United States Patent Application Publication US 2007/0161031 A1 - sequence listing, part 18

SEQ ID NO: 22197 - DNA, 2300 bp, Homo sapien
agcccgtgagtgccccctgccggccgccttgggggtggcactaaccttctttgggggtgggggcggggaccgagtctgtggccatccctaagtccgctccttgcgtcctcctctgcctgccccttaactcaccccttctctcccctcttcctactaacgggtcaggagaccaaggagatcagctgggagcaggtagggggcgcggggcggggcgtgagcgcatgaacaggctgtgcacgacgcatggatgcccctcctccgagccctgcccctgccttcaccagaacatgccatcatccccatgggggggcgctgcgccaagcttggctctggactgttccattatggcttggcggtggggagggtagaggggatgcgatgtggaagcccagactgttgcatagtcagccttatgcatggaccatttcatcatcgtgggttgtgggggctctaaggggcttcaattctgtagctcaggagagactgagcagccggtgtccctatagtggagggggcgggggctacagtggactgctcagtgtaccagggccaaggaggacacactggctgtggtggtggtgaggcagccaggctgaatgagaagttggggaggaggagctacactttgttctcaagaaacaagaggcggccgggcgcagtggctcacgcctgtaattccagcactttaggaggctgaggtgggcagatcacctgaggtcaggagtttgagaccagtctggccaacatggtgaaaccctgtgtctactaaaaatacaaaaattagccgggtgcagtggctagcgtatgtaatcccagctacttgggaggctgaggcaggagaatcgcttgaacccaggaggtagaggttgcactgagccgagattgcaccattgtactccagcctgggtgatagagccagattccatctcataaaaaccaaacaaataaactaacaaaaaaacccaagaggcatgaactcactgtccacggaggaattatgtttgactgtggtcatagatcacatatttccagccagggggaggcgtggattttgtgctgatgctgaaaggagtgagggacttgggactcatctggaatattgtcctgggccagatataacattagacaagtattttcaggacattgcaagagtgatggccctttcttagtgggagagctgccttgaaagagtccattgtcctgacttgggggtttagtgacgttggactgcagtgagacagagttaaagcagtgcttccccaaatttaatgtgtagtggggtggcacacacctgtagtctcagctacttggaagactgaggcaggaggaccgcttgagcccacgaagctgaggtcaacctgggcaacatagtaagaccctgtctctaaaaaataaacaaatacagccaggcgcggtggctcatgcctgtaatcccagcacgttgggaggctgaggtgggcggatcccttgaggtcaggagtttgagaccagcctggccaacatggtgaaacgccgtctctactaaaaaatacaaaaattagccgggcgtggtggctcgtacctgtaatcccagctactcgaaggctgaggcaagagaattgcttgaacctgggatggggaggttgcagtgagacgagatcgtgccaccgcgctccagcctgggtgacatagcagactctttcagaaagagagagagagagagagagagagaaagagagaaagaaagaaatttaaaaataaatataatgtatatttcgaatcacctgagggtcttgtgaaaatgccgataccgacttcagtaggtctggagtaaggtctgagattctgcaattccagcaagtccacaggtgatggtgacgctctaggtctcaggacaactgtttgagtagccaagagtatatgctgtcatgaagggctaggagacaactctggattggtccattatcctgagcagagattggtcattgtcctaccatggggtgggaaaaaaccttggattgggaggttggactgtacccctctcatgcacagtgggaaggggccagagggcctgactcttccctcacctgcccatggccccagatcctggcatatggcgacatgaaccacgagtgggtggggaacgactggctgcccagcctggggctgccccaataccgcagctacttcatggagtcgctggtggacgctcgaatgttagatcaccttaacaagaaggagctccggggccaactcaagatggtggacagctttcacaggtgggggctgcctggccagtggggacagtccaaagggaagcc

SEQ ID NO: 22198 - DNA, 2300 bp, Homo sapien
cgctctaggtctcaggacaactgtttgagtagccaagagtatatgctgtcatgaagggctaggagacaactctggattggtccattatcctgagcagagattggtcattgtcctaccatggggtgggaaaaaaccttggattgggaggttggactgtacccctctcatgcacagtgggaaggggccagagggcctgactcttccctcacctgcccatggccccagatcctggcatatggcgacatgaaccacgagtgggtggggaacgactggctgcccagcctggggctgccccaataccgcagctacttcatggagtcgctggtggacgctcgaatgttagatcaccttaacaagaaggagctccggggccaactcaagatggtggacagctttcacaggtgggggctgcctggccagtggggacagtccaaagggaagccccaccccagagagtctttggccaataggattggccatgggagattcccaggcttatcttggcccttttagcctgagttctcaggaaatcctgactctgtgctcctttcaccaatgagatggtccacaggaaaagttcagatcctgaaatggcttggctagttaaccctggaccccttccaggctggccagtaggaagtgcctattattgaaaatgcctcacctcctgagggggtcaacagtcaatagaacttatcagctccccaccctttccaagaagagcgcagccagtggggagggacccgtaggagcagcagtctaggggactggaaagctcatccgtgactccacttcccctgctgctcagggtgagtctacattatgggattatgtgcctgaaacggctcaactatgaccggaaggacctggagcggaggcgggaagaaagtcagacccagatccgaggtgagtagagcctaagggtccctttgggagccaggtggagggcgtggagctggatggggaggagagggggtagggggagaccggagaagcaaattggcaccataaccgtgggggtggagccagcgtggggggcgtggcccgaagagaccaaatggaggtggaggtatgggctaaactgaactctccaggccacgggaggggcacggctgagggtcccttccgtccccagacgtgatggtgtggtccaatgagcgggtcatgggttgggtgtccgggctgggcctgaaggaatttgccacgaacctcacggagagcggggtacacggggcactgctcgccctggacgagaccttcgactactccgacctggccttgctcctgcagatccccacgcagaatgcacaggtgagctgccgctgggcccggagcatgctgggcgtccccacctcgcagactgcacgctccaaccgccccctccacctcctctttccaggcccggcagcttctggagaaggaattcagcaaccttatctccttaggcacagacaggcggctggacgaggtgggcgcggcaacagctcagagggctctgctcccagcggctcctcgagaggctgagctgagggggcggggcctgactattaatggtcacggttggaggcggggccaggagaggggcggggttaaaggagaggtgagacccggagaggggtggagtcaaaggaaggggcggagtcagacaaggcaggagtccctcaccggctgtccggctcctatacctaggacagcgccaagtctttcagccgctccccatcctggcggaagatgttccgggagaaggacctccgaggcgtaactcccgactcagctgagatgttgccccccaactttcgttcggctgcagcgggagccctgggctctccggggctccctctccgcaagctgcagccagaaggtggggggctcccaaatgcgacagcccttcctcgcttccctagggtggggcatggaccacctcagtagtccgggttctggaatggcctagtcctttctcgcccacccctgaggaatggactgctccaacgttccggactcccccgtcaggatgaaatggataaatcccactcccccttcccagggcgggagtgaactcgcccaatgcgagtttgagtccttggctgcggggaagggagggaaacccatgtggagcccggcgatcgttgtgacatcgggaagggaagtccaaagggaggaatcctggagaggaacagggaggagggtgctccaggctgaaccgctgctcgctctccctccaggccagacttctgggagttcccgggcagacggcgtttcggtccggacctattcctgctagtgcaggcctccaggtgagg

SEQ ID NO: 22199 - DNA, 2300 bp, Homo sapien
gagacagagggggacagagactctgagagagagtggggacagagacccagagaggtggatgccagagatggggaggagacaccttgactgaggcaaggggcagagggggatgcaaaaaccaaagaattgggggaagggcaggaactcagaaaggaggggccagagatttaggggagagagagggacacagacttgggggaggactgacactaagataagagtgggacagaagcccagagtgagagggagaggcaatcccatggaggagggacagggaccctgagagagcagatgacagaattgaagagagaggaggacccgtgaacaggaaaggagaccctagtgggggcagtcatgaagggtgaggagtaggaaatactgacacacagagacgggcaaggccacttgtctcctgccagccctctgtgatggggacagctgtggcctccgtaacctgagtccccctacccctcccagctgtatttatagccctggcctagcccagtccctgcccccagatctgagttccagggacaggaggtcatgggcacgtgtgttgggggccatgttcctttccccccattctagggcctcaatactgacatcactctctcaccagcacgtatcattccagctggaaacaccccgcaatcgaacccccagtccttccgtcccaggagtctctcccctctgataagtctcttctgcctcccccaggtgccccaggctcccccaaaaacctgctaaaagtctagcctttgtctttgcagctgccaaacgtgagcttgttggtagttcaaagtcaagtcccttggccaccgtctcctggccagggagagacccctcactggtcccctccccagctgggaggaggaggagcaggaggcaggcaggcggggactgacccagaataactcagggctgagagtaaatttagctggagagaggggaggggaaggaccctattggctggggaatggggagggagggccccagaggggggtcagggggctccggagacagcctcagaggggtgtccagagccaggcagcaaggaccagaggaaggtggacagagaccgaaaggacaaaggagagacacagagaaaaaaagagaccaaccccaaagggacaaagaccccaacgtttgtccacattgccgcagaggcagctggagccagtgctgcctgtccgtccccatgggccaccataggccatggctgcacgcttctgtcctctgggctggggtggccagcctgctcctccccccggccatgacccagcagctcagaggggatgggctaggcttcagaaaccggaacaacagcactggagtcgccgggctctccgaggaggcatcagcagagcttcgccaccacctccacagccctagagaccatccagatgagaacaaggatgtttccacagagaatgggcatcatttctggagccacccagaccgtgaaaaggaggatgaagatgtctccaaggaatatgggcacctactcccaggccacaggtcccaagaccacaaagtcggagatgagggtgtctcaggtgaggaggtctttgcagagcatggtgggcaggcccgtgggcacagaggccacgggagtgaagacacggaagactcagctgagcacaggcaccacctccccagccacaggagccacagccatcaagacgaggatgaggatgaagttgtgtccagtgagcatcaccatcatatcctcaggcatggacaccgaggccatgatggggaagatgatgaaggagaagaggaggaggaggaggaggaggaggaagaggaggcctccactgagtatggacaccaggcccacaggcaccgaggccatgggagtgaagaggatgaggatgtctcagatggacaccatcatcatggccccagccacaggcaccaaggccatgaagaagatgacgatgatgatgatgatgatgatgatgatgatgatgatgatgatgtctccattgaatatagacaccaggctcacaggcaccaaggccacgggattgaagaggatgaagatgtctcagatggacaccatcatcgcgaccccagccacaggcaccgaagccatgaagaagatgacaatgatgatgatgatgtctccactgagtatggacaccaggcccacaggcaccaagaccacagaaaggaagaggttgaggctgtctcaggtgaacaccaccatcatgtccctgaccacaggcaccaaggccacagagacgaggaagaagatgaggatgtgtccactgaacgttggcaccagggtccccaac

SEQ ID NO: 22200 - DNA, 2300 bp, Homo sapien
aggatgccagacagggaggggacaatttaacccaaagagggggagacaaagacttaggggacagagaatcagaaggtggggcagcagggacccagggatagacagagagagagggggacagagacccacagagagagggggacagagacccagggagaggggacagagacccagagagagtgggacagagacccagagagagtgggacagagacccacagagagagggggacagagacccagggagaggaggacagagacccagagagggggggacagagacccagagagggggggacagagacccagggagggggggacagagacccagggagaggggacagagacccacggagagggggacagagacccagggagaggggacagagacccagagagagggggacagagacccagagagagggggacagagacccagagagacggggacagagacccagagagagggggacagagacccagagagaggggaacagagacccagagagagaggaggacagagacccagagagagggggacagagacccagagagacggggacagagacccagagagagggggacagagacccagagagaggggaacagagacccagagagagaggaggacagagacccagagagagggggacagagacccagagagggggggacagagacccagggatggggggacagagacccagggagaggggacagagacccacggagaggggtacagagacccagggagaggggacagagacccagagagagggggacagagactctgagacagagggggacagagaccctgagagagggggacagagacccagagagaggggaacagagacccagagagagagggggacagagacccacagagagaggggaacagagacccagagagagggggacagagatccacagagagagggggacagagacccacagagagaggggaacagagacccagagagagggggacagagatccacagagagagggggacagagacccagggagagggggacagagacccagagagagggggacagagacccagggagaggtggacagagactctgagacagagggggacagagactctgagagagagtggggacagagacccagagaggtggatgccagagatggggaggagacaccttgactgaggcaaggggcagagggggatgcaaaaaccaaagaattgggggaagggcaggaactcagaaaggaggggccagagatttaggggagagagagggacacagacttgggggaggactgacactaagataagagtgggacagaagcccagagtgagagggagaggcaatcccatggaggagggacagggaccctgagagagcagatgacagaattgaagagagaggaggacccgtgaacaggaaaggagaccctagtgggggcagtcatgaagggtgaggagtaggaaatactgacacacagagacgggcaaggccacttgtctcctgccagccctctgtgatggggacagctgtggcctccgtaacctgagtccccctacccctcccagctgtatttatagccctggcctagcccagtccctgcccccagatctgagttccagggacaggaggtcatgggcacgtgtgttgggggccatgttcctttccccccattctagggcctcaatactgacatcactctctcaccagcacgtatcattccagctggaaacaccccgcaatcgaacccccagtccttccgtcccaggagtctctcccctctgataagtctcttctgcctcccccaggtgccccaggctcccccaaaaacctgctaaaagtctagcctttgtctttgcagctgccaaacgtgagcttgttggtagttcaaagtcaagtcccttggccaccgtctcctggccagggagagacccctcactggtcccctccccagctgggaggaggaggagcaggaggcaggcaggcggggactgacccagaataactcagggctgagagtaaatttagctggagagaggggaggggaaggaccctattggctggggaatggggagggagggccccagaggggggtcagggggctccggagacagcctcagaggggtgtccagagccaggcagcaaggaccagaggaaggtggacagagaccgaaaggacaaaggagagacacagagaaaaaaagagaccaaccccaaagggacaaagaccccaacgtttgtccacattgccgcagaggcagctggagccagtgctgcctgtccgtccccatgggccaccata

SEQ ID NO: 22201 - DNA, 2300 bp, Homo sapien
gcaggtttttgggggagcctggggcacctgggggaggcagaagagacttatcagaggggagagactcctgggacggaaggactgggggttcgattgcggggtgtttccagctggaatgatacgtgctggtgagagagtgatgtcagtattgaggccctagaatggggggaaaggaacatggcccccaacacacgtgcccatgacctcctgtccctggaactcagatctgggggcagggactgggctaggccagggctataaatacagctgggaggggtagggggactcaggttacggaggccacagctgtccccatcacagagggctggcaggagacaagtggccttgcccgtctctgtgtgtcagtatttcctactcctcacccttcatgactgcccccactagggtctcctttcctgttcacgggtcctcctctctcttcaattctgtcatctgctctctcagggtccctgtccctcctccatgggattgcctctccctctcactctgggcttctgtcccactcttatcttagtgtcagtcctcccccaagtctgtgtccctctctctcccctaaatctctggcccctcctttctgagttcctgcccttcccccaattctttggtttttgcatccccctctgccccttgcctcagtcaaggtgtctcctccccatctctggcatccacctctctgggtctctgtccccactctctctcagagtctctgtccccctctgtctcagagtctctgtccacctctccctgggtctctgtccccctctctctgggtctctgtccccctctccctgggtctctgtccccctctctctgtggatctctgtccccctctctctgggtctctgttcccctctctctgtgggtctctgtccccctctctctgtggatctctgtccccctctctctgggtctctgttcccctctctctgtgggtctctgtccccctctctctctgggtctctgttcccctctctctgggtctctgtccccctctctcagggtctctgtccccctctgtctcagagtctctgtccccctctctctgggtctctgtcccctctccctgggtctctgtacccctctccgtgggtctctgtcccctctccctgggtctctgtccccccatccctgggtctctgtccccccctctctgggtctctgtccccctctctctgggtctctgtcctcctctctctctgggtctctgttcccctctctctgggtctctgtccccctctctctgggtctctgtccccgtctctctgggtctctgtccccctctctctgggtctctgtcctcctctctctctgggtctctgttcccctctctctgggtctctgtccccctctctctgggtctctgtccccgtctctctgggtctctgtccccctctctctgggtctctgtccccctctctctgggtctctgtcccctctccctgggtctctgtccccctctccgtgggtctctgtcccctctccctgggtctctgtccccccctccctgggtctctgtccccccctctctgggtctctgtccccccctctctgggtctctgtcctcctctccctgggtctctgtccccctctctctgtgggtctctgtcccactctctctgggtctctgtcccactctctctgggtctctgtcccctctccctgggtctctgtccccctctctctgtgggtctctgtccccctctctctctgtctatccctgggtccctgctgccccaccttctgattctctgtcccctaagtctttgtctccccctctttgggttaaattgtcccctccctgtctggcatcctcctttctgagtctgttccctctccgccactggcccccaactccttctgttcccatctcgcgcttgcccttggagtctcccctgtgtgtctctctccccccggcccggacctctgcaccccccaggtcgctgtccctctgtccccttatcgcggcctgggacccgccctctccccgcctcccgctttggcgtctccaagactccccgccccccagacctcgccccgccccaggctaggctggaaagtggaggatccggtttgctctgggcgggtctggaagcagagccggcggagggagcgccggggccctgggctgcaggaggttgcggcggccgcggcagcatggtggtgccggagaaggagcaggtgagcgccggaccagggtctgcgggagcgcggagctggggacctcgcctccaggctcccagagaggagggcgctggacacccagattcctgggtcagacg

SEQ ID NO: 22202 - DNA, 2300 bp, Homo sapien
gcttttgccaaatccttgtagcacctctgctatcccttctgtaaaattgctcttaaatctgctcactaggtttgtgtaaatacaggtctcccctgatatctgaactcctggaatctggaacaaagaatttagatacatttttctccttctttcttcctttctctttcttttcttttcttttctctctctctttctttctttctctctttctctttctttctctctctttccctccctccctccctcccttccttccttccttcctttccttcctccctctctgtctctctccctccctccttcctttctttccttagttttttttttttttttttttttttttttttttttgagatggagtttcgctcttgtctcccaggctggagtacaatagtgtgatggctcactgcaacttctgcctcctgggttcaaccaattctcctgcctcagccttctgagtagctgggattacaggcacccgccaccacgaccagctaatttttgtattttttttagtacagacagtgtttcaccatgttggccagtctggtctcaaactcttgacctcagatgatccacccgcctcagcctcccaaagtgctgggattacaggcatgagccactgcgcccggcctcttgcttgcttgcttgcttgcttgcttgcttgcttgcttgcttttctttccttcttttcttttttttgaacagggtctcactctgttgcccaggttggagtgcagtggcgtggtcacagctctctgcatcactgcagccttgatctcccaggctgaagtgatcctcctgcctcagcctcctaagcacatgctgccacacctggctaattttattttattttattttatttatttatttatttttagagacagggtctgactatattgcacagctggtctcgaactcctgggttcaggtgatcctctggccccagcctcccaaagtgctaggattacaggcatgagccatcatacccgaccctacattttcaaatgaatttctcattctccaaacccctgttacttactcaggtgccaatcacctttagaaagcaagagagacttgtgcatttctttaggtgggggaaagttttatatgtggaaactttccaaatggaaacctgttccatttggcacagagaggaagaaacaagccacacagaagccaaagacaatgaaaagcaaacaaaggtgtttccctactcgctagatggctgttgccagctccattttttgagcccgaggcctgcttttcttgttcaaaagagtagcaaagggttaggcattcaaaaatattctagcacccggctgagcctctctccttgacagtcgtcaggagaactgaaaaaggaatgactttctcactgcgttattcaaggttattttaagctccgtgtgaagttcgtgtcgcgttgcctctggctgggactggtatgcgagcctcatttcaggaaacacggcgttctttccctggctcctcatagctccgtggagtaggccgcgctattattgtcttttcattagaggaggaaatttaggctcagagaggtgaagccgctcgcccaaagtcacacagccgcgtcagccccgagcatgcgggctctccctgagttacccgctggatgttctttctcgtgttgaacgtcatgtgtttggatgggggcacagggcacagcaaggatacccccagtggccctctgccttcccacttgaggctcctcaggtgacagtgacctgcttcttcctgctcaggctttctggactcactggcttccttcccgtggggaaaggggaccgtcctcggctccagtctctccccgaggccgtcagagccagggccaggggcagcgtggactctgcctgcctctgtgggtgtggactcagtgtcgacagccccctctacaggagcatgaacacgctgacagggtgctggggtcggggggcagccctgggttcacgctccgccctcgcacccccagagggaccttgtgccagtgtgggcgcccccggaccgcccaccccgcagtggccatggaggatgccttcggggcagccgtggtgaccgtgtgggacagcgatgcacacaccacggagaagcccaccgatgcctacggagagctggacttcacgggggccggccgcaagcacagcaatgtgaggcgggcctctgtgggcggggcccgggcaccagggggctgcatgctcggggctccagagtggagccgggacgcccgccctgaaccctggcccctccgcccatccctgtcttggctctctttgtcccct

SEQ ID NO: 22203 - DNA, 2300 bp, Homo sapien
tgctgtgtgtgtgtgtgtgtgtgtgtgtgtgtgtgtgtgtgtgtgtgtgtgttgcacccgggcctttgcttctgctgtgcctgctgctttgaacgcccttttcgcaccttaggggcatacctcccagtcctggtggtctttcaaagtgctacctcaacacccattctctgggagctctcttgggccactctatacctctgtgaccatatcctcctctgggccctaatcatattatatgcctatagatgcctccttagacacccctccaccctgccttccattatggcctgtccagccttccctttaatcgcccatccatctctgattgtccgtctgccccatcttgtttcctctctccccatccatccgtctgtccatctatccatctatccaccctgtacatccatctatccatccatccgttcattcatccatctctttatcctttcatccatccatttatccatcccatccatccatccttctatctgtccatccatccatcctaatcatattatatgcctacctctgagggcaccaagcaccctgagggtagttatgtgttggggggacatatttcccccaatagaaccagcttcttcagggtaggaactgtatctgatttctctctccatccctcccactgcttggtccataacatacctcaataaatattaaatgaataagtgattccttttgtttcttcttgggggctgtaaaccagtggtctgtgctctggccctgagccaaatgaccttatgcctatgatagcctgactgctttaagacccccacactctgcccagtagcaacccctttatgcagagtttaaaagtcagacatgcaaaatagaggcaaaatagacattcagcagatgtccctcctcccctgacttcttgtcccctctccctctaatccttccagcctgtgggagctcggaggcctcagcctacctggatgagctgcgtttggctgtggcttggaaccgcgtggacattgcccagagtgaactctttcggggggacatccaatggcgggtgaggggtcagggcctgggggttgggcatactgacaaagggactgtgctgtcctccctctctgccttctttttttttttttttttttttgacggagtctcactctgtcacccagcctggagtgcagaggtgtgatcccagctcactgcaagctccgccacctgggttcacgccattctcctgcctcagcctcccgagtagctgggactacaggcgcccgccaccacacccagctaatttttttgtatttttagtagagacggggtttcactatgttagccaggatggtctcgatctcctgaccttgtgatccgcccgcctcaggctcccaaagtgctggggttacaggcatgagccaccgcacccggcctctctgccttcttagacgcccctcaaccctgccttccattatggcctgtccagccttcccttaattgtccatccatctctgtccatctgccccatcttgtttcctctctccccacccatccatctgtctatccatccatccaccctgtacctccatctatccattcatccattcattcatccatctacttatccatccatccatccatttgtccatccatccatttatccatccatccatccatccatccatccatccatctgtccatccatccatccatccatccatccatccatctgtccattcatccatccatccattcatctgtccatccatccatctacctatccattcatccatacatccatccatctacctatccattcatccatccatccatccatctatccatccatccatctgtccatccattcatctgtccatccatccatctacctatccgttcatccatccatccctctgtccatccatccatccctctgtccatccatccatccctctgtccatccatccatccatccatccatccatccatccatctgcccatccatccatctgtccatccatccatctacctatccattcatccatccatccacccatccatccatccatccatccatccatccatccatccatccatccatccgtccctcatacccttgcccatctcttgtccttaacctttgagctaatctcttcccctattcatcccaccctgccagtccttccatctcgaagcttccctcatggacgccctgctgaatgaccggcctgagttcgtgcgcttgctcatttcccacggcctcagcctgggccacttcctgaccccgatgcgcctggcccaactctacagcgcggcgccctccaact

SEQ ID NO: 22204 - DNA, 2300 bp, Homo sapien
tcaggagttcaagaccagcctggccaacatggcaggctgactctactaaaccctgactctactaaaaatatgaaaattaaccaggcgtaatggcaggcacctgcaaccccagctactcggaaggctgaggcagggagaattgcttgaacccgggaggcagaggttgcagtgagccgagattatgccactgcacttcagcctgggtgacaaagtgagattgtctcaaaaaaaaaaaaaattcgatagaaataaataggtctgtggcccttttctgtcgcagcacttttttttttttccttgagacagggtcttaccccatcacccaggctggagtgtagtagtgtgatcttggcttactgcaacttctgcctcatggttttaagtgattcttgtgcctcagccacccgagtagctgggattacaggcgtgcaccaccacacctggctcgtttttgtatttttagtagagatggggtttcaccatgttggccaggctggtcttgaactcctggcctcatgtgatccgcccaccttggcctcccaaagtgctgggattacaggcgtgagccaccatgcccggcctgtcatagcacttaatacaatttataatcatgtaattatttgagattcatcatatatctgttttcttgttgtgtgaagcaaaacgagggcaggaatggggtctgttttgttctctacactattcccagttcctagcatttagtagactctcgataaatacgtgttgaaagattgaatgattcccaaagattgtgatgaattcttacagcacccccaaaatttcctcttcatctctttgttcaatcataacaatttaagcctttcattctcaaagtgtggctcagggactcctgggggctcttgaaacacttttgggggtccatgaggtgaacattattttcataatactactaagatattatttgcctttcactttcatttcctctttgaatatagtgatgtttgccagaagctacaagacatgagctattttgacacactcagtgcagaagcagatatgagaatccagctgtcttctatgaagccagacattagagagatttgcaaaaatgtaaaatgatgccattcttctccccaaattttttcttttttttcctttttttttttgagacggagtcttgctctgttgtctaggctggagtgcagtggcaaaatctcggctcattgcaacctctgcctcctgggttccaacgattctcctgcctcaggctcccgagtagctgggattacaggtgtgtgccaccacgcccggctaattttttttttttttgacttttagtagagacggggtttcatcatgttggccaagctagtctcgaactcctgacctcgtgatccacccgccttggcctcccaaagtgctgggattacaggcgtcagccaccgcgcccagcgccaaaatttcttttggagtagaaattatagttattttaaataaaaatgttattttgacacataatgaatttttaaacaatgactattttagaaatttattttaatattgatagatacaactcacataaacatacaacccatataaatgtaactcataaattattggagtccttaataattcttaagagaccggaaagtatgagaacggatgacctaagtaaatctttgagtttttaattcttgtctgcagccctagtaggcttctgagctctcttaaggcaacgtccctgtctgccttgttggacgcatatttaaggtttggtttctagtaggcgatctttaagtaaatgcgaaaggtttgaaggctagaaggaatgaatgagacgattctcccacttcctaccctcttcttccttacatgaagtggaagcaaagtgcatgtgccagagaaaggccttgtcttagagccccgcctgaagcgtggcatcgtgggtgtcggggtggggtgcggtggggaagggagtggcgcgtgagcagtcagaggatgtgcacacgtgcgtgcgtgtggggagagagcagggagttggggagggcgaagtggttacagtgtttgctacagctgtagggaaagagtgagggggcgcggcggcgcatgcgcagagaatcggcgggaaaggccgcgcgccaggcagatcgaggggtgtcgcccaaaccgatctgtcgacgcctgaaggggcctgaggagattgctaggcttctcagctggggcttcttcaccctcatttttgtccgactggctggactgaagaacctggcagaagccttggggctagggtgagggtcacggcccagggagccctaaaa

SEQ ID NO: 22205 - DNA, 2300 bp, Homo sapien
agaattgcttgaacgcaggaggcagaggttgcagtgagccataatcgtgccactgcactccagcctggtcaacagagtgagactccatctcaaaacaaacaaacaacaacaacaacaaaaacctgggtgtggtggctcatgcctgtaatcccagcacttggggaggccgaggtgagcggatcacttgaggtcaggagttcgaggtcagcctggccaacatggtgaaaccccgtctctaccaaaaatacaaaaattagccgggcgtagtgggtcatgcctgtaatcccagctacttgggagaatgaggcaggagaatcgcttgaacccaggaggcggaggttgcagtcagctgattgcaccactgtactccagcctgggcgaagagtgagactctgtctcaacaaccaccaaaaaaataaaagctgagggatgaggcaggtggtgactcagcgtttggatacagaactgtgtggctcaggactgggtttcaaaaagacccctctggggctatgtgggggacagactggagggagaaactagaagccagggagaagcctaaagtcagggtccaggtaggagagcaggagcccagagcctgcctgagccctcaggacagagaagaggggtggagtggagactcagcaggcaggagggatctggctaagagactgatgcgctgttggggaagaggggacaagatggagctttgacctcatgactagatagatggtggggctgcctcagatgaggaaaccaggtgagagaatttggggacatcagaggaaactgcagaggccactgggtgtgcacctgcaaccaggcactgcagacccagatctgactgtcaggatcccaggctcagtgcctcctcctctggggcctccgctcctcgggccccactgcagaggcaggaagtaccgcctgatgctcagcttccgctgggggtgttggcacggcccagcgccctccccactcccagggaccttcccacctcgagcctgtagcactttcacttccccaggtacccagcccctgcccccagcacctgggtgctccctggtccagaacaggctgcagactctgagaggcacaaaaacaagtggggaagggggagacagagaaaagaagacaggctgggcacagtggctcacgcccataatcccagcactttaggaggccaaggcaggaggatcacttgagcccagaaatttgagaccagcctaggcaacacagtgagactcccatctctacaaaaaatgaagaaaattagccaggcatggtggtgtgcacctgtagtcccagctacttgggaggctgaggtgcaaggattgctcgagcctgggaaggttggggctgcagtgagctatgatcgcactactgcattccagcctgggcgaccctgtctcaaaaacaaaaacaaaagagagatgaagagagaaaggaggaaggacccaaagaaggggccagaagcagagagaggccaggcacagtggctcacgcctgtaatcccaacactttgggaggccaaggcaggagggtcgcttgagtccaggagttccagaccagcctgggcaacctagtgagaccctatctctgtttttttttaattaaatataaaaaatacaacactcccactccatagcaagaccccatttctacaaaaaatacaaaaattagccaggcatggtagtgtgcacctgtaatcccagctactcagaaggcagaggtgggaggatagcttgagcccaggctacagtgagctgttttccccaccgtactccagcctgggtgaaaagtgagaccctgtctcaaaaagaaacaaatatataaataaaataaagaaacacagagagagggaggatagagaccccaggaggcaggaggacagagacccagaggagggagagactctgctgagataaggggacagagatggggagtagcaggaaggtggggacaaagacccagagaggaggaacaagagacccagggcaggaaatgggagacacagctggatgcagagatgggagagcttagcaggccatgaggtcagagtgtctgtgaggtcagctgctgtccagggtcagccctgaggtccccatgcccagaggtgggttccagtagatcaggggtccctttagatcccccagcgcctgagacatggagacctgggagggactgccccatgagtccttggtgcccacaaattccaaggcccctcaggtaccagagcatgtgtcccagtggagcaggtgagggagacagggacagagagagagacagaaagccaccttacatga

SEQ ID NO: 22206 - DNA, 2300 bp, Homo sapien
agtgtggagggacagtacctataacagaccctcagtctaggggatctcctcacccaggaactgacacagcagggactccaaagtgagccctcagcctgaggctcttttaactaggaaactgatgcagcggggaccccaccattgacccttagtttaggggacccttcacccagggtggggatgtcacagcactctctctctttttttttttgagatggagtctcgctctgtcgcccaggctggagtgcagtggcaagatctcggctcactgcaacctctgcctcccgggttcaagtgattctcctgcctcagcctcccgagtagctgggattacaggcacgccccaccacgcctggctaatttttgtatttttagtagagatggggtttcaccatgttggccaggttggtcttgatctccgacctcaagtgatccacctgcctaggcctcccaaagtgctgggattacaggtgtgagccaccacgcccagccccacagcactcgcacataaggtgggtccctccttccctggtgaagctgactggagggcactcgaaggcagatcctcagcttgtcaaggaacatgatatggtgggagcccctttaactttttggactgctgaggcagagaccccttgaccgcggaacctgcagggagggttctccctttacttgtgacatgatggggaccccttttacccagggaatgtgatgtgatgggaacccgattaaccctgagatgtgatacaccataactgccaacgctcagctgaggggtaacccccattgcccagggaactgacttttgggcatccctttctcctggggaacatgatatggtggcggcctgtttcctggagatggaaaagagcctgctgggtattccatgatagcttggcaggggggcacaggggtccctgccctcccttctaagcataagtcccttgtcctggccttcctggcaggtggtgacaaacagagacacccaggaactgctgctctgcaccgcctatgtcttcgaggtctccaccagcgagcgtggggcccagcatcacatttaccgcctggtcagggactgaagggggaccccaaaactggctcaccccccagaacaccctcctcccagggagggtcctccagctcacctcatgcttcttatttggggagagggctgtgatgtaaaggggttgacctcagaggcctaagcaactggggccatcccccccattagaggggcccccaaaacttggttggagagctgaacaggctgggactgaggaaaggataaaccccgatattgggacctcacagtgggtgtctgaaaggacagatcactccggagtatcagggattgtggggacaggagtgagacaaccccccaggtacagcactggcttttcttttcagcccctgacaggccacccccactcctctgcatgtcttggagagcgctagttacacattggcttgtcccctttactttttcccagccacccctccccctgaaatttctgcccctctctaccaccctcactccatgacctgtgagatcacaaagtgaagatgaaccctttctgtgcaggagcagagccaggtgggccctggacattttttttttttttaatataacgagatatttataagtgggtgctagggtcttgactttatctccgctgcacaagcagtgtgttgaactttctaatctcatccctctcctaagtgagccctgagctagacggtttccttcctcccctctcaaagtttgtttgtttgtgttctgacagaggataaagctattttaccaaaaacgcaggggatttatttgaggtttgggtgaaaaataatcttgtgggtggtggtaggccgacagatggggacaggaagctgtggacgaaagccccaggtcccgtgggagaggtgacagcagcaggggcacgcagccacgtgggtccccaggggaatgtgaaggcggagggctccaggcgaactggggattaaacaaatatttacaggcagcagggaagtgcccagcgcacgtgacgggggcggggcgggactttggggagggcggggcctaacggtatcgagcgagccggttgtagacgtggtccaggtttctgcacaggaatatcgagagcgtcatgaacccgagctatagagaaaggagatgaggtcagagaagtcgaaggggtgctggcgagacgggggtgatgcccacccgggcgagaaaggtcaggggtggggccgtgaattgggcgggaaggggctggagaaggggataggtagaaaagggcggggct

SEQ ID NO: 22207 - DNA, 2300 bp, Homo sapien
aaaaatccttccccaaactgtcaccgtcggatcccccttcccgctgtccgccggccgggcccgcccccccctccggtccctcccacttttcccaaacaaagctcccggcaactttctccctcgcagcgccccgcccgcccgcggctccccagccccaggccgggaggtaggaaggcgccggcgggagtcggggatcctgctttggggtgtgtgagttggggtggggagttgcttcttaggaggtgaggcgtgcgtttgcgggaccgtctctgaatggttcgcagccctctttttgcccgggggcccgaatttgctcccgtgaccgagcctcagtgaggagtgggaactctggccggagttagggtgcctgcggctgggtctgagtttgggcgtgcgcgcaggagcgggtgcgggccaagggcgctggcggggtgtggggcgtgcgtctgcggcggtgtcactttggagtgagaaggaccccttgtgtaatctggggggcatttggtccttcttacggagaagggagggcctctggggtggccgaggggaggttacggggctttctggatcttaagtcttgcctctttggaggtttagggtctggggcgggaaattagggggacctttcttacccggctccaccgtccctttgtctggccacatggggaagggctgggctgggattttggcctacgggggtcctgaacgccgcagcgccactgggcttggctggggtctttgtctgctatggtcggcgggaggaggggaataggggcctggactctggggtcctgggaaagctgtggaggacatggagcctccggggaggcgggatctgactgtattggaaaaagttttccctgttcccggcctccggaaagtcactgggaacttgagttggatcagagcccacggcgcacgggggaggggaggggcggggcccggtgccggaggggagtcgccctggccggcaagcccctcccctgatgggggttgtgggaagctgggggaggggacgcctgggccctttgttctggctcttctgatggcagggcgcccctgtcccccagcttgtggttctgtgggtctctcctggtctcggcctcagctgctgccctgagtctctgtccctgccctttctaggtctccgtctccctttctctgggtctctgttgccctctctctgagcctctgtccccctctctctgagtctgtgtccccctctctctgggtctctggtcccctctctctctgggtctctgtccctctctctctgggtctctgtccccctctctctgggtctctgtcaccctctctctctgggtctctgtctccctctctgggcctctggacccctctctctggtccctgtcccccccccccggtctctgtccccctctttctggtctctgtctccccctctccctgggtctctgtctccctctctttttgggtctctgtccctctctctgggtctctgtccccctctctggtctctgtccccccctccctctggtctctgtccccccctccctctggtctctgtccccctctctctctgggtctctgtcccctccgtcactggtctctgtcccccccttcactgggtctctgtccccttctctctctggtctctgtccccctctgtctctgggtctctatccccacctcactggtctctgtccccctctctctctggtctctgtccccttctctctctgggtctctgtcccccccccttgctggtctctgtccccatcccctctctgggtctctgtccccctccctctctgggtctctgtccccctctctctagacctcccctcagtcttgcttggcccctcttcttttctggcagctgctgctcacatcttaccacctgttcttggggtgggacaggggaagtttcacccacaccttccttccccaccactaacttttgcctcctgtcttctttaaaacccgtaattcatacccgaacctttagccttcatggccctcggcattactctagggtaatcattgtgacttcatcacaattgagttcctctggaaactctgagaacactcccatcctcagctttccaagaaatccagctccttctcctccctcagactcaggagtccagaccccagccccttctccctcacacccaggagtccaggcctccagcccccgctccctcagacccaggagtccaggccccagatcctcctccctcagtcctaggagtccgggccccagcccctcctccctcagactcaggagttcaggccccagatcctcctccctcagaccc

SEQ ID NO: 22208 - DNA, 2300 bp, Homo sapien
ctcgtttcggagtcccgcccaatcgcaatggccacgccccttggctgaaagccacgcccctgcactgggccacgcccctgcactggaccacgcccctgcgtcccagatcttgccctcatcaccccaagttccagtcctaggctcctcctactggagacaccggagtacaagcatcccttttagctctcactctaattgtgtatctgtttcggaaccttttctccgtgtcccttctggttttcccgctcccgctccactaaaaagtcccgttgtctccggaaaccctaaatccagtcttatatttcatcttccaaggaacccagaatcagacttccttttccctgaggacctcaggtccggactcccgccccctctagtcccgtaattttgaacacgcagcctttcacccttaagggaccgggccctaagccatcttccctcaggcaccaaagctctcttccccgtcccgggacagccgccagccgtctccagtccactagcgcctgtagatgaggaatctgcacctacgtgggcctccaataaactcccggtggtcctgcccacgactcttaactgtggtgaggtcacaaggaaaccaggtcgtcataggaatcagtcaaaacccatccccagaccccaatcctcaaaaaaaaaaaaaaacaaaaaaaacaaaaaacaaaaaaaccaaaaaccaaacagaaaaaaagaaaaaaaacctcagggcttaacagtaaagactctttgtattcgtatcacttccgcacccccaatacacaaacacgagggtagccgggattccaggcgcctagccccgtcccctctcagacctaggagcccatatctctctccagccgcttcctctcccagacccaggagtcccagcccccagacccaggagtcccagcccccagcctctcctccctcagatcaggggtttctggctcctatcagccttttccctccgacttggagtccgaacccccaatccccctcctttcccaagcacccaaatcctgagttcctaccagccccgagatagactaatctctcccaaagcaaaaatccttccccaaactgtcaccgtcggatcccccttcccgctgtccgccggccgggcccgcccccccctccggtccctcccacttttcccaaacaaagctcccggcaactttctccctcgcagcgccccgcccgcccgcggctccccagccccaggccgggaggtaggaaggcgccggcgggagtcggggatcctgctttggggtgtgtgagttggggtggggagttgcttcttaggaggtgaggcgtgcgtttgcgggaccgtctctgaatggttcgcagccctctttttgcccgggggcccgaatttgctcccgtgaccgagcctcagtgaggagtgggaactctggccggagttagggtgcctgcggctgggtctgagtttgggcgtgcgcgcaggagcgggtgcgggccaagggcgctggcggggtgtggggcgtgcgtctgcggcggtgtcactttggagtgagaaggaccccttgtgtaatctggggggcatttggtccttcttacggagaagggagggcctctggggtggccgaggggaggttacggggctttctggatcttaagtcttgcctctttggaggtttagggtctggggcgggaaattagggggacctttcttacccggctccaccgtccctttgtctggccacatggggaagggctgggctgggattttggcctacgggggtcctgaacgccgcagcgccactgggcttggctggggtctttgtctgctatggtcggcgggaggaggggaataggggcctggactctggggtcctgggaaagctgtggaggacatggagcctccggggaggcgggatctgactgtattggaaaaagttttccctgttcccggcctccggaaagtcactgggaacttgagttggatcagagcccacggcgcacgggggaggggaggggcggggcccggtgccggaggggagtcgccctggccggcaagcccctcccctgatgggggttgtgggaagctgggggaggggacgcctgggccctttgttctggctcttctgatggcagggcgcccctgtcccccagcttgtggttctgtgggtctctcctggtctcggcctcagctgctgccctgagtctctgtccctgccctttctaggtctccgtctccctttctctgggtctctgttgccctctctctgagcctctgtccccctctctctgagtctgtgtccccctctctctgggtctctggtccc

SEQ ID NO: 22209 - DNA, 2300 bp, Homo sapien
ctttttccaatacagtcagatcccgcctccccggaggctccatgtcctccacagctttcccaggaccccagagtccaggcccctattcccctcctcccgccgaccatagcagacaaagaccccagccaagcccagtggcgctgcggcgttcaggacccccgtaggccaaaatcccagcccagcccttccccatgtggccagacaaagggacggtggagccgggtaagaaaggtccccctaatttcccgccccagaccctaaacctccaaagaggcaagacttaagatccagaaagccccgtaacctcccctcggccaccccagaggccctcccttctccgtaagaaggaccaaatgccccccagattacacaaggggtccttctcactccaaagtgacaccgccgcagacgcacgccccacaccccgccagcgcccttggcccgcacccgctcctgcgcgcacgcccaaactcagacccagccgcaggcaccctaactccggccagagttcccactcctcactgaggctcggtcacgggagcaaattcgggcccccgggcaaaaagagggctgcgaaccattcagagacggtcccgcaaacgcacgcctcacctcctaagaagcaactccccaccccaactcacacaccccaaagcaggatccccgactcccgccggcgccttcctacctcccggcctggggctggggagccgcgggcgggcggggcgctgcgagggagaaagttgccgggagctttgtttgggaaaagtgggagggaccggaggggggggcgggcccggccggcggacagcgggaagggggatccgacggtgacagtttggggaaggatttttgctttgggagagattagtctatctcggggctggtaggaactcaggatttgggtgcttgggaaaggagggggattgggggttcggactccaagtcggagggaaaaggctgataggagccagaaacccctgatctgagggaggagaggctgggggctgggactcctgggtctgggggctgggactcctgggtctgggagaggaagcggctggagagagatatgggctcctaggtctgagaggggacggggctaggcgcctggaatcccggctaccctcgtgtttgtgtattgggggtgcggaagtgatacgaatacaaagagtctttactgttaagccctgaggttttttttctttttttctgtttggtttttggtttttttgttttttgttttttttgtttttttttttttttgaggattggggtctggggatgggttttgactgattcctatgacgacctggtttccttgtgacctcaccacagttaagagtcgtgggcaggaccaccgggagtttattggaggcccacgtaggtgcagattcctcatctacaggcgctagtggactggagacggctggcggctgtcccgggacggggaagagagctttggtgcctgagggaagatggcttagggcccggtcccttaagggtgaaaggctgcgtgttcaaaattacgggactagagggggcgggagtccggacctgaggtcctcagggaaaaggaagtctgattctgggttccttggaagatgaaatataagactggatttagggtttccggagacaacgggactttttagtggagcgggagcgggaaaaccagaagggacacggagaaaaggttccgaaacagatacacaattagagtgagagctaaaagggatgcttgtactccggtgtctccagtaggaggagcctaggactggaacttggggtgatgagggcaagatctgggacgcaggggcgtggtccagtgcaggggcgtggcccagtgcaggggcgtggctttcagccaaggggcgtggccattgcgattgggcgggactccgaaacgagggccgcaatcagagaacaccgccaggacttccaggacttggtctccaggactgaggtcaactgacgtgggcgtggtctgactgtgtgggcgtggccagggaatgaactcacggctctggcttaaggggtgtggtgaacgaaggatggggcgtggctgtgtcaccaagggcgtggtcatggagtagaggcccgggctcctgggtgaggccggcaagtttggagcgtggtcagacaataggggcgtggctacggctcgcggagcgcaaccaacgctctagaccagacctgggctcgagaccataactgtttggctttaacagtacgtgggcggccggaatccgggagtccggtgacccgggctgtggtctagcataaaggcggagcccaga

SEQ ID NO: 22210 - DNA, 2300 bp, Homo sapien
ccccgcacagtggccacgcccccacccaagacgcccctctccagcaccttgcccaggtcgcctccccagttcaggcaactcccacaccgcgctcatttcccccactgcttctttcttctactcccacaccctccaccttgccaggccccgtcttctcccaggtctggctcttctgggttctgtctcatatgcttttttttttttttttttgagaccgagactctgtagtccaggctggagtacagtggcacaatcacggctcactgcagcctcgacctccccgggctcaggtgattctcccacctcagccccccgaagtagctgggaccacaggcgcgcgcctccacgcccggctaatttttgtattttttgtagagacagggtttcgacatattgcccaggctggtctcgaactcctgatctcaagcgatccgcccacctgggcctcccaaagtgttgggattgcaggcgtaagccacagcacccggcctcatccaatggtcttttcctcactttcgcccacgttcaccaccagatctcaatcctcaccttctcccataccccgccccttcttctgggctccgcctttatgctagaccacagcccgggtcaccggactcccggattccggccgcccacgtactgttaaagccaaacagttatggtctcgagcccaggtctggtctagagcgttggttgcgctccgcgagccgtagccacgcccctattgtctgaccacgctccaaacttgccggcctcacccaggagcccgggcctctactccatgaccacgcccttggtgacacagccacgccccatccttcgttcaccacaccccttaagccagagccgtgagttcattccctggccacgcccacacagtcagaccacgcccacgtcagttgacctcagtcctggagaccaagtcctggaagtcctggcggtgttctctgattgcggccctcgtttcggagtcccgcccaatcgcaatggccacgccccttggctgaaagccacgcccctgcactgggccacgcccctgcactggaccacgcccctgcgtcccagatcttgccctcatcaccccaagttccagtcctaggctcctcctactggagacaccggagtacaagcatcccttttagctctcactctaattgtgtatctgtttcggaaccttttctccgtgtcccttctggttttcccgctcccgctccactaaaaagtcccgttgtctccggaaaccctaaatccagtcttatatttcatcttccaaggaacccagaatcagacttccttttccctgaggacctcaggtccggactcccgccccctctagtcccgtaattttgaacacgcagcctttcacccttaagggaccgggccctaagccatcttccctcaggcaccaaagctctcttccccgtcccgggacagccgccagccgtctccagtccactagcgcctgtagatgaggaatctgcacctacgtgggcctccaataaactcccggtggtcctgcccacgactcttaactgtggtgaggtcacaaggaaaccaggtcgtcataggaatcagtcaaaacccatccccagaccccaatcctcaaaaaaaaaaaaaaacaaaaaaaacaaaaaacaaaaaaaccaaaaaccaaacagaaaaaaagaaaaaaaacctcagggcttaacagtaaagactctttgtattcgtatcacttccgcacccccaatacacaaacacgagggtagccgggattccaggcgcctagccccgtcccctctcagacctaggagcccatatctctctccagccgcttcctctcccagacccaggagtcccagcccccagacccaggagtcccagcccccagcctctcctccctcagatcaggggtttctggctcctatcagccttttccctccgacttggagtccgaacccccaatccccctcctttcccaagcacccaaatcctgagttcctaccagccccgagatagactaatctctcccaaagcaaaaatccttccccaaactgtcaccgtcggatcccccttcccgctgtccgccggccgggcccgcccccccctccggtccctcccacttttcccaaacaaagctcccggcaactttctccctcgcagcgccccgcccgcccgcggctccccagccccaggccgggaggtaggaaggcgccggcgggagtcggggatcctgctttggggtgtgtgagttggggtggggagttgcttcttaggaggtgaggcgtgcgtttgcgggaccgtctctgaatggttcg

SEQ ID NO: 22211 - DNA, 2300 bp, Homo sapien
acctaaaaatatcagtgacctaagcattcacctcaagaagttggggggaaaaagctggaaaaagaacagcagatcatgccgggcgcggtggctcacgcctgtaatcccagcactttgggaggccgaggcgggcggatcacgaggtcaggagatcgagaccatcctggctaacacggtgaaaccccgtctctactaaaaatacaaaaaattagccgggcgtggtagcgggtgcctgtagtcccagctactcgggaggctgaggcaggagaatggcgtgaacccgggaggcggagcttgcagtgagccgagatcgccccactgcactccagcctgggcgacagagcgagactccgtctcaaaaaaaaaaaacaaaaaaacaaaaaaaaaaacagcaagatcaggggcttgagggcacatggctgtagtcccacctactcaggaggctgaggtgggaggattacttgagcccaggaggtggaggctgcagtgagctagggtcacattactgcactctatcctgggtgagaacctgtctcagaaagagaggaggggggaggggaggggaggaaggggagggaggaggggaggcagtggacgcggaggggaagggaggggaagggaggggaagggaggggaagggagggggaagggaggggaagggaggggagataaagggagggggaggggaagggaggtgggaggggagatgaggggaggaaagtggggggaggagaggagcagaggggaagagagggggaggggaggggaaggtacgggggaggggagatgaggggaggggagtgggggaaggggaggacaggagcagaagggaagggaggcgggaggggaggggaaggtacgggggaggggagatgaggggaggggagtgggggaaggggaggagaggagcagaggggaagggaggggggaaaagagagatggcacaaattattaatatccgtcaccacagatcttacagatattaaaaagattgggcatggtggctcatgccagtaaccccagcactttgggaggccaaggtaggaggatcatttgagggcaggagttcgagaccagcctaacataagaccgtgtttctccccctccaaaaaaagacaatattatgaactttatgcaaattatttgaaattttagataaaatggaaaaattccttgaaaaccacaacttaccaaaaccacaacttaccagaaataaaatagaacatctgaatagttgtatttttataaaagaaatagaatttgtaatttaaagtctttccacaaagaaaactctaggtccagatggctggtgacttcttccaaacacataaaaaataaataacatcaatcctacactagcactttcaaagaatagaaaaagagagaacacttctccacacattatatcagcatagccttgttaacaaaactcaacagggatctcacagaaaagaaaagaaaagaaaatatggcaatacataaaaaggacaggccaggcgctgtgtctcacgcctgtaatcccagcactttgggaggccgaggcgggtggatcgcctgaggttgggagttcggtaccggcctggccaacgtggtgaaaccccgtctctactaaaaatacaaaaattagccaggtgtggtggcgggcgcatgtaatcccagctactcgggaggctgaggcaggagaattgcttgaacccgggaggcggaggttgcagtgagctaaaattgtcccactgcactccagcctgggcgacagagcgagactccatctcaaaaaaaaaaaaaaaagaaagaaatgggggacggacaaggagtctctcagttcaattcccccttcctcagcccatttcaccaaagcctgaagcggaagagaaaaacacgagccccagcatggcgggcgcagccaccccctccttccaccaccagacaaactccgtggccacagcccacaccgccagcgcgcatgcgtgacacgcgtcggccgccggtttgcacctgcgtcttaagaggagtccgggcggggaggggcggggctcagacgctgcgcacgcgcactcgcgacccctcgcctccttttgctttttctggcgggaaaagctcacgcgcacctcccccaactcaactgccgttcgtcgttcgtggatgtccgttgtgtcccgagactaggacgtggctccaggtgcgccctgccccgcggcgaggttcccagaatggcccttcccagcccctaccgaaatcctagcgaagcccccccatattgtgggagagatacccctgcgtcagggccccccagatcctga

SEQ ID NO: 22212 - DNA, 2300 bp, Homo sapien
tgggcagctgccattcttgccacatcagcctggatttggccggctggcttctcatgggagtttgatcctgacttgcccctgctcctgatcctcccatggctccctaatgcccccggactaagttccagtccctcaggctagagtggcattgagtagtctctgaagctcctgcctcttcctgtcccttttctctccgtcgggcaacccctaggtctctcctcatcatggccccaaacctgctgctcccctgggttccaactcaggatgtacatggtcccccaagcccaggccacctcctcctcatccctgccagccccacttgcagctgctctgggcagtccctgcagcagtgacaggagtttggggggccccatcctgcctccattccacccaggccgacccaaaaccttagtggccgcactctgggggctagagagagacctgggcgctgctatcatcacagcgggcacgggcgccccttggggccaccagtcgagcctgggctcgcctgtcctcacccagctcccccagtgcctgctctccccaagccacgtgagcccgctgccaccgttctggaaacacgggtctttgaagagaggcccttccagggtctggaacaccctgcagggtgcaaaggggggcgatggccttggctgggccctggcgcacggagtgggttcgggatggagtcctgagggaccccgggggtgttggttgatctcgggggtctgacgggactgagacggggacactgaagcaggatggggccctggcaggagctctgggtggtgtgggccttggcgggctttcaagggctctgacaggattttgggggggtctctgactggatttctggggagtgtctggctggattttggagattttgatttctgtgggggtctctgactggatttcaggggtctctggctggatttcgggggtcttgatttctgcgggggtctgattggatttctgggggttctctgactggattttgggggtcttgatttattcggggtctctggattttgggggtcttgatttatgcgggggtctctggatttctgggggtctctggctggattttgggggtcttgatttctgcaggggtctgactggatttctgggggtctctggctggatttggagggtcttgatttctgcgggggtctctgagtgcatttcggggtctccgtttctggggtgtctttgatggacttctgtgctctctgacggaatctgaggtccgactgggtttgggaggggacctgccaggatttctggggatctctgacacgagtctaggtggctctgctgatctggggagagtaataggattttggggaaagtttctggcaggctctgagggagaagtctgacaatttctagacgattctgacaggatttcgggggtcaactataagatttcctggtggactcctttcagtatatctgaggggatgtggtcaggatttttttttttttttttgagacggagtctcactcttgtcacccaggctggagtgcagtggcgcgatctcagctcactgcaacctctgccttccaggttcaagcagttctcctgccccagcctcctgagtagctgggattataggcgcgtgccactacgcctggctaattttttgtatttttagtagagacggggtttcacttccccgggatggtctctatcttctgacctcgtgatccgcccgcctcggcctcccaagtggtcaggatctggggggccctgacgcaggggtatctctcccacaatatgggggggcttcgctaggatttcggtaggggctgggaagggccattctgggaacctcgccgcggggcagggcgcacctggagccacgtcctagtctcgggacacaacggacatccacgaacgacgaacggcagttgagttgggggaggtgcgcgtgagcttttcccgccagaaaaagcaaaaggaggcgaggggtcgcgagtgcgcgtgcgcagcgtctgagccccgcccctccccgcccggactcctcttaagacgcaggtgcaaaccggcggccgacgcgtgtcacgcatgcgcgctggcggtgtgggctgtggccacggagtttgtctggtggtggaaggagggggtggctgcgcccgccatgctggggctcgtgtttttctcttccgcttcaggctttggtgaaatgggctgaggaagggggaattgaactgagagactccttgtccgtcccccatttctttcttttttttttttttttgagatggagtctcgctctgtcgcccaggctggagtgcag

SEQ ID NO: 22213 - DNA, 2300 bp, Homo sapien
cctacaggcccagggtctactcccggaagatgggaatgaatgaggggcatgctaacccctcagggctcttccagtcctcctggaagagggtcttgcacctaagaggattcggcatggggaagagctccaacagttgagttctgtgggctgggaggtctgagttggagtcccagtcctcagagagcacccagtgacagtcattgaaaaatggctcaacccactagacaggaagggggtttcgacacgtgctctggggtcttacagaggcctgaatctctggtattttggagggtgagagagccagaagcctcagttcccagctgggggatctgctggggaagtagtggctgagaaaaccaatctgagatgaagaggcccccttattcttttagtggttcacagaccctttgggtaatttggtgaaaattcctgtgaaaaatacatatgcaggacaccccccaggcccgtccgtgctgcctggcctcccccaggcccgtccgtgctgcctggcctcccccaggcccgtccgtgctgcctggcctcccccaggcccgtccgtgctgcctggcctcccccaggcccgtccgtgctgcctggcctcccccaggcccgtccgtgctgcctggcctgtgctaagaccccctgctccaaggcttctctcccagcccatagtaggcaaagggaaccagggagaagaggacgaagccagcagtgactttgttggccctcaggttgaccagaagagaggaagaggaggatgcagagagccaggtcacggtaggcagtccccagcacccctccccagtccccatccactccacacccacagaggctgagtcgtttcaactcttcccaagccccagcctcacactccaactcctcaggagcagagagaaaaatcatttggccaagagataacaaggcctttgctgtagctaatgagagcgatggtgaggtggggggaggcctggaggctagtgggcggccaggctgctcccaggggaccctcccagccacacacacagggctgcagccaccacaccgcaggcctcatagacgtggctacacccccggattgcataaatgcacacgcacatgcgcccacactcgggagaggttgggccggccctccccagccagcctcagaactccctgggggcgtagtgcccgcagcccccctgcctgcagccacacaggccagttcctctgctcctcagagcccagtgcccggtgggggttaagatttccattctcaggcaaggacggggaaagaaacttggtaaggagaggtgaggagccctcagttgtgagctgaggaatgcaggagctgggctggagtctgcctgttgtgggtcaggcactgtcagggcccctggggctcttcagggtccaaaccggccaagatggctgcctccaggacactcagctcccagcaccctggccccgaagcccacctccttcaacatactacactcccttgcagagactggggctccacctcagcttcctcacagctcacatgggcataatctcttccttgctcccagggtggggaggagggttaaggactatgtcataaagggcctgggtccctgcctggcacagcaggtggtagaggtgaagatattgattgtgattggtgttctgtttttatttactgccattatcattgtcattcatcatcctcatctgtgttaaaaaggtatgggggtaggaaagccaaagacccatagaggggaggcccttccggggagacatgggggatgaggcggtgcagtgggtggggcctggccctggaggaacagctggggctttgatctttgaatcctcagatgaagtgttggaattaatcagtgaatttagtgtggttgctgggtgaaagatcaaaataaaaaatcatatttcagtatagcaaccatgagcaattagaaaaataaatttgtaattataccatttataatggcatggtgttttgtttttggtttttgttttgagatggagtcttgctctgtcgccaggctggagtgcagtggtgcgatctcggctcactgcaagctccacctcccaggttcacaccattctcctgcctcagcctcccaagtagctgggattacaggcacgtgctaccatgcccggctaatttttgtatttttagtagagacggagtttcgccatgttggccaggttggtctccatgtcctgaccttgtgatccgcccgcttcagcctcccaaagtgccgggattacaggcatgagccactgcacctggcctgtaatggcatgtttttaattagtaaagc

SEQ ID NO: 22214 - DNA, 2300 bp, Homo sapien
gcggccgacacatcgatgggacaggcttacttgaggtcctggggtctcttacctgctctggtgtccaaggtaacagcagataagcagagctggatgcagagaacggtgaatgttgcagaacagatctgggcagggcggtgggaggtagggtctcaggggcacacaggtgacgcacctcaccccctcccaggggatcctgggagcctagcgacagacttagactcttaaagggacagaagtaaaggacattttctctggggtggggaagggagttagaaactggattgatctagtggagatgtggcccaaattatttttttgaaaccagtggtcctggccctctaccctctcctacctgaaaacccaggggtctagttccctggtaccttcctatttcaagtcccctaagttgtatcccccagctccctccccccagactcagaactccagtcctctagctccttccttcctcagattcaggaatccaagtccccagcctcctccttccccagaacataggaatctgggtccctgtcccatccactcttagactcaggagtccaagcttctgccaccaccttcctaggaaactaggagcccaagttcccacatcccaagtttctactgctctgtaggacttccaagttttgcccatcttctcctcactgtgtataaaggcccctctttttaaatttttttttttttttgagacagagtctcactctgttgcccaggctggagtgcagtggtgcgatctcagctcactgcaacctccctctcccaggttcaagcgattttcctgcctcagcctcccaagtagctgggattacaccacacctaatttatgtatttttgtagagaaggagtttcgccatgttggccagtctggtctcgaactcctgacctcaagtgatccacccaccacggccttccaaagtgctgggattacaggcatgagccacagcacccggctgaggcccctcttaagagtcagtgtggactgggtgtgctggctcacgcctgtaatcccaacactctgggaggccaaggagggcagatcacaaggtcaggagttcaagaccagcctggccaacagtttggcgaaaccctatctctactaaaaatacaaaaattagctgggcgtgatggtgggcacctgtaatcccagctactcgggaggctgaggcaggacaatggcttgaacctgggaggtggaggttgcagtgagccgagatagtgccattgcactccagcctgggcaacaagagcaagactccatctcaaacagacaaacacacacacacaaaaagagtcagtgtgaggaggactgggctttaatcttcacagcacccccaaactcctcccagataagggcttagacacatccttagggcagctcaggagccctgtctgttttcccctcttctcactctctgaggtttttctgatgtggtctgtcacttttcctgtcctcacacccctgccacacgtaccctttgccatttcttgcctttcccccctccctacctcaccctcgatctttctgggcctctcgctgctgtatttatctctgggcagctccttccagaccaggacgtccttccatttccgtctgtctttctgagagccttttctttccctcctccatctccatctgactgttcgtttccatctccttcgctctcttttcttgttttcttccttttcctttctttttctgtcgttcccattctttctctctatttcttcctcggccactctgtctttgtccttctctttgtgtctctgttcctctgacggtccttccgccagtctctatttttagccctctgacacaccccctgtgtccacctctctgtctgtctgtctctccccctccctcgtctcaggtccagcttctggtcccaattagttggtggcggccaaggcagcggcaggtcccccacccccggctcctcattaccgctggcggctcctaatgagcctggggagggggtgaccccgcgtccccggccccccggcctgcgtcactgcccggtgcgggggctgcggaggcgatataagggggctgccaccatcgctgccccagcccactgcacggtaggggactgtgcgggaagctgggggtggatgcatggtggggcccggggttctgggccgggatgcagccctactgagcccctttctggttctccacaggtgatggagacccgccaggtgtccaggagccctcgggttcggctgctgctgctgctgctgctgctgctggtggtgccctggggcgtccgcactgcctcggg

SEQ ID NO: 22215 - DNA, 2300 bp, Homo sapien
ctgagtgcggatgggcgcccggtgaccacgcagacccgggacccgccggtggtggactgcacctgcttcggcctccctcgccgctacattatcgccatcatgagtggtctgggcttctgcatcagctttggcatccgctgcaacctgggcgtggccatcgtctccatggtcaataacagcacgacccaccgcgggggccacgtggtggtgcaggtagctcaaggcctgagcccttgcagagccccgccccgctcaccgagctccgcctacgcccccatgacgtcacactcacccaccagacgtccaggccacgccccttccgaaacgctgtcggaatagctccgcccaatccgtgcgccccttagttctgacctcgccttaggggccgcctccgtttcctaagccccgtcctgatctaaatgaagtcccgcccttatttccaggggcttgattgaaaaatgtagagtccgccccaacatcaggttccctaggggttgcccctgccccattttggacctactagcaattttgctcacgcctgtaccccaagctcatgtccccgggtcacatctatttaatctcagtcccatctcaggttcctccctgaatgtgatccttttttgaaaccctgccactgcctacgtcccactgcatgtgttgtgtcccttatctaaagacccacagggtctcccaggctacggtgcagtggggccattgctctgtcgcccaagctggagtgcagtggcaccatcactgcagcctcgaactcctgggctcaagtgactctcctgcctcagccttctgagcagctgggactacaggcgtgcgccggcatacccagctaacatttttatttttatctttgtagagacaaggtctcactatgttgcccaggctggtctcggactcctgggctcaagcgatcctcctgccttggcctcccagtcctgggagtacaggcgtgagccaccgtgccctgtcctttctcctattttaatttcagcataggccttgcccctgcatcagaaaagagtcctgatttgtgcctttgtcctacctgaagttcctccccttgctcccttccaatctggtccgcccccttggctgcttcgtgtccccgcctggaccctgtgcaggtcactccgcaaacgctcataagctggatataagtggagagagtcatcatcatacatgggcccctaggctttcatggaggcaaggaagcaggcaaagcaaggcgtctaggtggtgatggactctgttgttaaggcagcataggccctagcaacgtggaagagcggagtttgtagactttaattgacagaaagatagtgtgagctttgattggcaggcttttggaggtgggaggggttcctcgttgctgataggtcgagacgctaagtctgtgggtgctgattggtggagcggcagagcctggacagggcggctgatttaatgtacattttggcccgcagaaagcccagttcagctgggatccagagactgtcggcctcatacacggctcctttttctggggctacattgtcactcagattccaggaggatttatctgtcaaaaatttgcagccaacaggtacagtggtggggtctcaaagtgggcggtaactacagttgtgtgggtggagttagagggcgtggtcttgaatttgcgggctggctctggtaaatgggagaagcctggatttgggggtgggtcttagagaaaggtggggcttgcgattgaggaaggtgtaagtcagagaggtggtgggacctggggtcccggggaccactgggcctagcttgctgtgggcgggaaaggcagaatcccgggcatggctggatagcttggattcttttctctgacccttcccatcagagttttcggctttgctattgtggcaacatccactctaaacatgctgatcccctcagctgcccgcgtccactatggctgtgtcatcttcgtgaggatcctgcaggggttggtagaggtaaatccccgcctgatatgaccctgccctcgctcggaccctgcctcttctcagtgaccttggttttctcctctttagggggtcacataccccgcctgccatgggatctggagcaaatgggccccacccttagaacggagtcgcctggcgacgacagccttttgtggtgagaggaagagggatcctcactcctgaatctgagggaggaggggttggggcctggactgttgggtctgagcggggaggggctgggggggctgaactcctgtgtctgagggaggaggaggagactctggacctggactc

SEQ ID NO: 22216 - DNA, 2300 bp, Homo sapien
cccagctttggctctaagtcagataaattactcagctgcggaaaagcctaaaaatatatctggccacagtgcacgaaggagatggcctcatcagcaccatgcccctgccgccgtgccctcaggccctgtccccttggcccacagccctgaccctgtgtttcgctgagcttcagtccacctcgctaggccatgggggtcctttgctaagtctaacatcagtcttgcttgctgcagatcacctcttagctccaaagttaccccaccctctagtaacatgagagacaagaataaggctggacagaagtggggggaggtgggcaggaggatggtgcagtgacggaggttggtggtggaggggaagctgagataacctcaccccttctttttccaattttccagcccctccccaccctttttctcgcctcctttcacgagtttctcaaaatacatcagtgtgaagtcaggagaatgagagagagagaaagagacgtgctggtggagggggctggggggtggcagcgggagggatgtattcctcaggcccctccctcagtctctgcctctgtttctcatctgtgctagggtttctcacagtcaatctctctggctctcactctctgagttacctcttgggtccccagagacccccgggctctggccaggaccatcagcagggagtttgtgcagagaaaagcatttgcttccaatgcctggggtttgctctgatggttggagggagaggggaataccccatattagagacaacaggttgatctcatttaatcctctagacaaagatggggaaactgaggctccattctggggttggggagatcagtggatgagtatgagccccatgatttgaacccaggtcagtctccctcccaagcctagaacagagctcttccttgagaagagtgatgccacagctggtggggagcttccttgcacccagggtgacttggaacaaggacatgggggaatgggatgccagagagatgagaacccaaggtgcctcctttctgagagccaggtcttgggcagggggatgccgagggccagtaagggatcaggtcccattgctgttcttgtctgtgaccttggagtgccacttcagctccccgagcctcagtttccttagttgtacaatgggaagagaagagagagcagagggacataaggagacaaagacgtgggggagtggacagagatcctgagagaagcagagagagagagagggagagacagagaagttgagacatctcaatttggggtaatggcctcctaagtgttgtttttcctcatcgccaagtccccaggcctgagtttggggtatccagggaggggagggggatttacatctagggtctcccttctctgtccttgtcccctgcaaagcatcagggccaccttcatctctgtgtccttggtcctcttgctctaaaatgattgatatcaccttgaagttccctctttattctcttgcatttttgcccttgtcccattttatagatgtgggatactgagaccccctgtttagacagccttgattagagatctgacatctcctcatattaacaaggaatctcacatcaggggctgcaatcacatcttgagtttcagggtcaaatatcatccgatgtcaacctgggtcagtctaatctctttgggtgatgggttctgatgggtggggggagttactgccatcctgtactattcgtcctagtggcttcaatcccccctatctctggctctctgtcttcttcctcttggggtctcattcctactccttctgggttctgtccactccctggcttctcccacccctgtttcttaactgcccctccccacctccttaagttctaggatggggaggggttgctgtgttctcacagctcttccacctccctccccctggaccgtctggctgttccttcctcccccgtcccagtctccctcgcctccatctgttccagccccttcctgggatccagcccgatcccctggctgcctacccacctcagagaggggctgcacctcacaaatcacgtccccagcctgtctatcctccgtctcccaggctctccatctttctcttgcattctggatctctgttctcatctctctgcatctatgttctatctcctgggtttctgtccccgcctctctttgggactctgtctgcttccttctctaggtttccatctcttccctctctgggtctctgtccccctatttctaggtctctctccccctctctctgggtctctgtctccctctctctgggtctctgtcatcct

SEQ ID NO: 22217 - DNA, 2300 bp, Homo sapien
cacacctggccccaagccgcaaccaccgcctccgcacccgggccggggactctgcagccactgggtggcgcgtgtgagcggctcccgcgctgctacttcagccccacgagtcccagttcctacctccctcctgcctcagacccgcagcgtcctccgttctggggtcccaggggtttctcaaagctgtgagacccagagacacagccagtcaaggctggaagcgagaggctgcggcggtcagtggcttcccggccaccccgtccttggcgcccgcccgacgcgccgtctgctcctcccaccccaccgcgggccgcatcatgaaaatttaataccaaatgcatttgcggcccgacgcggggaggtagtggggaaaggatcaccctcctggggcctggatctggaggtggactcagcgccgggagatgggctggtctgaggacaggagcggggcgggaccctgtctgcgggcccaggacagggaagggccgggctctacccaacggggcggcgctggaattccggcgtggagacagagttcggtgggcggggacagattccgggggtgggagcaggactgggagggcagggacagatcccagaggcggaggcggtgggcgggggacagatcccatggggcaggggcaagactgggagggcggggacagatctcaggggcggaggccagagctcggtgggcggggtcagattccgggggcggaggcaggactgggaggtcgaggacagatcccagtggcgagggtcagaagtcggagggcggggacagatcccatggggccggggcaagactgggagggtagggagagatccagggggcggggagaactgggtgggcggggacagatcccatggggcaggggtagaacacagagggcggggacagatcccagggacggaggccagaactcggtgggtggggacagattccagggggcagagatagatcctgtggggaaggggtagaactcagatggcaggaacagattccagggggcaaggacagaactgagagggcgggaacagagccagggacagatcctaggagaaggggacacaactccaacggtggggagagaactcagagggcgggggcagaactcaggtcagcgacagatcctaggggaggagacaaattcagagggcgggtgaggatgccagggggtgcggatcacaatttagggggcgggacagatctcagggggtggagacagaactcaaatagaggaatggatcccccggagctagggaagaactcagagcgcggacagatcccagaggagcagagaaataacacaatggggagactatggggtcgcagctggcactggcggggtgtgtgaaatataactgtggggggcggaagccagagggaagaaaatcggggttagggaatgaaactcagggagagaagcaacagggaggagagagacgccggagggagaatagagctggaggagtatgggattcaaaggggaaagatggaaactaaggaggagatggagctcaagggtgaagaacccgggtggcgaaagggactagagggggacgacaggtggatcgaagtaggcgttggacttgaggggaaagaatttcccttgaatgagaaaacaaagaactccctggatgagactattggaactggggacgaggtgggatggggatggaattgcggggtgggggcggggaggagtgaaggaactggaggatgaacgcagagggaaagtcagagaagacaggattgtaagggacgcaattagggggaacagaagtcggggagagaaatgatggggatgagaactcaggagaggagagaaaatctgggtaggagccaggggtgatggaacagggatagggggagtagcctggggaaggaacagaattggggggcgtgaactcggaggcgtgagttcagaacccacaggcgtggtcttggaaggctcaggaggggacaggacgaggatgaaagggctgcgagagggggcgggtctgacagacgaggggaggggcctggtggggccggggcggggcctcccgcgccccgcccccggcgctgagtcctgtgacagcccccgggccgcctgcacttgcagcctccttccccccgagcggagctgcggggccggccgggccggggctggaccccgggaacccggacgcggccgcccgggcccgcgggcggggggatcggcgggggggacccgcggggtgaccggcggcaggagccgccaccatggagttccgccaggaggagtttcggaagctagcgggtcgtgctctcggga

SEQ ID NO: 22218 - DNA, 2300 bp, Homo sapien
cagcctgaccaacatggagaaaccccgtctcttactaaaaatacaaaattagcctggcgtggtggcaagcgcctataatcccagctactagggaggctgaggcaggagaattgcttgaacccaggaggcggaggttgctgtgagcccagatggcgccattgcactccagcctgggcaacaagaacgaaactccatctcaaaaaaaaaaaaaaaaaaaaaaaagtgatggtctataccctcctcttctttagtgaatcctaggatcatcagtagatggaggaacttcagtggtaaatgctcaaagcacaatgtgagttagtggggcatggtggtgcacacctgttgtcctcagctactcgggaggctgaggtgggagcccagggaggttaagactgcagtgagctgcccctgggcgacagagtgagaccctgtctcaaaaaggaaggaagggaggaaggaaaggaggaaggaaggaaagaaggaagaaagaaggaaaaagaagagaaagaaaaaggaaggaggaaggggaaaggaaggaagacagagaaagaaggaatgaaggaaggaaagaaaaaagaagagaaagaaaaaggaaggaggaaggggaaaggaaggaagacagagaaagaaggaatgaaggaaggaaagaaaaaaagaaaaaggaaggaggaaggggaaaggaaggaagacagagaaagaaggaatgaaggaaggaaagaaaaaagaagagaaagaagaggaaggaaggaaagaaaaggcaggcaggcaagcacaatgtgtctgcaatggggtgaattgtgagggagggggagaaaagacggggaagaggtcagggtgggagtgacttcaggtagggtctttccggccgcggaacggatgagcgaacgtgggcgccgtgtccaccagagggcgcaacctttccctgcccatcgtctcagagaactacatctcccagcggccctcggagtgcgcggcccttctcaaacgagcgctgaggctcagaggccgctgggacttgtggttgggacggtgagccgctggagggggccgagtaactcattcccaggtcctgaaaaagtgtgcggctgagtcctttcctccttcctcggtttccatggcgatggtttcggcaaaggcccaagttttggcagcggcggggcccgcttcccactccctcctcttcaccatctgctccaccctcacacctggccccaagccgcaaccaccgcctccgcacccgggccggggactctgcagccactgggtggcgcgtgtgagcggctcccgcgctgctacttcagccccacgagtcccagttcctacctccctcctgcctcagacccgcagcgtcctccgttctggggtcccaggggtttctcaaagctgtgagacccagagacacagccagtcaaggctggaagcgagaggctgcggcggtcagtggcttcccggccaccccgtccttggcgcccgcccgacgcgccgtctgctcctcccaccccaccgcgggccgcatcatgaaaatttaataccaaatgcatttgcggcccgacgcggggaggtagtggggaaaggatcaccctcctggggcctggatctggaggtggactcagcgccgggagatgggctggtctgaggacaggagcggggcgggaccctgtctgcgggcccaggacagggaagggccgggctctacccaacggggcggcgctggaattccggcgtggagacagagttcggtgggcggggacagattccgggggtgggagcaggactgggagggcagggacagatcccagaggcggaggcggtgggcgggggacagatcccatggggcaggggcaagactgggagggcggggacagatctcaggggcggaggccagagctcggtgggcggggtcagattccgggggcggaggcaggactgggaggtcgaggacagatcccagtggcgagggtcagaagtcggagggcggggacagatcccatggggccggggcaagactgggagggtagggagagatccagggggcggggagaactgggtgggcggggacagatcccatggggcaggggtagaacacagagggcggggacagatcccagggacggaggccagaactcggtgggtggggacagattccagggggcagagatagatcctgtggggaaggggtagaactcagatggcaggaacagattccagggggcaaggacagaactgagagggcgggaacagagccagggacagatcctaggagaaggggacacaactccaacggtggggagagaactcag

SEQ ID NO: 22219 - DNA, 2300 bp, Homo sapien
ttcacgccattctcctgcctcagcctctccagtagctaggactacaggtgcccgccaccacgcccggctaattttttgtatttttagtagagacggggtttcaccgtgttagccaggatggtctcgatctcctgacctcgtgatccgcccgcctcggcctcccaaagtggtgggattacaggtgtgagccaccgcgcccggccccccactcccatttcttagcaaacttgaagcccattaacctcaattccccgaggcctggttcccgccttagtgcattctgggaactgcagtcccatctttgagcaccccgccaaaatccccgaatactcaaggatccaggggtccggtcactgcacctgcagcagcagctcctcaaatcgcgccgaatcagcaccgatcgcctccgcctcgcttagccccattcccagcagcttcgggttcgccatggccctgggaaagagatctaggcgtcctcgagaccctcaacgtgggaaactttgcccaggatccgaaccccagtgcctgctctggccctcaatcgactccggatacctactatcctgttcaaaaacctaagactggcctaagactacatttccattcaagaccgaacaccatcgtcaaatccgtggggaatatgtgtctctagacgcactaccctccgtcctacgtgccgaactgtaaacgaagccacacttccggtctatcggtaaacacaggactggagtatgccacacttccgagtaccccagtgttcattcacaagctggtatcgcgttatcgacaagccacgcccctcgcatcaatcaaaaataaaccccaaggcggatccctgagtgccacacttcctgtatctatgaaagccacacttccggctgggcgctgtggctcctaccggtagtcccagcactttggaaggccagggcaagaggatcgcttgaggccaggagttcgaaaccagcttgggcaatacaatgagataacgtcccacaccccatctcttaaaaaaaaaaaaaaagcgccagacttccactctttccacaaccaaaactggcccccttactttgcagtgaaggttgcattttccaaaccttaatctcaatgtccatcctaaaaggtaccctttttatctttgaattatcacttcctgccagctctagatcctaatacgtccagatctagacccgccaggtctagatctagatctagacctctagtcaatataattagaaaagctgcactttgaggctgggaggccgaggtaggaggatcgcttgagcccaggagttcgagaccagcctgagcaacatagcaagatcctgtctctaccaaaaaaaaaaaaaaaaaaaaaattagccaggcttgatggcacctgcctgtagtcccagctactgtgcaggctgacgcaggagtaatgtttaaacctgaaaagtcgaggcgacagtaagccgtgatcggaccactgcactccagccctgggcgacagagggagaccctgtctcaagaaaataaaaggtaaaacaaaacctgcacttcctgctactataaaacaaggcactgggaagacgcatcaataggacgaccctttttttttattactattttttttttagacacagtctccctttgccacccaggctggagtgcagtggcgcgatctcggctcactgaaacgtacaccttctgggttcaagtgattctcccgcctcagcctcttgagtagctgagattacaggcgcgcaccaccacagctcggctaatgcttgtatttttagtagagacggggtttcaccaaattggtcaggctggtctcgaactcccgaccttaggtgatccgcccgcctcggcctcccgaagtgctgggattacagccaagagccatcgtgcccggccacgccgatcctcataaatccggagccctcctaactattcgcaaagtacccacatcgccgtctccccttcctccccgttttaagcagtgcgcatgctcctaaatacgcttccccgtgggggacgtaggcggggccatcgggtcctaaggaaaaagtgtgggcgtggctgctctctgtatcttgtagccccaccccattcccattagccccgcccctttgggctggaaccggaggtgtcgctcttcggacctcaaggttccccttaacacagagcgccccgcagtcttcgcggaaagcgttcggggtaggcgatggctgcgacgcgtgcagggccccgcgcccgcgagatcttcacctcgctggagtacggaccggtgccggagagccacgcatgcgcactggtga

SEQ ID NO: 22220 - DNA, 2300 bp, Homo sapien
tcctatgggatcacgggggctccatggaagttctgaaggtctctgggtaatcaaagggatgaagggagtccctcaggaggtctggggtgctctggaggcccatggaagccataggatgttttgaagagtcgtggaaagacaatgggggttgtgggtcactggagcctcacaggaatcctaaggggtctggtgggtggcgtcaggttctgaggggaccctgaggaatcacgagagcgtctagaggagttcaggaaaaccgcggaaacactacgaggagttcaggatcaaggggcaagagaaccagtggggaagaccggaacagactaaaaggctgccaccgccaaggctcaagggagcgtcctacagggcgcgatcctattgggcggcgggaatcacggggactaagagaggcggagcggctgagctaccgcagtggatgacgggactccccgcgaaaaaccgggcgcccaggcctggggaacgcagcgagcagcgccggccgggcagactctcaccagtgcgcatgcgtggctctccggcaccggtccgtactccagcgaggtgaagatctcgcgggcgcggggccctgcacgcgtcgcagccatcgcctaccccgaacgctttccgcgaagactgcggggcgctctgtgttaaggggaaccttgaggtccgaagagcgacacctccggttccagcccaaaggggcggggctaatgggaatggggtggggctacaagatacagagagcagccacgcccacactttttccttaggacccgatggccccgcctacgtcccccacggggaagcgtatttaggagcatgcgcactgcttaaaacggggaggaaggggagacggcgatgtgggtactttgcgaatagttaggagggctccggatttatgaggatcggcgtggccgggcacgatggctcttggctgtaatcccagcacttcgggaggccgaggcgggcggatcacctaaggtcgggagttcgagaccagcctgaccaatttggtgaaaccccgtctctactaaaaatacaagcattagccgagctgtggtggtgcgcgcctgtaatctcagctactcaagaggctgaggcgggagaatcacttgaacccagaaggtgtacgtttcagtgagccgagatcgcgccactgcactccagcctgggtggcaaagggagactgtgtctaaaaaaaaaatagtaataaaaaaaaagggtcgtcctattgatgcgtcttcccagtgccttgttttatagtagcaggaagtgcaggttttgttttaccttttattttcttgagacagggtctccctctgtcgcccagggctggagtgcagtggtccgatcacggcttactgtcgcctcgacttttcaggtttaaacattactcctgcgtcagcctgcacagtagctgggactacaggcaggtgccatcaagcctggctaattttttttttttttttttttttggtagagacaggatcttgctatgttgctcaggctggtctcgaactcctgggctcaagcgatcctcctacctcggcctcccagcctcaaagtgcagcttttctaattatattgactagaggtctagatctagatctagacctggcgggtctagatctggacgtattaggatctagagctggcaggaagtgataattcaaagataaaaagggtaccttttaggatggacattgagattaaggtttggaaaatgcaaccttcactgcaaagtaagggggccagttttggttgtggaaagagtggaagtctggcgctttttttttttttttaagagatggggtgtgggacgttatctcattgtattgcccaagctggtttcgaactcctggcctcaagcgatcctcttgccctggccttccaaagtgctgggactaccggtaggagccacagcgcccagccggaagtgtggctttcatagatacaggaagtgtggcactcagggatccgccttggggtttatttttgattgatgcgaggggcgtggcttgtcgataacgcgataccagcttgtgaatgaacactggggtactcggaagtgtggcatactccagtcctgtgtttaccgatagaccggaagtgtggcttcgtttacagttcggcacgtaggacggagggtagtgcgtctagagacacatattccccacggatttgacgatggtgttcggtcttgaatggaaatgtagtcttaggccagtcttaggtttttgaacaggatagtaggtatccggagtcgattgagggccagagcaggcactggggttcgg

SEQ ID NO: 22221 - DNA, 2300 bp, Homo sapien
attctcctgcctcagcctcccgagtagctgggactacaggcatgcaccaccacgcctggctaattttgtgtttttagtggagatggggtttttccatgttggtcaggctggtctcgaacttcccacctcaggtgatccgcccacctcgacctcccaaagtgctgagattacaggcgtgagccaccacacccggccatttttttttttttttcctaatgtagccatggggtcttgccatgtggcccaggctggacttaaacacctagcctcaagggatcctcttgcctcatttttttcttgcaggagtaattggcctcatcctgccacccacattctccttccttgagatgatgtggaggatttgccctgccctggctgtgggtaaatgatggcctggggggtcctgactcttgggtctgagaaaggaggggatcgtggggcccaaactccagagtctgagagacaagggggctggaggcctggactctgtggaaggagtctgtgggaggaggggctgcgggtctgaactcctaggtctgagggaggaggagctggagtctggactcctgagtctgagggaggaggagctggagtctggactcctgagtctgagggaggaggggctggagtctggactcctgggtctgagggaggaggggctggggtctggattcctgggtctgagggaggaggggctggggtctggactcctgggtgtgagggaggaggggctggggtctggactcctgggtctgagggaggaggggctgggacctggactcctgggtctgagggaggaggggctgggacctggactcctgggtctgagggaggaggggctggagtctggactcctgggtctgagggaggaggggctggagtctggactcctgggtctgagggaggaggggctgggcctggactccggggtctgagggaggaggggctgggggcctggactcctgagtctgagggaggaggggctggagtctggactcctgggtctgagggaggaggggctgggggtccagattcctgggtctgagggaggaggggctgggcctggactcctgggcctttgagctgccccacttccccaggctgcaccgtggtggccctcgtgcccccggcctccccggcgcccctcctcctggcccagctggcgggggagctgggccccttcccgggaatcctgaatgtcctcagtggccctgcgtccctggtgcccatcctggcctcccagcctggaatccggaaggtggccttctgcggagccccggaggtaccttcgggacaggggtcgtggcggaacgcggctgggggccgcaaggctcctcctgcggctgaactggggggggtccctaggaagggcgtgcccttcgacggagcctggcgggagagtgtgcggagctgggcctggcgctggggacggagtcgctgctgctgctgacggacacggcggacgtagactcggccgtggagggtgtcgtggacgccgcctggtccgaccgcggcccggtgagacccgtgcgctcccgtctcctcataccctggaggccgttggtgtctgtctccagtcttcggggtcccgagtctctgttcattttattttattttattttatttattttgagacggagtttcactcttgtcgcccaggctggggtgcagcggcgcgattttggctcaccgcaacctctgcctcccaggttcagcctgggagtagctgcctcagcctcccgagtagctgggattacaggcgggcaccaccatgcctggctaatttatgtatttttagtagagacggggtttcaccatgttggccaggctggtctcgaactcctgacctcaggtgatccgcccacctcggcctcccaaagtgctgggactgcaggtgtgagccaccgcatccggcctctctgttctttaggactctgttgatttatctgagtgtccatgtccctagttttccagcctctgtcttcactcttcagatcaccaacttgctagagtgcaatggtgtgatctcctgatgccccttttcctcacagggtggcctcaggctcctcatccaggagtctgtgtgggatgaagccatgagacggctgcaggagcggatggggcggcttcggagtggccgagggctggatggggccgtggacatgggggcccggggggctgccgcatgtgacctggtccagcgctttgtgcgtgaggcccagagccagggtgcacaggtgaggcagggggtagagacttgagggtgtcaggggaggaggggcctggagacccagctcctg

SEQ ID NO: 22222 - DNA, 2300 bp, Homo sapien
ggggaagcccttggggtaaccatgtgacctgggcgtgggggctgctgcctgctctaggctccttccctggtgggtgggccctggagggctgagcctcccggtcaccccttgcaggtgccgtggcctgtggtcgtggcctcccccttccgcacagccaaggaggcactgttggtggccaacgggacgccccgcgggggcagcgccagtgtgtggagcgagaggctggggcaggcgctggagctgggctatgggtcagtctgcgtggcccgggcgctcactcctctcctcattcttccatcttcatctcccttctccctgggtcgctccccgcgcctttaactcacccctctcccggcctgccaccgtctgttttcctctgttggacaccttcatcttccccacaggctccaggtgggcactgtctggatcaacgcccacggcctcagagacccttcggtgcccacaggcggctgcaaggagagtgggtgttcctggcacgggggcccagacgtgagtacatcccctccccgtcaccagcccccccgccgccccatgcccttgacactcgcatccggcctcgcgtgccccttgcatcctcttgacaccgtccctctcacaggggctgtatgagtatctgcggccctcagggacccctgcccggctgtcctgcctctccaagaacctgaactatgacacctttggcctcgctgttccctcaaccctgccggctgggcctgaaatagggcccaggtgagtcgttgggggccagtggtctgggagtgtgaacggggagaggggaattgatgcctgtttccccgtggactggagggctggcgcgaggtccatccaaaccatctcttagtcctgctgagtaccacgttgtggcctcacactttccctaccccaggcctgccgagactctcagctctgccccatgaatgtctgtactctcccagaaactcatgggtctaggagcttggggtcccccagaggttcactggagcagaagcttggggtccctcagaggctcatgggagcaggagcttggggtcccccagaggctcatgggagcagaaacttggggtcctccagaggctcatgggagcaggagtttgaggtccccccagagactcaagggagcagtttagggtctaccagaggctcatgggagcaggagcttagggtcccccagaggctcatggagcaggaacttagggtcctccagaggctcatgggagcagaagctttgggtcctccggggctcatgggaacaggaatttggggtgccccacaggcttatgagagcagtttagggtctgccagaggctcatgggagtaggagtttagggtcccccagaggctcatgggagcaggagtttagggtacccagaggctagtgggaacaggggtttggggtcccccagaggctcatgggagcagaaacttgagtcatccagaggctcatgggagcaggaatttggggttccccagaggctcatgggagcagtttaaggtcccccagaggctcatgggagctggagtttagggtcccccagtgaatcatgggagcaggagttttagggtcccccagaggctcatgggaacaggggtttggggtgccccagaggctcacgggagccaaggcagtcttcccagtgcggtagagcatagggtctgagcagattgaggccccaggactcctcctcatgtcccaccctactccagcccagcacccccctatgggctcttcgttgggggccgtttccaggctcctggggcccgaagctccaggcccatccgggattcgtctggcaacctccatggctacgtggctgagggtggagccaaggacatccgaggtgctgtggaggccgctcaccaggctttccctgggtaaggggtcacacgggaaagcccaagggtcatggtgtggcagagaggggagcctgcccacagcaattggtggactgggaggctgggcccccagggtaggggctgtggacagaggtggggtgtcaggagagccaagaccaggatgccaacccccactgtgcgctgtctgcccacagctgggcgggccagtccccaggagcccgggcagccctgctgtgggccctggcggctgcactggagcgccggaagtctaccctggcctcgaggctggagaggcagggagcggagctcaaggctgcggaggcggaggtggagctgagcgcaagacgacttcgggcgtggggggcccgggtgcaggcccaaggccacaccctgcaggtgaagggtctgtgggcacctgggccagc

SEQ ID NO: 22223 - DNA, 2300 bp, Homo sapien
agaattctttttgatgtaagaaacccactcttactagtttaggataaaagggagttttcagaggccaggctcggtgactcaggcctgtaatcccaacactttgggaggccgaagtaggcggatcacctgaggtcaggagtttgagagcagcctggccaacacagtgaaaccctgtctgtactaaaaatacaaaaattagctgggtgtggtggcgggcacctgtaatcccaattactcaggaggctgaggcagaagaatcactcgaacccaggaggcagaggttgcagtgagctgagagcacacacttcactctagtctgggcaacagagcaaggctccatctcaaagaaaaaaaaaatgagagttttccggactaggtgtggcagttcacacctgtaatcccagcactttgggaggccgaggtgggtggatcacttgtcagaagtttgagaccagcctgggcaccatggtgaaatcccgtctctactaaaattataaaaattagccaggcgtggtggcggcacctgaaatcccagctatctgggaggcaggagaattgcttgaacctgggaggcagagggggagcttgcagtgagccaagatcgtgccactgcactccagcctgggcaacacagcgagactcggtctcaaaaaaaaaagagagagagagaggagtcttctggaaggctacagagattccctagaggcaatagggcgatagggcaggacacacattgaggggccccaggacttggtcaggaaggagctagagcaggtcctttgtccatgggccacatgagctattggggcttgtatctctgcctctctgcttcatttaaatctttctagccagatggaaggtctgaccattgggtgcgacaaggcagctaacccaggctgaacaggaagtgaggcaggcagagggatcagggaagggaaatggatgatgaaggccaggacgggcgaggctttgctgcagtaacacataacccccgaatctgcgtgggccacaaccacaacattagtttgttgcttacactccctgtgctcatccggggctggcaggatccctgtgctcctccgagtggcacaggaaacttggctgatagaggcgctctctccatgcatcctccaccatccactccccggtcccttagacttccattcagaagtgacacctgtcacctccaccctcatgtgactggccaaagtgagtgtggccatgtccgagttccccaggatgggacctcgaatcctcctgctgggggggtgggggcagcagatgtttcaggacagtctgccacggatcagatgggtgagcaagagattcaggatgggcgtgatgggtcacacctgtaatcccagcattttgggaggccgaggcaggctgatcacctgaggtcaggagttcgagatcagcctggccaacatagtgaaacctcgtctctactaaaaatacaaaaattagccgggcatggtggcacgcacctgcaattccagctacttgggagcctgaggcacaagaattgcttaagcccaggaggcggaggttgccgtgagccgagactgtgccactgcactccagcctgggcaacagagtgagaccccatctaaaaaaaaaaaatgcttcagagattcagagatccacagatgtggaagagagcttctattttgtctcatgtaccacctcacccctcagtttggagttggagaagccgaggcttagagaggtcaaggggctggccaagctcccacagtgataaagctagtgctagggcgacacctgccaggcccaatgtgacaagatgcatcctgagtcctgtgtgccaagccttggcggggcaaagttggggcccggaggacggtaagacacagcaactgcgagttcccagagacagatccgggttccagccccagctcaccatgcactgggcgtgccacccagggagtcagccccactgcagcccccgctgcggggcgtccggagaacgcgccatctgcggcgtgagcggccgcctctcaccaccagggggcgcgctccgcctgggcccagattccaccccttgactgtctccccccaaaaatttcctttcactttcggtctctggctgtcacccggcttggccccttccacacccaactggggcaagcctggtgcgtgaggagacttggactctaggtccccaaggggcggagccagggtccccactcctggggcagggggagcagagggtggggggctgggttcccgggtccctaacctggggagggttctggggaccagacgtcgaggttcttaga

SEQ ID NO: 22224 - DNA, 2300 bp, Homo sapien
caacctccgcctcccgggttcaagcaattctcctgcctcagctaattttgtagttttagtagaaacggtttctccatgttagctaggctggtctcaaactcccaacctcaggtgatccgcccgcctcgacctcctaaagtgctggaattacaggcgtgagccactgtgcctggccctaattttgtatttttagtagagatggggtttctccctgttggtcaggctggtctcaaactcccaacctaaggtgatccaccagcctcagcctcccaaactgctgggattataggcatgagccaccgcgcccggggaaatatagggaacatttctatcatggccacgttctcttggacagcaatgccctagcacatagtaagcgcttgctgggaatggagttgttttgggcataaatctgtggcccgccccaagctaagctactttccctctcctctctcagcggagccttaaacaacgcagtgagacagacatctatcatcccattttacaggggaggatactgaggcacacagaggggagtcaccagccagaggatgcatagcctggacacagaggaagttggctagaggccggtcccttccttgggcccctctcattccctccccagaatggaggcaacgccagaatccagcaccggccccatttacccaactctgtacaaagcccttgtccccatgaaattgtatataaatcatccttttctaccagctctggccaggtctgtctatggatgggtgtgaatggggtagttttgatttcagaatcttggtttttgaattgcaatgcaatgtttcattcaatacgtgttttctgaggtcccctggagccccgggccggcgctgggcaatgtcagagcctggatttgagtcagaaccagcccaggtgccccaggtctccttggctatggacgagaagacaagggattcagcgagcctgggtgcaggatgccataggctactatggagataaaacagaggcagtgtgaggggcaactcacccaggcagggagagcagagaggctttccagagccaaatggcattgcgatggtgacaagccagatttggagggggtggggagggcatcctgggcaagggacccagctgaagcaaaggccgacagtccagaaagtgagaagttcctctgaggaacgctcagtggattggtgcagccaggcaactagaagccattccttgatccactcttagagcccctggggaagaccacctccatctgttttacagatggataaactgaggcccagataaggccaagggtttctccaggtcacagtgaagtcgaccagacacaggaatccaaatctctaagcctagaatgggcaaggctccggggctcacgccggtaatcccagcactttgggaggccgaaacgggaggatcgcttgagcccaggagttcgagatcagcctggccaacatgtcagactccccccgttcccgggccacaacaaaatatatatatatatatatattagccaggcatggtggcgcgcccctgtagtccaagttactcgagaggctgaggcaggaggatcccttgagcccaggaagtggaggctgcggtgagccatgatcgccccacagcactctggtgtggacaacacagcgagaccctgtctcacaaaataaagtaagcccggactgagtgcggaaaggcgggcctggcgggtctggtctccccatgcgggccaccagaggccctgcagccttcagtcgcttgaaggggtaatggcgcttccactcacaaacatggcggacagagcgtgtgaacgagatgaacagcccctcaaaaatatggccgccgaggctggacggccgtgccccagcagcaccgcctccgcgccccacgtgatctctcgccgggcacagcgctgaccgcggaggtccaaccggaagaatgtccggattggacattcggaagagggcccgccttccctggggaatctctgcgcacgcgcagaacgcttcgaccaatgaaaacacaggaagccgtccgcgcaaccgcgttgcgtcacttctgccgcccctgtttcaagggataagaaaccctgcgacaaaacctcctccttttccaagcggctgccgaagatggcggaggtgcaggtatgggctccgcgcgggccggggcggcaaggggccgggtgggatccaggccggaatggggtcgcaccctctctgtcttgcatgttttgcggagcttaacatccataatgaagcaaaatggaagtcttttgggataaggggaatctgtaggaaatgccgcgg

SEQ ID NO: 22225 - DNA, 2300 bp, Homo sapien
taatgaagcaaaatggaagtcttttgggataaggggaatctgtaggaaatgccgcggctctctttaggcctagggttggctacaatgtggcatttccttctcgaggcgagggtgatagagcttccagcacaggacaggtattttgcaactagattttgcttaccttgaactcgggtagtgggtgggggccctggggtagagtcttggccgaattggacccttgtgtgtcctcagcgatgaggaacacgcggaagtgtggccgggcggtctcggggcaatgagaaactgagttttggccaaaatggaaggtatttttatcccgctcagtgcgcgggctactttgatttcacgtggaggtgttaatcggggtcccctgcagctccggttcttttaattctcaatgcctttctgcggggggtcgagagctgttggctgcggggcactctggaatgaactcgttttccgtcgttttggggattggcgattgtcctgaggcgtgttactggaagtcgagagctgtgatgaatggttccacaaggatgggacatcttttgggcctgacacctgggggccctttccctggctcctggtgtagctacttaagtataaaggagggattggccctggaaaggtttctttgtgagtagtctgttgttggggcgggtgacatttcagagccaggccgatctaggcaagttgtgttcaccaagcatgtgtctttgtgcctagcacagttcgcaatgttttgcgtagttcagttaaccatattcctgaggcagttactggtatccttgttttacagaggaggaaattaaattggaattggtgattttgggccaaggtcacgacttcaggaagtctgtctggattttagagtctttgtaccaacgcttacaaagcatgtgtaacaaccagtgtgtgcttcatgcttttgcattaaaacaatgaggatttctacttttagtgttttttctgagacggagtctcgctgtgacacccaggctggagtgcaatggtgcgatcttggctcattgcaacctctgcttcccaagttcaagtgattctcctgcctcagcttcccgagtacctgggactgcaggtgcctgccacgacgcttggctaatttttgtgtttttagtagagacagggtttcaccatattggccaggatggtctcgaactcctgacctcaactgatctgcccacctaggcctctcaaagtgctgggattacaggcgtgagcccctgtgcccggccaggatttctactccggaggaagctgaggttcggtgcctgagcagtttaccggggaaagcagagtgctctatagcagagctagcatgggcttttgactactctgcctaatctcatcccacctgaaattcggttttcttccaaattaaatttgtggtagaaacatcctatacattagaagagaattagattgtgttaacatcctacaattgattggccacagtggctcaagcctgtaatccgagcattttggaaggccgaggcacacggttcacttgaagcgaggagtacaagagcagcctaggcaacatggcaaaaccctgactcaacaaaaaaaaaagtacaaaaattagctgcgtgtggtggtgcgcgcctgtagtcccagctactcatgaggctgaggtgggaggatagcttgatcctgggaggtcacaggatcacaggacagcctgtgcaacagcgagaccctgtctcaaaaccaaatcctacagtttattagttacaaggtcttgtaactgggtagtcagtgggcagagccttgctggtcttcgttcaaatccaattgctttgcaaaatacaatctgagcataaaatactcatagaagaactcagatatgaggggagtttgggcctcttaaactgctcactcactgatcctgaggcagccttgctttctcagtccctgttcctcatctgtagaacggggctccgtgcatagttcccagctctgatggctgggtgcaaggcacgctgttggcacggtaggacaaaagaagggaatgcttgcttgtgaggacaatcaaaggctgtccttgtctctgagtccttttgcccttgtctcccacaggtcctggtgcttgatggtcgaggccatctcctgggccgcctggcggccatcgtggctaaacaggtactgctgggtaagtcgctgctcgtggcccctctgtcatgggcccccgctggaggtcagtgatgagcaacattcaccatctttcgtttgagtctcacggccatgagatcaaccccatgcaccgctctgagacctgc

SEQ ID NO: 22226 - DNA, 2300 bp, Homo sapien
tgggaggccgaggctggagaatcacttgagcccaggatttcgagaccagtctgggtaatatagcgagaccttgtccctactaaaaataaaataaattagctgggcatggtgacacatgcctgtagtcccagctacttgcaaggctgaggtgggaggactacctgaggctggggaggtcgaggctgcagtgagctatgattgagccactgtactctagcctgggcgacagagagataccctagggagtctctaaaaataaataaaataccggccgggcgtggtggctcacgcttgtaatcccagcactttgggaggccgaggcgggcggatcacgaggtcaggagatcgagaccacggtgaaaccccgtctctactaaaaatacaaaaaattagccgggcgtggtggcaggcgccttgtagtcccagctactcggagaggctgaggcaggagaatggcgtgaacccgggaggcggagcttgtagtgaaccgagatcgcaccactgccctccagcctgggtgacagagcgagactccgtccaaaaaaaaaaaaaaaaaaaaaccgtaatattcagctatagacttgtgctgttcaacacagtagcctttagccacatgtggctatttagatataacacaatcaaagttaaacatttatgtcctcagtcataaaagccacatttagagtgccagtgactaccgtgtccaccagcgcagatatagaaaatttccatcacataaagttctactagacgatcctgttatcttcagaaaaacggcagaaggatcgctccacgccaacccctggcaccaattaaatcatcgtctgcggatgaaatgaggagagagtagctttctttctctttttttttttttttgagacggtctcgctccgtcgcccaggctggaatgcagtggcgcaatgatagctcactgtagccacgacctccccagctcaagcgatcctcctccctcgacctcacaaagtgttgggattacaggcgaggcgcactgcactcggcgagagtaactttctttctttcttttttttttttttgagacggttttgctgttgttgcccagcctggagtgcaatggcgcgatctcggctcactgcaacctccgcctcccaggttcaagagattctcctgcctcagcctcctgagtagctgggattacaggcatgcgccaccatgcccgactaattttgtatttttagtagagacggcgtttctccatgttggtcaggctggtctcgaactcctgtcctcaggtgatccgcccacctcggcctcccaaagtgctgggattacaggcgtgagccaccgagcccgttttttgtttgtttgtttgttttgtttgatacggagtcttgctctgtcgcccaggctgtctgtcggccaggctggagtgccatggcgcgatctcagctcactgcaaccttcgcctcccaggttcaagcgattctcctgcctcagccttccaagtagctgggattacaggggcccgccaccacgcccggctaatttttgtatttttagtagagacggggtttcaccatgttggccaggctggtgttgaacccctgacctcaggtgatccgcctgccttagcctcccaaagtgttgggattacaggcgtgagccaccgcgctaggccgagagtaactttcactgcacctctgaaagttcgtgggcagctcctgcccctaacaaagatggcgacgccgccacacatgctcctagcactccccggccgcccacccttcaaaaagatggcagccgcctcatccggtttgaaggctgaacgaacagagccacgcggtatccaaatcccacgggagcctacgccacgccgaaacaggatggactccgtacgactctcgcgataatacgggcgggctgaaggctggtcacatcttccctgcctaaataatcgcgcccggcgttgtggggcctaagactctcgcgagacaccgtctagcacttcccgcccgtcagtccttcacagtgcccgaatcgcccgctggtttaagtgcagcctgtcaatcagagcagctctcgaggccccgcccaaggccgtgctgcgtttctccttacgtcacttcctctccagcccctgcgtaatcgataaggaaacccggacgctgctgcccctttctttttttcaggcggccgggaagatggcggacattcaggtgcggactcggggttggatgccagggtgcggggtccgccttggccttcaggggcgcgtccgggagggcagagcccggcggccaagttcgggggttaattccggg

SEQ ID NO: 22227 - DNA, 2300 bp, Homo sapien
aatcccagcactttggaaggctgaggcgggcagatcacgaggtcaagagatcgaggccatcctggccaacatggtgaaatccccgtctctactaaaaatacaaaaattaaccgggtgtggtggcaggtgcctgtaatcccagctacttgggaggctgaggcaggagaatcgcttgaacccgggaggcggaggttgcagtgagccaagatcgggccattgcgctccagcctgatggcagagcgagactgcgtctcaaaaaaaaaaaaaagaagaaaagtctgcccagagggagagggagtcctgctaggcaattgtgtctcccacctgctggctcccccattagactttggggtttctttctttctttctttcttttttttgagatggagtcttgctctgtcgcccaggctggagggcagtggcgggatctcagctcactgcaagctccgcctcccgggttcacgccattctcttgcctcagcctcctgagtaactgggactacaggcgcctgccaccatgcctcgctaatttttttatatttttagtagggatggggtttcaccatgacctcgtgatctgcccgccttggcctcccaaagtgctgggattacaggcttgagccaccgcgtccaacatttttgaaattttttttaaaaatagagacagggtctccctatgttggccaggttggtctcaaactcctggactcaagcgatcctcccaacttggcctcccaaagtgctgggatgacaggcatgcaccaccacacctggcccccgcatcagactctgaaccagctgaacgtccactaatcctggaagccaattcctcaaatgaatctctttctgtgtatgcatatacacattctgtggattctgtttctctagagaacctgaactacctgaccagcagttccactcccagatgtatgctcaatagagctgaaaacaggccaggcatgggtgtcttgcacctgtcatcccagtgctttgggaggccaaggtgggaggctgtcttgagcccagcagtttgagaccagcctgggaaacatagcaagacactatctctgcaaaaatacaaaaattagctgggcctggtggcaagtgtgtgtaattccagctccttgagaggctaaggcaggtggagtgcttgagcttgggaggttgaggctgcagtgagccatgatcgctccacggcattctagcttgagtgacagagccagaccctgtcaaaaaaaaggaaaggaaggaaggaaggaaggaaggaaggaaggaaggaaggaaggaaggaaggaggcaaggaaggaaggaggcaaggaaggaaggaaggaaggaggcaaggaaggaaggaaggaaagacttcatattatatgattcaatttctttgaaatgtgcagaataggcaaatctatcaagacagaaagcagatgaatggttgccaggggtctgggagcagcggctgtttaacggggacagaccttctgtttggggtgataaaaaagctctggaactcggatagaggtgacagttgcacagcactgtaaatgtgttaaatgacagtaagggtaaatattttgaatattttaccacaatgaaataagtgtatgggaagctttgtagcaggagtgtgggcgggggctggtgcctggaggggccttcgagtgaggcagcattgtatggggaccatgtggtcactgaagtcctagcagaaggatgtggtttttttttttttttgagacggagtctcgctctgttgccagtctggagtgcagtggtgcaatctcggctcactgcgacctccacctcccgggttcaagcaattctcctgtctcagcctcccgagtagctgggaccacaggcccaccaccacgctcagctaatttttgtattattagtagagacgggggtgtcaccatattggccaggctggtctcgaactcctgacctcgtgatccgcccgccttggcctcccaaagtgctgggattacaggcgtgagtcactgcgcccggcccgcagaaggatattaaagagcacctgcaggaattttttaaggggatgccgggggaagggcttgaaggaggaactaaggaggcttccagaagattttgattaacagcgagcgctagggaaggccacggggatacagaggggtaggaggaggatccagagacctccaagttgtggactccggaggcatcgagttcctttcccagttttgtcaagaattccctgagcggcagacaccctcaaagtaaaaaacgggaaccacagagaaggaaaaagaagaaccacaagcgtt

SEQ ID NO: 22228 - DNA, 2300 bp, Homo sapien
aaatgaatctctttctgtgtatgcatatacacattctgtggattctgtttctctagagaacctgaactacctgaccagcagttccactcccagatgtatgctcaatagagctgaaaacaggccaggcatgggtgtcttgcacctgtcatcccagtgctttgggaggccaaggtgggaggctgtcttgagcccagcagtttgagaccagcctgggaaacatagcaagacactatctctgcaaaaatacaaaaattagctgggcctggtggcaagtgtgtgtaattccagctccttgagaggctaaggcaggtggagtgcttgagcttgggaggttgaggctgcagtgagccatgatcgctccacggcattctagcttgagtgacagagccagaccctgtcaaaaaaaaggaaaggaaggaaggaaggaaggaaggaaggaaggaaggaaggaaggaaggaaggaggcaaggaaggaaggaggcaaggaaggaaggaaggaaggaggcaaggaaggaaggaaggaaagacttcatattatatgattcaatttctttgaaatgtgcagaataggcaaatctatcaagacagaaagcagatgaatggttgccaggggtctgggagcagcggctgtttaacggggacagaccttctgtttggggtgataaaaaagctctggaactcggatagaggtgacagttgcacagcactgtaaatgtgttaaatgacagtaagggtaaatattttgaatattttaccacaatgaaataagtgtatgggaagctttgtagcaggagtgtgggcgggggctggtgcctggaggggccttcgagtgaggcagcattgtatggggaccatgtggtcactgaagtcctagcagaaggatgtggtttttttttttttttgagacggagtctcgctctgttgccagtctggagtgcagtggtgcaatctcggctcactgcgacctccacctcccgggttcaagcaattctcctgtctcagcctcccgagtagctgggaccacaggcccaccaccacgctcagctaatttttgtattattagtagagacgggggtgtcaccatattggccaggctggtctcgaactcctgacctcgtgatccgcccgccttggcctcccaaagtgctgggattacaggcgtgagtcactgcgcccggcccgcagaaggatattaaagagcacctgcaggaattttttaaggggatgccgggggaagggcttgaaggaggaactaaggaggcttccagaagattttgattaacagcgagcgctagggaaggccacggggatacagaggggtaggaggaggatccagagacctccaagttgtggactccggaggcatcgagttcctttcccagttttgtcaagaattccctgagcggcagacaccctcaaagtaaaaaacgggaaccacagagaaggaaaaagaagaaccacaagcgttttgagaaacaaacaggctgggcctagggcctggggtgtgccctgcaactggggggtggggctggatgttcttggagtcagggagcagcagcctcccacaggatgtgagagaggaactggggtctccagtcacgggagccaggagccggccagggccgcaggcaggaagggagcgaggctgaagggaacgtgagccgaccagggcccgactgagggaggaggggctgggggcctggaaccctgggtctgagggaggagtggctgggggtctcgacactgggtctgagggaggaggggtgggggcctggattcctgggtctgagagaggagggactgggggtctggacgctgggtctgagggaggagggaggaggggccgggggggcctggactcctgggtccgagggaggaggggttgggggcccggactcctgggtccgagggtagagcggttgggggcccggactcctgggtccgagggtagagcggttgggggcccggactcctgggtccgagggaagagcggttgggggcctggactccggggtctgagggaggaggggctggggcctgaggggggcggaaggggcgtggcggagctcggggccgggactctcagcctatcaagtgtctgtaattaattaaccaactgagatccagttcaggggtgaaagttcttcaggtacgaggagggcattgttgtcagtctggaccgagcccgcagagcccctcctcggcgtcctggtcccggccgtgcccgcggtgtcccgggaggaaggggcgggccgggggtcgggaggagtcacgtgccccctcccgccccaggtcgtcct

SEQ ID NO: 22229 - DNA, 2300 bp, Homo sapien
ggcagcggctgtaggaggagctctgttgtggagaaggatgaggagtgggctgccaggtggggggcagcgggaggaagagcctctgagagagggacagagaccccaagagaggggcacacagacctgggaggacagagacccagagaggggggacagagatcagagagaggtggagacagaaacccagagatgggagaacagaggtgcagagagagggggacggagacagagacccagagacgggggaacagagacccagaggggacagagagaggtgcggacagagggagggggagacagacccagaggagggaggcaaagatgtagaaagaggggggacggaaaattgggagaaggggagacaaaggcccagaaggaaggggatagagactgaggaagagtgtgtgagacacacacacaaatgggggacgccagtcagacccagagcgcctcagagattctgatgacctctccctctctctctctcctcagccccttggatctcccttcgtggagacgacaccggggtcctcctgcccaccccaggggaggcccaggatgctgatttgaaggatgtaaatgtgattccagccaccgcctgaccatccgccattccgactgctaaaagcgaatgtagtcaggcccctttcatgctgtgagacctcctggaacactggcatctctgagcctccagaaggggttctgggcctagttgtcctccctctggagccccgtcctgtggtctgcctcagtttcccctcctaatacatatggctgttttccacctcgataatataacacgagtttgggcccgaatcagtgtgttctcatcatttttcaggcaggggaggtaagggaataagtcgggggactgaatggcggctgggcctcggatctctcctacaggtaacatgctgccacaggggaacctgccagttttatacatcaggtcatgtattttctttttctttttcttttttctttttttttagacggagtcttgctctgttgctcagtccggagtcctgtggcgcgatctcggctcactgtaagctccgcctccctgggttcacgccattctcctgcctcaggctcccgagtagctgggactacaggcgcctgccaccatgcctggctaattttttgtatttttagtacagacggggtttcaccatgttagccaggatggtctcgatctcctgacctcatgatccacccgcctctgcctcccaaaggggtgggattacaagtgtgagccaccgcgcccggcctaaggtcactttttttttttttttttaagacagagttttgctcttgttgctcagactggagtacaattgcgtgatctcagctcactgcaacctccgcctcccaggttcaagcaattctcctgcctcccaagtagctgggattacaggcatgcaccaccacacccggctaattttttgtatttagtagagacggggtttcaccatgttggtcaggctggtctggaactcctgacctcaggtgatccacctgcctcagcttcccaaagttctgggattacaggcattgagctactgtgctcaacctgaggtcatgtatttttaattcataacttttacaaatatttactggatgactgccatgccaggcattttgaggaattcttggctactgtctgaccacctgaatccttggagccgaagaggagcgaggagcagtgttcactcttggaggaaatgggatatttcctccggccccttgattctgctctcccttttcttttcttttcttttctttctttttttttttgagacggagtttcgctcttgttgcccaggctggaatgcaatggtgcgatctcggctcaccacaacctccgcctcccaggttcaagcaattctcctgcctcagcctcccaaagtagctgggattaaagacatgcgccaccacacccggctaattttgtatgtttagtagagatggggtttctccgtgttgatcaggctggtctcgaactcccgacctcaggcgatccgcccgcctcggcctcccaaagttctgggattacaggcgtgagccaccgcgcccggccttttttcttttctttcgttctttttgtttatttttgttttgttttgttttgtttggtatagaagtgttggaacgtacacctctttcttaaaccatcctgacaaagggaaagggaaaaatacatttcccgtgaggcgttgtgactagaacagctggaggtggacggcagagtgccgcgacgactgccaggagttgtagttctccccggccgcgtcactgcg

SEQ ID NO: 22230 - DNA, 2300 bp, Homo sapien
tctcctgtttcagcctcccgagtagctgggactacaggcatgtgccatcacacccagctaatttttgtatttttagtagagacagggtttcaccatgttggccaggatggtctcgatctcttgatctcgtgatccgcccccgcctcggcttcccaaagtgctgggattacaggcatcagccactgcacctggccatcaacttctttgtttttaaatttaatagagatggatcttgctgtgttgcctaggctcatctccatctcctgggctcaacagtcctcttgcttcagcctcccaaagttttgggattacaggcgtgagccctgagcctggctctaaatcattttaagggataaaaaagcctgcaggggccaggcacagtgactcacgcctgtaatcccagcactttgggaggctgaggcaggtggatcacctgaggtcaggagctcaagaccagcctggccaacacggtgaaaccccgtctctactaaaaatacaaaaaaattagccaggcgtggtggcaggcacctgtaatccctgctatttgggaagctgaggcaggagaatcgctttaacttgggaggcagaggtttcagtgagccaagatcatgctattgcattccagtctgggcaacaagagtgaaactccgtctcaaaaaacaaacaaacaaacaggcatgcaggctgtttactggccaagcagtcttggtgaaagctgcccagcctctgtgggttcagggcttctccttttacaaatgaactccagaaaagtagggggctcccttcctcacaccatacacaaaaattaactcaaaaagtaaaagttaaaatgatcaaacccctagaagaaaacataggaataaatgtgcattatcttggcttaggcaatgtctttttttttttttttttaattgtgacagagccttgctctgtctaggttggagtgcagtggcatgatgtcggctcactgcaacccctgcctcctgggctcaagtgattctcagtgcctcagcctcccgagtagttgggattactggcgtgtgccaccacgcccagctaatttttgtatttttagtagagacggggtttcaccatgttggccaggctgatcttgaactcctgaactcaagtgatccacctgactcagcctcccaaagtgctgagattacaggcgtgagccactacacctggtctgaaaccactttaaaagggttaattttatggtatgtgaattgtgtctcaataaagtcatttaaaagggtgggggttgcccttaagtatggggaatgatcaaaggtatcaaagtaaggtggcaaaatgttgacagctgctggaccgcaggacatgggtacatcatgggggttccttatactattctggttttgtatgtgtttgaaaacttacagaataaaaaaagctttgctttttgaattgagctccagggttctggggtcttctcttcctcctttacctgcagtgggagtggaggtagctcttcccctagacacagagccctactctgacctgccctctgatcggtcgatctgagacataatcacagctgctagatccagtcgctagtggactggcaggcagcgattgggtcaagccttagctaagtgtcaagccttagctaagtgcccagccttgagccaatcactgggctggtccacgccttggcctcagtcagagcttacagatatgagaggggaagggaaggtggagtggattcatcaacaatagtggcccccttggtgtctttttttttcccctccattaaatggcacagccaccaccctagctaatctgaagtagtggctagaatttgaactctggtctctcaccctcttacctccaaacaaagagttttgttgttaaaggtgctattttcacatataaatgagtctaggtgagtctggaaggaggacttcctggaggaggcctggcgaccacatgccctccctctcttccacctcaccccccttctccgcctccgctttcccatcaaggggggcagatcagctctgagggctgcagaggtcttccctgtgctgcctgcctccggtaaccacagtcctgccactgtcccttcctccctaggatgacgcggcatggcaagaactgcaccgcaggggccgtctacacctaccacgagaagaagaaggacacaggtgcagggctggggtgggaagaggcgggacatggctgtgtcttggagtcaccctctcccctcgtgccccaggttttgcttcctctgtccctgtctctctcccgcccccgatatacactgatggccatga

SEQ ID NO: 22231 - DNA, 2300 bp, Homo sapien
ggtttttacacacgcaccctgttagataaaatttatagaaggtcattggtttggattgagctcctgcactaggttcaacagaccaaaccaaaatggagacactcatgctaaagttccatgcttccaagccaaaactaagttgatatctgatcttctgagatatcaggagagagataatagccaaatccccaaacaacccagttttagcccacctgataaaggaagtcccctctactttaacctttaacttagaaatttaatcaagttaatcaatttaatcaactagctttttgttttccgtttctgattttctcagccctttgtctctgaaaacaacctctgctcagctcatcggaacactcacgctattttccataattagatgttgtttgattgtagattcacgaataaatgccaattaagatcttctcactaaatgtgttgcaattttgtcttttgacaatccttaagtgtcatgatgcctacgatttgttttaatctctttaagtttaaaaaaatacagcaagtatggcaaaaataatcattggtgatttgggtgacaggaattcctgtattcttctctcacttttatataagtttgaacattttcgtaagaaaacattaacatcaaactgcctcaaggaccgttcaagccccaagttcacagaattagcagcacaatcagaatgggaatccatgactgcctgaccccgaagctccacacaagaaaacgtgaatccctgcaccaaccccgaaagggaaggggctgtcaaaaaggtgaagagaaggtggcgatggatgactgcacaatctagtatcgcccgccgtcccaccacagtctgagaaactgaggccaggaaaggagttctccctcctcaactcccactccttagacccccagcaatcccagtccactccttcccttgggaccaccagcaaatagccatcatctacagcagaactgtaactctcaggagaactggccgatgctagctaccacttgactgagtttatagtgagagagagagacaaagagagagagaactgcccgatggacggttggccacctccagcagagtgtagttcagcttcaaacttggggcgcccggacagctgtattaataatgattgacagggaatcgggaatccaaaatcttgccccagtctccctcaagaccccaggcctctagcccgcaggaaagcgatcccagcaacactcttcctgcaccgcctcgaactcacctcactaacgactcccagtccctcggtcgcttcttcaactgtgccccgacaccggaaaggagcactattttccccctccgctccgcccacttccgcccagcagaaggcaccggaagtagagctgcccctagttgcggaagtgcctcgcctggcttgctcaagtcctctcttctctttctctctccggaaacgtgagtagctaatcgaaagttccggatattgaaactggtgggaatatggggaacgcttactatgtacgaggcatttcccagggagatcgttttttcctgcttggttcccaggttttgagtctctccaagcccaaatttaaggactaatcacttcccctagagatcgggaagcccactttcccaaatatatcatccacttttcttgctgcatcttaaaacaattgagaagagacaactacgctcccattttacagacagagccattgggaaattgaaaatcaaagccgttcaagtcgctctcaggaaacagggatttactgcggcactgcccagctgtcccagggactaaggcatatcgttcccgctagtttctagatacctagagacctagatattaatttttctagctcggacagacgaactcccaggggagagccagagcgggtaggggtcgggagggaggaggagggtcgaatctaatcccccaggtatcccatggtattcgacaccttggcttcctcatggagctctggcctttaagtcctttatcccaaggtccctttaaatactttgtcccttacctgagtcccgcccagggcaggtaatggcaagttccgcccacctgccagaaacggggatcaggcctggttaccgggagtggggcgcccctcctccttatcccctcccctcttccctgtcccctttcacagctggctgtagctggccaaggagttctcgattaaagaggaaggggcagtgctcacatttctgggcaggtaagtgaatgtccctggaggaagagcctggcttggggacccaggcatcctggctccccgcccctccgagacccagaagtttggggctcct

SEQ ID NO: 22232 - DNA, 2300 bp, Homo sapien
ctgacctcgtgatctgcccgcctcagcctcccaaagtgaattttcatatttttagtagagatggggtttcaccatgttggccaggctggtcttgaattcctgacctcaagtgatctgcctgcctcagcctcccaaagtgctggtgctgggattacaggcgtgagccactgtgcccggcctcaactcattttacttttcacaggagtcatacaaaaattagccaggcgtggttgtgggcgcctgtaatcccaactacttgggaggctgagccagaataatcacttgaaaggggagacagaggttgcagtgagccgagactgtgccactgcactccagcctgggtgacagagcgagattccatgtcaaaaacaaaacaaaacaaaacttttcacaggagtttttttttttttttttttttagacagagtctcgctctgtcacccaggctggagtgcagtggcgctatctcagctcactgtgacctctgcctcctgggttcaagcgattctcctgactcagcctcccgggtagttgagattacaggtgcgcaccaccacgcctggctaattttttgtatttttagtagagatggggtttcaccatgttggccaggctggtctcaaactcctgacctcaagtgatccacccgcctcggcctcccaaagtgctgggattacaggtgtgagccactgcgcccgaccaggagtcctattattatccccagtatagagaacaggaaactgaggcacagagaggtaatatagcttgccgaaggtcacacagtgtgcaagtgtgagagccaggatttcagtgaaggcagtgtccgccagagaagaaagcaaggagcaggcagcttatctttctttccccactgtgtctacagcacctgacacagatgcttataaacatgtccactggtgatctggagtcttcccttcctggtaatttccacttgtgcctctttctgtgctcattgtcacatccacccacagacaacaaagattacgagagaggcagaggcaggggattagttatattattgggtctagggacctaagtgggcaggggccctggactcctgggcctaggagccccaaacttctgggtctcggaggggcggggagccaggatgcctgggtccccaagccaggctcttcctccagggacattcacttacctgcccagaaatgtgagcactgccccttcctctttaatcgagaactccttggccagctacagccagctgtgaaaggggacagggaagaggggaggggataaggaggaggggcgccccactcccggtaaccaggcctgatccccgtttctggcaggtgggcggaacttgccattacctgccctgggcgggactcaggtaagggacaaagtatttaaagggaccttgggataaaggacttaaaggccagagctccatgaggaagccaaggtgtcgaataccatgggatacctgggggattagattcgaccctcctcctccctcccgacccctacccgctctggctctcccctgggagttcgtctgtccgagctagaaaaattaatatctaggtctctaggtatctagaaactagcgggaacgatatgccttagtccctgggacagctgggcagtgccgcagtaaatccctgtttcctgagagcgacttgaacggctttgattttcaatttcccaatggctctgtctgtaaaatgggagcgtagttgtctcttctcaattgttttaagatgcagcaagaaaagtggatgatatatttgggaaagtgggcttcccgatctctaggggaagtgattagtccttaaatttgggcttggagagactcaaaacctgggaaccaagcaggaaaaaacgatctccctgggaaatgcctcgtacatagtaagcgttccccatattcccaccagtttcaatatccggaactttcgattagctactcacgtttccggagagagaaagagaagagaggacttgagcaagccaggcgaggcacttccgcaactaggggcagctctacttccggtgccttctgctgggcggaagtgggcggagcggagggggaaaatagtgctcctttccggtgtcggggcacagttgaagaagcgaccgagggactgggagtcgttagtgaggtgagttcgaggcggtgcaggaagagtgttgctgggatcgctttcctgcgggctagaggcctggggtcttgagggagactggggcaagattttggattcccgattccctgtcaatcattattaatacagctgtccgggcgccccaagtttgaagctg

SEQ ID NO: 22233 - DNA, 2300 bp, Homo sapien
agctcggacagacgaactcccaggggagagccagagcgggtaggggtcgggagggaggaggagggtcgaatctaatcccccaggtatcccatggtattcgacaccttggcttcctcatggagctctggcctttaagtcctttatcccaaggtccctttaaatactttgtcccttacctgagtcccgcccagggcaggtaatggcaagttccgcccacctgccagaaacggggatcaggcctggttaccgggagtggggcgcccctcctccttatcccctcccctcttccctgtcccctttcacagctggctgtagctggccaaggagttctcgattaaagaggaaggggcagtgctcacatttctgggcaggtaagtgaatgtccctggaggaagagcctggcttggggacccaggcatcctggctccccgcccctccgagacccagaagtttggggctcctaggcccaggagtccagggcccctgcccacttaggtccctagacccaataatataactaatcccctgcctctgcctctctcgtaatctttgttgtctgtgggtggatgtgacaatgagcacagaaagaggcacaagtggaaattaccaggaagggaagactccagatcaccagtggacatgtttataagcatctgtgtcaggtgctgtagacacagtggggaaagaaagataagctgcctgctccttgctttcttctctggcggacactgccttcactgaaatcctggctctcacacttgcacactgtgtgaccttcggcaagctatattacctctctgtgcctcagtttcctgttctctatactggggataataataggactcctggtcgggcgcagtggctcacacctgtaatcccagcactttgggaggccgaggcgggtggatcacttgaggtcaggagtttgagaccagcctggccaacatggtgaaaccccatctctactaaaaatacaaaaaattagccaggcgtggtggtgcgcacctgtaatctcaactacccgggaggctgagtcaggagaatcgcttgaacccaggaggcagaggtcacagtgagctgagatagcgccactgcactccagcctgggtgacagagcgagactctgtctaaaaaaaaaaaaaaaaaaaaactcctgtgaaaagttttgttttgttttgtttttgacatggaatctcgctctgtcacccaggctggagtgcagtggcacagtctcggctcactgcaacctctgtctcccctttcaagtgattattctggctcagcctcccaagtagttgggattacaggcgcccacaaccacgcctggctaatttttgtatgactcctgtgaaaagtaaaatgagttgaggccgggcacagtggctcacgcctgtaatcccagcaccagcactttgggaggctgaggcaggcagatcacttgaggtcaggaattcaagaccagcctggccaacatggtgaaaccccatctctactaaaaatatgaaaattcactttgggaggctgaggcgggcagatcacgaggtcaggagatcgagaccatcctgactaacacagtgaaaccccatctctactaaaaatacaaaaaaattagccgggcatggtggccggcacctgtagtcccagctactcgggaggctgaggcaggagaatggcatgaacctggggggtggagtgtgcagtgagcggagatcacaccaatgcactctagcctgggtgacagagcgagactctgtctcaaaaaaaaaagaaaattagcgggtgtggtggcgcatgcctgtaatcccagctacttggtaggctgaggcacgagaatcgcttgaacccaggacacagaggttgcagtgagctgagactgtgccactgcactccagcctggctgacagagcgagactccatgtcaaaaaaaaaaaaaagtaaaatgagtttatataggtaaacagtatctggcacagaatacaggctgtgtaagtggctgctattattgccattcgtggaccacagaggccagtcagagaggcactgcctcattacccagggactaaggcccttgtcagctgtaacaaacctggttctaggtgtctggaaaatatgaggggccacccctctctgctgctgctatatatggcattaaccacctgcctggatacttcacccagtgaggagacagaccaaggtgagtgtttgggggaagtggcatccagacacttggcgttggcctccccctgactcaggaatgtttctagtccttcctcttccaggagtccaggacccagcccctt

SEQ ID NO: 22234 - DNA, 2300 bp, Homo sapien
atgccaccaaccaccacccggcaggtacggcccccatcccgccccgctttgggctggccctccccctccccccgaggcagctgattggctgttgaaagttccgcccctcctaattggccgtggcccgtgccgtggcccgccccttgctgtgtctcctctgattggttgcctttgaggctgctggtcgctgcttcatttctcgccggattcgtccgcccctgcctcgcccctcccctttcgctccaattggccctgttaccatcagcccccaaatcccaccttctcttccaggcttttccgcctctccccaacccaccccaattctttccctctgggtttgccctattcttttggctctttggaactctgaattctttcttcctgattccctttcttcctgattggctctaattctctggcccgccctgttttatcttattttgccccattgccttattctacccaccttgcctttgcctccaaggtttctgattggttccctcttcctaggggtactggtaatgacatgatgctgtccagtttgacccttgaccctcctgattggctccttccctttttccctccccatctttttttctgaaccctcccacttagctcaatcctttctgacacgttctctggtctttcttagacttcattgtcccatcctttcctcttccttgctggaaatatccaaatttggtctccctcccagccttactgaggactctgttcttttgctcctggctctttcgcttctagatttttctacacttttgtctaccatttcctacctgggccccctgtccttatgactggattgccccttgtcttgctttactgtctcacctttcccccttccctcccctcattcatgtctcattagcttggttctatccatcttgtttttgaatttgcccttttctctcccatcccctccttttcctgatccaacttgcttttggcctcttccctttctctcttgactgtatcctacccacccccacctggctgactataacccctgtccccggccaggcctctctggactcttcgacactggcctccaccacgcgggctcagcagggcccgacgcctccgtcatgaaccttatctcggccctggaatcccggggcccccagcctggcccctccgcctcctctctcctctcccagttccgcagtccttcctggcaaacaggtaagcccagcgccggccctgcagggccagggtgggactggctcgctgttctctctgacgcgcggtcttcctcatctccagccatgcacacgccaggccccacggagctcttcatctcgggtgccctgccgggttccagcacctttccgtcctcatctgccctgtcggcttaccaacacccggcttccttcggcagccgccccttcccagtgccctcgtccctcagcctccaggaccccccattcagccctccagctaacgggctcctgtcccctcatgacgtgctgcacctgaagccctcgcaggcacccacggtgccctcttcactgggcttcgagcgcctggcagggggcggtgtcttggggccagctggtctcggtccagcccagacccccccttaccgccctggccccccagacccaccaccacctcctcgccacctcccaactcagttcaacctgctggcttcctcttccgctgccgccgccgctgccgagcagtcctccccacagctctataacttctcgggtgctgccccgggcccaccgccgcctgagcgggccctgccacgccaggacacggtcatcaagcactaccagcggccagccagtgcccagcccccaccacccccgccaccagcccatgcgctccagcactatctgagctgtggaggcagctacccctccatgggccaccgggccaacctggcctgcagccccctgggtggtggggagccctccccgggtgctggggagcctagcaaggctggtcccagcggagccacggctggggcatctggccgggccacgggccctgaggcagcagggggcggtggggctgggggtggtggtggaggttaccgccccatcattcagtcgcctgggtacaagacgggcaaaggtggttatggagcagctgccgggggtgccaccaggccccccccaccccgttcgaccgccacccccaaatgtcagagcctgggtgggccagcagccgcctatgccactgggaaggcctctggggctggaggggcagggggccaggcttattcccccggtcagcctcaagggcttctgggaccccaggcctacgggcaaggg

SEQ ID NO: 22235 - DNA, 2300 bp, Homo sapien
cgcgacccacccttccagacccccaagaagctgtacgcccaggagtacgagttcgaggcggacgaggacaaggccgatgttcccgccgacatccgcctcaacccccggcgcttgcctgacctggtctccagctgccgctcccgtccggccctctcgccactgggggacatcgacttctgcccacccaacccaggacccgatggcccccggcgccgtggccgcaagcccacgaaggcgaaacgtgatgggccaccccggccacgggggaggccccggatccgccccctggaggtcccgaccactgcggggcccgcctcggcctccacgcccaccgatggcgccaagaaaccccggggccggggccgaggccggggtcgaaaggctgaggaggcagggggcacccggttggagcccctgaagccacttaaggtgaggggaaatggggtcttgtaggggataggggaggaggagctgtgtccgatgtttgagtcttttttttttttttttgagacagagtctcgctctgtcgtccaggctggagtgcagtggcacgatctcggttcactgcaagctccgcctcccgggttcacgccattctcctgcctcagcctcccgagtagctgggactacagttgcccgccaccacgcccggctagtttttttgtatttttagtagagacggggtttcaccgtattagtcaggatggtctcgatctcctggcctcgtgatccacccgcctcggcctcccaaagtgctgggattacagacctgagccaccgcgcccggcctcccgatgttttgagtcttaaaggacaggtttatggccgcaccttggcatttttggggcagggggataataaggtttacatttctaaaatctgtgaggaagttagcgtgaggaatttcagggtctcactgacagaaagacctaagaattgaaattctgaatctaggctgggcagtgtggttcatgcctgtaatcccagcgctttgggagactgaggcgggaggatctcttgaacccagatgttcgagaccagcctggtcagcgtagtgagaccctggtctctattaaaaacacaaaaatttagccaggtgtggctgcgtgtacctacagtcccagctactcaagaggttgaggtgggaggatctcttgagcccaggagttcaaggctgcagggagctatgattgcatcactgtggcctgggccacagagtgagaccctgtctcaagagataaaggaaattctgggtttagggagagaggcaggaggttggagcttacgctggtttgaaactcctgacctcaagtgatttgcctgcctcagtctcccaaggtgctgggattacaggcacgagccacctcacccggtctgcttgcttttagtttctatatcccaaaggatgggcattcagggatcctacattcctgggtctcatgggaagcgggtctagggacctgaactgggctgtaagtgaagaggctcagtgagtccaagttcctggtcttctgagggaggaactccagtcttgtcctcctagaatctaagacaaggggtctgcaggtttgaattctataaattcacaggctgagcacctgtaaatttggatttttgggggctgagggaggatgggactgggggcccaggctactgggccctcacggcccgccactcccatgtctagatcaagctgtctgtgcccaaggctggcgagggtctgggaacctcatcgggtgatgccatatcaggcactgaccacaacagcctggactcgagcctgactcgggagaagatcgaggccaagattaaggaggtggaggagaagcagccggagatgaagtcgggtttcatggcctccttcttggacttcctcaagtcaggcaagcgccacccaccactctaccaggcgggcctgacgcctccgctcagccctcccaagagtgtgccaccctctgtgccagcccgaggcctgcagccccagccccctgccacccctgctgtgccacatcccccaccttccggagcctttgggcttgggggcgccctggaggctgcagagagtgagggtctggggcttggctgcccttcaccctgcaagcggcttgatgaggagctgaagcggaacctcgagacgctgccctccttctcctcggatgaggaagactctgtcgccaagaaccgagacctgcaggagagcatctcctccgccatctctgccctcgatgacccaccccttgctgggccaaaagacacttccaccccagatgggccgcccttggcccccgcggctgcagttc

SEQ ID NO: 22236 - DNA, 2300 bp, Homo sapien
ccccgccgctcgggctgcggctccggccccggcgcggggcggggcgggctggggcggggttcgtgagcaaaggaggagagaggcggagctaaagcgccgccgagcttgccgggatttcaagtaccgagcacggcgacgtgaaggccggcgggaaggcaaccgcactcggtttcccagaagccaatgggacacatggggcggggtccgcgcgatgcacgccgggaggcgtagtccgcgcaccgcctctgtcgcgcggggacagctaatggggtgagaggtgaagtgggcggggccgcggtagcccgcgatgacgccccacagtgccctgcgcgcgcgcggaaagggtggcggaacaggaggtgacgtaagaggcgccaggcagaacagacgcaagggaattgtagtccggcggagtgagcacgacttgctggatgttgtgctgcccacattctggggctctcagaatccagatcctctaggcccccctaaatttagaaccagacgggatgcagtggcgcacaccgtagtcccactcgggagactgaggcggaaggatggcttgagcctagaagttagaagccagcctaggcaatatagggagaccccgcctctaaaaaaataaaaataggccaggcgcggtggctcacgtctgtaatcccagcactttgggaggccgaagcaggcggatcatctgatatcaggagttcaagaccagcctgaccaacatggtgaaacccagtctctactaaaaatacaaaaattagcctggcgtggtggctaacgcctgtaatcccagctactcgggaggctgaggtaggagaatcgcttgaacccgggaagcggaggttgcagtgggccaagatcgcgccattgcactccagcatgggctacaagacggaaactccgtctcaaaaataaacaaataaaaataaacttagaacctagaagcccgaccccatagccgcctcgttcagtacagagaagtctgaattccgaatcctctcactcagagcagtgtccagactcctatttccctcctccctccgactcaggagtctgattcttccttcctcggatccaagagtcggtctcccagactagtcctggtctcaagctctcacatacgaattcgggtccccccaagccagtgccctcgctcggatccagaatcctgggtccccagcctctccaattcctggacctaagagtccaggcccccggctccctcctttaccgaacctagtacgaaggaacctgtctaccttcctccctgacaccctcctccccaggacccaggagtccacatctccagccccattttctcctaaggacccaggagtctgggccctctgcttccttctccttcaagacccagaaatcctggccccaggctcttcatgacccaggcatccctacttgggcgagctggctcatggattaggaatgcagtgatctcacggcccctccctgccccgttaccctgctgtccccctctagggccccactctcctcccagtctgtcttccgcttggctgggacagcgggaaccggaagcctgggtcccttagcgggcggagactctagcttctaacccagacgccggggtcgaaagcttggctaggatcccaggagggaggtggagctactcctcaaaacctgctgcttcctcggagcgccctatatacggccgcgcgcgcgagtcgacgagctccgcctaccatactaaggcctcggagacgatgccccaagcagcagtgtcacaggggtccttatttgcatagcccctcccctgaggaactttccgccccgtctgctgaaagaataaattcttattagcatagccacgcccacagaccgccctcccgctgagagcgcgtggcgccgctcagggcaaagcacaggtctctcattagcatagccccgcctcattcggaattccccttcgcagcgaacgccgttccctttcccttattaacatagctcctccctttctttggcccgtccccctccttaagtgtccggagacgcgagccctccttgccagagctcatgattatgcagtagcctcattagcgtagcccgcccccccgggtcccgcccggctcccccgcaggcggtagcgaaggcagcagcagcggtggcgacatgagcagcggggcggcgtccgggacagggcgggggcggccccggggcgggggacctgggcccggggaccccccgcccagcgagacacacaagctggtggtcgtgggcggcggcggcgtgggcaagagcgcgctgaccatccagttcatccaggt

SEQ ID NO: 22237 - DNA, 2300 bp, Homo sapien
ggggggtccccgggcccaggtcccccgccccggggccgcccccgccctgtcccggacgccgccccgctgctcatgtcgccaccgctgctgctgccttcgctaccgcctgcgggggagccgggcgggacccgggggggcgggctacgctaatgaggctactgcataatcatgagctctggcaaggagggctcgcgtctccggacacttaaggagggggacgggccaaagaaagggaggagctatgttaataagggaaagggaacggcgttcgctgcgaaggggaattccgaatgaggcggggctatgctaatgagagacctgtgctttgccctgagcggcgccacgcgctctcagcgggagggcggtctgtgggcgtggctatgctaataagaatttattctttcagcagacggggcggaaagttcctcaggggaggggctatgcaaataaggacccctgtgacactgctgcttggggcatcgtctccgaggccttagtatggtaggcggagctcgtcgactcgcgcgcgcggccgtatatagggcgctccgaggaagcagcaggttttgaggagtagctccacctccctcctgggatcctagccaagctttcgaccccggcgtctgggttagaagctagagtctccgcccgctaagggacccaggcttccggttcccgctgtcccagccaagcggaagacagactgggaggagagtggggccctagagggggacagcagggtaacggggcagggaggggccgtgagatcactgcattcctaatccatgagccagctcgcccaagtagggatgcctgggtcatgaagagcctggggccaggatttctgggtcttgaaggagaaggaagcagagggcccagactcctgggtccttaggagaaaatggggctggagatgtggactcctgggtcctggggaggagggtgtcagggaggaaggtagacaggttccttcgtactaggttcggtaaaggagggagccgggggcctggactcttaggtccaggaattggagaggctggggacccaggattctggatccgagcgagggcactggcttggggggacccgaattcgtatgtgagagcttgagaccaggactagtctgggagaccgactcttggatccgaggaaggaagaatcagactcctgagtcggagggaggagggaaataggagtctggacactgctctgagtgagaggattcggaattcagacttctctgtactgaacgaggcggctatggggtcgggcttctaggttctaagtttatttttatttgtttatttttgagacggagtttccgtcttgtagcccatgctggagtgcaatggcgcgatcttggcccactgcaacctccgcttcccgggttcaagcgattctcctacctcagcctcccgagtagctgggattacaggcgttagccaccacgccaggctaatttttgtatttttagtagagactgggtttcaccatgttggtcaggctggtcttgaactcctgatatcagatgatccgcctgcttcggcctcccaaagtgctgggattacagacgtgagccaccgcgcctggcctatttttatttttttagaggcggggtctccctatattgcctaggctggcttctaacttctaggctcaagccatccttccgcctcagtctcccgagtgggactacggtgtgcgccactgcatcccgtctggttctaaatttaggggggcctagaggatctggattctgagagccccagaatgtgggcagcacaacatccagcaagtcgtgctcactccgccggactacaattcccttgcgtctgttctgcctggcgcctcttacgtcacctcctgttccgccaccctttccgcgcgcgcgcagggcactgtggggcgtcatcgcgggctaccgcggccccgcccacttcacctctcaccccattagctgtccccgcgcgacagaggcggtgcgcggactacgcctcccggcgtgcatcgcgcggaccccgccccatgtgtcccattggcttctgggaaaccgagtgcggttgccttcccgccggccttcacgtcgccgtgctcggtacttgaaatcccggcaagctcggcggcgctttagctccgcctctctcctcctttgctcacgaaccccgccccagcccgccccgccccgcgccggggccggagccgcagcccgagcggcggggtaagatggcggcggcagtccgggccgcggggctcgggcctattggggtgggcggggcggagttgggtcgctagttgtcccg

SEQ ID NO: 22238 - DNA, 2300 bp, Homo sapien
gtctaataatgggtgacaggaggctgggggcagttagaaggacctggaaccatctagatggctttaatgtgactgcaggaatgcagttttgatgcctggagcaaattcgaatgcctttggggtcagagcagcttgtggcgaataataatacggaaagagaatgaggaaattttgcccagcttagatatacttgcccttcagacagtaattcaaatgaaaaatgttttaagattctgcattaccctgggggttattgagagagttagaattaatctacattagtctggaagagtctggagggtcatctagacccactattacagtgcttttcaaggggaaacctgggccatgttgaccgtgatctgcattaagatacattttttcattgagacctggtacagacagtcataatgtatttaacattatataacataatgtattaacattaactcaccttccacgaattgacatttccacttactacttgtgctgtgctgtgaagaactattttgttctatttactttttaaaacaagctatttgtgaagcactaaactggtatatgaccctgttgttggggaaaccactgatccagataggacctagcagtatctgcagagcattcttctgttcagaagatctcagtagctgagggtgtgtctgcgaagcctggtgctttctaaatgagcaagcaagcatctttgtatactgcagagggtttggggatccctcagcctgtagtcagcagatgttgattaagcttctgatatgtgacagtcactgttgtaggtagcatgtgcttccccgggaggtgctggagagcagttccagggccaggaactggggctgagcttattgagtattggtgaaagaggctgggatgtaatagactatcagggttgggtgtgtcttaggaagttaggaattaggtggagctgggaggctgaatatggaggcttggcatggtttgaaaatctatatgggatctagaacaggaccagggccttgtctttgcaggcatgctgtgggggaagcgaggagacagatgtaggggaaacctgggcgttaagggctaatagtgtcattcctcttcatccgtattgagcacttgaggtgctctaaatgtgtggcagaagtcaggctttgagtattcacagccattctctgagatagatgctcctatttcgtgcatttacaattaagcatactgagttgtgggttagggattttgaagctttctaggaattttgagattggatattgtcttatgagtagcagatttgacagtcatggggaagcttacagctgaaatattcatatttttctgaagccctaatcaagacatccacctgtttgatggatgatctttcaactgcctgactggggaatcatatcaaagaatttccatgacattgcaaaggctttgtgcagatggcgataggtaaatgcctcctgtgaagttttccttcggcatgtctttctgaagtttagcgttttcattttaaaaatggcatactggttttgcagatcactcaatgaagtttccaacttaggtgtataaatacaatttgggggtggtcctcaccatcgaggacagttgatgctctaggaagccgtgtggtgtttaaggcatggtgttgaatattgcccagcacattggccttgggaaaggtgggtttataggactgtggaacacaccctttgaaatcacagtgcagcacacacaaaaaaccttggtgttggctttgcctcttaggaggccagggaatgaggtcttgaagtttggataggttgttggggaagctgcgggaattgaggagtgagatgttaaaagcggaggccagggaggcctccctttgacataagaggcacctgagacccagaaaaaaggaagagaattgctcctagtccctggggtgtctgtgctgggtccagcgcccacccaagcacagggtggagtgggaggaggtggaggagaggaggggtgccagaggggatgctgagggagatagtgtggggcccttgaggtcttcatgtctatcctctacttccatcctttctcccgggacctccactccaaactctcccccctggacccccaggtgaccatggaggaagaagatgagtctcgagggaagacagaggagtcgggggaggatcggggcgatggtccgccagacagagaccccacgctttctccttctgcctttatcctggtgaggctgctgggctcctggcactgagggatggaggagctgggcatccacactccaggggcctgactccagggcctgaggcagg

SEQ ID NO: 22239 - DNA, 2300 bp, Homo sapien
tgcagcctgttttcctgtttcttctccccccaggatggagtgtggtgttgtggtcatagctcactgcagcctccacctcctcctgggatgggtcgccggcactggtcaagatagttcctagtttcaaggccagggtacattgcccagggtcaggccagtgctgtctcaggatatgggagtgcaggttcggggccgcactgactgagtttacaccctgactgctgccttctctctgtgtgcccttggggaggatactgcagccctctgcctcagtttcctcctgtgacctttgggttaagaaccatggtgtgcagttgttgggagcatcctacggctggctcctgtgaagcacttggggcttcctgggcaggacctggtggcccagggagtgtccacggctgggccagcaagcaggcaccaggagggaggcaaaggccctgaccgcctctctctccctgttcctttgcagtttctccacagtcgaactcctctaggcccacctgtgcccgtcacctcaccttgggcacgggagacgggggccctgccccaccccctgccccctcctctgcatcctcctccccttccccttctccctcatcttcctccccttcccctcccccacccccaccgccccctgcacccccagccccacctgccccccgattcgatatctatgaccccttccaccccaccgacgaggcctactctccaccgcctgctccggagcaaaagtacgacccttttgagcccaccggctccaaccccagctcatcagcggggaccccctcacctgaggaggaagaggaggaggaagaggaagaagaagaggaagaggaagacgaggaggaggaggaaggcctgtcccagagcatcagccgcatctcggagaccctggcgggcatctacgatgacaacagcctgagccaggacttcccaggtgacgagagcccccgcccggacgcgcagcccacacagccgactcccgcccctggaacgccgccccaggtggactccacccgggctgatggagccatgcgccggcgggtcttcgtggtggggaccgaggcagaggcttgtcgggaaggcaaggtctcggtggaggtggtgaccgctggtggagccgccctcccgccgcccctgctgccgcccggcgactcggagatcgaggaaggggagatcgtccagccggaggaggagcccaggctggcgctgtccctcttccgccccggcggccgggccgcccggcctacaccggccgcctcggccacccccacggcccagccccttcctcagcctcccgctccgcgggcccccgagggggacgacttcttgtccctgcatgcggagtcggacggcgagggcgccctgcaggtggacctaggggagccggctcccgcgccgcccgccgccgactcgcgctggggcggcctggacctgcgccgcaagatcctgacccaacggcgggagcgctaccgccagcgctcgccctccccggcgcccgcgcccgccccggccgccgctgctggtccgcccacgcgcaagaagtccaggcgggaacgcaagcgcagcggcgaggccaaggaggccgcctcgtcctcgtcgggcacccagccagcgccgcccgccccggcctcgccctgggactccaagaagcaccgctcgcgggaccgcaagcccggctcccacgcctcgtcgtccgcccgccgccgctcccgctcccgctcccgctcccgctccacccgccgccgctcgcgcagcaccgaccgccgccgcgggggcagccgcaggtcgcggtcccgggagaagcggcgacggcggcggcgctccgcctccccgcccccggccacttcctcatcgtcgtcctcgaggcgcgagcggcaccgcgggaaacaccgggacggtggcggcagcaagaagaagaagaagcggtcgcggtcccggggtgagaagcggtctggggatggcagcgagaaggccccggcgcccgccccgccgccctctggctccacctcgtgtggtgaccgcgacagccgccgccggggggccgtgccaccctccatccaggacctcacggaccacgacctcttcgccatcaagcggaccatcacggtgggccggcttgacaagtccgacccccgaggaccctctcctgctccggcctcctcacctaagcgggaggtcctgtacgactccgagggactgagcggcgaggagcggggcggcaagagcagccagaaggatcggcgccgctcgggggccgcctcctcctcctcctcttcccgggagaaggggtctcgtcg

SEQ ID NO: 22240 - DNA, 2300 bp, Homo sapien
cggggcagggacagacagggtcagcactggctcaggtgaggggcaggctggaggcaggggagtggggggatcgtctagagggagaggacaaggcccatggagacaggtcggagactgaggggcatgaaagttgggcacattctcacctgggtatcagaagtactgcctccaccattggtgtccggagaggtgtctggctgggaaaagtccccaactcctgttgagaaaagtggtgaggggagtaggagtgccaggaacccttggggccccagcctcccacacgaaccccaagctggcagacctgagttcacaaactcgtagattttatgtgggtcgtgagggtccttgctccggtcctctgctaaacgcaacccttctttgcggttgagggcagagcggaaattcctcttccaggttggcaggtctggcttatccctcccgggaacatatgcaccagtggcctcggcccaggcctggggcaacagtggtgtcaggatggtgggggaggacgacttagatcctgctcctggggccctaaccctgtctcccgagtcctaacaccaccctctttccctggcaagttctaactctgcaaggtccatccccaaatccccccgtcccacctacctccatcccccacctctagttttcaaaaggctttttttctttttgagatggagtttcactcctgtcacccaggctggaatgcaatggtgcaatctcagctcactgcaacttccgcctccccggttcaagcgattctcctgtctcagcctcctgagtagctgggattacaggtgggcaccactacacctggctaatttttgtatttttagtagagatggggtttcaccatgttggccaggctggtcttgaactcctgacctcaggtgatccgtcctcctcggcctcccaaagtgctgggattacaggcatgagctactgtgctcggcctcttcaaaagcctttgaaacctctttggtttttgttttgtttcgcttttgtttttaaagagatggagcctatgttgcccaagctggcctcaaactcctgggctcaagcgatcctcccgccttggccttgcaaagtgctaggattacaggtgtgaaccaccgcccccggcccaaaaaccttttctttctaagccaggcttccaagtccaacttggtgtctaatcccgtgcaccacctgccccgcgacaccctctgtgataaccccgcccctcacactgtttaccacctctggcatatactaattcggtagttaggaacctcagatttggggctccaggcctcacctctgatgtttcaagaaccatcccccagtatctatcctacaaccaagagccccggcctctagaaagccccaaacccccaggatgcatttcctttgcgtactaaccggctttcccggttttattcccgtaaccctgcagctccaaccctgcttgcgccccaccatcagtcagcggatccggctagccccgcccctcccgttctagccccacccaccagcgttggcacgagcccgcccctcgcgcgccacctccgccttctcagccgggcccactaggagtcctttccgcccagcgcgcagctccgggtttccagcgtcccaggtcgtcgcacgcacctggaagattccgaaatcctcctgctgtgcatcctgccgtaggccgtgcttccaagggatgcggaagcgcgtgcggctcttgttcacccaggccacgccctccagttgccccaggtccagctgcgacaccagccagggcaggatccgtggctttggggttcccatggtccggcctgcgcgtatagggcatttcctgggcgcgaccggcctcccccggacccacctggcctggagtttccgcacccagacctccttctcacgggccacggcacaggtccttcacccatattttcgggggtacaaacaggaaacctcctcttcccatcctcccatcctcccgagaggctctctaatcagctagggttccttcccatatccatggcacatccttccccagcgtcttcagtgcagaccctccactccctcaattccgccagtatagacctcctccctcccccacatcatcgaaagtaagtatccccactttcagggtagcatcctctttccctagttatttcagtgcagaatcgattcacgtgtaagcctctacctcctgcacttaccccaatgtagacccccttccacagtccccctacagaagatctcccaaaacatttccaacacagaacttccattcaattcccctccgactgcccgcctccctcctc

SEQ ID NO: 22241 - DNA, 2300 bp, Homo sapien
gctggtcttgaactcctgacctcaggtgatccgtcctcctcggcctcccaaagtgctgggattacaggcatgagctactgtgctcggcctcttcaaaagcctttgaaacctctttggtttttgttttgtttcgcttttgtttttaaagagatggagcctatgttgcccaagctggcctcaaactcctgggctcaagcgatcctcccgccttggccttgcaaagtgctaggattacaggtgtgaaccaccgcccccggcccaaaaaccttttctttctaagccaggcttccaagtccaacttggtgtctaatcccgtgcaccacctgccccgcgacaccctctgtgataaccccgcccctcacactgtttaccacctctggcatatactaattcggtagttaggaacctcagatttggggctccaggcctcacctctgatgtttcaagaaccatcccccagtatctatcctacaaccaagagccccggcctctagaaagccccaaacccccaggatgcatttcctttgcgtactaaccggctttcccggttttattcccgtaaccctgcagctccaaccctgcttgcgccccaccatcagtcagcggatccggctagccccgcccctcccgttctagccccacccaccagcgttggcacgagcccgcccctcgcgcgccacctccgccttctcagccgggcccactaggagtcctttccgcccagcgcgcagctccgggtttccagcgtcccaggtcgtcgcacgcacctggaagattccgaaatcctcctgctgtgcatcctgccgtaggccgtgcttccaagggatgcggaagcgcgtgcggctcttgttcacccaggccacgccctccagttgccccaggtccagctgcgacaccagccagggcaggatccgtggctttggggttcccatggtccggcctgcgcgtatagggcatttcctgggcgcgaccggcctcccccggacccacctggcctggagtttccgcacccagacctccttctcacgggccacggcacaggtccttcacccatattttcgggggtacaaacaggaaacctcctcttcccatcctcccatcctcccgagaggctctctaatcagctagggttccttcccatatccatggcacatccttccccagcgtcttcagtgcagaccctccactccctcaattccgccagtatagacctcctccctcccccacatcatcgaaagtaagtatccccactttcagggtagcatcctctttccctagttatttcagtgcagaatcgattcacgtgtaagcctctacctcctgcacttaccccaatgtagacccccttccacagtccccctacagaagatctcccaaaacatttccaacacagaacttccattcaattcccctccgactgcccgcctccctcctccaggacagagcacgccccaggtttcgagactgaactacccccatctacggagtccacccctccctctctagaaccccctcagtgtagacgcctcctcttttcctctttcctccctactttttctagtttttctgcagccgacctccagcgtcggccactgtagctccttccttgctccactttccccagagtacacagcctgcctttccactctccgtgcagacccatcctctttcccgctcctcgctctcggacgccaccaacgctctcccgggctcttccgcgttacctacgatggaaggtcggggcgtgcgggcagctggaacccacccctgtcttggagctccgggtagctctcaaactcgaggctgcgcaccccctttcccgtcagctgagctctagagcgctggggctttctttttgatcgacttcttgaaataaaaccaactttatcattctttgggtaacagacccaaaagccgatgggacggcccgctgggctgttcccgcccctatgcccttttttgggtttccggccagaggcatgctgggagcgtcacatgcaaattgagcgtgcacccagcgttccgccctttctacgctgggccggttatcgacccggcccagtgcgcaggcgcgggaaagttgaactaataaagtttgtacgagttcagtggaggagaccgcaagttgagtggaggaggcggcggtggggccccggaccaggtcagcggggtgttgacgaggggtggggtgaggagggaagaggagggggccgggatccagtggtgggcaccccagtcccgcttctctgatatccaagggtccagggtcctctagattccagcaggggtcggagatttgg

SEQ ID NO: 22242 - DNA, 2300 bp, Homo sapien
aggctggtgctagagactccacacagccaccccctagctgagtgatcttaaactagcaccttatcccgtgttctgccggcttcatagatgatcatggaaatctcttaccaggctctaaaccatagcaggggcggatgggcagagagcaaggccgaggggactcagagggggctgctcctcgccccagggagcagggaagacatcttcgaaggcggctcaggaagtctgttggctcttcttgggcagggcttctggagaggaggacttcagagactgaccccaccagagatcccctgcaagcagtctctttccccaactccctccctcccccgctgaggacctctctccaaaaccccaaagacagagaatagagccagatataaagagaggagacagactgagaccaggagcaagagttaggagggagcctcaaatgctggcccctgggggagaagggccactcctcttacctaggtggagttggaacaggagacccggcagcctcaccacgcctaaggaaggcagctaggaccctcagcgtgtcttcccggagccccagctcttcagagcctgccatggaggcacctgtgagagagagggttagggactggactccaagggtttagcaagaagtggaggcttggggaccaggacttgtgagtcccaaggaaggtgctgagggcctggactcctgggtcctttggagagtgtgggtctgggggcctagactcttgagtcctcagacgaaaaagcgatcaggaaaaagactcttcgatccaaggaaaggtggtggggctgggtgcccagattcgtgggtctaaaggaggagggagctggggtcctggacttctgagtcttagagaaaaaggaactggagccccagacccttaggtctcccaggaagaagaggcttagcgccccaactcctggattctataagaggcatatgccaaactcctgaaacccttaaagcatcgggaactaccaatcccaagaggtttcagggcaaatcttcccctaggtccgcgcttcttcgccgcgcagcctgctgtgaggtgtagttccaaatctccgacccctgctggaatctagaggaccctggacccttggatatcagagaagcgggactggggtgcccaccactggatcccggccccctcctcttccctcctcaccccacccctcgtcaacaccccgctgacctggtccggggccccaccgccgcctcctccactcaacttgcggtctcctccactgaactcgtacaaactttattagttcaactttcccgcgcctgcgcactgggccgggtcgataaccggcccagcgtagaaagggcggaacgctgggtgcacgctcaatttgcatgtgacgctcccagcatgcctctggccggaaacccaaaaaagggcataggggcgggaacagcccagcgggccgtcccatcggcttttgggtctgttacccaaagaatgataaagttggttttatttcaagaagtcgatcaaaaagaaagccccagcgctctagagctcagctgacgggaaagggggtgcgcagcctcgagtttgagagctacccggagctccaagacaggggtgggttccagctgcccgcacgccccgaccttccatcgtaggtaacgcggaagagcccgggagagcgttggtggcgtccgagagcgaggagcgggaaagaggatgggtctgcacggagagtggaaaggcaggctgtgtactctggggaaagtggagcaaggaaggagctacagtggccgacgctggaggtcggctgcagaaaaactagaaaaagtagggaggaaagaggaaaagaggaggcgtctacactgagggggttctagagagggaggggtggactccgtagatgggggtagttcagtctcgaaacctggggcgtgctctgtcctggaggagggaggcgggcagtcggaggggaattgaatggaagttctgtgttggaaatgttttgggagatcttctgtagggggactgtggaagggggtctacattggggtaagtgcaggaggtagaggcttacacgtgaatcgattctgcactgaaataactagggaaagaggatgctaccctgaaagtggggatacttactttcgatgatgtgggggagggaggaggtctatactggcggaattgagggagtggagggtctgcactgaagacgctggggaaggatgtgccatggatatgggaaggaaccctagctgattagagagcctctcgggaggatgggaggatgggaagaggaggtttcctgtttgtacc

SEQ ID NO: 22243 - DNA, 2300 bp, Homo sapien
aagtataaaaatcagctagtatgctggcgtgcacctgtaatcccagtcactcgggaggctgaggcacgagaatcgcttgaacccaggaggtggggattgcagtgagtcgagattgcacccctgcactccagcctgggtgacagagcaacaatctgtctccaaaagactgtcagagctcaactagaccttgaagatgatctcatccaaggaaggcaaacacaagacattactgttagtatccccttccctcactcactacagacatcaccaattgatcacagcacttcctctcccaagctgtgaaccccttttcaagctagcactcccagcagccattactagtctgtccaggttcacacctatgaggaaacttgtgggtcaccttgatcaagtccagtgacctcctccccaattcctactctgctattggaaaaacaggggagcagggaagagaaagcattttccccagagtcacgcaactaaaacagccagggagatgtgattgaaaaccagcccttctgcccctctatcaggggtattcctggctacaaaagtcctaggggcagggaagtagttatggaaggaaagagacaacaaccagattgaccaaatgctctctgaaagccaacccacagaattgacagaaatctaactggggaggggagaggacaggacggttctgtcctgaaggctggtgctagagactccacacagccaccccctagctgagtgatcttaaactagcaccttatcccgtgttctgccggcttcatagatgatcatggaaatctcttaccaggctctaaaccatagcaggggcggatgggcagagagcaaggccgaggggactcagagggggctgctcctcgccccagggagcagggaagacatcttcgaaggcggctcaggaagtctgttggctcttcttgggcagggcttctggagaggaggacttcagagactgaccccaccagagatcccctgcaagcagtctctttccccaactccctccctcccccgctgaggacctctctccaaaaccccaaagacagagaatagagccagatataaagagaggagacagactgagaccaggagcaagagttaggagggagcctcaaatgctggcccctgggggagaagggccactcctcttacctaggtggagttggaacaggagacccggcagcctcaccacgcctaaggaaggcagctaggaccctcagcgtgtcttcccggagccccagctcttcagagcctgccatggaggcacctgtgagagagagggttagggactggactccaagggtttagcaagaagtggaggcttggggaccaggacttgtgagtcccaaggaaggtgctgagggcctggactcctgggtcctttggagagtgtgggtctgggggcctagactcttgagtcctcagacgaaaaagcgatcaggaaaaagactcttcgatccaaggaaaggtggtggggctgggtgcccagattcgtgggtctaaaggaggagggagctggggtcctggacttctgagtcttagagaaaaaggaactggagccccagacccttaggtctcccaggaagaagaggcttagcgccccaactcctggattctataagaggcatatgccaaactcctgaaacccttaaagcatcgggaactaccaatcccaagaggtttcagggcaaatcttcccctaggtccgcgcttcttcgccgcgcagcctgctgtgaggtgtagttccaaatctccgacccctgctggaatctagaggaccctggacccttggatatcagagaagcgggactggggtgcccaccactggatcccggccccctcctcttccctcctcaccccacccctcgtcaacaccccgctgacctggtccggggccccaccgccgcctcctccactcaacttgcggtctcctccactgaactcgtacaaactttattagttcaactttcccgcgcctgcgcactgggccgggtcgataaccggcccagcgtagaaagggcggaacgctgggtgcacgctcaatttgcatgtgacgctcccagcatgcctctggccggaaacccaaaaaagggcataggggcgggaacagcccagcgggccgtcccatcggcttttgggtctgttacccaaagaatgataaagttggttttatttcaagaagtcgatcaaaaagaaagccccagcgctctagagctcagctgacgggaaagggggtgcgcagcctcgagtttgagagctacccggagctccaagacaggggtgggttccagctg

SEQ ID NO: 22244 - DNA, 2300 bp, Homo sapien
cttcgtgtgcttttccaagtcttcctattccactcagggctgtggggtggtggttgccctacctgtttttgccaaaaataaattgtttaaaacttttcttattaaaaacgttacaaagtattcaattgtctgttcttacacttgggaactaaagttttaaggagaggagatttggttcagagatttctgtggcttacgcaaattgaggaaagaaccagttcattcattctagaaatatttatttgcagcacctacaagagcctgtctcctggacatgtaacatatttgagagaatacctgtaaatattccagcaacttgcatttttttttcctattgcacgatctggttattctagctaatgctgtatgatggtcatggagtctttccagtgaattccacagaaaggtacagtctaacttcacctgtgtctaggacaccaccctcttcttgtttttctcctcccattgctcctttcaagtctctcttgctggtttctcatctacctacagaccagtggtttgtctcacacacaccccccactctccctttttttttggagatagggtcttgctctgttgcctatacttgcactgttatatagatacagtggcactatcatggctcactgcagcctcaacctcctgggctcaagtgatcctcccacttcagcctctctagtagctggaactaaaggcatgcgacacgacgcctagctaatttttaaaaaagaatttttatgggaggccaaggcaggtggatcacttgaggtcaggagttcaagaccagccaggccaacatggtgaaaccccatctctactaaaaatacaaaaattagccgggcatggtggtgggtgcctgtaatcccagctacttgggtggctgaggcacgagactcgcttgaacccgggaggcaagaggttgcagtgagttgagatcacgccactgcactccagcctgggcaacagagcgagactccgtctcaaaaaaaaaaaaattgtagaaatggggtctcccttatgttgcccaggctggtctccacctcctgggctcaagtgatcctcctaccttggcatcccaaagtcctgggatcacaggcatgagtcactgtgcctgggcggtttgtctcctttatagggccatatcccccttcacagagtaatgtttgtaaattaataagtgaaatgtacaggattacaaaccgaaccaattacagttgatcctcagtatttgtagattatttgcaaatttgcatccttgctacaatgtattcataccccaaaaattaaggcagtgcttttgtggtgttttggagggcaatgcttatgcacagagctgcaacaagctaaagacctgatgtgcatatttgcagctgggctcctcttgcttcagctcaaacactggaaacaaatgtccttttcttggtttgtttagtgccatgcttttcaatttttttttttttttttaaagttagagtctcggtctgtcgctcgagctggagtgcaatggcttcatcctggctcactgcaacctccacctcctgagctcaagcgattctcctgcctcagcctcccaagtagctgggattacaggcgtgtgccaccagtcctggctaatttttttatttttatttttatttattttattattttttgagatggagtctcgctgtgtcgcctaggctggagtgcagtggcaccatctcagctcactgcaacctctgcctcccgggttcacgtgattctcctgcctcagcctctggagcagctgggactacaggcgcccaccaccacacccggctaatttttgtttttttagtagagacgggggtttcaccatattggctaggctggtctcgaactcctgagcttgtgatccgcccacctcagccttccaaaatgctgggattacaggcgtgagtcaccgcgcccggccaaattttttttttttttttttttgagacaagagtctcgctctgtcacccaggctggagtgcagtggcgcgatctcagctcactgcaagctccgcctcccgggttcacgccatcctcctgcctaagcctccacgcccggctaattttttgtatttttagtagagacgggggtttcaccatgttagccaggatggtctcgacctcctgaccttgtgatccgcccgcctcggtctcccaaaatgctgggattacaggcgtgagccaccgcgcccggccgcctggcgtaatttttgtatttttaatagaaatgggggtttcaccatgttgcccagactggtctcgaactcctgatgtcaagtgatccgcct

SEQ ID NO: 22245 - DNA, 2300 bp, Homo sapien
gctaaagacctgatgtgcatatttgcagctgggctcctcttgcttcagctcaaacactggaaacaaatgtccttttcttggtttgtttagtgccatgcttttcaatttttttttttttttttaaagttagagtctcggtctgtcgctcgagctggagtgcaatggcttcatcctggctcactgcaacctccacctcctgagctcaagcgattctcctgcctcagcctcccaagtagctgggattacaggcgtgtgccaccagtcctggctaatttttttatttttatttttatttattttattattttttgagatggagtctcgctgtgtcgcctaggctggagtgcagtggcaccatctcagctcactgcaacctctgcctcccgggttcacgtgattctcctgcctcagcctctggagcagctgggactacaggcgcccaccaccacacccggctaatttttgtttttttagtagagacgggggtttcaccatattggctaggctggtctcgaactcctgagcttgtgatccgcccacctcagccttccaaaatgctgggattacaggcgtgagtcaccgcgcccggccaaattttttttttttttttttttgagacaagagtctcgctctgtcacccaggctggagtgcagtggcgcgatctcagctcactgcaagctccgcctcccgggttcacgccatcctcctgcctaagcctccacgcccggctaattttttgtatttttagtagagacgggggtttcaccatgttagccaggatggtctcgacctcctgaccttgtgatccgcccgcctcggtctcccaaaatgctgggattacaggcgtgagccaccgcgcccggccgcctggcgtaatttttgtatttttaatagaaatgggggtttcaccatgttgcccagactggtctcgaactcctgatgtcaagtgatccgcctgcctccgcctcctaaagtgctggaattacacccgtgagccatcgcgcccgaaccctattgtaaattttaagtctcaggcgtttgccagcggcacgccagagagtatagcctgcgcggaggcccagaaaccaaagagcgagctcattccgggattggagagaagtgtgagcagagggaagtagagggatcggggagaggaggggcaggacccacgcattcggccctttgcattcagcttcattcaactaggaactttttctgcaaatcaaggaaagcttcccggaggaagtggtgcctaagctgtgctctgattcacgtttagaagctgaccagacaaagagaggtgggcgttcctggcagggggagggacttggcaaaaaccaagtggcttgagaggggttgatggttttaaaaaacttggaatgattatgtcaagggctagggatttaatgtgttgacgacggactcctattcctcacttgcttcgggaccccagctatgcccttcctctctctgggcctctcaccgattccgtttttcccccaggtaatgagcacaagctccctttttcctccagactccccccgggttgggaggatccaccgagtggacgaggagtgataattcctttgagccaatcgttggtgcctgaagccccgccttcttccctacccgtgggccaattgccgtgttctccttgaggccggccgcttggcgagggtgggccaaaggctgcgtgacgtcgcttccggataaaccaatggcagcgattaggaggcgggtcgttttggtgatggacaggtgtttcaagacgcccctttagcgcggggctccccgggaagctttgaggcggtgctgggtgtaaaggggagggcattcctggtggattttgcccaatcaccagtcgcgcttcttgcaatagacgggcagttttccccatcccgggtcgacttgagggggcgggattctggacgccagagttggcaaacccctgacctatgatggacgtattctctagccaattactagacggtattctcagacgggccgcctccattgccaatgaaatcttccagcggggtcgcggtaggcgggccgtggaccctctggtataaggcggtcccgggggagtgaggagaaagggggggtcttggcggccggaggaggagtaggtgcgggtgaagatggcggcagccgaggccgcgaactgcatcatggaggtgagcgcttggagcgccgccgtgggcgggaggcggctttgggtcggtgtttcacgcctctgtggtggggaaagggctctaagttggcgatatggggttggaggtcccccgccgcacacggg

SEQ ID NO: 22246 - DNA, 2300 bp, Homo sapien
gggcagcaggccgaggccggctgacccgcccgcgcccccaggccccgagtccccgtacacgcactggaagcagacggtgttctacatggaggactacctgaccgtgaagacgggcgaggagatcttcggcaccatcggcatgcggcccaacgccaagaacaacgtgaggctccgggcagctgggtgggagggtggcagctagggcggggagtgtagattggggggggagtggtgggggaggaatggtggcagcgggggtaggggatgggggcagccggggtgggggatgggggcagctggcgggggcgagcacctctgcctattcccgggtccccaagcccctcagccccatgcctgtctacacagcaggattgcttgagcattcaccggaagttatgggcctggggacccaggctgaaaccctgccctcctggtgcttccactctagacaagggggtcagtgacatggtgatgccagttggaggtgacctctgtcaggctgggagcagggcagacaggtgttggtgtaggtgggctccagggcaagaggcagcccccagtagagtgcacggggttttctagcccagctgggaggcatgagaggagaaaggcagctttttgttttctgctcccctttctttttcctcctgagcacttggcaggagctgccatcacctgagatcagggggcttccgggggagctgggggggcttctcggagacagggtctgggcagagatccagtgtggtgggtctgagcaggcaggaggatggaaggcttggagcctggagtcgccgggagtggtctgggttggaaaagtgggtcccggccgatgggtgcgagggtgggtggcactcagggtagtcatggaatgtggaccctgggacacccacgagcctgtgacagcagcagttgtcaactgggcagttttactgccccctccgctccccgcccccccccaggacgtttgccaccgtctgtggaaacatttgtggttgtcactccggagaaggggtggtcctggcatctggtaggtaggggccagggggctggtaaatgtcctgcagccacaggaccaccccctacaaagactcatgcagcccccgggaccacggcactagctgggaaacggatactggagagggaggaggagtcctcgggcgttggtgactttgtctcatcttcatgtgctggagggtatggggggaggagaggaagtggagacagcaggctggaccattgtgtttcactggaacgtttgcctgaggaggaagtgggcttgggagaggttttcttttttatgaaagaagcaatcactgcattgctgatgggaatcatcctgatggagaaatccaagggcaagggacagcagctgggctctactcctgagtgagtctagtgggcttgggggtgtccatgtggtgctgtcccttggcagggtcagggcagctgctagggtgggaccagcagttggggtctgcagcgtggagatgggcaggaagctggagcccggctcatcgtcgcatagcctgcctgcacccgccccccgccaccacctcctggtgggttccgccctcatgccccacctctccctgcagcgggacctggacttcaccatcgacctggacttcaagggccagctgtgcgagctgtcctgctccaccgactaccggatgcgctgaggcccggctctcccgccctgcacgagcccaggggctgagcgttcctaggcggtttcggggctcccccttcctctccctccctcccgcagaagggggttttaggggcctgggctggggggatggggagggcacatcgtgactgtgtttttcataacttatgtttttatatggttgcatttacgccaataaatcctcagctggggtctggctttgtttcctgggggcaaaggaggtttggggttcctttcgcaggtactgcagtgccagcctcagcagtggggggaccggccttggcacctgctggtggctgccattctgtggatctgcgtctcccgtcccccgtctctaggcctcttgctccccttccttggttccttctcggggtccctgtcctccacagctgtctctcagggtctttgtccaactcttttcatccctctcctgggtctgcgcccctcccctctgcggtacccgtgtcctgcctagtaggggatgggggtggctttccagcacagccagccctcaagtttcccagaacagtctccccacctccccccaacactcgacattgttcctctctggctgttttttcctgttcgggtcccttcaaggcccaac

SEQ ID NO: 22247 - DNA, 2300 bp, Homo sapien
acgtttgccaccgtctgtggaaacatttgtggttgtcactccggagaaggggtggtcctggcatctggtaggtaggggccagggggctggtaaatgtcctgcagccacaggaccaccccctacaaagactcatgcagcccccgggaccacggcactagctgggaaacggatactggagagggaggaggagtcctcgggcgttggtgactttgtctcatcttcatgtgctggagggtatggggggaggagaggaagtggagacagcaggctggaccattgtgtttcactggaacgtttgcctgaggaggaagtgggcttgggagaggttttcttttttatgaaagaagcaatcactgcattgctgatgggaatcatcctgatggagaaatccaagggcaagggacagcagctgggctctactcctgagtgagtctagtgggcttgggggtgtccatgtggtgctgtcccttggcagggtcagggcagctgctagggtgggaccagcagttggggtctgcagcgtggagatgggcaggaagctggagcccggctcatcgtcgcatagcctgcctgcacccgccccccgccaccacctcctggtgggttccgccctcatgccccacctctccctgcagcgggacctggacttcaccatcgacctggacttcaagggccagctgtgcgagctgtcctgctccaccgactaccggatgcgctgaggcccggctctcccgccctgcacgagcccaggggctgagcgttcctaggcggtttcggggctcccccttcctctccctccctcccgcagaagggggttttaggggcctgggctggggggatggggagggcacatcgtgactgtgtttttcataacttatgtttttatatggttgcatttacgccaataaatcctcagctggggtctggctttgtttcctgggggcaaaggaggtttggggttcctttcgcaggtactgcagtgccagcctcagcagtggggggaccggccttggcacctgctggtggctgccattctgtggatctgcgtctcccgtcccccgtctctaggcctcttgctccccttccttggttccttctcggggtccctgtcctccacagctgtctctcagggtctttgtccaactcttttcatccctctcctgggtctgcgcccctcccctctgcggtacccgtgtcctgcctagtaggggatgggggtggctttccagcacagccagccctcaagtttcccagaacagtctccccacctccccccaacactcgacattgttcctctctggctgttttttcctgttcgggtcccttcaaggcccaactgtgcccagccctctgcagctggggacactgagtgggttgggggtgtatgtttgcaaggatagaatttctcatgggggagtggccctgcttcctcccctagaatggcttggggcttagggctggggacttgccctccatggaggtcagtgggagttgcagctgtaaggtggcagggcctacccatcttacagaggtgaagacgaggtccctctgcctctgctgcagacatggcgtctgcacccacccttccaccctcagggcctggccacggggtcctgggtcccccacaatactgtgcactcgacctggttgacccaggacaccctcctcgttgaacagccctggctacacctgcttcagtgcaactggagccctcaccggcgagtgcctgacacctcggccttttctcttccggaggggcgctcctcagtgtgtttggggtctccctcgctccacgccctccagggggccgcatgtgcacttgccctgcattgcctggcccccgaggttccagggtcccaactgtctactaaccggcttcccgacagggtgagggtgaggtcgcatctacaaccagagccagcgcttccccgccgccaccccttttcttggaatcccgctgcttagctacctgcgggtgtcattggccccgccccatttccccacgctttgaagggggcgagtctccacagacctcctagggggatagacagcagctggtgtgaccccacacacccagtgaggtctctggagccgcggtgcgggaagcggggacccgggtttgaatcctgcccctctggtgtggtgcggcctcttcccacagacttttggcctcagtgttccccgcctgggaagtggggactggccctggtacctggctccagagctgcacccagaggcgatcagcccggtgcgggaacggggcggggtggccgcaactacgggccacggatcctgacccg

SEQ ID NO: 22248 - DNA, 2300 bp, Homo sapien
tgggagttgcagctgtaaggtggcagggcctacccatcttacagaggtgaagacgaggtccctctgcctctgctgcagacatggcgtctgcacccacccttccaccctcagggcctggccacggggtcctgggtcccccacaatactgtgcactcgacctggttgacccaggacaccctcctcgttgaacagccctggctacacctgcttcagtgcaactggagccctcaccggcgagtgcctgacacctcggccttttctcttccggaggggcgctcctcagtgtgtttggggtctccctcgctccacgccctccagggggccgcatgtgcacttgccctgcattgcctggcccccgaggttccagggtcccaactgtctactaaccggcttcccgacagggtgagggtgaggtcgcatctacaaccagagccagcgcttccccgccgccaccccttttcttggaatcccgctgcttagctacctgcgggtgtcattggccccgccccatttccccacgctttgaagggggcgagtctccacagacctcctagggggatagacagcagctggtgtgaccccacacacccagtgaggtctctggagccgcggtgcgggaagcggggacccgggtttgaatcctgcccctctggtgtggtgcggcctcttcccacagacttttggcctcagtgttccccgcctgggaagtggggactggccctggtacctggctccagagctgcacccagaggcgatcagcccggtgcgggaacggggcggggtggccgcaactacgggccacggatcctgacccgccctgcccacgatgactatccacatcctcatcctgctgttgctcctcgccttctccgcccaaggggacctggacactgcagccaggtgagaaacccgggtggcagcagggacagggcgggagggagaccgtaaagggcgagcgccctctcccggccgcggaacgggcaggtgatctgtaagcctccccgctggtcttggagtgcttgggtgcccacctccatcacgctccatctctcaattcggtttgaacccggttttctcccacgctccctctccaggcgaggccagcaccaggtcccccagcaccgcgggcacgtctgctacctgggcgtatgccggacccaccgcctggcggagatcatatactggattcgctgtctccaccaaggagccctcggggaaggccagccacgagccccaggacccctacagctatgggcgccgccggtggcgcgaggcggaagcccggctcggttcccaggattccggcctgcagcgagggggctagcgcagtgcccagctcgctgggtgacctcgggcacggctcgtcccctcctcggcttcagtttgcctatctgtatgttggagcttctactccacatttcttctcccctaactccagcccctgaaaccgtcttccccagtccctccccgggctgcgactaggttggacctagaagcacacgggaccaggctgggcgaagaacactgacgcccagagccgaataaacaagagttccgtgtttcagtctctgcttctctgtacctatttcgacctctcagtcgaggctgggtctctaatatacctttctctattagccatgctgcttctccctcacggaagtcccactgtctaccttgaatccaacccgctgtggcgcctttcttgccaactcaatccatgcaccttccgtgggtggttttggcgggccgtcctgacccccaaacatccctcctccctccctggcgtgaaagggctgagatttgctccggcaccctacgcgcctgacgttataatgcacctggggtgggctgcgacctcccagctgagccttgttcctcgaagagacaggagactaagagacaatgagctgagtgaggagcccaggaacccgggttccgaacagctgcgtagaatgcgagcggccaaatggtggagaatctggccgggtaaaaggagacggaggactggggatcgaacggatgtaggggattggacgccgtggctcgaagggggcggggatagaacgcggggattggaaggaggcggggataaaacccgggacctgaatacccggctagggacacgagagagaggaatcggggtttctgggtgacggtgatctcggggtgggcaggactccaaaggcccgtcgacccggtggtggactccttgcactgggattggacatatgcaagcgggagatttggggccggcgctcaaaatcggggggcgggggtggactcgggtttggaccccagga

SEQ ID NO: 22249 - DNA, 2300 bp, Homo sapien
aagagggtccccggcagagccccacgaggcagctatgtggaagcctcagttggtcaaacccagcgaaggggacgaaatatctggagaagtaaaagggaatgcaggccttgcttttctggttaaatatttttttcttcacacttttggacaagattctgtttacacacacacacacacacacacacacacactcatttctttcttcccttccttccctccctccctccctcctttcctaccttctttcctgcctgcctgcctgccttctctctctctttccttcctttttttctgtctccttccttcctttttttctttgagatggagtctcactctgtcgcccaggctgtagtgcactggcaccgtctcagctcactgcaagctctacctcccaggttcacgccattctcctgcctcagcctcccatacctggctaatttctttttttttttttttgtatttttgtatttttagtagagatggggtttcaccgtgttagccaggatggtctcgacctcctgacctcgtgatccgcctgcctcggcctcccaaagtgttgggatttacaggcgtgagccaccatgcccggcctctttctttctttctttctctatctttctctctctccccctccctccctttctgtctctctctcctccctccctccctccctccctccctccctcccttccttccttccttccttccttctctctttctctctctttcctttttctttcttggaaggggtctcactctgtcacccaggctgtagtgcagtggcgtgatcaaagctcactgcagccttgacctcccagactcaagccatcctcccatctcagcctcctgagtagctgggactacaggcatgtgcccctaagcctggctaatttttaaattttttgtagacatggggtcttgctatgttgcacagactggtctcaaactccgaggctcaagctatcctcccacctcagcctcccaaaatgctgagataagaggtgtgagccactgcgcccagcctgtatattttattgtacctccaagccaactgccagtgacacacgcaccatttttttatgtacaacaacaacaacaaaaaaccctacaagagcagctaaaccgtgacacagtgctttcttttgtgtttttcattgtttgaattttatcatggtattggcaaggccacaattttcatgtatttacacatatgtatattatttcacatatttattgttttataaattttacatttatgttctgtttttcttttttgggggggacggagtttcactcttgttgcccaggctggagtgcaatggtgcgatctcagctccttgcaacctctgcctccccgactcaagcgattctcctgcctcaggctaccgagtagccgggattacaggcgtgcaccaccacgtgtggctaatgtttgtatttttagtagagacagggtttcatcatgttggccaggctggtcttgaacacctgacctcaggtgatccacccgcttagcctcccaaagtgctgggattacaggcgggagccaccgtgcccagctgtaccttgttatttccaccagctatgtaatattccactgccggagtataacagggtttagctaactgatcccccatggatggatttctaggtgatcgctagttactgactacgatggctgacttctttggctctatcctccctgcctgacgcaggagcatctggggccttccctgtcctactgtccctcccccaacaggccccagcccctcactgtgtgtctccccaccccgctcccaggtcagtgactggtgggaggaatttgtgtacctgcgctcccgaaatccgctgatggtgaacagcaactattacatgatggtgagaaggggaggggtgaggttcataggccccaggtctagggttggggggtacctgggcggaatgtgacggtcatgctcagtgacctggatctagacgcgccatctgggattcatcattccaccctcttttggggtcaggacctgtatttgggtcagtggctccatcgggggcaaacctgaccctgggtgttttgccatcccctctcctggtccccaggacttcctgtatgtcacacccacgcctctgcaggcagctcgcgctgggaatgccgtccatgccctcctcctgtaccgccaccgcctgaaccgccaggagatacccccggtgagagggccccagtgggttagggatggaggtgtggtcctgtggcctttgggccacgtgggtcctggaaggcagctcacagcccacggtttcct

SEQ ID NO: 22250 - DNA, 2300 bp, Homo sapien
aagctgggagaatggatcctaccacatgcatccctcctgaaccacggattggcaggagtcgcacaacactttatgtgatataaagtaatgatgaccagaggccacatggtgtcatggtttaaaacaagcgttctgaatctagattctgatgagatcacctaatgtgctgagtgcttgggaagacaagggatatcccatttctgagacccatttgtctcacttgtaaaataggccaaataacctcaagaggcggagttgtgaagaataaaagacaagacaagtgcttggtgcatagcaagtgttcatatctgaaaagtggcttcctttgtaattcaccagttcctggagagaaagggcatgtgttttcaaagtttctctttttaagctgtggaccccaaggacttttttttttctttagacggagactcgctctgtcgcccagattggagtacggtggtgcaatctcagctcactgcagcccctgcttcccaggttcaagcaattctcctgcctcagcctcccaagtagctgggattaaaggcaccaccacgcctagctaatttttgtatttttagtagagttggggtttcaccatgttggccaagttggtcttgaactcctgacctcaagtgatccacccacctcggcctcccaaagtgctgggattaccagagtgagccacggcacctggcccccaaggacatttagctcagtgtttggttgagtccatccttcttcctccacatgtctgagcaccccacctccatccccctttccctcctggatcctatttttctcccagcccaccatgaagaaaggtcgtttatgccctgggtttgccgcgcaggaatgctaagaatcagaggtatagcccttggctccaagtcacatagccattccagggcaaaatcaaggtgtaaacacagcctcccagttctggaattcttcctgggcttggggcttgcccccacatacccactaactcacctgtctcccattcttccccagagtggggtcaacagtggattggtccgcgccaaagactccatcaccagcttgaaggaaaagaccaaccgggttaaccagcacgtgcagtctctgcaggtgtgaggaccccctatatccaacacctgcccttcctccagggccaagttcccttcttggagcctgcctccagcagaatgcacccatagctcagttggggagcttgaggctcagaaagaaaaggaaccttcccaggcccagatcttcttttccacaggctgtcccctcgtgtccttggctaacctctcctccttccatgctccagagcgagtgttctgtgctgagcgagaatctggagagaaggcggcaagaggcagaagagttggaggggtactgcattcaactcaaggtgagccagtgggacgcaggaatggatggggagaggggaatgggagtaagaagagggtgggagaaagaggggaggaggctgggtgcagtggctcacatctgtaatcccagcactttgggaggccgaggcaggcagatcacctgaggtcaggagtttgagaccagcctggccaacatggtgaaaccccatctctactaaaaatacaaaaattagccaggtgtggtggcgggcgcctgtaatctcagctacttgggaggctgaggcagaagaattgcttgaatccacgaggtggaagttgcagtgagccaagattgcgccactgcactccagcctggccgacagagcgagactcagtctcaaaagaaaaaaagaaaagaaagaggagaaatggaatgggtggaccgaagagaggtgggaggaagtggaggggtgccactctggcacatctggctaaggaggaagccatccccttagccaaggaaatgagctggtgagtgtgtcttgtactggggggctaggaggcctggagcctggatggaaacagacaggctaagggttgggaggcagaactggaatgggaaggcagggccctcgccctggtgtctgacccaggagaactgctggaaggtgacccggtctgtggaagatgctgaaatcaaaaccaacgtcttgaagcagaattctgccctgctggaggtaagggctagggggcagtcccaggatttgtgggaggaggtcagatgcacgagggactcaagatacacttttaggtggaactccctgccccgacaccaccaccacactgcaccttcgtgcacatagtcatccttagaactcgctgataagagggattcaaatgaggctccaacacccagatgggggactcttgccctgcagtcacattcag

SEQ ID NO: 22251 - DNA, 2300 bp, Homo sapien
tctcgctctgtcgcccaggctggggtgcagtggcgcgatctcagctcactgcaacctccgcctcccgggttcacgccattctcctgcctcagcctcccaagtagctgggactacaggcgcacgccaccatgcctggctaattttttgtgtttttagtagagacggggtttcaccgtgttagccaggatggtctcgatctcctgaccttgtgatccgcccacctcggcctcccaaagtgctggaattacaggcgtgagccactgcgcccggccttttttttttttcttttttttgagacagagtctctctctgtcccccaggctggagttcagtgactcaatctcggctcactgtaacctcttcctcccgagttaaagcgattttcctgcctcagcctcctaagtagctgggattacaggcacccgtcatcatgctcgcctaatttttgtatttttgtagagacagtgtttcactatgttggccaggctggtcttgaactcctaacctcaggtgatccgcccgcctcggcctcccaaagtgctgggattacaggtgtgagacaccgcgcccagccaggagttctttattatagaaagattaagtgttccaagaactggagtccattcatgaccaggaagaagtactttctccctggggataacagcatttaaaatgtctattagcagtgatgtttgaactagtctttttgagaagtgtgaagagaacaggaaaagtctgtccctaaatagcagggcagtgctcgcttcgacagcacatgtattaacattggaacgatacagagaagattagcatgggccctgcgcaaagaccacatgcaaatttgtgacatgttccatatattttttaaatactttgggcgggcggggcgcagtggctcacacctgtaattccaatgctttgggaggctgaagtgggcagatcacgaggtcaggagttggagactagcctagccaacacagtgaaaccctgtctctactaaaaatacaaaaaaaaaattagatgggtgtggtggcaggtacctgtagtcccagctactcaggaggctgaggcaggagaatcgcttgaaactgggaggtagaggttgcaatgagccaagatcacgccactgcactccagcctgggtgtcagagcgagactccatctaaaaaaaaaaaaaaaaaattatagcggagcatggtggctcatgtctgtaatcccacactttgggaggctaaggcgggtggaccatttgaggtcgggagtttgagaccaacttggccaacatggtgaaacccgtctctactaaaaatacaaaaattagccggacattgtggccagcgcctgtagtcccagctactggggaggctgaggcaggagaatcggttgaaccccgggaggtggaggttgcaatgagctgagatcgcgccactgaactccagcctccatgacagagagagactctgtctcaaaaaaaataaaaagtattaaagaaaataataaataaataaacgggggagggggataccaccctctgtcctgccccaactctctaccttcctctcctccctcaccttctaccctgaccccgaggcccaccgcacctagctttcttttgttgatctacctgtatattgcctttcccccgaccccgacgccccatagaatatgagaccctccaggtcagggtctggatctcagccctcttcgaccacagtctctcaaaccccagccaattgtcaaatccaggaagctacatgaagaatcaagaacaagtgcacagggctgtgtgaccccacgcttagtctcagggagagggaagttggacctctcccaagaatccgtgggccgacccattgttaagttacaggctagcatgaatccatccactggagctctgaagacggggggcacattgggcatgtaactagaatcctgaacaggaggagtccactgagaaccctaggggaatgacctgggccagcatctctccctaccctgtgccccccactcactggggcccagtggttgggtcctttgtgaggcaggctgaggggacagtggatcctgagggtctgtggtcacagtaggtaggaagtctcagaggaaggagcccctccctgggagccagacccccacaccatggcgagcgtggtggtgaagacgatctggcagtccaaagagatccatgaggccggggacacccccacgggggtggagagctgctcccagctagtcccagaggctccccggagggtgaccagccgggccaaggggatcccgaagaaaaagaaggccgtgtc

SEQ ID NO: 22252 - DNA, 2300 bp, Homo sapien
ggtgtctcacacctgtaatcccagcactttgggaggccgaggcgggcggatcacctgaggttaggagttcaagaccagcctggccaacatagtgaaacactgtctctacaaaaatacaaaaattaggcgagcatgatgacgggtgcctgtaatcccagctacttaggaggctgaggcaggaaaatcgctttaactcgggaggaagaggttacagtgagccgagattgagtcactgaactccagcctgggggacagagagagactctgtctcaaaaaaaagaaaaaaaaaaaaggccgggcgcagtggctcacgcctgtaattccagcactttgggaggccgaggtgggcggatcacaaggtcaggagatcgagaccatcctggctaacacggtgaaaccccgtctctactaaaaacacaaaaaattagccaggcatggtggcgtgcgcctgtagtcccagctacttgggaggctgaggcaggagaatggcgtgaacccgggaggcggaggttgcagtgagctgagatcgcgccactgcaccccagcctgggcgacagagcgagactccatctcaaaaaaaaaaaaaaagaacttcaagtcctgggattaataatttttcttgtgtttaatggggctgctttatgttcttcaggggcaaacagcacccccctcccatattagaaatggactctccctgtgactaaaacagctgagcaatttctgtcctcctggaatccaaaatggactttcccaggccccattcctggaaacccaaatggacgcatccattgagcctggaaggtgggctcttctcaacctcctttccatctcccaggattcagaatggccattccaaaggtccagaacacacccccaaggctcattccaggaattcttggcttctgagattagaaaaggctgatggggtggagttttgttcctacaggtgacagaaatggactcttccagttccctttgtcccaaatttctcaatctcctggggcgttgggagttctggccgttttgccttccccaaagccagtttaccaaagagtctctggggagctgggggttggggatggaggctggggctgggccaaagcagattcacctatttcttcttttaacaaatgttgttgaaactgttcaaggccaggtcccattcttgcccagaaggagttcccagtctggaggagacaatcaattttggtttgatatctgctacaatggaggctgcccgagagacactgcggttggacaaaaaaaaaaaggcaacatatattgaaaagtaagccaagatacggtttacgtttatttctgctttttcacttccaagctgtgtggccctgggcaagtcattcgccctctcgacctaagttttaacttctgcttaatgggactagccttgaattactgtttttcactctgagattctaggtctcctgacaactcaagtcccgacacgttggctgcagagaaggggggaggggaggaaggcttcctagaagaggatttcagcagtcgggggtgacagtggagggagaaagggaacacggagacgcttgcgcagtaaacaccgcacgctctcttgcctcgcccaaccccttctctgcagcagggaattgcaggcgtcgctccacctatcccagccgagcggagtgacaccctcccctctttccttctctactgatcttcgccttccgcccgccccacagccgcccaatggagggctgaagtaggacagatctcgccaatccgcgacgcctgcggggcaggtctacccgttcattggtcccagtcaacctaagtcccgcctcctaggaccgttccccgccttccttcacgtccctcccttcctccttggagagccgctagatccaatcagtgtttgacctggccgcgcggagggggcgggcccatgatacgcaatcgaaccccgcccgtctctcgggcaacgcctcctcccccccctccccagctcccaaacggaaatagcggaacactgggccaatcgtagcgtcgtgcctttgcttggcggccaatgagagaggaagtgggggagaaacccgcctgtgagcggcaggagctcaagccagtgggcggctcagagctccggaccgcgggcggaggggaggggcagggggcggtgccacggcctgccagcccgcccgcccgcccgccagccagccctccccgcggccggctcggctccttggcgctgcctggggtcctttccgcccggtccccgcttgccagcccccgctgctctgtgccctgtccggccaggcctggagccgaca

SEQ ID NO: 22253 - DNA, 2300 bp, Homo sapien
atttctcgtagtctggactagcccccctacacctgtttatggagaaaccaggagatgccattgctgtgtgtcccatggtggcgactgggctcattgctgccttgtggtgtattttagcttgttcctctatctggtgaattttcctgcggaaaattctgcagaaaaatctgcggaaccattttttgctggaacgcttgacagctcttgcatacacttgaaaacacgtcacattctaggaaacgtggtgattggtgctcctgtgagctgctggctggcatctgtcagtggtggagagctctggggggtgagggggcacctggttgagccttgtctcctttggcctcccagcctctaggccaggaggatggcaccgagtgtgcctgcagtggcctcttgctgaatggacacttgggtgggtggcttgtgcatttttgtcaggggctgctcagcactcacaccagtccttgggaaggcctgggtttgggggcacctctggggaaggttcctggagcttcctttgctctgtgagaaacctaaggagcctcagagctgcagatgaggaaactgaggctcacatggtgccacctcttgcccgagagggtcagagcaggaggagagcccaggtctggggatagatcttgtgtctccagaggtgccttgtctcaccatctctgctgggctgggaagaggttgagggagcagagaccctggccctgagctgcagaattctcgagtgtcagaggcaccccgagctcctcctttggaagacaggagctggggcatggccaccaccccagcaggtgtgccaggtgggcaggacactcagccgggggcgtccccttcgtttccccagaggatgcggctgtgaaggggcggctggtggaatgtctggagactgtgctcaacaaggcccaggagccccccaaatccaagaaggtgcagcattccaacgccaagaacgccatcctcttcgagaccatcagcctcatcatccactatgacaggtgcccgcctgggcctatcagggcctgatgcctggggccaggaaagaggggcatggaggcccggactcctgagtcctaggcagagggcagggaatcttgacttttaggtagggtaggaggaggatggggctgtgaagtgtcacctgtgaggttggtgctggggcccttcctgggggcagaattgctaggtatctttctctgggctcaaaggcccagttgtctgggtcactggaggtgcagtactgcgatgcaaggccggcaaggttaagacctggatccttgggggctgtgagatgggtcagctggggcccgagtcctccaccttctcctgtcagtttctctcaccatccctctcttgtggcccctgctggcagtgagcccaacctcctggttcgggcctgcaaccagctgggccagttcctgcagcaccgggagaccaacctgcgctacctggccctggagagcatgtgcacgctggccagctccgagttctcccatgaagccgtcaagacgcacattgacaccgtcatcaatgccctcaaggtgtgagcccttggagcccaccccgggcctgccacccccctcagaaagaccagaggctcagaggcccttgggtggccaaccctgtgccaacagggagtctaaaacacacctgggctctgctctccgccctcagacggagcgggacgtcagcgtgcggcagcgggcggctgacctcctctacgccatgtgtgaccggagcaatgccaagcagatcgtgtcggagatgctgcggtacctggagacggcagactacgccatccgcgaggagatcgtgagtgctgtggggtgcgggctggactcttgggtctgaggcaggaggtggctgggggcctggattcctaagtctaagggaggaggggctggggcctggactcctgggtctccagatgggggcagtggtgagcccagatccaggtgagtgaaagcccgacatggcctgcggcacactctctctcacacgccccggcggcaggtcctgaaggtggccatcctggccgagaagtacgccgtggactacagctggtacgtggacaccatcctcaacctcatccgcattgcgggcgactacgtgagtgaggaggtgtggtaccgtgtgctacagatcgtcaccaaccgtgatgacgtccagggctatgccgccaagaccgtctttgaggtcagcatccctgaccctgaccctatgaccccacgacaggacctagaggcagagcaaggatggccggggccgtggcgcctgccagcccgcagccaccc

SEQ ID NO: 22254 - DNA, 2300 bp, Homo sapien
tttgctgaagctttttttttttttttttttttgagatggagttttgttcttgttgcccaggctgcagtgcaatggcacagtctcggctcacggcagcctccacctcctgggttcaagcgattatcctgcctcagcctcccgagtagctgagtttacaggcatgcgccaccacgcccagctaattttgtatttttagtagagccggggtttctccatgttggtcaggctggtctcgaactccagacctcaggtgacccgcccaccttggcctcccaaagtgctgggattacaggcgtaagccgccgcgcctggcctgctgaagccttcaaatccatacaatcatatgattttactcctgtgtgcttggcaggcatctttccaattttatgaacactttcttacattactagtatgccattgttacctgtaacaaaattaacttcttagtatcatccaacagtaagtgtgtaatcaaacgttccaattgtctcaaaatgtgtttttacagttggtttatttgtatcaggatccaaacaaagaccacacacatatttagacattatgtctcaagtttcttttcatctagagcagccccctcttttatgcctgtgtaactaacattttaataaagttgtaaggaagataaaagtaatccagagaaaggaaaaaaaatatcaataggcaagaaggaagattaaaatggtacctaggccaggcatggtggctcctgcctgtagtcccagcactttgagaggctgaggtgggtggatcatttgagccaaagagtttgagaccagcttgggcaacatggcgacaccctgtctccacaaaaactacaaaaattagctggacgtggtgggggcacacctgtaatcccagctactcaggaggctgaggcaggagaatcgcttgaatcctggaggcggaggttgcagttagccgagatggttccactgcactccaccttgggcgacagaacgagaccctgtcccctctcccaaaaaaaaaaaaaagagaaaaagatgtactttaggaagtaggaaaattaaaaattatgctagaaagatgggctgatctgcaagaaggaagaggaagggaaaaatgaatcataaatacttttgtcattacaagtaaatgctgcctgtgtaaaataataaaaatattcataagggcattttaaaaagtcagtaaaatgctgtcccagcactagttggctagtctggaggagttcaacaacctaatgtacatcaatacagaattggtcaaatcaatttgtcacatccataaaatagattataaaaatacattattaagatgaaatagacatactttttcatggcaaaaaagaaagtgtggaaatgttagtatattgatcatctttgtgaaaacgtatgaatagtctacgttaaactgtattttaggaaaaaaattggggaagggatttttcacattttacatggtatgctatcatgtataaattcattacagaaatgatattatttttattattctggaaaataaaggatttccttgttttcttttttctaataacaaaaacaaccttttttttagtggttactaggcaacgatcgctggactcaaccaccctcgaaggttgtaggggagatggtgtttttctcgatttcgccccaaggagggtgctcggacttcgacgtgccgccatctttgagcagggcacagctgtttacagccttggaatggatatcaggctgaatggtggttgcttggcaacgccccgccacggtcgccatctttgagtagggcacattgtttactactatatactggaaacctacagggaatgtggttgctaggcaatgctttgggaccatcgcaatctttgatccgggcacagctgttttttccgtttagaatgtaaatcatcaaagcctacaggatggtggctaggcaacgccttggcgcagtcatcatcttcaatccggcttcttggttctctttacctcctcggagaaactagaaagctttgcaaattcaatttgccgccatctttgttaggggtaccgtgacttccggctagggcggaagagaacctaatgggtttgggggaggtgcctgaatagggtttgagggtctgtttgagttgggtgaagaaggcgggaagttaatcctcttccaatcagctccccatctcgccctctggcggctccggaccacaggccgagttactctgattaccgccatgctccaagacccgcactgacagtccccacgtgagggaccgcggtgggagtcctaaatgggggaggaggggacgggcg

SEQ ID NO: 22255 - DNA, 2300 bp, Homo sapien
gtctcgctctgtcgcccaggctggagtgcagtggcgtgatctcggctcactgcaacctctgcctcccgggttcaagcgattctccttgcctcagcctctcgagttgctgggattacaggtgggcaccacgacgcccagtgatactgacctcgtgatgcgcccgcctctacctcccaaagtgctggaattacaggcatgagccatctcgcccggccgaagattatgttttaaaatatttactggccattcaaaattttgtgtgtgtgtttgtgtgaaactagtcaggtttctttttatttatttatttttattttttttgagacggagtctaactctgccgcccaggctggaatgcagtggcacaatctcagttgactgcaacctccgcctcccgggttcaggagaatctcctgactcagcctcccaagtagctgggattacagacgcccaccaggacggctaatttttttatttttagtagttagaaggagtttcaccatgttggccaggctggtcttgaaccccttacctcgggtgatctgcccgccttggcctcccaaagtgctgggattacaagcgtgagccacggcgtccggccctggtcaggtttctttctattaaaacaaatataaagtggcagggcacgatggctaacacctgggatcgctttagccgaggagtttgagacacgccagagcaacacagtgagaccccatctctacaaaaaatttaaaaattagctggaagtggtagtgcgcggctgtggtcccagctgctccacaggctgaagagtggctccagtgcgagtagaggctgccgtgagccaagattgggccactgcacttcaacctgcacaacagaaagagaccctgcctcaaaaaataaaaattaaaattaaaagataatagtaatgaagtgtttctatttttctatattgttattcatcagtaagatttatttgcgtagtacatttctgtcaacaaacacgctagaaagattttcccagttggccgtatatttttcaacttggtttatacagtcttttgggaaaaattaatgaagactacgttttctaactttgctgtagtgctaagaaactccatggcagtcattaagattttttcccttcagatagttttcgggtttcatttgttgcacttacatttttaatccacctggaatgtatttacgttctaagccagtttctggctcctctcccagaaaacaacgctcaggtgttgcttagcaacccgcacttggtttggtgttcggcttcttttcgggggggaaaacaactgccctcccttccaagttgaggacgaccttaaagcgtcgcctagtaacctcgtttccgccgatgtgattggatccttctcgcgtccctcccctagtccccacgcccgaaagaacagaaccagaaacttaatctaacggttacaaaacaagggcagcgggcccggcgcggtggctcacgcctgtaatctcagcactttgggaagccaaggcgggcgaatcacttgaggtcaggagttcgagaacagcctggcccacagggtgaaactctttctctactaaaaatacaaaaattagcggggcgtggttgcgggcacctgtaatcccagctactcgggaggctgaggcaggagaatcgcttgaacccgggaagcggaggttgtagtgagccgagatcgcgccactgcactccagcctgggcgacagggcgagactcccgtttcgaaaaaacaaacaaacaaaaaacaaaacacaaaaacgaaaacaagggcagcgtacgcgttgcatagcaaccaggtctcctgcccctccctttgagacaagaggcggacctggacgccccgctcaaagatggcggctgactgagccgctttcaatttatttagcttttgacaataattccgtctaacccatcaggcccctagaagggctaactatgccctttctgagtcttccacgcggtgggggcgaaggaggatggagctagaacgaagcctcagcgcgtgccccgcacaaacatggcagcattcccagcagccctaaaccgcccgacgcgagcgcgcgcgcggcgcaggcgcatttctgctcattccgcggcgtcggctgcggctgcagtggtggtggcgggtaccgcacggggtatggtccccgggtccgagggcccggcccgcgccgggagcgtggtggccgacgtggtgtttgtgattgagggtacggccaacctgggaccctacttcgaggggctccgcaagcactacctgctcccggccatcgagtgagtgctgttt

SEQ ID NO: 22256 - DNA, 2300 bp, Homo sapien
gttggttccagtcttgatggacacggttgggcctgtagacgttcattcacttagcctacatttcctgaggcctcacatgtgccccgctgtggtgggcaagcctgggggtaagagaggactcagaccccatccccgcctgtgggagaggtaggatcagagaccacacttcagggggacagggccctcaagaccctcagaggggtgctcggtctccacacacgtcccctgcagcaaaggtcagcctctcacgaccacgtgaccggaataatggtggcaaccacagctgcccttgaggagaggccatccccgggccacaacccatgtgggacggatgctgcgacgcgactgcagatcaggcggaggagaaacgagagtctgtgtgtgttagtttcccaggctgccgtagcaaagtatgagaaactggccagaagaatggaaattgatgtctcagggttctggaggctggaagtccaaaatccaggtggtagggccaggctgtctctgaaatcttacaggggaagggcccttctgcctttcctggtgcctgctgaggctgcatcacccgtcctcacatggcctctccctgtgtctctctgtgtccttgtgtcttccctctgtgtgtgtgtccgtgtccacgtttctccttttcacagacaccagccatagtggattagggcccgcaatttaactcgattacctgtgtaaagatctttccaaattaggtcaccttctgaggtactggggcttaggacctcaacctgtctttttgaagggggcacacttgaacccataagactaggaggacagaggaggcccccgtctctggctgggaaggtgaagtggggccaggactgatttggagcagacagcccagagaggggaggggacagcaggaggctgggcatggagtcagtcactccagggttggagtcagcacaggatcctaggcttggggtccccagccctttcccattccctcccagtcctcatgattaaagacaacaaatgtcggccgggtgtggtggctcactcctgcaatcccagcactttgggaggctgaggcaagtggatcatgaggtcaggagatggagaccatcctggctaacatggtgaaatcccgtctctactaaaaatacaaaaaattagccaggtgtggtggcaggcacctgtagtcccagctactcgggagactgaggcaggagaatggcatgaacccaggaagcggagcttgcagtgaactgagatcatgccactgcattccagcctgggcgacagagcgagactccatctcaaaaaaaaaaaaaaacacagacagcaaatgtcccctgtcctgtctgggactggtgctgtgctagcaccagggattgggtagggaactcagcagggtccccgtcatcccaaggtgcatagcccaggatagagtgggggacagcatgggagcaggctcttcaagcatagcctggggatggggatgatggcaaccctgggggctgaccgctctgcccctgcaggttcatgggcgggggtggtgagagctgcagcctcatcgcggaaggactcagcacagccttgcagctgtttgatgacttcaagaagatgcgcgagcagatgtgagtgccccctccacccaggccgggccggtctctctctgcctggcctggaaccactttgcctgtcgagtggttctacctccagcctcaccctgtagggcatgggctctgtgtccccaagcacgctgagccaggaggctgcaggtgtgtccttgggggacgcctggccagtgcccggtctcagcatccccatcaggaagcagtgccaactctgggtgtcactcctgcctgccctgcctgctgggtgacgtagagcacatcccagaacctcttggagcctcagtgttctcagctgtaaagtaggggcgttgcttctgattccatgtgaggcggaatatgtgcatctccgctggtgctgggtctgggttccttctcagggcctctgttgctgctggctccatgtcttctctctttcctggtagtggccagacgcaccgggtctgcctcctcatctgcaactcacccccatacttgttgcctgctgttgagagcaccacgtactctggatgcacaactgagaatcttgtgcagcagattggggaggtgaggactccagggtctgagggacgagggtctgggggcccggagtcttgggtctgaggcaggaggcactgagggcctggactcctgggtctgagggaggaggcactgggggcctggactcttgggtctaagcggggaggcactggg

SEQ ID NO: 22257 - DNA, 2300 bp, Homo sapien
ctcactgcaacctccaccccctgggttcaatcgattctcctgccttagcctccagagtagctgggactacaggcatacaccaccatgcccggttaacttttgtatttttagtggagacggtgtttcaccatgttggccagactggtcttgaactcctgacctgaagtgatctgcccacctcggcttcccaaagtgcagaattacaggtgtgagccaccacgcctggcatgtttttcttttaacaactcccttttagtctttccaaagcaagcaatctggtttgtgtataaacaactgtcttgcattaatttcattagtttgatagtaaattaaacaagaacttctggcataaacaggtttggatcaaacagctacctttcaggaagtaaacagcttgagagatggaagtggaattgcttagtcataatagtagcctgctagccccagcagtgggcttcacagatgaaaaggaaagtgtctttcaagttggtggaccgagttaagtgagatggtttcagagagttttgttgcagtattactgatagaatttcagcctacattttcatttcactttctgacatgagttcccattttgctcactctggagtacaccctggtataccgctctccatgcttatacaattcagggcattcaaactcacgtgtgtcctgatgggttctgagggatgggaaggcattaacaggtagagaacaggaaggatgggagagagattttttggggggcggcagcaggggccacagtaccaagtttggatttaattctaaaggcactgggaagccattggatggttttgattattgtagtgacagagaaggcagcaagagttaggagacgtcacccaggcaagagatcttgatggtttggaccaacaagaatggggagaagtgaggattccgggagattaaagcagctcctgttttttctccttcctgctgccaggttgtcctcacatgggtgattgacagggcattggaggtacctgttgataactaacttgcagtttgtgttcagggagcactgactccgtttggccacaatgcaggttggatttggggtttaaggctgggctccagtcagccctcgggagcccctgggcaggaaaacatggacaggcctacgggttcttctgccatttcactggccactcctccgtgtcctttgctggttgcttctcattgtcgtgactgctaaagggatgagtgtcccagtctctttgtgagctcatccagtctccattcaaacactgatgactcccgaatttctctctccaggctatgacatcaatatctatctacattgtttagtcaacatccgaaacagaagtagggactccgtctctaacctcctacagctgtgtctatttctcctctctaccttcactcgactccgcccacactggctcccttttattccttctactttcaggatttgtctttgctgttctgtcctctttgcacacttttccagccatctggaatggcaggttgctcacaggtcgttttcttgacttcccttgcttgctaactttacctcgctatggtcatatcccatcgccctgtggatgtgcgctagttaacacttagcacagcctgtgattatgtctctccccagtggaccgtggggcctgtgagggacgtggtctgattcggtcgtcgccgagcacagaactggacagggtactcataacagatttttgttgttgtttttaaagaaaagctaacatttgagtagtgactgcgccaagcagtcaagcacagcccctcgggctcgatccccataaccactctagggttaggtattacccacgtttaaggaacaaaaatcgagggaaaaatcttatacaactactagtaagtagtcattccattttagcagagcgaatgagcgaatccacggaaggccggggagcgacgtgagtggcgagaagcttggagtcgccagggacggcgggcggagcctgggcgccggggctaatgggcggagcctccagggacagctggccccgcccaggccgcgcggggcccgctgggagttggagtcccttgcccacctcgccacgtcaccgactgcaaaccttcagctgtctcaggctcgggtgcaatccgtaccctcagtgggttccctttcagtgggttcctttgtccccaggcccattattccgtcctcccctcttccctgatgtattttggcgcggtctcctggctctgcgggcccagggctccggatgaggtctcccgccgtcccgacccccgcaaggggccagcttggtgtcgccttc

SEQ ID NO: 22258 - DNA, 2300 bp, Homo sapien
tataaacaactgtcttgcattaatttcattagtttgatagtaaattaaacaagaacttctggcataaacaggtttggatcaaacagctacctttcaggaagtaaacagcttgagagatggaagtggaattgcttagtcataatagtagcctgctagccccagcagtgggcttcacagatgaaaaggaaagtgtctttcaagttggtggaccgagttaagtgagatggtttcagagagttttgttgcagtattactgatagaatttcagcctacattttcatttcactttctgacatgagttcccattttgctcactctggagtacaccctggtataccgctctccatgcttatacaattcagggcattcaaactcacgtgtgtcctgatgggttctgagggatgggaaggcattaacaggtagagaacaggaaggatgggagagagattttttggggggcggcagcaggggccacagtaccaagtttggatttaattctaaaggcactgggaagccattggatggttttgattattgtagtgacagagaaggcagcaagagttaggagacgtcacccaggcaagagatcttgatggtttggaccaacaagaatggggagaagtgaggattccgggagattaaagcagctcctgttttttctccttcctgctgccaggttgtcctcacatgggtgattgacagggcattggaggtacctgttgataactaacttgcagtttgtgttcagggagcactgactccgtttggccacaatgcaggttggatttggggtttaaggctgggctccagtcagccctcgggagcccctgggcaggaaaacatggacaggcctacgggttcttctgccatttcactggccactcctccgtgtcctttgctggttgcttctcattgtcgtgactgctaaagggatgagtgtcccagtctctttgtgagctcatccagtctccattcaaacactgatgactcccgaatttctctctccaggctatgacatcaatatctatctacattgtttagtcaacatccgaaacagaagtagggactccgtctctaacctcctacagctgtgtctatttctcctctctaccttcactcgactccgcccacactggctcccttttattccttctactttcaggatttgtctttgctgttctgtcctctttgcacacttttccagccatctggaatggcaggttgctcacaggtcgttttcttgacttcccttgcttgctaactttacctcgctatggtcatatcccatcgccctgtggatgtgcgctagttaacacttagcacagcctgtgattatgtctctccccagtggaccgtggggcctgtgagggacgtggtctgattcggtcgtcgccgagcacagaactggacagggtactcataacagatttttgttgttgtttttaaagaaaagctaacatttgagtagtgactgcgccaagcagtcaagcacagcccctcgggctcgatccccataaccactctagggttaggtattacccacgtttaaggaacaaaaatcgagggaaaaatcttatacaactactagtaagtagtcattccattttagcagagcgaatgagcgaatccacggaaggccggggagcgacgtgagtggcgagaagcttggagtcgccagggacggcgggcggagcctgggcgccggggctaatgggcggagcctccagggacagctggccccgcccaggccgcgcggggcccgctgggagttggagtcccttgcccacctcgccacgtcaccgactgcaaaccttcagctgtctcaggctcgggtgcaatccgtaccctcagtgggttccctttcagtgggttcctttgtccccaggcccattattccgtcctcccctcttccctgatgtattttggcgcggtctcctggctctgcgggcccagggctccggatgaggtctcccgccgtcccgacccccgcaaggggccagcttggtgtcgccttcgttcttctgccaccccattcggtaggggctcccgttcccgccacgccccctgaagttgtggctcgcgcgtcttcccaggactcccccgcgccggagaggcccgcaggaccgccgagcccacactccgctcccgcccgggccccgctcccccgcgccgccttggtacgctccggccacgccccctcggacgcgcttggtacgcgccgggctcccccgctcgcctcagtggttcggccgcggcgaccccactccggcggcgcgtcccccgagcttggtacggctcag

SEQ ID NO: 22259 - DNA, 2300 bp, Homo sapien
tagcaaacacaaaaaattttattttgtgagtgcttaaaaagagaaaaacctgaacaaacttgctctccacccacgcaggtgattctccacccacgcaggtgattcttcacccacgcaggtgattctgacttttgggcagtcgtcagaagatcagatagaaaacctgagtatcttggcgttagaatgagttggacagagagtggatgttgccccgggggcttcaggcaccataccggacatccagcatctgagatgagttaaaacgcacagctggaggtgactttcgagatgagggtacacttacaacatacaagttgtttatggcgctgggacctgaggtatctagtccgcatatacagtgacacgtatgcatttactgccacaaagatgggtaaaagtcaggagaacgcacttaagagcccaagcgacatacttaatgtctgcttgtctaggagagcaggttgactcaggacttcaaatatgctgggatctggagccatagtaaagaacacatatgcttgcctaaaacccagggataccttccacagcaggagcagcacatcaagatgggacgatcatatttaaaaacgacggttaaggtgcaacctaaagtaaatctcacatcttggcaatcgtgtgcaaaactgcgcgcctgacatccctattgcacagggaagcccatctagtacttgcactgaggtttaaaaccttggggtgcatgtctgaggacccggaaagcacttttgaacaactagatgcgaatgctgcaggaaggggcgaaggcagtggagtgaaggggtacgtttaagttgtgggaggtgatctaagtctcggtatccatgtttatgaccccaggaagcctgtttaaggtttcagtagggctgccacagctctgtgccatccacaccgctgaggcagtgtatttaagaagcggacccgagcgcgaacccaggggaaatctcacatcggggcaagcgtgtgcacggtgcaaagtcgcgatgtgcggttttacagccccaggtaaaccttacggtttctgaaaagcatgtgcatcttttgggtccggagaagcgtgtgcagcccaaagtacctgcgaagctgaatgtttacgtttaaggtctgggctcacggcagtccatcaaagcatcccacatgtgggcgcgggcgcgtattctaggtgcgcactccacgggcacggagcggccgccaggggagaacgcccacgggtgcgacatctgggggcgctggtacaaagcgcgggcccctccctcgccgctgtcccccaaaaccgcccccatttccaggtttcctgcccggagagcgagcaactctccaataggaaaaacaagcgagcgtgccggctgcctgtctgccgcccccagcccgcgtttaaatcgggccgcggagtcagcagtaatatgagcccgccccgcccccgtcccccaaccccccaccccggcccgaacgcgcaacaaaggggagagcgcggcgcgaaccaccgggtgctccacgggggaacccggccccgggcgggaccacccttcgggccacaggggacaccccggagcggcgggggctgcggacaaaggcgtgagcccgggataggggctgggggggcggggccgtggaaggctctggaaaaagggcggggggctcaccatgggaggggccgagcgggcccggatccgcggaggctgcgggcctcgggggctggcaggccaggagcgcgagcggacggcgcgcaccacgaggggccgcggagggcggccgcgacccccgagggggcccccggcgccggagcggtacggggcacggcgcggacggaccatggcgggcgcgggccgagcgggcggggagctgccgcgggccacaaggggggctgcgggctccaccgactgaggggcgcgggcgcgggcgcgcggcttcgggggagacgggctgagccgtaccaagctcgggggacgcgccgccggagtggggtcgccgcggccgaaccactgaggcgagcgggggagcccggcgcgtaccaagcgcgtccgagggggcgtggccggagcgtaccaaggcggcgcgggggagcggggcccgggcgggagcggagtgtgggctcggcggtcctgcgggcctctccggcgcgggggagtcctgggaagacgcgcgagccacaacttcagggggcgtggcgggaacgggagcccctaccgaatggggtggcagaagaacgaaggcgacaccaagctggccccttgcgggggtcgggacggcgggagacctcatccggagccctgggcccgcagagc

SEQ ID NO: 22260 - DNA, 2300 bp, Homo sapien
ggggaaacatttggaagacagctgggacaccacccccagaggggtctcacagaccaaaacatgtagaacaccaagagaaagttctagcaataaagccaagcaacgccacaaatgctactcacaggcactctccccactatttttattactattttttttttgagacagagtttcactcatttcccagactggagtgcagtggtgcgatctcagctcactgcaacctcgctcactgcaagccgcgccatcatgcccggctaattttttttttttttttttttttagtagagatggggtttcaccatgttggccagactggtctcgaactcctgacctcaagtgatccgcccgcctcggcctcccaaagtgctgggattacagacgagggccaccaagcctgacctcacttattgttttttaaaaccaaaaacatctcaaagcaaacaagggaaagctccgcaaacagcctggcagcaggaaacccacgagagtttccccgtaataggcgcctccaggcgggggaaaacaaattataagggtgatttatttttatcttattacaaacaggtattttccaaattttctatgaagcacaaggagatctttccttccagaatactagcaaacacaaaaaattttattttgtgagtgcttaaaaagagaaaaacctgaacaaacttgctctccacccacgcaggtgattctccacccacgcaggtgattcttcacccacgcaggtgattctgacttttgggcagtcgtcagaagatcagatagaaaacctgagtatcttggcgttagaatgagttggacagagagtggatgttgccccgggggcttcaggcaccataccggacatccagcatctgagatgagttaaaacgcacagctggaggtgactttcgagatgagggtacacttacaacatacaagttgtttatggcgctgggacctgaggtatctagtccgcatatacagtgacacgtatgcatttactgccacaaagatgggtaaaagtcaggagaacgcacttaagagcccaagcgacatacttaatgtctgcttgtctaggagagcaggttgactcaggacttcaaatatgctgggatctggagccatagtaaagaacacatatgcttgcctaaaacccagggataccttccacagcaggagcagcacatcaagatgggacgatcatatttaaaaacgacggttaaggtgcaacctaaagtaaatctcacatcttggcaatcgtgtgcaaaactgcgcgcctgacatccctattgcacagggaagcccatctagtacttgcactgaggtttaaaaccttggggtgcatgtctgaggacccggaaagcacttttgaacaactagatgcgaatgctgcaggaaggggcgaaggcagtggagtgaaggggtacgtttaagttgtgggaggtgatctaagtctcggtatccatgtttatgaccccaggaagcctgtttaaggtttcagtagggctgccacagctctgtgccatccacaccgctgaggcagtgtatttaagaagcggacccgagcgcgaacccaggggaaatctcacatcggggcaagcgtgtgcacggtgcaaagtcgcgatgtgcggttttacagccccaggtaaaccttacggtttctgaaaagcatgtgcatcttttgggtccggagaagcgtgtgcagcccaaagtacctgcgaagctgaatgtttacgtttaaggtctgggctcacggcagtccatcaaagcatcccacatgtgggcgcgggcgcgtattctaggtgcgcactccacgggcacggagcggccgccaggggagaacgcccacgggtgcgacatctgggggcgctggtacaaagcgcgggcccctccctcgccgctgtcccccaaaaccgcccccatttccaggtttcctgcccggagagcgagcaactctccaataggaaaaacaagcgagcgtgccggctgcctgtctgccgcccccagcccgcgtttaaatcgggccgcggagtcagcagtaatatgagcccgccccgcccccgtcccccaaccccccaccccggcccgaacgcgcaacaaaggggagagcgcggcgcgaaccaccgggtgctccacgggggaacccggccccgggcgggaccacccttcgggccacaggggacaccccggagcggcgggggctgcggacaaaggcgtgagcccgggataggggctgggggggcggggccgtggaaggctctggaaaaagggcggggggctcaccatgggaggggccgagcgggccc

SEQ ID NO: 22261 - DNA, 2300 bp, Homo sapien
gtctggccgtgagcgagcaccggctcagcaacaagctgctggcttggagcggcgtcctcgagtggcaggaggtgagtctctgtggggctgcggctggcctccagggtcttgtcttgtccctgcggggacaggccagggcatctaggctgtgcacagtgacgcccctcctgcccccacagaagcgcagaccctactctgactccactgcaaagctgaagcggaccctgccctgccaagcctacgtgaaccaaggcgagaacctgtgagtgccggggcgtggcagccagggcggtggcaggggcagtggctgtggccgtggggatcagggcagccctttctgaccagctccttcccatagggagaccgaccagtggccgcagaagctgatcatgcagctgatccctcagcagctgctggtgagacccgcccctcccaccccatccactctgagcacccccatgcctggctgacccagctgtctgtcctgtcgcccccagaccaccctgggccccctgttccggaactcccagttggcacagttccacttcaccaacagagactgcgactcgctcaaggggctctgccgcatcatgggcaacggcttcgtgagtggggcgggctcccttgtagcactgtggtgacaagtacagctggaggcagcgctctgctcacacagtccaggcgggggtcggggggtctcccctggggccgagggtagccctcgtggcctctcggaccccatctggaaatgactgactccaggcaccctccgtagagcacagggtgaaggaactcagcctgagaggcctccagtttctgcatctgtgcccagcttcgaggtggccctgggggcgtgagtgcagggagggactggggccagccctgttggggcccaggagcctgtcggggacacatagcgtatggcagggacctggtaaatgggtgtgctaggcacaagagccagccaggagggagtggcacgttggggcttggtattctggtctgtaaaatgggctaacctccccgagtggcctgagctggccgtgagggagcagagctgagggtgctgaagcaggcgcggtgagtaggtcctcaggcctggctccaaggggacccaggtatccagccagtggctgtgcagggactgagtggggcaggcgcggccatgacctggacccggggggctgccaagggatctgagagcggcttccgcagcactccagggttgggctggttgaggggtagagatgacattttctgaggtagggaggacaggggagccgtgcttcctagggccaccgggaggctggagggagggaatttgtgtaaagcgcttgagatggtgactttagtacctagtgagtgctgggtgaacccagctggtgaggctgttcaggtgactgagattctggcgcagggcaggtcagaaagggggcttgggctgtgaaagatggcaggtgctggagaggaggcaggggtggggtgggagcgagttgtctgcccagaggacctggctctgggacattcccagtccctgttccctgttgggacagtctgcctctacccgtcccagctgccgttgagcgccctgggttccgctagggcctcccttctccctcaggagaccaggggcagaccagggcttgtgcctggcatgaggtctcttaagtgacccgttcccccttcacccagcaccgtttgttgagggcctgccatatctgggccccgagtacccagtctgtagggaaagtggacatccatactcaccccccaggcatggccctgggaggctgactgtgcatggctccagggaggccagggacagggccctgagcgggtgatccctgggctggacaccaaggttgagaagttaggccggcagcgtggaggggacagcactgtgggggtggcccggtgtggggaggggacatggggttttgggacggtcacaccacttcatctagacaccacagccaggcacatctgtcaggcttagttctcccatgcgccatcctcaagaggcaccagcactttatctgttgagcctttatgtggcaccaactgtgtgcactattacccggttttacagatgatggaggcccagaagcaggaggtggctggtgttaggtcacacagctaggaggcagcagaacggtggggcgctgcctgtgctcttaacccccaggccaagtcaccccatcaggcagtcaggagggctggcggcagggggtgatgtgggtgggaggtagtgccttcttggcattctcaccgcagcctgggtgccgggtgccactctgacc

SEQ ID NO: 22262 - DNA, 2300 bp, Homo sapien
ggctgccaagggatctgagagcggcttccgcagcactccagggttgggctggttgaggggtagagatgacattttctgaggtagggaggacaggggagccgtgcttcctagggccaccgggaggctggagggagggaatttgtgtaaagcgcttgagatggtgactttagtacctagtgagtgctgggtgaacccagctggtgaggctgttcaggtgactgagattctggcgcagggcaggtcagaaagggggcttgggctgtgaaagatggcaggtgctggagaggaggcaggggtggggtgggagcgagttgtctgcccagaggacctggctctgggacattcccagtccctgttccctgttgggacagtctgcctctacccgtcccagctgccgttgagcgccctgggttccgctagggcctcccttctccctcaggagaccaggggcagaccagggcttgtgcctggcatgaggtctcttaagtgacccgttcccccttcacccagcaccgtttgttgagggcctgccatatctgggccccgagtacccagtctgtagggaaagtggacatccatactcaccccccaggcatggccctgggaggctgactgtgcatggctccagggaggccagggacagggccctgagcgggtgatccctgggctggacaccaaggttgagaagttaggccggcagcgtggaggggacagcactgtgggggtggcccggtgtggggaggggacatggggttttgggacggtcacaccacttcatctagacaccacagccaggcacatctgtcaggcttagttctcccatgcgccatcctcaagaggcaccagcactttatctgttgagcctttatgtggcaccaactgtgtgcactattacccggttttacagatgatggaggcccagaagcaggaggtggctggtgttaggtcacacagctaggaggcagcagaacggtggggcgctgcctgtgctcttaacccccaggccaagtcaccccatcaggcagtcaggagggctggcggcagggggtgatgtgggtgggaggtagtgccttcttggcattctcaccgcagcctgggtgccgggtgccactctgacctcagccatggcagggtcgggggatgccgatgggcgctgcacgggctctcagaggcccctcacctatggccatggccttgactgtgggggcctctgtccaccgatgatctcccttcatcccctacaggtggggcggtccagggtggtgggggcacagtggccccgggcagtgaccacagggtcctgacccgcggcccccgcaggcgggctgcatgctgttcccccacatctccccctgtgaggtgcgcgtgctcatgctcctgtactcgtccaagaagaagatcttcatgggcctcatcccctacgaccagagcggcttcgtcagtgccatccggcaggtcatcaccacccgcaagcaggtgtgccagccaagcacagcccctctggggacagagggggattagaccccactgccctggttgggcagccagacttggtgtgggcggagtgtgatgcgatggctggagcaaggagctgcaggggagcccggaggatgccgggcgggttcccaccagggctccatggaaaagcggccactgggcggctctgcagggctggagggtgggtcttggcgcggcggcagggaagccagcggagcggggagctgggcaggggttgggatcgtcctgcggctggaaggccctgcctggtaaccacgtgtcctggtcatgccttgccagttgaggcagactctgcaggtcctgtgcaccaggtgagggccgggacctgtctcaggccactggggagccatggggggctgtgagcagatgaggggcagggcctgttcccctgggactagagaatggacccagctggggctaacaggccaaggctcggagggagggatggcaggccccaggacagacagacaggtttcccaggagcctgggcccctcttcccaccccgttcccttccaacaggcagtgggacctggtggtgtcaactcaggcccagtccagatcgtcaacaacaagtttctggcatggagtggtgtcatggagtggcaggaggtgagcactcggcagcccagggacttgggacccccagatcctcacggactgtggctgggaggggacactggcattgggggtctccagccctgagggctcctctttgcctctcccccaaaagcccaggcctgagcccaacagtcggtccaagaggtggctgccatcccacgtc

SEQ ID NO: 22263 - DNA, 2300 bp, Homo sapien
attcctgatgtggggcacagaccaggcgaagcagccccagggacccgctaccgctgcggggggacatttgtgggaagggcctcctcactaccgtctcccgtaggccaacgacggcacgcccatatccatcggggacagcatctttgtgggaggtaagggcctggaggctgctgagggtgggctgggacgcctccctccgagctggtgggaacggggtgtcccgtgtgttccagacgcagccggacgcccggccaactgggccccggggcggaagaagaaagacttctcctgcgccgatcgcctggtgaggcccctgccccctgccccgcgcccgagcccgaccctggcctgtgtctgatgttcgtcctcaacccctagtttgccctcaaccttggcctgcccttcgccacgcctgaggagttctttctcaagtggccagcagccggcttcgagctcccagcctttgatccggtgaggccctggggcgggggtgggggtggggatgggagggctcccggggatggggacggcatctcacgcgtgtcccccgcccctcgcagaggactgtctcccgctcagggcctctctgcctccccgagtccagggccctcctgagcgccagcccggaggtggttgtcgcagtgggattccctgggggtaagtgtcctgttcctgtgcgcgtgccctgagccccgcctgggtcctaggccacccaccgacactgccccccacacagccgggaagtccacctttctcaagaagcacctcgtgtcggccggatatgtccacgtgaacagggtatgaccaggcttttgccgccccaaatctattataaagttcccatctccacctctcaactggtttggggcggctttcctccatcattgcctccccgtccccgctcggggtcttctctccccctgggtctgccgatctgtttgtgacctctcgtgtccccaggacacgctaggctcctggcagcgctgtgtgaccacgtgtgagacagccctgaagcaagggaaacgggtcgccatcgacaacacaaacccagacgccgcgagccgcgccaggtagcgtgaccgcggggccgtaggtggcctgcggcggggtgggcggggcctgcacatccagctccttcccccacaggtacgtccagtgtgcccgagccgcgggcgtcccctgccgctgcttcctcttcaccgccactctggagcaggcgcgccacaacaaccgggtgagcccgctcagcccggacaccccccgggctgcaccccctgacccccctcctcccctgacccctgggcctgccgcccctctgatgttccccacagtttcgagagatgacggactcctctcatatccccgtgtcagacatggtcatgtatggctacaggtactgttggggatagcagggggcaggggcactggctgggccacatgatccaggctgtccctcactgttcccaccactgccaggaagcagttcgaggccccaacgctggctgaaggcttctctgccatcctggagatcccgttccggctatgggtggagccgaggctggggcggctgtactgccagttctccgagggctgagccccgcccagctcccctccacaataaacgctgtttctccttgagcttggccggcattttgctggaaggagggtggtccccacgggggaggggctccaggcctgccagtttcttacatggaggaggctttaaggacattttcaggtaacaaaaggtggggccctaccgaggggagtccagctgggacctggcatgagcactttagacattagccggggaacacacagggagggcgctgtgtggccccccgagagccagctggtgagcccacgagcctcaaccgaggggctggctcaaggccaggtgtgacccctgaggacaaaatccagctcaggttctgtgacactgaacttgaacccaaggcctgcgggtctggagattcgggggggaagagggtgtggacagccgagagccagacccagtgagttcccgggctgtccagcctgctgggccaccttagagctagggggctgcaaggcatcgggcagtgagcagagaaggcaggcaggtttttaaaaggctttattggggaaacgtagaggggtggggaccgtccttggaggcctcaggacaccatcctccatgttgctgggcagttgaagtccccaggggcccctgctcagaagcgtgtcacctgggggcaggggtgcagtgggggctgctggccacaggctcccaagcactgaccccacatccctgtgagcag

SEQ ID NO: 22264 - DNA, 2300 bp, Homo sapien
ggttgggggatcggcagttgggaggggcgctctgagattaaagagttttacctctgagataaatgtgaagtgtgttgtgagtgttcattcaacattttctgaaaccgaatggcagcgtctgattatcagtgaatagctgggggttggaattactgtgcccattttatttacttttttgagacagggtcccactctcgcccaggttcaagcgattctcctgcctcaacctcccgagtagctgggattacgcgccactgccgcccgggtaatttttgtattttcagtagaaacagggtttcatcatgttggtcaggatggtcttgaactcctgacctcaaatgatccacccgccttggcctcccaaagtgctgggattacaggcgtgagccacggcgcctggctttgtgcccattttatagatatgaagacacaggttcatggggtggaggagagcatcccagtcttatgtgaccatggaacccaatcttgaggaggtgagtgttggagacagagcccacatattcaccagcaaagccaggaactccagccgggagtcttctattataaaaggactggagcaactgggcttggtgcctcacgcctataagcccaacacgctgggaggccaaggcgggaggatcacatgacaccaggaggtcgagatcagcctgggcagcacagtgagaccccttctccaaagggaaaaaaaaatggctggaggttagaaagcaggtggaacctcgtccgaaattaggactaggtaaacgtagtcccaccagaccactaccgaaagaatgctaacactaaataagacttaaacggatctgagcactttgggaggccgaggtgggcggatcacgagatcaggagatcgagaccgtcctggctaacacggtgaaaccccgtctctactcaaaatacaaaaaattagctgggcgtggtggcgggcgcctgtagtcccagctactcgggaggctgagacaggagaatggcgtcaacccgggaggcggagcttgcaggtgagccgagatcgcgccactgcactccagcctgggcgacagagtgagactccgtctcaaaaaaaaaaaaaaaaaaagacttaaacagggctcactaccacccattttttaaagcttttgtcacgtgttagctcctttaatcgtcatggtaaccccacgaagcggaaacgattatcctttttatagatgaggaaactagaacatcgagggtgaagccaaagaaggacttaggggcgctgtcgggggcggaggtttcctcgactgacaatgaccatcagatgggaaaaaaatcttcctccctgggatgaaaattagaagtcaaggtggaaagaggcaaatctgctaacggaggatccagtccccgctaccggcctgagcctcgcgttgcagcaagagagatgaaggtcagggctgccgagagaccctgggggccgggagtcggggaaggggcgtggctgctgtgggaggaggccaggccccgccccccacccacgaggggacgagtcatttccgtccgccgaggaaccgaccgccgccggccgggttgcaggcggggcacctcgggcaggacctccctggtcggaagtggccgtgagcccaagccgcggtcccgggtgagtacggggcggggcggaggcatgtgcgaggctctctgcctgtacgctggaaagtggggattgcaactcggggagggatggagcacgcgtcgtcgcctgggaaacgggtcgacccgcggaaggcgagcgggtgggacttccggagcagttaatggtggggaaactttctagtggatgtgggaggaggcgggacttcctgcagcaaattggggctgtgcgccgctcaagcccgtttacctgctccccaggccggcacccaggatgggcgaggtggaggccccgggccgcttgtggctcgagagcccccctgggggagcgccccccatcttcctgccctcggacgggcaagccctggtcctgggcaggggacccctgacccaggttacggaccggaagtgctccagaactcaaggtgagcggggcctgagctggagggggtgtggcctgctgcaaaagcgggaacaatccagagggacgcttggctgctacgcgggattgcagtggtgcagccagccccgaagtcggaaggtgctctctagggagtacaggaagataaagtttgtgcttgatttagaattagctagatcctttgggggagaggggatcgagccgatttagggaggatgttcactgcgcggatgatgctcaggccatcgggaaatcc

SEQ ID NO: 22265 - DNA, 2300 bp, Homo sapien
gattccttctattaagggattggctcgctgagttctaagctctaaatgggtcaactcctttgttttccgcctagcgacaagggatttgctcgcacggcattggctccatcccctagtcgctggacagctctttttttgattggctcaaatcctgtaaagggcttgaccagtctctacatagtcaccgtccgcttttcctgagttctccctcccaattggctccagcttcctgggggcgtggccaagccctcctcttcccagaattggcccggggccttcaatttacgttctttacactacggggactggggtcgtctttgcccacgtcccgacaacttgttccctgaccccctcagggatggccccaaactgtccctgcctctggcaccccctttcattggttccatccatccccacaacagcctgccaatcgaagcccgtccctgcatccaggatggtaccagctcccgcccctcgccccccacctccacaggtgccttaaagggccctcgtccacccaaggtggggggcaggggccctcactctccggccctggtgtgggggagagagtgaggggttgggggatcggcagttgggaggggcgctctgagattaaagagttttacctctgagataaatgtgaagtgtgttgtgagtgttcattcaacattttctgaaaccgaatggcagcgtctgattatcagtgaatagctgggggttggaattactgtgcccattttatttacttttttgagacagggtcccactctcgcccaggttcaagcgattctcctgcctcaacctcccgagtagctgggattacgcgccactgccgcccgggtaatttttgtattttcagtagaaacagggtttcatcatgttggtcaggatggtcttgaactcctgacctcaaatgatccacccgccttggcctcccaaagtgctgggattacaggcgtgagccacggcgcctggctttgtgcccattttatagatatgaagacacaggttcatggggtggaggagagcatcccagtcttatgtgaccatggaacccaatcttgaggaggtgagtgttggagacagagcccacatattcaccagcaaagccaggaactccagccgggagtcttctattataaaaggactggagcaactgggcttggtgcctcacgcctataagcccaacacgctgggaggccaaggcgggaggatcacatgacaccaggaggtcgagatcagcctgggcagcacagtgagaccccttctccaaagggaaaaaaaaatggctggaggttagaaagcaggtggaacctcgtccgaaattaggactaggtaaacgtagtcccaccagaccactaccgaaagaatgctaacactaaataagacttaaacggatctgagcactttgggaggccgaggtgggcggatcacgagatcaggagatcgagaccgtcctggctaacacggtgaaaccccgtctctactcaaaatacaaaaaattagctgggcgtggtggcgggcgcctgtagtcccagctactcgggaggctgagacaggagaatggcgtcaacccgggaggcggagcttgcaggtgagccgagatcgcgccactgcactccagcctgggcgacagagtgagactccgtctcaaaaaaaaaaaaaaaaaaagacttaaacagggctcactaccacccattttttaaagcttttgtcacgtgttagctcctttaatcgtcatggtaaccccacgaagcggaaacgattatcctttttatagatgaggaaactagaacatcgagggtgaagccaaagaaggacttaggggcgctgtcgggggcggaggtttcctcgactgacaatgaccatcagatgggaaaaaaatcttcctccctgggatgaaaattagaagtcaaggtggaaagaggcaaatctgctaacggaggatccagtccccgctaccggcctgagcctcgcgttgcagcaagagagatgaaggtcagggctgccgagagaccctgggggccgggagtcggggaaggggcgtggctgctgtgggaggaggccaggccccgccccccacccacgaggggacgagtcatttccgtccgccgaggaaccgaccgccgccggccgggttgcaggcggggcacctcgggcaggacctccctggtcggaagtggccgtgagcccaagccgcggtcccgggtgagtacggggcggggcggaggcatgtgcgaggctctctgcctgtacgctggaaagtggggattgcaactcggggagggatggagcacgcg

SEQ ID NO: 22266 - DNA, 2300 bp, Homo sapien
ctcttgacgggatggctgggcgacggagcagggtggcatcatccatcaaattcaacacaagccccacgtggaattctaaattttctagacaccatgttaaaagagtaaaaaaagcagatgaaattcctttttttttttttttttgcccaggctggcttcgaactcttgggctcggtgatccgcctgcctcggcctcccaaagtgctggggttgcaggcctgagccaccacgcccggctcgttcggctttattgtactcagtcttcagaacccagtgcaggttttattgttagaggcctctctgctaggactctctgctaggactccctgcctttccagtactccctgttcacatgtggctggcggctcccacagaggccagggcagggccaaaggggaaggagtacagtgacttggggcaggaggaatgggttggggcagaggacgtcgccagggtctgggcctgcgaggactggatggtgagaatcctggggagtagcaggtttggggaggacacacagcaccgctgggacaaggtgggtggagggtggtgagtgccatccaggggacgggcgggcactctgagtgggtggcgatgatgtaggccgccaagcctcagccccctctgtcctgctctggcccgcagggcgcggatggcgtcggggcgccccgaggagctgtgggaggccgtggtgggggccgctgagcgcttccgggcccggactggcacggagctggtgctgctgaccgcggccccgccgccaccaccccgcccgggcccctgtgcctatgctgcccatggtcgaggagccctggcggaggcagcgcgccgttgcctccacgacatcgcactggcccacagggctgccactgctgctcggcctcctgcgcccccaccagcaccacagccacccagtcccacacccagcccaccccggcctaccctggccagagaggacaacgaggaggacgaggatgagcccacagagacagagacctccggggagcagctgggcattagtgataatggaggtgagagggtgggggcaggggcgggtgcggcccagcgcttgaggtgcccgcaggaggctttgtcggggtgggggcctgcttagcccagagtacttctacagaagtgcagtctcaggaccccagagccagacaggcttgcctggggcttgctgtgtgatctaaagccagtcccttccctgctctgagccttactggtcctggggccagctctgtgctgggagtggtgggcacaaggacacagagcaggctcgggcttttttctcaaggggctcccggtctagccaaggaactggagtcccggtgggggttgggaggctctggggcaggtcatgggtagaaccagagtcgtttccacaacgcctgggaggccaagcaggagttaaagagttgtctgggatgcagccaacatctgaggaagccagggagggagcagccagctgttttggggggaatttgggggtcgggcacttcccggaggctggactgtaacgctagggctttgcggagttagtaggagtttgatcagtcactaggaggtccttgtttgttgttattaccaatggcaggcctcctcaccattgctggagaaaacccgtgtagggtgaagggcaggcatcctgagttcaaatcctggtggtgtcccttagtagccatgggacctcgggcaagtgacttaacttctctgggcctccaggtctccatttgtgaaacagaggtcatagtcattgcatgtttctctaaggctgtgttttgagtcacattgtcccgaacagatcgtagaggtttcatgttagcagcccgttgtgtgcagctgagagggtggcagatccatagaaactgggttggtttttgccgatgaccaggcaggctgctagaggaagttgtttttgaggtgaaggaaatgggtctcagaagcttcagggaggtggaggtggtggctgtggcagtggccgtggctgaggaggaggacacatggagcatggctaggtgctgcctggcctgggcctctaactcaggtcatccacagggctctttgtgatggatgaggacgccaccctccaggaccttccccccttctgtgagtcagaccccgagagtacagatggtgagtgtcccaggctgttcccctcccgacctgagggcaggcacacggccgacacaaaggcagggacagaagctgaagtccaccctctctttcagatggcagcctgagcgaggagacccccgccggcccccccacctgctcagtgcccccagcctcagccctac

SEQ ID NO: 22267 - DNA, 2300 bp, Homo sapien
cacatcttggggtgtggggtactaaaatttcgacaggaggggtggttccacccctctcctccttagctcttttccctcctccctgcatccaaagaggacagccacatcgtgctccccctcctgtggggaacacgtctcactttcctctaatctctccctgatcttacacgaaactcgtctatcggggcgggttcttcctccatctctcagctccttggaggaaacaggacctcctctagaagctgaagggtaaggaggacccccaggtcttggctactctcctgttgggtagcattacagggtgcccctggaccttggcaaagaggtctgtggaagtcgccctgtcctttttgctcatgtctcctgagttgggggagccctcacaactcactcaccctatttcactctttaatcccgtggctactccaagattgagtacacggagagttcatcctgacgttctcttccgggacctcctctccccctcttctccgcatgtcattaggggctggaggcccgtggaagtgagagccccaggcctagcacggcgaggcagttgactttggaccagccatttcttgcttagagcctcagtttcctccctcatcagctgggaaggacatgggtgtgtttgagacaccgggtaccccccagttcagtggggttttggggctgggcagtcagcagtttcagccccacttgtgccctgtgtagctgtgtgcttttttgccagtgtcctaagctctctgagcctcacagtttcagccccacttgtgccctgtgtagctgtgtgcttttttgccagtgtcctaagctctctgagcctcacttttccatctggattagaatatctgccctcctaaaggcaggcaggatggcggtcaggatttagaacaggccccggatctagactttctgagtccaggtcccagccctgcctcttccagttgtggcccttcaagatgctgactgcccctgggcctgagtttgcaactgtaaaatggggtgaactgtaactaaagctcctgtctcatagtgtaggtgaaagggtgggatgagaaggttgatcccatcttgggtccttgcgtggcttctgggaggtggtggataaacctcttccttcccttggggctttgaactccctgagtgagtcagataggtgagatgccaggtgtggaatcccagcactgaataggtgctcagcaaacaccaacatcaatgatcgtgagtcataaaaggcctgcaaatttcattcagactccagactccctgctcccttcaccctggtgggctggaccacagctgtgcctgaatccgtgcagtggcggtgtgcttactgcctcccggaagagcgtcttccgcagcccagcagctctggctcaaccacgctggttaatggggaagaaaatgaggcacagagagggccagtgagccatctaaggtcacacagcaggtttgagacagagtcagggcaaggacccagcccccctgccctcgctcttctcacccagtaaggagacgcaccctgcattgtctgcttagggccgacctgtcctgcaaacacaaatccctgaccttgggggaattcacagtctgatgcaggaggcagccaggttacagctgtcacaagctcaggtgacatgaatgctcatggaggaagcccagggcatcggatgggctcctgaagtcatctgatgcaccctgggggatcagggacaacagaggacctgccagaacagtcttgtaggaaaagccgtgtggatttcccagcacagagagcagcgccagcaccatttcagccccgactctctgaggcctcagtcatagaaccagccagttccctctggaaggaagtgtgctgggaaggtggccactcagacagtgtgggaccccctatggagcagactggctggatctatgggcgagggaaagtttcttccaccctaggatgagtgaaaggttggtggggaatggagcacaagtcatcaaggtcagggaccacgttttctgaaggcctcgggcctcagaggctctggaaggccgtggaggcaggatggcccaggagctggggatggccagaacacctagagcctccagggcctgccctgaggactatggcgaggagtagcatcagctccgggtgctgaaggaaccccctgggccttgtgcaggacactcttgacgggatggctgggcgacggagcagggtggcatcatccatcaaattcaacacaagccccacgtggaattctaaattttctagacaccatgttaaaagagtaaaaaaagcagatgaaatt

SEQ ID NO: 22268 - DNA, 2300 bp, Homo sapien
attgtatactggaattgaagccaaggaggtaccattttgctcgagggcatggcctaagccggtcagctaaggccatgttaatacggggctgtcccatctctctgcggggcgcgacagctggaagagccgaacggataagagaagaggaggtgagaggagctgtacaccacaagaggcactgagggactcaggataacgggatgaagccgtcagtgcccccagaaacgaagcggccccggacgaatttctgagtcaccgtcgcgagaaagcgggctgagccgccattttgaagcctggcaaaccgaagcaagaaatgctgccgtgttggatctttgccagccttcgtgccgaatgggagcaggttggagggagggagagccaatatacactatgggctgattaagcccggttggctgccatgttgttaacgagcaccgatttcctctacttttgtcgaagaagtttattgtgggtcagggacgtcaggtcgcttgccttcgtttactgtggtcatgattgagcatatgaggacggccattattgttgggggcaaatggaaatgctctaggcggggccatttttcttaggggcaagctgtcgtcacccttgtcaactggttcggatgaagcccctgtggccgccatcttgatctcgggcggccccgataagggaggcggagtgtgcggagaggaggcggggcaactgcgcggacgtgacgcaaggcgccgccatgtcttttgagggcggtgacggcgccgggccggccatgctggctacgggcacgtgagtggaggcggcgttgttaaccgcggtgtggggaggatttggccgtcctgaggcagcggggcgctgggagggcgagcggctcacgggaggggtatggcctgcacagatcagagggcagaggtctgccagcgatcctttgctgagcgctggaagggggtcgcccgtgggaatcgtcctgtcagacctgaggcaaatcgtagacagtctcaccttgcggttccagagcgcctgggatctctacctgggccgtggaccacgtccacggggtcgggggatggtttggggggcctcggggcgcccctcacccgtccaaaggcgggacttccggtcctggcctccgtctgggcgggatttcctgttttcttcctagaccagtgggtcctccctggaccccgggcgaggttgggaggtctcggggcagctgagcgtggccccaggcgctcaccccatggctaccgcgttcatgctcaggttcctcacatcttggggtgtggggtactaaaatttcgacaggaggggtggttccacccctctcctccttagctcttttccctcctccctgcatccaaagaggacagccacatcgtgctccccctcctgtggggaacacgtctcactttcctctaatctctccctgatcttacacgaaactcgtctatcggggcgggttcttcctccatctctcagctccttggaggaaacaggacctcctctagaagctgaagggtaaggaggacccccaggtcttggctactctcctgttgggtagcattacagggtgcccctggaccttggcaaagaggtctgtggaagtcgccctgtcctttttgctcatgtctcctgagttgggggagccctcacaactcactcaccctatttcactctttaatcccgtggctactccaagattgagtacacggagagttcatcctgacgttctcttccgggacctcctctccccctcttctccgcatgtcattaggggctggaggcccgtggaagtgagagccccaggcctagcacggcgaggcagttgactttggaccagccatttcttgcttagagcctcagtttcctccctcatcagctgggaaggacatgggtgtgtttgagacaccgggtaccccccagttcagtggggttttggggctgggcagtcagcagtttcagccccacttgtgccctgtgtagctgtgtgcttttttgccagtgtcctaagctctctgagcctcacagtttcagccccacttgtgccctgtgtagctgtgtgcttttttgccagtgtcctaagctctctgagcctcacttttccatctggattagaatatctgccctcctaaaggcaggcaggatggcggtcaggatttagaacaggccccggatctagactttctgagtccaggtcccagccctgcctcttccagttgtggcccttcaagatgctgactgcccctgggcctgagtttgcaactgtaaaatggggtgaactgtaactaaagctcctgtctcatagt

SEQ ID NO: 22269 - DNA, 2300 bp, Homo sapien
gggggtacccggtgtctcaaacacacccatgtccttcccagctgatgagggaggaaactgaggctctaagcaagaaatggctggtccaaagtcaactgcctcgccgtgctaggcctggggctctcacttccacgggcctccagcccctaatgacatgcggagaagagggggagaggaggtcccggaagagaacgtcaggatgaactctccgtgtactcaatcttggagtagccacgggattaaagagtgaaatagggtgagtgagttgtgagggctcccccaactcaggagacatgagcaaaaaggacagggcgacttccacagacctctttgccaaggtccaggggcaccctgtaatgctacccaacaggagagtagccaagacctgggggtcctccttacccttcagcttctagaggaggtcctgtttcctccaaggagctgagagatggaggaagaacccgccccgatagacgagtttcgtgtaagatcagggagagattagaggaaagtgagacgtgttccccacaggagggggagcacgatgtggctgtcctctttggatgcagggaggagggaaaagagctaaggaggagaggggtggaaccacccctcctgtcgaaattttagtaccccacaccccaagatgtgaggaacctgagcatgaacgcggtagccatggggtgagcgcctggggccacgctcagctgccccgagacctcccaacctcgcccggggtccagggaggacccactggtctaggaagaaaacaggaaatcccgcccagacggaggccaggaccggaagtcccgcctttggacgggtgaggggcgccccgaggccccccaaaccatcccccgaccccgtggacgtggtccacggcccaggtagagatcccaggcgctctggaaccgcaaggtgagactgtctacgatttgcctcaggtctgacaggacgattcccacgggcgacccccttccagcgctcagcaaaggatcgctggcagacctctgccctctgatctgtgcaggccatacccctcccgtgagccgctcgccctcccagcgccccgctgcctcaggacggccaaatcctccccacaccgcggttaacaacgccgcctccactcacgtgcccgtagccagcatggccggcccggcgccgtcaccgccctcaaaagacatggcggcgccttgcgtcacgtccgcgcagttgccccgcctcctctccgcacactccgcctcccttatcggggccgcccgagatcaagatggcggccacaggggcttcatccgaaccagttgacaagggtgacgacagcttgcccctaagaaaaatggccccgcctagagcatttccatttgcccccaacaataatggccgtcctcatatgctcaatcatgaccacagtaaacgaaggcaagcgacctgacgtccctgacccacaataaacttcttcgacaaaagtagaggaaatcggtgctcgttaacaacatggcagccaaccgggcttaatcagcccatagtgtatattggctctccctccctccaacctgctcccattcggcacgaaggctggcaaagatccaacacggcagcatttcttgcttcggtttgccaggcttcaaaatggcggctcagcccgctttctcgcgacggtgactcagaaattcgtccggggccgcttcgtttctgggggcactgacggcttcatcccgttatcctgagtccctcagtgcctcttgtggtgtacagctcctctcacctcctcttctcttatccgttcggctcttccagctgtcgcgccccgcagagagatgggacagccccgtattaacatggccttagctgaccggcttaggccatgccctcgagcaaaatggtacctccttggcttcaattccagtatacaatatggagaaggaagtgggcgtttcaaggcgtgcttgccccaggtggtgcagctctcagaccctcccacttgtttacttcgtggcgagagggcgaacactgcgcctgcgcactctccgtagccggatccaccttcagcgtctgcgccacgtgactccgatccaccctcgaggttccagtggaataacccccttctgaaaaatggtttcacccgctccttctctagaacgggtcgggccgctaccactgtccggcccggaggggaactgttttctccggaagtgacaacacgctgactaggaaaaggaggaggcggggcagtggggccttcggcggcgactatggaaggagccggctacagggtaagcactgaggacgcattccctcgc

SEQ ID NO: 22270 - DNA, 2300 bp, Homo sapien
tgcagggaggagggaaaagagctaaggaggagaggggtggaaccacccctcctgtcgaaattttagtaccccacaccccaagatgtgaggaacctgagcatgaacgcggtagccatggggtgagcgcctggggccacgctcagctgccccgagacctcccaacctcgcccggggtccagggaggacccactggtctaggaagaaaacaggaaatcccgcccagacggaggccaggaccggaagtcccgcctttggacgggtgaggggcgccccgaggccccccaaaccatcccccgaccccgtggacgtggtccacggcccaggtagagatcccaggcgctctggaaccgcaaggtgagactgtctacgatttgcctcaggtctgacaggacgattcccacgggcgacccccttccagcgctcagcaaaggatcgctggcagacctctgccctctgatctgtgcaggccatacccctcccgtgagccgctcgccctcccagcgccccgctgcctcaggacggccaaatcctccccacaccgcggttaacaacgccgcctccactcacgtgcccgtagccagcatggccggcccggcgccgtcaccgccctcaaaagacatggcggcgccttgcgtcacgtccgcgcagttgccccgcctcctctccgcacactccgcctcccttatcggggccgcccgagatcaagatggcggccacaggggcttcatccgaaccagttgacaagggtgacgacagcttgcccctaagaaaaatggccccgcctagagcatttccatttgcccccaacaataatggccgtcctcatatgctcaatcatgaccacagtaaacgaaggcaagcgacctgacgtccctgacccacaataaacttcttcgacaaaagtagaggaaatcggtgctcgttaacaacatggcagccaaccgggcttaatcagcccatagtgtatattggctctccctccctccaacctgctcccattcggcacgaaggctggcaaagatccaacacggcagcatttcttgcttcggtttgccaggcttcaaaatggcggctcagcccgctttctcgcgacggtgactcagaaattcgtccggggccgcttcgtttctgggggcactgacggcttcatcccgttatcctgagtccctcagtgcctcttgtggtgtacagctcctctcacctcctcttctcttatccgttcggctcttccagctgtcgcgccccgcagagagatgggacagccccgtattaacatggccttagctgaccggcttaggccatgccctcgagcaaaatggtacctccttggcttcaattccagtatacaatatggagaaggaagtgggcgtttcaaggcgtgcttgccccaggtggtgcagctctcagaccctcccacttgtttacttcgtggcgagagggcgaacactgcgcctgcgcactctccgtagccggatccaccttcagcgtctgcgccacgtgactccgatccaccctcgaggttccagtggaataacccccttctgaaaaatggtttcacccgctccttctctagaacgggtcgggccgctaccactgtccggcccggaggggaactgttttctccggaagtgacaacacgctgactaggaaaaggaggaggcggggcagtggggccttcggcggcgactatggaaggagccggctacagggtaagcactgaggacgcattccctcgcttcagtgtatgcgaaacgccccgtctagtgatcagctcttctctcaggccttggctctcgagaatccggcacggccttggcaaacaccgatctcttataaacgcgccgtcaccctcccgtccaccgccccagggaagaacctcccatggccccgcccccccggctcaggcgactccttgagccctgccccctgtggaacgcacgtcagcatccgaacgcgggctggaccattctccccgccttggtcccggggcaatggccctcccggccccgccccctgagggtggctcctccctgggcccgtccctattggctccccaggctggtcccctcgcttgggccccagccctcgctggttccccccaactcaggtggtgtttgagaagggcggagtgtacctgcacaccagcgctaagaagtatcaggaccgagactctctcatcgctggtgtcatccgtgtcgtggaaaaggtgcgctgggagggagcagggctcggacccgctccgagcgggatgcaggcggtctgggatgcaggcggcagctgtaggagtttggtctggcggt

SEQ ID NO: 22271 - DNA, 2300 bp, Homo sapien
aggtcccactgctgaccgccagaccaaactcctacagctgccgcctgcatcccagaccgcctgcatcccgctcggagcgggtccgagccctgctccctcccagcgcaccttttccacgacacggatgacaccagcgatgagagagtctcggtcctgatacttcttagcgctggtgtgcaggtacactccgcccttctcaaacaccacctgagttggggggaaccagcgagggctggggcccaagcgaggggaccagcctggggagccaatagggacgggcccagggaggagccaccctcagggggcggggccgggagggccattgccccgggaccaaggcggggagaatggtccagcccgcgttcggatgctgacgtgcgttccacagggggcagggctcaaggagtcgcctgagccgggggggcggggccatgggaggttcttccctggggcggtggacgggagggtgacggcgcgtttataagagatcggtgtttgccaaggccgtgccggattctcgagagccaaggcctgagagaagagctgatcactagacggggcgtttcgcatacactgaagcgagggaatgcgtcctcagtgcttaccctgtagccggctccttccatagtcgccgccgaaggccccactgccccgcctcctccttttcctagtcagcgtgttgtcacttccggagaaaacagttcccctccgggccggacagtggtagcggcccgacccgttctagagaaggagcgggtgaaaccatttttcagaagggggttattccactggaacctcgagggtggatcggagtcacgtggcgcagacgctgaaggtggatccggctacggagagtgcgcaggcgcagtgttcgccctctcgccacgaagtaaacaagtgggagggtctgagagctgcaccacctggggcaagcacgccttgaaacgcccacttccttctccatattgtatactggaattgaagccaaggaggtaccattttgctcgagggcatggcctaagccggtcagctaaggccatgttaatacggggctgtcccatctctctgcggggcgcgacagctggaagagccgaacggataagagaagaggaggtgagaggagctgtacaccacaagaggcactgagggactcaggataacgggatgaagccgtcagtgcccccagaaacgaagcggccccggacgaatttctgagtcaccgtcgcgagaaagcgggctgagccgccattttgaagcctggcaaaccgaagcaagaaatgctgccgtgttggatctttgccagccttcgtgccgaatgggagcaggttggagggagggagagccaatatacactatgggctgattaagcccggttggctgccatgttgttaacgagcaccgatttcctctacttttgtcgaagaagtttattgtgggtcagggacgtcaggtcgcttgccttcgtttactgtggtcatgattgagcatatgaggacggccattattgttgggggcaaatggaaatgctctaggcggggccatttttcttaggggcaagctgtcgtcacccttgtcaactggttcggatgaagcccctgtggccgccatcttgatctcgggcggccccgataagggaggcggagtgtgcggagaggaggcggggcaactgcgcggacgtgacgcaaggcgccgccatgtcttttgagggcggtgacggcgccgggccggccatgctggctacgggcacgtgagtggaggcggcgttgttaaccgcggtgtggggaggatttggccgtcctgaggcagcggggcgctgggagggcgagcggctcacgggaggggtatggcctgcacagatcagagggcagaggtctgccagcgatcctttgctgagcgctggaagggggtcgcccgtgggaatcgtcctgtcagacctgaggcaaatcgtagacagtctcaccttgcggttccagagcgcctgggatctctacctgggccgtggaccacgtccacggggtcgggggatggtttggggggcctcggggcgcccctcacccgtccaaaggcgggacttccggtcctggcctccgtctgggcgggatttcctgttttcttcctagaccagtgggtcctccctggaccccgggcgaggttgggaggtctcggggcagctgagcgtggccccaggcgctcaccccatggctaccgcgttcatgctcaggttcctcacatcttggggtgtggggtactaaaatttcgacaggaggggtggttccacccctctcctccttagctctttt

SEQ ID NO: 22272 - DNA, 2300 bp, Homo sapien
gctgtggagcaaggtggagagtcatcttcatcttcatcttcatcctcctgccctggggcagcgcaggtggtcagctcagccttccagtgtctcgtcactagctctgtgggtgccgactgacttccggcccctgggtggaactcatcagctccaatggaggtctcattccccactaaagaacccccctacagaggcatccaacttctccgtgtgccttgaaggttgttctgctgtccctgaaataccttcttgtcctttcatatcctgggagtcccagctcaaatgtctgctctcccaggaagcgttggggatctggaatcagactgtctgggtgcaaaaagttccaacacttcctagcgttttcgacctcatctatcagtttctcaaaaagtgagtaagggtcagggcttaggtgggtctggatctgacttatctctgggtctcagaattgcccaggacggggtccagccatgggaagtcccaggagacataacgaagggaaagccgggagcagtgacgaagtgggtgagtaggctgtcaggccctgtcctctggcaccagaggaaatgccatttcccttcaagcaactcgaatccacatcttgcaccctggcagggatctcccaagaagcaaagggagagaggggtcagccgtccccacgaccgtgcgtcttatgctccctgctctttttccttgaatgggcatcctctgcccatttcacagagaggagcaaaaggagaggcagagtacccaagcctaaacagggtcacacatgccccacgagtaggtctgggattgtacgcaggtccctcaaatgacttacaacagcacggacctagaaaaaaagcgagtggagaagggcaaagcgggtggagcctaccttcttggagaagaggatttgggtggaatctccagcctcctctacaggagcccagtgcaggaggacgtcattgtcctagggtaaggagggaggcggggttagaggcgctccccaaaccacattcccaaaactttccgttgcaaatttccaaactttcccagtttctaccctcagcctttcaaagtcccgcccctcattccagttcccacacccagccttcttcaggtcccactgctgaccgccagaccaaactcctacagctgccgcctgcatcccagaccgcctgcatcccgctcggagcgggtccgagccctgctccctcccagcgcaccttttccacgacacggatgacaccagcgatgagagagtctcggtcctgatacttcttagcgctggtgtgcaggtacactccgcccttctcaaacaccacctgagttggggggaaccagcgagggctggggcccaagcgaggggaccagcctggggagccaatagggacgggcccagggaggagccaccctcagggggcggggccgggagggccattgccccgggaccaaggcggggagaatggtccagcccgcgttcggatgctgacgtgcgttccacagggggcagggctcaaggagtcgcctgagccgggggggcggggccatgggaggttcttccctggggcggtggacgggagggtgacggcgcgtttataagagatcggtgtttgccaaggccgtgccggattctcgagagccaaggcctgagagaagagctgatcactagacggggcgtttcgcatacactgaagcgagggaatgcgtcctcagtgcttaccctgtagccggctccttccatagtcgccgccgaaggccccactgccccgcctcctccttttcctagtcagcgtgttgtcacttccggagaaaacagttcccctccgggccggacagtggtagcggcccgacccgttctagagaaggagcgggtgaaaccatttttcagaagggggttattccactggaacctcgagggtggatcggagtcacgtggcgcagacgctgaaggtggatccggctacggagagtgcgcaggcgcagtgttcgccctctcgccacgaagtaaacaagtgggagggtctgagagctgcaccacctggggcaagcacgccttgaaacgcccacttccttctccatattgtatactggaattgaagccaaggaggtaccattttgctcgagggcatggcctaagccggtcagctaaggccatgttaatacggggctgtcccatctctctgcggggcgcgacagctggaagagccgaacggataagagaagaggaggtgagaggagctgtacaccacaagaggcactgagggactcaggataacgggatgaagccgtcagtgcccccagaaacgaagcgg

SEQ ID NO: 22273 - DNA, 2300 bp, Homo sapien
ccccccaggctacgtccagggcatgagtgatcttctctccccgatcctctacgtcattcagaacgaggtggatgctttctggtgtttctgtggcttcatggagctcgtggtgaggcttgggtcaggggtgggacacaggcctatcgagcgatcaggtgtcctggtacctcacggggtctgctctttcccccctccttccgtcccacagcaagggaactttgaagagagccaggagaccatgaagcggcaactcgggcgactgctgctgctcctgagggtgctggaccccctgctctgcgacttcctgggtatgtctctcgggagggtgggcaggagacaatggggccatagaccttgccagattctctggtagcagccacagtggcatcctggacattgggtcctgatccaaacaagagaaacatccccacacaacctagaatgtagaggcagaattgctgtttgaagcaaaacttcaccaaatgcagacacgcaggaatgctgactcaccccgtcctcatgctcacctagatcctgtttgggctttgcctttggcttaacctgcagggtatttttcagaaataaggacctaggcattcctgccacttcttatccccacctggctgtggctcaccttgaaccaggaatcagagactggttctctgggccctggggctgggggtgctgcatcccagctttaacatttttattcttcgaccaggcacagtggctcacacctgtaatcccagcactttgggaggccaaggcgggcggatcacttgaggtcaggagttcaagaccagcctgaccaacatggagaaactgtctctactaaaaatacaaaattagctgggcctggtggcacacgcctgtgatcccagctactcaggaggctgaggcaggagaatcgcttgaacctgggaggtggaggctgcagtgagccaagatcacaccatggcacttcagcctgggcaacaagagcgaaagaaactccatctcaaaaaaaaaaaaaaaaaaaaatatattctttattacttggtcaatgtaaaaactgcaggaaattaagatgaagaagaaaaagtaaggctgggtgtggtggttcatggttgtaatcccagtgctttgggaggccaaggtgggaggatcacgtgagccaaggagtttgagaccagcctgggcaacactgggagaccaaaaaaaattgggagactacaaaaagatttaaaaattagcctgggcgcaatgtcatcctgggatcacgcctgtaatcccagcactttgggaggccaggcaggtggatcacttgaggccaggagttccagaccaggctgggcaacatagcaaaactctgtttctactaaaaatacaaaaaaattagccagccgtggtggcgcccacctgtaatcccagctgttgggatcggctgaggcacaagaatcactcgaactggagtgggggaggtagcagtgagcagagattgtgccattgcactccagcctgggcaacagagtgagaccttgcctcaaaaaaaaaaaaaaaaaaaaaaaaggtcgggtgtggtggctcacgcctgtaatccagcactttgggaggccaagataggcagatcacctgaggtcaggagttcgagaccagcctggccaacatggtgaaaccccgtctctactaaaaatacaaaaattagccgggggtggtggcgagcacctgtaatcccagctactcaggaggctgagacaggagaatcacttgagccaaggttgcaccactgcattccagcctgggcgacagagcgagactttgtctcaaaaaaaaagaaaaaagaaagttaaagttgctgtttgatatcattgtttttcttgagtgcagatggtgatgataataagttaaacttattcatgaacatttcctcgatgctttaggacccccgggggagggagctgagatactctgtcctcaccttactgatgaggaaactaagccatagaaaagcatcacctcctagggcacaaggacagaggctgcctctgggtcattcaaagtcttctgaaacatcacttttcttgactgcgcggcattgtgtccacctgcaagatgtggtagatttgatgtaacttgacctgctggagattcgggtcctttgcagtttttcatcacggtgcatagtctgggtaatttcttctttaggttcacttccaagaagtggaattttgttcaggacagtgcttgttttcacacagctttggagagtttgtcctccgttgttactttcctcaaaggttagaatgctcagactctcactt

SEQ ID NO: 22274 - DNA, 2300 bp, Homo sapien
tcccctctctgtgccccagggtcctcctgtcccaccctctcgccatctccaagcctcagtttcctcaactatcaaatgcaggcattgttgttggttttttgtttgtttgtttgtttgtttttgagacggagtctcactctgtcccccaggctggagtgcagcggtgcaatctcggctcactgcaacctctgcctcccgggttcaagcgattctcctgcctcagtgtcccgagtagttgggattacaggtgtgcaccaccacgcctggctaattttttatatttttggtagagacagggtttcatcattttggccaggttggtcttgaactcctgacctcaagtgatccgcccacctcagcctcccaaagtgctgggattacaggcgtaagccactgtgcctggcctcaaatgcaggcattgtgaggcttacgatgggtgcaaagccctgagcaccaggcggcctccaaggcaggtgatcgccatgggaacatttttgtcactatttttttcttttttagagaaagggtttcgccatcttggccaggctggtctcgagcccctgggctcaagcaatcctcccacctcggcctcccaaagtgctaggattacagcagtgagcctccgcacccggccctcattactattttttatttttattttttattttttgagatggagtctggctctgtcacccaggctagagtgcagtggcacgatctcagctcactgcaacctccacctcttgggttcaagcaattctcctgtcccagcctcctgagtagttgggactacaggcgtatgccaccatgcccggctaatttttatatttttagtagagacgaggttttgccatgttggccaggctggtcttgaactcctgacatcaggtgatccgcctgcctcgacctcccaaagtgctgggattataggcgtgagccacccctggccctcgtcactatttttgctgacccaagctctttcggtccctgaactctccagctctttgatcatttccctttgccacggcctcccgcccctgcgtcacatgccttgttactcacattcaccccccagcccctcccggccataaccgcatccctctttgatttactgcgggagtttcccatcttccttcttgttaatgccctccaacccccacccaacccttgctgcagagaatctgcctccctctggttttcctcctcacggagcccctggctccctctcccccaccccaaggaaagtccctgctattgtttctccacccccacccactccaaggtgccgccccactccctgccctgagcactgaggtggttcttaaagcagggatgggtgaagcctgggcgcttccctctgccgggtggtcactcatagaacccctgagtgcccctgcggccacagcagctggcatttccaaaggagcagcttccagtactaccccaggttccggccacagaacttaacctggattcactcacttgatcctaaaacactgtgacgtctgtagacgtcatttgacagctgtagacgagagccacagaggggagggcgggctcagagcccacgtcctgaccccgggaccacggctgccagccccactgctacacccatgtaacggagggggagactgaggctctgggtggcaagtggagagggaagtggaaccatggggggccctgcaggacatggcgacacctgacggagagggacttggaggggaaagttggcctggcccagggacctgtagcccctctgtccccgtgggaatcaaggaggcagagagagtgcaggggaggatagaaacaagtggcctggtgatcagggacgggggcaaaccgaaggggattccccgttgttggcacggttacctgagcatctatttctggcctccaaaccaccccagaactatctggggcaaaaggaagtgaatagactgattaacttcctccaaccccctttctccaacctcaactagactctgagcattggaccagagcagctccaggaaaccagtttcatttccctcggccagtttcccaaaaggaggggtgggcggggctctgccagtttaaggggagagaaagggccacagcagagacagtggagggcagtggagaggaccgcgctgtcctgctgtcaccaagagctggaggtagtgacacggccagtggtggggggacagagagacaggacccacagaaatagggactgagaagcagtcaggagctggggagatgaggaagagggaaaagaggccgggcgcgggggctcatgcctggaatcccagcactttggg

SEQ ID NO: 22275 - DNA, 2300 bp, Homo sapien
ctgcccacctcagcctcccagggtggtgggactacaggcatgagccaccgtgcctggtccagaggtaggtattcttaatgccacttcgtaccacaggggaaactgaggcacagggaagggaaatggccagggtcacacagctagtaagaggggtgcagtcaagttttgaactcatataatctggctccagagtctatgccaggtatgtataaaatttggcttcctggggccacattgaagaattgtcttaggccacacataacatacactattgatagctgatgaacttaaaaaaaaatcgcaaaaaattcgcatgttttggtaaggtttacaaatttgtgttaggctgcattcaaagctgttctaggccgcatgcaggcccacgggtgggacaagctcagtctatgctcttagctgctactctgtatactgcctcagtgataacacagcccctataggcccaagaaaatatagggcaagtgctcaaaaactggcagagtggacagtaagtgctctaagggaaggtggtcagatcccaagaaggacttcctgcccgcaacaggtaaggaaggagaaagaagcttgtgtgtaccgctcagtatcaggattcctccaccttctctggaccttgattcagtctcctaactgccacagaagggatgaaggttgaactccagctgggatgtcctgatgtggatgggacaaggtgggtttctgcaacagagaaaagacggacatccacctcggctggtggaggagggcccagtgcatgagaaggggcaagatggctaccctgtgactaaacgaaaacggagatcttccatttttggcagggttgggagatagttcctatccagtggaagctgaaggacggtttgaaaggaagccaagggcaagggatggagaaaaggacgcagctggggcctcgatgtctgaatccctgccaggggatggggcctgggcacccatcatttggaatggaagatgaggatagctggaaacagacactttagagggatgagggagacagaagaatgacagcaggtgttggacagtccaacgtctgcggctcttacaagtggtaaggaagaaatgagactgggccccagagttcctattaataaaatatgctgaggccgggagcgatggctcacgcctgtaatcccagcactttgggaggccgaggcgggcggatcacgaggccaggaaattgagaccatcctggctaacacagtgaaaccccgtctctactaaaaatacaaaaaattagccgggcgtggtggcgggcgcctgtagtcccagctactcgggaggctgaggcaggagaatggcgtgaacctgggaggcggagtttgcagtgagccgagatcgcgccactgcactccagcctgggcgacagagacggagagactccgtctcaaaaaaaaaaaacagttgaacaggaatgtatgagttgagctctgtgcataaggcttgccagacatcgtcttatttgagtctcataaacccaccaggcgagttgatttttcttattttacagatagggaaatgaagtaagagaacttaagttatttgcccgaggccatcctggcaggtctgtatttgggagagtgctgtgactcatgctggactctaacccacgagggtttctcagagtcagcagctgggggatgaagaagtgaaaagtgactggcaggaaattctgcaagcaaggaaagggaaagagaaatgaactggtgcaggtctgcgggaagagaatgaggctggatcctcaaaatcacaggaggaagcaggcccagacctcagaggcagaaagagaaagaaaccagagcttagagtcaggaggaggaaaccagaccccggagccacaaggagagggctggatccccggctcagagggaagaggtcggatccccagctgagagggaggagggtcccggaccctaggagtgggaaggaaaggctcggatcccctgatccccaggaggaggggacccggctgcctcccggttggggccgcgcgagggcggggcgcggaaggatccgggagggccgtgctccgccacccagtatatatctgtccccagtccccggggccgcctcattccctgtcctcggatcacagtctcttctcactacagtgtcgccgcctctgcctgcgtagccccggccatggctctgtagcctcgacccctttgtgcccccggcccgtctccgcgctcaccacgcctgcgctctccgctcccaccttctttcttcagccgaggccgccgccgcctctccttgctgcagccatggag

SEQ ID NO: 22276 - DNA, 2300 bp, Homo sapien
tgttgcccaggctgcagtgcagtggcatcatcttggctcactgcagcctagacctcccaggctcaagcgatcctcccacctcagcctcccaagtagctgtgactacaagcgtgagccaccatgcctggctaattttttttttcctatagatatgaggtctcgctatgttgcccacgtcctgaactcctggactaaagcaattctccccgcttggcctcccaaagtgctgggattacaggccatcatgcctggcttccttcccatcatttatgcctcagtcaacatgttacctacttggagaaggttttctggctacccattctatattaggtcccctttgtcattttgtagctcagctgctaggtgtttttgacttattccaatacactctcatttaatttatctctggtctactccccacagtgtgagctgctggaaggcacagaccatgttcttcttgttcccagccgtatcctcagcacctaaaacagtgcctggcacattgtaggcactcaatatttattgaatacatggatgagttcttcctcccccatcttcccctgccctccactccccagctccaccttccacctgcccttacctgccaggggctctccccccactggaagcccgccctccagggctcccccaaggacctcatagggagccaggggggcaggggccggggggagtttcccatagtctacgagccatcccagcccactagctgggagcagggccctgtccagctccagccccagggtcgccaggagtgacatggctgtagcacaggtgctgggcactgatggcaacaggagaggctgcaccagcagctggcacgaggctctggaggatgctcaggtgggcgaagacaggcaccaaggcgaaagtggaagacctacacgcgtgagacaagagtgggtgtggtcaggacagcgtcatccaccggccaaaatcaaggggaagccaagccacacccccaggcacgtccatgaggctcctccctcccccttccaaccaccgtttagaacactaagcctcagcctctccgaattctaaatttgccctttctttacccaaatctctgagccccacccactcccaagggaatttctttaggtcctaaagtaggaccgatgccccaccccttcccccaatacagaaaaaaaaaacctaaaggtctcccaggggaattaccttaggcccctcccatccacctcagaatatttcgcctcaaggaaaaactcaatcccagggacattttcttccagccacgccccttcctctaaaatatttccttttggccccactgccttcctagcttccatcccaaaccagttcccaggggaactgccccaggccgcagcccttcagcaatgttatccactcaaatcccactcctcgctctgccgctgcccctccaagccccgcccctcattgtttatttagctccgcccctcccccgattccccagaggccccgcctctttgtcacatcgaaaccccacccctcaactaacggttggtttagccccgccccttctcacaatgtgcttccgaaatcccacccatcgtgacgacagtggttctatccccacccacttagagggttgcctctgggtcccgccttctgccctgtcaatctaagccagtccccgcctcagcaggtgcctggtttaaaaggaaggaagctgggctgtgagccagagcaacgtggggcagggagggtggaggagggtagagggggcacgcggagaacggctacccgaacgccacccgtccacacgcggctctgcgccgagggccaaggcgcatgctacgtcgcccgagcggtccaattgcctttacacctccgccctcttggggatcaatgcgcatgtgcggccattcagggtccgcagctctttcactacggggcactggtgggctactgcgcaggaacaaccaagcacgaagaatcgtttagaaaaaaaaaaaacacaccctcccctggagtgctcaggcccagctgcacgcgggctgacaaacatcgagtctagaactctcccacccggccccgggcccagtgcgcatgcgcagccgcgcgccttcggcccaccgtactacttctgcgcctgcgcgaccgtgattccccgctcgcgactccccaccccccagggctccctaaagagggccacgagctgcgaaagggcgggaaaggcagttggagaagaggtaagcggttactcactccatggctgcagcaaggagaggcggcggcggcctcggctgaagaaagaaggtgggagcggagagcgcagg

SEQ ID NO: 22277 - DNA, 2300 bp, Homo sapien
ttggggaggtcaaagctgcagtgagccgtgatctcaccactgcactccagcctgggtgacagacagaccctgtcttttttttcttttttttctttttttttgagatggagtctctctctgttgcccaggctggagtgcagtggtgcaatctcagctcactgcaagctccacctcccgggttcacgccattctcccacctcagcctcctgagtagctgggactgtaggcacgtgccaccatgcccagctaattttttgtatttttaatagagatggggtttcaccgtgttagccaggatggtcttgatctcctgaccttgtgatccacccgccttggcctcccaaagtgctgggattacaggcgtgagccacagtgcccagcctgagtgaccctgtcttaaaaaataataataacgtattgtatttttcaaaataactagaaaagatgatttgaaatgttcccaacaatagaaataataaatgtttgaggtgacagatattcaaataccctgacttgattataccatattctatgcatggcacaaaatatcacatataccccataaatatgtacaaatatcacatattaataaaaatactttttaaaaatcaacaaggcagggctgggcgcagtggctcacgcctgtaatcccaggatgttgggactccgaggcaggtggatcacctgaggtcagaagttcaagatcagcctagtcaacatggtgaaaccccatctctactaaatatacaaaaaattagctgggcatggtggtgggcaccagtaatcccagctactcagggggctgaggcaggagaatcgcttgaacctgagaggtggaggttttagtgagccgagatcatgccattgtgctccagcctgggcaacaagagcaaaacttcatctaaaaaaaaaaaaatcaacaagccagacacagtggctcacgcctacaatgccagcattttgggaggctgaggcaggcagatcacctgaggtcaggagttcgagactaggctgctcaacatgatgaaaccccatctctactaaaaatacaaaaaattatccgggcatggtggtgggtgggtgcctgtagtcccagctactcgggaggctgaggcagcagaatcacttgaccttgggaggcggaggttgcagtgagccaagattgcaccactgccctccagcctgggtgacagagtgagactgtctcaaaaataaaaataaaatggccaggcgcagtggcttatgcctgtaatcccagcactttgggaggccaaggtgggcggatcacaaggtcaggagatcgagaccatcctggctaacacgctaaaaccctgtctctactaaaaatacaagaaaaaaattagccgggcgttggggtggacgcctgtagtcccagctactcaggaggctgaggcaggagaatggtgtgaacccgggaggtggagcttgcagtgagctgagatcccaccactgcactgtagcctggggaacagagcgagactccatctcaaaaaaataataataataaaataaaaataaataaataaaaatcaacaaaggagaaaggttcataggacaggatccagaagagaccatatgtgggattccagttgtcctttcccagtgaagtcatacagaaagcgcttaatgcttgaagcaaagatgagtgacaacatacagcaagtattgccacccagggaagctcacctgagcctcggcattcagagtttttactgggggttggtcacgtagatgcagctgactgcctgtgtggctgacctagtttttaccctctgtggagatacagcaataatacgtggtgcaaagcccccaccataaatcactgtgttcttgtagactcttccagtgtctcatggccccctggagaatgaatgaatgaatgagactctgcatccatcacctcacctgcagccgtgactcacctgtgtcccctgacagtcccctcctagcactgcccacctccgaggctggccagggtggctccttcctggtttggggctggtcctcatgccctctgccctgctgcttcccctgtgaaaggagaagttgggaagcgagctttcaggacatagcggttcccgaggctcctcctctgtggatggtcactgcccctccaccaggcttcctgctggaggagtttccttcccagccaggccggcccagaagccagatggtcccgggacaggcccagccccagagcccagagatgctgctgctgcccctgctgctgcccgtgctgggggcgggtgagtgggtcggtggctgggggtcccaggcag

SEQ ID NO: 22278 - DNA, 2300 bp, Homo sapien
gctaattttttgtatttttagtagagatgggatctcaccgtgttagccaggatggtcttgatctcctgacctcgtgatccacccgcctcggcctcccaaagtgctgggattatagacgtgagccaccgcacctggccttttaagtctgttttatctggagtaagtataactactcctgcttgtcttttttggtttctgtttgcatggaatatttttttcaatctctttgttttcagtgtatatgtctttccaagtgagtgactttcttatatgtagcataaagttgggttatgtttttgtaaatccatttagcaaaacatcaaattgtatccataaacatatataattattattatttgctaattaaaaataatataaattgtagtaaaatacccataacacaaacctactactttaaccactttattttttatttatttattttttttgagatggagtctcactctcttgctcaggctggagtgcagtgacggatctcggctcactgcaacctctgcctcccggatttaagcaattctcatgtctcagtctcctgagtggctgggactacaagtgagcgccaccatgccctgctaatttttgtatttttagtagagacggggtttcgccatgttggctaggctggtctcgaactcctgacctcaggtgatccacccgcctcagcctcccaaagtgctgggattacaggcatgagccactgcatctggcctactttcatcattttaaagtgcacaattagctgggcatggtggtgcatgcctgtaatccctgctactcgggaggctgaggcacgagaactgcttgaaactgggaggcagaggttgcagtgagccgagattgcgccactgcactcagcctgggtgacaaagtgagactcaaaaaaaaaaaaaagtgtacatttcattggcactaagtacattcacattcttgtgcaaccatcagctccatctagttgcagaacttttccatcattgaaaaaagaaaccaagtacccattaaacagtcacttcccattcttccctccccccaggcccccaaaatgacaaatctacttcctgtcactacatttgcctcttctggtcatatcagatgaacagaatcatgcaatattgtctggtttctttcacttagtataatgttgtcaggaccatctatgctgtggcaggtgtcacaatgtaattcttttttaggggtgaataatactccattaaatgaataaaccacattttgttcatggagttttaaatttgctagttaatgtccaaatcctcagccttggggaatcgggaggtgctggggcccctgcccttgagtctgcacaacccagacccccctctatgcccaggtggtaattggggctgggctgagccacaaactagtctgggcatcagggtggggaggtgacagagctgggaccctgtgatgtaaggtccaagttccccagtgggggctccatgaaccaattagacctcatttacaaaacacagatcaaaagataaattattaagaatgtccagggggcaacctcagagcactaaaccccaagcatgaggccccctgagctcactggggtcttatgtaattgcccccttctccctgtggagctgggagcctggtgtaagctgcagagacggccccgcaacaggcaggggagctcagtgcctttggggagcccggggaccctgagttgacataagtggaggtgaggatcctgtgggcagggattggatggtcatgtcttctttgcctccccccactgcatggagtagattttgcctggagaatgaatgaatgaatgaatgggactctgcatccatcacttcacctgcagccatgactcacctgtgtcccctgacagtcccctcctagcactgcccacctccgaggctggccagggtggctccttcctggtttggggctggtcctcatgccctctgccctgctgcttcccctgtgaaaggagaagttgggaggcgagctttcaggacattgcggttcccgaggctcctcctctgtggatggtcactgcccctccaccaggcttcctgctggaggagtttccttcccagccaggccggcccagaagccagatggtcccgggacaggcccagccccagagcccagagatgctgctgctgcccctgctgctgcccgtgctgggggcgggtgagtgggtcggtggctgggggtcccaggcaggggctggggctgccgctgagcctctgcatctccccagggtccctgaacaaggatcccagttacagtcttcaagtgcagag

SEQ ID NO: 22279 - DNA, 2300 bp, Homo sapien
atccccctcccagggctgagccggcatcctgggaccccacagcttcctctccctggatgctcctgagctgggagccactcactgtcctgctgggctcctccacctccccacccaccggggctgtctgcacgccccaccctcccaggccacactcacaggccacacggagtcggacggtcctctgtgcgctcacaccctttctggagaagtccacatggcaggtgaggtcggtgtcgtggtcctgggggctgggcgtgaagctgagcactgagaagtgggaggtgcttggtctggttcttctaggggagagggcagcccccgtccaggagaaagaaggggctggacatttcttgaaagcccagttaaacacacagatgaccgtcaccggctgcccgggctccagggtctcggggatgtagacatcaggcttctgagtcagggctggggcagagaccggggtggggaattcttgtgctgcaggggtccctgaaagccctctctgctcagcccatagcctgtccccagggtccctccccagtgtgacaggcaggggttcccaccccattccatacctgttacttttagaacaaattgttcacgaaactatgtctcacacggcttcctctctccacccgaaagaagtaccatgcctcatcctccctctgcgcgtctctgatcaccaaggagcagctccctttgccgggatccccagtgagctggaatcggtcccgggtgctcatttccacctctcgactctggttgttagtggccacaggagcacccgtctttgggctggtccatcctttgaaccagtagccataagcagcagtagactcgtcccagccatcccgggggtaggagaggttgcaagacacgatgacacacaggccctccggcaccggcacctgcctctgcacttgaagactgtaactgggatccttgttcagggaccctggggagatgcagaggctcagcggcagccccagcccctgcctgggacccccagccaccgacccactcacccgcccccagcacgggcagcagcaggggcagcagcagcatctctgggctctggggctgggcctgtcccgggaccatctggcttctgggccggcctggctgggaaggaaactcctccagcaggaagcctggtggaggggcagtgaccatccacagaggaggagcctcgggaaccgcaatgtcctgaaagctcgcctcccaacttctcctttcacaggggaagcagcagggcagagggcatgaggaccagccccaaaccaggaaggagccaccctggccagcctcggaggtgggcagtgctaggaggggactgtcaggggacacaggtgagtcatggctgcaggtgaagtgatggatgcagagtcccattcattcattcattcattctccaggcaaaatctactccatgcagtggggggaggcaaagaagacatgaccatccaatccctgcccacaggatcctcacctccacttatgtcaactcagggtccccgggctccccaaaggcactgagctcccctgcctgttgcggggccgtctctgcagcttacaccaggctcccagctccacagggagaagggggcaattacataagaccccagtgagctcagggggcctcatgcttggggtttagtgctctgaggttgccccctggacattcttaataatttatcttttgatctgtgttttgtaaatgaggtctaattggttcatggagcccccactggggaacttggaccttacatcacagggtcccagctctgtcacctccccaccctgatgcccagactagtttgtggctcagcccagccccaattaccacctgggcatagaggggggtctgggttgtgcagactcaagggcaggggccccagcacctcccgattccccaaggctgaggatttggacattaactagcaaatttaaaactccatgaacaaaatgtggtttattcatttaatggagtattattcacccctaaaaaagaattacattgtgacacctgccacagcatagatggtcctgacaacattatactaagtgaaagaaaccagacaatattgcatgattctgttcatctgatatgaccagaagaggcaaatgtagtgacaggaagtagatttgtcattttgggggcctggggggagggaagaatgggaagtgactgtttaatgggtacttggtttcttttttcaatgatggaaaagttctgcaactagatggagctgatggttgcacaagaatgtgaatgtacttagtgccaatgaaatgtacacttt

SEQ ID NO: 22280 - DNA, 2300 bp, Homo sapien
tccaatctgtatggcttttccctgtgtccacaggtgactttggcaggctatggcttcgccttccgctattgcccaagtggcaaacacgtggcctacgtggaaggcagcaggagccctcacgagggggaccttgagttcattagcatggacctgcacaagggatgcggtacgaggccagggatgggtttgggaccgcagagagatgcttcttatacaagggcagctctaggagttcacagccagagacagcaggtggccagacaggagaggcactaagggcgccaggacagggattggaaccacagacagcgtcccgaccgcaagggaggtgggtggggtagcggttcagcactaagcatagtgggaggctgggcactggggagcctgagttccagaggttggggttcaggatctgttgtagacttggaagatgggagttgcctaggagtcatccaggaggggctgttgaggaggtggttggccaccacatctggagtgtgggagggagatctgggcagaggctctgcagtatctcagaagttatcagccgaagccctgggagaggatgggatcatccagggaaagtgtacagactaggaagagggcccagggcagatttcttgagcccctctttctcacatccctttatatcatggccgtccacatgcctgccacatcctcccatcagactgagctcccccagtacagggatggcacccctgcctccagcatcgggtggtggaaggccagcacggacaagtagtgcttgtcgagtgcttacacaaagcgttgtctaaattaagcgttgtcttatgctcaggaagcataagaaaaataaactgtcagagtctcccccgccctcccccactgaggctgggtttggtacccatccttctgggctcccgtgtgttctgtgtcctttgtcactcaggtagtcgcacgctatagctgtctccccactaggctgtcacgggctgggacccgacgagatcctggtctgggttttcagaagtgagctgggcctggcacacgggtgctgaggcttgattgaatgagtgcatgaatgaaagaggagtggatgagggtgacctggtaaaaggggctgagagaatggttgagtgagagagagaatgagtcagcttctgcctactcatgaaagtgaatgagcggaggagacagcccatatggctggaaggctgggtgtatgagtgtgtggttgagtcagtgagagagaggggaaggaaggggggtggacccaccagtgagtggagcgtccagacttgagctgccacctttactcctccttccccagggccctcccgccgcagcgacctccagagcctgggctactgcatgctgaagtggctctacgggtttctgccatggacaaattgccttcccaacactgaggacatcatgaagcaaaaacagaagtgagtctaggggtcagcagaacccctgcaggtggtcagcagaacccctgcaggtggacagaagcccagagcccaactgggagcaggagggaaggggaggtggcatccagcagagcccaagtcctctgagccgcacaggcatgtgctgcagtgtccacacagcaggcgaggcaggtgttccggagccacactgcctgggctcagactctggcaccaccactgtggggtgttaacgtctgcgagcctcagtgtcctgctccatgagatggtctcctactagctactaccttatgggactgcaaagagttcagggaagtcaggtgcacacagcacttagcacaggggctggctcagagaaaatgctcattgtggccgggcgcggtggctcacgcctgtaatcccagcactttgggaggcagaggcgggcggatcacgaggtcaggagatcgagaccatcctgactaacacagtgaaaccccgtctctactaaaaatacaaaaaattagccaggcatggtggcgggcgcctgtagtcccagctacttgggaggctgaggcaggagaatggcgtgaacctgggagtgggagcttgcagtgagccaagattgcaccactgcactccagcctgggcgacagagcgagactccgtctcaaaaaaaaaaaaaaaaaaaagctcattgtgtgtgggaaactatgactcattcatcacaaacatgcaggcaatctgagcaggataggcccaggccctgcctcagcactggtagcaccacctatgcagtgtccacactgccagatcagtgccttcacctctgtgtaaaccaccaggtcttaccagtgctggtttaaacattcagcaccaaagccggtg

SEQ ID NO: 22281 - DNA, 2300 bp, Homo sapien
acgtgccacttagaagcagatcagtacaggggttaagaggataaacttgggaaataatctgcctgggtttggatcttgcttctgccatgtattgcatgatggacagagttttgctatgtcacccaggttggagagcagtggcacgacctcagctcacttgcaacctccgcttcctgggttcaagcgattctccctgcctcaacctcccgagtagctgggattacaggcgcatgccaccatgcccggctaatttttttatttttagtagagatggggtttcaccatgttggccaggctggtctcgaactcctgaacccaggtgatccgcccacctcggtctcctaaagtgctgggactacaggcgggagccaccgtgcccagccaaattttttggattttagaacctattacatattacaacaccggcgagatccaggggcaactctccataagtatatgatttgcacaacaaaatctttaaaaattctaaatagtcacacatcagttcagagtgggtattgccagcaaacaagttcaaagccaggtgaggttggcctgccaagtaagttgcaaaacagagaaaaagacctttcagttttcagaacgttttggattttaaagttatagataagggactgcagacctgtaaatattctttaacatttcttttttagtgtctggcatccccaaccaccctgagaatgtgaattagctgggcaggatttttgttttagacactgctataataacctgggcttgaacagtgcctattagactagcaccgttcaaacccaggttatagtagtgtaatatcggttgcacggagccttccatatagtaaacgctcaataaaattggatgtgctgaagtcacctatgcaatggccaggtcaggacttgaaaccctaagactccaaccctcaggccagtctttatcttaatttatttgacttattcaacaaatgtttagggaacagctgctatgcgtcaactactgtatagtgttcctcctagaaagttcaggaaacagcacagcaaaaaggctaaaagtcagaccccacctcagcgcaggtggggcgattgcctaggcgacgacagagcctcccttcggccgcacctccatagaaaccacgggatgacttagacgccaagtttcacagcggaggagctgtcgaacttcccacaagttccgcccatctccgccttagccatgcccaacacggagcccaaggtggcttgggaagctcaagaggaggccagtgaaccccgcgacccggagccgctctcattccgaaccccgacagcaggggcctccgcctcccacaaacggtcgtgctgacgtcacggacgccccggccgagctgcggctagggggtcgggggacgtcccctcgttcgcctcgcttcccctcacctctgtacttggggactggggtgggattctgggcttctgcagcctgaccctcggatcctccgcagttacccggactcaccttctcagttgcccagcgaaaacttccgctgggcggagagcgctgcgcgcgcatcctgaatctgaggcgcccgcgcaggcgccgctgacttcctgacggcccctgggcttcgcctgcctgggaactccgtttcccagatgcctccgcggcaggcccgccctctgattccagacggaatggggattattccctcattgctcatccccctcccctccgttctagccgctttggaacgccttctggttctactgcgcatgtgtcagtgtcagaccaatcggaatgcaccgtgaggtacctctccaccaatcagaggtcacattacctaaacttctgcctcaactccgccccttacttccgcttgttttctcagaaacccgtcacaacgcgtttccatggcaacctaccgcttgctcttcggaaaaggttaacactccctgacttctagtaaaggcaagaagctaattagatgattctttaacaaggtaaaaatctggactacaaactgatgccgcctggtcctgattctctttctactctactcccacagtgctaaggctgaagaagcaggaggagatgggaaggcgaaagaagtcgcccgcacagccctctgggaaatagagtcctggcgctgccgcggaggatcctgggtgcagccgctcagagaagcttctcgcgcacaggaagtcgctgcgaggaggcgcgtgtgcggggagttgaatctcccgctcccttgaggctggggttgcgtctgttgacgcggccgactacaatcccgaggtacggagacgctggggctgagggacttgcgg

SEQ ID NO: 22282 - DNA, 2300 bp, Homo sapien
atccagcccagagtgacttaagccaaacaattatcaggctgagagaccttgggcccaagagtcttgcccttccttccagaccatttaccttctctaagccttagtttccacatgtaccaaatggaacaaatacaacagatctatggtcctttaaatgctccaaaaaccagaacttgatttataaactgaccgcaaaacttcacctggattgccacaggccatgtagggtcttaatgttctcataagtgtgaatattcacaccttgccccacagaaacattttatgaccaaaaactggcccagattcctcggggtgtgggggggtgctgcctaattataaaatatgcaccctattagctttctaaaatctgaaaaattctgattcccgagattgccttggtgccaaggggacctgcacttatgtctcagtgctgctgcggggatcagaagaggaaatgcaactccagcagggcgcctggcacacagaaagcactcaaatactgtaaatgttaagtacttcaacttcccgaagaactcccatccatcgtccagcaagattctgcctaaatttgccaacttcaggtaactcattcccctccttccccaaccaaaaccaaaataaaacagaaccactcctctcagggccatcagggaggcctggaaacccctttagcagttttcttttcttttcttttctttctcagctcactgcaacctctgcctcctgggttcaagcaatcctcccacctcggcctcccaattagctaggaatacaggggcgcaccaccacgcccggctaatttttctatttttttcttcttttgtggagacagggcttcaccatctggcccaggctagcctcgaaatcctgggctcaagcgatccgcccacctcagcctcccaaggtggttttcttcctttctttttttttttttttttttaagatgtagtctcgctctgtcacccaggctggagtgcaatggcgcgatctcggctcactgcaacctccagctcctgggttcaagcgattctcctgcctcagcctcctgagtagctgggattacaggcccccgccaccacgctcaactaatttttgtatttttagtagagactgggggttcgaggaactcctggctgtaagtgatcccccccgccaaggcttcccaaagtgctgggattacaggcgtgatctaccgtgcccagaccttgagcggttttcataacagactgtgaaagacggttcacaccttcaccctgacaaccgccgcccaaggcgacgcaccctttgccgaagtcgcccccacttgcattccgtcacctctcaggaaggaccgagcccgcaagtccctcagccccagcgtctccgtacctcgggattgtagtcggccgcgtcaacagacgcaaccccagcctcaagggagcgggagattcaactccccgcacacgcgcctcctcgcagcgacttcctgtgcgcgagaagcttctctgagcggctgcacccaggatcctccgcggcagcgccaggactctatttcccagagggctgtgcgggcgacttctttcgccttcccatctcctcctgcttcttcagccttagcactgtgggagtagagtagaaagagaatcaggaccaggcggcatcagtttgtagtccagatttttaccttgttaaagaatcatctaattagcttcttgcctttactagaagtcagggagtgttaaccttttccgaagagcaagcggtaggttgccatggaaacgcgttgtgacgggtttctgagaaaacaagcggaagtaaggggcggagttgaggcagaagtttaggtaatgtgacctctgattggtggagaggtacctcacggtgcattccgattggtctgacactgacacatgcgcagtagaaccagaaggcgttccaaagcggctagaacggaggggagggggatgagcaatgagggaataatccccattccgtctggaatcagagggcgggcctgccgcggaggcatctgggaaacggagttcccaggcaggcgaagcccaggggccgtcaggaagtcagcggcgcctgcgcgggcgcctcagattcaggatgcgcgcgcagcgctctccgcccagcggaagttttcgctgggcaactgagaaggtgagtccgggtaactgcggaggatccgagggtcaggctgcagaagcccagaatcccaccccagtccccaagtacagaggtgaggggaagcgaggcgaacgaggggacgtcccccgaccccctagccgcagctcggccggggcgtccgtgacgtc

SEQ ID NO: 22283 - DNA, 2300 bp, Homo sapien
cattggggccttacactgtttttcaaatggttgcaacatttaacttctcgcacatggttcccgtcctctggagctctgtcttgtcggggagatgggcatgttgtataccaaaagagtgtacaaagtgttgcagggctgtgacacaatagggactctatggaaaactggcagccattgggtgtgggggcagtctgtaaatcagtcacctgtgttgctgcaggccaaggtagaaacgccctccgtgtgtgcatatttgttggttctctgattaaagttttgagtctaaaagcattggttccttctctcagcctgctgccatgcagccacgcatcagtccctgcctgccaggcctcacgtctttgctggggagggcttctggtggcgatcagtaagagggagcagctcagttttcccactgtctgggcggggcatgcgccactgaggaggcacacaagttcagctggtcctcagatgcatcatcaaacaacacttttcagtctgtgtgtgggcctaagtaaccaaggagagagcacaggcagcctgcagttcactcttcacagacatgtcaggccccaggcttggggagtgtttctaattagcatccagtaatacatataactttgtttatactttaatttttgtccccacctttttcctttagtgacaagtgacaagagatactagttcctgctcatggtagtaatagaaagttttttttttttataaactgagctgatagggccgagtgtggtggttcatgcctgtaatcccagcactttgggaggcctaggtgggaagatgacttgagcccaggagttcgagaccagcctcaacaacgtgatgaaaccctgtctctacgaaagaaatatgcaaattagctgggtagtggccactgatcacttaaaaatgattaaaatggcaaattttatgtatatttttacaatttaaaaacatttaaagtttaaatttagataaaagtttaagtttagataaatttaaaacattttaaagtttgtgtggtaggctgggtgtggtggctcatgcctgtaatcccagcactttgggaggctgaggtgggtggattgcttgagctcaggagtttgagaccagcctgggcagcatggtgaaatcctgtgtctacaaagaatacaaacagccgggtgtggtggtacacgcctgcagtcaagctactagggaggctgaagtgggagaatcgtgagcctgggaggttgaggctacagtaggctgtgatcatgccactgcactccagcttgggcgacagaacaagaccctgtctctgaataaaggaaaaagatgtgattggaaaaagaaatgagctacaggagcctaaaccaagcaaggctaagatggcaaaacccaacacctctgaggctgatgcaaagacaagctcaaacgaggtcaaggtataaagcagcagcaaagtcttctctagggccaaggtctcccccaacatttcagagatggggaccccttgtcggaactgataccccagctaaattccagcttgacttctggaagggctggagactaaggtcagtcagggtgatcagccctgtcaacataaccaaccccataaccctgggtaccacggcgtgggtgagcttctctggcaacactttgtgtgcggtcacacatcattgctgagtgcgttaaatgctttccatatgactttactggcagaggacacctggaagctcacgcttggtctctcctagactccatcctatgcaccttttcccattgctggttttaatctctattctttagctgtagtaaatgcaatcaagtataacagctttgctgagttttgtgagcccttctaatgaattactgaacttaagggtccactgccctctctgagcctcagtttcttcagtggactcaagaatgatactcagtgtaaggattctcaaaacgagcatcagcaggttccgcccacgccggcctcctgggttcagttctctaataaccacctcccttccccgcctactccagccaatccttgtgctgactcggctcctggccacgccctaaccccacccccgctgcctctaaacccgtccccacccctgcagcctcacaggctgccgtcagattctcaagcccctattcctctcggtggcctaaatccccaactgctcggggccacttttcaggccaaaatgggcccaaaatggggagggcaagtgatgaatgtcactagacagtggggccctcaaggacctggcaaatgggggcttggacctcggatcggcctcccacgcgaagcttgctcccca

SEQ ID NO: 22284 - DNA, 2300 bp, Homo sapien
tgggaagtggaggttgcagtgagctgagatcgtgccactgcactccagcctgggtgacaagagcaagaccccatctcaaaaattaaaaaataaaaaagggaacccaaagagtcctctcaccctctttttgccatgtgaggatacaagaagagagctccaccagaacctgaccttgctggtgctctgctcttggatttccagcctccagagctggaagaaataaattctgttgtttataagccacccagtctatggagttttgttgtagaacctaaactattaataagacaactgccctctcctactctgcctctctctcctcctctctccctcaacgtagtaatatttagtcttaattaatttaatctctctgaattaatatttaactatatattaatatatcatattattttgacatttgctatatctctgtgtatactattataatgtcttttagttgaatttctatgatttaattgatattaaattcatctacatatatagagagatacagcgaatgcaaaatgtgaagtcatatctgagtgtttattgggtcatccttgcaactgttctccagattttaaaactttcaagatgaaaattgcagggaaaaacaaagtgcccttccctcagtataccctcccttgtggattcattgatttgctaaatatctgttgaacaactagtacacgctaggcgctggacaacagcagggaaccagaccctacctcctggcctcagggaactctcttaactgtatcacactgtgtatttgcttcccagcaggtaatgcagtttgtcagtatttcagttactcatctgtgtaccaggttttacgtttctcttcctgccactccctcccatccctgctagcctgaactctatgagcagagattgtgttcgtcttatgtcagtctatctctggagcctggcacatagtaggtgctcaataaatatttgttgagttaattaatttaagtactgcaagcacaagaacctcttgtttttctcagctctagctctgggggccttgaacagcacctggcacatagtaggtgttcaataaataaatatgtgttgcatgtaaggttgaacgcagtggcctgtaatcccagcactttgggaggctgaggcgggtgaattacttgaggtcaggagttccagaccagcctgaacaacagggtgaaaacccgtttctactaaaaatacacaaatcagctgggtgtggtggtgcgtgcctgtaatcccagctacacaggaggctgaggtaggagaatctcttgaacctgggaggcaaagattgcagtgagctgagatcgcaccactgagctccagcctgtgacacagagtgagactccatctctctctctctctctctctctctctctctctctctctctctctctctctatatatatatatatatatatatatatatatatatatatataaattatctgggtgtggtggcatggtaaccccagctactcggttggctgaggcacaaaaataggttgaacctgggaggtagagcttgccgtgacccgggatcgcctcactgcactccagcctgggtgacagagcaagactctgtctcaaaaaaaaaaaaaaaaaaaaaaaaaaaaaacaatatgtgggccgggcgtggtgactcacacctataatcccagcactttgggaggccgaggcgggcagatcacctgaggtcaggagtttgagaccagcctggccaacatgatgaaaccccgtctctactaaaaataaaaaattagccggacgtggtggcgcacgcctgtagtcccagctacttgggaggctgaggcaggagaatcacttgaacccgggaggcggaggttgcagttaaccgagatcacaccactgcacgccagcctgggtgacagagttgagactccatctcgggaaaaaataaataaataaataaaataaaacaatatgtgttgaatgaataaatttaagaggaattagtaagttccaagaggggttgagcagaggctttctgtttttcttgactttctctctaggttctagaaccatgcctggcacatagcaggtgctcagcgaacacgtgcctgtaacaccgtgatgctccctgggcctcctgaccgcgccctcgcctgggaggcggggcgggccgggttctctctgtgacgtcacaaaggccccgccatgcctctggctttgacccttctgctgctctcgggcttgggcgcccccggaggctggggctgcctgcagtgcgaccccttggtgctggaggccctgggtcacctgcgctccgc

SEQ ID NO: 22285 - DNA, 2300 bp, Homo sapien
tcctcaccaacagttggtgttgtcaatcttgtttattttagccattctggtacatttcattatgataaataatatacattaattttacacatttaaaaacattgggctgggtgcagtggctcacgtctgtaattccagcactttgggaggccaaggtggaaggatcacttgagctcaggagtttgagaccagcctgggcaacacagcaagacaccatctctatgtttaaataacaacaaaaataaaaacattattctatattcattattgccacaccgaagaattatacaggctaaatatcctctgactagtgaatgtatagacaaactgtggtatatttgtacaatagagtactactcagcaatgaaaaagcatacactactgatacatgccacaacatgggtgaatctcacatgcatcatgctaaatggaagatgccagactcagaggctatacactctgtgattctatttatataacatcctgcaaaagacacaccacagggaccaaaaacagagcagtgattgtcaggagcaagaaaggagttgactgggccgggtgtggtggctcaagcctgtaatcctagcactttcggaggccgaggcgggtggatcacgaggtcaggagtttgagaccatcctggccaacatggtgaaaccccgtctctactaaaaatacaaaaaaattagccaggcgtggtggcgggcacctgtagtcccagctactcgggaggctgaggcaggagaatggagtaaacctgggaggcggagcttgcagtgagcccagatagcgtcactgcaagtccggcctgggggacagagccaggctccatctcaaaaaaaaaaaaagaaaggagttgactgcaaagaggcacaagggaattttcaagggtgacagatttgttgcgtcttaattttgttggtggttacacaggtgtaagcatttgtcaaaaagcatagaactgaggctgggcacagtgactcaagcctgtaataccaccactttgggaggccaaggtgggaggatcttttgagtccaggagttcgagaccagcctgagcaatatagtgagaaccacccccatctctataaaaattaaaaaaaaaattatctgggtgtggtggtgcaaggctgtggtggtagttacttgggaggctgaggcaggaggattctttgagcccaggagattgaggctgcagtgaactgtgattgcaccattgtactccagcctaggtgacagagtgagactccatctcaaaaaaaaaaaaagttgtacactaaaaagggtgaattttacctcataggtatacacatataaattatatatgtatctatattatgtaaaactgtgtgcaaatatggctgggtatggtggctcatgcctataatcccagcactttgggaggccgaggcgggcagatcacggggtcaggagttcgagaccagcctggctaatatggtgaaatcctgtctctactaaaaatacaaaaattagccgggggtggtggtgcgcacttgtagtcccagctactcgggaggctgaggcagaagaatctcttgaacccaggaggtggaggttatggtgagccgagattgcagcactgcactccagcctgggcgacagactgagactccatctcaaaaaaaaaaattgtgcaaatatacacaaaaattataaatttgtacatatatttaataagcctgactttaaaaagacaattctggaggaagggtctgtaagttttatcggatgccaagggacccaccgcacgtgcacaaagactaagactcctgcgggggttgactgtgcatacctgtgtcacctgccacgatgggaatgaagggagaggaaggaaggacattccaaggaaaggacccttcccaggctcagattcaggacaggggtggcccctgggccaggagcccggagtgcagggagcttgcagaggagtggtagggaggaggaagggggtgggttgaaaccagatggggactcggtttctacctttgtcaccgggctattatcatctacacctctccatatattcgttaatcatacacctgctttatctgccctcccagcctgcattccattcgggcggacagatgtccctgaaggcccgagggacaccagccgctatgccaggctccaaagaacccgaggcaaaccaacgctggtcccggtctttgaggactccccggcccagtgagggagaccgacaggtaagcaggcagtgtccaagcctggggaagaggctgtaaggcagacaccgcaggcactggcagggctccctatggaac

SEQ ID NO: 22286 - DNA, 2300 bp, Homo sapien
ttttttttttgagatggaatcactctgccacccaggctggagtgcagtggtgctatctccgctcactgcaacctccgcctcctgggttccagtgattctcctgcctcagcctcccgaaaagctgggattacaggcgtgggccactatgcctggataatttttgtatttttagtagagacggggtttcaccatgttggccaggctgctctcgaactcctgacttcaagtgatctgcctgcctcagcttcccaaagtgctggaattagaggcgtgagccaccgctcctggccagtactttcttattcagccttttccctggtgccaggactgtactaagagctttgtaggcactaattcacttaatccactcaatacaagcactcattaccatttactcaacaaacacttattaaacacctactgtgtgccaggcactgaggattcggcactgaacaaaataaagatctttgtcctcgtgggacttaaattctagtgaggagacagatgataaacagataaattagcaaacactcccagtgctatgagaaaaagcaaagcggggttaaacgagagagagtgatgagaggaactgtcttatataggatggccaggaaaggcctcttggaagaggtgatattggagcagaacggatgatgtgggagagaggttgtcatgcaaaacctggggaagagcattcctggtggacccaacagagaatgcaaaggccttggggcagcaccaggcctcctggtttgagaaattgagccagtgtagctggagcagtatgaaggggagggcctgggggtgagatcagagagagcaaaagggccagccacatcccgcaggacctcattggccatggtgagttcttagacttttactgagtgaaatgggagccatggaaggctctgaacagaggaaaggccccatctgaatagagtagactgtagggagagcaagggtgaaggcagacagtccatcactcccattttacgagtgcagaaataaatggaatctcaaaaaagtccagcaactggcctgagcccacacagctgctgagcagccgagccaagctggcaggcctccttgggttcagtggagccattcctttgtgcccttggctctttttattttccttttaaatagagatggggcctatgttgcccaggctggtcttgacctcctgggctcaagtgatcctcccaccctggcctcccaaagtgttgggattacaggtgtgagccacggcacccttccaaccttgggaagtcttttggctctcctgagcctcagttttcccatctgtaaattgtaaatggggaatcattaccacgtttgggcatagcatggcggttaaaagcacaacttctggttggatctgagtccttgctctgccatcggccagctctgtgactttctgcaattaacaccctctttctaagcttggggttacctcatctagaagatgaagatcttaatagcaccaatttcaagggcttcgttgtaaggattaaatgagatcatgcaggtaaggcgcttagcacagctcccggtctacatcgaagtgcttgataaacgatcattgttattccgatagtatcacggcccacacctccccggtgggtgagagcctgggagggtgcctggtacatggtctacgttcgacaaaagtgaattctgtctcctgtctctcctgcccgccgggtcccgggggacccaggcattccggccttcggtcggcccccccacgccggcccttacaaaggcccccattcatgccttgcgcacaaagcggcccattcaccctggccccttgggcctcccgcccccggccgccccccgcgcctcgctattggtggcgccccgtgcccatcaggcctcggcttccacccccgaccgcgccgcctagctccgcgcccgggccgcgttcttttcccacggctggcacccttcgacaacttctgattggcccagcccgccagccgctctttttgattggcggctcccgtcccccaggggcggggccgtagcttgccgcagcgggcgccgattggcctctgctgctctcttgggggcggggctgtcctggcggacacgcccctctttctccccaggccgaagcctcgggacggccctggaagccggtgagtgcccggggccggcagccctccgggggcggcggaacgggactgagccaggggaagctggagcctgggggctgcgatcggggcccgggagcccgggcaggcggccggggacggcggggaggtgacgcggacactcaccttgggcgcgcagcg

SEQ ID NO: 22287 - DNA, 2300 bp, Homo sapien
acaaacccaccaaacataccatatttggtttctgtaaaaaaataaaaaagagagagagaatttttaaaaaacaaaaaccatactatctaatttacatttttaatctttttatctgtctcctgggattacagcagctctgtcaaatagcaatataatacaggccagatgtgtaatgtaacattttctagtagccacatttaatgataaaagtaaaaaaggaacgggtaacattaatttaatgatatattttatttaacccagtagattgaaaatattatcatttcagcatgtcatcaaatatttaaaatctcagcaaactatctttttgttgtactaagtcttggaaatctggtgtgtatcttacacttagaactccagatggggatatttatatttaaattttaagatggggctcggtggctcacacctgtaatcccagtactttggggagccaaggcaggaggatcgcttgagcccaggagtttgagaccagtctgggcaacatagaagaccctgtctctacaaaacaaatttaaaaattagtaggcatggtggcatgcctgttaatacatttattttttaattaataaatttcagacatgaatcacctgaggctgggaagtcaaggatgtggtgagccgtggttgtaccactgcactccagcctgagcaacggagtgaaacctcatctcaaaataaaataaaatagattgaatttaaatgaatgaaattgaaaatgtgtttcctcagtgacacatgccacattgcaagtacccggtagtgcacaggtggtggtggcttctgcagtggacagcccggggctagaaagtaaacttttggaggcaggcgtcttcttccagcttgtctgttgctccattgtcagtgcccagaactgagcctggccaggagtggtggctcacgcctgcaatcccagcactttgggaggctgaagagggtggatcacctgaggtcaggagttcaagacctgcctggacaacatagtgagaccctaatttctacaaaaattgaaaataattggccaggcgcggtggctcacacctgtaatcccagcactttgggaggccgaggcgggcagatcaccaggtcaggggatcgagaccaacctggataacacagtgaaacgctgtctctactaaaaatagaaaacaatagccgggtatggtggcaggcgcctgtagtcccagctactcaggaggctgaggcaggagaatggcgtgaacccaggaggcggagcttgcagtgagccgagatcgtgccactgcactccagcctgggcgacacagtgagactccatctcaaaaaaaaaaaaaaaagaaaataattagccggggccgggtgtggtagctcatgcctataatcccagcactttgggaggccgaggcaggcagatcacctgaggtcaggagttcgagaccagcctggccaacatggtgaaaccctgtctctactaaaaatacaaaaattagctgggcgtggtggcagacgcctgtaatcccagctacttgggaggctgaggcaggagaatcacttgaaccctggatgccgaggttgcagtgagctgagatcacgccattgcactccagcctgggcaacaagcgagactccgtctcaaaaaaaaaaaaaaaaaaaaaaaaaaaaaaaagaactgaccctctgagcctggttcacagcctagcttattaaagaatgaatgagtgcctagagaggtgaatgaatgaaatgagtaagctgggtctgttaacccactttgcagaagtatggcaagaggtctggtaaaggaaggcagaggtggctgcctggggaatttggggtagggaagggaggcccgggggacggagccccatctgacccccaccctctttctttgcccctgcagaccatggcagccgtgaccatgtcggtgcccgggcggaaggcgccccccaggccgggcccagtgcccgaggcggcccagccgttcctgttcacgccccgcgggcccagcgcgggtggcgggcctggctcgggcacctccccgcaggtggagtggacggcccggcgtctcgtgtgggtgccttcggagcttcacgggttcgaggcggcggcgctgcgggacgaaggcgaggaggaggcggaggtggagctggcggagagcgggaggcggctgcgactgccgcgggaccagatccagcgcatgaacccgcccaagttcagcaaggccgaggacatggccgagctgacctgcctcaacgaggcctcggtcctgcacaacctccgggagcggtactactccggcctcat

SEQ ID NO: 22288 - DNA, 2300 bp, Homo sapien
acacgctggactccaccaacgcacagcaggagctccggtgaggcccggtggcaggccgctgtcacagcctgtgcacatacagggctgggggaaggacttaggtacaaagtctctgtctatacagaggcttacttattgtacagttgttcatgaaccaccggctctaggtccggcctgggtcaagctggggacagagatgggtcagacccaggtgttacccttgggaacttccagtctcaggggaggcagattcaggcaaagacaatctcaacccagaacaaggggtgctttagcggagtaacacggggcactgtgggtgataagtgaagacccctaaaccaagtctatgggagatccaggaagactttcctgaggaagggccttttggaaaagggttttgaaaggtgaataggagttcacccttaaagccacactccttccacagcatcaccacccagatctcctgaggagcataacatgaggccctcatattttaaggaaacatgaaaaggagaaacaaccagctcccccaaagcccctgccttcctctgctctgaaattcccatcctctctcctttcccccaataaaggtccaagagggaacaggaggtgacggagctgaagaagactctggaggaggagactcgcatccacgaggcggcagtgcaggagctgaggcagcgccacggccaggccctgggggagctggcggagcagctggagcaggcccggagggtgggttggggcagggggacagggcaggggggccacggggagggcagggcaggacgcggggttggaggaggtaccgctggctggttctaggctagctcatctccctgggcccctttcctcacgcattcatgtgcatctttcattcagcaagcattaatggggtgtggactatgttccaggagcattgctggggaaccagccatgaacccaacaaccagcactgccttcccttgtggagctttccttttagtgagagaggcagagggtaaacaatataaacactttcagtttatattggggtgataagtgctatggggccataatgaacaggaaaaagggatcagaattctaaggcgggtgagtttttaagtagagaggctgtggaggtattctgcgagaaggtgacatcagggtaaaaaactgagggagtggccgggcatggtggctcttgcctgtaactttgggaggctgaggcaggcagatcacttgaggccaggagttcgagaccagcctgggcaacatggtgaaaccccatctctactaaaaatacaaaaactagctgggcgtggtggcacacacgcctatagtcccagctacttgagaggctgaggcaggagaatcacttgaacccaagaagcagaggttgaagtgagtcaagattgtaccattccactccagcctgggtgacagagcaagactctgtctcaaaaaacaaacaaacaaacaaaaatgggccagacgtggtggctcatggctgtaatcccagcactgtgggaggctgaggtgggtggatcacctgaggtcaggagttcaagaccagcctggccaacatggcaaaatcccatctctactaaaaacacaaaaaattagccgggcgtggtggtgggcgcctgtaatcctagctacttgggaggctgagacaggagaatcacttgaacctgggaggcggaggttgcagtgagcagagatcgtgcctttgcactccagcttgggcaacaagactgaagcactgtctcaaaaaaaaaaaaaaaattgggagtgaggggtgagctatttgttcactgggagaagtgtgttccaggcagagggaacagccagtgcaaaggccctgagatgggagtgtgcctggcctggtccaggaaaggcctcatagatctttgctcatctccttcccacaccagggcaaaggtgcatgggagaagacccggctggccctggaggccgaggtgtccgagctgcgggcagaactgagcagcctgcagactgcacgtcaggagggtgagcagcggaggcgccgcctggagttacagctgcaggaggtgcagggccgggctggtgatggggagagggcacgagcggaggctgctgagaagctgcagcgagcccaggtaagtggggtgggcagggcagaggtttctgctgtgtgaccttggtgacatgcctgccctctctgggcttctatttggtccatatcaaaccaattgtctcgtttggctcttccaacataatcatgtacaagtctgggcacagtggctcatgtctgtaattctagcacttgggaggcc

SEQ ID NO: 22289 - DNA, 2300 bp, Homo sapien
agagtgaaactctgtctcaaaaaaaccccaaaaaacaacagcacgcaatagatccatatacctttctattgccgaataatgcccgttgtatggatattccacatttgtttatccattcgtttattgatggacattggggctgttcccgcctcttggcgatggtgagtaatgccactgagaacattccggtacgagtttctgcatagacctatgcgttcatttcttttgggtatgcacctaggagcgggattgttgggtcatgtgggaaccctatgtttaagcatctgtggatctgccagactgttttccacggcagctgtaacatttcacattcctgccagtgtggtagagagttgaggcagatggggtcactgggtggaagccacgattggagggcttcattcccgtcccttccctgcaggctgaactggagaatgtgtctggggcgctgaacgaggctgagtccaaaaccatccgtcttagcaaggagctgagcagcacagaagcccagctgcacgatgcccaggtgaccctgcctgcccttcggctccaccgtcaccctcccctccttgtcctcccagccacacctgacattgccgtctcctccatctacaggagctgctgcaggaggagaccagggcgaaattggccttggggtcccgggtgcgagccatggaggctgaggcagccgggctgcgtgagcagctggaggaggaggcagctgccagggaacgggcgggccgtgaactgcagactgcccaggcccaggtgagcagccctacgtaagaccttcagggaggcacagcccccctcactgctcctcctgggttccccagctcagggatggccatgctgcccaccttctcataggccagacccatgggtgcctttctcatctctgactcccccttaccccccacagcccatgcccagccctggctgtcctgacccctgactctcagcctcatcccttgtcccagctccagctcagccccagctccagtgccgtcctctcccatctagatcctcctcttggcctctgggcctccagcctctcccctaacagctcatcccctgcacagccccagaagcttctttctttacctggagctgaccctgtccctcctctgctcacagctctcccacgcctccccagtactcctagacaaagtccatgcctctcagtcaggcattgaggccctgcaatctctggtccttcctctgcctttagctgtattcatctctatctctactttcctattttatttgaaaaaaaccttttatttttccagacttagcattaggctcccctgtgggaagtttcctgacccgtcttctctttctcctctgtcccaactccagtcaccttgggctgggactgtctctgcccatgagtctccccaccagactgagagccccttcaaactagaatcccatcagagttagatccaggtctgtagcacagcctgatatagggcctgatgtatggtaggcgttgagaaatgcctattgaatgaatgagtgatggtacgtgcctgcagatatccttcaactggcagacttctatgcatacttcaagacccatctcaaatgctcctccttcaggaagtttctcctgaatgttctaaacagattctgggcacttcctgtggacctccatagctcccatactgctaccttaacccctatcaccctggctgtgactctgtgtctcccccagcagccgaggggctccccaggaaagactccaggtctgattcacctctgcatcttggagggagtaattttaattccctggaagaactagggctcatagtattcacaacttcacaccactcagaggcagaagagcccagcagaatgacccctttccctcttcaggcctcagtctcttcatcctggaaatggagcaccaccagcttacaccttggtcactcatggccgtgaccaccaaccaccctctctctcctcccctcagctttccgagtggcggcggcgccaggaggaggaggcaggggcactggaggcaggggaggaggcacggcgccgggcagcccgggaggccgaggccctgacccagcgcctggcagaaaagacagagaccgtggatcggctggagcggggccgccgccggctgcagcaggagctggacgacgccaccatggacctggagcagcagcggcagcttgtgagcaccctggagaagaagcagcgcaagtttgaccaggtggggcacctcagttcacccagccggggaatcagcaagtccatctacgcttcccatggtcgttgtgaggaac

SEQ ID NO: 22290 - DNA, 2300 bp, Homo sapien
ctgcactccggcctgggtgatagagcaagactccatctcaaaaaaaaaataaaaaattaaaaaaaatttttttaaattgtcatttccctgtaggtggtgcagtatgtttttctagctgacttacgatttctctctttatgtttggttcttagtggtttgactgtgatatgcccagctgtgggttttttgtatttatcctgctttagattcactgtgcttcctgtagctgtgggttgatgtttttgatcaaatgtggaacatttcagccattatttcttcaaatatttttatctcccactctctctccttccccttcttcttggactccaaatacatatgatttgattgtaatactcttccacaggtcattgaagctttattatttttggcatcttctggaattttatataaattattttcacataaatctcttttgggatgggcttattttactcaaaataattttttttttttgagacagagtctcgctgtgtcaccaaggctagagtgcagtggcacgatctcagctcactgcaacctccacctctcaggttcaagcgattctcgtgcctcagcctcccaagtagctgggattacaggtgtgcaccaccatgcctggctaatttttgtgtttttaatagagacgaggtttcaccattttggcaaggctggtctcgaactcctggcttcaagtgatccacccacctcggcctcccgaagtgctgggattataggagtaagctaccgcacccagcctcaaaataattagtctgagatccatccatatttttgcatatcaataatgtattccatgtatcaataatgtatttttgctgctgaatattattcctgtggtatagatcagccacattttgatattcattaaccttttgatgaacatttgggtttttttccagtttttttctagttatggataaaaccttagtctttctcaaaggtggttttaattaacatttccctaatgaccagtgacgttgagcatcttttcatatgcttatttgccatccatatatcttatttgctgaagcttctgttcagatcttttgcctatttgttaattaatgttgtttgttttactattattgaattttgaaaattctttatgggccgggcacggtggctcatgcctggtaatcccagcactttgggaggccaaggcaggcagatcacctgaggttgggagtttgagaccagcctgaccaacatggagaaaccccgtctctactaaaaatacaaaattaggtaggcatggtggtgcatgcctgtaatcccagctacttgggaggctgaggcaggagaatcgcttgaatctgggaggcggaggttgtggtgagccgagatcatgccattgcactccagcctgggcaacaagagtgaaactctgtctcaaaaaaacaaaacaaaaaacaaaaaaaaaacaaaaaaaaagaaagaagttatttatgtattctaaatgcaagttctttatcagatatatgctttgcaaatatttttgtccagtctgtggcttttctttccattctgttagagtctttcaaagaacagaagtttttaattttgtccaatttatcaatttgttgttttatagattgtgcttttagtattgtatataagaaatttttgcctaactcaaggtcacaaaggttttatcctggtttttttcttgttttctttttgtttgtttgtttgttttgttttttgagacggagtcttgcactgttgcccgggctggagtgcagtggcatgatcttggcttactgcaacctctgcctcctggggtcaagcgattcctcctgtctcagcctaccaagtagctgggattacaggcacatgccgccacacccggctaatttttttatttttattttttttttattttttatttttagtaaagacagggtttcactatgttggccaggctagtctcaaactcctgaccttgtgatccacctgcctcggcctcccaaagcactgggattacaggcatgagccactgcacccggcctatcctgttttttttttctggaagtcttccagtttcaagtttacatttaggtctgtgatttattctgagttaatttttacatatgatgctatcatggctccatgttaatttttgtgaatataaatatccaagtattccaacactgctctccactgacttgtttttgcatatctattgaaagtcatttttcttcttcttcttctcctccttctttttcttcttcttcttctttttttttttttttttgcccaggctggagtgcagtggcgtgatc

SEQ ID NO: 22291 - DNA, 2300 bp, Homo sapien
atttttagtagagacaaggttttgccatgttggccaggctggtctcgatctcttggcctcaagtgatccacccgcccccatggttttgtttttgaagtgaaaataccatatggttttttggccagacacagtggctcacacctgtaatcccaccactttgggaggccaagatgggcagatcacctgaggtcaggagttcaataccagcctggccaatatggtgaaaccctgtttctactaaaaatacaagaattagccaggcatggtggcacgcacctgtggtctcagctactcaggaggctgaggcaggagaattgcttgaatccgggaggcagtggttgcagtgagttgagatcccaccagtgcactccagcctgggtgacagagcgagactgtctcaaaaaagtaaagatagaaataaaataaataaatcaacagtaggcaaactgaggctcagagaggggcagtggctggctcacagtcacccagcaaggatatggccaagttgtaattcaaacccatgtctatctaacttgaagccaggctccatcaggcttccagctgccttctagttctcagccaggtcaacctcctcccttgaggaccagagtgggagaggctggctcagggtcacacagcaagtggctttatacacaggagcccaggtctgcagggttcggagagttccctgcttgttcacgggagctgaggagccccgtcggtctggcaagggggtggaggagttccctgtgctgtgtggccaggctgagcccatctacctattccgttccacccaggcccagatgaaggagctatggcgggaggtggaggagacacgcacctcccgggaggagatcttctcccagaatcgggaaagtgaaaagcgcctcaagggcctggaggctgaggtgctgcggctgcaggaggtgaggctggggtaggctgggccctgggacaggaagctgggaggtgggcaaggctaaccttgaggtccctggatgtgaagctggggaggtgggcggggctaaccacagggtccctggatgtgaagctggggaggtgggcggggctaaccacagggtccctggatgtgaagctggggaggtgggcggggctaaccacagggtcccagggtgtaaggctcgggaggtgggtgtgtcttaccatgtggcctgcaatgccagcctaagagcagggattttgtcttagggcactagggagccatggaaagatccagaacagaggatgggcagggtcagctctgtagcagttgaactggagtggggagattggagtcacaaaggctgtgggagtgggagtgggagaggggagagagagagagattgagaaagagagagagaaccctgagccagggccaaggggatgcagaggacggagaaggcagtcagaaggcaggagggagaaggctatggtgaggggggccggaggaggggaggagagcactgggggtctggcccggtgattgggggaccctggaggagaggcaggtttgagaggaggacctgtgtgcagtaaaaggtggagagggtgaggggcctgggggttgggctgcaagaggtgagcacaggtcaggggctcaggagacagatttaggagacatctgtaggttgcagctcattccagggttacccagggacagcatgagaaaaaagccaagagccttgaggtgtgagggacagagaaaggggtgagacccgtgcccagattgcttctcctcacacccaccggccacccctccatcatcacaggaactggccgcctcggaccgtgctcggcggcaggcccagcaggaccgggatgagatggcagatgaggtggccaatggtaaccttagcaagtaagtgccccaagggtctgaaggctgaggtactgcgtctgcaggaggtgaagctggggtaggctggaggtggctgggctctgggacaggaaactgggaggtgggcggggttaacctcggggcccctggggtgtgaggctggggagatgcgtggggctaaccacagggtcctgtagtgtgaggcaaggcaccctcctctgaccatcctgtcctttcatccccacgccttcctgtctccctagggcagccattctggaggagaagcgtcagctggaggggcgcctggggcagttggaggaagagctggaggaggagcagagcaactcggagctgctcaatgaccgctaccgcaagctgctcctgcaggtgagcgtgattgaccgcccccaccagcctcagtccccattgacctgggaccgtaaccttcagtcctcttattcaa

SEQ ID NO: 22292 - DNA, 2300 bp, Homo sapien
tggagagagaggtcttctgggagacgggccacggggtgaatcggggaggtgctgggagagactgagagttgaatagggggccccagagagtctggagaaggcagggaaagtgggggtcagggctcacagggcctaggagaatttgagggctgagaagggatgtcttctgaggggctggggaaggtccaagaaaccaagggctggacggtgaccaagagtagtgagaagagatttgatggggcccaggagacatgagggttggggagggtctcagaggagcccaggaaaggtggggaccgggttgttcagagaagcacgggagattcacggtctggaggaagtgtctaagcgtctagggtggccttggcgggggagggggaactttggaggggtctggaagagcccgaaggttggagatccgtctttggaggatctgggggatggctgcgagaggggggtgtgttcggaggagcccaggagactcaggattggggaagaggcttctaggagactgagaagcctagagggacccggagggttggagctggggcgctcctgggagactgggggcgcctggagaggcgggggtggggtggatgggggccccgagagcgcgctcaccctggcagcccgcgacgagtaggggtcctcgaagagcgcccacacgcggggctgccagcggcgccaccatgtgccgcccgcgccgcccgcgccccctggcggccccccggcgccgccgcccgcgtcctggaagcagaggcgcttgagctcgccgcccgctccgtccaggccgccgccgcccgcgcccgcctcgtcgtccaggcctccgtcgtgggcgcctgcggcgttggcggcgttggcggcgcccgcggggtcgggcgcctcgaaggagtcgagcgcctcctcagcgtcgcgatgctgccggtaggtcatccagcagcaggcctccacgtcggtctcgtcgatgccccagaagccgagctcctcctcaaacaggggcccgcacacgtcggctgggcagtgcagcttgccggtgcggtagtagttgagcacgtacgcgaagactcccgggtgccggtcaaagaagaactcgtcggcgcccgggtcgtagtcgaagcgtgccgccgcctcgggctccgtcaggccggccagccgcgtccccggcagggtgcgcagcgtcgagcggtacgtctcatggcgcacgccgcccacgttgatcacgatcttgccgctgtcgccaccgccgccgccgtgccgccccatggccgccgccggcagcccggggcatggctcggcgcgccggtccccgggcccgcggggtgccggggggcccgccggggacgcggcggggccgggctgcgcaggctgctgctgctgcggcggcagcggtggcggcggcggggactcgggcggctgcggcggtggcgccggctgctgcttgctggccccctggcgcccgcggaaggacgagacgcagactgagctcagcattggacggggggcggggcgggaggggcggggacgcaggggcggggacacggggggagagaccgacgggattgggtgggaggaggagcgaggtagcgggggcgtggcttaggggagaggaaccaaactgattggcctgggggaggtggggcggggctgtggctgggaggagtggggcgggcactctaacgcgacccagctggacgagtcggggccgccaatgagacggagcgattggctctttctaagagagcagggaggaggggcggggcggggcgtcaagggaggcgggaccggttactactaattgtgttcggcagcactggtagccaggggaaggcggggctagatacgatagagagagaccttactgaactgaaaaaagtgcgggcggggtagagggaggaggggacacatccaagctatttaaagacgcccgactggcctggaggggcggggccaccatgagagaggccgtcctgattgggctgagaaaggggcggagagaaacaaaacagatcgcacgccctcacctaaaacaccgctaggcaggacctggtggggaggagcattgcttggaagagacagggccgcagaaagtagaaacggtccagatgagactgcatggggcgggaactagagatggaggactttcccgcgcaagggggacaggctggactgaaagaggacacgggaagaacaaagacttagactcggtgagaaggtgttgaaacttgagagagtcctggaaacccgagagggtctggataggcctaagggagggagcggggctgaggctccaaggcgggcct

SEQ ID NO: 22293 - DNA, 2300 bp, Homo sapien
ggttgtcagagagcaaggaggagacagactcagatgaaagggcagagacccagagaggaggcaggacaaagcgggttgcggggagggagtagaggacagggacacaagacccagggagtgcggtacagagccccagacagagaggcacacccctgataaaatggtacagaaaccaagagaaagagactcgggggagctggggtgggggggcggggactgagacaccagggaggagagactgaggcctagagagaagaggagcaaagactcagaaggagggggacagaatcagagacccaggagggcagatttacaaacgaggggtcggagactcagaggggtgggaacagagacggcggcacaaatactcaagaagggagaaaaagagacgccaagaaacccagaaacgggagcgggggtgggatggggttgggaggcgatacgaatcagccgccgcacctgcagcaggaagcggcgggccagaaactgtgctgcccgagggcgcccgcagccccctgacccgcccccttcgctcccgcaggcgccgcctcctccctccgcagccccagccgcagccgctggccccgccccagccccctgagcctgcgctctgcctctcggagcctacgaccgcccagggggcggggacggcccgctccgaggcggtcccctttttctggccccgcccctcactccattcttccccagaacccgacctctgagactcctagcccaccccattttttatcggtcctgcctatattgcctcagtcttgacggtgcttcctggcgctttggcctctcccctctcccgtcctctctgcctccttgcgtgccccctcctcaccagtcctcatctaccctcggtcctccaatctgcagtccgccgcggtgtagcgttcgttagaagttctcgcctcgccctttgagaccctgtgacctttaggcagtgccctctcccaggtcttctgatcccgaagactccccgttccaggtccctcccctccatccagcccagtagctttgtactctttgtagtctcattgttcccctgggatccacctctcccgttcctctaccctcccttagccctgccctgccctcgcctaccctggttgctttcaagaccctcaagccccgctccttccttagtctctctttcctaccgcccattcaagacgttttctttttcttttatttatttattttttgacacagagtctcgctctgtcgcccaggctggagtggagtggtgcgatctcgactcattgcaacctctacttcccaggttcaagcgattctcctgcctcaacctcccgactagctgggactacaggcacccacaaccacgcccgactaatttttgtatttttagtagaggcggggcttcaccattttggccgggctggtctcgaactcctgacctcaaatgatccacccacctcagcctcgcaaagtgctggcgttacaggcgtgagccactgcgccctgcctcaagacgttttctatttgtcgaccccactcaccttcctcagtaccactcatccatccggacactcattctccgggcccagccccgactaaccaggcccgccttggagcctcagccccgctccctcccttaggcctatccagaccctctcgggtttccaggactctctcaagtttcaacaccttctcaccgagtctaagtctttgttcttcccgtgtcctctttcagtccagcctgtcccccttgcgcgggaaagtcctccatctctagttcccgccccatgcagtctcatctggaccgtttctactttctgcggccctgtctcttccaagcaatgctcctccccaccaggtcctgcctagcggtgttttaggtgagggcgtgcgatctgttttgtttctctccgcccctttctcagcccaatcaggacggcctctctcatggtggccccgcccctccaggccagtcgggcgtctttaaatagcttggatgtgtcccctcctccctctaccccgcccgcacttttttcagttcagtaaggtctctctctatcgtatctagccccgccttcccctggctaccagtgctgccgaacacaattagtagtaaccggtcccgcctcccttgacgccccgccccgcccctcctccctgctctcttagaaagagccaatcgctccgtctcattggcggccccgactcgtccagctgggtcgcgttagagtgcccgccccactcctcccagccacagccccgccccacctcccccaggccaatcagtttggttcctctcccctaagccacgcccc

SEQ ID NO: 22294 - DNA, 2300 bp, Homo sapien
ctcaggaagtctaacacctttctagataccacaacaggcaattcagaaagtctatgcaccttcccaggaagccaccccactcctgtacaagtcacaccttcgagccaattctgagactccactggtctgcttggttactatgatattcagctcaggaatttcccccaaaagctctaccttccacagccaaatgaagaagtctcctctccacttcaggaagtatccatcatcctaaagtcctaacttccatcaagaaaagcaccatttcccttcatttcttgtttccagtcccaacatctcggccctgcctgcattccactgccccaactagaaccccaaaaatgacccaattggcaggaagtcccatccctggccattcctagggctggcgggggagggctggcgacaatgacctctacactctgcccctgcagggaccctgaagtggctgatggaggagagctggtcctggggggctcagacccggcacactacatcccacccctcaccttcgtgccagtcacagtccccgcctactggcagatccacatggagcggtgagggacttggtctcctgggtctggagctggaggcctggactcctaggaccctgcctctaatgactgcttccttccccctcagtgtgaaggtgggctcacggctgactctctgtgcccagggctgtgctgccatcctggatacaggcacacctgtcatcgtaggacccactgaggagatccgggccctgcatgcagccattgggggaatccccttgctggctggggaggtgaggtcccagtctctggtgggtgtgtcctggggaagatgatggcaattccatggcgaacactgcggcctgaggatgggaagcaggtagctagagcgtatccaggacagaggggactgggcttcttaagtgacatgccagagagtggtgggaggaagcaaagatacttcccaagtgtctatgctaagtggctcagtggatggtgaagtaggggtgggagtggggggggggttgttgggggagatgataatgcagttttgtttgggactagatgagaggagcctaggcaacagggctgtccacacacggtgctgaatacccaggtgctcaatatgaacattactccatggcactggggagccacggacgggatttgagcagagcaggaatctcccatcttcacttgttcctctcctccaccagtacatcatccggtgctcagaaatcccaaagctccccgcagtctcactcctcattgggggggtctggtttaatctcacggcccaggattacgtcatccaggtaggtgtccgtcataatgacgccacagtgatgtaatatgactggagttgagagggtggagctggtagttggacatcactagggccggaaggggccacagaaacatttcttgtccccggggttgggggcggagagagcacggactcccagggaaatggtggttcctgcggcctggacacccagttgccgccttgtcgccttgcagtttgctcagggtgacgtccgcctctgcttgtccggcttccgggccttggacatcgcttcgcctccagtacctgtgtggatcctcggcgacgttttcttgggggcgtatgtgaccgtcttcgaccgcggggacatgaagagcggcgcacgagtgggactggcgcgcgctcgccctcgcggagcggacctgggaaggcgcgagaccgcgcaggcgcagtaccgcgggtgccgcccaggtgatgcgcatgcgcaccgggtagcagagctagcgctactcagtaaaaatccaatatttccattgaacgaacctgcctaggttgcttcttttcagagcgtactttttgaagagaaagctttgtgcatggacccacggagttgaggaagagagggaggcgaagggtatcaccccttttctccacggcgcacccttgtgatgggccttgtactacgagtcccatgaaggccctcgcctacgctgcctttcgtcaaaggctcctggctccgtggagcatcacggtcgttgtagtccacgccgtggtcacgccctgacgggggcgggcgcagccacaacatgcgtgggaggcgacaggtcgcgacggcagccacaggtggcagtcgggggtggctgtaattggtaagggtttaccagttcctgttctaaggggcggggataccgttccctcggacctcgtctcctgtttctcctctctgccttggcattccaggaccccggggtccgccataaaggcggagcttgaagcccctgggttgggggagcggtgctgcc

SEQ ID NO: 22295 - DNA, 2300 bp, Homo sapien
gctaaagggagtacttcagtcagaaagaaaagcatgttaatgagtgataaaaaatcatctgggccagacgcggtggctcacgtgtgtaatcccagcactttggaaggcagagacatgtggatcacgaggtcaggagatcgagaccatcctggctaacacggtgaaaccccgtctctactaaaaatacaaaaaaattagccggatgtggtggtgggtgcctgtagtcccagctactcgggaggctgaggcaggaaaatggcatgaacccgggaggtggagcttgcagtgagctgagatcgcaccactgcactccagcctgggtgacagagcaagactccgtctcaaaaaaaaaaaaaaaaatcatctgaaggtacaaaactcactgctaatagtaagcacacagaaaaacatggtgtattgtaacagtataactatggtgtgtgaacaactcttaagtagaaaaactaaaggatgaaccaatcaaaaataataactacaacaacgcttcaagacatagacagtacaataagatataaatacaaacaacaaaaagttaaaaagttggggacaaagtgaaggtgtagagtttttactaattttcttattgtttgttggtttgttggtttgtttatgcaaacagtgttaagtttatgttgtcagcttaaaataatgggttataagatagtatttatggcagggcacagtggcttacgcctgtaaccccagcactttgggaggccaaggcaggcggatcatgaggtcaggagatcgaggccatcctggctaacacggtgaaacctcgtctctactaaatatacaaaaaaaaaaaaaaaaaaatagccaggtgtggtggcaggcacctgtagtcccagctaccctggaggctgaggcaggagaatggcgtcaacccaggaggcagagcttgcagtgagccgagatcgagccactgcactccagcttgggtaacagagcgagattccatctcaaaaaaaaaaaaaaaaaaagacaatatttgcaagcctcatggtaacctcaaatcaaaaaacatacaacagatacaaaaaaaaaagcaaaaaattaaatcatatgaccaaggaaaattatcttctctaaaaggaaaacagaggccaggtgtggtggctcacatgtgtaatcccagcactctgggaggctgaggcgggtggatcacctgaagtcaggagtttgagatcagtatggccaacatcatgaaaccaaatctctattaaaaatacataaattagccaggtgcagtggcacgcgcctgtagtcccagctactcgggaggctgaggcgagaatcgcttgaatccaggaggcagaggttgcagtgagccgagattgcaccacggcactccagcctgggcgacaatgagattctgtctcaaaaataaatgaataaataaataaataaataacatgaaagaaggacagaaagaagagaatactacaaaacaaccagaaaacaagtaacaaaatgtcaggaggacgtccttatcaagaacaacattgaatgtaaatggactaaactctcgaataaaaagatatagaacggatgaatggatgaaaaagaagacccaatgttttgttgcttacaagaaacatacttcacctacaaataagagtctgggtcctcagacgcaggcagtcccacttcatatgggagggcaggcttataatcagttcctctctcccttccccaggcccttcacagacacctgctggtccctcccacttggccaaggaaacactgtggttaatgagtctcagaaaagtgatgtgaaagtgagaagtaaaagtgacagaggctaaaggatggggggtgggaggcagtcccagcagaggacaccccacgaccaccaccccccaagtagggaatgaggagcactaaggacacaggatacaacttttgttgacactacacaaatactctgcacaaatcttcaaaaacatccttgtccccctgtgtcacctgctgagagacctcgtgttctggtcacctcctaaaccgggaggtggggcataaacagggtggagtcacaggggaaagaaaactaggaagcctgggttcacacccggctccccagcaatgtctccaccactgctgctgctacccttgctgctgctgctgcctctgctgaatgtggagcctgctggggccacactgatccggtatggtgaccccatttgccacccccaaacctgggagggattctctgctttttgccctttaagtctggggctcctggttcagtgattcccaaacctggcacccaggatcct

SEQ ID NO: 22296 - DNA, 2300 bp, Homo sapien
ctcagctcactgcaacctctgcctcccgggttcaagtgattctcctgcctcagcctcccaagtagctgggactacaggcacatgccaccacgcccggctaatttttgtatttttagtagagatggggtttcgccatgtttgccaggctgtcttgaactcctgacctcaagtgatctttccgcctcagcctccaaaagtgctgtggttacagctgtgagcccccgcgtccggtcccagagcccttttaagtcccagatcttacaacactgagactctagattgaggacccctccccctcctctcaggactttttttttttttttttttttgagactgagtctcactctgttgcccaggctggagtgcagtggcgcaatcttggctcactgcaagctctgtcccccgggttcacatcattctcctgcctcagcctcccaagcagctgggactacaggcacccgccaccacgcccggctaattttttgtatttttagtagagatggggtttcacagtgttagccaggatggtctcgatctcctgacctcgtgatccacccacctcagcctcgcaaagtgctgggattacaggcgtaagccaccgcgcctggcctttttttttttttttttttgagacggagtcttgccctgtcgcccaggctggagtgcaatggcgcgatctcagctcactgcaacctccacctcccaggctgacaccattctcctgcctctgaaagtgctgggattacaggcgtgagtcaccatgcccggctaattttttttgtatctttagtagagatgaggtttcaccatgttggccaagctggtcttgaactcctgacttcgtgatctgcctgcctcagcctcccaaagtgctgggattacaggcgtgagccactgcgcctggccaggacatgtttttgagaggtctctgcagaccctactatgagctctgatgattaggtactgtggtttccagacctgtgacacactcctcccatcttcgagccccagatatgtgacatttaaactgagactcccccacatcacgcccatcaaactggcctgaagaagtcatgtttttggccagagacatggctcacacctgtaacccagcactttggaagtccaaggtgggaagcttgtttgaggccaagagttttgagaccagcctgggcaacatggccagactccacctctacaaaaaatacaaaaattagctcagtgtggtggtgcacacccatggtcccagctagttcaggagggtgaggaaggaggattgcttgagcccagtagttcgagggggcagtgggctatgatcctgctactgcactccaggctgggcaacagggtgacaccttgtctaaaaaaaaaattaataaataaaataaaataaaataaaaagccaggtgtggtggtgtgcccatagtctcagctactccagaggctgaggtgggagaatcacttgagccctggagatcaaggctgcagtgagccctgactgcactactgcactccagcctgggtgacagagggagaccctgtttcaaataaaaagtttaaaagaagaaaaagaaatccaatcttggggaccctatgcaagaagtcttcccactaccttacctctgatgtcccctccccgcccccatctctctttttctcctctcttgtcttcattccctggaactcttggtagggggaggggtgtacacttccaggaagagttttccccacttcacattctcgtgcctctcaaagactgactcatggggggtgacgggaaaggtgtgagtgatgtgacaagtgcttcaaggagtgactaaaggcaggaacgaagatattaccgcacatggtgcttgttaacctgctttttgaacctaatgtctcatggccattttctaagtcaatgcaaagaaaatgagtctccaaatgttgtatcaacagcatcgtcatgacctgggaacttgttagaaatccaaattctcggctccatcctagacctacttaattagcaactaagatacctgaattgtaattggccctctaagtcaagggttgcaaacactcagcttaagggccaaatcctgtttgcctcctgcttttgcaaatacagtttaaaggaacccggacagggcatagtggctctcctctgtaatcccagcactttaggaggctgaggccaggagtttgagatcagcacgggcaacacagcaagacaattaagatttgacgcttacatttttctcctcaagggtggggaaaatagtccctaacctcacgaactgaagcatgcaggggccacc

SEQ ID NO: 22297 - DNA, 2300 bp, Homo sapien
catggctgcctttggaacctgctagttttagagcccaagggccttgagcaaacataagcagtaggcaggtaggtcgtggttacaggaggccatgggcaggacccagcgcaatcccagtgatagtaggcatggggtgtttgtgtcaccccactcccagctccaggtagctcagcagagagagagagacagagacagagagagagagagagagagagagagagagagggagagagagagactgactctgtttgagagaaagcaagggaagagagcaagagtctctgcctggtaatccagataaatcttctggatcttatctaagaccactaagatagtacctctatgagtttgcaagaaccacagcattaatgggcttggggagccccctaatgcagacatggcttagatcacaacacccaagtacttttgaatacctggaaagcctccccaaaaaggacaggtacaaacaagccttgtctgcaaagactacaataaatacctaacatggccaggcatggtggctcatgtctaatcccagcattttgggaggctgaagcaggaagatcacctgaggtcaggagtttgagaccaggctagacaacatggtgaaaccctgtctcttctaaaaatacaaaaattagctgggtgtaggctgggtgcggtggctcatgcctgtaatcccagcactttgggaggccgaggcaggtggatcacctgaggtcaggagttcgagaccagcctgaccaatatgatgaaaccctgtctttactaaaaatacaaaaactagctggcatgcgcctataatcccagctacttgggaggctgagacaggacaatcgcttgaactcaggaggcagaggttgcagtgagccaagatggcgccattacactccagcctaggcaataagagtgaaactccatctcaaaaaaaaaaaaaaaatttagccagggtggtatcgggtgcctgtagtcccagctactcgggaggctgaggcagaattacttgcacctgggaggcagaggttgcagtgagctgagatcacaccattgcactgcagcttgggcaacaagagcaaaactccatctaaataaataaataaataaataaataaataaataaataaataactcatcaatgcccagccaccaatgaacatctataagcatcaaggccatccagaataaatgaccttaccaaacaaatcaaataagccaccaaggaccaatccttgaagaaacagagatatgtgacctttccgacagagaatttaaaatagctgttttgaggaaactcaaagaaattcaagctaacacacagaaggaattcagattccatcacataaatttaacaaagagattgaaataattgagaatcagctgggtgcagtggctcacgcctgtaatcccagcactttaggaggctgaggcgggcggatcacctgaggtcgggagttctagaccagcctgaccaacatggagaaaccctgtctctactaaaactacaaaattagtggggcgtggttgcgcatgcctgtaatcccagcctgggcaacaagagtgaaactcggtctcaaaaaaaaaaaaaccaaaaaacaaaaacaaaaacaaacaaacaaaaaacaatacccaatgatctgttgtcaacaagaaacatacttcacctacaaataaaacagtaagagactgggtcctgaaatgcgggcccacttcatatgtgagggcaggtgtctaatcatgtcctttctcccttcccccaggcccttcacagatacctgctggtctctcccacttggccaaggaaacacttgtggttaataagtctcagaaaagttatgtgaaagttaaaagtaaaactgacagcagctgaaggatgggggggtgggaggtggtgacggtggaggagaccccaccaccactgccacccaagtagggagtgaggagcaccaggagcacaggatgctacttctgccaaccctacaaaaatactctgcacaaatcttcaaaaaacatccttgtcccactgcgtcacctgcggacagatttcatgtcctggtctccttctaaacctggaggtggggcatgaacagggtggagtcacaggggaaagaaaatgaggccccaggacacctgggttcacacccaggtccccagcgatgtctccaccaccgctgctgcaacccctgctgctgctgctgcctctgctgaatgtggagccttccggggccacactgatccggtatggtgaccccatctaccaccccaaccttaggagggattttctgcctcttgccctttaagtc

SEQ ID NO: 22298 - DNA, 2300 bp, Homo sapien
acggggaggttaaggaactgggctcagtgttacacaggaaggaagtgacagagacaccaggttctgccatttccaacgctcatgttaatcacttgtttcgcttctaacatccctaggtggaaaattccacaatctcaaacgatgggcctgagtagacataataagttacagaagagcatggatcacatagtcccatttcttttttataaaggcatacacatatgtcagaggcattccaaccacagcgattctgtcttgaataggagcttggtaaaataaggctgagacctactgggctgcgttcccaggaggttaaggcattcttagtcacaggatgagataggataggaggttggcacaagatacgggtcacaaagagcttgctgataaaacagcatatgcagtaaagaagtcagccagatcccagcaaaaccaagatggcgatgagagtgacctctagccgtcctcatggctcattatacactaattataacgcattagcatgctaaaagtcacacccaccagcacgatgacagcttacaaatgccatggcaacgtcaggaagttcccctatatggtctaaacgggggaggaaccctcaattctgagaattgcctacccttttcctggaaaactcatgaataatccacccgttgtttagtatataatcaagaaataactataagtataatcacagtgaacagcccaagccgctgctctacctggagtagccattcttttattcctttatttttattgcattttatttttgagacggagtttcgctcttgttacccagactggagtgcaatggcgcaatctcggctcaccgcaacctcggctcaccgcaacctccgcctcctgggttcaagcgattctcctgcctcagcctctcccgagtagctgggattacaggcgcccgccaccatgcctggctaattttgtatttttagtagagacggagtttctccatgttggtcaggctgatctcaaactcccgacctcaggtgatctgcccacctcggcctcccaaagtgctgggattacaggcgtgagccaccgcgcccggtccgagactgagcttttttaattcttccaatcaccaagttattgaaaccatttttgcaaaattttaacaatgagaaaattctgacatctcaaatctggccaggcacagcggctcacgcctgtaatcccaacactctggaaggccgaggtaggtggattgcctgaggtcaggagttcgataccagcctggcaaacatggtgaaaccccatctctactaaaaatagaaaaattagccggccgtggtggtgggcacctgtaatcccagctacaagggaggctgaggcaggagaatcgcttgaacccaggaggcggaagttgcagttagctgagatcgcggcactgcactccagcctgggcaacagagtgagactccatctcaaaaaaaaaaaagtaaaaataagcccggtgccgcagctcacgcctgtaatcccagcactttgggaggccgaggcaggcggatcatttgaagtcaggagttcgagaccagcctcgccaacatggcgaaaccctgtctctactaaaaatacaaaaaaatgagccgggcgtggtggcacatgcctgtaatcccagttacttgggagggtgaggcaagagaatctcttgaacccaggacgcagaggctggagtgagctgagatcacaccactgcactccagtctggggtgacagagtgagacctctccaaataaataaataaaaataaataaaactaacaagcagcacgactccaaaatcagaaaacttgtaacgaccaaaaaagtgcaaacgtgccttaaatcagtcatgtgcgacaagcagctatagctagggtttggccgcaggctcagagaagcgcatgaatgagctaaagccacaaagcgcggggctggaggtttggctcccaagaagcgaggaaatgggttcggaactcttctgccaagtcccagtagatctacccggtaaacttccggtgagtttccaacttccgtgcggggcagcagcttcggctggtcctaagcggaccggaagttcgtcaagtttcacgctccgcccctcttccggacgtgacgcaagggcggggttgccggaagaagtggcgaagttacttttgagggtatttgagtagcggcggtgtgtcaggggctaaagaggaggacgaagaaaagcagagcaagggaacccaggtaggtgcacccgagagtggggagacgcaggaggagccccgaacccggggcttctcggcgctccccgcg

SEQ ID NO: 22299 - DNA, 2300 bp, Homo sapien
actggagtgcaatggcgcaatctcggctcaccgcaacctcggctcaccgcaacctccgcctcctgggttcaagcgattctcctgcctcagcctctcccgagtagctgggattacaggcgcccgccaccatgcctggctaattttgtatttttagtagagacggagtttctccatgttggtcaggctgatctcaaactcccgacctcaggtgatctgcccacctcggcctcccaaagtgctgggattacaggcgtgagccaccgcgcccggtccgagactgagcttttttaattcttccaatcaccaagttattgaaaccatttttgcaaaattttaacaatgagaaaattctgacatctcaaatctggccaggcacagcggctcacgcctgtaatcccaacactctggaaggccgaggtaggtggattgcctgaggtcaggagttcgataccagcctggcaaacatggtgaaaccccatctctactaaaaatagaaaaattagccggccgtggtggtgggcacctgtaatcccagctacaagggaggctgaggcaggagaatcgcttgaacccaggaggcggaagttgcagttagctgagatcgcggcactgcactccagcctgggcaacagagtgagactccatctcaaaaaaaaaaaagtaaaaataagcccggtgccgcagctcacgcctgtaatcccagcactttgggaggccgaggcaggcggatcatttgaagtcaggagttcgagaccagcctcgccaacatggcgaaaccctgtctctactaaaaatacaaaaaaatgagccgggcgtggtggcacatgcctgtaatcccagttacttgggagggtgaggcaagagaatctcttgaacccaggacgcagaggctggagtgagctgagatcacaccactgcactccagtctggggtgacagagtgagacctctccaaataaataaataaaaataaataaaactaacaagcagcacgactccaaaatcagaaaacttgtaacgaccaaaaaagtgcaaacgtgccttaaatcagtcatgtgcgacaagcagctatagctagggtttggccgcaggctcagagaagcgcatgaatgagctaaagccacaaagcgcggggctggaggtttggctcccaagaagcgaggaaatgggttcggaactcttctgccaagtcccagtagatctacccggtaaacttccggtgagtttccaacttccgtgcggggcagcagcttcggctggtcctaagcggaccggaagttcgtcaagtttcacgctccgcccctcttccggacgtgacgcaagggcggggttgccggaagaagtggcgaagttacttttgagggtatttgagtagcggcggtgtgtcaggggctaaagaggaggacgaagaaaagcagagcaagggaacccaggtaggtgcacccgagagtggggagacgcaggaggagccccgaacccggggcttctcggcgctccccgcgtactccgctctgcccccttctctccttccatttcctcccctcggtaattcgcgcctcccgcggctgtttccagggcaacaggagtagttcactccgcgagaggccgtccacgagacccccgcgcgcagccatgagccccgccccccgctgttgcttggagaggggcgggacctggagagaggtgcgagggcggagcatgaatggaggaggcggggcggggcatgatgggaggtgatggggcgggacctgcagcgcggtgcgggggcggggcatgaagggaggaggcggggctgggggcggggcatgatgggaggagatgtggcggggcctggagcgaggttgtgggggtgcagtaggaagggaggaggcggggcgggggcggggcatgatgggaggggatggggacctggagcgaggttgtgggggtgaggcttggagggagggatgcatatggggcggggcaaggtgttgggaggcccatgatgggggctttaggggctgaacctggaaggttgagggcggagcatagtaggaggaggtggggtcagaatgagaaatagggatgcttggggcagaagtgaggtagagtcttaagaagaggaggtggggggaaactacatggcatggaggccgtgaaggcagagcatgattaaaggagaatgggccctacctagaaaaagcaggtggattggacctgagggggcggggcctacagcaggggcggggcttaagaccaagctgaaggctggcgtggaacagaagggggcaggtcttgttagaaggatggggagggtttgta

SEQ ID NO: 22300 - DNA, 2300 bp, Homo sapien
gccgcgtggaggcgttgcagcagccctacgtggaggcgctgctgtcctacacgcgcatcaagaggccgcaggtagggccccgcagagcctctgcgcagagccaactacgtcccgcggcccacgtggtccgttcaggctgggttctgccagccacactgccctcccctccgcagagtctttcctcaggccccaccctgctcgactgggagccaggtctagtccaagcacagaggcgggccccacgctggctcccacgcctggtcggggaggggccctcctttctgttggggtgggcctcccaaagcctggcagggcaggggctcagccagcgcccacctgcctcctccctcaggaccagctgcgcttcccgcgcatgctcatgaagctggtgagcctgcgcacgctgagctctgtgcactcggagcaggtcttcgccttgcggctccaggacaagaagctgccgcctctgctgtcggagatctgggacgtccacgagtgaggggctggccacccagccccacagccttgcctgaccaccctccagcagatagacgccggcaccccttcctcttcctagggtggaaggggccctgggccgagcctgtagacctatcggctctcatcccttgggataagccccagtccaggtccaggaggctccctccctgcccagcgagtcttccagaaggggtgaaagggttgcaggtcccgaccactgacccttcccggctgccctccctccccagcttacacctcaagcccagcacgcagtgcaccttgaacagagggaggggaggacccatggctctcccccctagcccgggagaccagggccttcctcttcctctgcttttatttaataaaaactaaaaacagaaacaggaaaataaaatatgaatacaatccagcccggagctggagtgcaagatggagagggcgcgggcttctagggacctcagtgacactgggtgcccgaacctgattgagcaggtgggactgggtgtccccaggctgttgggaaaagggtggcacatagggtcccagtgttgggtggtgtgtcgcctgctgtgaaagttcaggacagaggcctcagcctcagggtcacctccctggacaaggtgaatcagaactcacccttgaaggataaacaggatttaagtgaatgaggggacctggacttctgtccgaacaacaagtgtttgctgaggcctcctgtgggccaggcactgggttggccattctagagatggagacattcacccaataaatgtttccagagcattaactacagttaggcacaattctaggcactggaaacatctgtgaacaagataaccatcctcctaccaagactcgggggatagggactttaatgagcgtggcactgtggtggggctagaggaaatcagggaaggtatcacaacagaggcaatcgctgggacctaaaacaagagcctgggggctgggcctccaagttgagggaacagcacgtgcaaagtttgaaaggagagacgccaggagttcggagcgaagcgacgaagttcctccaatccttcctgcccctgtgccagccctgaaggagctgaatgagcaattccaatcgagggcgaaaggggggttggatggagggatgcaacttaaaggtgtatttatttggggcggggaacagcggaagtgagagtagttaccaatgatcaccttatcctaagagtagtgtaccgggcgccccacaagtgtccctatcatgcgttgttgagtctaatttacgtatagggaaactgaagctaggatgaaggagaacagatcaagccaggactctaccgcttatcggccagcctctgcggggatcttgggcgtcaggtcaccagctggctgctgggcagcgacggggcagcgctccctacacggccccgggcgagaggcgggcggggggacgcggaggatgcgcgcgcaacacccgagggtgggaggagagagaacagaaccgcggcgcgcccagaccgcacgaggtcgtgaaggtagccgcgcggaggggcgtggcttcgggcagacaggtcatggggaggcggagttaagggaatttttcagcaagggggcgaggccacttcggaagctgagagagggggcggggcctgccctgcagtcgaacaagcggggcgtggccttgcccgcacttgggcaggcgggggcgtggcccgtctctgagcgccgcggctctgggcttgcgcgcgcgggagtcaggggtcacggcggcgtaggctgtggcgggaaacgctgtttgaagcgggtgagtagagggg

SEQ ID NO: 22301 - DNA, 2300 bp, Homo sapien
tccaccccccacagagggtcctcggcccccaccccgggagttccccaggggagttttcccagcacacttgctccgttgttctccagcctctggggactttcagaagctgggattggcagtgggcagggatggggtggcccagttcctggctgggccccagcacttgggctgacccgcctccccacaggagccgtgtgtgagttctgccagccccgggagtctgagctgtatcagaaggaggtgagagggccgggaggtgaggaggggccaggtggggaggcgggggcgccctgctcagccgctgccgtccccaggtatcccatctgaatgccctggaggagcgcttctcgcgcctctggacgcagtgccagcgctgccagggcagcctgcacgaggacgtcatctgcaccaggtgtgtgccatgtcccgaccctgggctgccccgccccttcccagctcccaggcctgtgggttgtggacccaacctctgactccaaggcctctcctgagcatcctccccgcccatccccttccagctgtgagctgtcctgagcctcagtgtccttgtctgaaaaatgggcccatcccagccccccagagggggtgggtgcttagggaggcagcgcccggcacccagtgttgcccgggaaacggctgtcctcccgacacacccagccagcctggccccctccccagggcggggccgggctttccccagggaacgggtaggcggggtgggttcccacgccaggtgacaggtgatatacggccagccatggccctgcacctcgccaggcacccgctgttatcggctccccccccccaccccccccgtgcctgctgagcaaacagcccgctgcgggagggggcgggtgggctgggcagcaggcggggaccaaagtcctgggaacagcccccacccctctcccaggctgggcactgggccttggctggtcctgaccctgcccctgcccccacccgcagccgggactgccccatcttctacatgcgcaagaaggtgcggaaggacctggaagaccaggagcagctcctgcggcgcttcggaccccctggacctgaggcctggtgaccttgcaagcatcccatggggcgggggcgggaccagggagaattaataaagttctggacttttgctatatggtgctttgtggtctctgggggacactgtctggtttcataagccctggccttggctgggaccctcctgaggcccgcaccgcccctcatcctcagcaaaagcccccggactcccacctgtgctgcctggttcatgtgggccaagcctgcctcagtttcctctctggccctgaaggaacccttataccagcgcttctctgccctgcttagggcccccaggtgtctggccccggcccagccctccctggtgatgaccctggggaccctggtggctgccccgccctccaggtgctgacctgtttcctccaggccctggggcagccccaggcgcaccggggcttccactcctcagcccggccaaggggacccccccatcccccgccggaccacacacccacgatgtttccacgtcggggtcctggcaatgggctttgggtctgggtttccccccagcgactcccatctctatccccgcagcctctaactgccgtcagatgccctcggccctcccgtcacctcacacatcccccggggagagtcttgtgcttgcccctcggcccccagcccgcccctgctggaattcggctcctgggtccagatcctccgtttcctgattctcctcttcagtgaaccccagcccttcctcgatgttttcagggttcccccaaatccagctcctgtcccatctccagccctcaaggtcagccccccaaacccagccccacggggatccccaaatccagacagcccctggcccgccatccctgccatgtgacaaaggggttgtgcaatccagccccctcccctgaccccctccctgaggggatttttgaggagggccgagcttgtggccagcgggcaccctcctccccccggcaggggctgggccaagatataaatagggttggcggctgcagcgggcggcaaacagcccgcccggcaccaccatgctcgccctggaggctgcacagtaagtgagggcccccaaacctgcacccggggtccccacctgcactgcccctctgtggggcctcacccatgggcagtggtttctctgctcctcacggccggtgggtgggagtggaggggaggggtccaccctgtctcttgccccttctggttctgttccctcttcacttcgg

SEQ ID NO: 22302 - DNA, 2300 bp, Homo sapien
tcccaggaggaggaggaggaaggaatgccaatgacctagagacacgagaagtccatgtggaggcacacagcagctgatggcagagcccaggctgggacctgcccttaagagaatgagtgggaagggggagggaggaagggcaggtaaaacgtcctccccagggccccctgcaacggggaaggtactttttacaaaagctatcattgtcaccctaaatgtggaataaaataagatgcatcgacgtagacaaacctcctgggaccttttgtcagggactgcaatcctgcccctccactgaggccgctggctctcagagacaccgtgacatcacgggtgatgatgagaggagttcaaagagagaattatatgctggcgcggtggctctgtaatcccaacactttggggggccaaggcaggaggatcgcttgagtacaggagtttgaaaccagcctgggcaagatagtgagatccccttcccacccgtctacaaaaaaaataaaaaattagcggggtgtggtggcgtatgcctgtaattccagctactccgaactactgaggtgggagggtcacttgagcacaggaagttgaggctgcagtgagccgtgatcgtgcccctgcactccagacacggcgagaccctgtctcaaaaacaaacaaacaaatcacaaagacaccatacagcaaaacctatctgaaccttaatgccgagaaataagaggcttgacgcgcaggcacagagggttccgtttatgtcttcctctattcctgccaactgaagttctccacctcctccccgcttccccttccgtctgggtgtctgtccccttccctctgaattgagccctcgggctggcagcgagggacgcgaggcttcaggtggccgcggcactgcaggcctgggcccctccccaacttagcggggctcgcgggagcgcagtggcagtctgcctggcaacccgtgacatcacatggaactgacgccggattggctggacgctccccggaggcggagaaatttccggctcgtagggggttttggaaaaggaggagggggaagatgaacaggaaaaaaaagcggagggacttgttttcctcacaccgggtccctcacgctgcgttactagccaggcagtcccccagccttaaccctaagtccccaacaccctttccctccttcctccccacaacacctggtgtccccaagccccgcccctccccaggccccgccccctcggctccccgccgcgtccagagccaccccattcagaaagtcacaggtccccctgccgggaagggcgccaacgtccgggcagccctccagggccttcccagcctcccacccgcccccaccggggacgcccaccccctacccgcgtccggtgcctgccgtgcccgctccgggaagagtcgcggggagcggtcccaggaggggcggcggccagtccggggtcccagatggccggggccccagctctttgggtttgcccacgcccggggcgcgaaactccggagtcccagagccgcggcgccctccccggaggcgcagggacctcctccccccgccgccgtcctgcctacgctaggaaaccggaccctccctcccggctccggtttcccgaaaactcctgacttgcagatgctaagaatggcttcctagaccctgtccctcccctccctgcttcatgccagagctctggcccgcagcccttacccccttgagaccctcagtctcttcctcttccttctcccgggacccaggcgtccaggcgctcgtcctttctagggaacccaagaatctgggaccccagttgcttctgctcccagactcaggggtccaagcacccagtcccctcctccctgagattctggagtccgagccccagccccctcctccctcagacccaggtgtccgagccccagcccctcctccctggggacctggctctcagccatctccctaggtccagctgttatttctcgccctttagaacatgcgggcggaatgtggggcggccctgtggtctgatgtctcccggagccttctgggagtctcaggactcattaaaaggctccccttaggggcccacctgtcctccctagggcctagcgggacgcggctgcggtcagaggagcaggaggaggtcccccgacatgcctgaggcaaaaccaggtggcgccaggaccccctccctgtgtggggatggggctcttcttttctggatggggatttgggacccctctgtttgtagggttgggagaaggaggaaccttcgctgtgtgaggaggaggctccctttgct

SEQ ID NO: 22303 - DNA, 2300 bp, Homo sapien
ggaccttcatgtgtgcatgtgtgagacaatgtgagtttgtccttccttccttccctccttcctctatttctccctccttactttcttccctttcttcttttctctgtcttctttcttccctctctttctttcttttttagagaacgggtctcacttcattgcccaggctggagtgcagtggtgtgatcacagttcactgcagcctcgaactcctgggctcaagtgatcctcctggctcagccccagtagctaggaccacatgtatgtgtcaccatacctggctagctttgtaattttgatttttgtagagatgggggtcttgctatgttgcccaggctggtcttgaactccaagcctgaagtaatcctcccacctcagcctcccaaagtgctgggattacaggcatgagtcaccatacccggcatctctctttcatgaactgtgagatgtggtcaaaaaagtgaaagccagacaggcatggtagctcatgcctgtaatcccagcactttgggaggcccaggcaggcagatcacctgaggtcaggagttcgagaccagcctggccaacatggtgaaaccccgtctctactaaaaatacaaaaattagctgggcgtggtggcaggctcctgtaatcccagctactcaggaggctgaggcaggagaattgcttgaacccaggaggcagaggttgcagtgagccgaggttgtgccactgcactccagcctggagactctgtctcaaaaaaacaaacaacaaaaaaagtgaaagctactggcagaatgtttctgtactgtaggcatgtaaacatttcagtgtttgtagctggagttggggcaggagccttgggtgagaaaaaggaacagcttctgctgtctattttgtgcttgttttctcgtttgtttgcattactttttcttttctcttttcttttcttttttattctctctttttttttttgagacagagtctcactcattctgttacccaggttggagtgcagtgggatgatctcggctcactgcaacctccacctcttgggttcaagcaattctcctgcctcagcctcccgagtagctgggattaccggcgcccgccaccacacctggctaatttttttttttttttttgagatggagtctcgctctgtcgcccaggctggagtgcagtggcgcaatctcagctcactgcaacctccgcctcctgggttcacgccattctcctgcctcagcctcccgagtagctgggactacaggcgctcaccaccacgcccgactaattttttgtatttttagtagagacggggtttcactgtgttagccaggatggtctcgttctcttgacctcgtgatccacccacctcagcctcccaaagtgctgggattacaagcgtgagccaccgcacccggccctggctaattttttgtatttctggtagagacagggttttgctatgttggccagaccggtctcaaattcctggcctcaaatgatctgcctgccttggcctcccaaagtgctgggattacaggtgtgggccaccgcacccgatctgcattactttttcaatgaaaaaatatgacgtaaaggggcagtgtggagtgaggcacaggagggctcaagaaccatgagatccacaatcatgacaagcttggcattccaatcctggcccactctggagccacagtgggaccctgggcaactggctcccggctctctgagcctcagtttagctctttggcggatggggctaagggaccccaccatgtgaagatatgaggtcagaggtgagatcgtatgcgcggcctaggggcgtctggcatgagcaggccctgcggaaatgatcattctcctgaccgctgctggggcatggctgaggactgtccccttcaggtctgtctaatctctgatttctggcccctgagggctgctctgtccttgttctcccgggtagatggcagctcagggagggccggtagcactgccagctcctggccctgggggtggtctggacgaggggaggtactgctgggggctcaggtgcctggagctgagggaggaaggggtctcggctgaggtgggggcagttacccgaagagttgcaggtgtccgttctccttggcagggccggccagaagcaataggtccgggagctccagggctggactggaggctgccacccccatggtgacctcgttggcaacttctcccaaccgagtcacctggggccagaggtcagaggtcggggcaggatagatgtcggggcagaactgaggagggatcagaggttaggaatcttggt

SEQ ID NO: 22304 - DNA, 2300 bp, Homo sapien
ctcccgagtagctgggattaccggcgcccgccaccacacctggctaatttttttttttttttttgagatggagtctcgctctgtcgcccaggctggagtgcagtggcgcaatctcagctcactgcaacctccgcctcctgggttcacgccattctcctgcctcagcctcccgagtagctgggactacaggcgctcaccaccacgcccgactaattttttgtatttttagtagagacggggtttcactgtgttagccaggatggtctcgttctcttgacctcgtgatccacccacctcagcctcccaaagtgctgggattacaagcgtgagccaccgcacccggccctggctaattttttgtatttctggtagagacagggttttgctatgttggccagaccggtctcaaattcctggcctcaaatgatctgcctgccttggcctcccaaagtgctgggattacaggtgtgggccaccgcacccgatctgcattactttttcaatgaaaaaatatgacgtaaaggggcagtgtggagtgaggcacaggagggctcaagaaccatgagatccacaatcatgacaagcttggcattccaatcctggcccactctggagccacagtgggaccctgggcaactggctcccggctctctgagcctcagtttagctctttggcggatggggctaagggaccccaccatgtgaagatatgaggtcagaggtgagatcgtatgcgcggcctaggggcgtctggcatgagcaggccctgcggaaatgatcattctcctgaccgctgctggggcatggctgaggactgtccccttcaggtctgtctaatctctgatttctggcccctgagggctgctctgtccttgttctcccgggtagatggcagctcagggagggccggtagcactgccagctcctggccctgggggtggtctggacgaggggaggtactgctgggggctcaggtgcctggagctgagggaggaaggggtctcggctgaggtgggggcagttacccgaagagttgcaggtgtccgttctccttggcagggccggccagaagcaataggtccgggagctccagggctggactggaggctgccacccccatggtgacctcgttggcaacttctcccaaccgagtcacctggggccagaggtcagaggtcggggcaggatagatgtcggggcagaactgaggagggatcagaggttaggaatcttggtaggggaaaaggtcatgaaccaggtgagttgaaaatcaggctgggggccagatatcttgaaattaaagttcaagaatcatatgggtgtgaagtcagggaaactgaggcaagggagttacaggccagggttcacaaagaatctagagaactagaagtatggggtgtcagagatcacataggagttgggagtcgggaatcccacgagatggacgttatgggggagcaggggctttccaagtcaggaggaggtcgaggggcaggccgaggctggggatgagggggttctggggctccctacctgtacgaagttgctctcaaagatggggaagtcccgaaactggtcgaattcgccgctctggaggtagcgttggagccgtctgggacggcccgtgggagaggctgcaaccaggaggcattttaccaggacgaagtctgggggtcgatcctgggaggctgtgcctggcttcccaactgagagggcccggcacagccccgcggagaggacggggtatcagatgcccccgaattgccggccccatcctacttggttccttcaccaggtccaacccctctaggcctggctcccctctctcacctgccatcccacctggttccacctcgccagctccacccagggccggcttagggccgcgatcccgcctcattgcaatgtccccgtccgacgggagcggacggaggagcagagggagaaagcgagggggcgggactacgcgcactgtgacgtcatgatgcggagcgggctttatgacgtcacacaagagcgggctcctgatttgtgatgacgtccctggagggggcggctcctggagatcaggccaaaggggcggccccatcctgctgacgtcaggccccaggtgcggacgggtgccagtgcgcaggtgccggggcccagcgcaggcgcacgggcgtcaggatgcggcctgttcctcccggcgtgctccgcggctcttggctcacagccgtcccttcgctggtgggaagaagccgagatggcggcagccagcgctggggcaacccggctgctcctgctcttgctgatggcgg

SEQ ID NO: 22305 - DNA, 2300 bp, Homo sapien
tctgagttaatacttgcaaagcgtggaaccgctaatgctgggcacgtggcgactgatcaggaaagccgctctgaaattattactgctgtgatgaccttttaaaaactgaggtttgtctcacaggcaagggggcatttaaagagtgtttctcttctttcatgtcccactttcccctaacctgaggcaaatctgttagtaaatggttgttagtaaatgtcatacgacgggaggcacccagactccaagtcttgacttctcagggcaccaatgttaagtgtctaggagaggacgttgcctgactcaccgatctcaaatgagtgctccagcagcagccccaccgtgccacaggcctcgccctctcgaccttccgccccagcctgcagaggacacagaaggccccaggtgaggaccacccaagccctcagcatagtagtcacccacagaacccaggacagacagactggtgggctgagggaggagccttatcttcaagttaatcactgctgcttgcctttatttcactagaaaccacccatttcatgaatattcatactctgcactccctcacccccagaaaaccagaccctacaaacatgcctaacctcattgccaaagcaactatcccaaggtcacttccaagccttgcgccacaaatactcatgagttaaatgacactctccctctcccaagccttctttttcatgctaatattcaaatggcctccttatcacctgacagcccaatagccaagatgcagcctgagttcagtccctattaagcacattcaagattcatgctttccttttctccaacctccaaacttgcatactcacgcatatttaggagacaaaactcatctccacttcctcaagagccccctcccacgccttattttctttttctgagacagggtctcgctcagtcgcccaggctggagtgcagtagcgtgatctcagctccctgcaacctctgcctcctgggttcaagcgattctcctgcctcagcctcccgagtagttggaattacaggcacctgccaccacatccagctaatttttgtgtttttagtagagacggggtttcaccattttgagcaggctggtcttgaactcctgacttcaagtggtccgcccgcctcggcttcccgaagtgctgggattacaagcatgagccaccgcgaccggcctaattttttttttttttttagtattttttgtagagacagggctcgctatgttgcccaggctggtcttgaactcctggcctagagcaatcctcccgcctcggcctccctaagcgttgggatgacagatgagccaccgcgcccggcttcaccttgcctctttcatttcaaccgcccggacgtcggattctccaagattccacacccccagccccgccccctcatacatattcccgagccagagccttccgacaggtgcgcttgtcctcccacccagtccttgcaacccggtgcactggcgaggcccctcctgcgcgtgcgtgactgaggcctggctttccagggatctcccacctcttccctctcagccctgcgcagcctccttccgtctgtaactcacctaaagacccaagacctgcgacatccgtagaccgcgcccgctatgcacagctaaagagcactcacccctcgcgcaccagtcccggcccggcagccgctgccccgggctcgactgggcgctgctaccgccatcagcaagagcaggagcagccgggttgccccagcgctggctgccgccatctcggcttcttcccaccagcgaagggacggctgtgagccaagagccgcggagcacgccgggaggaacaggccgcatcctgacgcccgtgcgcctgcgctgggccccggcacctgcgcactggcacccgtccgcacctggggcctgacgtcagcaggatggggccgcccctttggcctgatctccaggagccgccccctccagggacgtcatcacaaatcaggagcccgctcttgtgtgacgtcataaagcccgctccgcatcatgacgtcacagtgcgcgtagtcccgccccctcgctttctccctctgctcctccgtccgctcccgtcggacggggacattgcaatgaggcgggatcgcggccctaagccggccctgggtggagctggcgaggtggaaccaggtgggatggcaggtgagagaggggagccaggcctagaggggttggacctggtgaaggaaccaagtaggatggggccggcaattcgggggcatctgataccccgtcctctccgcggggctgtgccgggccctctcag

SEQ ID NO: 22306 - DNA, 2300 bp, Homo sapien
agtgaccaggttccctccccatctgggcccccattttgctatctgcaaagtggggacacctccaccatgttccacctcacaaggcaacccgtagcagatgcatgaaccccacagctcccaaatcctgcctctgcctcaccaggtgacccagggatagccacacaacctctctgagcctcagcttccccaactgcaaaatacggaggctgtggagttcaggaattcccaactacctggccatgtcagaatcaggggagctgttcactgagcagatgccagggtttgcagaggggcaccagcttcagggtttgtgccctcaggttcggggcctcagactcgattactacactctgggcagcactgacgtccagctctgggaacctggacacctgcatcatggcaatttaagtttgggtttgaagctggcccctgctctgccactcactcacgatgagaccttgtgtggtgcctactctgagcccgtttcctcttctggaaaaaggggctgacacgaatacctaccacctcacatggctgctgtgaggacatctgagttaatacttgcaaagcgtggaaccgctaatgctgggcacgtggcgactgatcaggaaagccgctctgaaattattactgctgtgatgaccttttaaaaactgaggtttgtctcacaggcaagggggcatttaaagagtgtttctcttctttcatgtcccactttcccctaacctgaggcaaatctgttagtaaatggttgttagtaaatgtcatacgacgggaggcacccagactccaagtcttgacttctcagggcaccaatgttaagtgtctaggagaggacgttgcctgactcaccgatctcaaatgagtgctccagcagcagccccaccgtgccacaggcctcgccctctcgaccttccgccccagcctgcagaggacacagaaggccccaggtgaggaccacccaagccctcagcatagtagtcacccacagaacccaggacagacagactggtgggctgagggaggagccttatcttcaagttaatcactgctgcttgcctttatttcactagaaaccacccatttcatgaatattcatactctgcactccctcacccccagaaaaccagaccctacaaacatgcctaacctcattgccaaagcaactatcccaaggtcacttccaagccttgcgccacaaatactcatgagttaaatgacactctccctctcccaagccttctttttcatgctaatattcaaatggcctccttatcacctgacagcccaatagccaagatgcagcctgagttcagtccctattaagcacattcaagattcatgctttccttttctccaacctccaaacttgcatactcacgcatatttaggagacaaaactcatctccacttcctcaagagccccctcccacgccttattttctttttctgagacagggtctcgctcagtcgcccaggctggagtgcagtagcgtgatctcagctccctgcaacctctgcctcctgggttcaagcgattctcctgcctcagcctcccgagtagttggaattacaggcacctgccaccacatccagctaatttttgtgtttttagtagagacggggtttcaccattttgagcaggctggtcttgaactcctgacttcaagtggtccgcccgcctcggcttcccgaagtgctgggattacaagcatgagccaccgcgaccggcctaattttttttttttttttagtattttttgtagagacagggctcgctatgttgcccaggctggtcttgaactcctggcctagagcaatcctcccgcctcggcctccctaagcgttgggatgacagatgagccaccgcgcccggcttcaccttgcctctttcatttcaaccgcccggacgtcggattctccaagattccacacccccagccccgccccctcatacatattcccgagccagagccttccgacaggtgcgcttgtcctcccacccagtccttgcaacccggtgcactggcgaggcccctcctgcgcgtgcgtgactgaggcctggctttccagggatctcccacctcttccctctcagccctgcgcagcctccttccgtctgtaactcacctaaagacccaagacctgcgacatccgtagaccgcgcccgctatgcacagctaaagagcactcacccctcgcgcaccagtcccggcccggcagccgctgccccgggctcgactgggcgctgctaccgccatcagcaagagcaggagcagccgggttgccccagcgctggc

SEQ ID NO: 22307 - DNA, 2300 bp, Homo sapien
ctggatggccgggggcttctgggcccgacgcctagtgcagcccctggggtcgtggtttgacatttgtctgcctggtgcaaacaaggaatccttgcctttaaggtgacaggccctccacaggcttccagacttgaaggaaaaggtttaagaaagaaaacaaaaccaacagttagtggagtcaaagcccagacactgtaaatagaaccccctccaccaccccccgccgcccagcatcctacctggactgcggtgctacgagggcctgcgggcctttgctgtgtgccaccctccctgtaagtctatttaaaaacatcgacgatacattgaaatgtgtgaacgttttgaaaagctacagcttccagcagccaaaagcaactgttgttttggcaagacggtcctgatgtacaagcttgattgaaattcactgctcacttgatacgttattcagaaacccaaggaatggctgtccccatcctcatgtggctgtgtggagctcagctgtgttgtgtggcagtttattaaactgtcccccagatcgacacgcagctagcctcctgcattgtatggttataaatagcaccctagtgagtgctgtcgtccagtctctcttgggtgtggtttgaatgatctcgggatgcatgactaaaatggaattacgatggcagatcggaaacgcgtttataaacaagtgatggtttgtgagtcgactgtcaagaccaggaggtggtgcaccgtgggaggttgccttccctcccatcacttctttttgtttttgagtcagggtcttgctctgttacccaagctggagtgcagtggcggtaccttgactcactgcgacctccacctctcaggctcagcgattctcccacctcagcctcctgagtagctggaattgtaggcgtgcaccaccacgcgcagctagtttttgtattttttgtagagacggggtttcaccatattgcccaggctggtcgtgaactgctggactcgagtgatccacctgcctcggcttcccaaagtgctgggattacaggcgtgagccaccgcgcctggcctatttttggtaactttaataaagaagatagtcttagcattgctaacttctgtttctttctccacctgcaggagatagcttatgctttttctgtcttcattccatgtgaatcctgcttcattcttttcctagaggattccagaaatatttactaatgctttttttttttttttttttttttttttgaggcagagtctcgctctgtcatccaggctggagtacaatggcacgatctcagctcactgcaacctccgcttcctgagtttaagcgattctcctgcatcagcctcccaaatagcggggattgcaggcgcccgccaacacacctggctaatttttgtattgttagtagagacagggtttcaccatgttggccaggctagtcttgaactcctgacctcaggtgatctacctgcctcagcttcccaaagtgctgggattacaggcatgagccactgcgccaggcctactgatgctttttgggaagtgttcccaacttggagtcctggtccctgtgtctgatctgcagatgtcttctaccccggcactgggggaacatcttatttttcctgggttaaacattgggatctttataaacctgattatgtcctttccctctaagtctcggttgctttcaggctggcagggttactctgttgggtattccaggaaatgcctgagctccttcaggctcccctagcgttctgttcttattaaacttttcttccccgtctggccggtccttggggaacccactcactattttattttattgaccgggttatccagggatgaagtatgaaactcaaaagatagagtaggttggccaggcatagtgattcatgcttgtagtcccagctgtttgggaggctgagacaggaggatcgcttgagccccagagttcgatgcttcctgagctgtgattgaatcactttactccagcctgggtgacagagtgagaccctgtctccagaatagacaaaagatgcagtggaatccacgtccagaaactgtatgctcactctgggctccagcacccacttcccctccctggaggcagcctgagttttctgtcccctggtatgctgcagatactctccacagaaacaagcagatgcacatgtcaacagttttgcaagtgttgctcttttcccccaccttcttttgacatagctggggcagtttccatctctggtataaggtgccatcttattccatctctggtgtaagagtgtgttgctggatt

SEQ ID NO: 22308 - DNA, 2300 bp, Homo sapien
aaaaattcgctgggcgtggtggtgggcacctgtagtttcagctactggggaggctgaggcaggagaatggcgtgaatccagaaggcagagcttgcagtgaaccaagatcgtgccactgcactccagcctaggtgacagagtgaaactccgtctcaaaaataataataataataataataggccaggtgccgtggctcacgcctataatcccagtactttgggaggccgaggtgggtggatcacgaggtaaagggatcgagaccagcctggccaacatggtgaaaaccccatctctactaaaattacaaaaattagccaggtgtggtggtgcacgcctgtaattccagctgctcgggaggctgaagcaggagaatcacttgaacccaggaggtggaggttttggtgagccgagattgcaccactgcactccagctttggcaacagaggaagactctgtctcataaataaataaataagtgggacgtggtggcctgcgcctgtaatcacagctacttgggaagctgaggcagaaggactgcttgagcccaggaggttaaggctgcagttagccatgatcgtgagtaagagagactttgtctcaaaatataatagcccaggcatggtggctcacacctgtaaccctagcactttgggaggcaaaagcaggaggatcacttgagctcaggaggtcgaggctgtagtgacccatgatcgaatcactgcactccaccctgggtgacagagtgagaccctgtctcaaaaaaataaataaaaataaatataatagaccaggcacggtggctcacgcctgtaatctcagcactttgggaggccgaggcgggcggatcatgaggtcagaagactgagaccatcctggctaacacggtgaaaccccgtctctactaaaaatacaaaaaaattagccaggcatggtggcaggcgcctgtagtctcagctactggggaggctgacgcagaatggcgtgaatccagaaggcggagcttgcagtgagtggagatcgtgccactgcactccagcctgggtgacagagtgaggctccatctcaaacaaacaaacaaaaaattaggccaggtgcagtggctcacgcttataatcctagcactttgggaggctgaggtgggtggatcacaaggtaaagagattgagaccatcctggccaacatggtgaaaaccccatctctactaaaattacaaaaattagccaggtgtggtggcacatgcctgtaatcccagctactcaggagactgaggcaggagaattgcttgaacctgcaaggcggaggttgcagtgagccgagatcgcaccaactgcactccagtctgggtgacagagtgagacaccgtctcaaaaaaaaaaaaaattagccaggcatggtggcaggtacctgtaatcccagctacctgggaggctgagacaggagaatcgcttgaacccaggaggcggaggttgcagtgaactgagatcgcgccattgaactccagcctcagcaacaagagtgaaactccatttcaaaaaaaaaaattaattaaaataaatacagttaaaagatgccttgtcctaatccctggagcctgtgaatatgttgtgttacttggccaagggagagtgaggttgcgagtgggactgggacagggagagtgtcctggatcccccggtgggccccgggtcatcacgagggtccccacagcggaggagggacgcctgtgctgacgggaagtgtcggcccaccctcccagctcccaccctgtggggagacccaaggggacaccaagagtttctgtcccagcagtgggggcttttatggggttcccacagagcactgcagggacgagagaacagagaagggaccccgggacaagcaagtcgcataaaatggcccagagacaaggctggccacggaaggctgaggagggctctgcagaggctggcggggcacgggagggcactccagaattggaagtcatcccggatgagacctggaacgccacggctgtttatcgccagagttatttgaggaggtgatgaaggaggagggtgggtcccggccaggaacccaaccaggcgggacctccaagggcagcctgggagctgcgagaagggaaggacaggtcagctctgggtgcagagacccctctggggctgcaggcacagaatggagggggaaccagaagccaggaggcccgggaggaggctgggaggggcgaggcagggcttgagctaggcccctgagggcgacagagaggagggtctgaggctggtgggccctgggaggtgagga

SEQ ID NO: 22309 - DNA, 2300 bp, Homo sapien
cctgaccctctctgggccttggttcaagcaaatgtgaaacaggacgaacccattcatctcatttcgcctcccaggtcagggagaagaagggcagccctcagtagactcggagggaaccttggggagaagaggcctaatacctctccaagaccctccgccctctttcccctctcccaggcgccctgatctggttgtggaagtggcccatcccaaaataatccatgaatctggggcacaaatcctgcgccatgccaatctcctggtaagccccaccccaaccatttacgcagagccctgccccttctgtcttggtctcaccccaccctgaagtggatatccttccctgacctcaaccctcccctccttcatccaccccaggtggggtccccctcagctctaagtgaccagaccacagagcggcagctcttggaggcctcacagcactgggaccacgccgtgtttgtggcccgaggggccctgtggggcgctgaggacatcaggagattggatgcagctgggggcctccgggtgaggcctgctgggctccccaggaaccaggggaggcctgcaaagaccccactccccctaacccgggctcttgcttccagagccttcgtgtcaccatggccacacaccccgatggcttccggcttgagggacccctggctgcagcccacagccctgggccttgcactgtgctctacgaaggccctgtccgtgggctctgcccctttgccccgcgaaattccaacaccatggcggcggctgccctggctgcccccagcctgggcttcgatggggtgattggggtgctcgtggctgataccaggtgagcagagctaagcagggtgttgggctgagtccaggctctccagactgactgcccctcttgtcccagcctcacggacatgcacgtggtggatgtagagctgagcggaccccggggccccacgggccgaagctttgctgtgcacacccgcagagagaaccctgccgagccaggcgcggtcaccggctccgccaccgtcacggccttctggcagagcctcctgggtgcggccaggcccctctcccccggccctgggctcctgtgttctgcagagcttgggggtcccgggctctcactagttctgcagttctggttctgtatttgttgacctttctttctttctgacctttatttccttaacctctctccatgactttgaatcctggcactgtagatgtctccatttgtgcccgcctctgatcgagactctctctgtctctgtccacccccagggctctgtcccgctctctccgggtcttcctccaccgcccccctgccctgtcccctcctcccaccactgcctcccccaggcgtctgtctcctcatctctcctctgtctcattcgctcattcccctctccccgcagcctgctgccagctcccctccaggccggggatccatctctgctgagaagcctcctccctcccgagacaagatcatctgcctggcctctcaccaccaccatcccacccctgccctgccccacttccccagggtctcccttctgactcagtaaagatcaccgctgcctccccccgcaccgcctggcgtctctgatccctttcccttgtgtgacgtcacgctgcgtctgcgcaccgcgcatgacgccatcgccgggggcgagcacccatgagagcgcggcgccaggaagctatcgcgagagcctacctactaagtttcctagaatctctgagcagtagtgggcgcggccgtatgcgaaagaagggcctctgaggcgcacttccgggacctgccgcggagcccgacggaagttgtagtgcggcatttcctaggcccgacggccgacttcagggccacgcggcccgggcgttccgtgtggagcaggagtcccgcggggccccacgggagtcgtagtccggcgcgcggggatcaccgggagctgtagtccgtcccgcctgcccagtcagcgcggtgttgcccgccccgcactcggagcccagagccgccgcccaggaaggggatgcggaaacccctggctcggtggagcggagaggcaggcggggtgaggggcgttgccaggcaaagggcgagcgccgtggctggggtgcgggtcggcgaagggctccattccttggtgtccggggagggggcctggttgctgggtgataggaagaggaactcctgttgcttagtgactggggagggggccccgttgccaggtgacaagagcagagagcctcgctgctacatgaccggggaaggggagtcttctgttgctaggagaccagag

SEQ ID NO: 22310 - DNA, 2300 bp, Homo sapien
gcgtgcccccttccctgcagctccagaaccttgctgcccttggggaaaggtcagtgaccttgccatgggagagtggagctccctgaagctcctgtcctggctctcttagccactgtgtgatctcaggggttccctgaccctctctgggccttggttcaagcaaatgtgaaacaggacgaacccattcatctcatttcgcctcccaggtcagggagaagaagggcagccctcagtagactcggagggaaccttggggagaagaggcctaatacctctccaagaccctccgccctctttcccctctcccaggcgccctgatctggttgtggaagtggcccatcccaaaataatccatgaatctggggcacaaatcctgcgccatgccaatctcctggtaagccccaccccaaccatttacgcagagccctgccccttctgtcttggtctcaccccaccctgaagtggatatccttccctgacctcaaccctcccctccttcatccaccccaggtggggtccccctcagctctaagtgaccagaccacagagcggcagctcttggaggcctcacagcactgggaccacgccgtgtttgtggcccgaggggccctgtggggcgctgaggacatcaggagattggatgcagctgggggcctccgggtgaggcctgctgggctccccaggaaccaggggaggcctgcaaagaccccactccccctaacccgggctcttgcttccagagccttcgtgtcaccatggccacacaccccgatggcttccggcttgagggacccctggctgcagcccacagccctgggccttgcactgtgctctacgaaggccctgtccgtgggctctgcccctttgccccgcgaaattccaacaccatggcggcggctgccctggctgcccccagcctgggcttcgatggggtgattggggtgctcgtggctgataccaggtgagcagagctaagcagggtgttgggctgagtccaggctctccagactgactgcccctcttgtcccagcctcacggacatgcacgtggtggatgtagagctgagcggaccccggggccccacgggccgaagctttgctgtgcacacccgcagagagaaccctgccgagccaggcgcggtcaccggctccgccaccgtcacggccttctggcagagcctcctgggtgcggccaggcccctctcccccggccctgggctcctgtgttctgcagagcttgggggtcccgggctctcactagttctgcagttctggttctgtatttgttgacctttctttctttctgacctttatttccttaacctctctccatgactttgaatcctggcactgtagatgtctccatttgtgcccgcctctgatcgagactctctctgtctctgtccacccccagggctctgtcccgctctctccgggtcttcctccaccgcccccctgccctgtcccctcctcccaccactgcctcccccaggcgtctgtctcctcatctctcctctgtctcattcgctcattcccctctccccgcagcctgctgccagctcccctccaggccggggatccatctctgctgagaagcctcctccctcccgagacaagatcatctgcctggcctctcaccaccaccatcccacccctgccctgccccacttccccagggtctcccttctgactcagtaaagatcaccgctgcctccccccgcaccgcctggcgtctctgatccctttcccttgtgtgacgtcacgctgcgtctgcgcaccgcgcatgacgccatcgccgggggcgagcacccatgagagcgcggcgccaggaagctatcgcgagagcctacctactaagtttcctagaatctctgagcagtagtgggcgcggccgtatgcgaaagaagggcctctgaggcgcacttccgggacctgccgcggagcccgacggaagttgtagtgcggcatttcctaggcccgacggccgacttcagggccacgcggcccgggcgttccgtgtggagcaggagtcccgcggggccccacgggagtcgtagtccggcgcgcggggatcaccgggagctgtagtccgtcccgcctgcccagtcagcgcggtgttgcccgccccgcactcggagcccagagccgccgcccaggaaggggatgcggaaacccctggctcggtggagcggagaggcaggcggggtgaggggcgttgccaggcaaagggcgagcgccgtggctggggtgcgggtcggcgaagggctccattccttggtgtccggggagggggcctggttg

SEQ ID NO: 22311 - DNA, 2300 bp, Homo sapien
cgggtggtcttaggcccctcagccttcaccctggagaccccagagaaggtctgattccctttcttcctaaactcctcccccagcaccgccacaccacacccaaacccaggtggagacttataacaaaggaaatctatcgtcccacagttctggaggctggagggagggccacgctctctctgaaacctggggatacctcaggggagcttcctgcctcgccagcttctggtgtccccaggctgtcctggctggtggctgtatcacatcaccccagtcttccagtgcctgcccctgtagcctctcatctcttccctctgtgtgcgtccgtctgtgtccaactccccctcttttatttatttattttttaattgagatggagttttattcttgtcgcccaggctggagtgcaatggtgtgatctcagctcactgcaacctctgcttcccagcttcaagtgattctcctgcctcagcctcccaagtaactgggatcacaggcatgcgccaccaggcctggctaatttttgtatttttagtagagatggggtttcaccacattggccaggctggtttcgaactcctaacctcaggtgatccactcacctcagcctctcaaagtgctcggattacaggcatgagccaccgcgcctgaccgttttctttgtttgtttctttgtttttgagacagagtcttgctctgttgtccaggctggagtgcagtggcacaatttcagctcactgaagcctctgcctcccaggttcaagcgaatctcctccctcagccccctgagtagctaggattacacgcgactaccaccacacccagctaatttttgtatttttagtagagacggggtttcaccatgttggccaggctggtctcgaacttctgacctcaagtgatccacctgcctcagcctcccaaagtgtcgggactataggtgtgggccactgcagcctgcctaacctcccctcttacaaggacagaggtcagactggaccaggagcctccacctccagtataacctcagctccatccttggcaaaaacccaattcccaaataaggtcccattctgaggccctggaggtcaggacttctgcgcttccctttctgggtgacaattcaacccacaacagggcccaatccagagtgtgtctctccactgcagaccccctcaaggctgctccagaggacggggtgccgaaggggagggaggccaagcgggaggctgggcctgcggcctctggggcacagcagctgtatttctggccggttcagtgggaggctggagggccggatcgggtgggcctggggcggcaggggcaccacagtgccactcagaagggcaggagcagagccctgggagggcagggagcaaaccctgagcgggcctggctggggggttgctggcacagtgggcagctgttgggtgggttgggggagggggtggtgatgtctcttggggggtcaaggtgcccgagttgcaggccctggagggctggggctggccagggctgccatctcacgctgctgggggaggcagagggagggacggagccatgcagggccttccagtgctttcccacgctgaggtggcttcggggacacagccctgaggacacacaggcctgcgcccagcccccttctcccctcgtagtggcccaggctgtaccccgtacacggcagctatgggcactatggggacactcaggccccagcaggagtcagaaggtagagatggcgggaggccccccacttccgtgaggtgcctggcccctgcccccttcctggctctgtctacacccaggcatctcatctctcccacaccgggggctcctggctctggaagccaattcctcccttatcagcagcggcagcctttgggtgccacgtcggggtcttggcccctctctgtctgcccgcgtctgtctcctctctcctcccgtcaacttggggctctcgccacccagtgcccgccccccccaccccatgctcccgttcacgctctctttctctccagcctccttccagcgccaatcctggttgccatggaaacactgcagcgggtaccaggtggtggctgggggcagggagcctgcgctgccgcagcctgcgccatttccgatgccaggcaccctcaaggcacagaggctggggctcatgttgggggcacttggcctctccaggcctcgaaggcttctcctgggctgacgcgagctggggaacgggagggacggacgtgggagcgagaacgtcacactggaggcagctggtggcacgatgggggacagagtgaaag

SEQ ID NO: 22312 - DNA, 2300 bp, Homo sapien
caggccctgcgctttgggccagccctttggctaagagggtgtgggctggatcatcgccagggtcttaagaggtaggagcccctgacccaggataaggactgggcattgacctccctgttcacattcaggaaaatgaagaccctcaccgcactcacatagtcagacacagacacacggccccagccctgcaggagaaaaatgagcccgggtggacacagaatcaacctctctctctttctctccccagctccctctttcccctgccctctgtctctctgcctctgcttctgtctctgtctctctgtgtctctgtctagccctcgctctcacacatgcactcagatacacagacgtatgcacacacatttttatctgggttaaaatggtcttggaaactgcaggaggagggagtgactgtgtgtgtgcatagccgtgtgcctgggggtgagcctgtgtcgggggtcctgagagtccaccgtgagaggggggtcctgagagtccaccgtgagagggtgtgccccatcactgctgagtgtgtgagtgggtcggtgtgcgtgtttgtgtgacctgccctcctcctggtctcttgggaatggtttggggttggcctgtgttggggcagggcctgctggtgtgggtgtatttgtgtgtactcagagatgctgcgtgcaaaggagagctgggagccagagggtagacccagggccgaagtaccccctctgcgccctcccggcctgctctgtgcccttggacaggccgttttccctcatagtgcctcagtgtccccatctgtaaattgggcatcctaatagctttctcctatggtcattatgaggctcacatgagatgaccgggatacagtttgctgcattgcaagggctcacccagtgttccggagagactattgttactggtatcgttgctgtgactcacccatcccctttccctctctggttccatggaaatggcggggcaggacagattggggaggtacagcgtgacttctcagagggcccgagtccccgctgtctgctttcctcccagaacccaggcagagtccctggacccccttcccttccccatcccctccccgagaaccaagctcggtcctgcggcagcagctggcatgagtcccatcggggctgtctctgcctggagcacccacagtctcggggcaaaggagggggtgcagctggtggcctctcggcctgtgccgccccccgtcaggtccccagccaccctcacacacaagctccagtctcctccctcttcaccctgctgcctcccagccctcccttcacctgcccacacctgtcacctccacggttgccttgtctgccaccttacctctctctccctcagattctcccatgagtctgactcaagtctctgaagctgctgtgaggcccccacagggcctggacagggtgggcagtgacaggagggtgtgcagcggagggtctttcggtttagctgagggcacagggggtgggggaaatgcatctcttcgctaacatccctgggatggggagagggggagggagtggaggggagaggaggctgggacccacctcccaggtgatcacgcaggtggcaaggggaccgggcgggtgttgggatgggagcgaggtcctcgccacctcgcttgctcttccccgtttctgccccctcgccttgtctgtctgtctgtctgtctcactcctctgatgtatctacctttttgaagtcatgcaaagaactgggttttgaatctggacaacttctgcacttactggatgagtgaccttgggcaggcacttcctctcccccagcctcagttttccctgctgcagaatgggcgtagaatcttgccagcatggagaggatgagctagtgcagggccaggcgggccaagcttccctctgcctgccccagcctgctgggtgggtccatcggcagctgtctccctccctgtccctttgttctgggcatggggcagggaggcggcgatggggctgcctgggtgttggcaagcacccaggccacatgggctcctgtccctcaccaagcctctcccccttctctcccccacccacagccccccagcgtccacgcggagcatgaacattgaggatggcgcgtgcccgcggctccccgtgccccccgctgccgcccggtaggatgtcctggccccacggggcattgctcttcctctggctcttctccccacccctgggggccggtggaggtggagtggccgtgacgtctgccgccggagggggctccccgccggccacctcctgccccgtggcctgctcctg

SEQ ID NO: 22313 - DNA, 2300 bp, Homo sapien
ctgggaagaggggcctggggtccccggacttctacctctgtgagatagcggggcggagaactgggcccccggaccctggagaagcagcacgtcgtgatcctagatctctgggtccccagtgtggaaacccactgggtctctgctgccttagtcccgggcaatctccctgcttccttgctgaggccaagtgatttcggctttcttgccgcgggttcggagtgggggaaggagggggtgcagggggaggagccgcggacctgcgacagtggcgaggggaggagccgagccggcaccgcggctggcgcgcggggctgcggcggcggcggcggcggcagcggcggcagcggcggctccgggtgagtccgctcctccccctcctcctgccacagccccagccccagtcaaatccctggggtcggccccggcgcatgggggcggggtagatgcagaggcgcgtggatctcgggccggggagtgggagcgctgcagcgctctctggccaccccgggggaggggcacgtggccctggaagggggtcccgaaacacctgggtgtatcccacccctcgcccaccgatccccagcgcggggggatcgtttcctcattccgtggcccctaaggacttagggctccgtggcttttcgaagtcccggacatcgttcccctcccctgaagcgtcttgggaccccagcatcttaaccccccaaaaccttaaaaaaaaaaaaaaaatcccatcctctctgcagcccggaggcattaaggacttcaactcccagcagatcctgcagcgccgggtctatgaagccgcagcagcgcgagcgcgagacctgccgggaattgtagtctctaagccctcaacgggagctgggggcccggaggtgggagggggtggccgggctcccagtgggtcgcctggggtcgggcagctggctcgagtagggcaagatgtgactgttaagctgagctttttctcccggcctcagcccctagatcagacattctctctcattacccggcgcgtgggaacgggtccacagccccttgtccgccctagaacccccatgggctgccgcccgccgccgcctcggctgccacccaggacacggcagagataagcgcaggtgagtgtggccatgcctgtcttggagtcctggccttctgcagcacccccacgacacctgtccatctgtgagccctggtctgtctgttcctaattcccctgcatccccttcaacccatcttgatgcctggctccgagccatgtgtcactaattccccctctccccacatccacctctccttcctagcctcctctcatttatgtgctcattgaaccttcccttatgaacccatgtctgtctgcccagccctcctgtctccttttgtctatctgcgatctctagccatcatctgctgtccttgcccacccatccatcctcccgttcgaccgtttctctttcaaagatatttctgcccacactcctgcctgcccctcttcaccgtctctcgtcctctcgtctctcaagcccccgtgaattaattacatctcggttcattccttgtcactgtccatcccaagtctcaatccttgactttccttctgcctgcctgttcacctctccatctcttcggagcctcagtctgcccttcacattatctctgtctcccctccctgtatctctccctccctcaacttggtccccatctctgcatctccacctctccacccccagctcccaccatacctatccacctccaatctctctacccacatccatccttctctcctggccctccccgcgtctaccccagtctggcctccttggtccctggaccctccaactgctttcctaccctaagcccctgtcatcctgctcctactgtctaaaatgcttttctttaaaatgcttttcccatcctggcgccactgccccccgcctgtggctggctccatgtcatccttcaggtttgggagagccctccctgaccgcccccctctgagttcctttgtgacacattctccagctgtgtcctgtggagcgcttctcacagacagtctgacagtgaccggtttgtgtatgtgtttttgtttgcttgtttactctatgtctcctctcgttggattgtgacaccgggaggtcagggaactccaggaccttgttctctgctggattcgcagcaaccagcacagcacgtagggcgtagttggtgctggatggatgtttgttgaatgaatgaatgatgaatggctggcaccttgtctgctcatccctaactcctgttccttcatctgtgcagcc

SEQ ID NO: 22314 - DNA, 2300 bp, Homo sapien
atttttacttttatttacttacttattttgacatttttatttcttgctctaaatatttatttatttattcatatttatgtttatttttgagacagggtctcactctgtcgcccaggctggagcccagtggcacaatcttggctcactgactgcaacctccaccttctgggttcaagtgatccttctgcctcagccccccaagtagctaggactacaggcatgcatcaccacacccagctaatttttgtattttttgtagagacagggttttgccatgttgcccaggctggtcttgaactcctgagctcaagtgatccgcccacttggcctcccaaagtgctaggattacaggcatgagccaccgcacctggctatttattcttgagatgggggtcttgctttgttgcccaggctggatggaatgcagtggtgcaatcatagctcactgcagcctcaaaatcctgggctaggccgggcgcggtggctcacgtctgtaatcccagcactttgggaggccgaggcgggtggatcacaaggtcaggagatcgagaccacggtgaaaccccgtctttactaaaaatacaaaaaaaattagccgggcacggtggcaggcgcctgtagtcccagctactcaggaggctgaggcaggagaatggagtgaacccgggaggcggagctttcagtgagcccagatcgcgccactacactccagcctgggcgacagagcaagactctgtctcacaaaaaaaaaaaaaaaaaaaaaaaaaaattcctgggctccagcaatcctcccacctcagcctcctgcgtaggtgggactacaggtgcacgccaccacacccactagtttggttttgttttggttttttggtttttttgttttgtagagatggagtctcctacgttgtccaggatagtctcaaactcctggcttcaagggatcctcccacttcagcctcccaaagtgttgggatttacaggtgtcagcccagcctttgatttttacctagaggttgtatttatttggatgtcactgattgagagcactgagggggcctccgagccacctctccaggctatgtagatctagatcaagcttgtccaacccatggcctgaggcccgcatgcagcacaggacagctttgaatgcggcacaacacaaatttgtaaactttcttaaaacattatgagatttttttgtgattttttttttctcatcagctattgttactgttagtgtattttatgtgtagcccaagacaacaatgcagtccagggaagccaaaagattggacacccctgatctagaccttacccaagggatttaacctccatgggcctcagttgtctcctctgtgaaatgggaatgtcataattgcacccaagtgaaaattaaatgagaaaacgctttcaaagcacttagcacttcaccacttataggaaatgacaattgccattaactgctattaatataccagaaactgttactcactacttttgagaaatattcattaagtacctagttggtaccaatgttttgtctacactgaccggtttttcaaactgtggatcccttaggaaataagtttatggtgtgtattttgctgatgaggaaacggggcctcagagcaagaggcgcacacaggcaggagttggcccaggtgggattcaaacccaggtccctgctagtacctctatcctggctgtggcactgtacctttgagtctcagcttccgctcctaccaccggccttcagagcggctcaggttggagggcctgaagtcctgggttcctgggaagaggggcctggggtccccggacttctacctctgtgagatagcggggcggagaactgggcccccggaccctggagaagcagcacgtcgtgatcctagatctctgggtccccagtgtggaaacccactgggtctctgctgccttagtcccgggcaatctccctgcttccttgctgaggccaagtgatttcggctttcttgccgcgggttcggagtgggggaaggagggggtgcagggggaggagccgcggacctgcgacagtggcgaggggaggagccgagccggcaccgcggctggcgcgcggggctgcggcggcggcggcggcggcagcggcggcagcggcggctccgggtgagtccgctcctccccctcctcctgccacagccccagccccagtcaaatccctggggtcggccccggcgcatgggggcggggtagatgcagaggcgcgtggatctcgggccggggagtgggagcgctgcagcgctctctggccaccccgg

SEQ ID NO: 22315 - DNA, 2300 bp, Homo sapien
cgccaggtcaccctggtccccactcccctccagcgagggtctaggcccgggcctcctccgcccctttcgacccctccagctcccgcttctccttccaggctcctccagtccctttccacccctgtccaagctccctgcgtccccaccaggtctccagtccctacaccgccggccggcgcgccccctcggctcccgcccccgactcctgctccccggtgccccccgcccctctccccggccgggttctcccccaccagtttcccagcctcggctccggctctctctccccgcccctccccgcctccctccgcctccattcattctccccggccccgctctcggccacgccagccgccccctgtccccccacagcctcccagggcaccccctctctcgcgtcctccaccacccccctcgccgattcctcagcccgtctcggtaccagctgcgtgccagctattcttagccgcggagcgtttgattcatgccgccccggcggagcgtgcccgctccctcccgcgagccctgagggggaggggccggagccggcccgggggggctggggcagccgtacgcgcggggggccctagccagcttttctttcatcccaccggccaccccctccgagcggggttgaggctgggggtcagccagggtcagccgagggggagtgtctgcgggccccagatcgcgaggtgggctgtgcggcggggcagggaggaggcagccggggtctccgcagggacgaggtggggcggcgtggctgggtacctggagggggagggggcttcgcagcgctgccgcgcgtgggggaggggtccgccggccctgggttagaggctcgctcgcccacacctcctggaactctcctcccaccacacacatttagtcttccctttcccaaccccccagcccatccccactcccccaaagtcagcagtaccctccactgcttcccatctccatggcaacggtgcaggaaccgggcctggtgttggggggagggaccagaccagacattctggtttccggtgctggggtgggagttgggggagaacagaagggaggcggaccccatttggaaggggctccaccctcataaggccacctcaagggagaacagcaaggatctagagatgatcccccactcagttccccagaccctcctctcacttcttagcctccctcctaacacccccagtcctcagagtggagcccctagtacccagcaagccagcccacccaccctgcagtcctagaaaagagctacaggtcatctgcagccacccacatctacccgggccaccacaccactgtcacctggacagcactccccaggccgacctccccacctacccgcacaccctctcaagatgccccagtctccaaaagccacctcttgtggttcccttggggacaccctaggccaaatgctctgcccatgacacccccatctcagtgccccttgctcccctgggacggcagattccccagcactattcggcatgccacgcgttgtcagccacacttgagtgaagtcaccagctccacccgctccaggctcaccacacctccctctcccccttactacatctcagtgtcagcctcagcttctccccaaccccaccccccggccctgggatgaggggccaggctggggccaggagggcaggatgcctgtcagtttgtccacctgtctgtccttagctaattttagctgcattttctgtggcctggcaaagtgggccagtagctcccgcggtgattctgcggtttctgggacacggccacgctgggtcaccagcaaagtggggcgcagggggcgggctgcaagcggggccaagggcagggaaggagacacatgccagaagcatgtcagggacaggggtgtgtgcgtgccagcgtgggaggaggcggcaggggaggccgtgcaggccgagggtgtgtccagcctccttcctgcctatcttgggcagtgggggtaggctgcccttgaccgcttgaccaccgaatagcgcctgcggcctctgaggggtcccgggctcctagtctgatggccgcccttggcccctgcagccgcctgtgatgctgccgtcccccgtcgccccgtggccccacaatgacccacagccccgcgacaagcgaggacgaggaacgccacagtgccagcgagtgtcccgaggggggctcagagtccgacagctccccagacgggccaggtcgaggcccccgggggacccggggccagggcagtggggcacctggtagcctggcctctgttagaggcctccagggccgct

SEQ ID NO: 22316 - DNA, 2300 bp, Homo sapien
ccaggtggtgagcagctgggcccggggaaagcacagctgcccatgttggctccagcagccagagaggctgtgcacccctgcacactttacaaggcctttccccacatacgcattatttcttgaggtctgtagctcctggtgaggggccccaggttcccgatgggcacctgagaggcccaggctctgaggcagggagcagtctgcccaaggtcacagtgccctcgatgtaccaggatttcttggaaaacggaaggctggaggcactgatttccaaggcccctcctggggctcccggcagccgagggcagatgccctgctcttggagccagaaaccttggctagctgccgccacactggtgacctccagcaggctatgctgtttcagagcctcggtctcctcctttgaagagcaggcccagtgatccttggctggtgtgccccatgcttgttggcaccaccagccaggcctgggcgggaaaagccctgcatgactcatgggcctgacatagaggggcatggcatggcattgttcttccttgcctccaagcctctctcccactgccctcaccacctctacctaccctgccaccaccaccctgggaacttgggtgccagcaaaccaaagaggtgaagcttccaggcctttgaccccaccaggaacggctaccctctcgcccactcaacaggttgattgaacacctactatgtgctaggtaggccttgtgctaggagatgcatcagtgcataaaaatccctgctttcattggcagggaacagacataaacaaacaagatcatgccagtcttgattataccaaaaagatgaaatggggcattttaataaagtaacttgcggaatagataaggtggttggggaagacctcctggagctgagacctcgatgatgagaaggagctggggaaagaggcttctagaaggaggaaagggctagtgcaaatgctctgaggttgtaatcagcttagtatttggggatgagccaagaggccagggaaggtggaggctgggggtgggtgaagggaatgggggtgatgaggctgcagaggtgcaaagggttcttccttcccagcccccagcatggtaggctgcgctgaggactgaggcccgggcttggcttccctcctgcttatgatgggaaggtgggggagcaggggagtggggagtgatgtgatctgatttatggtttggaaggattgctttggctgcggcaagcagccgggattggaggggctcaggaggaaggagggggagggcgagactgcagtggtccaggctgaaatgaggtggcttgctgaatgctcagagctccttgagcacacaacctagcgtctgtcgatttcacctcctggagaaaccttccctgactgctccgccagactcctcaccctctcccatctccagccccctcatccccggagctatctggctgctggtctgcaagcagctggagtccccagcatcacccagcccacagcctggcctgcaggaggcttctagtaaagtggccaattaatccccgagccccgtcttccagggtcatgcacacagtcacacgcgtgctcttcacatgtgtcaccctgcccccacacacactcacttggatctccagacaagggcttggagggtaggatgggcaatctagggggcaggaggggccctggagtctcctccattgagtgtgcaggcgatggtggccacagggtaataacaacctcagcgagaccctgaggtctgcccctccttaggaatggccaggcagggaagaagggagcagtgctcggtcccagcatcccaccactgccgagatggttctgagcgggttcctgggctgaggccggggcctgtgttttccaagattccttggagagccagctccatcctcttcctgattatctgatctttgggctacagcagaaggaaagagcagggcggaagcgagctctggaaagtggaaagaggagggtgtgcgaggagacccaaggcgggatctaggctttggaacgttggaggtttccggccacagaggcagggcctccggggagccaagaggggcggggagagacacacacagagaagcagaggagaccaacggaccggacagagacgaggagaggaacaggaagagagaagctgggagaatcgggaacctgggggctagtgacctgcacacagggcaggggcactcggcagttcccagaggccacccctcccaccccagacatccagacatctggaactttgggtgccaagagtccagcttaatgcaggcagcctggcttttgg

SEQ ID NO: 22317 - DNA, 2300 bp, Homo sapien
ttgatctttttctaaagaaaacatttcatgatcttcatttcttcctgtcaatatgtgtcaccatgtgatattaactcctttcagcctagaggacttacttccttaagcaattcctgcggtctgtaggccatatattatttcagatctggcttatctgaaaatgcccttttttcactttcatttttgaaagatattttcacagaatataaaattctggattgacagacttttctgctgccaattttttcaaatagtggagtaatttttaatattttgtccagattttaattttttttttgtctgtggcaccatttgtctgacaaagttactctgacattatccaaagttaaaagaacctccatctcattatttttactttatttttattgagacagggtctcgctttatcacccaggctgaagtgaaatggcgtgaccatggctcattgcagcctcgaattccagggctcaagtgaccctcgtgtctcagtctcccaatttgctgggactacaggcacgtgccaccatacctgactaattttttttttttttttttttgagacagagtcttgctctgttgcctgggctggaatgaagtggcacgatcttggctcactgcagcccctgcctcccaggttcaagggactctcctgcctcagccttcagagtagctgggattacaggcacgcaccaccaagcctggctaatttttgtatttttagtagagacaggcttttgccatgttggccaggctggtctcgaactcctgaacttaagtgatccaccagcctcagcctcccaaagtgctgggattacaggaatgagccactacgcccatctcacggctaatttttaaattttattttatttttatttttttgagacggagtttcgctctcgttacccaggctggagtgcagtggcgcgatcttgattcactgcaacctccgcctcccaagtttaagtgattcttcagcctcatgagtagctgggattacaggtggctgccaccacacccagctaatgttttttgtatttttagtagagacggggtttcgccatgctgggcaggctgatctcgaactcctgacctcaggtgatccgcctacctcagcctcccaaagtgctgggattacaggcgtgagccactgtgcatggccacaaaaacttgtaattatttattttttgtagagacggtctcactatgttgcccaccttggtttggaactcctggcttcaagcaatccttctgcctcagcctcccaaagtgttgtgattacaagcatgagccaccacacctggcccctccatttcatttattatttttccataacacttgtagtcttctaaagcagtatatcatgaagtaaatttattatatgtattacacctgacatctctcactgggatgtaagttccatgagggcttgttttgttacacgagttatgtccagtacttagaacaatattatagtgtccagtgagccgagatcgtgccattgcactgcagcctgggtgacataaggagactctgtctcaaaaaaaaaaaaaaaaaaagaacaatattattgtgtcataaaaagcattcaggctgggctcaatggctcacacttgtaatcccagcactttgggaggctgaggtgggaggatcacttgaagccaggagttcaagaccagcctgggcaacacagcaaaaccccatctctacaaaaaagaatttaaggcctggcagagtggctcacacctataatcccagcactttgggaggctggtggacgggtcacgaggtcagtagttcaagaccagcctggccaacatggtaaaaccctgtctctactaaaaacagaaaaattagccaggtgtggtggcatgtgcctgtagttccagctacttgggaggctgaggcaggaaaattgcttgaaccttggaggtggaggttgcagtgagccgagatcataccattgcactacagcctgggtgacagagagagcaagactctgtgtcaaaaaaaaaaaaaaaaaaaaaaggtaaaaaaattagccaggcatggtggtaagtgcctgtagtcccagctactccaggaggctgaggggggaggatctcttgagcctaggaggtggaggctgcagtgatctgtgattgtacctttgcactccagcctgggtgacagagcatgacgctgtctctaaaagaataataataataagcattccataaaaattatggaatggagaaatcatgaatggggtctcggaggggaccagaggctgcagtgacaggcaacctggggtcctgacacgt

SEQ ID NO: 22318 - DNA, 2300 bp, Homo sapien
ccaagctggtctcaaactcctggattcaagtgatctgcccaccttggcctcccaaaatgacaggattacaggtgtcagccaccatgcctggcccagttatattgattttagacttccaacctccagaactgtaagggaataaatgtgtgtcattttaagccactgagtggtaacttgtcacagcagccaatacatcagtagataggaaagtgctgacatctccaggggctagaacgtggtttctagtttcttaattttgcttcaggatttttttctcttttctgttttttttagagacaggctcttggtttgttgtccaggctgtagtgcaaaggcacaattacagctcactgaagcctcaaattcctggactcacgtgatcctcccatctcagtctcttgagtagctgggactacaggcagatgccaccataccgtgcctggctaatttttgtttatcttttatagagatggagtcgggtgcggggggtgggtctcaccatattggccaggctggtcttgaactcctggcctcaagcaaccctcccaccttggcctcccaaagtgctgggattacaggtgtgagctgccagctcctggtctggcttaagcctccagcccttctacttctttattccaggggcctctaccctatttcaagtacgaggagagacagagattcacaaaacttttgtatctggtgcaggggctcacacctgtaatcccagcactttgggaggccaaggtgggaggattgcttgagcccaggagtttaagagcagtctgggcaacacagcaaaaccctgtctcaaaaaacaacaaaaacctaggacaggactggaggctgactgtgcgcagtgaggcaggagagccagccagccccaggtggtgctgcgaagtgtagattttattagcattgtgggatggtgaggccgcctgagcagcagacgattgccattgaaagatgacttgttggctgggcatggtggctcatgcctgtaatcccagcattttgggaagccgaggcgagtggatcacctgaggtcaggagttgaagaccagcctggccatatatatatatatacaaaaattagccgggcatggtcgcgtgtgtctgtaatcccagctactaggggggctgaggcaggaggatcgcttgaacctgggaggtggaggttgcagcaagctgagactgtgtcactgcactccagcctgggaaacagagtaagactacatctcaaaaaaaaaaaaaaaaaggaaagaaaagaaaaaagaaagaaaggaagatgacttgttatactcacagcttccccagaggagggggcatgccacaggggccacatggggacgcaccaatggtgcccaggaggtagaccacgagcaagcggcttccttgtgttttctgtgggataaggtagggtaaagagtggctggttgcgccatttcagcaggctctggggcacaggggctgtcctgagttgtccgataccctgccccgggtgatcagggcaggtggatggtggcctgggtggtgggttggctggtttgtacaggagaggcatgcgcttgggccagtccctgactatctccaggaactggtaaccctgggaggggtggtccttctacgatcagcaaggcccctgatgtcaaagcatcagagtacagaaaatcaagcacatagttactatcgtcagcctctgcaactcagggggtcaagactgttgctgagacgaacaatgtggggtgggggtctctgtccaagtctgcaaccaggttaaaggcacctgtgttcaaatcgcagctttgtctgagaaatctgtgttttctcaggccagttagggaacccttctgtgcctcagtttccccatcggtacaatggggatggtggtaagcacatcagtgtctcctggggcagcgatgaagatgaaacgaagatgaaacgggttaatccaaggctggcagaggcgctggggaatgggatctgtggcccctgggggagcgtgccagggcctgctataatgggggtgctgagtgcagggctgggacaggcggggctgcggcccagacagtgggctgagctcagcgtctgggctgggtggaaatggccggcctggggttttggggccaccctgctggacctctcctgctgctgctgctgctggtgctgccaccccgggccctgccagaaggacccctggtgttcgtggctctggtgaggcgcccccaccccggcctgcccttagctcccccagggctagccctgaccagtcctgtccccaggtattccgccatggcgaccgg

SEQ ID NO: 22319 - DNA, 2300 bp, Homo sapien
tccaaaccccagctctgctgtttacaggcttggagacattcaccaggccatcactcttttgcgcctcactgctgtgtctgtggaacaggcaccgagcaaatggcccggggcactagcgcttcccgccttctgaaggtggggcttgaataagaagaggaatgcgtggactggagggaacaagcatttgcgtttcaggggaaagaactaatcaaacatgtcaaaactcagcagtggaaaagagacagtaactaccaggtgattctgtcacgttacttcatgggttttgtaggctgaatgcaatgtgtctttaagcacagcttagcctgcagtgaaccgtttatatataaactgatagaattcagggaactcctattttcacaataaaaataacaggctttatcaggagaattgtttcaaagagcaaaatcagacaagcatgagtgtgtgttatcagaaaagagacaggtgttctcagctctgggaagattttcatttgttccttaggtgtcaggagctggaaccgtggctgcagcgaaatagaactgaaagtgtgttctccgggttcttggaggtttcagctatttctggcagggaagctggcttttgggcagggttggctgggattgcagttcccctgagtatctttctgagggtcctgtgcttttttttttttttttttttttgagagggagtcttgctctgtcgcctggactggagtatagtgatgcgatctcggctcactgcaagctccacctcccaggttcacgccattctcctgcctcagcctcccgagtagctgggactacaggcgcctgccaccacgcccggctaatttttttttttttttttttgtatttttagtagaagtggggtttcactgtgttagccagggtgttcttgatctcctgtcctcgtgatccacccgcctcagcctcccaaagtgctgggattacacgcgtgagccaccatgcccggccgggtcctgtgctcttaatccgagatcctctgtggggtagtgaatggagctgagcgtttgtcatggctggcttagaggggattcttggggacatgagtggtgtcggtgccagttgggtagggatgtgtgagaggtgagacgacagagctgatgcgggatagggagacagaagggacacgtagcatttgtggattctgggccggcgccttccttacgactgtccagatagaaatgttcctcgccttgtccagtctggcagccactggccacgggtggctcttggacacctggaatgtggctagtttgtggctgggggctgggtttttaattttccttgattagtttaaacaaggacccccctcttcctacaaagcatatttctatgcaaaatggggcttttggtgtttctgaggttgttaaacagcagcacccactgagcgagcacccacagtgttagtgcttttgcggagaataaactgaacttatcctgccagggtcccagtgagaggcagctgccccttccccatgtcacagaaggttctggtgaagtcagagcagcttagaagagctgggccgggggcagcagaggcgattgaggggtatcccgttaggcatgggaggcccaagcagaagggtttggccccgtcctctcactgaaccccacagatgtgcctgtctgcaggcatctctagtcccgttttccagagaaacactgctgctggggggcggggaggggtgaggtcagtgggcctagatcatacaaggagccatacccaggctgagctggatggggaggggaggtagcctggcacccccagggaccaagtgtcattcagtttgttgcctgatctctcagcactcttctgtgatgtcccccttaggacagtaggtggtcctgggacccacatcaggagggggtgagggcaccggggcctccatgatgtccagcactgggctccgactgccactgaggacacggtgccccccgggacctttgacacccgggggtctgaggggccctggctctggggagggctggtgggtatcttggctgccctgcaccccactgaccttctcccctcccctgtgccctcctgcctccaggtgctgaagggcctgaccatcactcattaagaacagaggaggctgcctgttactcctggtgttggtgagaaggcagatgtagacaggtgcccagcaagtgctgagccaggcgctgccctaagcactgggctcattaaccttagtaaccctgttggggggcggaggtgggatgggggctggggctgggttgcagtgagatgtccagtgtccagggttcttg

SEQ ID NO: 22320 - DNA, 2300 bp, Homo sapien
agctggcgcgagcggggatgctggggcggacccccctccgtctgccccgcggcggagctcgccccttgtgctgcccgcacgccgcgggcctccgccatcttgtcgatttggttgggggagaggggtgggcgggctgggaggcgacattgagttctttccgagtgtttccattttcgtgctacctacaggtgcttccttaggaattctctcttgcttttaaaattctggatggctggcatttttgtgcaacctagaacaaagactgggggacgggagagggttttggggggttccatgggggcacagatagggtatcgagttaccaaagaagtgagagtgaagtttctaggtgaattgccgggtttgagagtcgtgtaggaatggatatagaaggaagcaaacgaggcctttgcttacctgcgggagtcgttctgaccgttcatgccacgtgagagggttttgttaacgttagtttttggcttaggtcctttaaggtcttgaacatcggtttcctgacttgagcggggcccatgcccctgccgaggaggctcagcctggaagcagctagcccatttcctatctcccccaccacgaccccagcaaggatctctacttgacttacctccttcaggcaaccacctagaaaatcgttgagtttgttcatgtcacaagtgaaagtattttttcatgcattcatcgttggcacgtcgtcctttggcaatattaaaatctaccaacaaatgggaaaagttaacatttgcaccatcttgccatattcaaaaaccttgtgcttaagtgttttgaaagtaagtttcatggccgaacgcggtggctcatgcctgttatcccagcactttgggaggccgaggtgggtgggtcgcttgaccctaggagttcaagaccagcctgagcaacatggcaaaaccccatttctacaaaaaaatagtaaagtgagccaagcgtggtggtgcgggcctgtagtcccagctacttatgaaggaagtgggagaatgcctttagccaagatcgcgccactgcactccagcctgggcaacagagcagactcttacttgaaagaaaggttcatatttcactcaaaatagtgtacttgtgtacctacagtaacatttttctacttaatgttattagcattgtcacccttaatactgcaatttaacaatctgctttgtgcctgttgttcctcagtcatcttcgaaatgtcttttacagctgatatgttcaaacctgactcagtcgagggtctctcctcattattatttacaagttggctttgtttcttcttccttctctcaataagttcttccaggggatttgtgtcttggcagctttctctgtttatgggttatgtgcagatgtaggcagtgctaaagaaacctgcaaacagtgggggatgaacaccggggacatcttcatgtagtgcatttggggtcctacccatcccatgaggacagtcccccgaggacctgtgacactggggaggttggggcatcttggtgtctccatgagcaaaactggtcattcctaccttctggatgagttttgcatttcctactctttttgagacaagtcttgctctgtcgcccaggttggagtgcagtggcacgacttggctcactgcaacctccgcctcctgggttcaagcaattctcctgcctcagcctcccgagtagctgagattacaggcattctccaccacgcctggctaattttgtattttcaatagagacagggtttcaccatattggccaggctggtctcgaactcctgacttcgtgatctgcccacctcggcttcccaaagtgctgaggttgcaggcgtgagccaccgtgcccggccgcgtttcctactctttaagctctgttagcttggcctctgtccctgaaggtaagtggcctcaggacctggttgcagaggggctggggctcccatgatgtccagcactgggctctgatcacccctgaggacacagtgcaccccaggacctttgacacctgggggtctgaggggccccagttttaatggcttgtggacttgcagactgtttcctcccccactctcactgtgtctttctgtgttacaggtgcagcttcaagcttaggaccacccaccatgcctatccaggtaagaacccttgctcctgctccttcactcacctgggtttaaaatatctcactgtctaggttgacttcataccgtacctctagaaactgattgatgtgccaatgattgtactcagtgtttacatacaaaaaccatctcaggctgggcgcagtggctta

SEQ ID NO: 22321 - DNA, 2300 bp, Homo sapien
aatgaccagggacccgctaaacaaagcgtgttcaattcacacaaaggagcccgttgccattgttcagtgaatgagataattctgtacgtactcatgtggggaaacaacttatgggacagattagagtggaaaaaagtatctttatccataatatgtgtgtgtgtgtgtgtgtgtgtgtgtgtgtatatatatataaagtccataccaggccaggcgtggtggctcacacctgtaatcccagtgctttgggaggtttgaggcaggcagatcacttgaggtcaggagttcgagaccagcctggccaatatggtgaaaccctgtctctactaaacatgcaaaaaaattagctgggcgtggtgataggcacctgtaatcccagctactcgggaggctgaggcacgagaattgcttgaactcgggaagcggaggatgaagtgagctgagatcacaccactggactccagcctgggcgacagagcaagactccatctgaaaaaagaaaacataaagtccacaccaaattgttgacagtgaaactcctagaaagtgagtttggagtagagaagtttcattttttaattttcaaaataatcatataagtggaaagaatgtataatcctatcagtggaaagacactcctgagatctccaaccctaccaagaatccaggcccccaggccttagaccgtcaaaactgagtgggagccccaaaggcctccctcggccccaggagtcccagctcccaacccccttttctcccaaacacgggaatcacgaccccagcccctcctccctcagacccaggggtccaggcccccatctcccgcttctccagacacagggtccctccttccggcccttgcgtcaccgtgtaggctccgcctctaattctgcgccacgtgggcgctttcccaggacggccccctgtcaatctccacactggccccgcctccagcccagtggctgggacttaatttgggtccggcccttcggcttgggccccgcctctgcagcctcactcagctcaagcccctgccgcgcaaatagtcccagcggattctctctcgtgtcgggccgccctcggggtcctttctcttcacggcccatctttgatgctgtcttcagaattgccggacgcaggggacaagacaatcgtttccatcatatccttgcccctttttgtcagccccagagacagcgtctcctcgcttgttcaggaagattctagcggaagcaggcagtattcctttccctaagcatgaaatggggtttcccaaacaggcgtgtgtattggacgcctcgggcggagcgcgggctggcgccgaggaccggccttgcgagcggcgcgcactataaaatggcgcgtgctgcaacccgcgcccgcttcggagagagaaatgctggggtgaggttcttaagtttattactttttccggctgtgtggaaagacgcacgtgtcctgaagggttcgaggctgcgacgggagcggccatgtagtcgcgtggaaagggtcagggcgtttgcaaggacccagagagcgccctccggggcgagcctgggagttttctgcggggatggtggtggctgtttgggccgcctgggagtttgcgactcctatagctggcgcgagcggggatgctggggcggacccccctccgtctgccccgcggcggagctcgccccttgtgctgcccgcacgccgcgggcctccgccatcttgtcgatttggttgggggagaggggtgggcgggctgggaggcgacattgagttctttccgagtgtttccattttcgtgctacctacaggtgcttccttaggaattctctcttgcttttaaaattctggatggctggcatttttgtgcaacctagaacaaagactgggggacgggagagggttttggggggttccatgggggcacagatagggtatcgagttaccaaagaagtgagagtgaagtttctaggtgaattgccgggtttgagagtcgtgtaggaatggatatagaaggaagcaaacgaggcctttgcttacctgcgggagtcgttctgaccgttcatgccacgtgagagggttttgttaacgttagtttttggcttaggtcctttaaggtcttgaacatcggtttcctgacttgagcggggcccatgcccctgccgaggaggctcagcctggaagcagctagcccatttcctatctcccccaccacgaccccagcaaggatctctacttgacttacctccttcaggcaaccacctagaaaatcgttgagtttgttcatgtcacaagtgaaagtattt

SEQ ID NO: 22322 - DNA, 2300 bp, Homo sapien
tagagatggggtctatgttgctcagtctggtctcaaacttctgggctcaagtcagtctcctgcctcagcctcccaaagtgctgggattatagggttaaaccaccactcctcgctgcaaatttcatctttaaacacagatggagctgcaaccatatgctagacactggatgtatagcactgatcaaactagacacgaatccttatctttatggaattgacattcagcaaggcagcaaaatatgtccataaacaagtagttagagccgggcatggtggctcacacctgtaatcccagcactttgtgaggctgaggtgggtagatggcttgagcccaggagttcaagaccagcctaggtaacaaggcgaaaccttgtctctacaaaaaatacagaaattatctgggcgtggtggtgtcctcttgtagtcttagctacatgaaggctgaggcaggtggattgattgagcctgagaagtcaaggctgcagtgagccatgactatgccactgcattccagcctgggtgacagagcgagatgctgtctcaaaaaataaaataaaataaagcagacaataggttagaggtaaatgttatgacgaaaaatataggagggtaggtgagatgggattcggaacaagagagcctcacagtcatataaagtggaggcaaggaggtcaggagactccattccaggatgacatctgagcagagataggaccaagggaggcagaaagccatgtagatgggggaaaagagttccaggcagagaggacagtacatgcaaagtccctgaagtagaaacgtccttggcaggttccaggagcaccagggaggccaaaggagaggaaagagatgcaggctgagaggggacaggggccagatcactaagggctgtgtgggtcacagcgaggactttgcttttatgctaaagtgaggcagcagccagtgacataaacgtctctcattgccttaagagaggaatgtaggtctcttcttttactccagaccacaaggttcatgaaaggaatctcctcactagaaagaagaaaacaacccaaatgaccagggacccgctaaacaaagcgtgttcaattcacacaaaggagcccgttgccattgttcagtgaatgagataattctgtacgtactcatgtggggaaacaacttatgggacagattagagtggaaaaaagtatctttatccataatatgtgtgtgtgtgtgtgtgtgtgtgtgtgtgtatatatatataaagtccataccaggccaggcgtggtggctcacacctgtaatcccagtgctttgggaggtttgaggcaggcagatcacttgaggtcaggagttcgagaccagcctggccaatatggtgaaaccctgtctctactaaacatgcaaaaaaattagctgggcgtggtgataggcacctgtaatcccagctactcgggaggctgaggcacgagaattgcttgaactcgggaagcggaggatgaagtgagctgagatcacaccactggactccagcctgggcgacagagcaagactccatctgaaaaaagaaaacataaagtccacaccaaattgttgacagtgaaactcctagaaagtgagtttggagtagagaagtttcattttttaattttcaaaataatcatataagtggaaagaatgtataatcctatcagtggaaagacactcctgagatctccaaccctaccaagaatccaggcccccaggccttagaccgtcaaaactgagtgggagccccaaaggcctccctcggccccaggagtcccagctcccaacccccttttctcccaaacacgggaatcacgaccccagcccctcctccctcagacccaggggtccaggcccccatctcccgcttctccagacacagggtccctccttccggcccttgcgtcaccgtgtaggctccgcctctaattctgcgccacgtgggcgctttcccaggacggccccctgtcaatctccacactggccccgcctccagcccagtggctgggacttaatttgggtccggcccttcggcttgggccccgcctctgcagcctcactcagctcaagcccctgccgcgcaaatagtcccagcggattctctctcgtgtcgggccgccctcggggtcctttctcttcacggcccatctttgatgctgtcttcagaattgccggacgcaggggacaagacaatcgtttccatcatatccttgcccctttttgtcagccccagagacagcgtctcctcgcttgttcaggaagattctagcggaagcaggcagtattcc

SEQ ID NO: 22323 - DNA, 2300 bp, Homo sapien
cttggggcagagcttgattggttgggctttggtcatgtgtccatctttgggccaattgcagggtctgcagctggggtactgtgattggctcagccagaatcacatgattacctctgtggcccagaggccagcatatgccaggagaatccctcatccagggttatgtgagttgggtggagggtgtccccaagagatgtcaggctgctgttctgggcagaccaaattcaccattcaaggtcttggtttctggcttggtgccttctccctgacctctgcttcttgactcttcaatgagcagaaagaactaagggaactggctgggcatggtggctcacacgtgtaatcccagcactttgagaggccaaggagggaggattgcttgagctcagtaatctgagaccagcctgggtaacagtgagaccccatctctatgaacaaaacaaaacaaaaacaaaaaaccaaggggtctgatatttcccccacttcccagagtgctgttgctcttctgtatatatgatgatcctttatctttcttgttgggtattagagatgtgcagtttgccagaaacaaagcagatgaggtcttggcctatttggctaaaacaattttgcactgttgaaaagtagacaaagtagaaaaagggctaaaaggaggagatgtagcatctcggaaacaggtaaacctctcttctgctggaagtctaagttggataaatatccactgtaaactggaactaagcttttgggcacattggttttagagtatttgacttgaaagtttttcttgtgtgcaaatctgtatgtgttttgtgggggctctcaggtgtgaacaagagatgacattaggatgtctgaggagattctcggcatgtgaatggggccactaggggaccttggggggtgactagcagagactagagcagaagtagggtgactttggagaggactggggtgaccgtggtgtcttggataactttgagggtgctgttgagggtgtctgggagtgaaactgaggatactaacatgagttgttatgagacaccttttaggagttcaagtagggtgaccaggggtgtctgtgggggtggttctagaaatgatcgaggctgggctcagtggctcacgcttgtaatcccagcactttgggaagccgatcacctgaggtcaggagtttgagaccagcctggccaacatggtgaaaccatgtctctactaaaaatacaaaaattaggctggcgtggcagcagctgcgtgtagtatcagctaatcgggaggctgaggcaggagaattgcttgagcccaaaggcagaggttggagtgagccgagatcacaccactgcactccagcctgggcaacagagcaagactccatcttaaaaaaaaaaaaaaaaaaagaagaagaaagaaagaaatgattgaggtgattctgtggggtaaccttgaggatgagtgggatgacctttggggggtcctctgtggggtgaccttggggggtgtgtgggattatgagagtgtctgagaattgagttttaggttaagtaggggtgatttgggacaactctaagggtgtgactgggggatgactttaggggtccctgggggtgaccttgtgagtgagattggagtttctttggggtttctaggaggtgactttggggaggtgagtaggggtgattttgaggatgtgccagactttggggttgtctgttgggctgcttgtgggtatcagcagagatgactttggagggtgaccaagaggggtatctggggttgactctggggcccctgtccccctctccccagttctcatccatatgagcaagggcttcatgttactggccgtggccctgtgctgagtcctcctcccgcccatggccctctcctcctggccagtggtcctccgcctgaacatggccgactttgtcttcagtttcctctgcctcggcattggtaggtgttggcttggggggcgggggccctccctaaccccagccctgctctctggctttctggaggtgtatctagacttccgtgctgctcccctcggggcctctgtcttagcatgtctctggggagctctgactcagttctactctatctgtgggatgtctctctctcccccactctctgtttccctttctttttttgtcccctctctccaggtatctttctgtctgttgtgagggcgtgtgtgtgtgtgtgtgtgtgtgtgtgtgtgtgtctgcttgtcacggagggtgggagaggatgtctcagtccctcttttcttactgggggtcatagggctcactgtccagcct

SEQ ID NO: 22324 - DNA, 2300 bp, Homo sapien
acgtcccttgtgacaacaccaccaagcctggtgtctataccaaagtctgccactacttggagtggatcagggaaaccatgaagaggaactgactattctagcctatctcctgtgcccctgactgagcagaagcccccacagctggccagcagccccgcctgacatggaacagaacggagccatcccccaagaccctgtccaaggcccagatgttagccaaggacttgtcccacctgaggacaaagctggcgctcaaggtcacctgtttaatgccaagataacaaagcgctgatccaagttgctctgtaggaatttctgtgacttttttctggggtcaaagagaaaccccgagacactgtacactgttccttttcacccaccaccccgatccctaggtgaggagaagcggcttgaagcagggctccattcattcaacacacatgaccacccgtgtgatcttgaacaagaggcccaatctcacttcgccttggtttccttatctgtaaaatgagaccatcttattgctgacttcaaagggctgttgtgaggattaaatgagatgattcgtctgaactgattaaaatcgtgtctggcactgagtaaataccctctatctctggatcccagttaaaggacctaacagacactagattaccaagaatggctttttctttaaggtttagttctgggccgggcatggtggctcacacctgtaatcccagcactttgggaggccaaggcgggcggctcacttgaggtcaggagtgcaagaccagcctggccaacatggtgaaaccccatctctactaaaaatactaaaaaaatttagccgggcgtggtggcacacgactgtaatcctagctacttgggagggtgatgtgggaggatcgcttgaacttaggaggcaggagttgcagtgagccgagatcgcgccactgcactccagcctggtgacagagcaagactccatctcagaaaaaaaaaaaaaaaaaaaaagatttagttctgggcttcctggtagccatggcaaaaaggcaaatactgtcctttccttagccaggtccctgatatacagcagaggctggaactctgagctgctttgattttaccaaaaagccaagacaacctgttggaagcctatgggtttaccattgaggctgcaggaatctagttcctaattatcttcagagaccacaaaatgtgatgttcaaggtcgctgaatgttgaagtacatgaacctggctcgtgagacctaaatattgtactggtggtgggggggaagggtcattggaatctgtggttagcctgatcttgacctgggagggaaggttgtccagatctctgggactttggaggacaggacgttgagcacccataactgggagcaagaagtgggaggctcattgagaccccagcattgtttgggagggacactggattttgtaatgctaaagaacttaccctgggagacccctgaaacttcacattcctggatctggaggcactaggaatgtggtgatgtgtaccccaaaattttattatgaaaggaacagtagctttggggacctaggtcctgggtctgggagtgcaagaaccagggcattctgaaggccaaggcttatatttcagggggaactggcagctgagatgctagtatcttggctccgagtggtgcagggaatcagagccctaactgctggtgtttgagggcaccaggtctgggggtgcagggccttaattgagactgaggtatatggggctttgtaccaggggtcactgattcctccgtcttcctgtttctgcttcccctcagtccccccttgcctcactggctgctccccagagcaaagccccagagccacaggccctgccccacctggcttcaaccccaggaatgcgtccagcgtgatccagggcctgcagaacaggtgctggttctccctccccgtctacagctctggggatcggagggggggggggcaattgtccagcccccaggcaacaggggaagggccttggccaacatctgggtgccagcagggcaggggtggggctctgaggggataagggcttttaaaagcctccccagggaggttccccagttcctccacctgctggcccctggacacctctgtcaccatgtggttcctggttctgtgcctcgccctgtccctgggggggactggtgagacagtggggggatgtgggagggggaacgggccctgattctcttgctggcctcacatccccccccgataagaccttcccctccaacaccccaccctcatccctctggccca

SEQ ID NO: 22325 - DNA, 2300 bp, Homo sapien
ccagctgggactgggagcttataaattcaggcatcctggtacctgctcccttctggcacccaagctgccctagatgctgctggaggatctggaggaggtgagagctttgagacaagactgagggaggggcaaaggggagattcactgtgccctggtttcaaggggaaacgttgaccacgcttggagaactgagtgtcaagggcatgggtagatccacgtgtcctttaccaatgccccaaattgaacctgaaccaagaaaatgtcctggaatggccagaaggagctgcagtggtggggagggagggggatggagtggatcaggaggacgtccctgaagtacttgtatcagagccaagaacgtggtcaggagtgatcacgggttcaagtcagttcagcacaacctcccggaggcctcctgtgtaccaggccccaggtggggcagtgctgaggtcacagaaagaacctgacctgagccccatcttcaagacccccagatggagaaaagaacaggccagacctcagcaagtatggggcatctgcgctgtaatggagacagaatgggtgctgtgggattcaggggagacacctgttaggtgttggggcctcccagaagaggtgggggcagagtgtcagaggacaaagatgaatttggaagatatggggaagaaggatttcaattcaccctcaaagcttcctgaggcctcccgtgggtcgggccctgcagtactggagacccagagtggagtcagaccagctcctcggggagctgccagtctcgtaggggaggcagacaccactgagggtcaggggaggtcagagaaggcctcaaggaggaagcggggctggaagggaatggcgttggatatgcggtgggaggaatagcctaagcatgaaatggcaggagggaaaatggcagcactggctgcgtctaggacaaggtcatgggagacccagggagaggggctggaagggaagaagccacttttgtccttgaaagtgaggctggagccaggcaactcatgcctgtaatcccagcactttgggaggctgaggcgggtggatcactagaggtcaggagttcaagaccagcctggccaacatggtgaaactccgtctctactaaaattacaaaaattagctgggcgtggtggcacacacctgtaatcccaattgcttgggaggctgaggcaggagaatctcttgaacccagaaggcagaggttacagtgagcggagatcacgccactccactccaacctgggctacagagccagactccgtctcaaaaaaaaaaaaaaaaaagaaaaaaaaagaaagaaagtgaatttgaagagctggactttatcctggtggtgccaaggatccatggagggtggtgagcaggggaggggcacagccagctccagatgtagaaagaccctttggggtcatggctggagggcaagctggtggaggggactggactggagggggacccaaaaggccagataagagggttgagatagaccaggcgcggtggctcatgcctgtaatcccagcactttgggaggccgaggtgggtggatcatgaagtcaagagattgaggccatcctggctaacacggtgaaaccctgtctctacttaaaaaaaaaaaatttccaaaaaattagccgggcacggtggtgggcgcctgtagtcccagctactcgggaggctgaggcgggagaatggtgtgaacctgggaggtggagcttgcagtgagccgacattgtgccactgcactccagcctgggtgacagagtgagactccgtctcaaaaaaaaaaaaaagttgggacaggggtccttggtgatgatggagagagatccaggggctggtagcatggtgctggaggctgacaggtggaggaggtggggcagggtctgtccgagtgcctagaggaagagtaaaccttccagagatgggggacccagaaggaagcgcagagtggggttgggggaaggggataccggtggtcagaagaaatttattaacagtggatgggataagtctgtgtctggagggatcctggtggaggcagaagggtcctgcctcacctggattctctcactccctccccagactgcagccgaaccctggtccctcctccacaatgtggcttctcctcactctctccttcctgctggcatccacaggtgaggtggccccaggagggggccaggtctgtgggagcaggtgcccccttcccaagcatgtctgggcccagtgatctgccagcccctacctcacccagagaccactaaagatccttccttcaccct

SEQ ID NO: 22326 - DNA, 2300 bp, Homo sapien
ttaattcacgtgtaggggaggtcaggccactggctaagtatatccttccactccagctctaagatggtcttaaattgtgattatctatatccacctctgtctccctcactgtgcttggagtttacctgatcactcaactagaaacaggggaagattttatcaaattctttttttttttttttttttttttgagacagagtctcactctgttgcccaggctggagtgcagtggcgcagtctcggctcactgcaacctctgcctcccaggttcaagtgattctcctgcctcagcctcctgagttgctgggattacaggcatgcagcaccatgcccagctaatttttgtatttttagtagagatggggtttcaccaatgtttgccaggctggcctcgaactcctgacctggtgatccacctgcctcagcctcccaaagtgctgggattacaggcgtcagccaccgcgcccagccacttttgtcaaattcttgagacacagctcgggctggatcaagtgagctactctggttttattgaacagctgaaataaccaactttttggaaattgatgaaatcttacggagttaacagtggaggtaccagggctcttaagagttcccgattctcttctgagactacaaattgtgattttgcatgccaccttaatctttttttttttttttttaaatcgaggtttcagtctcattctatttcccaggctggagttcaatggcgtgatcacagctcactgtagccttgaactcctggccttaagagattctcctgcttcggtctcccaatagctaagactacagtagtccaccaccatatccagataatttttaaattttttggggggccgggcacagtggctcacgcctgtaatcccaacaccatgggaggctgagatgggtggatcacgaggtcaggagtttgagaccagcctgaccaacatggtgaaactctgtctctactaaaaaaaaaaaaaatagaaaaattagccgggcgtggtggcacacggcacctgtaatcccagctactgaggaggctgaggcaggagaatcacttgaacccagaaggcagaggttgcaatgagccgagattgcgccactgcactccagcctgggtgacagagtgagactctgtctcaaaaaaaaaaaattttttttttttttttgtagagatggatcttgctttgtttctctggttggccttgaactcctggcttcaagtgatcctcctaccttggcctcggaaagtgttgggattacaggcgtgagccaccatgactgacctgtcgtttaatcttgaggtacataaacctggctcctaaaggctaaatattttgttggagaaggggcattggattttgcatgaggatgattctgacctgggagggcaggtcagcaggcatctctgttgcacagatagagtgcacaggtctggagaacaaggagtggggggttattggaattccacattgtttgctgcacgttggattttgaaatgctagggaactttgggagactcatatttctgggctagaggatctgtggaccacaagatctttttatgatgacagtagcaatgtatctgtggagctggattctgggttgggagtgcaaggaaaagaatgtactaaatgccaagacatctatttcaggagcatgaggaataaaagttctagtttctggtctcagagtggtgcagggatcagggagtctcacaatctcctgagtgctggtgtcttagggcacactgggtcttggagtgcaaaggatctaggcacgtgaggctttgtatgaagaatcggggatcgtacccaccccctgtttctgtttcatcctgggcgtgtctcctctgcctttgtcccctagatgaagtctccatgagctacagggcctggtgcatccagggtgatctagtaattgcagaacagcaagtgctagctctccctccccttccacagctctgggtgtgggagggggttgtccagcctccagcagcatggggagggccttggtcagcctctgggtgccagcagggcaggggcggagtcctggggaatgaaggttttatagggctcctgggggaggctccccagccccaagcttaccacctgcacccggagagctgtgtcaccatgtgggtcccggttgtcttcctcaccctgtccgtgacgtggattggtgagaggggccatggttggggggatgcaggagagggagccagccctgactgtcaagctgaggctctttcccccccaacccagcaccccagcccagacagggagctgggctct

SEQ ID NO: 22327 - DNA, 2300 bp, Homo sapien
gagctggctattgcatgcgaggatgtgcattagtttggtttgatctttaaatgaaggaggctattagggttgtcttgaattagattaagttgtgttgggttgatgggttgggcttgtgggtgatgtggttggattgggctgtgttaaattggtttgggtcaggttttggttgaggttatcatggggatgaggatatgcttgggacactggattcaggtggttctcattcaagctgaggcaaatttcctttcagacggtcattccagggaacgagtggttgtgtgggggaaatcaggccactggctgtgaatatccctctatcctggtcttgaattgtgattatctatgtccacttctgtctccttcactgtacttggaattgatctggtcattcagctggaaatgggggaagattttgtcaaattcttgagacacagctgggtctggatcagcgtaagctgctctggttttattgaacagatgaaatcacattttttttttcaaaatcaaagaaatcttatagagttaacagtggactcttataataagagttaacaccaggactcttattcttgattcttttctgagacaccaaaatgagatttctcaatgccaccctaattctttttttttttttttttttttttgagacacagtctgggtcttttgctctgtcactcaggctggagcgcagtggtgtgatcatagctcactgaacccttgacctcctggacttaagggatcctcctgcttcagcctcctgagtagatggggctacaggtgcttgccaccacacctggctaattaaattttttttttttttttgtagagaaagggtctcactttgttgccctggctgatcttgaacttctgacttcaagtgattcttcagccttggactcccaaagcactgggattgctggcatgagccactcaccgtgcctggcttgcagcttaatcttggagtgtataaacctggctcctgatagctagacatttcagtgagaaggaggcattggattttgcatgaggacaattctgacctaggagggcaggtcaacaggaatccccgctgtacctgtacgttgtacaggcatggagaatgaggagtgaggagccaccggaaccccatattgtttagtggacattggattttgaaataatagggaacttggtctgggagagtcatatttctggattggacaatatgtggtatcacaaggttttatgatgagggagaaatgtatgtggggaaccattttctgagtgtggaagtgcaagaatcagagagtactgaatgccaacgcttctatttcaggaacatggtaagttggaggtccagcttctgggctcagacgggtatagggaccaggaagtctcacaatccgatcattctgatatttcagggcatattaggtttggggtgcaaaggaagtacttgggacttaggcacatgagactttgtattgaaaatcaatgattggggctggccgtggtggctcacgcctgtaatctcatcactttgggagaccgaagtgggaggatggcttgagcccaggagttggagaccagcctaggcaacatagccagaccctctctctacaaaaaaattaaaaattagctggatgtggtggtgcatgcttgtggtctcagctatcctggaggctgagacaggagaatcggttgagtctgggagttcaaggctacagggagctgcgatcacgccgctgcactccagcctgggaaacagagtgagactgtctcagaatttttttaaaaaagaatcagtgatcatcccaacccctgttgctgttcatcctgagcctgccttctctggctttgttccctagatcacatctccatgatccataggccctgcccaatctgacctcacaccgtgggaatgcctccagactgatctagtatgtgtggaacagcaagtgctggctctccctccccttccacagctctgggtgtgggagggggttgtccagcctccagcagcatggggagggccttggtcagcatctaggtgccaacagggcaagggcggggtcctggagaatgaaggctttatagggctcctcagggaggccccccagccccaaactcaccacctggccgtggacacctgtgtcagcatgtgggacctggttctctccatcgccttgtctgtggggtgcactggtgagattggggggataaaggaaggggggcgggttctgactcttatgctgaagcccttttcctcccacccagtgccccagcctcgtcccttcagcccacagttcagcccagac

SEQ ID NO: 22328 - DNA, 2300 bp, Homo sapien
taaataacaaattagatatacatttatatgtgttaacataatattgtaaattagtacaaatcatatataataagttaaataataaggaagattggggagagggaagtttgcagtgttaaagcagtgacagacgttccataaactggcgagtggacagataaaccatggtgcatccatacaatggaatcctattcagcagtaaaaatggaataaactgctgatagctgtgtgaccttcggcaagttacttaacctctctgatacttaactctgtgaaatggggctaataatcaaatcttccaggtaaggttcctatgaaagtgaattactgcatgtcaagtgcttagaacaatgcctgggcacagaggctgtaggctgtgtctgctgtcaacacctgtatttccgtctccatacctttcagactcactgaccctgagaactctttgtgcctgtgtttccatcttccccatcctagctttctgactctgtctcccccagcctccatcttggtgtctctgtatcagtgtctctgtgtctctatccctatctaactttctctgtttctgtcactgactttctttgcctttcttgcactctgagtttccatctctccagctccccatcactccctctcattccagatgttgctaacactgacttctcccagagaccactggacagtgggacatttttggttgctatgacttggcaaggagggtgctactggcatctagtgggcagagggcagggatgctgcgtaatatcctacagcacacagggcagtgcccacaacaaagaatgattcaatcagaagtgtcagtagcggccaggttgagaaattctgccctaggttatggtttcagggtctcaccgcctaaggtggagaggatcccttatggctgttgctgcccagagattctgtgggagggtggagaagggagacggctaaagaatcccagaatcccctccccaccaggtgccaacctgatgaccacagcagaaaccccctgcaccaggctcctgggatatgtcgtccacaatgtcacaggtgtgtgtgttgtgtgtgtgtggtgggagagtggtgtaagtgtgtgtgtcttagtcttctctggctcccataacaacataacacagacaggtggcttccacaacagaaatttatttctcaccattctggagaccggaaagtccaagtctgaggtttagcaggtttcaattctctctccctcttttcctcttcatattagggcacttaatttcatcatgaaggccccaccctcacaacctcagctaaccctcctcacctcccaagggtcccagccccaaatgccactatcttggggcttagcactttgacatataagtctggagagggggggacacaatttggtccatggctttgcgtgtgtgatgtgtatgtcccaaagtgtcaccgtcttcaagcagacagggttgcttctaagtttacatgcccgtatgacgtgtgtatgggggtgcttgtgtggctgtacttgtgtgatttttgtgtattggggtgaataggcatttccattcatccgaggctgtttctggattatgatatcactgtaatttaccatgtgactggatctttgtggttgtacctatctggttcagtgtcatgtgctgtgtgtatcatggtgtgaccacattgtatgagtcaccctgcagctttgcaagagtgtgtgtagccaagcgtgatgtcacatgggaggttgtgtcctgtgcctgtcacctggtcctgtgtccctgagcctgactccagggttctgacatgtagctgcatgtttagtcatgccctgctcactggggccttgggaggccttatgggacagtggttaaggaaataggctgtggagttgccctgcctgggttcaaagccctgccctgccatttattagctgggagaccctgtaatcccagcacttagggaggctgaggtgggtggatcatgaggtcaggagagcgagacaatcctggctaacacagtgaagccctgtctctactaaaaatacaaaaaattagctgggtgcgatggcaggcacctgtagtcccagctactcaggaggctgaagcaggagaatcgcttgaacccaggaggtagaggttgcagtgagccaggactgcgccaccacactccagcctgggcgacagagtgagactccatctcaaagaaaagaaaagaaaagaaaagaaaagaaaagaaactgtgtgtctgaggatggtgtaagaggaggtatcggagggacagaccaggggcctggagtttagaacggacatgtc

SEQ ID NO: 22329 - DNA, 2300 bp, Homo sapien
tccacatctctctagacagatctctcactgtctctagttaggagtcactgtctctagttaggggtctctctgtctctctgaatctatatctccatgtctaactctcagactgtctctgaggatatctctcaagcactctgtctctccggctctgattctctgtgtgtcttccctccatgcttgtttgtgggtggctagacaccatctctccccattcacagatggctagatgctttctctaaactttcctttctacctagttctctctctctctctcttttcccatctctctctctctttttctctctcagtctctaaatctgtctctctaggttctgggtccatggatgggagagggggtagatggtctaggctcttgcctacctaataacgtcccagagggaagaaagggagggacaaagagagggatggagagacttgggctgaagatccccagacacggctaagtctcagtcctcatccccaggtgctgacgtgatggccacagcaggaaatccctggggctggttcctggggtacctcatccttggtgtcgcaggtatctgagtatgcgtgtgtgtgtctgtccgtgcttgggggcacagtgtttgttaatgttcaggtgtgactcagtgtcctcttgcttgtgactgcaaagctgcctgtgagacggtaccgtgttatccgtcccccatggctgtgcccctgcaactccttgtatcgtggtaaatttgtgtgtggcagtgtgcctgggtgtgtggttgtacctgtgagactctgacagtttgtgcctctgaatatctggtggagtgacaacagtgtaatgatgatatggggacaggggaagccgagggtgcaggagattgtgcttcctggggcgtgatccattgctgggaatctgtgcctgcttcctgggtcttcagtcctgagatccccctctcccatccccaaggaactcacctcacaggactataaaacggtgttttggtgtgcatgggcttgtggcttggtgtgactgtgggcaaggctgggagaggataggagtgactcggcgcaggaccgactctttgagcatcagtctgcgcagacaagtgacccgatccttgctcccagcaacaactccaccccctgagctttaattcaccccgaaggacccgatcctactgctatgagcctagactcctctgttgaacccctcctgaccgtggctttgcaccgcgatggcaccagtctcacctccagagctcaccccagagccctgactccgccccagaagccctggtcccaccttctgagactgcctctagccataacccagctcttgaagccttgatggcgcccctgcgctgtaaccccaaccctaggagcactgatcccgccttctcagcccacccccatgccctgactctcctcccaggagccctgactaccctgaatccctgaccaggctcctgcaccgtgatcaccgcccctgggagccctaggcctatatcctggaccagcccctgaagctccgatcatgacccctgcaccataaccccacccccaggagccctgggtccgccccctgggcccgcccccagccctgactcggccccccaagagtcctgactgctcctgaagccctgaccacgcccctgctcggtaacccctcccccaagagccctgggcccgcctcctgagcccgttcccagccctgactccgccccgaggagccctgactgctcctgaacctctgaccacgcccctgctcggtaagcccacccccaggaaccctgggcccgcctcctggtcccgatcccatccctgactccgccctcaggatcgctcgtctctggtagctgcagccaaatcataaacggcgaggactgcagcccgcactcgcagccctggcaggcggcactggtcatggaaaacgaattgttctgctcgggcgtcctggtgcatccgcagtgggtgctgtcagccgcacactgtttccagaagtgagtgcagaggtagggggagtgggcagggcctgggtccgggggcggggcctaatatcaggctcatcttggggtgctcagggggaaacagcggtgaaggctctgggaggaggacggaatgagcctggatccggggagccccagagggaagggctgggaggcgggaatcttgcttcggaaggactcagagagtcctgacttgaaatctcagcccagtgctgagtctctagtgaactaaggcaagttcttgtccctgaatttttgtgaatgaggatttgagaccatggttaagtagctcttagggtgtttagcgaa

SEQ ID NO: 22330 - DNA, 2300 bp, Homo sapien
tgcccctccgtgcaccctccgcggtctacggcaccctctcaccccccaccccccttcccgcacctatgcgtctccacaagatccgtagagcgcaagccagcagaccaagcctccacgccatccttggcccctctgctcctggccccccactttccatccatcgggcagtaacttggctccacatgcagaggggaccccgtgtccattcacctctcttctcccttgaccccgtcacctcccacctgggctgttgccactgccccccgccccgcccccaccatcactctccaagctggaagtttttaaaaagtaaataagattatgtcactccatcctcgtgcttaaaatccattgcacttaagtaaaacccaagctccttaatcctggtacgtaaactcctgcaggcccgcccggttcccggtctgcgctcctacccgccctgccctcctacccgccctgccctcctctggctggagccaagttctcccctgcaccccgcaaccgcccctgctgcggcgaccctcctcctcctcttccctgggatctcagcttaaatgttccccttctctgagtctccccgaccaccaccttatatgctggtccctgcagttttcctttatggtctgtgcccccgggtaggacgcgatccccagtgacgaggactttgctggttcctcctgtggccccagcacctgccgcagagctcggagtgtggtaggcactcagctgcttttcactgagcgaagactttttagttctcccgctcaccgagagcctacaatgtgcctggcactgtgtgcctttccctgaattacctctttgaatccacttgggaaatggggcataatggtcactccagttttacagttggaaaaacaggctcacaggggtgcagtcacttgcccaaggttccaaaaatagttcgtgatgtaggctggatacgaacctggggaaatttgctggagaagcacagaaagagagggatgaaggaggaggggagagagagagagagatttaatttaaaaagagaaagaacatgagagagaacaggagagaatgagaggaaatgaaagaaaacacgagaaaaataatgagagagagaatgagagaaagaaagaagaagagaaagagaaaatgagagatacaggcaagagagaggtatctcatgagagagaataagaacatgaaaagagaaagaatgagagagagagagagaaagaaaaaggagagtggagtctaggatctgggcaggggtctcctccctgggtccctagaccctgctgccagccccttctgggcccccaaccactgcctggtcagagttgaggcagcctgagagagttgagctggaagtttgcagcacctgacccctggaacacatcccctgggggcaggccagcccaggctgaggatgcttataagccccaaggaggcccctgcgggaggcagcaggctggagctcagcccagcagtggaatccaggagcccagaggtggccgggtaagaggcctggtggtcccccactaaaagcctgcagtgttcatgatccaactctccctacagctccatgtcgctggattctcagcctctgtgccttctgtctccacatctctctagacagatctctcactgtctctagttaggagtcactgtctctagttaggggtctctctgtctctctgaatctatatctccatgtctaactctcagactgtctctgaggatatctctcaagcactctgtctctccggctctgattctctgtgtgtcttccctccatgcttgtttgtgggtggctagacaccatctctccccattcacagatggctagatgctttctctaaactttcctttctacctagttctctctctctctctcttttcccatctctctctctctttttctctctcagtctctaaatctgtctctctaggttctgggtccatggatgggagagggggtagatggtctaggctcttgcctacctaataacgtcccagagggaagaaagggagggacaaagagagggatggagagacttgggctgaagatccccagacacggctaagtctcagtcctcatccccaggtgctgacgtgatggccacagcaggaaatccctggggctggttcctggggtacctcatccttggtgtcgcaggtatctgagtatgcgtgtgtgtgtctgtccgtgcttgggggcacagtgtttgttaatgttcaggtgtgactcagtgtcctcttgcttgtgactgcaaagctgcctgtgagacggtaccgtgttatccgtcccccatggc

SEQ ID NO: 22331 - DNA, 2300 bp, Homo sapien
gacagagacaaggagacacgaagacagatgcaaagagctggcggcagatggaaagaaaagctggcgtagagacgaggtcaggagaggtggcctcagatggctcaggagtggagagggagaagccacctttcgggttccccacccaatgcccatttcccaagccgtctgcccctctcctggcctcttgatctattttcccaataacaagtagccctgcccaactctctcacccatgcctggccacaccagccgggccacggcacctgcagattcccagactgggtccctgcctctttgtgctccacggcctgggcccagagtgaaggcaagagaaggagttgagagctccctctgcaaagtggcttgagtctcccctgcctaaaatgcagggagagggaggcagaaagacagggaaggaggaaggggtggggaagaaagagagagagagagagagacagaataacacaactacagaaacacagagagaacacacagagagcctgggacacagggacacacagagtcagagagaaaagagaagatagagaaagacacaaatggagacacagaggtgtaaagaaagagagattaacagagtcccagatacacgcaaaggggcagaagcacagttttcagggtggtgtctatgatcatcttcttttttttttttttttttttttttttttgagacggagtctcgctctgtcgcccaggctggagtgcagtggcgggatctcggctcactgcaagctccgcctcccgggttcacgccattctcctgcctcagcctcccaagtagctgggactacaggcgcccgccactacgcccggctaatttttttgtatttttagtagagacggggtttcaccgttttagccgggatggcctcgatctcctgacctcgtgatccgcccgcctcggcctcccaaagtgctgggattacaggcgtgagccaccgcgcccggccatgatcatcttcttgactatgctgatgtgacaagtacctaaagccatcagactctaccctttaaatatgcagtttgggccaggcaccgtggctcatgcctgtaattccagcactttgggaggcagaggtgggtgaatcacttgaggccaggagtttgagaccagcctggccaacatggtgaaactctgtctttactaaaaaaaaaaaaaaaaaaaaaaaaatcagccgggtgtcgtggggcacacctgtaatcccagctatgctggaggctgaggcacgagagtcacttgaaccctggaggcggaggttgcagtgggccgagatcacatcaccgccctccagcctgggcgacagagcaagactctgtctcaaataaataaataaacaaacgaacaagcagtttgttgtaccttagttatatctaaaaaaaaaatgctgtcaacaaatagagcagaagtgaaataaaggaaaataaatgggccaagaactctaaggtatatttgacaaatcattcagaacctttaaaaaagaaagaatcacagaggcatagaaagacagggaggaacagggagacagaaacacctgtggcccaaggagaacaaaacaaggctcctaagacagacaggaggagagagagagagagtgagtgagagacagacagagaaaaagacagagagagagagacagagacagagagacagagaggcgagagggatagaaagagagagaggggtggagagagacacgagatattgagagagactcagaaagatagccgagggagaaccacagagagatggaagaagactctgagaaaaaaccagagacaaagatggaaagaggagtatcgagggtgaacagacagtggtggaatgagcaaaatgcagagaagaaagcaagcaatccaggcgccaagaatagtgacccagagttggtgagaagccagatccttaaggctgggggaggcagggaaggggctggcctggcttccggagacccctccccattctccgggccagggaggtagggagtgacattccggactgggtggggggtgctctgggggtggagatagggggagcaggaggagctattgctaaggcccgataggcacctcattgcccgggaatgtgccccagggagcagtgggtggttataactcaggcccggtgcccagagcccaggaggaggcagtggccaggaaggcacaggcctgagaagtctgcggctgagctgggagcaaatcccccaccccctacctgggggacagggcaagtgagacctggtgagggtggctcagcaggcagggaaggagaggtgtctgtgcgtcct

SEQ ID NO: 22332 - DNA, 2300 bp, Homo sapien
tcctatcattgtccttattacgcagtgacttccccctcctcatttctctccactctgccacgcacacaccctcaccctccagcccataccaaccaccccaaccactgcctgtggtttcccatgtgcacccaggccaggcattttcacggcctttcctcctgacctacgcctggctcagctttctaggcccaagttcaaagacacctccctaaatcttcccagatccctctgctactgcccagcaccaccatcttatcacagccccacgtcgttcccaagtgctctccgatttctgcttaactccatgcctctcgctgtgtgtccgcatctcatcaataagtcctcaagtcctcttccatcctgctagcttcctcatcgctcgggaatcatccccgctacttcctggggaaactgactcccttctgggcacacacagtgctacccccggggaaatctaagaagagacccaggagaagataagcacggagagtcagagaatcaaggggaaagaaagggagagaggccgggcacagtggctcacacctgtaatccagcactttgggaggccaaggtgggtggatcacctgaggtcaggagtttgagaccagcctggccaacatggtgaaacctcttccctactaaaaatacaaaaaacatttagccgggcgtggtggtgggtgcctgtaatcccagctacttgggaagctgaggcaggagaactgcttgaactcaggaggcggaggttgcagtgaactgagatcacaccactgcactccagcctgagtgacagagcaagactccgtcaaaaaaaaagaaagaaagaaagaaaagaaggaaggaaagaaagaaggaaggaaggaagggaggaagggagagaggaagggagagaggaagggagagagagaaaaaaagagggagagagacacaaatacagagactgagatgggagagagagagagatggaagctccctcccctccatggccagggagacagatggagcaagagacctcaggggtgggcagacttggaggagaaggaccaggaggatgtggagtgccgaaatctccagtcagggccaggtgggcagtcagagactgcaaaggaggactgtcagacagggacaaaaggaagccattgatgtaaccgccctcccgcctgcccgccggaagagaggttgaggccggagctgctgggagcatggcactggggtgctgggggcggacaaagcccgattgttcctgggccctttccccatcgcgcctgggcctgctccccagcccggggcaggggcgggggccagtgtggtgacacacgctgtagctgtctccccggctggctggctcgctctctcctggggacacagaggtcggcaggcagcacacagagggacctacgggcaggtgtgtgagtcaccccaaccgcactgaacctgggcaggctgcttcccagtgccggagggctctagagcccggagtgagggcctgcaggtccctgggtggcacagagagtgctgggggtgcagggaggcctggggcaccatctgcttgccccagaggccggaatttgtcttcagacactttctttctccaaaacccggaggtctaaggactgagccgactagaacttcctctgcctcagattcaggccccagcccctcctccctcagacccaggagtttaggtcctagcccctcctccctcagacccaggagtccaagttcccacctcctccctcagactcaggagtccaggcccccagcccctcctccctcagacccaggagtccaagttctcacctcctccctcagacccaggagtccaggccccaagcccctcctccctcagacgcaagggtccaggcccccagcccctcctccctcagactcaggagtccaggcccccaagcccctcctccctcagacccaggagtccaggccctcactgcactcagggaccagtgctcccttccctggaggcctggtcaggggtcaccaagagcagagcgtgggggcgggaggaatgtgtgtgggaggcctgggtaaggaggaaaagggtgtagccagtctcctggctcagggacctgagagacaggggttaaaaggacgttccagaagcatctggggacagaaccagcctcttccagggaggcctgggagctgggggtgtgtgtctggcagtccctgcagccctgggctctgcggcccctgcgtcctccgcttggctctgccactgcatctgagtgtcttctctcctcacggctccccgcatttctaactctttctgcctcctcgtctcaaag

SEQ ID NO: 22333 - DNA, 2300 bp, Homo sapien
ataacatcatgtttgatatatgtatgtatatgttgtggaatggctaaaccaagctatttaacatatgcattattttacacccttattttttgtggtaaggacacttaaaaaatcttctgacttaaaaaaaaaagtatggtgattggaaaatgtaaatgtgcatgcgtgcttggcatcacatttcattggccaggacttccctggatgctaaaggtcctcaaatgccaggctggggggctgggacttggtcccaagggagatggggacccagggcacgtctgtgagaggaggggcaaggtcagcacaaggcacaggaaggtctctctggggcaagggatacagagaacagagggatcctggtccaggtgggagaggtgcagctctgagttggggttgagggtgtgggtacagagaggaagggaccccccagagagaggaggcagagggatagggcctggtcactgggttgtgcaacatcagacttgctgtctgtgaagatagcacgtcctgagaagaaggtgctgaggtcagtggggaccaaatgtgagagggagcacccggagagtatactgaataccgaagtagtcttcatccctggagtgatggggggtgcacaatgcaagatgacaattagattcaatgcaagacaaagaaaagggttggctgggaacagtggctcatgcctatggtcccagctcctgggaagactgaggcgggagggtcgcttgagcccaggagggttgaggctgccacgagcaaggatcgtgccactgcactccagcctaggcgacagaacaagaccttgtctcaaaagaaaaaagaacttttttttttaagttacctgtagtgcccagcccaagcaggtgctgagccagacttcattcctatcattgtccttattacgcagtgacttccccctcctcatttctctccactctgccacgcacacaccctcaccctccagcccataccaaccaccccaaccactgcctgtggtttcccatgtgcacccaggccaggcattttcacggcctttcctcctgacctacgcctggctcagctttctaggcccaagttcaaagacacctccctaaatcttcccagatccctctgctactgcccagcaccaccatcttatcacagccccacgtcgttcccaagtgctctccgatttctgcttaactccatgcctctcgctgtgtgtccgcatctcatcaataagtcctcaagtcctcttccatcctgctagcttcctcatcgctcgggaatcatccccgctacttcctggggaaactgactcccttctgggcacacacagtgctacccccggggaaatctaagaagagacccaggagaagataagcacggagagtcagagaatcaaggggaaagaaagggagagaggccgggcacagtggctcacacctgtaatccagcactttgggaggccaaggtgggtggatcacctgaggtcaggagtttgagaccagcctggccaacatggtgaaacctcttccctactaaaaatacaaaaaacatttagccgggcgtggtggtgggtgcctgtaatcccagctacttgggaagctgaggcaggagaactgcttgaactcaggaggcggaggttgcagtgaactgagatcacaccactgcactccagcctgagtgacagagcaagactccgtcaaaaaaaaagaaagaaagaaagaaaagaaggaaggaaagaaagaaggaaggaaggaagggaggaagggagagaggaagggagagaggaagggagagagagaaaaaaagagggagagagacacaaatacagagactgagatgggagagagagagagatggaagctccctcccctccatggccagggagacagatggagcaagagacctcaggggtgggcagacttggaggagaaggaccaggaggatgtggagtgccgaaatctccagtcagggccaggtgggcagtcagagactgcaaaggaggactgtcagacagggacaaaaggaagccattgatgtaaccgccctcccgcctgcccgccggaagagaggttgaggccggagctgctgggagcatggcactggggtgctgggggcggacaaagcccgattgttcctgggccctttccccatcgcgcctgggcctgctccccagcccggggcaggggcgggggccagtgtggtgacacacgctgtagctgtctccccggctggctggctcgctctctcctggggacacagaggtcggcaggcagcacacagagggacctacgggcaggtgtgtgagtcacccc

SEQ ID NO: 22334 - DNA, 2300 bp, Homo sapien
atgatcatatgcgatgtatatacataggacaatgattactatagctgaacaaatgaacatgtccatcatctcacatagttacccattttcctcccctgtggcaagagcagctataatctactcatttagcaaaaatccttggctgggcgcggtggctcaggcctataatcgcagtactttgggaggccgaggccggtggatcacctgaggtcaggagttggagagcagcctgaccaacatggtgaaaccccatctctactaaaaatacaaaaattagttgggcatggtggtgcacgcctgtaatccagctactcaggactctgaggcaggagaatcacttgaacacgggggagtggaggttgcagtgagccgagatcgtgccattgcactccagcctgggtgacagagccagagtccatcaaaaaaaaaaaaaaataagaaagattcttctctcctctatgtgtccatgcagtctcatcatttagctaccacttgtaagtaggaacatgccatatctggttttctgttcctgctttagtttgtaagggtaatggcctccagctccattcacgtccctacaaaggacatgatcgtgttcttttttatggctacgtagtattcaattgtgtatacgtaccacattttcttaatccagtctatcactgatggacatttaggttgattccctgtgtttgctgttgtcaatagttctacaatgaacgtacgtgtccatgtgtctttaaacagaatgatttatattcctttgggtacacacactggggcttatgagagggtggagagtgggaggaaggagaggatcagaaaaaaataactaatgggtactaggcttaatacctgggtgattaaataatctgtataacaaacccccatggcgcacgttcacctacgcaacaaacctgcacatcctgcacatgtacccccgaactgaaaagttaaaaaaagaaaaataaatatttgcttataaattaataaatgaagccctcaaaaatgttctattagataatgttaagtacagacatttttgttataaatacataatatacaaagaaatctatgtataacatgattaaaatgaccataagaacatagatcctaaacatggcaaatattagtggggtggggttagggaaagcgttgtttttaacttacacctctctgttagagttgggaatgggttcaggcgtaattacaggcacgactgggatcagcttggacaagttcccccaggcgggccagaattaggatgtagggtctaggccacccctgagagggggtgagggcaagaaaatggccccagaagccgggcgcagtggctcacgcctgtaatcccagcactttgcggggccgaggcgggcacatcatgaggtcaggagatcgagaccattctggccaacatagtgaaacccggtctctactaaaaatacaaaaattagctgggagtggtggtgcgtgcctgtaatcccaggtactcgggaggctgaggcaggagaatcacttgaacctgggaggcggagctggcagtgagccgagatcgcgccaccgcactccagcctggcgatagagagagactccatccaaaaaaaagaaaggaagggagggagggaggagggaagaaagaaagaaaaccgccccagagaaggacccgagccagagcctattctctgagctcagcgactgcttgaatcccgctcctgcccctcagacccagcgcaccgggtccctcccccgagagcagccaggagggactgtgggaccagaatgtgcgggggcgcaggagctgggcaccgcccgtccttcggagggagggtggagagagagtgcagtggtgccaattgctctcgctgcgtcagggttccagataaccagaaccgcaaatgcaggcgggggtgtcccagagtcggctccgcctgcaccccagggcgctggggccgggcatggggcggggggtgatataagaggacggcccagcagagggatgaagattttggagcccagctgtgtgccagcccaagtcggaacttggatcacatcagatcctctcgaggtgagaagaggcttcatcaagggtgcacctgtaggggagagggtgatgctggctccaagcctgactctgctctcgagaggtaggggctgcagcctagactcccggtcctgagcagtgagggcctggaagtctgcaatttggggccttttagggaaaaacgaactacagagtcagaagtttgggttccacagggaagggcaagatcggagcctagattcctgggtctctagggatc

SEQ ID NO: 22335 - DNA, 2300 bp, Homo sapien
acaaagatgaatgtacaaagaagttcatctcagcattattataattaaaactatccaagtgtatttcaatttgaggcagatgacatgcatcatgatacaagtatagtatggaatattacacaaccattataaaggaaggaaaagtaatctaaatgtacaaagagggaaaagttttcctctttttaaaaaataaatgttattgtgtatatttaaagtgtacaatatgatcatatgcgatgtatatacataggacaatgattactatagctgaacaaatgaacatgtccatcatctcacatagttacccattttcctcccctgtggcaagagcagctataatctactcatttagcaaaaatccttggctgggcgcggtggctcaggcctataatcgcagtactttgggaggccgaggccggtggatcacctgaggtcaggagttggagagcagcctgaccaacatggtgaaaccccatctctactaaaaatacaaaaattagttgggcatggtggtgcacgcctgtaatccagctactcaggactctgaggcaggagaatcacttgaacacgggggagtggaggttgcagtgagccgagatcgtgccattgcactccagcctgggtgacagagccagagtccatcaaaaaaaaaaaaaaataagaaagattcttctctcctctatgtgtccatgcagtctcatcatttagctaccacttgtaagtaggaacatgccatatctggttttctgttcctgctttagtttgtaagggtaatggcctccagctccattcacgtccctacaaaggacatgatcgtgttcttttttatggctacgtagtattcaattgtgtatacgtaccacattttcttaatccagtctatcactgatggacatttaggttgattccctgtgtttgctgttgtcaatagttctacaatgaacgtacgtgtccatgtgtctttaaacagaatgatttatattcctttgggtacacacactggggcttatgagagggtggagagtgggaggaaggagaggatcagaaaaaaataactaatgggtactaggcttaatacctgggtgattaaataatctgtataacaaacccccatggcgcacgttcacctacgcaacaaacctgcacatcctgcacatgtacccccgaactgaaaagttaaaaaaagaaaaataaatatttgcttataaattaataaatgaagccctcaaaaatgttctattagataatgttaagtacagacatttttgttataaatacataatatacaaagaaatctatgtataacatgattaaaatgaccataagaacatagatcctaaacatggcaaatattagtggggtggggttagggaaagcgttgtttttaacttacacctctctgttagagttgggaatgggttcaggcgtaattacaggcacgactgggatcagcttggacaagttcccccaggcgggccagaattaggatgtagggtctaggccacccctgagagggggtgagggcaagaaaatggccccagaagccgggcgcagtggctcacgcctgtaatcccagcactttgcggggccgaggcgggcacatcatgaggtcaggagatcgagaccattctggccaacatagtgaaacccggtctctactaaaaatacaaaaattagctgggagtggtggtgcgtgcctgtaatcccaggtactcgggaggctgaggcaggagaatcacttgaacctgggaggcggagctggcagtgagccgagatcgcgccaccgcactccagcctggcgatagagagagactccatccaaaaaaaagaaaggaagggagggagggaggagggaagaaagaaagaaaaccgccccagagaaggacccgagccagagcctattctctgagctcagcgactgcttgaatcccgctcctgcccctcagacccagcgcaccgggtccctcccccgagagcagccaggagggactgtgggaccagaatgtgcgggggcgcaggagctgggcaccgcccgtccttcggagggagggtggagagagagtgcagtggtgccaattgctctcgctgcgtcagggttccagataaccagaaccgcaaatgcaggcgggggtgtcccagagtcggctccgcctgcaccccagggcgctggggccgggcatggggcggggggtgatataagaggacggcccagcagagggatgaagattttggagcccagctgtgtgccagcccaagtcggaacttggatcacatcagatcctctcgaggtgagaagaggc

SEQ ID NO: 22336 - DNA, 2300 bp, Homo sapien
atcctggagaacaaactctgtcactgggcataccctggacacatctcggacagcatgctctgtgcgggcctgtgggaggggggccgaggttcctgccaggtgagaccttactctggggaaaatgaggctgtcctgccaagttttctaggatttaggggagcagaggggtcggcccccagccttcctgggtcaaaatgagaaggagactgggatacctggttcctgggagaggacgggaccagggcctggactccttagtgtaaaagagaaaaggtctggaggtccagacttctggatctacaggaggagtgggctgggcgtccagagtctgagtcctcggggaggaggaggttaggtcctgcggggaggtgggccctctgagcttttactcctgggtctgaggaagaagaggctggagatggaggactctcggatgttggaggaggaaggggctggggcctttctgggagggaggaagtggcccgtgtaattgtcatgaacagagtggcctaacagttcctctgcccttctctcgcgtacagggtgactctgggggccccctggtttgcaatggaaccttggcaggcgtggtgtctgggggtgctgagccctgctccagaccccggcgccccgcagtctacaccagcgtatgccactaccttgactggatccaagaaatcatggagaactgagcccgcgcgccacgggggcaccttggaagaccaagagaggccgaagggcacggggtagggggttctcgtagggtcccagcctcaatggttcccgccctggacctccagctgccctgactcccctctggacactaagactccgcccctgaggctccgccccctcacgaggtcaagcaagacacagtcgcgccccctcggaacggagcagggacacgcccttcagagcccgtctctatgacgtcaccgacagccatcacctccttcttggaacagcacagcctgtggctccgccccaaggaaccacttacacaaaatagctccgcccctcggaactttgcccagtgggacttcccctcgggactccaccccttgtggccccgcctccttcaccagagatctcgcccctcgtgatgtcaggggcgcagtagctccgcccacgtggagctcgggcggtgtagagctcagccccttgtggccccgtcctgggcgtgtgctgggtttgaatcctggcggagacctggggggaaattgagggagggtctggatacctttagagccaatgcaacggatgatttttcagtaaacgcgggaaacctcaccttctttctgcctgagctgtgagatgagtggagagcaaacgggtgggcggtgaagggcagatgagggaaccggtaccgccttgcaactcccccttaaacccctagtaagttttgcctaaagtctctgtccatcagccctattgcagcaagactcctgggttctgcttgggttggtcttgccgcctccaggggaaggggaaaccaggtcacagtgcctcccaaacctgccctcccagatcccggacctctcaggggacagcgggcggggcctgatccaccctctggtttctgaccctagaagacctgcctttcttcggttcccggttactggcagcagccccctcctcccacaaaagatcaggttccaagcttctccttttaaaagtacttagaattcagcccccagctctctcctccctcacacccaggaatccaggcccctagcccctcctccctcagacccaggagtcctggcccctagcagccccctcctccctcagacccaggagtctgggcccccagcccctcctcggtcagacctaaatcccaggtcccagtccctcctcccttagatttaggagtccaggcccccagcctctcctccctcagacccaggaatccaggcccccagcctcctcccctctcagaactaaaatcttggcccccagccctttatgtttcagatcgtagagtctcagcaccgagtccctcctctccctagcctcaggagtctgagattccagcccctcctccctcaagatttcacgttcaatcccctccgccccttctcactcacacccagtgttccagttcccagaagctccccaggctctagtgcaggaggagaaggaggaggagcaggaggtggagattcccagttaaaaggctccagaatcgtgtaccaggcagagaactgaagtactggggcctcctccactgggtccgaatcagtaggtgaccccgcccctggattctggaaggtgaggtgcagaggtactcagatacagac

SEQ ID NO: 22337 - DNA, 2300 bp, Homo sapien
gtctccatcagtgaccatcttcctgcaaatctctttccttttatctcactgccttcattccaccccttgaggtctgggtctttttctatttcttttttttttttttttaagagactgagtcttgctcttgttgcccaggctggagtgcagtggtgtgatctcggctcactgcaacctccacctcctgggttttaagtgatcctcctgcctcagcctcccgagtagctgggactacaggtgtgcaacagcatgcccagctgattttttgtattttcagtagagacggagtttcaccatgttggccaggatggtctcaatctcttgaccttgtgatccgcccgcctcagcctcccaaagtgctagggagttatatatgcatctcctcttatctcttggctctctgcatgcatctttctgtttctcttccttcctttcttttttttttttttttttttttttttttttttttttttgagacggagtcttgctctgtctcccaggctggagtgcagtgaccagtctcggctcactgcaacctccacctcccaggttcaagtgattctcgtgcctcagcctcccgagtagctgggattacaggcgcctgccaccatgcctggctaatttttgtatatttagcagagatggggtttcaccatgttggctgggctggtctcaaactcctgacctcaagcgatccgccggcctcggcctccaaaacactgggattacaggcatgagccacggtgcccggccagcctctctctctacttggccctcttcctccttgtctccatttgtttctcttgtgtgctatgactgtctgtctgtcactgtctcttgtctctatctttgagagtcctaaatgtggctccattggtcctttggaaaagctgcagggaggactcagggcagtggggtgctgagtgtgttggagacagttgcagatccttgacagttctcttccctgacagcgctgtttccagtcacactgcagtgtgccaacatcagcatcctggagaacaaactctgtcactgggcataccctggacacatctcggacagcatgctctgtgcgggcctgtgggaggggggccgaggttcctgccaggtgagaccttactctggggaaaatgaggctgtcctgccaagttttctaggatttaggggagcagaggggtcggcccccagccttcctgggtcaaaatgagaaggagactgggatacctggttcctgggagaggacgggaccagggcctggactccttagtgtaaaagagaaaaggtctggaggtccagacttctggatctacaggaggagtgggctgggcgtccagagtctgagtcctcggggaggaggaggttaggtcctgcggggaggtgggccctctgagcttttactcctgggtctgaggaagaagaggctggagatggaggactctcggatgttggaggaggaaggggctggggcctttctgggagggaggaagtggcccgtgtaattgtcatgaacagagtggcctaacagttcctctgcccttctctcgcgtacagggtgactctgggggccccctggtttgcaatggaaccttggcaggcgtggtgtctgggggtgctgagccctgctccagaccccggcgccccgcagtctacaccagcgtatgccactaccttgactggatccaagaaatcatggagaactgagcccgcgcgccacgggggcaccttggaagaccaagagaggccgaagggcacggggtagggggttctcgtagggtcccagcctcaatggttcccgccctggacctccagctgccctgactcccctctggacactaagactccgcccctgaggctccgccccctcacgaggtcaagcaagacacagtcgcgccccctcggaacggagcagggacacgcccttcagagcccgtctctatgacgtcaccgacagccatcacctccttcttggaacagcacagcctgtggctccgccccaaggaaccacttacacaaaatagctccgcccctcggaactttgcccagtgggacttcccctcgggactccaccccttgtggccccgcctccttcaccagagatctcgcccctcgtgatgtcaggggcgcagtagctccgcccacgtggagctcgggcggtgtagagctcagccccttgtggccccgtcctgggcgtgtgctgggtttgaatcctggcggagacctggggggaaattgagggagggtctggatacctttagagccaatgcaacggatgatttttcagtaaacgcgggaaacctcac

SEQ ID NO: 22338 - DNA, 2300 bp, Homo sapien
taatttttgtgtttttaatagagtcagagtttcaccatgttggccaggctggtcttgaactcctgacctcaagtgatccacccacctcggtcccccaaagtgctgagattacaggcgtgagccaccgcgcttggtctaaaatgctcttaatagcagttaaggtggcacttagcacatagtggatacccagtccctgatctcaaggacttccctgtctggaaagggagtgagacaactgcaggcaagggtgaaatgagctatgataaaggcaccacaggtttctgcaggggatgaagagacattgaacatttaccatgtgtcagacactgttgtgcttcatgtgtgtaaatttgcttaatccccccaacgaccctcgttattactgctacttaacagatggagcaggccaggtgcggtggctcacgcctgtaatcccagcactttgggaggctgaggcaggcggatcacgaagtcaagagttggagaccagactggccaacatggtgaaaccccgtctctactaaaagtacagaaattagccaggtgtcttggcgcacgcctttagtcccagctacttgggaggtcgaggcaggagaattgcttgaacccaggaggcagaggttgcagtgagctgagatcgcgccactgtacttcagcctgggtgtcagagcaatactccgttttggaaaacaaacaaacaaacaaacaaacaaaaaacagatggagcaactgagagaggtcttgtgacttgcccaaagtcacacacctcatcactaatcacacctaatcattgagatttggacacacatggttcagttccagagtccatgctccaaaccatgacgacacagtgagagaacattcaaggggagcccagacccagcttcataaccaggcctgtgagcaggagaaagtggaagggatcgtaagtgcccaggggaggcaaagatggactctgcctgaggatctcagagatttcctggaggagggagaattgaggttgggtgttgaaggatgagtgggagttcaccaggaaaagaaggatatggagaaagacattcactcattcaatgaacatctcctgaggacttctgcaagccctgttccgcctggaacggggtgatgctgggacacagagatgagtcagacctgggcccagccctccagaagctgtccacctggtgagaaggaatgatgaggagagaggcagggaggatggggtgatggaagggacaatggggtggggggcagggagatggatgaaaaaaatatatagcaaatgttctcaggatttggcaaagatcaggatgtattaagagagagcacagggcacttgctacctggaaggttgggcacctgggtccttgggtggtggagccgtggggaagggggcaggttatgacaagagtgggttaatccagatggaaccagatttctcaacattctaggagagggccttgtccttgtgggaagaggcccaaatccccagggcagggaaggttctgcaaggtgtgtaaacctgtgcagctgcctgtggtctctgcctcactccacctggatttccctcaatctttcccgtgttctgtctcctcctcccactcctcctctcatcttgggtccttctgtgcctgtacctccctctctttgtatcttttgctcttgtgtctgagtcctgactctgtcttccacccctcgcctcctttctgggtggtccccctgcacatccctccagcctgccgtgggaggttggtctctgcacaccactgctttatccaaaataaacctgctgcaccccaggaccttaggcttcaaggatctccctccttttccaggacacaaaagattctgtatcttgtagcctaaggtgatgaggaatgaggtctcccactctgaagaccccagaggaggtgcccacaacctctccacacccccagcactcctcctccattcagtcaagctctggcccagcaagccgccagttcatcccaaaaggggggtccccctgcacttacctcctctcccaaggcccctgtcacagccccagggcttccccctcccccaggtacatttcccaaccccgattaatcacaggggcggccccatggaggaggaaggagatggcatggcttaccataaagaagcactggacgccgggtgcacgttccaggatccaggtgcccaggggtcatgaagctgggactcctctgtgctctgctctctctgctggcaggtgaggctcccaggctggctgccccttcacggctgtactaaggtcaccttgctcttccctcccatcccag

SEQ ID NO: 22339 - DNA, 2300 bp, Homo sapien
gaaattaaattaattaatctatttaggagacagtcttgctctgttgcccaggctggagtgcagtaacaatcacagctcacggcaatctcaatttcctggggtcaagtgattgtcctccctcagcctccagagtagctgggactacaggcacatgccacgaagcccagctaatttttgtatttttcgtagagacagaggtctcagtatgttgccccggctagtctcaaactcctgggctcaagcagtctgtcctcctcagcctccaaaagtggtgagattacaggcatgagtcgctgtgcctggcctccaagcactttcaaatgtatcaacttaatcctcacaaaaccctgtgaggtcggtactgttttcatacctattttatagttgaagaaacagacacagagaagcaaagtcacttgctcacagtcacgtggctaggagagcaaggatctgaagcaaggcgatctcttaattaccaagtgatgttcctggagtaaggctctgtttgtttcctttcctgtaaaatgctgcatgcaaaagtataacacagtaagtaaagaagtcagttagcctgcacatactaagacctaaccaaaggagcttattgtttttctccaacttccatgataggtaattagatagtggagacctctgctggccaatatggtagccactaaccgcagctggctcttccaattaaaattacataaagccagaaatgtaactcctctgtctcacttgttatatctccaaggctggatagccacatgtgactggtggtggctggattagctagtgcatataaaacatcactgcagaaagttcagctgagcagcactgagttagatggcctctgaagaggatgtcccacggagagaatccagaactcaggatctttttttttttttttctttgcgacagagtcttgctctgtcacccaggctggagtgcagtggcgtgatctcggctcactgcaacttctgcctcccaggttcaagcaattctcctgcctcagcctccctagtagctgggactacaggcctgtgccaacatccccagctaatttttgtgtctttttagtagagatggggtttcactatgttggccaggctggtctcgaactcctgacctcgtgatccgcccccccttggcctcccaaagtgctgggattacaggcgtgagccaccgcgcccggccagctcaggatcttttgggatggtctgttcacctcgcagaagtggctggcatgagcaataggagcccagagtggaaccagggccttctggttgtcaagtggacttgctgtgtgacctcctgtgagtctctgccctctctgagcctctcactcctcacctgagatgagggagttggctgaggtgatgccgatgcccctcacagctttgacctcctatgattcaggggcctgtgtgtcacctggtggcacacagatggcagggagggtgtgagatggccacacatgggtatgaggcagagccacagccccccccaacacgcacatgggctagtcactgggacacacacagagctcactcacggccacagagtgggcgtgggtttccctttttccttgtttctgtttctcttagcctcggcgcctccctccctccctctctctctctctctctctctctctctctctctctctggctcttttagccttggtttgttacaatctcccttttcaagccagcctctgtccctcctactcaacctgctttatctctaggccttcctccttcctcttccacagtctggcttctcacattgtcactctaggtatgcacttcccattgatttcctcttgctcagtggcctctcatcctgccacccctagccttgctggggacgtgaaccctctccccgcgcctgggaagccttcttggcaccgggacccggagaatccccacggaagccagttccaaaagggatgaaaagggggcgtttcgggcactgggagaagcctgtattccagggcccctcccagagcaggaatctgggacccaggagtgccagcctcacccacggtacaattagacagagggaaagggagggagcccgggggtgggggtaggggagggtggagaagcttccggactccttggggttaaaagggaaggtcccgccaggggtccctgggcagaggataccagcggcagaccacaggcagggcagaggcacgtctgggtcccctccctccttcctatcggcgactcccaggtgaagctacctgcaccccacccgggttggggtggattgcgagaggatgggtggggaccccc

SEQ ID NO: 22340 - DNA, 2300 bp, Homo sapien
gctatctctgctcactgcaacctccacctcctgggttcaagcaattctcctgcctcagcctcctgaatagctgggattacaggtgcctaccaccacatccggctaatttttgtattttttagtagagatggggcttcaccatgttggccaggctggtctcgaactcctgacctcagatgatctgccctccttggcctcccaaactcctgggattacagacgtgagccaccgcgcccgcccggctttcatttattaattaaaagaaattaaattaattaatctatttaggagacagtcttgctctgttgcccaggctggagtgcagtaacaatcacagctcacggcaatctcaatttcctggggtcaagtgattgtcctccctcagcctccagagtagctgggactacaggcacatgccacgaagcccagctaatttttgtatttttcgtagagacagaggtctcagtatgttgccccggctagtctcaaactcctgggctcaagcagtctgtcctcctcagcctccaaaagtggtgagattacaggcatgagtcgctgtgcctggcctccaagcactttcaaatgtatcaacttaatcctcacaaaaccctgtgaggtcggtactgttttcatacctattttatagttgaagaaacagacacagagaagcaaagtcacttgctcacagtcacgtggctaggagagcaaggatctgaagcaaggcgatctcttaattaccaagtgatgttcctggagtaaggctctgtttgtttcctttcctgtaaaatgctgcatgcaaaagtataacacagtaagtaaagaagtcagttagcctgcacatactaagacctaaccaaaggagcttattgtttttctccaacttccatgataggtaattagatagtggagacctctgctggccaatatggtagccactaaccgcagctggctcttccaattaaaattacataaagccagaaatgtaactcctctgtctcacttgttatatctccaaggctggatagccacatgtgactggtggtggctggattagctagtgcatataaaacatcactgcagaaagttcagctgagcagcactgagttagatggcctctgaagaggatgtcccacggagagaatccagaactcaggatctttttttttttttttctttgcgacagagtcttgctctgtcacccaggctggagtgcagtggcgtgatctcggctcactgcaacttctgcctcccaggttcaagcaattctcctgcctcagcctccctagtagctgggactacaggcctgtgccaacatccccagctaatttttgtgtctttttagtagagatggggtttcactatgttggccaggctggtctcgaactcctgacctcgtgatccgcccccccttggcctcccaaagtgctgggattacaggcgtgagccaccgcgcccggccagctcaggatcttttgggatggtctgttcacctcgcagaagtggctggcatgagcaataggagcccagagtggaaccagggccttctggttgtcaagtggacttgctgtgtgacctcctgtgagtctctgccctctctgagcctctcactcctcacctgagatgagggagttggctgaggtgatgccgatgcccctcacagctttgacctcctatgattcaggggcctgtgtgtcacctggtggcacacagatggcagggagggtgtgagatggccacacatgggtatgaggcagagccacagccccccccaacacgcacatgggctagtcactgggacacacacagagctcactcacggccacagagtgggcgtgggtttccctttttccttgtttctgtttctcttagcctcggcgcctccctccctccctctctctctctctctctctctctctctctctctctctggctcttttagccttggtttgttacaatctcccttttcaagccagcctctgtccctcctactcaacctgctttatctctaggccttcctccttcctcttccacagtctggcttctcacattgtcactctaggtatgcacttcccattgatttcctcttgctcagtggcctctcatcctgccacccctagccttgctggggacgtgaaccctctccccgcgcctgggaagccttcttggcaccgggacccggagaatccccacggaagccagttccaaaagggatgaaaagggggcgtttcgggcactgggagaagcctgtattccagggcccctcccagagcaggaatctgggacccaggagtgccagcctc

SEQ ID NO: 22341 - DNA, 2300 bp, Homo sapien
cctcattggtcagggccccagccattgtccttgagagaacctctgtcctttatggagttccacccttcttccctgggattggcccctagagacagtggttcttctcttttggttagccattgccattgtcctccgggaaagtgattatactcttttgtctaatgaccagacttggagccctccccaaggcccaggactgggttgaagggttggggaggaaaacagaaataagatgtctcccttgttcagacagtacttctcttcccttccagggtgattctgggggccccctggtgtgtgggggagtccttcaaggtctggtgtcctgggggtctgtggggccctgtggacaagatggcatccctggagtctacacctatatttgcaagtatgtggactggatccggatgatcatgaggaacaactgacctgtttcctccacctccacccccaccccttaacttgggtacccctctggccctcagagcaccaatatctcctccatcacttcccctagctccactcttgttggcctgggaacttcttggaactttaactcctgccagcccttctaagacccacgagcggggtgagagaagtgtgcaatagtctggaataaatataaatgaaggaggggccatgtctgtccatttgaagtcctcatgctggttgagactggaagaaggactcagcagtttccctatctcataggagtagaaacagagctcaaataaggccaggcacagtggctcacacctgtaatcccatcactttgggaagctgaggcaggtggatcacctgaggtcaggaactcgggaccagcctggtcaacatagtgaaaccccaactctactaaaaatgcaaaaattagccaggcatggtggcgcatgcctgtaatcccagctactcaggaggctgagacaggagaatagcatgaacccgtgaggcagaggctgcagcgagccgagattgaaccattacactccagcctgggcgacagagcgagactccatctcaaaaacaaacaaacaaaaaacccagtgctcaaataggatgagggtcttccctgagtagttactcagaaatggagtagaaaaagttacttttaataatataggccgggtgcagtggcccacgcctgtaatcccagcactttgggaggccgaggtgggaggatggcttgagctcagatttcgagatcagcctggcaacacagtgaaatcttgtcactacaaaaacacaaaaaattagctgggtgtggtggtgcgtgcctgtagtcccagctacttgggaagctgaggtgggaggatcacccgagccggggaggtggaggctgcaaagagccgagatcatgccactgcactccagcctgggcaataaagtgagaccttgtctcaaaaacaaaaacccagcaatataaataagacacatgtttcttcatctggcataatagaaatagtgcccagagcttataagcttttcaagagtccacaaaagacccgaaaaagaaaaagaaaattgttagctccaaaataccagatgaaagctgcaaagtcaacatttatgaccatttaatccaatgtccataaaacgtagcattctttccactagccaactgcagtttactttcttgtaatgaagcatacattgtatctttaatgtgggacgtggctttgttctaataagacgaagggtggagtgcaggcttggaaagcaggagagctcagcctacgtctttaatcctcctgcccaccccttggattctgtctccactgggactcaagaggtgaggagagaccatctccccaaatgcactgaagggaaactggaggagggagggagtgaggggtgatcataccagcggaggcacatttgctgagcccccccgcagtctgctctttccaagtggaccctcctggaagcctgatcccaacctcccctgcaagcaggtctgtcacccccatctctcagatgaagaaactgagccttgcaggggtggagtcccttgtccccacgtcataagggtagtcatagtagtaggaagaggaagcacctaggtttgaggccagggctggctgctgtcagaacctaggccctcccctgccttgctccacacctggtcaggggagagaggggaggaaagccaagggaagggacctaactgaaaacaaacaagctgggagaagcaggaatctgcgctcgggttccgcagatgcagaggttgaggtggctgcgggactggaagtcatcgggcagaggtctcacagcagccagtaagtgaacagctggactcgggctgc

SEQ ID NO: 22342 - DNA, 2300 bp, Homo sapien
ctgtttctggggctctaagtctttcccataccatcctccagttggtgctgtcccagactgagagagatttgaggatggcggtctctcccctcattggtcagggccccagccattgtccttgagagaactctgtgcttttgatggagtcctgcccaccttccctgggattggtcatttttgatggcactctctcccctcattggtcagaaccccaggcattgtccttgagagaacctctatcctttatggagtcccaccctcctcccctgggattggtcattgataatagtgttctctctcctcattggtcagggccccagccattgtccttgagagaatgctcgactctttatgttgtcttgacagcctcccctgagattggtcattaatgactgtgctctctctcctcattggtcagggccccagccattgtccttgagagaacctctgtcctttatggagttccacccttcttccctgggattggcccctagagacagtggttcttctcttttggttagccattgccattgtcctccgggaaagtgattatactcttttgtctaatgaccagacttggagccctccccaaggcccaggactgggttgaagggttggggaggaaaacagaaataagatgtctcccttgttcagacagtacttctcttcccttccagggtgattctgggggccccctggtgtgtgggggagtccttcaaggtctggtgtcctgggggtctgtggggccctgtggacaagatggcatccctggagtctacacctatatttgcaagtatgtggactggatccggatgatcatgaggaacaactgacctgtttcctccacctccacccccaccccttaacttgggtacccctctggccctcagagcaccaatatctcctccatcacttcccctagctccactcttgttggcctgggaacttcttggaactttaactcctgccagcccttctaagacccacgagcggggtgagagaagtgtgcaatagtctggaataaatataaatgaaggaggggccatgtctgtccatttgaagtcctcatgctggttgagactggaagaaggactcagcagtttccctatctcataggagtagaaacagagctcaaataaggccaggcacagtggctcacacctgtaatcccatcactttgggaagctgaggcaggtggatcacctgaggtcaggaactcgggaccagcctggtcaacatagtgaaaccccaactctactaaaaatgcaaaaattagccaggcatggtggcgcatgcctgtaatcccagctactcaggaggctgagacaggagaatagcatgaacccgtgaggcagaggctgcagcgagccgagattgaaccattacactccagcctgggcgacagagcgagactccatctcaaaaacaaacaaacaaaaaacccagtgctcaaataggatgagggtcttccctgagtagttactcagaaatggagtagaaaaagttacttttaataatataggccgggtgcagtggcccacgcctgtaatcccagcactttgggaggccgaggtgggaggatggcttgagctcagatttcgagatcagcctggcaacacagtgaaatcttgtcactacaaaaacacaaaaaattagctgggtgtggtggtgcgtgcctgtagtcccagctacttgggaagctgaggtgggaggatcacccgagccggggaggtggaggctgcaaagagccgagatcatgccactgcactccagcctgggcaataaagtgagaccttgtctcaaaaacaaaaacccagcaatataaataagacacatgtttcttcatctggcataatagaaatagtgcccagagcttataagcttttcaagagtccacaaaagacccgaaaaagaaaaagaaaattgttagctccaaaataccagatgaaagctgcaaagtcaacatttatgaccatttaatccaatgtccataaaacgtagcattctttccactagccaactgcagtttactttcttgtaatgaagcatacattgtatctttaatgtgggacgtggctttgttctaataagacgaagggtggagtgcaggcttggaaagcaggagagctcagcctacgtctttaatcctcctgcccaccccttggattctgtctccactgggactcaagaggtgaggagagaccatctccccaaatgcactgaagggaaactggaggagggagggagtgaggggtgatcataccagcggaggcacatttgctgagcccccccgcagtctg

SEQ ID NO: 22343 - DNA, 2300 bp, Homo sapien
ggggtcaagtgatcctcccacctcagcctcccacataactaggactacaggcctgtgtcaccataatgcctggttaatttttttagtttttgtttgtagaaacagggtctcactatgttacccaggctggcctctaactcctggcctcaatccatcctcccatctcaacctcccaaagtgctaggattatagccacgagccaccatgcccggccccatacttatatttacttgtagtgagaacacttaaaccctactcggtcagtaattttcaagtacacaatacattgttactaactatatacatggtatttttaatttgcatgaatgctccttaaaatcagcgagcccgccttattttttgtattcaattttattggatataaattccacatcagtaaacctgattctcttaaaaatctacacagaaaaaaaaaaagagagagaggttgagttgggtagttgttggtatttttgtttttgtttctttgcttattcagttgaggtttattgtaaaacttgacaccagaaaaaggaagaagtggcgtttttgtgctgtgagcgtgtgacgtgtgtcctttccagagaaaggacagtcatggtgcttttttatcctctctgcccaaagaaggaaagctcttaacagccagcaggaggctttgtagggaccagcgttatcaacgccagtcgcgctgaccaatgatgagttaaagcagttaggtcgtttctaagagcaaatcaaaagctaaggttctgtgattctgaaaatgagacacggacagagactggagacccagagagaaagtgaaggactaaaagacagtcatagggtgggagtttgctctcctctgttttgttctgggtttttttgtttgtttgtgcgctctgtctgaccgcttttcttttttttctttttctttcttttttttttttttttttttgagatggagtcttgctctgccgcccaggctggagtgcggtggcacaatctcggctcactgcaagctccgcctcccacgttcaagggattctcctgcctcagcctcccgagcagctgggattacaggcatgcaccaccacactcagctaatttttgtatttttagtagagatggggtttcaccatattgaccaggctggtcttgaactcctggcgtcaagtgacttgcccgcctcggcctcccaaagtgttgggattacaggcgtgagccaccgcgcctggccctgactgcttttctccttggtttgtttctcaatcccccttcctctgagccgaattccctttttgttctcattttctctctctgtcccctctctctctccttctttctctccttccattcctcctagatgaagcaaaaactcagataaaccagcacagaggccaggtatggtggctcacacctgtaatcccggcactttgggaagccaaggcaggcaggttgcttgaggccaggagttcaagaccagcctggcccacatggtgaaaccccgtctctactaaaaatacaaaaattagccggacatggtggcacgtgcctgtaatcccaggtactcaagaggtggaggttgcagtgagcggagatcacagccctgcactccagcctgggtgacagagcgagactccatctcaaaacgaaaaacaaaaaacagcacaaagttcccttgtcctgtgactcattctctctctctctttctaccatttctccttccctgtgtcttttttttttctctctgtgggttttatttaagcaatagaagttcttagcaaagaaaaactttatggaattagattgatccacttcatatgtacatatatgaactcagttcagaaactctcttctacccctgcctgatcacctatttggaagtctgttccttcaactcttcttctctttctgggactctttctagcttgggcttcctgcccctcccgtccactctcctgctttcacagcctctccttccccctgcccctcccctgcactgcatggggatgggccccaggtgtccaaggtctccccaccctcctttgtcactggagtcaggattagaacccagctccctagtcaccttgagtcatcagtcctggggctgctgacgggcttgcagaggagagagggagtggggctgggtcttcccaccctgggtcctttcctccttccccactccgtttagctgtaaagctcaattaagtgtgattagctgagaagagtttctgcagaattagagcacgccccacccctgtcttcgtggtccccttcccttaacccggaaactggatgggccaggacaaagagag

SEQ ID NO: 22344 - DNA, 2300 bp, Homo sapien
ttgcatctatttgtaaattcatttcagcattcctcgttgtctctgtgcatatggctctttgtaacatcttactggctctgccatttattaatgagtcaagatacaatctttgacacatgttcatttcatatatgtcagagagtcatggtaagaccatgttttaaaagttaccctttgacactagatttgatctccacatccaaatctgaactccatcaataaggactgtacaagtttccatgtgagccctcgccccatccatctctattctttatcctcattgtgacacctccactctctcactctttccaaacttcatctggtccacgtccctggctttcttccaaattctgaccccacctcagtccttaatccctaatcctgtcccctccaccccctaggattaactcagggctccacccagtcatagttcctggagacacctactcattctcaaaacaccaccccttcctccttcctctcccccacccccaatccacgtcttcaaagctttccggctcctgctttttcctctccacctaggtccccgtggactccctcaccccctctggccctgctcctaaaaggccatttctggaaaatgttgctttctcaggtcgcatctctgcccccatccaagtccgagggagctgattttctatccacccagctgatgatttccttcttgtgtccggtggttggcgggagcagggaggcaggatgatgggataattgtgggtgtccttgtgtctttcaaaagaaaaagggttgagatgagactgggaattggaacctggatgtgttgagagctaaacctgagatgaggttggagatgggactggggttgaggaacaggctggagtacttggtatggttagggatggatagggaggtgggaatctgatagaacacggccatctgggggctgactgcctattaagaattatgcatggggttggagaagaggttagaaaactgggtgcagaatgggttgaagttagggatgggcatggaactcagcggggtagggggaaggaaatgggctttccccttacccttttttgggtcctgaggcctgaaagttcacagtgggttcaactctgccttgggcggggtcagacctaggtcccagcacgtcctggaagctccgccccaagcagagggccaagcccaggtcgggggtgcctggagacatcccgctgagccactgggggtggagagggggaggccagggaccaggaaatgctgagtgagctgggggagggagttcaggggttaaaagccatggttcggggctgaagttctagacagctggcggctgacgctcctcgtgggcccctcactcaggtagggtctgcctggggcgggggcggggagcggaggagggcagggaggggagagaagaggggataggaaggatggggaaagcagaagggcagctgagtcagggagagggagagtgaagctagagtctcagatctagagagaaacctgcagagacggagagaggcgaagggcgcggacagataagaacttgggctaataccaagcgtgtggacagacccagaggggtagaatggaaggcagactctggaggaaaagggcgagagtgcaccgaccacccagctcgccagagggcaggggaggagggacggcttcctggggtgaggggctgcacgccggagccccaggaggttgcacactgttcctcccacctcgccactgcacccccaccaaggatggaattggaggcggggggcagattccagggtcagggctgtcaagagtgaatgaggcgaggagacattcaggagcagagaggtttcagacgcggaggttccgggcacgccctcaacacccccttcaccttctcctcaggccccgcccgccctgccctcccctcccgatcccggagccatgtggcccctggccctagtgatcgcctccctgaccttggccttgtcaggaggtaagaatgcgcgggggtggaggcgcggcggccattcgggacaatggtaggaggggtcaggccggagggggagggggcgtgggagccgcgagctccgccccccgcccactcggggccgggtccagtggggacagctcagagctcttcctgcttgtccctgggtgacctggtttcccggctgaggttggccctccgaccccagacccttcacctcccaaaataccctcgcagcagcccctcccgcgttcaaggcttcctgtcctctctggaaagctgaaagacatgggttcgcgtcctgacgctgccgctttgagccagtagcctagcagct

SEQ ID NO: 22345 - DNA, 2300 bp, Homo sapien
aatggacccaacattggacactgaggtgtcgccaatgcaaagttagatgggttatctgattttatgaggtctctgtaccctttcctgtctttgagccactttatgactctaaattgtaggtatctgagagcaatgcaaataattcttgtccataaatgtttacatgaattttgccaggtggaagtacaatggatttccctcctcctcccagtgtggaatagccagttttgcatctatttgtaaattcatttcagcattcctcgttgtctctgtgcatatggctctttgtaacatcttactggctctgccatttattaatgagtcaagatacaatctttgacacatgttcatttcatatatgtcagagagtcatggtaagaccatgttttaaaagttaccctttgacactagatttgatctccacatccaaatctgaactccatcaataaggactgtacaagtttccatgtgagccctcgccccatccatctctattctttatcctcattgtgacacctccactctctcactctttccaaacttcatctggtccacgtccctggctttcttccaaattctgaccccacctcagtccttaatccctaatcctgtcccctccaccccctaggattaactcagggctccacccagtcatagttcctggagacacctactcattctcaaaacaccaccccttcctccttcctctcccccacccccaatccacgtcttcaaagctttccggctcctgctttttcctctccacctaggtccccgtggactccctcaccccctctggccctgctcctaaaaggccatttctggaaaatgttgctttctcaggtcgcatctctgcccccatccaagtccgagggagctgattttctatccacccagctgatgatttccttcttgtgtccggtggttggcgggagcagggaggcaggatgatgggataattgtgggtgtccttgtgtctttcaaaagaaaaagggttgagatgagactgggaattggaacctggatgtgttgagagctaaacctgagatgaggttggagatgggactggggttgaggaacaggctggagtacttggtatggttagggatggatagggaggtgggaatctgatagaacacggccatctgggggctgactgcctattaagaattatgcatggggttggagaagaggttagaaaactgggtgcagaatgggttgaagttagggatgggcatggaactcagcggggtagggggaaggaaatgggctttccccttacccttttttgggtcctgaggcctgaaagttcacagtgggttcaactctgccttgggcggggtcagacctaggtcccagcacgtcctggaagctccgccccaagcagagggccaagcccaggtcgggggtgcctggagacatcccgctgagccactgggggtggagagggggaggccagggaccaggaaatgctgagtgagctgggggagggagttcaggggttaaaagccatggttcggggctgaagttctagacagctggcggctgacgctcctcgtgggcccctcactcaggtagggtctgcctggggcgggggcggggagcggaggagggcagggaggggagagaagaggggataggaaggatggggaaagcagaagggcagctgagtcagggagagggagagtgaagctagagtctcagatctagagagaaacctgcagagacggagagaggcgaagggcgcggacagataagaacttgggctaataccaagcgtgtggacagacccagaggggtagaatggaaggcagactctggaggaaaagggcgagagtgcaccgaccacccagctcgccagagggcaggggaggagggacggcttcctggggtgaggggctgcacgccggagccccaggaggttgcacactgttcctcccacctcgccactgcacccccaccaaggatggaattggaggcggggggcagattccagggtcagggctgtcaagagtgaatgaggcgaggagacattcaggagcagagaggtttcagacgcggaggttccgggcacgccctcaacacccccttcaccttctcctcaggccccgcccgccctgccctcccctcccgatcccggagccatgtggcccctggccctagtgatcgcctccctgaccttggccttgtcaggaggtaagaatgcgcgggggtggaggcgcggcggccattcgggacaatggtaggaggggtcaggccggagggggagggggcgtgggagccgcgagctccgccccccg

SEQ ID NO: 22346 - DNA, 2300 bp, Homo sapien
ggcccatagttaaacagaaacagttcaggaatcacagaaaggcacctggggagagatgggtgtgtggctccagatgcaggtgcccagacagtgcgtccccaggtgtacagacagacccaggccaagctccagctcaaagagccagcctaggggggtgccgaggtggagggaggctgagtcaggctgaggccggggaacagttggggtagccaagggaggcaagcagcctcctgagtcaccacgtggtccaggtacggggctgcccaggcccagagacggacacaagcactggggaatttaaggggctaggggaggggctgaggagggtaggccctcccccaaatgaggatggaacccccccaactccagaacccccctgcaggctggccagaatccttccccatctcattcactctgtctctcctgctctctgccgtctcctattttgaatttccaaccccgtctgttaagactgtccttctgtctctgaatctctgtccccttctctttctgggtctctctccctctccctctgggtctctgtccccctctctgggtctctgtcactctctctttgcatctccagctctcactttgtctctgcacctagcagatcccaagctggggaatgccagttctggcaccaaccttcctgctccctgctggggcctctgctcccccatctctcaggagtcgaaagtgagaaagcaaggtgggcagctctgctccaggtccaggtatctcccgcccacctcctgcccgtcctctatcccacccctcctctccatctctccctggcgctgccatctctcatctaggcctccgtctcctctgtcattgtccccatcccctgtaggtgcccatccttcccgtctcccctctgccatcggcctgcctgtcccatcctctttctcccaccatgtcccgttctcttccacgtctcatgcccgcactgccttcatcatcatcgctgttgttctgtgtgtgtttgtggtgagtgccgcatggtgggggcgtctcggcctctctcctctctctccactgttttctctttctgtgtgtctgtttccattctatctccaccttcttccctccgtcttttgcttttctatctccacttctccacacccctctctccctgcgtctctgtgtctccctcttcctctgtcttgtttttttcccaccgtctgcctcttctgttccctgtcacatccaacttccaccggtttctccagctctctcctcagttccttctctcatgagcacacctgcctctgtgctcgtattcctggactcctctctctccactgtcatatcttctcattcattttcccagtctctctctgtctcttgctctccccctctctgtcactctgtctctgtctctctctttctctctctctctctgtgtctctctgtctggctctctctctgtctctctctccatctctctctctctctcccccccgtcaccctgtctctgtctctctctgtctgtgtgtctctctgtctttctctctctccatctctctctgtctctctctctctctctctctctctccctctctccctcctcccgtgactccctctctcagtccatctcttcctccctctctcagccccttcgtgccctttcctctgacactccccaccctggtttcctgactccaccactagatccaccacctccagcaactgggaaccctcccctgcccaccctgccctggggtcccctcccaggattccttctagattatagcatcttccctgggcgggttctcatgaacaattgtggctgcttttttggccagacaggggagggaggggatgggatcagggagtcctggaatgggaactaggcaataaaaaaaaaaaaatgtcagaagcagggcggcgggaggtgggggcagggccagctgtccttaccagggataaaaggctttgccagtgtgactaggaagagagacacctcccctccttccttcatcaagacatcaaggagggacctgtgccctgctccacatcctcccacctgccgcccgcagagcctgcaggccccgcccccctcgtctctggtccctacctctctgctgtgtcttcatgtccctgagggtcttgggctctgggtaagtgccccttgctgtctctgcctctcagcccccggttctgttgaaggttccttctctctcactttttctctgcatttgacaggacctggccctcagcccctaaaatgttcctcctgctgacagcacttcaagtcctggctataggtaagagaacggttgggtatgacacaa

SEQ ID NO: 22347 - DNA, 2300 bp, Homo sapien
cccagcaacctggccacggcacggcaggtgctgaggtccgggctggggacggcaagtccttgggagccaccggcggtgaactgggcctcatcagctgcatctccagctgtctccctacctttgagctgaaggccttggggagccttccagtcattctgtgccctggctcaggctctgcataaacacaagaaccccctctttatttatttgtttgtttatttatttattttgcaacagagtctcgctctgtcacccaggctggagtgcagtggcacaatctcagctcactgcaacctctgcctcccgggttcaagcgattctcctgcctcagcctcctgagtagctggggctacaggcacccaccaccatgcccagctcagtttttttgtatttttagtagagattgggtttcaccatgttttccaggctggtcttgaactcctaacctcaggtgatccaccttggcctcccaaagtgctgggattacaggcgtgagccacagcacctgcccccctgccaccctttaaagaaaggattctcttggatctcagggatagagtggcatgaaggagccactcccaggctcctgggggttgaccaaggccttctgcttaagtagggtgttctttttaggaacagggagaccttgtgtttactaggaaattctgttttatttttaactttttcctttgagataattacagactcacaggaggctacacacacagcatagggaatctccctcacctacttctccccgtggcgacaccttgtgtaactgtcgttcagaatggaaaccaggaaatcaacacagaaaccaaactattaatgagactacagatcacactgcgcgttcatttttcacacgcatttctttgcacgtgtgtgtgtgcacgtgggcttctgtgtctctttatctcatgtgtagaatcgtgtaatcaccgccacatccagtgcaaagctgattcgtcaccacagagcagctccctcctgccaccccatccctgggtcccaagagaaccctttcttaaaagagggagttcttgacgggtgtggtggctcatgcctgtaatccttgcactttgggaggccaaggagggtggatcatttgaggtcaggagtttgagaccagactggccaacatggtgaaaccctgtctttactaaaaatacaaaaaaatgagcggggcatggtggtgggtgcctatagccccagctactcaggaggctgaggcaggagaatcgcttgaacccaggaggcagaggttgcagtgagccgagattgagccactgcactccagccggggctaaagagtgagactctgtctcaaaaaaaaaaaaaagaaaaagaaaaaaagaaaaaaaaataaaataaataaataaataaaataaatttaaaaatttaaaaataaagagggggttcttgtgttgatgccgagcctgaaccaaggcagaggaggccgggaaggcttcccaaggccttcagctcaaagcagggaggcccatagttaaacagaaacagttcaggaatcacagaaaggcacctggggagagatgggtgtgtggctccagatgcaggtgcccagacagtgcgtccccaggtgtacagacagacccaggccaagctccagctcaaagagccagcctaggggggtgccgaggtggagggaggctgagtcaggctgaggccggggaacagttggggtagccaagggaggcaagcagcctcctgagtcaccacgtggtccaggtacggggctgcccaggcccagagacggacacaagcactggggaatttaaggggctaggggaggggctgaggagggtaggccctcccccaaatgaggatggaacccccccaactccagaacccccctgcaggctggccagaatccttccccatctcattcactctgtctctcctgctctctgccgtctcctattttgaatttccaaccccgtctgttaagactgtccttctgtctctgaatctctgtccccttctctttctgggtctctctccctctccctctgggtctctgtccccctctctgggtctctgtcactctctctttgcatctccagctctcactttgtctctgcacctagcagatcccaagctggggaatgccagttctggcaccaaccttcctgctccctgctggggcctctgctcccccatctctcaggagtcgaaagtgagaaagcaaggtgggcagctctgctccaggtccaggtatctcccgcccacctcctgcccgtcctctatcccacccctcctctccatctctccctggcgct

SEQ ID NO: 22348 - DNA, 2300 bp, Homo sapien
caaaaaaaaaaaaaaaaattagccaggcatggtggtacacgcctgtagtcccagttactcgggtggctaaggcaggagaaacgcttgaccctgggaggcagaggttacagtgagccgagattgtgccactgcattccacctgggtaacagagccagactccatctcaaaaaattaaattaaattaaattaaaaatctttaaaaaatggaaagagatgggtgctaggcaggacctgaggacatgaagaggcgtccccaaaagagaattgagcaggaaatccaggagcacagaaggagtgagtcaaaagtcgggggaagaaagattccaagagttgctgctcacctgtgacagatgttcccgacggtcactgcagatgagtcctaagggctgcttcttgggctcagtggcaggaagagtactcagggcagaggggagagccagtgcaaacatctggagcaggagtattcctcaggtgtcagagtaaacgacatcaaggctgaaggagaggaggttggagaaacaaggagccacacatgtagggcctcatcggccattagcagttattatactaaagtgagatgggatccaggggaggatgctgagaagattcagggcatgatcccactggctgttatgtgaaggagtgtttgtagaggaggcaaggcgggagcaggagacctgtggggagccccatgcagccgtccaggagagagacagaccagactagggtgctgccgtggagacggtcctaagtgtttggctgttttgaaactacattcaaacaggatttgctaaatttcatttaggtacctggagtttgaaaaggtccggacttggcattgcagtttggtgccacccactgggagcatgacaagtgcagtgagagaaagagcagtccagggtcctggaccccaaagctcctggcctgagcagctagaaggatggagctgccctgtactccaggagaagcacgctgggttagaagaatcaggaatttgggttttgagatgcctattagacatctgagtggtactggtctctgccctcatagaagttagagatggtaaatatatagtcacataaaataattccacacattgtggtaaatcctagaagcagcgtgacctgctctgaatggcaaggaggtgactacagtagtccaggctggaggtgatggtggcttggggaggagaactgagcctggggagtttttatgggttcaccaggcaggcaggaccaggatttgactggagggttggagtctaggctgggtggggaagaatgaagtaggaaagataacagatgaaggtcaaagatgggccgatccatgtcttggtgagagcacagaagcttgtggggcattctgataccagagcagggttgagttcaatcttggaggcccacccattttctcaccctcaaaatgtgtgcaaccccagctggtctcctgagaggtgtgatccaggctgcctgtgttccctggagaaggtgatcaccctgcctttcataggatgcaatcagaacccattcctggagaccgtatcccaccctacaaagtgcaatcagttggcctttcctgttttccacctcccgctgcacagagcttcagtcccctggcctccctctgcccttagagtcaaaaacccctcacctcccaagggcttttaacagccctggtggcccaggccaatgatacctaccttgtcctgatcaggactgtaacaagggtggcctccctggaggttgtgacaaatgggccttaatatacacccccatccctctggagaggacacaacctaatcctgggtataacctgcttgtcgctccctctctttacccatgaagccagcttcttaagctacttctcttcttcttgcataatgggtgcaatccaagaagccttccctaaggcagtggcttccttacaccggacctatttataaccatcctatccccagcgctagaagaagctactccactcgcgcacacgtctccctggtctattccgggcagaggtgcaatccagacaatctccccgatggcagggaccctgcaatccggaatccatatgtaacccacctcctctctctccctgtctaggagaagccgacccctcccgcaatgcccgccccgccgtgcgcctcctgccatgctgcacgcgccgccctccgccgtccgctctcgggccaagcgctgtgcggtgcctgcttctgcgccgccttcgaggccgaggtgctgcacacggtgctcgccggccgcctgctgccgcccggcgcggtggtggccgtgggcgcctcggg

SEQ ID NO: 22349 - DNA, 2300 bp, Homo sapien
gagctggtcctgagagggaagaacactgaattcctcccagctctcagcacccgggggcctggagctgcctcagataggggctgggacggaggagcattgacctgttgggctcaccacccactgcgatttcagcacatttccctgagcctctgtgcagagtgagttgcaggacagctgctgaggcaggcagcctagtcgggtgtttgggctgtcagaggggtggaggcctgggaacagaatctcacacgcttctaccctttcccaggaagcccctctggctacagatgtgtgagtgaaaagcaggagggcttctggcccctggttctcacctgatcagggggccatcctgggcactggcttccccccaacccccatggcctcacctggagctactactccaggtgagcaggcctgctcttttctagggaagccgaaggattgttccccgagttccaggtggggctgagctgtcctgtcccgcctgagttagaattgaagtggccgatgctaatctgaggcccgtgttggctctgcaggtgtggagggccccaggggagcagtgctgagaggcctgactgagcccctcctgctcaagacagaactcagatgtggacacccagccctgcagaacagatgcaggacaacactgtcagccatggctcagcccttctgaccattgcagttgagatgctgcaacttcccagggagcgactgggcaaacatgggggcctgaggtattcacggcaacgtgcacagatgataaaactacctagaaaagcatggagaccattagcgttaaagtgaggctggggctgcttcaggaggaagtggggtgtggctgacaggaagtggggtaacaaagaggaggtgttgcggcatccccagtgttctgtttctctaagcatgttcatatgtgtaaaccgctgagattttttcttggggggaagacatttttatctatatggcttatatttctcccaaaaatatttctagaaaactgacatcggtctaaggaggctccaccacacaggatactcccagttcctcccagcccagccacacagttacaaaaaatcttctgctgaattcaggtgcatgtttcttctcccatgaaatcctgcccatcgcggagggtgcatgccccggggctggtgtcctcactccacatctcctgttcaccgggacccctgggagcagagcttgcagaagcaaagccccagggccagctgatccctcatgttctggagtaaccagggaagtgtggctgagcgagacatcggtggtgaagaaacccttcgtggtgcagtgaggaaaggagaaatatcttcccttttgaaatctgccccttttcttccgaatttcctcccttccaagccccacagtacaacagtcacagcctcagtttcccagacctcctgcgagccaggctcccctctgtgtccttggcgtgtatcaacacatagaatcctcacctccacagccccatgtccctctgctcagtcctcctgagattgaacccctgacctacgggagagtgaccccatcctgcctgtgccccccaactgaagctcctgccgtggacagctcagacgtcaggagcctccatgtctcccctccgcacagtgaccccttggggacagtgtccagctctgctgtgttgacctcgttgtgcagaaagggggtgcccacctcgtgcttgcttgggggggatgagaggctgcctgctcaccccacctgcacccccatctctcatggccccaagtcccacctctgagctacgcagatatccacagcctctgactcaggggtctggccagatgggactcattttcaccctgcagaaaatgtcacctaaggggaagggcattgagagggaggcaggaggtggggtgggccctgcatggggtgggaatctgggtgagtctgtctcccgctctggcctcagggacccaggagtgaacatggggtggtggacggtggatctcccagggctgacccgggcctgacagtgtctgggtgtaaagttcctcctctgaggaggtcactgttccgacctcgcccctgtcttcctgtagggcctcctctaagtcttgagcccgcagttcctgagagaagaaccctgaggaacagacgttccctcgcggccctggcacctctaaccccagacatgctgctgctgctgctgcccctgctctgggggagggagagggcggaaggacagacaagtaaactgctgacgatgcagagttccgtgacggtgcaggaaggcctgtgtgtccatgtgccctgctccttctcct

SEQ ID NO: 22350 - DNA, 2300 bp, Homo sapien
gcagaagaatcgcttcaacccaaaaggttgaggttgcagtgagccaagattgtgccactgcactcaagcttgggtgacttcgtccccacctcaccaccaccccttccccccgaaaaaaggcagacactggatagagatttggcagccttgggaagcgaagaaaaacaaaaaaacaaacaaacaaacataaaaagacccaaagtaatgctgatctcacctcatagagatcagttcgctctccctctccaagagtgtgatactgtgcttaataaactgctgcttcttgctttgctgtctgtgtgtgtctcatccaattctttgtttaagacaccaagagcctggaactgcatggcaccatccggtaacacttctgcccactgagatactgcaaatatccttatggggagagagtggctgggcaaggaggaggcgcccaggaggcagattggtctgcaggatgagatactagctgcaaatgcagggattggaggtgagggcggggagtggcttcggacgcccaaacccagcatcttcctctctcaatcgttacagccaaatgatctctaggttatggacaattaggggacagtgtgggctgagcagatcaatgcagttgtatggaagaaaacagactgggattttctatgtatacaacatcttcaggaaaacctacgtgaagttagaattttcaaggcagcatgtgccgatgataaaactacatagaacagcaggaagactattatcattaaagtgaggctaggggctccttcaggagggagcgggggcatggccaataggaaaggggaatgtaagggtgaatgaattaataaaatctctttcttcatttcaagggacagacttgacagttcttttgtgttctagttcttcaagggtgcttattttgtgtgaatcactgagttggtttttaggggacacttttatgtacatgtcttgtgtttctccccgctcaaaaaaaactgtttcaagaaaagctggcctggatctaagggggctgcagcttgcaggatttttcccacttcctcccagcccagtcacacagtttaaaataatcttctgttgaagtcaggtgcgtgtttcttctctcagaaaatcgcgcccatcactgagggtggacgccccggggctggtgtctttgctccacgtctcctgttcacctgaacccctaggagcagttcctgcaggagcaaagccccagggccagcagacccctcacactctgcactaaccaggcctcatgagatagcagtggtgaagggaaatgtccttgtgctcagagagctgtgaggatgggaatagtgtctgctcttttcatattgatcctttcccttatgactttcctgtctaccaagccccacaatacaacaatcacagcctcagcttccccggcctcctgcaggctgggctcccctccgtgtccttggcgtgtatcaacaggcgcaatcctcaccttcacagccccatgtccgtctgctcggtcctcctgagactgaacccccgacctaggggagagtgaccccaccctgcctgtgccccccactgaagctcctgtcatggggagctcaaacgtcaggagactcagtgtctccccaccacacagtgactccttggggacagtgtccggctctgctgtgttgacctcattgtgcagaaagggggtgcccacctcgtggctgctgagggagggatgagaggctgcctgttcaccccacctgcacccctgtctctcatggccccgagtcccacttctgagctacgcagacatccacagcctgtgactcaggggtctgggcagatgggagttattttcaccctgcagaaaatatcacctaaagggaaaggcattgagagggaggcaggaggtggggtgggccctgcatggggtgggaatctgggtgagtctgtctcccgctctggcctcagggacccaggagtgaatgtcgggtggtggacggtggatctcccagggctgacccagccctgacagtgtctgtgtgtgaagttcttcttctaaggaggtcactgttttgacctcaccaccgacttcctgtagggcctcttctaagtcttgagcccgcagttcctgagagaagaaccctgaggaacagacgttccctcgcggccctggcacctccaaccccagatatgctgctgctgctgctgctgcccctgctctgggggagggagagggtggaaggacagaagagtaaccggaaggattactcgctgacgatgcagagttccgtgaccgtgcaagagggcatgtgtgtccatgtgcgctg

SEQ ID NO: 22351 - DNA, 2300 bp, Homo sapien
gcgggtatattgatgatttcccagcatacgcgatgggaatggtgagctgcaaagaaacatggaaaaccattagagtggaagaagtgttgtgtatcttgactgtggcagtcacagcggggctgcatacacttatcaaaactcactgaaatgaacatttcaggtgtgtgcattttatttcatgtaaattatgcctaataaagttcactaaatacatccagtgaaattcacatcttcatatttaacattctgacccataaatacaatataatttgctttactattaagaccaaattattgcattcctattatgtgctacattcttatttttagaagaacttacaaggtattatgttacttattaaagactcaattccttatatattaagaatgcaaatggctgtctacattagcaaggacaaatgaacatttacctagataatactgttacaaagattttactaatatatggtaccaaatattattatgccctggattttgaggatttgccagatgagatggaaaatcatgtcactgaacctaaaattatttttatctataaacagaatgggccaggacatttagttgtgtgcttgtcaggaaggtgatagctgggtacagtcaaatctgtgccacaggatctaggaaggcagatttccaaatctcacataagagatcagcacgatcacattgtctgagattttttttttttttttttttttttttttttttgagacagaatctagctctgttgcccaggctggagtgcgttggtgtgatctcggctcactgcaagctctgcctcccgggttcatgccattctcctgcctcagcttcctgagtagctgggactacaggtgcccgccaccacacccggctaatttttttgtattttcagtagagacagggtttcactgtgttagccaggatggtctcgatctcctgacctcgtgatccacccgcctcagcctcccaaagtgctggaattacaggcttgagccacagcgcctggcctgtctgagacttctgacaaacaagagggagcaagagggttaggaaacctgtgaaaaactaaattccaacaagacaattaatgcccaaacaagcaactcacgaaagacaaatagtcataaacataaaaactaagcctgaaattttaattttgtctgtatattcccctcatattatcggaaaatattgtctttgggccacatgtaactgtgagaagcacattttttcatgaaaggaaatgctaatctctatgatgaggaccttaaaaaaatcgctcctgcccacactacactgagaggcagcattaaccgaaaaggagtttcttctacactggttcatagaacatgtgtccttctttatgttttacgtgaagatgctgcatggttcttattttggaggtgtcattgaaactgcaaatctgtatactatttatcagggaaaaattctatagtcacatttctttaaaaatacccaatatgctaccatgacacatggcaaactcatcagtgtccgcagctctaaagccagacagtgtgtgtgtgctaaggacatgaggctatggatagggaccatctcaagggtaggggccaggtcagtgctatctcttcttctctccatccccacctacatacagatgctcactatatatttggtgaatgaatgaatggctgtcaccttcactgcacctaggaccactcttcattttttcagtcccagacactcccatagaccctacagaatcctacatcctgcaggatcgactatctcatggctcaagatgaggctgtgactgtctggggccagaagtgaccagttcccagacgtaaacaatggttcacagaaaaacacttcagagtgagagggttttagacacaggtgtcccatgcttcagatgtccccagaggtcctggtccaggctctggcattggacggaagacccgaggtgggaggcaggaagtggtctctgctccttctctgctcccctctgggcaggtctctgaggtcacttggctttgcagtctccctccactctgtgcagaggcggatgacctctgaccacgtgtgggtttgaggttcctcttctgtgaactgccaagatctcatgctcctccccacagccctcttctctgctcacacaggaagcccaggaagcctctgcctcagagatgctgccgctgctgctgccgctgcccctgctgtgggcaggtgagtggccctggggagaggggccgtggggatgagcccatctgaccctcatgtctccacagggccctcgctcaggatgcaagatt

SEQ ID NO: 22352 - DNA, 2300 bp, Homo sapien
ccggggaaactgaggctgttgttcagtgaggcttggaaaggagggtcaggacagaaggcgtcaatttgaaaagggcagacacttctcccttcgttgtggttacctggacatcaggaggggtttcttcaccgctggcatctcattcagccacacttcccctggttagtccacagcaggcggcgtctgctggacccagggctttgctcctgcaagtgctgctcccaggagtccaggtgaacaggagccatggagcgaggaccccaggcctggggcgtacaccctcagtgctgggcaggattattttggagaagaaacgtgcacctgaattaaacagaagactatttttaactgtgtggctgcaggctgagagggagtggtgggggaccctgggaggtggagcctccttagacccatgtaagttttcttgaaacatttttttgggggaaacagaagacatatagataaaagtgaccccaagagatcatctcaggcagggtgcggtgtctcacacctgtaatcccagcactttgggaggccgaggcgggcggatcacctgaagtcaggagttcgagaccagcctggccaacatggggaaaccccgtctctactaaaaataccaaaattagccggacatggtggcgcatgcctgtgatcccagctacgcgggaggctgaggcaggagaatcgcttgaacagacagaggctacagagctgagatcgcgccactgtgctccagcctgggcgacagagcaaggcactgtctcaaaaaaaaaaaaaaaaaaaaaaaaaaaaaaaaaaaaaaaggagcgattagtgattaggacagagacatgctcagaagaaaggccacgtgggacacagggagaagatgccacccgcaagccaccgagaggcctcagaaggaagcaacgctgaccacagcttggtctcagacttccagcctccagaagggtgggaaaacaaaggcgttgttgaagccactcggtctgtgttcctttctcaaggcggccctggcaagagagtccatggagtggtcgagaggattcgatgtgttcctgtgagcacagcccggtgtggaccgcggtggatgcagagccccacaggggtctgggacagcctgtaacatgggatgctcagaggatggaaggagaaaagggaagggaagggctcctcaccagaggaaacctgtgctgctgccgccctgtctctgacatctgcagggctgccccctccacccacactctccctccctccccaggaccgggcagggctctcagccgcagcccctcgctgcccctgcaccctgggcagttgcctcccatctatggggcggagccgcctgggcgtctgggctgggcgaggcggagcctggaggggcaccggccacgggcaggggagacagaggcgggcacagcctggcggggtccgggctgagccagcggggaggacggggctgtgggagcccagcggagagggtgaggatccgcgggcaggtgggacaggtgagctgggaggtgagagatgggcagggctgcctgaaaggcaagttcatcccagagcagcgagcagggcgcagccaaaggccgtgggggaaacagcggcgagaaaaaaacggccaaaattctgcccgcagtgcgcctgtatcctagcggggcggccacaaaaatattgttgagtagcaagaagtgtttcgaaagtgtgcagtgggtaaagtgtgagaaaataaagcagatttaatcaagaggaacggagtcctcagggctggctggagaggagcgtggtttcaagaacgcggtcaggaaaggactcgctgagaagaaatttggcgcccaaacgttcctggcaccgcccgcggctgctgattggctcaagcccgtaggattcctctgggcctgaaggtgcggggagggacttgcactttcagctcctgattggctgtgcgtcagctcccagaggcaagtgtccgtgggggaaagctccatctgcctcgcagatctgctgcgtaataggcacctgaagctgctgattggctactaaagaggcctgtgcagccactgattggctgtggggtagacgcacaacgtgcgaggcgcgcgggctgggcccagggcgacagcggagccttcacaccgctttctccgcgcgctgatggaggattcctggcctcacagcagtgcctggcctgtgggcgtccccggcagtcctcggctgcgggacctgtatcgggactgcgcaaagtgggcttccaggagagcagggcgtccctcagtcagctgaccccttggagcgtggggcagccc

SEQ ID NO: 22353 - DNA, 2300 bp, Homo sapien
agttcaagatcagcctgggggaacatagcaagaccccatctctcctaaacataaaaacaaaaagttactccggcctggtagtatgagcctgtgatcccagctactagagaggatgacgtgggagagtcacttgagtctgggaggtcaaggctgcagtgaactgtggtcaggccggtgcactccagcctgggcaacaaagcaagaccctgtcttaaaaaaaaaagcactaaatgtattgaattttctattacgtgccacatgctaaatatttaaataacttacaacagatattatttactggagacttaatttgttgtatatcaaatgaggatgcagctacctctctattagtaaggatgaatgaagagttatctagatactattgtgtgtagagatttgacaaaggtatggtggcaagtactaatatgtcccagggatcaacggtttgctggatgcatactacacagagtgatatggaaaaccatgtagctggacctaaagtttaattttctctgtacactccactcatgttgtctggaaatattatgtctttgggccatatttaactgtgagaagcagatttttacatgaaagaaaatgttgatccatatgatgagcctctaaaaaaacttgcttctgcccacactgaaccaaatggcagcatgaatggaaaagaagttttttctgcactggttcatagaacatgtgttctcccttttgtttcacaggaagatgctgcatggttcttgttttggagatgtcattgacactgtgcaaatcagtgtactaggtgccaggggaaaattctatagtcatatttcttttaaaatttccaatatgctaccatgatacatggcaaattcccaacttttcacagctctaaagccagacagcatgtgtgtgtgtggtgaggacatgaggctatggatggggagtatcttaagggcaggaatcaggtcagtggcatctcttctcaagccccacctatacacaaaggctcactgtaagaattaaagaaagaggaaagaaacacgaatggtggctcaccagtcaagacagattttagagaaaacaaacctgagaggagtttctggccgagttaagtcagaggcacactctcttacagactaagagtttttaaggatttagggtgggagagtttatcagagacttggactgcttctgagtctctttgttgtgcttatctgggagagagaggtgtgtgtctgtacccatacatctttctgcagctacaggcatacccactgagtctgcttttagcttccctatcttagtgcacctgaagggaaaggaatttgcttattaaggcccactgttttactagggccattgtatgagggtgaagtttggcagtaactcaagagactctccccctacctccctctgtgcccgagctgtcttatctgtgtttcactgtctgctctttctggttgcttgtagttagcagagaagtgatttccttgaaatgcatgaggctagaaaggaaattggaacttaaagaggcagtgtttctccgagatgacggtgctcctgctctgtcactcactatatctttagtgaatgaatgaataaatgaatggctgccaccttcactttacctaggactcttctttgtttctctgccccagacactcacacggaccctatagaatcctatatcctgctggactaaacaccccatggatctaggtgaggctgcgactcgggccaggccagcagtgatcagccctggtgtaaacagttgtgcacagaaaagcacctcagagtggaaggactttagacatggggttcgcatgtctcagatggccctgaaggtactgatccaggctctggtgctcctggaaggcaagactcagattctgctccatctcctcccatctctgggcgggtctctggcatctctggcccatgagggtcaatctgtgtggaggggacaagctctgagcatgtgtgggtctgaggttcctcttccatgcagggctgaggtctcctgctcctccccagcttcctgtccggccctgtagtccttcccctccactcccttcctcttttctgctcacacaggaagccctggaagctgcttcctcagacatgccgctgctgctactgctgcccctgctgtgggcaggtgagtggctgtggggagaggggttgtcgggctgggccgagctgaccctcgtttccccacaggggccctggctatggatccaaatttctggctgcaagtgcaggagtcagtgacggtacaggagggtttgtgcgtcctcgtgccctgcact

SEQ ID NO: 22354 - DNA, 2300 bp, Homo sapien
attcccaacttttcacagctctaaagccagacagcatgtgtgtgtgtggtgaggacatgaggctatggatggggagtatcttaagggcaggaatcaggtcagtggcatctcttctcaagccccacctatacacaaaggctcactgtaagaattaaagaaagaggaaagaaacacgaatggtggctcaccagtcaagacagattttagagaaaacaaacctgagaggagtttctggccgagttaagtcagaggcacactctcttacagactaagagtttttaaggatttagggtgggagagtttatcagagacttggactgcttctgagtctctttgttgtgcttatctgggagagagaggtgtgtgtctgtacccatacatctttctgcagctacaggcatacccactgagtctgcttttagcttccctatcttagtgcacctgaagggaaaggaatttgcttattaaggcccactgttttactagggccattgtatgagggtgaagtttggcagtaactcaagagactctccccctacctccctctgtgcccgagctgtcttatctgtgtttcactgtctgctctttctggttgcttgtagttagcagagaagtgatttccttgaaatgcatgaggctagaaaggaaattggaacttaaagaggcagtgtttctccgagatgacggtgctcctgctctgtcactcactatatctttagtgaatgaatgaataaatgaatggctgccaccttcactttacctaggactcttctttgtttctctgccccagacactcacacggaccctatagaatcctatatcctgctggactaaacaccccatggatctaggtgaggctgcgactcgggccaggccagcagtgatcagccctggtgtaaacagttgtgcacagaaaagcacctcagagtggaaggactttagacatggggttcgcatgtctcagatggccctgaaggtactgatccaggctctggtgctcctggaaggcaagactcagattctgctccatctcctcccatctctgggcgggtctctggcatctctggcccatgagggtcaatctgtgtggaggggacaagctctgagcatgtgtgggtctgaggttcctcttccatgcagggctgaggtctcctgctcctccccagcttcctgtccggccctgtagtccttcccctccactcccttcctcttttctgctcacacaggaagccctggaagctgcttcctcagacatgccgctgctgctactgctgcccctgctgtgggcaggtgagtggctgtggggagaggggttgtcgggctgggccgagctgaccctcgtttccccacaggggccctggctatggatccaaatttctggctgcaagtgcaggagtcagtgacggtacaggagggtttgtgcgtcctcgtgccctgcactttcttccatcccataccctactacgacaagaactccccagttcatggttactggttccgggaaggagccattatatccagggactctccagtggccacaaacaagctagatcaagaagtacaggaggagactcagggcagattccgcctccttggggatcccagtaggaacaactgctccctgagcatcgtagacgccaggaggagggataatggttcatacttctttcggatggagagaggaagtaccaaatacagttacaaatctccccagctctctgtgcatgtgacaggtgaggcacaggcttcagaagtggccgcaagggaagttcatgggtactgcagggcagggctgggatgggaccctggtactgggaggggtttaggggtaaagcctgtcgtgcttagcgggggagcttgaccagaggttgatcttctctcaggccctcacctggaccctccctcctgattctgcatcccctctttctcctcactagacttgacccacaggcccaaaatcctcatccctggcactctagaacccggccactccaaaaacctgacctgctctgtgtcctgggcctgtgagcagggaacacccccgatcttctcctggttgtcagctgcccccacctccctgggccccaggactactcactcctcggtgctcataatcaccccacggccccaggaccacggcaccaacctgacctgtcaggtgaagttcgctggagctggtgtgactacggagagaaccatccagctcaacgtcacctgtaagtgctgggccaggatgctggggtccctgagggtgtaggggagacaggatgggctggtgctggggacatttagtgtcctgg

SEQ ID NO: 22355 - DNA, 2300 bp, Homo sapien
aattaaaaaatgggcaaggacctgaataggcatttcataaaagaagacataccaaaatggccaacaagtatataaaaaaaatgcctgacatcactaatcatcagagaaatgcaaattcaaaccacagatatcaccttatacctattagatgggtatatcaagaaggcaaaagatagcaagtgttgatgaggatgtggggaaaagtaaaccttgtacactgttggtggaaatgtaaattggtataaccactatggaaaatagtatagagtatcctttaaaaattaaaaatagaactaccatatgattcaggaatcccacttctaggcatgtatttgacagaaatgaactcagtatcttgaagagatatctgcactcctgtgttcattgcagcattattcaccatagcccacacgtggaatcaacgtaagtgtccattaatagatgagtaaagaaaatattatatatgtatacacacatgcacgcacacacacacacacaccccattcaaataatgtcattttgttcaacattgtctaatcataagagaaaaaaatcaattcccagccagtaccagtatctgtgtggagtttgcatgttcttatatatggtaaaattggtttcattttacatcatttcacttaaagcagcagtttccaagaactgaatgatgatgttaagtgaggatttattgtgcacacacacatacacacacagtggaagttattcagccttaaaaaaggacatcttgccatttgcagcaacgtaaataaacctgaaagacattatgctatgtgaaacaagtcagacacagaaagacaagtactgcatgatctcacttatatgtagaatctaagaaagtcaaacgcatggaagcaaagtatagaatggtggttgccagggctgagggctaagggaaatgagatattgatcaaggggcacaaagtttcagctaggcagaatgaataagttctggaggtttcatgtgcaccatggtgactatggtaaataacactgtactgtatacttgaaattttgtgacagtaaatattaagtgttctcaccaccaaaaaaatggtaactgtgaagtgctgattatgttaattcactggattgtggtaatcattccacagtgcatacatacatcaaaacgtcatgtcgtacaccttaagtatatacaatttttatttgtcagttatacctcaataaacctggaattaaaaaactgaaaattctataatctcatctctgatcactgctctaaccataggtaagcactggtatcaaattatacatcattctagatctttgttttactcattcatgtatgtatagttttgagtgtattatatatgaatatgtagatacatatttacatattatatatataaagcttttatataaatgacaaatgatccagttttcatttaaagattgtgaaatatttcagacatatagaaagatataaatatggtataatgagcatatacccaccaccagcttaatattgaaaacactggctgggcacggtagctcacacctgtaatcctagcactttaggaagcccaggtgggaggacggcttgagcctaggagttcaagaccagcctgggcaacataacaagatcccatctctacataaattaaaaaattagtcaggcatggtggcacatgcttgtagtcccagctacttgggaggctgaggtgggaagattgcttgagcctgggaggtcaagcctgcagtgaactgtgaatgctccgttgcactccatccagtctgggtgacagagcaagaaactgtctcaaaaaaaaaaaaaagaaaagaaaagaaagaaaacactacccctggtatactcccttccccaaacacatctcccactctcaaacatagagatcgctgctattctgaatttgacattttattctgtgtactaaggaacttaaccttgcctgaagagaagtctggcctttgcccttggcttctggaagacactccctagctcttagaatgtcacacctcataggggtgtctttgtttgcccagggaccttgcatcacactgaatattctagaaatgtgatttaggatgagggctggccacaccagataatgttaacaatgtgatttagagtggaagcaataccagatagtctaacaatgtgatttagaataggggctttggatcaaatggtatcagctcaacttcaggaggagctggatgctaagatccaccatgagggaagtcaccatgttacacgatggaggcccaataaaaacactggacacaaggcttgggtgagcttc

SEQ ID NO: 22356 - DNA, 2300 bp, Homo sapien
tgtgtgtttgtgtgctacgattgtctctgcatctctggaggtgtgtaggtttgtatgtccatggacacctacccatctgagtctgtgagtctgtgtgggctcatgggaagatacatgttgcatgtgtctgctgtgattgtgtctgctgtgtgtgtatctctgaaaacatcagtgcatgtgtgtggcagcgggtgcaggagacgtctgtgtccgcaaggacgtgtgtgtgcacgtgtggtgcatgtgtgtggcagcgggtgcaggagacgtctgtgtccacaaggacgtgcgtgtgcacatgtgtgcaggtgctaccatgcccgggccttgcctgagctgccaaggctgagccacccccaccttccacagggctgctctcccagagcctggagttcaactctcctgccgacaactacacagtgtgtgaaggtgacaacgccaccctcaggtacctccctcggtgggtggggactcagatctcatggagccatgcggtcctgccccttcaccttcctgggtggggatcctggttacaggaacagcctgggatgggaagacttgggctccacattccccctcagtagcgacacagctatgagctggctccccctcggcttcagtgtccccatctgtcaaaggggtggagagagggggcagagacacacacagagagagggacagagacccagagagagagagggacagagacccagagagaaggggacagagatccagagagaaggggacagagatccagagagaaggggacagagatccagagagaaggggacagagatccagcagagagggacagggttgctgtttccccaggtctccacctctcctcaccctggtctctgttcccccctctctccacgcctctctctctctctctctctcgcttgctctctctctctctctctgtttctgggtctctgtcccccctctttctctgggtctctgtccccctctctctggatctgtctctgggtctctgtccttctctgtgtgtgtgtctctgtccctctctgctggatctctgtccccttctctctgagtctccctctgggtctctttccctctctctctctgggtctctgcccccctctctctctgggtctctgtacccctctctctgtgtgtctctgtccctctctctctgggtctctgttctcctctctctttctctgggtatctgtcccactctgtctctgggtctctgccccctctgcctctgggtctctgtctccctctgtctctgggtctctgtccccctctctctgggtctctgtctctctctctctgggcctctgttcccctctgtctctgggtctctgtccccctctctctgggtctttgtctctttctctctgggtgtctgtatctgtgtgtgtgtgagtctctgtcccctctctctgggtctctgcccccctctctttctgggtctctatccccctctccctaggtctctgtagctctctctctgggtctctctctctctctctttctctctccgggtctctgtccccctctgtctctgggtctctgtgtctctctctctctctgggtctctgtccctctgtgtgtgtgtgtgtctctgtccttctctctctgggtctctgtccctctctctgggtctctgtccctctctctaggtctctttctccttccttctgcatctctattcctctctcccagattctctgttctcccctttttgtgtctctgacacacacgatcactcaataaccacgagctattgttccgttctgcagttgggctcacagctttccctccctgaggctcaacttacccccagctgtatggtgggcacagcagcatccgcctcacagggctgtggtgggacctggagatgcggtggcctccttctcccacccaccccctcggtgggggaagcctcaggctgggtgggtggagaaaaaccttcccactcattctccctgcagctgcttcatcgacgagcacgtgacccgcgtggcctggctgaaccgctccaacatcctgtatgccggcaatgaccgctggaccagcgacccgcgggtgcggctgctcatcaacacccccgaggagttctccatcctcatcaccgaggtggggctcggcgacgagggcctctacacctgctccttccagacccgccaccagccgtacaccactcaggtctacctcattgtccacggtgagcccttggccggggcctggctgggtggaggggttgagagcgtgggggagactaggcatgatgacagataccacgtgttccccaaccccagggatac

SEQ ID NO: 22357 - DNA, 2300 bp, Homo sapien
cagttcctggattcaaaagcctctgctggaatctctgattccagctggtttcctgaggccctgagttccaacatgtctgggtccttctggtcaaatgtttctgctgagggccaagatttgagcccggtttcccccttctctgaaacccctggttctgaagtatttcctgatatttcggatcctcaagttcctgccaaagaccccaagccttccttcactgttaagaccccagcttcaaacatttctactcaagtctcccataccaaactgtctgttgaggccccagattcaaaattctccccggatgatatggatcttaaactctctgcccagagccctgaatccaaattttctgcagagacccactcagctgcaagctttccccagcaggtggggggcccactcgctgtgctggtggggaccaccatccggctccccctagtcccaatccccaaccctgggccccccacctctctggtggtctggcgccggggctcaaaggtgctggcagctgggggcctggggccaggggcacctctgatcagcctggaccctgctcaccgagaccacctgcgatttgaccaggcccggggggttctggagctcgcctctgcccagctggacgatgcaggggtctacacggctgaggtcatccgggcaggggtctcccagcagactcacgagttcacggtgggtgtgtatggtaagtgggccctggcgtccggcgtgcaggcggcaggggctgctctgctctgccaggctttgggcaagtcacggtgctgtggggtccctggataggagaagaggacttctgggttgaggaagggagaaaaagagctagaggtcaaggcaggggtgtctgagcaaaggtggacctgggatggagactcctgggagcctgaactcccaggtctgagggaggaggaggaggctaggagcctcttctggcgaactcctgggtcccggagaggaggtgtctgggggctcaaactcataggtttatgagaggagagggatgggggctgagactccaggggcttagagggagcagcggctggggttccctctaaggggaccaaagatgggctccaggactgggtgggtcctgagcccattctccctctcccagagcccctaccccagctgtcggttcagcccaaggctccagagacagaggagggggcggccgagctccggctgcgctgcctggggtgggggccaggtcgcggggagctgagctggagccgggacggacgcgccctggaggcggcggaatcggagggagccgagacgccccggatgcgctcagagggcgaccagctgctcatcgtgcgccctgtgcgcagcgaccacgcccggtacacttgccgcgtccgcagccccttcggccacagggaggctgccgccgacgtcagcgtcttctgtgagtgggggatgcctcgggtcggggacagggggtccttggggagaagcgggctggggacccagtctccgggagtcctagcggcgtcccaggtgaccctgacactcgcggtcccgacccctcctccctccagacggcccggacccgccgaccatcacggtctcctcggaccgcgacgccgcgcctgcccgctttgtcaccgcgggcagtaacgtgaccttgcgctgcgccgccgcctcgcggccgcccgccgacatcacgtggagcctggcggacccggccgaggccgcggtgcccgcggggtcgcgcctcctgctgcccgcggtcggaccgggccacgcaggcacctacgcctgcctggcggcgaacccgcgtaccggccgccgccgccgctcgctgctcaaccttacagtggcgggtgagaggctggagcgggagtaggggaatgcctgggagaggggcggggccagaacgagggcggggctagaggaaaggggcggggccagcaaggaggagcagcataccggtgggtggggcagggccagcgggagggcgggtcaccaagaaggagctgggatacccgtggtggggcgggccagcgcggaggggcggagacacctaggataagaggcggggccagaaagaggataagggaaggagccaaatagagtggcagggatgaccaggactgacgggccggcccagcactgagagggcggacattcctgggcatggaacactcgacaaagtcgacaagcggagttaaatggcaaagagtgggagttagaaaaggaaagaactaatttgcttaagtgggatcagcaaagggagaagttacctggcaaggggggcggagtcaccagggaaaggggcgagg

SEQ ID NO: 22358 - DNA, 2300 bp, Homo sapien
tccctctgggtctggctcccttcccctcccaggaagctaagctaccagtcctgttggactcgtctgacccgggagggatgggtgcagtcctgggtctctctccagtgtcctttcagtgaggccagcaccatggacaacccacaggctctgccactcttcctactcctgggtaagttccctgctcagtcccttccctgtcagtctccctcagcagcctcccccaatgccttcctctcttctctgcagcctccttggtagggatcctcaccctcagagcctcttctggacttcagcaaaccaacttctcctctgccttctcttcagactcaaagagctcttcccaggggctgggtgtggaagttccctccatcaaacctcccagctggaaagttccagatcagttcctggattcaaaagcctctgctggaatctctgattccagctggtttcctgaggccctgagttccaacatgtctgggtccttctggtcaaatgtttctgctgagggccaagatttgagcccggtttcccccttctctgaaacccctggttctgaagtatttcctgatatttcggatcctcaagttcctgccaaagaccccaagccttccttcactgttaagaccccagcttcaaacatttctactcaagtctcccataccaaactgtctgttgaggccccagattcaaaattctccccggatgatatggatcttaaactctctgcccagagccctgaatccaaattttctgcagagacccactcagctgcaagctttccccagcaggtggggggcccactcgctgtgctggtggggaccaccatccggctccccctagtcccaatccccaaccctgggccccccacctctctggtggtctggcgccggggctcaaaggtgctggcagctgggggcctggggccaggggcacctctgatcagcctggaccctgctcaccgagaccacctgcgatttgaccaggcccggggggttctggagctcgcctctgcccagctggacgatgcaggggtctacacggctgaggtcatccgggcaggggtctcccagcagactcacgagttcacggtgggtgtgtatggtaagtgggccctggcgtccggcgtgcaggcggcaggggctgctctgctctgccaggctttgggcaagtcacggtgctgtggggtccctggataggagaagaggacttctgggttgaggaagggagaaaaagagctagaggtcaaggcaggggtgtctgagcaaaggtggacctgggatggagactcctgggagcctgaactcccaggtctgagggaggaggaggaggctaggagcctcttctggcgaactcctgggtcccggagaggaggtgtctgggggctcaaactcataggtttatgagaggagagggatgggggctgagactccaggggcttagagggagcagcggctggggttccctctaaggggaccaaagatgggctccaggactgggtgggtcctgagcccattctccctctcccagagcccctaccccagctgtcggttcagcccaaggctccagagacagaggagggggcggccgagctccggctgcgctgcctggggtgggggccaggtcgcggggagctgagctggagccgggacggacgcgccctggaggcggcggaatcggagggagccgagacgccccggatgcgctcagagggcgaccagctgctcatcgtgcgccctgtgcgcagcgaccacgcccggtacacttgccgcgtccgcagccccttcggccacagggaggctgccgccgacgtcagcgtcttctgtgagtgggggatgcctcgggtcggggacagggggtccttggggagaagcgggctggggacccagtctccgggagtcctagcggcgtcccaggtgaccctgacactcgcggtcccgacccctcctccctccagacggcccggacccgccgaccatcacggtctcctcggaccgcgacgccgcgcctgcccgctttgtcaccgcgggcagtaacgtgaccttgcgctgcgccgccgcctcgcggccgcccgccgacatcacgtggagcctggcggacccggccgaggccgcggtgcccgcggggtcgcgcctcctgctgcccgcggtcggaccgggccacgcaggcacctacgcctgcctggcggcgaacccgcgtaccggccgccgccgccgctcgctgctcaaccttacagtggcgggtgagaggctggagcgggagtaggggaatgcctgggagaggggcggggccagaacgagggc

SEQ ID NO: 22359 - DNA, 2300 bp, Homo sapien
tgcctgtaatcccagctactcaggaggctgaggcaggagaattgcttgaacccaagaggcggaggttgcagtgagccaagattgtaccattgcactccagcctgggtgacagagcaagactccgtctcaaaaagaaaaaaaagaaagaaaaagtttgccaacccctgttctagacagaggcctgaatggtccatgagctccactgattgtcatacagtcttctgtctctccccattcaggccatcgatgatgactgtaaccagacagggcagatgacagctggatttcttgactggccacaggtgagactggagtggggagcacctgctgagggccaggccctcatccctcaaacttcatttctgcctcaaggcctttgcatttgctgttctctcctcctggaacactgttccctcggattgcctcatggctttcttgttcccctccttgaggtctctgctgaggtatcacctcttcaaaggggccttccttgccatcctacgtgaaatactcatgcccacccgctcaactctaggttccccagtccccatctctgccagtccaatagaaatgcaggctggggccaggcatggtgagtcatgcctgtaatcccagcactttgggaggccgaggcaggtggattacttgaggtcaggaggagtttgagaccagcctggtcaacatgttgaaacctcgtctccactaaaaatttaaaaattagctgggtgtggtggcgtgcgcctgtagtctcagctactcagggggctgagggagaattgcttgaacttgggaggcggaggttacagtgaggcaagatcgcacgccactgcactccagcctggcaacagagggaggctccgtctcaaaaaaagaaaaaagaaatgcaggcttggcacagtggctcacacctgtagtcctagcactttgggaggccacggtgggaggattacttgagcccaggagttcgagaccagccttggcaacatagttagaccccatctctaccaaaaaagaaaagttagctgggtgtgatggcacatgcctgtagtaccagcctcaggaggctgaggtgggaggatcccttgagttcaggaggtcaagactgcagtgagctgtgatcataccactgtactccagcctaggtgaaagagggaaaccctgtctcaaaagaaaaaaaaaaaaagaagcaaggcacatagacaaatttaaaatttttcacagctacataaaaaagtaaaaagaaacagacaaaattatattttatttcaccccattatatctaaaatattattttaacatgtaatcaacataaaaatattaagatacatatgctctacaagcaatggggttacgtcctgataaatccatcataaattgaaaatattataactgagagaatgcatttaatattcttaatctaccaaatatcatagctgagcccagcctaccttaaacatgtcacaacacttaacgttagcctacagtggggtaaaataatctaacataaagcacattttataataaagtgctaaatatcccatgtaatttatcaaatactgtactggaactaaaaaaacggaatggttgtacggacactggcagtatggtttctactgaatgtttatcactgtcacatcatcggaaaactgaaaaatcttaattcaaaccatcataagtcagggaccatctgtattttacgttttttggattttctttgtactaaatcttcaaaattcagcatgtattttatatttacagcacatctcaattcaggtgctaaatttctatgagaaacacattcctaaagatgacagttgaaatagatttacacacccaagttgttcaaaacaaacttaaaagttttctagtaactgcatttccagtaactgcattgggtatctgtgtttttttgtttgtttgtttgtttgtttttgttttttttttaaacagcttcgttgagttatttacctacaataaaccgcacatatctaagttgcacaatttgttaagtttgcttttcttaaactcttttatttagatagagatgggggtctcactatgttgcccaagctggtctttaactcctgggctcaagcaagctgctcacctcagccctccaaaatttaagttttgatatgtgttacatccatgaaatcatcaccacaatcatgataatgtgtcttgaattctcagtatttatttatttttatttttttgaggtggagtcttgttctgtccccagactggagtgcagtggcgcgatcttggctcactgcagcctccgcctcccgaatttaagc

SEQ ID NO: 22360 - DNA, 2300 bp, Homo sapien
acacgcagagagaggagaaggccacgtgaagacagagctgaggatgctggcattgaagataaagcgatgcagccacaagccagggagtgtcagcagaagctggaggaggcaagaaacgtgttcctcccggggcctgcagaccccttggtctcaccctggtgacactgactttggacttctggcctccagagctgtaagattctaagccaccaaatatatggtgatttgttacggcagccgagagaaactaataggagagtggttagtggttcacgctacaccctggtctacaccggaagcctctctccctggcacatgatggtgtccccaggatccagctcagagccaggcacacagtggggcccaggagagacaaaaatgatgtgcagaagcaaatgggtggggtttgccacccacctcccttacctcccttgtctgtttagcaaagaggtctttcatgctggtgttttccaaattaggttgtgaccatgtgtgatcatgacatccaggcagagggctggcatttttccgaaaaagggtagaaaatgtcagagtatggtgtgtgtgtaggcagggtcagtattggtcactgacccttacactgcagtggcatttgtgaaataggtcagggtcactggtcacgttgtctaaggtgttatccgagctcgtttcacaaccaagagaattaaagagcatagaccacccaaaaggtgaggttggagcgaaagtttaataagcaaaagaagaaagctctccacagaggagagggaagcccaagcgggttgccatttttacagttgattccaaaagctttttttttaaaaaattatttatttatttattttttattattatactttaagttttaggatacatgtgcacaacgtacaggtttgttacatgtgtttatatgtgccatgttggtgtgctgcacccagtaactcgtcctttagcattaggtatatctcctaatgctatccctcccccctccccccaccccacgacagtccccggtgtgtgatgttccccttcctgtgtccatgtgttctcattgttcaattcccacctatgagtgagaacatgcgttgtttggttttctgtccttgcgatagtttgctgagaatgatggtttccagcttcatccatgtccctacaaaggacatgaactcatcattgtttatggctgcatagtattccatggtgtatatgtgccacattttcttaatccagtctatcattgttggacatttgggttggttccaagtctttactattgtgaatagtgccgcaataaacatatgtgtgcatgtgtctttatagcagcatgatttataatcctttgggtatatacccagtaataggatggctgggtcaaatggtatttctagttctagatccctgaggaatcaccacaccgacttccacaatggttgaactagtttacagtcccaccaacagtgtaaaagtgttcctttttctccacatcctctccagcacctgttctttcctgactttttaatgatcgccgttctaactggtgtgagacggtatctcattgtgattttgatttgcatttctctgatggccagtgatgatgagcatttttcatgtgttttttggctgcataaatgtcttcttttgagaagtgtctattcatatccttcgcccactttttgatggggttgtttgtttttttcttgtacatttgtttgagttcattgtagattctggatattagccatttgtcagatgagtaggctgcaaaaattttctcccattctgtaggttgcctgttcactctgatggttaaactaaagagcttctgcacagcaaaagacaccaaaagcttttataagaaactcctttcatctctgtagctgtttgagtatcttatctgtaaagctatctgcataactctccgttatctatgtagttgtgggtacgtctttaggcaagcacaaagctccgcttctcttgtttctgtaaccgtgggtttgttttaggtaagctccgcccctccccgtgcaagttcccacagagaccaccatgtacgtgcctgaaaaggggagggaacttttcctgggagcctgtcagtcacgcaaagaacaaaaggcttctgtgctgggcagcttgagttttccccaggctgctctattgttgcctgtagctgtgatttttcaggcaggctgctcctctgaggaccacccttaactgtctacctaactggtttttccttttcttctcctcatttgtatttatgtatcagtgtattatgtatttatatacacttggagatacag

SEQ ID NO: 22361 - DNA, 2300 bp, Homo sapien
cctcatggtgctctccacggccaccaactactggacccgccaacaagagggccacagtggcctgtggcaggaatgcaaccacggcatctgctccagcatcccctgccagagtgaggctccgcccgcccagatgtcagagggcatttcagacccccagggctcgggacacacagctgggcccatggcgagacgcccaccccttccaccccgggctcagttgcagctgtcccttgtcggccgaggccgccacgaaccccgcccctcgacttgtgggcttgtccccgaccccctccccgtcctggtagcggcagtaaccgcaggtcctgatgtgacctccaagtctcaatccaaacgcctgactcccggtcggtggagctcggctcctggccacacaccgggttgggggcaggagacgggagagcttccggttgcggccgaacccgtagtgactggggcggcgcccgcgggggctgatgcgcccgctctccccagccacgctggcggtgactgtggcgtgcatggtgctggcggtgggtgtcggcgtggtgggcatggtgatgggactgcggattcggtgcgacgagggcgagtcgctgcggggccagaccacgagcgccttcctcttcctcggcggtgagactgcagaccgccccaggcgggcaggcaggggcgggccctgggtgatggaggggcctggtcgccaggggaggggcttgaggtactcggccaggatccgaggggcagggctggaagaagccgagagaggtgggcggggctcgagacagagttcagagcgggaggagcaggaaggggcctgggccaggggcgggctgagaggcgataggcgtggtctgatagaagggggcgggtctgaaggggcgtggcctgggtgcagcccccaccaggcccagctagctcatcttgcggctgggcggggcccaggactgctgctgctgaccgccttgataggctacaccgtgaagaatgcgtggaagaacaacgtcttcttctcttggtcctatttttctgggtggctggccttacccttctcaattctcgcgggtaaactggacagcgggaagagggtggaggagactgcccagaagaccctcaccccagaggctccccagctgccctcccaggaaaccccggggacctctcggggactccccaacacactaacgactcccgcagacccggcagagacccccttggagccccaaaccccagtccccggggccctcccggccatccgccccagggcccaccttcctctccctgctccgcacccccgtccccccaggcttctgctttctgctggcagacatgatcatgcagagcaccgacgccatcagtggattccccgtgtgtctgtgactgcagcctgcctggggcagaataaaggaacggctttttttagcgctgcggctccgcgtgcttttctgcgggtcgtggggacgcaggcacggggttgcatagaggctcagggaagacataaggacatgaactcatagggaacgtggagacagggagacacagacatggagacacaagtctccatggattgggatgggaacagggacatgtgggaggggcggggccaggaggggacgtgggcctttggagagggtgtggagaggctgtggggacgacatggaggtgaagtagagacacggacaggggaggatacggatatggaagggacagggaacacggggatggagagagtggagagaccgacgcgcgaggattcagaggcgtgggaatacgagtaccgcgacttggagaggccgggaagaagtgggggatctggagagggagagcagatccggggataccgggaagtgtttataggaccgggaggatctataaactccgggcgcgcttccctccagtgcacgacctttcccctagttctctgccctgccctctccgccaggcctttccttctctctccaggtcccgctcgctccccgagatccgcttcccattggtttgcattgcttgccacacctcccttccttccggcctctcgattggtcctctgtcggggaggcgggctctgcagcggttgactggctgaccgtgctgcgcgcaggcgcagagaggggcgcggggggcgggggtggtggggcttctggactgagccgctgagggtgcgggctgaccctgtaagtggctgcggcgggaagatggcggagctgcgcgtgctcgtagctgtcaagagggtcatcgactacgccgtgaaggtgatcgggcccccctctcccacatccctgagtcccgcagccgtgtgcttc

SEQ ID NO: 22362 - DNA, 2300 bp, Homo sapien
aacatttaggagcttcttaagggccagggaaaggtaatatccaggcagaggggcccaaagatgaacgtgcagaaaagtcaggagtcttgtggggatgaagatcggtaatttagggtcaggatatagaatgtggggggcgggggatggaaaatgaagagggagaggcaggtgggggctgtggcctctaatgtcatgctggactttctcttgaacatgatggggagttgggagaaaaattgtgggcaggggagggacagtgtcagctctgggtgccagaaagacccccctgtagacatggaggggaggccagaaggtgagggaggaacttggcaatgcaataggtgggacatgatgaggcctgacctgggaccaggaaaggagggaatgagccagacagattcaggggcaggaggagcaggacttagggacccaaggcttttcagggtgaagggcaagaagaaggtgaggacagtgcccaagggtctggctcgatgaactggatgggatggcagggccatccctaatatggtggaagacactaagctcagttggaatatggttgactattaaggccctgaggggcagccaggagcaggtgagaacttgagtcaggctcaggggagagaccttgggttggagatggagttttggatggagcattaaggagcactgaaactttggccgtgaggaggcttgcctggcaagagagtgcagggtggagcttcaagggatacccagatttacaagtgaaggggagaaggcagaggagcagaagtctgcagtcagacagctggggacctggagagcttctgcggtgcctagaatgtcaagggaagagaaggttgttttttttttttgagacggagtcttgttctatcacccaggctggagtgcagtggtgtgatcttggctcactgcaacctctgcctcccgggttcaagcaattctcctccctcagcctcttgagtagctgggattacaggcgtgcgccaccatacctggctaattttgtctttttttttttttttttgagatggagtcttgctctgtcgcccaggctagaatgcaatggcgcgatctcagctaactgcaacctccacctcccgggttcaagtgattctcctgcctcgcatccccagtagctgggattataggcacctgccatcacccccggctagcctggctaatttttgtatttttagtagagacggggttttgccatgttggtcaggcttgtctcaaacccctgacttcaggtgatctgcccgcctcggcctcctaaagtgctgggattacaggcgtgagccactgcgcacccggccaagggaaagagaagtttctaagaaagggctgggagtggtggctcacatccataatgtcagcattttgggaggccaaggtaggaggatcgcttgagcccaagagtttgagatcagattgggcaacatagcaagaccccatctctacaaaaaatcttaagaaaattagccaggtgtggtggcacatgcctgtagtcccagctactcaggaggccgaggcaggaggtttccttgagcccaggagttcaaggctgcagtgagctgtgatggtgccactgcactccagcctgggagagagagatggctcacgcctgtaatcccagcactttgggaggctgaggcaggcagatcacaaggtcaggagtccaagaccagcctggccaatatggtgaaaccccgtctctactaaaaatacaaaaattagccagatgtggtggtgtgcgcctgcagtcccagctacttgtgaggctgaggcagaagaattgcttgaacccaggaggtggaggttgcagtgagccgagatcgtgccactgcgctccagcctgggtgacagagcaagactccatctcaaaaaataataatgataataatgataaaagaaggactcggcctatcatgtaacggcccccaaagctgagatctgaatctaagcagtcactcagttgagagctgcgggggtgtatgcgatggtggtggggggagtgattatccctttaaacagccactgggggagggggttctggaacccctggcctcacagagacccagcctccctccccccgtctctctgggctctgtgtctaaggagccctagggcactgggtgtgagtcacttaggtgggcctgtgtggaggggtgtctggggaggacattgaacaggctgggctgaaagggcgttcggctgtcgggggaggtctctgggaagacaggttcctcacagcaaagcctgtggtgaaggtctcagaggcctctcaggggaag

SEQ ID NO: 22363 - DNA, 2300 bp, Homo sapien
ttgggactgagaatggagttctatttgaggatgggggttggagctagggtggagattacgaatagggatgggattgggtatggagttgtgttcaggaatgggaatagggttaactttggggatagggatgggttgaatttgtggttggaactgggcttgatactgagtttggggatggagttgggtttggggttaaggatggctttgggtttgggagggggtcagggtcacagatagataggctgtgtgctctgacctgctactcactgcacaccatggcaggttttccggagacctggcctgctcatggcctctgccacctctgggagcctgtgctcataaatgtgttctcagagtggtgcagatctgagtgaaggatgggggctgccgatctgagtctctccaataaaggagaggaaccagtcttccaggtcatttcccattctccacatttgccagctgtcctgggactgctggaccagttcatctccaagacagaggtcctcttccagactactccctatgtattagtctattctcacactgctataaataactgcctggccgggcgtggtggctcacacctgtaatcccaacactttgggaggccaaggtgggcagatcacctgaggtcaggagttaaagaccagcctgtccaacatggtgaaaacccgaaaatctactaaacctgaaatctactaaaaatacaaaaattagctgggtgtggtggcgggcacctgtaatcccagctacttgggaggctgaagcaggagaactgcttgaacctgggaggtggagattgcagtgagccgagattttgccactgccctccagcctgagtgacaagagtgagactctgtctcaaacaacaacaacaacaacaacaaatgcctgagactgggtaatttataaaggaaagaggtttatttgattcacagttcagcatggctggggaggcctcaggaaacttacaatcatggtggaaggtgaaggggaagcaagccactgtcttcacagagtggcaggaagaaggccaagcgaaggcaggaagagccccttaaaaaaacaccatatcttgtgaaaactcactcactatcacaagaacagcatgggggaagccggccccatgattcaattacctccacctggtctctacctagacacgtgaggattatggggacacaattcaaggtgcgatttgggtagggacacaaaccctaaccatatcaccgtttcacagaggtcaagttttcctgggccttctacctgggctgtggtaccgtcaccttatacctgctcgtagatgaggtgttgccaggacctgatggtgtggatggaagaggctagcgtttggggggctggagaaccctaaaccaaaatccttatgtcccccaacaccccctaggccccccgatcctggtgataaaggccaccaggctggagcccccacccaagcagggatgccactgaactcattaatcagatgaggatgtgggtatgtctgactctctgcaaacctttcagaattgtgattctctgctgtttgcctgcccttggcatatgctccaaactggggcccaggattctgagctcctgcccgcctcttcctccctcaggacctggagttcaggcccccagctccttcctccttaagccccaggagttctaactcccaagtcccctccttcagtagagaccctagacttggggacttcctctcccagaatggaagactgcataacccacaggaaagcatgacacatccccagctgtcccctccagccacatctgccctcccccttaatgtacaccctagcctgattggcttcctcccacctcagggcccccaagcctctctctctcacctcttccaggaagccccgacttggtgttgaaggttccatgggtgggagttgtagaatctgtgacagaggcaagtactaaaccaccgcccaaaccactgatgatctgacaccctcagtgccctcccccatcacacactaagcggggaactggaccccagggaggggagggaggacgttgcctgtgcaatccaggaagggagggtatgtgaaaagctaccgggaactgtgtgaaaccaaaccagcctcatgtgacaaagcgcaggacccctcactgccccaactgcttgctgttctctctttcttgggctctaaggacccaggagtctgggtgcacagcctccttctctctgagattcaagagtctgatcagcagcctcttcctcctccaggacccagaagccctgagcttatccccatggagctctgccggtccct

SEQ ID NO: 22364 - DNA, 2300 bp, Homo sapien
ttgagccaagttagcgccattgcactccagtctgggcaacaagagtgaaaccccatctcaaaaaaaaaaaagagctagaaacagatactcatcgaacagaaatttccaagaataaaccaagaaatgtgaagactccagggatccccagaaggctggagaaatcgtagctgtccactgttttagcacttaccagacccagcgctgtcatacgcacctttgataccatccaaagccatctgtgactataaacaaattaaggttcggaataggaaaatgatttgtccaaagatacaccaccaaaagcgaggccaccaggaattggaactgagttctgtctggtgccgaagttcatggcagagctgtctgtttctttagagagacccgggttagaaacaaaaagagagaagcgggggaggaagtcacaggtgggcactgaggatggagagatggctgccttctgcagaggtgcagagacagcctggcagcgagaaacaagaaagtacggagacgctgagccccactgacctgtctttttgttgttctaggaacaacctgtccctgccgtcatctgggaccgagccatggccccctgcgcctctcccagcccctccacccttgctcctgaactccacagaccccacccacctggggctcccggagagcgtggcctctgtcaccgtgcccatacgcctggacaccctctcctgcctcctgcacagcgccctgctgggggcctacaccttccaacaggccttgccctcttgcccctgctgctcccaggcaggccactcccagccgggggcagttaggaggcctcccaggggacgcggaggctgggaagtcaggcacaggccaggctggggccgaggcctgcatcgacggggccttgggagagctgagcagccagagaggggccgggcggggggccctggggctggccccaggaccccaccaatgacactgccatcaccaccaacactgcctgcccaggatgggaagaaagaagctcgaggtccagagccacccctggaaacaccactggctgctgaggactgggagacagagtactaggaccttggagggtcaggcacctgagattgcagtcacccaggagggttttcctggggcccagagtgatctcagccctgtcagaagaaccccaagaaacatcttccatcctcccctctccccaaaaccacaatcccaggagtagctcctgtgaggcacttggtgaacctgacctaagtcacctgaatcccaagtgagaagaaaatcctaaacctcgtacccaaacctgtctccttgatggcctcaaccccattcccaatgccatccccaaccacaaccacaatccttacctcattctcaacccccagggctcctccaaccccattccctatcctctccctaatcccaaagccactcctacctgcctctctcttccccactctcaataccctgttcccaaacccattcattcccatccctgtcaccagtcccagctccacttctgcgcctcaaccctaacccaccctctttaccaacccctttctcctcattgcctgtgtacctcagcccatctttaatgtcctctgaatctacagccccaaagagctccatcctcaacctcagccacagccctgtgtccatccccacaaagaaccgcattggccccacatacccagacacctgtgactccccaccccactgcctgctcttcaggtagaaagccctggttgaacaataaacgcatgactctccctgaatcttgcgtgtgtgcgcgcgcccgtgtgtgtgtgtgtgtgtgcgtgtgtgcgtgcttacacagctcggacaaagccagggttgctttgagcaaggctggcgacaaggtattgggttccggggagggtcacagaggtcagtgagtgggtggggggagccccctggatgcctgcttcagcgaattccatttgaggcctctgccaccgctgcatttctgcctgctggaagctgctgggtagtgggaccattgtgtagggaggcttaagggatttggggaacctaagggggcaaagaggccagtgaccaggctcagctcagtctgcacagaggggccgtggcagaaggagggctcgggcaggctctgccactcaggtaggcaccaggcgtgagacctgtagccccctcttccccaagtcccaggagtctagggtcccagctccttcttctcccaggacctggtgtcctaccccctagcccctagccccttccttacccaccacccaggaatccaggctcctgggccccttctcacctag

SEQ ID NO: 22365 - DNA, 2300 bp, Homo sapien
gtgtggtagtgtgtgcctgtggtcccagctacttgggaggctgaggtaggaggatggtttgggcccaggaggttgaggctgcagtgagccatgatcacaccactgcactccagcctgggtgacagagggggaccctgtctcaaaaaaaacacacgcaaaaagtattgcaacataaagcatttatttaaaaatataaatacctatgccactcctcttagctgattattttccagtccctgaatcactacatttgttttactttcagaagctgttccctccccaggaatattcaacttccagtcttccagtaccttcccataacagccttttctaaccatcttatctacttaattttttattctttttttttttttttttttttgagatgaagtttcactctgtagcccagactagagtgcaatggtgccatctcagctcactgcagcctccgcctcctgggctcaagtgattctcctgcctcagcctcccaagtagctgggactacaggcatgccccaccatgcctggctaatttttgtatttttatttatttatttatttattttatttatttttgagacagggtctcactctgttgcccaggctggagtgcagcggcacgatctcagctcactgcaacctctgcctcccaggttcaagcgattctcctgcctcagcctctcgaatagctgggattacaggtgcctgccaccacgcccagctaatttttgtatttttagtacagatggggtttcaccatcttggccaggctggtctcaaactcttgacctcaagtgatccgtccacctcggcctcccaaaatgctgggattacaggcgtgagccaccgggccaggcccctaaccacgttatctgctctatctccctacctcggtgactctatatcctcttgccctgatttgacatcttcaggtacatattcttacagaatatatgctatgtatgtctcgtctgtctcccttacaagcatgcaagtttcctgagagtaggggccatgtctattctgtcccgtgtgcagcctggagcccaaatcatagcaggcattgaatatttcttaaatgaatgcatgtaataatgacgattgcttctcagcaaaacactgtcacaaccaccagcaataacaataagtaaatctcatgtgttcagcctaattgtggtccagattctgtgtctactaatacacaagtaatatcacaagaacctggacagtaatattagccccatttctcagatggagaaactagggcatagagagtagaagcacctaaagtaacaaagcaagttagagacacggcacctagtagaacccagcgcctagaatggctaagacctccagaccatctaccacgccctctgccctagggagtgtccacatttccctacctaaaacgtcccttgagtcctaaagaatctgtcttgaggatatggcaggaataaagagagagaaagacagagagagagagagaagggggcaggggtcccgggactactgaatctgagagaggaagggggctggggaaccagagtacggggtctgaagaaggaggggctggagcctggactcccgggtctgaaggaggagtggctaggaccctagacttccgggtctgagggaggagggggctggggatctggactcctaggtcttagggaggaggaactggggatctgaactcccgggtctgagggaggaagagctggggatctggactcccgggtctgagggaggaggggctggggccctagacttccgggtctgagggaggagggggctggggatctagactcttgggtcttagggaggagctggggatctggactcctgggtctgagggaggaagagctggggatctggactcctgggtctgagcgaggaggagctggggatctggactcctgggtctgagggaggaggggctacagggtgctggaggccttaagtaagtgatcttggggaactagatccaggtccccgcctgagctctttcttttgggatcccggataactccgcgagccacgccccatttctgacccggccaagccccgcctctctcggcctcggcccctccccaaccttcccgggcccccgaaggatctcggaggcgaagttgctagaagatacgtaagagggccccagtggagatggaacaaccaaaggacggggctgggcctgaagggtgagacaaacaaagacctcctgagagggggacagagacccagagagaggaggggacagagaaaacgagagagaaagggcgcgctgaacagacctgcatagag

SEQ ID NO: 22366 - DNA, 2300 bp, Homo sapien
cccaccacctccaccaccagtggcccagataagggtagctcactgtggacttctcacttctgcttttccgatgacccagggcccagagggagagcccccaccccactaccccacccccagccaggcccccaggatagacacaagcctgccctctcctcctacacagggagctctggaaggaccagctcaacaagcccaaggccaggctgggcccccaggagacccagaggacaactgggcaaggtgggccggagagtgtgggggaaggcaaaggagttctgtgagctcagcgtctgaagctcatttcatgcatcaggccccagggctcagcttccgccttcggcttccccttctgccaagagccctgagccactcacagcacgaccagagaacaggcctgtctcaggcaggccctgcgcctcctatgcggagatgctactgccactgctgctgtcctcgctgctgggcggtgagtgggccaagggccggaaaggacctggggcggagctagggctggggttgcaggttgagcctctgtctccccacagggtcccaggctatggatgggagattctggatacgagtgcaggagtcagtgatggtgccggagggcctgtgcatctctgtgccctgctctttctcctacccccgacaggactggacagggtctaccccagcttatggctactggttcaaagcagtgactgagacaaccaagggtgctcctgtggccacaaaccaccagagtcgagaggtggaaatgagcacccggggccgattccagctcactggggatcccgccaaggggaactgctccttggtgatcagagacgcgcagatgcaggatgagtcacagtacttctttcgggtggagagaggaagctatgtgagatataatttcatgaacgatgggttctttctaaaagtaacaggtatggaatggggtgggaacccctgcctctcacactggggagggaccctggggacagcctatgggctgagcagagagggctctcagggacccctgcagcacaagaatctcccaccacggtctctgtcccagccctgactcagaagcctgatgtctacatccccgagaccctggagcccgggcagccggtgacggtcatctgtgtgtttaactgggcctttgaggaatgtccacccccttctttctcctggacgggggctgccctctcctcccaaggaaccaaaccaacgacctcccacttctcagtgctcagcttcacgcccagaccccaggaccacaacaccgacctcacctgccatgtggacttctccagaaagggtgtgagcgcacagaggaccgtccgactccgtgtggcctgtgagtgtggcctgggagggtggggtgtgcagacagccccggtgggtggggaggtggaggagcccagtgggacagtgagcggctcccagctcaggagcatccagggagaggaagctgtggggtcccaggatgccgccgcagccctgggagggggatgggaatggcgtctggtccacacacgtgagccctggcgctggttgtcacttgtcttcccgggatagtcccactttcttttccctgagggagttttttccaggtgtgaggaataaattgtccctccctgaagccagctcacaatcttgttgcagatgcccccagagaccttgttatcagcatttcacgtgacaacacgccaggtactgagggccgtcgggctggggctgggccagttgtctttagatgaaaaggcttcaggggatgaggggatgtgctcctccctgtaccccttctctctttctccctccctttctctcttttttttttttcctcccactccagccctggagccccagccccagggaaatgtcccatacctggaagcccaaaaaggccagttcctgcggctcctctgtgctgctgacagccagccccctgccacactgagctgggtcctgcagaacagagtcctctcctcgtcccatccctggggccctagacccctggggctggagctgcccggggtgaaggctggggattcagggcgctacacctgccgagcggagaacaggcttggctcccagcagcgagccctggacctctctgtgcagtgtgagtgtgcccagcaggggcctggagtccattgggagggcagagggatacaggggctgggctcagggtcccagagctgagggggcctggagccccaggcctcggagaccgaccttcttacctgtgtagaccctcatgcagtttgtgtctgggactcagtgggtgattctgccctgcccttcta

SEQ ID NO: 22367 - DNA, 2300 bp, Homo sapien
cccagaactgtgaggaagtcaatgttgttgtttcagcccctctgtctggggcacgctgttacagcagctcaagcgactgatacagtggatgaggccgtggagcacacctgtaatcccagcactttgggaggccgaggcgggaggatcactggagcccaggagttcaagaccagcctggccaacatggtgaaactctgtctcagcaaggtgcagtggctcacgcctgtaatcccagctctttgggaggctgaggcgggtggatcacctgaggtcaggagttcgagaccagcctgaacaacatgaagaaaccccatcttttctaaaaatacaaaatcagccaggcatggtggcgcatgtctgtagtcccagctacttgggaggctgaggcaggagaatcgcttgaaccccggaggtggaggttgcagtgagccaagatcatgctactgcactccagcctgggcaacaagagggaaactccatctcaaaaaacaaaaacaaacaaacaaacaaacacctctgtctctacaaaaattatcaaaaaaaaaaatcaaaaattatctgggcgtggtggtgtgtgcctatagtcccggctagttgggaggctgaggtgggaggatcgcttgagcccagaagatggaggctgcactgagccatgatcacaccactgcactccagcctgggcaacagagcaagaccttgtctcaaaaacaaaaaacaaaaatgccatggatgaaagaaccaggacagggcagaggctgggtcatctcctccaggaggcctctcctgacttccctccaccaggaagagctgaccactccttccccaggtcccatcctgaatgtctgtccagcatccagttcatttaggggaccttctgtactttgtttctaagaatcttcatttgctaacctggggccctggagctgactcaccatggaggattcacctccaagtccccctaaagctcagtgcttgatacccaaggtatgtggaggttgaaggatgagttctgtgtttcggtgtgacccaaacagagtcatttcaggaagagctcagtgaggggaaaacatcttgtagagtttactccattcattgcaaattaccccttccctagtctgttccccccactctgcccctcactcccgccttcctcaaactcttcccatcagcattagctttggacatatgtgttctaatcccaatgggtgtcccaattgaatgacagaggaggaagggagactgggaagtggactagggcctggttggggcaggagactgcttctggggaccaagggtcagtgagctcaccaggaagcatgaagaggtggagctgacaccaccctacggtggccagatttagaaaaaaagaaattcaacatgctcagttaaatttgaattttaggccaggtgcggtggttcacacctgtaatctcagcactttgggaggtcaaggcaggtggatcatttgaggtcaggagttcaaaaccagccctgccaacatggtgaaaccccacctctactaaaaatacaaaaattagcttggcgtggtggcgcgtgcctgtaagcccagactcaggaggctgaggcaggagaatcacttcagcctgggaggtggaggttgcagtaagcagagattgcaccactgcactgcagcctgggtgacagagtgagactctgtctcaaaatataattaattaattaattaatttgaatttcagataaatttattttgctttctggtataagtatatcccatgcagcatttcggacatacttataccaaaaaacataaaataaaatactttatattgtctgtgaaagctttaaccaggcatcctgcattttacctgacaagaccagccccctccagtaacggtcccttcccctgtacccaccacctccaccaccagtggcccagataagggtagctcactgtggacttctcacttctgcttttccgatgacccagggcccagagggagagcccccaccccactaccccacccccagccaggcccccaggatagacacaagcctgccctctcctcctacacagggagctctggaaggaccagctcaacaagcccaaggccaggctgggcccccaggagacccagaggacaactgggcaaggtgggccggagagtgtgggggaaggcaaaggagttctgtgagctcagcgtctgaagctcatttcatgcatcaggccccagggctcagcttccgccttcggcttccccttctgccaagagccctgagccactcacagcacgaccagagaacaggcctgtctcaggcag

SEQ ID NO: 22368 - DNA, 2300 bp, Homo sapien
attaccacttggggaccatggaaaagacctgtgccatggctcggcccttctgactattgagatactgcagctgtctctactgggcaaggataggaggcccaggagggggaaatggctgcagaatgagataccagctacaaatgcaagcattggtgatgggggtgggagtcggctatgcacacccaagccctgcaccttcccttctcaattatcacagccgaatgatctactccaggttataagtaatgaggggaagataggagacgggcagatccatgaagctgagtggaagaaagtagagtttgattttctgtgtatacaaagtcttcagaaaaacgtgcaaaagcttagtaaatgcagcctgctcagataataaaactatatagaaaagcattgaggcaatttgcaccaaagtgaggctaggggatcgtttgggagggagtggggtgtggccaataagaaggagaaacaaatgagcagcgctggggactttgtcaatgtgccatttctaggagggggctcgttgtatgtaaatcactgaggtcttctttgggggttgtttttatctatatttcttatatttaccccccaaaaaatgtttcaagaaaattgacctgagtctaaggaggctccgcctcccaggatcccccttaacttcttcccagcccccagccacacagtttaaaataatctgttgaggccaggcacggtggctcacacctgtaatcccagcactttgggaggctgaggtgggtggatcatgaggtcaggagatccagaccatcctggtcgacatggtgaaaccccggctctactaaaaatacaaaaattagctggatgtggtggcgtatgcctgtaatcctagctacttgggaggctgaggcaggagaatcgcttgaaccagggagtcagaggttgcagtgagccgggatcgcgccactgcactccagcctggcgacagagagagactccgtctcaaataataataataataataataataataatcatcatcatcatcatcatcatcatcatcatctgttgaattcaggtgcacatttcttctctcaagaaatcctgcccatcgctgaaggtgcacaccccagggctggtgtcctcgttccatgacacctgttcacctggacccctggaagcagagcctgcaggagcaaagccccagggctgacagaccccgcctgctgtgcagtaaccaggggaagtgtggctgagtaagatacgggtggtgaagaaacccattctgatacccagatagctgcaacaaagggagaagtgtgtgcccttttcaaattgaccctttcccttctgacatttctcccttccaaaccccacagtacaacagttacagcctcagtttcccaggcctcctgcgagccaggcttccccccgccccccgtccttcgtgtgtatcaacatgcagaatcctcacctccacagccccgtgtccctctgctcaggcctcctgagactgaacccctgacctaggggagaacgaccccaccttgcctgtgccccccactgaagctcccgtcctggggagctcagacgtcaggagcctccgtgtctcccctctgcacagtgactccttgaggacagtgtctggctctgctctgttgacctcgttgtgtaaagaggaggtgcccacttcgttgctgctgagagagggaggagaggctgcctgctcacctcacctgcaccccagtctctcatggccctgagttccacctttggctggtatgacctccacaaacagtgacagccccgggggtgattcaggggtctggccagatgggacccaatttcaccttgcagaaaatgttacccaaatggaagggcaagtccgggaagcaagaaagaggttgggccctgcatagggtgggaatctggatgagtttctcaccctctctggcctcagggttcccaggagtggaaatggggtggtggacagtggatctcccaggactgacccggccctgacagtgtctgtgtgtgaagttcctcctctgaggaggtcacttttctgacttcacccccaacctcctgcgggacctcccctaagtcttgagacctcagtttctgagagaagaaccctgaggaacagacgttccctggcggccctggcgccttcaaacccagacatgctgctgctgctgctgctgctgcccctgctctgggggacaaaggggatggagggagacagacaatatggggatggttacttgctgcaagtgcaggagctggtgacggtgcaggagggcctgtgtgtccatgtgccctgctcc

SEQ ID NO: 22369 - DNA, 2300 bp, Homo sapien
tacaacagtcacagccttagcttctcaggcctcctgtgaactgggctcttctctgtgtctttggtgtgtatcaacacacggaatcctcacctccacgaccccgtgtctctctgctcagtcctcccgagactgattccccaacataggagagagcgaccacaccctgcctggtacccccactgaagctcctgccatggagagctcagatatcaggagcctcagtgtctccccactacacagtgactctttggggacagtgtctagctctgctgtgttgaactccacctcacggccgctgagggaggaaggagaggttgcctgctcatcccacctgcacccccatctcttatatcctagtgtcacctctgacctacagagagacatccacagcctgtacttcataggtctggccacatgggactcattttcaccttatggaaaatatcacccaaggggaagggcactgagagggaggcagtgggcggggtgggccctgcatggggttggaatctgggtgagtctttcatcctctctggcctcagggtccccaggagtggacggggtagtggacggtggatcttccaggggtgacccggccctgacagtgtctgtgtgtgaagttcctcctgtgaggtcaccgttcagaacccacccccaacttcctgtgcggcttcctcgaaatcttgagttctcagttcctgagagaagaaccctgaggaacagacttacctcagcaaccctggcacctccaacccgacacatgctactgctgctgctactgctgccacccctgctctgtgggagagtgggggctaaggaacagaaggattacctgctgacaatgcagaagtccgtgacggtgcaggagggcctgtgtgtctctgtgctttgctccttctcctacccccaaaatggctggactgcctccgatccagttcatggctactggttccgggcaggggaccatgtaagccggaacattccagtggccacaaacaacccagctcgagcagtgcaggaggagactcgggaccgattccacctccttggggacccacagaacaaggattgtaccctgagcatcagagacaccagagagagtgatgcagggacatacgtcttttgtgtagagagaggaaatatgaaatggaattataaatatgaccagctctctgtgaatgtgacaggtaaggcacgggctccaagagaggccaaaggcaaatgtgatgagggctttagggcacggctgagacgggacacatgtcctgggagggggccgggggtgatggactcaggggaggagctggaccagagcctgagcttccccaggaccgcaccttggatgcccctcctgatcctgcaagcccctcccctcaccagccctgacccacaggcctgacatcctcatcctgcctctgacgctggcactgtggcatgtggggccttatgactccttgttttggggcctgtcctaggcatggccggggtttagcaccatcccaggcctctccccaccagatgccagaagcacccaccccacccatgcagcgagacaattatctccacacattgtcaaacgtcctggggggttaagtcctccccagttgagagccttaggtctacacaaccccgtgactctctcaggccaggccagggaggaagcacttcctggcgcaaaccaagggcagcagaggcacctgagcctggacagggagactcagcacacggcccctccatctctcatgccccgaggtcctcggagatccacatttagatgctcaaaagacaggagggacctccacgatggtccagaggccgggagggcaggacctacgtgtctggtgcaggccctggtgcttcagggaagcccggaggtaggaggcgggacacggtctcttctcctccctgggtgggtctctagggtctctgagctttagggtttccttcactctgtgcagagggaatgagttcctatagcatgtgggtttgcagtttctcttccatgcagggctgaggtctccagctcctctccagccccctgtgggtcccacagccctgcccctcctctccctcccccttctctgctcacacagggagcccaggaagcctctgcctcagagatgctgctgcccctgctatgggcaaatgaagagagggacagtgggggctgggctgaccctcgtttctccacagcgtcccaggacctactgtcaagatacaggctggaggtgccagagtcggtgactgtgcaggagggtctgtgtgtctctgtgccctgcagtgtcctttacccccattac

SEQ ID NO: 22370 - DNA, 2300 bp, Homo sapien
aacccaccttcaatattgaggcctataattcggcatgagatttggtggggacacagatccaaaccatatcaggctctaatcctattaggctaatccaaaccacctatctaaacaccatgccttctaatactatcacatgggggttcaaaggtcaacaaatgaattttgaggagagacatgtagctgtagcacttgtcactctggtccttaatatcttcctctccaaattatggaagtgggtctagagggcccatcagctcctctgagtcatatgtggttcaaacgttcttcctttgcagattctctgtggcttcctcatgtctctccttcccatttttctgcttttctttgccaactggggactgtgggaaagagatgggccgtggtcgagcccttcttcccattgagatgctgcaactgtccttacgggaagaaagtgacacggcaaggatgggggcccaggagcagattggtctgcaggatgagatacaagctgcaaatgcaggaattagtggtgtcagggagaggagcagctatgcatgccccaatcctgcacatttccttttcaattatcacagccaactgactctactccaggttatgggcaattggggacaacatggggatgggaagatccatggagctgagtaaaataaaacagattgtggtttttatgtaaaaatagtctttagaaaaacctatgcaaagccatagtattgaaggcagtgcactcagatgataaaactacatagaaaagcaaggagaccattatcattaaagtgaggctggggcatcttcaggaggaactgcatgtggcctataggaaggggaaacacagggctgaataaatgaatgcaatttctttcttcatctcatgggagaaatttggcaattatcttgtgatgttctatttcttgaacagtgataatttggtgaaaatcactgagtcatttttttaggtggcacttttatttacttgtattacatttccccaaaaatcattgtttcaagaaaagctgacatgggtctaaggagggcgaatcttgcaggattttccccaccttcctcccagtacatagcatacagtttcaaaaactcttctgctgaattcaggtgcatttcttctcccatgaaatcctgtccatcattgagcgtggacacgccagggctggtgtcctcgctccacgtctcctgttcacctgaaaccctgggagcagagcctgcaggaacaaagggccagcagacccctcatgctctggagtaaggaggacttgtgagagagcagtggtgaaggatcccatcctgaacccagagagccatggccgagagagaaacgcctgcccctttagaaatctgtcccttcccatccaacattcctcccttccagacctcactgtacaacagtcacagccttagcttctcaggcctcctgtgaactgggctcttctctgtgtctttggtgtgtatcaacacacggaatcctcacctccacgaccccgtgtctctctgctcagtcctcccgagactgattccccaacataggagagagcgaccacaccctgcctggtacccccactgaagctcctgccatggagagctcagatatcaggagcctcagtgtctccccactacacagtgactctttggggacagtgtctagctctgctgtgttgaactccacctcacggccgctgagggaggaaggagaggttgcctgctcatcccacctgcacccccatctcttatatcctagtgtcacctctgacctacagagagacatccacagcctgtacttcataggtctggccacatgggactcattttcaccttatggaaaatatcacccaaggggaagggcactgagagggaggcagtgggcggggtgggccctgcatggggttggaatctgggtgagtctttcatcctctctggcctcagggtccccaggagtggacggggtagtggacggtggatcttccaggggtgacccggccctgacagtgtctgtgtgtgaagttcctcctgtgaggtcaccgttcagaacccacccccaacttcctgtgcggcttcctcgaaatcttgagttctcagttcctgagagaagaaccctgaggaacagacttacctcagcaaccctggcacctccaacccgacacatgctactgctgctgctactgctgccacccctgctctgtgggagagtgggggctaaggaacagaaggattacctgctgacaatgcagaagtccgtgacggtgcaggagggcctgtgtgtctctgtgctttgctccttctcctac

SEQ ID NO: 22371 - DNA, 2300 bp, Homo sapien
acaagaaaacctagggaaaactcttttgaacattggtcagaagagtcagaaattatgactaagttctgaaaagcacaggcaacaaaaacaaaaataaacaaatgggacttaataaacaaaaagcttctgccaggaaaagaaataattagagtgaagaaacaacctgttgaattggagaaaatattcgcaaactattcttctgacaggagactaatatccagactatacaaggaactcaaacaactcaacaggaaaaagcaaataatccaagtaaaaagtgggcaaaggacaggaatagacagttctcaaagaatacataagaacagccaatacgacaaaatggtcagcgtcactaatcatcagagaagtgcacatctaaaccaaaatgagataccgtcttacccagtcagaatgactattactaaaaaaacaaaaaataacagattttggcaaggatgaggagaaagataactcttctgtactgttggtgggaatttaaactagtacagccacttttgaaaacactatggacatttctcaggaactaaaaatagaattactattcgatcactcaagcaatcccactactgggtatctacccgaagggaaagaaagaaatacatcaaagagatacctgcattcacatgatttttgctgcactattcacaatatcagagatatggaaccaacctaagtgtcaattaacagatgaatggataaagaaaatatagtatacatgctatttggccataaaaaagaatgaaatcgtgtcatttgcagcaacatggatgggactagaattcattatctaaattgaaataagtcagacacaaaaagacaaatgttgcatgttctcacttacatgtgggagctaaaaaaatattatcacatggaggtggacagtagaaagatagacaacagagactggaaagggtcagatgggggaggacagaagatgaagagaagtgagtgaagtgctacaaacatacagttaaaaggaataaattcagcgttagagagcagaatagtgtgattttagttaacaagaatgtattgcactcacgtgacggacactctaaatatcctgacataatcattacgcattatatacatgcaaaaaaattttacatctactccttaagtttgtagaaataaaaaaatttacaaatatatggtggcaaattctaatacctcataggtattagagatttgccagatgcatactgcacagaggaaaatagaaaaccatgtgagctagacctaaaaattttaattttgtcaggatattctgctcacgttgtccagaaatatgtcttttgtgccacatttaactgtgagaagcagatttttcacaggaaagaaattgctaatctctatgatgaggacctaaaaaaaaatctctccagtccacactgcactgagtggcaacattaattcaaaagaagtttcttctgcactgcagttcataaaatatgtgtcctttttgatttacatgaagatgttgcatggttcttattttggagatgtcattgaaattttgtaaatcagcgtactagctgtcaaggaaaaacctccatactcatgttttaaaaaatatctggcattctactgtgtcacttggcaaactcaccagtgtccacagctctaaagctagatagtgagggtgtgtgctgaggatgggaagctatggatggggatcatctcaagggtagggaccaggtccctggcatctcttctccagcccgacctacatacagatgctcactatgtctttggtgaatgaatgaatgaatgaatgaatgagtgaatgaatgagtggctatcacccacactgcacctgggacccttcttcctttcactgtcccagacactcccacagaccctacagaatcctatatcctgcaggactgactttctcatggcgtgggatgaggctgtgactctctggggccaggagtgaccagctcccaggtgtaaacagtggtgcacagaaaagcacctcaggtgggcagggccttggacacaggtttcgcattcctcagatgccccgggaggccctggtccgggctctgttgctcacaggaagccccgaggtgggaggcgggacacagtctcttctcctctgctcttctttgggcaggtctctgggtctcaaagtttccgtctgctctgtgcagagggagtggagctccgagggcttgtggcttcgcagttcctcttctgtgaacagccgagatcacgcgctcctccccagccacccgttcctccccgcagtccttcccctccactcccttcccctt

SEQ ID NO: 22372 - DNA, 2300 bp, Homo sapien
acaataattttaaaacacaatgaaaaatgggtggaagatttgaagagttgcttcagcaaagaggataaatgagtggccattcggcacttgaaaaaatgcttgatctgggaaatgcaaattaaaattactatgagataccactatgagatactcactaaaacatattaaattaaaaagactaacaatactaagtattgataaggcagtggagcaactagaattaccatgcatatgataaaagataactattaaaacaccaactctcaccctaaataaggaaaattcaggagcattctcatttgaatcagaaacaagacaaggatgcccactgtcaccactgttacttgacattattaaagaggttatagccaacaaggtaaaaccagaaaaataagcaagaaatgtaaaaattagaaactgagaaatatttccagtatttgcagatgatgttcaagttcccatagattttaatatcataatctaataatagagataagtcccataacttttgccatattctgttggtaagaagcaaatctcaggttccgtttgcactcaaagggatggatttgtacaaggtgtgactcagtaggtgtcaccttagggtatgcctgccccactaagagtatgagggcgcagttacccctcatcctacagatatacagatgtcccagtggagggacgccttaacttgccctgaacatacacatgcggggctgttgtacttaaagcctcctacttctatctcaattttcactctctgcattttcctttttttaaataaaatgtaccaaagccgtagggtaaatcctatgacacagtaaagaatagtctcagatttataagtggagaaaattcaaaagttctaagtccggggaatttcttagtaactcaaacaaaatgtcacactttctcacataataaagataagtgtttttattgattttacactatttgcttacagtaaatatataattgatgttttaaaataaaagcaggtttcatgcttcatgtaacaaagttaggttcagatactaatgtgaaaactcaactattcctgggaaaccatgttcaaaaaaatgcttcattggctaagcagtcttattttattattcaaatggactaaaaatgaggtatgaagtaattaaaagtaatatggtggctttaagtgcagagatggggtggcagaagctgtgaacacagaatgtaaaatcggtaactacaaaatggcacaaactacgaaagcaatatatttaaattactattttttaaaaaagaaggatcatttcagatcttcaccttcagatcctcactcagccctgcctcctatttcccataatcagccatttttttaattttatgattgctattactcaccttctagaatatatttttgtttatttgattgaacaacctcttcctgaaaattctgcccagttgggctggctgacattgatctcagtaattgtgtttttttcctttaacttgattatatttttttcattcgcctctctttaaatgaagtgtcccaagagccctaaattctctcttcaggtggtcgcttggtaggttacttcatcaataggttcatccaggtatagagagcaatggtgtaaggataacaaagatacaatttctcagaaagataacattttcaaaagtgctattaaagacagtgagttgttcagcaattcaggaaaaaaaagtctttaaatcagagggaaaaatatagagaaaaagtatttttcagaatacatgtcagtttctcctagaaatatatatacacaagtattgaataggtcccctgccaatgtaggacccaagacttttactctgtgacattccatttgtccttggctgtacggaataaaagccctttgacgatggcggcctccaatatcataatccgtatgggtgcggccatgccgtcctccctaccaagtttctgaagttgaatgaaccgcggaataaaggtacgccgttatacgccatgataactgttggcggagcgtagcttcaaaagtgttagtgggcatgcgcgcggttcaacagcgcctacggaaatcctaacgggaatgtaacccaaaccggaagtggcctagagcgaccatttagcttctgttgttaagtggatctaagcctatgtcgcttactggacgctgaagtgattgggaatattagcagtgggggttctgtagggtcaggaaggggcggctggctttgggggagtgatgaggggcttgttgggggtgggggtgcgtgataaagggatttctcggctgaagacgaggctgtgaggt

SEQ ID NO: 22373 - DNA, 2300 bp, Homo sapien
tatgtgggaaattatatcaatgataaccctgtttattgtgggatatcaatatttttaaagtgccaacacagtcatgataggacaatattttatgtgtgtgtgtgcgccttatgtatataagcatatatataatatataagcatattattatatacaggttgagtatcccttctccaaaatgcctgggatcagaagcattttggatttcagatacttacagattttggaatatttgcattatatttattggttgagcatccctaatctgaaaatccaagattaaatgctccaattagcatttcctttgagcgtcatgttagagttcaaaaagtttcagattttgggttttcagattaggaatacccaacctgtatgtacgtatatttctgtatctatgtatgtatatatatgcatatgcagacatatgtatatggtctggtcagcatatgtgtatgtatgcgtatgtatgtatgtatgtatgccctcagtgcagtggggtttgctgcagaattcactgcatagcaggagatgtaagcagatgagttattttttaagagaatctaatctaattgtttttataaaaattattccctattgaatatttatataatgaggttgtatcaacaatgattaactcctttattatacatacacatgaatgtgcatttttggtaaatgcataaatgagattctataatgtttactgatctttatattacagattttctcttcttttaggattagctcagcttgccccccctttccatctccaccatctatagtgagcctctccataattagtgccaaccattagtctcgttcatatttttacaccaggagtcaacaaactgtggccattggccaaatatggcctcccaactgtttttttaaaataaagttttattggaacacagccatgttcatttggacatgtattgtctgggcttcttttgtgctgcactggcagaattgagtagttttggcggagatcaaatagcccccaagctggaaactgaaaatatctactctctggctctttacagaaaatgtttgccagcacatgatacacacacaaacacacacacatacacacatattactatgttcatcatcatatacctgtgtaagtactctttcattgatttataaaactcagatctcttacgtgtgtggatggtatttttttcattctacaatccatgatggattgtacacacgtgtattctatgaggttgacctgccataatttatttagccattcccacagttttgattacttatttcctccccacacacattttttgctaaaaaacggagagggaactgttatcaatacttccgagaagcagaccagcataatcttttaagtgcacaggcccaggagccaggttcctgcatttgattcctggctccactctctaccctctgcatctgctgagcaagttatttggtctcatctattctggttttctcatctacaaaagggagatgatgatagtaccctacccccatgcatttggtgtgagaagtgtgtgtgtgttaaacccttggaactgcatggacagaccaagtgctgatgaattttagcgggcctcgtatccctgagcctgcctggttcccttgtgctgggtgtgggactgtggtgggagatttctgtcagctggaagtcttttccagaagggtgttagagatgggcacccatggctttagtctccataccccttcaaggttgataggggcccacacagctggtcaggaaccagcacagacctcaggctgtgtctaaaacaaggtgactgcacatgcaggagcctgtgctgggccctggagagcaaatctgttctgtgtctcactggcctctccctgtccaggggcgtagtatcagtgaccatgtcccacctcctgagaaaggtggaagagtctcacctggggagtccaggtacaagggctggccggccgtagatgactggtgtggggtggaaaggctgcagaggcctctccatggtggtgaggggtggaaatagtgtgcacctgggtcctgggagtggcaccctgaccagtttcagggaggaaggtggcagggccctaggacaagtgtgttaaaaacttgagcccacagtgtagacacactggttccaaagacccctcaggatgtgcctcccttctcagatctgggctttccctgttcctaagcatcacctggggggatcactctgggtcctcatctccagccacatgttcactcctcacgtgggcctccctaactgtccccctcagggcaagcccttcctccccacttc

SEQ ID NO: 22374 - DNA, 2300 bp, Homo sapien
cttttgatttagtcctccctctttgttcttgttttttgcctcctgcttaatatcttctggggaggcctcttcacagtcctcatatcctgcccatcacccctcttctcattctgtttgtgggtgactctgaatcgcaatgtccaccagcctggccctccaaatgccccacggaagatcccatctaggcctctcatatctcagtgcccaactgaccagctctcacaccccaaggcagaaacttacctaaccaagctccccgtctcccggaagcaacaccacctttcacccagcttctctatggaagacaactcagctttttcaacctctgaatctgcagtcacctagtactggggttcacttcctgaggtccttatcagatccagttgcatccctgttttagttacctactcacctcagccagatgaacttcccattggtttttcaaccccttgcatctttggccaggctgatctcattgcgcaagacacttccctaaacactgtggtagacctaactcttaccttcaagtctcagctcaaactttcattcattcatttaacaaatacccactgagtgccgcctatgtacccagcatgctctaggtactgggacacagcagtgagcaagataggaaaggttgcagctgtcagggcactgatgttctaatggaggaaccaggccatggataaggaagtaaatgactaagatgctttccaaatacgagggaattatctttggtggtatgactgggggggggggaacagggagggggttctttagggtggctggaggcctttgagctgaggccaacaaaatgagtagacagatattgggtcagggtgggaagaatgctccaaattgagttaatagcaaatgcaaaggacatgaagggcagggcctggctgtgttcagcccattggaaagtgtgttgtgactgaggacgaccagaaaggaccagaagcttagaggttggcaggataaggagcttggattttattctgagatgggaaccactggatgattttaagctggggggcagggtagtgactggtgacaggatctgatttatatttccacaggcttcctggcactgtgcctgaatagagggtggagtgtggcaagggaagaaacagaacagtgaggaggcccctgcagtgatgcaggtgaggagtaacggtagctcggagcagaatggagacagtggaagtggagagaagtggttagattctgggcctcttctggagatagagacgatgagactcacacaagatttggttgcgggagggaagcggatgagagaaacagaacactggcgaccattccaagattttggcttgagcacttggatggacagttagtggggaggaggcagaaagattgtgagaggagcaggtttaggacagggaatctgggatttcgtttggatgtggtagatttgaggtcctttgctctgtaaggtctttcctgaaccctgggctgggtctagcacctcctctgtgttcccacagcctcctgagcaccccctgggccagccctgaccactctgtgttgtaaccaggacagaggagggtgcactcgcactgcacccaggttgaagggcgagagtgagaaggtgtcaggctgggccgcagaatccaaagcgggtcagcaggtacaacagctgcttagagcactcccacccggagagagggattgagagatcacggaaaagggtgccatctttccagggacgcctaccagaacgcgggggagagaaatacagagaccctcaactccgccacgtcatcgcgacaaagggccaggaccggccggccgcgggatgggcgctcacctgggcagaactggagctggaagggccaacctccaaagaaacgaggagcgggcggaaggactacgactcccggaaggctttgggcccatccgcctacgactcccaggtgcccctgcgttgcgtcgtcccgaaacacttgcggctctcggacaaactgggcctacagttcccagagatcctcgcggcagcgctgcgcattctgcgcacgcctcccagagtgtactaggccggtccggcccgcttcccgtctgcgcctgcgcaagcacaatagccgtgccagaattctctgccagctgctgtgcactgctgtcagtgcaaagatgggatggacttttttttcagattttctgctgttgtgggagtatggcaagagtttgagggggcggagaaagagattgggaatgtgaaaagggaagatagcacctgcgctaagcacattcctaggattgggccgcgtctcggggatgca

SEQ ID NO: 22375 - DNA, 2300 bp, Homo sapien
aaaaaagactagtgcaataatggagataggtcaggctcaactcggaatacagcaaagaccaggggggtttatgggcaagaagcatagtgcagcaggtgagggaggctggccgtgtgtgttagtggacggaaaactactaagaggagacactgaagataccgggattctttctaaactgacttaacaggattcttgctgaaagcaggccagcatgatcagataccaagggtgagggctagggaatttgatcagatagtgaaggcgatcagatatcaagagtcttgcaaaaccaacttagcaggattcttgctacagctggacaaggcagtcccaaggacaaagcctagttgaaaaaagggttcagaggagctttcataagtttggttaagaagagagtctttgtgactctttagaaaaaaaaatacaaaaatacaaaatttggcacacataggatgatttttggactgagaaaacacatcaaatcacaaaatctaaaatgtcaaaatatgagacaactcagaaaaatggcatactatgtttgttaatagtatagtctacctgtctgctacacctgcatactttttccctatatttttgactgattttctttgattgccttcataatggtgataatttttttctttttgagacagagtctcacttggtcacccaggctggagtgcagtaccgtgatcttggctcactgcaacctctgcctcctgggttcaagtgattctcctgcctcagcctctggagtagctgggactataggtgtgcgccactatgcctggctaaatttttgtacttttagtagagaggaggtttctccatgttggccaggctggtctcgaactcctgatctcaggtggtccacccgcctcctcctcccaaagtgcttgggattacagatgtgagccactgtacccggccaatattggagaataattttataatacaatttttatagatagaatagaaagagaagtcggtatttcttctggcatgggtggttgacgtttgttttgatcattgatagtttaagaaactgtctttattctcacaacacattaatcggaatgtgaaaaatttttaatatattgttaaattttgggaaactattatgaaatttctttcataaaagagcagtaacaaggcaggttatttccacacattgcgtgggcccctcctgggcatctgaaaagtggatcctgcaagggagggcattgaagattgagcttcatcagcctcacagtggcaaatttgcttctgtagctccttaataggatgaggctttagcagggcttgtgtttcactgccgtcccacaagaccctcaggtccatcaagacccaaagtggactgtgctgtgtcccaagaatcttcttaacataagagtgcttcagctctctcatgctctgaccctccacgaaatttgggtcaaaaaaattttttttcagcccttttgaacttttttttttttttttttaaggcagggtttcactctgttgcccaggctggaatgccgtagtgcgatcacggctcacagcaacctcaaactcctgggctcaaggaattctcctatttcagtgccccggaggagctgagactataggtgtgccaccacaccagctaatagtttttattttttgtagagatggtgacttgctatgttgcccaggctggtctcagactcctgggctcaaacaaccctcccacctcagcctcccgaagtgctgggattacaggcatgagctaccatgcctggtcactttgaacatttaaaatcaaatttaaaattatgtatttccagaatgtttcatggtttttaggtggagggtggttctgacatctcacctcatcaccaggacaagcccttgtttctcttttctttctgcattcagccccctgaggatctcactcatgactgaaacatcatttgaggggtgatcacctccagatcctcagctggacaagcctcacatcgtctgggggcctcagtatcttcacctgcggcgtccagtcggggtgggagcagaatggcttcccagcccccgcctcaccccaacagcacgtgatgcccaagttccccttctgtgcgcgtccacagctctcactcaccctccggcttcctgtcggggctttctcagccccaccccacgtttggacatttggagcatttccttccctgacagccggacctgggactgggctggggccctggcggatggagacatgctgcccctgctgctgctgcccctgctgtgggggggtgagtgagctgagggaggagggacaggcacag

SEQ ID NO: 22376 - DNA, 2300 bp, Homo sapien
agctggacaagaaaaaagtgaacttcttatgagagctcccaaatctcttcatgatcagacccaggacacctcccagacctaccctcctaccatcttccccactgatcacccctcaatgctggcatatggctattttccaagcacaccacgtgtgttcctaccttgggacttttaaatgtgcggttcccttggaatggataccagtggactcattcccacacgcccttcgcatctttactcaaatgtcatctcctccaagtggccccccaagccatgctgtaaaaaattttatcatcatgcctgtcataccaacactgtgggaggctgagacgggcggatcacctgaggtcgggagttcgagcccagcctgaccaacatggagaaaccccatctctactaaaaatacaaaattagccaggtgtggtggcacatgcctgtaatcccagctacttgagaggctgaggcaggagaatcgcttgaacctgggaggcagaggttgcagtgagctgagatcacaccattgcactccagcctgggcaacaagagcgaaactccgtctcaaaaaaaaaaaaaaaaaaaaaaaaattatcagtcctcactgattcctcttctgtgttcctgtttttattttttcttagaatatattattctttagcagactgtgtattttaatttcatattaaatgtttgtcttccctctaggatttttattttattttctctttttcttttcttttcttttttttttttttgagatggaatctcgctctgtcgcccaggctggagtgcagtggtgcgatctcggctcactgcaagctccacctcccgggttacgccgtcctcctgcctcagcccccccagtagctgggactacaggcgcccgccaccacgcccggctaattttttgtatttttagtagagacggggtttcaccatgttagccaggacggtcttgatctcctgacctcgtgatccacccgcctcggtctcccaaagtgctgggattacaggcgtgagccactgcgcccggccttctttttttactgttcttcgtggagcaggggtatgcataagcagtgtgcccagaggagcccccactaggatttttgacttaccttctcatcctaagagtttatcctttgctgtatctccagctcctaaaacagggggcctggtgcaccataggcgcccatgaagcatcagttgaatgagtgaattctcggggccagacactgtcctaagcactttacacatgagacctcactgaatccccacacagcaattctattattgtctgcatttttcagctgagcaaactgaggcacagagagggtaggtaacttttgtaaagttcaacagccggtaggtgaggggtctgggttcacacttggtattccatatcctcaacgttcacatttcaaatgcccggctctcaagcctcatctggctgtcaacatcagggatggggtctgacgctgcctgggacaaggacaaggatgagatgaggttcccaaatccaactggtggtggggaccacatctctcttgactgctaaggacccggtcatgtccacctgatgtgtttgtccctgacaacttgccttccctctggaaagaggaaagtcttccccacctgaaacccccagcgtgtgcttccctcaccacagctcctatcatgtcataaaggatttattctcccatctcgctgagggtcccgaggccctgactcccagggagctggccaagtggtgttctccttcctatgtagacaaaggtgcataaggaaagtgctgcagctatgggacctggtgacctcaggagtctagacttacaagtctggacaagcccctctgggggcctcagtatcttcaccatcggcgtccagtgggggtgggagcagaatggcttcccagccccagcctcaccccaacagcacgtgatgcccaagttccccttctgtgcgcgtccacagctctcactcaccctccggcttcctgtcggggctttctcagccccaccccacgtttggacatttggagcatttccttccctgacagccggacctgggactgggctggggccctggcggatggagacatgctgcccctgctgctgctgcccctgctgtgggggggtgagtgagctgagggaggagggacaggcacaggggtgagaaggggggctggagctgcagctgagcttctgtgtccccccagggtccctgcaggagaagccagtgtacgagctgcaagtgcagaagtcggtgacggtgcaggagggcctgtgcgtccttgtgccctg

SEQ ID NO: 22377 - DNA, 2300 bp, Homo sapien
gggggaggggaggaaagagagagacctaagagggagggaaggagagagagagggagagagacagagactgagagagagcaggagacggaggtgagggatggagagagggaaggggcggagggagaggaagtgaggaaagacatccgaaaaaagggggtggagaagggtgagaaagaggagagagactgagagagggccagagagagaatgagagagacaaagagggggaagggggagaaggggaggatgaaagacagaaggtagaggaaaagcaggagaaagagggggagagaaggaagaaaacagaagcggggagaggagagaggcgatgggcagagagagaagccagcgcagagccagggagggatgtcctgatgcaggaggaggctgggaaccagggaaggtggaaagaaagagggagagagaaaaaggcagggccagagagacctggactgcgagaaaggaaccggaaggtgcgcctggagcaggggcagcgagaaccagacagtccaggaggaggggctgggcacgggagagaccccagctggaggggctcagagcccaggggtggggagggtgggtgctgggtcccggggtccagaagctggagaaggctggggacacctcctggattcaagagggaggacagagatggggctgggcagactttgggagcctcttcccctctctgaggctcagccccctcacctgccaaatggggatgctgagggcacctcgctctctggagtgggaggtgtcagggagaggactggtgctcagggcctggtatggggtcagcgctgggagattgtggctgtcatagttgtaaatgacccaaagaagggaggagagaggaaagaaagcacctagggaggctctgatggttggctagcccctggcctccttagccctgggcctggagtctctgcagactgacaggagggtaggtaggaagcaggtgtgcccaaagggccaaattacgagacaaatgaggttccctcccagccggcacccaggaagccaggttttctatcaggccatgccttccccaggaggcctgcctggccggagggaggaggggctgggggcagggactcctgggtctctggggagaaggaggctttggatctggactcatgagtctgagggaggaaggggctgagtccttggattccaggaacatttggggagaaaagggccagaggcctggattcctgggtctgtggtgaggaagggcctagacttctgggttctttagggaggagggggatgagagccttgactccagggtccctgatgaggaaggggctgagggcctggactcctgggttccttggggaggaggggccgggggcccggactcctgggtcctggcacccacccgtagaaccgaccttgcggggccttcgccgcacacaagctcgtgtctgtgggtccgtgtcgggggctcaccatcgcggctggggcctccccggccctccccctcatccctggtcctcctggtccctgtctgtctgtctgtcgggtctgtccacctgccgcgccccccgggctgaggtaggaggttgtatagttgaggaggacacccaaggagatcactatacggcctcctagctttccccaggctgcgccctgcacgggacggggcccggcggggacccccagccccactcagggacccttagccccactgggctgccccagggaccctgggaggaagagccgggctcttttctgtccttgtccctgcatcccctccttcccctgaaatctgttttccttccctgtctgtctccatctctgctgtgtctctgtggcttctgtgtctctttcacagtggatcctctgactccctcttattctggctttctaggtctctgcccctcccgatatctctctgtgtctctatttctgtcgtttttggtctttctgtctctggctctcagaatgtctctgtgcctatctccatctctgacccccaccccagggtctaccgggccaccgcacaccatgttgccagtctctaggtccctgagaccctttaacctgtgaggacatccagggtcacaggtgaggttcttgggagcctggcgtctggcccaaccacacacctggggaattgctggcctgacttctgacccctgactcctcatacccttcctccagagcatgacatttgaccaccaactgaaacctgacctctgaccccagaccactggcccttcccccgccctgtggtgacttcataaaggttactagcttctcccctggccttgagacccacacgatggccctgctgg

SEQ ID NO: 22378 - DNA, 2300 bp, Homo sapien
ctggccctggatgccccctgggtggatgggaaccttccctcttccgggattgttgacaggacgcttggagggcaaagcaggaagcaaaaggagcgactgtgggtgtgggaataagccctgagctcctggacctaagaggaagccagtttattctatagcgcagggctctgtaactcctgcaactccgagcctccacagttccagggtctggcacctcgtggggatcatggccatggtgatcaggcatgattaccgcccatgctgcccatcggcattgcgtggcccccagccctgaggtctcttcgcacagccacacacctcaaggctgtcacatgtgcctgtctcaccaggacagtcacaccttgtctcttttcactgctgtcacctgagtgatccactctgctgttcctgttttcccgccctctaattgcctcacacctcaaaaatgtggaatcactttataagaaatctgtgtgtgtgtgtgagtgtgagtgtatgtctctgagcgtgtctgtgtgcgagtgtgtgtgtgttctatcctagaggaagatgccttccctaagatcaggctcatcaggcagccccaacccctgcactgagctccatggccatcctaggaggcaagaagattgtcccactttacagatgggtaagttgaggccaggagaggggcagtgacacacccagaacttcatagccagtaagagtgtgagccatgcagccatggcagaacctatgcctacccgaccccatctggacttccagctctaggcaatttctgcagcgtcccttccccctcaccaccttcagcccctggctcttagagctgccttcagccttcgtttggacaagtagctgagctcaatgtcttcccagctttcccctcccggatcactgcccaactctgggggcctccttcctctgccctgggccctcccacatacccatttcttaggggctccaagtccacatctcccatctccccatccccacacactcaccctgggcagcagccagctcctgcagggcatgggtcatctgggtgaaggtgtcatgcaggtggcttctctcatcatagtctggcggtgagggagggagcaggggctgggggaggcagctccccgcaacaccatgtccctaatgcgaacattctgtttctgagtctctgccctcccaagtctgtatcctcccctctctgactctttgccccacagtcgctatgcttcctgagtccctcccaagtctctatcctccctgagtctctgcccccgaccagtcgctatcctgcttcccctagtctctgcctcatctctgtcctcctctctctgggtttccatcctctttgagtctccatcttccaccctctgagtctccatcctcccctctctgggtctctattccctctccagtctccaacctctcctgactctccatcctcccctttctatgagtctccatcctcctgactctccatcctcccgagtgtccatcctcccctctctgactctccatactcctgagtctccatctttccgagtctccatcttcctctctctctgagtctccatcctccccctctctgagtctccatcttcccctctctgactctccatcctcccctctctgagtctttgccctgctgtcttcccctgtctgtgtctctctgtccctaagtctctgttgttctcatggtctttgagcctttctcctctgactgtttctctctgtctgtccctcagcctgaccctctgggcctctcctgccctccctctgcaccttccccaggacactgatgaagtgtggatggtctcctcactgatttcggtgtcagagaggccctggaaggcggccgtgaaggcctcctcacactcttcaagcttggggctccgcatcccaacaaacatctggcagatgcggaggcgctcagagtaggttgtgaagcagaggagacaggcccaggcgggcaccctgaagacagccagggccagcagggcagacgggacggcactggccagagccagcagggccatcgtgtgggtctcaaggccaggggagaagctagtaacctttatgaagtcaccacagggcgggggaagggccagtggtctggggtcagaggtcaggtttcagttggtggtcaaatgtcatgctctggaggaagggtatgaggagtcaggggtcagaagtcaggccagcaattccccaggtgtgtggttgggccagacgccaggctcccaagaacctcacctgtgaccctggatgtcctcacaggttaaagggtctcagggacctagagactg

SEQ ID NO: 22379 - DNA, 2300 bp, Homo sapien
aggaaaaatgtgctaaaaacaagccagcatgtgcaaaggccctgaggtgctagggaatgtggtggttttcatattaaaggaaatgaggccaggcacggtggctcatgcctgtaaccccagcactttgggaggctgaggtgggtggatcacttgaggtcaggagttcgagaccagcctggccaacatggtgaaaccccatctctactaaaaacacaaaaattagccaggcgtggtggtgcacacctgcagtccctgctactcgggaggctagggcaggagaatcacttgaacccaggaggcggaggttgcggtgagccgagatcgcaccactgcactccagcctgggtgacagtgagacactgtctgaataaaataaaataaaggaaatgaaaggtgggcagtagggatgggacagggagggagggggaactaggccaaaccatgtaagacctaataggccttggtgaggaatttgatctttatcctccccttctccccccaacaagctacatgcaggtgatgtccaggaggacttccatcctggagagattcaggaggcagaagaaaggagacttagggacttgttagccttcaactacagagggcgggtgatgagaagaggagcagagaatatggtaatgagaggggtgaagaggggccagggaagggcagataccatgacagtacgtcctgtgagctagggccagcctagccctagccaggctagatcagaatgcaggaccaaggaccaagccctgggggaagggctttactacacaggccgtcctcccctccactctccaggatcctttgaggttgccttccctgatgctgcggagaaaatgaagaaggtcattacacagcttaaagaaggtaaaatacactccatctctccttccccagacacacacacacacaattagaaaaccccacttttggccggggatggtggctcacgcctgtaatcccagcactttggaaggctgaggcgggcagatcacttgagatcaggagttcaaaagcagtctgaccaacatggtgatacccatatctactaaagatactaaaattagctgggcgtggtaacgcatgcttgtaatctcatctactcaggaggctgaggcaggaaaattgcttgaaccctggaggcggggttgcagtgacccgagatcggcactccagcctgggtgacagagcaagactccatctcaaaacgaaacccactcctgagaccccccatccactccccgtacaatcccctggccccatctctgagcctcagaccttgagggacgactatttccccgcgtggaccatttttgatctggccccgccccttcgatgaaaggtttcgtctccaactgagcccctttccgggactactactaacctggccacgcctcttctctaactgggccaccaccttagccttggtctcctgcaaggatcgcccaggatctagccccgcctcctcggtggaatacacctggattgcccatccccatcagggcctacagaaaaccagtgtgtttccctctaaaccccaagtagaaggctggcagcagtcctgggcctgacctcctagtggaatgctcaggcttggccccggccccaggtggaacccagccggcttgaccccgcccccaggttatgacgaaagcttggccccgccccctcggagcaatgcttcgggccttgtaacattagctaggggagcatcgggcaagggttcttcccatgactgtaaggtagtgatgtttcctcttcctccacagcccaggcttgcatccctccctgcggtaaggacttcatctaaaacttggaaattgcggggtaagggaggcggtcggggacgaaacgtacgacatcaagtgtgggaaagcgggtgggcttcacatccttaggaagccaataagatccctggagaaaaggaagaaaaccaagtattgctctaaatcctcagaaggtgtgtgtgagagccgaagcaaaccaataggaatcctagagggcggagaggagtgagagtcggccaaagacagcagggagggcggggtcaagatgccacctggccgatggaccccgggaagctgcatggatctcaaatgggccaagggccccgggcttggaagggcaggtggcgcctagacccagcgttcccgctccacaggtctccaggagttcgcccggcgtttcctctgcagcgggtgctactctagggtctgcgacctcccgctggactgcccaggtgagggggcggggcctcggggtgcaggaggccaacctgagaaaagggaccagag

SEQ ID NO: 22380 - DNA, 2300 bp, Homo sapien
acttggtgtctggcaggggagagctccgggacaggctggaagagatggaactgcagggagagacgaagatgtagaaacagagaaatggagagaaactgaatgagagagacagagacagagaaacacatacagagatagagccttacaaagagataggtgcggtggctcacgcctgtaatcccaacactttggaaggccaaggcagatggatcacttgaggtcaggagttggagaccagcctggcctacatagtgaaaccccatctctactaaaaatacaaaaaattagccaggtgtggtggtgggcgcttgtagttccagctactcgggaggctaaggcaggagaatcgcttgaacccgggaggcggaggttgcagtgagccgagctcacgccactgcactccagcctaggtgagagagtgagactccgtctcaaaaaaaaaaaaaaaaaaagagagagatggggatgcagagagacggaaggaggatagagacagagctagagagggagggagatagagggaaaaagagacagagagaaagagacacacacacatggacacacagtgagaaagtcagggagaggcactcagaaagaaagagagccacacaagaagaaagtcagggagacttcagaaatgcaaagggacagacactcccaggtaaaagcagagagagaatggctgtgaggggggatgaggaggagaaacagacaggaatacacagaggcagagacccaaatagagggaccgagaaacagagatggggtgacagatacaaaatgacagagatttggggagggacagacgaggagagagaagcacgggggaatttctctctgctgctccatgtctttcagcctgtcctggagctggcccgtgccagacaccaaaggtcgttggagtcacaggcagggagaaaagaacgaggcagctaccgaggcagctaccaaggccgaaagtgagacatcaatagttcacagtaagaggagcagagagaagaacagaattagatacagatagtttttttaaaaaattcatggaaagaagggcatgtaaacagacatttatcacagatctggtcctgaggggctggggttcgggcaccccaggtcccgcatctcttttcacccttcctctgactcagtttccctgatgggtgacagcactgacagaccccggctggctccccagggtcagctgaccgacaactctctgtgttcatccctgagtccctggggatacaaatcccagcgccccagctctccaccccagaccctggtgcacacacgcagacccacgtcagttaggcgctgaatggacagatgttcactcacagctccggttccaggcagccgtgcctcgggccagcgtacacacaggcacacccacagcacgcacgtgtgtgagtttcgttccatctgccagttgctgagacatgtccctggggggcccaacccagagatggattctggggacaggagaggcggctgtggggagaagcagggcgggggtgactggggaaggtgagaagggggaggtggggagagctttaaagcaagaagagaaagaaatgagggtgagaggaggcaagagaagtggagaggaagaaagggatggagagaaagacagaaacttggagaaatgtggtaatggggagagagatgagggtaccaacaaagagatgaggagaaatagtgggttagggagaaagaaagggatggagggaaatacagggataggggatggggggatgaggggaacccccaaaatgcaagtgaggtggaagagaaaaatcaggggagacaagggacgagaggggggaggaagagagaagaagacatagaggagggagggagaggagggggagtgatggcagagaggactagaggaggggcgcgggtagacatgggggcctgggaagggaggcccgtctggctgaggggggtgggagtaatagcgggaagcgggtggagctgcccggctgggccgtgacctcagagcccctggcccagcttagcctgactgacgtcagcgctcgctcccgcccccgcctgcgctggtcttcaaatgacccccctccagctctctggccacagagaggctgggagagcaagccggagagaagagagagcccggccagacccactgcgatgagacaggtgtgtgtgtgtgtgtgtgtgtgtgtgtgtgtgtgtgtgtatacagccatgtggggaaaactactgccatatgtgtgaccacgtgtgttggggaactgtgtgtgcatgatttcatgtgtgtatccatgtgcctgacagtg

SEQ ID NO: 22381 - DNA, 2300 bp, Homo sapien
ttgacatttgggcccttctcctctgtgcataatgatgtcctctgccattccctttattttaatccccttacaaagtgttggcttccatgtgactcctaggcacgtcttcatttgttacccttcataccttgggaatcttctaaaatgcatctgttgttatgatcccaagaaaatgtttataaaatacaaacacaaatgtttataaagtacaaatgaacatatcacccttctgattaaagatcttcagtgattctccatctcatccccatcctcctggtgtgggatgctggagtgtagcagtccccaacatttttggcaccagggaccagtttcataaaaaacaatttctccatggggtggcggggtagatggtttcaggatgatttaagcacattgcatttattgtagactttatttctattattattattacattgtaatacacaatgaaataattatacaactcacaatgatgtagaatccgtgggagccctgagcttgctttcccgcaactagacagtcccatctgggagtgatgggagacagtgacagatcatcaggcattagattctcataaggagcacacaacccagatccctggcatgcacagttcacagtagggttcacactgttatgagaatctaatgccgccactaatctgacaggaggcagagctcaggcagtaatgccagcaatggggagtggctataaatacagatgaagcttctcttgctcacctgccagtcacctgctgtgcagcccacttcctaacaggccacagaccggtatcggtctgtgtattggtctatggcctggaggttggggacccctgctgtaatgtgaagtcaggagctgtggtagctttcttggagccatgaagtggcaatccccaggaaaaaaagtcaccatattagggataaaaaagagaaaagattaaaatgaatgtagttcttgatgatattttccagatataacctaacctagtattaccctcttgcaaaattcttgtaaagtaaaccataaatttcgtcttggttctaagctaagcttgtccagcccatggcctaagatggctttgaatgcagcccaacacaaattcataaactttcttaaaacattatcagatttttgggggatttttttttttttttttttttttagctcatcaggtatcgttagtgttagtgtattttatgtgtggcccaagacaattcttcttcttccagtgtggcccagggaaggcaaaagattggacaccccttgttgaagccattgttaggtgtaattgtaaattataaattacttagaattaaaaacagcccggctcatgcctgtaatcccagcatttggggaggctgaggcaggaggatcactaaacccaggggtctgagacatgcctgggcaacgtagcaggatactgtctctaaaagaaaagaaaaaacagtcttaatgcaacaatgccttggtaataatgcttttagaatcagtgtcgttatctctgattctgtaactgtcttaccatatttctccatatcactctgatacccttggaaggatgcttaacatttcagaaaaacggttatttctttgggctagaagactacaaatgagcttccacaagatcagaggattatggggttaatcttggtggtgtgcatgggtgtggacgcgctgtcctgccaactgtctcaacttcccccactcccttacctctctctgtgtttctggtctccatccctcatgacttcttctcttcctttcattgcctccctctgattcttctcaccacagtgcttgctgctttctttaccttgacccttggagggagcaggggcccggacacttggatttcttggcccttgttgttgagagcactgaacctctgcatcccacagagactgaggctgagaaatacagtcaggtacatgagtttctaaacaggcccagcccactgtcctaatgccattaaagcagacagtatattggtgtattcttggggccatcaaaaatcagaagaagctcagacttcctatttcctgctacccagctggttttagttcctttacccctcctcctgttccttggtgtatgttttgctgcaatcattagagcctgagtcactctccccaggagacccagacctagaactacccagagcaagaccacagctggtgaacagtccaggtaagaaacatattctgggggactgggtagcttgacatagacacacttaatacactggtgaacacaatagactctttgtttgaagaaggatgtggagttgaagaataattttttta

SEQ ID NO: 22382 - DNA, 2300 bp, Homo sapien
ttctcaaaagaagacatttatgcagccaaaagacacatgaaaaaatgctcatcatcactggccatcagagaaatgcaaatcaaaaccacaatgagataccatctcacaccagttagaatggcaatcattaaaaagtcaggaaaaaacaggtgctggaaaggggagaaataggaacacttttacactgttggtgggactgtaaactagttcaaccattgtggaagtcagtgtggtgattcctcagggatctagaactagaaataccatttgacccagccatcccattactgggtatatacccaaaggactataaatcatgctgctgtaaagacacatgcacacgtatgtttattgcagcactattcacaatagcaaagacttggaaccaacccaaatgtccaacaatgatagactggattaagaaaatgtggcacatatacaccatggaatactatgcagccataaaaaatgatgagttcatgtcctttgtagggacatggatgaaattggaaatcatcattctcagtaaactatcacaaggacaaaaaaccaaacaccgcatgttctcactcatagatgggaattgaacaatgaggaaacatggacacaggaaggggaacatcacactctggggactgttgtggggtggggggaggggggagggatagcattgggagatatacctaatgctaaatgacgagttaatgggtgcagcacaccagcatggcacatgtatacatatgtaactaacctgcacattgtgcacatgtaccctaaaacttaaagtataataataaaaatatatatatatataagaaagaaattttaagaagaaattctaagttctttttacagcattcaagaccaaccaagaaattgcctctgccgccctctacatacttaatgcttattgctgtctgccttatcatctatgctctggtaaacaaaagtaacctgcttttttgtgacccctttcgtgggtatttttactcccctctgacaagaatgcattattttttctcctttatctgagtctttaagactcagcctacatgttccctcctccggatattgactctagatccgtgaatctgagttagtggttccttttagaggacctcacaaggagccaggcatctgtctatcactacgtgcccccaccctattgtaactaagcactgcattctcacctctctattcaggtggtccgcagagcccatgtctgattgatctctatgtctccagcagccagcaaggaagcacctctttagagacctgcacctatacaatacctaccaccttttatttctcgatatgtgaactccattgagaacaaacgagtaaatgtaggtaatgtgccttcttcttttcttttcttttctttttttttttagatggagtctcgctctgttgcccaggctggagtttagtggcacaatctcggctcactgtaacctccgcctcccaggttcaagcgattctgccgcctcagcctaccaagtagttgggattacaggtgcccaccaccacgcccagctaattttttttgtatttttagtagaggtggggtttcatgatgttggctaggatggttttcaactcctgacctcaagtgatccacccacctcggcctcccaaagtgctaggattacaggtgtgagccacagcgcccagccagtaatgtgccttcttaagttctgtgagccattctaacaaattatcagaacagaggaaggggttataaacatccccccacccccgatttatagccagtcagtcagaagtacaggtggccacctgggacttggattggtgtctgaagtgaggacagttttgggagagtgagccctttaacttgtgggatctgacactaactccaggtagacagcgtcggagctgaattgaattgtgagatacccagtggtgtccccagagaactggagaattgcttgatatggaaaagacccacacatttgatgccagaagtactgcataagtcgagaattgagtttgacttaatcatcatatttgggcttgattgcgtggctgaaactcttcccacttcagtaattgtttctttcattttcatgaaactctgaagaaggaagggctggacattcagattccttgacccttgacatttggaagcatgaactccagtctctcacagaaggctagaggtgaaggaacattcagacacattggtttctaagaagagtccgctgacaacatacccaaggtgtcttctgaaaattataagaaatcctgagtttctgttaggggattggctccagctccat

SEQ ID NO: 22383 - DNA, 2300 bp, Homo sapien
gggagagtgagccctttaacttgtgggatctgacactaactccaggtagacagcgtcggagctgaattgaattgtgagatacccagtggtgtccccagagaactggagaattgcttgatatggaaaagacccacacatttgatgccagaagtactgcataagtcgagaattgagtttgacttaatcatcatatttgggcttgattgcgtggctgaaactcttcccacttcagtaattgtttctttcattttcatgaaactctgaagaaggaagggctggacattcagattccttgacccttgacatttggaagcatgaactccagtctctcacagaaggctagaggtgaaggaacattcagacacattggtttctaagaagagtccgctgacaacatacccaaggtgtcttctgaaaattataagaaatcctgagtttctgttaggggattggctccagctccattgtccctcccccatcattcagtagtctccgcgaaagcccttagagccggtgttgctccacaggaagccaagaagcacacaggaaaaggagcttagctgctggtaagttggggactgacaatttaaaatttatcaatggaactcctgctctctgacaaacacctcctaaattctagagcagtgctgtaatggagcatccacttgccacaggtggcttttgagtgcctatgtttctatcttgatctgaaatgtgcttaagtgtaaaatatacttagtgtagtttaatcattagtatgatcaaaataatacaatttatctcgttaataactttcattttggtaacgtgttccaatgattttttttatttgcggggttaaatgaaacatattattataattaatttctcccaatgattttacttttttaacatggctactagaaagttgtaagtcacgtgtgtggctggcatttagggcttgcattaccctgtctctactaaaaatgcaaacaacaaactagccaggcgtagtggtgggagcctgtaatcccagctactcaggaggctgaggcaggagaatcgcttgaacctaggaggccgaggttgcagtgagccgatatcgtgccattgcactccagcctgggcaagaagagtgaaactctaactcaaagataaataaacatgtgaaggagccaagtgtgaggagcttaagaggaagagcatggtaggcagaaggaacagagaaggcagaagccccgagatgacaatgagctgcatgttcaaggaatcagagcccgttatgggtggagcccagtgtgtcccacgagagtgcagagatgaggtctgaggaatgcacagggcaggtccaggggtacttgagggaacttaagataaggataagttagaagtttggaagccattagaaggtgttgaaaatagcatcaccattttattggaccttttttttttttttttttgagacagaatcttgctctgtcgcccaggctgaagtgcagtggcgcagtctcggctcactgcaaactctgcctctcagggtcaagcgattctcctgcctcagcctcccaagtagctgggattacaggcacccgccatcacgcccagctaatttttgtgtttttttagtagagacggggtttcatcatgttgggcaggttggtcttgaactcctgacctcaggtgatccacccacctcagcctcccaaagtgctgggattacaggcatgagccactcccggcccttattggactttttttttttttttgagacagagttttgctcttgttgcccaggctggagtgcaatggcacgatctcagctcactgcaacctccgcctccctggttcaagcgattctcctgcgtcagcctcccgagcatctggaattacaggcacgtgccaccacgcccagctaattttgtatttttagtagagatggggtttcttcatgttggccaggttggtctcgaactcctgacctctggtgacccacctgcctcggcctcccaaagtgctgggattacaggtgtgagccactgcacctggcccttattgaactttttaaaagctcatttggtttccttctggagattggattgtagggcaggggaaagtaggaccaggaacaacctatttgcaaagttggcgcaaacattcctgcctgacaggaccatggacacaggttgtagagatagagatggctctggctgtgcattcagcagattctgtagatagaattaataggacttggatgggattgtggtgagagaaagtgaaatgaaagataagttctagtttggaagttttaacaactgaatgtt

SEQ ID NO: 22384 - DNA, 2300 bp, Homo sapien
acctcctaaattctagagcagtgctgtaatggagcatccacttgccacaggtggcttttgagtgcctatgtttctatcttgatctgaaatgtgcttaagtgtaaaatatacttagtgtagtttaatcattagtatgatcaaaataatacaatttatctcgttaataactttcattttggtaacgtgttccaatgattttttttatttgcggggttaaatgaaacatattattataattaatttctcccaatgattttacttttttaacatggctactagaaagttgtaagtcacgtgtgtggctggcatttagggcttgcattaccctgtctctactaaaaatgcaaacaacaaactagccaggcgtagtggtgggagcctgtaatcccagctactcaggaggctgaggcaggagaatcgcttgaacctaggaggccgaggttgcagtgagccgatatcgtgccattgcactccagcctgggcaagaagagtgaaactctaactcaaagataaataaacatgtgaaggagccaagtgtgaggagcttaagaggaagagcatggtaggcagaaggaacagagaaggcagaagccccgagatgacaatgagctgcatgttcaaggaatcagagcccgttatgggtggagcccagtgtgtcccacgagagtgcagagatgaggtctgaggaatgcacagggcaggtccaggggtacttgagggaacttaagataaggataagttagaagtttggaagccattagaaggtgttgaaaatagcatcaccattttattggaccttttttttttttttttttgagacagaatcttgctctgtcgcccaggctgaagtgcagtggcgcagtctcggctcactgcaaactctgcctctcagggtcaagcgattctcctgcctcagcctcccaagtagctgggattacaggcacccgccatcacgcccagctaatttttgtgtttttttagtagagacggggtttcatcatgttgggcaggttggtcttgaactcctgacctcaggtgatccacccacctcagcctcccaaagtgctgggattacaggcatgagccactcccggcccttattggactttttttttttttttgagacagagttttgctcttgttgcccaggctggagtgcaatggcacgatctcagctcactgcaacctccgcctccctggttcaagcgattctcctgcgtcagcctcccgagcatctggaattacaggcacgtgccaccacgcccagctaattttgtatttttagtagagatggggtttcttcatgttggccaggttggtctcgaactcctgacctctggtgacccacctgcctcggcctcccaaagtgctgggattacaggtgtgagccactgcacctggcccttattgaactttttaaaagctcatttggtttccttctggagattggattgtagggcaggggaaagtaggaccaggaacaacctatttgcaaagttggcgcaaacattcctgcctgacaggaccatggacacaggttgtagagatagagatggctctggctgtgcattcagcagattctgtagatagaattaataggacttggatgggattgtggtgagagaaagtgaaatgaaagataagttctagtttggaagttttaacaactgaatgtttaaactcaaatagacacaaaatattggaagagtggcaggtttgggaggatgagacaatcaactgtttggttgagccacgttaggtttgaaatgtctacgggactcccgtggggagaggttatatcagactggagcaccagagagaggccaaggctgatagtttagatgaaaagagagcatgatattttaagccctgagactggataatatcacctatagaaagactatatagagataagagaggtggggaacaagtaaaagctgcgggacactcctaaatttagagtcaaatttagagcagaaaatactagcaaaggggactgaaaagcggtggccaattgagcttcaaatgcaagtgaaagtgtgttgtgtgtacatttatcatctcatggcacaggaaaaacgtgatttaaggagaaggaagcgatccaatgggaagaagagatccaatggatcctctatcacgaagatattgagataagaaccaatatggatttgcacccactgcatttgcagccttgaggtcataagcatcctcaggaaaatgcaccaggtcagtgctaaggactggagtcaatacagactggattcaggagaaaaagtgaggcagggaatcaaagggag

SEQ ID NO: 22385 - DNA, 2300 bp, Homo sapien
ggtttccctctgtaataaaatggaagaggcatgtgaatgagtcacattttctgcctgtctcatgattctggctcgggagggcctgttgatgcaatgtccagaacagtggcagccattctgtggtcactttcaagaaagccctagaagaaaaccaatatgatgatggagtggaagggtgacattaaactcaatttttgttcaaactccagatctatccccttccaaaactttttttaataataaatttctccatggcttatgtgcttcattggtttactctaccttatcactgaaaacatccagtgaatcagagagaaaatagaaaatagttgactcttgttttgtggctctccactgtttttcatggttctattccttgggcttgagaacaacattctgatggtgtttaaaaactcagaaagagcccatctccttagatcagtagtccatagagcatctccctaggggcagaaggttagggggttaatctcggcaatggtgtggagtgtacagtgtctctcatttaccttccttacctctctacatgctcctagttactgcttctctttgtaactctgaggtatgaaatacctcaaagcatatttgattttgtcacagatttctggcacagggctcttaaaacccttggaattccctgagtgataggagtattatttgttattcataaacagccccttttgatcatagctgagtttatgctaaggagatcatggccttaggatgggactggtcaccagaaagaccaagggattagagggttggagctgtcagccccacctactgatctccaggaaggggaggcagggactggagattgagttccataaaaactcttgaacaatgagatttgatgagcttccacattggtgaacactcaggagtgctgggagagtggctgcctgaagagagcatggaagctccatgcaccacccaaccccttccctgccatatacctgccatatgcctctttccaatggactattcctgaggtatattccttatataaagcaacagatgcaaacaaagtgctttcctgagttctgtgtgccattctagcaatttattggtgtcattggaacacccaatttatagcctgtcagtcagaagtacaagtagccacctgggacttgcaacagatgtctgatctgatctgagaacagtttgtgggagtgagccctttagcttttcggatctgagctgaatccaggtagacagcatcataaccgaatttttaattgcaggtggcccaggtggtgtccccagagaattggagaatttcttggtgtagagaaaaagtatatttggtcagaaggattgtgaaagtagagaatcgagtttttgtttcaccgtgcatctttgtttttttattgtttttcctctcattcttctcaccttggtaattgtttctttcattttcctgaatctctgaaaagaaagggcctggactctcagatttcttggcctttgatatttggaaggatgaactccagtctcccacagaaggctagaggtgaaggaacattcagacacataagtttccaagataaatcgtctgagaacatctccaaggtgtcttctgggaatggtaagaaaccctgagtttgtgtcactggattgattccagctccattgtccccgtgtccttcaactaagtctctgctgaagcctgttctataaaaacagcaagtaagtggtttggactgacctattgtactaggttcgacaaagcaaaccaaatggagtcagtcatactaaaactccacatcaccaaaccaaaactaatgtatctgaacttttgagaaatcaggagagagagaaaatggacaaattcctaaaacaggccagtttcagtgggcatgaacatgaagttctgtctgctttcatctttacaaaaaaaaaaaaaaagcaatctgtggtaacttgacttcaatcaatcagttgttccttattgctgtctctctattcctgctgcacaaaaaaaatgcaacatccagatgaccaatcaggtttttgttctctgtttctgctttctttagccctcctatccctgtaaaaccaacttccttggctctaactatcaaaacactcattttgttttatagcatgacaggctgtctgattccatctttataaccaaagccaattaagatcttaaaaccaaacatataacttcatctttttacaagtacttagagcctgagttgctccacaggaatccaggaactgggcacaggaaaaggatctaagctggtggtaagttggggtctgaaaattttaaa

SEQ ID NO: 22386 - DNA, 2300 bp, Homo sapien
aagcttgtgtgtgatgccaaagctatgagggtacccctaggtagcctggaaaggtgtattgtgtttcttcagaggtggaggcaactgtagctgagggtctgtagaaataagcacttaacagaacatgctagccaaatgaatgagagcaaaatgtttaccagttcttgattgaatagtattagcaatttttaataatattagatgttagatatgggggccctgatagatgggactacagccttagtgctgtagtcatccatcataagacattctttgtgatattttttattttcagatatgggaacaagaagcactttgggctgttaagtggagatgcaatgtggatagtcacccttttattaatcacgttttgtttaacaaattttaattattgaaggccattatttcaccctacgttgggccatattaactatcttaactgggggactaagtgatcccattttatcaagccaatctctaagtgcaaacaatttactttaattttaatgtattatttattatgtctacctccaacatattctgttttagagcaacctacctccaacataggctattttagaacaataggtatgactatgggtaatttaggcaaggctgtagttaaagcgaggtatactcatttttcaaaattttatatgtagttgccttctcaagacaatatgggcaaagtgagtacatttagtgggatccttgcagggagccgaagaccccatgggatatgaccaactcatcattccactggaggctatatgatcaaacagcaaactgtttatcatgaatgcaggatgtgggcaaactcacgactactcccactgccagagggtttgctgagggcgagtcgcctcctggtgccgagctccttgtccactagaggcaaggtgccccctaactccttcttccagagatactcttttgtctcttgtcttttattcccgtgttcatccccctttgttcagtccaccagggatcatggcacgttacatagtggtgccccgaacagcgacagaatcaggggctctacaagtggcactcaaacaggcgacagtctgaacacgggactatgaggatgtgaatgaagaagatctcctggaatagaggaactgaaattgacaacgcaaatggggaccctgggatgagtcagctggcagcgcacatgaggtcagcgcctaaagaggtactgggatcagttccttaaagaagtactgggaatgggaagttttctgaatcacggtaacatggggcagaattcgtctactgaaaaaaataattatgtgcagttgcttagagttctgttgaaacaaactggtgctcaggttagttctcagacattaacttagctgctgcaggaggttattacacataacccatggtttccacaggcagcacccttgatgtggaaaattgggacagagcagaaggattaaaatgggctcatcaaaaaggtcttaaaattgatccttctgttttctccacttggagtttagttcatactgtacttctgccattatctccttattattctgtgggacaacaggctgaatctaaaaatctgaaagaatctgttgtcccactcacagctccagatgaaaataaaaaacaggagagggaggataaaaattggcctatacagcctcctccagttgcagaaacatctgtattgcctcctttggtagcagaactagagaccccaatacaaagaattttatgctctgctgccatagctggagagcccctaggaccttgcacttttcctatttccataaggcctgatcccaacaatccacagcaggttattcatgaacacaccccactagagtaagttgttgaaggaattaaaagcgagagtggtaaataatggcatacagagccggttgaccttaggattgctagaatctgtgtttggtgctatgcgttttttaccctttgatgtgagacacttgatgcgaacttgcttgtccactagtgcatatctgacatggaatttaaattggcaagaaatgtgtgcagaccaggctaaacagaaccatgttgctggacacggagacattacagaggatatgctattaggtaatggcccttattcagacctggaaagtcaaatggcactcccagacgctgcttatcagcagtgtgcacaggctgttaaatgcacctgggccgcaattcctgaagagggagtcccagtacaatcctttttacatatgcaagggtcacaggaaccctatgtgcaatttcttacaagatcacaagaggcagtgaagcgtcagattcctcatacc

SEQ ID NO: 22387 - DNA, 2300 bp, Homo sapien
gacaccaggcacggtggctcacacttgtcatcccagcactttgtgaggccaaggtgggcagatcgctttaagcccaggagtttgaaaccagtctaggatacatggcgaaaccctgtttgtacaaaaaattagtcaggcgtggtatctcacgcctgtagtccccactacttaggaggctgaggctggagaatcccttgagcccagggaagtggaggttacagtgagcagcgatcatgccactagactccagcctgggtgatagaatgagaccctgtctcaaaaaaaaaagaaaaaagaaaaaagaaaaagaagaagaaaaagaaaagaaaagaaattagccaggcatggttccaggtacctacagtcccagcaactcaggaggctgaggtgggaggatcacttgagcccaggagtttgaggctgcagtgagctgtgactgcaccactacaccccagactggggaagagagtgagatcctattaaaaaaaaaaaaaaaacccttgagaaatgagattagatgagcttcttgagttggtgaacacaaagaggtgccggaaggctgagtgcctgaagagagagcatggaagctccatgtaccacctcaacctctcccttgctatatacttgccctatgcatctattttgactgtttttgagctgtattcttttctccttttttttgagacagaatctcactctattgcccaggcttggagtacagtggcatgatctcggctgactacaacctcttcttcctgggttcaaatgattctcgtgcctcagcctcctcagtagctggaattactggcatgtgccactacacccggttaatttttgtgtttttagtagagacaaggttttgccacattggccagactggtctccaaatcctggcctcaagtgatccaccagcctcagactctcaaagtgctgggattactggcgtgaaccaccatgcctggcctaagatgtactctttagaataaaccaataaatgaaagcaaagtgatttattgtgttctgcatgccattctagcaaattacaaagctgatgagggggtcacaggaacccctgatttatagcccatcagtcagaagtacaggtggccacatgggacttgcattggtatctgaagtgaagacagtcttgtgggagtgagacctttaacttgtgcgatctgatgctatctccagttagacagcatcagaactgaatttcattgtaggatagacagtggtgtctccagagaattggagacttgctctgtttggaaaaaagcccacacatatgctgttagaagtatgtgtgtaaatagagaagtgagtttttgcttaatcatacatctttgttgtttattgttttcctctcattttttcaccttggtaattttttgtttcatttccctgaatctctgaagaagaaagggcctggactctcatattccttgacccttgttatttggagggatgaactccagtctcccacagaaggttagaggtgaaggaacattcagacacataggtttctaagatgagtagtttgatgacatctccaaggtgtcttctgggaatggtaagaaaccctgagtttctgtcactggattgattccagctccattgttcccttgtccttcagcaaagtctctgctgaagcctattatgtaaaaatcacaggacaccattggtttaaactgagctactgtactacactcaacaaacaaaaccaaaatagagtcactcatactaaagttctatgtcaccaaaccaaaaactaagttgtttatctggctttccaagaaatcataaagagagagagagagagagaaaatagccaaattcccaaacaggtcactttcagtagccatgaaaatgcctctgctttaatccttacaaaagaagtaacgtaagtaaccatgtcagtcaatctgttttgtttttttttttaaattattgtttccctattcccactgtatggaaaaagcaactttgaaatgaccattcagcttttttttctttgtttctgctttctttagccctcctctccctataaaatcaaacttctctgttctactcatcaatacaggcattctgttttgagggatgaggtgttgtctgattctagaattatgaataaagccaataaaaactttacactaaattagttgtaattttgtcttttgacaaatccttggagcttgtgttgctcgacaggaagccagggactggccacaagaaaaggaactcagctagtggtaagttggggtctggcaatctaaaaattattgttggaatgcctgctg

SEQ ID NO: 22388 - DNA, 2300 bp, Homo sapien
caattggagacttgtgatcctaggagcatgtcttcttatcattgaatttggtcttgaatccacaggttctggcctataggaacaagacattttcagtaatggaagaaggagcttccaggctggggaagatcatcatttccagtggtagcttgacctgagatgatacctgaccaccacttctgggaaggcccagaatagacagaagagagagaacatactagagttgctagcccctaagagttgaacgaaatgggcaaggcccaggtgaggtttgttttacctattttgtcgtttgtttcccaatgggtctgtggaagcttgtaaaagacagtctggttaaatgagatagtgtatgctgataaaaatcaggatctgtgggaaaataagtttaagttggaatcttaaaatcctggcaaattaagaaacaagatatatggatcagggggtttgtgaaagttcttaatgtcggaacatagctaagtgactgttaagaccctgtgggttttctctgctttaaactgtgtctccttttttttggcagctgaaataacaggaaacacatgaaaaatgccacgattgtaatgtctgtgaggagagagcaaggcagttcttcaggggaggtaaatttgtcattgctgtgagagcttgagaaacttctttccttcagagagcttttgtggttgacggtatcctcaaagtcagccttgtaataaaggcatgggatgttttctatggctttttcctgttgtttagtggggtaagctaaggagtaatgccaaaggaaaactggattggacaaaattcttcgaaaatagcgtgccttgaaaatagaggcttctggtcatctgactttgcccagtgataaagcctggagtatccagtagaatgaatgggctgcttgacctttgaatgatcctccctgaagaagaattctctcatccagatttttgttattgagacagcaggagacaattaacagctccattctttggtaacagcttggaatgcagatactgacaatgcttctttcttaccttcttaactccaggttcaaaaaacaaagcaccagttcggcttgttttgctttttctatgtttaattactgaaatgatacatggctacatttgcacgcaagagattcaagcaaacagaagcatttgtatcaaaagacagtatctcctttcaccctttttctgcccaaacttcaacccaaaggatactaaataagtgttcatagtttgggtctctatctagttcctccctgtgattgacatctggtagaatatattcatatttatgtacatttatgtatacatacttgtgtatacttatacatatgtaattataaatattattactttttttctccccccaagttggagtcttgctgtgtcgcccagagctggagtgcagtggcgcaatcttggctcactgcaacctctgcctcctgggctcaagcaattctcctgcctcagcctcctgagtaactgggattacaggtgcgtgccaccacaccctgctaatttttgtatttttagtagagatgggggtttcaccatgttggccaggctggtctcgaactcctgacctcatgagccccctgcctcagcctcccaaagtgctgggattacaggcgtgagccaccatgcccagccatattattactttttttttttttttcctcttgagacggagtcttgctctgtcgcccaggctgcagtgcagtggcgcaatcttggctccctgcaagctctgcctcccgggttcatgccattctcctgccttagcctcccaagtcgctgggactacaggtgcccaccaccatgcccagctaattttttgtatttttagtggagatggggtttcactgtgttagccaggatagtcttaatctcccgactttgtgatctgcccacctcggcctcccaaagtactgagattacaggtgtgagccaccacgcccagccgtattattacatttttaaaatatgtcttagatcatatattatttgggagcttaattttttgcatttaagagactgccttggagatcattgataatcatgtgggtatgtatacatctacctcattgattttaacatttttgcagtatattatagcatggaggtgctgtaatttaaccctgtctgcttttgatagacatttagattattggtaagtttttcattatgagaaacaaaggaataatgaacagtcttattacatgttgtttcatatctatgctagtactgccttcgtgcttttagggtaggcagaattggtggaattccatggtcctt

SEQ ID NO: 22389 - DNA, 2300 bp, Homo sapien
tttcatatctttatttatcatggttttacttttaacctatttatgctttcatatttaaagtgggtgtttagtgggcaacatacagttgggccttccttttttatccagttaacaatctctgtctttttactggggtatttagatcatttacgttcaatgtattgatgtttttaggtttaaattactaacttactatttgttgtttattctatgtcttctttgttctccttttcttctttttctgctttcccttagagtagctgagtgtgtttatattacatattgtctcctttgttggcttattaactgtaaatccttgtcatttgattccttgagattttatagcatacatcattgtgagggattgcatatttatgtcctctccaaatttacatgttgaagtcctaatccctaagggatggcattaggaagtgtgacctttggaaggtaattacatcttgaaagtggaaccctcatgatgagattatgtgtcttatgagacaacacagaagagagtttgttttctctttctctgctctttgccatgtgaagacagaatgagatgaccatgcataaaccaggaaatggactctcactggacactagacctgccaacaccttgattgtgttttagagtccagttctagagactcctcagcctctggaacgtgagaaatgaatgtttgttaaggcagtcagtcagtctatggtgtattttttctagtagcctgaactgactgaaagaaaatcatgaacttatcattctaacttcaaggacattatatcacttactgtataataaaataatcttacagtagtatatctctatttcctgtgaccagatcagtgtcagtgaagagattgtcttctagatgctactggaatacatatttgaggtatgggtaatcttgattttacatgataaattcattctagcattccaaactccatttatctttgggtactttataatatatgaggaaatttctggcatttaaacttcatttagtgtaggcaaattttgagtccaagtttcagtcaaccagccaagtcaacagttagcaccactcaatttagctcacacactgaaattgccagtagaatgtaatctccatgaatgagagtctttgtgcctgaatttccaactgttgtattcccagcacgcacaacagtgtttgacacattaggcattttataaacattcgctggataaatgagtgaatgatcaatccctttaaaggttctctgaggctggttataaaattatagggagcaggtttggtgctagaattcatcagttaattgatcagctgagtttcagtattgaacagaatcatctccccttcagagttttgatttcaagttgctcccaccttcctggatgtaaaggcttgttctgcctttggcttttccagggtgagagagccctgttttcgtgttggttccccactttgtcaactgctgatcaactgtgttctccattctccacaccaattataaccaaagctttaacacgcggttgttttatccattctatgactgactccttcctctgaggctacatctgatgtagatgtaaagatacttcttaggcagttctcaaaggctgctttctccagccagatgcatcctcaggagtaataacccctccgattgttgctcaggtccctccctcttgaaattcctgtaagactgccgcgccacatggtttctttccattcttcttaggatcaaagtgcctaaatgtctgtgaccatctctacccatcctgtagacagatcagggcaggcttgagcctttgagaaactaagcagtttatgtagcgcccctggctaatgttgcaaagccaagatctagcagttcacgtggactggaaaaagggtgaaatgggtcgttttcaattgcttttcatcgtcagaacctacctgtcttaaggcgcgaaaagagggactccgcctgctctacggcagtagggttgaaaatggctgctcccagcaagcgtcccctgggcgcagacatattgcatcataaagggacggctggtgccgtattccgtgtctccggaaagacgcagtatggccctcgccggccgccatccccgaaacttgcgagtgtcgcgtctgcagtgtgtggggttcgcggggcggcgggtagaggcgagtgtttagagacttcgggtccctgactcgcctccagcagtggagacaggtcatcggtctggtctgcgtgggcttctgggaatgtttcaggggcagggagagcgcgcttttttttttctgttgttcgctagcgcgtgaggt

SEQ ID NO: 22390 - DNA, 2300 bp, Homo sapien
gtcagagttaaaggttctctctcttattccctgaacaattgctgttatcctgttcttttttcagggtgcccacatttcatattgctcaaacacacatgctgtacaatttgtgtagttaacacaattattacagggtcctgagacgatatacatccttctcggctgacaggattaagagattaaagcaaagacaggcataggaaatcacaaggatattgattggggaagtgataagtgtccatgaaatctttacgatttatgtttacagattgcagtaaagacaggcataagaaattacaaaagtattaatttggggaactaataaatgtccataaaatcttcacaatccatgtttttctgccatggcttcagccggtccctccgtttggggtccctgacttcccgcaacagccttggttgcatttgagcctctgaatatctgtgtggtttgtgcagtgaaggggtggcctgcctctccacatctgtgggtgtttctcgtcaggtgggacgagagactgagaaaagaagagatacagagacaaagtatagagaaagaaaagtgggtccaggggaccggtgctcagcatacagaggacccgcgccggcaccggtctctgagtccctcagtatttattgatcattatctctaccatctcggagagggggatgtggcaggacaataggataatagtggggagagtgtcagcaggaaaacatgtgaacaaatgtctctgtgtcataaacaagcttaagaagaaggtgctgtgctttgatatgcacatacataaacgtctcggtgcattaaagagcagtattgccgccagcttgtctcacctccagccctaaggcgattttctcctatctcagtagatggaacatacaatcgggttttataccgagacattccattgcccagggacgagcaggagacagatgccttcctcttgtctcaactgcaagaggccttccttcctcttatactaatcctcctcagcacagaccctttacgggtgtcgggctgagggatggtcaggtctttcccttcccacgaggccatatttcagactatcacatggggagaaaccttggataatacctggctttctggggcagaggtccctgtggccttccgcagtgtattgtgtccctgggtacttgagattagagagtggtgatgacttttaacaagcatactgccttcaagcatttgtttaacaaagcacatcctgcatagccctaaatccattaaaccttgagtcaacacagcacacgtctctgtgagaacagggttgggggtagggttacagattaacagcatctcaaggcagaagaatttttcttagtacggaacaaaatggagtctcttatgtctacttctttctacatagacacagtaacagtctgatctctctttcttttccccacagtgcactgttgttagtgctccaacctcacagtgcaggggttgaggtgtcaggagagggaacacatcagtgccatttcactgtctcctgtgtcaaagcaaaattaaaatgcagaccagaattcaaaaactcctgagcaaacaaaacccagtaggccttaaaaacagccttaaccttgcttaacctgcaaacataagcaacaattcacttgagtcatttctggtaaatgcttgtgttagggaaggacaaaactcaatctcaaccgatcaaaagtaggcaactcacatgctattatgtcattagggactttccaaggcaaatttaaaaaaatgcatttttataattgtaactaatcaaataatttctttgttttactccttcactcaccctgtgaatacttgtgtctaatgctttaagcatagaagcgcgagacttcttttggtttgatgcttcctaattcatgaattgctgtttgttcagataaactctagaaaatgctcctgcgcctcaaatttttgctttcaggagagtcatcccggtttaatgacacaagaacaactgtttcccttctgtacggcagatctaccaagatggccgcgcccagagagccgtggctcagggcgcggacatgttacctcctcgaagagaagcccatgtcccatcgtcctagcgcggcagaattgactcgcgccctcgtccgccgccataggccagtgccggggtttaagggccaggaaaggaagcattcagggaatttaggtgtagccagaagaaaatcaggtgagtgtttgggtctctccgtggagtaggttaaaggggtagggagcttctgaggagcctgtggggagagctggcggcctgggcggtggagccttt

SEQ ID NO: 22391 - DNA, 2300 bp, Homo sapien
ctaggaagattagtaaaagaggaaggcctctttgcagttaagataagaagagggcatctgtctcctgctcatccctgggaatggaatgtctcagtttaaaacccaattgtacattctatttactgagataggagaaaactgccttatggctggaggtgagacatgctggcagcaatactgctctatactacactgagatgcttgtgtaaagtcaaacataaatctggcctacgtgcacatcaaggcacagcacctttccttatttatgacacagagaactttgttcacatattttcctgctgaccctctccccaccattaccctatagtcctgccacatccccctcaccgagatggtagagatagtgatcaatgaatactgaggaaactcagagaccagtgctggcaggagtccttcgtatgctgagtgctggtcccctgggcccactgttctttctctatactttgtcagtgtgtcttatttcttttctcagtctctcatcccaccagatgagaaatacccacaggtgtggagaggctggcccccttcataaggttgttgagatttatctatgttggtgcatgcatctatgatttgttttttattattgttcagtagtattccagggtatgattacactgcaatttgcttatacattcatgtactgatggacacttggactgtttcctgttcagggtattatgcataaaggtgctaagaacattcttgtgagtctttgtgaggacatatcatttcattactgttgtataagtatctaggagtggaattcctgagtcataagattcttgcttttattttgcaattctcctaaggagtcatatagttctgtaaagcttttcactcttcacagatttgatattttaagtaacacggtatgtttctgaaatggagtttgcattttggggcattttctatagatgtatcatgaaggacacgtgaaaactctgttataaatataaacactccactgcatgcaggaatttccttctcattcttccaatggaattgtcttaatttaggttggatcagaattagaatttacgttatgatgactatgtaaataatatttataggtcagtcaggtagtatcctatgattacttttcttgcacaacttttttttttcttttttctttttttcctcatgaaggggttgccaaggctgtgtagtgcagtggctattgataggtgcgatcatagctcactgcagcctggaactcctgggctcaagcgatcttcctgccttggtctccccagtagctgggactacacgtgtgcgccatcgcgcccgggcttgcacaacttttcattctcccagagtcgccttatttattccttccagaattttaggcacttggttctccgaaagccccgacgttaagattgactccacctacagcagagggaaggcccttcttctctcttaaggaaaattcccgcctcccgcattggattccttttccggttggctggtggctgctctctttacctgcactgggcggtgaccgtgtccctcaaatgtaaatgaggttccaggggtcgctgttttttcactttccgttgacggggtgaacaatatcctcgtacctcgattgcctctccacacccttttggtcctcaaaaatcttcctcttgtcctccacatgtagctagatgcgttttcgcggtatatgactcagggtgcgattgctctttttcctctgtggagaaagcgttttcacttgtacggacacctaagtgttaagatggccgcgcccattgtgtcattcccgtcattctttgtgcaaagcggatgacttttctccccagcccgctaaggtgcacgtagccataccatgtttgtcttggctaagctcgaccctctgaaaataaatgaaacttgggcgcaggatttaggtgccaaaatatggagttcttcaccgtcccgcgctatccctgaatacttgggcagaaaaggtccactttaccttccgtacgtgcaggattcaaagatggctgcctccagtatccgtgacgagaggacgcgaacttactacctcccagtcgtccgtgctccgtacacctgcaacttcagaccttcctcggccgccgtaggccggcttggaggctgggggagggcccagaagtggaataattcaggaaagtgcaggttctgggaagtctcggtgggttccccgcaaaatcaggtctgtgtgtgggtctgtctgtcaggatgaggggaggagggtgtctgtgggcgtccgtttagtgcggagccgtggagtttgtgggggaagcggg

SEQ ID NO: 22392 - DNA, 2300 bp, Homo sapien
ttgtaggcaattgtatataccctagcagataccaaaatagaaattaattatatgtagatttggaagatgaatgaaggtgcatgaataacccagtggacaattatcaaaattacttttgccattgaaggaaaggaactactggcaagaacttctaaggattagtattattctaaaaaaaactttaaaaaaatctgaatagagactcatttctgtcataagaggggcagaagagagaaggaataggattcacagaataagcccaataaaagaacaaaataacttcattctctaaaaataaaggacagcatgtaagatgggtaaaggtgagatccttttggatatcttggataagaacccttaaatttatctacagacctgtcaccttggagagctgctactgttttaaagatcctggctcctctgtggtatgctgaattggaacataagatttctcttcatcattccttctcacttggggttaagacccttgtcctctcctatactcagagttccttcccttgatctaataaagatacatccatgttagaaacagtcctgctcacaaggaaaaataaagtggaaatttgccataaagtggctgcctcacagtggaaacccgaagtctgggttatcgggtgattacaacaaatagtttttgagcatctgcactgtggtagacacttgtacacacaggatacactgaagaacaaacataaagtagtggcctgtaacaggatggattcagtacagatgctctacagttaagagtataagaaatgaactcttcttcaacctggacttcagattctctctacttcttgccttgtgaatctgcacatcctatcatagcagtcgtagcatcttactccctgaacacataaatcagggtgcgctactgggcttcccaggcctgtccttgggaccaggtgttgaaatcacctttcagaagttggcatcccagctaaataaatttaactggatactcagttccaggttgcctctttcaaaaggcacatcaccccatgccttcataaaaatggtagccgacatttattaagcatgcggtttgccaaatggtaactgcattatttagtaatttaaaaaaattaaagtttgtttttgtttttgttgtgtttgagacagggtcgtgctctgtcgcccaggctggagtgcagtggcctgatcatggcttactgaagtctggacctcctgggctaaagccatcctcccacctcagcctccagagtggccgggactacaggtgcatgccaccacactctgctaatttttgtatttttgtattttttctgtaaaggcagtgtttcactatatttcccaggctggtctccaactcctgggcataagtgatcctcctgacttagcctcccaaattgctgagattacatgtttgagccatggcacccggcctctttagttatttaacactcttatatgctccatttccatcttcaagtgtttcagggaaatatttgattaaatttgaggcctcattcctttttccttattacaggtaaccacacactgtatgcagttgcacgtgggcattggtcctcatagagatcgctcccgtatttggcctcaagacaattctcggctagactagccttgcccattcttttctgcatccgttgaaggagattcagaacatccacaaatttggtccactctgtgaccgctgtccccctattccccttcagccacttcgcctttggcacaccttgttggtcctgaagaggccctcagaaatactccacattccgccctaaactcccaacagattgtattttctactgaatggaaactgacacctcctaagatgaactgcagccacgatgcttcttcctaacggctcaatatggggtacagcgcgcggccatcttatttttttgctcaggctgttaaaagtttttataattttctgacaatttatccagtttgcgcagtgactgaggtgccctgaaattaattcactgtcttccaacgccgtggtaacagcccttccgggttctctggtgggagtcgccgagatgggcgtggccatgatacgtcacaatacgaggccgagggaggaattctgtcgtctgggaacggctggtttcgcggtcagacgccgagggccctcgaagtccctagcaacggctgcggagggagatgtaagtcgttttggacgcaggctcagtgtttggtcccagcgttcggtggagtccggagagactcaggatcagatgagtcggggtctggatgtggctccaagtgaaaggcctgtgggggtcagtgaa

SEQ ID NO: 22393 - DNA, 2300 bp, Homo sapien
aacttcccagtacttctttaaagcactgctcccagtacctctttagggcactgaccttatatctgctgccggcagactcttcccagggtcccctttcgccttgtcaatttcagttcctctgctccagcagaccttcttcattcacgtccttgaagtcccatgtttggatgctgctagttgggcgtgcttggagtccctgttctggttgccatttgtaacctgcacggacctaggtggactaaacaaagtggggtgaacacgggaataaagatgagacaaaagagtgtatttggaagaagggatcgggggcgctttgcctctaggggacaagggccctgagctttacacagcccttcatatttattaggcaaaagagacagtgagaaggggaggtggaagaaggggtcagctgctcggtccagagtagtcttgcaagactgcattctctagatgtcgcagtagataacggcgccaggggtccagagtagtcttgcaagactgcattctctagatgtcgcagtagataacggcgccaggggtccagagtagtcttgcaagactgcattctctagatgtcgcagtagataacggcgccagggagtgattgcctccagcaaaccttcatcagccggagcagtcatgagtttgctgacatcctgcattcatgataaacagtttgctgtttgatctgtagcctccagtggaatgctgagttggtcacgtcccacgggccacgagccttcggctccctgcagcaggtgcctgtaaactcagctactcgggaggctaaggcagagaattgcttgaacccgggaggccgagatcacaccattgcactccagcctgggcgacagagtgagactccatctcaaaaattaaaataaaataaaataaaccccagatgttattggattttaatttttaatccattctgacagttttgaggcatttatatttaatgtaattaactgggatccatgctctgtttttacttagcataaaatacttaatgtaatgtaattttcttagtacattttattttaaaacagctatctaaatgcattgtatttgctctttttgctctgtttttgattctcttcttttggatgaatttcttgttattacatttcccccttttgttggcatggaacttacgtactttaaaacaattactagtttttttttttttttttttttttaagacgaggtttcgctctttttgaccagactggagtacaatggcacaggcttgtctcactgcaacctccatctcccggattcaagcaattcttctgcctcagcttctggaataactgtatttttatagagatggggtttcaccatgttggctaggccggtctcggactcctgatgtcaggtgatccacccgcctcggcatcccaaagtgctgggattacaggcgtgagccactgtgcctggacttactagtgttaattgtaactagagattacatgtagtgtgcaacctttgtcatattcttctgctaattggcacttttccattctacagaaaccttagagcacgtcaactttattcaccacctaattatccagtaaattattgtgtattttagctttttatgtatttaaaacctcctaaaatattgtcagtactgtttttatgacaatgcttatgatttgcccagtacattggctttcaaactgaagtacatgtcttcacagggtgtatgtacaaagacttttgaagaggtgtgggagcacacatgatttaaaggaaaacaaagaccaggtcctctccttgctgattgtctcttttctaaaactaatctgcctaagagttcaccatctcctgaggctggtgctatggtgggtctcatttcctacctgccttcacagtccttccacggaaacgtcacagaggaaaggcatacctccaccacattaagaatcctagacattattggccacaggtataaaatccgctggggctccaaacaaaggtatatagttaactatattgggggcattgctttaagatgagtgcctagcagcagtgacagtatctgggcctggaaaaaatgtaccacttacattgaatttgctcttcaacccacaggttctgactcctcaggagcaaaaaacataacctgaagagggaggaagtggatttggggttcaccatttcttggggcacacttgattgaaaactgagacttctgaagagaaggccagaagatacaaagacagaccatcccagttgaatgctgtcttccaagaacagaagaaaatgatccaggcccaggtaactgacttttggtt

SEQ ID NO: 22394 - DNA, 2300 bp, Homo sapien
ggggctcagatacagagaagcccgagctaggaagaggagtggcgtgaatgaaaggtctagggggaggagtgtcaaaggagtgcctctgtggtaagttttaaattgaatttgaaggcaattttatttagaggaagacggggcttgtctgtgtttgagaatgtaatgaggctggaggctttcaggtgtgcagttgaaggttagtggttgctttgagactaactggatgctggaaacacttcctgtcagtctttcaagtccaaatctgtcctgaaggtttctatttaaaaactttttcttcctaggtccactattctcattgtacccataaaaatcagagtaattcagggtgacgaagtggtgtctttaccgaggagtcttgctctgtcgcccaggctggggtgcagtggcgcgatctcggcttactgcaacctccgcctcccggattcaagcgattctcctgcctcaggctcccgagtagctgggattacaggcgcgcgccaccgcgtccgggtaatttttgtatttttagtagagactggtttcgctttgttggccaggctggtctggaactcctgacctcagatgatccgcctgcctcggcctcccaaagtgctgggattacaggtgtgagccaccgtgccccacttcactttcttaaatgttgtgtttagaagcacaaacttaaaaaaaaatcaagtccactttattaattttattttgttttgtgggtcatcctttactctcctctcagaattaactcacgtccatgaggattatctcccttttccttctctaagttttatactttctcttaaacttagatctatgatctattttgagttaacttttgtgtatggtttgagggtcctaactcatttttctggatgtggatatccaattatcccagtgccgcttgttgaaaagactattcttattgaattgtcttggcacttttgtcaaaaactcttaacaatatttttatactctcaattctggctctgctcttcccattggcacctttactaaaagtggcctttctaggaggcccaattcctttagtctgtcgtggccaggctcacatcgtaattcattctcaaaatctcttttctctcctctcctctcctcttttctcttcttttctcctcttttctcttccttctcctcctcctcttcctccttcttcttcttcttttttgtaaataataatcattttttcgaggccaggcgcggtggctcacacctgtaatcccagcactttgggaggccgagacaggcagatcacgaggtcaggaggtcgagatcatcttggccaacatggtgaaagccagtctctactaaaaatacaaaaattagctgggcgtggtggcgcgtgcctgtagtcccagctacttgggaggctaaggcaggagaatcgcttgaaccagggaggcagaggttgcagtgagcccagatctcgccactgcactccagcctggcgacagagcaagactccgtctcaaaaaaaattataatttttttctttcttcaccacccgcccccccgaatacctgctatttttctgttcttaaaaaccgcttcctgcaagctaattttcgccagacgctttcccgtgggtgtctgcctacctgatgtgttgccttttccctttctacctgatctgttaccttttccatttccaattcattctctgggatacctacacctggctgcactgttacttgtctttttcaaaacctttttttttaaatttaacaaagtggatggaaaagcgctaaaggcaatttagcttgccccatatttgcctgataaagcctgagtctctgaaaatctgccccctttcgcaagactttaagtgccaggaaacgaggcgatttcagtgacttctcttcttccctggctcctggctcaaaaacctgccactgccttctgtgcgtccaattttcaaacatggctgccgtcaggagccacggctatgggcgcggccattttacagagtaggaaatgccgtaaatgcgcttgtccttgctcttttaaacattttaggttctcctcggccgccgtaggtggaccataaacccgtgcgaggactccagaagtaggagcagtttacggaagtgtaacgttgaggcccttcttgtgtatctggagaaaatagaggtcagtgtgtggttttgtccctgaaagttttttgtcctagttcaggttttgtctcagtggaaggtttgggagatctgaggacgtggtgtaccctggaccacatagtttttggcaggaagactggggagcgccggggtataggc

SEQ ID NO: 22395 - DNA, 2300 bp, Homo sapien
taatctaaatatgatttgtcattcaatctttacaaatcttaataagggttaaaacatttatatttcacgtttactttgcatttgtttgaatattagtaaaactggtattttttaaattgtttaggatcatttacattaaaaaaagtgtcctgtttatttccttcatgtatttatagaaaattttagggagcttttaagttgatcatcttttccttatttttatttatttttttttttgagacaagagtctcactctgtctctcaggctggggtgcagtggcatgatcttggctcactgcaacctctgcctcctgggttcaagcgattctcgtgcctcagccttccaagtaaatgggactacaggcctgagacaccatgcccagctaattttttttgtattttagtagctatggggtttcgccatgttggccaggctgatctcaaactcctgaactcaggcaatcctcccgctttggcctcccaaagtgttaggattacaggcatgagccaccgcgcccatcttttttcttatttcttttcagatctctttataggccgggtgaagggtgaagtggctcacacctgtaatcccagcacttttggaggatgaagtgggaggactgcttgaggccagttcaagaccagctgggcatcatagtgagacccttgtctctacagaaaattaaaaaattagccaggtgtggtggtgcccacctgtagtcccagctattcaggagcccaggagttccaagttacagtgagctgtgatctccccaggcactccagactgggcaacagagtggaccttgcctcaaaaagagacaaaaaaaaaacaaaaaaaaagaaaaactctcatataccaagggtgagaagagcaaatggaacacgaacttgactctgaaaaatagtttgacaatttctctgtatatttatatactgatacctatatcacacacatagattcacacaggcatttcctttctctcattcttctaatataggaagtttggttggatttatatttacagttcagcattgccatgactttgcacatactattcgcggttggcacacgtagtataacgtgatctccttcttaacctttctttcttttgttttttttttgagatggagttttgctcctgttgcccaggctggagtgcaatgacgccatcttggcccacagcaacctccgcctcccgggttcaagcgattctcctgcctcagcctcccgagtagctgggattacaggcatgcgccaccatgcctggctaattttgtatttttagtagagacagggtttctccatgttggtcaggctggtctcgaactcccgctctcaggtgatccgcccacctcggcctcccaaagtgctgggattacaggcgtgagccaccgcgcccggcctctttcccaaccttttttttctcactgaagtggtcctgttcccttaatttctggccacttctcctgagtccagccctcatatttggctccacctgggtcccaggctctcccctccgccttgggaactatactttctggcttttactggcttttccccatgcctttcacccaacataattttggcacgttccaaccgttttcattacctagtctgtgactgctacccctgttccgtcagcgtagctaacagccctcttctgcgttcaaaaggcgcttcaagctactttgttagaaatctggctttggccgaagtgtcccctctcggccggttctccttttccctcacaaggaactgtttcctaacctttgtacaaagtgtaaacgtcgcggccatcttagccttctattcagctgctgaaagggatttacctccacgccatttttgtcttgtgtaaactggagcctctgtatatggacccgtatttatgaagggttgaggtgccaggaaatgggacagtttcagtgctctttcatcttcccggccatccccggtcacccccggtcacccccggtcaccagcgccaaaacgcgccctttgccttgtgtacgtcagatactcaaagatggcggcccccatggagccaaggcgacgagggcgcggccatcttgcatctgcgcaaacgctgggaacgcctccgaccctggatagtcgccgtcaggcactgaggaggccgagagatgaggccggagcccaccaagttctgggaagtaagttcagtcactgggtggtcgctgtggtgacgggggaggaaattctgtccgtggctgggcgtgttcgtggacagtggtgatggactggtatctgtcggcgccagcgtttggcgacgccagtg

SEQ ID NO: 22396 - DNA, 2300 bp, Homo sapien
tgtaacctgagttattttaggaagagttttcaggataggcttttctgtgcagatataatttgaaccaaagcctaaatatactgtggggacacagccatcatatttttaagtccagaacactatagaactttctaagtgttttctttggggttcctgcctcagcattctctgagaagcttgtaaaagaaggcaaattcttgagtcactccccagacattccaagctagaatttctggggatggggttcggactctgcatttataaaaagagccttcttaaatttgaacatctctgccctaaattgtggattggtgctcccatcaccattcccacactgtaacaggatggattcagggcagattgtctccagcaatgaatcagacaaaagtgctccaccaaccaggcccttgaatcaccttccttgtcccgtgaatcagcacagcctgccacggcaaagttttatcagcccactcctggaaatgatcagtgaaggtcccatcatgggctgctcatagtcctgtggaccaggtgctaaacttacctaccagagattaacattccagatgaacggggctgaaatttaatcctggatggaatatgttataacactcaagaaatacgaacatgaaattcttattctctagaaattacaaaacgtaagtaaaatgaagaaattttaagtcaccataattgtacggaacagtcaaatattgttagtatattctccagaatttttcaaatgcatgagcatatttattttctgaaagaaaacagcctattttgcatttatcatgccatgaacttattatacatcatcatacctattttctaagatcaacatgttttataatatattcatgattatggtacaaagatagtaaaattaagtataaattgggaatatttttcaagtaaaaacatggcattctctacctatgaacacaaacaatattaattcaaactaaatgtcttgtttaaccaatcacaattttccaaaagatgtttatgatttcttccaataacaagaccataaaatatatactatcctgcagatcatttttttgtcctctgacaaagttttcttttttataaaacaattgtagcatattcttttaaattgatatatactcttacagttcagcagatgttccataatttaccaaagtattcatctctcattgtaattccctttttttgtaaattacaaaagttgtggttaatattaagacagatttgcctagatagcttttagaattgctgtgtcaaagaaaacgaaaaaattaaattggctctaggttgccttccaaaaatacaatatttacttaaatcttctacagttacaacgccaacatctgcaaaaatagaactaatattttttaagtgtgactttttaaaaaatctggaaacattgcaaagtaggatgatcgcattctaataatttcatattcttaagtgccccactgtcatcttcctttacttctggaaggaaacatgtagatattaacacagttgcaccttcacctcctcatccccttccccactggcagtggttttaatagcaagccccatgtgggtattagcatttaatggagcatcactcctgttctcggcttcgtccattcagtcagagtctaatctaacccacaaaagccttacccagcccagaacccccgccctatccccaaatctaacactttcagtgaccactggttttggcaactctgtgaccgcttcctggccagcaccgtgacttcttcaaaccttgtttatttttccaaattgtcctggatatgagcatcttctctgccgtacggctgctgccttcctctaagatggccgtgcccatggtgctccagctaaggctccactctcagctataatgggcacaaagggcgccgccatcttttttccacagcaggctgaatagaatgccactgcgccgtgttggccttggctgggcacccgactcttgagtgtcccttgcaacgaagagagaaaggcactgaggtgactaagagtgattcccacagccattatggccgctcctgtcagaaacgctgcgatgggcgcagccctgtgacctcatagagcggcgcccgcagtctgaactcgcgatcccgggcaggctccgtggtcctcgcctcgcttcacggtctttaccgctcagcttcccggagtccgcgcaggagcgcgtctgaataggaagcgttttcggacgtggatgcggcgttttgtcgctgccagtggtgtctggagaggttcgggctcgggtgagtcgagttctgggcatggactcgcgg

SEQ ID NO: 22397 - DNA, 2300 bp, Homo sapien
tttaggccctggctagaagccagttagttcctcttctagaatggccaattaagtctacaatgccggccacagtgagcttgtggtatttagcttgccctaatcctatccccatatcctcagcttcaaggtagccttgaaaagcaaccaccttttaacaacagtaacagtgaatatctgcaccctagcagaatatctgcacttgaggaggtagaaatggctctgaaaatggcagaaatggctctgaaacacccaaaagcctccatccccacagaatgttcactactaagcctgctttgcagcctgctgaataggtctattctcatagtatttctctatttggcttgactttatttatgtgaacactcctacccatagggcacttgtcaaaaaacaatcagcagcaattgtttaacactagagtgtttaggggagtgacagtgtgtgtctgcgtgatagatggaagtaataagagggcacaggggaaaggggccatacgcataagatgatggaacagagagcctggagggtggggtatagagagtgtaggggaagggagaaggcagacaggtaaaaggaaaaagaatgttaagtgttgttcagcctcaagactgacatgatgaaagtacctttattgtggtttttgtaaattagaatgcatgctttattattaaaaaaaacacaattgaaaatgttaaggaccttttcctccttgcttcttataagaaaccatcataagacataacttgtaataattctgtagaaatatacatatataaagatatatgtatatatatattttaaaatagtatgtttttattgcaaaatattcattagtgtcatcatatcatagccagatctacaaccccagagtaattcccatggttatgttacatggcaaaaaggactctgcattgtaattaagtttattaatcagctgactttagcattgggagattattctggattgcccaagcacttaagaataggagaaaccggagagatgcagcagcaatagtcagtggtttcaaatatgaaagggatttcacatactattgttggctttaaagataggaagtcgtgggggcaaggaaactctctaaaggaaattaatctggcaacaacctaaataattctagaaaaggattcttttccagagtcaagaacagagccaggtggttcttctcttctaaagacatttccatgggccagttccaccgcaagcttctcagagagaatatgttctgccgtacggacaccgaacgtcccctaagatggccgcccccatgatgctctcccctaagggctctggctccgttacctgcaacgcaccgctcgcttattttttgttctagtctctcttgcttcagtttttatacggcttctaaaacgcttcgcatttacaatagtgactgaggtgcccagaggtgactttaattttccattgagctgagacgtcacagccatcataaccgctaagaagggatgccgcgcctttgtggtaataatgggttctggcctttgagaagtttgcgccgttcactgtcccctgcgaggagaagactaacttatttctgttccgtgtctgttcagaggactttacccccacgccgtgtctgcctgtgtgaactcaagcctctgataagctctccattttctgccagggctgaggtgtctggaaatcggacagtttaagaggcctccgtccaccgcgtctcccggccgctgtgccttctgtacgtcacgtactcaaagatggccgcccccagagcggcgaggcgacgccggcgcggacgcgtctcctcctgaggaaaagccggaaggccgcattccgctctccatggaaacgcggctgaccgtctctggaggtttagagggggagggagttgggcgaggggcccagaagtggaagaagtttagggaagtaagttcagcttttaagaggtcgcggcgattccaaggagagtcaggtcagtgtgtgggtcagggcgtggaaacgtggtgggagggagctttctgagggcgtctgcgttgttggtggcgctatatggtggaggtagcgcgggggttgggggaggcgggggcgggtgtttccttttggaggggagctggtaggagtccctggtgggtgtctgtgataggatatctttggggtccctcatggaggctctggtggtcagtgattaaaggcctgaatagatcaacgaccaagagtactgaggtcagggattgtggtcctcgcgggtcactccccagtggggctcagtgattgagaatcgatggggtggcttttgtcaacgaat

SEQ ID NO: 22398 - DNA, 2300 bp, Homo sapien
aggtcgaggtgggaggattgcttgagcccaaaagttcaagaccagcctgggcaacatgatgaaacatcatctccacaaaacatacaaatatcagctctgttatatatgaaataaacagagttttccaaagatcttttataagatgggagaaaggagatgaaatagaagagagattgacttggtccttcaggattggaatctgatagatgggacactagaggaagtttaatgtaatctttttggctatctagatctagtttttaggccctggctagaagccagttagttcctcttctagaatggccaattaagtctacaatgccggccacagtgagcttgtggtatttagcttgccctaatcctatccccatatcctcagcttcaaggtagccttgaaaagcaaccaccttttaacaacagtaacagtgaatatctgcaccctagcagaatatctgcacttgaggaggtagaaatggctctgaaaatggcagaaatggctctgaaacacccaaaagcctccatccccacagaatgttcactactaagcctgctttgcagcctgctgaataggtctattctcatagtatttctctatttggcttgactttatttatgtgaacactcctacccatagggcacttgtcaaaaaacaatcagcagcaattgtttaacactagagtgtttaggggagtgacagtgtgtgtctgcgtgatagatggaagtaataagagggcacaggggaaaggggccatacgcataagatgatggaacagagagcctggagggtggggtatagagagtgtaggggaagggagaaggcagacaggtaaaaggaaaaagaatgttaagtgttgttcagcctcaagactgacatgatgaaagtacctttattgtggtttttgtaaattagaatgcatgctttattattaaaaaaaacacaattgaaaatgttaaggaccttttcctccttgcttcttataagaaaccatcataagacataacttgtaataattctgtagaaatatacatatataaagatatatgtatatatatattttaaaatagtatgtttttattgcaaaatattcattagtgtcatcatatcatagccagatctacaaccccagagtaattcccatggttatgttacatggcaaaaaggactctgcattgtaattaagtttattaatcagctgactttagcattgggagattattctggattgcccaagcacttaagaataggagaaaccggagagatgcagcagcaatagtcagtggtttcaaatatgaaagggatttcacatactattgttggctttaaagataggaagtcgtgggggcaaggaaactctctaaaggaaattaatctggcaacaacctaaataattctagaaaaggattcttttccagagtcaagaacagagccaggtggttcttctcttctaaagacatttccatgggccagttccaccgcaagcttctcagagagaatatgttctgccgtacggacaccgaacgtcccctaagatggccgcccccatgatgctctcccctaagggctctggctccgttacctgcaacgcaccgctcgcttattttttgttctagtctctcttgcttcagtttttatacggcttctaaaacgcttcgcatttacaatagtgactgaggtgcccagaggtgactttaattttccattgagctgagacgtcacagccatcataaccgctaagaagggatgccgcgcctttgtggtaataatgggttctggcctttgagaagtttgcgccgttcactgtcccctgcgaggagaagactaacttatttctgttccgtgtctgttcagaggactttacccccacgccgtgtctgcctgtgtgaactcaagcctctgataagctctccattttctgccagggctgaggtgtctggaaatcggacagtttaagaggcctccgtccaccgcgtctcccggccgctgtgccttctgtacgtcacgtactcaaagatggccgcccccagagcggcgaggcgacgccggcgcggacgcgtctcctcctgaggaaaagccggaaggccgcattccgctctccatggaaacgcggctgaccgtctctggaggtttagagggggagggagttgggcgaggggcccagaagtggaagaagtttagggaagtaagttcagcttttaagaggtcgcggcgattccaaggagagtcaggtcagtgtgtgggtcagggcgtggaaacgtggtgggagggagctttctgagggcgtctgcgttgttggtggcgc

SEQ ID NO: 22399 - DNA, 2300 bp, Homo sapien
ttcaaaacttgcaagatatcacagaaatcctactggggagaaaccacacaaatgtagtgaatgtggtagaacttttagtcataaaacaagtctggtgtaccatcagagaagacatactggagagatgccatacaaatgtattgaatgtgggaaagtctttaactccactacaaccctggcaaggcatcggagaattcatactggagagaaaccttacaaatgtaatgaatgtggcaaggtcttccgttatcgctcaggcctcgcacgtcattggagtattcatactggagagaaaccttacaaatgtaatgagtgtggcaaagcctttagagtacgttcaattctgcttaatcatcagatgatgcatactggagagaaaccttataaatgtaatgaatgtggtaaagcttttatcgaaaggtcaaacttggtttaccatcagagaaaccatactggagagaagccatacaaatgtatggaatgtggcaaggcgtttgggcggcggtcttgcctcactaaacaccaacgaattcattctagtgaaaaaccttataaatgtaatgagtgtggcaaatcttacattagtcgctcaggcctcactaaacatcagataaaacatgctggagagaaccttacaactaaactcaatgtggaaaggccgttagatgttgtcctaacctctgggatccccaaataatttatacttactcatatagcttgtatatttgtcctttccctttgaagtctcatgtggaattgtagtaatctccagtattggaggtggagcctagtgggaggtgattggatgatgggggtggctttctcaagaaagttttagtaccatccccttgttgctgtccttgtgatagttctcatgaggtctggctcatgcctgtaatcccagcactttgggaggctgaggtgggcggatcacttgaggtcaggagttcaagagcagcctggccaacatggtgaaaccctgtttctgccaaaaatacaaaaattagctgggcttcgtggcgggtactggtagtaccagctactcgagaggctgagtcaggagaattgcttgaaccctggaggcggaggttgcagtgagccgagatcgcgccactgcactctagcctgggtgacagagtgagactccatcacgcacacgcacgcacgaaagtgaatggcacctccctcttgtttgttcttctggccatgtgacatgcccttcacctcccaccatcattttaaccttcctcaggtttcccgagagggtgaacagacgtcagcgccatgtttcctataaagcctgcaaaattgtgagtcaattaaacctctttatacattacctagcctcaggtatttctgtctagccatgcaattatggcctaatatatttacacatggagtgaatatagctaagttttttttttttttttttttttttttttttttttttggagacggagtctcgctctgtcgcccaggcgggactgcggactgcagtggcgcaatctcggctcactgcaagctctgcttcctgggttcacgccattctcctgcctcagcctcccgagtagctgggactacaggcgctcgccaccgcgcccggctaattttttttgtatttttagtagagacggggtttcaccttgttagccaggatggtctcgatctcctgacctcatgatccacccgcctcggcctcccaaagtgctgggattacaggcgtgagccactgcgcccggccagaatatagctaagttttaagcaagtgttcactaggcataagaatatacatcctggagagaaatcacagaagtgtagtatatgtggcaagaatactacttaaaggtcaaaacttgtggatctataactcaaagtgcagatatgctttacaaatgaaatgagggtggcagaagcttcaccagagttcagtcactacttgagagtttatattggaaagaaatcgtataaatgtatgtgctagaggcttccccgaggtgtctgaactcactagacctcagaatatacatctttgacaaatgtaatgtgtgtgctaagactttttacccgaacatccaaatggaaacatcagagtattcatactggagaacagtcttacaaatgtaacgaatgtggtaagcctttttaaaaatcaaatgggctgggtatggtggctcacacctgtaatcccagcactttgggaggccgaggtgggtggatcatctgatgtcaggagtttgagaccggcctggccagcatggtgaaaccccatctctactaaaaaatacaaaaattagctgggc

SEQ ID NO: 22400 - DNA, 2300 bp, Homo sapien
tttcacgtttctgctaattgcattcctgaagttctatgcaccatcctgacctaattgccttccaaagaccacacttccaaatactatcacattgaggatggggccttaacataggaattttggcagacataagtctttatatcagagcagtctacattgtatctgtaagttttcattttgcagtttggtccaaacggtgttgtcttttatctcagttcatgcattttccaagtacaatctctgtatcatatatattttgtggccaaggaactggataataaagacagtgaataggactgggcacggtggctcatgcctataatcccagcactttgggaggcagaggtgggcagattgtttgagcttaggagttccagaccagcctgggcaacatggcaaaacctcatctctaccaaaactacaaaaaaattaaccgggcatgatggcatgcatctgtggtcccagctctcaggaggctgaggtgggaggatcgcttgagcctgtgagttggaggttgcagtgaggtgggatcatgccactgtactccagcctgggtgacagagtgagactccatctcagccaaaagcaaaaaaagacaatgaatacatagggacttgctctgttgtttgttacatagttgtaggcatgaaatcataactgagatttctgatttcctttcccaagttttattctttttttgaggcagtctcgctctgttgcccaggctgaagtgcagtgtcgtgatcttggctgactgcaacctcccccttacaggtttatgtgattctcgtgcttcagcctcctgagtagttgggattacaggcatgcatcaccacgcttggctaatgttttatatttttagtagagatgaggtttcaccatgttggcctggctagtctcaaactcttggcctcaagtgatctgcccaccttggcctctcaaaatgctgggattataggtctgagccaccatacctgtctccatttttttttttttttttgagactgctctgtcgcccaggctggagtgcagtggcgaaatcttggctcactgcaacctccgcctcctgggttccaatgattctcctgtctcaggctccggagtagctgggattacaggcacgtgccaccacacccggctgattttttttacttttagtacagacgagatttcaccatgttggccaagctagtcttgaactcctgacctcgtgatccacccacctcggcctcccaaagtgctgggattacaggcttgagccaccgtgcccggctgacctgtccccaatttttattctttattattttatatatttacctttctctcatccaagtactaaccagttctgacactgcttagtttctgagatcagacaagatcagatgcattcacggtggtatggccatagacatatttacctttcttttatctttaaaagccagtgatctcaacatattttctagttatatactgcctctagaatataaattcttgcttattattgatggagaattgtttagaatttcatactatagatttgtattttgtggttgttcattatttacctgctggttttatcacaggctattagaatgttttattaattaatttatattatgattatttattagttaatatttaccattacagtatatcttgctgttgcttggcattcatttgtatgaaataaatatatgtaactttttttctctcctattatgagggagccatatgtttactgccaattggtgtgtcatttggggtcagcgattgcaaaatacttgttttggtgctcatatatgtttgcataacatgagtcttttggtcgaaggatgtttgaaactaggctttcctaaaattgatttaaattacatgtaatcactttttctttactatagaattctattcattttgcatttctacaaatagaagatcatggtagaaaagtttcacaacttgctagtataaacattatgtttagcgtagtgtgttttcagtataaaataatatttaccaataatagttattttaaaaccccatgttcattatattttgcaggtatctctcctaaatgtgtgatcaaggaattaccaccaatacagaacagtaacacaggagaaaaattccaagcagtgatgttggaaggacatgaaagctatgacactgaaaatttttacttcagggaaatccggaaaaatctacaggaagttgactttcaatggaaagatggtgaaataaattataaagaagggccgatgacccataaaaacaatcttactggtcaaagagttcgacatagt

SEQ ID NO: 22401 - DNA, 2300 bp, Homo sapien
tcccaatagctgggaccacacatgcaggccaccatgcctggctaatttaattttttgtagagatggggtctgactatgttgcccaggctggtctcaaatccttggccttaagtgatcctgccacttcagccgcccaagtagctgggactacaggagtgtgccactaagcatggctaatttttatatcttctgtagagacggggttcttgctatgtgcccaggctggtcttgaactcctgagctcaagtaatctgccagactcggcctcctgaattgttggggttacaggcctaagctaccttgcctggcccatctgaaaagtcttaatccatttcagtatcaactctaaggcccaaatatcacctaaatattatctgaatcacatatgggtgagacacaaggtgtggttcatcctgaggcaaagtttctgcccagctgtgaatctgtgaagccagagaagttatctgcttccaaaatacaatggtgggacaggcataggaaacaccctcagccctggaaaccacccttctactttgttactctgaatttgatgtttgtacttagcacgtgtaagtaagtgcatgaagtatgtttctttgtgtgtgttgggaacgggtgctcagtgtcgcaaaaatcaacactgagacaaaggatctctcagcaaggctagtttactttctgcagaaagggtgctgctcactagcagtcttgccacgagagtacacatgaacaaaagagaagggtcatttataacctgacgcatctggccgggcgcggtggctcatgcctgtaatcccagcactttgggaggccgaggtgggcggatcacgaggtcaggagatcgagaccatcctggctaacgcagtgaaaccccgtctctactaaaaatacaaaaaattagctgggcgcagtggcaggtgcctctagtcccagctactcgggaggctgaggcaggagaatggcgtgaacccaggaggcagagcttgcagtgagccgagatagcgccactgcactccggcctgggcgaaagaacgagactccgtctcaaaaaaaataataataataataacctgacgcgtccaccctactgctgtgtctggtttccattggctggaatcggacccaattctgtgcttgacctgattggctagcaccttagaacttcccaaaagaggcaaaggcagaggagaacaaaggaagagaggaagtaacttgtggaaggctgagagaggcaaaaacacttccaaataaggaagaggaataggctgtgacctaatgcttgcttggaacaattcaggcatgccagggcaaatatctaggctaaaatgtgggagctaagaacacagagtatattgatttatctattatggctagcagatatttaagaatattagcacaggtctttgagtaaattttgcttctaagagaggttactatctattctcaattagactgggaggaaagtccctttgaagaggaacctctacttatttcattttctacactgtgtctagcacatttcgcttggcataatgtcttctgggttcctggatccagtcactgctccacatccaatccccaccgagatcccagttccctgactactgagtagcttcagcttttctggtaagactggatggagtccaccaggctcggaaaaatcggttttgacttaaatcagttcaacttgttaagaataaatcatcttagtttccagtataagtggaccacaactttaagattcaaccttaaattctgaaacattaatttaaaatgggcaaggagcaacgctgcttcacaggacaagaaatagtcacaaatactcccaaacctggaaaacaaaatcctgctgggtgagaggcggagtggagaacaggccccgcctcggccccgcccacccctggaggccccgcttcatcccagttttcggtccagccaagccccacctagtcacgccccctaccgccctgggcctcccaccaccctttcgggccactcccaagtcaggccagtctttccgcccagccctttcctagtcgcgccccgcctaggccccgcccccaggccgcccagtttttctttccgcgcccagtttcctgcacacccggaagcagatcgcgctggggaaaggccacgtcgctatgagtgtgtttcagtctacctggattaaacgtttgcttctcttcgtctaccttgattaaacgtgcacttcgcagtcctcggttctccatacccgtgacctggggatcgctacggaccttaaaatacccgcaacagccccttcgtcccaagtaagtagg

SEQ ID NO: 22402 - DNA, 2300 bp, Homo sapien
ggggtttgttttgggaaagggctgttaatgtctttgtttcaaactataaactaagttccttccaaagttagttcagcctatgcccaggaatgaacaagagcagcttggaggttaaaagcaagatggagttgattaggtcagatctctttcactgtaataattttctcagttataattgtgcaatggaagtttcaggttctggatcaggacccctttctggtaacacaaggatggttatgaatgcatccagatatccaaaaagttatctctgaaagccagagatttcctttccctatgggttcttcccttgcatgtcaacccaaggattcactggggacctagaattgtgcagggcagttaggaagagagagacaaaagagagaagaggtgaagtagttttgaagaagagaaagaaggtcccatgcagcctcagttttttttccaacaaacttttcatgctgggaaataggatcctggtttatttgtgggagggattttataggagggtgagaaaaaaatgccctttgagggtagagtctgtggagccctaattggggaaaaggagtcagcctgaaaggaccaggagaaagcaaagagataaagcaaataagctataaatctttcttcatggtccagaacatataaaaaaaaatagaggaagcagataagctgtaggtctctttttctttatggccaaggacatatggcctttctgtggaaagaacgtaaataagtcacaaactttctgctttcatttatcatcaaacgcctcagctaacagaagaatgcaagttagctccctgctaccttggcctcccaaagtgtggggattataggcgttagccactgcacccaaccaaatctcctcttctcatggctcactgcagccttcacctcctgggctcaaatgatcctccttccttacccttccgagttgctgggcccacacgtgcaggccaccatgtccagataatttaattttttgtagagaggtctggctatgttgcccaggatgatctcaaatccctggcctcaagcaattctgacacctcagcttcccaagtagctgggactacaagagtgcattaccaagcctggctactttttgtatttcttgtagagatgggggtctcacgatgctgtccaggctggttttgaactcttgagctcaagtgacctgcccacctgggcctccaaaactgctggcccatctcaaaagacttaatccatttcagtatcaactctcaaaagtcttaatccattcctgtatcagctcttagggcagaataccccctaaatattatctgaaccacacatgggtgagaatcaaggtgtgattcatcctgaggcaaaatttctgcccagctgtgaatctgtgaggccagagaagttatctgcttccaaaatataatggtgataaaggcataggatacatcccccagccctggtaaccacccttctaatctgttactgtaaatttgacgtttgtactttgcacgtgtaaaagcacaggcagtatttgtctttctgtgtctagcatatttcgcttggcataatgtcttccgggttcctggatccagccacggctccacatcaaatccccagcgagatcctagttccctgactattgagtagcttcagcatcatcggcaagagtggatggagtccaccaagcttgtaaaaatcggttttgacttagttcaacttgttaagaaatcatcttagtttctaatataagtggaccacaactttaagctttaaccttaaattttgaaacattaacttaaaataggcaggcagcaacgctgcttcacaggacaagaagtagtcagaaaaccaaagacatgctgcctgtgaaccagagtaaataacaggctctatttcggccccgcttaccccatgaaaccccgccccatcctccgccgcggctccgtcccgccccacctagccacgcccactgccgctccggcccggctccaccctctcagggtccctccccgagtcaggcccctctttccgacccgccccttgctggtcgcggctcgcccaggccccgccccctggcctcccagttttttctctccgctagcagtttccgtcactcccggaagcagattgcgccagggaaaggccttatcgctgtgtgtgtgtttcagtctacgtggattaaacattacttcgctccgtctgcctggattaaacgtgcactttgcagtcctcacttctccgtaccagtgatctggggatcgctacggaccttaaaatacccatagccccttcgcccctgcaacaggcacttc

SEQ ID NO: 22403 - DNA, 2300 bp, Homo sapien
tgccacacactgttttttttgagcctaggttggagggcagtggcacgatcttggctcactgcaacctccgcctcccgggttcaagcgattctcctgcctcagcctcccaagtagctgagattacaggtgcgtgacaccacacccggctaatttttctttttttttttttaagagacagagtctcaccctgtcacccaggctggagtgcagtggcgcgatctcggctcactgcaagctctgcctcccagattcaagcaattctcctgcctcagcctcccgagtagctggcactaaaggcatgcgccaccacacctggctaatttttgtattttcagtagagatggggtttcaccatgttggccaggctggtctcaaacttctgagctcaagtgatccatccaccttgacctcccaaagtgctgggattacaggcatgaagcactgcttccagccaaatttcctcttatcaaaacatcagtcagattgcatcagagcccattctaacaagcttagtttaacttaatagcctctaaatgccctatttcaaaatacagtcatattctgaggtactgggtgttagaacttaaagacaatgatttattttattttatttatttatttattttttgagacagagtctcgctttgccgcccaggctggagtgcagtggctggatctcggctcactgcaagctccgcctcctgggttcacgccattctcctgcctctgcctccggagcagctgggaccacacgcacccgccaccacgcccggctaattttttgcatttttagtagagacagggtttcaccgtgttaaccaggatggtctcgatctcatgaccttgtgatccgcccgccgcggcctcccaaagtgctgggattataggcatgagccaccgcgcttggccaacaatgattttttagggacgtgattcagctcataacattctgtactctggactcccaaaattcatgtccttctcacatgcaagatcccttcacccccatcctaacatctcaaaagtcttattattattattttttgagacagagtctcactctgttgccctggcagcagttcagtggtgcaaagacaactcattgcagccttgatcccctgggctcaagagatcctcccacctcagcctcccaaatagctgtgactataggcgtgagccaccatgcctggctaatttttgtattttttgtagagacaagggtcttactatgttgccccaggttggtcttgaattcttgagctcaagcaatccttccaccttggcctcccaaagagctgggattacaggccagagccactgctcctggcccatttcaaaagtcttaatccatttcagtatcaaactctaaggcccaaatattacccaaatattatctgaatcacatatgggtgagactcaaagtgtggttcatcctgaggcaaaatttctgtccagctgtgaaactgtgaagccaaagaagctatttgcttccaaaatacaatggtgggacaggcacaggatagaccgtcagccctggaaaccacccttctactctgttactgtaattttgatgtttgtagattgcacatgtaagtaagcacatgcaggatttgtctttctgtgtctagcacatttcgcttagcataatgtcttcagggttcctggatccagccacggctgcacatcagatcttcacggagatcctagttccctgactactgagtaacttcagccttaactggcttcagcctcactggcaagacccgatggagtccaccaggctcgcaaaaatcgattttgacttaaatcagttcaacttgacaagaagaaaacatcttagtttccaacagaagtggaccacaactttaagctttgaccttaaagtctaaaacattaacttaaaataggcaggaagcaacgctgcttcacaggacaagaaatagtcacaaatactcctaaatcgggagaacaaagacttgctgggtggaaggcagagcgaataacaggccccgcccaccaaacaggtcccgcccacaccgcccgtcccgcttagcccacctggccccgcccactaccgcatcagccttgccccaccctttcagggttcccaaatctggccagtctttctgccctttcccttgcgggtcgcaccccgcccaggcccctctcccgccccaggtctctcagtcttttttctcagggcgtgtagcttcctgcacacccggaagcagatcgcgcggggaaaagatcacagcgctgcgcgtcagtttccgtctacctggactaaacatttgcttcgc

SEQ ID NO: 22404 - DNA, 2300 bp, Homo sapien
ctgggaatagggagggctgggactgaaatattcaaccccatccccacttttatgagcagcagtttcctaactgcagtgggtaagggtatttgaaatagatgctgggccgggcacggtggctcacacctgtaatcccagcgctctgggaagtccaagtgggcggatcacctgaggtcaggagttcgagaccaaagacagccaacacggtgaaaccccgtctctactaaaaatacaaaattagccgggcgtggtggctcatgcctgtaaattccagctactccggaggctgaggcagaagaatcgcttgaacccgagaggtggaggttgcagtgagcagagattgagccactgcacttcagccggggcaacaagagcgaaactccgcctcaaaaaaaaggccgggtgcggtggctcacacctgtaatcccagcactttgggaagccaaggcaggcagatcaccctgaggtcaggagtttgagaccagcctggcccaaagtggtgaaaccccgtctctactaaaaatacaaaaattaaccgggcgttgtggtaggcgcctgtaatcccaggtactctggaggctgagacaggataattgtttgaacccaggagacagaggctgtagtatgccgagatcgggcccctgcattctagcctgggcaacagagcgagactccgtctcaaaaaaaaaaaaagaaaaagaaaaagaagaaaaaagaaatagatgctgtgggtattcagatctgtcagagtgctagctcagcctagcccttcaagtagcagaataaaggaggaaagagcatcccaggccttcccatccccattcaactccctcagttagagtggtcctaagattgcggtgggggggtagggctgtgttgaagaggttaaaaacagagattagtcagatccaatcctgctcccactctatggaggaaacaaattcgaatacatagtcacagcccaggctctgggattgagagacagagagagagattggattggagagagagagagagagagatgggattggagagacagagagatagatgggactggagagacagagagaggggttctgtggctctggaagcctagagaacagagcctgaagacagagaggaaagggagtaaaggggaggcatttatgcagagatctcagaagtgaatatgaaaggcacccctagcagaacgcacagcttgggcaaggaggcttgctggcatgaaaacgcaagaagtgctcaggcagctgtaattctccaggacatcagataaaaggtaaaaaacagatgggagacgcgcctagacagggtattgaataccagcccgaggggcttgggtttcatccaaacagcaaggcaactgagctcaacacagtgagactcggtctccacaaacatttttttaaaaattggccgggcctagcggcgcgcgccgatagtcccagctatttctgcaggctgaggcgagaggatcatttgagctcggggaggtccaggcggcagtgagccaagatcctgccactgcactacagtctgggcaacagagcgagaccctgtctttaaaaaagtaaaaaaaaaaaaaaaaaaaaaagaaagaaaaagaaaaaagagagaagggcaagtcgctcccttctctgggccttggcataaatcaagcacaaatcaaagtctcactccctcctcctgccgcgcaacggcgcggagagccagccagccagccagcggaaccacggcctggtaacccaaaacctgcacaccctccagctccccacaggacgtcacgtattaccaccgacgcacgcgcagaagccttcccggggactcaagaaagggcaggcttagcctcctccccatgtcgcccctcattggctagaaactactgctcgtctcggtcgttgttagcagcgaccagggcgggtacaatcttggtcgctaggacacggctaacttccgctttcttccccctctcctaggctcaaactagtcaaatcttgttcactcgaccaatggcaaatcggaagtgggcgggacttcacaagtccggaccaaagaaacgcgagcttagccctgggtagcgcggccaatggccgtggagcagcccctgtaaactggctcgggcgcccccacgcccgcccttccttcttctcccagcattgccccccccacgtttcagcacagcgctggccgcagtctgacaggaaagggacggagccaagatggcggcggccgacggcgacgactcgctgtaccccatcgcggtgctcatagacgaactccgcaatgaggacgttcaggtccgg

SEQ ID NO: 22405 - DNA, 2300 bp, Homo sapien
taccatctcattgtcctcagggctgttgctcacctagtatggccctagcccatgtgtatatttccccatagctcaggctgagagaagaacacacagatcaacttggagaaaacaaagaggaaagaaataggcaactaggtcaatactccccacagtattttatgttattttattttatttatttatttatttgagacagagtctcactctgtcacccaggctggagtgcagtggcaccatctcggctcactgcaagctccacctcccaggttcacgccattctcctgcctcagcctcccgagtagctgggactataggcgcccgccaccacgcccggctaatttctttttgtatttatggtagagacggggtttcaccgtgttagccaggatggtctcgatctcctaacctcatgatccgcctgcctcggcctcccaaggtgctgggattacaggcatgagccactgcgcctggcctccccacagtattttattatgaaagttttcagacatgcataactttggaagactaacacaagggtcagcagactacagtccatgggtccaattcagcccactgtctgcttttgcaagtaaagttattggaacacagctatgcctgtttgcttctctagttctggttctatggttgttttcagtgccacgcaagcagagttcagtagttaggtttgcaaagctgaaaataattactgtctggcaatgtatagaataagttttgctgacttctagcatagtgcagtgagcacctctatacttacaccccaggtcagtgattgttagtgtttgctatattagttttttatctttctataggtctgtctctatatacgttttattttttagctgaaaatcagttgcaggttttgtagtactttatcctgaggtccgtttaatgccagaatggtgagtttttggactacctgtatgaaagatttactgtgtgcatttttctgaggagagaccatcacaacacttcatcagatgctcatcgtctgtgatcgcagagatattcttcaactcctggaccggagaacccaactcacgcaagatcttagtcacttgtagacctcgtctcagttatgtagggcctcagaacagaacaggctaagggagctcctgctcctcaacctcgccctgtccctacctgttctgcctctatccaggaagaaaggtcccccgtgggaccattagtcactctccccctcatgaaagcatttcctcccactctcacactcatgagctcattccattcttgtgacagtgctgggagctattaataataggagaggcctcgtggtgatgaagaaatgaggggagagtttcacagtctgtcctgccatcagagcagctggctttggatcccacactccctcggtgcttgctttggtaggtgtctttacctctctgatcgtcactttccaaagtggtgaaaagaggatattagccatgcttttcttttaggatctggaggatcaaatgaggtcccaacatgtaaatgcttgttgtgagatctattatgtgtgttagccaaatataatagttctctaggactgccacagcaaatcaccatgaactgggtagcttaacacaacgaatttattctctcacagttctggaggccggaagtctgaaatcaaggtctcggcagggttggttccttttggaggctctgagggagacccattccatgcctctctggaagttaggacttctggtggctccagcaattccttgtgttcctgggcttgtggatgcatctcctggtctctccacccatcttcacatgcgtgccttcccctctgtatctgtcttcctttctgtctcttagaaggacactgtcactggattcaaggctaaccctccgtttaggatgatattatctggacacacttaactacgtctgcaaagactgttttgacgtgcacgtcactggattcaaggctaaccctccgtttagggtgatattatctggacacacttaactacgtctgcaaagactgttttgatgtgcacgtcactggattcaaggctaaccctccgtttaggatgatattatctggacacacttaactacgtctgcaaagaccgttttgacgtgcacgtcactggattcaaggctaaccctccgtttaggatgatattatctggacacacttaactacgcctgcaaagactgttttgacgtgcacgtcactgggacataactttttgaggctgctattcagcctcctgtactggtggtattattactactgctaatgctactcttgtttttgtagt

SEQ ID NO: 22406 - DNA, 2300 bp, Homo sapien
aaaagactgagactctgtcttaaaaaaaaaaaaaaagggaggcacgcttggccctgcctgtttcatggcaccaggcatggaaagacgcacggctcctgctgcaaagctggttcctgaagacctggtaggaagcaggacagttcattatgaagacgggaatgaacaagtaaaaatcttgaaggacctcatgatatcttgggaaaatactgccttttattcatcttgcaaatatttactgaatgtctactatgtgccaagaactggtttaacagcctaaaattcctgccctcatggaatttttattctaagacccagtgtgacacagtttatgcagctcaggagacaaggatgggaagaaccttccctaactgtggtgatggtacgctattctgaagctctgagtccttcccgcaaatgccagtgggaaccagcataattaaaggcaaagggcgcctcagggtggagtggcactcaaggcctctctgatcccaccctgccctctctccgatcccaccctgccctctctcctgctttctctcaggctgggccatcaagatcaggcctgaatgttcctgcttgcacttgctctcacctcccagggttctttgtcctctggctggaacaaagttcctatcttagctcttacccactcatcttctagaaccagctgtaacaccacctcccctcctcaatgcttccaaggccccacatctgtctgtctgtcccacacctgtgacactttataatcaaatttcccctaagtcagtcttccccttcagactgcctagctccatgaaggccaggaatgatccgaattcactggcccagcaaatagctggtgctcagcaaacatgtttgtgggatgaggcaatctggatccctgtggaaggagcactgtcctgagagtcacagacctggagtcttgtcccctttctgcctggctggtagtgtcactctgatcagttaattaaactttccggggctgggcgcggtggctaacacctgtaatcccagcactttgggagatgaaggcaggcggatcgcttgaggtcaggagttcgagactagcctggctaacaacatggtgaaaccccgtctctaataaaaatacaaaaactagccgggtgtcgtggtgggcatctgtaatcccagtccctcaggaggctgaggcaggagaaatgcctgcacccgggagggacaggctgcagtgagccaagattgcgccaccacactccagctgggtaacaagactctagcctgggcgacagactccatcttaaaaaaaaaaaaaaaaaaaaaaaaaaaaaacaccaaaaaaccccacctttttgggctgtcttcccctttgtgaaaggacagcttgattatgtcaggaacaccccacatgtgctacccttctctgctcctgtggcactttcctccacgtagccttaactttgcctcagaatctttctcaaggcagcactttaagatgccatgtcaatcaaccaggattggcacacgaagcgagacgcagttagatgatcatagagatcttattgctcaaacgcccaatggttccatcggcctaatggaaacctcagctcctatatgcttcccttctgagagtgtcagtgtccccaccagtgggacaatgtcaacggtcgctcatctacctctgtgaacttgtcagccaccatgtagcggacgcgccaggacttgtcttcagcggcctggcgcagagtgggcatcaccagggcctccagatcctcctggggcagaagctgggcgatgttcacgcacgcctccaccgccagcagccgcaccgagtcctagggagaggagaggaacagtgggagggcagcagaggccttgctgagctctgggattctctttcatgggcaggaaccaccagaaggacgggagagcagagggccaggaagcaaaactcacctgctcgtcagaggccaggttggagaacatggggatgatctcactcttgacgttgtccagctccagcaccttggcaaactcccccagcttggaggctgcggcccgccgcaccatgggggtgtcatctgagcacaggttccggaagtacctgggagtcggggacggggatcctgaggcagcaggcagtatggcagagaggagcaagcacagactctgcagttgtgtgggtccaggttttagctgaatgaccttgggcaagtgatgaccccctctctgtcttcccagccctatgaaacggagctgatagtaacagtacctaccccacaggtccgcatgaggtttaaatgaaaatagtgtgtgtgagacac

SEQ ID NO: 22407 - DNA, 2300 bp, Homo sapien
gtttcgtggcaacatagctatttagcaatattgtgtaatatagacatctatcttgtacagatcccaaaatctatcccagatactgcatcttcaaaaaataatgctgacctaggccaccatggagtgtgcctggagtcctagctacttaagtggctgaggcaagaggatgtcttgagcccaggagtacatatgcagcctggaaaacacagttagaccctgtctctaaaaaataataataataatcgaagtaaaatatgctgatatgggccgggtgcggtggctcgcgcctgtaatcccagtgctttgggaggccaaggtgggcggatcacgaagtcgggagttcgagaccagcctggccaacatggtgaaaccccgtctctactaaaaatacaaaaaattagctgggcatggtggcaggcgcctgtaatctcagctactcgggaggctgaggcaggagaattgcttgaacccgggaggcagaggttgcagtgagtggaggccatgccacagcacaccagcctgggcaacagagcgagactccaactgaaaaaaataaaaataaaaaatgctgatatgtcatctcgtatccatctttgtgacatatcactatatcctcattttaacctgctaatattttaaatatgttcattttcatatctaaacatgatcatacttcaagatggatgaagggatccaaaaatagggatataaggccgggtgcggtggctcacgcctgtaatcccagcactctgcaggccaaggtgggcagatgatcacctgaggtcaggagtttgagaccaccctggccaacatggcaaaaccccatctctactaaaaatccaaaaattagccaggcgtggtggcacgcgcctgtaatcccagctactcgagagcctgaggcaggagaattgcttgaacccaggaggtggaggttgcagtgagctgagatcgtgccattgcactccagcttggatgacagagttagactctgtcttaagaaaaaaaaagttgggggggtgagatatcagagaaaagcatacttattagtacctgttaattcaaaaatattgccataaaattattgccggcagacgtaaggctatttaaaatttgataatctagttttacttctatcagggttctataaaagaataatcggcctaccaaatacacttagaattactgcagagttattctttagatcaataaatacaattgtcttctgaagactattttaagggctttgttatctacaggggccagtacattgaagaagagaaaacaaacaagatttaagagattataatttttaaaataaaaagtatgtttacttattactttcagaatgcacctaaagtgaatctgaaattacagtatttttagaaaatattgacctaagcctcagcctcccaagtagctgggattataggcgtgtgccatcacgcccggctaatttttgtatttttagtagagacggggtttctccattttggtcaggctggtgtcgaactcctgacctccagtgatacgaccgcctcggcctcccaaagtgctgggattacaggcgtgagcaaccgtgcccggcctctattgcttttttaaaagcaatagctggtgacctgacttctcaccggccttagcactccacgccccagatgtggcccaggaaactctttggaactctctactccagagtgaatggggaatagaaatggagaggatttctatgctattctgtggggcgtcagcgtgaaattacacattctgcacaggttgagtttgcatattgtattttagtttgcattcctttcacagacaatttaagggattttcaattaaatttctaaattttaattgaattccttaattttaattgtgggaactttcctggatccaaacaacagacgttgaccctcctagtgagatcccaggtcacaaaccgtggagcggctccagcctgactggcaagtgtggcttgcaaaacgcggaaaaccgagacacgcccagagataggaggagggaagtgcaggccccgtccaataagtattcaggccccgcccgccacgtcgctggccacgccccggcccggcctctccgttcgcgcgcagccgcctgcagacccggaagtggatggcgtggagatatggcgcaactgcggcgcgtgagttttcctttgtttagattaagtgttcgcttagcggtgccctcacgcttctgtacccgggatgtggggggcggtacagaccttgaaatccccgcaccgctctctccaccccgagtaaattcatgcgtcccgtcag

SEQ ID NO: 22408 - DNA, 2300 bp, Homo sapien
ttaattactttgtttcagatttttgtgttaccagtttcctctgctggtgtctcctgaagctgtcttctctgaatgtgggagtgtcccatgatttaggtctttttcatttttgtttttgtttttaagacacggtctcagtctgtcacccagactggagtgcagtggtgcaatcatagctccctgcagccttgaactcccgggctcaggaggtcctcctgcctcagcctcccaagtagctgggactctaggtgcataccaccacacctgagtaatttttttattttttagtacagactgggtttccctatgttgaataggcttggatctcaaaactcttctcatctcttttcacacacactacccttccttatcatctcatctcatggctttgaaccccatctacctgtctccatgtgccctgcagacctctgccctgaggtctagaaacctgtgttcagttgtcccctcacttctctgctgggacatctaacaggcatctccaccttcgtatgtgccactttctgaactcccccaaatgcattcccctgcagtcctgcacatctcagatgagggtgaccctgtacttcctggggcttagctgaacttgtcatatgttcaaaatatgtaagatgttacattgtaaatacattaatatatttttttttcgagacggagtcttgctgtgtcaccaggctggagtgcagtggtgtgatcttggctcaccataacctctgcctcccgggttcaagcaattctcctgtctcagcctcccaagtagctgggactacaggcgtgcaccatcacgcccaactaattgtttgcatttttagtagagatggggtttcatcatgctggccaggatggtctcgatctcttgaccttgtgatctgcccgccttggcctcccaaagtgctgggattacaggcatgagccaccatgcccagcctataagtacattaatttataacataaataattacatagttactaaaacagatgaggaaatttgttgtttctgaaattctttggaggtatgggagagaaatgttggtggcctcatccctgtgtgatctgcatcccaggacctctctgagctcatctcctccctgtgtccccctcgttccctctgccgcagccacacagacctctttcctggggccagggttgctcctgcctcagggcttccacctgggctgtccctctgcctggacatctctagcctgtcagctgcaggtgcaaacaccttttcttccccaggtctttgttctgatattaccttcttcatggagggttctgtgttcctctccaccctacatttaacactccagctacacccttacccctactgtggtccacattgcctgctctggatgtttctttctgctcttttgctgtccactacgtaaatcctggtaacaagacccaagggtagagcagagccagaaggtgggggtgtgctgggcttgccccgtctgagtggagctcacccctgttttcacattggagtgcagatacacatcttgtgcccccagcctcttacctgagattcccattcacatactcaggttgggcccagccttaatatttgaagttgattccacagtagtttctccttatctgccagtgtactttttgaggttccagttactcatggtcaaccacagtccaaggtattacgtggaaagttccagaaatgaagaattcacaagttttcaatttctcatccttctgagcaggatgatacaatctctcactgtcccactctgttttgtccaggacttgaatcatctctttgtcctgtatgtccccctgtatagtcatccctcggtatcacgtaggatttgcttccaagatccccccaagactacccaaatcagatgatcttcaagacccttatataaaattgcataatacagtcacatgccacataaggacatttcggtcaacagcagcccacacctgtgatggtggttccataagattacactggagctgaaaaattcccgttgcctagctacctcagagcagtcatgacatcatagtgcagtgcattccttgtatttgtggtgatgctggcggaaacaaacctagtgcgttaccaaacagctttaacctggatgtggaggaggatgacattgagaatctcttagaggtggttcatgaggaatgggttaatgaggagtcattggaactgatacaggaacatgtagctgaagaagaggcaagagaatagggaactggctgggcacggtggctcacatctataatccctgcactttgggaggccgaggcaggtggat

SEQ ID NO: 22409 - DNA, 2300 bp, Homo sapien
caactctaataaaattatattttgtgtttatatatgcacgtatagacacatatataatattttttttttacttttttctttttctgtacattgcatccagatgctatgcttgtttgtttttttttttgagacagagtcttgctctgtcacccaggctggagtgcagcggtgtgatcttggctcattgcagcctccgcctcccaggctcaagtgattctcctgcctcggcctcccgaatagctgggattacagacatgcaccatcaccacacctggctaatttttgtatttgtaatagagatggggtttcaccatgttggccaggcatggtcttgaactcctgacttcaggtgatccacccgcttcggcctcccaaagtgttgggattacaggcatgagccaccatgcccggccagatgctatgcttaatacattttttccgaatgtcactctagtgaaaattttaggggacacaaaaatgagactgttgtttggagacaatattttttgacaagagtatgcacaagacaatggcaggtataaacgttttattgtaaatatgaaaaaggaaaaaatgctttcactatattagaggacttgaagtaacgtgaagtgattccaaccctttatctttattttatttatttattttattatttatttttttgagatggagtttcactcttgttgcctaagctggagtgcaatggagtgatctcagctcactgcaaccttcacctcccgggagcatgctgctctatcttttttttcagatgtttgagctattccaggttttttgggatttctgttggtttgttttgttttttgcttttctacataattgtttggataatcttgtcagtatctacgaagtgccttgatagtaaatatattaaccctgtgtatcaatttggggtaatttcacatttttttctatgttgagtttatcaataaattgatattgtatatgtctctatctgggtgtctttgatttctttcatcagcattttgtagttttaaaatcctgagaatgttaaattaacatattttttgactttttttttttttttttgagacagagtcttgttctgttgcctggtctggagtgcagtggcacaatctcagctcactgcaacctccgcctcccaggttcaagcgattctcctgcctcagcttcctgagtagctgggattacacgcgtatgccaccatgcccagctaatttttgtatttttagtagagatggggttttaccgtgttggccaggctggtctcgaactcctgacctcaaatgatccacctgccttgacctcccaaagtgctgggattacaggtgtgagccacctcgcccggttaatgcttttttaaaaccaacaattggtgacctaaattctcactggccttagccctccatgcccctggtgctgtcactagaaaactctctggagctgagcacagggttacctctgtccctcccgaaagaacagggaatagaaaaggagaggatttctattctgctttgtgggccgtcagcatgaaattgcacattctgcccaggcagggctttgcagttcatgtattaacttgcgtcgctttcacagacaatcccagggcttaattaaattgctaaatttagttttttatgtatttatttgagagactgagtctctgtcgcccaagctggagtgcagtggccgtcataactcagtgtaaactcgaactcctgggctcaagcgatcctcccgcctcagtcttcggggtagccgggactacaggtgcccgaccgcacggtcggcttaagattaactttaatagcaggaattttcctggatctaatcattagccgactttgctcagtcccggcaagagtacagttccgagacagctgagttgctccagtctccttgacaggtctccccggcaaaacccggaaaacagaggcactggaagcgaggcggagggaagcgcaagccccactccgccccgcccccgcccccgcccccgcccccgcccccgcccccgcccccgcccccgcccccgcccccgcccccgcccccgcccccgcccccgccccgctcggacccctccgctgcgcgcgcagtttcccacaaacccggaagcggatcgcgtggagtgaaggtcacgccgcggcgcgtgagtttccctttgtgtaaattaatctgcgcttcccaactcccccgcgcttctgtacccgggatctgaggggccacacagaccttgaaatcctcgcaccgctccctctaccccgaccaaattcaggcgtctccgtgagagtcaggcg

SEQ ID NO: 22410 - DNA, 2300 bp, Homo sapien
ctataaatcttctaaaataaagtgtattagttttttaaataactaatttaggccgggcttggtggctcacgcctgtaatcccagcactttgggaggccaaggcaggtggatcacgaggtcagaagttcaagaccagcctgaccaacttagtgaaatcccgtctctactaaaaatacaaaacttagccaggcatggtggcacgtgcctgtagtcccagctactcgggaggctgaggcaggagaattggttgaacccgggagttggaggttgcagtgagctgagattgcgccactgcactccagcatgggtattggagtgagactttgtctcaaaaataaaataaaataaagtaatttataaaattaaatgaatattgactggaaacacagatgaaacaaattttctaggaaaatgtactctaccaattttgacagtagtagagacagaaaatctaaacagaatgtaagatgaaacatataagatgatttaacagagaaattgcaccaatctttcaggcaggagaatcacctgaggtcaggagtttgagaccagcctgtccaacatggtgaaaccgtgtctgtactaaaaatacaaaaattagccaagcactgtggtgcaagcctgtagccccagctacttgggaggctgaggctggagagtcgcttgaaccggggaggcagaggctacagtgagctgaaaccgtgtcactgcactccagcctgggtgacagagcaagactctgtctcaaaaacaaacacacacacacacacacacacaatgtaatttacatctattttttaaagttattggtttttttaaaagcaacagttgggccgggtgcagtggctcacccctgtaatcccagcactttgggggccggggcgtggggggggggtgtggatcacgaggtcaggagatcgagaccatcctggctaacacggtgaaaccccatctctactaaaaatacaaaaaattaggcgggcgtggtggtgggtgcctgtggtcccagctactcaggaggctgaggcaggagaatggcgtgaacccaggaggcggagcttgcagtgagcctgggtgacagagcgagactccgtctcaagaaaaaaaagcagttggtggtggcctaacatccctccggggacaggacccatcgccgaacgatgggtatggtggcatgtgcctgtagcgtttttaacacacagggaagcgaccgccagactctcacggagatgccccgttcgttctgccttgggccaggtaaatacggattcccaggttggccttaaccctccaacgcgcttggcgttgtccctcggaaactctctagagatgagcactctagagatgactcagtggactgggaaaggcagacccacctcaatttgggtgggcacaatctaatcagctgccagcacagtcagaataaaagcaggcagaagaacgtgaaaacactagacgggcttaacctcccagcctacatctttctcccgtgctggagatcagagatgatgatggaaagggagaagatttctattatgttctgtgggccgtcagcatgaaattgcacatgctacccaggcagggctttgcatttcacattttaacttgcatcgccttcacacagaattccaggccttttaaattaaattgttaaaattagtttttatttacttatttattttaggacagagtctacactgagtatagcactgggtctacactacgcccaggctggagtgcagtggccatgatagctcagtgtagactcgaactcctgggctgaagcgatcctccagcctcagcctctctagtcgctgggactacaggtgcctgccaccacggccggcttaaaattgattttaatagcaggaaatttcctggatctaatcctcaactgacgttgctttgctccggcaggatcccagtttgcagagggctgagctgctccagcctcactgccagcaaaacccggaaaacagaggcactggaggcgtggcctagggaagccccgccccgtcccgtcccggtccgctctctatgctgcgcgcgcgcagttttttgcagacccggaagcggatcgcgtgggtagaaggtcacaccgcagcgcgtcagtttccctttgtttagattcaatctgggcttcccagctcccccgcgcttctgtacccgggatctgagagtcaacacagaccttgaaatccccgcaccgctccctccaccccgtgtaaattcaggcgtctccgtgagagtccggcgctcgcttccctgtgtgttaaaatcgctcggcgacgggtcctgtc

SEQ ID NO: 22411 - DNA, 2300 bp, Homo sapien
gggcagaggttgcagttagccaaagatcacgccctgcactccagcctgtgcaacagaatgagaccctgtctcacaaacccacacacaaaattatccggctttggtggcaggcgcctgtaatcccagctactccaggaggctgaggcaggagaattgcttggacctgaggcagaggttgcagcgagccgatatcatgctattgcacttcagcttgggtgacagagtgagactgtctcaaaaaaaaaaatgtatttgctcagttaggatggaaataggcctgtatggaaagtacagttaatgtttgagttgtaccttgatacaagcagtttcttgggagaaatggcatccagcccagtggagacccgcaagaacaggtcatgtccatacattcccgctagagggcagtgctggtgttggtcgaggcttcggaggtcaccttgaaggctaacggtgtgatcattggagaacagctggcatacagccacgtctcagtgtaggctgcaggtcttcagagaggcccctgacagcagagtgtgtcgcagcctctggtctcacagtgcctgtcaacctcttgaatttctgtgtattttgaattccagtagtcgaggtcagaatctcatatatggggtctgagaaggtgccatataacattctccaggggagctgggaatccaaccacattctctggggtgggagggaagtttactccatttcctatttatgggggctgctaaggggtgatgcatcactcgtgaaggaaggaggaacacactccaagttcttatcacagcacacaagtcattcatgtagcaaactatgtaagtggaatcatttgaaacctacataacagggggcccaggtttctcctgcctcagagacttcatctgggctgttcctctgcctggaactctctggcccctcagctgcaggtgacaaacacccttccttccccaggcctttgttctggtagtaccttcttaggattctgtgacccccccatagcccccgatttaacactccagcctgaccccaccccaactctcctccattttgaagctgtgtgtgtttctttctttcccttttcctgccactgtctggatcctggtgacagcaaggacccaaggggagagacgagccagaaggtggggactgtgctggctcaacccctctgagtggagctcagccctagtctcacatttgagagctgaggcattttgcagaaacatctcttgtgcctccttacagagattctgatttcaatactcaggtggaggccaggcctaatatttaaagctgatgctacagtagttgctccctatctgctggtttgatttctgtggttccagatcctcgagtttaaccgtggtctgaaaatattacacagaaagttccaaaaatgaagaatgtacaacttttaaatttcttgccattccgagtagtgtgctgaaatctagcactgtcccactctcttttgtttttgaggagtctccattgcccaggctggaacgcagtggtgcaatatcggctcactgcaacctctgcctcccaggttcaagtgattctcatgcctcagcctcccaagtagctgggattacaggcatataccaccacaccccactaattttttgtatttttagtagagacagtttcaccatgtagcccaggctggtcttgaactcctgagctcaggcaatccacctaccttggcctcccaaagtgctaggattacaggtgtgagccactgtacccggccagtcccatgctattttgcccaggactcgaatcatctccttttctggtatatctaggcagtacagtcatccctcagtattggagggattacttccacgacccctgaggataccaaaatcaggtgatcttcaagtcccttatgtaaagttgcatagtacagccatacactgcataatgacattttggtcaacaatcagatctatgatggtggttccgtaagattacactgttacactggagatgagaagttcctgttgcctagctacatcagagtagtcatgacgtcatagtgcagtgcattccttgtgtctgtggtgatgctgggggaaacgaacctagatcgttgccaggcagctttaacctgggtgtgggtgaggatgacactgtgatgctcctagaggtggttcatgaggaatggacgaataagtggttggaactgatatgagaacacatagctgaagaagaggtgagaagataggaaagtgaaggaaaagaaaaaaaaaatccaggaactttcacagtgaagggtttagcagaaacttgtacag

SEQ ID NO: 22412 - DNA, 2300 bp, Homo sapien
ataagctttttcccatttaaaatctttttccccattaaaacttttttgtcaacaaccaggacacaaacacatacattagcctaggcctacacagggtggggaccatcaatgtcactgtcttccagtgccacatcttgtcccactggaaggtcctcaggagcaataacatgtatggagctgtcatctgggataacaatgacttcttctggatacctcttgaagaacttgcccgaggctcttctaggagagaaggcactcctttcagaaatatgtctgtggtgtgaatctgaaagttagctgagggcctggtgcagtagctcacaccagtaatcccagcactttgggaggccgcggcaggcagatcttgaggtcaagagatcaagaccatcctggccaacatggtgaaaccccatctccactaaaaatacaaaaattagctcggagtggtggcacaggcttgtagtcccagctactcaggaggccgaggcaggagaattgcttgaaccctggaggtggaggttccagtgagccgagaccgcaccactgtactccagcctggtgacagagcgagactcggtctcaaaaaataaaaaaataaatcagctgattaggaaaacgagagaggaagaaaaatatctatggtggtttacttgcttattttttcttcctaaatgttcttgtgagcaggtaatgcaccataaactttcctttctattaataaacaccttttggggttgggtgtggtggctcacgcctgtaaccccagaactttgggaggctgaggcaggctgatcacaccaggccaagagttcgagactaacctggccaaaatggtaaaaccctgcctctagtaaaaatacaaacgttagtctgggccccatgctcacgcctgtaatcctaacacattgggaggccgaggcgggcagatcacgaggtcaggagttcgacaccagactgaccaacatggtgaaaccccgtctctactaaaaatacaaaaattagctgggcatggtggcgcatgcctgtaatcccagctactcaggaggctgaagcaggagaatcgctggaacccggaaggcagacgttgcagtgagctgagcctgggcaacagagagagactctatctcaaaaaaaaccaaaaacaaaaaaaacaaaatacaaactttagccgggtgtagtggcaggcacctgtaatcccagctactcaggaggctgaggcaggagaatcgcttgaacccagaaagcggaggttgcagtgagccaagatcacactactacattccagcctgggtgacagagtgagactctgtctcaaaaaataaaataagctggccgcagtggctcacgcctgtaatcccagcactttgggaggtcaaggcgggtggatcacgaggtcaggagatcgagaccatcctggctaacatggtgaaaccccgtctctactaaaaatacaaaaaattagctgggcgtggtggtgagcgcctgtagtcccagctactcgggaggctgaggtgggagaatggtgtgaacccgggagacggagcttgcagtgagtcgagatcaccccactgcactccagcctgggcgacagagcgagactccatctccaaaaaaaaataaaaataaaaataaaataaataaataaacacctattggtgttggagttcatgttttcaaactttttaagaagcttgttgaggtctgtacaagtttctgctaaacccttcactgtgaaagttcctggattttttttttcttttccttcactttcctatcttctcacctcttcttcagctatgtgttctcatatcagttccaaccacttattcgtccattcctcatgaaccacctctaggagcatcacagtgtcatcctcacccacacccaggttaaagctgcctggcaacgatctaggttcgtttcccccagcatcaccacagacacaaggaatgcactgcactatgacgtcatgactactctgatgtagctaggcaacaggaacttctcatctccagtgtaacagtgtaatcttacggaaccaccatcatagatctgattgttgaccaaaatgtcattatgcagtgtatggctgtactatgcaactttacataagggacttgaagatcacctgattttggtatcctcaggggtcgtggaagtaatccctccaatactgagggatgactgtactgcctagatataccagaaaaggagatgattcgagtcctgggcaaaatagcatgggactggccgggtacagtggctcacacctgtaatcctagcactttgggaggccaagg

SEQ ID NO: 22413 - DNA, 2300 bp, Homo sapien
tggtgtgcaccttcattttcatgcagcaaaaatatatagtaatatgacaaatattaggaaataaagtatgggttgagggcaaaaatactgtaacatggccgggcctggtggctcacgcctgtaatctcagcactttgggaggctgcattgggtggatcacgaggtcaggagattgaggccatcctggtcaacatggtgaaaccttgtctctactaaaaatacaaaaaaaaaaaattagctgggcctggtggtgtgcacctgtaatcccagctacttgggaggctgaggcaggagaatcgcttgaacccaagaggcagaggttgcagtgagctgagatcaccccactgcactccagcctggtgacagagcaaggctccgtctcaaaaaaaaaaaaataataataatactgtaacacaatttctttttgtacttctagtgttcagtgacatcatttgaaaatattaatgttcacccatcttctttttaagtcacacacagaaagggaattttgttttggtacattaactagaaacttcatatagtcaccctcacaactcttttggtaatttgaatttttgaccactcttctggaacttgtttgaagtccccctaaggtttggcttggatcttgagaatgatgatcccatacactgatatggtttgagagtgtttattatataatgaggctctgtgggggaaagcagggtatacttttccagctggtccaaaagtggcttcagagaactgggataggtgactggcttggggtgtcatgattgctaaagggtagggctggggcggggatacccactacccatactggaaacttagttacaattcacacctagcatgtatatttttatattttttgtatgtatatatatttttacatttttttcctacattgcctccaaattctatgtttaatacatttcttccctgttttgctctggtgaaaactttaggggacaaataaatgagtgctgtttggagacaaaattttgtgacatgggactgggcattgtggcgtgtgcctgtagtcccagctacttgggaggctgagatgggaggatcacttgatgccaggaggtcgaggctgcagtcagtgagctgtctgcacttcagcctgaaagacagagggagaccatctcaaaaaaaaaaaaaaaaaaaaaaaaaaagttgtgacctgagtatgtccataagacaatggcaggtatacactaggattaatataaatatgaaaaaaaaaaaaaaacttggccgggtgcggtggctcacgcctgtaatcccaacattttgggaggccaaggcaggcggatcacgaggtcaggagttcaagaccagcctggccaacatggagaaaccctgtctctattaaaagtacaaaaaagtagcccggtgtggtggtgggcgcctgtaatcccagctactcgggagactgaggcaggagaatcgcttgaacccaggcggcggaggttgcagtgagccgagatcgcgccacttcactccagcctgggcaaaagaacgaaactctgtctccaaaaaaaaaaaaaaaaaaaaaaggaaattgcacattccgccctggcagggttttgcatttcatattttaatttgcatccccttcataaacaattcaaggactttaaaattccggaaactagtgtttattattcatttatatttatttattttaattatttatttccaatttgttatttatgattatgtatttattaggcgcaaggtttctctctcatgcccaggcgggagtgcagcgcacgacctcggctcactgcagcctccacctcatgggctcaagcgatcctcccacctcagcatccgggtagctaggaccacatgcgagcgcccctacagccgatttaaaattaattttaatagcaggaattttcctggatctaatcatcaacaaactttccctctgccgggacacaatctatttccagatagctgagttcttccagtctccacggcaggtctagcctccaaaacgagacgagctgggagcgaggcggagggaagcgcaggctccgcccaatcccacccgggcctggcctcgcctcgcctctcagctgcgcgcgcagtttcctggagacccggaagcagattacgtggagtgacggtcatgctgcggcgtgtgagtttccctttgtttagattaaatctgggatgctgagtcccctcgcgcttctgtacccggcatctcaggggtcacacagaccttgaaatccccgcatcgctccctccaccccgactaaactcagacgttctaatgagagtct

SEQ ID NO: 22414 - DNA, 2300 bp, Homo sapien
gcctaaagcaacaaaggggatcctgttctggggatctggaacacatcctgtccttttctcaccggtcccttcctctcaggatgttgcttttccagcacattctatattcattcttgggaactacaagtgagaagtcagatgcaactgggccaattcaaccccacttgaatgctgtcctgcagtctctccgccaatccagatatcccttttatttttatattttttgagacggagtctcgctctgtctcccaggctggagtgcagtggcgcaatcttggcttactgcacctccacctcccagattcaagcaattcttgtgtctcagcctctcgagtagctgggactacaggcgtgtgccaccatgcctggctaattttttttttttttttttttgtatttttagtagagacttcgtttcaccatgttaaccaggctggtctctaattcccgacctcaggtgatctgccctcctcggcctcccaaagtattgggattacaggcgtgagccaccacgcctggcccagatatcccctttaataaagctagtccatttacatgtgcactgacctccctggatctggaggtagaggctggtctcaggagattgaagtaatacctcgactggcagaatctcagggcaacatcattgaggtacagccagttgcatttcactaggctcaagaggattgctgcctcaagcaggataaccaggcctgcctggagcagtgccgtagtccaggatcccagtgacctaggtgagaagttggtactcagatcaaagaaaagttcttcaggtgaccccactgtctgcagccaatgggcctgcttgtgggccttatgtatttgtgtttcaaaaataacctgagggcttgatgtgggggtccttatctcccatgcaaggtgattcatgcctataatccgagcactttggtaggagcagatgggaagactgcttgaggctagaagctggagaccagcctgggcaacaaaaccagactacatctctattaaaaacaaagcaacaaacagtagaaaattagcacagtggagaggcacaggcctttactcacagctactcggcaggctgagacagggggtcacctgcccaggaccccaggaagtcaaggttgcagtgagctatgattgcgccactgcatttcagcctcggtggcagagaccctgtcttaaaattttaaaaagtattaaaaaactaagttggaccgggcgtggtggctactctggaggctggggcaagagaatcacttgaacccaggaggcggaggttacagtgagctgagtgcctgccactgtactcccgcctgggggacagagggagacgctgtctcaaaacaacaacaacaacaaaaaactacgtcgtttatggctatttttataagttactggctttttttttttaaagaatcggtgacttatcttcacactggccttagtcctccatgcccaacacgatgtccctaggaaagtctctggaattgagcacagggttgaccttcaccgtctagagtgaatggggaagataaatgaaaagtatttatcttctatgggcactggcatgaaatagaacattctaccctggcagggttttgcatttcacattttagcttgcatcatccccttcacagacaattccaaagtgtgttaattcaattcctaaagcttcccttcccttcctcccttcccttccctccttacttttctttcttgtccatttattttcggtttttttctctttctttcttggttttctttctctttttcaacttctctttcttttctctttctctttactctctctcttctctctctttctgcttccagggtaggtgggacttgaaattcattttaatagaaggaattttcgtggatataatctacaaccgattttgctctgcgcaggtaagatccgttttcagaccaaaaccctgaaaacaagcgcagccagtcaagcgaacggaagcgcaggcccggcccaggctttgtcccggcccgccctggtcccagccagtccggcctctaggatgcgcgcgcaatttcgtgcaaacccggaagcggaccgcggggggcgaacgcctagagcgcagtttccggtagacccggaagccgattgcagggagaaactgttttcgcagcagtgcgtgagtttccctttgtctatgttaagtctaggctagccagttcttctctgcttctatacccgggagctgaggggcatgcagaccttgaaatcccggcaccgctccctccaccccgagtaaattcagacatcctttgagagtctg

SEQ ID NO: 22415 - DNA, 2300 bp, Homo sapien
aacacccaggtgctgtctgacgaagaactgcttgttggtgacaagtaattcccatattactttggtgaccagagatgaggcattctgtgttgagcgctctttattgtgttcactgtgaacacaaaaacacactggtttttcctaacttatacactcacaccctagtccatcccaagaaaagagaagagtgccttataaatagtgttccaattctcatcttcatgtgtggttttttgttttttgttttttgagatggagtcttgctctgtcacctaacctggagtgcagtgacacgatctcggctcactgcaacctctgcctcccaggattaagcgattctcctgcctcagcctccagagtagctgggattacaggcgcaggccatcaggcccagctaatttttgtatttttactagagatgggtttcacatgttggccaggctggtctcaactcctgacctcaagtgatccgctcacctcagcttcccaaagtactgggattacacgtgtgagccacagctcctagcctcatgtgttctaaacaaattttatattatagaaaaattaatatgtcacaattcaatcataatttccaatcaactcaccactcatctgtaaccagggtccccctctttcctcactactgtttccctgcctcattctgtacatatctctcattctcatcttttttcctagctctttttttctctattttcccctaggattctgttcattttgagtccctcctcttctctttgtcccattcttccctctattccttctctcccacctgttctgatccatttttacaacttgtttcacctcttattcctctttctgcccaatctttcattgtccctaatctccatatatttctgcctctttcctcccacatctcagctccccttggggtctccctgttaaattccatcttcgatattacacacccctgtccccactctctggcacccttagatcccaggcctccccctgctgtggttctccctgttctccttgtgaccagctgccccctctggctgtcccagcaccacgctgctctgtctgacctggctccaaatccctcctcctctcccccctctgtctgagaagccttccctatcttgttgaatttcgtctttctacagacccaggtttgtctatatttttacagttacttttctcccctgctattttctcggcaccttctttcactgtgcctctgcaaacccctcactcaccttctactttgccttctgttaatgggtctctcattcttcatttctctttcaaaatttctctatttcctctgcctcgttcccatctctttttctccacacattcacagggaggggattggaataagatgcccacttccggaagagctcattttctgtgggctggaaactggctcgagagaacactggatgtcaggagactgaagtcaccccccacactcggggtcaggagaaccggtggctggaaaagggaggcctggggaacagagggtccagattaaggagcaaaaaggcaggagtgggtcaggagaggggtggagtctgcagaaaccaggtctgggcagaggacgaggcctctcgtgccctgttggggcgctgagctctaggggcaaagaagggcgaggctaggggaacggagagtgaggattttacgtggtgcggggcgtgtgtaggggttactaaaggatttgaagcaggtaaaccccacgataggaggtgtctacgtgggtaaatgacaaaaagaccgggcacacgaccagcctccaagcgattttaacacgcagaaagcgactcccagactctcaaaggatgtctgaatttactcggggtggagggagcggtgccgggatttcaaggtctgcatgcccctcagctcccgggtatagaagcagagaagaactggctagcctagacttaacatagacaaagggaaactcacgcactgctgcgaaaacagtttctccctgcaatcggcttccgggtctaccggaaactgcgctctaggcgttcgccccccgcggtccgcttccgggtttgcacgaaattgcgcgcgcatcctagaggccggactggctgggaccagggcgggccgggacaaagcctgggccgggcctgcgcttccgttcgcttgactggctgcgcttgttttcagggttttggtctgaaaacggatcttacctgcgcagagcaaaatcggttgtagattatatccacgaaaattccttctattaaaatgaatttcaagtcccacctaccctggaagcagaaagagagagaagagagaga

SEQ ID NO: 22416 - DNA, 2300 bp, Homo sapien
tcaaagaaaatttcttcaggtgaccccactgtctctagccaatagtcctgcttgtggatcttacgtatttgtgtttcaaaactacctgaggtcctgatgtggggtccttacctcctgtgcacagtgactcatgcctgtaatttgagtactttgggagtgtagacagaaggaaaacttgaggccagaacttggacacccggctgggcaacaaagtgagactccatctctacaaagtaataataatatataaaactaaaaaattagcacagtccaatgtcacaggcctgtacttccagctactcgggagactgaggtaggaggtgcccatgaccccaggaagtcaaggttgtagtgagctatgattgtgccactgcactccagcctggatgtcacaggttgattccctgtctttaaaaaaaaaaaaaaagtcttaaactaaataatttatacctatttttaaagttattggcttttttaaaaagagttggtgacctgacttcacactgaccttagtcctctatgcccaaggtggtgtccctaggaaagtttctggaattgagcacagggttgacctcaccctctggagtgaatggggaatgtaaatgaaaagtatttctagccgggcgcggtggctcacgcctgtaatcccagcacttagggaggctgaggcgggcggatcatgaggtcgggagatcgagactacggtgaaacccagtctctactaaaaatacaaaaaaaattagccaggcatggtggcgggtgcctgtagtaccagctactcgggaggctgaggcaggagaatggtgtgaacccgggaggcgaagcttgcggtgagccgagattgtgccactgcactccagcctggacgacagagcaagactccatctcaaaaaaaaaaaaaaaagtatttctattctatggggcattggcatgatactgcgcattccactctggcagggtttagcatttcacactttagcttccatccccttcacagatagttccaaagtgtcttaattcctaaaatttgtctttctggctgggcatagtggctcacgcctgtaatcccaacactctgggaggccgaggcgggcagatcacctgaggtcagaagttcaagaccagcctggccatggtgaaaccccgtctctactaaaaatacaacaaattagtcgggtgtggtggtgcgcacctgtaatcccagctactcgggaggctgaggcaggagaatcacttgaacctgggaggcataggttgcagtgagccgagatctcatcattgagcttcagcctgggcaacgagcgaaactctcaaacaaacaaacaaacaaaaaaaatgtctttctttcgttctttcttgtctctccctttttctcacacacaggcacagacacctacattcttttctttgttgcactatttctctctagtcttattttctttctttcttttcttttttttttttttttttgagacggagtctcactccatcgccaggctggagtgtagtggtacgatttcggctcactgcaaccctgcctcccgggttcaagtgattctcctgcctcagcctcccgagtagctgggactacaggcgcccaccaccacacccagctaatttttgtgtttttagtagagacgggggtttcatcatgttggccaggatggtctcgatctcctgacctcgtgatccgcccggcttggcctcccaaagtgctgggattacaggagtgagccaccgcacccggccttgtctttctttttgctttcttttcacgctctcttctctctctgcttccagagtagttgggacttaaaatttattgtaataacaggaattctcgtggatctaatctaatcaccaaccgattttgctctgccccagcaagatctgtttacagatctgtttacagaagtgctgagcagatctcgcctccaaaaccctaaaacaggatcgctgagtcagactgacagaagcatagaccccgccttgagcccgccctgtcccggccctgccctcggccccgggcccggcctgtacgatgcgcgcgcaatttcctgcagacccggaagtcgagatcatggagtgaacgtttcgcgcgctttttcctgtagacccggcacccgactgcgcggaaagactgtctaagccgccactcgtgagtttgcctttgtctagattaaatttaggctgcccagttcctgtgtgcttctacacccgcgatctgagggctcatgcagaccttgaagtcccggcaccgctctatccactccaagtaaattcagacattctctagagag

SEQ ID NO: 22417 - DNA, 2300 bp, Homo sapien
cctcataattgcacttttctacactattagtcaattttttttttttttttttttttttttgagatggagtcctgccctgtcacccaggctggagtgcaatggcacgatctcggctcactgcaacctccggctcctgggttcaaaagattcttttgcctcagcctccaaagtagctgagataacaggcacccgccaccacacccggctgatgttttggtgttcttagtagagatgcagtttccccatgttggccagcctgttctcgaactcctgacctcgtgctccacttgcctcagcctcccaaggtgctgggattacaggttgtgagtcgtcgtgcccagccgttagtcagttcttattccttataatgctgtgtattttcttgacctcatacatcagaaggtagtgatcttaacatgtatttcagttcttatattgtgtgctggtggttaagtagatgttgtggcttttttcttaagagggaattgtttagaattctgcaggctgtataaatgtacttatttgcttgctggttttatcatgggttacaatattttattaattaatttttataattttgcatatggcttttcagtatgtggtatgcaatataactgacacactccactcgttaatgtcaaaagtgccaccaggtgcagtggctcacaccggcaatcccagaaatttgggaggccaaagggggtggagaccagcctggccaacatggtgaaacccggtctctaccaaaaacacacaaactagccagtcatagtggtgtgtgcctgtaatcccaggtacttaagaggctgaggcaggagaatcacttcaacccagcaggcagaggttgcagtgagctgagatggcaccatggcacttcaagctggaatgcaagactgtctcaaaaaaataaaactacaaaaaatggtttcaaaagtcactatgtgcctgttctgtgtggatatatgtaattttatgacatttattgagaaaagtattgtattaactttttttttcttttttttccttttttttttctgtttgaggcatagtctcactttgttgcccagtgtggagtgcagtggtgacatcttggctcactgcaacctctgcctccccggttcaagtgattcttgtgcctcagcctcctgagtaactgtgactacaggcacgggccagcacacctggctaatttttgtaatcttttcttatcttctcagtgctataattgtttgataatacagaatttccattgcttttggttatccttacatgagcttgttgtggattatttaccaatatagtatattgtgtggtgttttttttttgcatttatttgtacacagtaaatatggtttaaatatgaagagtatatatttttctcttccttgatgtgacagtgatatgttttttgcaaactgtgatacactgtagggtcacagtggaaaaatactccttactttaggcttacacatgtttgtgccctgtcagtgttttgtcatgatataggaaataagcttttatagacttgatttgaaggacatgtaattgtctgttatttattaaagaatcttactacttttgtgttcgtaaactttgaagatcatgtttgggaagtttaaaataagtattttttattgtgtcatatttacacacttcagtatgatttaccatctgcacttaattgcaaacgtattggtgtttatattttgtagatatctcttccaaacgcatgatgaaggaggtcttgtcaacagggcaaggcaatacagaagtgatccacacagggatgttgcaaagacatgaaagttatcacactggagatttttgcttccaggaaattgaaaaagatattcatgactttgagtttcagtcacaaaaagatgaaagaaatggccatgaagcatccatgccaaaaatcaaagagttgatgggtagcacagaccgacatgatcaaaggcatgctggaaacaagcctattaaagatcagcttggattaagctttcatttgcatcttcctgaactccacatatttcagcccgaagagaaaattgctaatcaagtggagaagtctgtcaacgatgcttcctcaatttcaacatcccaaagaatttcttgtaggcctgaaacacatactcctaataactatgggaataattttttccattcatcattactcacacaaaaacaggaagtacacatgagagaaaaatctttccaatgtaatgagactggcgaagcctttaattgtagctcatttgtaaggaaacatcagataatccatttaggagaaaaacaatata

SEQ ID NO: 22418 - DNA, 2300 bp, Homo sapien
tagtgtttatcttgaaaatatgtccttaatgggttgtatagaacagtgaagtttctttctctcttttcaacctcttagctgtttgcctctatttcccatcacattctggtcaaggcttattgatttatttatttagagacggaatctcttctgtcgcccaggctagagtgcaatggtgcgatctcggctcattgcaagctccgccttctgggttcacgccattcttctgcctcagcctctccgagtagctgggactacaggcgctgggcaccacgcccggctgattttttttttttgttttttttgagaccgagtcttgctctgtcacccaggctggagtgcagtggtgctatcttggctcactgccagctccgcctcctgggttcacgccattctcctgcctcagcctccccagcagctgggacacaggtgcacgccaccacacctggctaatttttttgtatttttagtagagacggggtttcaccatgttagccaggatgacctcgatctcctgacctcgtgatccgcctgcttcagcctcccaaagtgctgggattacaagcgtgagcccccatgcccggtcctaaggtttatttattaacaaaatggtttttatttctttctctgttatcgtcgtggagatgatttctcatttgggataatattttttagttttcaattatattttgtcaacatttaaaaagcaaagtaaagaatatttcttgggccaggcatgttggctgacgcatgtaatcccagcattttgggaggctgacacaggcaaataacttaaagtgaggagttcgataccggccaggtcaccgtagtgataccccgtctctatgaaaaatacaaaaattaaccgggcatcgtggcacgcgcctgtaatgccagctgctcccgaggctgaggcaggagaatcgcttgaacccaggaggcagaggctgcattgagttgagatctcgccactgcactccagcctgggcaacagaaatactgtgtctcaataatagtaataataataataataataataaagtaatagatctcttccacaaatgtgctgggacaactaactggatatccacatggaaaagagtaatgttggatccctatgtcacaccatcaaaaattttatttaaaaaagttttttttttttttttaaaaagggaaaaggcccgggcgcggtggctcacgcctgtaatcccagcactttgggaggccgacgtgggcggatcacctgaggtcgggagttcagcctggctaacatggtgaaaccctgtctctactaaatatacaaaattaactgggcatggtggcgcatgcctgtagtcccagctactcgggaggctgaggccggagtatcgcttgaaaccaggaggcggaagttctagtgagctgggatcactccacggcactccagcctgggcgacggagtgagactctgtctccaaaaaaaaaaaaagggaaagagagagagagagactaggaagggagacctgccgcagtgggtgttactttgtcgcccaggctggcttgggaccccaggctcagcaattctctccgttgcttcctgagtagctgggacctgaggctcccgcccccgcgcctctgctgtgtttaagcagcaggtggtgacctcactccttcctggcctaagcactccgtcccgcacccctggcggtggctttaaggaagtctctgaagctgagctcagggtggactctccctccctagtgaatggagatagaaagggagaggacatctattctgttccgtgggccgtcaccatgacatcgtacatgccgcccaggcagggctttgcatttcacattctagtttgcatcccggttccagacaattccagggctttggaatcatgcctcagactttctggcgctctcgcctccacaacctaaaaacagagacgctaggagagaggctgaaagacgcgcaagtcccgccccggccccgccccggccccgccctctgccggttctaaagggcaaggtctcagcgcctcgcgccccgccgctacctcgcccaggccccgcccacctcctcccacctcccgcccaggcctggcttccgtcctgcgcgcggagattaacgcaaacccggaagcggatcgggtggagtgaaggtcacgtcgccatggtgagttttgctctgtgttgcattaagtctccgcttcccaggtccccgccgcttctgtccctgggacgtggggtccccacagacctggaaattctcgcccgtcttccttcgcccagagcaaattgagacagcccagtgag

SEQ ID NO: 22419 - DNA, 2300 bp, Homo sapien
tggaaacaagcctattaaagatcagcttggatcaagcttttattcacatctgcctgaactccacatatttcagatcaaaggtgaaattgctaatcaacttgagaagtctaccagtgatgcttcctcagtttcaacatcccaaagaatttcctgtaggccccaaatccatatttctaataactatgggaataatcccctgaattcttcattactcccacaaaaacaggaagtacacatgagagaaaaatctttcccatgtaatgagagtggcaaagcctttaattgtagctcactcttaaggaaacaccagataccccatttaggagacaaacaatataaatgtgatgtatgtggcaagctctttaatcacaagcaataccttgcatgccatcgtagatgtcacactggagagaaaccttacaagtgtaaagagtgtggaaagtccttcagttacaagtcatcccttacatgccatcatagacttcatactggagtaaaaccttacaagtgtaatgagtgtggcaaggtctttcgtcaaaattcagcccttgtaattcataaggcaattcatactggagagaaaccttacaagtgtaatgaatgtggcaaggcttttaatcaacaatcacacctttcacgccatcaaagacttcatactggagtgaaaccttacaaatgtaagatttgtgagaaggcttttgcgtgtcattcctatctggcaaaccatactagaattcatagtggagagaaaacatacaagtgtaatgagtgtggtaaggcttttaatcatcaatcaagccttgcacgtcatcatatacttcatactggagagaaaccttacaaatgtgaagaatgtgacaaagttttcagtcagaaatcaacccttgagagacataagagaattcatactggagagaaaccatacaaatgtaaggtttgtgatacagctttcacgtgtaattcacagctggcacgacatagaagaattcacactggagagaaaacttacaagtgtaatgagtgtcgcaagaccttcagccgcaggtcatcccttctatgccatcgtagacttcatagtggtgaaaaaccttacaagtgtaatcagtgtggcaataccttccgtcaccgggcatcccttgtataccatcgtagacttcacactctagagaaatcttacaaatgtacggtttgtaacaaggttttcatgcgtaattcagtcctggctgtacatactagaattcacactgcaaagaaaccttacaagtgtaatgaatgtgggaaagcttttaatcaacaatcacatctttcacgtcatcgtagacttcatactggagagaaaccttacaaatgtgaagcatgtgacaaagtttttggtcagaaatcagctcttgagtcacataagagaattcatactggagagaaaccatacagatgtcaggtttgtgacacagctttcacgtggaattcacagctggcacgacatacaagaattcacactggagaaaaaacttacaagtgtaatgagtgtgggaagaccttcagttacaagtcatcacttgtatggcatcgtagacttcatggtggagagaaatcttacaaatgtaaggtttgtgacaaggctttcgtgtgtcgttcctatgtggcaaaacatactagaattcacagtggaatgaaaccttacaagtgtaatgagtgcagcaagaccttcagtaacaggtcatcccttgtatgccatcgtagaattcatagtggtgagaaaccttacaagtgtagtgagtgcagcaagacgttcagtcagaaggcaacccttctatgccatcgtagacttcatagtggtgagaaaccttacaagtgtaacgactgtggcaataccttccgtcactggtcatcccttgtataccatcgtagacttcatactggagagaaatcttacaaatgtacggtttgtgacaaggctttcgtgcgtaattcatacctggcaagacatattagaattcacactgcagagaaaccttacaagtgtaatgaatgtggaaaggcttttaatgaacaatcacacctttcacgtcatcatagaattcatactggagagaaaccttacaaatgtgaagcatgtgacaaagttttcagtcgcaaatcacaccttaaaagacataggataattcatactggagagaaaccttacaagtgtaatgagtgtggcaaagcctttagtgaccggtcaacacttattcaccatcaggcaattcatggtatagggaaatttgattaatataatgattgtcacaaagtcttcagta

SEQ ID NO: 22420 - DNA, 2300 bp, Homo sapien
cagcctggccaacatggggaaaccccgtctctactgaaaatacaaagccattagccgggcatggtggcgcacgcctgtattttcagctatttgggaggctgaggcaggagaactgcttgaacccaggacgtggaggtcgtagtgagccgagatcacatcactgcattccagcctgggcgacagagcaggacgccttcccaaaacaaaacaaaacaaaacaaaatgtgctatacaatttagtttcctaatatcaattttaaaaagttttcgtgtaaataattaggaaaactaagcagccccagagataagacctcctggcatcattgtcccttcttatggagtgataatgtaaccttccttgaagtgtatcactccatcaccagtcaagctgccgcagcctatgcactggacttgaatggaaaatgtggtggttctgggaaagcttctctgtatttccttgtgtgtgtgaaatgttaatgtctctacttgggaacgctgaccccattcatttggagttgaggtttccaggtggctattctcatgctttgtgtccaaataaactctataattaataatgtattctaaatttcattatttactgctgacatcagtttctgttggattgtaggagcctcaccagagagggcacctgtccgccatgctgtaaaactcacacttgccaaaaatacatgggttagggtttctccccctccctcaggatgatgctagttagctgacacagatggtcacctccattaccaagtagagccaggatgaattatgtgtgaccaagggtgttgtcaagtcctcttccctgaggactgatcagtgtttatcttgaaaacatgtatttgggttgtatagaacagtgaagtttctttctctcttttcaacctctcaactgtcctctatttcccatcacatgctggtctaaggcctatttattaataaaatagtttttatttctttctctgttatcgtcgtgaagatgatttctcatttaggggaagatttttttagttttcaattgtattttctcaacatttaagagcgaagtgaagagtatttcttgggccaggcacagtggttcacgcctgtaatcccagcatttcaggaggccgaggcaggcggatcacttgaagtcaggagttcgagaccagcctggccaacatggtgaaaccccgtctctacccaaaatacaaaaattagccgggcatggtggcctgtgcctgtaatgccagctattccggaggctgaggcaggagaatcgcttcaacccaggaggcagaggctgcagtgagccgagatgtcaccactgcactccagcctgagcgacagagaaatactccgtcttaaaaaaaaaaagaaaagaaaaaaaagaaagtaatagatctcttccacaaatgtgctgggacaattaactggatatccacatggaaaagaataatgttgtatccctatctcacacaatcaaaattttattttaaaaattaaaagagacgatgaggggagccctgcgggagggtgtgttactttgtcgcccaggctggcctggacccccaggctcagtgatcctcccgcctctggccctcaggctcccgcccacctggccgcattcctgctatgtttaagcagtaggtggtgacttcactcctccctggcctgaacactccgtcgcgcatcccaggcggaggccctagggaagtctctgaagctgagcacagggtggactctccctcctgagtgaatggagaatagaaagggagaggatttctgttctgttctgtgggccgtcagcatgaaattgtacgttccgcccaggcagggctttgcattttacattcttgtttgcatccccgttccagacaattccagggctttcgaatcgtgcttcagccttcctgaccgctctcgcctccaaagcccgaaaaatagagtcgctgggagcgaggctgagagacgcacaggtcccgccccggccccgccctctgccggttctaaagggcaaggtctctccgcctggggccccgcctctacctcgatcaggccccgcccaccttctcgttggctccacccaggcctggctttagtcctgtgcgcacacatccgcgcagaccaggaagcggatcccgtggagtgaaggtcgcaccgcggcggtgagttttgctctgtgttgtattaagtctgcactccccatatccccggcacttccgtacctgggacgtggggtcaccacagacctgtaaattctcgcccatcttccttcaaccagagcaaatgcagacgttcccctgggaatc

SEQ ID NO: 22421 - DNA, 2300 bp, Homo sapien
tgccgcagcctatgcactggacttgaatggaaaatgtggtggttctgggaaagcttctctgtatttccttgtgtgtgtgaaatgttaatgtctctacttgggaacgctgaccccattcatttggagttgaggtttccaggtggctattctcatgctttgtgtccaaataaactctataattaataatgtattctaaatttcattatttactgctgacatcagtttctgttggattgtaggagcctcaccagagagggcacctgtccgccatgctgtaaaactcacacttgccaaaaatacatgggttagggtttctccccctccctcaggatgatgctagttagctgacacagatggtcacctccattaccaagtagagccaggatgaattatgtgtgaccaagggtgttgtcaagtcctcttccctgaggactgatcagtgtttatcttgaaaacatgtatttgggttgtatagaacagtgaagtttctttctctcttttcaacctctcaactgtcctctatttcccatcacatgctggtctaaggcctatttattaataaaatagtttttatttctttctctgttatcgtcgtgaagatgatttctcatttaggggaagatttttttagttttcaattgtattttctcaacatttaagagcgaagtgaagagtatttcttgggccaggcacagtggttcacgcctgtaatcccagcatttcaggaggccgaggcaggcggatcacttgaagtcaggagttcgagaccagcctggccaacatggtgaaaccccgtctctacccaaaatacaaaaattagccgggcatggtggcctgtgcctgtaatgccagctattccggaggctgaggcaggagaatcgcttcaacccaggaggcagaggctgcagtgagccgagatgtcaccactgcactccagcctgagcgacagagaaatactccgtcttaaaaaaaaaaagaaaagaaaaaaaagaaagtaatagatctcttccacaaatgtgctgggacaattaactggatatccacatggaaaagaataatgttgtatccctatctcacacaatcaaaattttattttaaaaattaaaagagacgatgaggggagccctgcgggagggtgtgttactttgtcgcccaggctggcctggacccccaggctcagtgatcctcccgcctctggccctcaggctcccgcccacctggccgcattcctgctatgtttaagcagtaggtggtgacttcactcctccctggcctgaacactccgtcgcgcatcccaggcggaggccctagggaagtctctgaagctgagcacagggtggactctccctcctgagtgaatggagaatagaaagggagaggatttctgttctgttctgtgggccgtcagcatgaaattgtacgttccgcccaggcagggctttgcattttacattcttgtttgcatccccgttccagacaattccagggctttcgaatcgtgcttcagccttcctgaccgctctcgcctccaaagcccgaaaaatagagtcgctgggagcgaggctgagagacgcacaggtcccgccccggccccgccctctgccggttctaaagggcaaggtctctccgcctggggccccgcctctacctcgatcaggccccgcccaccttctcgttggctccacccaggcctggctttagtcctgtgcgcacacatccgcgcagaccaggaagcggatcccgtggagtgaaggtcgcaccgcggcggtgagttttgctctgtgttgtattaagtctgcactccccatatccccggcacttccgtacctgggacgtggggtcaccacagacctgtaaattctcgcccatcttccttcaaccagagcaaatgcagacgttcccctgggaatccggaagtcgcttccttttgtgtttaaagtcgccctgaggctgttcccgtctccagtctttctgctacagggcgctgtatacacttcctatcgcgtagtttctgtgctcaaaaccgttttttaactcctccctccccgcgcttttcaaagtcctcacccgagatgtgtatttccgcctgggcgcctcccagtctcaacctttaggcgcctgaagcgcaaacgtcgcgatcccagtctcagggaggccgagttctctgcctggtgctgggatcttgtggaccccaccgaaggcgtcgtcgcaccccacctcccgcctcatgctgggccttgctgcaccccaagtctccccttagcagtcaccactttccttgagccagcgttggggaggtg

SEQ ID NO: 22422 - DNA, 2300 bp, Homo sapien
caggctggagtgcaatggtgcgatctcggctcactgcaacccccacctcccaggttcaagcgattctcctgcttcaacctgcctagcagctgggattacaggcatgtgccaccaagcccggctatttctgtatttttaatagagacagggtttctccatgttggtcaggctggtctcgaactcccgacctcaggtgatctgcccaccttggcctcccaaagtgctgggattacaggcatgagccaccgcacctggcccgttctggtttttgaggagcatcacagaagcatctttcactggcactgtgacagtgttcatcacataaactaatgatcatcttctctaagcagcagtcactgctgtagaaattcctcctacggaggacatcattcaggctcactgcctcatatataggaggctcttgactgaactctttttttctggacatggaattttgctcttgttgcccaggctggagtgcaatggcatgatctccactcactgcaacctccgcctcctgggttcaagtgattctcctgccttggtttcccaagtagctggaattacagccgcccaccaccatgcctggcaaatttttgtatttttagtagagataaggtgttcttaaactttgaagatcacttttgggacgtttaaaataactgttgctttttgtgtaatatttacacatttcaatattaactattatttaccatctgtacttttttttttgagatggattattgctctgtcacccaggctggagtgcagtggcatgatctcgcctcactgcaagctctgcctccagggttcacgccattctcctgcctcagcctcccaagtagctaggactataggcacctatcactacacctggctaatttttttgtatttttagtacagatagggtttcaccatgttagcgaggatggtctcgagctcctgaccttgtgatccacctgcctcgtcctcccaaagtgctgggactacaggtgtgagccactgcacctggcctaccatctgtacttaattggaaacctattggtctttatattttttagatagctctttaaaatccatgatggagttctcatcaactgggcacggtaatacaggagaagtgattcacacagggacgttgcaaatacatgaaagtcatcacactggagatttttgcttcccagaaatcaagaaagatattcatcactttgagtttcagtggcaagaaatttaaagaaatggccatgaagcacccatgacagaaaccaaagagttgacaggtagtacagactgacgtgatcaaagacatgctggaaacaagcctattaaagatcagcttggatcaagctttcattcgcatctgcctgaactccacatgtttcagacccaagggaaaattggtaatcaagtggagaagtctatcaatgatgcttcctcagcttcaacatcccaaataatttgtaggctcaaaacccatatttctattaagtatgggaagaatttcctctattcttcattattcacacaaatacaagaagtacacatgagggaaaaacctttccaatgtaatgagtgtggcaaagcctttaatcatagctcatgtttaaggagacatcacgtaacccattcaggagagaaacagtataaatgtgatgtatgtggcaaagtctttcatcagaagcaataccttgcatggcaccatagtgttcatactggagaaaaaccttacaagtgtaatgagtgttccaagaccttcaatcagaagtcatcccttcagtgtcatcatagacttcatactgtacagaaacattacaaatgtgaagaatgcaacaaagtttagagttgaggatcacaacttgaaacacacaggagaattcatactggagaaaaaccatacaaacgtaaggtttgtgacaaggctttctgggataattcatgcctttcatgccgtaagagttcatactggagagaaatgttacacatgtaacgaatgtggcaaggcttttagtagaaaagcaaaccttgcacatcatggacttcatactggagggaaatcttacaaatgtaagggttgtgacaaggttttccaccatgatttatgccttgcacaacatcagagagttcatactggagagaaccttacacatttcacgagtatggaaagacctttgctcaaaattcagcccttgtaatgcataaggcaattcatactggaaagaaaccttacacatgtaatgaatgtggcaaggtttttagtagaaaagcacaccttgcatgtcatcatagacttcatactgtct

SEQ ID NO: 22423 - DNA, 2300 bp, Homo sapien
ttgcatccttgcttgactaaaatggaagccgtattgattttgaaatgaaaagcttcatgatgtagcatctggactttcactgtccccttttttagatgttctgcgttcttcatgatagctcagtgggggttccagaagtaaagaaggcttaaaaccttatggctggcaaggcgtggtgactcatgcctgtaatcccagcactttgggaggccaaagcttgtggatcacttcaggtcaggagttcgatactagcctcaccaacatggcgaaacgtcatctctactaaaaatacaaaaattggccaggcgcggtggctcacgcctgtaatcccagcactctgggaggctgatgagggcggatcacaaggtcaggagatcgagaccatcctggtgaacacagtgaaaccctgtctctactaaaaatacaaaaaaaaattagccgggtgtggtggtgggcacctgtagtcccagctacttgggaggctgaggcaggagaatggcatgaacccaggggacggagcttgcagtgagctgagatcgtgccactgcactctagcctgggagacagccaggctccatctcaaaaaaaaaaaaacacaaaaattatccaggcgtgatggcacatgtctgtaatcccaggtactagaaaggctaaggtaagattatcacctgaacctgggaggcaatggttgcagtgagccgagaatgcatgactgcactccagcccgggtaacagagcaagattctgtctcaaaaaacaaaaacaaaacaaaacctcatggcagactttaaagatatccagttccctatttgctactcctgtgcttttgattcagtagttctgggaagagagctcagtgtccacatattacagtgctctttaaagattcagaaggaggcagtcagtggaggaatttgtgagatattttcctaagtccatctgtaatgtcttctttcctacagaaacatagggctggggatctagaaaacttccaacatgtcatgtttcctactttttataagcaggagtctctttctaacctgttggagcaaggcaaagagccctggactgtgtagcatgaagtgaaaataagatgggtgggaattttttttttttttttttttttttttttgagacaatctcactctgttgcccaggctggagtgcagtgacacgatctcggttcactgtaacctccacctctggggttcaagcaattctcctgcctcagcctcccaagtagctgggactgcagtcacatgccaccatgcccagctaatttttgtatttttagtagagacagggtttcaccatgttggccaggctgtgtttgaactcctgacttcaggtgatccacctgcctgggcctcccaaagtgttgggattacaggcatgagccactgctcccggcctactgtcacttcttaacatattaatctttgtatttctgaccacctcaatatccacagtactcagtccccatgctactctcaccatgtaaggaaagacacttgcttatctgtaggacggctttctcagaacacagcctaaaccgatgtctgctctgtacgatggtggacataccgctgtctaggaaggattaccaagtgacatggtcagcaacacaaccccgttcttgtagctcccttgaaatgattcctttctatgcatctatttgccatgtcgtgtcgtgttgtgcaggtttgtcgtgtgggtatatgtgtgccgtggtggtttgctgcacccatcaacccatcatctaggttttaagccctgcatgcattaggtatctttcccaatgttctccctccccttgccccctaccccctgataggccctgctctatgttgcttccctccctgtgaccatgtgttctaatcgttcaactcccacttatgagtgagaacatgcggtgtttggttttctgttcctgtgttagtttgctgagaacgatggcttccagctccatccatgtccctacaaaggacatgatctcattcttttttttctttttccgagatggagtttttgctcttgttgcccaggctggagtgcagtggcacaatctcggctcaccaccacctccgcctcccgggttcaagcgattctcccgcctcagcctcagaagttgctggaattacaggtatgcgccaccatgcccggctaattttgtatttttagtagagacggggtttcaccatgttgatcaggctggtctccaactcccgacctcaggtgatccgcccacctcagcctcccaaagtgctgggattacaggtgtgagccactgtgtcctgcca

SEQ ID NO: 22424 - DNA, 2300 bp, Homo sapien
tcctgagtagctgagactacaggcatctaccaccacatccagctaatttttgtatttttagtacagacagagtttcaccatattgtccaggctagtctcgaattcctgaccttgtgatccacctgcctcagcctcccaaagtgttgggattacaggcgtgagccacagcacctggccaaaagtttctaacatttctataatgggaaccaggcatctatttatttgagtgtttcttgtattcttcacaaacataataaatttataacaagagggtattatgacctcttcaaaaagtataatcaaacaccactgggaagacatcatgtggtgaaaaatcccttactcagatttgtcagaacattcactacaattaaatccttgttgtcaccgctctcctcattttctgtaaagataagaactcctcccataaccatttggttaaaatgtgttttcatttcagggtctattgacattcagggatgtggccatagaattctctcaggaggagtggaaatgcctggaccctgctcagaggactctatacagagatgtgatgttggagaattataggaacctggtctccctgggtgaggataacttccctccagaagtggggatgttcccttgtgtatctttgcattttctcttgtttctcttgggagttgcatccttgcttgactaaaatggaagccgtattgattttgaaatgaaaagcttcatgatgtagcatctggactttcactgtccccttttttagatgttctgcgttcttcatgatagctcagtgggggttccagaagtaaagaaggcttaaaaccttatggctggcaaggcgtggtgactcatgcctgtaatcccagcactttgggaggccaaagcttgtggatcacttcaggtcaggagttcgatactagcctcaccaacatggcgaaacgtcatctctactaaaaatacaaaaattggccaggcgcggtggctcacgcctgtaatcccagcactctgggaggctgatgagggcggatcacaaggtcaggagatcgagaccatcctggtgaacacagtgaaaccctgtctctactaaaaatacaaaaaaaaattagccgggtgtggtggtgggcacctgtagtcccagctacttgggaggctgaggcaggagaatggcatgaacccaggggacggagcttgcagtgagctgagatcgtgccactgcactctagcctgggagacagccaggctccatctcaaaaaaaaaaaaacacaaaaattatccaggcgtgatggcacatgtctgtaatcccaggtactagaaaggctaaggtaagattatcacctgaacctgggaggcaatggttgcagtgagccgagaatgcatgactgcactccagcccgggtaacagagcaagattctgtctcaaaaaacaaaaacaaaacaaaacctcatggcagactttaaagatatccagttccctatttgctactcctgtgcttttgattcagtagttctgggaagagagctcagtgtccacatattacagtgctctttaaagattcagaaggaggcagtcagtggaggaatttgtgagatattttcctaagtccatctgtaatgtcttctttcctacagaaacatagggctggggatctagaaaacttccaacatgtcatgtttcctactttttataagcaggagtctctttctaacctgttggagcaaggcaaagagccctggactgtgtagcatgaagtgaaaataagatgggtgggaattttttttttttttttttttttttttttgagacaatctcactctgttgcccaggctggagtgcagtgacacgatctcggttcactgtaacctccacctctggggttcaagcaattctcctgcctcagcctcccaagtagctgggactgcagtcacatgccaccatgcccagctaatttttgtatttttagtagagacagggtttcaccatgttggccaggctgtgtttgaactcctgacttcaggtgatccacctgcctgggcctcccaaagtgttgggattacaggcatgagccactgctcccggcctactgtcacttcttaacatattaatctttgtatttctgaccacctcaatatccacagtactcagtccccatgctactctcaccatgtaaggaaagacacttgcttatctgtaggacggctttctcagaacacagcctaaaccgatgtctgctctgtacgatggtggacataccgctgtctaggaaggattaccaagtgacatggtcagcaacacaaccccgttctt

SEQ ID NO: 22425 - DNA, 2300 bp, Homo sapien
gtaaatattttactctgatatttcatcctgctggttgtgaaaattaacatgttctcatattagtaaatatggctaccttcctctttgatgcctgcattggaaattggctgaataacatatgggtcctttgtgacttttctctgtataaggagtgccatagtcactgcctctgtgctcacctgcattactacagatatctgaggattcctccagggaaggctgttgaaggagtgattgcttctaggatgggtaatctcctgttttcttagaactgaacagattctcccctgccctcaactgccaaagttccttttccaccaagatgagattcctcttcagttaaaggaaactatatatacacacacacacacacacacacagagatatacacacacagatatacacacacatatatacatatacacatacacacatacgtatatattttgaaaatcttttgtattttgaaaatctggggaaaatgacaaccctttgcattcaactctagttttttgtgagtctgcgtaaattttattattttgtggacatatatataaaaaatgtatttttgtactttgagtaattttgttttcttgtattttgagatggggcctcgctttgttgcccaggctgaagctcagtggtgcaatcatagctcactgcaacctgtaccctcatggtaaagacatcctcccacctcggcctcccaagtagttggaaccacagatgcctgccaccatgcccagctaaatttttttttctttctttgagatggagtttctgttgaacaggctggagtgcagtggtgtgatcttggattactgcaacctctgcctcccaggatcaagcaagtctccggcctcagcctcccatgtagctgggattacaggcatgtgccattgagcccggctatttcactgtggacgttgtcatctttgaaggcatcactcatgctctatctcatctagatactgagtgtcacttggtgtgtcaataaaagtttctaacatttttttttttttttggagatggagtctcactctgttgcccaggttggagtgcagtggcatgatcttggctcactgcaacctctacctcccggcttcaagcaattctcctgcctcagcctcctgagtagctgagactacaggcatctaccaccacatccagctaatttttgtatttttagtacagacagagtttcaccatattgtccaggctagtctcgaattcctgaccttgtgatccacctgcctcagcctcccaaagtgttgggattacaggcgtgagccacagcacctggccaaaagtttctaacatttctataatgggaaccaggcatctatttatttgagtgtttcttgtattcttcacaaacataataaatttataacaagagggtattatgacctcttcaaaaagtataatcaaacaccactgggaagacatcatgtggtgaaaaatcccttactcagatttgtcagaacattcactacaattaaatccttgttgtcaccgctctcctcattttctgtaaagataagaactcctcccataaccatttggttaaaatgtgttttcatttcagggtctattgacattcagggatgtggccatagaattctctcaggaggagtggaaatgcctggaccctgctcagaggactctatacagagatgtgatgttggagaattataggaacctggtctccctgggtgaggataacttccctccagaagtggggatgttcccttgtgtatctttgcattttctcttgtttctcttgggagttgcatccttgcttgactaaaatggaagccgtattgattttgaaatgaaaagcttcatgatgtagcatctggactttcactgtccccttttttagatgttctgcgttcttcatgatagctcagtgggggttccagaagtaaagaaggcttaaaaccttatggctggcaaggcgtggtgactcatgcctgtaatcccagcactttgggaggccaaagcttgtggatcacttcaggtcaggagttcgatactagcctcaccaacatggcgaaacgtcatctctactaaaaatacaaaaattggccaggcgcggtggctcacgcctgtaatcccagcactctgggaggctgatgagggcggatcacaaggtcaggagatcgagaccatcctggtgaacacagtgaaaccctgtctctactaaaaatacaaaaaaaaattagccgggtgtggtggtgggcacctgtagtcccagctacttgggaggctgaggcaggagaatggcatgaacccag

SEQ ID NO: 22426 - DNA, 2300 bp, Homo sapien
acgatagaacgattggggagaaggaacagcaagaagttaggtaagttgcgaggatggagcagaagaggtggaagagaaggaatagagggaagaaggggataaacagcaggagaggagaggggtacaaaatgaggagcagaatgccaggtaaaaagaaaagaaaacaagagctagagagagaaggggagaatgagagatatgtacacaattagggagggaagcacagtaatgaagaaagatgggctgggcgcagtggcttacgcctgtaatcccagcactttaggagactgaggcaagaagattgcttgagtacaggagttcgagtctagcttgggcaacatagtgagacccccatctctaccaaaaaaaaaaaaaaacaaccgggcatgatagtgtgcacctgtaatcccagctactctgaaggccgaggcagaaggatcacttgaacccaggaggtccaggctgcagtgagccgagatcatgtcactgcactccagcctggtcaacagagcaagaccctgtctcaaaagaaaaaaaggggcggaggactttgggtttagatgagtgggtgagttcattggatacgattagttgtgacatttgacttctttgtatataatctagtaacttaaaactgcttaaattatacagatgagattgagaattttaagaatcctatctataagacatgtacattctatgaatgttggcctcagaggttagcttccacttggaatccctattcagctacagtggagtgacttattcacttgtgagtcactctgttcccttttcccagagtggggtagggagtggggcagtgaagtgagaaaaaaatccctttctgttaacacataatttttaacttaattaattaactaacattaagagacagggtctggccaattgcctaggctggaatgcagtggcatgatctttaactgcagcctggtcctcctgggctcaagtaatcctcctacgtcagcttcctaagtagctgggaccacagtgatgagccaccaagaagcccggctagttttctttttctttcttttttttttttttgtagaaacgaggtttcactgtgtttcccaggctagtctcaaaatcctgggctcaaagtatcctcctgccttggccgcccagagtactgagattacaggaaagagccaccgcacgtggtctacatagtttttttttttttttgagttggaatttccctgttgtttcccaggctggagtgcagtggcgtgatttcggctcaccacaatctcagcttcccagattcatgcgattctcttgcttcagcctcccaactagctgggattacagacgcccaccaagcccagctactttttgtatttttagtagagatggagtttcaccatgtagcccaggctactctcgaactcctgacgtcaaacaatctgcccaccttggcctttcagagtgctagtattacaggcatgagccactgtggccagcccaatttttgtatttctagtagagggtttcaacatgttggcaggctggtctctaattcctgagcttaagcgattctgtctcctcagcttcctaagtagctgggaacatagacacacagacgtgtaccttcatgcctggctatgtttttgtatttttggcaaagatggggtttcaccatgttgcccaggctgatctcaaacccctgagattaagcgatccacctgcctcagcctcccagagtgctgggatgacaggcatgagccactgcacccagtttctgcatggggtttggtcagggctgggtctgcgccctgaagaggagctcattccagcccagctccccactgctgcagcgtgtgtggactcctccagaagggtgtggtgtgggcttctccagaagggtgcgggagttttcctgtaggagtttatcgtctctggtgcagtgggcagcagaggggaccatatttcctcagggtgaggtctcctttgtatgtgttgttatgttacaggaatggggtgtattgattctgagcaataaacaacatatttttaacattcaggattgacttctaaggactcttggtacatgaggaagaaacccggaaggggaagaggaaagcaaaggcgtcaggaatggttcttcctcaggtgagatgatattctcggtggattgttctgtctctttcctttcagaaaccctgggccttggagttgggaatcttctctgggtctcaagaagtgtcctgcctgacaggtttgctcacactcacccatgccttccctcagtccctctcatctcacttagattccatctc

SEQ ID NO: 22427 - DNA, 2300 bp, Homo sapien
agacctcatgggatcattgttacttcttatggagtgataaagtgaccttcctcgaattgtatcaatccataaccaatcaagttgctgcaacctatgcactgggcttgaatgaaagctgtcatgattctgctaaagattctctgtctttccctgtgtgtgaaaccttaacgtctctactttggaacgccgatctcatttatttggagttggtgtttccaggtggctttcttcaagctttgtgttcacataaactcagtacttaatcttacattctaaattttattatttactgctgacgtcagtttctgtcggattgtaggcgcctgaccagagagggcacgcgtcgctatgttgtaaaactcacactcgtcaaaaagacatgggttagggttttccccctccctctggatgaagctaattagctgacacagatggtcacctccattaccaaatagagccaggatgaactatgtgtgaccaagagtgttgtcaagtcctcttccctgaggactgattagtgtttatcttgaaaacatgtactcaatgggttgtatagaacagtgaagtttccttgtctcttttcaacctcttagctgtttgcctcaatttcccatcacattctggtttaaggcttacttattaataatgtggtttttatttctttcactattatcatcgtgaagatgatttctcattggggggaagattttttttgttttccattatattttctcaaaatttaaagagtaaagaaatgaatattttttgggccaggaagtgtggcttatgactataatcccagcactttcagaggctgaggcagtcagatcacttgaagtcagaagttcgagaccagcctagccaatatagtgaaacctcgtttgtatcgaaaatacaaaaattagccgggcatggttgtgcgcgtctgtaatgtcaactactccggaggctgagacaggaaaatcggttcaacccaggaggcagaggctgcagtgagcccagatctcgccaccgcattccagcctggccaaaaaagaaaactctgcctcaaaaaaaaaaaaaaaaaaaaatagaaaaaactaaatatataaaagaaaataagccgggcgcggtggctcacacctgtaatcccagcactttgggaggccgaggcgggcggattacttgaggtcggaaatttgagaccaacctgaccaacatggagaaatcccatctctactaaaaatacaaaattagcagggcatggtggcacatccctgtgatcccagctacttgggagatagaggcatgagaatcgattgaacctgggagacagagatcgcgccattgcactccagcctggtcaactagagcaaaactccatctcaagaaacaaaaaaagaaactgatagatctcttacacaaatacgctgggacaactaactggatatccacgtggaaaagaataatgttggatccctatgtaacatcatcaaaaattttattataaaaaagaaaagagagagagagacgaggaagggagccctgcgggagggggtgttactttgtcgcccaggctggcctgaactcccaggctcggcgatcctcccgccgctgcttcctgaatagctgggacctcaggctcccactcccgcgcccatatcccagctgtgtttaagccgcaggtggtgacctcacccatccttggcctgagcactccatcctgcatctcaggcagtggcctgagtctctaaagctgagcacagcgtggactctctcccaagtgaatggagaatagaaagggagaggatttctattcggttctgtgggctatcagcatgaaattgtaccttccgcccaggcagggctttgcatttcacattctagtttgcatccccgttccagataattccagggcttttgaatcatgcctcagccttcctggccggtctcgcctccaaaacccgaaaaatgcctctgcgctgggaacgatgctgagagactcacaggtcccgccctggccccgcccactgctggttctaaaggggaaagtctctcggcttcccaccccgcccctacctcatccaggccccgcccacctcgcgggccccgcccagacctggcttctgtactgcgcgcgcacatgcgcgcaaacccggaagcggattatgtggagtgaaagttacaccgtggcggtgagtttcgctcttctattaagtctgcgcttaccaggtccccggcgctgctgtacctgagacgtggggtccccacagacctggaaattctctcccttcttccttcacccaggacaaattgagacg

SEQ ID NO: 22428 - DNA, 2300 bp, Homo sapien
attagccaggcgtggtcgcactggcctgtaatcgcagctacctggctgactggggcaggagaactgcttgaacccgggaggtggaggttgcagtgagccgagatagtgccagtacactccagcctgggtgacagagctagacgctgtctgaaaaaatgacagcaacaacaaacaaacaactaaaaaaaaaaaggttattctgtaaataattaggaagactaagcagccccagagttaagaccttttggcatcattgtcccttcttatggagtgataaagtaaccttccttgaagtgtatcaatccatcaccagtcaagttgctgcaccctaggcactggtcttgaatggaaaatgtgattctggtaaagcttctctgtcttttcctatgtgtgtaaaatcttaacgtctccacctgagaacgctgatcctattcatttgaagttgatgtttccaggtggctatttccaagctttgtgttcaaacaaactctgcacttaatcatatattctaaattttattatttacctctgacatcagtgtctgtcgtattgtaggagtctcaccagagagggcacctgtccccatgttgtgaaactcacacttgtcaaaaagacatgggttagggtttttccccctccctcgggatgaagctaattagctgacacagatggtcacctccattaccaagtaaagccaggatgaagtatgtgtgacccaaggggttgtcaaatccccttccctgaggactgattagtgtttatcttgaaaacatgtgcttaatgggttgtatagaacagtgacatttctttctctcttttcaacctcatagctgtttgcctctatttcccatcacatttgagtctaaggttctttattaaaatggtttttatttatttctctgttgtcgtggagataattacccatttgggggaagattttctttgttttcaattatattttctcaacgtttaaacagtaaagagcattccttaggctatgcaaggtagcccacgcctgtagtcccagcactttaggaggccgaggcaggtagattacttgaagttcggagtttgagaccagcctggccaacatggtgaaagcccgcctctatcaaaaatacaaaaattagccgggcatggtcgctcgtgcctctaataccagtaatactgtaatactccggaggctgaggcaggagaatcgcttcaacccaggaggcagaggtcgcagtgagcagagatcacgccccttcacgccagcctgggcgacagagggagactccctcaaagaaaaagaaaagaaaaacgtgaaaaaaaagtaatagatttcttccacaaatgtgctggaacaactaactggatatccacacggaacagaataatgttggatccctatgtcacaccatcaaaaattttatttaaaaaggtttaaaaagcgagagagagagagagagagagagacggagagagagggagacaaggaaggtggccttgcgggagggggtgttactttgtcgcccaggctggcctggaccccagggctcagcgatcttcctgctcctacttcctgagtagctgggacctcaggctcccgccttcgcgcctgcacccctgctgtgtttaagcagcaggtggtgacctcactcctccctggcctgagcactccgtcccgcaccccaggcagtggctttagggaagtctctgaagctgagcacagggcggaccctccctcccttgtgaatggagaatagaaagggagaggagttctgttctgttctgtgggccgtcagcatgaaatcctatgttccgccctggcagggctttgcatttcacattctagtttgcatccccgttccagaaaattccagggcttttgaatcatgcctcatacttcctggccgctgtcgcctcccaaacccgaaaaacagaggcgctgggagccaggatgtgagacacacaggtcccgccccggccccgccctctgccggttctaaaccgcaaagtctctctgcttcgcgccccgccgccacccggcccaggccccgcccaccacctcgcggggcccgccgaggcctggcttctgtcctgcgcgcgcagattctcgcaaatctggaagcggatcgcgtggagtgacggtcacaccgcggcggtgagtttcgctgttttgtattaagtctgcatttcccaggtcctcagcgtttctgtccctcggacctagggtccccacagatctggaacttctctcccgtcttcacccagagcaaatagagacatccccgtgagagtctggaagtcgcttcctt

SEQ ID NO: 22429 - DNA, 2300 bp, Homo sapien
tttttttttttggagacggagtttcgctcttgtcccccaggcttgagtgcagtggcacgatctcggctcactgcaacctccgtctcccgggttcaagtgattctccttccttagcctcccaagtacctgggattagaggcatgcactaccactcctagctaattttgtatttttatagagacggggtttctccgtgttggtcaggctggcctcaaactcctgacctcaggtgatccacccgcctcagcctcccaaagtgctgggattacaggcttgagccaccgtgcccggcaaaagaaatttctttagcccaggtttgtgaaagagccttctctaattttccaggatgggggtgataagatcaacccttcccattagtccctgcaggcccccatgtaagaattcaggcacacctcactcatctcagaccttctcagggcaacttggtgaaaatgtcttccaatctgagccccagtgagcctccttggaacttggcgatgaggggctacaccagaaaagctcaaccctagtgactttgacccctgaaatgattgacaaaatggagtgcgtgtgtgggtgtggctttttttttaaatttttttgaggagaggagtgcccagttgtgattagaattttcaatgggatgcagtgccctaaaaatgaaaaacaaaagcagaagaatggaagaaacagaggtagactcagacacagagaccatcttcggggcctttctctgtatgaggacatcacaacaaaatctaaagcaggtcatgtcagtccctgacagggaaccctccaccagcttcccgtgttccccaggacaaaagcccaacccctcactgtggctccacagccctgtgtccagggccccttccactgtccagcctcctcctgggagcttgccctcatctcatgactctctccgccccagtcatatttgcttttctcttttcccaaacatcaaaacccttcctgtctcaggtcgttgtccctggttttaccctacgtaccctgtcactttctcctccttcaggtctaggctcagagctgtcgcccatgccctcccacccccggctgtagttcccttgtccatcagtctgtatcacgttactcaggattcattgtctgcatcaatcacatcagaaatgcattttttttttttttttttttttgagacagagtcactctatctttcagcctatgagtgcagcctcttgatcttggctcactgcaacctctgtctgctgggttcaagcaattctggtgcctcagcctcccaagtagctggtgtgtctgccaccacacccggctaatttttgtattttaacttccattttatattatttttgagtctgtctgtcaccaagactggagtgtagtggcgccatctcggctcactgcgacctccacctcccgggttcaagcaattctcctacctcagtctcctgaatagcagagattacagacacttaccaagcccggctactttttgtgtatttagtagagacagcgtttcaccatgttggccaggctggtctcgatctcctgacctcaagtaatcagcacacctcggccttccagagtgctaggattaccggatgacccacacgcccggcccatttttgtatttttagtagatacagggtttcaccatgttggccaggctgctctcaaactcctcaggtcaagtgatcctcccacctatgcctcctaagtagctgggaccacagacacacagacgtgcaccaccatacctggcgaagttttgtatttttggtagagatggggtttcaccatgttgctcaggctgttctcaaactcctgagttcaagcgatctacctgccacagcctcctagagtgctgggatgacaggcatgagccaccgcacccagcctctgcgtggggtttcgtcagggctgggtctgtgccctgaaggggagctcattccagcccagctccccactgctgcagcttgtgtgtggactcctccagaaggggagcgggagtttccctgtaggagtttatcatccatggtgaggagggcagcagggggcactatttcctcagggtgaggtctttagttaggcctctgagcccaagctaagccatcatatcccctgtgacctgcacgtatacatccagatagcctgaagcaactgtaaaaatatccttaactgatgacattccaatattgtgatttgtttctgccctaccctgactgatcaatgtgctttgtaatctcccccacccttcagaaggctctttgtaatcctccccacccttgagaatggacttggtg

SEQ ID NO: 22430 - DNA, 2300 bp, Homo sapien
tttctttttttgagagggaattttgctcttgttgccaaggctggagtgcgatggcatgatctcagctcaccacaaccttggcttcctagcatcaagcgattctactgcctcagcctcctgaatagctgggattacaggcatgcaccaccacgctcggctaattttgtgtttttagtagagacagggtttcttcatgttgatccaggctggtctctaactcccgacctgaggtgatccacctgcctcggcctcccaaagtgctgggattacgggcgtaagccaccacgcctagcccatagtagttttcaaaagggacatcagggcacggtggctcaagcctgtaatcccagcactttgggaagccaaggtgggtggatcacgaggtcaggagttcgataccagcctggccaacagagtgaaaccccatctctacaaaaaaaaaaatacaaaaattagccggtagtgatggcagactcctgtaatcccacctactcaggaggcagaggtttgtttgaacccgggaggcagacgttgcagtgagccgagattgcgccactgcatgccagcctgggcaacagagctagagtccgtctgaaaaaaaaataaagaaaaagaaaggaacatcaaagccaggcgtggtggctcatgcctgtaatcctagcactttgggagcaaatcacttaaggtcaggagtttgagaccagcctggcctacatgatgaaaccctgtatctaccaaaaatacaaaaattagctgagcgtggtggcacacgcctctaatttcagctactctggaggctgaggcaggagaattatttggacccagctgggaggcagaggttgcagtgagccacgatcgcaccacggcactccagcctgggtgacagagtgagactctgtctcccccacccccaaaaaaaaatagccaggggtggtggcatgcatctgtagtcccatctacttgggaggctgaggcaggagaatcatgccactacactccagcctgagtgatagagcgtgacttggtctcaaaaaacaaacaaacaaaaagaaataacaatcagctctttaatgtctctctttataaaagcagtagtcttggctgtgtgcgggggctcacacttgtaatcccagcactttggaaggctgatgcgggtgaatcacctgaggtaggtggttcgagaccagcctgaccaaaatagagaaaccccgtctctactaaaaatacaaaattagctgggtgtgatggtgcatgcctgtaatcccagctactcaggaggctgaggcaggagaattgcttgaacccaggaggcaaagtttgcggtgagccaagatcgtgacattgcactccagcctgggcaacaagagggaaactccgtctcaaaaagtaaacaaataaataaataataaaaataaaagcactagacctattcatgtgtagtcaacacccatgaccaaattctctcacaggccccatctgcaggaacatcctattggacacaactctgaacatcgcttttggccaatataatctttcagaccaaggagcctacatcatgtttttttttttttttttttttttttttttttttgagacggagtctggctctgtcgcccaggctggagtgcagtgatgcaatctcggctcactgcaacctccacctcccgggttcatgccattctcctgcctcagcctcccgagtagctgagactacaggcacccgccactatgcccggctaatttttgtatttttagtagagatggggtttcaccatgttagccaggatggtctcgatctcctgacctcgtcatccgcccgcctcggaatcccaaagtgctgggattacaggcttgagccaccgcgcccggcctacatcatgttttttatggttttattgtgcaatttgttttatacaatgttttctgtgatctcagttgataaattttcccagtacactttctatattttttgcacagttgactagataacgaaggacaatgcatatatacaaaattgctgtattgcctggtgatatgcagctgtacctgtgacatcataattgcaccctccgacatggttagtcagttcttattccttataatgctgtgtatttacttgaactcatacatcagaagatagtgatcttaacacgtatttcaattcttatattgtgtgctggtgataagcaaaagttgtggcttttttcttaagagggaattgtttagaattctgcagcctatataaatgtacttatttgcttgctggttttatcatgggttacaatagtttactgactaat

SEQ ID NO: 22431 - DNA, 2300 bp, Homo sapien
tttctcatttgggaggagactttttagttttcagttatattttgtcaacatttaaaaagcgaagcaaagaatatttctgcggcatggcacggtggctcacgcctgtaatctcagcagtttgggaggcggaggcgggtggatcacgaggtctagagatcgagaccatcctggccaacatggtgaaacaccgtctctactaaaaaaaaatacaaaaaaaaaaaaacccaaaaaaattagccaggcgtggtagcgggagcctgtggtcccagctactccggaggctgaggcaggagaatggcgtgaacccgggaggcggagcttgcagtgagtcgagattgcgccactgcactccagcctgggcgacagagtgagactccgtttaaaaaaaaaaaaaaaaaaaaaaagaatatttctggccgggcgcggtggctcacgcctgtaatcccagcactttgggaggccgacgcgggcggatcacaaggtcaggagatagagaccgtcctggctaactcgatgaaatcccatctctactaaaaatacaaaaaattagccaggcatgttggctcacgccgtaaccccagcactttaggaggctgaggcaggcaaataacttggagtgaggagtccgataccggcctggtcaacatggtcaaccccgtctctactaaaaatacaaaaattagcctggcatggtggcgcacgcctgtaatgccagctgttcccaaggctggggcaggagaatcgcttgaacccaggaggcagaggatgcatttagtcgagatctcgccactgcactccagcctgggcaacagagaaatactctgtctcaaaaataataataataataataataataataataataatacaagaaagtaatagatctcttccataaatgtgctaggacaactatctggatatccacatggaaaagaataatgttggatccctatgtcacacaatcaaaaattttatttgcgaaagttttttttaaaaaaaaagagagagagagagacaagaaagggagaccgcggcagtgggcgttattttgtcgctcaggctggcttggaacccgaggctcagggatcctcccgccgctgcttcctgagtagctgggacctcaggctcccgcccccgcgcctctgctgtctttaagcagcaggtggtgacctcactccttctcggcctgagcactccgtccggcattccaggcggtggcttcagggaagtctctgaagctgagcacagggcggagtctccttccggagtgaatggacaatagaaagggagaggatatctatctgttctgtgggacctcagcatgacatggtacataccgcccaggcagggctttgcatttcacattctagtttgtatccctgttccagacaattacagtgtagcaggacgagtcgcagacaaaacctctcagacaccgagttgtagaaggaagggctttattcagctgggagcattggcaagctactgccttaaaatccaagctccccgagtgcacaatttctgtcccttttaagggctcacaacactaaagatttcagatgaaaggatagtgactgattgagcaagcaagggatacgtgacaggggctgcatgcaccggtgatcagggagagagagaacagggcaggagtttcaccgtgttcttctatacaatgtctggaatctatgcctaacatcagcttctaaatcataagttgatttttaactactgggtttaggccaggcggatccaggcctggtttcgggcctggcgcggggctgcctgtctttggttttacttcctgttgtttttactgactataaaacaatataaaacaatgtcagagggtctctctcttctctcaacagggcttttgtatcatgcctcagactttctggcgctctcgcctccaaaacctgaaaacagagacgctgggagcgaggctgagagacgcgcagatcccgccccggccctgccctctgccggttctaaaaggcaaggtctctccgcctcgcgccccgcccctacctcgcccaggccccgcctacctcccacttcccgcccaggcctggcttttgtcctgcgcgcgcagattaacgcaaacccggaagcggatcgggtggagtgtaggtcatatcgccgcggtgagttttgctctgtgttgtattaagtctgcgctaactaggttcccagggcttctgtccctgggacgtggggtccccacagacctggaaattctccggcgtcttcctttgcccagagcaaattgagacatccccgtgagagcccgagggtcgctt

SEQ ID NO: 22432 - DNA, 2300 bp, Homo sapien
tagcttctatgctgttttatcagagattgctattatcacagtatgggacccaccctcaataatacctacaatggtgcaggtgattctcatctgtctccagcattgaacatcaaggcagtttcctccatgttgagagctgagatcagcctgtgatccacagggaggtgagggggctgtgctctgcatggggtttggttagggccagatctgtgccctgaagatctgtgtcctgctgcagcgtgtgtgtggacttttgcaggagggagcaagacctcaaaacaggtcaaaattgcccttgtaggtcttcctgtggcaccttcttatctccacataatctctggtgcagtgggcagcagagaaccatctttatccctggtgaggtctcccctgtgtgtgtgttttgtcacaggaaaggagggagtgatttctaaaaattaaatctcgtatttttttttacatacaggattgattttccaaagactcatgttacgtgaggaagacaccaagaggagcaaagaaaaggagccagggatggctcttcctcaggtggagtaatattcctcggtggattcttctgtctctttcctttctgaaatgccaggtattgtagtagccagtcttctgtgagtctgaagcatcctgcctcacacgtttgctcacactaacccatgccttttctcagtccttgtcatcttcacttaaattccatcttctataacctagtgacatgagcttgggaagaggctgcactgggcatggtcctgggaagggctcacaccagagatggatggagatggggtgtggaccccaaggtgtcagtgatattgggcagcagggattgttcaggggccacatctggatgcacatttagctctttgtggatcagatcagagaatctatgtatgaaagtcatacattaatgtatgcactggtatctgtgtactggtatctggtaaattctggaaaaggagacaaactaggggagatatttctttttctttttctttttcttttttttttttgagacgtagcctcgctctgtcgcccaggctggagtgcagtggcacgatcttggctcactgcacgctccgcctcccgggttcactccattctcctgtctcagcctccctagtagctgggattacaggcacccaccaccacgcttggctaatttttttgtattttttagtagagatggggtttcactgtgttagccaggatggtctcgatctcctgacctcatgatctgcccgcctcagcctcccaaagtgctgagattacaggtgtgagccagcgcgcccggtcttgtttttgtttgggttaggcgggctcctgtagttccagttactcgaaaggctgaggcaggagaagggcgtgaacccgggaggcggagcttgcagtgagccaaaatcgtgccactgcactccagcctgggcgacacagcgagactccgtctcaaaaaaaaaaaaaaaaaaaaaaagtaaaagagcgagagagagatcaggaagaggaccctgcagttagggggtgttactttgtcgcccaggatggcctggacccccaggttcagggattctcccgccgctgcttcctgagtagctgggacctcaggcttccgcctcgtgcccgcatccctgctgtgtttaggcagcaggtggtgacctcactcctccctggcctgagctctccgtcccgcatcccaggcggaggccctagggaacactttgaagctgagcacggggtggaccctccctcctgagtgaatggagaatagaaagggagaggatttctgttctgttctgtgggccatcagcatgaaatcgtatgttccgccctggcagggctttgcatttcacattctagtttgcattcccgttccagataattccagggcttttgaatcatgcctcagccttcctggccgctgtcgcctccaaaaactcgaaaaacagaggcgctgagtgcgaggctgagaagcacaggtcccgccccgggccctccctctgccggttctaaagggcaaggtctctccgcctggggccccgcctctaccccgcccaggtccagccaacctgccccggcctggcttcagtcctgggcgcgcacaaacccggaagcggatcgcgtggagtgaaggtcctaccacggcgcgtgagttttgctctgccttggattaagtctgcacttcccaggtccccggcgcttctgcccctgggacgtgggatccccacggacctggaaattctcgcctgtcttcccttcacccagagcaaattgagacgtcccggtaagagtctgga

SEQ ID NO: 22433 - DNA, 2300 bp, Homo sapien
ttcagggacgtggccatagaattctctcaggaggagtggaaatgcctggaccctgctcagaggactctttacagggatgtgatgctggagaattataggaacctggtctccctgggtgaggataacctcctggggatgtgcccttgtgtatctttgtattttctcttgttgcctcttgggagccacatccttacttgactaaaatggaagccgtattgattttgaaatgaaaagcttcatgatgtagcatctggactttcactgtcccctttgtttagaggttctgcattcttcatgatagctcagtggagcttccagaagtaaagtaggcataaaactttatggcagcctggtcgtggtggctcacgcctgttatcccagcaccttgggaggccaaggcgtgtggatcgctatgggtgaggagttcaaaaccagcatggccaacatgcagaaaccctgtctgtactaaaaatacaaaagttagccgggcatggtgatgcatatgtgtaatcccagctcctagagaggctgaggaaagagaattacttgaacccaggaggccaagttttgcattgagctgagaacacaccactgcactccagcccggacgacagagcaagactctgtctcaaaaaacaaagacaaaaacaaaccttatggcagactttaaagatatccagttccctgtttgcttctcctgtgctttcgattctgtagttcttggaagagagctcgatgtccacatactacatattacagtgctccccaagcattcagaatgaggcagtcagtggaggaatttgtgaaatattttcctagattcatctgtaatgtcttctttcctacagaaacatagggctgggactctagaaaagctccagcatgttatggtcctttctttttataagcaggagtctctttctgacctgctgtctccatgttggagcaagggaaagagccctggactgtggagagttaagtgaaaataacaaaaaaatccagatgggtgggaatgtattacaggtgcaaacgcaggtaagagctcagatgggcagagtggaagctccaccttcaaatagtgtgtggggaaactctctgcaagtgggagaattctgtggcaaaagaaaagtttaaatcctcacatctctgaaaagatatctttctttgcccccgcttatctctctgctctttctttctattctttctttctctctttttttatgacagagtctcactctgttgcccaggctacagtgcactggtacgatcttggctaactgcagcctctgcctcctgggctcaaaggatgcttatgccccagattcctgagtagctggaactgcaggcgctcaccaccatgcccagctaatttttgtgtttttagtagagacagtgtttcaccatgttggccaggctggtttcaaacttctgatctcaagtgacccacttgcctcagattcccaaaacactgggaccgtaggcatgagctgccatgcctaaccattgttattattttaaatagttttgtcttgtagttctttagatatttgggcagaggttattgttgcaggtatgttaaacatattaaagttatagcataataaagaaacttaaaattaccataacctggacgtgtgcagtggctgacacctgtaatcccagcactttgagaggctgagatgggcatatcacctgaagtcaggagttcaaaactagcctggttaacatgttgaaacttcgtctctactaaagttacaaaaattagccaggcgccgtggtgggtggctgtaatccaagctactcaggaggctgaggcaggagagccacttgaatctggaaggcagaggttgcagtgagccgagatcgcaccgttgcactccagcatgggagacagagtgaaactctgtttcaaaagaagaaaaaaaaaattctgtaacctgcaaaaatgacttcttcttctccactagaacatttttttatttgtcagaattatttctgtgtatgttgcatttttgttaacatatatgtacagtgtttttcatgccttttattttaaatatgaaaaaagtttagttatgaaggtatacatatgccagtttctgtatctgtccttttattaattaattactttatgtatttatgagactgagttttgctgttgtcacccaggctgaagtacgatgctgcgatctcagcttactgcaacctctgcctctcgggtacaaccgattctcctgcctcaggcccctgagaagctgggattacagatatgcaccaccacacccatctaattttgtatt

SEQ ID NO: 22434 - DNA, 2300 bp, Homo sapien
gacccaaggatgtatttctgaaggtcttgggaacgatccttgtaaggcaaactacaagggcgatagtacctatatctcagtaggaagttaaataattcaaacatcaaatatttcaaatttaaagctacggacatttaaataattctgagctttgagaggaacgtggtcatgcaacctgagtccagtggtgtgcaggcgcaacttctaagagttttactggccaggtgcggtggcgcacgcctgtagtctcagcactttgggaggctaaggtgggtggatcacttgaggtcaggaattagaaaccagcctggccaacatggtgaaaccccgtgtctactgaaaatacaaaagcattagccaggcatggtggcgtgtgcctgtaatcccagctactcaggaggctgaggcaggagagctgcttgaacccgggagatggaggtcacagtgagccaagattgcaccactgcactccagcctgggcaacagagcaagactccgtaccaaaaaccaaaccaaaacaaaacaaaacaaaaagtgcaataaaatttagtttcctaatataaattttaaaaaaagtttacctgtaaataattaggaagactaacctgttggcatcattgtcccttcttatggagtgataaagtaaccttccttgaagtgtatcaatccataaccaatcaatttgctgcagcctatgcactggccttgaatggaaaatgtgattctggtaaagcttctctgtctttccctgtgtgtgaaaccttaacgtctctacttgggaacacgggcccccttcatttggagttgacgtttccaggtggctatcctcaagctttgtgttccaataaactctatagttaattatgtattctaaattttattatttactgctgacgtcagtttctgtcggactgtagcagcctcactagagacggcacctgcctccatgttgtaaaactcacacttgtcaaaaagacgtgggttaaagtaattcccctctctctgcatgaagctaactagctgacacagatagtcacctccattaccaagtacagccaggatgaactatgtgcgaccaaggctgttgtcaactaatcttccctgaggactgattagtgtttatcttgaaaacatgtacttaacgggttgcatagaacaatgaagtttctttctctcttttcaacctcttagctgtttgcctctatttcccaacacattctggtctaaggcttattcattaatagaatagttcttatttcttcctgttttgtcatgaagatgatttctcatttcggggaagattttttagttttcagttgtattttctcaacatttaaaaagcaaagtaaagagtatttcctgggccaggcacagtggctcaggcctgtaatcccagcacttggggaggccaaggcagtcggatcacttgaagtcaggagttcgagaccagcctgtccaacatggcgaaatcctgtctctacacaaaatacaaaaattaaccgggcatggtgggtgtgcctgtagtgccagctactccggaggctgaggcagaagaatcgcttcaacccaggaggcagaggctgcagtgagtcaagatctcgccactgcactccagccagggcgacagagaaatagcctcaaaaaaaaaaaaaaaaaaaagggaaaaagaaaagaaaaaaatgtaaataaaaaggagaaagtaatagatctcttttacaaatgtgctgggacaactaactggatatccacacggaaaagagtaatgttgtatccctgtctcgcacaagcaaattttttttttattatttttttatttttttatttttttttagagacggagtctggctctgttgcccaggctggtgtgcagtggctcgatctcggcccaatgcaagctgtatctcccgggttcaaaagcctgagaacatggcctgggaggaggctgagactcacaggtcccgctccggccccgccctctgcgggttctaaagggcaaggtctcgccgcttcgcgccccgcccacacctcacccgggccccgctcgcctcctcgttggctccacccaggcctggtttctgtcctgcgcgcgcagattcgcgcagaccaggaagcggatcccgtggaatgacggtgacgccgcggcgggcggtgagttttgctctgtgtggtgttaagtctgagcttcccaggtccccggcacttctgtacatgggatgtggggtccccctagacctggaagttctcccctttcttcgttcactcagagcaaatggagatgttctactgggagtccggaagcc

SEQ ID NO: 22435 - DNA, 2300 bp, Homo sapien
ggcatcattgtcccttcttacggagtgataaagtaaccttccttgaagtgtatcaatccatcaccagtcaagctgccgcagcctatgcactggtcttgaatggaaaatgtgttgattctgctaaagcttctctgtctttccctgtgtgtgaaaccttaacatctctacatgggaacacgggcccccttcatttggagttgatgtttccagatggctatcctcaaactttgtgttccaataaactctataattaatcgtgtattctgaattttattatttactgctgacgtcagtttccgtcagattgtaggagcctcactagagagggcacctgtcgccatgtcgtaaaactcacacttgtcaaaaagacgtgggttaatgtatttcccctccttctgcatgaagctagttagctgacacagatggtcacctccattaccaagtagagccaggatgaactatgtgcgaccaaagacttgtcaagtcctcttccctgaggactgattagtgtttatcttgaaaacatgtacttaatgggttgtatagagcagtgaagtttctctcttttcaacctctcagctctttgcctgtatttcccaacacattctggtctaaggcttatttactaataaaatggtttttatttcttcctgttttgtcatgaagatgatttctcattttggggaagattttttagttttcaattgtattttttcaacatttaaaaagcgaagtaaagagtatttcttgggccaggcacagtggctcacgcctgtaatcccagaacttcgggaggccgaggcaggcggatcacttgaagtcaggagttcgagaccagcctgtccaacatgatgaaaccccgtctgtacccaaaatacaaaaattagccgggcatggtgggtgtgcctgtaatgccagctactccggaggctgaggcagaagaatcgcttcaacccaggaggcagaggctgcagtgagccgagatgtcaccattgtactccagcctgggcgacagagaaatactcagtctcaaaaaaaaaaaaaaaaagaagaagaagaagaaaaagaaaaaatgtaaataaaaaggagaaagtaacagatctcttttacaaatgtgctgggacaactaactggatatccatatggagaagagtaatgttgtattcctatctcacacaagcaaatttagtttgtttatttatttttagagagggagtctggctctgtcgcccaggctggagtgcagtggctcggtctcggcccactgcaagctccacctcccatgttcaccgcattctcctgcctcagcctcctgagtagctgggactacaggcgcccgccaccacgcccggctaatttttgtatttttagtggagacggggtttcatcgtgtaagccaggatggtcgcgatctcctgacctcgtgatccgcccgcctcagcctcccaaagtgctgggattacaggcgtgagtcaccgtgcccggcctaataaaaattttattttaaaaatttaaaaaagagagagactgcgggagggaatgttacattgtcgcgcaggctgtcctggacccccaggctgagcgatcctcccgccgctgcttcctgagtagctgggacctcaggctcccacgcccgcatccctgctgtgtttaagcagcaggtggtgacctcactcctccctggcctgagcactccgtctggcatcccaggctgtggccctagggatgtctctgaagctgagcactgggtggactctccctcctgagtgaatggagaatagaaagggagaagatttctatactgtcctgtgggccatcagcatgaaatcctacgttccgcccagaaagggctttgcattttacattctagtttgcatcctccttccagactattccagggcttttgaattatccgtctgccttcctgggggctctcgccgccaaaacccggagaacgggttgggaggaggctgagagatgcacaggtcccgctccggccccgccctctgcgggttctaaagggcaaggtctcgccgcttcgcgccccgcccacacctcacccgggccccgctcgcctcctcgttggctccacccaggcctggtttctgtcctgcgcgcgcagattcgcgcagaccaggaagtggatcccgtggaatgacggtcacgccgcggcgggcggtgagttttgctctgtgtggtgttaagtctgagcttcccaggtccccggcacttctgtacatgggatgtggggtccccatagacctggaagttctcgcctttcttccttcactcagagcaaa

SEQ ID NO: 22436 - DNA, 2300 bp, Homo sapien
acattgtcatcaacagggcaaggcaatacagaagtgatccacacagggacattgcagagacaagcaagttatcacattggagcattttgctcccaggaaattgagaaagacattcatgactttgtgtttcagtggcaagaagatgaaacaaatgaccatgaagcacccatgacagaaataaaaaagttgactagtagtacagaccgatatgatcaaaggcatgctggaaacaagcctattaaaggtcagcttgaatcaagatttcatttgcatttgcgaagacataggagaattcatactggagagaaaccttacaaatgtgaagaatgtgagaaagttttcagttgcaaatcacatcttgaaatacataggataattcatactggagagaaaccatacaaatgtaaggtttgcgacaaggcttttaagcatgattcacacctggcaaaacatactagaattcacaggggagacaaacattacacatgtaatgaatgtggcaaggtttttgatcaaaaagcaacccttgcatgtcatcatagaagtcatactggagagaaaccttataagtgtaatgagtgtggcaagacctttagtcagacatcacaccttgtgtaccatcatagactgcatactggagagaaaccttacaaatgtaatgagtgtggcaagaccttcgctcgaaattcagtcctcgtaattcataaggcagttcatactgcagagaaaccctataagtgtaatgaatgtggcaaggtttttaagcaacgagcaactcttgcaggacatcgtagagttcacactggagagaaaccttacagatgtgaagaatgcgacaaagttttcagtcgcaaatcacatcttgaaagacataggaggattcatactggagagaaaccatacaaatgtaaggtttgtgacaaggctttccggagtgattcacgtcttgcagaacatcagagagttcatactggagagagaccttacacatgtaatgaatgtggcaaggtttttagtacaaaagcgtacctcgcatgtcatcaaaaacttcatactggagagaaactttacgaatgtgaagaatgtgacaaagtttacattcgcaaatcacaccttgaaagacataggaggattcatacaggagagaaacctcacaagtgtggtgattgtggtaaagcctttaattcaccttcacaccttattaggcatcagagaatccatactggacagaaatcttacaaatgtcatcagtgtggcaaggtctttagtctgaggtcactccttgcagaacatcagaaaattccttttggagacaattgtttcaagtgcaatgagtatagcaaaccatcaagcattaattgacatcagagtcaaatcagcattgacctgagtttgagttgacttaacattgatttcaagcattaatcgacattaaactgtttatgttaagaggattgggccaggcgtggtgtctcacacctgtaatcccagcactttgagaggccaagacaggtaggtcacttgaggtcatgaatttgagaccagcctggccaacagacgggagccacttttcccagcctgtatgttcttttatttatttatttatttttaagatggaatcttgctctgtcgcccacgttggagtgcagtgatgtgatctcggttcactgcaacattcacctcccaggttcatgcaattctcctgcctcagtctcctgagtagctgggactacaggtgcgtgccaccatgcccgggtaattttttgtatttttagtagagactgggtttcaccgtgttagctaggatggtctcgatcttctgtccttaaaatccacctgcctccacctgccaaagtgctgagattacaggcgtgagccaccacacctggcctgttttttgtttctttaacaaaaagttatagaaatttctctgggtattgtgttgaatctacatcacattcagttataatcatttagcaatattattccattcaatatggcttgtatctcttatttgcacatgtttttatcactttgatcaatgtttgtagatttgaaggtagaaacttctcaacttttttcatttattcctaagtatttcttactttaagttctttagcaaatgaaagtgtttttttaattttctttttaaattgtttattgttaatgtatggaaattcaactaatttttggtgctgttattctattcttcaaatccactgcatatgttttttagttccagttgcattttggttgactctttgtgattttctacacagaagatcatgtcatctacaaag

SEQ ID NO: 22437 - DNA, 2300 bp, Homo sapien
caacctcttgatctcatgatccaccgcctcaccctcccaaagtgctgggattacaggcatgaggtaatgcgtgtggccaagcccatggtttacgtagaaaacacagcatttgcaatatatatacataattattattgttattattattattttgagaaagtcttgctctgttgcccaggcccgcattggggaggtgcctggggcctatatggtgacacaaggtgttcttccctgcccagtgccagcccctggaaaatgggctcctctgacatgaaggtgtccaaaccctcctgtgattgtgtgggccaaagggatcaggagacagagagagagcagtaaaaaacctgagacagagaaaagaagaatgagaaaggcccataacagatggcaaagtagaagatgggtgagggatttgccaagagacagcaaaagtgaaaaaaaaaataagaaagcaggaggagaaaagcaactggagaaatgtagagaaaagctagatgtacagagagatgaaggacagcaaggtagggagagggacagcaaagagggagtctcatcagagtgagggagaggaggagggatttggagccagggcagacagagcagagtggtgctggtggcaaggagaacagagggagaagcacagcagggaggacacctggggatctggggtgccagagagtggggccagggaggtataacaaggaagagacaatttaacagggagagcagaggatgcacagagatgggagaagaggtggaaatctatagagattgaggatgatctaaagattggggagaaggagcagcaagagattaaatgagttgtggagatggagcctggctaatttttgtatttttagtagagacagggtttcactgtgtttgccaggttggtctcgaactcctgacctcaggtgatccacctgccttgacctcccaaagtgctgggattacaggcatgagccactgtatctggccacccatgttttcttgattgaaaacatttgcttatatagtagttctacagctgaccctctttccctattttctttttttgtttgttcgtttgtttgtttttttgagacacagtttcactcttgttgcccaggctggagtgcaatggtgcaatctcagctcaccgcaacctccgcctccgggttcaagtgattctcctgcctcaaccttcctgagtagctgggattacaaccatgagccaccatgcctagataatttttgtatttttagtagagacgggggtttctccatattgctcaggctggtctcgaactcctgacctcaggtgatctgcctgccttggcctcccaaagtgctgtgattacaggcctcagccaccctgcctggcctccctgttttcaaggtcagtagctgtgtgttttcacttctgcattttatatatgttactataattttcttgtaagaagaattaaatgttgaaagtcaatagcatcagaacgttgcaaaagaagtttctttagcccaggtatgtgaaagatgcttctctaattttcaaagagaggtgataagaccaaccctttccattagcccttctgggcccccatgtaagaattcagacacaccttctcactcatctcagaccttctcagggtaactcggtgaatatgtccccactctgaggatatcacagctaaatgtaaagcaggtcacatcagtccctggcagggaaccctccaccagcttcccgtgttccccaggacaaaagcccaactcatcagtgtggctccacagccctgtgtccagggcccctgccagtgtccagcctcctcctgggagcttgccctaatctaatgactccctccgccccagtcacatttgcttatctctttccccaaacatcaaaacccttcctgtctcaggtcattttccccgttcttaccctatgtccctaaatgatcacagccatctccctttctgctccttcaggtctaggctcagagctgtctcccatgccctcccacccccatctgaaattccctctgcccatcaatctctatcatgttactcaggttttattatctctatcacatcagaaacgcttttttttttctcttcctcaaacagagtctcactctgtccttcaggctgtgagtgcagtctcctgatcttggctcactgcaacctctgtctcctgggttcaagtgattcttgtgcctcagcctaccaagtagctgagatacaggtgcgtgccacccgccaccatacctggctaatttttgtatttgtagttttgttttattttattttattttgttttgttttat

SEQ ID NO: 22438 - DNA, 2300 bp, Homo sapien
agcccccaagtagctgggattacaggcgcctgccaccacgcctggctaatttttgtatttctaatggagacggggtttcaccatgttggccaggctggtcttgaactcctgacctcaggtgatccgcccacctcagcctcagaaagtgctgggattacaggtgtgagccaccgtgcctggccaattttaggttgtttcaatgtgtactttataaagatatcaaggacctattttgtttgtttgttttgagatggagttttgctcttattgcccaggctggagtgcaatggcgcgatcttggctcaccacaacctccgcctcctgggttcaagtgatctcctgcctcagcctccccagtagccgggattacaggcatgtgccactgcgccaagctaattttgtatttctagtggagatggggtttctccatgtttgtcaggctggtctcaaactcccaacctcaggtgatccacccacctcggcctcccaaagtgctgggatttaaggtgtgagccaccacgcccggccccaggacctttcttctttacgctaacatcaaaatttggttcaagtagcctattctattttctttccttatgtcatctgataaaatggtgagctgtgagcttctaagtaaatgtctccctcaagttcctctggttcataatattccttgcagatgttgaacgatgggctggattgttttggaaccttgttccagcagagcccatgtgttcatgaagaaaacatttgcttacagcttatgactaccattgcctctctttcagtgttttttgttgttgttgttgttttggtttttgttttgttttgttttgtttgagaaggagtctcactctgtcacccaggctggagtgcagtggtgtgatcttggctcactgcaacctctgcctcccgggttccaatgattttcctgtctcagcctcccgagtagctgggattacaggcacacaccaccatgccaggctaatttttgtatttttagtagaaaccgggttttaccatgtggaccaggatggtctcaatctcctgagctcgtgatccacctgcctcggcctcccaaagtgctaggattacaggcgtgagccaccgcgcctggcctctttcagtgttttaaacacctatagctatgtgttcacacttgtgtttattttgaacgtattactgtcatatttctgggaaaataattacatgtttaggattcatgccatcagaaccttagacatggagagagacattccttttgctcaggtgtataaaagatagtcctggaattttctttctttgttttttggttttttttttttttttgagacagtcttgctctgtcacccaggctggagtacagtggggcaatccggctcactgcaacctctgccttccatgttcaagtgcttctcttgactcagcctccagagtacctgggactacaggagccagccaccacacccagctaatctttgtatttttagtagagacaaggtttcaccatattggccagactgttctctgaactcgacctcaagtgatccacccacctcggcctcccagagtcctgggattacaggtgtgagccaccttgcctgacccctcttcactagtttttaatttacataatgaattctgattttgaacccatgtattgagtttttccatttagttactgtatttttatcccgagagtttctgtgtagttcgtcataatttctgtatgttggttgtccttctcatgttcttcatgcattgcttttatgatttcttgaagttgtatcttaattcagtgagcttccaactttttggggggtggaggtgatggagtttcgctgtgtcccccaggctggagggcagttgtgcgatcttgattcacttcaacctctgctctccgggctcaagcaattctcccacctcagcctggtgagtagctttggttgtgtcctctccaggtttttgcttataccttctgaacgcaagttaatttaagtgtgtgtggatgtaatttgaagtatgtgcagaagtgcattaatggataagcccatgatttttttttgagacagagtctcactttgtcgacaggctggagtgcactggtgccatctcagctcactgcaacttctgactcccgagttcaagtgattcttttgcctcagtctcccaagtagctgggacaacaggggcgtgccgagaagcccagctaattttgtacttgtagtagagagcgggtttcaccacgctggccaaaattgtctcaacctcttgatctcatgatccaccgcctcaccctc

SEQ ID NO: 22439 - DNA, 2300 bp, Homo sapien
tgggcccacttttcttcctctatactttgtctccgtgtcttatttcttttctcagtctctcatctccatcttgcgagaaatacccacaggtgtgtaggggcaggcccccttcacttctgagggtttttttttttttttttttgagacagagttttgctcttattgccagtgctggagtgcaatgatgcaatctcagctcaccgcaatctctgtctcccagtttcaaacgattatcctgcctcagccaccagagtagccgggattacaggcatgcaccagcatgcccggctaatcctgtattttcacaagagacggggtttctccatgttggtcaggctggtctcgaactcctgatctcaggcgttctgcctgcctcggtggtttgacactgggattacaggcatgagccaccgctcccggcttgaagtggtattttttagaaacaacctaaactttttttcagcttaataacccatggatgtatttctgaaggacctggggtctctctttgaaaggcaaacaacaagagagacggtacctgtaactcagtaggaaattaaacgtttgaaatatcaaataattccaatttaaacaatttaaaggtatggacctttaaataattctgagccttgaaaggaatgtggtcatgcaacctgtgtcctgtggtatgcagacgcaacttcttttttcttttttctttttgagacgtagtctcactatgtaacccaggctggagtgcagtggcatgatctcagcttactgcaacctccgcctcctgggttcaagcgattctcctgcctcagcctcccaagtagctgggactacattcacgcaccaccacgcctggctaatttttgtattttttagtagagacaggatttcaccgtattggccaggctggcatcaaactcctgacctcgtgatccgcccgcctcagcctcctaaagtgctgggattacaggcgtgagccaccggcgcccggctgcagacgcaacttctaagagttttcctggccagacgcggtggctaactcctgtagtcccaacactttgggagaccaaggcgggtggatcacttgaggtcaggagttcgaatccagcccggccaacgtgatgaaaccccagtctctactaaaaatacaaaacaattagccaggcttggtggcgcgcatctgtaatcccagctagttgggaagctgaggcaagagaactaccttaatccgggaggtgaattttgcagtaaggcggagatctcgccgctgcactccagcctgttcaacagagaaatactctgtctcaaaaaaggaaagaaaagaaaaaatgtaaatataaaaatgaaagtaatagatctcttccacaaatgtgctgggacaactaactggatatccacatgaaaaataacaatgttggatccccatctcacaaaatcaaaaattttatttaaaaaaaagttaaaaaaaaaaagagagagagacaaggaagggagcgctgcgggaggcggtgttactttgtcgcccaggctggcttggacccccaggctcagcatcctcccgccgctgcttcctgagcagctgggacctcagacttccgcccccgcgcccgcattcctgctgtgtttaagcagcaggtggtgacctcactcctccctggcctgagcactcggtcccgcatcccaggcggaggccctggggaagtctctgaagctgagcacagggtggactgtccctcctgagtgaatggaaaatagaaagggagaggatttctattctgttctgtgggccgtcagcatgaaatcgtatgttccgcccaggcagggctttgcatttcacattctagtttgcatccccttccagacaattccagggcttttgaatcatgcctcagccttcctggccggtctcgcctccaaaacccgaaaaattgaggctctgggagccaggctgagagacgcacaggtcccgccccggccccgcccccgccccgccctctgtctgttctgaagggcaaggtctctccgcctcgcgccccgcccctacctcgctcaggccccgcctacctccccgcgggtcccgcccaggcctggcttctgtccccagagagcagattcgcacaaacccggaagcgggtcgcgtggagtgacggtcccaccgcgggggtgagttttgctctgtgttgtgttaagtctgcgcttcccgggtcccaggcgcttctgtacctgggacgtggggtcctcatagacctggaagttctcctccgtctttctttacccagagcaaattgagaagtccccgtgagagtctg

SEQ ID NO: 22440 - DNA, 2300 bp, Homo sapien
atgaaaataaatcccaatgtttgaagactgcctattttacagcctttgttgttcacacctgatagaacacttaggagagaacaacaaagaaaacacccaaaatagattacaattggatgggtgtggtagctcgcctttaatcccaacactttgggaagctaaggtgggaggattgtttgagtacaggagttcaaggccagcctaagcatcatagtggacccccgactctacaaaatattaaaaaattagccaggcctggtggtgagggcctgtggccccagctagttgggaggtgagacgggaggattgcttgagccccagaggttgaggttgcagtgggcagtgttcccaccactgcattccatcctgggtgtcagaactaggtcctgtttctagggaaaaaaaaattacaacttgaagataaaaagtacattttctacttattttcagaaggcacgtaaagtgaatttgatattacaatacacttaggaattattttttaaaaaaagaatttgagaatgaggaccaaggtctaatttttttctcttgcccaaattcctatctaaagggtctggggagtcatgccctacaaaccataaatactcatcagatgggttttatttagtcctatatatcctgtcttactttccagtctgactctggaataacgtgacaaagaagaaagtcaaaatattttaccccaaaacatgtttctgtgccatattttgaaatggtcctgcaaagctgttctttgtgaggggtacatgtgcatttgtaaagaatctctgttaacatagctagatctttttcttctaggccctaccaatcctgaagagattaagtaagaatctcgcactgtttaaaggtctgaatagaaaacacttatcatctattatctctaagggcagccaatagaagacttgaaaacaacattggtctccacaatcttttaccttaacgtgaacatttcctctccgttgatcccaggtatttagacaaactcaaccaattgtcaatcagaaaatgtttcaatttacctgtagcccagaagtccccgctttgagttgcccctcctttctgaaccaaagcagcgtatttcttaaatgtatttgattgatgtctaatgcctccctaaaatgtctaagaacaagctgttccccatcaccttggacacatgttctcaggacctcctgagggtcattcatatttagcttagaataaatctcttaagatattttacagtttgattcttttccacgacaaaaataactcattttaagtgcagcatgaaataataaacgtaagaaacaactgggcaacttatatgcactgttacaatgtcagtgctttttttaaatcacttttttgtttattgagacggaggagggagctctgggatagagggtcttactttgtcgcccaggctggcctggaactccaggctcagcgatcctctcgcccctgcttcctgagtagcggggaccccagactcctgccaccccgcccgcatccctgctgtgtttaagcacactcctctgctccgcaccccagacggtggccctagggaagtctcaggagctgagcacagtgtggactctcccactccagtgaatggagaattgaaagggagaggatttctattctgttctgtggaccgtcagcatgaaattgtacctttcgctcaggcaaggctttgcatttcgcattctagtttgcattcctgccgtagacaacttccaggctttggaattaaattgctaaaataaatttcaatagcaaggaactttcccggatccaattaccgccacacggcgacttctcagggaggtactatttccctgactgctgagctgctccagcctcactggcgggtttcacctctaaaaccttgaaaacagaggcgcggagagcgagatggagaaaagctcaggccccgcccctttcccgcccccgcggactcctcccagcccaagactcttctcttccgcgccgggccccttgtcctttgcaccccgccccggcctcgcccaggccccgcccacctctcggggatctggcccaggtcccgcttctgtcctgcgccgattggcacagacccggaagcggatggcgtggactgaaagttgcacggcggcgtgtgcgtttcctagttgtctggtgctgctatataggggacgtggggtccccacagacctgcaggttccggcccctcttttctcaacccagagcaaattgaaacgtccgggtgagagtccgtgagtcgcttccttttgagtttaaagttgccctgaggctggtcc

SEQ ID NO: 22441 - DNA, 2300 bp, Homo sapien
atttccgtgttttgaaggtaggaaacacgatagcttgctgttttccttttttttttttttttttttttgagacggagtctcgctctgtcgcccaggctggagtgcagtggcgcaatctcggctctctgcaagctccgcctcccgggttcacgccattctcctgcctcagcctcccgagtagctgggattacaggcgcccgccgccacgcttggctaatttttttgtatttttagtagagacggggtttcaccatgttagccagaatggtctcgatctcctgacctagtgatccacccgcctcggcctcccaaagtgttgggattacaggcgtgagccaccgcgcccggccgaaaaatctttccaatgtagtgagagtggcaaagcctttaattgtagctcactcttaaggaaacatccgataatccatttgggagagggagagaaacaatatgaaagtgatgtatgtggcaaagtcttttattatcgtggtggagatgatatctcatttaggggaagattttttttgttttcaattatattttctcaacatttaaaaagtgaagtaaagagtatttcttggccaggcgcggtggctcacgcctgtaatcccagcactttgggaggccgagtggggcagattacgaggtcaggagttcaagaacagcctggccaacatagtgaaacctggtctctactttttagtagacaaaaaattagccaggcatggtggcaggcgcctgtattcctagctactcgggaggctgaggcaggagaatcgcttgaacccgggaggcgtaagttgcagcaagccaagaacgcgccactgcacagcagctggggtgacaatacgagactccgtctcaaaaaagaaagaaagaaaaagggtatttcttgggacaggcacggtaactcacgcctgtaaactcagtactttgggaggctgaggcaggcagataacttaaagtcaggagttcgagaccagcctggccaacactgttaaacctcgtctctaccaaaaaatacaaaacttagccgggcatgggggcgcacgcctgtaatgccagctattctggaggttgaggcaggagaatcgcttcaacccaggaggcagagtgtgcagtgagctgagatctcgccactgcactgcagcctgggcgacagacaaatactctgtctcaaaaaaaataaataaataaataaaaaagaaaaagaaaagaaaaaagtaagtgaaaaaagaaagtaatagagctcttccacaaatgtgctgggacaagtaactggatatccacatggaaaaaaataatgttggatccctgtctcacaccataaaaaattttatttacgaaagtttaaaaacaaaacaaaacaaaaaacagagagagagtgacgaggaagggagtcctgcgggagggggtgttactttatcgcccaggctggcctggagccccaggctcagcgatcctcccgccgctgcttcctgagtagctgggaactcaggatcccaccccgcgccctcccacgcccccttgtgcgcccgcatctctgctgtgtttaaccagcaggtggtgacctcactcctccctggcctgagcactccatcccgcatcccaggcggtggctctagggaagtctctgaagctgacacagggtggactctccctcttgagtgagtggagaatagaaagggagaggatttctattctgttctgtggtcgtcagcatgaaataatacgttccgcccaggcagggctttgcatttcacattctggtttgcattccccttccagacagttccagggcttttgaatcatgcctcagctttcctggcaggtctcgtctccaaaacccaaaaacacgccgaggctgagagactcacagatcccgccccgccctctgccggttctataggggaaggtctctccgcctcgcgccccgccccctgccggttctataggggaaggtctctccgcctcgcgccccgccccctgccggttctataggggaaggtctctccgcctcgcgccccgcccccacctcgcccaggccccgcccaccccctgccatgtcccgccgagacctggcttctgtcccgagcgcccagtttagcgtaaaccgggaagcggatcgcgtggagtgaaagtcaccgcagcggtgagttttgctctgtgttgtgttatgtctgcgctccgcaggtccctgggacttctgtcccaggggacgtggggtccccacatacctggaaatttctaccattcttccttcgcccagagcaaattttttttttttttttttttttttt

SEQ ID NO: 22442 - DNA, 2300 bp, Homo sapien
ttgtcacactaacttaaaagacagggtgagggagatatgtaaattgtccactagaaaattaaataaaagaactaaatgtgggaaaaaaaaaaagaaagaaagaaaatacaagcacttaggtcgggtgcagtggcttacgcctgtaatcccagcactttgggaggctaaggcgggtggatcacctgaggtggggagtttgagaccagcctgaccaacatggagaaaccccatctctactaaaaatacaaaattagccaagcacagtggtgcatgcctgtaatcccagttactcgggaggttgaggcagaagaatcgcttgaacccaggaggtggaggttgcagtgagccgagatggcgccactgcatgccagcttgggcaacgaaagcggaaaaaagaggccgggcatggtggctcacacctttgggagcactttgggaggctgaggtgggtaaatcacctgaggtccggagtttgagaccagcctggccaacatggtgaaacccatctctactaaaaattaaaaaaaaaattatctgggcatgctggcgggcgcccataatcccagctacttgggaggctaaggcaggagaatcccttgaacctgggaggcagaggttacggtgtgccgagattgcaccactacactccagcctgggtgacagagtgagactccctccccaccgcccccccaaaaaaaaagaaaaaagaaaagaaaatactagcactaatttatatgtcagattcatgtcacatctcaaattcatctaaattttcttgacatccctttttataccagtggagccctgatgaagacacttaatagaagttttctctctatcagagaaataagttgatgagaataaactcaacgaaggtgaaaattctgtttttttctgtgacctgggggaaaaagcttaaggtgaatttacattcagattggttatacagagagaacatacagaagtggatgaactcggtgtaattaagtttttctatccacaaaccaggtgaaagtattgcaggaggcagatagcgaggcatgagcaggtaaggagattctgtgtcacccgcaaggggtcctgatccagaacctaagagagggttcttggatctcacgcaaggaagaattcaaggtgaatccatacagtaaagtgaaagcaagtttattaagagagtaaaggaataaagtatggctactccatagtcagagcagcctcctgtttcatcctatgactaagaatgccttcacttactgggaatgtaacccagcaggtctcaggcttattttctccagcccctattccagatggaattgctctggttcaaatgtctctgacactttggaaaggaatatttagaaatgcaactcactggccaggcacagtggctcatgcctgtaatcccagcactttgggaggccgagacaggtggatcacgaggtcaggagatcaagaccatcctggctaacacagtgaaactccatctctactaaaaatacaaaaacttagctggcctggtggtgggcgcatgtagtcccagctactcaggaggctgaggcaggagaatggcgtgaacccgggaggcggagcttgcaatgagccgagatcgggccactgcactccagcctgggtgacagagcgagactctgtctcaaaaaaaaaaaaaaaagaaaagaaaaaagaaaaaagaaatgcaactcactgagagtctccttaaagatgctgcccactgacagcaagaaaagatcagtggctacattgcctccacctggccttgtggctgcactcctctggcccagaaggggacttatcaggggctagctggacataatcgagatgggggattttccccattaacaaccatgtgtacttctgcaataacccaccctagaagagccttctgctcaaaatgatactgaaacacacatccctggctggagatttgagatgctaatgagatatgtgacgtgtgtaccagcacggaccgtcacagggctttcctgatcagaggacttcctggaacgtgcttactaggaacatccctgcacagccccttcatgaataatcatgtcagattctcacaaaaaggctctgcccaacactagtagggacaggctcattcttttgaggagcccaccctgctccactgttcagggtatctcttctttccgagctcctacgcctttagataaagggcacttacctgcttaactctttctgcgtgtctcttgactgaattcaaggagaccaagaaccagaggacttccacgcccctcctggtaacatctggtgttttcccc

SEQ ID NO: 22443 - DNA, 2300 bp, Homo sapien
cgctgccctgcttttttttttttttttttttttttttgagtcaaagtttcactcttagtacccaggctggagtgcaacggcgtgatctcagctcatcgcaatctctccctcccaagttcaagcgattctcctgcctcagcctcctgagtagctgggattacaggcaggtgccaccaaaaaaagaccaaaaaaaatttttttttttttttggtatttttagtagagatggggtttctccatgctggtcagactggtcttgaactcccaacctcaggtaatccgcctgcctcggcctcccaaagtgctgggattacaggcatgagccaccgtgcccagccaaatttttttttttgttcaatgttgcccaggttggcctcaaacgcgtagccttgcctccttgtgacccaggacaaccggccagagccaatgcagctccctgtcctgcttagttgagccagttcagcattgggaagcttacccagggaaagactgatggatgtatttcactcaattgccagcctgtagaggctataaatgccttctggtgtttgtggacacctttattgggtgggttaaagcctttcctacaagaacagaaaaggcccaggaagtagccaaggtacttcttaaaaaaaaaaaaaaaatcatcccggccgggcgtggtggctcacttctgtaatctcagcactttgggaggccgaggcaggcggatcacgaggtcagagaattgagaccatcctggctaacacagtgaaatcctgtctctactaaaaaagagaaaaaattaggtgggtgtggtagcgggcgcctatagtcccagctactcaggaggctgaggcagaagaatggtgtgaacccgggaggtggagcttgtggtgagctgagattgtgccactgcactccagcctggacaacagagcgagactccgtctcaaaaacaaaaagaaaaaaaaaatcacccctcagtgtgggtttagtttgtgtttacaaagtgacaacggcccagtttttatttcacgcaccctttaattagtgacaaaagccctagaaataaagtactcctagcactcctggagaacacattcctctggcaaggtagaaagcactaatcaaactattaaaaggaccctgaacaaagtgtgccaggaaacctcctcaccatggttagaactcctgtccgtagcactgttctgagcatgacccctaatattacttatgccttcctacatgcagacctaatgttagatccagaagttacccaattaatcaaatacataacatcactggcccaatttcaacaagccatccaggagtttgagcaaaaggtactgcctgccactgacccctccagtaatcaacccttatactagccagggtcacaagtcctcatcaaaacctggagagatgggtcacccaggtctcaactagcctgggtctctcctttatggaaaggcccctttattactttctaccccgacagctatcaaagtttctggaatctctagttggatacatcactcctgagtaaaactgtgagaaggtcccgaagaaccaacaacagaatcagcatctgagtagtctcatgagccagccactggagagcttccaattcctcttcaagtgaaaagataagtaaagccttctctcctttcacctcaaaaaaaggtctctcagtacggggaatcttggttgcggtggcatcggttcttctccttattttgacccacactggcatgccacctgaagtcccgataacagcctgatttctcactaaacactccatcgaaccatttcattatttgtctctcctattttcagcactttccttttgctttcacaaagcttaagggagaatcagctatgacagagaaattccttttcctttatctttccctccttcccatgcccctactctcacaggcacagtggaatgaaaattcccttgtcagtttttccaaaataattgcttcgggaaaccatctaagcaactgttggatctgccacaacttcatcaccaggtcctcatcttaccaatatattttggtaagaaatttttctttaaacctaacatttggttcaggaatccctgaaggccaacataaatctgttccgctccaggtttcgcttgctaactcagcgcaccaagtcccctgcctggatctcactccacctttcaatcaaagctctaaaacttctttctatttctacaactgctcttctctaaaccaaacctgttgtccatgccctgaaggacactgtgacaggaagaacacctctgaggagggattccccagtcccac

SEQ ID NO: 22444 - DNA, 2300 bp, Homo sapien
ctgggctcaagcaatcttcctgagtagctgggactacaggtgtgtgccaccatgcccagctaatttttaaaaattttctgtagagatgggagtcttgctatgttgcccaaactggtcttgaattccatgatgagccaggctcacatttgtaatcccaacactttgggagatcagggcgggaggatcagttgaggctagaagttcaagacttgcctgggcaacatagtgagaatccgcctttgcaaaaagtaaaaaaattagtggagtgtggcggtgcaaacccgtagtcccagccacttgggagactgaggtaggaggatcacttgattccagagttgaaggctgcagtgagctatggtcttgacactgcactctagcctgggcaacagagcaagatgctctctcaaaaaataaatagaccgggcacggtggctcacgcctgtgatcccagcactttgggaggccaaggtgtgggggatccctcgagctcaggagttcgagtctagcctgagcaacatggcgaaaccccgtctctacaaaaagtacaaaaattaactaggcatggtgacgtgtgcttgtagtcccagctactggggagattgaggtgggaggattgcctgagcctggtagatgaaaagttgcagtgagcagagatgacgccactgcactccagcctgggtgacagagcaagactctctccaagaaatatgtaacatttttaacataacataacataacataacaaactttccctgaataactgtagtcatgccaagtgctcatccacagcctcataacttgtgcttgtgctttctagccttgtttactcctccatatatgaaaaaaagaaaaaaaagctttttagtttgtgtctcttggacattttcagatcttgtgattggaacattctctctattgcaatagtccttttgaataaaatcttccttctctaagtctgaatttgtcatttacagtggtaaatatcttaattgttctgagataaattatgtatattatctttttgtggcaaaggacttaatatatattcagtaggtgaaagtagttcctggggccaggtatggtggctcacgcctgtaatcccagcactttgggaggctgaggcgggtggatcacttgaggtcaggaattcgagaccagcctaggcaacatggtgaaacttcatctccgctaaagaacgtggtggcgggcgcctgtaatcctagctactcgggaggctgaggcaggagcattgcttgaacccgggaggccgaggttgcagtgagcagagatcatgccactgcaccccagcctggacgacagagcgtgactccggctcaaaaaaaaaaaaaaaaagtataggcgtttgaggttgtcatctcgcacggaatagaatagtaagtataaaaaaggacaatgcaatttatatctattttttaaaagttactgctaatttcagggcttttaaattacttaattttaatcgcagaaacttttccagcatgccatcaccgctccgtgtcaacccatgttcccagactcctgggctgcttcagcgtcaataacattactgggtaaacgcgctagcaaaaaatgctttcaacataaaccgcctccattctaagaggaaagcagtttggtttccaaaataacctacacaactgtgcttttaacttgaaaccgtttgaaacatctacgccgttccacaagacactacagatggctctgggcgctgggctgtgggcatcacacgaaatcgcagaccctaacgtgtcccgtccagccccgcctctcccccgggtcccttcctggcggtccctctgcctccctcccccgcggtcccttcgccttcctcccccgcggtcccttcccgcggttcctccccgcccttccccggcggctcctccccggcccgcccccgggtccctccacttggtcactccccacccctccccggtggctcctccccgttccttccctggggtccctgcctggcggcccctgcttcagcccggctctctcaacgccccgcccttttccggttccgcccatctcggaccccgccccgggccgctcggtcgctttccttcgcgcagttgcccacagacccggaagtggatcgtgcggagcaagcatcacaccatggcgtatgagtgttcctctgtgtagactcaacctgcgcctcgccgtcccccattcgcacacccgatgcccgggggtcgctacggacttaaaatctccgcaccgcaccctccacctcaggtaaataggccttgctgtgtgggcccggagacgcttccttt

SEQ ID NO: 22445 - DNA, 2300 bp, Homo sapien
ttcatatatcattgtgattgtggtaactttgtattaaatctatatttttatagatcaattaagtctatattttatagatcactattgcgtatgcatcttacctaaatgaatgacagagacactcattaccacataatcctgtaagaacgattatccaatctttcgaaggaggcatccagtacctgaggtgttagttctagtggtggccaggcgctgtagctcacccctgtaatcccagcactttgggaggccaaggggggtggatctcctgaggtcaggaattggagaccagcctggccaacatggtgaaaacccatctctactaaaaatacaaaaaatagctgggtgtggtggcgcgtgcgtgtggttgaagctactcaagaggctgaggcaggagaatcgcttgagcctgggaggtagaggttacagtaagctgagatcacaccaccgcactccagcctgggtgacagaacaagactctgtctcaaaaaaaaaaaaaaatcactaataatgacaaagtgcatatttcttgagctgagaatatttttgtatctgtgtttccattgttcgtttccaaaaacaattacaggttgctaatacacatcaactggactgttcagtagaagctcctgtgtttctcatgatctctgacagcatccaggggttcacatggagaaagcagaatatgctgaggtctgagatttgatggatggtgatgttggaaatctttttatgtgcccatttatctcagtatatctgcttcagtgaaatgtctcttcatagttctatccattttctaatttgattattttgctttttttttaagtcgttctaggattctttatacattccacataccagttttatgtcagatatatggtaggcaaatattttctattattcagtactgtattagtccattttcacactgcctaaaccctcctgtgacaacctgagactgggtaatttataaacaaaagaggtttaattgactcacagttccgcatggctagggagccctcaggaaacttacaatcatagaggaaggcaaaggcgaagcaaggcacgtcttgcttgcagcaggagagagagcgatcaaaggaggaactatcacagatttttaaaccatgagatctcctgagagctcactatcatgagaacggcttggggaaaaccacccccatgatccagtcacctcccaccaggtccctccctcaacacctgaggtttatacttgaaaatgagatttgatggggacactgagccaaaccatatcaaataccttttctttcatcgtctgaaggtctttcacagaccaaaagtttttaatttggtaaataccagttgattttttttttctttaatgaatcatgcttttgctgctatggctaagaatttttgaacaagctcttgattcttacgattttattgtgagtaattttttctttcagtctcctacaggataccattttatggtttgatattttacatttaggctatggtcaatgttgaactaatgtctgtacggttgtgaagtttgagtagagatgacttctttcctgctgtggatattaagttagcccctcaccagtttttaaaaattcttcattcaattcccttggtaactttgtcaaaaatcagttggaagtacctgtagaggctatttttgtactctcttactgtattgcatcaatccatatgtcttttattgccccaaaaccacacagtttttattacctttcctatattggtagtcttgaaatccagtggagtgattccagacacttcatttttgttttttggtaacttttatggatccaatcactgctagttttggattccccaccgaaatcccagttcccggactgctaagctgcaggagactccctagcaggatcgggtccaacctgcaggcaaaatagttttaacataaaccgttttcaacttggtaagtggaaaacattttggtttccaccataagtggcccacacaactctgatttttttaccttaaagcggcgcagaccccgcccactccagccattccttcaggctgcccgggctcttctctccgcgcatgcgcagtttcctacaggcccggaaacggatcgcgttgggtgaaggtgacggcgtcgagcgtgagtgaccctctgtgtagattaaacctgcgctccctgtttcccatttccacagccgatgtccagggtcgatacggcccttaaaatccccgtacactccaccccaggtgaatacaggcctcgcagtgtgggtccggagtcgcttccctttgggttgaagtcg

SEQ ID NO: 22446 - DNA, 2300 bp, Homo sapien
aaatagaaaacctgaagacactaataacaaaattgaagctgaaaaaaaaaaaatttcatgtagaagaaaagcccaggattgaatggattcactgctgaattataccaaacacttgaagaagaactaatactggctaggcatgttagctcacgcctgtaatcccaacagtttgggaggctaagatgggaggactgcttgatgccagaagtttgagagcagcctgggaaacacagcaagacctcggctctactaaaaaataaaaaaggatttggccaggcacggtggctcacgcctgtaatcccagcactttgggtggttgaggcaggtggatcacctgaggtaaggagttcaagaccagcctggccaacatggtgaaaccccaactctactaaaaatacaaaaatcagccaagtgtggtggcacacgcctgtaatcccagctacttgggaggcagaggcaggagaatcatttgaacctgggaggcagaggttgcagtgagccaagattacgccactgcattccagcctggacaagagaacgagactgcatctcaaaaacaaacaaacaaacaaacaaaaaaacacaattagttgggcgtggtagtgtgtgcctgtaaccccagctactggggaggatgtggagggagggtcagttgagcccaagagtctgagtttgcagtaagctatgattgtgccactgaactccagtctgggtgagatagagagagagagactatctcaaataataataataataataataaagaaagaaaagaaaaaataaagaatactaattctactcaaaccatttcaaaaattgaaggcagcacatatttccaaactcattttatcagaccagcattaccctgataccaaaaagcagacaaggacaccacaacaaaaagaaaactataggccactacccctgatgaatatacatgcaaaaatccttgacaaaatagaattcaacaacacattaaaaagacattcaccatgatcaagtgggatctattccaggaatgcaaggatagtttaatacacacaaatcaattaatgtgattcatcacatcaacagaatcaaagacaagaagcatattatcatttcaatagatgctgggaaatgactcaataaaatcattatctcttcctaataaaaagtctcaacaacttgggtacagaaaaaacatacctaagcatgataaaagccatatatgacaaatccagcaggaatgtactaaataagaaaaaactgaaagcctttctgctaagatctgaaagacaaggatgtccactttcactacttctattcaacatagcattgatgttctagccaaagcaattaggcaagagaaagaaataaaaagcatacagattgaaaaggaagaagtcaaaatatacttctttgcagatgacatgattttatatttagaaaaacctaacaactccactaaaacactcttaaaatttagctaactatatagaatttggatctgtaagactgagaactgggcatcagatagaatcaactacagaaggaaacaccaaaggagatgaaataacccttttgtaacagccctccctgtgccacacggagtcaaggaaccagagttctcagaagctagaaaacagtgttgtccatcatgataaagactttgcctttgtctgagctgcagcaccactggaaggtgaaaggataaactagtacaagtctaaaggatagacaaaagggggcaaataaagatttctgttctgaggtcacagaattcaaacttgttttcccacagaactctcagatttgcatagagtttcccaaacactatttaataaacggcattttctctacccatctgaactcttacctgtgatcacagctttgatccattcccatccatctgggtttcctgctatttgtacttggctctccaaagtgaaaggctccttcccttgctccaacatagagataatactgaggtcaaaacaagagattcctgcttatgaaaagaaaggaaaacaatgggctgtagattttccagagtcccagtcctatgtttacatgaggagggaggactttacagctgtatctaaaaaaacacttcaaaaattcatccactaaatgcttctttataaattgttaggaaacactataatatgcaaatatatagctctcatcccaaaaccactgaatcaaagcatggggatagaaaacagggaattggatattttaaaagtcctgaaaccctccagtgacatcaggaagaggaaaattaaaatccagtttccacattatggagattttcattt

SEQ ID NO: 22447 - DNA, 2300 bp, Homo sapien
ctagtacactgaattatttactctggaaagttctgaattcttggtttgggaagaccccagttttcttttttgtttgtttgttttgttttgttttttgagacggaggcttgctctgtcaccggggctggaatgcagtggcgtgatctcggctcactgcaacctccacctcccaggttcaagtgattctcctgcctcagcctcccaagtagctgggactacaggcatgtgccaccacgcctggctaatttttgtatttttagtagagacagtttcaccatgttggccaggctggtctcgaactcctgacctcaagtgatccacccgcctctgcctcccaaagtgctgggattacaggtgtgagccaccacgccctgccctagttttcttgatagtaatattctacatttattcttccgctgtacccataggactcattaaaaataacacaactgttgaaaatgtttttgaaatcctgtttagttataatgcctaagatgtttttatactaactcagtgaaaatctgtggaaaagtttcttacataataaatatgattaagcagttttactggaagggcatttctccaaaggctatggaaatgttattttcagtttatggtattgagcaatatatttcatggtttatgttcaattgtagtaaaattactttttattttttaatatgattttcccttttatttttttctttcatatattgtaacccagatgaaacgtttaatattttgttaaagtgaaaactatacggtgtatataaataagggtgttgtttggagataaaattgtgtgacatgaaaatgtacataagacaatagcaggtataaactaggttctctataaacatgaaaaaagggtatccctgtgagtctttagttcagtcaatgtactgggatggtacgttagaaatactggaaaactattctttaggcgaaaataaatccaattgtcatgtggtgactattttccacactctgttatccacatctgatagaacattaagaaacagaaaacaaaaaaatagacccaatatagattacaattttaaaataaaaagtactgtgtcaagttcccttcagaatgcccataaagtgaatttgaaattacatgatatttagaaattattgatttaagcatattttgatgcaaagaaagattatgtcaaagttgtttgtggttaagtcatttcaagtgtggaacggaataacgaatataagcaaaaataatgcagtttatctctattttttaaaaattcacatggtttaaatcagtagttgactgggcacagtagttcactcctgtaatcccagcaattttggaggcccaggcaggaggattgcttgaggtcaagagttggagaccagcctgggccgagactcccatctttacaaaaatatatgttttaaagaacaataaagcagcccttggtgatctaacttatcggccttaaccttcccatgaattgagcacaggcttgactcttccactggggagaatggggatttgaaatgtaaaggaggttctgttgggctactgcattaaattgcatatccgtccaggtaggatgctgcatttcccattctactttgaatcatcctcagagataatttccagacattttagttaaattaaatacattttaattgcaggaattgctggatccaatcgccgtgcctcgtggatcctccactaagatcccagttcccagaccgagatccccgattcccagatccccgttcctgagctgcagcagactccctagcaggactgggtccaacccgccggcaaacaattttaacataaaccgttttcaacttggtaagaggaaatcattttggtttctatcataagtggtccacgtaagtctattctttcaccttaaaactgcttcaaattggaacggtgctcccggggacatagtgaacactccagcgtttctaaaccgggaaaaatgagactgcgggctaggcaggctgagggaagcgcagaccccgccccagctccgccccagcgtttcgtccgcagaccccgcctctccccaggccccgcccccagagtgcccgggctcttttccgcgcacgcgcagttttctgcagttccggaagcggatcgtgttgggtgcgggtgacgccgccgagcgtgagtgtccctcagtatggattaaacttgcgaaccgccgtgccccgtttccgcagccagttcccgggctcgctacagacctttttttttttctttttttttttttttggtgagacggagatttactcttgttgtccaggctggagtg

SEQ ID NO: 22448 - DNA, 2300 bp, Homo sapien
tgtctgcctgcgttactgcagactctcgtttatgttgcttgcctttgttctcaatggtttccctgacctggcatcctgtcacttttgatggtacttctgttacttaactgattctttaggtttaattgtaattgttgaggggttttttgtttttgttttgtctttattttgttgagatggggtttcactatattgcccaggctggtcttgaactcctgggctcaagcacccctcctgcctcaggctctcaaagtgctgggattacaggtgtgagccactgctctcagcctaactgtaattcttagatgcctgggttcggggcttgctctgtcatttctagctcttggaccttaggccagtttcttagcgtatctgtgacagtttctttctttttcttttttttgagacggagtcttgctctcgcccaggctggagtgcaggggcgccatctcggctcactgcaagctccgcctcccgggttcacgccattctcctgcctcagcctcccgagtagagtagctgggactacaggcgcccgccaccacgcccggctaatttttttgtattatcattagagacggggtttcaccgtgttagccaggatggtctcctggtgaccatcgtgatccgcccggctcgtgatccggtcctgacctcgtgatccgcccagctcggcctcccaaagtgctgggattacaggcgtgagccacagcgcccggccgacacagttgtttcctagtaagataggaaaagatctttttctcatgggctattatgttgttatttgagttaatacaggtaaagtattccgaataatgccttgcacatagtgttcagaaaagtcagtcattgctattgccattatcatcacagtttttacttctggccagtgtttctgtaaagccactgtggaccttgtcacctcagaagacatcattcgtgctttagcttatctagatacggagtatcacttagtgtgttgaaaataatatctaacacttctatagagatcagcttgtgtttgggtttttatttgtctatttattgtattgtccacaaaactgaaaactccacacagatttagaggctattataactacttagggaaaagtacaataaaacagaattagggagacataacttgctcaaaaatgccttcacgctggggcggtggctcagtgagccgagatcatgccattgcattccagcctgggcgacaagagcaagactcttgtctaaaaaaaaaaaaaaaaaaaaaaaaacaacaacaaacctcacatattcgtatttaagaatataggaaacactgattcagtttcttctactgttctctcacaacacagaatgctacagttagcccagaggtactgggttttcccacacacaccaagcaagcaatcctgccacagacaccaggtgcgtgttctctcattccgttccattttgccgggacatggcatcagatcccacacgttgagggctcagtcccacaatagtgcacacatttcaatgccagtctcaagcagaggttgtgacttgtgcttacagatcagatataaatccaggagtcccttgaccccctcctcaggttcaacgaatttgctagagtggctcacaaaatacagggaaacactttacatagatttacgtattataaaggatattacaaagttgacagaagaacagccagatggaagggatcagtgaggtgaggcatgggagaaggggcgttgagccttggtgccctccctgggtgcaccacgctgcaggagcctcccagtgttcacctatccagaagctccgctgaatcctctccttttgggttgttatggcgccttcattacatatgcatgattgcttatattactggccattggttaaacttttagatagcctaagttttgtttttttttttttttgggagagacgaagtctcactctgtcacccaggctggagtgcaatggcgcgatatcggctcattgcaacctccgcctccagggttcaggccccgccccggccccgcccaccctatgctctcagtccctcccaacgcctggcctttccccaccgcaacccgcccctttgcctactgcgcgggcagtttcttgcaaacccggaagcagatctcttggagtgaaggctgttagtcgccgcgtgagtttccctctatctagattaaacctgcgtttcggagtcccctgctcctccgtacccgatgtccgggggttcgtatagcccttaaagtccccgcacggctccctccattccatgtaaattcagactttgccgcgagactctg

SEQ ID NO: 22449 - DNA, 2300 bp, Homo sapien
ggattacaggcgtgagccactgcacccggccgatatatttttcaatatgaactactgatttgccaactgtagttaatagaaaacctgttttttaaatatcttgtagatgtctctcctacacatatgatcaaggaattaccaccaaaagagaacaatagcacaggaaaagtattccaagcagtgatgttggaaagacatgaaatccatgacatccaagatttttacttcagagaaatgcagcaaaatattcatgactttgagtgtcagtgtcacaatgatgagagaaattacagagaaatacctgcaattaaaattaaaaacatcactggaagaagagatcaaggtgatggaaggaatgcaggaaataagccagttgaaaatcagcttgaactaagcttttggttgcatctggctgaactgcagggatttcaaattgaaaggaaaatttatgaatgtaatcaaattgagaagtctgtcacccgtgggtcctcagtttcattacttcaaacaaatcttccttgtgtcaacaccagcatttctaatatatacaggaatgattttatgcatccttcattactcacacaagaccagaaagcatacattagggaaaaaccttacaaatgtagtgattgtggcaaggcctttaatcagaggtccaaccttactacacatcagagaatccatactggacagaaaccacataaatgtgacatatgtggcaaaggtttcaggcgaattgcaaacctagcaagtcatcatagaattcatactggagagaaaccttacagatgtaatgagtgtggcaagaccttcaatcagacgttcaaccttactacacatcagagaatccatactggacagaaaccatataaatgtgatagatgtggcaaaggtttcaggcaaattggaaacctagcaagtcatcatagaattcatactggagagaaaccttacagatgtaacgagtgtggcaagacctttaacaggatgttccaccttactagacatcagagaatccatactggacagaaaccatataaatgtgatatatgtggcaaaggtttcaggcaaattgcaaacctagcaagtcatcatagaattcatactggagagaaaccttacaaatgtagtgattgtggcaagacctttaattacaggtcccaccttacaagacatcagagaatccatactggacagaaaccgtataaatgtgatacatgtggcaaagatttcagtcaaaattcataccttgaaaatcatcagagaattcacactagagagaaatcttacagatgtaatgagtgtggcaagacctttaataagatgaccaaccttactacacatcagagaatccatactggacagaaaacatataaatgtgatatatgtggcaaaggtttcaggcaaattggaaacctagcaagtcatcatagaattcatactggagagaaaccttacagatgtaatgagtgtggcaagaccttcaataggatgttccaccttactagacatcagagaatccatactggacagaaaccatataaatgtgatatatgtggcaaaagtttcagtcaaaattcataccttgaaaatcatcagagaattcacactggagagaaaacttacaagttgtaattagtgtggcaaagcctttagcgtgcgctcaaacctaactaaacatcaggtcatccataatggagagagaccttataaatgtaatgagtgggacaaggcttttttttcagagttcaaaattgtaaaacatcacaggattcattctggagagaaacaaaacaaaagtaatgaatgtagtaaggcatttattcaaaattcaagtctggtggaccatcagagaactcacactggagagaaaccttacaagtgtaatgagtgtggtaaaacctttattgggcattcaagcctaactaaccatcaggtaattcatactggagagaaaccttacaaatgtaatgagtgtggaaaggcttatgtgaagtggtcccaccttagacatcatgagagtattcaaactggagagaagccatacaaatgtaccaaatgcagcaaggcctttagacaatgggcggacatcaggattcaccaaaaaatctatgctggagagaaacctcacaagtatgatgagtgtggaaaaacctttacccaggcctctcacctcactatacatcagattatccatactggagagaaaccatatgaatatgacatatatggcaaagtcttcagtcaaaattcacatttcaaaagttatcataggatttgtactgaagagaagccttaca

SEQ ID NO: 22450 - DNA, 2300 bp, Homo sapien
atatcaatataacttatgagtgaatattcataggtcttgataagttataataggcactaaataatttcatatgacccaatgtatttaatgtgagtagatgttaagataccagcagaaacactcatttcactgtctgcaaagactaaaaatactacggcacccatcacggaaattaatgtacaacattaggtagagtgtgcactaaaatatgagacatgaaacataaaaggtgataaagcattttaggctagaaaacgaatcattttaaagattatgtaactatatatttattattttaaaacaactaactgaaacttgaattaatatttgatttgggaaacctatgaaaatataataattctgcaaaatggaatttgaaagtatggaatcttgtgcatttaatacattgaaaagagaaagaggctgggcgctgtggctcacacctgtaatcccagcactttgggaggccaagatgggtgggtcacaaggtcaaaagatcgagacatcgtagctaatacggtgaaaccccgtctgtacgggtgagactccgtctcaaaaaaaaaaaatttaaatacatatatgtatttttatatgtaaaataaatagaatttttatatgtgtatgtttatatgtaaataacatatatgtatttttatgctaaaatgcactctcatttttttttcacccttcacctgttatcagatgtaattcccagttacgaaaacagagacccaaagagacagtggatagaccttggtttactcagatacccccatatgggctcatcttctcttggggagcctccagtcaataagtttcctctctgggcccaagagaaatcaattcagttggccaggagaattgccaagcacatattatgttaaaaatactcttccaaataactgagaataaagactttacagactaaaggccaggagcggtggctcacgcctataaccccagcacttcatgaggcccaggtgggcggatcacatgagctcaggggtcccagaccaacctggctaacgtggtgaaaccccgtctctactaaaaatgcaaaaattagccaggcatggtggcacacgcctgtagtcccaggtactcgggaggctgaggcaggaaaatcgcttgacccaggaggcgtaggttgccgtgagccgagatcgcgccattacaatccagcctgggaaacagagactccatctcaaaataataataaaaataataataacgatagtatattagtaattaataacttagacaaaacacaacataccaactccaataaatccagcacttggatttgtaatttatctcaagaaatgtgcattaggataataaaggaaaataaatttagatcgatacaagcagaactttgcgttcttttaaagccaagcctcagccttccaccccccaccgcccagggtctgaccccataaattctctggaactcagcccatggtgcatctctgcctcctgggtgactggggagcggaaataaaaattacgttccagtgaaagtcaatataaaattgtacactccgcacaggcacaaaaatgcatctcattccagtttccatcacctacgcagacaactccagctttcgcttaattaaatacaaattttaatcgtccggatttcagaagttcctggatccaagagcttccttataccgtcgccctctcccatccaccaggtcccagcgctcctcccgcctcgtcgcaggacgcgcctccatcgctcgcagaaacgttttcaagcaaacctttcccatcttaagctccgattccaatataaggggcccacaggtctctaattttttacttagctaggctccaaaggacaccatagagattcaagggaatccaaaagtgaagaatcgagtactgctgggcgacaaacaggcctaaaaaagtcgctgggacgcgccgaggagaggtccggcagtccgacccctaggccccgcccatcccgccattgtccccgcccatcccgccattgtccccgcccatccccgccatttgcccgcccatccccacagttgtccgcgccctgcccctgcccttgccccttgcgccgccccagtgcactcgcgtacgcgcaggttcctgccgacccggaagcggatctcgcggggctactggcgctctcgggtgagtctccgtctttcgggttcaagcctgcgcctcgcgggccacaggttcccacgctccgctgtcgggttttggggtcgccctgtaggttaaaaccccgaacctgctcattcctctcgcggcgtggccctaagacgttcccagtc

SEQ ID NO: 22451 - DNA, 2300 bp, Homo sapien
aaggctgttttttacacaaaatctttagagagtctggagcagaagctgataaaagacgtaggaaacataaggaatgcatggggaaaatatctctaaacacagtggacttctccctttagaatatgaaaataggccggatgcagtggctcatgcctgtaatcccaggactttgggaagccaaggcaggtggatcacctgaggtcaagagttcgagaccagcctgaccaacatggaaaaaccccatctcaactgaaaatacaaaattagccaggcatggtggcgcatgcctgtaatcccagctattcaggagagtaggtgggattattttgttttattttattttatttgtaaaatgaataagcagaagaatcacttgaacctcgggggcggtgtgggggaggttgtggtgagccgagaccacaccattgcactccagtctgggcaacaagagcaaaactttgtctatatatatatatatatatatatatatatatatatatatatatatgaaaataattgatactttgagaaaaaaggcccattaaagattctggacacaaagctttgttttgtagtgctgtgggattgctaacatgtccagtaggcaggaagaagggagagaatgaccacaaggcttcacagaaatgtgagctccagtggtgatgagagaaagagtagaaaccgtaatgaaacatgatggtttccatccagtaaaagtcatgaggcttaactgaacatagtatcaattgttagtgcaatgcaacaacttaattctgaatggatatctgatttaaattgtaaagatgactaatgaaatttttagaatagatcaaaggagaacaaaatgatttctcacacagcccgaaaagcattaatgtgaagtataaaaggagaaatgacaattcagtttataaaaaatttaagagctgatattaataaaaagataagaaagatagaacaaaaaccaaggaattacttgtttccagcatatatagtgtactcaaatcaataagaaaaagaaaggcaatacaactgaaaaaaatattatctatctatatgtatgcacacacatatatgcacacacacacacacacatatatccaaaatatataaggaactcatacaacttgataccaaaaacatgaataactcgtcctaaaatgggcaaaggacctaaatagacacatctcacaagaagaaatccaaatagtcaacagacatgaaaaagagacagcatctctaatcatcaggaaaatgtaaaataaaactgtaatgagctaccacttcacacttgataggatggctattatcaaaaagacaaagataagtgtcagtgaggatgtgggaaatccttacacattgttgatgggaatgtaaactggtatagccattgtggaaactactatggaggtatctcaaaaaacataaaaatagaactgccatttcatccaacaatcacatgtctgggtaaatatccaaaggaggcagggggcggtggttcacacctgtaatcccagcactttgggaggccgaggcgggcagatcacttgaggtcaggagttcgagaccagcctggccagcgtggagaaaccccatccctacccaaaatacaaaaattagctgggagtggtgcaggcacctgtaatcgcagctactggtgaggctgaggcaggagaattccttgaacccgggaggtggaggttgcagtgagctgagatcgtgccactgcactccagcctgggtgacagagcaagactctgcccccccaaaaatatatgtatgtataatatatatttatttaatatatatttataaaaatatattttataacatttggtataatttatataattttataatttatataattatatttatatgaaaaaatatatatttatacacacacatatatataaaatctccaaaggaatttaaaacacaatccccaaaatatatcttgaattcccatgttttttggagcattatacagaataaccaagatacggaaataacctcaatgtgcccgaacagataaatggataaagactttgtgagatacacatacaacacacacacactatatatacatatagtgccatgcaacctacacacgtgtgtgtgcgcgtgtgtataaaacacagtgcactaatactcagcctttaaaaaaaatgccacttgcaacaacgtagatggagctggacgatatcatgctaaaattatgcaaagtgaaacaagcacaaaaaagaacgagacacgggcgtggggcacgaggtgctcactgcgcaagcgcccactccacc

SEQ ID NO: 22452 - DNA, 2300 bp, Homo sapien
ttttttcttaataggaaattgtttagaattctgcaggctgtataaatgtacttattatttgcttgctgattttatgggttacgttattttactaattaatttttatgattttacataaggcttttcggtatgtggtatgcaatataactgacacagtccactcgttaatgtcacaaagtgctgcctggcactatggctcacacttataatcccaggagtttgggaggctcaggcgcctaaattgcttgagtctaaagttcgaggccagcctgtccaacatggtgaaaccccatctttactaaaaacacaaaaattggccaagcatggtgatgcatgcctttaatcccagctactcaggaggctgaggcaggagaatggcttgaacccagcaggcggaggttacagtgagacaagactgggccattgcactccagcctgttgtgatggagtgagacttcatctcaaaaatataaaaatacaaacaatttcttaaaatgtcacaacttgccttttctgcatgaatataagtaattttataacagttattcagaaaaatattgtattaactttttaatttttttttcgagatggactcttgtcacccaggctgaagtacagtggtgcaatctcagctcactgcaacctctgcctcttgggctcaagcaattcttgtgcctcagcctcctgagtagctgggactacaggcatgggccaccacgccttgcttaattttgtaatgttttcttatcttctcagtgctatgattgtttgacaatacagaatttccattgattttggttatccttacatgagcttgttgtggattatttaccaatatagtatattgtgtggtcttttagcatttatttgtatatagtaaatatgctgtaaatatgaagaatatatgcttttctcctcattgatgtgacagtgatatgttttttgcaaagtcttatacactttagggtcacagtggaaaaatactccttactttaggcttatatacatttgtgtgctgtcagtgttttgacatgatattggaaataggcttccatagaaatgatttcaagtacatgtaatcgccctttatttattgatgaatcttacccttttgcgttcctaaactttcaagataatgtttgggaagtttaaaataagtattgtttttagtgtcacatttacacatttcagtattatttaccatctatacttaagtggaaacctattggtgtttatattttctagatatctcttccaaatgcatgatgaaggagttctcatcaacagcacaaggcaatacagaagtgatccacacagggacattgcaaagacatgaacgtcatcacattggagatttttgcttccaggaaatggagaaagatattcatgattttgagtttcagtggaaagaagatgaaagaaatagccatgaagcacccatgacagaaatcaaacagttgacgggtagtacaaaccgacatgatcaaaggcatgctggaaacaagcctattaaagatcagcttggatcaagctttcattcgcatctgcctgaactccacatgtttcagaccgaagggaaaattggtaatcaagttgagaagtctatcaacagtgcttcgttggtttcaacatcccaaagaatttcttgtaggcctaaaacccacatttctaagaactatgggaataatttcctgaattcttcattactcacacaaaagcaggaagtacacatgagagaaaaatctttccaatgtaatgagagtggcaaagcctttaattatagctcagtcttaaggaaacatcagataatccatttaggagcgaaacaatataaatgtgatgtgtgtggcaaggtctttaatcaaaagcgatatcttgcatgtcatcgtagatgtcacactggcaagaaaccttacaagtgtaatgattgtggcaagaccttcagtcaggagttaacccttacatgccatcatagacttcatactggagagaaacattacaagtgcagtgagtgtggcaagaccttcagtcgaaattcagcccttgtaattcataaggcaattcatactggagagaaatcttacaagtgtaatgaatgtggcaagaccttcagtcaaacgtcataccttgtgtaccatcgtagacttcatactggagagaaaccttacaaatgtgaagaatgtgacaaagctttcagtttcaaatcaaaccttgaaagacataggaaaattcatactggagagaaaccttacaagtgtaatgaatgcagcaggacctttagtcggaagtcatcccttaca

SEQ ID NO: 22453 - DNA, 2300 bp, Homo sapien
ccggtcacttgggttaaaaccatcgcaagttccactattgtaaatttcatattaatccttgtgttcctgttctgtctgttgttagtctgcaggtgtacccagcagctccgaagagacagcgaccattgagaatgggtgatgacgacgatggtggttttgtcaaaaagaaaagggggaaatgtggggaaaagaaagagagatcagactgttactgtgtctatgtagaaaaggaagacataagaaactccattttgatctgtattaagaaaaattgttctgctttgcgatgctgttaatctgtaactttagccccaaccctgtgctcacagaaacatgtgctgtattgaatcaaggtttaatggatttagggctgtgcagggtgtgccttgttaacaatatgtttgcaggcagtatgcccggtaaaagttatcgccattctccattctctgttaaccagggacacaatgcactgcggaaagccgcagggacctctgccctagaaagcctgggtattgtccaagtttccccccactgagacagcctgagatatggcctcatgggaaaagaaagaccttatatcccccaacccgacacccgtgaagggtctgtgctgaggaggagtagtgaaagagggaggcctctttgcagtcaagataagaggaaggcttctgtctcctgctcatttctgggaatggaatgcctcggtgtaaagccgaccattcattctattctgaggtaggagaaaaccgccctgtggttggaggtgagacatgctggcagcaatactgctctgtgactctttgctacactgagatgtttgtgtgaagagaaacataaatctagcctacgtgcacatccaggcacagtacctttccttgaacttattcatgacacagattcctttgctcacgtttccctgctgaccttctcgccaccatcaccctgttgccctgccacactcccctcacaaagatagtaaaaatagtgatcaataaatactgagggaactcagagaccagcgccggtgcgggtactcgcacactgagctccggttgtctgggcccactgctgtttctctatactttgtctctgtgtcttatttcttttctcagtttctcatctccacctgatgagaaacacccgcaggtgtggaggggcaggcccccttcaggctgaggcaggggaatcacttgaacccaggaagcagaggcttgcagtgagtcgagatcccaccactgcactgcagcctggatgacagagaaatactctgtctcaaaacaaaagaaaagaaataagtaaatacataaaagaaagtaacagatctcttccacaaatgtggaatggacaactaactggatatccacatggaaaagaacaatgttggatccctatctcatacaatcaacctcttattttaaaacgtaaaaaaaaaacaacgaaaaataaagagagaaagagagaaacgaggaagggagccctgcgggagggggtgttactttgtcgcccaggctggcctggacccccaggttcagcgatcctcccgccctgcttcctgagtagatgggacctcaggctcccgcgcccgcgtccgcatccttgctgtgtttatccggcaggtggtgacctcactcctcgctggcctgagcactccgtccagcatcccaggcggtggctttagggaagtctctgcagctgagcacagggtggactctccctccggagtgaatggagaatagaaagggagaggatttctattctattctctgggccgtcagcatgacattgtaagttctgcccaagcagggctttgcatttcacattctactttgcatccgcgtttcagacaattccagggcttttgaatcatggatcggccttcctggccatctcgcctccaaaacccaaaaacagaggcggtgggagggaggctgagagacgcacagatcccgccccagcccagccccgccccgccctctgccggtactaaagggcaaggtctctccgcctctacccctacctggcccaggccccgcccacctcctcgcaggccccgcccaggcctggcttctgtccttccccgctcagacgcgcgcaaacccggaagcagatcgcgtggagtgaaggtccctcagcggcgcgtgagtttcgctccatcttgtatgaagtctgctcttcccaggtccccggcgcttctgtccctgggacgtggggtccctacagacctggaaattctcacccgtcttccttcgcccagagcaaattgagacgtccccgtgagagcccgggggtcacttcctttt

SEQ ID NO: 22454 - DNA, 2300 bp, Homo sapien
tcactgcactccagcctaggcaacagagcgagactctgtctcaaacaaacaaacaaaaaattagacaggcatggtggcgtgtgcctgtaatcccagctacttgggaggctgaggcaggagaactgcttgaatccaagaggtggaggttgcagtgagccgagatcgccccactgcactccagcctgggcgagtcttgcccttatttacaggaaaagagttctcctgtaaataactaggaagactaagcagccccagagataaggcctcctgggatcattgtccctttttatggagtgataacataaccttccttgaagtgtatgactccgtcaccaatcaacttgctgcaacctatgcactggtcttgaatggaaaatgtgttgattctcctaaaacttctctgtctttccctgtgtgtgaaaccttaacgtctctacttgggaacgttgatcccattcattaggagttgatgtttgccggtggctatcctcatgctttgtgttcagataaactctatacttaatcataaattctaaatgttattatttactgctgacatcagtttctgtcacattgtaggagcctcaccagagagggcacctgtagccatgttgtaaaactcacacttgtcaaaaagacatgggttagtgtttctccccctccctctgcatgaagctaattagctgacacagatggtcacctccattaccaactagagccaggatgaactatgtgtgaccaagggtgttgtcaagtccttttccctgaggactgattagtgtttatcttgaaaacatgtacttaatgggttgtatagaactgtgaagtgtctttctcttttttcaacctcttagctctttgcctctatttcccatcacattctggtctaaggcttacttattaataaaatggtgtttatttctttctctattatcgtcatggagatgttttgtcatttgggggaagatttttttgtttcgttttcaattgtattttcttaacaattagaaagtgaagtaaaaagtatttggccaggcgcggtggctcccgcctgtgatcccagcactttgaggaggcccaggcaggtggatcccttaaagtcaagagtttgagaccacactggccaacatggtgaaactcgtctacaaaaatacaaaaattagccgggcatggtggcacgcgcctgtaattgcagatactctggaggctgaggcaggggaatcgctgaaacccaggaggcagaggctgcagtgagccgagatcccatcacggcactctagcctgggcgacagagaaatactctgtctcaaaacaaaagaaataagtaaataaataaaggaataaatctcttccaaaaatgtgctgaggcaactaactggatatccacatggaaaagaatactgttagatccctatctcacacaatcaaactcttattttaaaacgtttaaaaaaaaaggaaaaaaaagagagagtgacgaggaagggagccctgcgggagggggtgttacattgtcgcccaggctggcctggacccccaggctcagcaatcctcccgccgctgcttcctgagtagctgggacctcagtctcccgcgcccgcgcccacatccctgctgtgtttatccagaaggtggtgacctcactcctcgctggcctgagcattccgtcccacatcccaggcggtggccctagggaagtctctgcagctgagcacagggtggactctccctcccaagtgaatggagactggaaagggagaggatttctattctgttttgtgggctgtcagcatgaaatcgtacgttccatccaggcagggctttgcattttacattccagtttgcatccccgttccagacaattccagggcttttgaatcatgcctcagccttcctggccggtctcgcctccaaaacccgaaaactgaggccctgggagccaggctgagagactcacaggtcccgccacagccccgccctctgtcggttctaaagggtaaagtctctctgccccgcccctacctcgcccaagcccgcccacctcctcgcgggtcccgcccaggcctggcttctttcctgcgcgcgcagcttcgcgcagacccggaagcggacggcgtggagtgactatcccaccgccgcgggtgagtttcgctctgttttgtattaagtctgtgcttcccaggtccctggcgcttctgtacctggggcgtggggtctccactaacctggaaattctcagccgtcttccttcacccagagcaagttgagacgaccccgtgagagtccgggggtcgcttcct

SEQ ID NO: 22455 - DNA, 2300 bp, Homo sapien
tccaaagcctccggtgcttgtgtaggctaaagggatcaggagacagacgtagagcagtagaaaacctgagacagaaaagaagaataaaaaagactcataacagatggcaaagtagaggatgggtgagggatttgccagacacagcaaatgtgggggaaaaaaaaaaaaaggaggagaaaagcaactggagaaatgtagagaaaaggtagatgtacagagagatgaaggacagagagcaaggtagggagagggacagcaaagagggaggctcatcagagtgagggagaggaggagggatttggagccagggcagacagagcagagtggtgctggtggcaaggagaacagagggagaagcacagcagggaggacacctggggatctggggtgctagagagtggggatgagggtataacagggaagagagaatgtaacagggagagcagaggaggcgcagagatggtgttgcgggaaactaagtactagagagaccggtatgcgggagacagaacgatgtttatttaaggtacgcaccggctcagtggatttacatctaaaaagctgagcatttcaacaaagacagagtggggtttttataagcaggcttacagaagcaaaataaaagcagttaatcatgtaatgattggtcacataatctatagcatagcataacttgtggccttgcatagctggtggtcttgtagctgcattgaaagaaaaacaagaacagctaaatacagactttttttttcttcactcttgttctaaagtggggttttctggagctcattcctttggcttcagctgcacaaaaagcgttatcttataactgtccttgaagtgagcttgctaggcagaggaaaacttgttcttcttttctttttaacccttgccttgcctgttagttttttggagtgaatgaatgcatattgattttttaaatttctgcctcagttttctccctttgctgctttttataaataaggttttaatagaaagcaccactattactggattcttcatgaaagagcaggttttcttctttaggcacaggctgatatttatatggagctattagctgagtggtagtctgcctagtcacaattgcttctatagttgattgaacgttcttaacaaggagaggtgaggtaagggagtattaaaccaattcttagtatttctagaaccactcctgttaaggttttgaatcgactgaaggaggaaaaccagcctctaaagagggactcgggagtctactttgtctaagtctggactggaacatgggataatttttttattcttgcagttacttctataacagccttcctattgtcattgatttctaggcagcaattagttagattaaactttctacatactcctccttcctaggctaggaggtagtcgaaagctaatctattttggtagatggcatttctcatttttgtggcttgctgggccagtaagtctaatgcatttgctgtttcattagtgatgattccaagtactgcttgcaactttatgatgcggttaagcgtgtaaacttaagtgtgcccggctcaatttttgaatttttagtagagacagggtttcaccatgttggccaggctggtctcgaactcctgagctcaagcgatcctcacacctcagcctcctaagtaactgggaccacagacacacagacgtgcacaaccatgcctggctaagtttttgtacttttggtagagatggggtttcaccacgttgcccaggctggtctcaaacctgagctcaagagatctacgcacctcggcctcccagagtgctgggatgacaggcatgagccaccgcacccagcctttgcatgaggtttggtcaggcctgggtctgtgccctaaaggggagctcatcccaccccagctccccactgctgcagcgtgtgtgtgggcttctccgggaggggagtgggagttttcctgtaggagtttattgtccctggtgtggtcggcagcataggggaccgtatgtcctcaggatgaggtctcctttgtatgtgttgttgtgttacagggaggggatatgttgattctgagcaataaacaacatatttctaacattcaggattgacttctaaagactcttggtatgtgaggaagaaacctggaagaggaagaggaaagcaaaggagtcagggatggctcttcctcaggtgagatgatattcttggtggattgttctgtctccttcttttcagaaatgctgaccttggagtttggaatcttctctgagtctgaagcatcttgcctgacaggtttgctcgc

SEQ ID NO: 22456 - DNA, 2300 bp, Homo sapien
caagaccagcctggctaacatggtgaaaccctgtctcaactaaaaatgcaaacattagccagatgtggtggtggatgcctgtaatcccagctacttgggaggctgaggcaggagaactgcttgaatctgagaggtgtaggttgcagtgagctgacatcatgcctctgcactccagcctgggtgagagagcaagactacgtccaaaaaaaaaaaaaaagagagagagaattttcctgtaaataattaaaaagactaagcagccccagagataagacctcctgggatcattgtccctttatattgagtgataaagtaaccttccttgaagtatatcaatccataaccaatcaccttgctgcaccctatgtactggtcttgaatggaaaatgtggtgattcttctaaagcttctctgtctttccgtgtgtgtgaaacctaagggaacgctgatcccattcatttggagttgatgtttccaggtggctatcctcatgctttgtgttcaaataaactctgtgcttaatcatatattctaaattttattatttactgctgatatcagtttctgtcagactgtaggagcctcaccagagagggcacctgtcgctatgttgtaaaactcacacttgtcagaaagacatgggttagtgttactccccgtccctcagaatgaagctaattagctgacacagatggtcacctccattaccaagtagagtcaggatgaactatgtgtgaccaagagtgttgtcaagtcctcttccctgaggactgattagcgtttatcttgaaaacatgtccttaatgggttgtatagaacagtaaagtttctttctcttttttcaacctcttagctgtttgcctgtatttcgcatcacaatctggtctaaggcttatttattaatgaaatggttttaatttctttctctatgatcatcgtggagatgatttctcatttggagaaagactttttgtttgttttcaattatattttctcaacaattagacagtgaagtaaaaagtattttgggggggccaggcacagtggctcacgcctgtaatcccagtactttgggaggccgaggcaggtggatcacttgaagtcaggaggttgagaccagctggccaacatggggaacccacctacaaaaatacaaaaattagccgggcatggtggcacgcgcctgtaatggcaggtactccggaggctgaggcaggggaatcgcttgaacccaggaggcagaggctgcagtgagcccagttcctgccactgcactccagcctgggcgacagagaaatgctctgtctcaaaataaaagaaaagaaataagtaaataaataaaagaaagtaatagatctcttctacaaatgtgctgggacaactaactggatatccacatggaaaagaataatgtatccctatctcacacaatcaaaattttattttaacgttaaaaaatggagaaaaaaagagagagagacgagggagggagtcctgagggaggggtgttactttgtcgcccaggctggcctggacccccaggctcagcgatcctctcgccgctgcttcctgagtagctgggaactcaggctcccgcccccgcgcctgaatccttgctgtgtttatccagcaggtcgcccctggctggcctgagcattccgtcccgcatcccagggggaggccctagggaagtctctgcagctgagcacggggtggactctccctcctgagtgagtggagaatagaaagggagaggatttctgttctgttctgtgggccgtcagcatgaaatcgtacgttccgcccaggcagggccttgcattttacattctagtttgtatcccgttccagacaattccagggcttttgagtccatgcgtcagccttcctgggcggtctcaccttcaccacccgaaaacaggtgctaggagagaagctgagaggagcaccggtcacgccccggccccgccctctgccggctctaaagcgcaaggtctctccgcctcgcgccccgcccctgcctcgtccaggccccgcccacctccttgcgggtcccgcccaggcctggcttctgctctgcgcgcgcagattcgtgcagaccaggaagcggatagcgtggagtgacggtgccaccgcggcgcgtgagtttcgccctgtcttgtattaagtctgctcttccaggttcctggcgcttctgtacctgggacttgggatccccacaaacctggaaattctcagccgtcttccttcactcagagcaaattgagacgacctcgtgagaggccgtgggtcggttcctt

SEQ ID NO: 22457 - DNA, 2300 bp, Homo sapien
ttctgaaagatgcctttgtcacatcctataatcagctcacatcatttttttctgtacaagtatattttccagttatttacctgttgaccccagaatttgttagatttttaaaaaaacaatttctaaatagtttctgtttgaaactagttgcgtccagttcagatcaaggtctgcatgctttctagtctttattatttattggaaaacttcggtacctaatacaaaagtttgattgtttcagtgtgtacctggtaaagaatcagtgaccttttaccttaacatcaaaatgtagtttaaccagttaatgtatttttcagttttctttccttatgtcatctgtgaacatcttgagctgtgagctattaagtgcatgtttccctcaaggccctctggtccattctggactaatgttgaaagatgggatggattggcatggaactgttggggtgatcagacccaacaccgggctgtgggggctaagaagtccagtggagtcaaaggaatgagaaaagacaagttaagaatgcataaggtgggtccagggggccaacgctagtatggaggctgcaatagacctgagctctggaagcccacactattagtgatcaaacaaagcagcaggtggtgaggatgtggggtttgaaaggaagcagtgcatcaagcacatgatctataggtgtgtcaggttaacatttatatggaacatgttctgctacttgagatcatggggaacatattcttctagtttaagatacaatcattttatgagtctgggagtgctagaagcaaagaaccatcaagtctaggcacattccagaggccacgaggggttttatgccctgaaacctggattccatccaagccacaaggggtttgttggggaaagaaagagagatcagactgttactgtgcctatgtggaaagaagaagacataagaaactccattttgttctgtactaagaaaaattcttctgccttgagatgctgttaatctgtaaccctagccccaaccctgtgctcacagaaacgtactgtgttgattcaaggtttaatggatttagggctgtgcaggatgtgctttgtttaaaatgtgtttgcaggcagtatgcttggtaaaagtcatcaccattctccagtctcaaataccaagggacacaatgcactgcagaaggccacagggacctctgccccagaaagcctgggtattgtccaaggtttctgcctgctgagacagcctgagatatggcctcatgggaagggaaagacctgactgtcccccagcccaacacccgtaaagagtctgtgctgaggaggattagtgaaagaggaagacctctttgcagttgagataagaggaaggcatctgtctcctgctcgtcctggcaatggaacgtctcgctgtaaaacctgattgtacattctatttactgagataggagaaaaccgccttatggctggaggtgagacatgctggcggcaatactgctctttactgcactgagatgtttgtgtaaagtcaaacataaacctggcctacatgcacattgaggcacagcacctttccttaaacttatttatgacacagagacctttgcttacgttttcctgctgaccctctccccaccattagcctgtagtcctgccacattcccctcactgagatggtagagagagtgatcaataaatactgagggaactcagagaccagtgccgatgcgggtcctccgtatgctgagcgccggtcctctgggcccagtgttctttctctatactttgtctctgtgtcttatttcttttctcagtctcttatcccagctgatgagaaatagccacaggtgtggagggactggccccccttcagggttttatgccttgggcttaggttgtaatttggcagggcagccttccaccctttggcacagagctgggtgttccaaagaccacaaggggttttaggccctggaccccggcatgttccaagactctttatattatgtcagactagcaagccctgcctcagcttttccccaacatggaacgctgttctaaaagcacccatgattcttttttttcttttttttcttttttttttttttcagatggagtttcgctcttgttgctcaggctggagtgcaatggtgtgatctcggctcactgcaacctccgcctcccgggttcaagcgattctcctgcctcagcctctcgagtagctgagattacaggcatgatccattgctcccagccacccatgtattcctgattgaaaaaatttgcttatgtcttagttctacagctgacc

SEQ ID NO: 22458 - DNA, 2300 bp, Homo sapien
ctcccagccacccatgtattcctgattgaaaaaatttgcttatgtcttagttctacagctgaccctctttcgctattttcaaggtcaatagctgtgtgttcacacttctgcattttataaatgttactgtgattttcttctaaggaaaaattaaatgtcaggaatcagtggcatcagaaccttgcaaaagaagtttctttagcccaggcctgtgaaagatgcttctgtaattttcaaggataggggtgataaagaccaagccttcccattagcccttccaggcccccatgtaagaattcaggcacaccttctcactcatctcagaccttctcagggtaacttggtgaaaatttccctgctctgagccccagtgagcctccctgcaacttggagatgaggggctagaccagaaaagctcaacccgagtgacccagtcccctgaaatgatcggcaaaatagtgcatgtcttggcgtggcctttcttctggcagaggggagtgcccagctgtaattagaattttaaatgggatgcagtaccccaaaaataaaattaaaaaaaattttttaaaaaaacgtgaaagaatggaagaaatagaggtgtagactcagacacagagaccatcttcgaggcctttctctgtatgaggacatcacagcaaaatctaaagcaggtcacgtcagtccctggcagggaaccctccaccagcttcccgtgttccccagaacaaaagcccaactcctcactgtggctccacagccctgtgaccagggcccctgccagtgtccagcctcctcctgggagcttgccctcatctcatgactccctctgccccagtcacatttgcttttctgttttcccagatatcaaaacccttcctgtctcaggttgctgtccctgctcttaccctatgtccctaaatgatcacggccctgtgcctttcttcttcaggtctaggctcagagatgtctcccatgccctcccaaccccatctgaagttccctctgcccatcagtctctatcatgttactcaggttttattatctctacatcaatcacatcagaatttttttttcttttttttggagacagagtattgcccgggctgtgagtgcagtctcatgatcttgggtcactgcaacctctgtttcctgggttcaagtgattcttgtgcctcagcatcccacgtagctgagattacaggtatgtgctaccacacctggctaattattgtatttttatttttatatatttttttatttttgagtctcacactgtcaccccagactgaagtgcaatggcatgatcttggctcagtgcaactgccacctcctgggttcaagcgattctcctgcctccacttcctgagtagctgggattacaaacaaccaccaagcccagttactttttgtatttttagtagagatggggtttcactgtgttggcaaggctggtctcaaacttctgacctcaagtaatccaccctcctcagccttccagagtgctggtattacagacataagccaccaagcctggctcagtttttttatttttcgtagagacagggtttcacagtgttggccaggctggtctcaaactcctgagcccaagtgatcttcacacctcagactcctaagtagcttggacaaccatgcctggctaagtttttgtatttttggtagagatggggtttcaccatgtttcaccaaactcctgagctcaagagatctatctgcctcagcctcccagagtgctgggatgacaggcatgaggcaccagacccagcatctgcatggggtttggtcagggctgggtctagggacccagggctgggtcaggaaggggagcccattccagcccagctcccactgttgcagcgtgtgtgtgggctcctctaggaaagaagtgcgagttttcctgtggcagtttatcatccctggtgcagtgggcagcagacgggaccatatttcccagggtgaggtcgcctttgtatgtgtggttgtgttccacggaggtggcgtgttgattctgagcaataaacaacatatttctaacattcaggattgacttctaaagactcttggtacgtgaggaagaaacccggaagaggaagaggagagcaaaggagtcagggatggctttttctcaggtgagatgatattttcagtggattgttctgtctccttcctttcagaaatgctgggccttggagttgggaatcttctctgagtctgaagcatcctgcctgacaggtttgctcacattcacccatgccttccctcagtccctcttatctcgctta

SEQ ID NO: 22459 - DNA, 2300 bp, Homo sapien
aaagttcatacacagacatgaaagatagaagatgttttattctgtcattattttaagaataggaaatcaacctgaacaatagcaggagattcattaaaccattcttagcacattacgctcatggagactgtggtgttaccgtggagaggcttgtgaaacaggtgttttcattaaacgtttttataatttttattattatgttatgataatattatattttaaatatgcagagtcttgctctgtcacccaggctgaagtgcagtggcatgatcttggctcacgggaacctccaccttccgggttcaagtgattctcctgcctcagcctcccaagtagctgggattataggcgtgcgtcaccacgcccagctaattttgttgtatttttattagcgacgggtatcaccatgttggccaggctggtctcgaactgctgatctcaggtgatctgcccaccgcagtctcccagagtgctgggattacaggtgtgaggcaccatgcccagccccaccaattattattaaatacatatttttatatttaaccatcacatgatgtatccatttgttttgtggtaaaactccaagcaaagctgcagcttagattttttgccataatgcatctcctttccctgtcacgtcctccaccctccttccagcctcactggggagccactactgtcagttctgtgccaggtgtcagagcaagtcccgttcacgtgtatttctacatcgttatgagacttatgagatgatatcgttatgagatataatcgatgagatataatggatttccatactttgactaatctagttttcatatattttcttttgagactgggtctcactgtggtgcccaggctggagcacagtgacgtgatcttagctcactgcaacctccaccctaaggctcaagccatcctcctacctcaggctcccaagtagctggaaccacaggtgcctgccaccatggctagctaatttttttttttttttttttgagatatagtctctgttgcccaggctggagtgcagtggtgggatttcagatcattgcaacctctgcctcctgggatcaagcaattctcctgcatcagcctcccatgtagctgggataacaggcatgtgccgctgtgcccagccagattttagtttctcatctttcactgtgaatgttgtcatctctgaagacatcacccgtactctgtctcatctagatacggaatgtcacttgctgtgtcaataaaagtttctgggccgggcgcggtggatcacgcatgtaattccagcactttgagaggctgagtcaggcagatcacgaggtcaggagtttgagaccaacctggctattacggtgaaaccccgtttctgctaaaaatacaaaaattaactggttgtggtggcatgcacctgtaatttcagctactcaggaggctaaggcaggaaaatcgcttgatcctaggaggtggaggttgcagtgagcgcagacagcaccagtgcactccagcctgggtgacagactgagactccacctcaaaaaaaaaaaattttagtaaaacacaactgggaagacaaaatgcggtgaaaaatcccttactcagatttgttagaacattcactgcatttaaatccatgccttcacctctcttcttctcattttctgtaaagataagaactcctctcataaccatttggttaaaatgtgttttcatttcagggtctattgacattcagggatgtggccatagaattctctcaggaggagtggaaatgcctggaccctgctcagaggactctatacagggacgtgatgctggagaattataggaacctggtctcccctgggtgaggataacttccctccagaagtgggaatgtgcccttgtgtatctttgtattttctcttgtttttagatacagtgtcttgctctgtcacccagggtagagtgcaatggtgtgatcatggctcactgcagtcttgaattccttggctcaagtgattgtcccacctcagcctcccccggtagctggtacaggtgcatgccaccatgtttgggcaaattttttagtttgttttctttccagacagggtcttgctgtgttgttgaaattcatcttgatctcctgagctcaagagatcctcctcagtctcccaagtagctgagattacaggtgccaaccaccatacctaattattggcttttatttttaagatttttgcatatgtgtggccgggcttggtggctcacgcctgtaatcccagcactttgggaggccaaggtgggtggatcacgaggtcagg

SEQ ID NO: 22460 - DNA, 2300 bp, Homo sapien
tggtgttagccaggatggtctcgatctgacctcgtgatcctcctgcctcagcctgccaaagtgctgggattacaggcgtgagccaccgcgcccagccgttagtcaattcttattccttataatgctgtgtatatttttgacctcataaattaacatgtagtgatcttaacatgtatttcagttcttatattgtgttctggtggtatatagaagttgtggcttttttcttaacagggaattgtttagaattctgcaggttgtataaatgtacttgttatttgcttgctagttttatgagttacaatattttactaactaatttttatgattgtacataaagcttttcggtatgtggtatgcaatataactgacacagtccactagttaatgtcatttttttttgagacagagtttcactgttgttgcccaggctggagtgcaatggcgtgatcttggctcgctgcaacctctgcctcctgggttcaagtgattctcctgcctcagccttcccgagtagctgggattacaggcatgagccaccacacccggctaattttgtattgttagtagagacggggtttctccatgtttgtcaggctggtctcgaactcctgacctcaggtgatccgcctgccttggcctcccaaagtgctaggattacaggcataagccaccgtgcctggcattaatgtcacattaactggggcactgtggctcgtgcctgtagtcccaggactttgggaagctgaggcgggtggatcattgaggtcaaaagttcgaccacagcctggccaacatggtgaaaccctctatctactaaaaatacaaaaattagccaagcatgctggcatgtgcctattatcccaggtactcaggaggctgaggcaagagaatggcttgaacccaaaaggtggaggttgcagtgagccaagattgggccatagcactccagcctgttgtgacaaagtgaaacttcatctcgaaaataaaaaaatacaaaaatttttaaaagaacgtcataacgtgccttttctgcataggtataggtaattttatgacagtaattcagaaaaatattgtattaacttttattttgagattaagtctcactttgttacccaggctgaagtacagtgttgcaatctcagctcactgcaacctctgcctcttgggttcaagcgattcttgtgcctcagcctcctgagtagctgggactacagacgtaggccaccacgcctggctacattttgtaatcgtttcttaccttttcagtgctatgattgtttgacaatacagaatttccattgattttggttatccttacatgagcttgttgtggattatttaccaatatggtatatcatgtggtcctttagcatttatttgtatacagcaaatatgctgtaaatatgaagaatatatacttttcattggtgtgacggtgatatgttttttgcaaactgttagacactttacggtcacagtggaaaaatactccttactttaggcttatacacatttgtgcactgtcagtgttttgtcgtgatattggaaatagggttccgtagagatgatttgaagcacatgtaatagccctttatctaataaagaatcttacgcttttgtgttcctaaactttgaagatcatgttggggaagtttaaaatgagtattttttgtgtcacatttacacatttcagtattatttaccatctgtactgaactggaaacctattcgtgtttatattttgtagatatctcttccaaatgcatgatgaaggagttctcatcaacagcacaaggcaatagagaagtgatccacacagggacattgcaaagacatgaaagtcatcacactggagactttcgctttcaggaaattgataaagatattcataacttagagtttcagtggcaagaagatgaaagaaatagccatgaagcacccatgacagaaatcaaaaagttgactggtagtgcagaccgatatgatcaaaggcatgctggaaacaagcctattaaagatcagcttggatcaagctttcattcgcatctgcctgaactccacatgtttcagacccaagggaaaattggtaatcaagtggagaagtctatcaacgatgcttcctcaatttcaacatcccaaagaatttcttgtaggcccaaaacccatatttctaataactatgggaataatttccggaattcttcgttactcacacaaaaacaggaggtacacatgagagaaaagtctttccaatgtaatgagagtggcaaagcctttaattatagctcactctt

SEQ ID NO: 22461 - DNA, 2300 bp, Homo sapien
gtggcaaggttttcagtctgacttcactccttgcagaatatcagaaaattcattttgagataattgttccaaatgcaatgagtagagcaaaccatcaagcagtaattgacattaaagtgtttatgttaagaggattgggccaggtacagtgtctcacacctgtaatcccagcactttgggaggccaaggcgggtagatcacttgaggtcaggagtttcagatcagtctggccaacaaacatgagccacttttcccagtttgctttttgttctttaacaaaaactgatagggatttttatgggtaccgtgttgaatctaaatcacattgggttatataatcatttaacaatattaatttttccaatccatcaatatgggttatatgtctgtatatgtttttaatcatattgatgtatatttgtagatttcaaggtacaaacttctcacctttttacttttatttctatttctttaagttctctagcaaatggaagtgtttttaaattttcttttaaaattgtttattgttacaaacttctcatctttttgcttttattcctaagtatttcttactttaagttctctagcaaatggaagtgtttttaaattttcttttaaaattgtttattgttaatgtatggaaattcagctaatttttggtgctgatattgtactgtgcagatacactgaatctgtttattacttccagtagtattttggttgagtctttgtgattttctacacagaagatcatgtcatctacaaacacatataattttacttctttctttctgatttggatgggtttgatttcttttgctatttcattgctctggctaggacagccagtatttattgaatagaaggggtgagagcattcttccatcatgtgagatcctacaggaaaatcattccatgttccctgcttcgttatctactcgttggtcatttcatggatggcctttctattgttgaggtaaatttccttttctgtctattttgttcagaatttctatgatgagtggattttgaattttgtgaaatactttttctccatctattgagatgatgtggttttcatctttcattctgttcaagtggcatatcacattgatttgcttgactatgttgaaccatccttgcatcccagaaataagtggcacttgagtatctacagtcctttttacatcctcttgaatacagctttttagtacaaggggtcttcaagaagttcatggaaaaatacatattttgcatattatgagaaaattgtgtatgaatttcccagtttttgcaccaaaataaactggtacgaatctgttatgtctgaacaggtcctagtttgaggcacccagaaggataagacatgagttttaaaagagactttctctgccgggcgcagtggctcatgcctgtaatcccaacactttgggaggccaaggtgggtggatcacctgagatccagagttcgagaccagcctcaccaacatggagaaacagcatctctactaaaaatacaaaattagccaggcatggtggcaaatgcctgtaatcccagatactctggaggctgaggcaggagaatggcttgaacccgggaggcagagattgctgtgagccgagattgcaccattgcactccagcctggtcaacaagagcgaaactctgtctcaaaaaaaaaaaaaagaaaagaaaagaaaagagactctatcaaagcaatataaatcctgctaaaattgaaacaaaaaggagcatcaaatttacagtgagaccagatgcagtggctcaggcctgtaatcccagcactttcagaggccaagacaggtgggtcatgtaagcccaggtattcaagacaagcctgggcaacatggtgaaacccccttgtctacaaaaaatacaaaaattagctgggcacggtagcacatgcatgcagggccagctgctgtggagtctgtggtaggaggatagctcgagcctgggaggttgaggctgcagtgagctatgatcatgccactgcattccagcatgggtgatggagcgagatactggctcaaaaaaaaaaatacttcttgtaaagtttgggtagaggaataatgaaatcattgatgctttatgaaaagattatggagatgatgcccagaagaaataaacagtttgtaaatggataacttagtttgagttgggacaagacaatgttgaaggtgatgcatggagtggcaggcacaccatccacatcagtttttttgtttgtttttgttgttgttgtttttttgagatggtgtctcgctctgtctcccagg

SEQ ID NO: 22462 - DNA, 2300 bp, Homo sapien
cacacctgtggtcctcgcactttgggaggctgagatgggaggattgcttgagaccaggagtctcctgggaatgttctcatctcccctaacccaattcatgagagacccttggactttactgttatggaaaaatctatattaagcaatatcagtgtgtcaaagcattatgtctgtcacaagctcgtgaaaggaaaataaaaattactaagccaaagagaaaagtcaacctgagaactgcatcagacaaacctgcctcccattttattcctaaatgagatagccacaaagactaaaataaagctacgtagaggccatgcacggtggctcatgcctgtaatcccagcacttttggaggccgaggcgggtggatcacttgaggttgggactttgagactagcctgacgaacatggagataccctgtctctactaaaaatacaaaaattagcggggtgcggtggtgcgcgcctgtaatcccagctacttgagaggctgaggcaggagaattgcttgaacccaggaggcagaggttgcagtgagccgagattgcgccattgcactccagcctgggtgacagagtgagactccctctcaaaaaaaaaaaacttccagcaaacatcatatgttataataatcctttgccacagaagagactcaggtatgataagttcctacgtggagaacaaaatatgagtttctactcggtcctcaggtgccttcccagagatgcccccacattttcctacagcagtggggatgtaggatggactgaccctccccaccacacacacacacacacacacacacacacacacacacacacacacaccctggggaaaagcccatataaagcagttcccatttccctccacaaactgcgggctcccagtgaaaactaccttagacattcttgcaaatcccattcttgtctggccttctacgggatgacaggggcctagagaaggcagtactgggtggagttacctgggtgcgcatttgtcgggatgtggcattttatggctattctaaggtctgttatcagttgtctgtcttggggagaatgtgcagtcgccatggtccaataatcctctatccaaggaccacacaggtcaccgcaggcgctcaatcagcgtgatccacatggtatgatgtgtgctctggcagggcacagacggacacactcagctctgtcaatgtgtaaacagggagtgttgcaatgacatggtttattcacagtcaccatggaatctgatgtggcattttaaaaaatgcgtagatctgttgcaactggtatgaaaacatcacttgtggggaaaagaaagagagatcagactgttactgtgtctatgtagaaagaagtagacataagagactccattttgttctgtactaagagaaattcttctgccttgagatgctgtgaatctgtaaccctagccccaaccctgtgctggcagagacgtgtgctgtgttgactcaagatttaatggatttagggctgtgcaggatgtgctttgttaaaaagtgcttgaaggcagtatgcttggtaaaagtcatcaccattctctaaactcaagtatccagggacacaaacactgcagaaggccgcagggacctctgcccagaaaagccaggtattgtccaaggtttctccccatgtgatagcctgagatatggcctcgtgggaagggaaagacctgaccatcccccagcctgacacccgtaaagggtctgtgctgaggaggattagtgaaagaggaaggactctttgcagttgagataagaggaaggcatctgtctcctgctcctcctgggaatagactgtcttggtgtaaaacccaattgtatattatatttactgagataggagaaaaccgccttagggctggaggtgagacatgctggcagcaatgctgctctctattacaccgagatgtttgtgtgcgtacacatgaaggcacagcacctttccttaaacttatttatgacacagagacctttgctcacatgttttcctgctgaccttctccccactattaccctattgtcctgccacatcccctctcccagatggtagagataatgatcaatactgagggaactcagagaccagtgctggcgggtgctccatatgctgagcgccggtccactgggcccactgttctttctctatactttgtctccgtctcttatttattttctcagtctctcgtcccacctgacaagaaacacccacaggtgtggaggggcaggccaccccttcatcactgattggccgggcgcagtggctcacgcctgtaat

SEQ ID NO: 22463 - DNA, 2300 bp, Homo sapien
ttcaagccactgaagccttgctccttttatggccacagagtcctctggggaggacagatggtggaagaatgtgcttgtttatatccttatctggttggatgcagtctttattatttatttattaagcaaaacatcttgtccctgttggcaaagtgccctgtggaatgcaagatggagtctttttctaagatggagttacttatgtcaagggtactctatacagtagtcttacccacacgttcatagaaacatacaatctcatccatgtcataatgaaggccaaaaacctcacaggcgccctcccttacctgagctccaggaggctccctgatgagtccacacaatcacaaatccagtcacacccaccaatgattctctcccaacaacagcatatattttttagggcaaagcatctcacaccccagtgtttgtctaaattgcaccatttcggaagccccctgctcttttgcagaccttggtcaaagtgaaacatttcacaggggttcaggcagtgagaaatatcctgcctaaccacctgaccacaaggcgaacaaagacccaattaaagaaacattctcatcatgtcctactgggcaaaggcccaactacaaaaaccatccctatcatatctttcttggcaaaggtccaaggaacatcctgatgagatcccaccggaaaaagggccaaaccgcctgatcataagaacatcttgtcaatatcctgccgggcagcaagccatacagcccaggcctctcccgcccataccaaggtaacactcacagagacatctgaagagccaggcagtgctcccaagtctgggacagcatcagagaacgaaacgcaaagtcctgcccttacagagagagccttggcacagacccagtcaggaccaggtcactcccgtggaacctactcaaggtccctacacacatgcctggagctccccaatctactggggggtgggggaaagggcagtgctgaaacgtccccaaaatctcacatgtaaacaccctacctaacactttctagaggcatttccagctcggggctgtatttccaagaacgctctggaggcacagctcttttctaaggagggccatgttgcatgctgggaaatttttgaacttttcccaaatcacagcttttaagctttccgggcttattattattattattattattttgagacattgtttcactcttatcgcccaggctggagtgcagtggtgtgatctcggctcactgcaacctctgcctcctgggttcaagcgattctcttccctcagcctcccaagtagctgggattacaggcacacaccaccacgcctggctaatttttgcatttttagagcgatggggtttcaccatgttgggcaggagggtctcgaactcctgatctcaggtgatatacccgcctcggcctcccaaagtgctgagattacaggcgtgatttctggtcgtttcagactacatttccttcccagaaggacgcggggacacgccttccctatggacggatcccaaatgcaagttgtaagcaattataactgtaggcccctagagcctgaaccacttttcccaggaattttttgtggtgcgccttaggagcaagcaaagtttcagggcaggagaaggccgacagggcttccagcatttgaagattctgccagtctgaaatacgctttcccagaagtctatggggggtgcagctgctctaacagtgggaggagacaccgacgaaaagcattctgacggccgcgcttccagcgctaaggattcccgcgtagtgagcatttcccagaggtctctggggcatggctccattagggccgtgtgcagttgcctgcagggaaacactgatgggcgcccttccagatacgtcgattcccgggttatgagctacatttcccagaagccctcaaggcaggacgcccttagggtcgcgtagagttgcatgctgggaaatcctgacagccgcttccaactctgtggatttccgggttatggactacatttcccagaggcctctgggtcacggctccatttgcgccgtgtagagttgcatgctgggaaacactgacgggcgcccttccagctgcgtcgaagcttctctggtttcgcattacatttcccagagggccttggggcacagtccaatgaggagcgagccgggtggccggctgaggggcgtgcttcatgctcgcgggatttttaaaaatggtttctcctggatcttatcccaactgcgcctgagaccttgtttcacctcctgatgtgctgggtgtggttaggcctcgagc

SEQ ID NO: 22464 - DNA, 2300 bp, Homo sapien
cttcccaaagtgctgggattacaggtgtgagccactgcacctagctgataagaatctttaaactagattttttaaggaactatcatgtctctgtctccctagttaaaaggaaatagcagacttgttacttttatgaaaatggattgagatatgttactgattttttagtaataacagctaccttatcttaattgttatatatgactgtgtgtttcatgtggatgatcctgttcaaacagtcatacattgtactatctttcttgtggttttaccagtgaggaaactttaccacactgtgaagttaataactatcagagctcagattaacaccctcaaatcagaccacagagcctgtgttaatttcaccaaaacatgtctgctcaaattatatgtaccattttaacctacccttttcccttgttgattcttcagaagttttcttaattaatgagtcagtattattaggaaatgtactctatgtcattgtataacagaccatggtttaatctgattttcctttatcctccactgcaagattttcatttttaaaaattattctcgactgggtgtggtggctcacgcctgtaattcctgcactttgtgaggccgaggcaggcggatcacctgaggtcgggagttcgagtccagcctgaccaacatagagaaaccccgtctcttctaaaaatacaaaaaaaattagccgggcgtggtagcgcatgcctgtcatcccagctactggggaggctgacgcaggagaaccccttgaacccaggaggcggaggttgcagtgagccgagatcgcaccattgcacttgagcctgggcaacaagagcgaaactccgtctcaaaacaaacaaacaaacaaacaaaaaattattctctggaaattctgggtaacgtcagtggattacatcaatgttaatcttctggttgtggtattatatactacaatcaccagctgaggtaaccaggtgaaaggtacacaagatctctcaattttatttcttgtaactacatatgaatctaaagtctatctaattaaaagagaaaaagattttcagaaaaaaagcattttgtgaacatacttcaacattgtgtacaactatagctacttccttggcataaataccaaaaagtgggattttgagtcaaaatgagactgtggttaagtacctgcaacatcctgtagaccctgtgacgttagtacttggaatgagagcgggactcacggggcataactgctacctgtacattgtttacaatgcagcaagcaagggacaccgaatagcagctccggcagcctgtgctagcggcctgcagagaattccaggtgacgctccagaggggctaggagaggatacccttctgaggacagccatggctcgcccggcatcaccccactcaagaggccagacggggtcccagctggggtgacacagctcctttcccagtcgggaaggggcgtctgcagggaccaggaagggcttagcttggggctgcccgctccggcaccgacctgggacgcgccctgaggcccctgcctgggaccgtcccggactacatttcccagagaccatccaggagtacgccgtgctgcatgctggaacacggggcttggggctctggtttcccccgacggccccgcgtcctcttctagcctcaccctctcccgaggccccagcgttgggggactaccgggtgcgtctgcggctttgggagagtgggaggagggaaagggatgggaggggtgcacgcacacgtgtcagtgtgtccgcgtgtcagcatctgtgcaggcgcacgtgtgtgtcgggctctgttgtgtctgcacatgcgtgtcggcatctgtgcgtgcgcacacgcccgtcagggtctgtgtgcccgcacaggcacgtcaacagctgagcacgctatgtatcgggggtctgtgtacgctcacatacgtgtcggggtctgggtacgtgcacatacgtgtaggggtctgtgtgcacatgcgtgtcgggctctgctgctgtctgcgcgctgcggccgctgggtgcgcgtgcgcatgcgcgctggcctccagggggtggcgggaccgagtgtgtgacgcacttgcgtgggagtacgaggctgacgcggcggccctgtccccgtaactgtgacacgggtgcacgcgagcgtcattgggggcgatgggggccgtgctgggtgcgcgtttgcaccagtgacgcagccgctgcatctccgccagtccgcgcaggtgagattggtgcgcgtggctccgaggggagacgggcacggggcttctgacggtgacgcac

SEQ ID NO: 22465 - DNA, 2300 bp, Homo sapien
tcgggagttcgagtccagcctgaccaacatagagaaaccccgtctcttctaaaaatacaaaaaaaattagccgggcgtggtagcgcatgcctgtcatcccagctactggggaggctgacgcaggagaaccccttgaacccaggaggcggaggttgcagtgagccgagatcgcaccattgcacttgagcctgggcaacaagagcgaaactccgtctcaaaacaaacaaacaaacaaacaaaaaattattctctggaaattctgggtaacgtcagtggattacatcaatgttaatcttctggttgtggtattatatactacaatcaccagctgaggtaaccaggtgaaaggtacacaagatctctcaattttatttcttgtaactacatatgaatctaaagtctatctaattaaaagagaaaaagattttcagaaaaaaagcattttgtgaacatacttcaacattgtgtacaactatagctacttccttggcataaataccaaaaagtgggattttgagtcaaaatgagactgtggttaagtacctgcaacatcctgtagaccctgtgacgttagtacttggaatgagagcgggactcacggggcataactgctacctgtacattgtttacaatgcagcaagcaagggacaccgaatagcagctccggcagcctgtgctagcggcctgcagagaattccaggtgacgctccagaggggctaggagaggatacccttctgaggacagccatggctcgcccggcatcaccccactcaagaggccagacggggtcccagctggggtgacacagctcctttcccagtcgggaaggggcgtctgcagggaccaggaagggcttagcttggggctgcccgctccggcaccgacctgggacgcgccctgaggcccctgcctgggaccgtcccggactacatttcccagagaccatccaggagtacgccgtgctgcatgctggaacacggggcttggggctctggtttcccccgacggccccgcgtcctcttctagcctcaccctctcccgaggccccagcgttgggggactaccgggtgcgtctgcggctttgggagagtgggaggagggaaagggatgggaggggtgcacgcacacgtgtcagtgtgtccgcgtgtcagcatctgtgcaggcgcacgtgtgtgtcgggctctgttgtgtctgcacatgcgtgtcggcatctgtgcgtgcgcacacgcccgtcagggtctgtgtgcccgcacaggcacgtcaacagctgagcacgctatgtatcgggggtctgtgtacgctcacatacgtgtcggggtctgggtacgtgcacatacgtgtaggggtctgtgtgcacatgcgtgtcgggctctgctgctgtctgcgcgctgcggccgctgggtgcgcgtgcgcatgcgcgctggcctccagggggtggcgggaccgagtgtgtgacgcacttgcgtgggagtacgaggctgacgcggcggccctgtccccgtaactgtgacacgggtgcacgcgagcgtcattgggggcgatgggggccgtgctgggtgcgcgtttgcaccagtgacgcagccgctgcatctccgccagtccgcgcaggtgagattggtgcgcgtggctccgaggggagacgggcacggggcttctgacggtgacgcacttgctggagagtgtggggtgacacagccgggctctccccataactggtgaccgggggtgctccagaggctttgggtcaacgcagcccgtgcctgtgaacctcggcggtgcgtccctgggactctgctccgtgaggtgcgctctgggggttgtgcgggggcagcggtcgggacgggtctccgtggcccacggatgcacctctgcaccgtgtggggtggtggggcccgtagcatggccgtgctgggcgttagtgggtatgaggggcgcagatgtgtctcaggacagagtgagctgtggtgaggctgagctgtgcagacttgtgctgggatgggtgatcgggccttctgggtgacgcaggtgtgtgtgacaacacaacctgtagcttcagcgtctctgtgctgggatggatgatcgggccttctgagtgatgcaggtgtgtgtgacagtgcaacttgtagctccagcgtctctgctgcttcccctgccttcacctcctaaccaagcggtacctgcctgagaacaagggccgcggagggacgtgagcgcctgagcctcgcctggaaattcaccagcaagaaggcagaaacagccatgaggtgacgctttcagagccagaagtgctgtgcatgca

SEQ ID NO: 22466 - DNA, 2300 bp, Homo sapien
ccgtctctaccaaaaaaaaaagaaaaaaaattacaaaaactagccagatgtggtggcgtgcacctgtagtcccagctcttgggaggctaaggtgggaggatgacttgagcctaggaggcagaggttgcagtgtggttgagattgcactactgctctccagcctgggtgacaaagcgagaccctgtttcaaaaaaattaaaaacagcagatgagtttcttttttaaaactggattcaggatcagtgtaatgttactgatcttcaatagtaaccacaaacttaaaaaatctttacatattgccgtatgtattagatattctgatatttaatagctgagacagtcataccttatagtattattatcccaattttactagtgaggaaacaagcagttaataactgttagagctcagattcacattctgaaagttatagaaattaagaacatagagcctatgttcttaatttcaccaaaatatctcctcccaaattatacataccctttcaaacctaccttcctctcttagtaattaatgataccgtctttcaatttacatgaatcagtatcactattagtaaatgtattttatgccattatataacagactaatttatttattctgtactctactgtgatattttcctctatcttctgcaagattttcatttttaaaaattactgtcttggctgggtgcagtggctcatgcctgtaatcctggcctaggcaacaagagtgaaactccatctcaaaaaaaaaaaaaaaaaattagtgtcttgaaatttgcataacatcaatggatgatgtcattgtgaatgtcctggcggtgatattatactgtatactataatcaccaattggtgtaaccaggtgaaagatacataggctttctcagtattatgtgtacaactacctaagaatctacggttgtatcaatttaaaagaaaaactttcccacacaagataatctccaaacatcttgggcatacatgtgtgtactactctagctatttccttgggataaattctaaaaagtgggattttgagtcaaaatgagactgtggttaagtagtacctgcaacatcctgtagaccctgtgacattagtacttggaatgagagcgggactaactgggcataactgctgcctgtacattgtttacaatccagcaagcaagggacaccgaatagcacctcgggcagcctgtgctggcggcctgcagagaattccaggtgatgctccagaggggctaggagaggatacccttctgatgacagccatggctcacccggcatcaccccactcagaggccagacgggctcccagctggggtgacacagcccctctcccagccgggaacgggcgtctgcagggagcaagatggactcagtgtggggctgcctgcctggaacgcgccctgaggcccctgcctgggaccggcccagactacgtttcccagaggccccccaggaacttaaggcgctgcatgctgggacacggggcttggggctctggtttccccagacatcgccctcctcaagcctctcaccccttcccgaagcccctgtgtgtttgggcctgagtagggcattcgcttcctaggaggaacccaggggtgcgcgccaagcatgggggtagggggaccgccgagtgcgcctgtggcttcgggagaggccaaagaaggaaggagtgggaagggcgcgcacgcgtgtcagtgtgtgcatgtgtcagcgtctgtgcacgcgcacatgtgtgtcggggtctggtcgcacatgcggatcaaggtctggccacacgcatgcgttgggggtctgtgtgcgcgtacacgtgcatgtcgcggtctgggtgtacatgcgtgtcaggatctgtgtgcacgcacatgcgtgtcgggctctgctgctgcctgcgcgctccggccgctgggtgcgggaggcccctcccgagtccggggtgcgcatgcgcgctggcctccatgggtggcgggaccgactgtgtgacgcacttgcgtgggagtgcgaggctgacgcggcggctctatctcccgtaactgtgacacgggtgcacgcaagcgtcattgggggtgatgggggccgtgctcggtgcgcttctgcaccggtgacgcaaccgctgtgtctccgccagtccgcgcaggtgagattggcgcccatggctccaaggggagacgggcacggagcttctagcggtgacgcacttgctggagagggtgtggggtgacgcagccgggctctccccataactagggctggggtgctcccgaggctttggggcgacggaacccgca

SEQ ID NO: 22467 - DNA, 2300 bp, Homo sapien
atataacagactaatttatttattctgtactctactgtgatattttcctctatcttctgcaagattttcatttttaaaaattactgtcttggctgggtgcagtggctcatgcctgtaatcctggcctaggcaacaagagtgaaactccatctcaaaaaaaaaaaaaaaaaattagtgtcttgaaatttgcataacatcaatggatgatgtcattgtgaatgtcctggcggtgatattatactgtatactataatcaccaattggtgtaaccaggtgaaagatacataggctttctcagtattatgtgtacaactacctaagaatctacggttgtatcaatttaaaagaaaaactttcccacacaagataatctccaaacatcttgggcatacatgtgtgtactactctagctatttccttgggataaattctaaaaagtgggattttgagtcaaaatgagactgtggttaagtagtacctgcaacatcctgtagaccctgtgacattagtacttggaatgagagcgggactaactgggcataactgctgcctgtacattgtttacaatccagcaagcaagggacaccgaatagcacctcgggcagcctgtgctggcggcctgcagagaattccaggtgatgctccagaggggctaggagaggatacccttctgatgacagccatggctcacccggcatcaccccactcagaggccagacgggctcccagctggggtgacacagcccctctcccagccgggaacgggcgtctgcagggagcaagatggactcagtgtggggctgcctgcctggaacgcgccctgaggcccctgcctgggaccggcccagactacgtttcccagaggccccccaggaacttaaggcgctgcatgctgggacacggggcttggggctctggtttccccagacatcgccctcctcaagcctctcaccccttcccgaagcccctgtgtgtttgggcctgagtagggcattcgcttcctaggaggaacccaggggtgcgcgccaagcatgggggtagggggaccgccgagtgcgcctgtggcttcgggagaggccaaagaaggaaggagtgggaagggcgcgcacgcgtgtcagtgtgtgcatgtgtcagcgtctgtgcacgcgcacatgtgtgtcggggtctggtcgcacatgcggatcaaggtctggccacacgcatgcgttgggggtctgtgtgcgcgtacacgtgcatgtcgcggtctgggtgtacatgcgtgtcaggatctgtgtgcacgcacatgcgtgtcgggctctgctgctgcctgcgcgctccggccgctgggtgcgggaggcccctcccgagtccggggtgcgcatgcgcgctggcctccatgggtggcgggaccgactgtgtgacgcacttgcgtgggagtgcgaggctgacgcggcggctctatctcccgtaactgtgacacgggtgcacgcaagcgtcattgggggtgatgggggccgtgctcggtgcgcttctgcaccggtgacgcaaccgctgtgtctccgccagtccgcgcaggtgagattggcgcccatggctccaaggggagacgggcacggagcttctagcggtgacgcacttgctggagagggtgtggggtgacgcagccgggctctccccataactagggctggggtgctcccgaggctttggggcgacggaacccgcacctgtgaacctcggcagtgcgtccccgggactctgttctgtgaggtgcgctctgggggatatgtgggggcggcgatcaggacgggtctccgtggcccacggatgtgcctttgcactgtgtggagtggcggggccggcagcgtggccgtgctgggcgttagtgggtatgaggggcgcagatgtgtctcaggccagtgtgtgctgtggtgaggctgagccatcagtgcaggcttgtgctgggatggttggtcgggccttctgggtgacgcaggtgtgtgtgacagcacaacctgtagctccagcgtctctgtgctgagatgggtgatcgggccttctgggtgacgcaggtgtgtgtgacaacacaacctgtagctccagcttctgtgtgctgggatgggtgatcgggccttctgggtgacgcaggtgtgtgtgacagcacaacctgtagttccagcgtctctgtgctgagatgggtgatcgggccttctgggtgacgcaggtgtgtgtgacaacacaacctgtagctccagcttctctgtgctgggatggatgatcgggccttctgggtgacgcaggtgtgtgtgacagcacaacct

SEQ ID NO: 22468 - DNA, 2300 bp, Homo sapien
ccgtactttgggaggccaaggcagaatcacttgagcccaggagtttgagaccagcctgggcaacatagccagaccctgagatcatttttttgtctctgcaaaaaaatttttaacaattagttggctgtgggaggcggagcttgctgtgagctaagatcgcgccactgccctccagcctgagcgacagagcgagactccgtctcaaaaaaaaaaaaaaaaattagctgggtgtggtggtacacctgtagtcccagctactcgggaggctgaggtgggaggatggcttgagcgcagcaggttagggctgcagggaggtatgatgattcctgtttaaaaaaaaaaaattaaagaaaatgtacataatctgacttttgttgttgttgagacaggatctcactcttacccatgccagtgtacagtggcaccacacctggctaatattcaaattttgtagaggcgggggtctgtgttgcccaggctgatgtggaacctctgggctcaagcagtccgcctgcctcggcctccctaagtgctgagattacaggcatgagcccctgcacctggccacattcctattattaattaacacaataattgtacatattcgtggggtacagtgtgatatttccatacatgtatacaagatgtaataatcaaatcaaggtaatatcataaccatcacttcaaacattgattatttccttgcattgggaacactgaaaacctatttttccagctctttttttttttttttggagacagagtctcgctctgtagcccaggctgcagtgcagtggcacgatctcagctcactgcaacctccgcctcccaggtccacgcgattctcctgcctcagcctccggagtagctgggattacaggcatgtgctaccacacccagctaatttttgtatttttagtagagatgacgtttcaccatgttggccagggtggtcttgaactcctgacctcaggtgatccgctcaccttagccttccaaagtgcttttccagctcttataagttgttaacgacagtcaccctctagtgctgtggaacattggaactcaccctgttttgagccctgactatagcaatcatggctttcctgtttgagttcagtgaccttgtgagcctcttgtccatcgggactatgcttgcttactccttggtggctttttctgttcttgtcctcaggtgagactggggtcctagacacgtgaggattgatggggttcccagccctcttctgcctgcctcctggcccctcggtgcattgctacacatacaggagtgggaggagtacaacagcccctgcttatccacgggggacacgttccaagacccccagtacatgcccgaaaccgcggatagtaccagtccctatacatgatcattttcccatccataactcagttgcctaatgtgacttaacacggccggtagcgttcacagcatggacacactggacaaaaggatgatttacatcctgggcatgggcagcgtggaatgccgctacttgaagctgcacacaattgaaaacttatcaattacggcggggcgcggtggctcacgcctgtaatcccagaactttgggaggccgagacaggtggctcacttgaggtcaggagtttgagaccagcctggccaacatggtgaaacctggtatgtcctaaaaatagaaaaattagctgggcgtggtggtggtctcctgtaatcccagctactcaggaggccgaggcaggagattgcttgaacctgggaggcgggggtggttgcagtgagctgagattgtgccactgcaatccagcctgggtgacagagtgagactccgtctcaaaaaaaaaaaaaaagaaagaaaagaaaaaaaggaaaaaaagaaagaaaacttacaaattactgctggacttttccatttactatttttggactgtagtggatacgggtagatgaaacctcagatacgtgggagctaccgtgggtgtattaggctctctgatgttggatgaacagggacctgggttaatcttgccctactctctctaattcaggtaccagccagacgagaatttcagcaagaacgagaagccgaaggaggaagtagttgagatgaattctgtacccaaagcagaatccccagcatgtgttcctgaagcgtccagcactccggcgagtctgtggagccctgtcagcaccatccccaccccgagatggggccgcatcgtctatggatgtgcctttctgcttggtgagcagtggcgtttctccgcggggtgttttgaacctgatagcatgcggcagg

SEQ ID NO: 22469 - DNA, 2300 bp, Homo sapien
cagcactttgggaggccaaggcagatggatcacctgaggtcaggagtttgagaccagtctggccaacatggtgaaaccctgtctctactaaaaatacaaaaaaaaaaattagctgggcatggtggcatgtgcctataatcccagctatttgggaggctgaggcaggagagttgcttgaacccaggaggcagaggttgcagtgagccgggatcacgccactgcactctaacctgggcgacagagtgagactccatctcaaaaaaaaaaaaaaaaactttcatgctgatcagtagtggaatcagcttgtgaattgccctccagcctgagcaacacagactgcctcttactaatcccagcactttgggaggctgaggtgggaggatggcttgtgcctaagactttgagactagcctagccaaaatcccttctctacaaaaaatgcaaaaattagctgggtatggtagtgtgcacctgtagtcccagttactcaggaggcttaggtgagaggctcacctaggcccaggaggttaaggctgcattgagctatgattttgccactgcactccaggctgggcctaggcctttgtagtcacagctacttgggggcaaatgtaggaggatcacttgagcccagtaggtcgaggctgcagtcagctgtgttttttgagacatagcaagaccctgtctcaaaaagaaaaaaaaaagtagctacaagctcatttatgcaaaggctaaccactgtcacaagtagagatgtgcagaactgagattcaaatggatggaatggcaagaaaaactgccacttctgtgaacctgaagtcaaactgcccttgtcgtcaagataaaaggtatacatggtgtgagcctgggcatctgaaaggtgttgcagctttttcttttatttttttgagatggagtctcactcctgtcacccaggctggagtgcagtggtgcgatctcagctcactgcaacctctgcctcctgggttcaagcaattctcctgcctcagcctcctgagtagctgggattacaggtgcccaccaccacacccagctaattttcgtatttttagtagagatggggtttcgccatgttggccaggctggtctcgaactcctgacctcaggtgatccgcctgcctcagcctcccaaagtgctgggattacaggtgtgagccacctgtaattagccaggcttggtggtgggtgcctgtaatcccagctactgggaaggctgaggcaggagaattgcttgaacctgagaggcggaggttgctgtgagccgagatcgtgccactgcactccagcctgggtgacagagtgagactccatctctaaataaataaataaataaataaaatgagatgatttctgagtgagttaactaaatcaggatatgcagaacaatgccaagcatatattagccactaaagaatatataagttgcctgaaagcccctttagggtttaaacctggacttcattattcacaatcacattcccggtccccattacggagcctggtcacctgggtgcttgttagatatggaaatcatcagatcccaccccagaccgagtcagaaacgttgagggcaggagttcaagaccagcctggccaacatggcggaaactccgtctctactaaaaatacaaaaattagtcaggagtggtggcacaggcctgtgatctcagctactcgggaggctgagacatgagaatcccttgaacctgggaggcagaggctgcagtgagccaagatggtgtcattgcgctccagcctgggtgacagagtgggactctgtctcaaagaaaaagaaaaaaagaaaagaaattgcagcttctgctcaggaagtctggagtgggccaggattctgcattttaacaactcccaggagtgttagtggggctggtttgtggactcgcctttgagtcgttggtctccgctcaatcaatattagataaaatgacagtattgggagaaatccagggggctctggaggaccgagggatcatattggaggcagatagggcagagaaaggtggaggaggtgggagtcgggtgtggctgtggaggaagctacttaaatccggatttgatctttgctagttcttatccctggacctgaacccaggcgcacatctggattagaagatgccaggctcagaggatcttcgtaaaggtaagccagaaaaaatgagaaccgaagcaaagacacgtgaagaagtggaaagcagctggcggcgggaaaaggcagagggaccaggcggccgaagctggtgcttcgtccacgtgggtggcag

SEQ ID NO: 22470 - DNA, 2300 bp, Homo sapien
ttcccgagcgcctccttttcatcatcgacggcttcgatgagctcaagccttctttccacgatcctcagggaccctggtgcctctgctgggaggagaaacggcccacggagctgcttcttaacagcttaattcggaagaagctgctccctgagctatctttgctcatcaccacacggcccacggctttggagaagctccaccgtctgctggagcaccccaggcatgtggagatcctgggcttctctgaggcagaaaggaaggaatacttctacaagtatttccacaatgcagagcaggcgggccaagtcttcaattacgtgagggacaacgagcctctcttcaccatgtgcttcgtccccctggtgtgctgggtggtgtgtacctgcctccagcagcagctggagggtggggggctgttgagacagacgtccaggaccaccactgcagtgtacatgctctacctgctgagtctgatgcaacccaagccgggggccccgcgcctccagcccccacccaaccagagagggttgtgctccttggcggcagatgggctctggaatcagaaaatcctatttgaggagcaggacctccggaagcacggcctagacggggaagacgtctctgccttcctcaacatgaacatcttccagaaggacatcaactgtgagaggtactacagcttcatccacttgagtttccaggaattctttgcagctatgtactatatcctggacgagggggagggcggggcaggcccagaccaggacgtgaccaggctgttgaccgagtacgcgttttctgaaaggagcttcctggcactcaccagccgcttcctgtttggactcctgaacgaggagaccaggagccacctggagaagagtctctgctggaaggtctcgccgcacatcaagatggacctgttgcagtggatccaaagcaaagctcagagcgacggctccaccctgcagcagggctccttggagttcttcagctgcttgtacgagatccaggaggaggagtttatccagcaggccctgagccacttccaggtgatcgtggtcagcaacattgcctccaagatggagcacatggtctcctcgttctgtctgaagcgctgcaggagcgcccaggtgctgcacttgtatggcgccacctacagcgcggacggggaagaccgcgcgaggtgctccgcaggagcgcacacgctgttggtgcagctgtaagtatccctggggtatcccctggggctgcttaggttcgtgtgttttttttttttttttttttttttgctctgttgcctaggctggagtacactggcgtgacctcagctcactgcaacctccgcctcccgggttcaagagattctcctgcttcagcctcccaagtagctgggactacaggtgcacgccaccacgcccacctaatttttgtatttttagtagagacagggtttcaccatgttggccagggtggtctcgatctcttgacctcgtgatctgcccgccttggcctcccaaagtgctgggattacaggcatgagccactgcacccggcccacgatttttttttttttttttttttaaactaagtctctcttggtctcctaggctggtgtgcagtggcgcaatcttggctcactgcagcctctgcctcccgggttcaagcgattctcctgcctcagcctcctgagtagctgggattacaggtgcccatcaccatgccaggataatttttgtatttttagtggagatggggtttcgctgtgttagccaggctggtcttgaactcctgacctcaagtgatccacccaccttggccttgaggttcatgctcttaaccagtgcctctcagctgggggtgattttgctctgacatttggcgatgtttggagacacgtttttggtggtcacaactgggaagcaaataatactactgacatctagtggataaaggccgggaatgctgcaaacatcctacagtacacaggacagtccctctggccccaaagtgtcaatagtgccacaaagactaaacaacacccattgggactaaattgaggtcgatgtctgggagaatttattcaatcaacaaatattactaagtccctttttcttgagagagtgtggctctgtcaccaaggctggagtgcaggggcacaatctcagctcactgcaacctccaccttgcgtgtctcagcctcctgagcagctgggaccacaggagtgtgccaccacacccagctaatttttgtatttttttagtagagatggggtgtcaccatgttggccaggctggtctca

SEQ ID NO: 22471 - DNA, 2300 bp, Homo sapien
tcattgcaacctccgcctcctgagttcaagtgattttcctgccccagcctcctgagtagctgggactacaggcacccgccaccaaaccccagctaattttttttttctttttttgagacagagtctcgctctgttgcccaggctggagtgcagtggcgcagtctcggctcactgcaacctctgcttcccgggttcaagtgattctcctgcctcagcctcccaagtagctgggattacaggtgcgtgccaccaagcccggctaatttttgtatttttagtagagacggggtttcaccatgttggccaggctggtctcaaactcctgacctcaggtgatctgcccgcctcagtctcccaaagtgctgggattacaggtgtgagccactgcgcctggctatgaaggcttttgtgtgtgtgtgtgtgtgtgtgtgtgtgtgtgtgtgtgtgtgtgtgtgtctgaggggtcttaattgattaggagcatgaaacaaagttggcatgatgcaggagacagagggaattataaacttgctcttccatcagaattcataaattctgctaacacatattttgtagagatggggcctcactgtgttgaccagtctggtgtgaaactcctggcctcaggtgatctacctgccttggcctccccaagtgctaggattacaggcatgagccattgcacccagtcacatcttcctcttacactaaccctcctgtcttcttcttataaagactcttgtggctgggtgcggtggctcacgcctgtaatcccagcactttgggaggctgaggcaggtggatcacgaagtcaggagatcaagaccatcctggctaacatggtgaaaccccatctctactaaaaatacaaaaaaaagagaattagccaggcgtgttggcgggcacctgtagtcccagctatacggaaggctgaggcaggagaatggtgtgaacctgggaggcggagcttgcagtgatccgagttcgtgccactgcactccagcctgggcaacagagcaagactctgtctcaaaaaaaagactcttgtgattccatgggtcctgcccagataaccaggataatgtccccatctgaagtgccttcatttggtcacatatgctaagtctcttttgctatgtagggtgaaatgtcacaggttctggccattaggacatgaatatctttggggaccatcatcctgcctaccgcaaagtccctctcatgccactcttgtgactgagagaacagaaaaaaaatagcagacctacgtgaggtccttaataattctccctgaggctgggctcagtggctcatgcctgtaatcccagcactttggaaggctgaggtgggcggatcgtttgagctcaggagttcaaggccagcctgggcaacataagaagaccttgtctctaccaaaactacaaaaacttagctgggcatggtggcgcatgtctgtggtcccagctacttgagaggctgaggtgggagaatcgctggaacctgggaggcggaggttgcagtgagctgagatcacgccagtgaactctagcctgggtggcagagtgagactctgactcaaagaaaaaaaaaaaaaaaaaagccagggacggtggctcacacctgtaatcctagcactttggaaggctgaggcgggtggatcacctgaggtcaggagttcgagaccagcctgaccaacatggtgaaaccctgtctcttctaaaaccacaaaaattagctgggtgtggtgtccggcgcctgtaatcccagctactcaagggaagctgaggtgggagaatcgcttgaacctgggaggcagaggttgcggtgagccaagatcgcagagccagggccacagagtaagactctgtctcaaaaaaaaaaaaattctccctggaagaggcgcagtcgcagttttgataatacactctaccacacacactagtgaaatgaggaaaacaagaggaaagcggaaagagagtgactgttttgtcaagagatccaggaagagacagcagaagtgaaaatctttttcatcagccaagtggctcctcggatttcttaatctccccccgaacttcctcttctccacccagaacagccattggtgagtggggcagggcaggagggaactgaagagtgagaaagcattatttcagcaaaaggtctttcctcccttgctctctcctccaaccactggctcagcctctccgcccgctgcctgtgaatgatgcaatggaaggtgtgctggggtcgccctgtgtcccgtgcataggagcatctcagcctccaggtcctctcct

SEQ ID NO: 22472 - DNA, 2300 bp, Homo sapien
tttatcccaagtgaactctccccctaaaacctctattacagggaatgctatgatgccatgtggtagatcagatgaccactctgaggatctggatcagcctccttccctggcatcctcagggcttgctccataggttcaggagcaaagtggccgaggtggactacaccacctacgtcactgatgaatgcccacctagctggcagtagcaagtgctgatcccccagtgtggtacagtttcctaggaagaccaaaaagccaaatacctgggcccgtgaggattacactggagccctttcatcctgggctgggcagggagtttttcctccctcgagtaaacaactctgggcttgttatttgcttttcttgccctttgcacttctgccaacagcagcatctgtgtatgcactgaatggccctattcaccctcatgttaacccgcacagtattgcttctgatcaaggagctccatatattaggaagtcagtggggggcagtccatgtaccccattaccccaaagcagccagcctcatggaacagcacggcctgtttgagactgggttacagggccagtttggagtcatcatctttggggtcggggtgctgttacaggatgggtaaccactctgaaccaggggtacatgccagatgatcccagattacaaagacctgtgaactcaagagtgccatttctttcttttatttttctctctcttttttttttgagacggagttttgctcttgttacccaggctgaagtgcaatggcatgatctcagctcactgcaacctctgcctcctgggttcaagcgattctcctgcctcagcctcccaagtagctgggattacaggcacatgccaccccgcccggctaattttttgtatttttagtagagacggggtttcaccatgttggccaggctgatctcgaactcctgacctcaggtgatccacccacctcggcctccctcccaaagtgctggaattacagacatgagttgctgcatcggccaagagtgccatttcttaggaccacacccgatgactcactcttcaaatttttatttgttttgttgttattttttgttttgagacagagtttcgctcagtcacccaggctggagtgcagtggcaatcttggctcactgcaacctccacctcccgggttcaagccattctcctgcctcagcctctggagtagctgggattacaggcggcgccacaacgcctgattaatttttttgtatttttaatagagacggggtttcatcatgttggccacgctggtcttgaattcccgacctcaggtgatctgcctgccttggcctcccaaagtgctaggattacagaggtgagccaccgtgaccggccttcactcttcaaatgtttgcttcctgttcctgctaccctgaaccctgctgttgaggggttctagtgtctacaagggaaccgctgccaccacgaggaataacacagtaagttgtgtaagtggagaccacctctgggccgtttggggtaccttgagtgtgtcactatggggttaggcagtgactaatttaggcaggaaggggaaagatttgctgctacacttggggccaaggaggcctgtgaatagaacctagaggcgtcccaggggagtctccaactaacaccatgtcccgactccctatctgtccacagccctccctccttggacaaggacaaggcctgatctgggtgcactgagacctccctcccctatgcagggcccagagtgacaaagagggtctgtgtccccttccctttgcagaagcacatcaagcccgcacacaggctctaccttcctctacccaaccccctctccactcctgcagacccccgccttcctgcaggtccccctccggcccctccctgctccgtagggcacgtagacccggatccccagctcccggaccccttccgactgctcccttcgccactcgcgcggcttccactcctggactcggcctccacccctgggcttggcctcaaagcctcctcagttgtcggccctggaaggtgcccagcggcggcagcgccagacgcgccccgttagctcagcgtcgctgagcatccgcagccgccaccaggccccgcccagcggccgcagccagccaggccgcgcccgggacgactgcagagcgcggtgagtgaacgcggccagagggagggactcaggcgtcccaggtccccgccctgcccctccccgggggcccgacatcccgaccctcagctccctctttttcttttggctccggcagtccgttttagggccgcagagccgc

SEQ ID NO: 22473 - DNA, 2300 bp, Homo sapien
tcactatggggttaggcagtgactaatttaggcaggaaggggaaagatttgctgctacacttggggccaaggaggcctgtgaatagaacctagaggcgtcccaggggagtctccaactaacaccatgtcccgactccctatctgtccacagccctccctccttggacaaggacaaggcctgatctgggtgcactgagacctccctcccctatgcagggcccagagtgacaaagagggtctgtgtccccttccctttgcagaagcacatcaagcccgcacacaggctctaccttcctctacccaaccccctctccactcctgcagacccccgccttcctgcaggtccccctccggcccctccctgctccgtagggcacgtagacccggatccccagctcccggaccccttccgactgctcccttcgccactcgcgcggcttccactcctggactcggcctccacccctgggcttggcctcaaagcctcctcagttgtcggccctggaaggtgcccagcggcggcagcgccagacgcgccccgttagctcagcgtcgctgagcatccgcagccgccaccaggccccgcccagcggccgcagccagccaggccgcgcccgggacgactgcagagcgcggtgagtgaacgcggccagagggagggactcaggcgtcccaggtccccgccctgcccctccccgggggcccgacatcccgaccctcagctccctctttttcttttggctccggcagtccgttttagggccgcagagccgccttttaaaaacacaccctgcatcccttccctgccctggggcttcgggcccaccagccccttggatcccttcccctcttgcaggatccgtgaatccagagccccaagccccagccccagccccatcctcattaaaattctgagtccctccctccatccaggagtcaggaatgtaggccaaaaatatcgctgccttccagacccaggcggctaggcttgcaacacctgctcggaaaacccgagtctgagctttaatggttctattatgatgatcatgatgatttatttttaatagagcagagtctccttatgttgcccaggctggtctcgaactcctgggctcaagggatcctccctcctcagcctcccgaaatgctgggattacaggcgtgagccaccgcgcccaggcctgattgttcttttgagccaagaatctgggcctcagcctaggcatcctgtggagcccaggaatccgggcccccaactgctaccgcgctagctcccaggaattttgcccccaacacaccccacccctatccactgtgatatctgagacctgcgtccagcccgagtcccttaccctgcggcgcccggtgccagtgggtactaggggagcattttgccgccccttcaagtccttaaatacaggaatctagcctctgtttcttggggagacccatcagtcagggatcgtagcccagaaccacctaaagcccaggaatactgctctcaattctgctctccctcagggctccaagagacagagatcctagcccccccattgaactgaggggcctggtcccccaatccgctgcgacccaggtgtctaaggtttcatccggcaaggaaggggtgggggcggaacagaccaggaaggagggggtaggaagggagcggaagaaaggagtgaggtgagacgggggcggggacctgagctggggggctctgcactaaacaaaccctaaacatgcggggtttctatggtaacggtcttccctggcctacccgggagactcctctagggctgtgtcgaggagggcagcccccaggagtctccacgccgccagctgttgtgtcttcctgttttgtcaccacggcaaccgtgacctcagccctccaccctgctcactggggtggggcgggagctccacgctacttttactctggggggcgtggtctgctcttggccccgcctcggggcggggctgggatagcccagactcggggaagtccctgtccaccgccctagccggagctgcgccccgccccggccccgcccccgtcccgcccgcgctggctccccagccctccaaccccacccagccctcagacccttccagctgccgctgtcgtctttgcttcagccgcagtcgccactggctgcctgaggtgaggttgtggggaccccagagggcataagcaacagtctagggtctttatggccagagagaggaatgggctgggtctcagaatgtctgggtccctagaaagactggggctgggccaggattcttggggttctgcagag

SEQ ID NO: 22474 - DNA, 2300 bp, Homo sapien
ctccaagagacagagatcctagcccccccattgaactgaggggcctggtcccccaatccgctgcgacccaggtgtctaaggtttcatccggcaaggaaggggtgggggcggaacagaccaggaaggagggggtaggaagggagcggaagaaaggagtgaggtgagacgggggcggggacctgagctggggggctctgcactaaacaaaccctaaacatgcggggtttctatggtaacggtcttccctggcctacccgggagactcctctagggctgtgtcgaggagggcagcccccaggagtctccacgccgccagctgttgtgtcttcctgttttgtcaccacggcaaccgtgacctcagccctccaccctgctcactggggtggggcgggagctccacgctacttttactctggggggcgtggtctgctcttggccccgcctcggggcggggctgggatagcccagactcggggaagtccctgtccaccgccctagccggagctgcgccccgccccggccccgcccccgtcccgcccgcgctggctccccagccctccaaccccacccagccctcagacccttccagctgccgctgtcgtctttgcttcagccgcagtcgccactggctgcctgaggtgaggttgtggggaccccagagggcataagcaacagtctagggtctttatggccagagagaggaatgggctgggtctcagaatgtctgggtccctagaaagactggggctgggccaggattcttggggttctgcagaggagagggctgaggacctggactgtggaggtcatacgtctggaagagtggggaaggggacctggactccggggtctgagggaggaggggctgggggtctggactcccgggtccgaggcaggaggggctggggggtctggactcctgggtccgagggaggaggggctgagggcctggactcctgggtctgagggaggaggagctgggcctggactcctgagtctgagggaggaggggctgggtctgcgggagtagagagatggggactcgtaggtgccctagttggaggctggaatctggtacgtggaggtcctttaggaggggaagcgcttagggttaggtgtcctgggtttgggaatgagaatggaaggaattcagaattactgacccctccccatccaggggacagacagaatcggaactttgggctcctgaaaggccgagggaggggggtgttaagatccagccccgtgcttccgaagtgcagaaggagctgggaaaggaggagaagacagggctgcgtcccgcacctctgggtgccgagagccgaagctggggttccggggcccgattctcagcgtgagcgatgggtgtggcgtctggagtggacgagggaggacactgaggggctgggtgtggcccggagagtcgggtgcgctgcgaggaatcccggaggggtgtttcctcaccctccagggtctggctgcgcattcctgagctctgatctcgggcgatggctggaggccctaagggcggggtggacccctcccctcccctcccctcggcgcgcccccctcccctgcgcgcccccctccgcggctagcccaccttccgcgggggacagaatgagtgacgccctcgctcgtcctcctcccctgcttgggacggggcagtagcccgccttctagagcacgggacgctgggccagtcccgatttccttctccttcgagggtcctggaggggcgtgggggcaggcagtgtctggctccgggtggagcctcccaggtgctcccgcaagccccgaatggcgattagggaggccgtgggaggcgtagctgggcctcgggcctgacgccagcaccgcgtgcagtttccggcctggagcctgagcccctcagaggcccgggtccctgcccactccggtcttagagatgctcttgggggggctctcagcccatgtttatagggatccagaaatgcaggcctccaaccctgagagtcggggtccccaccccccggaaatccgggagagggcgggcagccccggaggcgggcgggggtccgggcaccgcctcctggtccctgacacattccagatgcctgggccgactcgaagcccttataaggcgcggagacaccggctctggctgggccgcccgcctccacagccgccgcccagggttctcccgccactgccgcccgcacccccgcccccgcggggttaagatcacacacgcgcccacgccggcccgcggggcgtgcactttcgctgggttccgtccgccgcagcccaaacagttaact

SEQ ID NO: 22475 - DNA, 2300 bp, Homo sapien
agccagagacagagattcagagagccagagacacagagagattcatagagacatatagagagattcagagagcctgaatcacagagattcacagagccaacgagacaaacagagagattcatagagccagagacacagattcggagagtcagagagacatagaaagattcatagagccagagacacagagattcagagagtcagagagacatagagagacattcatagagccagagacacagagagattcatagacatatagagagattcagagagcctgaatcacagagattcacagagccaaagagacaaacagagagattcatagagccagagacacagagggattcggagagtcagagagacatagaaagagattcatagagccagagacacagagattcatagagacatagagattcatagagccagagacacagagattcagagagtcagagagacatagaaagacattcatagagccagagacacagagagattcagagtcagagaaacatagagattcatagagccagagacacagagagattcagagtcagagagacatagagagacattcatagagccggagacacagagagattcagagtcagagagacatagatttatagagccagagacacagattcagggagtcagagagacatagagagacattcatagagccggagacacagattcagagtcagagagacatagacattcatagagccagagacacagattcagagagtcagagagatgaatagattcagagagccagagacacagggagagtgaatcacagacacagagggacggggagatccccagaaacagaaagagattcatagagccagagagacaaatagagattgggtcagagagaaagggacagagacagagacagagaagagaagagggagagagattgggtcagagagaaagggacagagacagagaagagaagagggagagagagactgagtcatagacaggagagagacccccctagcatcagagagagagagagagatcaacagagccagagagggacaagtacagagaaacagatggaaccagagagatataggaagagacaaacaaaaacagagacggagttgcagaaccggaggaagggagagagacagagacaaaggcatttataaagacgggtggaggtgaggagagagagggagagacaggggcaagcatttagagagtgactcccagagaggaagacagagacggactcccaaagagatcaagttgcagagggagggggagacagagtcacagcctgagagagaatagagattcacagagccagagagacaaagacagggaaagaaacaaactcagggagacagaggcggaagaatttatcagacgtagagggagagacagagggagactgattcacagtgaggcagaccaagaccccgagaagaaccacgacaccaagacccagagatggcgacagatacagatggagacacacagcagaggaaatagagaaatagaaagaaatagaaacagcatttctcggagacagggaaaagaaaacagatccactgagaggcagaaacagagacacatcgagaaagctcgctccaggaatagagggagagggacagaggtcacaagaaagacacacgcaggcagagagctacacaaataatggagaggccaggggaggaaataaagactcagccggcatcggagaaagtgagaaccttagcgccctgcctgtccactgctggacccctagcgtggagcataaagtttgttgaaggaaggagaggggcagggtcagacacagggaccccagggcgcccacaggacacacgaggcaccctagtgggggaggaacgcggggcaggatgacagattgcagggtggtgggggggagccaggctcagaggatgcccctccctccagccagcccccggagtgggtgtgtgcacgtgtggggggcggggagggaggacatttgtcccgtgtctccgggaggggagcgcctttaagccgaaaccccgccctctcggtcgtcctggcaacgcctcccccaacccggggctcccacatttcagcaggtgccggagctggagctcccaccgccgccgcccgtgcctccggctgccggcgcccctgcctttggctcttcctccccactcgcccgctccccctggcggagccggcgcgcccggggtgccgctccctgcctggcgcgctccgcacctggaggtgccttgcccctctcctgcccacctcggaatttccctgtggctcctttgatc

SEQ ID NO: 22476 - DNA, 2300 bp, Homo sapien
atcacgggattgcgtggcttggggaaaaatcttgcaggggtcgggggagaatcgtgggtaaggaatttcaagtccttgagatctgggttgaggagctccctcgctggaatttctaggttcctaagtggaattggggaggccacagagatgaactgggatctcctgtttggagtctaatgttatgaaatcgggactccatgctggatgttgaagaagatctgtgattggaagtcccagcatgggaaaccggggtccagaacctctggtaggaagtttcagatcgtgtgttaggggagggggttttgggactcctgcttgagattttagagttcagggcactgaatcctagttggaaggatgagagaccgttgtttgactggggtgctctgatgaggatgctggattggtggtggtggtggggtccagctcattcatgatttttttttttgagatggagtctcactctgtcacccaggctgaagtgcaatggtgctatctcggctcactgcaaccttgcctctcaggttcaagctattctcctgcctcagcctcctgagtatctgggattataggtgtgagccaccgtgcccggctaatttttgtatttttagcagagacaaggtttcaccatgttggccaggctggtctcaaactcctgacctcaagtgatccacccacctcagcctcccaaagtgctgggattccaggtgtgagccacctcacccagtctcagctcctgattttgatgttctggaatctgtaatcgagattctggttctatgtctctgggttccaatgttctgggactcagcagactgtgaagatgttccaggattccaggtccaggagcctgcctagatctgggagggtggaattagggttctggagctaggttctggagtgaggaggaattggagcaagattgggttttaagacggggtgcaagaatgtggagaagggacgaggtcccagctgagagtcagaggggcgaaagggggaagctgagatcggctacctgggatggaggcagccagggtggccagggtgatggtgcccgtttccgaacccacagggctgcgagaggaccaggcagctcgcggtcaaacccctgagccgccaggcggaggatgggaggatgtcatgtgtgatgtcatcttaaattggggtatcaaatgaggtcaaggcacaggatcagagttagaaggtcatgggtcaagttcttggtgttagaattgggtgttaggctcaagatacaaatcttgagtgtaaacttcagtgggggcctctgctcaaagtcttagatagggctgaggtcaagggtgtgaagccctggtatggggttagagatccttggttagtgacccactttgggaatttctggatgtagttcagagacagggtgcaagaaaatgtatcagggcatcagattagggcatggagttaagactgggtagcctgggttagagtttctggccagctcaagttgtagagcatccagggttcaagcccaatgccctgtgctctgggatctaggtcctggctcagagttgaggttattgatccttgttggagtctggtgttcacaaccgggggcttcgatcgtcacacagagacagggctgcaggatgccaggtcctagagctgaaatcattgatctgcctaatagtttctgagtcactgatccacactcaaggttagggactctggtggcatctgatttctaaattagggtctcaggtcagcaggtgaggttaggttttggcagggggacctggttctggggttaagaagctcaaattagaatttctgctcggagtcacagtatttgggacccaggtccaaacacggttggagccaagattcaatctctgggcctgggctgaaagttgtgattagaaatctaattctggggttggggatctggatctggagctagaccacaggcagcaggtttggggagcccagccctgaggctgaggctcaacagttggtgtctctggtcagactctagggttggggtcatgggtcaggccacggaggtcagatctgagatttcgatttgggagtcagtgtctctggctagggcccagcatcccgggttgctgcatggggtcaagcactctggtcggtcccatggagctctgcactgtagcttcccttccacaggccccgcagggcgccccctgcctctgaggatgagtcactgcagcagccgcgccctgaccctgctgagcagcgtgtttggtgcgtgtggcctgctcctggtaggcatcgcggtcagcactgactactggctgtac

SEQ ID NO: 22477 - DNA, 2300 bp, Homo sapien
agtgtgtgttcctgtacaggtgaagtcgtagaggggagtactggggggcgttcccaagaagggaagcctgtgggggcctgcggaggggattttccggggcagaggagaacctgggagctatagcggtggagcaagaggaagtgagtcaagggaattctatatgatgagagagaagttggggaggatgcttcctggtacattgaagagagagtgggcttcaaagtgagttagggggatctcaagttgggggaaacagtgtgctgaagatcccgtgtgatgatgaagggctacgaggaggggatttggaggcagtgggagctgctgtgagtgcagaggggcgggtgggtggtacagtgtgccccctgctatgggagtacagggcagagattggaatggtcctgagtggagagacatttggggtctggaggaagccattcttgcgagtagaaaatgccgtggaactcacggaggaaatttttcttaatggaggagaaaacgatggttatgatatgagttcgtttaagttgtgggggggggggtggcggggtgggaagattcagaaaactcttctaaagcaaaagagagggtgggggttttcctggagtaaaggcatagtatggggtggggagtgagtggcttgtggggagacagtgggggctgtgacagggaatgggctggagatggcggggggggggcagcttgcaaaccagtgggtctgatgttgggtgcattagaattccccagggagcttttaaaaacttacatgcgcaggccacactgcagaccaaccatgtcggactttctcaggtgggactcaaacatccgaatttttaaggtcctcgggtgatttccaggtgtgttggaggctgcccgaggcaggaagggggcttccagggagaggaggctgactgagggtggctggtgattccgagttgcacaaactgtgagggtcagctgggattttctttttctttttcttcttcttttaatttttcctttttagttgaagagaggttgagagatttattttttcctaaggagaggaaactgtgggggaccatttggagtgatggaatgacaaaagccagaccggagggggctcgcggaggttactcccacggaagtggtgctactcgggcttcttaagttgtggagacgctcagggaaaagttgggctgacagggaagggttctagcgggtggagaggtggggcttgcaggggaagagtggggagagctggtgggcgccgcatggtgatggggcgggggtcgctaaggaaggaagaacgcgacgggggctcctggggaggaggcggcggcgtggggcttggcatcatggcggggggtggcttcccatgcgatgaggatcgtggagccccctggggcggaggcggcgcgggctaggggcgagggctgtgagtgtgagcggtggtggggactcctccgagtggggttagtgggatggtgggacgactttcttgggcagaagacaggagtggagagagatttcatcttatttattaattattagcggtggtggggactcctccgagtggggttagtgggatggtgggacgactttcttgggcagaagacaggagtggagagagatttcatcttatttattaattattagcggtggtggggactcctccgagtggggttagtgggatggtgggacgactttcttgggcagaagacaggagtggagagagatttcatcttatttattaattattagcggtggtggggactcctccgagtggggttagtgggatggtgggatgactttcttgggcagaagacaagagtggagagagatttcatcttatttattaattattattattattattattattattattatttttgagaaagagaagcagtggagccccgagtggaaggagtttctggagctgaggcagggattttgggggggggggggcggggactgggggaggtacctgtgccttcttctcctctaatgcgagatctcgctccttgccctccaccagccgccgaccatggccgcgctctgaccccctccccggccgcagcctcctcctcgccgcccccctccccagccccgccggccccgggccccccgcttctgcctgcgctgtgaacccccccccagccgccggcacggccccgcccccgctgccccggtggtggcccacggccccccggctgcccgtggtcaaactggagtcgctgaagcgctggaacgaagagcggggcctctggtgcgagaagggggtgcaggtgctgctgacgacggtgggcgccttcgccgcc

SEQ ID NO: 22478 - DNA, 2300 bp, Homo sapien
accaggaagagagagactgaaggtccctaggaagaattctgccaaggcggtttcaggaagagatgctgggaaatgtaggaaaaggaatacaaatcagtgagacggagaagcgctgagtgagagagacggatacgtggagagaagagggatgccggagcgggtgttaaaagagacaaatctggccgggtgctgtggctcctaatcccagcactttgggagactgaggcaggcagattgagctcaggagttccagaccagccaacatattgaaatcttgtctctaccaaaaatacaaaaattagccgggtgtggtggtgcacgcctgtagtcccggctactcaggaggctgaggtgaaaggatctcgcttgggcctgggagggtgaggctgcagtgacccgtgatggcaccactgcgctccagcctgggcgaaagagcgagactctgtctcaaaaaaaaaaaaaaaattgagagacagcaaatatttgctggaagagggagagggaactggttaggggagaatggattctagagtctgaaggccaaacagaacgagagagagagagagagagagagaaagaatgaggttgagggtaggcaggaggaagagcaagatggggagggagggggagagcaggagagaccaaactagtagagtcacagacagagaaaaagtcaaagacaggaaggtgatacagaggagagagaagaggaagaggagagactgacaggtgcacaaatcagagaagtcccagagatagcagaaacacacacagagacagagatagagagggagaggtaagccggagacagactcagagattcgcacaaaaagcaacgtggagactcagaagcaagcgcagcgtcaaggaatgctccatttctggtgtgttgttttcccagtattcaagaaatatttattgagtgccaacctgttctagacccaatctcggccaggggatgtggtggcaaatagacggacaagggcctgctctcctgaaacacactggagagataaacaataaataatatcatttcagtaaccaaaaagtgctttaaaaattaagctgaaggccgggcgcagtggctcatgcctgtaatcccagcactttgggaggccgaggctggtggatcacttgaggtcaggagttcgagaccagcctggtcaacatggtgaaacttcatctctaccaataaataaataaagtagctgggtgtgctggtgtgcctgtagtcccagctacttgggaggctgagaaagaaggatcacttgaacccaggaggcagaggttgcagtgagctgagatcgcgccactgcactccagcctgggcgacagtgagtggtaacagaatgacagagcaaggatgactttagatgaggtccttggagtagaccttgtggcagaggtcacagagatgtggattgtgagtaggaaagagaggtgagaaagtctgggggccaggcattccacccaccagaggcagccccaaagcccagaaaagtagcaggtcttcgaggaggcctgtgcggtgagcagatccaccataggacagaggcacagggtaggggctgatcagttagggccttggatccttgggaagaaatctgaattttattctagatctgatgggaagtgcttggagggttttgagcacaggcatgccatgatcatatttttattttcttatttatatttattttgaaaaagagtcttgctctgtctcaggctggagtccagtgggctgatctcggctcactgccaacctccgcctcccaagttcaagtgattctcctgcctcagcctcctgagtagctgggattacaggcatgtgccaccacgcctggctaatttttttgtatttttagtaaagacgggatttcaccgtgttggccaggccaatctgaaattcctggcttcaaatgatccacctgcctcggcctcccaaaatgctgggattacaggagtgagccactgcgcccggcctcatatttttatttaaacaagaacagcagaattacattgctgtgctgagcatacgtagacttcaggagtcaaaggggaaggaaggaggtagcgggctgttgccttcctctggttgctggaggcctggaccaaggtggagttagtgggatggaggaagtggaagaaggcatgggattttggaggctagagcctgcattggtggtgaactggatgtcatagaggagggaaggaaaaggaaccaggaagagaagaactctctgaattgggcacgcacatctctgatgggcaccgatgaggattgttaccaggaacgagga

SEQ ID NO: 22479 - DNA, 2300 bp, Homo sapien
ccccgtctaataaactcgatgaagaggagtgctgctttcattctgtgcccctgacagccggccctgccctgaggcctgcgctttctccaacatggaaatcaggccttccatccttcaagacccagggttctggccccagtctcctccctgaggcccaggactctgggtctgccaacgccttgaccaggagtccaggctccccggccctcctcctccctcagacccaggagtccaggcccagcccctcctccctcagatccaggagtccaggccccctgccccctcctccctcagacccaggagtccaggcccaggccttcctccctcagacccaggagcccaggcccccagcccctcctccctcagacccaggagcccaggcccccagcccctcctccctcagacccaggagcccaggcccccagcccctcctccctcagacccaggagtccaggcccccagcccctcctccttcagacccaggagttcaggccccagtccctcctccctcagacccagaagtccaggcccccagcccctcctccctcagactcaggagcccaggcccccagcccctcctccctcagacccaggagtccaggccccagcccctcctccctcagacccaggagtccagacccccagcccctcctccctcagacccaggagcccaggcccccaacccctcctccctcagacccaggagtccaggcccccagcccctcctccctcagacccaggagtccaggcccccagcccctcctccttcagacccaggagttcaggccccagtccctcctccctcagacccagaagtccaggccccagtccctcctccctcagactcaggagcccaggcccagcccctcctccctcagacccaggagtccagaccccagcccctcctccctcagacccaggagttcaggcccccagcccctcctccctcagactcaggagcccaggacctaggagaccaggttcctctcctctcagatccaagattctgggtacccaggccttcttcctctaccactcagaagtggggtaccgaggcttcttctcccttagggacccaagactcctggcctcaggccctcctccctgagacccggggccctgcctcccgcccctcctccctggtaaccccagtcagacttgctgccccgcccgtctcctgctgcccgggagactgcggagctgggactctcggcgccgctcttgccccttagtgaaatgaaagtcccatcaggctcggccccttcctccccgggcggcctccctccccccttcctcgtccccttaaaacacccgggatccctatggcaacaggcgccgggcgacaggtgcgggtgttatttacgggtcaagcccgaaatagccccgagggtggagggtggagggtggggggtgggcgggtggggacgaggccgggcgcgggcggaggccaggccggtggcggtggcgggcacagccggacgcttcggaggcagcgcggagctggggtcggcgcggggccgaggcaggagagcgagaggggcccctgctcgggagtcgggggtgggagccccgagggggggccctggcctggggctgagcctggcgcgaacccgaccgggaaggccctgggagcccgggggagggagacggactgatcccgaaggggcgcagcgtctcttgcgggtcgcggttggcctttgaaccctggggggactcagtcctggttttccgagccgcagtgcggaccacagccccatagtgtgagccccaggagggcccccggtcccatctgccccagccctcggggaggccccgtagcctcccgcctctggactccactctgtcttccggccaccggccccttttccaggctcagtagagacctcggatcttttctgaatggcaggggagacccctatccccttttcctgaattccagcgaggcccagtcctcttctgagccccagccagggctctgttcttctccttctgtggatgccggggtcctactgcctctcttgagacccggattgaattccgacctccccttgggagcttcccgggaccccaggtcttccttttccgaatcccagagggtccccaagtcctctgttctcaaactctgagcccaagggaaccccggccacatctcctccaaacacacacaggacctcaggtcccttcctgggtaccccaaactcttagccctagtggggtgctcagatctctcaggaaaaccagtttcccttttgttaaccccccagcggggaccccaaagcagccccttggagctgcaggga

SEQ ID NO: 22480 - DNA, 2300 bp, Homo sapien
ttaggacaggacggggtgggcacagggacccatccagcaagttattatttttgtagttattaagatagaaagtataggccgggcatggtggctcacacctgtaatcccgcctcagcctcccaaagtgctgggattacagcggtaagtcatcatgcccagacgattattttttatttgtatacgtttatggggtacaagtgtaactttattgcatggatagattccaaaatgatgaagttagggctttcaggtatccactaacccagtgacacacattgtatccattagataattctttttttttgatggagtcttgctctgtgacccaggctggagtgcagtggcgtgatctcagctcactgcaacctccgcctcccgggttcaagcgattctcctgcctcagcctcctgagtagctgggactatgggcgtgtgccaccacgcccggctaatgtatccatcatcataacacacaaccatttgaatgaatctcacaggcattgtgctgagtgaaaaaggtcaccctcagaaggtgaggcgatggacgattccatttatacaagagtctcaaagtgacaaagtgatagagacgtagaacagattagcaggtgctagggtgggagagcgattataaaggggcagcatgagggagttcctacgtggtggtgggacagttctgtgtcttgattgtggcggtggttctataaagccatacatacaggcaataaaatgttacagaactatacccataggcaaagaaaagggaggaggaaaagaaggtggaagaggaggaagagcaggagaaaagaaggaaaaggagaaaaggaaatagaaatagaaggaagaggaagagaaaaagagaaacgaattatgcacaaactggtgagatctgagtgacctctggaacctggttaaacgtgtgatgccagtgcaaagtctctggttttgaaaatgtgccatacgccgggcgtggtggctcacgcctgtaatcccagcagtttgggaggccgaggcaggcggatcgcctgaggtcagaagttcgagaccagcctgggcaacatggcaaaacctcgtttctactaaaaagaacaaaaaaaattagccaagagtggtggcggacacctgtcatcccggcaactcgggaggctgaggcaggagaatcgcttgaacccgggaggcagaggttgcagtgagccaagattgtgccactgcactccagcctggctgacagagattctgtctcaaaaaaaaaaaaaaaaaaaaaaagtactgtaattataagagattaccattggccgggcacagtggcttatgcctgtaatcccagcactttgggaggctgaggtgggcgggtcactagagaccaggagttcaagaccagcctggcccacatggtgaaatcccatctctacaaaaaattagctgggtgtggtggtgcatgcttgtaatcccagctacttgggagtctgaggcaggagaatccttaaacccatgaggcagaggttgcagtgagccgagatcgcgccactgcactccagcctgggtgacagagcaagactctgtcccccccgccccccaaaaaaaggttaacattgtggggagctggctagtgggtacacggaagctataaagctataggtattaatgtttgtttgtttgcttgtttgagacagtttcaccgttgttgtccaggctggagtgcagtggcacaatcttggctcacagcaacctccgcctcctgggttcaagccattctcctgtctcagcctccggagtagctgggattacaggcatgcgccaccatgcctggctaattttgtatttttagtagagacgggggtttctccattttggtcaggctggtcttgaactcccgacctcaggtgatccgcccgcctcagcctctcaaggtgctgggattacaggcgtgagccaccgcgtccggccggtattagtgttttaaaataaaaaattacatttacagaaaactcttggcagaacttcagataaggtaggacagagctcgggcgggtggggccacacacaccggattcatggggaagaagttatcatcgacggcttcttgtttcctgagtcggttgtgagaaggaaactgcaagagtggggcagagaaccagagtgtcagagcaaaacctcctctatctgcacatcctggggacgaaccgggcagccggagagctgcggccggcccagtcccgctccgcctttgaagggtaaaacccaaggcggggccttggttctggcagaagggacgctatgaccgcagaattcctctccctg

SEQ ID NO: 22481 - DNA, 2300 bp, Homo sapien
agaggttcccagaactacccgagccccgtgcgccaccggaacctgcacttactcgcagccatctttgtctccgcggcggcgacagcggcgaggacgcggagcaccctgggagttgtggtccctatgcgcgagaacccgctcccagggctgcgcgtgcgccctggagcacaagtagaggcgaaagcaaggacgcggagcactctgggagttgtggtccctctgtgcgacggcccgctttcggagcctgcgcgtgcgcactcgcgcagaacaaagatggagccgtggaggtaaaggaagtggtgtcaggagcaagcgcaagcctgactttgcggacctgcgtggaatctccttagtctcagcctagaagtcgctccggagtgactagtcctcctgctgcgacccacctaaggcggaacaaaatagtccccattttatagtttatgtatgaaagcccattttacagacgaagaaactgagcccgggagaaggtgaatgactaacctgtccttcgaggtctcagctcaacatcggctcgtcctggaagcgctaggtctcatcccagatgggttaggagctttctgcgggctctcacagtgctctgttaccgccattatagctcagatcacttaagaaactgacctggtctgggccgggcgcggtggctcacgcctgtaatcccagcactttgggaggccgaggcgggcggatcacgaggtcaggagatctagaccatcctggctaacatggtgaaaccctgtctctacttaaaaatacaacacaaattagccgggcgtggtggtgggcgcccgtagtcccagctactggggaggctaaggcaggagaatggcgtgaacccgggaggcggagcttgcagtgagccgagatcacaccactgcactccagcctgggcgacagagcgagactccgtctcaaaaaaaaaggaaactgacctggtcttggtctttcagtcggactggtagctgctgcttgagagcagtaacggagtctgagttccctctgtgcctgccaacatggcacagcgagggtctggcacgtaataggttctaatttttttttttttcttctgagattgagtctagctctgtcgcccaggctggagtgcaatggcgcgatctcggctcacagcaacctccgactcccgagttcaagcgattctcctgcctcagcctcctgaatagctgggattacaggcgcgcgcctccacagccggctaatttttcttttttaggagagacgggggtttctccatgttggtcaggctggtctcgaacttcccgatctcaggtgatccacccgccttggcctcccaaagtgctgggattacaggcgtgaacaaccgcgcccggcctagaggggctaatttttatctatctatctatctatctatctatctatctatctatctaacacagtatcacaccaagagcctggcacataataggtgctaatttttctctgtcaaccaatctatcaatcgatcaattaatcacagcaagggcctggcacataattggtgttaatttttatctatccatcaatcaatcacagcaagggcctggcacttaacaggtgctaatttttatctatctatctatctatctatctatctatccatccatccatctatctatctttcaatcacagcaagggcctggcacataataggtgcaaatttttatctatctgtcaatcaatgacagcaagagtctggcacataataggttcttatttttaaaacagacagatatctttctatctgtctatctatatttaaagacatggtctcactctatcacccaggctggagtgcagtggcacaatttatttattttttagacagggtctcgctctgttgcccaggctgctcttgaactcttgggctcaagcgatcctcctgcctccacctcctgactagtatttgtttctagagttaaataaatgaacaccacaggttatgactgaaccccctgctaatttttccacagtgccatagggctatgacacagtcacccacaggcccccacctcgatactctcttccgtaaatgaggatctgggtctggttttctgatgttgcctcatttcctgggaggggagagggtgcgaccaagccctggctccagctctagcgggtatctgcccaccatggccctggtgctgatcctccagctgctgaccctctgtgagtcacccctttcttctccctgggttcctggctggggttgggggcagagagagaggcaatggagacccagacaccctgcagggggaccaggcagc

SEQ ID NO: 22482 - DNA, 2300 bp, Homo sapien
ctggaggatcagcaccagggccatggtgggcagatacccgctagagctggagccagggcttggtcgcaccctctcccctcccaggaaatgaggcaacatcagaaaaccagacccagatcctcatttacggaagagagtatcgaggtgggggcctgtgggtgactgtgtcatagccctatggcactgtggaaaaattagcagggggttcagtcataacctgtggtgttcatttatttaactctagaaacaaatactagtcaggaggtggaggcaggaggatcgcttgagcccaagagttcaagagcagcctgggcaacagagcgagaccctgtctaaaaaataaataaattgtgccactgcactccagcctgggtgatagagtgagaccatgtctttaaatatagatagacagatagaaagatatctgtctgttttaaaaataagaacctattatgtgccagactcttgctgtcattgattgacagatagataaaaatttgcacctattatgtgccaggcccttgctgtgattgaaagatagatagatggatggatggatagatagatagatagatagatagatagataaaaattagcacctgttaagtgccaggcccttgctgtgattgattgatggatagataaaaattaacaccaattatgtgccaggcccttgctgtgattaattgatcgattgatagattggttgacagagaaaaattagcacctattatgtgccaggctcttggtgtgatactgtgttagatagatagatagatagatagatagatagatagatagataaaaattagcccctctaggccgggcgcggttgttcacgcctgtaatcccagcactttgggaggccaaggcgggtggatcacctgagatcgggaagttcgagaccagcctgaccaacatggagaaacccccgtctctcctaaaaaagaaaaattagccggctgtggaggcgcgcgcctgtaatcccagctattcaggaggctgaggcaggagaatcgcttgaactcgggagtcggaggttgctgtgagccgagatcgcgccattgcactccagcctgggcgacagagctagactcaatctcagaagaaaaaaaaaaaaattagaacctattacgtgccagaccctcgctgtgccatgttggcaggcacagagggaactcagactccgttactgctctcaagcagcagctaccagtccgactgaaagaccaagaccaggtcagtttcctttttttttgagacggagtctcgctctgtcgcccaggctggagtgcagtggtgtgatctcggctcactgcaagctccgcctcccgggttcacgccattctcctgccttagcctccccagtagctgggactacgggcgcccaccaccacgcccggctaatttgtgttgtatttttaagtagagacagggtttcaccatgttagccaggatggtctagatctcctgacctcgtgatccgcccgcctcggcctcccaaagtgctgggattacaggcgtgagccaccgcgcccggcccagaccaggtcagtttcttaagtgatctgagctataatggcggtaacagagcactgtgagagcccgcagaaagctcctaacccatctgggatgagacctagcgcttccaggacgagccgatgttgagctgagacctcgaaggacaggttagtcattcaccttctcccgggctcagtttcttcgtctgtaaaatgggctttcatacataaactataaaatggggactattttgttccgccttaggtgggtcgcagcaggaggactagtcactccggagcgacttctaggctgagactaaggagattccacgcaggtccgcaaagtcaggcttgcgcttgctcctgacaccacttcctttacctccacggctccatctttgttctgcgcgagtgcgcacgcgcaggctccgaaagcgggccgtcgcacagagggaccacaactcccagagtgctccgcgtccttgctttcgcctctacttgtgctccagggcgcacgcgcagccctgggagcgggttctcgcgcatagggaccacaactcccagggtgctccgcgtcctcgccgctgtcgccgccgcggagacaaagatggctgcgagtaagtgcaggttccggtggcgcacggggctcgggtagttctgggaacctctgggcggtcctgggactgaggtgcggcagggcaggggtggaagcgatggggtccgtgctggaggggaacgcagaagtcacgagggggctcctccagggcaggggtggcacga

SEQ ID NO: 22483 - DNA, 2300 bp, Homo sapien
agcctggacaaaagcgaaactccgtctcaaaaaaacaaaaacaaacaaacaaaaaaaaccatagtacatccaaaacatcacttcgccatgtaatcaacaaaagattattggtagtttacacactctgttatactaagtttttgaaatccagtgtcttataccacctcaattcataccagcaccacttcaaatgctcagtggccagttgtggctggtggctgccatactgaataagtgttcagaaccttaacctagtgcctggctggtggaccagcagtactgacaagacctgggaactcttcaaaaatgcagaatcccatgccccaccccagacctacagaatcagaacctacagtttggccgggcgcagtggctcacccctgtaatcccagcactttgggaaggcagatcacttgcggtcaggagttcaagaccagcctggccaacatggtgaaaccttgtctctactaaaaatacaaaaattagccgggcgtggtggtgctcgcctgtaatcccagctacttgggaggcggaggcaggagaatcacttgaaccctagaggcggaggttgcagtgagccatgatcaaaccattgcactgtagcctggaagacagagcgagacgccatctcaaaaaaaaaaaaaaaaaaaagctggccgggcgcggtggctcacgcctgtaatcccagcactttgggagaccgagttgggaggatcacgaggttaggagatcgagaccatcctggctaacacggtgaaaccccgtctctattgaacatacaaaaaattagccgggcatgggggcgggcgcctgtagtcccagctactcgggaggctgaggcaggagaatggcgtgaacccggaaggcggggcttgcactgaaccgagatcgcgccactgcactccagcctgggcgacagagcgagactcagtctcaaaaacaaaaacaaaaaattagctgggcgcctgtaatcccagctactcgggaggctgaggcaggagaatcccttgaacccaggaggccgaggttgcagtgagccgggatcgcgccactgcacttcagcctgggtgagagtgagactccatcgcaaaaaaaaaagctacattttaacaatcccccgcccccatccctgcaggaactccggtgctaattaaagtgtgagtagggcagttccagggcagagggcagagattttcaatcagcaaggcacattgggatcatacggggattttcacaagacacagattccccagtcccacctccacccaagccaactcaattcagaatgggggagaggaaagatgaaaaggaggaggaggatctggacttttttttggtgctcaggtgttaaggcataagcagggttgagaacgtctcatttagaggggttaagagcgtattgggtaggtggagaggaacgcggggggcgatggtggagaggttataatgggtatggggatagataaggggatgccgtgggggtgcagacacactagaggggacccgagggcggcgatagggctttaggggtacaagatggagggatgtagggggacgggggtggacgatgcaagtttgcgcctggagcactcacgcaccgaggcccccgacgacgaaggacacgaccagcactggctccttgtcccaggcattcttgaggaaggcgccgactcctgaaggggtggcaagaagcgtcacccctgcaagtagctgcccccggtgacctctaaccctctcgtgccacccctgccctggaggagccccctcgtgacttctgcgttcccctccagcacggaccccatcgcttccacccctgccctgccgcacctcagtcccaggaccgcccagaggttcccagaactacccgagccccgtgcgccaccggaacctgcacttactcgcagccatctttgtctccgcggcggcgacagcggcgaggacgcggagcaccctgggagttgtggtccctatgcgcgagaacccgctcccagggctgcgcgtgcgccctggagcacaagtagaggcgaaagcaaggacgcggagcactctgggagttgtggtccctctgtgcgacggcccgctttcggagcctgcgcgtgcgcactcgcgcagaacaaagatggagccgtggaggtaaaggaagtggtgtcaggagcaagcgcaagcctgactttgcggacctgcgtggaatctccttagtctcagcctagaagtcgctccggagtgactagtcctcctgctgcgacccacctaaggcggaacaaaatagtccccattttatagtttatgtatgaaagccc

SEQ ID NO: 22484 - DNA, 2300 bp, Homo sapien
gccaatgactgccagaaacctccagaagccaggggagaggcctggaagattctcacaaccctgtcgacaccttgccttggatgtctagcctccagaactgtcagacaggaatttctgtgcttgagggaccctatttgtgataagttctgggagtccaagcagactaatacaactgtcttcagagtttcaggcatccagacctgatgctgttcctcccccatttgaaacccttcagtggctccttcactctcaaggaaaaaaaaatatccagacttcttgtcctggtgttcctggcctgccaagatctgagccctgcctgctgtttaatcctcattgattgattgattgattttgagacggagtctcactctgtcacccaggctggagtacagcagcatgatcttggctcactgcaacctccgccttccgggttcaagcaattctcatgcctcagcctccctagtagctgcgactacaggtgcgcaccaccacacctggctaatttttttgtattttagtagagatggggtttcaccatgttggccaggctggtctcgaactcctaacctcaggtgatccgcctgcctcagcctcccagtgctaggattacaagcgtgagccaccatgcccagcccatccttattctcagcaaggaggctattgcagtcattcagcccagacagctggagtttgcaatggcagccatagggatggaggagaggagaagggtccagagacactcaagaggcggaatgaatgagtcgagaggagtgaatcctggcaggggtatgggagatgtgaagagcttgggctttcacctgtgagcggtgccacgcattgagaggcccccgggagacatcagagaacccatctgcgttgtcagggaagctccacgggagatggcccttccaggggcccggcacagggccagacacataatgcatgctaaatgactgaatatataagctaaatgactgaatatatcagcaagccaagaaaggctgggcatgtggaaaggcagagattgcggggggcggtagtttaggccaggggaccccaaaaccgggggatccgcactcacctacctgctcgatctcccggcagcgccgacctagtgcctggtactttctgcgatttaattcccgctggcgccgccgccgaccccgggctgcctcttcctcttcatctcgctcccggagccctgagccgcccagaccacctgacacaaactccacttccgtctccagctcgctctccaggatgtggccaccaaataggggaggcaacgccaactctgagcctggcggcgctgagaactcctcaaagcccacggctgccatggtcctgagaggcagggaaaggctcaggggccctggatcctggacccccagccccttctcccactgaaccaggagcccagaccccaacccctcctccctgagatcctagaatccaggcccccagcccctcctccctcagaccgtagaatccagctcccagccctcctccctcagacccagaagtccaagtccgcaacccacccttcgcagcacccacagggttcaagccctgaccccctcctcccaggatgcaagagtccagacctccagactttttctctccaaggacccagggagtccaagccccaaccctcaaccagacgcaagagtcctggcttccaacctcctagtctgtcagatccagcagtccaaacccctaaccttctcctccctcaggatgaccccagtccataaaagggttctaaggtaaagcagttgcatgaactacaacccccatcagacctcagcgtaaaagctcatatggttgcacacaatgcagctgcactgttttctgggattcgcactttttcacaagggctcagccacatacccttctctctgctccaattccatctccgcgacctccggaagccccgggcctcagagcttccgacctcttcaatctgtaggttaagccgttcgcaaaactacttgtcccatcaggctcagcagccgaggacggcgggacgtggccctaggccttgtgggagttgtagtttcctgtttccggcttcgcttcggcccacccccacgtccaccccgaatccctgcttaaaggccttgctttcttgtctaacgccgcaaccagtcctctgagttgccaacgtctttcttcttgtctcgacgccccgtcgtccggccacagcgattctctgcttagcaggatcggtccacagcgggacgtgagtccctttcctcctcgcggcttaccgcctctctccgcctagtgccaggtgctaa

SEQ ID NO: 22485 - DNA, 2300 bp, Homo sapien
ccaggtctttgtacaggagtcccttgtaactaaagtggccctttccttcactttgttttttcttttcttttcttttttttgagaccatgtcttgctctgtcacctaggctgcagtgcagtggcgccatcatagctcacggcagcctcgatcacctgggctcaagcgattctcccgcctcagcctcccgatagctgagatgacaggcacgcaccagcacgcccggctaatttttaaatttttctgtagagacagggtctcactgtgttgctcaggctggtctcaaactcctgggctcaagcgatcctttcgcctgggccacccaaagtgctgggattacaggagtgagccatggcgtctggctctcctcacttcttagtagcccagcatctcctcagccttcagctctcacgttccacctccctgacccacacgccccactctagactacaggaggttgctttgtgataacgtgtcccgcacgctctgcgtgtctacagtaaggcacttcacacatttgtgattaatgaagtaattatttgataaagcctgtctgccaggcatcaaccaaagctctaagagggtagcgaacaatttttgctccttccacatccccagggccacaccatggtaggcgcatattaagacttttgggtaaacaggctgtaaaaggccgggagcggtggctcatgcctgtaatcccagcactttgggaggcccaggcgggtggatcatctgaggtcaggagttggagaccagcctggccaacatagtgaaaccccgtctctactaaaaatacaaaaaactagccgggcgtggtggtgcgcgcctgtaatcccagctactcgggaggctgaggcaggagaatcgcttgaatccgggaggcggaggttgcagtgaaccgagatcgcgccactgcactccagcctgggcaacaagagcgaaactccgtctcagacaaaacaaacaaacaactggccaggcgcggtggatcatgcctgtaatcacagcactttgggaggccgaggcgggcggatcacgagatcaggagttcgagaccagcctgaccaacatggggaaaccccgtctctactaaaaatacaaaaattagtcaggggtggtggcgggcgcctgtaatcccagctactctggaggctgaggcagaagaatcgtttgaacccgggagacggaggttgcaatgagccgagatcgcgccactgctctccaacctgggcaacagaacgagactccgtctcaaaacaaacaaacaacaaaaaaacaaaaaccaagctgtaaagacccgcctttttcctcacacacttcttctcccagacccaggagcccagcctcccgctccccgtggtctccatcacactcacctctcctctccgcgcaccactgtttctagcgttagtcgctcaccgatgacgtctcactctcgcgccgttatagaggcaaagctactctctgattggtccccgctcgcgatgttcctggccgcatttgaaacaacaactttattagcacctggcactaggcggagagaggcggtaagccgcgaggaggaaagggactcacgtcccgctgtggaccgatcctgctaagcagagaatcgctgtggccggacgacggggcgtcgagacaagaagaaagacgttggcaactcagaggactggttgcggcgttagacaagaaagcaaggcctttaagcagggattcggggtggacgtgggggtgggccgaagcgaagccggaaacaggaaactacaactcccacaaggcctagggccacgtcccgccgtcctcggctgctgagcctgatgggacaagtagttttgcgaacggcttaacctacagattgaagaggtcggaagctctgaggcccggggcttccggaggtcgcggagatggaattggagcagagagaagggtatgtggctgagcccttgtgaaaaagtgcgaatcccagaaaacagtgcagctgcattgtgtgcaaccatatgagcttttacgctgaggtctgatgggggttgtagttcatgcaactgctttaccttagaacccttttatggactggggtcatcctgagggaggagaaggttaggggtttggactgctggatctgacagactaggaggttggaagccaggactcttgcgtctggttgagggttggggcttggactccctgggtccttggagagaaaaagtctggaggtctggactcttgcatcctgggaggagggggtcagggcttgaaccctgtgggtgctgcgaagggtgggttgcggacttggacttct

SEQ ID NO: 22486 - DNA, 2300 bp, Homo sapien
gcctcagcctcctgagtagctgggactacaggcacctgccaccatgcccagctaattttttttttttttttttgtagagtcaaggtttcactatgtaagccaggctggtcttgaactcttgacctcaagtgagcgacccaccttggcctcccaaactgttgggattacaggcgtaagccaccgcgcctcgccgcaggggctaatcttgaaacaaactaggtatggaaacccagctgcaaaactccagagatcacctcaaggcgatcaatctacaacgtggccattgttgacttgacaccagcccatgctccaggtggcccgtgactcaagacagccttcggagcaagacacacataccttgtacccagcaccactcctgtatgcctcccattcaaagttcccctttttaagcccctctccccagcctaaagcttgaaatggtcttctaaagacattagcttggccatttctcatctgcgagcatttgatcagtaaagctgctttactttcaccaccccccacttcctctgcctctgagtagcagaaacttgagttggttacattatcggtctcttcccgcctccaggtctttgtacaggagtcccttgtaactaaagtggccctttccttcactttgttttttcttttcttttcttttttttgagaccatgtcttgctctgtcacctaggctgcagtgcagtggcgccatcatagctcacggcagcctcgatcacctgggctcaagcgattctcccgcctcagcctcccgatagctgagatgacaggcacgcaccagcacgcccggctaatttttaaatttttctgtagagacagggtctcactgtgttgctcaggctggtctcaaactcctgggctcaagcgatcctttcgcctgggccacccaaagtgctgggattacaggagtgagccatggcgtctggctctcctcacttcttagtagcccagcatctcctcagccttcagctctcacgttccacctccctgacccacacgccccactctagactacaggaggttgctttgtgataacgtgtcccgcacgctctgcgtgtctacagtaaggcacttcacacatttgtgattaatgaagtaattatttgataaagcctgtctgccaggcatcaaccaaagctctaagagggtagcgaacaatttttgctccttccacatccccagggccacaccatggtaggcgcatattaagacttttgggtaaacaggctgtaaaaggccgggagcggtggctcatgcctgtaatcccagcactttgggaggcccaggcgggtggatcatctgaggtcaggagttggagaccagcctggccaacatagtgaaaccccgtctctactaaaaatacaaaaaactagccgggcgtggtggtgcgcgcctgtaatcccagctactcgggaggctgaggcaggagaatcgcttgaatccgggaggcggaggttgcagtgaaccgagatcgcgccactgcactccagcctgggcaacaagagcgaaactccgtctcagacaaaacaaacaaacaactggccaggcgcggtggatcatgcctgtaatcacagcactttgggaggccgaggcgggcggatcacgagatcaggagttcgagaccagcctgaccaacatggggaaaccccgtctctactaaaaatacaaaaattagtcaggggtggtggcgggcgcctgtaatcccagctactctggaggctgaggcagaagaatcgtttgaacccgggagacggaggttgcaatgagccgagatcgcgccactgctctccaacctgggcaacagaacgagactccgtctcaaaacaaacaaacaacaaaaaaacaaaaaccaagctgtaaagacccgcctttttcctcacacacttcttctcccagacccaggagcccagcctcccgctccccgtggtctccatcacactcacctctcctctccgcgcaccactgtttctagcgttagtcgctcaccgatgacgtctcactctcgcgccgttatagaggcaaagctactctctgattggtccccgctcgcgatgttcctggccgcatttgaaacaacaactttattagcacctggcactaggcggagagaggcggtaagccgcgaggaggaaagggactcacgtcccgctgtggaccgatcctgctaagcagagaatcgctgtggccggacgacggggcgtcgagacaagaagaaagacgttggcaactcagaggactggttgcggcgttagacaagaaagcaaggcctttaagcagggattcg

SEQ ID NO: 22487 - DNA, 2300 bp, Homo sapien
atctgagtaggctcagtatagccacaggggcccttaaaatagaagaggggaacaaaaacagaggccgagatatgaagacagaagcagagtcagagagaggtctgagggtgctatgtggctggctccgcagacagagggagggccacgagctaaggggtgccagtgacccctagaagctggaaaagacaagggaatggattatcccttgaatcccccagaaggaacgctccaggatgacaccctgacttcagcccagtgaaactcattttggacttctgacctacaggaccacagataataaacctgtactgttttttgtttttgtttttagatggagtctcgctatgtcacccaagctggagtgcaatgatgcaatctcagttcactgcaacctccgtctcccaggttcaagcaattctcctgcctcagcctcctgagtaactgggattacaggtgcgtgccaccacacccggctaattttggtagagatggggtttcaccatgttggccaggctggtctcaaactcctgaccttgtgacccgcccaccctggcctcccaaagtgctgggattacaggcgtgagctactgcacccggccacacctgcactgtttgaagccagtaggttcatgctaccttccaacagcagacctaggaaaccccactggggaagggggtgcctgaccccagggagggtgggcagaagcactgcctccgccttggtaggacagtgctcgctggggtgggctccctgctgagggtctccctgcagagacaccccaggcccagaggaaaagacgcccggccgcccctcacctttccctcctcaccttcccttctgtgctctcgtggaaactgtccacacgggctgccagtgtgcacttggcggccaccagccgggccgctttccgccgcagatcctggagcaacggaaaacgggggtggaatctgtgtgagacagacagacagaggtaacagcaaagcaaccgcgcgcgctcctcctctggctctacctggggtcctggaagggggctttccacccttgggctctagaggtgtgtgctctcagctcctacttcacaggaagaggggatgagggcagggcacagagccatgtcccagctgataagtggccatcaggtaaggatgacagtaaggcacgctgacaacgaggacggtggtgactgtggagacgccggggggagtgcactcggcctggatgccagccccatgctaagcacgcccctcggatcatctcatcaaatattcaaatattgggctggtgtgatcattgcacccccttttcagatgtggaaaccaaggcttcaagtcatgtggccagggagacagccagcaggtgatggagccagggttccaatccaaactgcaaacagagcccagctgtcagccacagtgaagcgatggccagccctggcctcccttacaggcctgtggtgtctacggcctgtgcctggaccgatgtgagatggccaaatgaagaggcagaggcctgggtgacaagacatcaggctccctggggcaggtttaacccatatgcccagggctgtgaggcggtggcgatggcaggggtgcagtgaggcagctggagccccgagccccaggcccacccgtcctgggttctatcgcccactctctctcctcccaggatggggtgacctgccagcctccctgggtgtgttccagtagcagtgcctgacctaaagggtcgcagaaaagaccacaaaaaaaaccccacacagggctggggggtggggccaggaagtgcctgcccagccttggccatcagtgctattgttctccccatccctgggggaggccaggcagggcacagggccgtgagcctgaggtaactcgccacagtcggacagagcagggtctggacccaggcctgtctgtcccagaacctgtcttgtttttttttttttttgagacagagtctcactctgtcacccaggctggagggcagtggtatgatcttagctcactgcaacctccacctcctgggttcaagcgattctcctgcctcagcctcccaagtagctgggattataagtgtgtgccactatacccagctagttttttgtatttttggtagagatggggtttcaccatgttggccaggctggtctcgaacacctgacctcaggtgatctgcccgcctcggcctcccaaagtgctgggatgacaggcacgagccactgcgccccgccaggctagcgggcctgtgtgtgtgctgtcaggcgtcgatgctgggatggtgatgtgtcccgactgcaggg

SEQ ID NO: 22488 - DNA, 2300 bp, Homo sapien
ttttttaaagttcctcaggtaggccaggcgcagtcgtcacgcctgtaatcccagcactttgggagactgaggcgagcggatcacctgaggtcaggagttcgacaccagcctggccaacatggtgaaaccccgtctctactaaaaatacaaaaattagtcgggcgtggtggcgggcgcctgtaatcccagctactcgggaggctgaggcgggagaatcacttgaaccccgggaggcagaggctgcagtgagcctagattgtgccactgctctccagcctgggggacaagagcaagtcttcgtctcaacaacaacaacaataacaacaagttcctcaggtgactctgatgtgcagccaagttggaaagtcatcgctagatccgcggtgtgcaaagtgaactgcggaccgtggactgcggcacttgttagaaaagcagaatttgcattttaacacattcctaggtgattccggagatgtctgagaagcgatactttgtccaggggccacagtttgaatagcagagctctagaacaataactctaggcttcattcccgttgtctgtgtgtgggcctacgaatatgcattttcgcaagcattcctcctcccccttgcctcagaccattctgatgcgggtggtgctgaacggctccatcctccttcacgttcacctctccctgggatttatcttactttccaccacctagacaggaaggggcgaatctggcttcccatctcggttgtgtgaccctgggcaaatgcctcccagttcgtggaagtctcagtgtctagtaagttttcaatcacaagtcattcctcacattcattcatctattcctttgacaaatggttactgactacttcctgcgtgctaagtgctggagatgcaaaatccagacagggaaaccgaataattacgaaaatgacggtagacgtacaaaaataaatcctaacgaacaaggcgcgcaggagcgctccgcccgggagggaggtcagggaagttttctctccaagaagacaacagagctgagacctgaaacgagcaggcattagggagccacccgtctcctctgtaccttctgcagcgtcctcaacacactaaggaagcggagacgcagaggagaatgactgtcctaccatctggtcgcctaaccaggcaggggcaggacaaaaactccatgcctcacgcttcccaaccaattctgctatgcacggtgccagagacttaaagcagtgtctctggtccctttcttctttcactcagcaaataatgaatttcagagatgtgccaacatagaggcacttggagaaagacgaggcagctgagagggaagctgcttacctggccgggacgcaacggttgcgaccaagtcccacttctgccagctacatacaccctctttcacacgctctacgagcagctaccgcccactcgccacgctattggtcaaactagcatgaatgataacttttagggccaacgaagaaaaaggggtggactttcttgcccagctcctcccacttggccctgtggctgttttgattggcagatgacttcggctcggcccccgctttaaaggcacctgtctgtctcccattaggtacgcggcccctaacgcccacactccatgccttcctccgctttccccacccacttccaggaccaaccaatgacttcaaggcagaatatgcccccgcaaccaattaaaaagagctctaaacttgacggacgacttcccgcccctggactgtcgtagctcctcccccagaccaattgttttaagagaggggggcggatacatccaatcagcacgacacaggtctcttgattgacgttcgggtcctcgcgctggcgtgttgtgccctgaggcgggaggaggaggaggagcggggaggaaaacctgagccaatcctagcagcctgcgcgggaggccaatcgaacgccgcgccttggagcgatcacccaatccgcgaaagggggcagggcgcatccctgccaggaaccaatagaaagcctccaagggtcaggagcgacgttcagcaggagcaatgactggcctatattcgggactcgggggcgggtcggcgccagagacgagaagagaggaggggaggcctcctccgccgccgccatcttggaccgggcccggtcagcttccgcggagccatcggcagacgccgcggcctcccttgagccccgacccccgtcgtcagaacaaccccgggcccactcccccaaccccacttccgcttcgcgccgctatcgcgatagcgcccgggcccggggcgcgagaaaaaggcgg

SEQ ID NO: 22489 - DNA, 2300 bp, Homo sapien
gccgcagcctactgagtagctgggattacaggcgcctgccaccacgccaggctaatttttatatttttaatagagatggggttttgccatgttggtcaggcaggtcttgaactccgaacctcaggtgatccacccacctcgacctcccaaagtgctgggattacaggtgtgagccaccgtgcccggcccaaattttagaagtaggtggacaggatatttatagtgcgtgcatttttctggaaaaagggaaacagcagctttgagattttcagaaggggtccatatcttttaacaccaccaacaacaaaaatgaatcgctggggtgggtggtcgggaaccatggcaaggtttggagtagagaaggaacaacatgacttcattggaaaggtcccctggggctggtgaggacaggatagagggagggtggtctgggcaggagaggacaggcctgggctgtgtgggacatggtggcacgacagggaagggagccatccagtggggtttagaagcaggacggatagctgggcgtggtggctcacacctgtaatcccagctcttagggaggcagaggcgggaggatagcttgagcccaggagtttgagacctgcctgggcgatatagcgagacagaatggataagccttggcgactgactcgttgtggagagtccagcacagggctggggtttgggacagctgcacgtggctggaggagatgggaggaaccagccctgactttggggaacagaagcctgctgtaacctttgtaataggaaacgaggctgtggctgcggggctggagacccaacctacctgtttccagcaaggagactgaagcctagccgggctgggcccaccccgattccagtcaccccatgccagtcacaggcagacagctgagcatgtagacctcctgcctccttcaagacaggcgggagctctcccagcgtgtaggtgtccctagtgaaggagcgtgtactattggcacatcctttgacaaaaatggtagcgcactgtacatattctgcaggttggcgtttacttctgtagtatgtcacgaacttgtattttgaaaatctcggcgtagtattccatgctgcagagtcccactcacgagacgttcctctgctgatgaatgcgtcgtggtctccgattgtttccctacagtttgatgcttttacctgtcatgggtagattgtggggagtgggtcgttggccctccacggcccccaaacagggcaggtgagagcatctggggcctgtgtcaggctgcacttgctcctgcagcccaagtgctcaggccaggcctcttgtttcctccccaggcccctgagcctctgagctccttgaagtccatggcggaacgggcagccatcagctctggcattgaggaccctgtgccaacgctgcacctgaccgagcgaggtgagggacccaggatggtggggaagcagcgggccaaagaggaggggctgcccctgacccatcctcaccactgagggggccggacccccaccctccccacagacatcatcctgagcagtacatcagcacctccggcctcagcccagccgcccctgcagctgtcagaggtgaacataccgctgtcgctgggtgtctgtccactgggccctgtgcccctcaccaaggagcagctctatcagcaggccatggaagaggccgcctggcaccacatgcctcacccctctgactctgagcgtattcggtgaggggccacagggaagggggatggtctgggacttgagtcttacggaggaggcagtggctgaacctgtgaggctgtgggtagagcaccaggcccctgacttgggctctccactgaaggtcagcaccgccctgggtctttctgtaccacctccccccgcagggatgcatgtctgagcacccttttgatcacgacaggactagtaggcagctggcactgaccttcctgttgctctcacaggcagtacctcccccggaacccctgtccgacgcccccctaccaccaccagatgccacccccacactcggacactgtggaattctaccagcgcctgtcgaccgagacactcttcttcatcttctactatctggaggtacagcagggcccccggggcagcctcgggccccccggcttcgccgccaccgccgccgtcccccctcgggctggaggggtgaggtgggtgccccactgcggccactgggaccgcaccccctccctattcccactcctgggcccctgccccaaatccacctgtccccgtccccgccttccagcccagagatgttagaactgctt

SEQ ID NO: 22490 - DNA, 2300 bp, Homo sapien
cagcacttcgggagactaaggcgggtggatcacctgaggtcaggagtttgagaccagcctggctaacatggcaaaaccccgtctctactaaaaatacaaaaaaaattagccgggcttagtggcaggcgcctgtaatcccagctactcaggaggctgaggcaggggaattgcttgaaccagggaggtgaaggtcgaagtgagccaagatcgtgccactgcactccagcctgggcgacagagcgagactccgtctcaaaaagagaaaacaaacaaacaacaacaacagcaaaacaaattagccgggagtggtggtgcacacctgtaatcccagctactcgggaggctgagacacgagaatagcttgaacccgggaggggaggctgcagtgagagccactgcactccagcctgggcgacagagcgagactctgtctcaaaaaaaaaagcctgggcgacagagcgagactctgtctcaaaaaaaaaaaaaaaaaaaatggaggcacagactcttgtgtttcagagcccttttctccgtgccttcccccaccagcttaccctcttctccacctgctccccggctgcccgcaccttccgggcctccgcggcgaatttctttttccccttggtccttctcctgggtctggccatctccagcgttcccctgctttacagcatcttcctgtaagtgcgagaggctcccgcctctctccctccctctctccccattcagtgttcagactcctggcactatgtgagcccagcctgtcttgacttcaggatcccgccttctaagctttgtggtccattccgggggcagtcgtccatctgggcccagatccctgagtctatttccagcctccctgagaccacccagaatttcctcttcttcctggggacccaggcttttgctgtgccccttctgctgatctccaggtgagacggcccagacttctgggtctgggtttgaatgcgtgtgatctgggggccaccacctgcgtccaagagaggagaggcttgggcgtgggagcaggcaacgtactgagtctgagggaggaggcctaggctcctggactgctgggtccgaaggaggaggtgggcgggacgtaggactcctggatctgaaggcggaggggctgggagactgaactccttgagcccagacgaggaggggcttaggcgtccacatccctggcttcgaaggagccagacgtttggatataatggaagagcgtgtcaggagtggcttccgttcctgtctccttcagcatcctgatggcgtacactgtggctctggctaactcctacggacgcctcatctctgagctcaaacgtcagagacagacggtgagccaggcgggtccctgagagggcccctggggaacatggaaaggggttggggaagaggattgtctcacctccacctctctttgccccaggaggcgcagaataaagtcttcctggcacggcgcgctgtggcgctgacctccaccaaaccggctctttgacccccgcagcccacgtcccgctttcagaccccaggcccattgtaagcctaggtcacaacatctgtaaactaggagaactggagaagactccacgcccttccagctttggtatctggagatttccagggcccctcgccgccacgtcctgactctcgggtgatcttccttgtatcaataaatacagccgaggttgctgagcgcgctttgaaatctgcgtcctgaaggtgggggcagggctacagcggggcaggagccaatcaaatgtacgggcatgtttgtcggtgcagagcgctcttccgcaaggagacttgtcggtcatgtcggccaatcgacggccgcatctggtagcatcaggggcgggccaacttatgattggttcagatctgtgacaagaggcggttgctaggggataccacgagccgaacgcctagcattcgctgtgataaagggcgtctcagccaatcacctgtcgctacaggccagggggccgtaccaactaattcggaaccaatccgcggtcgaagtagggacaagaaaaaggggggcatcctctcgccaatcggaagtgcaaagaggcgggcgtgccagtccctggacagctacgacgccatgaatatcttgcccaagaagagctggcacgtccggaacaaggacaatgtcgcccgcgtgcggcgtgacgaggcccaggcccgggaggaggagaaggagcgtgagcggagggtgctgctggctcagcaagaggtaagctcggaagccggcagggcggcgctccggggcccagcgcgcaggcgccgcg

SEQ ID NO: 22491 - DNA, 2300 bp, Homo sapien
tctcccctctcagctcggtgtctgggctgaagcagacactgctggcggagtccgaggctctgaccagctacagccaccgggtgttctcggcctgggacttcggtctctgcggggacgtccacgtgcggctgcgccagcgcatcatcttgtacgaattaaaggtgcgattagggagcggggtctgcaactgggtagggaccagacaggaccgggctgagataacgcacagggcctaactcggtgatggggcctccggagagatgctaagcagctccttctccaagaaaggcaggtcctggggaatgagaaggttgagaggaggccgagatagggctgcccgagctccaagcgtgtaggaaaaggatgcgccagggctgggatcggtggctaatgcttgtaaccccagcactttgggagaccgagacaggtggatcgcttcagtctaggagttcgagaccagcctgggcaacatagggaggctccctctctaccaaaaaaaaaaaaaaaaagtttgtttttttttaagtaagcacaagaagcgggcggggcctaaggcaatttggttcaaagttaagtgatgggagcggccagcagggcgtcttgatacagctgaactggaacttcaggccaggaataaagcgcagggccacctgggggcggagcctctgatgggcagggctgaccaggggcgggtcttgggatgctgggcggagcctcaggggcggggcctggggtgctgagattgaccgcggagggatgggggcttgggttgctggatccggccgcgaaggggcggggctgtaaagggccgctggtttcctggagcgggtggaaccaggactgcagaggttgttagcgggtggggagacggctgcatcagttcacgttaaggaggatctctggagagccagacctggggaaccgggaggcccgcgccttgggaaatggagtccaagcgggcatctctcctgccttcaggtggagctggaggagacagtggtgcggcgccaggctgcggtgcggacgctgggccagcaagccagggtttggttggtgcgggtgctgctcaacctgctggtggtcgcgctcctgggggcagccttctatggcgtctactgggctacggggtgcaccgtggagctgcaggtgcggacggtcttggaagaggaagccagggggtcctggaacctacatttccaacggtggagggaggggacggaagtttgggatgccagagatcttagagaggaagtatgggagagggtatgttcggaccctggacttagggattttaaaggaaaaagagaggctgggcgcggtggcttacacctgtaatcccagcactttgggaggctgaggcgggcggatcacgatgtcaggagttccagaccagcctgaccaacatggtgaaaaacagtctctactaaaaatacaaaaattagacgggcgtggtggtgggcgcctgtaatcccagctactcaggaggctgaggcaggagaatcacttgaacccgggaggcagaggttgcagcgagccgagatcgcaccgctgcattctaggctgggcaacagagcgagactctgtctcaaaaaaaaaaaaaaaaagaagaagaagaagaagaggccggggggaggaccttaagcttggctcctccaggaccccaagcctctactcatggtccatcccgctcccaggagatgccccttgtccaggagttgccactgctgaagcttggggtgaattaccttccgtccatcttcatcgctggggtcaattttgtgctgccgcccgtgttcaagctcattgctccactggagggctacactcggagtcgccagatcgtttttatcctgctcaggttccagcctcacggggatggctgggaatgatgaagggtgggggcggtcagagggatgttggcgctgacaggtaagacacggaaatcctgctgataccgaatccagggattcaaatcctgactctgttggccaggtgcagtggctcacacctgtaatcccagcactttgggaggccgaggctgaggtcaggagttcgagaccagcctgacaaacatgatgaaaccccgtctgtagtaaaaatacgaatattagcccggcggtagtggcttctgtagtcccagctactcgggaggctgaggcaggagaatggctcgagcctgggaggtggaggttgcagtgagctgagatcgcgccactgcactccagtccgggtgacagagtgagaccctgtctcaaaaaaaaaaaaaaaaaaagaaagaaagaaagaaagaaatcctgatt

SEQ ID NO: 22492 - DNA, 2300 bp, Homo sapien
gtgccaccatgcccggctaattttgtatttttagtagaaatggggtttcaccatgtttgtcaggctggtctcgaactcctgacctcaggtgatgcacccgcctcggtctcccaaagtgctgggattacaggcgtgagccaccacgcccggcaaagagcctcgattttaagagaagggaaaagccctggaataggtcttaaacaggggaatacggtctgagttgcatcaaaagaaggtcccactggctcaagaactgagaatggattatatgcgggcacaagtggaagcaaggagaccatgtgagggccctctgtggttgttcacatgagagatgatgggggccggggccagggcagtgaaggtgcacatggtctctttgtccagttctgtttctgcccctgctggggttctctatctccttcctgggtctttgcccccctctcttgagtctctttacctgcccgtcttctctgggtcttttttttttttttttggaggcgacctccacctcctgggttcaagtgatcctcccacctcagcctcccaagtagttgggattacaggcatgcaccaccacgcctggctaatttttgtatttttagtagagacggggtttcaccacattggccaggctggtctcaaactcctgacctcaggtgatcctcccccctcggcctcccaaagtgctgggattacaggcgtgagccatggcgcctggcctgccccctctcttgagtctttacctgccatcttctctgggtctctgtcttcttctcggctcttcccgccgcagctcccttctctgtgtgcctgtacttcttatgggtctttgacccccatcttttgtagatgtagtttcccctttctcactgtctttttctccctttctccgaatctccctctggggcctctgtccctcctccacatctctgtcttcctcagggcctctgtttctctcactctgggtttctgcccccttcgctccgaggctctgtccctgtctcctaggtttctgcctctctttggggtgcctgcaccccagaactgtctctgaatctcccttggactttgccttcaatgactgtgtctccgcctctttgactctttccccatctggtctggtgggaactcgcctagtacccaaggccttagggttcatcttccccatttgtcccaatatgaggggtctccccataacccccgttcctggctgtcctttcacttcccgtctcccgggtctcccctctcagctcggtgtctgggctgaagcagacactgctggcggagtccgaggctctgaccagctacagccaccgggtgttctcggcctgggacttcggtctctgcggggacgtccacgtgcggctgcgccagcgcatcatcttgtacgaattaaaggtgcgattagggagcggggtctgcaactgggtagggaccagacaggaccgggctgagataacgcacagggcctaactcggtgatggggcctccggagagatgctaagcagctccttctccaagaaaggcaggtcctggggaatgagaaggttgagaggaggccgagatagggctgcccgagctccaagcgtgtaggaaaaggatgcgccagggctgggatcggtggctaatgcttgtaaccccagcactttgggagaccgagacaggtggatcgcttcagtctaggagttcgagaccagcctgggcaacatagggaggctccctctctaccaaaaaaaaaaaaaaaaagtttgtttttttttaagtaagcacaagaagcgggcggggcctaaggcaatttggttcaaagttaagtgatgggagcggccagcagggcgtcttgatacagctgaactggaacttcaggccaggaataaagcgcagggccacctgggggcggagcctctgatgggcagggctgaccaggggcgggtcttgggatgctgggcggagcctcaggggcggggcctggggtgctgagattgaccgcggagggatgggggcttgggttgctggatccggccgcgaaggggcggggctgtaaagggccgctggtttcctggagcgggtggaaccaggactgcagaggttgttagcgggtggggagacggctgcatcagttcacgttaaggaggatctctggagagccagacctggggaaccgggaggcccgcgccttgggaaatggagtccaagcgggcatctctcctgccttcaggtggagctggaggagacagtggtgcggcgccaggctgcggtgcggacgctgggccagcaagccagggtttggttggtgcgggtgc

SEQ ID NO: 22493 - DNA, 2300 bp, Homo sapien
atttgtatgtctcacaagttctcaggtgatgctgatgccagacctgggaccccaggttaagaaccaccgggctgcccgggtgtggtgtctgacacctgtgatcccagcactttgggaggccaaggcgggcagatcacgaggtcaggagatcgagaccatcctggctaacacggtgaaaccccgtctctactaaaaatagaaaagaaaattagccgggcgtggtggcgggcgcctgtagtcccagctactcgggaggctgaggcaggagaatggcgtgaacctgggaggcggagcttgcagtgagccaagatcgcgccactgcactctagcctgggcgacagagcgagactctgtctcaaaaaaaaaaaaaaaaaaccactgggctgaagaattaagacttgttggtcctgggagaggaagggcagtggaatataaaatgttaaatctttaaagaagaagagggtcttgataggactgagtgtgtatggaaggctgcgagctcctggatccctgaaggagacagaggcctgtagcctcctccgccttccggagctagggtcatgggtctgagtggggagggcctggggcctggtctcctggatctgagggaggagggaggtggggtctggtctcctggatctgagggaggagggaagtggggtctggactcctggatctgagggaggagggaggtggggtctggtctcctgggtctgagggaggagggactggggcctgatctcctgggtctgagggaggaaggggtggggtctggactcctgggtctgagggaggaggggctgggcctgcacttctcggtctgagggaggaggggctggggtcctggactcctggatctgggggcagtgggcactggggacctggactcgtaggtcctgactcccagcctcctcctcaggagcgcctggaccatgctgctgagcgcctactggcacggcctccacccgggctactacctgagcttcctgaccatcccgctgtgcctggctgccgagggccggctggagtcagccctgcgggggcggctgagcccagggggccagaaggcctgggactgggtgcactggttcctgaagatgcgcgcctatgactacatgtgcatgggcttcgtgctgctctccttggccgacacccttcggtactgggcctccatctacttctgtatccacttcctggccctggcagccctggggctggggctggctttaggtgggggcagccccagccggcggaaggcagcatcccagcccaccagccttgccccagagaagctccgggaggagtaagctgtcacgacgctccctctgccagctggtcccgggaattctgtgaaccaggctgctgtctcctccccagaaagagtccttaccttggagagggtcctggagagaatttcctcttccccagctaaataccctgcctgcaactgaagcagacccgggggtgtcctccctgccctctgcccagaggccacctccactcctacaaaatcaaagtattgtccagacaagagtcactggcccctgctccagcttctgggtatccagagagcactgcacttccccaaaacggaaggggcccctgggcagtgggttttgggcaaattccctttctttgcatccacaatgtggggtcggagcttgggggcaggtcctgggagtgggaagcctcttccttgtgtctttcgctccacttttagctcatcgcaccaatattgcagacttggaaggaagcataagcttcccatttcacaaaggggaaactgaggtgcgggtgcgcgggcctggggacggccgtcccatggcttccatctgagccacctcgggaccccagcgctcctggcgccctcttctcatcgcttggcctatgacaggtcaccgtgtgtaaatctttcccaataaagtgttgcacaaaggcatcctgtccgtgcaggtatctgggtgataaacggtgggaaggacttagtccaccaagtcccagggtgaggtacagcccccccgcccagcccaggaaccaaactgtcaggcccggggcaccacggggacttcagctcccaggagacctttcgcatcagcggccctgagaaaccacaggaagtgtaccttactccctccgggccacctgctggccaggtacacacctgcccctggcccctcccttacctggggcagtgtctgcctggtggccactagagacagcccagcctgggccatggaagaaaacccgaccttggaatcagaagcctggggctcctctagggggtggctggccccccggga

SEQ ID NO: 22494 - DNA, 2300 bp, Homo sapien
ccatctcaaaaaatacatatgtatgtgtgtgtgcatgtgtgtatatatatgtatgtgtgtatgtgtatatatatgtgaaattttaaaaagaaaatatttttcattaatgtttacctcatcaaaggttttttttccaataacagctttagggaactctaattcacatactcatccacttaaaacatacaactcttggcttctttaatttcctggaaaaaaaaaaaaacacaaaacatacaactccctgatttttagtatattcaccgagttgtgcagacatgaccattgtgtagttatattcagaacagtttcataccctgcaaagaaaccccatgtccatcatcccacaaacctccatccatccctggtaaccagtaattgactttctatctgtaaagatttgcctgttctggacattgcgcttacaaatggaatcatacaacatgtggtcttatttatttattttaatttgttttttttttccttttatcttcccatgctacattgacctaaacatacggcctttgtgaacatataaaaattttaaccccggtcccttctgtgaatcacactgcttcctccctaggccagaccaccatcatattgtagctaaagtgccacagctatctcctagtttctttccttcctccttccctccgtccttcccttttcccttcttccttccttccctccttccttccctccctccttccttccctccttccctccctccttccttccctccctccttccttccctccttccctccctccttccttccctccttccctccctccctccctccttccttccctccctccttccttccctccctccttccttccctccttccttccctccttccttccctccctccttccttccctccttccctccctccttccttccctccctccttccttccctccttccctccctccttccttccctccttccctccctccctccctccttccttccctccttccctccctccctccttccttccctccttccctccctccctccttccttccctccttccctcccttcttccttccctccttccctccctccttccttccctccttccctccctccctccttccttccctccttccctccctccttccttccctccttccctccctccctccttccttccctccttccctcccttcttccttccctccttccctccctccttccttccctccttccctcccttctttcttcccttcttcactccttccctccctccctccctccctccctggctggaatgcagtagctcagtcactgctcactgcagcctgggctcaaacgatcctcccgcctcagcctccccagtagctgggaattcaggtgccctccacacctggctgatttttattttttgtagtgatggggtcttgccgttttgcccaggctgctgtccaactgttgggctcaagcagtcctcccagctaggcctcccaaagtgctgggattccaggtgtgagccaccgcaccggcccctctgtctgtttttctgttactgtctctgtctctctgagtttcttgtcccccctgtctctcgttccttatccccatctctcagggtctcagtccctacccttggggtctccccggcgcccagtctctgcccctctcactccctcttcccaccttccttccaagctccctgtcctcctcctgcagacttgagctctgcccacctgcctgtctgaccgcggccctccctccccgccccacaggcccgttcttccgctaccgcacctacctggactggctggagcagcccttccccggggcagtgcccagcctgcggcccctgctgcgccgcgcctggccggccccgctcttcggcctgctgttcctgctctcctctcacctcttcccgctggaggccgtgcgcgaggacgccttctacgcccgcccgctgcccgcccgcctcttctacatgatccccgtcttcttcgccttccgcatgcgcttctacgtggcctggattgccgccgagtgcggctgcattgccgccggctttggggcctaccccgtggccgccaaagcccgggccggaggcggccccaccctccaatgcccaccccccagcaggtcaggcggcgcgagggaggcttcccaagacccagcagcccccacctccaagggctggctctgcccctagccgggaggagagcggggagcaaggggccagggccaccacctttttgagcagagtgtcgccccctcggcaaccatggcctgccagcccctgtcggtagggaaaagatccctgg

SEQ ID NO: 22495 - DNA, 2300 bp, Homo sapien
ccaggtcccgaggatggtgaccagagaatgcaaagtgtgggggccacaggtgaacagggtgagccccaggcccacagcggctgctccccatctcttcagcccaggacctgcagggggaagggacagcataagcctggaaccttccagagggtcccccccctttattttccactggggagggagcctgactcaccggctttcttaaagaggaagccgatggggatggagataagaagaaccactagatacgtccattcttcaggcgacatggtctgggggaggggcagagattcacagtgagaacccaggaatccaggccccctgcctcctccctcttcgaggatccaggaacccagccttctagaccccagtttttgaggatgatggagtatgagcctcagctcctctcctttgagaacctagcaacccggactccagccccttcctccttggaggagacaggaatccacccccagcccctcctttgagcgcacaggcctccagctctcctgtccttggagaacccaggaaagtgtggggatctcccagcacccaagcccctcctttgcgaacgcagaaatcaaagctactccccgcacccatactggggacccagatttgaagacgcccctcttttaaaaacccagaaacggcacccctcccggacccttcctcttcgacagcccaggaatctagacctccgagccccctcttccagcgaggatccaggaacccagaccccctctttggatcccccatcccccggcccttgtgaaaccagatatccggaccccccagcccttcttcgagaccacccagaggagcccgggtctccaacctgcacctccttcggagctccacacccctctcctactgagaacccggggatcgaacaccctcccctccccaggcccaggcccaggcccagccccaacccgtcccgcgcaccccagcgcatccccggcagagccacaggcggttgcgccagccccgagttccaacgcgcctccggggccgccccgcacccgccagcccgcagagaccctgccgccgtgtaacctcgcctcgccactgggcgccgccaccctggcccacctgagctgctcgccgggcaggaggcggccgagcagtcccagcccgcttgccgccgcagctccggccacgcctcccccgcccagcgcgcccccgcgccgcctgctccttctgggcgcccgccgggctgcgcagatcaggccggggaagaagccacggtcagggccccgggcgggcagggaagaagccccggagcagaagccgagagcgcgagtcggcaacgggattcgagtccaggtccacactgggatccgagctccgagtacgtgaaggggcgggccttcgggctcggaacaaggaggagccaaaagctttggacccgaaggggaacagacgggctccggaaaggaggcggggtctggagctcgccgtgaggaatgaggcggggtctcccttcgggttccttcgggcacaatcgggagcttgagttctccggaagcggggccacaaacttcggctcacttcggcaatagtcgagaacggagagctgaggccagtgtgggcggagccacatgtttcggctttcttcggaggtagtcgagtccttagggtcactgttccgatgtgggcggggccacagactcggccggatgtgggtggggccacaagcttcggtttacttcgtagatagttgggtacaagtgacgctaggatgataggcggagtcaacaggttcgccagatacccatgagtatttacaagggggcggggcgaaagcgacttgccctcaaaggggcggaaccccgagggccggcgtgcgcctacgggaccgggccagggtgacgatcctcaagttcccaagtagaggagaggaagcggcagagggaggtgcgctcagtggggcggagccaaggtggcccccgcgggaggagggcggggcttcggtcctgcgaggggcgggacctgacttcccgcggcgctgatggggcgggatgacgaagttgacgagggtgtcggcatgagggggtggagcaaggagcgcgtggcgcggtgcgcagtgggtggctccacctcgactgcgaattactgtttatgaggtgactcgctggttctatcggtggacagtgggacattctgaagggaggcaaggaggcggactgagcgctcccaattggggtgagcccgcccgagcggagagtggacggcgggtgtccagggggcggggctttcggctgtggggttcggtcgtagggcgggaactccccaac

SEQ ID NO: 22496 - DNA, 2300 bp, Homo sapien
ggcgtcatcggctcccggcagcctcgcggcctgtggccccgccccctccgagcgccagcgcaccccagttggggagttcccgccctacgaccgaaccccacagccgaaagccccgccccctggacacccgccgtccactctccgctcgggcgggctcaccccaattgggagcgctcagtccgcctccttgcctcccttcagaatgtcccactgtccaccgatagaaccagcgagtcacctcataaacagtaattcgcagtcgaggtggagccacccactgcgcaccgcgccacgcgctccttgctccaccccctcatgccgacaccctcgtcaacttcgtcatcccgccccatcagcgccgcgggaagtcaggtcccgcccctcgcaggaccgaagccccgccctcctcccgcgggggccaccttggctccgccccactgagcgcacctccctctgccgcttcctctcctctacttgggaacttgaggatcgtcaccctggcccggtcccgtaggcgcacgccggccctcggggttccgcccctttgagggcaagtcgctttcgccccgcccccttgtaaatactcatgggtatctggcgaacctgttgactccgcctatcatcctagcgtcacttgtacccaactatctacgaagtaaaccgaagcttgtggccccacccacatccggccgagtctgtggccccgcccacatcggaacagtgaccctaaggactcgactacctccgaagaaagccgaaacatgtggctccgcccacactggcctcagctctccgttctcgactattgccgaagtgagccgaagtttgtggccccgcttccggagaactcaagctcccgattgtgcccgaaggaacccgaagggagaccccgcctcattcctcacggcgagctccagaccccgcctcctttccggagcccgtctgttccccttcgggtccaaagcttttggctcctccttgttccgagcccgaaggcccgccccttcacgtactcggagctcggatcccagtgtggacctggactcgaatcccgttgccgactcgcgctctcggcttctgctccggggcttcttccctgcccgcccggggccctgaccgtggcttcttccccggcctgatctgcgcagcccggcgggcgcccagaaggagcaggcggcgcgggggcgcgctgggcgggggaggcgtggccggagctgcggcggcaagcgggctgggactgctcggccgcctcctgcccggcgagcagctcaggtgggccagggtggcggcgcccagtggcgaggcgaggttacacggcggcagggtctctgcgggctggcgggtgcggggcggccccggaggcgcgttggaactcggggctggcgcaaccgcctgtggctctgccggggatgcgctggggtgcgcgggacgggttggggctgggcctgggcctgggcctggggaggggagggtgttcgatccccgggttctcagtaggagaggggtgtggagctccgaaggaggtgcaggttggagacccgggctcctctgggtggtctcgaagaagggctggggggtccggatatctggtttcacaagggccgggggatgggggatccaaagagggggtctgggttcctggatcctcgctggaagagggggctcggaggtctagattcctgggctgtcgaagaggaagggtccgggaggggtgccgtttctgggtttttaaaagaggggcgtcttcaaatctgggtccccagtatgggtgcggggagtagctttgatttctgcgttcgcaaaggaggggcttgggtgctgggagatccccacactttcctgggttctccaaggacaggagagctggaggcctgtgcgctcaaaggaggggctgggggtggattcctgtctcctccaaggaggaaggggctggagtccgggttgctaggttctcaaaggagaggagctgaggctcatactccatcatcctcaaaaactggggtctagaaggctgggttcctggatcctcgaagagggaggaggcagggggcctggattcctgggttctcactgtgaatctctgcccctcccccagaccatgtcgcctgaagaatggacgtatctagtggttcttcttatctccatccccatcggcttcctctttaagaaagccggtgagtcaggctccctccccagtggaaaataaaggggggggaccctctggaaggttccaggcttatgctgtcccttccccctgcaggtcctgggctgaagagatggggagcagccgctgtgggcct

SEQ ID NO: 22497 - DNA, 2300 bp, Homo sapien
caacccgtcccgcgcaccccagcgcatccccggcagagccacaggcggttgcgccagccccgagttccaacgcgcctccggggccgccccgcacccgccagcccgcagagaccctgccgccgtgtaacctcgcctcgccactgggcgccgccaccctggcccacctgagctgctcgccgggcaggaggcggccgagcagtcccagcccgcttgccgccgcagctccggccacgcctcccccgcccagcgcgcccccgcgccgcctgctccttctgggcgcccgccgggctgcgcagatcaggccggggaagaagccacggtcagggccccgggcgggcagggaagaagccccggagcagaagccgagagcgcgagtcggcaacgggattcgagtccaggtccacactgggatccgagctccgagtacgtgaaggggcgggccttcgggctcggaacaaggaggagccaaaagctttggacccgaaggggaacagacgggctccggaaaggaggcggggtctggagctcgccgtgaggaatgaggcggggtctcccttcgggttccttcgggcacaatcgggagcttgagttctccggaagcggggccacaaacttcggctcacttcggcaatagtcgagaacggagagctgaggccagtgtgggcggagccacatgtttcggctttcttcggaggtagtcgagtccttagggtcactgttccgatgtgggcggggccacagactcggccggatgtgggtggggccacaagcttcggtttacttcgtagatagttgggtacaagtgacgctaggatgataggcggagtcaacaggttcgccagatacccatgagtatttacaagggggcggggcgaaagcgacttgccctcaaaggggcggaaccccgagggccggcgtgcgcctacgggaccgggccagggtgacgatcctcaagttcccaagtagaggagaggaagcggcagagggaggtgcgctcagtggggcggagccaaggtggcccccgcgggaggagggcggggcttcggtcctgcgaggggcgggacctgacttcccgcggcgctgatggggcgggatgacgaagttgacgagggtgtcggcatgagggggtggagcaaggagcgcgtggcgcggtgcgcagtgggtggctccacctcgactgcgaattactgtttatgaggtgactcgctggttctatcggtggacagtgggacattctgaagggaggcaaggaggcggactgagcgctcccaattggggtgagcccgcccgagcggagagtggacggcgggtgtccagggggcggggctttcggctgtggggttcggtcgtagggcgggaactccccaactggggtgcgctggcgctcggagggggcggggccacaggccgcgaggctgccgggagccgatgacgcccgaacgccgaacctattgcgtccgggaggaggcggggctacggattcggccgagccgagaacacccgaacgtcaaattgctggcgttcgggaagggggcggggctgcggattcggtggagccgaggacgcccgaacgccgaacttcctgtgctcgggagggggcagggttttgtactgtgggagtctgagagcgaggaggtccgaaagccgaatcacagtcgttcggaaagaggaggagcgaaggctcgagcgtccggaagagggtgtggcctcggcggtgccttagcctccagagcttctgaccgctgacgggaacacccgaagggggacgcccactttgcaagagggtggtgccaaaatggacctttgtaagggggcgtgtcgccgcgcttgcggaggtttgtttttcacgctccaaggcgcaatggtaggtacggcagtgcgggcacagagcgggtgccgaccgcagggtcacaagggtagagcgggaccctgggggcttggcgaggggcgagggtcgggggcttgtctccggcgtctcgtctccggcggccgcgaggcctggtgggatcgcccgggggcggggcctggcgctcgggcccagcaggtggtgaacggcggctgagcgaggccccgccccctgaggcctaggggcggggcttcgccgagaccccggaggctttgggtgcgctgcagcggtctgcggcgcgcagctgtttcggtaactgctttgcctcccggctcccgcaggaggatgctggtggtggaggtggcgaacggccgctccctggtgtggggagccgaggcggtgcaggccctccgggagcgcctgggtgtggggggccgcacggtaggcgccctgc

SEQ ID NO: 22498 - DNA, 2300 bp, Homo sapien
tttggcagcctggctcgagccggcctcctggcttgagctggcccctgaagcctgttctagtttctgcttcttagcagcctggccctccgtaatcttctccaggagctcctgacgacgggtctcccgggcctcagctgccaaggcgctctgctcctggaagctctcctcttgctggcgcttgaaggatgtcagggcctgagaagcacacttcgctggaacctccaagcttatggtcccttcagaagccaggaaacttgactcccaggtcccgctcccaccgaacccgagttcgagccccgcccccttaccaggctgtggtgccgagagtctggacgcggggcgctgaccagagtcacggcgccgatctcggccaagagccgcgcctcttcgggcatcagcagcagcgggaggcccaggcgcgagttctggcggggcccgcggggcagggcgcctaccgtgcggccccccacacccaggcgctcccggagggcctgcaccgcctcggctccccacaccagggagcggccgttcgccacctccaccaccagcatcctcctgcgggagccgggaggcaaagcagttaccgaaacagctgcgcgccgcagaccgctgcagcgcacccaaagcctccggggtctcggcgaagccccgcccctaggcctcagggggcggggcctcgctcagccgccgttcaccacctgctgggcccgagcgccaggccccgcccccgggcgatcccaccaggcctcgcggccgccggagacgagacgccggagacaagcccccgaccctcgcccctcgccaagcccccagggtcccgctctacccttgtgaccctgcggtcggcacccgctctgtgcccgcactgccgtacctaccattgcgccttggagcgtgaaaaacaaacctccgcaagcgcggcgacacgcccccttacaaaggtccattttggcaccaccctcttgcaaagtgggcgtcccccttcgggtgttcccgtcagcggtcagaagctctggaggctaaggcaccgccgaggccacaccctcttccggacgctcgagccttcgctcctcctctttccgaacgactgtgattcggctttcggacctcctcgctctcagactcccacagtacaaaaccctgccccctcccgagcacaggaagttcggcgttcgggcgtcctcggctccaccgaatccgcagccccgcccccttcccgaacgccagcaatttgacgttcgggtgttctcggctcggccgaatccgtagccccgcctcctcccggacgcaataggttcggcgttcgggcgtcatcggctcccggcagcctcgcggcctgtggccccgccccctccgagcgccagcgcaccccagttggggagttcccgccctacgaccgaaccccacagccgaaagccccgccccctggacacccgccgtccactctccgctcgggcgggctcaccccaattgggagcgctcagtccgcctccttgcctcccttcagaatgtcccactgtccaccgatagaaccagcgagtcacctcataaacagtaattcgcagtcgaggtggagccacccactgcgcaccgcgccacgcgctccttgctccaccccctcatgccgacaccctcgtcaacttcgtcatcccgccccatcagcgccgcgggaagtcaggtcccgcccctcgcaggaccgaagccccgccctcctcccgcgggggccaccttggctccgccccactgagcgcacctccctctgccgcttcctctcctctacttgggaacttgaggatcgtcaccctggcccggtcccgtaggcgcacgccggccctcggggttccgcccctttgagggcaagtcgctttcgccccgcccccttgtaaatactcatgggtatctggcgaacctgttgactccgcctatcatcctagcgtcacttgtacccaactatctacgaagtaaaccgaagcttgtggccccacccacatccggccgagtctgtggccccgcccacatcggaacagtgaccctaaggactcgactacctccgaagaaagccgaaacatgtggctccgcccacactggcctcagctctccgttctcgactattgccgaagtgagccgaagtttgtggccccgcttccggagaactcaagctcccgattgtgcccgaaggaacccgaagggagaccccgcctcattcctcacggcgagctccagaccccgcctcctttccggagcccgtctgttccccttcgggtccaaagcttttggctcctccttgttccgagcccgaa

SEQ ID NO: 22499 - DNA, 2300 bp, Homo sapien
aggcgtgaggcaccgcgcccagcctatatggaggttttcggctgagctgggggtcagtgcccctcgcccccagactgtacagagtcagctgtgttaagatattaagcaccttcagtacacaagactctgtgctggttttcttttcttttttttttttttttactctaaatcatcaaaccctatgaggaaagtcctgttactttctcccatttagcactcttgaagaggctaatttgcctaagatcaagagctcgtcagtgactgctgaggttcaaacgcagatcttttttaagacttgagaacctacaggttcaaccaccattataaaaccatctctgtaatcacgaggcacccggaatttgtggagcttggacttcatcctgaagggagtgaaaacttatggaagttttttccttccacgtttcccccttccagatgaataatatacgcgtgttcaagatacaaaaatgcataaaatttggccaggcatggtggcttacacctgtaatcccagcacttggggaggctgaggcgagtggatcacttgagcccaggagttcaagaccagcctgggcaatatggcaaaaccccgtctcaaaacaacaaaacaaacaaacaaaaaacccataaaactgaacaaggtagtttgtaagatatggaagtacaatgcagatgacaataatgacgatggtagctaccactaggcgctttatttatgccactctcctcaacactggatagactctcacttaatcctcacaagcttatgaggtaggcgctaccatcattcgccgttttacagaggaggacgctgaggcacagagtgattgagaaacttgtcgaaggcactgcagctggcaagtggtgacgtggcatttgaatccaggcatccggatggtgtggatgccgtggaagagaaaggggcgggtgggactgcttcctgaggagatagtgactgccgaggcagcagcgtagggaagacaactgaagaacacgagctgtggagacagaccatcgcattcggagtggagagatgggtgtacagacagacaataaccagactatatataaaaagagaactctaggtcaggcgcggtggctcacacctgtaatcttagcactttgggaggctgaggcgggtggatcacttgaggtcaggcgttggagaccaggagttcaaaaccccgtctctactaaaaatttaaaaattagccgggcatggtggtgggcgcctgtagtcccagcttctcgggaggctgaggcacgagaatcgattgaacccgggaagcggaggttgcagtgagccgagatcgcaccactgcactccagcctgggtgacgagagcgaaaaactccgtctcaaaaataaaataaattactgataatagtactaataccccttaagtggctattgataataatagtaccatgggtgggggggcaacttctctgagagtgctctgtaagtatgtattgaagattgagtaaatacatttaaaattcttagaacagtatgtggcacatagcgttccagaatgccacattattgttagtgacagaaataatctcggctgggcgcggtggctcacgcctgtaatcccagcactttgggggggccacggcgggaggctctctcgaggccgggagttcaagaccagcctgggcaacatggcaagacgccgactgttaaaaaaaaaaaaatgctacccgggcgtcgtggcgtgtgcctgtaatcccagctactggggaggaggtgggaggatcgctcgagcccgagaggttggtcggggcctcagtgagccgaaatcacgccactgcactccagcctgggcgacggagcgagaccctgtctcagaaagaaaaagaaaaaccaccgtccaggggcggagaaggaaggttctccctacttctcaggtttccactccctggccggaaaaaacctagtcctcccaggttagcacgccgctctagcccagcctcacgtctccactgcttctcagccagccaacgcctcttctgattggctctgacgtgcgtggtgcgtgaaaacgtcacgagacgccggcgttactataagagcgcagccgtggcgcttgcgcgcctctttctcagtgaccgggtggtttgcttaggtgaggtgcggcggtgtgctttttctctagggtttgggttggatggtggcccgggccttccgagtttccatgagtaagctaaagacgttaggaaacagagcagggtggttgaacgggagtgcagcacggttgtgggggcagatactgactatgagagcgttggaggtta

SEQ ID NO: 22500 - DNA, 2300 bp, Homo sapien
tgacctgtaacacagagcccggggctccttataccagcacacccatctgccctccaggctctgtggctcaatggtctaattcatctgcactgctggggaccgtgacaggcagggccacaacccccaccctcattgcccatctccctgctgtgtgtccagggaagccttaggtggacacggggtggtcagtgaccccgacctcttgggccagaagcacaaggcagaaggcatggagttgagaccggtgagagctctccctgcaggccccagcgggccccagagagtacgcatcccctaaataccagtcgcctcatctcaggggcgtccaggcagccctcagccctccctctcagcacagccgggatcgccggtgctctctggagacagcctgacccctcagcatcactcagaggccggttttgacagctctgcattgaccaggacaaggggctcccagcccgccagcgcctagatgggcagcacctcctggacgtccccctgggccatgcgagccacccccctgggggccagcacagatgctgcggtggacacaatgcctcctgcccaaggtcggtcccccgtcgcccccacccaacatcctggttgcaagtgaggggcccctacccagaccccatcccgttctctgctctggaccctgggctcagggtcgagagagagaatgatacagggatgtggtccaaggagatcaccaagaaagggagagcaagaggcccggagattaaacagacccacgcaggccaggcactgtggctcacacctgtcatcctagcgctttgggaggcgagtggattgcttgaggccaagggttttagatcagccggggcaacacattgagactccatctctacaaattcttgagatggagtctccctctgttgccccgctcgctgcctctgtagacagagccctgaagacccttttcctttccaagcccgtaggcttctccccagaaccgcatacctcaactcccactctcccctccctccaggctgccgtggagctccgcaattgtgagctacacccaggtgagccaccacctctcagaccagagacaactgcagtctcttcctcccaggggagctcccaggagcccagtgagtacgctgccccggccatccactagcccagaccccacgctccaaggaaggagaccacagtgagcccagatggtgcagcagctggccccatggacacaagaccaccgtcatttcccaagtagcaacgctgagggaaggaagggccaaccacctagcttgagtaagccgcaatggacttctccacgtggtttacagtaacttagctgtgttccagaactgtccctgccctgacctcaaaccctgaaggcctccagataaggacccaatcaactacagcctgcagcctgagggggttgcacaatttcaggtttctcacttcctcagaaaccaaaccccttcccaacacagatgatcaacaaggctgagaaaagggaagcctgccaacctcttgaccgtgagtccacagaagcactgaacgcggagaggaggaacagacttccctcaacgccccttctcctacgctaacccacttcccctacatgtgaagacaaaactgggaacttgcccaacatcaaccgcatcacaagctttgaaactagcaagcaaattctgtgaagtgttccccaacaatcaccaacagttcaccttccccagcaacccgtcagcctctggtcagctcccgtcccacctgtctcttgcctggcggggtcagggtcccagggccagcaggcagggaaggcccccacctccactcggcgcctgccctgcctagcaatgaccggctccctcccacccctatatgcaaacaccggcttacttggaatttccttctggttttgacacagtttttccaaaaataccactcgtctctcccctgatgacagaagtttctggtaaagatgtgtgttcactactgtagaatagtactgagaggccagggaccactagctggtaggcactcccaagtgagtgagcctcccagggaaggctgcatgtttagagcaggggaaagagtcaaggatgagagacccccacacaccaattgtaaagcgctgatcctgtttatttggcaggaaaacgagacaatccagcagcccaggagggacaggtggacttaatcctcctcctcgtcgtctccagccccagccccaccctggcccttcttggcattcttcctcttcacgcggcccgggcggccacccccgtagggagagcgcagagagaagtcgatgtgcttctggg

SEQ ID NO: 22501 - DNA, 2300 bp, Homo sapien
ctcagtgtcagctcaagattgtgcccagcagggatgggaccaatgccagcctcacactcacctgtggggcagacgcccatgtctgaccaccgtggattgaatctgtttctcacacacaggggaggggctgagcgctgaccgtggcctccagtgagtgagcagagaccccccagcgcctgtccacacacacgggggagggggagccacagcttccagcctcacccagagccctgacccctccctgcctgggaggacgtggggttcctcttctgtcccacatggaggtgggagcctcctcctccctaatgacgctcggtggtcccagacacctgtggccactcagcattgaactctgctcatggaaggggatgcgtctcaatgtgaggaactgtttttcctctttctctgcctgtggctgtgatgatctgcatatttcagacgtatcacaaggagaatttcatggtatttggagccgatgtgggctcttgagtgggggcgtcaatcatcctcctcgactgtggagcccagcaccaggatcctctcccgtccccaccctcctgtctgaactggtctggaaattcaccatggctgagcctcccatgtcctgggcaccactgacccccacagccactgtgatgagtggggttcatgacagcaggctcagaggtgacattcatgtccaaagtcacataaaccctagatgataatcaggaattaaatacaaatcagctcaccttccccagaatcagattatagattacaatgaaacatatatatatatatttctctttatcccctctatttctcctttttagacaggatcttgctctgtcgcccaggctggaaggccaaggggtgatcatagctccctgaagcctccgcctcccgggcccaagtgatcctcccacctcagcctcctgagtagctgggaccacaggcatgagcctccatgcccagctcacttttttcttttctgtagaaacagggtcacagtctgtttcccaggactgtctgaagctcctggcctcaagccatcacccgccacagcctcctgaagtactgggattccaggcatgagccaccacggtagaccctgcatttctctgtgctcactgctacacgcagctcagcctggactacacagccaggtgtcaggtgcgtctctgctgatctgagtctgcctgcagcatggacctgggtcttccctgaagcatctccagggctggagagacgactgccatggtaaggaccccgtaacgctgagctgatggacgggctgaaggagggagggagaccccatggggaggctctgagagggaggaggagcccacggtcaccctcgcctcaaaggggctgactcaggaaggcaccaggtctatttgcggctgtgtccccgtcctcagtgagataaagataaatcaggcagacagtggcccgggggcagggagaccccatttctctctgaaatgcctgcagagagcctggtgcctgcccccacttcagccctggggaaatcagagccaggttcctggggtggcagttcctcttcctgtgggctgaggatgagacaaccccatgacaagaaggacccagcctccgagcggccacaccctgtgtgtctctctgtcctgccagcactgagggctcatccctctgcagagcgcggggtcaccgggaggagacgccatgacgcccgccctcacagccctgctctgccttggtgagatttcaagatggggagggggagatctgagtcttggaggaaccccaccccacacacaagccctggtccatcaggagacctcaaaagctcaggaggcacccgggcggggacctgctcaggcttcagggcaaatgcctcacagggaactctcttccagggctgagtctgggccccaggacccgcgtgcaggcaggtgagtctgtccccagctgtcccaggtccctactcctcactgggacagggggccacccatgggcagctgggggaggagacagtagttctgggtgactgatggggatgatggggaagtcctggggctgggagctgggatctgagcgtggggatgtcttgggatccagcctctgatttccatctagggcccttccccaaacccaccctctgggctgagccaggctctgtgatcagctgggggagccccgtgaccatctggtgtcaggggagccaggaggcccaggagtaccgactgcataaagagggaagcccagagcccttggacagaaataacccactggaacccaagaacaaggccagattctccatcccatccatgacagag

SEQ ID NO: 22502 - DNA, 2300 bp, Homo sapien
ttccagcgattctcctgcctcagcctcccgagtagctgggattacaggcgtgcaccaccatacccagctaattgtttttgtatttttaggagagatagggtttcaccatattggccacgctggtctcaaactcctgacctcaggtcatccgcccacctcggcctcccaaagtgctgggattacaggcatgagctaccacgcccggtcaaatttttcactttatggctacatagtaggtgtatatatttattaaattacttttcgatggtattaattcaatttactatttttcaccttcacgacgtctgtctaatgcatttcaacaactgtctgtgttttcctcacgtatcttggttgtcattcctgtgggacagctcctcccacgcacccggcctttcataaagggtttctcccacggctgtccaggcatcagcctgatgaaggggattgttgccgctgctcctgccccactcccccaaactcagtgtcagctcaagattgtgcccagcagggatgggaccaacgccagcctcacactcacctgtggggcagacgcccatgtctgaccaccgtggattgaatctgtttctcacacacaggggaggggctgagcgctgaccgtggcctccagtgagtgagcagagaccccccagcgcctgtccacacacacaggggagggggagccaccgcttccagcctcacccagagccctgacccctccctgcctgggaggacgtggggttcctcttctgtcccacatggaggtgggagcctcctcctccctaatgacgctcggtggtcccagacacctgtggccactcagcattgaactctgctcatggaaggggatgcgtctcaatgtgaggaactgtttttcctctttctctgcctgtggctgtgatgatctgcatatttcagacgtatcacaaggagaatttcatggtatttggagccgatgtgggctcttgagtgggggcgtcaatcatcctcctcgactgtgaagcccagcaccaggatcctctcccgtccccaccctcctgtctgaactggtctggaaattcaccatggctgagcctcccatgtcctgggcaccactgacccccacagccactgtgatgagtggggttcatgacagcaggctcagaggtgacattcatgtccaaagtcacataaaccctagatgataatcaggaattaaatacaaatcagctcaccttccccagaatcagattatagattacaatgaaacatatatatatatatttctctttatcccctctatttctcctttttagacaggatcttgctctgtcgcccaggctggaaggccaaggggtgatcatagctccctgaagcctccgcctcccgggcccaagtgatcctcccacctcagcctcctgagtagctgggaccacaggcatgagcctccatgcccagctcacttttttcttttctgtagaaacagggtcacagtctgtttcccaggactgtctgaagctcctggcctcaagccatcacccgccacagcctcctgaagtactgggattccaggcatgagccaccacggtagaccctgcatttctctgtgctcactgctacacgcagctcagcctggactacacagccaggtgtcaggtgcgtctctgctgatctgagtctgcctgcagcatggacctgggtcttccctgaagcatctccagggctggagagacgactgccatggtaaggaccccgtaacgctgaactgatggacgagctgaaggagggagggagaccccatggggaggctctgagagggaggaggagcccacggtcaccctcgcctgaaaggggctgactcaggaaggcaccaggtctatttgcggctgtgtccccgtcctcagtgagataaagataaatcaggcagacagtggcccgggggcagggagaccccatttctctctgaaatgcctgcagagagcctggtgcctgcccccacttcagccctggggaaatcagagccaggttcctggggtggcagttcctcttcctgtgggctgaggatgagacaaccccatgacaagaaggacccagcctccgagcggccacaccctgtgtgtctctctgtcctgccagcactgagggctcatccctctgcagagcgcggggtcaccggaaggagacgccatgacgcccgccctcacagccctgctctgccttggtgagatttcaagatggggagggggagatccgagtcttggaggaaccccaccccacacacaagccctggtccatcaggagacctcaaaagctcaggaggc

SEQ ID NO: 22503 - DNA, 2300 bp, Homo sapien
atgagtaggaaggacagtatcttgtggcttgagtgccaggtcagctgcagtgcaatagaacgccgggtggacttcaaggattttatttatttatttattattattattattattattattttgagatggagtttcactcttgtcacccaggctggagtgcaatggcttgatctcgcctcaccgcaacctccgcctcccgggttcaagcaattctcctgcctcagcctcctaagtagctgggattacaggcatgcaccaccacgcccagctaatttttttgtatttttagtagaaacggggtttctccatgttggtcaggctggtctcaaactcccgacctcaggtgatccgcccgcctcagcctcccaaagtgctgggattacaggcgtgaggcaccacgcacggcggcggaatctgttaaacacaaaaacgggagaggtggccccatgctgatcatggacttcagtcagtgggcagagatatcccagctcctgtccacaagcacgagcaagggtgaaccacagcttttcttttccttttttttttttctttttttgagacggagtctcactctgtcccccaggctagagtgcagtggcgcgatctcagctcactgcaagctctgcctcccaggttcacaccattttcctgcctcagcctcccaagtagccgggactacaggcgcccgccaccacgcccgcttaattttttctatttttttttttttaagtagagacgggttttcaccgtgttagccaggatggtctcgatctcctgacctcgtgatctgcccatctcagcctcccaaagtgctgggattataggcgtgagccaccgcgccgggccgggccacagcttttcatcttcatctggagcccctaccccctccctttccatgaggacctggggttcctcttctgtcccacacagaagtggaaatttcctccctaatgaccctgggacagtcttagacacaagcaggctgtcagctttcaagtttgttctttgatgtgcaaccttctcaaattaaagaacttttcatttctttttctgcacaaaactttcataatctacatatttcggatgtataatctacatatttcagatgtgtgtatgtgtgtgtgtgtatatatatatatatatatgtatgttttgagacagggtcgtgctctctcacccaggctggagtgcagtgctatgatcatacctcactacagcctggaccacccaggctcaagcaatcttcccacctcagtgtcccaaatagttgggactgcagtcgtgcacaaacatacctgattatttcttctttgttatatgcagagacggggtctcactatgttccccaagctggtcttgaacttctgagctcaagggatcctccatcctcagcctccctaggtgctcagattacaggggtgggccaccgtgccgggaacttcaaacataaggagcatttcttggtatttggagcagatgtgggctcttgagttggggcatcaatcatcctcctctactacggagctcaatgccaggatcctctcacaccccaaccactcctgtcttaatctggtctggaaattcaccatggccaagccccctcccatgtcccaggcaccactgagccccacatccactctgagaagctgaggtcatgaccacaagttccaaaagagaaaggctcaagcaagccactttgctgtccaaggtcacataatcggtggaattaggaagaaaattcagctccccactccaccccatgaatcagatgacaaacctgagtaattgttctgaaaaccttgaacatggttggaggcacagagggacggccaaggacaaaggggcactgaggaggcaggaacgacttagaggttcattcccagcggaggggttttgttgctctgccctagcccttggtgagctgagtataggtcaggccgacagcggctagggctcagggagaccccatttctgtctgaaatgtctgcagagagcctggagctcaccccagccccatccctggggaaatgagagccaggctcttggggagggcagttccccttcctgtggggcttccgatgggacagtcttgtgacagggagaacccagcctccagtccacactctgcgtgtttttgtgtcctgccaggcaccgtggtctcatccgcctgcacagctgagtccagtgggagctgacgccatgaccctcaccctctcagtcctgatttgcctcggtgaggtttgaagagggggaaggaaggtccccgtcttggagggagctcactctaaagcgaggctctg

SEQ ID NO: 22504 - DNA, 2300 bp, Homo sapien
cagatgaagaaactcataggaggaggcatgggggaagaggcccggggcttccataccctccctgggcgtcgccctccaggagccttagcatgctcagccacccagaaactcatgaaacccagtcctctggggcttttatgaaagcttcatgacatcagcatttcctcccacaaggaacagggtgagactgtcttctgggagggtcttaagatccactatcagaaaggcagggaacattcgagtcttactttgggttaggtgaaggaagggcaggaggaggtcagaggcctccgctgaggcccagcacagccaatgttataacaaaagactataacaagggctatgggagttacaagccaggaactgcgggtgaaaaccagcatatatcacaacatcacacttccctctctggacacactgtggcttgccatgccatgcactccatattgtaatccttgcttctcactcccaaataaactcaaaatccaggcaaccctggagcaatgcagccttgaattccaggggtctcttatatgcacactttttccaaacaaacggggatcaaaactatagcatttgtgagaaacaagacttgcgtatatgaacggcagacttttcctatatgcagacccagcagagacaacgtcagggctggagtacgagcaagtgttggtacatgtagggggtactgaaacgaattgcctgtgtatcccaagaaacaactgtactgagagatcatattttctaggggtttatttttggttttgtttttattttaggttaaagctttggatagaatacccagtgtctccttgtccatctgaagaacatgctgctatgtggaagcacatccttgagatccacaaggagacactgggcaagaagacaaggatgccccactgtgcagaggtccccctaataaatgctctatgaacaccctggtgtttagtgcttctttccttggaattccagcaggtctggacagtttggtgcactcccttgagggaattcccctgggctgcttggggtccactccagcctcaggtgtagctagaggacgcagcctcccaccttggtctggagccctgagcccctcactgtcattgcagatcccggggttcctctcccggctccactcagtggtggaaacctccaccctaatgagcccttgatggtcccgggaccctgtggcatctcacctctggcctctgttctttcttgtgagtccgtctacacttggggttttcacatgtctttttctgctcatgaccttgatactctgggtatttcagaaatgctacacatacgtttctccattacggtcagatgtgacatcttgagtggactcatcaatcacctacagaatgtggagtccaacagcaagatcctctcacgtcccaaagcctcaggtcttaccctggtctggaaatcaagcacaaatgagcccctcccaatgtcccaggcaccactgaccccacaaccactgtgacgagtgggattcatgacaacaatctgcaaaggaagaaactgaggctcagtgatgggacattacaaaccaaggtcacgtaggcagcggatgataaccagtcatcaaataaatatcaactccctcccccactccccaaatcaaagctcaaacataagtcattgttcccaaaatgttgaccaggaattgaggtgcagagggacggctaaggacgcaatgggcaccgaggaggcaggaaagactcagaggtttcttcccgggggggagggagtggacgctggagcaaaaacatttaaaaaggggaagttaagaggggactatttggttgaaagaaaacccacaatccagtgtcaagaaagaagtcaacttttcttcccctacttccctgcatttctcctctgtgctcactgccacacgcagctcaacctggacggcacagccagaggcgagatgcttctctgctgatctgagtctgcctgcagcatggacctgggtcttccctgaagcatctccagggctggagggacgactgccatggtaaggaccccacaacgctgtgctgatggatgggctgaaggagggagggtgaccatgtgggaagctgtgagaaggaaggggaagccactgctaccctcatcaggaagggcagacacaagaagcaccagttctatttgctgctacatcccggctctcggtgagacgaggagaaaccagacagacagtggctgggggtcaggaaagaccccattacagtctgaaatgtctgcagagggcccagtgcctgcccccacctcagctctaaaagaatgagagt

SEQ ID NO: 22505 - DNA, 2300 bp, Homo sapien
agacagtcccggatcccacagattgaaggcccattccccaaaactgcccccaacaccattcccaagtccagacctccagaacttctgactgactggcttcaagttggggatcccatgccccactcttcggtttgattaatttgctgtagcagctcacagaactcaggaaacactgacatttcctggttgaatacaaagcacactgcagaggacacagatgaagaaactcataggaggaggcatgggggaagaggcccggggcttccataccctccctgggcgtcgccctccaggagccttagcatgctcagccacccagaaactcatgaaacccagtcctctggggcttttatgaaagcttcatgacatcagcatttcctcccacaaggaacagggtgagactgtcttctgggagggtcttaagatccactatcagaaaggcagggaacattcgagtcttactttgggttaggtgaaggaagggcaggaggaggtcagaggcctccgctgaggcccagcacagccaatgttataacaaaagactataacaagggctatgggagttacaagccaggaactgcgggtgaaaaccagcatatatcacaacatcacacttccctctctggacacactgtggcttgccatgccatgcactccatattgtaatccttgcttctcactcccaaataaactcaaaatccaggcaaccctggagcaatgcagccttgaattccaggggtctcttatatgcacactttttccaaacaaacggggatcaaaactatagcatttgtgagaaacaagacttgcgtatatgaacggcagacttttcctatatgcagacccagcagagacaacgtcagggctggagtacgagcaagtgttggtacatgtagggggtactgaaacgaattgcctgtgtatcccaagaaacaactgtactgagagatcatattttctaggggtttatttttggttttgtttttattttaggttaaagctttggatagaatacccagtgtctccttgtccatctgaagaacatgctgctatgtggaagcacatccttgagatccacaaggagacactgggcaagaagacaaggatgccccactgtgcagaggtccccctaataaatgctctatgaacaccctggtgtttagtgcttctttccttggaattccagcaggtctggacagtttggtgcactcccttgagggaattcccctgggctgcttggggtccactccagcctcaggtgtagctagaggacgcagcctcccaccttggtctggagccctgagcccctcactgtcattgcagatcccggggttcctctcccggctccactcagtggtggaaacctccaccctaatgagcccttgatggtcccgggaccctgtggcatctcacctctggcctctgttctttcttgtgagtccgtctacacttggggttttcacatgtctttttctgctcatgaccttgatactctgggtatttcagaaatgctacacatacgtttctccattacggtcagatgtgacatcttgagtggactcatcaatcacctacagaatgtggagtccaacagcaagatcctctcacgtcccaaagcctcaggtcttaccctggtctggaaatcaagcacaaatgagcccctcccaatgtcccaggcaccactgaccccacaaccactgtgacgagtgggattcatgacaacaatctgcaaaggaagaaactgaggctcagtgatgggacattacaaaccaaggtcacgtaggcagcggatgataaccagtcatcaaataaatatcaactccctcccccactccccaaatcaaagctcaaacataagtcattgttcccaaaatgttgaccaggaattgaggtgcagagggacggctaaggacgcaatgggcaccgaggaggcaggaaagactcagaggtttcttcccgggggggagggagtggacgctggagcaaaaacatttaaaaaggggaagttaagaggggactatttggttgaaagaaaacccacaatccagtgtcaagaaagaagtcaacttttcttcccctacttccctgcatttctcctctgtgctcactgccacacgcagctcaacctggacggcacagccagaggcgagatgcttctctgctgatctgagtctgcctgcagcatggacctgggtcttccctgaagcatctccagggctggagggacgactgccatggtaaggaccccacaacgctgtgctgatggatgggctgaaggagggagggtgaccatgtgggaa

SEQ ID NO: 22506 - DNA, 2300 bp, Homo sapien
tatctttatccagtctgtcattgatgggcattccaaccagcataattttatcaatgtaatgattcagtctaacattttatgaaaggagatgataatgatgattatggtgagaactaaactatgggatagaactaaacagttggtatgtgcctgaggtaggacagtgaatgtatattgctggctgtgcctgctcaaggaaaatggtttctggtggtctttattagcagtgctggataagaaagcatggtggctcacgcatgtaatcccagcactttgggaggccaaggcaggaggatcacttgaggttaggagttcgagaccagcctggtcaacatgatgaaaccccacctctactaaaaatacaaaaattagcctggcatgatggtgggtgcctgtaatcccagctacttgggaggctgagataggagaattgcttgaaccagggaggcggaggttgcagtgaaccgagatcacgccattgcactccagcctgggcgacagagcgagactccgtctcaaaaaaaaaaaaaaaaaaaaatagaagaagaagaaggagaaggagaaggtgaaggagagggagagggagagggagagggagaaggagaaggagaagaaggaggaggaggagggtgtggaggaggaggaggaggaggagggtgccactgcactccagcctgggcaacagagtgagactgcatctcaaaaaaaaaaaaaaaaagaaaagaaagatagatcttctagactcttccaatttagatgaggccgtcttgaatgacaactcctctctaacattttaaccttcctaaacatttgaatctctttctccgtagtaaaccaaggcaggtctggcatgttgagtctaatcactttgggccacctttggtggaaacctccaccctaatgaccccttgatggtcccaggcacctgtggcgactcacctctggcctctgttatttaatgtggatccatctacacttggagacttccacgcctctttttctgctcatgatattgatgttctgcatatttcagaaatacttcacgtacatttctccattagggatcccagatatgagatcttgagagaacacatcaatcatccaacgctatgatcctatcatatcccaaacacttcatgtgctgacctggtctggaaatgaagcacagatgagcctctcccatgtgtcaggaaccactgaccccacaaccactgtgaccagtgggatttgtgacaacaagctgcaaaggaagaaactgaggctcagagatggttcattaccgcccgaggtcacgtaggcagtgaatgataaccagtctctgaataaatatcagcttcctcccccactccccaaatcaaagctcaaatataagtcattgttcccaaaacgttgaacagggattaaggtgcagagggacggccaaggatgcaatgggcaccgaggaggcaggaaagactcagaggtttgttcccagggacgtcaggggtggacgctgtagccaaaaaaaaaggggggggaagtaaaaaaaaagggggggattactattgattagaaagaaaacctatagtccagggccacaaagagggtcatgacttcctctctttattccctgcatttctcctctgttctcactgccacacacagctcagcctgggctgcacagccaggtgtcaggtgcgtctctgctgatctgagtccaccctgcagcatggacctgcatcttccctgaaggatctccagggctggagggacgactgccatggtaaggaccccacaacgctgaactgatggatgggctgaaggagggagggagaccttgagggaggctgtgagagggaggaggtcgccctcacctgaaaggggtgactcaggaaagcattggttctttttcctgctgcatcccaggtcttagtgagatgaagacaaggcagacagacagtggctgggggtcaggaaagaccccatttctgtctgaaatgtctatagaggagttgggcccacccccacctcagccctacaggaaagacagccaggctcctgggagggcagttccacttcctgtgtggctgcagatgacaaaaccccatgagaagaaggaccgagcctccaagtgtccacaccctgtgtgtcctctgtcctgccagcaccgagggctcatccatccacagagcagtgcagtgggaggagacgccatgacccccatcctcacggtcctgatctgtctcggtgagatttgaagagggagggagcttctaacctaggagggacctcaccccacagccaaactcttgtccctaagg

SEQ ID NO: 22507 - DNA, 2300 bp, Homo sapien
ccgcctcagcctcccaaagtgctggaattacaggcgtgagccaccgcgccgggcggattattctctagttcttttagttgtgatgttaggttgttaatttgagatcacccatcaccacacctggctaattcttttgtatttttagcagagacggggtttcaccatgttggccaagctggtcttgaactcctgacctcgtaatccacctgcctcagcctcccaaagtgctgggattagaggcgtgagccactgcaactggcctatatgtctatttttataccagtgtcatgctcttttggttactatagccttgtaaactttgagtcagttaatgtgatgtctctagctttgctctttttgcttaggattgctatggctgtttgggctctttttttggctcaatataacttttaaggtttctttttctaagtctgtgaaaaatgaaggtatttttgtaaggactgcattaaatctgtagattgctttgggcaatgtggtcattttaatcatagtaattattctgatttatgagaatgggatgtttttccatctgtttgtgtcttctacaatttctttcatcactggtttgaagttttccttgtagaaatctttcacctccttggttaaatatattcccaggtgttttatttttgtgcacccactgtccatgggattgcctccttgacttggttctcagcttcgtcattattggagtacagaaatgctactgatttctgtactttgattctatatcctgaaactttactgcatttctttatcaaatctaagagtgttttggctgagtctttagggtttttgaggtataagataatatcatcagcgaacagaaataatttcactttttttttttccaatttagatgtgttttatttctttgtcttgcctgattgctctggcaaggacctccagtactacgttgaagagtggtgacagtgcacatctttgtcatgctccagttcttagggggaatgctttctatttttccctgtttgcgatattggctgggatttcgtcacctatcgcctttagtattttgaggtatgtccctctgtaccttgtttgttgggaatttttatcatgaagggatgcaggattttatcaaatgctttttctgcacctctgtgacataatcatagagactgaaaccagaatcctctcatgtcccaacccctcatgtcttaatctagtctagacattaaccgtgattgagcctctcccatgacccaagcacggctgacccccacatccgctgtgatgagtgaggttcatgacaacaggctccacacagggaaactgaggctcagagatgagacattactgcccaagatcacacaagccgtagataataatcgggaattacatagaaatcaactccccaccagccgggcgcagtggctcacgcctgtaatcccagcactttgggaggccgaggtaggcggatcatgaggtcaggagatcgagaccatcctggctaacatggtgaaaccctgtctctaataaaaatacaaaaaaattagccgggcgtggtggcggacgcctgtagtcccagctactcgggaggctgaggcaggagaatggtatgaacccgggaggtggagcttgcagtgagccgagatagcgccattgcactccagcctgggcgacagagcgagactcggtctcaaaaaaaaaaaaaaggaaagaaagaaagaaagaaagaaagaaatcaactccccactcagcaaaccagagcccaaacctaagtaatgtacccacaaaaattaaaaaataaatagatacataagaatgaaaattttaaaacaaagcctaagtaattactccaaaaatgttgaacatggattgaggtatagagggaagcccaaagaaacagaaggcacagtggaggcagaaaagattcagaggtttgttactggaggtggggtggaggtggacgctgttgcaaaaaaaaaaaaaaaaaaaaattaagggaagtacaagaaagagagtactattggttagaaagaaaacactccagggccactaaagggtcatgatttcctcccctatttccctgcatttctcctctgtgctcattgccacatgcagctcagcctgggctacacagccaggtgtcagatgtgtctctgctgatctgagtctgcctgtggcatggacctgcatcttccctgaagcatctccagggctgaaaaatcactgaccatggtaaggaccccgcaacgctgagctcatggacgggctgaaggagggagggagaccccatggggaggctctgagaggga

SEQ ID NO: 22508 - DNA, 2300 bp, Homo sapien
acgtcctttttttttttttttttgagatagagttttgttcttgttgcccaggctggaaggcaatggcgtgatctcggctcactgcaacctctgcctccggagttcaagtgattctcccgccttagcctcccgagtagctgggataacaggcatgtgccaccacgaccggctcatttttgtatttttagtagacacggggttttgccatgttggccaggctggtctcgaactcctgacctcaagtgatccacccaccttggcctcccaaagtgctgggatgacagctgtgagccacagcgcccggccgaaaatgtccttcttaacgacccccttgtgaatccccatttgtgtctgaaatatcggcagagagcctggtgctcacccccaggacaagccctgggaaatgagagccagggtcctggggaggggcagttcctctttctgtcggtgtgctgatgggacaacctcgtgatggggaggacccagcctccgtgtgcccgcacaccatgtgtctgtctgtgtctacgggcaccgtggccacacctgcctgcacagccagggccaggaggaggagatgccatgaccctcattctcacaagcctgctcttctttggtgagatcttaagagggggaggagagaccctagtctaggagagagaccccaatccatagccatgccttagtcaattagggcatcccaggggctcaaggaaaagaagaagacctgctcaggcttcggaggcaaatctctcacagggaactctcttccagggctgagcctgggccccaggacccgggtgcaggcaggtgagtctgtccccagctgtcctaggtccctcctcctctctggggacaagggaccacccctgggcagctgggggtgaagacagcagttctgggctgactgatggggatgaggggggtcctggggctgagagctgggatctgagggttgaggacatcttgggacctaacctgtaatttccttccagaaaacctacccaaacccatcctgtgggccgagccaggtcccgtgatcacctggcataaccccgtgaccatctggtgtcagggcaccctggaggcccaggggtaccgtctggataaagagggaaactcaatgtcgaggcacatattaaaaacactggagtctgaaaacaaggtcaaactctccatcccatccatgatgtgggaacatgcagggcgatatcactgttactatcagagccctgcaggctggtcagagcccagcgaccccctggagctggtggtgacaggtgagaggacactcaggggtcccagccccaggctctgccctcgggaagggggtcggctctcagctctcgaggggtctcccttctcacagcccagccttgtaggataaggtgggaggtgtgagccccatttaaacacggctgcctttttttctcttgaaagcctacagcagacccaccctgtccgcactgccaagccctgtggtgacctcaggagtgaacgtgaccctccggtgtgcctcacggctgggactgggcaggttcactctgattgaggaaggagaccacaggctctcctggaccctgaactcacaccaacacaaccatggaaagttccaggccctgttccccatgggccccctgaccttcagcaacaggggtacattcagatgctacggctatgaaaacaacaccccatacgtgtggtcggaacccagtgaccccctgcagctactggtgtcaggtgaggaagccgtagcttttccttatacaaagtcagggcaccaggtgagctgttgggagccttaccctcgggctagcccacgcaagaagaaaagatgaggggaagatgggggccctggggacacaaatacagaatgagaaaaaaacaaggacgctggaaaccctagtgaggaaggctacagaaggaaggggcgcaggaggaaccagccgctccgagtcccgactcatctttccctccaggcgtgtctaggaagccctccctcctgaccctgcagggccctgtcgtgacccccggagagaatctgaccctccagtgtggctctgatgtcggctacatcagatacactctgtacaaggagggggccgatggcctcccccagcgccctggccggcagccccaggctgggctctcccaggccaacttcaccctgagccctgtgagccgctcctacgggggccagtacagatgctacggcgcacacaacgtctcctccgagtggtcggcccccagtgaccccctggacatcctgatcgcaggtgaggagcccagcgggttcagtcagg

SEQ ID NO: 22509 - DNA, 2300 bp, Homo sapien
gtacaggtgtgcaagaaggagttaatctcacagctgcaagggtgataacgttgggagagtttgcttgtaaagttggtccttagctggcatctagttcctaaacatggctcctggaatgttccctatgttcctaagagataagctggtgttgtgtgactgcagcactgaattctactgtgtcttgactaggccatttccgcaaacaatgtagctcactgttgatgagtttgtaaaaaaaaaaaaaatgctgatgaacagcagcttttccctggtttccctgtgactgaccattatgcctatatggcccccacctaataacaaccttgaacattgagtcttaagcaggtttgcctggaaccaacacttcacatgcattgctacattttttatgctgatggaatgattaagacaagacatagattttcacagcttatgaccagcattcttgatcttaaatatattttggtaaagtttttttttttcaaaaaggtaaaaaaaaattgctcttctagaaggataaaatggacacaagtttttatttagcttactattaacgagggaacgggaaagatgttaatactgaattcaaagaagaatccgtagagcagacatttaggggctggtaatgtttaaggggattcaaaaatgagcctaatttttgttatttttagtatagagacggggtttcaccatgttggccaggctggtcttgaactcctgacctcaggtgatctgcccgcctgggcctcccaaagtgctgggattacaggtgcgagccaccgtgcccggccatagaattgatttttaagtgtgttaattctacctactattttcaccacagccacatctgcctacataatttctagttgtctatctcttctcaaatacactgcatgctgtccatctacccccatgcacatgatcttacaaagaacatttctcccagagacgactcagaaatcaggcctgtccagagcgggtggttacagctgctcctgtccaggagcatcaactcttccaaacttagcatctgcccaaagttgtggctggcaaggcggagtccaatgtgacctcccactcacgtgtgggacagatgtccaggtgtgacaataccacagacagcctgtttttcacacacacacaggggagatggagcctcctccatggggaggctctgagagggaaggaggaaccatcagtccctctcacctggaaggggctgaatcaagaaggcaccgggtctgtttgctgctacatcctggcccttggtgagatgaggacagattagatagatgcagccaaagtgaggggagagcccatttctgtctgtaatatctctagagagcctggtgttcacgcccaggacaagccctggggaaatgagagccaagctcctggggaggggcagttcctctttctgcccctcatggctcccacaaggaagcagagagatggcagtgcccatgtgcaaacacagaagaggggcagccacagcgtctcactttcacctggagccctaggttcctccctgtctgtgaggaccctggacttccttttctgtgccacacagagatggaaacgtcctttttttttttttttttgagatagagttttgttcttgttgcccaggctggaaggcaatggcgtgatctcggctcactgcaacctctgcctccggagttcaagtgattctcccgccttagcctcccgagtagctgggataacaggcatgtgccaccacgaccggctcatttttgtatttttagtagacacggggttttgccatgttggccaggctggtctcgaactcctgacctcaagtgatccacccaccttggcctcccaaagtgctgggatgacagctgtgagccacagcgcccggccgaaaatgtccttcttaacgacccccttgtgaatccccatttgtgtctgaaatatcggcagagagcctggtgctcacccccaggacaagccctgggaaatgagagccagggtcctggggaggggcagttcctctttctgtcggtgtgctgatgggacaacctcgtgatggggaggacccagcctccgtgtgcccgcacaccatgtgtctgtctgtgtctacgggcaccgtggccacacctgcctgcacagccagggccaggaggaggagatgccatgaccctcattctcacaagcctgctcttctttggtgagatcttaagagggggaggagagaccctagtctaggagagagaccccaatccatagccatgccttagtcaattagggcatcccaggggctcaaggaaaagaagaag

SEQ ID NO: 22510 - DNA, 2300 bp, Homo sapien
ggagggctccacagggaggggacgtagctgtgaacggtgaccaggatgaagccatgaggcttcccttccatctggctctgccctggactctgtgatgggattgaagctgccccaagtccctgggtctcaagttgtccatctccccctgtgatctgtgaccagaaactcccaggggaggacacggggtcataagccattcgcggccccttccccacctgggtttctatccccagagtacgtccttggacctagacccggtgactgcctgtgaggctcgggctgtgagctcaggcaggtgggaccaggggctgaagccacatggggaggtgggaggagcgatgccgtgctccatccggaccccctcagaggctcctgggctgctggggcacagcgggacatgctcctgagtcccgcagacctggttcaagtccagtgtctggtttttattagccttctgtctgcgggaatatcttgcctctgtttctctccctctcttcttctccttccttctctcttctctcaccttcatgcagtgacatataaaggtcacgaggacagaccctcctgcagccagattgctgggttcatggttcaaatcccggtggttctgccacctcctggctctatgcctgacggtgactcacccaaacctcctgtgtcccaaattcctcatgtgaaacagaggcaatagaagagctgtcctggtagaatcgtttagggcagacttgagttcaggtacacacggcgctgacatcagtgctgattagaaaaccccaaaggagggatgctcctattaatactgaggaagtattttgtcctcacagggactgtgccaggcactgaagcctccggatttgatgcaccaagaatgaggagaaatggcctcccgtcttgtgaacttcaatggggagaaatagttagaatgagcaatagaaatgcactgattcccatacatgcatatacagataaaaatatatgatttgcaatgtagaatttcagacctataatttaaattatattatatatgtttacatcataatatatatatattatatatatattatatatataaggaagataattatataataaaacatgttagtgtatcactacatatgactatagtgtatattatatattatatgaaagatatatttacaatatatagtataataaatttcaagtgttatagttaataaataaatataggtattaatgtaaatatattatctattatgtatacattatgtataactataatagaaaaaatattttatatttaatcataggtttatatcaaatataaattatacattatatattatagtgaatatatgtaacatatattataagttataaatcatatacaattaacattatatacattaaattatatgtatatgtcaagattacataattaaaaatatatttgttatatattatacatttgcataatacatgatacatataactataaataatataaaaactgtaatattgcacatatataatacatatgtaattttaaatggtggcaaatgttatgaagaccaagcccaggaagtcatggtgtagaataacgggtggtgtcctggaccttagaccgtggacgaggcaggagggaaggacattccaagagagaatgtctgcctttcttgaaggatattgaagatgctgcctcagccccgggggaggggagggaccgctgttcctggaagagggacgcttggctcggaccctgggtttgggggagcccctcaggaccccatttagccacctgggaattgggtagtggcgtgcactgtgcagaggagggtgaaggttggaggagatgacgggcgggcctgcaatgcgctgcgtagggagcctgggcggtgccccacacactcgcccgctagctgcagggcttcaggaaagaggagcacatcgggacttggattcttcccacaggagggcgggttacatccccgtcagagggttgccgcgagggcagataaaatcagacatgaggattcttgccctctggtgggaacccagaaggaggtcagggagggaaggtctcccttcctcttgttgcgggtggttggtctctgcctagatccgcagagggcagaaattagcgatgtctactacagcttcacgcccaggaaacgcgctgtatctgcaccgtccagtagggatggcatcaggcccgtggggtcactgagtcctggaggtgcagacggtgcagccagcttctcatgccattcaactttggataaatttaaatatcaatagctatgtgtgactctcatgctgga

SEQ ID NO: 22511 - DNA, 2300 bp, Homo sapien
acatagtaggtgtatatatttatggggtagatgagatgttttggtacagcacgtgactccctcttagttatgcaaatttctccagcaagtcgttgcccagcagcctacttgaattcctcccctgaaaacggacttttcttttctaccatgtggctagtccgcaaatttttcgaacttttacactttgcttctcttttaaatataaactctacctttaggtaatttctttgctcccacatctgagcctaggttggtacaagaagccatgccacttgaacactttgttgcttagaaatttcttctgacttggccaggcttggtggttcacgcctgtaatcccagcactttgggaggccgaggcgggtggatcacgaggtcaggagatcgagaccatcctggctaacacggtgaaaccccgactctgctaaaaatacaaaaaattagccgggcgtggtggtgggtgcctgtagtcccagctaatcgggaggctgaggcaggagaatggcttgaatctgggaggcagaggttgcagggagccgagatcgcactgcttcactccagcctgggcaacagagcgagactccgtttaaaaaaaaagaaaagaaatttcttccgccagacaccctggcgtggtatctctagggcatggacagaatgcagccacgttgtttgctaaggcgtaacaaaggtggctttcgctctagttccaagtaagatccttatttccagctgagaccttgtcagcctggacttcgctgttcacatcactatcagcattttggtcacaaccatttaatccatctctaagaagtttcaaacattcccttctcttcctgtcttcctccgggccctccaaataacatgaggtctattccgttaacaaatttcaagtgaacaagacgttattgctgacgatgggtcgtatgtggtgcagcagatctctaggcctgtttgttaataactccccatttccccctcctcccagcccccgtaaccaccattccctgctgtgatgttgtgactctggtgactttgcagatctcctgtaagtgacatcatgcagtacttggtctctgcctctgcgtcgcttggcgtgatgtcctcaggtttcgtccgtgttgtcgcccatggcagaattttcttccttgtttaaggctgaatagtattcccctgtgtgtgcaccacattttctatatcaattattctatcaatggacatttagatggttttcacgtcttagctattgcgaatagtgctgcagtgatcaggggagttcagacggctctttgacatactgattttttttttttttttagacagagtcttgctgttgttgcccaggctggagggcaatggtgcaatctcagctcactgcaacccctgccttctgggttcaagcgattctcctgcctcaaccttccaagtagctgtgcccaccaccacacccagctaattttttgtatttttagtagagacagggtttcactatgttggccaggctggtctcgaatttatggcctcaggtgatccacccacctcggcctcccgaagtgctgggattacagctgtgagccactgcgcctggcctgtttcttttaaatacagacccagaagtgggattgctggaccatatggtagctctatttttaattttttgaggaacctccccactgttctctatagtgattgcccaatttttaattcctactgtggtatgcgagggatccagtttctccacatcctcaccaatagtctccttaaaaaaataatatgctttgtaggatatttttaacgtgttaaataccttgtcgggattttagcatagatcacaatattaaaaacttggggaaggatttctatggctcccatttgtaatacaaggaaatgtcagcttctagttttgtaacgtcttgcccaagagctgcgaccgttaacttgtggagttgggacggcgtccaagtcaattggttgcccgacctttattctgccttgtcccatagatttagaaagaggctgacacatctggtaactagtttacggtcatctgcctctaagcgacatttagggtaagcgacatttttcagaaaccaaggccctccctctcgtctcactagtgggaagggtggaaagaacaggacagaaagctcttcctcttgtgtgaggcagttgctgtggaagccccataggcaggaggcccccgggcagcacatcctgtctgcttgtgtctgctgcagagttctgtccttgcattggtgcgcctcaggccaggctgcactgctgggacctgggccatgtctccc

SEQ ID NO: 22512 - DNA, 2300 bp, Homo sapien
gttactcacgaggctgaggcatgagaatcacttgaacccgggaggcggaggttgcagtgagccaagatcatgccattgcactccagcctgggtgacagagtgagacttcatctcaaaaaaaaaaaaaaaaagaaagaaagaaagacaagtttataggggaagtggcttgtcaaagttctctgaggctgtgggacaggaagtcacaggagaagctcattctggctgacttcccagctggtgttctgcacctctatcagtatcttaggaaccaagttaccacgacacacctattagagtggccaaattctaaaacgcagacaataccacatactggcctactggcgaggatgtggagcaacgggaactctcattcattgctggtgggattgccaaatggtacagccactttgggagacagtgcggcaatttcttctaaaactaaatatagctttgccatgtaatccagcaattgcattccttgatatttaccgaagggagctgaaaacatacggtcatatggatctttacagtagctttattcataatcgcccaaacttggaagcaaccaagatgcccttcagtaagtgagtggattaactatgtgtccagacaatggaatattatcccatgctaagaagacacaagctctcaagtcatgaaaagatgtggaggagagttcaatgtatatcactacacgaaataagcccgcccaaatggcgtatccactgtctgattccaactatgtgacattctggaaaaggcaaaactatagaaagagtgtaaagttcattggttgccagaataaaaggcttggacaagaggaaatcatcccagtggaaatggagaaacgcaggaacaaatgaagagcaacagaagaagctaaatatttgggtaaagacaggaattttgaatgatgatttcatcattaatgaattaagaagacattgatgcgtgctcattctatatttgatgacattgcaaacattgttttgaaaactatactttgcactaaaattaaaaacgaggctgggcacagtagctcatgcctgtaattccagcactttgggaggctgaggcgggcagatcacctgagggcaggagttcaagaccagcctggtcaacatggcgaaaccccatctctactaaacatacaaaaattagctgggtatggggtcacacccttataatcccagctactcagaaggctgaggcaggaggatcgctggagcctgggaagtggaggctgcagtgagctgagattgcaccattgcactccagcctcggtgacccaccttaaataaataaatacaatttttaaatgatagcatatatatatatacacacacatatacatacacaccaaataggtacatcgatgagagaacactatatttacaaaagtgcaagggaaatttgaatataagacttcagatgctggttacggtacctgaggtaggagggggaaacaggctggagtatacactacagaaatagacatgctttatcaattgtctgatttccctggagcatgttgacttcacgttgatttttttttacatgttctgttaaaaaaatttctttaaattggcctttggaaatttaccagcagtgtgctggtaaagtcttgacaatcagctctctgaaaaaaaaagcaaaaagaaaaacaaaaaacaaccccgacgtgtagcatttgccgatttctctggtgtaaatactcacagcatggctttgacatgagttttacatttggtaaaagcaaattgtgcctactttgaatagaaggattgggacagagatatggttcttgtcaggcactaattagggagtaaggcttgtctaatattgccttggctctcaagcaaaataaaaaaaaaaaagtaacgtttgggaatctgtgttgcttcctcagccccatcctgggtaaaatcggagacgtatacagggcagggagaagctgtttatttccgtgcctgcggctggagcttcttaaggatttgagctgtgatgctggcacctggcagaccacatcctgtgcggttttcagttttgctccgttcctgaccctggtatagcagaagctttttcacatctatgacacccgctatgtcttggtaaaccctggaagggaaaggaggacaaggttaaaatactgttccgaggatctggtctctccacagcgcaggctggaggtggcagcccgtggaaagccaagttcatccaccatcggagcccaggccaggctgccaaggctaatattcaggacaaagccaggcacaggtcgggaatcctatgaagatgat

SEQ ID NO: 22513 - DNA, 2300 bp, Homo sapien
tggaaaccactcatctagaatattatccatatggagagggctgatgcagggccaaatgatggagggtataaactcagggctgagggtgtgacttgattctatgggcaacgtggagccactgagctctattgggttgcacagtcaccaccagcacctcactgtcctgcactctgatgtacacatgcccaactgtgcacatcatgacgtttggaattcttcccattagcaaatcctgctgctacaacaaacactggctgtggacatgatgcaagagattgtcagaacaagagttttagaatatactaatcttagccctaaagggttaagccttcattttacagacagaaaaagagggactctaagatgaaaaactacttgcctagagtcacttaatacacctctaaccgctcatctcgggatcttcttcatccccaagccccatgtaggccacctggttgggaatggtggagaacatgactctagccagaaccagagaaagctgaagaagacctagggtagtgatgagagagggtgtgtgtgtgtgtgtgtgtgtgtgtgtgtgtgtgtgtgtgtgagagagagagagagagacagagataaggcgcctattctcactctcccatttcatcatcaataccttcaccaatatcactatcctcctcctcaccgtcatcatcatcgtcctcatcaccatcatcaccaccatcatcatcatcattatcatcatgacatgtcaacataatcttgtcttccatcatcaccatcaccaccatcatcaccaccaccatcaccaccatcaccaccaccaccatcgccaccaccatcaccatcaccaacatcatcaccaccatcaccatcatcaccaccgtcaccaccatcaccaccaccatcatcatcataattatcatcatgacatgtcaacataatcatgtcttcaccatcatcatcatcatcaccatcaccatcatcaacaccaccaccaccatcatcatcaccatcaccaccatcaccatcatcatgacatcatatcaccaacataatcaccaccatcatcgtcatcaccaccacctccgctaccaccagcattcctcttttccctagccctttcttgccaatctggagcaaaatatggaaatgggttaagtggagaactaatctccctttcttccactcatcccaattcccacaagagaggccacgtgtgtggtttccagatggcaaagtctcaccctgccctacagcaagaggggacccctggggccagattcctgagcacctagttttggctgcaatagtgacagtctgggtgatgatgtcagggtggccaggtcccctcccagggttggcacttccccatctatcggtgtggcatcggaggattccagtgagatgtaacatggggagtggctggaaaaatactctgtaactgtatggcgaatgccaaggggcaggggtccttgtatacaccgaagtaatcccgagtcagtttacaggatgggaagggcccctatatagatgaccagggtccttatgcaggtagaaggggtccttatgcagcatgaaggcttgctacacaggcgtgtggatttttccatacattctggagtagcctctacacataggagtgtttgtgcttagaagctgtgtccttatgcaggctaggaataaaagtgggacggagattttacacaaatacgggcatcttttacaggtgggagcactttcgtacacagaggacttcttatccatggaattggccgttctttgtaaaacgctctgtacttactagcaacctttacacagacatgaagtttctccataaggataaagggatcattatgttttaggtgaaataacagtatgagtggcctcgtatggacaaggagggctgatttcaatcgcgatgcaagccagctgtccggatgccgccgacgccagcagcgcggtacctgcgcgggcagcaggtgggagccgcgaccggggtggggcgcggagcgctgggggcctcccgactcccgcagtccccgccgcgaccaccaggggcagcaccgtccccgcccggcccgcgcctccctccccccaatctccgccccccaccccctgcctcccccccgctcccgctcccctgagcccagccagaccccgcgccgcccgcgccccgctcgactccggaggctcccgcagccccggcgtccgccccgctgccccctcccccgggggccatgggggcgcccccgggctaccggccctcagcttgggtgcatctcctccaccagctgccccgcgccgacttccagctc

SEQ ID NO: 22514 - DNA, 2300 bp, Homo sapien
cgggggaggcacacagccacacgcacacactcactggcatatgcacagcacacacacacgtccacttactcccattacacactcacatgcacacacatatgcacaggcacacccagacacgcccacttattccaacacactcacatgcacacacatatgcacaggcacactcagacacacccacttactcccattacacactcacatgcacactcacatgcacacactcagacacgcccacttactttcattacacacatgcacacacacatatgcacaggtacacacacacgcccacctactctcattacacactcacatatgcacacacacatacccatttactactcccgctatgcactcacacccacatacaacacacgcatatagacacatgcatacactcacatggatatacccacttacacatacacaatcacacatatgcacacgcacattgcgcacagtgactcacaacacacacatacacatgtataagcatttactcccatatacaagcacacactgcacttatatatatatgcttacacactcatgcatgcaccgtcacatacacgtttatactcccatacacacacacacgtacattccattcacatctacacacacatgcacacacatattgactatagcattcatgtgcacacacacactcacatgcagtcacgcatccacacacacactcatccacactgttacacacacacaaccggacccactcacaggcccaaggaactgtgcccagaacacacaaatgcccacagatgttctcatttgcagacagcagtgcacccaggagacacactcaggtgccccctcatctcatggagacagcccaaagataaaaacatccagtctcaaccagaaacacaaacactgcacacacttgggacacacacacacacacacactgtgccactgtgtgtgtgtatgtgtgtggacaaaggcagaaacaccgtggtttaggggaaacagccttggcaagtccagaggtgtgactctgatcccaatgttgtccctccatgctccggggctcagtgcaaaccccctgggccactgtgggcctctgggaccgcacaggtcagctgtgaaatccccgccacgtggagagccctgttattctgcaaggctctgcccaccgcagaacgtttccgcggcctgcctgtcttccgggccttggctctctccgcctctctgtccttgtgtgtctctcccgtctccatagtgttctcacgctctctctcccttactctgctcttcctctctgatttgatcccttttgctctctgcctttttctgactcatgcccgaaccttgtcttatctttgtctctttttttggttgtgtctttctgcctgtgcctccctccatctctctctctctctctttctgttctgtcttcactcttccagtttccatttctgagtcttgcatacacacacacacacacgttgccacacagcccctcgtcccgtccctgggtgacaagctcaggcgctgtggggtgtagcgctcagcagcaggggagacagtgagcagggaggagagggggaggaagcacgcctcccccagcctggcccgaggcaccaggaacaggtgcccccacacccccacccgccccctgatcccacacgattgtggaggggccttggcaggtccttgggaaaacctccattccaactgctggctgcagagagaaggaaacccaggctcggagaaggggcggttcctgctaaagattgcacagccaatggagggcagagcagaattgggacccaaggcttggggcccccagttggaagctccctccagcaagctggccctgacacctggagccccagctgccagcctgggaggggctgggacccaatctcccccaagattaggccagggatgtctcccaccttcactctgacatcccagaccccgaccccccagccacgcaggaagggggatctgagtgtggaacacacgggtgccctcggaggtctgatgtcacccccttccccaggccttgttgctggtggcggccttggcgggcctgggcttgggcctgagcctcattttcatcgctgtctacctcatccgcttctgctgctgccggccccccgagccccccgggtccaagatcccctcgcccgggggaggctgcgtcacctggagctgcattgtcgcccttctcgccggctggtaatggggccccagggtgggtgggcggtggggacagggctccccaagctctttgctggccttcctgggggtgtcctccggggacatgg

SEQ ID NO: 22515 - DNA, 2300 bp, Homo sapien
ctggaggccctgcccgcggggcatgcgctgagatttgggaggccttccgggatgctgcgctccagcggggaaggccgactggggctgaaaaagctggaggtcaggacacacccgcagggcagcaggtgcaagagacagacaagcctgggtttgaagaagtccaggttctgcattgtggtcaggcccaggggctgcacaagccgggcctcagctccttctcctgggcgagggcagggaagtggtgggagccataagggtgatgccagggtgaggcagacccaccatcgctagaaaatatcttccgggtgcaccactgcgaaagcaccccacacttgggagtccctcgacagacaaatcaggggcctccaagggagtcttgctggaggggagcacttgcgaggctgggcggaagcagccagagaccagggtaaggagtgaagcccaagcttgtggggcctgcagagaatggcaggaggattacatgagcacttactacgtgccgggcactgtgctgttgttacggcgggtccttgctcccggagctcccaagatcgtggtggccacttccaagagggcagcaagcctcgtgttctctgacctggggttcttggcctcacggattccaaggaatggaatcctgggccctgcggtgagtgttttagctctattagaagccgtgggtcacggaagagaaccgtggaacccagcgaccagtgttcagctcgatcaggatgaacccaggcagttagctgtgcaggaacaatggcgagcctctagcccgattgggagcggcaatgggtgtctccctggatcacgagcacagtggacaccctgccggatccggagggtggaagtcagcggcgggtctgcgacggcggcaaacagcagtggtggacggcgagcgaaagctcagctcaagccgtaacagacacggaccagaagagtgtgcagtttcaagttttaatagagtgaaaacagagttcccatacaacgggaggggacccaaagtgggtagccgttgctggctggaatgcctgggtttctatccagatcattgtcccttcccctgtgctctcaggtgatagatgattggctatttctttacttcctatttttgcctaactagcactttagtgagctctctttactacctgattggttgggtgtgagctaaattgcatgccccgtgtttaaaggtggatgcggtcaccttcccagctaggcttagggattattagtcggcctcggacatccagctagtcctgtctctcactgtggcttgcatgcttgcacctcctgaatcatggtggtgggcccttcactgatatttaaggattaacttttttttttttcatttttgagactaagtctcactcttgtcgcccaggctggagtgcagtggtgcaatcttggctcactgcaacctccacctcatgggttcaaatgattctcctgcctcagcctcccaagtagctgggattacaggcgtgcaccaccacgcccggctaattgttgtatttttagtaaagacggggtttcaccatgttggccaggctggtctcaaactcctgacctcaagtgatccgcctgcctcagcctcccaaaatgcgcggattacaggcgtgagccacctcgcccggccaagtattaactattaactaacatctcagttccctcgttcacgctcaggctaacctctaagtgtgtccacgtgcttggcactctcctaagcacttctagtcatgcagcccactcgaggcaatattctcaagccagtgttgttgtgctccccacgttacatgtagggaaactgaggaacgagaggctaaggttaccgagacaagagttacccggccagttaagcggaggggctggggttgagaccaggcagcctctgcctccagacgtcatgccctccagggatgcgatgggatctttggtgcagtcttgagaacgagtatctccactctgcagggtggggttggggatggggagctcggagagaacacatcacgtgtccctggtcacagggcacatgtgtgtggcccggccaggggatagtcccaggtgctcaggacctgtattctaaaccgctccagtgtcctgtctcatgataacactatttcacagaggacctgggctgtggcccagacacagtaaacagcaggaggctgagcttggagggtggtgaatgtgaggctgagctggggggcagggtgaatgctggtggagggttgctgttccgccggggtgcctggaggcaggtttgtggtttcagccctaccctctcccctcccagg

SEQ ID NO: 22516 - DNA, 2300 bp, Homo sapien
tttgtgatataatttgtcctgtttacataatttttttccctgacatgtaagataaatgtatctaattgtgggcttacttgtaaagagttttcacatttaagttccagtcatttcattttatcgctgtgtctgtgtacagaatgctaaagaataagacataaaaaataaaagtacagttataaacacctcttttaaaaggcagagactgttcgcttgggcaaaaaaaagcaagatccaactacatgctatctacaagaaacccaccctaaatacaacaggtaaaaggaagctaaatggaacgtgggtcctggcttgtaccctggcatgtaaagaaaacattggaggaaaaggtggtgaaatcccagtaaagtctgggttttagttacagtaatgcatcatgtcagtatctacaacaaaccacttttgttggtgcttgtgatgacagcatcagaagaaactgagcataaaacatggtggactgcgtatgatctttgcaacttttcttttttttttttttgagacaagaatttcactcttgttgcccaggctggagtgcaatggtgtaacctcggctcactgcaaccttggcctcctgggttcaagcgattctcctgcctcagcctcccgagtagccgggattacaggtgcacgcgccaccacgcccagctaatttctgtatttttagtagagacgggacttcaccatgttggccaggctgatcttgaactcctgaccccaggtgatccacccatctcggcctcccaaagtgttgggattacaggcgtgagccagcgcgcccggtctttgcaacgttttgaataaatccaaaattattccagaacaaaaagcttagtaccaaaaagaaaacaaaaacaaaaacaaaacaaacccccccccccccacagagtaaaataacggaaaaagatctactatgctagcactaacaaaataatacgtagttatgaaaatggtatgtatttttcaagctagacgttcataatggtagaacatgaggaggaaaactgcctcttaaatcccaccacttactgtgacgcagtgaccggtccctgcagcggactggatagttgtatcagagtcctggacggaaacagatggcactcaaaaggtggcgcgcagttcagagaaatgcctatgtacggatttggtccaatgcctcagcctgacctcagggaccttcgggggtctgctccgcgcccacccttacacatctgtgaccccacacacttccaccccagcgccactgccaacagctacacccatccccctccaaccgcgtcagcttccagcctcggtccatctgaactcgccgtgccccctcccctgcgcccttccagattcatttgctagggaagcccgctcttccgggtggagctgttcctcatcccctttctttatcattctctccccagggcttccacatcaccgtgctgtggacaatcccggaactcctgtcacgccagtttacatttaggaacagtaatggctcccactgactcagtcaaaacaaggctgcggccgggcacggtggctcacgcccgtaatcccagcactttgggaagccgagacggagggatcacgaggtcaggagttcgagaacagcctggccgacatggtgaaaccccgtctttactaaaaacacaaaaattagccgggcatagtggcgcgcgcctgtaatcccagctactccggaggctgaggcagaattgtttgaacccaggaggcggaggttgcagtgagcagagatcacgccactgtactctatcgtgggcgacgacagagcaagagcaagactccgtctccgagaacaacaacaacagcaacaagaaaacaacaataaaaaaaataaggctgcgtgggaggcagaaagagctaatgcggccacgcttgtcccctcggggccaccgtccccacccagacttccggtctgccttaaaatgttcatgcgtaagtgcgtgggcaggaaggcgggctcaagcgcagctcgtggcgttcattggctgtgcagggccgagggaggcggtgcaaggccgccgcgtgacgtcaggacgccgcggtcaggacgtcgaagccaaagaagaccagagccagccgggtggcacagcggtgtcgtggccgtgttgctgatcgcctgggtggttgttggcgtgtccctgcagcgaaggatcctggttggtaaggggagcggcgggcgagcaggcgggcggggatagcatctccttttggtcttgcgccccgcgagccccgaggccttctcggccgtcgcagcagcagacgccgcg

SEQ ID NO: 22517 - DNA, 2300 bp, Homo sapien
gcccaccatcctggacgcaccgaacaccgagggcgcccacggggcagagggtgccgagtggacactggcggggacaggtcaggaggcccaggctgcccccaagcgagggagcacaaggccgctctgcacagggcaccaggaaccaggcgtggaggaacccggagagctggaggcggcccaggagagggcgctgggcacagctgctgatttgggaacactggccccaagaggacgcctcgccggagtgactgaggaggcactgaagccaacagcagccaccaggaccacattgctggggggcaaggaagcacaggccctgggagtcccggggggctccgctgagacgacagaagccgagtggggtcctgcggcctggcccgaggacaaaagggcccgccttagtgttgcagccccttgccaaccgcgccccacacattttgtggccctcatggtgaccgagcctgggctacaagcagaagtgaccaaggcccaggaatacctggtccacgtggccccacactgcgccaacttcctagtgccctctcagaacctacacctgaccctggccctgctgcgactggcaggcgctggggaggaggccgctgccattggagctctgagacgggccctcttggccccggggctaaatgcaccccctcggctgagctttagaaagctggtcctcctgggcccgcatgtgctgtgtgccccaccctctcccacactggaaagcatggcacaagtgctgagccagaggctggaagccgaggggctgagtacactacagtctccagggcagctgcacccccacctcaccgtggccaaggtgccccatggttcccaggtccacctccccaagctggagttcaccctcagccaggaagtggggtgccagcccctgcagacactctggctgtgccgtatagggaggacaggggggcctttccagcccctggctgagatccgcctggagtgacacccccagacctctggaggagacaatggatgcaaacagcccacacaggaaagacaaagcaggagcgtgcacgctctctctttctctctttaattttggtttctctcaagcttccaaatggtgctcagtgctccaaggaaaggaaggaaggaaggaaaaggaggggagaggaggggaaggggaggcagaggaggaacatctggaaaaaaagcagcctgacagtccagctgtttgcaaactcatagcacatcctccagttacatggcagaagagggagggagggagggccaaaaagaaaagggagaggaggaagaaaaataacttaaataaacacacacacaaagaaaagagaaggcaacatgacgtgagctggtgatccatgaaggcagggagggaggggaaccgttttacctgtgctgaaccaagggaagaatgcggagagggagggagggaaaggggaaaaaaaaatcagaagaaacactgggggcagagggaggaggggacacggagacaactttatacaacttgagacgaggcggcccggccggcgtgtcctcagtgcggtgtggcggcggaggatctggtgctggtggtgctggcacttcagggtggggggccgaggacgggcacagtctctaagcagctcccccaccccaaacacggaggccccaaggggctgggaacaagagtctgtggcgaagcaggtgaggcagcgggcggtgggcgggcttgctgggtgcccccgccgcaggcgggcacgggctggacggcctgtcttctttccactggccccccggcatgggatgggccagggcgccgggtcgggtaccggagtgcaagctcgaaagagagagagagaaaacactgagacagcattagtggagtgaaaggcggacacagatgagcctgcagaccatgcccccaaccctccgctgcccatcccctcctccccaatcccatccctctgaggcaaaaaataaaaacgtagaaaaatctctgtacagactccccggtgggaaaacgggggcagggatggtggctcttcctggagcgcactccccacaaataaatttacaacccaagtccacggctcaaaaacagaatccgcaaaggcagcgctgggggctgcagcccctgcccccgcccctcctcgctgggtgctcagaaggctgacagctgcgccaggctgaggcggcagtcgatgctggagttgtccgggcccgtgtaggccaggcccaggggctctaggaaggcccggcaggcggcctcgccctcgaaggccagctcggcctgcaggtaggagactggcagcgcagggcggaag

SEQ ID NO: 22518 - DNA, 2300 bp, Homo sapien
tacaaaaattggctgggtatggtggcgggtgcctgtaatcccagctactcgggagactgaggaggaagaatcgcctgaacccgggaggcggaggttgcggtgagccgggatggcgccattgaactccagcatgggcgagactccgtctcaaaaacaaaaatcaaaaaacaaaaaacgggaaccgtcccccatcgtcctttgagcagtcgcgtggctgcgagccccgggctggggccgcgctgaccctcccgtgcccctcgcagatgcccgtgctgaagcagctgggccccgcgcagcccaagaagcggcctgatcgcggcgccctgtccatctccgcgccgctcggcgacttccggcacacgctgcacgtggggcgcggcggcgacgccttcggggacacctcgttcctgagccgccacggcggcgggccgccccccgagccccgggcgccccccgcgggggccccgcgctccccgccgccgcccgccgtcccgcagtccgcagcgccctcgcctgccgacccgctgctgtccttccacctggatctggggccctccatgctggacgcggtgctgggcgtcatggacgcggcgcgcccggaggcggctgccgccaagcccgacgcggaaccccgccccgggacgcagcccccccaggcccgctgccgccccaacgcggacctcgagctgaacgacgtcatcggcctctaggttccctcattccccgcgcccttcccgcccggcaccccacttctgtatacataaacggccaaggtgtgtgcccgggctctgacttttcactttgcacgtggaaagggatgaatgatagggtcctggcgcctctgagagccggatgtgtcacccggaggcctggtccgggtccgatgattgccctggggtgggggtgcggctcctttaagagagcccgagggcgtggccaggcggtgccccttgcagaggcggcggctcccgcagtcccattcgtcaaatactgtgcgccaccgccggccggacgtggtcctggggccgggccagactcagccaccgcggggccagccgaggcggggctgcagagtgctgcagccccaggagtccttctggccctgaacgcctcaggtggactccgacccggcggagccgccgtttactctgggagcggctgcagagggaagtgtctgagaacacttttagagcagtaggggcctggtctccgtgggggaagggtccgcaggcatcttggttctttaaggcccccgagggatggggccgaacatgcaaatgatttggactgaggggccaggttctcgtaagtttcccagaggggcggggccgcaaatgtaaatcacttggactgagggcgggtccaggttctttaaagacgtcccctcatgggcggggcacacaggtatcaccgggaaaggggcggggcaccacatgtaaatcaccgggaaagggatgggacacaggtaaatcacccggaaaggggcggggcaccacatgtaaatcaccttaaaacggacagggcacacatgtaaatcacttggggagaggcacacacgtaaatcacccggaaagaggcagcacaaaagtatcactgggaaagggccagggcacgcatgtaaatcacccggaacggggcgggacacatgtaaatcacttgagaaggggagaggcactcgtaaatcacccggaaaggggcggggcattacatgtaaattaccctgaaaggagcggggaacatatgtaaatcacttgggaaggggagaggcacacataaaaaaaaaaaaaaaatcacctaaaaggggtggggcactcgtaaatcaccaggaaaggggcggggcaccacatgtaaatcaccgggaacggggcggggcactacatgtaaatcacctaaaggtcgaggcacacgtaatcatcccgaaaggggcggggcattacatgtaaatcacccagaaagaggcagcacacatcaatcaccgggaaaggggcggggccaggctcccaagagctccgggagaccgagactgccgcagcctttacgcagcttgctttcctggcgctgggggagggcgcagccgggaagtcccagagcagcggtgtcaggctctccaccaaggagggactgggccagagtcctcgcgagggcacgcggcgtggtccccagagctaggccggagcgcgggccgctgacgccactgtcgggtgaggctcggtgcatccatggggagccgccctccgtgcggggcgacctcgtctgcgcggcgggcgtgccagttccccgcacccatggcagcggccaga

SEQ ID NO: 22519 - DNA, 2300 bp, Homo sapien
ggagtgcagtggctcgatctgggctcactgcaacctccgcctcctgcgttcaagcgagtatcctgcctcagcctcccgagtacctgagactacacaccactgcgcccagctgatttttgtatttttttagtagagtcagcgtttcaccaagttggccaggctggtcttgagcttctgacctcaagtgatccacccgccttggcttcccaaagtgctgggattacaggcgtgagccactgcacttggcctttatatatatcttaacgtatgtacataatacatgtaatgaaccactggcacatgctgcacacggatgaacctgcttatgtgaaggaagtcagataggtaaggctgtatgatgtgtgattccatttatgcgaatgtccagaagaggtaatccatgaatcagaaaacaggggagtggtttccaggggctgcagagagcggggcatgggagtgaccgcttaatagggttttctttaggggtgatgaaaatgtttgggaacttgatagaaaggatggctacacaattaccagtgtaccaattaggtacgttccattgggaatgtactaaatgtcactgaactgtacaccttaagatggttaattctggcccgatgcagtggctcacacctataatcccagcactttggaagccgaggcaggcggataacctgaggtcgggagttcgagaccagcctgaccaacgtggagaaaccccgtctctactaaaaatacaaaattagctgggcgtggtggcaggcaccggtaatcccggctactcaacaggctgaggcaggagaatcgcttgaacctggaaggtggaggttgcagtgagtggagatcgcgccattgcactccagcctgggcaacaagaacaaaactccgtctcaattaaaaaaaaagaaaaaaaaaagatggttaattttatgttatgtgaattttacatcaataaaaaatacttaataaaagtctgttatatatatatatatatatatatatatatagtttttctgattactgagtttctggtgaccactgccccctccccccttaaattttgctgtgggtgctgagtcctgacctacttcactccatcccctgcggggaccccagtgggaactttctaacacctggatctttccctgccattcctccgcggtccccccacgcctgcagggcaaactgaagctcccagtggctttcaagctggcttctccaggcaaatcaaactccacctggtgtctgagaaccctctgccccacccagcttccccactctgctccgatatccatcctcctctccctgggctccatcaactctcactcatccttaagacccagctcaaggctgcttcctgttatcgcaaattgactgtcttctctccagcactacaaccccagccccaactaggggtaaaaccactgacctagcctcccacctgggcctcccctttctctcactgagctgcctcctacctgggcttccctctccctctccctctgaccctgacccaggctccaacctgcatctccacctccctcccgctgacccagcctcccacctgggcctccacctccctcccacagacctagactcccacctgggcttcccaccttcttcccactgagctgcatcctgccttgggactctgctctccccctccgctctctctccctgcccgcaccgccctgaaggaattgccctaacactcaaacctcactctcttgtcatcaatagacactggtgcttagaatgagatatgagctttctatgacggagtggctccaggcagggaggttcatctaggggacgccgcagcaaagccagagctgcccctctcagacaccctccatgctcttcatcctcctgctgctttcactgtctgacctgcctctcttctctctttctctctctctctctccctctctctctctccatacagctgcaatctggaagaaattactcttctaaacagccagacttccccagtttcaggaaattccaagctgtgcaggggaggggccaggctgggggcgcgccctgtccagccccaccccctctgccagttccccctgcacacttagtcctggcctcctcccgcccccacactccgcccagaggggcctcagcttttccaccactgctttctagtcctttaactcctagaggcaaacttttgggggataagaaagcctgggaggggcctgtgccaaaaccctctctgcctggggactgggcggtgattccgcttctgcctgggctcctgccatggcccccgagaggggctgacactttag

SEQ ID NO: 22520 - DNA, 2300 bp, Homo sapien
tctgttctgctttattattattggtcatatctggtcatacgccctgaaaaccctgaaaatgggattgctaaaatcgccttaatctaaactccatttccctcccacttgctccctgggcttggagcacaaccactcaaacagaactggcttttggtcagtaaggaagaagtgagcaacggctgcggtgtagaccctcgtcaatgcctgcgacggttacacctggagacaagctccccagtgtcctcaggagcagcggagatgagaatccatgatagggtgggctctgtccccctcagctccgtgatgccgaaatgcactgctggtcctggtcctgctcctcattccacacccggctgagtgcccatctgaccccagacctcaacgcgaggttctaagcactgtctcctgacccttcaaccccttcgggattttgcatgtgctgttggaccacctcactcccacctggagccaaatgacactgtaggaggaggggaagagaacttatgctagtagagtgtgtgtgtgtgtgtgtgtgtgtgtgtgaatgtgtgtgtgtattatacataatatatataattacaacattgttaatggggccgggcgcggtggctcacacctgtaatcacagcactttgggaggctgagatgggcagatcacatgaggtcaggagttcaagaccagcctggccaacatggtgaaaccccgtctctactaaaatacaaaaattagccgggcatggtggcgtgcgcctgtagtcccggctactcagcaggctgaggcaagagaattgcttgagcctgggaggcggaggttgcagtgagccaagattgcaccactgcactccagcctgggcaacagagtacgactccatctccacacacacatacacacacacacacacacacacaaattgttaattgtatatgtataattataatagtttatatatattaacaattatatataaacttgcatatatatagtatttgctgtattattatatataaacaattatatatgtaatgactgtataaaatagataaacaattttaactaataatattatattaattatattattattagatgtaataattataattatttatatataatatttattattatgtatcattgttagaacacttaacgtgagctctgtcctcttaacaaatttcaagtgaacaagacgttattgctgacgatgggtcgtatgtggtgcagcagatctctaggcctgtttgttaataactccccatttccccctcctcccagcccccgtaaccaccattccctgctgtgatgttgtgactctggtgactttgcagatctcctgtaagtgacatcatgcagtacttggtctctgcctctgcgtcgcttggcgtgatgtcctcaggtttcgtccgtgttgtcgcccatggcagaattttcttccttgtttaaggctgaatagtattcccctgtgtgtgcaccacattttctatatcaattcttctatcaatggacatttagatgattttcacgtcttagctattgcgaatagtgctgcagtgatcaggggagttcagacggctctttgcatactgaatttgtttcttttaaatatagacccagaagtggcattgttggaccatacggtagctctatgtttagttttttgaggaacctccccactgttctctatagtgagtgcacaatttttcagcctcccaaagtgctgggatcacaggcgtgagccaccgcgcccggcgcactgtaggatcttttttaatgcattatataccttgctgagattttagcagagatcacaatattaaaaacttggggaaggatttctatgactctcattttaaatacaaggacatgtcgacttctagttttgtaacatcttgcccaagagcggtggtcgttaatgtgtggagttgggatgacatccaagtcagttggttgcacgacctttattctgtcttgtcccatagatttagaaagaggctgacacatcgggtaactagtttaaggtcatctgatcatgcgggtaagcgacatttttcagaaaccaaggccctccctctcatctcactagtgggaagggtggaaagaacagaacagaaagctctccctcttgtgtgaggcagttgctgtggaaaccccacgggcaggaggcccccggccagcacatcctgtctgcttgtgtctgctgcagagttctgggaccggggccatgtctccacacctcactgctctcctgggcctaggtgagtcctggagggagcgggaaggactggaaagggggtcggga

SEQ ID NO: 22521 - DNA, 2300 bp, Homo sapien
ggggtgggctttgcagtgagcactgggaacacaggaagggagtcctctggagaccctaggctccattttgttctagaaaccctccataggcagcccctcaggctcatccaatctcctgaaggagcctgtgatgctcagaatccagcgtgtctgggggtgggtagggtaggagtactctctgtcaggaggcagggacccgtgctgggcacttgtgttgggaattgttaaatgagttgatatgttttttgtattgcttgaatctggtagattcctccttctcctccatgtacagatttctgttgtagacaagaactaggagcaacttggctcaatattgtatcatcatgcttagtagaattctgttctggggagaccttccatgtccactctggggtggctgtgtccctggcttgcgaccaggtatcccagggcatcaggggaccccacgttacagggcaaaccagaacaatgtaaagaaggaaatgcccccaaggacagcgggagacggggggctccacatttccctctctaggctgtgcctccttctcttccaggtgctcaggacaagttctccctgtcagcctggccgagccctgtggttcccctaggaggacgtgtgactctctcctgtcattcccatcttcggtttgtcatatggacaatattccaaacaactgggacccgaagccatgagttgcacactggcctttccaacaacatcaccatcagccctgtgaccccagaacacgcagggacctacagatgtgttggaatttacaagcacgcctcaaagtggtcagctgagagcaactccctgaagatcatcgtcacaggtaggagaagtccagcccaccccacgtccaaccggtgtccagatggacctgcccagagtccacacccaatgaagccagagagttgttgtgggattcctagtcatgcactaaccgtggacacagaagccatcctgggaatttaaagagagggcatttcctgtgaggaatcaggtacccaggtggaggaggagggaggaagccgagcagcaggagaatctgcctggggagtagcagacgcagggtgctggtaccaattgcagcagggtggatccagggaggagccatgttgcctgaccccagctggatccagggaggagccatgttgcctgaccccagcaccagtgtttccctcggggaagtcgttactctgcctcgaaggagccagaggcttggggaagtgacagttccctcgggagatgagtccagtggctcagtgggacatggattgggaaatgcacccattcctctcctcctccttcccagtctcgtgacactcatcccttctctctcatggatgtgcagagtgtctcacggagagttagaaactcatcctgtggagtcgcccctgcccatcctataaagcagggaagggagagtgtggagttattcatattttatatatgtatgtaaatatacacataaagagagagagagagtagagttttctggaagagaaagatagagatctgtgccttgaaccgtgagtcaaggaaggatttcagagaaaacatcaagaaccaggattttcacggttggttctgtgttaataatgcaaaatcagtttttgttgttaacttcttgaagcatgggagaaaaatttaagaactagaaaatagttctcaatttgcaagtcattaatttgtaactttgaaaatgacagaataaacatttcagttttgctgtacaaccattttacaacattgacaatgcatgtattttaatttggcagtctcacattcaaggagctcagaagaaacagagaagagattgggtctttccaccaagagagcggggaaagcaggttggggtgaggcagggagatccaggctacgaaagctcctggaggatctgaatggagattgggactgtgaggggctgcccaggaaaggagtttaccgtgtccttctgcctaaatagggaaaaggagtcacttccaccctccccaacaagtagtcacgtctaacctcttgggttttggggcaaaaccagttgttccttcagtgtgagcctgtgagatttcttctgatcctccagagattcttgtatttttcaacacgcagagttgaaaaacagtgaggctcataacctcacagtcccatgccagggaacctaagtccagcagtgtgttttctgaaggttctcaaagcacagagtaattcccattttccgggagaaccccacatctcatatggtttcaagccagacaatggggatccgcgcagagagaacatgcacgcacacaaacag

SEQ ID NO: 22522 - DNA, 2300 bp, Homo sapien
caatttgcaagtcattaatttgtaactttgaaaatgacagaataaacatttcagttttgctgtacaaccattttacaacattgacaatgcatgtattttaatttggcagtctcacattcaaggagctcagaagaaacagagaagagattgggtctttccaccaagagagcggggaaagcaggttggggtgaggcagggagatccaggctacgaaagctcctggaggatctgaatggagattgggactgtgaggggctgcccaggaaaggagtttaccgtgtccttctgcctaaatagggaaaaggagtcacttccaccctccccaacaagtagtcacgtctaacctcttgggttttggggcaaaaccagttgttccttcagtgtgagcctgtgagatttcttctgatcctccagagattcttgtatttttcaacacgcagagttgaaaaacagtgaggctcataacctcacagtcccatgccagggaacctaagtccagcagtgtgttttctgaaggttctcaaagcacagagtaattcccattttccgggagaaccccacatctcatatggtttcaagccagacaatggggatccgcgcagagagaacatgcacgcacacaaacaggaaggacgcagacgggctttgggggtgatgagggacagcttccccctgaggtctcaggcgaggggtgaggaaggagactcatgtgaactcctctgtctctgctctcaggcttgttcacaaaaccctccatctcagcgcacccaagctccctggtgcatgcaggagccagggtgagcctgcgctgtcactcagaactggcctttgatgaatttatcttatacaaagaggggcacatacagcattcccagcagcttgaccaggggatggaggctgggatccattacgtcgaggctgtcttttccatgggtcctgtaacgcctgcccatgcaggagcctacagatgctgtggttgtttcagtcactcccgctatgagtggtcggctcccagtgaccccctggacattgtgatcacaggtgagtgtggctggaccatccgtggtctgttggtgccatgggagcttcatgtaatgcggttgttaatcaaacctcagtagaggaagagaaataaaggaagagagggactgtgaaaaagtgctcagcaaaggggtttaacatgtcttactgcttaaagaggcaggaggggtcacttctaccctccccaacaagtagtcacgtctaactccttgggcttgggggtacagccagttgttccctgcagtgggatcctgtgaggttccttctgatcctcccgagattcttatatttttcaacaaacacaattgaaaaatagtaagactcataaccccgtagccccatgtcagagaactcaaggccagcactatgttttctgaagggtctcaaagcacagagtaattcccattttccaggagaaccccacatctcatatggcttctaggggcggtaaaccacagggactcagtcaaaagcagaatcaaagaaatgcagaggaagtaaaaagacacagacataggctgactcaggaccctagagatgaacatgagattgacaggggcaccagccgacattcggaatctgctgccaagataagaacagcgaggctgggcgctgtggcttacgcctgtaatcccagcactttgggaggctgacgtgggcggatcacaaggtcaggagttcgagaccagcctgaccaacatggtgaaaccctgtctctactaaaaatacaaaaattagctgggcatggtggtccgtgcctctaatcccagctactcaggaggctaaggcaggagaatcacttgaacccgggatgctgaggttgcagtgagccgagatcgtgctactgcactccagcctaggagacaagagtgaaaatctgtctcaaaggaaaaaaaaaaaaaaaaaaaaagagggagagagattactttgttcatacactcaggcgtgtgttctaaaatcagcctctttttctcctaggaaaatacaaaaagccttctctctccacccaggtggaccccatgatgaggctgggagagaagttgaccctcttctgcagctctgaaatctcatttgaccagtaccatctgttcagacacggggttgctcatggacagtggctcagtggagggcagagacacagggaagcattccaggccaacttttctgtgggccgtgcaacgccagtccctggcgggacctatagatgctatggttccttcaatgactctccctataagcccccagtgacccgctgcaac

SEQ ID NO: 22523 - DNA, 2300 bp, Homo sapien
gcacctgagggtggagacagaagccccaaagtttcggtagcaatgatagcaggggaaaaggctgagaagggcttgggactcttttatataatatataaattaatataaaaattaattcaccttcacaatgtctgtctaatgcatttcaacaactgtctgtgttttcctcatgtatcttggttgtcattcctgtggggcggctcctcccacgcacctgacctttcataaagggtttctcccacggctgtccaggcatcagcctgatgaaggggattgttgccgctgctcctccccactcccccaaactcagtgtcagctcaagattgtgcccagcagggatgggaccaacgccagtctcacactcacctgtggggcagagcagacgcccatgtcagaccaccgtggattgaatctgtttctcacacacaggggaggggctgagcactgaccatggcctccagtgagtgagcagagaccccccagcgcctgtccacacacacaggggagggggagccacagcttccagcgtcacccagagccctgacccctccctgcctgggaggacgtggggttcctcttctgtcccacacggaggtgggagcctcctcctccctaatgaccctgggtggtcccagacacctgtggccactcagcattgaactctgctcatggaaggggatgcgtctcaatgtgaggaactgttcttcctctttctgtgcccgtggctgtgatgatctgcatatttcagatgtatcacaaggagaatttcatggtatttggagccgatgtgggctcttgagtgggggcgtcaatcatcctcctggactgtggagcccagcaccaggatcctctcccgtccccaccctcctgtctgaactggtctggaaattcaccatggctgagcctcccatgtcctgggcaccactgacccccacagccactgtgatgagtggggttcacgacagcaggctcagaggtgacattcatgtccaaagtcacataaaccctggatgataatcaggaattaaatacaaatcagctcaccttccccagaatcagattacagacctaacaaattcttctgaaaactctgaacatggacggaggtgccgagggaaggccaaggacgcaagggacactgagggggcgggaccgactcagagcctcattcccggggtgggggtgggtgatgttgcaacaaagagaaaaggggaagtacaggagagggacggtttggtaggaaggaaacacacactctcaagacagaacaaatatgttttattatagttaatccctgcatttccccttttgagacagggtctcactctgtcactgaggctggaatgctaaggggtgatcatagctccctgcagcctccgcctcccaggccgaagtattcctcccacctcagcctcctgagtagctgggactagagatgtgagctgccatgcctggctaattttttgctttttttatacagacaaggtcttgctatgtggcccagggtaatctgaagctcctggcctctagccttcacccacctcagcctcctgaagtgctgggattccaggcatgagccaccatggtagaccctgcattactcctctgtgctcactgccacacgcagctcaacctgagctacacagccaggtgtcaggtgcgtctctgctgatctgagtctaactgcagcatggacctgggttttccctgaagcatctccagggctggagggacgaccgccatggtaaggaccccgcaacgctgagctgatggacgggctgaaggagggagggagaccccatggggaagctctgagaaggaagaggaagcctctgctcaccctcatctggaagggcagacgcaggagggcaccagttctatttgctgctacatcccaggtctcaaggagatgaggataaaccagacagacagtggctggggggcaggaaagaccccatttctgtctgaaatgtctgcagagggcctggtgcctgcccccacctcagccctaaaggtatgacagccaggctcctgagagggcagttgcacttcctgtgtggttgcacataacaaaaccccatgacaagaaggatccagcctccgagtgtccacaccctgtgcgtctctctgtcctgccagcactgagggctcatccatccgcagagcagggcagtgggaggagacgccatgacccccatcctcacggtcctgatctgtctcggtgagatttgaagagggaggggagcttctaacctaggagggacctcaccccacagccaaactctggtccctaaggagac

SEQ ID NO: 22524 - DNA, 2300 bp, Homo sapien
tctactctcacaccacaacagtcatcaacacaggagacttgtaggatcagatgtgtgggattgtttcccagacccaatagcgaacagcagctgggtgtcctctaagtcggctccgagctgtctacccagacacagtcccagatcccacagattgaaggcccattctccaagattgcccccacacaccattcccaagtccagacctccagaacttctgactgactggcttcaagttggggatcccatgaccacctctttgggtttgattaatttgctgtagcagctcacagaactcagggagacactgacgtttactggttgaatacaaagcacactgcagaggacacagatgaagagactcataggaggaggcatgggggaagggaccggagcatctatgccctccctgggcgccacgctccaggaacctccgcatgctcagccatccagaagcccatgaaacccagtcctcttgggcttttaaggagcttcgtgacatcagcatttcctcccacaaggaacagggtgagaccatcttctgggagggtcttaagagccaccatcagaaaggcagggaacattcgagtcttgccttgggcaggtgaaggaagggcaggaggaggtcagaggcctcccctaaggcctaacacagccaacactctaacaaaagactgtaaccagtggtatggagttataagccaggaaccgcgggtgaaaaccagtgtgtatcacaacatcacacttccctctccggatgcactgtgtcttgccatgccatgcactccagattgtaatctttgcttctcattctcaaatacaagcaaaatccaggcaaccctggagcaatgcagccttgaattcctggggtctcttgtatgcacactctcttcaaccaaacggggatcataactatggcatttgtgggatgcaaatcctgtgtatacgaatggcagactttccctatacatggtgcagtggagccagcttcagggctggagtacaggcaggttttgtgacatgtgggccacggactggagccagttcccttgtacaccaaagaacaactgtacttagagataattttctctagatttttgttttgttttgttattttaggttaaagcattggatagaacacccagtgtcaccttgtctacctccaggacatgctgcagggcccactctatggaagtccctctaacaaatgctctatgaacaccctggtgtttagtgcttctttctttggaatcccagcagctctatcactggacggtttggtgcactcctttgatggaattcctctgggctgcttggggtccactccagcctcaggtgtagctggaggacgcagcctcccaccttggtctggagccctgaggccctcactgtcattgcagatcccgaggttcctctcccacctccattcagtggtggaaaactccattctaattaccccttgaaggtcctgggaccctctggcctctgttctttcttgtggatccacctacacttgggaacttcctcacctctttttctgctcatgacattgatgctctgggtatttcagaaatgcctcatgtacatttctccattagggtcagatgtgagatccagagtggacacatcaatcatctacacagactggggggtccaacatcgagatcctttcacatcccaaacagttcaggtcttaccctggtctggaaatcaagcacaaatgagcccctccgaatgtcccaggcaccactgacccaacaaccactgtgaccagtgggattcatgacaacaatctgcaaaggaggaaactgaggctcagtgatgggacattacaaaccaaggtcatgtaggcagcggatgataaccagtcatcaaataaatatcaactccctcccccactccccaaatcaaagctcaaacataagtcattgttctcaaaacgttgaacagggattgaggtgcagagggatggccaagtaagcaaagggcaccgaggaggcaggaaagtctcagatgtttgttcccagcgggtgggagtggacactgtagcaaaatattttaaaaaggggaagttgagaggggactatttggttgaaagaaaacccacaatccagtgtcaagaaagaagtcaacttttcttcccctatttccctgcatttctcctctgtgctcactgccacacgcagctcaacctgagctacacagccagatgcgagatgcttctctgctgatctgagtctgcctgcagcatggaccttggtcttccctgaagcatctccagggctggagggacgactgccatg

SEQ ID NO: 22525 - DNA, 2300 bp, Homo sapien
cctaaggcctaacacagccaacactctaacaaaagactgtaaccagtggtatggagttataagccaggaaccgcgggtgaaaaccagtgtgtatcacaacatcacacttccctctccggatgcactgtgtcttgccatgccatgcactccagattgtaatctttgcttctcattctcaaatacaagcaaaatccaggcaaccctggagcaatgcagccttgaattcctggggtctcttgtatgcacactctcttcaaccaaacggggatcataactatggcatttgtgggatgcaaatcctgtgtatacgaatggcagactttccctatacatggtgcagtggagccagcttcagggctggagtacaggcaggttttgtgacatgtgggccacggactggagccagttcccttgtacaccaaagaacaactgtacttagagataattttctctagatttttgttttgttttgttattttaggttaaagcattggatagaacacccagtgtcaccttgtctacctccaggacatgctgcagggcccactctatggaagtccctctaacaaatgctctatgaacaccctggtgtttagtgcttctttctttggaatcccagcagctctatcactggacggtttggtgcactcctttgatggaattcctctgggctgcttggggtccactccagcctcaggtgtagctggaggacgcagcctcccaccttggtctggagccctgaggccctcactgtcattgcagatcccgaggttcctctcccacctccattcagtggtggaaaactccattctaattaccccttgaaggtcctgggaccctctggcctctgttctttcttgtggatccacctacacttgggaacttcctcacctctttttctgctcatgacattgatgctctgggtatttcagaaatgcctcatgtacatttctccattagggtcagatgtgagatccagagtggacacatcaatcatctacacagactggggggtccaacatcgagatcctttcacatcccaaacagttcaggtcttaccctggtctggaaatcaagcacaaatgagcccctccgaatgtcccaggcaccactgacccaacaaccactgtgaccagtgggattcatgacaacaatctgcaaaggaggaaactgaggctcagtgatgggacattacaaaccaaggtcatgtaggcagcggatgataaccagtcatcaaataaatatcaactccctcccccactccccaaatcaaagctcaaacataagtcattgttctcaaaacgttgaacagggattgaggtgcagagggatggccaagtaagcaaagggcaccgaggaggcaggaaagtctcagatgtttgttcccagcgggtgggagtggacactgtagcaaaatattttaaaaaggggaagttgagaggggactatttggttgaaagaaaacccacaatccagtgtcaagaaagaagtcaacttttcttcccctatttccctgcatttctcctctgtgctcactgccacacgcagctcaacctgagctacacagccagatgcgagatgcttctctgctgatctgagtctgcctgcagcatggaccttggtcttccctgaagcatctccagggctggagggacgactgccatggtaaggaccccacaacgctgagctgatggatggctgaaggagggagggtgaccatgtgggaggctgtgagaaggaaagggaagcctccgttaccctcatctggaagggcagacgcagaaagcaccagttctatttgctgctacatcccgtctctcagtgagaagaggagaaaccagacagacagtggctgggggtcaggaaagaccccattacagtctgaaatgtctgcagagggcctggttcctgcccccacctcagctctaaaagaatgagagtcaggctcctggtagggtagttctgcttcctgtgtggctgcagatgacaacaccccatgagaaggacccagcctccgagtgtccacactgggtgggaaggaggggaggctatttctctctgtgtgtctctgtcctgccagcaccgagggctcatccatccgcagagcagggcagtgggaggagacgctatgacccccatcgtcacagtcctgatctgtctcagtgagatttgaagagggaggggagcttctaacctaggagggacctcaccccacagccgacctctagtccctaaggagaccccaggggctcacaaagatcccagggaggggaggacctgcccaggcttcaggggcaaat

SEQ ID NO: 22526 - DNA, 2300 bp, Homo sapien
atcagcaaagactcaagatacaaaataaatgtgcaaaaatcactagcatttatataccaataacagtcaagttgagagccaaatcaggaatgcaatctcatttacagtttacacacacacacacaaacacacacacacaatacctaggaatacagctaactaggagggtggacaatttcttcaaggagaactataaaacactgctcaaaaaattagagatgacacaaatagatggaaaaatattccatgatcatgaataggaagaatcaatatcttaaaaatggccatagtgctcaaagccatttatagattcagtaatatttgtattaagttatcattgagattcttcacagaactagaagaatcatatggaaccaaaagttttaaatttaaaaattcatatggaacccaaaaagagctcaaatagtcaaggcaagcctaagcaaaaacaaaaaccgaaaaccaaagctggaggcattatgttacctgacttcaaactatactacagggctacagtaaccaaaacagcatggtactggtacaaaaacaaacacatagaccaatggaacagaatagaaaacccagaaataaaaccacacacctacaactatctgatctttaggaaacctgacaaaaaaaaagtgatggggaaaggattccctattcaacaaactgtgctgggataactggctatccatatgcagacaattgaaactggaccccttccttacaccatatacaaaaaaactaactcaggatggattgattgatggatgtaaaacctaaaactataaaaacctggaagacaacctagacaatacattcaggacacaggcacgggcaaagattttatgactaaaatgccaaaagaaattgcaacaaaagcaaaaattgacaaatgagatctaattaaaccaaagggtttctgcactgcaaaagaaactgtaaacagagtaaactgacaatctacagactgggagaaagtttttgcaaactgtgcatctaacaaaggtctactctccagtatctttaaggaacttaaaccaatttacaagaagaaaacaaacaaccacattaaaatgtgggcaaacgacatgaacagacgcttttcaaaagaagacatacatgtggccaacaatcatataaaaaaagctcaacatcactgatcatgagagaaatgcaaatcaaaaccacaatgagataccatctgatacctgtcagaatggctattattaaaaagtcaagggacacatgttctcaggacctcctgagtgctgatcactcatatttggctcagaaaaatctcttctaatatattacagagtttgactctttttgtccacaataatttggtgcctgaacacgtgaggcctcagataagactcaggaccccaaaggagttgtctcaacctggagctaaggtaccagcaggggcccactgaaagcctccaggattttgagcttcttctctgccagaagtggtaagtcctcctgagccccgacctccctttggttgacggccctttatttattctgatctactatttctttttctttctaggaagttgttgtttaaggatcctacttctagttgggagatacattctaaagggtcttctccattgcttttctccccaaattaatctcgatttggcttgtctgttcacatttgcatgaggaactgaactgttgttttcatagggaaacgagagactgtgtttcctcagcttaaaaaagaaagggcattttgctcctcccagccaaaatgtgggaagtgatgaggggtgcttgtgggaatgtctgggggtgggtggaccccatcgtgatgtgagtggcctacagggaacacccaacaaaatgagttttaaaaaggcttgtccaggaagcacatatgggagctggtcactctgcattttgggccctcctggaggtgtttagaccttccgagagagaaactgagacacatgagagggaagaaatgactcagtggtgagaccctgtggagtcccacccacaaccagcacactgtgacccactgcacaaacctctagcccacagctcacttcctcctttaagaagagaagagaaaagaggagaggagaggaggaacagaaaagaaaagaaaagaaaaagtgggaaacaaataatctaagaatgaggagaaagcaagaagagtgacccccttgtgggcactccattggttttatggcgcctctactttctggagtttgtgtaaaacaaaaatattatggtctttgtgcacatttacatcaaggtaagagagccctaatggcagcttg

SEQ ID NO: 22527 - DNA, 2300 bp, Homo sapien
cccagatcccacagattgaatggttcagtccccaacactgcccccacaccattcccaagtccagacctccagaacttctgactgactggcttcaagttggggaccctatgaccacctctttgggtttgattaatttgctgtagcagctcacagaactcagagagacactgacgtttcctggttgaatacaaagcacactgcagaggacacagatgaagagactcataggaggaggcatgggggaaggggcgcagggcttccataccctccctgggcatcaccctccaggagtctccacatgctcaaccacccagaaacccacgaaacccagtcttcttgggtttttatgaagcttcatgatgtcagtatttcctcccacaaggaacaggctgagaccatcttctgggagggtcttaagagccaccatcagaaaggcagggacattagagtcttgccttgggcaggtgaaggaagggcaggaggaggtcagaggcctcccctaaggcctaacacagccaatgttataacaaaagactgtaacaagggctatggagctatgagccaggaaccgcaggtgaaaaccagtgtgtatcacaacatcacacttccctctccggacacactgtggcttgccatgccatgcactccagattgtaatccttgcttctcactcccaaataaactcaaaatccagacaaccctggagcaacgcagccttgaattcctggggtctcttatatgcacacttttttcaaccaaacgggggtcaaaactgtagcatttgtgggatgcaagacttgtgtatatgaacggcagacttttcctatatgcaggcccagcagagacaatgtcggggctggagtacgagcaggtgttggtgcatgtagggggtactgaaacgaattgcctgtgtatcccaagaaacaactctactgagagatcatattctctaggggtttatttttgtttttatttttattttaagttaaagcttcgggtagaacacccagtgtctccttgtccatctgaagaagatgctgctatgtggaagcacatccttgagatccacaaggagacactgggcaaggagacgagggtgccccactgtgcagaagtctccctaataaatgatctatgaacaccctggtgtttagtgcttctttctttggaatcccagcagctctgtcactggacggtttggtgcactcccttgagggaattcccctgggctgcttggggtccactccagcctcaggtgtagctggaggacgcagcctcccaccttggtctggagccctgagcccctcactgtcattgcagatcccgaggttcctctcctggctccactcagtggtggaaacctccaccctaatgagcccttgatggtcccaggtccctgtggcatctcacctgtggcctctgttctttcctgtggatccatctacacttgggaacttccacatctctttttctgctcatgacattgatgctctgggtatttcagaaatgcccagatagatggacaaatacacgtccatctatccattagggtcagatgtgagatccagagtggacacatcaatcacctacgtagactgtggagtccaacgccaagatcctcttatgtcccaaacacctcaggtcttaccctggtctggaaatcaagcacaaatgagcccctcctaatgttccagcaccactgaccgtacaaccactgtcacgagtgggatttgtgacaacagtcggcaaaggaagaatctgaggctcagagatggttcattaccgcccgaggtcacgtaggcagtggatgataaccagtcgttgaataaatataactcccccccaactccccaaatcaaagctcaaatataagtcattgttcccaaagcgttgaacagggattgaggtgcagagggacggccaagtaagcaaagggcaccgaggaggcaggaaagactcagagatttgttcccggggggtggggttggacactgtagcaaaatattttaaaaaggggaagttaagaggggactatttggttgaaagaaaacccacaatccagtgtcaagaaagaagtcaacttttcttccctatttccctgcatttctcttctgtgctcgctgccacacgcagctcagcctgggcggcacagccagatgcgagatgcgtctctgctgatctgagtctgcctgcagcatggacctgggtcttccctgaagcatctccagggctggagggacgactgccatggtaaggaccccacaacgctgagctgatggacggctgaaggagggagggtg

SEQ ID NO: 22528 - DNA, 2300 bp, Homo sapien
tccacagagcagggcagtgggaggagacgccatgacccccatcctcacggtcctgatctgtctcggtgagatttgaagaaggaggggagcttctaacctaagagggacctcaccccacagccaaactctggtccctaaggagaccccaggggctcacaaagatcccagggaggggaggacctgcccaggcttcagggggcaaatccctcaccgggaactctcttccagggctgagtctgggccccaggacccacgtgcaggcaggtgagtctgtccccagctcttccaggtccctcctcctcactggggacaaggggccacccccgtgccgctggggatggggaatagcagttctgggctgactgatcggggcgtctggagggtcctgggctgagagctggaatctgctgggttgggtgggaaatgagttagaatccgactcctgatttccttccagggcacctccccaagcccaccctctgggctgaaccaggctctgtgatcacccaggggagtcctgtgaccctcaggtgtcaggggggccaggagacccaggagtaccgtctatatagagaaaagaaaacagcactctggattacacggatcccacaggagcttgtgaagaagggccagttccccatcccatccatcacctgggaacatgcagggcggtatcgctgttactatggtagcgacactgcaggccgctcagagagcagtgaccccctggagctggtggtgacaggtgagctgacactcaggggtcccagccccagactctgccctcaggaagggggacggctctcaggggcttctccctctcacagcccagccctggggatgacgcgggtggtctgagccacatttaacacggtgcctccttctctcctaggagcctacatcaaacccaccctctcagcccagcccagccccgtggtgaactcaggagggaatgtaatcctccagtgtgactcacaggtggcatttgatggcttcagtctgtgtaaggaaggagaagatgaacacccacaatgcctgaactcccagccccatgcccgtgggtcgtcccgcgccatcttctccgtgggccccgtgagcccgagtcgcaggtggtggtacaggtgctatgcttatgactcgaactctccctatgagtggtctctacccagtgatctcctggagctcctggtcctaggtgagaaattcacagcattgcctggagttccctgagtctccaggcaggtggggagcagccgcgtctcagggcagttccaggtgggatgatgttggggcgagagggctcagggctcctggggccagagacacaggaagatcagcagtgatgtggccccgggggaaagggaagatttgtggggaagcctgagggtcggctcctggaaaccatgaccaccttttcccaggtgtttctaagaagccatcactctcagtgcagccaggtcctatcgtggcccctgaggagaccctgactctgcagtgtggctctgatgctggctacaacagatttgttctgtataaggacggggaacgtgacttccttcagctcgctggcgcacagccccaggctgggctctcccaggccaacttcaccctgggccctgtgagccgctcctacgggggccagtacagatgctacggtgcacacaacctctcctccgagtggtcggcccccagcgaccccctggacatcctgatcgcaggtgaggagcccagcgggttcagtcagggacccaggctccgcacaggccctgccgggggagctcaggtagtgatggccgggatgagggatgggggtcccaagggagggagagacagacagagacaggggatgggcggggagggggagactcagagaaaacagagacagagacactgagggtcccagagggagacctggggaggtgtcagctcagagcaaggtggggcagcccctcgcccatccttcttctctccaggacagttctatgacagagtctccctctcggtgcagccgggccccacggtggcctcaggagagaacgtgaccctgctgtgtcagtcacagggatggatgcaaactttccttctgaccaaggagggggcagctgatgacccatggcgtctaagatcaacgtaccaatctcaaaaataccaggctgaattccccatgggtcctgtgacctcagcccatgcggggacctacaggtgctacggctcacagagctccaaaccctacctgctgactcaccccagtgaccccctggagctcgtggtctcaggtgggggccttgaccctgtcctct

SEQ ID NO: 22529 - DNA, 2300 bp, Homo sapien
taacatttaaaaacccacaattcaggccgggcacggtggctcatgcctgtaatcccagcactttgggaagccgagacgggcggatcacttgaggtcaggagtttgagaccagcctggtcaacatggcaaaaccccgtctttactaaaaatacaaaaattagccaggcatggtgtcaagcacctgtaatcccagctactcgggaggctgagacaggagaattgcttgaacctgggaggcagaggttgcagtgagcagagattgtgccactacactccagcctgagtgacagagcaagactctgtctcacacaaaaacaaaaacaaaagcaaaaacaacccctcacaattcagcctaggatatgtttattaaatttacatttgtctttttgcttaagattgctttggtattcgtcctctttttggttccatatgaattttaggattgttttttctaattctgtgaaaaaaatgatgttgatattttgatgggaattgcattgaatctaaatattgctttgggaagtgtgatcattttcacaatattgattcttccaatccatgagcatgggatatatttctattttgctgtgtcatctacaatttctttcagcagcattttgttgttcttcttgtagagatctttcacctcctcggctaggtatatacttagatatttttaatttttgcaactgatgtacaagggattgagttttgcagcaacctggatgagctggaggccattattcatgacaccacatccagctaatttttgtattttttgtagagatgcggttttgccatgttgcccaggctggtcttgaactcctgggcccaagtgacccgcccgccttgacctcccaaagtgctgggactgcaggcatgagccacggtgcccggcctatcatagcacttttgatcattgggataattcctcctccttgtcatttttggacacatgcttcccacatgcctcatcttccagagagggtttccaccagggctgtgctgggagttaaggctggaaaaggggagatggttccagctgccagtgccacatgagtctactcagggctgtaaccagcagggaaggtccagtgtgagcctcagactcgcatgtgggacagacgcccatgtgtgacaacgctgcagtgaatctgtttcacacacatggaggaggcggctcagggctgaccatggacctgagtcaatgagcagagatatcccagtgccatccacaaacacaggggagaaggagccacaacttctcactttcatccaaaaccccgacccctccctgtctgtgagggcctggggttctcctctgtctcatacagaggcagaaacctcccccttagtgacccccagactttgcaagtcaccagcagccgctcggctctggcctcttctgcttcttaaggtttcctgcctatgacaggaagtctcatttctcattttcttcatcggaccatggctacatatttcagacacattataagtaggttttcccaatgttaggagcagatgtgggctgttgagcatttaagttgctcaccgtgactgtgcagtccaacaccaggatccactcatgtttcagcccctcaagacttaacccggtctggaaatgtaccatgactgaggccctcccatgacccaggcaccactggcccccaaaaccactcaggaggggggttcatgacaacaggctccaaatgaggaaaccgaggctcagagatgggacttactgcccaaggtcatgcacgcagggatgaaggtgagcaattcagaaaaaattaactccctatcccaccgccaaatcagagctcaagacaagtacttgttcccaaaaccttgaaggcagactgagatgcaggggaatgcccaaggaagcggggctgggggtgggagggaccccgaggaggcaggaatgactcagaggttacttttaagggaaggggagctgaacgctattaaaaaataggaagaaaaaaagaagggaagtctaagaaggaaactggaagaaataaaacccatactccaaagacaaaagaagagtcagcatttctttatttctcctttttttctcattgccaattgcagctcaacttgaatttcacagcccgatgtgagatgcgtctctgctgatctgagcctgtcctgcagcatggacctgcaactttcctgaagcatctccagggctggatgccatggtaaggatcccgcaatgctgtgttgatggacgggctgaaggagggaaggagaccccacggggaggctctgagaagaagaaaaagcccccagtc

SEQ ID NO: 22530 - DNA, 2300 bp, Homo sapien
ctgaaatagcttccaataaggtccttacacacaaatgtggagagacacatggaaatcctcgaaatgagatactgtcccgtgattctgagagtgacccaaaaggatacggaatgaggtactaaaagcaggtgcttggaaacctgagggcagtggtgttcatgcgtttcccggcactttgactttcagcctcctgcaagcctctccttctttgccttcctgaccgttagatacaattaatttggggtttgttttttctgcttcctctttcccctcccaccctatgtttcagttctaaagttagaaggtcctctcatccttttaagaagaacagagacagaaaatggttagtcaccatctaggacagactacaattccagatcattgcaggacgtgcccactcaaatggatgattattgagagctggccacctgaagtgttttacacaggcagtgatctaagggttgaagctatctggcctttttgcttgcttgttatgtatttatggcttttttccttttcaaaataattttactaaatatttaattcaccaactatatatatttatggggtacaatgtgttataaatgtatacactgtggaatgatggaatcaagacagttaacatgtccatcactccgcatactaacatctgtgaaaacatttaaaatctatgcttggctgggcgtggtggctcatgcctgtaaccccagcaactttgagaggctgagatgggcggatcaccagaggtcaggagttcgagaccggcctggccaacatggtgaaaccccatctctattaaaaatacaaaaattagctgtgagtggtggcgggtgcctgtaatcccagctacacaggaggctaaagcaggagagtctcctgaacccaggaggcggaggttgcagtgagctgagatcacaccacagcactctagcctgggcgacagagtgagactgcatctcagaaaagaaaaaatatatatatatattttggagctacatcgtgctagcgctgcagagaatgagttttgttttgcgacacagtttttagatgtctaccgggctctggtggagatggaatgtttggcctcaagtgggcaggtcccatgggacatgagtagccgaccatgacctggctgcgtactggcccaccaagcattcgactggcgtgcccagccactctccgtcatcgcagagaagtgctctatgtgagatttggttaaaggagtccctgaaggcctgtgggaggcagaatagtgacctcccagagatgtccacctcctgaggcccagaccctgtgagttggggaagcttatgtggcaaaagggactttgcagatgtgattaagtcaaggatcttgggttggggagattacccaggtgggcctgatgtaatcacaaggggctgagtaagtgaaagaggaaggcaggagggtcagagtgagagaaggaggtgagtgcatgcaagcagggggcagataacgggactggtggctttgaggttggagggaatggagaggcaggaatgcgggagcctgcagaggcttgaacaggcgagggaacagattctccttggagcctccaggaggacacggctctgatagcagcttcattttagcccagggagacccattttggacttgtgacctccgggacggtaagtcaataaacctacattatgtgaagccactaagcttgtggtgatttgttatggcagcaaaaggaagctttatggttcatctgtaccctgaaaatgcaggtttttggtttttttttttttttcacttgttcaatgatgtacccccagtgtcaggcgctttgcaaacacacgatacatacgggttgatgtttggtcaagagaggaattaagaccaggcagacagcaggctgggatcagagagaccccatttctgtctgaaatgtctgcagagaacctggtgcctgcctcagccctagctctggggaaatgaaagccaggctggggttcaaatgagggcagtttcccttcctgtgggctgctgatggaacaaccccatgacgagaaggacccagcctccaagcggccacaccctgtgtgtctctttgtcctgccggcactgaggactcatccatctgcacagctggggcccctgggaggagacgccatgatccccaccttcacggctctgctctgcctcggtgagatttaaagagggggaggggagacccgagtcttggaggaaatttgcctcacagccaggccctggttctttaggagactcaaaaatctcagggtagccgggcgcggtggctcacgcctgtaatc

SEQ ID NO: 22531 - DNA, 2300 bp, Homo sapien
agggaggagcctcagtgaacccagcaggaacaaacatagggtctgacatgatggaactcacttcctggaggccaagaaagacacttgcaggacaaaagggaaagagcggtggcttgcttagttccattcactgacaacccacaggagatgtccagtccttttttgatttattattttattttattatattttattttattttattttattttgacatggagttttgctcctattggccaggctggagtgcaatggcacgatcttgactcactgcaacctccacctctcaggttcaagcgattctcctgcctcagcctcctgcatagctgggattacaggcgactgccaccacagccaggtaatgtttgtatttttagtagagatgaggttttgccatcttggccaggctggtctcaaactcctgatctcatgtgatccgcctgtatcagactgccaaagtgttgggattacaggcgtgagccaccacacccagccttttgtatttttagtagagatggggtttcaccatgttggtcaggctggtcttaaactcctgacctcaggtgatccatccacctcggccacccaaagtgctgggagtacagatgttagccaccgtacccagtgagagtttcagtgctctatcggattccctgcctactccatgttgcatgtaatgttccacctcagggatgtttctctcctttctgtctccttcctcttctccttttccttttttctttctaatttttatttttttgagacagagccttgctctgttacccaggctagagtacagtggcacgatcccagctcactgcaacctctgcctcctgggttcaagagattctcctgactcagcctctcgagtagctgggattacaggcacccgccatcacacccagctagtttttgtatttttagtagagacgaggtttcaccatgttggccagactggtcttgaactcctgccctcaggtaatccacccgcctgtggccccccaaagtgctgggattacaggcgtgagtcaccactcccagccctgaatgatctttcctctttagtgtgttctcacaaccacctctcactgagctttcttgttttttgtttttgtttttgtttttgtttttgtttttgtttttggcagagtctggctttgttgcctatgctggagtgcagtggtgcaatctcagctcactgcaacctccgtctcctgggttcaagcgattctcccacctcagcctcctgagtagctgggattacaggcacccaccaccacacccagctaatttttgcatttttagtagacacagggtttcaccatgttggtcaggctggtctcgaactcctgaccttgtgatctgccagcctcagcctcccaaagtgctggaattacaggcatgagccaccactcccagccctggattatctttcctctttagtgtgttctcacaactacctctcactgctgggttttctctctttcttttttttttttttttttttttttttttgagacagtccggctttgttgcccaggctggagtgcagtggcgcgatctcggctcactgcaagctccacctcccaggttcaagcgattctcccacctcagcctccctagtagctgggattacaggcgcatgccagcacacccagctagtttttgtatttttagtagagacaggggtttcaccatgttggtcaggctggtcttgaactcctgaccttgtgatcttcctgcctcggcctcccaaagtgctgggattacaggtgtaagccactgcacccagccagctttctcattcttatcccttagttctctgccagggaataagatagaaaccattccctcaaccacattctagtcatggtccctattctcatgtttccacttctctctctttggtaataaatcaattaattgagaaacaagtagctaaatgttcatcttctgctagtctgcatccccttattttcccagagcctcccctaatgaaactgactttatttactgaacgcaggaaatgggtctctccagatcaggatgactttctgctgggaaatatttgtctttgcatcagtggggaaaaagaaagccgatgtcatgagtggaggctctgagaaaataagggctgtgttttcagtttagacccagctaagttgggagctgacatagatatgatgttgggtccaccctccacgggcaggttttcagacaaaggatccctggcaatcaggggacacctcaggtctgggctgagatgtgtgcagagggcctgggtcctcctgagcccctgc

SEQ ID NO: 22532 - DNA, 2300 bp, Homo sapien
ggcataattcaaaacataatcaatcacatccaaattgcagctagagatagcaacattcacctcacttccagaacaagtacacagaaaattattaagcatatgaaagacttgaaaaacatttgtgtaggcggcgggtgcataaggttgggtgttgatatgaaacatttaataatttcaataatcctagcactttgggaggccaaaatgggaggatcacttgaggccaggagtttgagaccagcctgggcaccatagtgagaccccgtctctattttttttaaataaagaaaaacatttgaatgatttttttcttaactgacatttagaaagcatccacctcaaatcttcctaatccacaaacttgtctagcacccctggaacattcaccaaaataaatttttaaatgctgaatcataggtaatatgatagatgaaacagttgaattaaattataaatgtacaacaaggaaatgctggggaaattatcaaatattttaaaattaataaacacacatagcaataaacaatgagtggaagaaaaacatttcaaagaaaggtggaaaatattttgtatcaattaaaaatgaaaacacatctcggcaaatgactggggatacagatagaacagcgttaagggacaataagcctcaaatgtctgtgttagaaaagaaggaagagctgagtaaataggtaactttcacttgcagaaatactacacatcagcaaattaattccaaagtaacgtcgaggaaaaacataaaatggcaagcaaatatatacgtgcatatgtacatacattcataaatgacaaacaggacagaaaaatcagtgacatcaattttgttccttagaagaaacaggaaaattgaccccaaaaaactttccaggccacatttggtcatgatggaaatattttggcacttcctggttaagctcaacaccaacttgcacccaaaaccaataatttcatttctaggtaaatatgtctaattaattcagcatatgtatgcaagggatcacacagaaacacgattatcaaggcccgagttataaaagagaaaatccggaaacaacacaaatgtccatgataaaaagaatggataattacatgttgataaagttatgcatggactattaaactgcaatccaaaagaataaaatagagctataaaattcaatatgtatatggtgtcatagaaacacaaatgtgagaaaaagaaagaaaaatacaaaatttatattttttaaaatttgaaacaactatatatgtgagtgcttagggtgtgtgtgtgtgtgtgtgtgtgtgtgtataaccatatgtatataaatgcacacatacgcacacatatagaatgtcccggccaggcatggtggctcacacctgtaatctcagcactttgggaggctgaagtagacagatcacttgaggttaggagttcaagaccagcctggccaacatggagaaacctcctctctactaaaagtacaaaaattaggtgggcgtggtggtgggtgcctgtaaatccagctacttaggaggctgaggcacgagaattgcgtgaacctgggaggtggaggctgcaatgagccgaggtctcaccactgcattccaaactgggtgacgaagtgagattgcgtctcaaaaaaaaaaaaagttctaaaagttgtgacttgggtgtggcagattgtgacatactgccagctgctagaaatgctggggcaggaggattgcttgaactctgaagtcaaagaacagcctggggaaaatagcacatgaagaagagtttgaatctcagataaaaacaacaaaaatacatcaaaagtctttaatgtaagccaagcattcagtcatctcctgtatgagagattggatctgagacgtgttttgagttggttatagtgaaggatgcaaggtgtcaattctagttggaacaatttccaggaagccatgttctgctcttgaccaaacagccactgggcctcatgcaaggtagaaatagcctgcatacgtcatcctcccatgatgtggtcagcatgtaaactgcatgagcccctcacaacatcctgtgtgctgctgaactgagctggggcgcagccgcctgtctgcaccggcagcaccatgtcgctcatggtcgtcagcatggcgtgtgttggtgagtcctggaagggaatcgagggagggagcggtggggtggagatctgggcctggagtggagatatgggcctggagtggagatatgggcctggagtggagatataggcctggagtggagatatgggcctggggtggagatatgggcc

SEQ ID NO: 22533 - DNA, 2300 bp, Homo sapien
tccaacctaactggcttacttcctagtctacttgaggctgcgatcacactgaggaactcacaattccaaacatataagaggctccctcttaacacggcacttagatacgtgctattccacctttcctcagagtatctttcagccttctgtcagcagtaaaacttataaattttttttataatttcaatgtagttttctcttcttcaagtaaacatgtctgccctcatggtttcgtcaatgggactcttttcttgcctaaggcttccggtgttatcattaccacgtccacataaccccatctgttctccgctgggttctcacccctggactctgagcttctggaagcagggtggagcctgaattgtctctgagactccaatttccatccaaagatgcagcacataggaggttccaaggatggtgaatcagatgaacaagtgatattcttactctctgcagatctggaaagctggcagagtcattccacgatgaaacatttgtagagtcataggccttgttagtctcatctccacagggacacgtatcaacacatcatctttcatactactataaatagacagtcactcctccatatctctggggtttacacatgtttattgaatcagcaataaatcaaaaatattttgagaaaaaaaatccccgaagtttcaaaaagcaaaaaactatgttgaatcgacacaaattgagtggcgtgtaggctgtgtcaggaattataagtaatcaagagatgatttcatgtatacaggaggatgtgcatgggttctatgcaattgctatgctattttttttttttttgagacagtctcactctctcacccaggctggagtgcagtggcgtgatctcaactcactgcaacctccgccttccaggttcaagcgattctcttccctcagcctccccagtagcctcccctaggattacaggcacgtgccaccctgcacagataaatttttttgtgtgtatatttttagtagagatggggtttcagaatgttggaccagctggtcttgaactcctgaccttgtgatctacccagctcagcctcccaaagtgctgggattacaggcgtgagccacggtgcccagcttcactatgccatttcatgcaaggggcttgagcatctgcagattttggtatctgaatggggatcctggaaccaatcacccaggtatagtgaaggaccatggtatataatttttatttgtcaatcttaaaaataaagcataaaaaatttacaacaacaagataaaaaataagaagtgtttttatagtgtgaggataagtttagatttattttttcctacgtgtaaccctatggtcctgtgttatttgttgagaaaatattctattccaccttaaactacatggcagcctttgtcaactataaagggactgtgtatccacagatgtattttagacacagttttctgtccagtggttctctgtatcccctctcatgaggatgctgcattttatataaacttatagaaccccttaaaatttggtaacctgagtcctctgatttgttattataggttatttagtttgctttttttttttttcttgagacagactcttcctctgtcacccaagctggagttcagtggcttgagctcagctcactgcaacctccgtctcccaggttcaagctattctgatgcctctggtttagtagtagaaactcaagcaggaaaattagaatggcttcttgtcacaattactctgataatgttaataatacctgttagacattttgcacattacatatgaagaagagtttgaatctcagataaaaacaaaaatacatcaaaaatctttaatgtaagcacagaattcaatcatctcgtgtatgagaggttggatctgagacgtcttttgagtctggtcgtagtgaaggacgcaaggtgtcaattctagtgagaacaatttccaggaagccatgttccgctcttgagcgagcacccactgggcctcatgcaaggtagaaagagcctgcgtacgtcaccctcccatgatgtggtcaacatgtaaactgcatgggcagggcgccaaataacatcctgtgcgctgctgagctgagctggggcgcggccgcctgtctgcacagacagcaccatgtcgctcatggtcgtcagcatggtgtgtgttggtgagtcctggaagggcatcgagggagggagtgcggggatggagatcggggcccagagttggagatataggcctggaagtggagttatgggcctagagatggagtgatgggcctagaagtggagatctg

SEQ ID NO: 22534 - DNA, 2300 bp, Homo sapien
gaggctccctcttaacacggcacttagacacgtcctgttccaccttccctcatgctgttccacctcccctcagagtatctttcagccttctgtcagcagtaaaacttatatattttttaaaataatttcaatgtagttttccctccttcaaataaacatgtctgccctcatggtttcggtaatgggactcttttcttgcctaagacttccattatcattaccatgtccacataaccccatctgttctccactgggttctcacccccggactctgagtttctggaagcagggtggagcctcatttgtctctgggactcctatttccatccaaagatgtagcacataggaggttccaaggatcgtgaatcacatgaacaagtgatattcttactctctgcagacctggaaatctggcagagtcattccaagatgaaacatttgtagaatcataggccttgttagtctcatctacacagggacacatatcaacacatcatctttcacactataaatatacagtcactcctccatatctgtggggtttacagttctttattgaaccgagtataaatcaaaaatattcagagaaagtatccacagagttacaaaaagcagaactgtgttgaatggacacaaatgaagctgtgtgtaggctgcatcaggaattataagtaatctagagatgatttcatgtatacaggaggatgtgcataggttatttgcaaactctgtgccatttcatataagaggcttgagcatctacagattttggtatctgagtggagatctcgaaaccaatcacccacgaatagtgaaggatgaccgtatatgacttttatttctcaaatttaaatataaatcataaaaaatgtacaactagataaaaactaagaagtgtttttatagtgtgagttagatttattttttcctaggtataacccattggtttaatattatttattgagaagacattctatgccaccttaaaccacacggcagcctttgtcaactctaaagggactgtgtgtacacggatgtactttagacactgtttctgctaaggggctctctgtgtccacactcttgatgatgctgcactttatgtagccttatagaaccctttaaatttagtagccagagctctctaatttgttattataggctatttgcttttttttcttgaggcggagtcttgctctgtcgcccaggctggactgcagtgacacaatctcagctcactgcaacttctgcctcccaggttcaagcgattctcatgcctcagcctcttgagtagctggcgttacaggtgcctgccaccaggcacggctaatttttggatttttagcagagacacggtttcactatattggccaggctgctctcaaactccttatctcagttgatccgcccacctcggcttcccaacgtgctggggaaacttgattttctatagcattatgttactggatatttctgtaaaatttaaaatgagggagggagagagacagacggaaaacaaactccagagttgggactctggaatcttgggtcatgagacaaattttagattaaactacaaaactccagaatttacaggtggggtttttactgataaagtacaattctaagattgtaaataattgcataatccttccctgggaatttaaatcattttaactggttctgctgtaatactagaaatacaagcatgaaaaattctaatggtttattagtgacaatgactctgaaaacattaataatacctattagatattttgcatattacacaggaagaagagtttgaatctcagataaaaacaatagaaatacatgaaaagtctttcatgttagcacagattttaggcatctcgtgttcgggaggttggatctcagacgtgttttgagttggtcatagtgaaggacactaggtgtcaaattctagcgagaacaatttccaggaagccgtgttccgctcttgagcgagcacccactgggcctcatgcaaggtagaaagagcctgcgtacgtcaccctcccatgatgtggtcaacatgtaaactgcatgggcagggcgccaaataacatcctgtgcgctgctgagctgagctcggtcgcggctgcctgtctgctccggcagcaccatgtcgctcttggtcgtcagcatggcgtgtgttggtgagtcctggaaagcaatagagggagggagtgaggggatggagatctgggcccagaggtggagatataggcctggaggtggagttatgggcctggagtggagatctgggcctggagtggatatat

SEQ ID NO: 22535 - DNA, 2300 bp, Homo sapien
tctgtcagcagtaaaacttatatattttttaaaataacttcaatgtagttttccatccttcaaataaacatgtctgcccccatggtttcggtaatgggactcttttcttgcctaaggcttccggtgttatcagtaccatgtccatataatcccatctgttccccactgagttctcatccccggactctgagtttctggaagcagggtggagcctcatttgtctctgggactccaatttccatccaaagatgtagcacataggaggttccaaggatcacgaatcatatgaacaagtgatactcttactctctgcagacctggaaagctggcagagtcattccacaatgaaacatttgtagaatcataggccttgttagtctcatctccatggggacacatatcaacacatcatctttcataatataaatatacggtcactcctccatatctgcggggtttacaggtgtttattgaaccaagtataaatcaaaaatattgagagaaagtatccacagagtttcaaaaagcataactatgttgaatggacacaaatgaagctgtgtgtaggctgtatcaggaattataagtaatctagagatgatttcatgtatacaggaggatgtgcataggttatttgcaaacgctgtgccatttcatataagaggcttgagcatctacagattttggtatctgagtggagatctcaaaaccaatcacccacgaatagtgaaggatgaccgtatatgacttttatttctcaaatttaaatataaatcataaaaaatgtacaactagataaaaactaagaagtgtttttatagtgtgagttagatttattttttcctaggtgtaaccaattggtttaatattatttattgagaagacattctatgccaccttaaaccacacggcagcctttgtcaactctaaagggactgtgtgtacatggatgtattttagacactgtttctgctaaggggctctctgtgtccacactcttgatgatgctgcactttatgtagccttatagaaccctttaaatttagtagccagagccctctaatttgttattataggctgtttgctttttttttcttgaggcggagtcttgctctgtcgcccaggctggactgcagtggcacaatctcagctcactgcaacctccgcctcccaggttcaagcgattctcgtgcctcagcctcttgagtagctggcgttacaggtgcctgccaccaggcacggctaatttttggatttttaacagagacacggtttcactatattggccaggctgctctcaaactccttatctcagttgatccgcccacctcggcttcccaacgtgctggggaaaacttgattttctatagcattatgttactggatatttctgtaaaatttaaaacgagggagggagagagacagacagagagcaaactccagagttgggactctggaatcttgggtcatgagacaaattttagattaaactacaaaactccagaatttacaggtgtggtttttgctgataaagtacaattctaagattgtaaataattgcataatccttccctgggaatttaaatcattttagctggttctgctgtaatactagaaatacaagcatgaaaaattctaatggtttattagtcacaatgactccgaaaacattaataatacctattagatactttgcatattacacaggaagaagagtttgaatctcagataaaaacaaaaaaaatacatgaaaagtctttcatgttagcacagattttaggcatctcgtgttcggataaaaatacatgaaaagtctttcacgttagcacagattttaggcatcttgtgttcgggaggttggatctgagacgtgttgtgagttggtcatagtgaaggacgtgaggtgccaattctagtgagaacaatttccaggaagccgtgttccgctcttgagcaagcatccactgggcctcatgcaaggtagaaagagcctgcgtacgtcaccctcccatgatgtagtcaacatgtaagctgcatgggcagggcgccaaataacatcctgtgcgctgctgagctgagctggggcgcggccgcctgtctgcaccggcagcaccatgtcgctcatggtcgtcagcatggcgtgtgttggtgagtcctggaaaggaatagagggagggagtgccacatcctcctctctaaggtggcgcctccttctcccccaggtggtcaggacaagcccttcctctctgcctggcccagccctgtggtgtctgaaggagaacatgtggctcttcagtgtc

SEQ ID NO: 22536 - DNA, 2300 bp, Homo sapien
caagagatctattgtatgtcttggtgactccagttaatagcaacatatggtgtattgaacattactaagagattagattttacatgttctcaccacacacacaaaacatacaagtatgtgaaaaaataaatatgataaagaggttgtttcatccattccacaatgtgtacctatatgaaaacatcatgatggacaccacaaatacccttttcctcattaattaaatttgttttggttttttttttgagatgcagtttcactgttgttgcccaagctgaggtgcaatggcgtgatctccgctcactgcaacctctgcctcccaggttcaagcggttctcctgactcagcctcccaagcagctgggactacagttgcgtaccaccccgtccggctatatttgtgtttctagtagagacagggtttcgccatgttggccaggctggtctcgaactccagacctcaggtgatccacccgcttcgccctcccaaagtgctagatttcaggctgagacaccacacccagcctgtacattgactttctgcccttaaactgtgctgaagtttgtttctcagatgtaggagcctttgggcagagactatggggtttctaggtatagaaattatctcatcttcaaacagaggtaatttgactacctctctctgctactctcttcttacttggatgccttataattctttctctttcctgatggctctgtctaggacttcaagtactatgttgaataggatggtgagagtgggcattcttgtcttgtttcacttatgaagggaacttcttccagcttttactcattcagtatgatgttggttgtgggtttgtcacaggcggctcttattatattgagttatgtttcttcaatgcttagcttgttgagggcttttaacatgaagaaatgcttagtaaaaagtatgttctacatgtgtgttgagaagatcatgtggtttttgtttttagttttgtttaggtgatgaatcacatgtattgattgtgtatgttcaaccaaccttgcaccctaagaataaagttgacttgatcatggtggattcactttttgatatgctgcgggattcagttcttagtattttttgtggatttttgcctctatgttcatcaggaatattggcatgtagttttcttttgtttaatgttcttttctgtctttagtatcagggtgatgccagccttatagaatgagtaaaggccaccctgggcaaacagtgagacccatccctttttaaaaattatgagttttacaaatttaaaatgcatagtgaaaaagttcttacaaactccagaaagataggtgtaaataagagacatttgtaagaatgacagcacattaaatgtgtagatttcaaccttcagttattgcaatattccagtatcaagttggaggatgttatcagtctgatattttttcctcaaatgagagagagaaagaaagacacacaaacaacacagggagaaaaaaagcacacgttacagagagacaaaaagggagacagggaactgtgaatttggactcttgtgtcataagacaaattctagataacacgaccagaccttcaattgacatattgtgtttttgctaataaggtggaattctatgatgcgaaataactatatagtcttttctactgggatttaaatcattttatctgtttctggcttaacaggaaaaatacaaccatggaaaattatgatgatttatttaatacgattgctctatagtgttaataaaacctattaggtattttgcatattacatatcaaggagagtttgaatctcaggtagaaacaaaaaaaaatacatcaaatttcctcatgtgagtgcagaattcaatcgtcccgtgcaggggtaagtgagtctgagatgtgttttgagcctggccgttgcgcatgatgtgaagtgacaagtctagtctgcagttttcagaaaccctcattcctcccttgactgattcaccacttgaacctcatatgacgtagaagaagcctacctatgtccccttcacatgttgtggtcaatgtgtcaactgcacgatccgggcccctcaccacatcctctgcaccggtcagtcgagccgagtcactgcgtcctggcagcagaagctgcaccatgtccatgtcacccacggtcatcatcctggcatgtcttggtgagtcctggaagggaaggagcaccagggttacactatgggcctgcagattgggtgtctccccagcagagagccatgttctgaagcaagtgagtggtgaggatgagttaattttcagt

SEQ ID NO: 22537 - DNA, 2300 bp, Homo sapien
tccaaacatacaagaggctctctcttaacacggcacttagacacgtgctgttccaccttccctcgtgctgttccacctttcctcagactatttttcagccttctggcatcagcaaaccttataaaatttttttgatttcagtgtagttctctcctcttcaaataaacatgtctgccttcattctttaggtgactctttttttggctgaaagtttccagtgttatcattaccatgtccaaataactccaactgttctccactgggttctcacccctggacttggagcttctggaagcagggtggagcctgatttgtctctgagactccaatttccatccaaagatgcagcacataagaggttccaaggatcgtgaatcacatgaacaagtgatattcttactctctgcagacctggaaagctggcagagtcattccatgatgaaacatttgtagagtcataggccttgttagtctcatctccacggggacacatatcaacacatcatctttcatactataaatatacagtcggtcctctgtatctgtgggatttacaggtgtttattgaaccaaatataaatcaaaaatattcagagaaaaaatccacaaagtttcaaaaagcaaaactatgttgaatggacacaaatgaagctgtgtgtaggctgtatcaggaattataaataatcaagggatgatttcatgtacacaggaggatgtgcatgggttatttgcaaatgctgtgccatttcatgtaagaggcttgagcgtctgcagattgtgctatctgagtggagatcctgaaaccaatcacccacgaatagtgagggatgactgtatataatttttatttctcaattttaaatataaaacataaaaaaattacaataacaagataaaataaacaagtgttttatagtgtgagaatacgtttagatatatttttctctatgtgtaacccttgggcccatgttatttattgagaagacattctattccaccttaaaccacatggcagcctttgtcaactataaagggactgtgtgtacacggatgtattttagacactgttttctgctcagtggctctctctctgtccactctcttgagaatgctgcattttatgcagccttatacaacccctaaaatttggtagctggagtcctctagttatttattataggctatttgctatgctttttttatttttcttgaggcagagtctcgctctgttgcccaggctggagtgcagtggcacgatctcggctcactgcaacttccgcctcccaggttcaagggattccgtgcctcagcctcttgaatagctggcattacaagtgcctgctaccaggcatggctaatttttgtatttttagcagagacatggtttcactatattggccaggctggtctcaaactcctgacctcggttgatcactcacctcggcttccaaagtgctggggaaattgattttctatagcattatgttactggatatttctgtaaaatttaaaatgagggaggcagagagacagagagagagcaaaccatgagttggaactctggaatcttgggacatgagacaaattctagataaatctacaaaaatccagaatttacatgttgtgatttttgctgataaagtacaattctaagattgtaaataattgcataatccttccctgggagtttaaatcatttgaactggttctgctgtaatactagaaatacaatcatgaaaaattctaatggtttattgtcacaattgctctgaaaaccttaataatacctattagatattttgcatattacacaggaagaagagtttgaatctcagataaaaacaataaaaatacatgaaaagtctttcatgttagcacagattttaggcatctcgtgttcgggaggttggatctgagacgtgttttgagttggtcatagtgaaggacgcgaggtgtcaattctagtgagagcaatttccaggaagccatgttccgctcttgagcgagcacccactgggcctcatgcaaggtagaaagagcctgcgtacgtcaccctcccatgatgtggtcaacatgtaaactgcatgggcagggcgccaaataacatcctgtgcgctgctgagctgagctggggcgcagccgcctgtctgcaccggcagcaccatgtcgctcatggtcgtcagcatggcgtgtgttggtgagtcctggaagggaatcgagggagggagtgcggggatggagatctggacctggaggtaaagatatgggcctagaggtggagttatgggcctagaggtgga

SEQ ID NO: 22538 - DNA, 2300 bp, Homo sapien
agaggctccctcttgacgtggcacttacccacgtgctgttccaccttccctcatgctgtttcacctttcttcggactattttccagccttctgtcagcagtgaaacttataaaattttttgtgatttcaatgtagctgtctcctcttcaaataaacatgtctgccctcattgcttcaggtaatgtgacactgtattcgctgaaagaaaccgctgttatcattaccatgtccacataaccccatctgttctccgctgggttctcacccctggactctgagcttctggaagcagggtggagcctcatttgtctctgggactccaatttccatccaaagatgcagcacataggaggttccaaggatcgtgaatcacatgaacaagtgatattcttactctctgcaacctggaaagctggcagagtcattccacgatgaaacatttgtagagtcataagccttgctagtctcatctccacggggacacatatcaacacatcatatttcatactataaatatacagtcgctcctccatatctgtggggtttacaggtgtttattgaaccaagtgtaaatcaaaaatattcagagaaaatgtccacaaagtttcaaaatgcaaaactatgttgaatggacacaaatgaggcagtgtgtaggctgtatcaggaattataagtaatcaagagatgatttcatgtatacaggaggatgtgcatgggttatatccaaatgctgtgtcattttatgtaagaggcttgagcatctgcagattttggtacctgagtggagatcctgaaaccaatcacccacgaatagtaaaggatgaccgtatatgacttttatttctcaattttaaatataaatcataaaaaatgtacaataactagataaaaagtaagaagtgtttttatagtgtgagaataagtttagatttattttttcctacgtgtaaccctttggtttaatattatttattaagaagacattctatgccaccttaaaccacacggcagcctttgtcaactctaaagggactgtgtgtacacggatgtattttagacactgtttctgctaaggggctctctgtgtccacactcttgaggatgctgcacttcatgtagccttataaaaccctttaaatttagtagccagagccctctaatttgttattataggctacttgctatttttttttcttgaggcggagtcttgctctgtcgcccaggcgggactgtagtggagcaatctcagctcactgcaacttccgcctcccaggttcaggcgattctcgtgcctcagtctcttgagtagctggcgtttcaggtgcctgccaccaggcatggctaatttttgaatttttagcagagacgcggtttcactgtgttggccaggctgctctcaatctcctcatctcagttgatccgcccacctcggcttcccgacctgctgggggaaacttgattttctatagcattatgttactggatatttctgtaaaatttaaaatgagggaggcagagagacagagagagagcaaactccagagttgggactctggaatcttgagtcatgagacaaattatagataaaactacaaaaatccagaatttacatgtgtggtttttgctgataaagtacaattctaagattgtaaataattgcataatccttccctgggaatttaaatcatttgaactggttctgctgtaatactagaaatacaagcatgaacaattctaatggtttattagtcacaatgactctgaaaacactaataatacctattagatattttgcatattacacaggaagaagagttcgaatctcagataaaaacaataaaaattcatgaaaagtctttcatgttagcacagattttaggcatctcatgtttgggaggttggatctaagacatgttttgagttggtcatagtgaaggacgcgaggtgtcaattctagtgagagcaatttccaggaagccatgttctgctcttgagcgagcacccactgggcctcatgcaaggtagaaaaagcctgcgtacgtcaccctcccatgatgtggtcaacatgtaaactgcatgggcagggcgccaaataacatcctgtgcgctgctgagctgagctggggcgcggccgcctgtctgcaccggcagcaccatgtcgctcatggtcatcatcatggcgtgtgttggtgagtcctggaagggaatagagggagggagcgtggggatggagatctgggcccagaggtggagatatgggcctggaggtggagttatgggcctggagtggagatctgggc

SEQ ID NO: 22539 - DNA, 2300 bp, Homo sapien
caacctaactggcttacttcctagtctacctgaggctgcaatcacactgaggaactcacaattccaaacatacaagaggctgcctcttaacacagcacttagacacgtgctgttccacctcccttcagactatctttcagccttctgccagcagtaaaacttataaattttttaaataatttcaatgtagttttcccgccttcaaataaacatgtctgccctcatggtttcggtaacgagactcttttcttgcctaaggcttccggtgttatcattaccatgtccacataaccccatctgttctccattgggttctcagccctggactctgagcttctggaagcagaatggagcctgatttgtctctgagactccaatttccatccaaagatacagcacataggaggctccaaggatcgtgaatcacatgaacaagtgatattcttactctctgcagacctggaaagctggcagagtcattccacgatgaaacatttgtagagtcataggccttgttagtctcatctccacggggacacatatcaacatatcatctttcataatataaatatacagtcggtcctccatatctgtggggtttacaggtgtttattgaaccaacaataaatcaaaaatattttcagaaaaaaatccccgaagtttcaagaagcaaaaaactatgttgaatcgacacaaattgagtggcgtgtaggctgtgtcaggaattataagtaatcaagggatgatttcatgtatacaggaggatgtgcatgggttctatgcaattgctatgctattttttttttttttttgagacagtctcactctctcacccaggctggagtgcagtggcatgatctcagctcactgcaacctccgcctcccaggttcaagcgattgtcttccctcagcctccccagtagcctcccctaggattacaggcacgtgccaccatgcacagataaatttttttgtgtgtgtatttttagtagagacggggtttcagaatgttggaccagctggtcttgaactcctgacctcgtgatctacccaactcagcctcccaaagtgctgggattacaggcgtgagccacggtgcccagcttcgctatgccatttcatgcaaggggcttgagcatctgcagattttggtatctgaatggggatcctggaaccaatcacccaggaatagtgaaggaccacagtatataatttttatttgtcaatcttaaaaataaagcataaaaagtttacaacaacaagataaaaaataagaagtgtctttatagtgtgaggataagtttagatttattttttcctacgtgtaaccctatggtcctgtgttatttgttgagaaaatattctattccaccttaaactacatggcagcctttgtcaactataaagggactgtgtatccacagatgtattttagacacagttttctgcccagtggttctctgtatcccctctcatgaggatgctgcatttcatataaacttatagaaccccttaaaatttggtaacctgagttctctgatttgttattataggttatttagtttgcttttttttttctttcttgagacagactcttcctctgtcacccaagctggagttcagtggcttgagctcagctcactgcagcctccgcctcccaggttcaagcaattctcgtgcctcaggtttagtactagaaactcatcaggaaaattagaatggctttttgtcacaattactctgataatgttaataatacctcttagatattttgcacattacacatgaagaaaagtttgaatctcagataaaaacaaaaatacatcaaaagtctttaatgtaagcacagaattcaatcacctcatgtgtgagaggttggatctgagacgtcttttgagtctggtcatagtgaaggatgcaaggtggcaattgtagtcacaacaatttccaggaagccatgttccgctcttgagcgagcacccactgggcctcatgcaaggtagaaagagcctgcgtacgtcaccctcccatgatgtggtcaacatgtaaactgcatgggcagggcgccaaataacatcctgtgcgctgctgagctgagctggggcgcggcctcctgtctgcaccggcagcaccatgtcgctcacggtcgtcagcatggcgtgcgttggtgagtcctggaagggaatagagggagggagagtggggatggagatctcggcctagaggtaaagatatgggcctggagtggagatatgggcctggagtggagatatgggcctgggtgtggagatatgggcctg

SEQ ID NO: 22540 - DNA, 2300 bp, Homo sapien
ttttgagacacagtctcgctctgtgttgcccaggctggagtgcagtgatcttggctcactgcaacctctgcctcctgggttcaagtggctctcctgcctcagccttccgagtagctggaattacaggcacccgccaccacacccaagtaattttttatatttttagtagagactgggtttcaccacattgaccaggctggtcttaaattcctgaactcaagtgattcacctgccttggcctcccaaagtgctgggattacaggcatgagctactgcacccagccaacaatagtatttttaattaggtcatcctgcctttacaatctctgcattttaaatactcaactaagagtacagccattatttgtctttcacccaaagtcccattcaagtgagaacaaaggaatgaataaataaggcataagtaacaaaacaacaaaaaaagaaaattagaatgcggtcaatttcatgcaatcatcaacaccaaatttccagaacgtagtatttccaaatttcccgaacgtaaatatgtatgtggaaattaacaaaatgtggcaaaacaaaaggtcacttaaatttgcacaaatgaaacagtcaacatggaagctgatcggctttctgaaatatgggacaagctcaggacttcaaaatacttcggcgttggaagggctaagttatgatgtattaaaatgaaaataaagtggggcgcggtggctcacgcctgtaatcccagcactttgggggaccgaagtgggtggatcacgaggtcaggagatcgagaccatcctggctaacacggtgaaaccccgtttctactgaaaatacaaaaaaaattagccgggcgtggtggcggatgcctgtagtcccagctactcgggaggctgaggcaggagaatagcatgaacccaggaagtggagcttgcagtgagctgagatcacgccactgcactccagcctgggcgacagagcaagactccgtctcaaaaaaaaaaaaagaataaataaaataaaataaaatagtagaaggtttaattaggaatatttcactctccatacctgaagaattcgtgatagccaggagtctacaatcaaaataacataaataataagataaaaataaaattaatttgaagccataaaaaaagaatgagttcatatgttttgtggaaacatggatggagctggaggccattatccttagcaaactatacaagaacagaacaccaaatacagcaggttctcacttataagtggaagctaaataatagaactcatgaacacaaaaaagggaaaaacagacaatggggtctcctttagggtggagggtgggaggcgggaaaggagcaggcaaagtaactattaggtaccaagcttattacctaggtgatgaaataatctgtacaacaaacccccatgacacaagtttacctgtataacaaaccttcccatgtacccttgaacctaaaataaaagttaaaaaaatactcaatgagcaacaatgtacattatttgaggataattatattaaaagcccagacttcaccactacacaaaatatccacgtaataaaatttcacttgcgctccttaaatttatacaaataaacaaaaaagtataataaaatagtagattctttctttagagatgacaaatagtgccagagaaaatgcctccacactctggcattgagatcatctccaggataagggtatactgcatgcctggtcaagtccaagtaaatatactcagaccatgaatctcagagatgaaacataggttcagaacagacaaagccacagagcttttgactaatggcccagtgaaggcaatgtctgcctgtatggtatccaccaccttatattctgtcccaagcccgtctatttggatgtagcatctggttcaaagatgaatttgaacaccattagacactggcttaatgaaaattcacttctcattcgtttctcatctgaaacataaatagaaatataggtcttaggcaggaggatttcttgatgccagaagttagagactaccctggccaacatagaaagaccccatctctatttaaaaaaatatacatatatatgtcttctcttgggctccacccaagagcaacctggaactaagttattcggcaacgaactgttccactttgttgtgaggcaatagatgtggaaattccctgacgaggggctctgtcctcatacttcctgcggagcttattgtcgtaagaatatctgtcatcctgctaatgtgcattgaaaggagagcaacggggctgaggccgtgtcagcacgatg

SEQ ID NO: 22541 - DNA, 2300 bp, Homo sapien
cccacaaggcagaggttgcagtgagctgagatcacaccactgcaccacagcctgggcaacagagcaagactctgtctcaaaaaaaaaaaaaaaagaaagaaaaagaaaaagaaaagaaatgtttcttttcttattaagttctttaaatgaaaagcttttcttttcacttttattttattgaaacattataacactatctttgaagaagttagtgttatcattccattctgatgaaaccaattaacttatccaagcatatgtatactgtacacagagaagccaacgtcaaaacccctatttttatctttttagattcagcagatacatgtgcaggttttttatgagtatattgcatgatgctgaggcttgcattaatgatctagtcaccaaataggtagattttcaagccttgctcccctccttacccaatgtttagcgctctcacttataagtgagaacatgtggtatttggttttcttttcttttttttttttttttttgagatggagtttcactcttgttgcccaggctggagtacaatggcaccatctcggctcactgcaaccttcaccttccaggttcaagcaattctcctgcctcagcctcccgagtagttgggactacaggcatgtgccaccacacccggctaattttgaatttttagtagagacagggtttctgcatgttggtcaggctggtctcgaactcccgacctaaggtgatccacctgcctcagcctcccaaagtgctgggatgacaggcgtgagccaccgtgtctggccagtatttggttttctgtttctgtgttaactcgcttaggataatggcctctagctgcatccatgttgctgcaaaggacataatcttgtgatttttcaaggctgtatagcgttctgtggtgtatacatatcacattgtctttatccagtccacctctgatgggacctgggtggattccatgtcttcactattgtgaatcctgctgcaatgaacatacaagtgcatgtgtctttttggtagaatgatttattttcctttggctatatacccagcgatgggattgctgggctgaatggtaactctgtttgtagttctctgaaatatctccaaaccaaactgctttccacagtggctgaactaatttacacccaccaacagtgtataagtgtcccctttgctccacaatctcaccagcatctgttaatttctggcttttcagtaatggccattctgactggtgtgagatggtattgttgagggataatttaggaatcagagagaccgaggggttgaggaggatttattattattattattatttaggtgcaccggccccagtcagattaacatccaaaaagactgaggctcgaacagagagtccggttaccttttaagcattttgtggggttgggggagatctgtgcagggggaagcatattacagaagcaagaaacaaaggcagttattcaattgagacatgcatcacattattccttacttttcaagaaaaatatgttttacgacttgaggttatcctgtctagtgatcttgcagccgcacggcaagagaaacagggtcttcacaatgcctgggaaagggagagataaggctcactagccacagacagaaaaacaggcagttcatgtttaaaggactccacctctttctcttcctcggggggaactgggttttcttaaatacaactgagtttttgtttacacattctgtaatttcttttaattcctgttccagtatctcactgtgaaactccctatgtttttatacgattctcagggggtttcctctgggcatgattgggcacaacttcccacagtcagctctgggtacgacctccacattgcagaattgagaagttgacccagaaatgcattttgggctgagcagacaattgtcagagttgctggctagaccacagatgtgtcagagggaccacggcctttctgtaagctcatggtcagaggcggaggggagttgtgaacgttctgatgaaagcagtcaacgtgaaagcgctctggtgatgggcgctggtgctcacccaccacttcctgtgtatctatctccctggcccgcccggctcagtccccactgctcagcactaggccggcagaatctgagcgatgtcttccacactccctgccctgctctgcgtcggtgagttctggcgtggaaggggaatgggatcacggtgtgcctgggaggcaacaggtctcattactcccgtcttccagggctgtgtctgagtcagaggatcagcgcccagcagcgtgagtccttccttc

SEQ ID NO: 22542 - DNA, 2300 bp, Homo sapien
cctcatttacataaactcaggtgtggttgcagggcctgggtatgtataacaagagatacctctttcatgtttatctctccatagctgctctaggactaaaggccaaatgttttaacaaaatatactctctctctctttttgtcagctagaatataatttatttttattgtttttattttctttttcttcagagagggagtctcgccatattgcccaggctggtcttgaactcctggactcaggcagtcctcccgcctcagcctcccaaagtgctgggattacattcatgaaccactgcgcctggccatcttttttttttttttttaaagatggagtctctgtcgcccaggctggagcgcagtggtgcaatctcggctcacggcaacctccaactcccaggttcaatcaattcttacgcctcagcctcctgagtagctgggattacaggtgcacaccaccatgcctggctaattctttatttttagtagccaggggttttttgccatgttgcccaggttggtctcgaactgctgacctcagatgatccacctgcctcagccttccaaagtgcagggattacaggtgtgagccaccatgccaggcctccatagtgcctatttctatagatggcatgctgcaactgatatatacatcttcatttgtgggaccatttgcttccattaaattaacagtttaaactaccaaaattctgtgctgaatgctttccacaacatacactgttttatttaaaaacaattttaggccaggtgcggtggctcatgcctgtaatcacctgacatcaggagtttgagaccagcctgaccaatatggtgaaaccctgtctctactaaaaatacaaaaaattagttgggcatggtggcatgtgcctgcagtcccagctacttgggaagctgaggcatcagaattgcttgaacctggaaggcagaggttgcaagaatggagattgcaccactgcactccagcctgggccacagagcaagactccatccaaaaaaaaaaattaaatatcagttatctatttatttttttgagactgggtctcactctgtggcctaggctggagtgagatggccagtcacagctcactgcagcctcaaactcctgagctcaggtgatcctcccacctcagcctcctgaatagctgggattacaggtgcagcccatcatgtatggctaatttttttgtttttgtttttgagacagtcttgctcttgtcacccaggctggagtgcaatggcgtgatcgtgcctcactcaccctccacctccctagttcaagtgattgtcctgtctcagcctcccgagtagctgggattacaggcacctgccaccacacctggctaattttttgtatgtttagtagagacagagtttcaccacgttggccagtctggtctccaactcctgacctcaggtgatccacccgcctcggcttcccaaattgctgggactacaggcatgagctaccacgcccagcctatgcatggctaattattaaatatttttgaagagatggcatcttgctatgttgcctaggctggtatcaaactcctggcccctagggatccactggcctaggcctctcagcctgctgggatttataggcaggaggcaccacagttggccacaaagtagacttattgtatttgtaacttaggaagtcacgggagtttttgtcctctttttttttaatttttatttatttttgtttaattttttttctctacaagagtttttaaagctgggagccaggtaccctgcaaaacccaaaatgtgtatttcctgttctgtcgcctatcacacctggcccgggtggtctaggaagggaattgcacattaatctcacctggggagattcagcaagccgtaattctccaaagcccactgaagcccaattacagccaaatccctgaggatggggcccaggtgatgtcaaggtgagcctgaggtcagtggttgggagccacccaatgttaatctcagtggggcggttccaccctgggcgggaaagctgtctctccacctagcgtaccaagggccagagacctcccctttttatccgtttcctttgcaggaaacacaggctggaagcaagacctgacctgagggaggtgagtgctggttcttgcatcgatttctttgtcttctcgtttaagggagaagaagctattggttgagtttccaccatagcccttcccaagccttaatggttggtgcgaggatgctggaaggatctttgatttttttttttttgagacggagtctccctctgtcgcccag

SEQ ID NO: 22543 - DNA, 2300 bp, Homo sapien
ggcgcgatctcggctcactgcaagctccgcctcccgggttcacgccattctcctgcctcagcctcccgagtagctgggactacaggtgcccgccaccacgcccggctaattttttgtatttttagtagagacggggtttcaccgtgttagccaggatggtctcgatctcctgacctcgtgatccacctgcctcggcctcccaaagtgctgggattacaggcgtgagccactgtgcccggctatatgtttacaaaattaatactgccagccaggcacggtggctcacgcctgtaatcccagcactttaggaggctgaggctggcagatcacctgaggtcaggagtttgagaccagcctggccagcatggcaaaaccccgtctctattgaaaaaaatacaaaaattaaccaggcgttgtggcgcatgcttgtaatctcagctactcgggaggctgaggcaggggaatcacttgaagccggcaggcggaggctgcggggagccgagatcgtgccgttgcactccagcctggggaacagagcaagactccattaaaaataaaataataataatactgtgaatgtgaaactgatgaacttggtgcttttcatgcgtctcatagttgacgtgtcattgatatttcacttgaaatacggttggatttttattaataatatacctggggtgatgggagaaggtagccaatcacagctgaggcttctaagcggtgattctcagcctcggccgcaatcacaattatctgggactctcgaaagaactccagggtctgggcagtcccagtgtaaccaatcaagcagaatctctaggcgttcgtgctttgaaatgaggctccacataggtaagtttaacaggcagtcaagatggaggaccacaggtggagatcgggaagctcaggtgaaggaccgccccccaacaccccccgcccccaaaagacctctcagtaattccggtggatacaggaagtgctcagcaacgattacgccccgagggccaatcacagggctgcggccgagaaagaagccttaatagagctttctcaacctgcagccctcatctccgccggcgagtagggccaggtgttgggaggtgagtagctctccggcagctctgcaacttcatttctttatttctccattccacagttggtaaaatttctccttttatttcatatattttttttctgagacggagtctcgctctgtcgcccaggctggagtgcagtggcgcgatctctgctcactgcaagctccgcctcccgggttcacgccattctcctgcctcagcctcccgagtagctgggactacaggcgcccgccaccacgcccggctaattttttgtatttttagtaggtggctcacgcctgtaatcccagcactttaggaggctgaggctggcagatcacctgaggtcgggagtttgagaccagcctggccagcatggcaaaaccccgtctctattgaaaaaaatacaaaaattaaccaggcgttgtggcgcatgcttgtaatctcagctactcgggaggctgaggcaggggaatcacttgaagccggcaggcggaggctgcggggagccgagatcgtgccgttgcactccagcctggggaacagagcaagactccattaaaaataaaataataataatactgtgaatgtgaaactgatgaacttggtgcttttcatgcgtctcatagttgacgtgtcattgatatttcacttgaaatacggttggatttttattaataatatacctggggtgatgggagaaggtagccaatcacagctgaggcttctaagcggtgattctcagcctcggccgcaatcacagttatctgggactctcgaaagaactccagggtctgggcagtcccagtgtaaccaatcaagcagaatctctaggcgttcgtgctttgaaatgaggctccacataggtaagtttaacaggcagtcaagatggaggaccacaggtggagatccggaagctcaggtgaaggaccgccccccaacaccccccgcccccaaaagacctctcagtaattccggtggatacaggaagtgctcagcaacgattacgccccgagggccaatcacagggctgcggccgagagagaagccttattagagctttctcaacctgcagccctcatctccgccggcgagtagggccaggtgttgggaggtgagtagctctccggcagctctgcaacttcatttctttatttctccattccacagttggtaaaatttctccttttatttcatatattttttttctgagacggagtc

SEQ ID NO: 22544 - DNA, 2300 bp, Homo sapien
aagtttttgttgctactgctatttttttttttttttttttgagacaaagtctagctctgtttcccaggctggagtacagtggcgctatctcagctcactgcaacttccacctcccaggttcaagcaattctcgtgcctcagccttctaagtagctgggactacagccgcctgtcaccaacctggctaattttcgtatttttagtcgatatagggtttcactatgttggccaggctggtctcaagctccagacctcaggtgatcctcccaccttggactcccaaagtgctgtgattacaggcgtgagccaccgcacccggccctgttgtttttaaaatagagacagggtcttaagttgccaggctggtctggaacttctggactggagtgatcacccacctgagcttcccaaagtgcggggattgcaagcgtcagccaccacccccagtgttgtgtttttgtttgttttaccaggctggagtgcagtggtgcgatcacagctcactgcagccttaacttccctggctcaggtgatcctcccacctcagcctcctcagtagctgggactacaggtgcatgccactatgcccagcacaattttttttttttttgtatttttttgtagagacagggttttgccatgttgcccaggctggtctcaaactccaagcaatcctcccaccttggcttcccaaagtgtttggggttccaggtgtgagccatggccccccggccagcttcagtaaagtaaaagccacacacctgtgtcctgagaccaggctccaccactaagttatctttaagccttttttttttttgagacagtttcactcttgtcgccccaggctggagtgcagtggcgccatgtcagctcaccacaacctctgcctcccactcccaggttcaagcgattctcctgcctcagcctcccaagtagctggaactacaggcacctgccaccacgcccggctaattttttgtatttttagtagagacggggtttcactgtgttagccaggatggtctcgatctcctgacctcacgatccgcccgcctcggcctcccaaagtgctgggattgcaggcgtgagccaccgcgcccggctgtgtgtttgcattatcatattcagcccagttttcacgaagtttcttgtctcctgggtgatccacgtagctccccacttccttatctgatctatgcttgtcctttcattgttgtgttactactttgctataatgagagagtgttttcgctttataggttaacttttagaacctgagcagcccctcagggaaaaccctgacagtagctggttattttgcaattagaaaaactagctgggcactgaggcaggtgaatcacgaggtcaggagttcgagaccagcctggccaacttggtgaaaccccccatctctactaaaaatacaaaaaaattagctgggcacagtggtgaatgcctgtaatcccagctacttgggaggctgaggcaggagaattgcttgaatccgggaggcagaggttgtagtgagccgagattgcagcactgcactccagccagggtgacaaagtgagactccgtctcaaaaaaaaaaaaaaaaaaaatacaaaaagtagctgagcgtggtggtgggtgcccataatcccagctagtcgggaggctgaggcaggagaactgtttgaacctgggaggcagaggttgcagtgagctgagatcgtactactgtactccagcctgggctgcagagtgaaactatctcaaaaataagtaaataaaagtaaaatgagttgaggtcttgctctgttgcccagatgggagtgcagtggcacaatcaaggctcactgcagtttcagtctcccaggctcaagcaatcctcccactgcagcctcctgagtagctgggactacaggcatgtaccaccacccactgctaacttatttttcatggagatgggggtctcactatgttgcccaggctgggagtttgttcttgaagaagcagggtagatggtgagtgtccttgttcgtggcacagcaggaactggcatttgagacaggagtgctaatcaccatccctctccactcctcccttgattgtcatcacagctcccacgtgggacaagatggtgtcttcggcgcagatgggcttcaacctgcaggctctcctggagcagctcagccaggatgagttgagcaagttcaagtatctgatcacgaccttctccctggcacacgagctccagaagatcccccacaaggaggtagacaaggctgatgggaagcaactggtagaaatcctcacca

SEQ ID NO: 22545 - DNA, 2300 bp, Homo sapien
ttttgcatttttagtagagatggggtttctgtgttggccaggctggtctcgaactcctgagctcaagtgatccaccccacctcagcctcccaaagttctgggattataggcatgagccaccacacctggccggaaaacacatttgtagcttatttgctttatctgatcccgtgccccccctcccccccgccccatcagcctgcctccttttctctaattgggactccacaggaaatacacctgattttgtgtcaatctcacatgagtttgtattttgtagcgtttacagaaacgaaaggaaatgtcatctgcctgggtaaagaagtctttaaaggaaaaaagccaggtctgtaccatatcttcctgcagggagcttgggatcagatttctctttataaacttgaagtcctcttaactttcctatgtaacacaaagcatttatttatgtatgtatgtatcgagacggagttttgctcttgttgcccaggctggagtgccgtggcgtgatctcgactcactgcaacctccgcctcccaggttcaagcaattctcctgcctcagcctcccgagtagctgggattacaggcatgcgccaccatgactggctaattttttatttttagtagagacaaggtttcttcatgttggtcaggctggtgttgaactcccaatgtcaggtgatctgcctgcctcgacctcccaaagggctgggattacaggcatgagccactgtgcccggccaacacaaggcattttgttattttggttttccctatgggtaactgattgcatcctctctcccttccctcctcaccaatgataaagacaaagacaataggtgcaggtatatattgaagacgaagttccgggagatgtggaagagctggcctggagatagcaaagaggtccaggttatggctgagagatacaagatgctgatcccattcagcaaccccagggtgcttcccgggcccttctcatacacggtggtgctgtatggtcctgcaggccttgggaaaaccacgctggcccagaaactaatgctagactgggcagaggacaacctcatccacaaattcaaatatgcgttctacctcagctgcagggagctcagccgcctgggcccgtgcagttttgcagagctggtcttcagggactggcctgaattgcaggatgacattccacacatcctagcccaagcacggaaaatcttgttcgtgattgacggctttgatgagctgggagccgcacctggggcgctgatcgaggacatctgcggggactgggagaagaagaagccggtgcccgtcctcctggggagtttgctgaacagggtgatgttacccaaggccgccctgctggtcaccacgcggcccagggccctgagggacctccggatcctggcggaggagccgatctacataagggtggagggcttcctggaggaggacaggagggcctatttcctgagacactttggagacgaggaccaagccatgcgtgcctttgagctaatgaggagcaacgcggccctgttccagctgggctcggcccccgcggtgtgctggatcgtgtgcacgactctgaagctgcagatggagaagggggaggacccggtccccacctgcctcacccgcacggggctgttcctgcgtttcctctgcagccggttcccgcagggcgcacagctgcggggcgcgctgcggacgctgagcctcctggccgcgcagggcctgtgggcgcagacgtccgtgcttcaccgagaggatctggaaaggctcggggtgcaggagtccgacctccgtctgttcctggacggagacatcctccgccaggacagagtctccaaaggctgctactccttcatccacctcagcttccagcagtttctcactgccctgttctacaccctggagaaggaggaggaagaggatagggacggccacacctgggacattggggacgtacagaagctgctttccggagtagaaagactcaggaaccccgacctgatccaagcaggctactactcctttggcctcgctaacgagaagagagccaaggagttggaggccacttttggctgccggatgtcaccggacatcaaacaggaattgctgcgatgcgacataagttgtaagggtggacattcaacggtgacagacctgcaggagctcctcggctgtctgtacgagtctcaggaggaggagctggtgaaggaggtgatggctcagttcaaagaaatatccctgcacttaaatgcagtagacgttgtgccatcttcattctgcgtcaagcac

SEQ ID NO: 22546 - DNA, 2300 bp, Homo sapien
aacacggtgaaaccccgtctctactaaaaatacaaaaaatcaactaggcatggtggcacgcacctgtagtcccagctactcaggaggctgaggcaggagaatcgcttgaacctgggaggcggaggttgcggtgagccaagatcgcgccactgcactccagcctcggcgacagagtgagactccgtctcaaaaaaccaaaaaacaaaaaacagtcaatggcattaaatataaatacatttacagtgttgtgtaaccatcaccactatggatcccccagactttgtcatcatcttcaacctaagcgctccctattaaatagtaactccccacttttcccaggccttggcaaccaccattctaatccctgtctctatgaatttgactcctctcgatacctcagataagcggcacaatgcagtatttatctgtcaagtccggaatatttcctttagcataatgtcttcaaggtccatcacgttgtagcatgtatctgaatttattcttttataatattttttattttttggagacagaatctcgctctgtcacccaggctggagtgcaatggcgcgatctcggctcaccgcaacttccgcgtcccgggttcaagccattctcctgtctcagcctccggagtagctgggactacaggtgcctgccgccatgcccggctattttttttttgtattttttgggggttttactgtgttgcccaggctggtcttgaactgctgagctcaggcaatctgcctgcctcagcctcctaaagtactaggattacaggcatgggccaccacgcccggccttatttttatttttgagacagtctcactctgccgcccaggctggagtgcagtggtgcgatctcggcttaccgcaatctctgcctcccaggttcaagcgattctcatgcctccgtctcccaagtagctgggattacaggcacctgccaccatgcccggctaatttaacgcccagctaatttttgtatttttagtagagatggggtttcaccatgttaaccaggctggtctcggactcctgacctcaggtgatccgcccgcctcggcctcccaaagtgctgggattacaggcgtgagccactgtgcctggctgatttttattcttttagttaaggctggttgatattaccttgtgtgtatataccacatgttgtttatccattgttgttgatggacatgtgggtggtttcaccttttggctattgtgaataaagctgctatgaacactgtgtacaaatatgttagagaccctgttttcagttcttttaggtgtgtaccccgaagtggaattgctggattttatggcaatcccacgtttaacttctggaggagctgctggaactgttttccacagcaggggcgccatgttacgtccctgccagcaatgcacgcgcagttcaatttctctgcatactcaccaatatctgctgttttccattaaaaaaaattatagccggtcgggtgcagtggctcatgcctgtaatcccagcactttgggagaccgaggcaggtggatcaactgaggtcaggagttcaagaccagcctggccaacacagtgaaaccccatctctactaaaaatacaaaaattagcctggtgtggtacatacctataatcccagccacttgggaggctgaggcaggagaatcgcttgaacctgggaggtggaggttgtagtgggccgagatggcgccactgcactccaacctgggcaaaaagaacgagactttgtctcaaaagaaaaaaaaaaaatacagccattccagaaggtgtgaagtcatatctcactgtggttttgatgcgtattttcctagtgacatcagggagtttatgggagcacgggaacacagaccaggccccagcaggcggacaaacggtgcaacgccaggctggccagaggagataagcgcggctccttggagcttgtgtgcaagtcactgtactgaggagccggctacggctcgatgagtctcaattaggaaaggccggggctggtggaggaagggaggagagcattcttcatcctcatcacatcctgagcctgtgccccaggctcccaccacttccctccctggccacagagctcaggacagggctgaggaaccatgtctccatccccgaccgccctcttctgtcttggtgagtcctgagggtcagatctgggaaatgctgaaggacaggcatggactgccagacaaaggatttttaagaaatttgcattggtgatgaatttcaggacaaaaaggaacctgtaagagccccttcatttgttgggtg

SEQ ID NO: 22547 - DNA, 2300 bp, Homo sapien
tcgatggactcaaacagaaggccccggcccccgaggctgaggatgaggaggtggcccggaggctttgggctgaaagtgcccgcctggtgggcttagaggctccctctgtgagggagcagcccctccccagataacctctggagcagatttgaaagccaggatggcgcctccagaccgaggacagctgtccgccatgcccgcagcttcctggcactacctgagccgggagacccaggactggcggccgccatgcccgcagtaggttctagggggcggtgctggccgcagtggactggcctgcaggtgagcactgccctgggctctggctggttccgtctgctctgctgccagcaggggagaggggccatctgatgcttcccctgggaatctaaactgggaatggccgaggaggaaggggctccgtgcacttgcaggccacgtcaggagagccagcggtgcctgtcggggagggttccaaggtgctccgtgaagagcatgggcaagttgtctgacacttggtggattcttgggtccctgtgggaccttgtgcatgcatggtcctctctgagccttggtttcttcagcagtgagatgctcagaataactgctgtctcccatgatggtgtggtacagcgagctgttgtctggctatggcatggctgtgccgggggtgtttgctgagggcttcctgtgccagagcccagccagagagcaggtgcaggtgtcatcctgagttcaggctctgcacggcatggagtgggaaccccaccagctgctgctacaggacctgggattgcctgggactcccaccttcctatcaattctcatggtagtccaaactgcagactctcaaacttgctcatttaaaagaaaaaaaaaagaagaaaatgtacccgagtcgtagattttatttttcctctgtgcatgggtgaatgcccatgagctgaacaaaggcaactcatggctttattccttttaggaaacaaggcatcagtttatcaccagggcaacaggccatgcaaaagttcagacttggccgggcgcggtggatcacgaggtcaggagatcgagaccatcctggctaacacaatgaaaccctgtttctactaaaaaaatacaaaaaattagctgggcatggtggtgggcgcctgtagtcccagctactcgggaggctgaggcaggagaatggtgtgaagctgggaggcggagattgcagtgagccgagatcatgccactgccctccagcctgggtgacagagcaagattccgtctcaaaaaaaaaaaaaagttccgactttttagagatgaaagcccctttcacctgtttcacaggaaataaccgtttaagtccgggcatcttacaagactgctgtgttagaaactggatagagatcagggtgagatgaaggggctcttagcttaggtgcagaaccgaaggaggcaccgaaaagctcagtaatcgagatagaaaacatgttttcatatttgagatactggggaggccagggatgctactcaatatcccacagtacacagaacagccacctagtctcgctctgttgcccaggctggagtgcaatggcatgatctcagctcactgcaacctgtgtctcccatgttcaagcgattctcatgcctcagcctcccgagtagctgggattacaggcgcccaccaccacacctggctaattaaagacggtatcaccatgttggccaggcttatcttgaactcctgacctcaggtgatccacccgtcttggcctcccaaagtgctgggattataggtgtgagccagtgcacccagccctttttgcttttttagagacgaggtcttactgtgttgccaaggctggagtgcagtgccgtcacagctcactacaacctcgacctgtgattctcctgcctcagcctcctgagtatctgggactacaggtgcatgccaccacacttggctaattatttgtagaggtggcaacataacatttgctatgttgcccaggctggtctcaaactcctgggctcaagtgacccttccgccatggcctcccaaattgttgggattacaggcatgagccaccgtacctggccttagttttctttccgatgccacaccaaatggctagagggtgtgtttgggatgacctgagtctggtaggcaacttccagtggaccccacggtgcgaccacctccctttgagtgtgggggagatgtagcgactggcttctagcagtaggatagggcagaagtgacagtaggttagtcttgtggttaggttacaaaactgacctctgtgatggta

SEQ ID NO: 22548 - DNA, 2300 bp, Homo sapien
aagtagctgagggtgcagatgcgtgccaccaaacctgctaatttttgtattttttgtagagataaggttttgccgtgttgtccaggccgctctcaaactcctgggctcatactattctccactttggcctcccaaagtgctgggattacaggcatgagccaccatgcccagtctaaaatttttctttatttttagtttggtaaactatgcataaagtaaaatgtaccatcttaaccattttaagtgtacaattcagtgatgttaagtatattcacattgttgtgcaaccatcaccaccgtccaccttcaggtcttttttttattttgcaaaacaaactctgtatctattaaaaaacagcttcccggccgggtgcggtggctcatgcctgtaatcccagcactttgggtggccgaggcaggtggatcacctgaggtcaggagtttgagaccaacctggccaacatggtgaaaccccgtctctactaaaaatacaaaaattagccgggtgtggtgacacgtgcctgtagccccagctactcgggaggctgaggcaggagaatcgcttgaacctaggaggcagaggttgcagtgagctgagatcgcccactgctctccagcctgggtgacacagtgagactgtctctcaaaaaacaaaacaaaacaaacaaacaaacaaaaacaaatcctgtgacttcccaatctcatctccagccccctgcagccaccactctgttttctgtctctatgaatttgactcctccaagtgcctcttatacagcatttggcattgtgtaactggtttaatacgtttgagatggtgagagcttaaggtctacaggcctaaggtttttttttttttgacagaatttcactctgtcgccaggctggaatgcagtagggcaatctcggctcactgcaacctccacctcccgagttcaagtgatgctcctgcttcggcctcctgagtagctgggactacaggtgagtgccaccacatccagctaatttttgtatttttagtagagacagggtttcaccatgttggccaggctggtatcaatctcctgacctcgtgatccatctgtctcggcctcccaaagtgctgggattacaggcgtgagccaccgtgcccggccattgactaaggtcttaaaatagctcttcctgcctgtataatctccattatggcagggctcatataagaagatgacagttcatctgatgaggaagaaaacttactcctagttagattgggttgaattcttccctgtttccagcggtgtctgctcctggcacctcaggcacagtcaggggtaggaggtggtgatcagatacactcgctgtgagcagtgcaaggggaagcaggtgcccagaggtgcatcccggtttggtgggggtgacaaacatggacaggtaagtgcaggagtgtgtgcaatactcaatctaagaaaggtagttcaggcagagttcagggaagatatctctgtgcagggccagacatggggatgagattctgataatttgggaatgaatcaggcccccagcccctcctccctcagactcagcagtccaggcacccggccctcctccctcggacccagaagtccatgctcccagcccctcctcccttggacccaggagtccaggcccccagcccctcctccctcagacccaggagtccaggcccccagccgccttctcctgcaggaccccaggagcttgggtacccacaggctactagatccttgtttctgtgcatggaaattctcaaattatctccaaaagtctatgaagaaggtaaacacacatttccagatgagggaataggctgatatagttgaaagacacacagagggtcacagtctggaattgacagtggtgggattcgaacctatttcactccagaactgcgtagcgccttatacgctgcggcaagtgtgacgtcattcgaacaaaccataggccccgcccccggactagccacgcccacaggctcctgaaaccaccaatcccagctgtgacagcgctcaggaccgatgctcataggtcccgtccctaggatccccgccccctccgcccgcgccccgcccctcgcagcccagttccggacgcgggcccagccgcgcctgcgcctccgctcgcctgtggctgcgtcgcgcgctcttcctcggagctacccaggcggctggtgtgcagcaagctccgcgccgacccctgacgcctgacgcctgtccccggcccggcatgagccgctacctgctgccgctgtcggcgctgggcacggtagcaggcgccgccgt

SEQ ID NO: 22549 - DNA, 2300 bp, Homo sapien
ccagcctggccaacatggtgaaaccccgtctctactaaaaatacaaaaatcagccaggtgtggcggcgagcgcctgtaatcccagctactcatgaggctgaggcaggagaatcgcttgaacccaggaggcagaggttgcagtgagctgagattgcatcactgcgctccagcctgggcatcggagagagactctcaaacaggagctggcgaactgtggcgcactgcttatttttataaataaagttttatgggaacacagctgtgctcacttgttttcacatcatctgtggctgcttcccagctcctctggcagaggaggtgcaacagccactgtgtggatcacaaagctgaaattatttactatctggctgtttgtagaaaaagtttgctgatctctgtcctggaagtcaatgatattaggatttcagtttacagaaaaggagaaaaagacagggaaaaacagtgttgtttttttttcaaggttgagaaaatgaacatctgaaccaattgcccatgttattaaatgtaaacatttattattattatttttgagatggggtcttgctctgtcacccagcctggggtgcagtggcacaatcacagctcatcatagccttgacctcctgggctcaagcagacctcccacctcagcctcccaagtagctgagggtgcagatgcgtgccaccaaacctgctaatttttgtattttttgtagagataaggttttgccgtgttgtccaggccgctctcaaactcctgggctcatactattctccactttggcctcccaaagtgctgggattacaggcatgagccaccatgcccagtctaaaatttttctttatttttagtttggtaaactatgcataaagtaaaatgtaccatcttaaccattttaagtgtacaattcagtgatgttaagtatattcacattgttgtgcaaccatcaccaccgtccaccttcaggtcttttttttattttgcaaaacaaactctgtatctattaaaaaacagcttcccggccgggtgcggtggctcatgcctgtaatcccagcactttgggtggccgaggcaggtggatcacctgaggtcaggagtttgagaccaacctggccaacatggtgaaaccccgtctctactaaaaatacaaaaattagccgggtgtggtgacacgtgcctgtagccccagctactcgggaggctgaggcaggagaatcgcttgaacctaggaggcagaggttgcagtgagctgagatcgcccactgctctccagcctgggtgacacagtgagactgtctctcaaaaaacaaaacaaaacaaacaaacaaacaaaaacaaatcctgtgacttcccaatctcatctccagccccctgcagccaccactctgttttctgtctctatgaatttgactcctccaagtgcctcttatacagcatttggcattgtgtaactggtttaatacgtttgagatggtgagagcttaaggtctacaggcctaaggtttttttttttttgacagaatttcactctgtcgccaggctggaatgcagtagggcaatctcggctcactgcaacctccacctcccgagttcaagtgatgctcctgcttcggcctcctgagtagctgggactacaggtgagtgccaccacatccagctaatttttgtatttttagtagagacagggtttcaccatgttggccaggctggtatcaatctcctgacctcgtgatccatctgtctcggcctcccaaagtgctgggattacaggcgtgagccaccgtgcccggccattgactaaggtcttaaaatagctcttcctgcctgtataatctccattatggcagggctcatataagaagatgacagttcatctgatgaggaagaaaacttactcctagttagattgggttgaattcttccctgtttccagcggtgtctgctcctggcacctcaggcacagtcaggggtaggaggtggtgatcagatacactcgctgtgagcagtgcaaggggaagcaggtgcccagaggtgcatcccggtttggtgggggtgacaaacatggacaggtaagtgcaggagtgtgtgcaatactcaatctaagaaaggtagttcaggcagagttcagggaagatatctctgtgcagggccagacatggggatgagattctgataatttgggaatgaatcaggcccccagcccctcctccctcagactcagcagtccaggcacccggccctcctccctcggacccagaagtccatgctcccagcccctcctcccttggacccaggagtc

SEQ ID NO: 22550 - DNA, 2300 bp, Homo sapien
tctcatagaagcatttggtatgggtccgaggcctttgggtctgagggaggaggggctggggtctggactcttgggtctgagggaggaggggctgggggcctggactcctgggtctgagggaggaggggctatctcattgctttgggggtggcgcaggcggccctccaggccatggtctggagcagcaggtgagaccgaaacccgagcctccacccaagtcccaagtcccagggcccagggcctctttcctccttctctggccgcaaaggaggcccctccctctctgtaacccacagcaaatgcctcccaaataccagtcaaagtgtccacccctgcacagtctgactcagccagtccagggcggaggcagtaaagccctgtcttggcaagtcaccagggaaatccatcaccgaagcacctctctcccccctcggcctggctattctgtcattggcacctgttcttgggtgagtgacagggctctgtggtcagggtttgcctctgtcccagtctgggatagctgtcttggggggctggcctttcttccctctcacctgggatgtcccaggaacggaacagaattctcccctggggcttgaagagctcaccccccatctcctccgttatccccacccccacaccacccaacacacatcctctagtctgtaggatttgctgacaaattcctatgacagccggatgtggtgcctcacacctgttacccagcattttgggaggccatcacttgagatcaggagttcgagaccagcttagccaacatggtgaaaccccatctctacaaaagtagctgggtgtggtggcgtgcgcttgtagtcccagctactagggagactgaggcaggagaatcacttgaacccgggaggcagaggttgcagcgagccattgcgccatgcactccaggctgggtgactgactgagattctgactcaaaaaaaaaaaaaaatcctatgacaaggagaaaggtcagattccctggcaatgggagctgaggcatgttcttgagaaggagggaggttataaattagatggggctgggtctcagagagatatagctacttacatattaaataatgaggctgagtgtggcgtctcacacctatagtcccagtactttgggaagcagaggcaggaggatcccttgagcctaggagtttgaaaccagcctgggcaacatagggagattccatccctaccaaaaaaaaaattaaaaattagccaggcatagtggcctgcatctgtggtcctagctgcttgggaggctgaggtgggaggattgcttgaacctgggaggtcaaggtacagtgagccacgattgcaccactgcactccagcctgggtgacagagcaagaccttgtctcaaaaaaagtaattaatttatttattcaatacgtagctcctgagacaaaatgtgtgccgtactctagaccctgctggtgtgcacaattcatgggggatatgtgcgctaatggaagtgtggcacagggcaagggtgtccccagagaaagccctaatccagctttatgggtggttgtatgaggcacagaagcctttcctggttaagggataaatggatggggtttcaaaggatgaataggagtttgccaaggacaatgaagcaaagattgacattctaagcattgggagtgtcctatgcaaaatcccaaagtgatgtagtagcaaatacttaagcacctacagtgtgccaagcatgtttcatgtgctggagatacagaggaggaggagacagatgaaaccccagcccttgtgatattgtcatcctagtaggtgtggtggggagataaacaagtagacacctgcatgaataagactttcagattgtggtaaaccctgtggaggaaacgaaacaggtgaaggaacggcgtgactaggagcaggcaggtgcggctgcttcaggtagggtggtcagggaaggaggcggcatctgagctttgacctcaatttcgagaatgagccaggaatgcagagaggatttcaggcagaggaaaccttagggaggctggcgggttaaatctgcaggggtgtggctggccggaggaagtgaggtgtgagacagtcacgttgatggtgacagcagcagtgaccgtagcagcctagaggtggccgaatgcttactctaatgggctggcccatccctgagtgtctagagttcccagcccgcttaaggaaggaaggaaaacacaggcagctctaagtgtacgacgagggaggtctcatcggcggtgaggaagcccaggcgggtccccttcccagctgaaag

SEQ ID NO: 22551 - DNA, 2300 bp, Homo sapien
ttaagtatttgctactacatcactttgggattttgcataggacactcccaatgcttagaatgtcaatctttgcttcattgtccttggcaaactcctattcatcctttgaaaccccatccatttatcccttaaccaggaaaggcttctgtgcctcatacaaccacccataaagctggattagggctttctctggggacacccttgccctgtgccacacttccattagcgcacatatcccccatgaattgtgcacaccagcagggtctagagtacggcacacattttgtctcaggagctacgtattgaataaataaattaattactttttttgagacaaggtcttgctctgtcacccaggctggagtgcagtggtgcaatcgtggctcactgtaccttgacctcccaggttcaagcaatcctcccacctcagcctcccaagcagctaggaccacagatgcaggccactatgcctggctaatttttaattttttttttggtagggatggaatctccctatgttgcccaggctggtttcaaactcctaggctcaagggatcctcctgcctctgcttcccaaagtactgggactataggtgtgagacgccacactcagcctcattatttaatatgtaagtagctatatctctctgagacccagccccatctaatttataacctccctccttctcaagaacatgcctcagctcccattgccagggaatctgacctttctccttgtcataggatttttttttttttttgagtcagaatctcagtcagtcacccagcctggagtgcatggcgcaatggctcgctgcaacctctgcctcccgggttcaagtgattctcctgcctcagtctccctagtagctgggactacaagcgcacgccaccacacccagctacttttgtagagatggggtttcaccatgttggctaagctggtctcgaactcctgatctcaagtgatggcctcccaaaatgctgggtaacaggtgtgaggcaccacatccggctgtcataggaatttgtcagcaaatcctacagactagaggatgtgtgttgggtggtgtgggggtggggataacggaggagatggggggtgagctcttcaagccccaggggagaattctgttccgttcctgggacatcccaggtgagagggaagaaaggccagccccccaagacagctatcccagactgggacagaggcaaaccctgaccacagagccctgtcactcacccaagaacaggtgccaatgacagaatagccaggccgaggggggagagaggtgcttcggtgatggatttccctggtgacttgccaagacagggctttactgcctccgccctggactggctgagtcagactgtgcaggggtggacactttgactggtatttgggaggcatttgctgtgggttacagagagggaggggcctcctttgcggccagagaaggaggaaagaggccctgggccctgggacttgggacttgggtggaggctcgggtttcggtctcacctgctgctccagaccatggcctggagggccgcctgcgccacccccaaagcaatgagatagcccctcctccctcagacccaggagtccaggcccccagcccctcctccctcagacccaagagtccagaccccagcccctcctccctcagacccaaaggcctcggacccataccaaatgcttctatgagatagttttctccccttgttcatgaagaaatgagcccaggcccagtcagatctgcatctgtgtcacagcccagggccactgtaaccttaggctactgacttccctctctgagcctctgttttctcctgtcaatggggcaaggggtctgctccttccctcaaaccccaactcaggtacagtcaagcacagaaaatacttgtggcatgaatgtgatgagaacacagaattgcagaagccaaagaaagagaagcgtaagggccctccttccacccctacctcccccacccgctgctacacgcaccaggaccacctgctgggtagccaggagctcacagtctagccccgctggccacccctgcagcccccatccttcactcaggcagttgcagggcccagaacacccctatcttctaggattgacactggctgtcaaactcatccttcaaggtgattcctggcctgccctcctcctccaggcagcctgtcctcctcctccaggcagcctgtcctgaccctcagcagcctctcctggccttggcagagcccctcgtgtcctcccttgcagcacgcatgggaagaaaggccatcgtcc

SEQ ID NO: 22552 - DNA, 2300 bp, Homo sapien
aacggaggagacacagacaaaatgaaccaggaacacagtgggtaagaaggtgaaaagttctccacacaaaaatgaagtagggagagaggaaagagactacaaagaagttgggttgccgggggcggtggctcacacccataatcccagcactttgggaggccgaggcgggcagatcacgaggtcaagagatcgagaccatcctggccaacatggtgaaatgctgtctctactaaaagtacaaaattagccgggcgtggtggcgcgcgcctgtagtcccagctactcaggaggctgaggcaggagaatcacttgaacctgggggggcggaggttgcggtgagccaagattgcgccactgcactccagcctgggcaacaagagtgaaactctgtctcaaaaaaaacaaaagaagtcgagtaagggatgccgccatttgaaacagggtggtcagccagtcctctgagaaggtgacattcaggcaaagatcaaaggaggcaagaaagtgaggcatgagggtatctggtagaagagcattccaggcagaggaaacagcaagtgcaaaggccctgaggcaggaccgggtctggatgttccaagagcagcaaggaggccagtgtgctgacacacagaaggaagagatgagatcagaatcacgtcccttaaggccttgcaagatgtcagctttttttttttcttcttttttgagacagagtctcgctctgtcgcccaggctggagtgcaatggcgcaatctcggctcactgcaagctccgccttccaggttcacgccattctcctgcctcagcctcccgagtagctgggactacaggtgcccaccaccacgcccggctaattgtttgtatttttagtagagacggggtttcaccgtgttagccaggatggtctcgatctcctgacctcgtgttccacccgcctcggcctcccaaagtgctgggattacaggtgtgagccactgcgcccggcctgttttctgttttttgagatggagcctcgctctcttgcctaggctggagtgcagtggtgcaattatcggctcgccgcaacctctgcctcccgggttcaagtgattttcctgcctcagcctcctgagtagctgggattacaggcacccgccaccacacctggataatttttgtgtttttagtacagatggggtttcaccatgttggctgggctggtctcgaactcctgtcctcaggtgatctgcctgcctcggcctcccaaagtgctgggattagagatgtgagccactgtacccatgcaagtttcttaacccttctcttcctcattttctcatctgtgagacgaagacagcctcccacccagacacactcccctcacggggctctggggagaaatgatgtggaaagctttgctagtaacctctacagcatggagggagttctggaaaagtgatttcagaaaggtgtttatgcctggaaagcctgttcatttttgtgatgtccttggagctgggccaggcattatcgagctaaatcttagcttttgtcagaataggggggtcattgagggaaatttccaaaggaaggtggaacgggatgggtggggaggtaagggcatgagcagaggcagtgatcgtgggcaggaggtgtccatagaagacgggctgccactggccctggagacagaaggtcagccccgggttcaaatccctccttaaccaagtgctgaaatggacaagttgctcaacctctctggccttcagcttcctcatctgtcaagcaggaatcaaacctcgaacttcctcccgctgttagaatttcaagggagttttaaagacagagctttcaactctgacctgtgaacaagtgtgacatcaaatgtactgttcgttgctattattctgttgctacaaggcagacagttagtttcccagctcccctgcagtccccccagcccctcctagatctgtctgccagccccgccccggggtcactccagccaggctgtgccaggtgaatgctcaggtatgcggaggcggaggcggaggcaggacggccctgggagggagcaggaggaggggccggcagcctggaagggaaaggacagcggagagcagggcagagcctgagcaggcaggtaaggagatccgggtcaggagagaagggggccggggcttgaccaatgggtctgagggacggggggactggggtctggactccagggtctcagggaggacgggctgggggtctgaactcccgggtctgagggaggagggcctggggtcctggactcctaggtctgagggaggaggggctga

SEQ ID NO: 22553 - DNA, 2300 bp, Homo sapien
aggcatgagggtatctggtagaagagcattccaggcagaggaaacagcaagtgcaaaggccctgaggcaggaccgggtctggatgttccaagagcagcaaggaggccagtgtgctgacacacagaaggaagagatgagatcagaatcacgtcccttaaggccttgcaagatgtcagctttttttttttcttcttttttgagacagagtctcgctctgtcgcccaggctggagtgcaatggcgcaatctcggctcactgcaagctccgccttccaggttcacgccattctcctgcctcagcctcccgagtagctgggactacaggtgcccaccaccacgcccggctaattgtttgtatttttagtagagacggggtttcaccgtgttagccaggatggtctcgatctcctgacctcgtgttccacccgcctcggcctcccaaagtgctgggattacaggtgtgagccactgcgcccggcctgttttctgttttttgagatggagcctcgctctcttgcctaggctggagtgcagtggtgcaattatcggctcgccgcaacctctgcctcccgggttcaagtgattttcctgcctcagcctcctgagtagctgggattacaggcacccgccaccacacctggataatttttgtgtttttagtacagatggggtttcaccatgttggctgggctggtctcgaactcctgtcctcaggtgatctgcctgcctcggcctcccaaagtgctgggattagagatgtgagccactgtacccatgcaagtttcttaacccttctcttcctcattttctcatctgtgagacgaagacagcctcccacccagacacactcccctcacggggctctggggagaaatgatgtggaaagctttgctagtaacctctacagcatggagggagttctggaaaagtgatttcagaaaggtgtttatgcctggaaagcctgttcatttttgtgatgtccttggagctgggccaggcattatcgagctaaatcttagcttttgtcagaataggggggtcattgagggaaatttccaaaggaaggtggaacgggatgggtggggaggtaagggcatgagcagaggcagtgatcgtgggcaggaggtgtccatagaagacgggctgccactggccctggagacagaaggtcagccccgggttcaaatccctccttaaccaagtgctgaaatggacaagttgctcaacctctctggccttcagcttcctcatctgtcaagcaggaatcaaacctcgaacttcctcccgctgttagaatttcaagggagttttaaagacagagctttcaactctgacctgtgaacaagtgtgacatcaaatgtactgttcgttgctattattctgttgctacaaggcagacagttagtttcccagctcccctgcagtccccccagcccctcctagatctgtctgccagccccgccccggggtcactccagccaggctgtgccaggtgaatgctcaggtatgcggaggcggaggcggaggcaggacggccctgggagggagcaggaggaggggccggcagcctggaagggaaaggacagcggagagcagggcagagcctgagcaggcaggtaaggagatccgggtcaggagagaagggggccggggcttgaccaatgggtctgagggacggggggactggggtctggactccagggtctcagggaggacgggctgggggtctgaactcccgggtctgagggaggagggcctggggtcctggactcctaggtctgagggaggaggggctgagggcctggactcctgggtctgagggaggaggagatggggcctggactcctgggtctgagggaggagtggactggggtctggactcctgggtctgagggaggaggggactggggtctggactcctgggtctagggaagagggactggggcctggacttctgggtctgagggaggaggggctgggggcctggactcctgggcctgagggaggaggggctggggcctggatgcctgcattgagggaggaggctggggtaggaattagaggctcctactggccaggccttcacatgtttgctggctcccagggcacctccaggtgggcaggagctaccactcagcaccatgagcaccgccacagggtaagcgcccccggaccccaggtcccagccccagcacgcctcccgcctcccctcgcctcctcacccacacccgcttgcggcagcccagactgtttgcggcggcccagactctggcccaagccccgacactcaggaggaagcca

SEQ ID NO: 22554 - DNA, 2300 bp, Homo sapien
ggggggctggactcctaggtttgagggaggaggggctgggggcctggactcctgagtcagagggaagaggtgctgggggcctggactcctgggtcagagggaagaggggctggggggctggactcctgggtcagagggaagaggggctggggggctggactcctgggtcagagggaagaggggctggggggctggactcctgggtcagagggaagaggggctggggggctggactcctgggtcagagggaagaggggctggggggctggactcctgggtcagagggaagaggggctgggggtctggactcctgagtcagagggaagaggggctggggggctggactcctgggtcagagggaagaggggctgggggcctggactcctgggtcagagggaagaggggctgggggcctggactcctgggtcagagggaagaggggctgggggtctggactcctgggtcagagggaggaggggctggggggctggactcctgggtcagagggaagaggggctgggggcctggactcctgggtttgagggaggaggggctgggggcctggactcctgggtcagagggaagaggggctggggggctggactcctaggtttgagggaggaggggctgggggcctggactcctgggtctgatggaggaggggctgggcctggactcccaggctcattctctttctcccctggcagagcagaggaagcgttactccacagttgttatggctgatgtatcccagtacccagtcaatgtgagtctggggtctgtgttcccccaggacatcttctggggcaaaggtggcctcaggagatagggcttttgaaagcagctaggcccccaagcaggaagcatgtggaaagtcagtttgcccatccataaaatggacctccgttgcctcacctcagtcatggatatgaagccaggggcctcgggtccacttaatctgccagcctttcctccaggccagctgttgtgctggacagtgggaccacggaggcaaatcaagacacagccctgcatgaggaaggggtagacaaggtccagaggaatccacagaggcgcctggtgctctaatggaggtggcagggggcatggcaggagacccgaggaggcatttagaaggagagagctataatccagactccttccctgcccgcaaggagcctccagtctgtgagaagccagactcaggtgctagtcactctgatgaaagggaaacaaagggcactgggaggaggagctgatttgtggaacaggtgatcaaggaaggcttcctggaggaggtgtggttagtctcaggctgaaagtctgattattctgggggattctgagcccacctggcatcatcttgggcctcactgctttctccatggtccgtaccagcacctggtgacgttctgcctgggtgaggacgatggcgtgcataccgtggaggatgcctccaggaagttggccgtcatggatagccagggccgagtctgggcacaggagatgctgctgcgagtgtctcccgaccatgtcacgctgctcgacccggcctccaaggtgccggggggcacgtgggtgggaggagtgtctggggcagggacttcagggggtctgggtgtgaatcttggctcctgcacgtccttcctctgggaactctggcgagggaccccagcccccttcttgagccttaatagcctcatctattaaacagggctgttatccctaaccccctaaccgcctgaggttgccctgacctgctggcccacactcccgtcgccatttagtagtaccatcatttcggggcctcagtttaccccgccatcccacccggcaggaggagctggagtcgtacccactgggcgccatcgtgcgctgtgacgcggtgatgccacccggcaggagccgctcgttgctgctgctcgtgtgccaggaacccgagcgcgcgcagcccgacgtgcacttcttccagggcctgcgcctcggggtgagcagatgggctggctctgggggtggagctggaactgggcggagcctggagccggggcggaaatgggtggggcctctaggtggggcggggcctggggctaaggcgggatcagagcaaggaagggcaggggacctgggaaggaagttctggaaggcagtggggtttgagattggacccagggtcaagatagaacatgaaggtgggatgaggacatgaacagaacatggccaagaaggatctgggggagcagccaggacgaggtgggggcgaggaaccacccggactgggtctccatgggcggggtcgtggc

SEQ ID NO: 22555 - DNA, 2300 bp, Homo sapien
tggttagtctcaggctgaaagtctgattattctgggggattctgagcccacctggcatcatcttgggcctcactgctttctccatggtccgtaccagcacctggtgacgttctgcctgggtgaggacgatggcgtgcataccgtggaggatgcctccaggaagttggccgtcatggatagccagggccgagtctgggcacaggagatgctgctgcgagtgtctcccgaccatgtcacgctgctcgacccggcctccaaggtgccggggggcacgtgggtgggaggagtgtctggggcagggacttcagggggtctgggtgtgaatcttggctcctgcacgtccttcctctgggaactctggcgagggaccccagcccccttcttgagccttaatagcctcatctattaaacagggctgttatccctaaccccctaaccgcctgaggttgccctgacctgctggcccacactcccgtcgccatttagtagtaccatcatttcggggcctcagtttaccccgccatcccacccggcaggaggagctggagtcgtacccactgggcgccatcgtgcgctgtgacgcggtgatgccacccggcaggagccgctcgttgctgctgctcgtgtgccaggaacccgagcgcgcgcagcccgacgtgcacttcttccagggcctgcgcctcggggtgagcagatgggctggctctgggggtggagctggaactgggcggagcctggagccggggcggaaatgggtggggcctctaggtggggcggggcctggggctaaggcgggatcagagcaaggaagggcaggggacctgggaaggaagttctggaaggcagtggggtttgagattggacccagggtcaagatagaacatgaaggtgggatgaggacatgaacagaacatggccaagaaggatctgggggagcagccaggacgaggtgggggcgaggaaccacccggactgggtctccatgggcggggtcgtggcttagggcagggacaggtgtagggcgaggggtgagttcggggcgtggacgtgcgtgggttcacaggtgtgaacggtagccgcacgtgggctgggactgagctgaaaaatcggccaggggcgaggcccgggtaggaagtgggtgcggcgtggggaggcgtggcctgacggtgtgattggcaggcggagctgatccgagaggacatccagggggctctgcacaattaccgctcgggccgcggggagcgcagggcggcggcgctcaggtgagagggaagaagttggcagggtctctgggaagccggtttcccctccttgtgcctcagtctacaacaccagcctggaacagaacaagagttttgcatggagtcaagcacaccctagtcgagtcttgtctgtacctcccagacgagctgaccccttctccagaactctgcttcttttctctgttccctgtccaggccctcagtttcactctagagaggtgctatccctccgtatatcggatttctccctacctcgttgaacttgttcactccctttgagccttttgagcctgtgtgtctcgttctgcgccctggatttccccctccctggacccctcagtggacccagtcttggtgtccccgtcgccctccgcagggccacgcaggaggagttgcagcgcgaccgctcgcccgccgctgagaccccgcccctgcagcgccgcccgtcagtccgcgcagtgatcagcaccgtagagcggggcgcgggccgcggacgaccccaggcgaagcccattcccgaggcagaggaggcgcagaggcctgagccggtggggacctcgagcaacgctgactcggcctccccggacctgggtccccggggtcctgacctggcggttctgcaggcggagcgggaagtggtgagccgctaaggaaggggtctgggggcagggccaggcgactggaggcggggctagggcgtggaagggcggggccggctgcgggacgggcgttctctggtcagacttctgcgttatggaagaggggctgggtcgggggcggggcttggttgtggggcgtggccaggtgtttggggcgtggcctgatctggggaagtgtataggtgctcaggttcagggcttcgacggggatggttttggaactcgggagccctgagcgtccccctcctctgtcccctaggacatcctgaaccacgtgttcgacgacgtagagagctttgtatcgaggctgcagaagtcggcggaggcggccagggtgctggagcaccgggaacgcggccgcaggagccggcgccgggcg

SEQ ID NO: 22556 - DNA, 2300 bp, Homo sapien
acggtggtgaactgcggggaaggggcgaagacggtggtgaactgcgcggggaaggggcgaagacggtggtgaactgcgcggggaaggggtgaagacggtggtgaactgcgcggggaaggggcgaagacggtggtgaactgcggggaaggtgtgaagacggtggtgaactgcgcggggaaggaggaggcgagtgccggctgcaggagccggggcagctgagggcccaccagtgccctgggtatgctgaggggtcggggtgaggtctaagcaggtctcccctgggagctagaaggacccctctggggatgagactggaggcttctcatgggtgggggccgtgaggacaagacggcagtgcctgcacgtggcagctgcgggcgcctgctggacgcagggcacctcctgcccctgaggtgtgtggccatctgtaggaaaaccagtaagcccacgagccctcggtgcccgcctgggcagtgagctcctgcacagctgtttgtggtggtgttgctgtggggcacgtgtgctccacccctcccctgcagcccccttccctccttgcagcttcggaaccaaaaagaagcttcccagagccggggccaggagccccaagcgccctctagcagcaaacacagaaggtatagggagggaggagtccagggctggcggggtggctggaggccccgggcttgtaccccagcaccctctccttccccaacaggagctctgtgtgtcgtctgagcagtcgcgagaagatttccctccaggacttgtccaaggagcgccggcctggtggggctggggggccccccatccaggacgaggatgagggggaagaaggtcccaccggtgaggggcctgaatctggactcctgggtccgagggaggaggggtcgggttctctgaatctagaggcaactggcatcttctgtgacctgcccggtgttcccacatcacagaaccaccccctgcagaacccagaaccctcaatggcgtctcctccccgccgcaccccagccctaagagtcccgtggtgagtggatgccctgagaggtcctgtgaggctgggagggcccggaggtgggattccatacagcctgtgaacctctggcaggggcagatagggggaagactatagttcccagagtcgtcctggacaaccggcttcctttttaggctgtgcctgccccgggggctgatgggaattgtagtttgttgcagtcctttgggggctaacccttgaggtctgagaagagggatcctttctctctaactgagacctcctccttctcccagcagcttgaagaggcccccttctccaggcgctttggcctcctgaagacagggagttctggtgccctgggtccccctgaaaggcggacagcggagggagcccctggggctgggctgcagcgctcggcttcctcctcctggctggaagggacctccactcaggtgagtgagggttgggccgggtccaggcccaggcccctgcccagtcgagggaactgccccttcctccccttctcctctccacacaggccaaggagctccgtcttgccagaattaccccgaccccctccccgaagctgccggagccctctgtcctgtgagtccccagggcctgggcccctcaggggtgggtggcagatgtgggttccaagcctgtccgtgtgatcctgagtgagaccatgtaccccctggggtctggttcctgccgccactccagagcctgtgctgtgttcctcttgggggctctctccctccctcaggtctgtgttgaaacgtcaccttctcccctatcttccccccaccccgaggtgcacactgaccaccctgctgccaccacggcgccgtccgcacacgcacaccctcccgctctcagttctcgcactgctgcttctgtccagagtcctttatccttctgaccggttgcgtagtgtgctggtcttttcatggcttttgtgggttttgtgtatttctgctcagctctgactctgttgtggcccagataatttgtttctttcactcacggctgcatctccagtgccggcacacaatgcacctgggtaatgtttgtggaatgaatgaattgatgcaggtctgaggtcaccaagcctcctccttgcttggagaactcctcgcctccctccaggattccggagcctgaatccccagcgaagccaaacgtccccacagcctccacggcgcccccagcggactcccgggaccgacggaggtgaagaggccagggcaggaagctgccgcccccgcccccagcagggagagacgatgtgaagcag

SEQ ID NO: 22557 - DNA, 2300 bp, Homo sapien
aggggcgaagacggtggtgaactgcggggaaggggtgaagacggtggtgaactgcgcggggaaggggcgaagacggtggtgaactgcgcggggaaggggtgaagacggtggtgaactgcgtggggaaggggcgaagacggtggtgaactgcgaactgtgcggggtaggggtgaagacggtggtgaactgcgcggggaaggtgtgaagacggtggtgaactgcgcggagaaggggcgaagacggtggtgaactgcggggaaggggtgaagacggtggtgaactgcagggaaggggtgaagacggtgaactgcggggaaggggcgaagacggtggtgaactgcagggaaggggtgaagacggtggtgaactgcgtggggaaggggtgaagacggtggtgaactgcgaactgcgcggggtaggggtgaagacggtggtgaactgcgcggggaaggtgtgaagacggtggtgaactgcgcggagaaggggtgaagacggtggtgaactgcagggaaggggtgaagacggtggtgaactgcgtggggaaggggtgaagacggtggtgaactgcgaactgcgcggggtaggggtgaagacggtggtgaactgcggggaaggggtgaagacggtggtgaactgcgcggagaaggggcgaagacggtggtgaactgcgcggggaaggggcgaagacggtggtgaactgcgcggggaaggggcgaagacagtggtgaactgcagggaaggggcgaagacggtggtgaactgcggggaaggggcgaagacggtggtgaactgcggggaaggggcgaagacggtggtgaactgcgcggggaaggggcgaagacggtggtgaactgcgcggggaaggggtgaagacggtggtgaactgcgcggggaaggggcgaagacggtggtgaactgcggggaaggtgtgaagacggtggtgaactgcgcggggaaggaggaggcgagtgccggctgcaggagccggggcagctgagggcccaccagtgccctgggtatgctgaggggtcggggtgaggtctaagcaggtctcccctgggagctagaaggacccctctggggatgagactggaggcttctcatgggtgggggccgtgaggacaagacggcagtgcctgcacgtggcagctgcgggcgcctgctggacgcagggcacctcctgcccctgaggtgtgtggccatctgtaggaaaaccagtaagcccacgagccctcggtgcccgcctgggcagtgagctcctgcacagctgtttgtggtggtgttgctgtggggcacgtgtgctccacccctcccctgcagcccccttccctccttgcagcttcggaaccaaaaagaagcttcccagagccggggccaggagccccaagcgccctctagcagcaaacacagaaggtatagggagggaggagtccagggctggcggggtggctggaggccccgggcttgtaccccagcaccctctccttccccaacaggagctctgtgtgtcgtctgagcagtcgcgagaagatttccctccaggacttgtccaaggagcgccggcctggtggggctggggggccccccatccaggacgaggatgagggggaagaaggtcccaccggtgaggggcctgaatctggactcctgggtccgagggaggaggggtcgggttctctgaatctagaggcaactggcatcttctgtgacctgcccggtgttcccacatcacagaaccaccccctgcagaacccagaaccctcaatggcgtctcctccccgccgcaccccagccctaagagtcccgtggtgagtggatgccctgagaggtcctgtgaggctgggagggcccggaggtgggattccatacagcctgtgaacctctggcaggggcagatagggggaagactatagttcccagagtcgtcctggacaaccggcttcctttttaggctgtgcctgccccgggggctgatgggaattgtagtttgttgcagtcctttgggggctaacccttgaggtctgagaagagggatcctttctctctaactgagacctcctccttctcccagcagcttgaagaggcccccttctccaggcgctttggcctcctgaagacagggagttctggtgccctgggtccccctgaaaggcggacagcggagggagcccctggggctgggctgcagcgctcggcttcctcctcctggctggaagggacctccactcaggtgagtgagggttgggccgggtccaggcccaggcccctgcccagtcgagggaactgccccttcctcccct

SEQ ID NO: 22558 - DNA, 2300 bp, Homo sapien
cagcattttgggaggccgaggcagtcggatcacgaggtcaggaattcgagaccagcctggccaacatggtgaaaccccgtctctactaaaaaacaaaaattagccgggcgtggtggagcacgcctgtagtcccagctactcaggaggctgaggcaggagaatcgcttgaacccgggaggcagagcttgcagtgagccgacatcgcgccactgcactccagcctgggcgacagagcaagcctccgtctcaaaaacaacaacaacaacaaaaaaaaacaaaactactgacaagttgctctacttaacccaaagaaagtgaaggagaaagcggctgcctcaccgcctagacattgagtcgccggatgtttcaatgcctcatgatacaataaaaccacaaaaattttcgtaacagcagcagcaacaacaacaacaaaagagaaagagagagggaaagaaacaggcctcgtgggatgcgcagtttacgtctccgcgcaaacccaaggacttcagagtgggtgggaaactcccacagcgcttgggaaacagtctgtagtctctgtcccgattttggcccttttctgtatgatttttatgggactcttcctgtcacaaagtgccagccaccttcccaatcttgagttgggcgcgggatccgtaaggtgaagatcaaggtgtgctcatcgcttgggcccgctgaaaggtgattcgccccccacctgctggaactccttgcccgggaccaccaatcccagcatgccttgagagcgcgcgagggcctgggcggttcccaggaggtccgggtgggcgcaggagaagcgcgggccagtgaaagctctgagagccctgtccctgtggacactgtgtcttgggttcctttactcggtgtggctcagggattaccattagggagtggagtgtggatttctcttgccccgagccctaaatgccttggggccctgccttgcaccccactgtgcttttaggggtgtggccctgtgggctacatttcccagcgtgccctaggatcgtggtcctgaccttttcaccgcaaatttcatttcccagcatgccctgcgaggtcacccagggaagcttggaagtggactgtctttcatggcttctaggttgcggactcagtttcccatggtgccctggtgaacccattcattcattcattccaaaaatatttgcgatcaggttctctcaggttctgttctaagaaccgaggacaagtagtgcacagaagacaaaagatcccgctctcgtggagcttatttctagttaaggggtcaggaaaaaaaccaaaataaataaaacccagctgggcatggtggcttacgctcgtcatcccagcaggattacaggccgaggcgggcggatcatgaggtcaagagatcaagaccatcatggccaacatggtgaaatcccgtctctactaaaaatataaaaattagcagggcggggtggcgcgcgcctgttatcccagctactctggggactgagccagaattgcttgaacctgggaagcggaggttgcagcgagccgatatcgcgccactgaactccagcgtggcgacagagcgagactccgtctcaaaacaaagaaaacaaaataaaacaacaataacaaaacaactctgcctctccccgcactccctcccacgcggctgtccagtcgaattcctaactgccccggggcagtctgctattcatcccctttacccggtgctacacacttcctagtatgccgtggggcacccctccggcctgtagactccatttcccagcattccccggaggaggccctcatctggcgatttccactgggcgcctcggagctgcggacttcccagtgtgcatcggggcacagcgactcctggaagtggccaagggccacttctgctaatggactccatttcccagcgctccccgcgacctgcccagcacaccctggggcagcgccgtgacgtcagcacgccgggcggggaccgggagatccttggggcggtggggggccagcggcagttcccggcggcccccggggcgggcgggcgggcgggtggtggcggcggttggggctcggcgctcgctcgctcgctgggcgggcgggcggtgcgatgtccggagaggatggcccggcggctggcccgggggcggcggcggcggctgcccgggagcggcgacgggagcagctgcggcagtggggggcgcgggcgggcgccgagcctggccccggagagcgccgcgcccgcaccgtccgcttcgagcgcgccgccgagttcctggcggcctgtgcgggcg

SEQ ID NO: 22559 - DNA, 2300 bp, Homo sapien
cactgcaacctctgcgtcctgggttcaagccattctcctgcctcagcctctccagtagctgggattacaggcatgcaccaccacgcccagctaatttttgtgtttttcgtagagacggggtttcaccatgttggccaggctggtctcgatttcctgacctcgtgatccgccctccttggcctcccaaagtgctgggattacaggcgtgagccaccgcgactggccgcaaacacattttacatgcatcccaccttcacttggtggtggaggcttaacatttaagtgcattccattgaatgcattcgtatcgaaacacgaagcagggatatgaagacactcagtgcacagcctctgtcaacagccagaaccagtccgtggtctgcggcatcttatcaggagaaagttactgaaatcagtctcttgttcaactaatgctgtagttatgccttgtggaacagggggttcagctagtcagcatctggcaatggatggctgcaatggttgtaatattgcttatcttgaggccggtgcttgtttagctgctagaaaaaggaaaagccttgtggcagttggaacatagtcgattatataagtgtagggatgcgtggcttaacccttgcctggcatggccttaggtcttgtttataatttggtatcttattgccacaaacagttcattccatcagtcttctgatctctattgtcacagctcctctggcccatgtggagtgcacagagatgccaagactaaaggtcaaagagagagagacacagagaaacagacaggcagagagacatgaccgacaacagagagactgagttgggagtagagagagtaggagccaggcaaagacccaaagagagagggagaaaataccacaagatgcatagaaggaagtgcaaagaaaggagaaaagagagacagagatatactcacagcaaggtgcagagacatggagaccctataagagatggaaatggagagccacagagggggaactgcgggcactaagagagacatggagagaactagaaagatagagacgtgaacacagacacagagacccagagccaaaaagagacagaaatggggtcataggtggacagaaatgcacagagagactgtgagcccccacagacacaaacgctgagaggggcagacatgcagagacacccacagaaatgcagagacaaaaccacccggagacacatgccgagaaacacactgaggggctcagaaagcgacagatgcagagagagcccaagacagacccagcaaggggccccgagaaatgcacagaaacacaaagaccgagaccaccagagacagaggtacggagaggcggggagggtgaggaagcctgctctccagggctggcttgaacctagaactcaaggtcatggcttggctgggaagcgggagggggataccaaaaaagatcagcgttagatggaggtggggagggagggtaggtttcaccctaattgacaccccaccctccccctccccctccccacacctgcttcccggctttagtgcctgttgtcaccaggatggaatcctggcggcagacaaaggggtgggggtgggaggaggagacaaaaagatggacagagacagaggaggagactaagaagtagagacagacacacagagacacacagatggagagccacagagacaacagaaatgggggtccagaaagagacctagatagaaagagggaacagagagaagaaaacaggaaacattccttatagcccatgtgtcattagtaggtcctccaaggacctactgtgtgccgggcatggggacgtcaaagcacagggagctataagggaggtagttggagcaccacgggagcctggggtgtggggtgggagcaggggcggggctcctgggccatgcagatggggttggcatggggttggggaggggcccacggaggcttctggactctgagtgtggagccaggggcagcagggctgtctctgaactcccaggcttgtgtttgagcaaaggaattctctccccctccctctcccctcggggcgggcccgagcctccagctataaactccccggagcttcagtgccctcagcaaggctcagcctcaagattcacagcatctcagacacagcctaggtaaggggctctgcggagccctgtggtcttcaaaaaccatgtccttgggggagggggcaggaggcaggtggggaagatgtcgggtgtggagaaatggtgcagaggtaggtggggcatacaactggaggtctgggaacttgagaggctcagactt

SEQ ID NO: 22560 - DNA, 2300 bp, Homo sapien
cttcccatctatccctaagcaagtccgagggcaacggagttccgcccgcaggctgctgtcaccaatccgagcatgaccctctgcaaaactccgcccctgaagcccctccgcgtagtccccgcccccttcgcagccctggctcctccccccactcccagggtcttggatccctccggcgcctgtactctgcccccaggaagccccgtcccaccttggcgtgcggctccgtggcataagcgcggtagttggaggagcggcgtctgattggggctggtgcagggcgaggttccctagcctgggttaggaggagtggggaccccatcaccaccaagaccccacccagcccttaccgtaccgcaccctctgctagggctgcagcctcccgccccagacccctcactgcagcgcccaccctggccctgggggtcccagccacgccttagcccgctgctctcaccgcatcgctgctcctggaaggagagaaaccaaggaggggggttagtggtgggctgtgtcctgtctcctaagggacccctggagtcccctctgaacaagaggtcgggggaccgcgcttccccttccttgggttccaggagtctgactcgcaaacccacttcctctcttcacccaagagtccctacgcctacctcgcaggccaagggtccagcctctcagctgcgacccctcttgggaacccgggaggtcgcccccaactcccactgccttggggcatcactcacccatccgccatgctgagactcaggccgggaatggcaggaggcagggcgaggacaggggcgtttggagggtcagtgagggggccgcccgggtgaccttcagggtcccagggaccgtcagtctcctccgggctgcttgagactccccgaggacactgagataaagggcgaggacacagactaaatatactgtcacctcctcctccccctgcccactatgccagataacgggggcgcgtgaggggcggggtgggccctgctccagctggatcaccagccacctccgggcacaggaatccggaccctcctccctctgatcctggagtcctagacccctcctccctcagacccagagaatgcccgacctcccaacctcctcctccctcagtcccaggaccctgggagaccctggccactccctcacacaaggagtccaggcccccagcccccttttccctcagactcaagtgtctgggcccccagctcctcttccctcagacccaagagtccaggcccccagcccctcctccctcagacccaagagtccaggcccccagctcctcttccctcagacccaagagtccaggccccagcccctcctccctcagacccaagagtccaggccccagcccctcctccctcagacccaggagtccaggcccccagcccctcctccctcagacccaggggtccaggcccccagcccctccctcagacaagggagtccaggcaggcccccagcacacttcctctctcagactcaagagtctgcaccctcagctcctcctccctcagaccaggagtccaggaccccaatccctctcccctcagaccgaggagtccaggaccccaatccctctcccctcagacccaggagtccaggccactcaataaatgttgttgattaatttgaggatgcagctgtgctcggggctagctctcagtcaatagcactgggaaatccatccctcgtccacttggaaacccaggaatctggtttctggcttcctctgtccagcactcctgggcctttctctcccagccctggagacggacataggacaggaaagacgcttggacacacagaagggtggacacaacttgctttacttgaaccatctgggtgctgaccaggccctggtgaggagacaccccagcccctagtcagccacagggtgcctgggaacaagggggccaaagtcaagggcctgagactcagtgtcagatcctaggctgggcttagagcctcagaagtggaatttggaattctgagagaacaatctagaattctaggaatagaccatagaatctcagaaatggaatttgaaagtctaccaacactcccggggtgggggtggcgggtactgagtgggaatgattagaataaaattgaggactctagcagcggacttagaatggtatcagcgggttctcatcctacaacctgactttggaagttggagataaggggtgtctaggggttgggtcagactccagttttggagtctgactcacagttgggcggagccaaggccccctgaggctgagccagaacctctgaga

SEQ ID NO: 22561 - DNA, 2300 bp, Homo sapien
cccaggagtccaggcccccagcccctccttgcttagacccaggggtccaggcccccagcccctcctccctcagacccaggagtccagacctcctgctcccttctttccccaggacccagactccagttttgccacccctcctccctcattgtctgggatcccagagccccatcctccctccggatttggagctgaatctcagcctgtcctccgtcctctctgcagtatggtccatcttctcatccctgagcttggggcctgtgtggcacccggagggaacttgattgtggaattagcccggtgagtcagtggggtggagggtggggaacatcctggctggggatcaaaatctgggtccctgacagggcgcttcccatctgcaggtacctggtggacgtgcggcaggagcagctgcagggattcaacacccgggtcagggagctagctcaggcagctggatttgctccacagaccggggccaggccttcagagaccttcgcacgtttctgcaagtcccaggaatcagctctgggcaacactgtcccagctgtggaacccggaactccgccccttgacatcctggcccagcctcttgaagccagcaacccagcccttgagggcctgacccagcctctgcagggtgggaccccacactgtgagccctgccagctgccctctgagtctccaggttcactctcagaggttctggctcagcctcagggggccttggctccgcccaactgtgagtcagactccaaaactggagtctgacccaacccctagacaccccttatctccaacttccaaagtcaggttgtaggatgagaacccgctgataccattctaagtccgctgctagagtcctcaattttattctaatcattcccactcagtacccgccacccccaccccgggagtgttggtagactttcaaattccatttctgagattctatggtctattcctagaattctagattgttctctcagaattccaaattccacttctgaggctctaagcccagcctaggatctgacactgagtctcaggcccttgactttggcccccttgttcccaggcaccctgtggctgactaggggctggggtgtctcctcaccagggcctggtcagcacccagatggttcaagtaaagcaagttgtgtccacccttctgtgtgtccaagcgtctttcctgtcctatgtccgtctccagggctgggagagaaaggcccaggagtgctggacagaggaagccagaaaccagattcctgggtttccaagtggacgagggatggatttcccagtgctattgactgagagctagccccgagcacagctgcatcctcaaattaatcaacaacatttattgagtggcctggactcctgggtctgaggggagagggattggggtcctggactcctcggtctgaggggagagggattggggtcctggactcctggtctgagggaggaggagctgagggtgcagactcttgagtctgagagaggaagtgtgctgggggcctgcctggactcccttgtctgagggaggggctgggggcctggacccctgggtctgagggaggaggggctgggggcctggactcctgggtctgagggaggaggggctggggcctggactcttgggtctgagggaggaggggctggggcctggactcttgggtctgagggaagaggagctgggggcctggactcttgggtctgagggaggaggggctgggggcctggactcttgggtctgagggaagaggagctgggggcccagacacttgagtctgagggaaaagggggctgggggcctggactccttgtgtgagggagtggccagggtctcccagggtcctgggactgagggaggaggaggttgggaggtcgggcattctctgggtctgagggaggaggggtctaggactccaggatcagagggaggagggtccggattcctgtgcccggaggtggctggtgatccagctggagcagggcccaccccgcccctcacgcgcccccgttatctggcatagtgggcagggggaggaggaggtgacagtatatttagtctgtgtcctcgccctttatctcagtgtcctcggggagtctcaagcagcccggaggagactgacggtccctgggaccctgaaggtcacccgggcggccccctcactgaccctccaaacgcccctgtcctcgccctgcctcctgccattcccggcctgagtctcagcatggcggatgggtgagtgatgccccaaggcagtgggagttgggggcgacctcccggg

SEQ ID NO: 22562 - DNA, 2300 bp, Homo sapien
ccacaggctgtacagggagtatggctgggaaggcctcaggaaacttacaatcatgacaggaggcgaaggggatgcaggcatctgttccacggcaggaaaaggggcaagagaggcagtggggaagaggcgcacacttgcaaataaccagattttgtgggaactcactatcacgagaacagcaagggagaaatctgcccctgtgacccaatcacctcccaccaggccccgcctccaatattggggattacaattcaacatgagatttaagcagggacacagatccaaaccatatcagtcattaatgacccagggaattcagagtacattgcacagtacagattgttcaaagttcttaaacagttagaactaaactgatctattttactaaaggcacatagttctcttctattaagttcttaaacaactaacatgaaactatttgtatgtctatgtgtatatatattatatgcaaaggtatatacagtcatccctcagtaacactggggactggttccaggacccctgcagataccaagatccaaggatgctcaagtcccttataaaattgtatagtattgccaggggcggtggctcacgcctgtaatcctaacactttgggagcctgaggtgggaggactgcttgagaccacgagtttgagactggcctggtcaacatagtgagaccccgtctctacaagaaataaaatattggccgggcgcggtggctcacgcctgtaatcccagcactttgggagaccgaggcaggcagatcacgaggtcaggagatcgagaccatcctggctaacacggtgaaaccccgtctctactaaaaatacaaaaaaaaaaaaaaaaaaattagccgccgggcgcgatggctcacgcctgtaatcccagcactttgggaggctgaggcgggtggatcacgaggtcaggagatcgagaccatcctggctaacacgtgaaaccccgtctctactaaaaatacaaaaaattagccgggtgtggtggcgggcgcttgtagtcccagctactccggaggctgaggcagaagaatggcgtgaacccgggaggcggagcttgcagtgagccgggatcgcgccactgcactacagtctaggcgacagagcgagactccgtctcaaaaaaaaaaaaaaaaaaaaaaaaaaaaaagaaaaagaaaagaaaaagaaataaaacattagctgggtgtggtagctaatgcctagccccagctagctgggaagctggaggaggagggtcccttaagctcaggtggtcgaggtaacagtgaactatgatggcacaactgcattcagcctgggcaacagagtgagacactgtctcaaaacaaaaaagatgtacttacaaatagcctgtacacatggtcccatacaccgcaaatcatctctagattacctataatatgtaatacaatgtaaatgcttacaccatattttacaatttgtattattttttactgttgtgttgttatcttttcccccaaatattctctgtctgcggtgagtgtggaatctgcaactctaattccctcttctaggtggttatttatttatttattttagaggcggagtctcactctgttgcccaggctggagtgcaatggcatgatctcggcccattgcaacctccgcctccgggttcaagcgattctcctgcctcagcctcccgagtaactgggattacaggcgcccgccaccatgtccggccctgttcttcatgtagtttttgggatgcgtggggagtttgcgggggttcattgttttcattagatgactatgacataataacatattaagggtgtaatttctgggctccctcctccacacattcccgcaattatctccctctctccgtagagcgaagcgagaccttcctggaagtgtgggggaacgcgctgctgcgcccgccagtggccgccttcgtgcgtgcccaggccgacctgctggcgcacctggtccccgagcccgaccgcctggaggaacagctgccctggctcagcctccgcgccctcaaggtgccgccgcccggcctccatctgggatcgggtggccgcgggaataatggaagcgcacagtccaaaggacgtgcgttgatggagcaggcggcgggctagggggttcgaatcccagttccccgactcccactgtgggatttggcctgggggcaggaggtggcttctgctttcggagcctcagtttttccatccgagaaacgggggaatcgttcccctgttctgggatggaagagagggtcaattagaatccgctctccctgcatcc

SEQ ID NO: 22563 - DNA, 2300 bp, Homo sapien
actccgtctctaaaaaaaaaataataaataaataaatcgcctggctcggtggttcacacctgtaatcccaacactttgagagaccaaggcgggcagatcacctgaggtcgtgagttggagaccagcctgaccaacacggagaaaccctgtctctacaaaaaatacaaaattagccgggcgtcctggcgcctgcctgtaatcccagctactcgggaggctgaggcagaagaatggcttgaacccgggaggcggaggttgcggtgagccgagatcgcgccattgcactccagcctgggcaacaagagtgaaactctctctctctctctctctctctctctctctctatatatatatatatatatatgtatatatatgtatatttgtattttattttgtatatatatacaaaatatttgtattttattttgtgtatatataaatatatatacatatatttgtattttattttgtgtgtgtatatatatatatatacacaaaataaaatacaaatacaaaaattagctggtgtggtggcaaatgcctgtagtcccagctacctgggaggctgggacaggagaatcgcttgaacccgggaggcggaggtttcagtgagccgagatcgcgccactgcactccagcctgggtgtcacagcaagactccatctcaaaaaaaaaaaatgtcactctggttcctttgctgagaatttgttgggagagtgggagaaatagggaggaaaggcattaattctccagagagaaacccaggatctggggctcttgcaggcttagagctggcctggaaggggctggttagccagcctgattctgcaggaatgtctgaggtctcaaccttcgtttccccagtaggtattgtcttcccagtgcccagatctgccctcaggaggcagatccgctgcacctctgcccgctgcacgctacattcccatttcacagagcagcagactgaggctcagaaagggtgactggtctaagctcatgtgtctgggcaaggagaggaggcagagagccaagtccccttgggcgctgagcccagtgctgggtgctggggtgatctagagatgtgcctcattcagactttggtttttcttttttttttttttgagacagagtcttgctctgtcgcccaggctggagttcagaggcgcgatctcagttcactgcaacctctgcctcccaggttcaacagactctcctgcctcagcctccggagtagctgggattacaggtgcgtgccaccacgcccggttaatttttgtattttttaaggtcgaggcgcggtttcaccatgttggccagactggtctccaacttctgacctcaagttatctgcccaccttgacctcccaaagtgttgggatcacaggcgtggccacagcgcccggccgacttacccttattttaatgcagttgatttaactgtacgattacagaatttacctgtaatttttttgttcatgtcagaagagtaatgtgccgatgtcgtaacaaggtttgagggaggcacatctcacgcatgcgcgtgaacacccaatcatcccgcttagaaactacaaaaggatctagctgtaagtttaaattatggcttcgtgtaacaataaccagctcacaaatccctgaatttttaatgacctgcacatcagtgtcccacctgtgggctgttctgtgtggtagagcccacgttgtgctggggcggggagcgggctcagaagcctgccatctaaagtctagacacttcactttatttgaattgatgaaaattccgttacgtatgagcaaaggcatatgaagaaaacaaaaaaacaaaaaacaagaaataagattaagctcccttcactctcaattttaatcagcccaggcctcccccattccagaaatttggaccgaccctgactccgccccaacctgttctagcaccgccccttcccccgccggcgccgtcgtcatgacaaccgcgtccacacgccctcttctcctaggtgtgggggaaggctggccctcagtgctcccattggccaaaagtttgtagagggcgggcctcgctcactctcattggtcagttgctcgctgtggtcccatcccacatgcttccattgcttgattcctcgaaaagggcggggactctgggcagcggttgtggagtgccgcgggtccacagtgctgcactgagcagagaggaaggggcgtcccgggatatttggaggataaaggtgtgggcaaggtatcatgtggaggcaaaggggcgagaagtgaggggcggtgagaggggagcggggcgggca

SEQ ID NO: 22564 - DNA, 2300 bp, Homo sapien
gctgtgggaggagggggctggtatcccaaactctggtttccccaggagagagtggtctggtgggcttcagatgagtcctatgggagctggggatctggattcctggttccctgaaggaggagagggatgatagcttggattccctaggtctttccaggatgcagaaagaaacaggctggggcctggattctgaggcaggaaggaatttgggtctggagttctggctacttgaggaccaaaggcaggaaggatcctgccttgattttacttcagaaaccaaatcagtcttctataatctggggtcggagggagtccctgtgcccaaggtctctctgcaccccaccatccacatgtatttttccttctatcccataatttattaaatcactgttctccccagagacagttgtcccatggatttctgggtctggaaataatattggattgggagtagggatgggttcctggtatctagggatcgaggcgaacgtccaggaggggactagagggacccacacatttgcacatgaaaaaatgtaggtttgggtggttgagtctctcagagaaggcagtgtccagacgtctgtgtccagggtctgggcagtatggacagggctcgctggagctaggtgcttggggacttgccttctgagcttttcttttactcttctctgttgttgttgttgttgttttgttctgtttttgtttttgtttttgagacatggtcttgctctgttgcccagactggagtgcagtggctcactgcagccttgacctcctgggcccaggtgatcttcccacctcagcctctagagtagctgccatcacaagtgcgcaccaccacgctggctcatttttgtagagacgggattttgctatgttgcccaggctggtctccagctcctgggctcaagcattcctcctgcttcggcctcccaaagtgctgaggttacaggtatgagccaccgcactggccgcctcctgggactggtgttaggggaacttagagggcgatgtctgggggctgatagctggggactttgatgctgaaccctgcagagtctgggtctccaatgggggtctggggtctcctaggtcctaggactgagtatcctggcatgccgttctttgggctatacagggtgtgtgtcgtgtgtgttggggcgggaggagtggagtggtctggacggccaacgactggaccagaaggcagaaaatgctaaagcaccaggataaacatctgtgggcgtcatcgaggttcccgggtggaggcgggaggaggggcggggcagggctttccgcctacccgagaccaaatacgggcacacacaatacacaccacacacgcgcgcacacgcacacgggcacacacgcgcgcacgggatcctgctccgctccgcggctcccccgccccggagagctccgcgatcagcacccgggacagcgccaccgcccacgtgcagggggtggggtccgggcggggctggcgcctcggcgtctcccgggagtgtcccgtccagccgccgagcaggtaggagctgctgggacccccgccctcagcccatccgcatccgcatccctagaggaaaggggtgtgcgagtgggggctggggcactggggagacaaccagagggagggcagcagcctgaagcggagagacagggatctggggacgcgagacaggtatggagaagacaaagagccgagggcggggagtggggcgcaggcggaggggagagggagagaccctggagacagaggccaggcgatagggaagagagacaggcgggttggggaggcagacacagggaagacgcctatgtggggtcaagaggcagcgtggagaccgaggcggtcacgagagcagcacggatgcgtggagagaccaacaggccaagaaggatgagggggctcagcacaggcaccgggcagcccccgacccgccctccagcaaaattggggagagggaagagggaacctgcgtctcagctcccaggaccaggtgcggagggagcagtcggctgtgggcgctcggaccacaggctgcccgctccccacctcgcgggacctcaggatcccagtcgggctattggggggttcccaggcaccggtgggccccggagcgagcctgccccgccgggactccgcgtctgtgcgtcagccccgcccgttgtcctggcaacaacccgttgcccgggcaaccagctttgctctcaccccgcttgagaggagcccggctgttgctctgggcaacgcggtctgctggttcccacgtctgccttcgcccgcttccggttca

SEQ ID NO: 22565 - DNA, 2300 bp, Homo sapien
ggctaatttttgcatttttagaagagacggttttgccaggttggccaggctggtctggaactcctgaccttgggtgatccaccggcctcagcctcccaaagtgctgggattacaggtgtgagcaggcatagttattgtcatcattcaaacacagatccctccaatcagccatgaccccggaccctcacactcctgccccttggtctgacccttcccttgttctgcctagtgctggcgtgggtcgcacaggaaccctcattgccctggacgtcctgctccggcagctgcagtccgagggtctccttgggcccttcagctttgtaaggaagatgagagagagtcggccgttgatggtgcagactgaggtgaggcagtccctcagcaacacaggacgggaggcagtgggacgagggaccctggggctccacgcagctcagacctggggggacgcctctcactcccgtgcctgcttcccaggctcagtacgtattcctgcatcagtgcatcctgcggttcctccaacagtcagcccaggccccagccgagaaggaagtcccgtatgaggatgtcgaaaacctcatctacgagaacgtggccgccatccaggcccacaagttggaggtctaagtgacgagggggctgggtcggcagcccaggcatcctcaagctctggacacccacttgagcccagattcctggaagagcagagggctgggctcccagactcctgggtgctgtgggaggagggggctggtatcccaaactctggtttccccaggagagagtggtctggtgggcttcagatgagtcctatgggagctggggatctggattcctggttccctgaaggaggagagggatgatagcttggattccctaggtctttccaggatgcagaaagaaacaggctggggcctggattctgaggcaggaaggaatttgggtctggagttctggctacttgaggaccaaaggcaggaaggatcctgccttgattttacttcagaaaccaaatcagtcttctataatctggggtcggagggagtccctgtgcccaaggtctctctgcaccccaccatccacatgtatttttccttctatcccataatttattaaatcactgttctccccagagacagttgtcccatggatttctgggtctggaaataatattggattgggagtagggatgggttcctggtatctagggatcgaggcgaacgtccaggaggggactagagggacccacacatttgcacatgaaaaaatgtaggtttgggtggttgagtctctcagagaaggcagtgtccagacgtctgtgtccagggtctgggcagtatggacagggctcgctggagctaggtgcttggggacttgccttctgagcttttcttttactcttctctgttgttgttgttgttgttttgttctgtttttgtttttgtttttgagacatggtcttgctctgttgcccagactggagtgcagtggctcactgcagccttgacctcctgggcccaggtgatcttcccacctcagcctctagagtagctgccatcacaagtgcgcaccaccacgctggctcatttttgtagagacgggattttgctatgttgcccaggctggtctccagctcctgggctcaagcattcctcctgcttcggcctcccaaagtgctgaggttacaggtatgagccaccgcactggccgcctcctgggactggtgttaggggaacttagagggcgatgtctgggggctgatagctggggactttgatgctgaaccctgcagagtctgggtctccaatgggggtctggggtctcctaggtcctaggactgagtatcctggcatgccgttctttgggctatacagggtgtgtgtcgtgtgtgttggggcgggaggagtggagtggtctggacggccaacgactggaccagaaggcagaaaatgctaaagcaccaggataaacatctgtgggcgtcatcgaggttcccgggtggaggcgggaggaggggcggggcagggctttccgcctacccgagaccaaatacgggcacacacaatacacaccacacacgcgcgcacacgcacacgggcacacacgcgcgcacgggatcctgctccgctccgcggctcccccgccccggagagctccgcgatcagcacccgggacagcgccaccgcccacgtgcagggggtggggtccgggcggggctggcgcctcggcgtctcccgggagtgtcccgtccagccgccgagcaggtaggagctgctgggacccccgccctcagcccatcc

SEQ ID NO: 22566 - DNA, 2300 bp, Homo sapien
ggatgcagggagagggggtacctggtgttggattttctctactttccctcgggggtacccccgagctccccttgccttcttcggcatcaccccttgtttattcgttgcaccctgagattatatggcacccacaaaaacagaatagatgtgtgtgccacctgccctgtggggcactggggaggatttagggaaccatgggacttcttcaggcaggcaagaaagcaggtgtcaggggagaaaggactcactgggtgggggcagagagagttactttaggactgacccaccattattttaagatttcagtgagtggaaagataacatggctgggaatctctgcacaatccaatgacatatgtgatgctacttttgcttaatcccgaaagccgtgaggtctggccagggggtggggggtgggggtctgggccaccggagggagactgagctcagcccctctgtcctctccccacctggtacttgtctgcaaaaccacagttgctgtccctctcattcttcctgacgtggtcagcgaagtcttcagctgggatgtcccctggggagctacgggttttgggggagcagggagaaaagaccgtaacttcttttaatcttgcacttttgagggctgggcatggtggctcacgcctgtaatcccagcactttgggaggccgaggcgggtggatcacctgaggtcaggagttcgagaccagcctggccaacatggtgaaaccccatctctactagaactacaaaaattagccgggcgtggtgttgcacgcctgtagtcccaactactcgggaggctgaggcagaagaatctcttgaacccgtgaggcagaggttgtggtgaaccgagatcgcaccactgcactccagcctgggtgaaagggcgagactccgtctcaaaaaataagaaataaaataaaataaaataaaaaataataaacatactcagacagccctacacttacacttctcatgcagaccagtttttttctccttcctgtcatcctatcaccatggcttggagtctatatccactactccagggaacacctttctccaaaatcgtcgtggcctccctgtctgtaattgcaaaggccacgtttcagcccccaccggcctgactgctcagcagcatttagcaccactgcctgtgcctgccttttctcctggatctgcactgttccggaacacccagccctggcttggcccccacctacccagctgctgcttgttcatttcctgggcaggcccctcctcctctgtccgtcttaaaaggtaactgttccccagtgtccaaccccaagccacttttcttgctggacgcacacttcttacagggtttggcccattcctgtagtttcactttctttctttttcttttccttttccgagaaagagtctcatcctgtcgcccaggttggagtgcagtggtgtgatctcagctcactgcaacctcagcctctggagctcaagtgattctcctgcctctgcctcctgcgtagctgggattacaggtgccagccaccatgcccggctaatttttgtatttttagtagaaacggggttttgccatgttgatcaggctggtctcgaactcctgacctcaagtgatcctcccgcctcggcctcccaaagtgctgggattacaggcgtgagccaccacgcctggcctcttgtctggattattacaaatctcttccacatgttagacttcttcctaaacatgttagactgtgtcactagcctattcaaaatctcccaagaactctcagctcacaataaatccaaagtcctaactttcaactacaggcctgtgcctgctgtggccccactgacgtctctctgacctcacttcccactgccctccccttcctcactctgctcagtcggagacgcacgatgttctctgaacctcacgtgtgctgttgcctcaggccctccacgcgcccatccctgtcctgggagcgcctttcccagatgcatgctcggctcctctcccacttgcgtaggcctgtactcagatgacttcctcttagtcatcttgttagcaaagctttccttgaatatcctgccgaaaatattcctgctgggtgcagcggctcacgcctgtgatgcaaacactttgggaggccgaggtggaagggctgcttggggccagaagttcaagaccagcctgggcaacctggtaagaccacccccccgacctccatctctacaaaaaattaaaaaattagccaggcattgtggtgcgtgcctgtggtcccagctactggggaggctgagatgggagggt

SEQ ID NO: 22567 - DNA, 2300 bp, Homo sapien
tgtctcaataaaaaaaaaattttttttaagatatagacgagaaacagagaaaggttaaaacagaaacccaagcaagtgattggcatgaattacatccggtgcccactgaaaggaaacttctcgcaaccaaacctttgtgtatacagatggggaaactgaggctctcagagacagagaaactgacttctcaaagtggtggtgtgagaacttatttatttatttgttaattttgagacagagtctccctctgtcaccccagctggagtgcagtggtgcaatcacagctcactgcagcctccacctcttgggctcaactgatcttccctcttcagcctcctgagtagctgggaccacaggtgtgcaccaccatgcctggctaatttacttctactttttatagagacgggatctccctatgttgcccaggctggtcttgaactcctgggctcaaggaatcctctcgtctcagcctcccaaagtgctgggattataggcgtgagtaaccatgctcagctgttttgtttgctttttttttttttttttttttctttgagaaagagtcttgctctgtcacccaggctggagtgcagtggcgctatcttgactcactgcaagctccgcctcccaggttcacaccattctcctgcctcagcctcctgagtagctgggagtacaggtgcctgccaccacagccagctaatttttgcattttagtagagatggggtttcaccatcttagccaggctggtctcgaactcctgatctcaggtgatctgcccacctcggcctcccaaattgctgggattacaggtgtgagccaccgcgcctggccattgttttgctttctgagacaggggctcactctgtcacccaggctggagtgcagtggcacaatcgcagcttactgcagccttgacttcccagtctcaggtgatcctcccacctcagcctcccggtagctgggactacaggcgtgcactaccatgcctgggtaattttttctctctttttgtttttctttgtaaagatggggttttgtatattgcccgggctggtctcaaactcctgggctcaagtgatcctcccacttcagcctcctgagtagctgggcacacaccaatatgcccggctggggtttctattcttcatttccgcactatatgtgagatgaaggcagtccacgtgtgcacatagtaagtcaacaaaaacaccttgaaaagccctgggtgtcaggccccttctgagcacaggtggcctagggatgaactaaaaataaacatgactaatatttatcaactgtttaaaatgggccaggcattgttccaagactttccacgtagtaactcatctatttctcttagcatatttacaagggtgcccattctttagagatgaggaatctgagtcactgtggatttaagtcatttgctcagggtcacagatggatatgcaaattagagagtctggggtgtggaagacagtgcacagggtcctgaccaggctagaaaggccccaggcccggcatgggtcatttccaagctgaatcctaatggagcagtgggtaggagactgttagggggaaagtaggcaggtgcatctggtgggggagacagtctaggcaaaggccaagaggcaggagcccgctgggctcattttgtgagagctgcaggggcttgtgggagacggagaggggaaaggcgtcagaggctgaatggaagagcgtgctccagggacgaggggcatgaggtctaagccccaggctgctcttgatgtgtgatcacccaccagggaggcgagggagtcagctggcctttctctcagcaccccctgctctcatcctctgccccacgtcccgcatccgtgcagcagtggggcgcggcacccggtacctggggtgcagagggagatttcgggggacaaagtggagtgggctgggggctggagaaaggatgggaggcatctccagtgtcagagctagaggcagcggtgagggaggaaggtgagggccagcggggcagggttgggagctgggttccacttcctcctcctccccttcccgccctggcctctggcttcaccaatgatctggtaaaggggaaattcttgagtgtaaagtccagcaggtggaaggactaggcctgggactcctgggtccccggcagtgtctggaggcatggctggggctggcgggggcctcggggtctgggggaacctggtgctgctggtaagtgctccccgcccagagcgggctcccaaggcagggactcccaggtctgagggagaaggagctgggtgcctgc

SEQ ID NO: 22568 - DNA, 2300 bp, Homo sapien
ccgggctggtctcaaactcctgacctcaggcgatccaatgcacctcggcctcccaaagtgctgagattacaggtgtgagccaccgcgcccggccttgccacgtactgtaaaatacccagatctcttgtgagctcactcatcaccatggggatggtactaaaccattcatgaggggtccatccccaagatcctaacacctcccaccaagtccggcctccaacactggggattccatttcaacatgagatttggtggggacacagatccaaaccatagtatcatccttcccaaacagtcaacccagggaatcacagagatcagcgccagcatcaagccttggaaaacacaggggtgggatatgggagggtgattcctaaacattatcctttgattcacatgattaatctatgcaggagcttatggatcttggaagacagaagtaagaaatggtgatactggccgggctcagtggctcacggctgtgatcccagcactttgggaggccaaggagggcggatcacgaggtcaggagatcaagaccacggtgaaaccccgtctctactaaaaatacaaaaaattagccgggcgtggtggtgggcacctgtagtcccaggtacttgggaggctgaggcaggagaatggcgtgaacccgggaggcagagcttgcagtgagcagagatggcgccattgcactccagcctcggagacagagcgagactccgtctcaaaaaaaaaaaaaaaaaaatggtgataccctcggaagtggctggtcttctcagggtaaggtctccttcagcaaatcagcacagcccctggcacctgatattcagctaatgaactggaaaaggcgttttgcctatagaagttagcctgaatgaagagtgttctttactccaacagtgacagaaggtcagtgtgattccctttagactgtctgggacctcggtcatcttatcaacccataagacatcacgctgttccccctcactcctggatagcaatttatcctcactggaatggacacttacaggtgtttattaatttctcagtgatttgttgaatgaatgaaggaatgaatgaatgaatgatgtctttaccttgagattggagttctttcagatttgctctctgcccacctcaccagcctcttctcctatctttactccagctacacagatgtccgtgcatgtttttcttagcactccaggtggattcaaacctcagggcctttgcacacactgttccctctgcctggtaaaatatttctccaccagccagggcctacttctctttctacttctggttgaccccagatacagttggccactccctcctatgtttggagccaaactaaacaaatctcttattataatactcatcacattgtctgtggctttgcctatttttcctttcttttatcagagtggaagaagcttctttgggtagagacaagtctattcatcttgggggacatcaggccaactccacaccgaaggctgatgaaacttcaggcaatatcccttcatctgaatctgatgacgtgtgtcacgttttccaggtccacactcagggatctggtctgcgttttcatgtaagctttctccactctcactttccctggactctcatccaggattagatttttttttttcttttaaatggaatctcattctgtcacccaggctggagtgcagtggcaccgtctcggctcactgcaacctctgcctcctgggttcaagcgattctcctgccttggccaccacgcctggctaatttttgtatttttagtagagacgaggttttgccatgttgactacgctgttctcgaactcctgacttcatgtgatccacccgcgtcagcctcccaaactgctgggattacaagcatgagccaccacgcctgccgcgattagatcattgatctcattgcaggtgaaccagtccagacccccatccaggttttccagcttgctcgctcctcacgctgtggctgtgtcctgtgttgccgtgtttccgctgaatccagcccttgttttcgctcttcctggccttgcgggcagccaggattgaaagatccaggaagtgacaggggcctgactcatcaacttgtaagagagctggggttctcctagatccatgctcgcactgaggtgagaaatgagaagccagggccgggagcctcctgggggttggctgccaacgccaggcaggcggggaatggtgattttcgcttgtatcgtggaggatgccacgcacagacgtgaatagaaagagcctggaccgtgtcctgaggtcagcga

SEQ ID NO: 22569 - DNA, 2300 bp, Homo sapien
tcctcttcgctgaggtgggctctgggttcatcttgtccctgagctgctccaggcctcctttgcaggacccccaggcgcagcctcatgttgtgccccagccccttgcactctgtaggctggttcttctcttagtagcctgggatgcttggggcccttgagccccagggttgggaagggctcgttggagggtgtgaaggattgggagggtgagagcatgcagaagaccctttggggctgtctcagccggcctcgagtacctcctccacagggacaggaggcgggaagaggggtgcttgtcttcctgtccagggctgtgctgtccctccacgctgagccagctgcgtcctcgggaggcccctccccgtggggcaggtggcagacacacacccagtgagccgacttcagtcgggtgggatgtgagggtgtcagcaggtgacggtgggggccacgctgacagccgcacctgcctctcacccacagtgcaaccagagacccctctacctctgtcccagcctccggggcccaccagcccccccagaccacagaaggggagaagagcccagagcccttggggcttccccaaagccagaggtgagcaccagggcagcagggcgggggggtgggggtggggctggtggggcaggaagtgacctctgcacatcccctctctcccctgacagtgcccaggccctcacgcctcctccgatacccaatggctctgccccggaagggcctgcatccccaggctcccagtgagtgtggctgcagcctcgggctgggtaggtggggctgggcctgctagaccctcacacgacatctccctctgtttccagatagctgcctggtgcggcagcggcggccaaatcttccgtcctcccgtggatctcccggggtgggggcagggcgggtcccacgatggcccccattgccctcatcaccctgacacccccacattctctcctctggacccccaggaggctggtgccagggagacaggcccaacccacccccatttgcactgagaagagaagttttggagcgttgcctcctagaataaagatacagagagtcaaatagagagaatggagagagagaaacatatattatatattatatagagagagggaggagagcgagagagagtgaggacaccgaactgggctggcggctccaaagcacagccttccctgttccgtcccagcgggagctggtgttaggggtcccaaggttgccacccacgtgcccagctgtcccacgctgcagcgcagacggccacgcccacacccggccttttagctcaggtccaccatgggggacggcccagcgtgggtgggggtgccagagggtcccgagtgggggccgtgcctttgcccagaccctgcactttcaaccaggccagtccggctctggggagcaggggcctccccggcaacagccccaggggccttgagggtctgaggtcccagccctgttgccaagtgaccttgtccccagctccctcctcccaggctggtgtgagtgtgcgtgcgtttgtgccgagcttctatttcatattgcaaatataaataaaggaaggcagtttacgattctgctggtcagaccttacgttctgggatgcggggtggggagcctgtattatccctgcaccccagaggctgggggtgctcctgacccagtctgcccccacactgtcctgccagagggagccctgtggctgcagaggccccaggctgggccaggcactggctgtgagggctcctgccaggtctaccccacctgtgggcagggccttgggcagaggatagaagccaccgacaggctcaaatccctgctcctgcccctgcttacccccagtaaccaagcccagcattgaggctgggtactggcgcccagtaggtctgagtctttcaggtagaaggtagaagtgtaggctgcgtgtgcagcgagtggcaccggtgagcggcgctgggaaaccggagcgtgtggaccgggccatgaggacagcgtcctcactggggtggcagttggcttggaggtcacctgggggctcgctcagctaacaggagagggtgcttgttccccgcattcgtggtggtccctcctggtcacccattgaagcagtgtttgtggtggagcccctgagggcttggtggggttgagcagaatgaggaaaggtttcatggagcagggagggagacggctagggcagcaagtgaaggacagactcgccttcccatccctccaggggcactcctgccagccagcccctctcccgcttcccatgatggggtggctgttgg

SEQ ID NO: 22570 - DNA, 2300 bp, Homo sapien
cagtaaaatgagagatgatgacgtccctctccaatcaggctgtgatgacattttagtgcaaatgttacattgttttttttttttctcttaatactggccggccccagagtcgctgtgatgaaatgggttcatgccatgtagatttgacagcctgaacactaagtcatcatctgcaactgagtttttgactcatgacttttgatttcggaattaggctgttttcactttttattgacatgtaacatgcgtatagacaagtgtacatacagatcctgagtgtgtggccaatggatatccttcctcagtgcccagacccaggagcaggaccttcccagtacccacatcccctctgttagccagtatcctcccttctgagggtaaagttgtcctggcttctaaccctgtagatgagttttgtctctgttttcacttgatatagcatacagcatctccttttatgtctgacctctgttgctcaacactctgcttgtgagctccttccctgttgtgtgtttgggtgcccctggctctcgtgcagtggggcagtgccatgcatgatgagctgcagctgaattgcttgttctgcagttgacaggcctttgggcaggttcctgttgctcgctgctgtgagtgcagccgctgtgagtgcggccgctgtgaatacccttgcacgtgttgttggtgcacaagtgtgtcactgccaaatccagcatcttgacttagccctctcttttcttctaagagttttatagcattatttctatggttttccattcattttgagctaaattttgtatatgatgtgaggtggtccaccttcatccctttacatatagataaccagttttccctgcaccagttgttgaagacactgtcctttctccactgaatcatcttggcacctgtgtaaaaaggaaatatttgaccatatgtatgagtttgtttcttccctctctgttctgttctatcagtctgtgtgttgtttttatccagtaccacactggcctggttgctgttgctttatagtaagttttgaaaatgggaggtttgttgggcacggtggctcacacctgtaatcccagcactttgggaggccaaggtggatggatcacctgaggtcaggagtttgagaccagcctggccaacatggtgaaaccccatctctactaaaaatacaaaaattagccggctgtggtgggtgcctgtaatcccagctactcaggaggctgaggcaggaatatcgcttgaacctggcaggcagaggttgcagtgagctgagatcgcaccattcattgcactccagtctgggtgacaagaacgaaactccatctcacagaaaaaagaaaatgggaggttttagttttccaaccttgttcttctttttaaagattgttttgccctatttgggatttcttgagattccatatgaattttaggatcagcttgtcaatttcaaccaagaagccaccttgcgtcttctaatacgtgaacatggatgtctttttatataggtcttaaaatttctttcaacaatgtttcgtaggttttagagtatgaggctttgtatttcttttaagtttattcctgttttcttctttctgttactattgtaaatggaattttcttgaaattgttttcagattgttacaagtatatgaaaatacaataggtttttgtatgttgatctttcatcctgcaaccttgctgaactaatgtatgagttctgatagttttagtggactccttaggattttctatgtacagaatcatgtcatgtgaatagagttcattttccttcctttcaaatctggatgattttaatttccttttcttgcctggttgccctggctagcctccgggacaatgttgaacagaagtggcaagaacaggcatccttgttttgttcctgatcttagggggaagcattcagcgttttgccatgtaagcatgctgttagttgtggggttttgtagatgccttatgttaggttgaggggcttcctttatactccttagtcgttgagtattttagtttacttttaactatatacagatatattactttccagttaaagtagtcagttactctgttaagacaaaaatattgggtcagcattttagacatagtatatagtcccatactgcatctttgggtcagcgatggaccacatatgacagtggtcccgtgagattataatcctctatttttgctgtatttttcctatgtttagatacacaaacatttaccattgttagaattgcctgtagtattcagtactgtaacatgctgtataggtcggt

SEQ ID NO: 22571 - DNA, 2300 bp, Homo sapien
tgcttctggagtcagaaaaaagtggctgggcggagtggatcacacctgtgatcccagtactttgggaggccgaggcaggcagatcacctgaggtcaggagttcgagactagcctggccaacatggcgaaaccccatctctactaaaaaatacaaaaattagccaggcgtggtggcaggtgcgtgtagtcccagctacttgggaggctgagttaggacaatcgcttgaacctgggaggcggaggttgcagtgagccgagattgtcccactgcactccagcctgggcaacagagcgagactctgtcttgctccccacgatgagctcatttacggccagggagactgaggccccaggacatagctggttagtgtgtgggagctggatggctgcccatggctgccccggggtccctgtacagcacagcgtaagggacaccacgatgagggatagtcagctgttcctggcttagtccacagctggacagaggtcctctcagatgcagacgtgatatcctgtgttggctgcttctgtgcccagcatggagacttgcagagcgttggtctttgtgggtcagtggcctgtgccgagacccctggagaagatgctcaagtgaaaactgggctggacacagtggctcacatcttaatcccagcacttagggaggccgaggcaggaggatcgcttgagttcaggaatttcagcccagcctgggcaacattgtgagaccatctctgcttttttaattaaaaaaaaaaagaagaaaaccccaccctggcaggagaatgaagggactgactggtagatggcattggggtcaccagctgcccctttcgggatgaaactgttagcttttcctctaccaagaaaattccagaggggttaagaagttaagtgaacaaaactaaacccagaaagatttccggaatggaaagtggatgactggtttgatcatctcaaggctgaagatgctgccccgcatagctcctgtagcagaagccaggtcagctgaggctgccagtgccacggggacatgggctgccctgccctagacccactgtgtgcccagcgtggtctctgctccgctgcttctcagtgtctaggagggactaaggacacttgccttggaaggtggttgtgagaatgaagtgcgtgagtaatgtctgtcacatacttagtgtcctttaagaattaactgtcctttatccattgatctttgtggcagaatttttcatgaatttgagacaaatgatcccttgaactgtccgtaacacgtgggacagaatgtggaccctgatcattagaccctcgtggtgagggaggtggggccctggcaggcacagtttaagttttgacgtgattctttttcccataatttagaatttcagccgcggaccgtagacatcttgaggttaggggatgtgctttattgggctgtagtctcacattctgcttgtgcctggctggtgtgagtgtcagcctcctacagatgccccaaggatggggacaagggcatggatctgaatccctctctggcacctgtccttggaagagcctgaggagagtcgcttaacatttccgagccccattttctcacttctagagccaagggaaacagcctacctcaatgagtggttttaaggatttaaagtgatcatatgtgagatgttgatattcatgtatgcgttgccccttaggaccagtggttcgggttgtgtgtgaatttgcagataccaaatctgcaagtaatgagggtcagctctgtgttgagtgaagaaagaaatgtggcctgtcctgtgctgcccccacccccaggtggaccttctcaccatgccttgccttctctcctagcgcaccttttgacaagacagccaacatcaccttctccctcaatgctgacgatgagaacgtgagtactgccctgtcccctggttgtggcgggtggaggggtgtggggctgtgggcagtgtggcccatcctcccacccctgtgccctgcagcccaacgccaacctacttgagatatgctacaaggaccgcatccagcagtttgatgatgatgaggaagaggaggacgaggaagaggcccagggctcaggggagtctgatggagaagatggcgcctggcagggcagccagctggccaggggggcccgtctgggccagccacctggtgtccggtgagtccccctccagtttcccttctccaagcttccaccacacggcagggccaaggggtccccccaacacatttggactgaggctgaagtgaatgaagaaaataaggaacctgcattggtgtgt

SEQ ID NO: 22572 - DNA, 2300 bp, Homo sapien
atgactgtcgttggtcacggaactcttccctctgctccaccctcaactgtcattggccaggtgtagggacccatatagtgttatatcaagattgttgccaatctagagttaccgaggcagacgggcagactgggagcaaggtctggactgcaaccttctgtgctgagcccagccttagggtggtcagggtggatgagcaaggagatcctggccccaggctggcctggcttcaagctagccaggaaggagaggaaaggaggcccaagaggcgttcgacctgcctgaggccatgtgtgggactctgtcctgcgttttgtcagcccaggctgctctcctaagctccgatgaagtctcttccctgggcctggtgctccacgtctccctgtctcttccctggggcctggggctgagtcaggcctgggggctggtgggcactgaggtgacaggtcagcagggctcgaggagatggtggaggcctgtgcagagggaatgactgaactggaagaagctgcagaagggcattggaggagagggactagcatctgtgcctgggagtgatggtggtgagggcctgcgggagaggcacccttggcctcttgtgccggctctgctctgttctcagcatcctctgtagtgacttgggggtagcagtggcctctgccttagctggtgatgcggttgtcaggaggcaggtaatgagcgtgagctctggtcagtgtcttaactggtgagagctccgtgaaggctgtctgctgggaccagatggccttcgagattccaggatgccgcctgacttaccgggctttggttgccccttgtcctgtgtggcggagtgatgacagctttcttgggggctgctggtgagcttggacatcatgtgcacagcacacatgcagagccaggaccattgtcatcaagtgcccagagcacaggtcacaggtcaggtctgtagtggaaggtctgtgtggaggctttctagggctctgcggagcagtgatgtagtacagggcaggggctcagaatggagttgcctggcatcttgttaatactctgtgtgtgtttccttattgccagtgagttcccatgcacgagcgtttaggggctggaaccaggctgaggaaccaggcactgtcctccagagggcgggagccagctccagatggggacagggtcagggccgggtgttgccagctttgttcttcccccacagaatctgtctatcccaccctgggttccttcaggtcctggtcagtgactattctgggagcccctcccttccaacttttcctcttccttgttccagcccaggtgctgggtgagaggatggttggggtgtgtttgtgtgtgagtggtgtccaggcaacggccacagcctggagatgcacagacttcctctcttccccctgccgccgccccatgcctcccacgtagccttgggggatttgctgggccaagcagcagccgtgtgctggaagtcatcgggcatctgagtttgttgagcaaatacaggttgaagcaaatttgaagccagaggttaaggccctgcctctgcagtgtctctcccaaaagtagggatagtggacccagaccctcatggggagacagggcccgaggcccctcagtgcacagggtccagcctcttctcgcaggccctgcacatggtccacacctggggacttcaccaggcctgaggcctcaggtgtgaaatgaccccctggacctcaggcgaggcggccgggaggctggagatgggggaagaggggcaggctcgagggcaactgcaggagcctggtgctcactgggagccttaagcctgagtgatggaggcagtgagcctgcgggcagtcccggggcggggccgggctcagcatgaggcagagggctgggacttggggagaggctgtgcccaaggtgggcactcagcccctgtggtcagtgcctcgtccagtggggactccctggggcgtctgacgcggcgctggttgtgtctatgcctgcagggcgccatgttttggaagtttgacctgcacacaagctcgcacctggacacgctgctggagcgggaggacctgagcctgcccgagctgctggacgaggaagacgtgctgcaggagtgcaaggtcgtcaaccgcaagctgctggacttcctgctgcagccaccccacctgcaagcaatggtggcctgggtcacccaggagccgccagatagcggtgaggagcggctgcgctacaagtgagttccccagctcctggccagcccgtccctatcagcatcacacataccttcactacgcaagcct

SEQ ID NO: 22573 - DNA, 2300 bp, Homo sapien
tgttctggtggatctgggatttttgagtctatttggattggtttttatcactcctcttcctaaatccaggataaattgagaggtagctgcaggatctgagatcctgtctcaagaaaaaagttccagttgtagtcccagctactcgggaggctgaggcgagaggattgcttgagcccaggagttcgaggctgcagtgatctgtgatcgtgccatgcactccagcctggtcgacagagccagaccctgtctcttaaaaaaaagtttcaattctaatgcaaacacaatgtatatctgtgagttctgctgggtggaaatccagacttcagtcattaaagcccccacagcttcccagcttccatttgaagggtagggactatagccacatccttatccctcagttcctgacctctgtgttaaaacagtgtggcaatgatgccatcatattgtggagaaaacaaggaagccaaatgctgggtaaaagacaaaacatctctatagaaaaaagagaaaaggaaatgcctctctgtgatggttcatttcaggtgttgactgggctaagggatgtccagatagctggtaaaacattatgggtgtgtctatgagggtatttctggaagagactagcatttgaatcggtagactgaataaagatcttccctccccagtgtgagctggcattatccaatccattgagggtctcaatagaacaaagagggcaaaggaggggtgaatttgctctttttttttttttttttttttctcgagacggagtctcgctctgtcacccaggctggagtgcagtggcctgatctgggctcactgcaacatccacctcccgggttcaagtaattctcctgcctcagcctcctgagtagctgggattacaggcgcacaccgccacgtccggctattttttgtattttagtagacacgtggtttcactgtgttgcccaggctggtctcaaactcctgagctcaggcaatccgcccacctcggcctcccaaagtgctgggattataggcgtggggtcttgaactcctgagctcaagtacaggcaggcgtgagccaccacgctgggccctttgtttttgagacaggttctcgctctgtctcctaggatggagtgcagtggtgcaatccggctcactgcagcctcggctcaagcgattctcctgccttagcctcccgaatagctgagaccacaggcgcgggccaccaggcccaactaattttttaaattttcttttgtagagacgggggtctccctaggttgcccaggctggtctccaactcctggtctcatgccatcctccggcctcgggcctcctaaagtgttgtgattacaagcgtaagccaccgcgcccggccaattcggagtcttaaaacaaaaacaaaaacaaaaaagttcctcgcgcccacacgatttttacagtaggcctctaacatgggtagagaggggagctattaaagttggggaaaccgaggctcaaagccagagggaccttcatcaatctagacacaaggtctaggaggtctctttcagttgatgctattagaagctgctttgggcggaactggcaacaccagcgacccggccgggactatcgccagcagacggaaacgactgagggcctctgaggctcggaggcggctaagcgcgagagccggacggaacgaaggcgcctggctttggctggagcgaaaaccaggtctggatttcgcaagagcccgaccctggagccaaagctccactatgattagaggagacagaacagcgaacggatttccaaacggagcgagtgggaagggaaatcctggagcggaatattcacggggccttggaacggagccggtgcgcagctgcggctcactgagctgtctgggtttattccggggcagaccgttggcaccaacgggcgcaagcgcgtctgcggcggcggggttcaagagtgggcggtgtcgggagcgcccgggcgcacgcgcactgcaccgcccaggcgtgcaccccgccccccgcacctgcgcaccaacacagccgcgggagggcggggcctcctgcgtcgtcctgcgctagggggattgtgggatagtggcggagggagccgggcgtcggaggccctgaggccggccgcagagcccggagattgagcggctttggggaaggggtggttaaggaagtaggcctcggcttccgtcggtcgctgctcggctctgcggcccgtttggaccgcggaggaggtcgccttcccctcccgtggggcgctcggttggactgtggaaaccggggcaacttcccccg

SEQ ID NO: 22574 - DNA, 2300 bp, Homo sapien
ggatggtggtgatggtgatggtggtgaggatgagaatggtgatgatgatgattgtgatggtggtgaagatagtggtgatggtggtgatgatgatgttggtgatggtggttgtgatgatgttggtgatggtgcttgtgatgacagtggtggtggtggtgactgcaagctcaggacctttccccctctcccaggtctggtccgagagcaggaggctgggctgctgcagttcctccgcctggacggcttctctgtgttgatgagggccatgcagcagcaggtgcagaagctcaaggtcaaatcagcattcctgctgcagaacctgctggtgggccaccctgaacacaaaggtgtggcagcccttgagtgagggcaggagtggggagcagacgccctggggtgggtgcaggtgtgggagaaggggaggaacaggcatcccggggagggcataggagatgggtggggctgcccctctgacccctgcagccctccccccagggaccctgtgctccatggggatggtccagcagctggtggccctggtgcggacagagcacagccccttccacgagcacgtgcttggagccctgtgcaggtactttggctccttgagaggacggggcctggggtgggggccccgtcctctcaaggtgggggtggctcaggaatcagcccgtagggactcaggagttgggaccttcccgtagagaggaagggtgtggggccagaaaggagcaggagtcagggagcctcagtttcctcaccagtagggctggcacagaggccttgcaggagggagagaggcttctgtacacgcccccaccagtggattagtgtctaatcagatgatgctggagctctcaacagcacaccagagttgacacgcaccaggccctgtgctgagcccctcagcacccaccctgggccaggggcagcgtgaggtccattccgcagatggggaaatggaggcccattgtggggcagcgacttgccaggctcctgagtgagccaggggacggggcgggcgatagggttgggtcagtgaggcctctagagggaggtcctaagggccgctgtcatgtccctcacagcctggtgacagactttccgcagggtgtgcgcgagtgtcgggagccggaactgggcctggaggagctcctccgccaccgctgtcagctgctgcagcagcatgaggagtaccaggtacatggggaggggacggggtgcaaggaggaccaggtgcaagggggaggggacaagggctccaggaggactaggtgtgtggggaggggatggggttcgaggaggatcaggtgccagggggaggggacaggggctccaggaggaccaggtacacggggaggtgacggggtgcaaggaggactaggtgtgaggggcaggggatggggttcgaggaggatcgtgtgccgggggaggggacagcggctccagaaggaccaggtgagttggggaagggacagggtgtgaggaggaccaggtgtgagggggaggggcctggggggtgaggaattccccaggttagaccaagtgtggtagtggggaccctagtaggggcagagccagccagtccttgcccttgggggctcctgggtccgctggttcaggctttcattcgtgttctcgtgcatttcacttatcttccattcagcagatgtttatttcatgcctagcattcgtcccgtgctgtgtcagagtaggagagacagcaaggagacaggagcttggagattcttaaagtgttgcccaatcattgaattattatctaaattacccaatacagttgttttacattaagtaaatgtaaattgaatataatatcactcaaatgtcttaatgatttaactatttcattaaattgacaagaaataacaaatggcaaaaaataaccaattattttgggtaaataacaagtgataaataacaagtcatcagatatttaattagataaggggcaaataaataactcattagataactagataagtaacaaatgctaaatcacaactaattaaaattcaaatagttaactgattaagtaatgcattaatttgttgaagtgaatgaatcaatgctggtgcttcagcaaagccgagcttagcaaacgcacccacctccttgggacgttatattctattagattcattcctgtgtagacactgtcaagtgtctgtatgtattgaaagtgtactacatggccaggcatggtggctcacgcctgtaatcccagcactttgggaggccgaggcaggcaaatcatgaggtcaggagttcgagaccagcct

SEQ ID NO: 22575 - DNA, 2300 bp, Homo sapien
tttgtagggctggggacacactatgttgcccaggctggtctcgagctcttgggttcaagtgatcctcccaccttggcctcccaaagtactgagattatagacctgagccactgcccccggccatgtattataaactgatagacttgtacatagatgtccgtgtcctaattcccaggatctgtgcataagttaccttgcatggctgaagggactttgcccatgtgactgagatagggagattatcccagttatttgggtgagctcgatggaatcacaagagtatttgtgagaaggaggcaggaggagcagtcagtgatggagatgggaaggtggaagcagaacttggggtgatggggccacctgtcaaagaaagagtgtggcctctagaagctggaaaaggcaagaaaaacattctccccgagagcctccagaagtgatgcaatcctgctgacagtttgatttcagccccgtgaaacccattttggatttctgccctccataactgcaagataataaatgtgtgctgttttaagccaccacattcttagtaatttgttaacagcagcaataggaaactaatataatagcacatccacaggcccagatgcatctcacagcacagtgctagaaacaccacacacacacacacacacacacacacacacacatacacacacaacctatctgtttggtcttcctgtttctgcccaaaatatccccctgcacaaccacgcccagcaggtgattgatacgtttgtgactgtgtgcccgttttgcgttgagcacaaccttttcctggaggaaaacgcctcctatccaggatcaacacgggagtttctttaagcccagcccagggccaacacctctgcagatcggcccgcaccagcacgtgcccaggcctaaaccccacttctggagcacagaggcctcgggcctccccaccaagctggctcctctggcgctctgaatcttgctgggctctggggcactttgctttccggctctaggcctcaagaatcctctcctctccacctggcaggacatggggaagagtccatgagggagaggctgggtgatgagagggatccacgccgcagctccacttgacagatggagaaactgaggccgagagaggggttgcggggggcataaggctcacaggccagccattacggttgcgaccccagggctcctgtagatggggttggtggccccggtggaggcgaaagtcagattagttggggcgaggtcccaaaccttctaaggatgactgacagcaatgagtgggaggggcctgtaaaggggccggggcccaactgggagagtctgaaaggcctagagcaggggcgggaatcgtagggtgggcggggtcagacctgggggcggggcacacgttagaagaggggtggagcttgcaaaagtatcgggggcgggactcgctgaggtgcgaaaactgggccaggggcagggctttgaccagctacttgagcgtgaaggggcggcgcccgcacgaaggggcgtcccagcttggaggcggggcccggatgggaggggcggggccgagtgcagtatcccgccaggtgagaaggggataagagtcgggcaagcagcttcagccgcaaccacggcacgaagttgggtgggtacgcctggcacttccgggtgaaaccgtgcgtatttccggttaagatggcggcgcccagcagagtcaggtgcggacgactttgtctgtaggagcagcggcggcttgaggacccggggaggtgagatccgccttattccggcgcccctcttcggagaggagggagaagacttgttgctaaggagaccaaagggcgggcttgttgctacggaggcggagcagtgaggttgctaagagacgggacgcacgcagtggagatggggaaggggggttgttgccagggagagtgggtggggcctgttgctagggagaaaggagaggcttatgactttggggaagggtcctgtgggtatgaaggaaggaaaaggggctgtggttaagtgggctgggggcagagtggtttggggtcatggggggtcgccgagctcccctgaaacgccgccttctcagcagaccctcaagaatcgacccatcaggacgccagagctgcttcagcggtgaccaccttctccctctaacacattcttcccttcttcacaaacggcccatgtcagacgaaggctcaagggggagccgcctgcccctggcgctgcccccggcctcccagggttgctcttcagggggcggcggcggcggctcctcggctgggggctcgggc

SEQ ID NO: 22576 - DNA, 2300 bp, Homo sapien
tccttagcaacaagtcttctccctcctctccgaagaggggcgccggaataaggcggatctcacctccccgggtcctcaagccgccgctgctcctacagacaaagtcgtccgcacctgactctgctgggcgccgccatcttaaccggaaatacgcacggtttcacccggaagtgccaggcgtacccacccaacttcgtgccgtggttgcggctgaagctgcttgcccgactcttatccccttctcacctggcgggatactgcactcggccccgcccctcccatccgggccccgcctccaagctgggacgccccttcgtgcgggcgccgccccttcacgctcaagtagctggtcaaagccctgcccctggcccagttttcgcacctcagcgagtcccgcccccgatacttttgcaagctccacccctcttctaacgtgtgccccgcccccaggtctgaccccgcccaccctacgattcccgcccctgctctaggcctttcagactctcccagttgggccccggcccctttacaggcccctcccactcattgctgtcagtcatccttagaaggtttgggacctcgccccaactaatctgactttcgcctccaccggggccaccaaccccatctacaggagccctggggtcgcaaccgtaatggctggcctgtgagccttatgccccccgcaacccctctctcggcctcagtttctccatctgtcaagtggagctgcggcgtggatccctctcatcacccagcctctccctcatggactcttccccatgtcctgccaggtggagaggagaggattcttgaggcctagagccggaaagcaaagtgccccagagcccagcaagattcagagcgccagaggagccagcttggtggggaggcccgaggcctctgtgctccagaagtggggtttaggcctgggcacgtgctggtgcgggccgatctgcagaggtgttggccctgggctgggcttaaagaaactcccgtgttgatcctggataggaggcgttttcctccaggaaaaggttgtgctcaacgcaaaacgggcacacagtcacaaacgtatcaatcacctgctgggcgtggttgtgcagggggatattttgggcagaaacaggaagaccaaacagataggttgtgtgtgtatgtgtgtgtgtgtgtgtgtgtgtgtgtgtgtgtggtgtttctagcactgtgctgtgagatgcatctgggcctgtggatgtgctattatattagtttcctattgctgctgttaacaaattactaagaatgtggtggcttaaaacagcacacatttattatcttgcagttatggagggcagaaatccaaaatgggtttcacggggctgaaatcaaactgtcagcaggattgcatcacttctggaggctctcggggagaatgtttttcttgccttttccagcttctagaggccacactctttctttgacaggtggccccatcaccccaagttctgcttccaccttcccatctccatcactgactgctcctcctgcctccttctcacaaatactcttgtgattccatcgagctcacccaaataactgggataatctccctatctcagtcacatgggcaaagtcccttcagccatgcaaggtaacttatgcacagatcctgggaattaggacacggacatctatgtacaagtctatcagtttataatacatggccgggggcagtggctcaggtctataatctcagtactttgggaggccaaggtgggaggatcacttgaacccaagagctcgagaccagcctgggcaacatagtgtgtccccagccctacaaaaaaatacaagaattagccatgtgtgatggcatctgcttatatcacagctaggcaggaggctgaggcaggaggatcacttgagcccaggaggtcgaggctgcagggaactatgactgccctactgcaccccagcctaggcaacagggggaagaccctgtctcaaaaaacaaaacaaaacaaaaaaaagagggtgatcatataatttttcatctatagcaagacatttgagagcaaaaagggactcaatagttacagaaccaggccaggtgtggtagctcacgcctgtaatcccagcactttgggaagctgaggtgggcaaatcacaaggtcaggagtttgagaccagcctgaccaacatggtgaaaccccatctctactaaaaatacaaaaattagccaggcatggtggcgggtgcctataatcccagctactcgggaggctgaggcaggagaatcgcttgaacccaggatgtgg

SEQ ID NO: 22577 - DNA, 2300 bp, Homo sapien
cagggtacaattttaggcgtccggctttttttgtatttttagtagagatggagtttcaccctgttagccaggctggttctgtagcctttttttttttttttttttttttttttttttttttttgagacggaatcttgctctgtctcccaggctggagtgcagtggcacaatctcagctcactacaacctccacatcctgggttcaagcgattctcctgcctcagcctcccgagtagctgggattataggcacccgccaccatgcctggctaatttttgtatttttagtagagatggggtttcaccatgttggtcaggctggtctcaaactcctgaccttgtgatttgcccacctcagcttcccaaagtgctgggattacaggcgtgagctaccacacctggcctggttctgtaactattgagtccctttttgctctcaaatgtcttgctatagatgaaaaattatatgatcaccctcttttttttgttttgttttgttttttgagacagggtcttccccctgttgcctaggctggggtgcagtagggcagtcatagttccctgcagcctcgacctcctgggctcaagtgatcctcctgcctcagcctcctgcctagctgtgatataagcagatgccatcacacatggctaattcttgtatttttttgtagggctggggacacactatgttgcccaggctggtctcgagctcttgggttcaagtgatcctcccaccttggcctcccaaagtactgagattatagacctgagccactgcccccggccatgtattataaactgatagacttgtacatagatgtccgtgtcctaattcccaggatctgtgcataagttaccttgcatggctgaagggactttgcccatgtgactgagatagggagattatcccagttatttgggtgagctcgatggaatcacaagagtatttgtgagaaggaggcaggaggagcagtcagtgatggagatgggaaggtggaagcagaacttggggtgatggggccacctgtcaaagaaagagtgtggcctctagaagctggaaaaggcaagaaaaacattctccccgagagcctccagaagtgatgcaatcctgctgacagtttgatttcagccccgtgaaacccattttggatttctgccctccataactgcaagataataaatgtgtgctgttttaagccaccacattcttagtaatttgttaacagcagcaataggaaactaatataatagcacatccacaggcccagatgcatctcacagcacagtgctagaaacaccacacacacacacacacacacacacacacacacatacacacacaacctatctgtttggtcttcctgtttctgcccaaaatatccccctgcacaaccacgcccagcaggtgattgatacgtttgtgactgtgtgcccgttttgcgttgagcacaaccttttcctggaggaaaacgcctcctatccaggatcaacacgggagtttctttaagcccagcccagggccaacacctctgcagatcggcccgcaccagcacgtgcccaggcctaaaccccacttctggagcacagaggcctcgggcctccccaccaagctggctcctctggcgctctgaatcttgctgggctctggggcactttgctttccggctctaggcctcaagaatcctctcctctccacctggcaggacatggggaagagtccatgagggagaggctgggtgatgagagggatccacgccgcagctccacttgacagatggagaaactgaggccgagagaggggttgcggggggcataaggctcacaggccagccattacggttgcgaccccagggctcctgtagatggggttggtggccccggtggaggcgaaagtcagattagttggggcgaggtcccaaaccttctaaggatgactgacagcaatgagtgggaggggcctgtaaaggggccggggcccaactgggagagtctgaaaggcctagagcaggggcgggaatcgtagggtgggcggggtcagacctgggggcggggcacacgttagaagaggggtggagcttgcaaaagtatcgggggcgggactcgctgaggtgcgaaaactgggccaggggcagggctttgaccagctacttgagcgtgaaggggcggcgcccgcacgaaggggcgtcccagcttggaggcggggcccggatgggaggggcggggccgagtgcagtatcccgccaggtgagaaggggataagagtcgggcaagcagcttcagccgcaaccacggcacgaagtt

SEQ ID NO: 22578 - DNA, 2300 bp, Homo sapien
gtggtagctcacgcctgtaatcccagcactttgggaagctgaggtgggcaaatcacaaggtcaggagtttgagaccagcctgaccaacatggtgaaaccccatctctactaaaaatacaaaaattagccaggcatggtggcgggtgcctataatcccagctactcgggaggctgaggcaggagaatcgcttgaacccaggatgtggaggttgtagtgagctgagattgtgccactgcactccagcctgggagacagagcaagattccgtctcaaaaaaaaaaaaaaaaaaaaaaaaaaaaaaaaaaaaaggctacagaaccagcctggctaacagggtgaaactccatctctactaaaaatacaaaaaaagccggacgcctaaaattgtaccctgctcaacaggcccctcttaacccccttccctgctgtagtcacctcctcagcacggacatgattatctaacacaccatacattttgcctattgaccttgctgatcatctgtttcatccaccagcatggaagctccacaggacaggcctttttgctgatttaggtcactgccacgttcttaccaacaggaacagtgcctggctgagatttggcactcattaaagatgtgtggactcaaggtgttgaatgggggactgggaaatctcacaggagccaataggctcctgtgtgcactttattttattttatttttgttagagacagggcctcactctgttgctcaggctggagtgcagtggtgcaaacgtagctcactgcagcctagaactcactgactcaagcctcagcctcccaagtagctgggactacaggcacatgccaccatgcccggctaatttttaaaaaaatttttgtagggatggggtctcactgtgttgcccaggctgatcttcccacctctgtctcccaaagtattgggattacaggcatgagccaccttgcccagccctgggtgtgctttacaggggacttgagaattaaatgggtgtctaacacttgcgggtacatgacatagagggatctatggtttatgcggaaagctaatgggggcaggcgggttactcacaggcagagcacatgcttgtggacctgctacagtggggatgtatgggctgtactggggtccacatgaagatataaaggaccctatgacgagcacagagaatatatgggggtctaaaaacataacacagggaaactgagggggttctggaagcttctctgtaaagagaatccaaaatcactctgggctgtgggtagatatggggccttgacattggtggggacacagacttacccttaccctgaatgggtggccttagggggctggggaaacagacatgaattttgggtcagcaactccaagaattctttcccctctctgtctctgtctccctccatatgtccccacctctccccagcacgtgtccctccacctgtgtgtacccccggccctctctacagctccatctgcgccccctctcccccacctctctggttggtcttcctctctctgtctctctgaatctctgactctctccatccctctgtcggcttccagcagctttctctccctctccctgtctgttttcccggcttgccattccttccttctcttctgtccctgtccatctctgcccttcctccctctctgcctcagcctgtctctggtggtctccatccctctggcgtctctgcctgtctcccgtctctgtgtcagccagcatctctctttgtgtatctccatctctgccccatctgttgggtcctctctctctctctccatccttccctccatcctctctcctgcatcctcccacctcctctccatccctccagctggaggcccgccccctgccccccctcgctccccctcccccctccgaaagggttaactttggggaagggcccggagtccccggatggtgatgtcagcgtgccggagagaaaggacgaggtggcggggggaggcggagaggaggaggaggcggaggagagagggcgcgtgggggggcgggggggacctcggcctgcagcatccgccggcccgcacctcagacccccccggcggggggaggcgcaggaagcggggggccggccagaaacgggctggggagggggggccccgcagcccccctgggccatgctgactcccggggcctgacccccccgggccagccccccctcccccagctccgcggcccgccgactggggggggccagcccagccccctggggacccccggagaggtggggggcagccgggggggccgggacggagcggtcgcc

SEQ ID NO: 22579 - DNA, 2300 bp, Homo sapien
gggtcaccttggctcccctccaacccttgccctggtgattggaagcattccctcccgtcccgtatgatacgttcgcttgtttgtttcctgtcccctctggaatgcaacttctctgctcattccaccacctttgctgatgacttgagtgtcgagtgtgtgtcaggcagcgtcccaggccaactccaggagggcagggatgtgattttgtcccctgcttcatggctggtggctacgtcagaatgcaggatgtggtggggtctatggtcagtgcgtcacagcagccagcctgtaacagtcctgactgtgggcccagcactgtcatgtactaggtcagttcattctgatgcagtccgtgaggtgggtgctgtgacgacccattgccattttcagagcagtgacttgcctgaggtcatgcaggtataagccccagagcaaggattcaaagcaaggcaggggaccaggtgcggtggctcacacctgtaatcccagcactttgggaggctgaggcgggcagatcacctgaggtcaggacttcaagaccagcctggccaacgtggtgaaaccccatctctgctaaaaatacaaaaattaggctgggtgtggtggctcacgcctgtaatcccagcactttgggaggctgaggcaggtggatcacttgaggttgggcatttgagaccagcctggccaacatggtgaaaccccgtctctattaaaaataaaaaaattagccgggcatagtggcatatgcctgtaatcccagctactcgggaggttgaggcaggaggatcgcttgaacctgggagaggcagaggttgcagtcagccaagaacacctcattgcacatcagcctgggcgacaagagcgaaactccatctcaaaaaagaaagaaagaaagaaaagaaaaggtgtcagcagggccctgcttcctctggaggctctagggaaggatccttccttgcctctcctagcttctggtgtccttggcgttccttcagttgcagctgtatcactcccatctctgcctccgtcatcacatgactgttctctgtgcctgcgtcctcgtctcctcttataaggacaccagtcattgatttagggctcagcctcattcaggtctctgctcccattgcacctcctgggagaagcctcactcagtcgctcgtcattgtatagctatttgtttggagctgtgcaagggcagaggcctgttttgttcactgctggatccctgacctgtaacggatgctcaccttttgttgaatgagtgaatgagagacaaccgtttcgaaactgctgtggggggaaagctgtctaaaaggaacagcctccacgctgcaattctagcttcgtaagcggggctccaagctgctccttgccaagtgcctgctgtgccacggacgagctaggggcctttggcaaattgctgagcctctctgtgcctcagtttccaaccccttaaggtggagatcaccgtagttccccacctccagtgcttgtggtgagggtgaaatgtgctaatgaggggtcctggttatctcttgcccagggggctctgccctttgatgacgacaacctccgccagctgctggagaaggtgaaacggggcgtcttccacatgccccacttcattcctccagattgccagagcctcctgaggggaatgatcgaagtggagcccgaaaaaaggctcagtgtgagttgagggggggaccggcggaggggggaacagtggccgatgaagacagaaccccctagaaaagtcatggggatgggtttccagaacctgctcgtcagtccccagggtgactgggatcgccagctgagccgcagcccaaggtccagcacagctgccgctccaaactggggagggggctacgcaagattggggcggggagctccaggcagcgggagggcgcaggagtaaggaggcgaacaggatgccactgcgcatgcggcaaagtaatgcggccggtccggggtacacggagaccgcgcgtgcgcggggcgatgcactcagtcgccactagagggcgatgtaatatgtcatcctgcccccggtggggtgggcggggagatgatcagggaccccaaaaccaccccagtctttcattgcgcgcctacatgtgcctacgacctcacttctgcttctctacgactcaccaccctcacagctggagcaaattcagaaacatccttggtacctgtgagtatggggtaactggactcttgggtccctggcggaaataggggaggggccaaagcagtagaagcggctgggaggggtgggatgccagggttcc

SEQ ID NO: 22580 - DNA, 2300 bp, Homo sapien
gtcccaggccaactccaggagggcagggatgtgattttgtcccctgcttcatggctggtggctacgtcagaatgcaggatgtggtggggtctatggtcagtgcgtcacagcagccagcctgtaacagtcctgactgtgggcccagcactgtcatgtactaggtcagttcattctgatgcagtccgtgaggtgggtgctgtgacgacccattgccattttcagagcagtgacttgcctgaggtcatgcaggtataagccccagagcaaggattcaaagcaaggcaggggaccaggtgcggtggctcacacctgtaatcccagcactttgggaggctgaggcgggcagatcacctgaggtcaggacttcaagaccagcctggccaacgtggtgaaaccccatctctgctaaaaatacaaaaattaggctgggtgtggtggctcacgcctgtaatcccagcactttgggaggctgaggcaggtggatcacttgaggttgggcatttgagaccagcctggccaacatggtgaaaccccgtctctattaaaaataaaaaaattagccgggcatagtggcatatgcctgtaatcccagctactcgggaggttgaggcaggaggatcgcttgaacctgggagaggcagaggttgcagtcagccaagaacacctcattgcacatcagcctgggcgacaagagcgaaactccatctcaaaaaagaaagaaagaaagaaaagaaaaggtgtcagcagggccctgcttcctctggaggctctagggaaggatccttccttgcctctcctagcttctggtgtccttggcgttccttcagttgcagctgtatcactcccatctctgcctccgtcatcacatgactgttctctgtgcctgcgtcctcgtctcctcttataaggacaccagtcattgatttagggctcagcctcattcaggtctctgctcccattgcacctcctgggagaagcctcactcagtcgctcgtcattgtatagctatttgtttggagctgtgcaagggcagaggcctgttttgttcactgctggatccctgacctgtaacggatgctcaccttttgttgaatgagtgaatgagagacaaccgtttcgaaactgctgtggggggaaagctgtctaaaaggaacagcctccacgctgcaattctagcttcgtaagcggggctccaagctgctccttgccaagtgcctgctgtgccacggacgagctaggggcctttggcaaattgctgagcctctctgtgcctcagtttccaaccccttaaggtggagatcaccgtagttccccacctccagtgcttgtggtgagggtgaaatgtgctaatgaggggtcctggttatctcttgcccagggggctctgccctttgatgacgacaacctccgccagctgctggagaaggtgaaacggggcgtcttccacatgccccacttcattcctccagattgccagagcctcctgaggggaatgatcgaagtggagcccgaaaaaaggctcagtgtgagttgagggggggaccggcggaggggggaacagtggccgatgaagacagaaccccctagaaaagtcatggggatgggtttccagaacctgctcgtcagtccccagggtgactgggatcgccagctgagccgcagcccaaggtccagcacagctgccgctccaaactggggagggggctacgcaagattggggcggggagctccaggcagcgggagggcgcaggagtaaggaggcgaacaggatgccactgcgcatgcggcaaagtaatgcggccggtccggggtacacggagaccgcgcgtgcgcggggcgatgcactcagtcgccactagagggcgatgtaatatgtcatcctgcccccggtggggtgggcggggagatgatcagggaccccaaaaccaccccagtctttcattgcgcgcctacatgtgcctacgacctcacttctgcttctctacgactcaccaccctcacagctggagcaaattcagaaacatccttggtacctgtgagtatggggtaactggactcttgggtccctggcggaaataggggaggggccaaagcagtagaagcggctgggaggggtgggatgccagggttcctgagaggcaacgggctagggactcggacttatgggtcctgggggaagaggacacagctagagaaggagtctaggggtcagaggcaggaggggctaagctaggagtccaggactcccaggtttgagggaaaaagggactgggggcctggactcctggatccgagggagg

SEQ ID NO: 22581 - DNA, 2300 bp, Homo sapien
cctgtaacaaaactgcatttctttctttcttttctttctttctttccctttctttccttccttccttctttctttttcttttctttcttttttttatcttgagacaaaatctcgctctgttgcccaggctggagtgcagtggtgcgatctcagctcactgcaagctctgcctcccgggttcacggcattctcctgcctcagcctcccgagtagctgggactacaggtgcccaccaccacgcccagctaattttttgtatttttagtagaaatggggtttcactctgttagccaggatggtctcgatctcctgaccttgtgatccacccaccttggcctcccaaagtgctgggattacaggcgtgagccatcgtgcccggcctcttttctttcttttttagttatttgattttcaatcccactgacatgagttcatcagttcattatatttactgtctgttccttttttttcttttttttttctttttgagatggagcctcgctctgtcgcccgggctggagtgcagtggcacaatctccgctcactgcaagctctgtctcccgggttcacgccattctcctgcctcaccctcccgagtagctgggattacaggctcctgccaccacgcccggctaatttttttgtatttttttttttttcagtagagacggggttttaccacgttggccaggatggtctcgatctcctgacgtggtgatccgcctgcctcggcctcccaaagtgctgggattacaggtgtgagccactgcaaccagcctactgtctgttcttttctgtttttgtttgtttgtttgtttgtttttgttttcttagagacggagtctcactctgtcgcccagactagagtgcagtggcgtgatctcggctcactgcaacctccgcctcccgggttcaaccaattctctgcctcagcctcccaagtagcagggattataggtgcccaccaccatgcctggctcatttttttgtatttttagtagagatggggtttcaccatcttggccaggctggtcttgaactcctgacctcatgatctacccgcctcggcctcccaaagtgctgggattacaggcatgagccaccgcgcctggctactgtctgttcttttctgtaagtcagaaatatttcataatacaaataaaattttgacccaccaattccacttccagggttttattctttttttttttcttgagacagagtctcattctgttgtcctggtgagccaagatggcgccattgcactccagcctgggcgacaacaagcaagactccatctttaaataaataaataaataaataaaataaaaccttcagacctcctgagaactcactcattatcatgagaacagcatgggggttcaccatgattcaatttcctccacctggtcccccctttgacaagtgggggttatggggattaaaattcaaggtgagatttgggtagggacacagagccaaatcatatcactcagcattgttgaaaaaacagaaaagtaggtcgggcgcggtggctcacgcctgtaatcccaacgctttgggaggccgaggcgggcagatcacctgaggtcaggagttcaagaccagcctggccaacatgacgaaatgctgtctctactaaaaatacaaaaattagccgggcgtggtcgtgggcgcctgtaatcccacctactcaggaggctgaggcaggagaatcatttgaacccaggaggcggagtttgcagtgaggcgagatcacaccattgcactccagcctgggcgacagagcaaaatgtcggaaaaaaaaacaaaaaacagaaaagaatgtccaacaataggacatagttggacgaattctagcatctctcaatctctcacaacatggaataacatgaaagctgttactgaactcttaccacacagcagccactttgcaaatagccctgtgagggaggggctgttataatgctcattttacggataagcaaagtgaggcttacagagatgatgtaaccggcccagagttaacatccaagtcatgggactccagagtctagtgcactttgcactctcaagctcccggccgcactgcccagaaagaaaccagctgctgaaagctggcggggtgggtctcagacttcaggtggcataataaaataagaaggaatgactcatgctgggacaccgatggcccgtgaaaacatcatgctaggtgaagggagccggagatgaaaggccacattcggtacgacgccatttctatgaaatatccagagtaggtaaatccatagagacacaaa

SEQ ID NO: 22582 - DNA, 2300 bp, Homo sapien
gagcaagaccctctctcaaaaaaaaaaaaaaagaagggagcatcacttgaatgagcccctagagagaccctgtctctacaaaaattaaaggattagccgagcatggtggcatgcgtctgtggtcccagctactcaggaggctgaggctgtaggatcgcttgaacccaggaggtcgaggctgcagtgagccatccttgcaccactgcactccagcctgggcaacagaggaagaccctgtctcaaaacacaatacaggccaggcatggtggctcatgcctgtaatcccagcactttgggaggctgaggtgggtggatcacctgaggtcaggagttcgagaccagcctgaccaacatggtgaaaccccgtatctactaaaaaaaaaaaaaaaaaaaaaaattagccgggcatggtagtgcatgcctgtaatcccaactatttgggaggctgaagcaggaaaatcgcttgaacctgggcggcggaggttgcagtgagccgacatcgcaccattccactccagcctgggcaacaagagggaactctgtctaaaaaaaaattagccaggggtggtagtgcatgcctgtaatcccagctacttgggaggctgaggcaggagaatcgtttgaacctgggaagcagaggctgcagtgagccgagatcactccactgcactctagcctgggcgagagagcgatactctgtctctgtctctctctctctctctctctctctctctctctctctctctctctctctctcacacacacacacacacacacacacacacacaccaaaacaccaaaaacagcacaccaaaacagcacctactctgtggcatgcattgttttaagtgcccacgatctatagctgtacagtggagcgcatgtctgacagtgatcctatatgtgtagacacacaagcgcctacattgtgttaccggacagtaacatgctgcacagctgtgtggcccaggagccgccggccaccttacagcccaggtgccagcagccctgccacgtaggtgtgagtgatgttgctctaggatgctggcaggatgacgacatcgcctgagcacgcactgcccagatggtatcagtgtcgttaagggaagaatggctgtggcgaaacaaacaaacaagcaaacaaagaccgcctgttctgagtgtggagcttattattctcggcgtaattatgatgaattgttagttacgtttgcctctaggattgaggtagggggggtgatcccaattagggggtgccccaggggagcgccccaggagtcagggcttgtctcaaaagtccccactcctccctcagcctcccctccctccatccgaccccgttcatatcgcgggaaggtcccacagagtgcgtgtggatactcccaaaacgcaacggtgtaaacggggagggagggagagagactgaggagccctttgtagccaggcagagctgtcaataaagtttcgtcgccttggtaaccgcaggcctcgcggggcgggaggggagagggatggcggtgcgcgcgcattcaccgcctccctcccgccgggtctggctttctccctcctgtggccgaagctttcctcggagaaatagaagagggaggccgcgactctatggtgatggacggaggccttacccaatggaaagaggagctgtcccaaggccaggcaatcatatacgactactggagctggcagagcccgccctctttccacttggacctgaataacccgacccaaaccgagtttcgcccggagagactgcgctttcggccaatgagtgcgtcgatttcgagccccagtgtgagcgaaggcgggacaagtctccatggcagcgactaaaggacagcgatgtgaaccactgacaacagttcgcggcgtttgacggcggcgggggcgtggcggggttttatctgtgtattgacgagagccgggcgcggagggaaagagtggggcttggccaatgggagcgccgtgagcttcgtagcaacggaggagtggcggtggctgtggccaatagaaagcctcagtggccttggcggggctggcccggagagcagatgggaggtgcggcgacagtgtttgacgagagccgaaggaggctgtgggaggtgttggcggcggcggcgcgggcgcctgaggaggaggaggagaagcgggtgaggggcggcgcggggcccgatctctgagccccttcacggccccagccccgcgccgccttggctccccagtcgccccctgccccgactgccccccaccccgcccggcccctcctcgtgtccaggcgcccacgtctc

SEQ ID NO: 22583 - DNA, 2300 bp, Homo sapien
gggcgtggcggggttttatctgtgtattgacgagagccgggcgcggagggaaagagtggggcttggccaatgggagcgccgtgagcttcgtagcaacggaggagtggcggtggctgtggccaatagaaagcctcagtggccttggcggggctggcccggagagcagatgggaggtgcggcgacagtgtttgacgagagccgaaggaggctgtgggaggtgttggcggcggcggcgcgggcgcctgaggaggaggaggagaagcgggtgaggggcggcgcggggcccgatctctgagccccttcacggccccagccccgcgccgccttggctccccagtcgccccctgccccgactgccccccaccccgcccggcccctcctcgtgtccaggcgcccacgtctcccggcccctcgccgggcctcgggctccgcggcactgcagcctccttcctgtgcttcctcacccgggccctgacccccttcttacgtccacggccctccctgcatcctcagggcctctccctgacctcttgtcactctccaggcctctccctgcaccccccagggcctttccctgacctcaccctccaggcctctccctgcacccccaggtctctccctgcaccctcagggcctctccctgacccttctctcacccccgggacctccctgcactcccagggccaatccccgacctcctctcaccctccaggcctccttctggaccctctaggtctttctgtgccctagaacctctccctgacccctctgtccctctcctggcactccctggaccctgaggtcggcctctgaccctccaggtcccttgccctgggctctcaccgcctacccaggcgcctccctgggtccccaggcccttccctagggtctccctttcctggatcccccaggaccccaccaagcccgtttggatccctgggcccctgtccgccctctcaggcccttcactcactggacacccaggatcttctccgccatccctggaccgccccccgacccaggtctcccgtctggctcctccctgagtccctaggccattccccgctctctgtcctccctggcacccccatcccttcctcacacccctctgagcgcccccaggcccggctgcagccttctccctcccacagccccctgccgtgcccaccgctgtgcgtttctctccttgcccccagccccctctccagcttccccgctgtccctggcgtcctcctgcagcgccccctctttctctcccgcagcctcgcagtctgtccccgacccctccacagccgtctctgcagctcccgctccttgccctgccccatctcctcctctcctgggcgcggatgagcctcgagcgccgtggtgcggggacgaggctggccctccgtccgggttaggggtttgggtggttttcttcatctctccgttctctcctggctccgctttaaaaaaatgtttttgtaaatattgacctgtgctgcctccccatagtcttcctttgctcccctccccacccccgcttttgtcctctgagcccccctcccctggaatccttggagagggagcaggtgctgggatccctcccctgccctccctcccgtcacccgcctccaggctgcctggggcttcacccggagcctcctgaccactcccgaaggctgccggggaggcagggggcggagaccgaggctgggtcgaggtgggggtggagggcgggacctcgggctggcgggaagctttgacttttcctccttgagggctagaggtgaagcggctccccacggtgctaagcctttagggtgatcccggctgccaatcagtcagccttctctgggcccaaagagatgtgtgtgtgtagggggtctctgtacatatgggcaggggcatctgcgtgtgtcagtctgagtgtgcatgggtgtgcatgtgggggttgtgtgtttaggggggatctgtgtctgcgctgcggagcaagagcaagagctaaggcgatggctgacatggctctgggctttccctactctcagaagtacttgttgcattccatcttcgccagcggcctggtgaagtcagcactgcttttctccccattttgcagatgagatcgtggggctcaccagcgtcccccatggcttctgagtagcgtgggagtggagtcagcaccaagccaggctccccgcgcctgccttgccctcacctgctcctgctctctgccagaggcagcatggtccgcagggcaccatggggcccgacagagtgacagcacgagaactgtgcgagaacgacgacctggccac

SEQ ID NO: 22584 - DNA, 2300 bp, Homo sapien
cacgcccggctgatttttgtatttttagtggagacggagtttcaccatgttggccaggctggtctcgaactcctgacctcaggtgatctgcccacctcggcctcccaaaagtgttgggattacagacgtgagccaccgtgcccagccaggttggaggtttctttgtgggtgatacaaatgccctggaactaggtagaggtggttgcatgacattgtgaatgtgccgaatgccactttaaggggtacattaaaaaatggtgacaagtttgggcaaaagagtgagacctcatctctacaaaatgtgaaaacaaaaaaagttggtggttcacacctgtaatcccagcactttgggaggccgaggagggtggatcacgaggtcaggatttcaagaccagcctggccaagatggtgaaaccccatctctactaaatatacaaaaattagccgggcatggcgacgggttgcagtgagctgagatcgtgccactgcactccagcctgggcaacagagcgagactccgtctcaaaaaaaaaaaaagttaactaggcatggtgccatgtgcctgtggtcccagctactctggaggctgagatgtgaggactggttgaactgggaagtcgaggctgcagtgacccaccatcgtgccactgcactgcagcctgggcaatagagtgacaccctgtttcttttcttttcttttttttttttagagatggggtttcgccatgttggccaggctagtctcaaactcctgacctcaggtgatccatccggcttcccaaagtgctgggattacaggggtgagctctattgccaggctagagtgcagcggtgtgatcgtggctcatggcagcctttatcttcctgggctcaagtgatcctcctgcctcagcctccaaaagcccagccaagtttttgatttttttgtagaaaagaggtctcacatgttgcccagactgaagtgcagtgatgccatcacagctcactgcagcctcaagctacccaggctcaggtgattctcctgcctcagcctcctcagtagctggaaccacaggcacgcaccaacacgcctggctaattttggtattttttgtagagatggggtttcaccatgttgtccaggctagtctcagactcctggactcaagcaatcctcccgcctctgccccacaaaatgctaggattacaggcatgagccaccgcacctggccgggattcttaattcgtacatttggctgtcagtgtaaacaatcctgagtcaggcctgatattaaccaggcaggagggagagaagcttagcagggatctagaggtgaaaccacctgcccagattccagttacttgtctgcccctagagccaagactcattgattccgcctcggatttattgtgcatttactactgccagactctgccccaggcagatacaacagtgagccaaacacacagcaagacccgccctgggggacgctctcctaagccaggcatctgcagctcttaaagccctgggtacccctctctccctaccctgtcccccaaagctctctctggcttgctttctccctgcagcctgcagcactcccagcactccgagtggccggatgcgggggcttaacctcagttggaaactgtccagaggagcccagcgctgccaggtaccctttaagaccctggagatctgccttagacctgggggcggggggaggggggcgagggaggagggtggggggggcgggtaacggaggggggaggacgaggggggcgggggggttcccaggagcccggaccccaccgctgctctttcctcttaaccccacaggccccgagggttctgtgcgcaccgactgtaggaagcggaatgttgaaagccgcttggggggatttgccccctctggtagataccagaactatggatatgcctttatatattggggggcgggggggggcgggggcgagcccgtggagccgcccaacttcgcagagattaaagcttgagcctgagactcagcgagtcgcacctcggtgcctgtgtgcacgcgcaggcccccgagggggcgtcgggggagcaaggggtggggtgggggcgcccctaccagccccgcggtgcacgacggctcccattggctggggctcgggcgtcctagccaatccggccgcggggtgcgtttctcctgacccgggtgggaccgcaccccgcggactcagaagcgagcggcaccccgggaccatcccacagcagatccagtggccgccaacgtcaggctggtgagggcacgacgggtggggttcaggggcggggg

SEQ ID NO: 22585 - DNA, 2300 bp, Homo sapien
ggactgggggcctggactcctgggtctgacggaggagcggctgggggcctggactcctgggtctgaggcaggaggagctggatcgtcaggtcctgggagcaggagggggcctaggcctctcgctgggtaggttatggagatgtggaagcccgggcccctcctgcctccctctatctctgcaggaccagcccatcagcagacatgcaggtgagcaggccctgctgtttgtcaggacctctgggttctccccgtcgcagggacagagctgcaccctttggctcttcccccttccttggtggggccctccacaagctcctggggtaggtcctcgtgccctcccctggggtccctgacccaggatgtctcctctcttcccagtcagggttgctgagcgcaactttccgcataagacggtggctgctcagagacagaggaaggccaaggtgagccggcggggtggtgtgggcccaaggggctgcccctgtctaaccgtcccttcctcacccactccaggcgctcaagcgcagtttcaagtctcaggccgtgggcgactctgtgcccctcatctggtcgcagctggagcatgctgacgtcaggaagaaacctgcagaaaagaagtgggcgtggggtcttgttgccggtgggtgggtgggagaaggtgggagaccccagcccagatgccaccaaagtcccacggtattgctcctgcaggtcccactcagacccccgccccgacagaactcacacccaaatccgcttgcctggtaagatcaacccaccccaccccttgccacagtgtgtggctctggttcctgccccaaagggctcagacggctcccccatccagagaagaccagcatcaccacctggaccatcttcagcatcatttccagcaccgccaaccagacacagtcctctccaaaggccagccttatacccggggcagggcccaggccccagagctgagggaggaggggctggaggcctggactcctgggtctgagggaggagaggctgggacctggactcctgggtctgagggaggaggggtggggggcctggactcctgggtctgagggaggaggaactgcggcctggacttctgtgtctgagggaggaggggtggggggcctggactcctagatctgagggaggaggggctgggggcctggactcctgagtctgagggaggaggagctggggcctggactcctgagtctgagggaggagagactggggcctggactcctcagtctgagggaggaggggctgggggtctggactcctgggtctgagggaggaggagctggggcctggactcctgagtctgagggaggaggagctggggcctggactcctgagtctgagggaggaggggctgggggcctggactcctgagtctgagggaggaggagctggggcctggactcctgagtctgagggaggaggggctgggggcctggactcctgggtctgagggaggaggggctgggggcctggactcctgagtctgagggaggaggggctggggcctggactcctgagtctgagggaggagggagcaggggtctgccctcccgggtctggggtctccatgcatcctgaccatgtatcctctcccctctgtccacctacaggcctgcacatctgcatctgatgaagccacaggccagggacatgtggttgagagcccttcacactgtgtctcagctgacagccctgatggcttctttctgggctcctgcagctccctggacccgtgcctgtggcatcaggacacggaagacctcatggactctgggggcagcactttgtcgtctgctgcctccggtctggctccctatcccccggctgcctgcctctccacaccctactcttccatccccaggggcagggaaaaggccgggcctatgggctcccaccaggggccggggccaccaccctgccagaaggccccatctggccttgtcacatcttgtaaggcaccgttccttgttgaccagtcccagaagctcccagctgtacctgcttcatcgtggaaacccccacctggattggctcctccccagaaggccccagctgcgtcagctcctccccggaaggccccagctgtacctgctccatcccagaaggccccagccgtacctgctccatcccagaaggccccagccatacctgctccatcccggaaggcctcagctgcgtcagcttctccccgaaaggcctcagccgtacctgccccaccccagaagaccccacccccatctcagaaggccccatctgtacctaccattccccag

SEQ ID NO: 22586 - DNA, 2300 bp, Homo sapien
tttgagatggagtctcgctctgttgcctaggctggagtgcagtgaggcaatctgaggtcactgcaacctccacctcccgggttcaagcaattctcctgcctcagcctcccgattagctgggatcacaggtgtgcaccaccatgcccagctaattatttatttcttttgtatttttagtagagacagggtttcaccatgttggccaggctggtttcgaactcctgacctcaggtgatcctcctgcctcggcctcccaaagtgctgggattacaggtgtgagccaccacacctgacccataggtcttcaataaatatttaatggaaggttccacaagtcaccctgtgatcaacagtacccgtatgggacaaagctgcaaggtcaagatggttcattatggctgtgttcaccatagcaaactggaaacaatctagatatccaacagtgagggttaagcaacatggtgcatctgtggatagaacgccacccagccgcccggagcagggactgtcattcagggaggctaaggagagaggcttgcttgggatatagaaagatatcctgacattggccaggcatggtggctcacgcctgtaatcctggcactttgggaggacgaagcgagtggatcactgaagtccaagagttcgagaccggcctgcgagacatggcaaaaccctgtctcaaaaaagaaagaatgatgtcctgacatgaaacagcaggctacaaaaccactgcatgctgtgatcccaattttgtgtttttctttctatatatggattaaaacaaaaatcctaaagggaaatacgccaaaatgttgacaatgactgtctccaggtcaaaggagagaggtgggattgtgggtgacttttaatgtgtatgattgtctgtattttacagaatttctgccatgactgtgtattttgcatgacacattttaaaaataataaacactatttttagaataacagaatatcagcctcctcctctccaaaaataagccctcaggaggggacaaagttgaccgctgattgagcctgtcagggctgtgcactaagtgtgggctttttacttacacaatcctcctggactcttgaatacgccctgttttacaggcgagggaaactgagtctcagacaaggagtggggactctgttgcacaaagtcacacagctagggagaggtggaagtgggattctgcgccgtgtctggctctttcccaaagctctctttgcaagtcggtgttgaggaatcctcgccacatgcacacacatgagatatggagaaacaggttcagtaaggatttgggtcttacccagggcctagagaagggtcaatggcagagtagggatgataattcaaatgctttagttacttttccctttacaataacccagacagacttccaggggccccgtgtcgtcactagtttgagtctggggttggaggtgcccatcctgggcccggagttttgattcacccatcatagccctcaagactccaggctggctgggcgcggtggctcacgcctgtaatcccagcactttgggaggctgaggcgggtggatcacttgaggtcaggagttcaaggccagcctgaccaacatggagaaaccctgtctctactaaaaatacaatccagctactcggaaggctgaggcaggagaatcgctcgaacccaggagacgggggttgcggtgagccgagatcacatcacaaacagccctaggcagtgcggggccccaggcgaggctcagaccctgcctccacagagctgtctgggtgatcgtgcctcctccgtggaggcagggtctgagcctcgcctggggccccgcactgcatagggctgtttgtttttgcgatggagtctcgctctgttgcctaggctggagtgcagtgtggcaatctaagctcactgcctgggcaacaagagtgaaattccatctcaaaaaacaaaaaacaaacaaacaaacaaaaaactccaggctgtatccctggaggagaagggagcccacagtccccggagagttcctggaagaggcccctgtgtgtccgatgaggtcacaaagcccctccaccagaggctcctcccccagacccctgctgtccaccctggcagggccatggcggaggcccgagtctcccagcctggggcatctccacgctctgtaacgctgagctccaggcacccgtgaagccccacgggtcaaggctggtgggccggggctgggaggcctgcacgcctgggttctgggtccctaaaccagtacccatccaccacagccaccatgatctggcttcg

SEQ ID NO: 22587 - DNA, 2300 bp, Homo sapien
gctctcggggacatggcttggtacctctgcccctcgcttgctctgtggtgaatcccgggtctcctctgcccccatgcctggggctggcccactgtgagcctgggtaggcgtcgctgcctcccccctggcctgtgggtcccctcccccctgcactcctctcctgcctccacctctgtgcggtgacgtccagggctctggccccggtggttctggccactgtctccgtgtccccactgtcccgtcttcaccccatcttgctcctgccccatctctctcgaaggcgacatctttttctctgtgtccctgatgtgttcagaaaagttaacgaggggaataaggatggtcagcactgactttgtgcttcacgtgaatgagctcgctttatcctcatcgtggcatttaggcggatgagggtgcatcattaaccccccttcacagatgaggaaactgaggcacagagggggagagtcgcacatggaggtcttgcctctatggagtgtctcagcgcctcttggtcctcagtctccgtctctcctcctccttcctgtctccacctgcctctttgagaaaggcttttcaaaaggccaggcgtggtggttcacacctgtattcccaccactttgggaggctgaggcgggaggatgacctgagctcaggagtttgagaccagcctgggcaacatggcaaaaccctatctctactaaaaatacaaaaaatagccaggcatggtggcgggtgcctgtaatcccagctactcaggaggctgaggcatgagaatcacttgaacctgggaggcggaggttacagtgagctgagatcacaccactgcaccccagcctgggtgacacagcgagactctgtctcaaaaaaaccaaaaacgaggccaggcacggtagctcacacctgtcatcccagcactttgggaggccgaggcaggcggatcacgaagtcaggagttcgagaccagcctggccaacatggtaagaccccgtctctactaaaaatacaaaattagccgggtgtggtggcgcacacctgtaatcccagctacttgggaggctgaggcaggagaatcgcttgaacccgggaggtggaggttgcagtgagctgagattgtgccattgatcgcgccattgcactccagcctgggtgacagagtgagactcagtaccaaaaaacaaacaaacaaaaaacaaacaaaaaatgagaaaggcttttactctctgcccccattgctgagtccccaacatctcagcgtctctgtctttctaatatctctgtctccccttttctgtccctggggcctctccgtccctgtcactctgccccgtgtctctgtttgcctggtgcctttcttcagctgcggcatcctctgtctcagagtcttggtgtctctgttcctttcccctcggggtctccctgggtctccccaagtccctcctgctgtcttcctcccgctctctgatctctgactcccagaacctctccctctgtctccagggctgcccctctgatcctctttgcttctctggtgtgtctctctggctgcctccatctctgtggatctccatctccctgtctctgtctcagtctgtccttcactctgtgtgtgtgtgtgtctctctctctctccttcccttccactccctcttcctcctgcctccacctctccaggcccctgtcttgtccctccgtccggcctttctctgcctttccgtcctcctgcctccccatctctctctgctagtcctggtccagccggacccccacccacagtcgggccccagcgcttgagcctgagtgtctgctccggcccgtggaggtggagggaggggacgccaatgacctcaccagcccctctccgaccacccccccctttcccttttcaacttttccaacttttccttccgtgccctcctccgagcgcggcggcgtgagccctgcaaggcagccgctccgtctgaatggaaaaggcaggcagggagggtgagtcaggatgtgtcaggccgccctcccctgccgcctgccccccgcccgcccgccccagccccctatataaccccccaggcgtccacactccctcactgccgcggccctgctgctcagggcacatgcctcccctccccaggccgcggcccagctgaccctcggggctcccccggcagcggacagggaagggttaaaggcccccggctccctgccccctgccctggggaacccctggccctgtggggacatgaactgtaagttggttcatggggagggtggaggggacagggaggcagggaggagagggaccc

SEQ ID NO: 22588 - DNA, 2300 bp, Homo sapien
ctgagaaatggggtctggctcctagaccatcctcccagactcacaagttcaggcccccagcccctcctccctcagacccaggagtccaggtccccaggcattcctccctcagacccaattctggctcccagccccatccttcagacctgggagtccagccctcagacctaggagtctgggaccccccagcccctcctccctcagacccaggagtccaggcccccagcccctcctccctcagacccaggagtccgggaccccccagctcctcctccctcagacccaggagtccaggcccccagcccctcctccctcagacccaggagtcccggacccggaccccccagctcctcctccctcagacccaggagtccaggcccccagcccctcctccctcagacccaggagtccgggaccccccagcccctcctccctcagacccaggagtccagggccccagcccctcctccctcagacccaggagtccaggctcccgccccttctccctcagacccaggagtctgggaacccccagcccctcctccctcagacccaggagtccaggcccccagcccctcctccctcagacccaggagtccaggctctagcccctcctccctcagacccgggagtccaggcccccagcccctcctccctcagacccaggagtccaggctccagccccttctccctctaatgcaggtgtctgagtttacaacccccttttccttcagatgcaggacttctagcccagagactgtcccagggagctaagactccctcctcactgtgctgcaaagctgaatggatgagttggggtgcactagggattatggttccaacccagccccccattccggtttcctcttcttggaagccaagttttctctcagtcactggggagtggtggggggaatcaatgtggaagcttcaggatctccgtttagccgactccctcccaccactccctaacctctgttcacagatggggaaacaaatccaggagggaaatgtgggctccctgtccaggagccaccattacagtctccgagcagctctggcccaccaggccctcaaactcagcaggggcccacatggcctgtccccttccctgtttgttttttttttcttttttcttttttttttttgacacagagtctcactccttcacccaggctagagtgcagtggcacgatctcgactcactgtaacctccactttctgggttcaagcaacctccacctcctgggttcaagcaatcctcctgcctcagcctcccgagtagctgggattacaggcaagtaatcaccacgcccagctgatttttgtatttttagtagggacggggcttccccatgttggccagtctggtctcgaactcctgacctcaggtgacccgcctgccttggcttcccaaagtgctggggttataggcgtgagccaccgcgcccagccctatcaccttccctgctaaacattccctagacagcaggcctggcagggctgagatgaaaagcctttctcaagacccctggaccaggagacccccggacttaggctccggccccttgtctcatccccctcccaggtcttctcattgcgggggggactttccctaacaatggggctcagtgaggcctctgtgtctcacagctccccttcccctggttgttaaggcgaaaaactccctagcaacggggtttcctgaaccttcgggccacccgaatccaccttctcaggtatcagtttccttaggaaagaaactccctagcaaagcctcccagttccccacccctcagggcgccccgggtgatatggagacacgccccagactcccacgcccttccagacttctctttcccaccataagtggccaaagaggctcttctaaacctgagacgcccccactcttccaccaggtccctaaagaatcaacaccctagaccaggcatggccaggctggtgtgaagcccttccacgtccgtagcacacccctgactccctagcaacagaactcacaatcctggggcctggcgggcaggcgggcggggccggttgctggggtgatgtcctgtaaggcctcttcccacagtggccccaggggtctggggaggtgacatgttgggctgtgggatcccagcgctgggcctgctcctgctgctgcagggctcggcaggtgaggggctggtgaggcgggggagctgaggagggacgcccggctccacacagccctaacactgccctttctctcgcagacggaaatggaatccagggattcttctacccatggagtgagcagc

SEQ ID NO: 22589 - DNA, 2300 bp, Homo sapien
gctgggcaatgctaggaacaaggacgctagggacctaggtcttaccctcaaggcactccctgtcaggtgggagagacagtaacaacatagacacagcacatggccatataagcagcaagaggggtcgctcagacaatatgaagacccagagaagacccagagaaattaagttaaatcttaaacatgtgagaagttttctgggtggagtggagacagccaagggcactcctggtgtagagaagagcaggaacagggaccaactggctatctgtggactaagagacaccattagtgcagagaggcaggagaaatggggccaaaatatggggggtccacaggccagtgagtgcttcagtttaaccaaaggtgaagagggagccacagcaggtctttgagcagaggcaggctagctggaaaggtgtgtttaggaaagagatagaaggtagaggggaaaggggagtgaatgtgtggtggcttcatttctcctgctgttggtccttcttactcctccttttctaggcctacaggtcaggaaaatcccagctcctcctttcctaggcctacaggtcaggagaatcccagctcctcttttcctaggcctacaggtcaggagaatcccagctcctccacctacgtgttgtgtggccttgggcaaatgtggcgcctttctgcgcttcagtttcctccactgcagaatggggatggtaatagtagtgaccttggagaccagttacatggagaggattaaatggggcctggtctgggctcagtggctcacgcctgtaatcccagcactttgggaggctgaggagagcaaatcgcatgagctcaggaggtggggaccaacctggcccacatggcaaaaccccgtctctactaaatatacaaaaattagcccggcaaggtggggcgcacatgtattctcagctacttgggaggctcaggtgggaggactgcttgagcctaggaggtcgaggctgctgtgagctgagatcacgccactgcactccagcctgggtgacagtgagagatcctgtctcaaaacaaccccaaacgacaacaaaacaaaacaaaacaaaaaatggggcctggtgtacctggaagctggggctctccccgtgcggggggcctaactgtgtgactcgacccccacacttcccatctccaggggcagggtctcacagcctcccccacgtatgcacctgtgcttgctgtgtctgcggttctccgccagagccttcccgtccctgtctccaccccgccctgggactctacctccccatggccgctctctgtctccatctgtccatcgctcccccgtctgtctccattcccgtccctccctcggtccctccgtctccccgccctgccccgcccgcccctcacctgggcctcactcgctgcccgcgcccgccgccccgggcccggcctcgagcgtggcgagctgcaggcgcacgcggcgggagccggcggcgggcggcgggggcgcgcgggcggctcggcgcgctctccgggagccgggcgcggggcgctggcccgcggcggcgggcgccgaccagcggcgggagagcttgcgcgccaggcgggcgagcgccgagggccgcaggccgtagtcgcgctccagctcctggcgcgagatctcgatgttgccggtgtaccagaggatccagcccagcaggctcaggaacaccagcagcgcgcccgagtagatgagcaggtccccgaagtcgcggccgcgcacctgcagctgcgcgaacacgccggtcagcagcgccgccatgcccgccacatccagcgccacggccagcagcagcgccatccggcagcggcccaggccggccgcgggtgctggcgcggccgccggcgcggacggtgcacccggcgggctcccctgcgaggcgcacaccgctggcgccgccgccatggccctgcaccgccgccgctggcgcccagagagagcgttccggggtgcggcccggtccggggcggggtcaggggacggcgccaggtgtgccaagctcccgcctggtcacctgaaccgggctgggcgcgaaccggcgcggccggggttaccctggtcgtggtttccgtgcaggggctattgctcagaggcctgagctggtggtagccaggcgcacagccacgggtgcctagggcccgtgccacccagggaggtcacatatggccaaaaatcagggcattttagtggtggcagcatgggacactcggagccgggcgtggcgttgtttctgctcagtgtccgcctcccgaagcctgtgcagatcagacagtgcagatca

SEQ ID NO: 22590 - DNA, 2300 bp, Homo sapien
gctcggcgcgctctccgggagccgggcgcggggcgctggcccgcggcggcgggcgccgaccagcggcgggagagcttgcgcgccaggcgggcgagcgccgagggccgcaggccgtagtcgcgctccagctcctggcgcgagatctcgatgttgccggtgtaccagaggatccagcccagcaggctcaggaacaccagcagcgcgcccgagtagatgagcaggtccccgaagtcgcggccgcgcacctgcagctgcgcgaacacgccggtcagcagcgccgccatgcccgccacatccagcgccacggccagcagcagcgccatccggcagcggcccaggccggccgcgggtgctggcgcggccgccggcgcggacggtgcacccggcgggctcccctgcgaggcgcacaccgctggcgccgccgccatggccctgcaccgccgccgctggcgcccagagagagcgttccggggtgcggcccggtccggggcggggtcaggggacggcgccaggtgtgccaagctcccgcctggtcacctgaaccgggctgggcgcgaaccggcgcggccggggttaccctggtcgtggtttccgtgcaggggctattgctcagaggcctgagctggtggtagccaggcgcacagccacgggtgcctagggcccgtgccacccagggaggtcacatatggccaaaaatcagggcattttagtggtggcagcatgggacactcggagccgggcgtggcgttgtttctgctcagtgtccgcctcccgaagcctgtgcagatcagacagtgcagatcagacaaggcctttagacaccaaggagctctgggacgcgagaaccagtagtcggggtgatctaagaggggaagctccgggttccgcggaagctgagtttccttcactcagcgcgtgtcttctggggtctcctgtgttcagcgaatgaagccacgggcacaaggacggacgagacccatcaggtccagagcgcacccgtggaggaagctgggcgaaccccgactgtcctatggaggatagtcctatggaccagacgaagcccctgccccaaggagtgcccgggtgtaaccgcaagttaaggagccctggggaggtgacacaggcaccctcattccttttgttcagtaggagtctctgaggcctccccagcaccatgccgcgtgggtgaggccgaggacacagagaaatatcaggcaaggctcctgcccccttagggtggccctgacaacggatcataacctcccagggagctgatggggtgtgacaggcacaccataggctggaggcacaggtggagggcagggaagaggaccggcaaatctatagaatcctaaagggagccaagagaagccacatgcaaatctccctccctccaaacaattctcccttagagggcatccgcgctcccctggggtggcagtcagcgagaagtttccgtgtaggttctccccaggcttaaacagtttaagagttttatttcaagaaaaccctggggagggcgaactgcaagagggctgccaggattagccgagggattccgaatgaagacggagtatttccgaacatacacacctctcccaagagcgtttccggagggttccgaaaatacccgagcgggcctcggcgccctcattggccatcaccgcgagggcttacgaagaccggaaatatccaaaggtgccggggctaggcttatatagttcacgcattcaccagttcattcataaaacaaatgtttgttgagcgcccatcatatgccaatcacagtgacaagtgctgggtgagcaatactggagagataacgctgaggtatgggtcccaggacctctcgaattggagccactcggaaatccagcggtagagtttcgaaaacttccgaacggttcccggaatacgctctcggccctctaaccgaagagttccgaatattcccgagcgttgagcgaattttcggcggaagcagccgaacatcatcgagccgcctcggaggtggggaccgacaactcctgtcgtgcccgcccggagaggaagcggaaatgcgtgtacggtattaaaggcgtcgcctcgcccctcgccttcctctttccgtctcaggtcgccgctgcgaagggaggtgagcgttcgtcttcctcgcgtggtcgccatctccggcccgccgcgcactccctctcagtcctctgcctgccttctccccttgcgcctcaagggtcattggcggaccccaacccctccccgtgaagtcgttgtgaattttcaagttattttcccctcactctcat

SEQ ID NO: 22591 - DNA, 2300 bp, Homo sapien
gcacagggaaagcgtcagacacagagaactaaagcagcgttaggccacgggccacgctcggacagcagaggaagagagcgactgggaacttgggtgaatgggagacccctgagggcagacagcgacctagaactcttgtcaggcgggactgagtgacctaaggcggcgggaccgaattcaggcagccgagactagctgcggcgaatgagagtgaggggaaaataacttgaaaattcacaacgacttcacggggaggggttggggtccgccaatgacccttgaggcgcaaggggagaaggcaggcagaggactgagagggagtgcgcggcgggccggagatggcgaccacgcgaggaagacgaacgctcacctcccttcgcagcggcgacctgagacggaaagaggaaggcgaggggcgaggcgacgcctttaataccgtacacgcatttccgcttcctctccgggcgggcacgacaggagttgtcggtccccacctccgaggcggctcgatgatgttcggctgcttccgccgaaaattcgctcaacgctcgggaatattcggaactcttcggttagagggccgagagcgtattccgggaaccgttcggaagttttcgaaactctaccgctggatttccgagtggctccaattcgagaggtcctgggacccatacctcagcgttatctctccagtattgctcacccagcacttgtcactgtgattggcatatgatgggcgctcaacaaacatttgttttatgaatgaactggtgaatgcgtgaactatataagcctagccccggcacctttggatatttccggtcttcgtaagccctcgcggtgatggccaatgagggcgccgaggcccgctcgggtattttcggaaccctccggaaacgctcttgggagaggtgtgtatgttcggaaatactccgtcttcattcggaatccctcggctaatcctggcagccctcttgcagttcgccctccccagggttttcttgaaataaaactcttaaactgtttaagcctggggagaacctacacggaaacttctcgctgactgccaccccaggggagcgcggatgccctctaagggagaattgtttggagggagggagatttgcatgtggcttctcttggctccctttaggattctatagatttgccggtcctcttccctgccctccacctgtgcctccagcctatggtgtgcctgtcacaccccatcagctccctgggaggttatgatccgttgtcagggccaccctaagggggcaggagccttgcctgatatttctctgtgtcctcggcctcacccacgcggcatggtgctggggaggcctcagagactcctactgaacaaaaggaatgagggtgcctgtgtcacctccccagggctccttaacttgcggttacacccgggcactccttggggcaggggcttcgtctggtccataggactatcctccataggacagtcggggttcgcccagcttcctccacgggtgcgctctggacctgatgggtctcgtccgtccttgtgcccgtggcttcattcgctgaacacaggagaccccagaagacacgcgctgagtgaaggaaactcagcttccgcggaacccggagcttcccctcttagatcaccccgactactggttctcgcgtcccagagctccttggtgtctaaaggccttgtctgatctgcactgtctgatctgcacaggcttcgggaggcggacactgagcagaaacaacgccacgcccggctccgagtgtcccatgctgccaccactaaaatgccctgatttttggccatatgtgacctccctgggtggcacgggccctaggcacccgtggctgtgcgcctggctaccaccagctcaggcctctgagcaatagcccctgcacggaaaccacgaccagggtaaccccggccgcgccggttcgcgcccagcccggttcaggtgaccaggcgggagcttggcacacctggcgccgtcccctgaccccgccccggaccgggccgcaccccggaacgctctctctgggcgccagcggcggcggtgcagggccatggcggcggcgccagcggtgtgcgcctcgcaggggagcccgccgggtgcaccgtccgcgccggcggccgcgccagcacccgcggccggcctgggccgctgccggatggcgctgctgctggccgtggcgctggatgtggcgggcatggcggcgctgctgaccggcgtgttcgcgcagctgcaggtgcgcggccgcgacttcggggacctgctcatctactcggg

SEQ ID NO: 22592 - DNA, 2300 bp, Homo sapien
cctctcccactcacccacttgcttgggtcaaaatactgtccctcccctagcccatcagcagcctgagcaccggcctgctaggtcctcccctgaatctcatcccatctccaaggctagcttcctggctggcctctgggttcttccccctgccaggccggctctcctcactacagtcaataggaactttggagggatttgtcacacccctgctttaaaccttccaccagcttcctctacaaactccttgaagaggcctagaagccctaaaagagcttggcagcttcatcatcaactttcttcatgtgtttttaccaagcgcccagctccacctgcccaagggcctttctggagccttcctattgtcatgatcccgcgccctctgcagcaaggcatgaaggacctcaactgtcaccgctgccaggtctttcctgaccacctaccaccatcaccaccgtggactagaccattccttcacaggctctgctcaaatcctgactttgtaggaattctggtgataacagaaatgtagcctgcatgaaacagtattctaaatcactccgcaaatcatgtgacccgcaaatcattcatgacccgtctccccacgatctgcatctggcttgtttcctcatccctgacactcacagcaggatggagtttgagatcacctggcccaccctcccaggcccttgctgacaccattcccaccacctggagctctcttcccattcctacttaattcctacccaccctcaggtccagggaagccatgtctgaaagccttgcttcaaatctagagtaccgtcccatgatatactaactcaatgaccagatatttctcaacccttgtgggaaaagagtacataattgtcatttgtggcgtcctgccctgtccaccaatgcatcccaacacctgacacgaggccagcctgtaatgggtacttcccgctagggtgatctagagcagggtgatggaggatctaagcagcagccccttctctttttccttccaaactcaccagggccctcgatggtgacctggaggtcggtgaggtcctcctcgttgggaaagaccttgatgccatcgggtgggtctgcggtcagtgtcgtcacctccttgtacaccaggcggatgatgtgcgggggtaggttctccacgttggagttctgggcacggatgggagagcagggtgagcgagtgttaagagctgggcttcccgcagggcctaaagatgctgagactgcccaagtcttgactcagtggccccaggctgtcaatcacccttgaactcccagaccctcacccaggatgcttcaggccatcagcccaggcagagtttccaacagaaatgggggcgggttcacgggggggcttgcagataactccacccaccccagaaccccccccccaaagcccgctcctaaccctgcttggtccccagtggttccacgtaggccagagatctactctctcccccttctccactaatttttggttagagcatccttgaaaccccggctcaggtctggagatggcggcggggcgtccttgctcctggtaacacccatgggcgggccgcaaagcgcccggagccctcgccgccagggagactgcgggccgcccgagctcctgctccgcctgcgggaaggccctcgggcccatcccgggtcagggacccccaggctggccctcaaacccctcaaggccgcccgtcggaggcccctgagactccacctcctccctcagggacacccccgaccaccttcatgggcctcatcgcccgtgctcaccatggctgcggccggccgggggcgggtccccccggcccccttcctgcgttcttcggtccgccggccggggcggggggcccaactgctgccgctgcggccctggagaggccccggcggccccgctccgctccccgctgcctccgacgtccgccgcgcacagcgtagaccaacccgccgccccggtgcccggcagcactgagccggccgcgcgcgcaccactgcctctttataaccgcccgcaggccacgccctccgcggcccctcagctccgagcctcaaccgtgacgtcagcgcgcacgttccttggttttcgacgcgctcgctcccttccccgcaaactatggtcagaagcgagggaagtggcggagagggctgggtagcgggccggccaatgggggcccgcgggggtcgggagggttctcaaagaacggaggggctgaaaaggggaagaagagaggaagggggacggggaaggcgacgcggccgctgattggaccgtttgaatgagacgc

SEQ ID NO: 22593 - DNA, 2300 bp, Homo sapien
cataataattaataatatccacccattatggttgttacaaggattaaatgacatcaagcatgtaaagaaactagaacagggtctggcacacagcaaataatacataataaccattagtattatcatcattattgttatgtcttttgggtggatttttaagatcaagacgaatttagccactagctttgccttgtcccagctggggaaccccgagcaagtcactttacctcctgctccttcagcttccttgtctgttaattgggttggaatcctccacacccagcaggctaaaattgaagatcagcaaaatgcttatcggcaaaatgggatgacgttgactctaagcaggactggtggcatagcggatggggggacgtgatgagattcagtagatgacgtcaacaggaactggtatagattggacctggggtgagggagcaggaagggatcacctgaagccatttctccacaaactagttatgatgatgactttttatgctgtagctgtttcttcagttgttttgggtttgtttgttttgtacatattggtgggggtctctcactatgttgcccaggctggtcttgaactcctgggctcaagtgatcgacctaccttggcctcccaaagtgctgggattatgggcgtagtcactgtacccgaccatgtaggttttgttttttggttttttttttttttttgcttttttgttttttgagacagggtcttgctctgttgcccaggctggggtgcagtggcgagatctcagttcactgcaacctccacatcccggctttaaccgattctcccatctcagcctcacgagtagctgggattacagggctgcatcaacacacctggctaatttttgtatttttagtacagatggggtttcaccatgttggccaggctggtctcaaactcctgacctcaggtgatctgccagcttcagcctcccaaagtgctgggattacaggcgtgagctaccacgcctggccttggccatgtagatttctttcacaccttccttattccttcttcagaagctgaggccccatgaggggaagctggtagccaggggtcttttcaggtacctgtggccaaattaggcccagatgttaatgctctcatccatggctgaaaaaggccaagaaactaagaagagctgtggacgcacagactggcagagacaccgagagggcactgcgaccgcactgcacagatgagcaaaggaaggccaacttcagcattccctcctcctctctaagcccctccaaaaggcctgctcagggagctctggccaccgttctcaagcaattgcctgacgtttttactgacactgagggctggagatggtcccttttccaggcagctatgtgtccatttcctagagagggaaactgagtcccagagaaggcgggtgtggctggaggccatgggtcagtcataggcataaccatgccgtgaataaccgtcttggcactctctgacttctttccctggcaatacaacggatcccagtgcccatttgtcacataaggaaactgaggctggcgtcttcgatgaagcctggcaggagtgggggtcacacacggagtgcaaggctgtccaagccttcaaggtcattctgactgatctttgagccttagcaatacaggacgtgggtccaagagcatttccagcacaaaatggcgcctcatagaaaaatgtagtcggagttccagcgcccacctccaccacggctcaaaggagggggcgcgggcggcagcgcacacttcatttgcatatacaaaaatcaacggatttcgttggctggcagcggtttgatctgcacgaaactgggtcgccctctgaccggtctctatcagtcattggcccatgcgagtctcgtgacccaccagtcactaaagcgcatccctattggcccgagcgccttccatcacgcgtttaaaaccccgagtcccgcctcccctcgccacgctccggcccccaggaagaccgttagtcgcgtgcgcgacttcctcagcgtcagggcgcgcccgcgcgtatgccgggccgtggcggcgtctcattcaaacggtccaatcagcggccgcgtcgccttccccgtcccccttcctctcttcttccccttttcagcccctccgttctttgagaaccctcccgacccccgcgggcccccattggccggcccgctacccagccctctccgccacttccctcgcttctgaccatagtttgcggggaagggagcgagcgcgtcgaaaaccaaggaacgtgcgcgctgacgtcacggttgagg

SEQ ID NO: 22594 - DNA, 2300 bp, Homo sapien
caccacacagccacacacccacacacacaccacatatacaccacacacacaccatacacaccatccacacacaccacacacacccacacaccacacaccatacacacaccacatatacacacacaccacatatacacacacaccacacacaccacatatacacacacaccacacacaccacatatacacacacgcacacacacaccacacaccacacacacatacacaccatgcacacacgcacacacacaccacacacaccatacacacaccacacaccacacacaccacacacaccacatatacaccacacacaccacacaaccacacacccacaccacacacacgcaccatacacacacaccacacaccatacacacacaccacacacaccatacacacaaccacacacaccacacacacacgccataccacacacccacaccacacacacaccacacacacaccatacacacacaccacacacaccatacacacacaaccacacacacaccacacaaccacacacacaccacatacacaccacatatacaccacacacacaccatacacacacaccacacaaccacacacccacacacacacaccacacacacaccatacacacacaccacacacaccacacacaaaccacacacccacatacacaccacacacacacaccacatatacaccacacacgcacacacaccacacaccacacacacacaccacacacacaccacatatacaccacacacccaccacacacacacacacgcgtctgcagtaagaattttatgaaccaacacttacccctgattcccttattacataaacactttctgatagttttctcttctgttctatttgatttcatttttcaaaatgctgctcactacccgcaaaatcaacttcacaacctaacaggtcacaactccaagtgtgaatcacattgctacaggatgagagggggtcagtggttccccaaaagcaagagttgggttctactcccaaaagaagggataggcggcgcgggggggaagaagaggaagtcctccacatctactgacccagcattgtgggctgggcctgggaatctgcattttggcctcacagctagcctgatgcccaggatccttgtgggggcacaaggagcataggagcgggatgtgacgaggtgggagggggagggctctagatgcgcaggggacccacggctgtggcttttccccctctccccgcagccgagaaggatctggacgaggcctacctgaagcgccggcccctggaattgccccgcggcacgctgcccctgcacgcgctgcggcggccgggcacggggggcggctatcgcatggaggcctggggcggcccagaggagctgggcctggcgcccgcgcccaacccccggcgggtcatgtcccaggagcacctgctgggcgatggtggccgttcgcgctacgagttcacgctgccgcgcgcgcgcctggtgtcgcaggagcacctgctgctgtcctcgcccgaggccctgcgccagagtcgcgagcacctgctgtcgcccccgcgcagccccgcgctgccccccgaccccaccgcccgggccagcctggccgcctcgcactccaacctgctgctggggcccggggggcccccaacaccgctgcgcgggctgccgccaccgtccagcctgcacgcccaccaccaccacgccctgcacggctcgccgcagccggcctggatgtccgacgccggcgggggcgggggcacactggcccgcaggccgcccttccagcgccagggcacgctggagcagctgcagttcatcccgggccaccacctgccccagcacctgcgcacggccagcaagaacgaggtgactgtctgaggccagggccgggtctggggggctgcggcctcccgggccccccgtcccagcctggatcccccgacacaggcgcacacatgccaggggcctggggcccagatcggcccttggacaggagtgaaagcctccttctgggatgtcctggcagacaagattcctcctcctattacttcactgcttgagccaaggcctccttcccatgatgtcatcccagaggaagaggccggctcatgaggtcatcactagcaaaaatgtctgtgttctgtgatgtcatcacagggacaaagcctcgttcccatgaggtcatcacagaggaagaggccggcccgtgaggtcagcgctggaggccatgtccatgttctatggtgtcctcagaggcttccttcttgtggtataataacagagacgacgc

SEQ ID NO: 22595 - DNA, 2300 bp, Homo sapien
gctgatttttggtatttttagtagatatggggtttcaccatgttggccaggctggtctcaaacccctggcctcagatgatccgcccgcctcggcctcccaaagtcctgggattacaggcgtgtgccaccaagcccagtctcttttttttttgagacagagtcttgctcagtcacccaggctggagtgcagtggtgtgatctcggctcactacaacctctgcctcctgggcttcaagcgattctcctgcctcagcctcccgagcagctgggttacaggcacccgccactgcctggctaatttttgtatttttagtagagacagggtttcgccatgttagccaggctggtcttgaactgacctcagctgatccgcccacctcagcctcccaaagtgctgggattataggcgtgagccactgcgcccggccccatctgctttctgtctgtggatttgcctgttctgggcatttcaggaaaacgggatcgcacgctccgtggtctttgtgttgagatctatccaggttgtggcctgtgcagggtcccccttctttcctatggctgaagaatatggcctcagtttcctcttggagcagggtgaggatcagggtggacccttcattcaggaggccctggggagtgggctggcccaacacaggaggacgcccagcagagcctccgttttggggctgatggtaaccagggctgacagtaaccggggctgatgtaaccgggatctgatagtaaccggggctgatggtgaccagggcggatggtgactggggtggatggtaaccagggcagatggtaactgaggctgatggtaaccgggactgatagtaactggggtggatggtaaccggggcggatggtaaccgggatcatgaagcactccttgacgttgtgcacagtcctcagcaaggagaacacagggaccaggagagggacacccggagccacgtgtggatgtggcccagaaggcttcccaaggaagtcacctccctgccgaataggacagaaataagaaagaagcccattctaggcccggggaacagcagacacagagaccttgaggtgggaagaaggttggcaaggtgccccgggccctgccaggctctgagtgtgaggacctggacgccagctggagacactgagaggagccctcgggcctgacccaccgtccctctgcccacccccagaaaatggcggctgccaggcccagcctgggccgagtcctcccaggatcctctgtcctgttcctgtgtgacatgcaggagaagttccgccacaacatcgcctacttcccacagatcgtctcagtggctgcccgcatgctcaaggtatgacctcagccccccaccctcagacccaggatccaggctcagccctccaccctcagacccaggatccaggctcagccctccaccctcagacccaggatccaggctcagccctccaccctcagacccaggatccaggctcagccctccaccctcagatccaggatccaggctcagccctccaccctcagacccaggatccaggctcagccctccaccctcagacccaggcgtccaggcccaactcctcttccttcagacccagggatccaggcccacttcctcttccctcagacgcaggagtccaggcccagctcctcctccctcagactcaggagtccaggcatagcccctcctccctcacacccaggagtccagacccccagcccctcctccctcagacccaggagtccaggcccagcccctcctccctcagacccaggagtccaggcccagcccctcctccctcagaccctgacctttcttccccatcactggcacaggtggcccggctgcttgaggtgccagtcatgctgacggagcagtacccacaaggcctgggccccacggtgcccgagctggggactgagggccttcggccgctggccaagacctgcttcagcatggtgcctgccctgcagcaggagctggacagtcggccccagctgcgctctgtgctgctctgtggcattgaggcacaggcctgcatcttggtgagatgctgactgaccccaggggtccctcgttctaacctgggacccccatcctaaatagaacctccttccctgaccagaaacctccacttccctgcaggacccccatcctgacctgggccctctctcctcacctgtgggccccatcctatcttggatcccctcctgacctgggggccccttcctctgatccgagcctccctcctccccattctgggcccctaattctgactcaccatccccaattcct

SEQ ID NO: 22596 - DNA, 2300 bp, Homo sapien
tgcgctcaccccagagtgtgcctcaatgccatgggacccctcctctggttctgatgctcccctgccagcgccgggtctgtcccatcgcgacctgggccagctggacctgaggcaggtcccacatttctgcggccccctgccccttccccagcatgccctgggggaagaggctgatctcgtggctcccgactggggttgggtggactgctgggaggtgcctcgtgcctgggattctcaggggatccccgagggttgggggaccagctccccatgaggccaatcacaacccagcccagaacccaggacaagccagaggcccctccacgacggctctacagccctctccaggagcccccaacctgtccactcccttcctggcagcccctgggaaaataaaccaacccagacccccacttcagaccactgcctcaggggtctcctcctgggcccaggggccccacctccacctcttcttgctttcctgccttcccccttccttctgcctagccccatctgggcatccacccctcactctcacccaggctcacctctgcctaatgtctgctctcctgtcatttattcccaaagatgtatcgagcgcctactatgggccaggcccaggtctaggacttgaggattcagctgtgaacgaggcagacgggacccctgcctcagggagctccctgttctgtgtgcatgtgtgtgttttggcggggaacagacaataaaagagtatatccatgcatttttcaaaaagcaagattcatttccaattcagattggagttagtgctgaaaagaaaataaaacacaaggccgggtgcggcggctcacacctgtaatcgcagcactctgggaggccaaggcaggcggatcacttgagcccaggagttcaaaaccagcctgggcaacagagtgagacctccatctttacaaaaaaattaaaaaattagtcaggtgtggtggcgcatacctgtggtcccagctactcaggaggctgaggtgggaggatcgcttgagcccgggaggttgaggctgcagcaagctgtgatcgtaccatggtactccagcctgggtgatagagcaatttttttcttttttttgatgtttcaaaaaaattaaaaacagcgacctgatggaagggctacctgacaccaggtggtcaggaaaggctttgaaagcctggaaggttgggccatggggagtcctaggattccaggctgaggcagcacacgtgcaaaggccctgcggtgggacattgagggaagagcaagaggagacccctgtggctggagcggagtgagcagggggagtggtgagaggcgaggtctgcacggaccaggaaggccgaccatgaattgggaggagtttggatttattccaagacagataggaaattctctctttctctcaacctccatttccaagcacagagtctaaattattctaaacaccacccgaggaggcaggtgctgtacagatggggaaactgaggcagcacagagcgcaaaggacaggggggcgtcaaattcctcacttgatcgctccctcagccagccccttcctggaaagtgcttgggtatctttgtaagcctccgtttcttgagagagggccaggtttcgaaccgcagacatgcctctactctaggtaagacccctctctctctctcccggcctcggcggtctgctctgtgcaatggggccggccgagacgccctctctccagccagagtctgagccttcggagaccaccgcgcgactccgccccgtcggccgccactcacgccctctacggctctccattggcagaacgacctgctgccccgcccccacggcgcctttgcgagctaatcattttcttgagactgacagccttgccggcaccgccccccctggggcgggagcaaagcagctgcatatgcggattggttgagaggcagggggcggggtgagttggtgagcgccgattgcgggcagaggcagtggcacatgcggattggccggagagagcggcgaggcagagcatgatgagtgtcgattggacggctgggcccaagtgggcggaaaacggacggtgcagggggtgggccacgtgtccagccctaacgaaacggtaaccagccctgggaagcccgcaagaggcctcagcggtggccgtccgagagccgagaggtgagggtgcccccgcctcacctgcagaggggccgttccgggctcgaacccggcaccttccgggtaagtcctctctcgctgctggcgctatttggagaccgaccttaccgcctagcagatggggaaact

SEQ ID NO: 22597 - DNA, 2300 bp, Homo sapien
cgcacccggccccccaagaggcggcccaaccacagaaggtttctgcacaaccagatctgcaggtgagggggctggtggggaaggtgggcacgggacggggaagaggggaaggagcaaccagcacccttggctgggggagaccaggtacagacagagaggagcagcccccagggctggatgccagcaacagtcaacgtgcatttattgagtgcctactgtgtgccaggccagttagcaaagcagataaagttccttgctgtcgtggaggttgtgttttcatgggggtggcggacggtcaggaatcaccaaaataaataactagcacggtgtgatgcgaccacataggtgacccttgcaaatatgctggccgggggtggtggctcaagcctgcaatcccagcaccttgaaaggccgaggcaggaggatcgcttgagttcaggcgttagagaccagcctgctcacatctgtctttacaggcagttcaccaagattgaggctgccacccagcgcctggccctctccatcctgtcccaggaggcacctccccagagaccctcgctccaaaagccacccccaccgcctccatcccccttcctgggagtggcctgtgctgtggcccccactgaggctccccatgccagcgccagcctgagtctcgctgccctggacacctctaccctcgacctctttgacaacattgcgctcaccccagagtgtgcctcaatgccatgggacccctcctctggttctgatgctcccctgccagcgccgggtctgtcccatcgcgacctgggccagctggacctgaggcaggtcccacatttctgcggccccctgccccttccccagcatgccctgggggaagaggctgatctcgtggctcccgactggggttgggtggactgctgggaggtgcctcgtgcctgggattctcaggggatccccgagggttgggggaccagctccccatgaggccaatcacaacccagcccagaacccaggacaagccagaggcccctccacgacggctctacagccctctccaggagcccccaacctgtccactcccttcctggcagcccctgggaaaataaaccaacccagacccccacttcagaccactgcctcaggggtctcctcctgggcccaggggccccacctccacctcttcttgctttcctgccttcccccttccttctgcctagccccatctgggcatccacccctcactctcacccaggctcacctctgcctaatgtctgctctcctgtcatttattcccaaagatgtatcgagcgcctactatgggccaggcccaggtctaggacttgaggattcagctgtgaacgaggcagacgggacccctgcctcagggagctccctgttctgtgtgcatgtgtgtgttttggcggggaacagacaataaaagagtatatccatgcatttttcaaaaagcaagattcatttccaattcagattggagttagtgctgaaaagaaaataaaacacaaggccgggtgcggcggctcacacctgtaatcgcagcactctgggaggccaaggcaggcggatcacttgagcccaggagttcaaaaccagcctgggcaacagagtgagacctccatctttacaaaaaaattaaaaaattagtcaggtgtggtggcgcatacctgtggtcccagctactcaggaggctgaggtgggaggatcgcttgagcccgggaggttgaggctgcagcaagctgtgatcgtaccatggtactccagcctgggtgatagagcaatttttttcttttttttgatgtttcaaaaaaattaaaaacagcgacctgatggaagggctacctgacaccaggtggtcaggaaaggctttgaaagcctggaaggttgggccatggggagtcctaggattccaggctgaggcagcacacgtgcaaaggccctgcggtgggacattgagggaagagcaagaggagacccctgtggctggagcggagtgagcagggggagtggtgagaggcgaggtctgcacggaccaggaaggccgaccatgaattgggaggagtttggatttattccaagacagataggaaattctctctttctctcaacctccatttccaagcacagagtctaaattattctaaacaccacccgaggaggcaggtgctgtacagatggggaaactgaggcagcacagagcgcaaaggacaggggggcgtcaaattcctcacttgatcgctccctcagccagccccttcctggaaagtgcttgggtatctttgtaagcctccgtttct

SEQ ID NO: 22598 - DNA, 2300 bp, Homo sapien
tgcttcagcctcccaaaggcctgggattacaggcatgagccactgcacccagctgattctgtttacttgtcagcatgagggacctgacaacatcccttgaagggctacacagatgttccggggggttaggagacaaccccacctccccatctgggtccctgagactcctccttggcctggaaagtgctggacacaaggctggcctgagtttcctccggtcactgtctccaaggggctgcgaggctgttctgaaaacaaacctgttgaatccacaccaccttttcagagacagcaggttgcccaaggccattgacttcaaaacctttgttcaccttctggctgcaaagtggggaatgttaaggagagtaagagccagtcttagccatgccaatctctctttctttttttttgagagggtctcgctctcttgtccaggctggagtgcagtggtacaatctcggttcactgcagacttaacctcccaggctcaagcgatcccctcacctcagcttcctgagtagctgggactacaggtatgtacaccacaggaagcttattttttgtagaaatgaggtcttgctgtactgcccaggctgggtgtcccatcccttttgtaatgcctctgcgtgggcaggtaaatgaggggggctgagctgagggcccctttcactactgcagagaccaaaatggcccgaggcaagggggacggaagtgggatccgcacctctgggctttcctagcctggcagccagctgggcagtgcattcccatccacgtctccaccctgcatggcagccgctttgtgtggttaatgctgacgtgaaaggaatgttgggctgagctggatgccaagggtttttacacgcacgaatgcacggagacatcagcaccaagaccctgtaaggtaggggtgggtccacaccaccgcagatcagccctgagttccagcctgcttgtggacttgggaaacggtgtgggaggctggaaaaatccactcattcaacaaacaagtaccgtctgcttctccatcagggcccatgctggttgtttggaatacctgggcagcaaagacacgaaaggtcctcgctgtcatgggacatagataaatgtcgctgagcatgtaagagggacaccacctagcacaggaggctttccagtgggatcttgctgggcagggatgggttaagggtagaagggccttctggcctgagaaacagcatgcagaatggtcttcaagctgagggtactgcctttgagcagtggctctcaactagtgaacatgtggcaatgtctggagatattctttttgttgttgttgttttttttttttaacacagagtctcactctgtcaccctggctggagtgcagtggcacgatcttggctcactgcaacctccgactcctgggctcaagcgatcctcttgcctcagcctcctgagtagctggggttacaggtgcctgccaccatgcccggctaatttttgtatttttagtagagacggggtttcaccatgttggccaggctggtcttgaactcttgacctcaagtgatctgcctgcctcagcctcccaaagtgctgggattacaggtgtgagccaccgcgaaaatctctatctggagatattctgagctctcctacggggtgtgtggagcggggctggggatgctacctgcatctagtgagtgggggccctagagtgtgtaggacagtccccgctgcaatgaatccatcccaaatggcactagtgctctggttgagaaactgcgtttaatgaccctcagaaaagccagtgtggctggaacgctgggttgggcgggggttgagcgtggagaggggctttggagcagctcggtctcccactaaaaccctaggccccacaaggagtctgtggattccagcctcccagaacagacctttgcccagcaggaaccaggtttctgcagcgtctggatgagcgtgcacgaagcacacgcccgaaaatcctgagcacgtggctctaccgagggactggaagcgctccaggcctcgttttcccgctggagcgattacaccctgggggcggggcccgcttcacgggagggatttttgtacaaccgtggtgcatggaaggatttttttgcagatgagagggaatcgggattaataaggggaacttgcgaccccgcgtctcgagctggccgtccctggccttgggctcaccggggcctcggcccccaagacctgacaactggagtccgcgaccacaactgggagaactacaactcccaggatgccgcgcaccgcctgcgcccgagctc

SEQ ID NO: 22599 - DNA, 2300 bp, Homo sapien
agcggcacctgaggacgcacgccccggccaacacgcctcccagcaccacagcccctgccgccggcccccagccccctgctccactggctgctgcgcgggccccgccagccacccaagatgtccacgtcctgccccacctccaggccacgctctccctcgaggtggcggggggcacggcccaggccccgagcttggggccagcagcgcccaactctcagacgttcctcctggtgcaaactgcccagggcctccagctgatccccagcagcgtgcagccccctacacctccgccccctcccgcacctcccaagctcatcctgctgccctcctccagtgctggggctgggggcggccgtgcaaggcagggcccgcgggcagtggggaaagcgggccagggggcgggagtggtctggctgccaggccctgggggtctaggggtgcagggagcggccagcgctggggccagcgggacagggcagagcctcatcgttctgcagaatgtggggggtggggaggcagggccacaggaaatgagtggggtgcagctccagcccctccgaccagccccagaagtaaccacggtccagctccagccagcgcaggaggtgaccacagtccagctccagccagcacaggaagtaaccacggtccagctccagccagcacaggaggtgaccacggtccagctccagcccgtggccggccagctctccaattccagtgggggagctgtggctactgaggcacccaacctgctggttgttcagagcggggcagctgaggagttgctcactggcccgggccccggggaggcgggggatggcgaggccagcactggtgtggtccaggatgtcctctttgagacactccagacggacgagggcttgcagagcgtgctggtgctgagcggggccgatggcgaacagactcgactctgcgtacaggaggtagaaacacttcctcctgggctgacggagccgcctgccaccggcccacccggacagaaactcctcatcatccgcagcgccccagccactgagctgctggacagcagcaacactggaggaggcaccgccacgctgcagctcctggccccaccgccgtcaggcccagcctcgggccccgcggggctccccggggctccagcctcccagatggtgcaagtggtccccgcaggagctgggcctggtgttatgacccctcagggcctgccctccatccagattgtccagactctacccgcagtccagctggtgcacacgttttgaggagaggcagtgattcccctcccgccccgcacagagaccccgactcactgccagccggggcggggcagggtgccgcaggctgggcttgctaataaagacccgagtctccccgcctgtgttttgttttcctggggggagggaagggggcaaagtcatggtcctagcccccgcctgggagcgtggagtcttaagtcttgcgtcctgggtcgcagatggcttgttctgcatcctggggccagccactacgtagggctcagttcccctgtcctgaaaccaaaaaaggccgcaggggtcattatagtggggaggtggtgacatcagactccagggagtgctacttgttcactgtaggtcgccccgctgcccccctcgtgtgagaagtagggggatccttatgcggaagggttctgcgaccccgggcgccccgtgggtggagtggggtccctggggatgggggagtcgggcgccaggatgctgagcgtggccggctcctcccgcgaaggccccggcacggatgagaatccacgcgctggcgtcgccgcccggcgctcaggttgctcagcaacgagggaacgtggggcgggagctcgcgctggtccccagcccgccgcccgtctcctgccggcttccgctcccgttcttccccaggtcccctttccccgttgctccttctctagggataggagaggtcgcttcccggccctccgcagggtcacagctcggttcctcccagcccgccctccggggagcttagcaacggttgctacggcccggagcgggcgccgccccgccccaccgcgcgcggtctgacgtcacttccgcccgcgacccccttccagacccgctcccgaaaccttgtcgaaggaccaaaggcgaccggtgcaggtgcttgctggtccttgttcttgtggcgcgggacggggacgactgtgggggagggggcgctggggaccggggtggagcgagcgtggtccgttctctggcatgtggggagggtgttcgtggaccccagtgcctgggagggagccccgt

SEQ ID NO: 22600 - DNA, 2300 bp, Homo sapien
cctgcccacaggccggcgtgaaggacacggaaaaccgcgtggccctccatgccttgacacggccgccggccctgctcctcctggcggcggccagcagcggcctgcgctttgtcctggcttccttcgccctggccctcctcctgccggtgttcctggctgtggccgccgtgaagctgggcctgcgggcccgatggggctcgctgcctccgccgggtggcctggggggcccctgggtggccgtgcggggctccggtgacgtgtgtggggtcctggctctggcccctggcacaaatgcaggggacggggcccgggtcacccgcctgtctgtctctcgctggcaccgccgccggggcgtgggcaggaggctgctggccttcgcggaggcccgggctcgggcctgggctgggggcatgggggagccccgggcccggctcgtggtccccgtggctgtggccgcctggggggtgggagggatgctggagggctgtggctaccaggccgaggggggctggggctgcctgggctacacgctggtgagggaattcagcaaagacctgtgaagctacagactgacagccagggcaggggaggagggaggggcgccagcacctgatgatcgcctactgtctgcgggttcttttacctgctctccctcagtgagtcctcaaccaccctgggcccagaaacagaggcctgccgaggggaggagcctggcctctgtccacccgtcagcagtgtgaagtctgttgtgtttgagcttctcagagtggaatgactccttttccttcctggccctcgggggcctctcgaggtcagcctctccaacccctacctcagctcctgtctgcactgagaaacctccccgggtgatgtctgcaaagtctgtgctgtccgtgccccaggctgggagagctatctggggagggggagaggaggccgagcagaatacaccccagagttagggtttgcgactccgcctccctgggacctggattgggtcagatgcctgtccttggaggggacaaggttgactgcttaggaggcgcgacgcacagggctgccaggcctggcccctctctgggaaggttgagagctgagacgggcagccctgtcccttcctccagatccgtctggttttttacaccgtttgttaataaagcctgaaaccgctgtgtgcctgtctcttctctgatggctttcccagtctgtctccggacacccccgcccatttctgtctggcttctcctttccccagttaacattaattgttgggggacggtgctggactgggagaaggggaggctgtgagctcaggggcagcccgaggccctgccagcccttctgagtcacgctccccattaccgaattttttccgcctcacagctgcctggtgtgcaggcagtggggtgtgtgtgtgtgtgtgtgagtgtgtggaagagtgtgtggagcccctccccttcccaagccttgacccttgtgctgcttatcccccgaccccagctccctctgggacagtgaagttcaacctctcctctctcagctggggactgggggcttcacactcagatccaccagtgagtgggaggactggagggccgggtctttcagtctcttttcctaacccaggaagtccctcctggtgtctggctgcaaatcttcttgctgctgcaccaagaaccccaggtctgcccagcccccaaccctagcagtggtctcactggatttccctgaccagacaagaggggagacagcaggtgggcgcccctcccgctcatgctgcgccccccccgcacacgtcccccaacccctgtcctgtgccttcctgcagccggccaccccctaagcatctctgggcacagcactttgctggctggagcctgcctggccgtcgtctccatctcccgtgtgggtgtctgcagttggacaccctccctcccgcccgccacccccctcccccccatgcctcagcagacggccagccccctcccgccccccctcccccccaccgtcccctgccgcctccctgcagcctctttcttcctcctggcaaagcgtccagccctgcctgctcctcctcgggcctgggcgcctccagcaggcacttccctccctccctctctccccagctgcctcctcctcttctctccccgctctccttcccctttcaccccatcccctgccctggctgcaaccatgagggtcttggcctgcctccttggtgagtgatccattctccttggggactcggggggcctaggcccccacctctgaccccttagcttgtccagtttagggactca

SEQ ID NO: 22601 - DNA, 2300 bp, Homo sapien
tgttggatcccgtctttggttaaaatgttaactttggttaactgtggatcttttggattaattttgattgtttaaaaatattgcataaaaacgcttgagcccaggagttcgaggttacagtgagctatgatcttgccaccgcactccagcttgggcgacacagccagactttatcttaaaaaataaaaaaatccataaaagtatttattttgattactaacattacccttcggagccctctttggtctccctgcctcccctggctccgcacatctcccagtcccccgctggctcagaatcctcccgtatgctgcacgcttctgagcactcccgccccctcccgcaccccagcaccccacgcatccctccctcacctcaccctcctgcacccgctcccgcaacccgcgtgcccctcggcatccccgagtccggagcatccccgcatcctcccgcagtggaggacgccaggtggcgcctggagccatcggaggacgtagggaggaggggccctagggccgggtgaagtctgccggtgacccatgacgtctcgaggctctgtgcctttccattggtcggctcctcgaggggcggggcgggacgcgtggtgggcggagccggttgacctcagaccgtccgtctgtctttcctcctcctccaggttccccgaggaaaccgtggcccgagcgccggccaccgcggcccgctgcgaccaggacagcgcccccaaccccgtccccaggtccctccgcctctccgggacccccaggcccagcgctgacctctgactccagtcgagagctcactccccactcagccttgacgtccgaggcgacctctgacgctccggacacttcaccacccaccccagacccggcctcccggacgaaccccgacctcatcttgacaagccctgactttgctttgtccacccctgactccagtgtggttcccgcgttgaccccggagccctcacccacgcccttacccaccttgcccaaagagctgacctctgacccttctacaccgtcggaggtgaccagcctttcccctacctcagagcaggtcccagaatctgacacaaccccagatttggacacaactccatactccagtacagtctcagaatattctagatccccagacccctccccaagccctcaccccactactacccctgatcccaccatggcccctgaccccatcacaacccttaaccctactgtgacccctcacttccctaccacccctcaccccaccacgacccctcaccccaccaccatcactcactccaccatgattcctgaccccaccacaacccctcaacccttcaccaccatcactcactccaccatgattcctgaccccaccacaacccctcaacccttcaccaccatgcagcccaccacaacccctcactccacaacccctcaccccaccacgacccctcatcccaccaccatcactcactccaccatgattcctgaccccaccacaacccctcaacccttcaccaccatgcagcccaccacgatgcctcatcccaccacgacccctcaccccaccacgactcctcaccccaccacaacccctcaccccaccacaacccctcaccccaccatgactcctgaccccaccacgaccccttaccccaccactactcctgatcccaccacgacccctcaccccacaactcctgacccttcctcaacccctgtcatcactactgtgtcccttccaacctccttggggacagaactctcctctcccactctagcaccaacagtcaagcccagtctgcacccccagttgaccttcacagcacctgcccctcacacctccacatcccagatacccaccttagagccctctccagccttggagtccagcccctccaggtcctccacagccacaagcatggacccactgtccactgaggacttcaagccacccagaagccagagccccaacctaacccctccacccacccataccccacactcagcctctgaccttactgtgtcccctgaccccctcctttcccccacagcccaccccttggatcatcctccccttgaccccctcaccctagggccaactcctggtcagagcccaggcccccatggtccatgtgtggccccaacaccacctgtaagggtcatggcttgtgagccacctgccctggtggagctggtggctgctgtgagggatgtgggtggtcagctgcagagactgacccaggtcgtggaacaggagcggcaggagcgccaagccctgctgctggggctgacgcagctggtaga

SEQ ID NO: 22602 - DNA, 2300 bp, Homo sapien
gctgggattataggcatgtgccattatgcctggctaatttttgtaccttttgtagagatggggtttcaccatgtgggccaggctggtcttgaactcctggcctcaggtgatctgcccacctgggcctcccaaagtgctgagattacaggcgtgagccaccatgcttggcctcctttacttttttgagtatatagcacattcacacggttttgaattcaaaaagtacaaaaagccgggcacagtggctaatgtctgtaattccagcactttgggaggccgaggcaggtggattgcttgagcccaggagttcaagcccagcctgggcaacatagggagaccccatctctacaaaacatacaaaaattagccagacatggtggcacactcctgtagccccacctactcaggaggctgaggtgggaggattgcttgagcccgggaggtcgaggctgcagtgagccgagatcacaccactgcacttcctccagccagcctgggcaacagaaggagatctcatctcaaaagaaaacaaaacaaaacaaaaaaaaacaaacaaacaaaaaaacaaggatagagtgtagtaaatttctgtcctggaagttagactatgttgccagtttcagtttcttctctcttgttccagttcatctggacacaatcccagaacacacacaaacccagaacaggctgcaggctgtacttgaccttccatttttctcttctacaggttatcacttggagacttaccatatatgcacacggtgagcttctttgttcttttctatggacacctagtattccactgggtggatcagtcatgatttattactcagctctcctacagatgggtgtttagattggtttcagctgtttgcagtgatgtgcagtactgcaatgattaacctggtgcagacattattttgtgcagttccgagtagatgcctctgaagaataaattcctggaattgctggctcggtaagaatgttccaggttctacttgccccagccgtgtatgaaaggacctgtttgctcgcactctcattagcactgtttggcaggaatgtaaccttaaacaaacagcgtcaagctgtgggtatactcctgcaaaatgccttttctgctccagaataggtttctgagatgtcgccaggttggtttcattctgccaatttcagctgaaacattgctgcctccaggaagacctcaggaatcacctcctcccagtgtgagctcagctcagtgccttctgttctctgcattcccatagcagttccctgcctcggagcacacgttcccccacatgcactccagcgtgattgatccgtatctatctgccttccccatcagacagtgagctccggtttttgccactgtgactccagcaccaaggacagcaccagcccatagtaggtgctcagtaaacattggctgctaaggtcccagtgaatatgcgtatatgtagacaaatatatgcaggctggcccgtagtagatattcagtaaatattggtcgcttagggttgaatgagtatatgcaggggctttcacaaagggggaaaccgaggctcgaagtgggagaatccttcacccagacagccaagggaaggctggagccaggttctgatccagagtgccagtacttcctgaagcctctgtcactgattcattcatcttcctcccccggccactcccctggcctgacacagtgcctggcacagacaggacctgataaatgtgtatttgttgaaggaatgaatgaatatgtgtgtgtgcatgttggggagccgggagtagctggacccagtgttccaggccctcagcaccctccgccctctgggagcccgggggacaggcccccagccccctcccctcacaggaccctgtagtgcaagctgccttccctcccctctccaggtcccccgtcctcccgcttccggcttcccagccagtctttcctctttcaggctccgaggaaaggccaggtttccggggggaaggcttaggcagtgacaccgagcccagcctcctcctccaccccccaccacgctcaggcccccctccctccccgccaccaccgtccgcgtttggccggccgtggggaaggaagaaaggagccaaggaggcgaggtaagaacccagccccagcgaccaggaccaagccccaggcccagggctgagaaatcctcaaggcctcgacccggccccaattctgctgatcatgccttcggggagctgcaggcttggcccggaggagatcggcccccctctaggacctgggacccccgacccccaccagcctc

SEQ ID NO: 22603 - DNA, 2300 bp, Homo sapien
ggggccggcgcgtgggaaggggagggggtgagggggccctgcccctcggcggcggcgaggcgggggcggcggcgcgcggtgccggccccgcccctcggagaagcgccgggcccctcccttcctgcccttcccgcccgcctgcgcgcccgcgggaaacaaaggggactcgctgggtcctaacgaccggtcgcggccacgcccggaagccgcgcctgcgcaccggcggccctggtgtgtccccagtgggaaataacccagcaccacatccccaaccacctcgaaacgcctttcctctcacaaagcccacagtcgggtgacccaaagacagataccgaatgatgaggagcgggaaaatggctgcccagtgcccgtaattaacatggcaccggacaggcttcgaagcccatggagtgctaagtggataagatggtgccggtcttttccagctctgtattgcagttggcgcacttcgctttctttttttttccctagtccaactgtacatcctaatcggaggagtccgaggctgtgaaaaagaaatagtatctgctctcatttacgttagcatcgcctagtgtcgccacggagaagccccctcgctctcagctccttgcccttagtctgtatggcgccgtgggtgtccctaagccccgccccttcccgctgccctcacccaagatggcgcgggcctggcttcttcaacctccagggctgggaaaggaaagggaaagagggagaagggcggggatgaggaaggggagccaagagggcgggagaaagggggagtacggcgggggaagggagctgaggcggaagtcgaggggccccccgggtggaagtgacgctgcccccgctgcccaaaatgtcggcgcccagagggaggtgtaagtaattaaagaggaaagccgacggacttccccggcctcccggggccgccccgggtctccaggaccaacgctccgtacgagcgaggtggactcgcctggccccggggcctgcccgacctgccccccaaccgggcgcccagggctgcaccttttaggggcagggggaggggcacaaaaggccggctctcggggcctggggcctggagcagactgggcaagtgggggggcccgctcctcaggctgcggggtggaggaggaggcggggcctagtggctgctggggcggagcaagggctgggaggagcctgagttgggcggagcttagagtggaagtgggaggggcgtggaggagggagagtctggatagaaaatgggagggtcttaggcaaagaggtggggtttgataaaggggcgtggctcagaaggaatggtgggtaggccctggattgaggggtggaaggaaactcattgaggctggttgggtaaagggagcccaggaagcaggagggaggagtttagagtagaagggatggagtttgtctggggtgtggcttagagaagtaggtaggcctagtgaggggggtggagtttaagggtgtaatttggaggggtttaatgcaactatcaggtctttataatgaatgtggaaaggacttgcaggggatgggaatagacttcgtagagaaggcctgagaaggtgacgggagtccagtggagagtcttagaaaggatgtggcttctttaaaggaaaaattgggtggagttttggaagtgggtcttagtggacccgagaggggcttagataagtcaaataacttagcaatcatggtaggacttaaggaggaatccaggaggaacttacgggataatagtcatccaaacagcttacttgttgcgtctttgctgtgcaccagcttaagtgggcacgtagcatttattgccacaattttacttaattctcgccaccactccatgaggtaggtactactattcccattttacagatgaagaatttttattatctgatgttacaggagtaattctggtctccctgcaaggatgactccagtgtgcttagccccaaatctttgccctcccattcgctaagtggtcatcctggaagaggagtgggaggagcttagaggggagtgggagggccttttggaaggaaaagggcttggcaaagaatacaagatccttagggaacattgtgggggactttgaagggagtaggtgggacttaaggaagagtgggagaggcttaaattacagtgggaggggcacagagagcagtggccgcgcattggcgaagagcgaggagaggcttaaaaacactccgtggagtgaggagactatgaagtgattaggaagattttgccacaggcgtggagccgcgagagaagggtttctaaga

SEQ ID NO: 22604 - DNA, 2300 bp, Homo sapien
tgttccctaaggatcttgtattctttgccaagcccttttccttccaaaaggccctcccactcccctctaagctcctcccactcctcttccaggatgaccacttagcgaatgggagggcaaagatttggggctaagcacactggagtcatccttgcagggagaccagaattactcctgtaacatcagataataaaaattcttcatctgtaaaatgggaatagtagtacctacctcatggagtggtggcgagaattaagtaaaattgtggcaataaatgctacgtgcccacttaagctggtgcacagcaaagacgcaacaagtaagctgtttggatgactattatcccgtaagttcctcctggattcctccttaagtcctaccatgattgctaagttatttgacttatctaagcccctctcgggtccactaagacccacttccaaaactccacccaatttttcctttaaagaagccacatcctttctaagactctccactggactcccgtcaccttctcaggccttctctacgaagtctattcccatcccctgcaagtcctttccacattcattataaagacctgatagttgcattaaacccctccaaattacacccttaaactccacccccctcactaggcctacctacttctctaagccacaccccagacaaactccatcccttctactctaaactcctccctcctgcttcctgggctccctttacccaaccagcctcaatgagtttccttccacccctcaatccagggcctacccaccattccttctgagccacgcccctttatcaaaccccacctctttgcctaagaccctcccattttctatccagactctccctcctccacgcccctcccacttccactctaagctccgcccaactcaggctcctcccagcccttgctccgccccagcagccactaggccccgcctcctcctccaccccgcagcctgaggagcgggcccccccacttgcccagtctgctccaggccccaggccccgagagccggccttttgtgcccctccccctgcccctaaaaggtgcagccctgggcgcccggttggggggcaggtcgggcaggccccggggccaggcgagtccacctcgctcgtacggagcgttggtcctggagacccggggcggccccgggaggccggggaagtccgtcggctttcctctttaattacttacacctccctctgggcgccgacattttgggcagcgggggcagcgtcacttccacccggggggcccctcgacttccgcctcagctcccttcccccgccgtactccccctttctcccgccctcttggctccccttcctcatccccgcccttctccctctttccctttcctttcccagccctggaggttgaagaagccaggcccgcgccatcttgggtgagggcagcgggaaggggcggggcttagggacacccacggcgccatacagactaagggcaaggagctgagagcgagggggcttctccgtggcgacactaggcgatgctaacgtaaatgagagcagatactatttctttttcacagcctcggactcctccgattaggatgtacagttggactagggaaaaaaaaagaaagcgaagtgcgccaactgcaatacagagctggaaaagaccggcaccatcttatccacttagcactccatgggcttcgaagcctgtccggtgccatgttaattacgggcactgggcagccattttcccgctcctcatcattcggtatctgtctttgggtcacccgactgtgggctttgtgagaggaaaggcgtttcgaggtggttggggatgtggtgctgggttatttcccactggggacacaccagggccgccggtgcgcaggcgcggcttccgggcgtggccgcgaccggtcgttaggacccagcgagtcccctttgtttcccgcgggcgcgcaggcgggcgggaagggcaggaagggaggggcccggcgcttctccgaggggcggggccggcaccgcgcgccgccgcccccgcctcgccgccgccgaggggcagggccccctcaccccctccccttcccacgcgccggccccgttgcccccgcgcgcgcgcacactcgcgagccccggcgacatgcaaatgaggtacccgagaggcggggggcgcaggcgggagggggggtgtgggggtaggggaggccgggccgcgcgctcccggagcgcgcctccaacacctgttcctgctcccgcgctcgcgccccgcgaagccgtccgggcgcgcgcgcgcagacccccttcct

SEQ ID NO: 22605 - DNA, 2300 bp, Homo sapien
gtggaaaaaagggactggtcccaggtgatatttgaccctgattcctggatgaggaaacatatctgcgatgttaagagcctgggccctggagtcaagacatcattcgttcaaatctttactctctgcgtggccttgggcaaggtgttcgcttctctaagccttaatcaagacttttgcaaaatgggacacatagttctacgtacttgcccagacatgccatgagcataatacccacaaagtgttcatacacagaagctttcaggacacattagccattgttatcaggagcagctaagcctcacatcaaccctctgaatagggcatatctgtcccattttgcagatggggaaactgaggcacaggaaagccaagtcagttgcctaagttcctctgccagtaaatggcagggccaaaactggaaacaggtcttgtgacccgaatgtcccagagaatggagaacaaataaacccaaggaggaaaggggacattacgagggctcagtcctgggtttgaattcagctctgcctataactagcaattgactttgccagtttcctcctctgaaaagtgaataaaccagggttgtcaggagaatcgaataagacagtgggctttaaaatgcccctcgaacactgcctggtgcacagtaagcactcaataaacttcaccaacgccaccaccatcttcccggcgcccactcagatactgggagcatgggattggggtgtaacggaggggaaggggaggcacaggtgcagctggaagcaggtgctgcaggtgcccccctgcacccccccctcccctttaacagccacatagactgctgtccagagaggagcaaccacctttccatacggttcgctcccacggggtagcctagtctaggagtctggtctttggaacggtggaaagggggagactggtcccccgaccctccccgtcccctcgccccggtactgacgcgcccatcggcccccgagctgcgaagcccaagcgcggggcgggccctgcgggggcgacggccaatgagcggcgccgggtaagcgggcggcgggggctgccaggaagggggtctgcgcgcgcgcgcccggacggcttcgcggggcgcgagcgcgggagcaggaacaggtgttggaggcgcgctccgggagcgcgcggcccggcctcccctacccccacaccccccctcccgcctgcgccccccgcctctcgggtacctcatttgcatgtcgccggggctcgcgagtgtgcgcgcgcgcgggggcaacggggccggcgcgtgggaaggggagggggtgagggggccctgcccctcggcggcggcgaggcgggggcggcggcgcgcggtgccggccccgcccctcggagaagcgccgggcccctcccttcctgcccttcccgcccgcctgcgcgcccgcgggaaacaaaggggactcgctgggtcctaacgaccggtcgcggccacgcccggaagccgcgcctgcgcaccggcggccctggtgtgtccccagtgggaaataacccagcaccacatccccaaccacctcgaaacgcctttcctctcacaaagcccacagtcgggtgacccaaagacagataccgaatgatgaggagcgggaaaatggctgcccagtgcccgtaattaacatggcaccggacaggcttcgaagcccatggagtgctaagtggataagatggtgccggtcttttccagctctgtattgcagttggcgcacttcgctttctttttttttccctagtccaactgtacatcctaatcggaggagtccgaggctgtgaaaaagaaatagtatctgctctcatttacgttagcatcgcctagtgtcgccacggagaagccccctcgctctcagctccttgcccttagtctgtatggcgccgtgggtgtccctaagccccgccccttcccgctgccctcacccaagatggcgcgggcctggcttcttcaacctccagggctgggaaaggaaagggaaagagggagaagggcggggatgaggaaggggagccaagagggcgggagaaagggggagtacggcgggggaagggagctgaggcggaagtcgaggggccccccgggtggaagtgacgctgcccccgctgcccaaaatgtcggcgcccagagggaggtgtaagtaattaaagaggaaagccgacggacttccccggcctcccggggccgccccgggtctccaggaccaacgctccgtacgagcgaggtggactcgcctggccccggggcctgcccgacctgccccccaaccgggcgcccagggctg

SEQ ID NO: 22606 - DNA, 2300 bp, Homo sapien
gcggtgatagggccactgcactccagcctggatgacagagcgagaccctgtctcaaaaaaaaaattatccgtcctccttgccccactctcacgcagttcctcctgttcttccccagctccaagcccctactctctattagatcaactctatccatcctctttaaaccgctctcactttctgcggaccaacccctaaacctctttaagccccacccaactctaaccctcttctaagcccccgccccaggtcccagcctaactgccccgcaatctcagccccacccctcgctccttagccccgccccaatccacaccccttatctctaaaccttacccagaccgtcctgctcatacctttgtcttaatttttccttccaaacagtaggtcctcaggacaaggaggtggggcaaagtggctgcagaatttctgggaattggctaggagagaggcggtcggacctacagtcaggtctgcatggaaggttcaatgtttttagttagattggatgtgtactgggaatacagctgacccttgaacaacaggggtttgaactgcaggtccattgagaggcggacgttttttcacccaaacaccggtggaacatacagtatacgaagggcggattttcctacatccgcgggttccgcagggcccactgctggacttgtgtatgcccagatcttggtatctgcgaggttcgtggaaccaattccccgcggactccgagggacccatggactttggggtctgatggagatggggaaggggccaaggttccccccaaaaccattctttggcgagcaccacgctcatgaggcacaggaagtggggtcctctccaattccccgcactcccgacaggacggtgtagccgaggaagaacatttgaaggcaggagaggatggcatcccggcacggaacacacacaggcagccagcaggcagagatttatttccacagcccctgcctccaagggtctgttagtctgggggaggggggctgaaggcagctggaccccaaagtttaggtctccaccctccacctgctcccacaacgggaagaccaccggaaacaagggtgtcccggccccctggctcaggcccagcaccagccaaactccctgctctaaacctggcccagggagcgatggccgggggtgtgggtcaggccggctcccctttcccctctgtctcctcctcctcctcggcccctgctgtggccgggatgccctcctcgtcccacggcggttcagaccctggatctggtgcacacaggggtacccccatggcctccgggtgcttgcgcttcgcatggcgccggagcgtgttggcctctgtaaagcgcagccggcagatggggcactggtacgggcgctcccccgagtgcacgcggtggtggtgcgccagctcgcccgcctcgcggaagcggcgggggcacagcgggcagcggaagggccgcaggccggcatggatgttgcagtgccgccgcaggtggctggagcgcttgaaggtcttgccgcaaaccttgcactggtgcggcttcagctctgagtgcgagatgctgtggcgctccaggtcggagaggtaggggaaggcccgcaggcacaccgggcagaagtgtggggccttcctggggccagagccctcaggcccagccgctgaaccttcagagaccgtatagggcacaccctgatcatcgatcaggaggaggtcgctcccgccactgctgcctactggggctgtcaccccctgcacctgcaccagtgggggctcctgccctgacttgggggggcggccccgcttgcgagggagggaggccttgagtgtccgatttgaggaggtggctcccccaggacgacggcctcggcggccccggggaacaggaggagataaggccagaggtttctcttcctccccgggcaaaggcgaaggcaacgggtctgggctgggggtgtccattgagcagtggggggcttgggtctgggcactggagccagctaagaggagagaggggcagagtcagtgctcacagggtctagagcacccctgtgtcccccaacacctcgcccatccctctctccaagtctcttgacaaaggtgtgtttgacattcatccagatacacaattttagctatgctggtgggtaaaacagtgagatgatcttgtatcagctgataaacaggcacttccctgagctccaccagacatccctatgcctccctaactctccttctggatctagaagttcaagatcaacatgagcaacacccctccccacctccccacaaaaaaaaaccttc

SEQ ID NO: 22607 - DNA, 2300 bp, Homo sapien
acaccctgggaacaaatccgaacgttccttctaaaccaacgcaggccgactcgaggctctagcagtcagtggaagacctcagcggaactgaagaggctttgctttgtttccacagtaaaggtttttgtggttacctctgcaccacttgcgataacgtaatgacgtgtcacacctgtagtcccagctacttgggaagctgaggcaggaaatttgtttgaaccaaggaggtggaggttgcagtgagctgagatcacgccactgcactccagcctgggctgtttctcaaaaaaaagaaaagaaatgaaattatttcacacccaagagattagcgaacattttaaagtttgagtatcagatattgataggaatgttaagcaacaaaggtccctatttattgctagtgggagtgccaaatggtagtaattattatagctaactcatagcacctgctgtgtgccatacattgtccaaaatactttatatataatgacttctttaatcatcatagcaactgtgtaaagtaggttttattatcaccctcattttgcaaattaggaaacctggacagaaagagctgacttaagcattagacacagtagtagatacagtgcctagggcccatgatactcttagggacccacaacatttaaaaatttattttaggccgggcgcagtggctcacacctgtaatcccagcactttgggaggccgaggtgggcggatcacctgaggtcaggagttcgagaccagcctggccaacatggtgagaccctgtatatactaaaaatacaaaaattagccgggcatggtggcgggcacctgtaatcccagctactcaagaggctgaggcaggagaatcgcttgagcccgggaggcagaggttgcagtgagccatgatcatgccactgcactccagcctgggcgacagagtgagactccatctcaaaaaaaaaaaaattattttaaaatcaaaagaaaagaagggaaatatagctttggaagaccaaggcagaaggatcgcttaaggctaggagttcaagaccagcctgggcaaggcaagacagcaagatccccatctctataaaagaagaagaaaggaggaggaggagataattcagcctaagtggtgtttatctttattttataccaacatatcacaaaatataatttcatatatatttatgaatgaaatgatcatgcttaggatcatgtttaagtatctcctatcctgccctttcaagaaaactatttaaagatgtttccaaactcttccatgtctcttctcagtggtttgtcacaatgcttctacagtgctacacaaaagaaagagaaatggtccagagaagtgtagtgacttatccaaggtgataccaccagaatgactaaacggggcagctaagaagagccccgtccttgatgctgctgaaaaccccgcgtttttgagctctttcctcccaaacataacatcagcttgcgggtttttgcgtcctcccaggaccacctgtgttgctgtttactgaatatttttctccacactgccttttttttttttttttttgacagagtctctgtcactcaggctgcatgcagtggcgagatcatggctcactgcagcctcgacctcccggcctcaagcgatcctcccacctcagcctcccgagtagctgagaatacaggcatgagccaccgcacccggcctacaccgacgtttataaacttggcgtcattacgttgtcatgagcagtgcagaggtaatcacaaaaacgtttaccgtggaaacaaagcaaagcttcttcagttctgctgaggttcccctgacagccagagcctcgagtcggcctgcgttggtttagaaggaacgttcggatttgttcccagggtgttacaggcatcctagcgccacacagagcgtaccctcggagggacagacaggtaattagagagggaacaactcacattctcccgggctcagccgccacgccccgccccgccacgccccctgctgcaccacgccccctcgcagccccgcactgcgcctgcgcagtagctcttacgccagttcgagccccaccccctttcagagcgaacattggccttgggggcggggcttgggcacaagatggccgctgcgcgcccagaggcccagagtcggagctcaccgactccggagtcgcgatcccaggagccactggacctggtgcgggcaaggaaggggcctgggcgtggggctcgaggtgggaggaggtcgtagtgtggggggcgggtccggggcgtggcctatgagggggtgggcgagggag

SEQ ID NO: 22608 - DNA, 2300 bp, Homo sapien
tttttgagacagggtttcactcttgttgcccaggctggagtgcaatggtgccatctcggcttactgcaaccttcgcttcttgggttcaagtacttctcctgccccagcctcctgagtagctgggattacagtcacacgccaccacgcccggctaattgtgtatttttagtagagacggggtttctccatgttggtcaggctggtctcgaactcccgacctcagatgatcctccgcctcagcttcccaaagtgctgggattacaggtgtgagccaccccgtccggcctctttaggttatctttagagctggatatcatttccctccatcacatagccttgcagagggaagtgacatcattgttaaccaaaataagttactgaggcaagagcctcaatcactccagagcttatatatccagagcttgagggcagacctgggaaaggcaagagtcacagaaaacctctgtggcttatggaaaggttttcaggaggcttagtatttatacatttccttaaaggagggaaggcaggtgggaagagggtgacagatggaagaatgattgagctcatcgtttttgttctgtacctgggaagataagcattatcagtgggaaacctaacagactttagttttaggagctagacttagattgcaaacctaaagttacaagggacatgttcttcttcttattattatttttatttgagacagagtcactctgtcatccacactggaatgcagtggcgccatcttggctcactggaacctccagctcccaggttcaagcgattctcctgcctgggcctcccaagtagttaggattacaggtgtgcgccaccacgcctgactaattttttttttgtatttttttttttagtagagatggggtttcactatgttggccaggctggtcttgaacgtctgacctcaggtgatccgcccgcctcgacctcccaaattgttgggattacaggcgtgagccacagcactcggcccatgttcttgttttatgggaggatggaggacagcaaacaacaatgtgtactggtggtcacgtggaggtacttgaggcgctttgtttttctgtgagggtctggctaacgtgtaatgctttgacacaaggttctgaagcaacagctgttgatctgggaagcagatagcagtgttgcataactcagtctccaggcttaaccttccctttggcataatgaatttggcagccctgagacttttaaaataaaagtctttacatcctactagccagctttgactagcagtgtgatccagggccaatgactgcccctctatggccttggcgttaccacctaaccaatagggatacggtactccattttcttgccatggagcaaatcaagagttagggcctgactgtcttcaactgtctcatgagttgaagaatttcagccctctgcctttgctctgtagcaacagacaaatcactagacctttctgatttcaggtcctatttgtagaaagactttgtactgtctttcctactctagaaagtctttcctggccgggtacggtggcacacgcctgtaatcccagcactttgggaggccgaggtgggtggatcacttgaggtcaggagttcaagaccagcctggccaacatggtgaaatccccatctctactaaaagtacaaaaattagccgagggtggtggtgtgtacctgtaatcccagctactcgggaggctgaggcaggagaatagcttgaacccgggaggtggaggttgcagcgagccgagatcacacactgcactccagcctgggcaacagagcgtgactccgtctcaaaaaaaaaaaaaaaaaaaaaaaagaaagaaaagtccttttttttttttttttttgacaaaagccatctctgttgtattccctccctcagcatccggcacggcgccaaatagtgatttcattttaacttttgtgtagtgtgtgtgtggagtagcaaggtgcgcgacgcaggaacctttctcttgtgggtgcgtttctggcccgagtgctttcctgctgctctccgaatccggaagctgctggagaagtcggagcatcccggaagtcgtcactgcggccgcttccggacgtgaaagtttgctgcgtagggatagggagaccgggccggattgcggggagtgagcaggttcagcagtgacggcattcttaagagtcctgcccaagtgagggacttggggtgtgggacagagtggcccccagggcagtgggcgttggaaactgagaggccctgcgaaggaggcttggggaggggctacggtgacc

SEQ ID NO: 22609 - DNA, 2300 bp, Homo sapien
gcccgggagttggaggttgcagtgagcctagaattgcgccactgcactttagcctgggcaacagagcaagactccatctccaaaaaaaaaaaaaaaaaagaaaaaaaaaagatttggaggggacagacatcttaactatatcagggatcttggcaagacactcaggttggataattgtctaagtagaccaggggttctcagctaggagccatgttgcctcctagaggacacgggcaatgtgtagagacattttgggttgtcacaacttggggttgggggagggtgctactgccatctggtgggtggaggccaaggatgctgctcaacactctacagtgcacaggatgggcccccacaacaaagagtggtccggctcaaaatgtgtggtggcccacgcctgtagtcccagctgtttgggagactgaagtggaaggatcacttgtgcctgggagggtgaggctgcagtgagccagaagcatgccactgcactccagcgtgggcgacagagtgagactctgtctcaaaaaatatacatactgcccagtaaaatgtttaaaaagtaccttgtgtcccaaaccaaatataactgtgaggccttttgggcccttgggcctccagtttacaactggttgacagtggtctctggaattgttccataaggtaggagccatatgtggcttaaattttgattatgggaaattagtattttttgagacagtctccctctgttgcccaggctgcagtatagtggcacgatcttggcacactgcaacctccacctcctgggttcaagcgattctcctgcctcagcctcccaagtagctgggactgtaggggagcaccactacggccggctaatttttgtacttttagtagagaaggagtttcaccatgttggccaggctggtctcgaactcctgacctcaggtgatccgcccgccttggcctccgaaagtgctggggttacaggtgtgagccaccgtgctgattatgggaaatgtaatacaatttaaaattcaggtcctctgatacaccagccacatttcaagagtgtaagagtcccacgtggctagtgactgtcatagaactttccaccattgcagaaagttctgatggacagtgctctaggatgtagctgtggcaccccagggtcttggggctcgctgtgacagttactcctcttctgtcccccactctcagctgcacctgcagatgctgctgctgccgccctcctgcgaggccgtggcgccacgtggctggaggaggagctgcagctgccccgagtgctgccgcgtgtgcagctctccagtgcggctgcagcgccaccgcgcgttgctttcgacgccggagtccttcgcatgcgcagccagcgcccgggcctcaagtgccccaggacctggcgcagcccgcgagcccgcatcaggcttccagtgggccccgtgggcagtgccagcctttcccacctccgcatctggcaaagcctggccttcgctgcgcttcggtgtcgccacatgccttctggaaatatcacacctccccacctgcgcatgcagccgtctggccctctgtgggcctcggttcccgcatgtgccccgtggaaagaacataccttccccaactatctggcagcgtctggccttctccgggcctcggcctccccatttgctgggtggagaatcacggcccggccacatcggagccaatggctggtctctggacctcggtctccacatttgctcagccggcaggaacatcccttctcccgccctctacctcggtgggtggccacggccgagcaggcagcgacggcccagtggaaagaggacaaacccttgtgggccttagggcgaagacgtaactttgcttagtctcggtttattggccgatctcttgtcaagcggcggaatcgttccgttcgggaggtgggaggggagcggggccgccgggggcgggcgtcttcagtggaccccacgcctccggtcccctccccgcagggcgctccgcagaggcgaggggtgggagcgccggctccaggcggcggaacctccgcactgggctcgcgcgcttccggccggcgccttttcccagggactccgccaacccctcgcacccccgcgcccccagtccccgcgtccccggcgccgccggcccggagctgcccggaagtctcggttccgccgccggcgctcgccaggggaagcccggggccgcccgggacctcggcccgttcctccggacccgagaggccgccgcacggggtacgggggccgggatggagggaggagcctggccctgggacg

SEQ ID NO: 22610 - DNA, 2300 bp, Homo sapien
gggagcagagcaaaagaacgggcgggggaccacgctgtgtgtaacagggagagggatggggctcctggaagaggtgaacacgaggagaaagagagatgccagacgtacacagaaaggaggggaaagtgggcttgggagaggtgctgtgggaagcggagtcccggagcctggtgtgcataacggggtttgggagaaggcccctgatgggtacagaaagaagtaacgatgtcaccgccatatatggggggcgagagaaaagggggcctttggggagaatgtagcaggtagccaggttgggggggcggggtatacagaaggaaggcatttgagccattttggggtgtatagatgtagtaagacgatgggttccgtagtggggagaggtgactagacttcgaggtgctaagtgtaggaacaggatggaaaagccctagtgaaatgtggggaattgggttagtggggctctggggaggtacctagagaggaagtgagggaggccacggaatatgaagatggggaggccctgcggcatgtagtggggacggagggccaggaggccgatacgggggccggtgggggggtagggggcggcaaagggaggggaagtaaactgaactggggctgggcaacaggaaaaaagaagaaaccacagattagagaaatctcggcggtcaggaggcccggggtctaagatgtaaagaggtaaacagatttagggattgattgtctgctggggtgggttgagaggagaaaagggaagaaaagtcgggggactacgtcctcagacctgacctgagtggtgagaggtggacccaggaggagtggcaggtggtggcggggttttgcagagctcagttggaggccctctccgaggcagcttgatggaacgtgggagagccgggctggagtcacagtttttattttgctagggaggtagtcagtggcgcacaaagggtaacaagcagtgatagtggggatgctttccattttaggaaacttttcctaaaaggaagtggcaattttaactaatctcccctccgccgctcccagctgccgctccagatgctgctgctgccgccgcggccaccccaccctcggtcctcctctccggaggccatggacccaccgccccccaaggctccccctttccccaaggcggaaggcccctcctccactccttcctcggcggcggggccccgacccccgcggctgggccgccacctcctcatcgacgccaatggggtcccctacacatacacggtgcagctggaggaggagccccggggcccgccccagcgcgaggcgcccccaggagagcccggccctcgcaagggctacagctgcccggagtgcgcccgtgtctttgccagccctctgcggctgcagagccaccgcgtgtcgcactcggacctcaagcccttcacgtgcggcgcctgcggcaaggccttcaagcgctccagccacctgtcgcggcatcgcgccacgcaccgcgcccgcgccgggccgccgcacacctgcccgctctgcccacgccgcttccaggacgccgcggagctggcgcagcacgtgcgcctccactaagctcgagacccggcctgtgctgccctgcccgtctcagggccaccaagtctgacccacacagcgtcactcactcccacacacaccccctggctctgctgaggttactgccttaccctgggcctcagtttccccaccttccaaagggaggagcatcattccttccttaccccctttctagctgtgtgatgtagaccaaagtcgttgcccctccctgggcctgggaaccagtcggaactgggttccagtccagctgtgctgtgtgagcctgtgcaagtgacatgacctctctaaaccttggttttctgctctctggagcggtgaaccggtggttgtctgcggggaagagatgataaagagcacgggcacggtctggttcatttctgtatctaccccccttccgcccacgcccccgaccctttgctcaataaacattccgcactccattttcaggctcttccttgcgtgtgcgtgcacgttgggtgctggggggtggagaccggatcttcctcgcttgggtactttcctctcggtgtgtgtttctggccggagccgtttcgcgacggcccgggcgccccgccccaaccttccttccctagaccctcttctctcccttcggcttctctctttcggccggcgccgccagttcctggggcacacccagaggtccccttctcgccgccgcctgcaactgcgagggtagcccggggccgcttggagtc

SEQ ID NO: 22611 - DNA, 2300 bp, Homo sapien
ggagtccaatggcacaatctcggatcaccgcaatgcctcctgggttcaagcgattctcctgcctcagcctccctagtagctgggattacaagcgtgtgccaccatgcccagctaattttgtatttttagtagagacggggtttctccatgttggtcaggctgttcttgaactcccaacctcaggtgattcacctgcctcggcctcccaaagtgctgggattccaggtgtgagccacagcgcctggcctctttttttttagacggagtttcgctcttgtcacccaggctggagtgtaatggcgtgatctcagctcactgcaaccttcacctcctgggttcaagcgattctcctgcttcagcctcccaagtagttggggttacaagcgtgtgccaccatgcccagctaattttgtacctttagtagagatgggtttcaccgtgtttgtcaggctggtctcgaactcctgacctgaggtgatccacacacctcggcctccctcagggcactaggcctcgaaacaaaagttttttttttttttttcttttgagacggagtcttgctctgtcgcccaggctggagtgcagtggcgcaatctcggctcactgcaagctccgcctcccgagttcatgccattctcctgcctcagcctcctgagtaggtgggactacaggcgcccgccaccatgcctgtctaattttttgtatttttagtagagacagggtttcactgtgttagccaggatggtctcgatctcctgacctcgtgatccgcccccctctgcctcccaaagtgttgggattacaggcgtgagccactgcgcccggcccacaaaaatttctttaccatagttagctttagtttgtgcatttttttttccatcaactattattattactatttgagacggagtctcgctgtgtcgcccaggctggagcgtggtgcgatctcggctcactgcaacctccacctccccggtttaagcgattctcctgcctcagcctcctgagtagctgggattacaggtgtgcaccaccacgcccggctaaatatttttttaaactgctgatttcatcctattctattgaattctccacccatgaacctgtagtttggaaaagaccaatctagggcagatggctccccctggaatttttggaccaggctgcagttaatctgtaaagtggggaggggaggatcatggtcacagctttgcaggcggtgcagacatttagattctccctccatcgggttaagaccttgctcttataagggctggccacagtccagagcttggatgcttctggtgaacaggagaggcaggtggagctgagcctgaagcttaataaacatctgcttattcattcatttttcttgcctattttgtgccaggcactgtgctaggcctcatttgctcttccgacctgtttttttgggaggaagaacaaatcttccgttcatactccccagagtgggaaagagcctcccagaggctgccatcataccccaccatctgacctcaaataataccagcagcgctcctctcttcagccctgacgatggccaggtgctgggctgagcttctgtgtgtcgcatcactgcatcctcacaataaatttagaagggcttgtaatttccccattttgcaggtgagttaacaggctggggaggagcaggaacagtcaggactggaatctagctttgctccaaagccagctcttaattaccaacatggggatgggggtggcgtgttcctggccctcattttccgggagaggggtaactcccccgattttggcccccacatccctgagaaccttggggtctggctgtaggaggtaggggagctctgaggggtccgcgctggctagttcctgagagagcgttaaaagtagattctcctttcgctccaactttctcggtgtctcaaacactctcctgccttctgggcccattgggcacaccgccacccaatccggggacccccggagactcgccagctctccaggatgggaatttcgtgatgttccctgcctgagcttcggggagggcgggggagtgctgtaaggggctatcgcgcaagtgcagaccctctgcttctgccgcaaacggcgggcctcacctggacccggggactcttcaacgaggggcgctagcctggcccgactgggcgagtccccgcgtccctgcccgttccgtcgctcagttccacgacacgctcccctgccgccccgcctgttcgcgggtgggtgggcgcttccctcggctccccgtgacactttgcagacgctccccggcgccg

SEQ ID NO: 22612 - DNA, 2300 bp, Homo sapien
tttttagtagagacagggtttcactgtgttagccaggatggtctcgatctcctgacctcgtgatccgcccccctctgcctcccaaagtgttgggattacaggcgtgagccactgcgcccggcccacaaaaatttctttaccatagttagctttagtttgtgcatttttttttccatcaactattattattactatttgagacggagtctcgctgtgtcgcccaggctggagcgtggtgcgatctcggctcactgcaacctccacctccccggtttaagcgattctcctgcctcagcctcctgagtagctgggattacaggtgtgcaccaccacgcccggctaaatatttttttaaactgctgatttcatcctattctattgaattctccacccatgaacctgtagtttggaaaagaccaatctagggcagatggctccccctggaatttttggaccaggctgcagttaatctgtaaagtggggaggggaggatcatggtcacagctttgcaggcggtgcagacatttagattctccctccatcgggttaagaccttgctcttataagggctggccacagtccagagcttggatgcttctggtgaacaggagaggcaggtggagctgagcctgaagcttaataaacatctgcttattcattcatttttcttgcctattttgtgccaggcactgtgctaggcctcatttgctcttccgacctgtttttttgggaggaagaacaaatcttccgttcatactccccagagtgggaaagagcctcccagaggctgccatcataccccaccatctgacctcaaataataccagcagcgctcctctcttcagccctgacgatggccaggtgctgggctgagcttctgtgtgtcgcatcactgcatcctcacaataaatttagaagggcttgtaatttccccattttgcaggtgagttaacaggctggggaggagcaggaacagtcaggactggaatctagctttgctccaaagccagctcttaattaccaacatggggatgggggtggcgtgttcctggccctcattttccgggagaggggtaactcccccgattttggcccccacatccctgagaaccttggggtctggctgtaggaggtaggggagctctgaggggtccgcgctggctagttcctgagagagcgttaaaagtagattctcctttcgctccaactttctcggtgtctcaaacactctcctgccttctgggcccattgggcacaccgccacccaatccggggacccccggagactcgccagctctccaggatgggaatttcgtgatgttccctgcctgagcttcggggagggcgggggagtgctgtaaggggctatcgcgcaagtgcagaccctctgcttctgccgcaaacggcgggcctcacctggacccggggactcttcaacgaggggcgctagcctggcccgactgggcgagtccccgcgtccctgcccgttccgtcgctcagttccacgacacgctcccctgccgccccgcctgttcgcgggtgggtgggcgcttccctcggctccccgtgacactttgcagacgctccccggcgccgggcatgggcgccgccgccgtcggtccccgagccggattccgcgagcgggtgggtgagcgcggggggcctcggcccctcggaccccgggcacccgcgggcgggggatggtggccgcgtttgcacccccgccctagtgcatgttcccgctggaatcgttccacgaccgctccccctcccacccgcgggacaaagggcgggggcggggggggcgcacccccacgcgtgacctttccccgtactgcgcacgcgcccagcccccaccaccgggggacggtccgcccgcccacgcgagtgcgggggaggggtgtgggggccccgaaggtagaggaggcagcgcgcacgggctggacctcctcctaccctgggaagttggggcagtttccccctgcacctgcctcttccttaggcctggcagtggcccgcgatgagagagggtccttccccttcaggctaggtgtccctggtcaggcgaccccttggggcacccagcaatttagggcttcagcttccttttccttcgatacccaggagcccacgtccccagctcacttctcccccaggacctaggcggctgggccccctgcccctgactccaggagcccaggagtttgaagcccaggcgcgttttgcctcagtcctggggtccaggctccctcctccctcagaccaggggtccaggccagaaggtccctcctgtctcactt

SEQ ID NO: 22613 - DNA, 2300 bp, Homo sapien
ccgcgcatggcctgtcctgggtttacttttaagttttggtccaccgtcgagggcagggccaccttgggcacctccttaactttcatcagtaaggaggaggtgcgcagtaggacctacctcacggggagggtgagacttgaataagtgaattcacctgaggcagggagacgagggtgatggctcggggtgtcggggggtgctgggaccgcgtgggttgaacccggcctcttggctcattttgtctcctcactctccttcctgggcctgcctcttcccatttcccactggtccaagatctggctgcgattcttcccctcctctctgccccttccttgcctgttgttctccgtctccacctgcaccggcccgtgcctctgctcgccgagatcctttcttcccatggccgtttcccttcccgtgtccgccccctcagtcttgtgccctgcccctcactttcgtgtccccgcctccacccctcagtgaaggacgccgacggggtcctctgccggtacaagaagatcctgggcaccttccagaagctcaagagcatgtcgcgggccttcgagcaccaccgcgtggacaggaacaccgtggcgctgaccacgcccatcgccgagctgctcattgtggcccccgagaagctggccgaggtgggcgagttcgacccctccaaggagcgcctgctcgagtactcccgccgctgctttctggccctggacgacgagacgctcaagaaggtgcaggcgctcaagaagagcaagctgctgctgcccatcacctaccgcttcaagcggtgatcgcaccacgcctccgcgcctccacccgggccttcctcccccgtggaccccggtggatgacctgcccctctccccgccgcgcccctgcccctcctcctcgctccctgggttgggggctcccttagccgggcccccaagcgcgacggccccggaccggccgcggccccttcccgaacgccggcacccccttccgcttgggctgcccagccctgtcctcgccgggccccttcctcctggaaaaccaggcaggcgggtgcccccccctcgagtgggggactgtacagaccccgtctccgccctggccccgcggaggagctgcccacctgattcccggacagacctccccaactccgcgtgagacagagaattattcagataatttaaattaaaaaacgacgtgaaaatttggaataaacttggcctcagcctcttcctaggagggggacgtgcctgggagggggcggccgtcgccccgaagacggtgacggggttgcgggggcttccaagggggtgggtggtcaggcgggaggacgggtaggatacggtgtaattagccccccggaggcagagatggagagtgaagcagctgcgccccagaaaactcggaggcagagctcgggaaaagaagcgcggacacagccgggcgcggtggctcacgcctgtaatcccagcactttgggaggccgaggcaggcggatcacgagttcaggagatcgagaccatcctggctaacacggtgaaaccccgtctctactaaaaatacaaaaaattagccaggtgtggtggcgggcgcctgtagtcccagctacttggaaggctgaggcaggagaatcgcttgaacccggcaggcgaaggttccagtgagccgagatcgcgccactgcactccagcctgggcgacagagactccgtctcaaaaaaaaaaaaaaaaaagtaaaaagaagcgtggacactacccgctgggctacccagaccggagcgcggcgcgagaggcgtgagtcgatgacctctagcgagggaggccacctagcggccaggccaagtctggaggatacttccgttgggccgccagggggcagtaacgccagatcatctgtctcccggaagtaatgccagatgatccgtctgccgcgcctgcgcggcgggaagagccggagcgcgttgatgtggttgccgagacaaccaagagggtggccggatttaacggctggggattaagcactttcaccgttgtaagggaaatctcgcgcacgcgcaatggggactgaaacctggtccccgcaacccccttcacgggagcagtgggagagcgcgccacagaacgacttttacgcaggcgcagaagcctgtttcccctcacccgcggcttccaccctgcgcaggcgcaaaaagccgcgctggcaacctccgcagcggtcgcgcgcacccttcatccctcttgctgcttttgtctggcacaaccttctcaggccctccgcgaggccggccctttttttctttcact

SEQ ID NO: 22614 - DNA, 2300 bp, Homo sapien
ctgcccagccctgtcctcgccgggccccttcctcctggaaaaccaggcaggcgggtgcccccccctcgagtgggggactgtacagaccccgtctccgccctggccccgcggaggagctgcccacctgattcccggacagacctccccaactccgcgtgagacagagaattattcagataatttaaattaaaaaacgacgtgaaaatttggaataaacttggcctcagcctcttcctaggagggggacgtgcctgggagggggcggccgtcgccccgaagacggtgacggggttgcgggggcttccaagggggtgggtggtcaggcgggaggacgggtaggatacggtgtaattagccccccggaggcagagatggagagtgaagcagctgcgccccagaaaactcggaggcagagctcgggaaaagaagcgcggacacagccgggcgcggtggctcacgcctgtaatcccagcactttgggaggccgaggcaggcggatcacgagttcaggagatcgagaccatcctggctaacacggtgaaaccccgtctctactaaaaatacaaaaaattagccaggtgtggtggcgggcgcctgtagtcccagctacttggaaggctgaggcaggagaatcgcttgaacccggcaggcgaaggttccagtgagccgagatcgcgccactgcactccagcctgggcgacagagactccgtctcaaaaaaaaaaaaaaaaaagtaaaaagaagcgtggacactacccgctgggctacccagaccggagcgcggcgcgagaggcgtgagtcgatgacctctagcgagggaggccacctagcggccaggccaagtctggaggatacttccgttgggccgccagggggcagtaacgccagatcatctgtctcccggaagtaatgccagatgatccgtctgccgcgcctgcgcggcgggaagagccggagcgcgttgatgtggttgccgagacaaccaagagggtggccggatttaacggctggggattaagcactttcaccgttgtaagggaaatctcgcgcacgcgcaatggggactgaaacctggtccccgcaacccccttcacgggagcagtgggagagcgcgccacagaacgacttttacgcaggcgcagaagcctgtttcccctcacccgcggcttccaccctgcgcaggcgcaaaaagccgcgctggcaacctccgcagcggtcgcgcgcacccttcatccctcttgctgcttttgtctggcacaaccttctcaggccctccgcgaggccggccctttttttctttcactttccccacccggagagccaggtgccgagaactaggacctcgtccccttctctatcccttcccctgatccatctcgtctctgttctccttcccttttccgttcccgaagccggaaggagccgaggtacccacggaaaaagtcgaagctgtccccggagagtgaggccttcacgaagcggtggcggaaggagccgaagttctctgatcggaggcgtgagcaagtggcatctccggaaagagccgaaacacggactcgagcttaatcccaggaggggcccgagggcgagatccggaaatctccggaaagagccgaaggccgggacggttaggattgtcggaagtggccgattgcttggacagggccggcggagaagatcggagcaagtccgtggaagaagccaaagactgggacggattgaattgttggaagaacccgaactcgcagaggggactgggcgcagtggcacacgaggacacacggaaacctccgaacgttgaggagataatctcggaaaagttacggaaacctgggaagtcggcgaaaccctacgttcgggtgttttcggaagcagccgaagcggccgcctgcttcgccttcgtccagtatccggagatagccgaggcgcttcggagccaggctcggggggaggggcaagctcgcgggcgggcgggcgggtgagggggcggagcccgggcggggcggggagggctgccggaggcttgattaggtaggaggtggcgaagcgccggcggcggccggaagtagccgaagccagcggcggaagtagccgaagcggctggagcgggcggcaaggcgaggcgaaagctgcacagggccctacgcggccgcctcagcatgtcggacttcgacgagttcgagcggcagctcaacgagaataaacaaggtgagggcaccggggtcgcggggcggaggtgtgggcggctcctcgcgtcgctctttgcccccccgccattttctccctcgcttccccccact

SEQ ID NO: 22615 - DNA, 2300 bp, Homo sapien
ccatgctggtcttgaactcctgacctcaggtgatccatctgcctcagcctcccaaagtactgggattacaggcgtgagccactgtgcccagccgaggatattttttatagtttgtttcagtaaggatccatatcaggtccctgccttgaatttggttacaaagtttgtgtaatttatcctttgtacctcactccctcttttttttttttgcaagctcttttatttgtagaagaaataagttcatctgctatatagaattttcagtgttcgtgtaggctcattgtatccttccctccctccattttcctgtaaattggtttaagcaaggttagaagctcgaatagatcaaggttcaagtttttaaattttattcaacctgggtttgaatcctaatttctgagcttcccttagttcacttattgttgggagaacatggctgttggggtggttctgggagcgcccaccatggtggctcgtgtggagtagacactcagcacgagggacccctcccccgcggtgagctcgtctaggcctcccgcctgcgctctatggctctgctgagtttctggcatgtctctattctttctccctctccatgcctatggtgtgtttatgctcttgttttttgatcctggagaatatttgggtgaactccaccaaacctgcttactaagggtccctttctgacacctgtggcgaagccccctcctccctgtcccttcctgccttcagtgctggggttgggtggacgctgactggctgttgggcgtgagccttgttcacaaacctgcctctcctttccccacagatctttgtggagttcacctctgtgtttgactgccagaaagccatgcagggcctgacgggccgcaagttcgccaacagagtggttgtcacaaaatactgtgaccccgactcttatcaccgccgggacttctggtagaggcggctgggggagggtgggggcagggctggctgggggcttctccccactcccgccccccccttatccccctctgaagacgatgggcagaggagtgacagccgcagacacacgacagccggcagcaactggaatggcagcaattaagggtggggggcgggggttggggggttggggggttagggcagggaggggactggggaagtgcgcacacagcccacacagacaacacgcacccacacagacacagagggaaggggttgggatggggacagggtgcacagcagggcggggtaggaccccagcccctcccaaaacagcctctccttctcccatagacccctttcttctccccttccccacggtaggaacatagcgtgtttatattttatggccaaactattttgaattttgttgtccggccctcagtgccctgccctctcccttaccaggaccacagctctgttccttcggcctctggtcctctctggtcccctcctgggtttcttacgtagttgatttttcctctttagtctcccccgacctgcgcccagccccgtggcccctgcccctctcctactctctgtggcagtttcatatttgctaagacgaatttgctcattaaacattttgttgtattttactttatggagcggctgtgtgtccagtatgtccgaccctcttcctcggttctgggctcgggtgggggttcccttggcaaactgcgggcccctggctgggacgcccctgctgccggcgccggcagcctcgaggccttccctgcttgcgcggtgcccttctcggggtcggcacaggcacagccccgggggacgtgaggttcccgagtgctctcccaccccgccgacaggagggatggtggccgagcgggccggggcgggcgtggcgtgggtgtgccaggagctccgcggttgccgccaagcgagctggagctgactctcggcgttccgtgagcaccgcgcggatcccccgctgcagcgggcggaagtgacgtagaggcgcctagcaacggggcccagcgcgccggaagtgatgccttccaggttggcttggctgcggaagcgactcctgccagggcggggtgcggcacgggagggcggggagcgcggcaatttccgcttccggtccgtcgcctccttctgttgcttcccgtctcctcggcggctcccctcccccgcccggctctccgcgccccttctgggcggcggggcggcggagccgtcggcgtgcggccctccttgcgttcgtgcgtgcgcccgtggcccggcgcacgtcccgcgacaccgaggccgagcggggcagggggctgaccgccatgaccccccagagcccggcgtga

SEQ ID NO: 22616 - DNA, 2300 bp, Homo sapien
acagctctgttccttcggcctctggtcctctctggtcccctcctgggtttcttacgtagttgatttttcctctttagtctcccccgacctgcgcccagccccgtggcccctgcccctctcctactctctgtggcagtttcatatttgctaagacgaatttgctcattaaacattttgttgtattttactttatggagcggctgtgtgtccagtatgtccgaccctcttcctcggttctgggctcgggtgggggttcccttggcaaactgcgggcccctggctgggacgcccctgctgccggcgccggcagcctcgaggccttccctgcttgcgcggtgcccttctcggggtcggcacaggcacagccccgggggacgtgaggttcccgagtgctctcccaccccgccgacaggagggatggtggccgagcgggccggggcgggcgtggcgtgggtgtgccaggagctccgcggttgccgccaagcgagctggagctgactctcggcgttccgtgagcaccgcgcggatcccccgctgcagcgggcggaagtgacgtagaggcgcctagcaacggggcccagcgcgccggaagtgatgccttccaggttggcttggctgcggaagcgactcctgccagggcggggtgcggcacgggagggcggggagcgcggcaatttccgcttccggtccgtcgcctccttctgttgcttcccgtctcctcggcggctcccctcccccgcccggctctccgcgccccttctgggcggcggggcggcggagccgtcggcgtgcggccctccttgcgttcgtgcgtgcgcccgtggcccggcgcacgtcccgcgacaccgaggccgagcggggcagggggctgaccgccatgaccccccagagcccggcgtgagggggccgaggtgagcgcggggcggagcgcgggggacgctggcccgcctgctccgggtgttcgggcctgggccgcggcgcgcgcgggctcgcgtctggccagttctgggtgtctctggcggcctttgtgtctctgctcctgtgtcggccttgactgcccccgtgtcggttgtctgtgtctgtctctctcgtgtctgtgtgtctgtcagcgtctgtttcctgtgggcctctgcctgtgcctgtttcagtgaacttagaaaagggtttggagataggagtgtgtttgtgtgtctgtcccgggtctctctctcctctgtctgtcgtgtctgtgtctgtcaggatttgttcgtgtctcgttgagtttccgagtcttcttttccctaggtgtctctagcccttccctgcgggcttttctgcctatggtgcaaatcttacccccgccccgtcttcgcatctgagttttgcccccatacctatcacctccaatcctgaagtttctttccaggagtctgttaacttgatctagaatctgccccttttccccagttttctgagtctctggtgtgatggtgaagagccccagccttggattcagaagcccggctgcctgctaagctgtgtaattgccaggtgatagtctctgtgtcaaaacctcagtttcctagtcgtaggaaatccatagttcgtaggcattcgtagttcctacatcatagggtccttgtgcatgtaagttgaggtgatgcttgtaaagtgcctgacggtatctgacacatagcaagtgtgtaattactgggagctctggtttttattattacagtgcttagagatttttacacagtaagtgttagatatcggtcggttattggagtactccttggagaactttgccatatcctttgtattctttttaatgtaagaattctctttgaatcaatttaatttgaaatacagtctcattctaagcagtatctgagaaatctcagctttgatgtgctagttgggtaattttttctaatgcacgccaaataagtacagagtattaagatagtgccttttctgccgccacccttttggaaatgttctctgttttttctctgataataatagcagccagtgttattgagcgcctactatctgtggggcacagagccaagcactgcatgtacccatcttatttaatcaacaggcctaccaggtaggaattctttcatttcagagttgagcaaactgtgtctcaaggaggtgtgcgctgcaggtagctgatgtggccaggatttgaacccacattttatattctttgccattagattccatttttcttatctcttatttctcagcgccaggtctctttttgtttctgggcctctttcttccttggcctcctgcctccctgtcttccc

SEQ ID NO: 22617 - DNA, 2300 bp, Homo sapien
ccaaagtgctgggattacaggcatgaaccaccgcacctggctgatactgtcttttgatgcacaaaattttaaaatttttataaagtccagtttgtctatttttttcttttgtctgtgtcatgtcatattcaagaaataatccagaccaaatctgtgtctggaagcttctgccctacattttctcctaggagttttatactttgggccttccatttagatcttcttcaatccattttgcattaatttttgtttatggtattaagggtccaagtttattcttttgcatgtgaccatagatggtatgtaacctttgctaatggtttgtaattatctgaaaggtatattagctcagatacaatgatattgcgtttgtcatcatctccttatgtgtaaagtggtattcccaggtgcacatatgctcatgagttctagatcttggggaactgaatcttggtgttcaaaaattcttagtccatttagtgctttctagcttgagtgtttttcaatgctgatattttatactattaatacttttttgggtaagaatttgccaggctttttcttcttctgttttacttctctgtgtattttctaggattctcttataaacagcatatagcaggatttgtatttatccaatgtgagtctatatattagtgagcaattttatttcattcatatgtgttaagattatatttaggctgggcgcagtggctcaagcctataatcccagcactttgggaggctgaggcaggtggatcacctgaggtcaggagttcgagaccagcctggccaacatggtgaaaccccatctctactaaaaatacaaaaaaaaaaaattagccgggcatggtggcaggtgcctgtaatcccagctacttgggaggacgaggcaggagaatcatttgaacctgggaggcagaggttgcagtgagctgaggtcataccattgcattctagtctgggcaacaagagtgaaactctatctcaaaatacatatctatatatatttggtattatttttgccacctgtcttattttgtctaccatatatttctacttcatttcctgtcttttgttgaattgcaatgattatctgaagggtttataatactgggaacgttcactgctctgtttctgtctgagttgtctgcagatgctaacctatagtaaatctaactttttccttatatactgtaataagaaggcatataccggccgggcacggtggctcatgcctgtaatcccagcactttgggaggccgaggcgggtggatcacgaggtcaggagatcgagaccatcctggcgaacacagtaaaaccccatctctactaaaaatacaaaaaaattagccgggtgtggtggcaggcacctgtagtcccagctactcaggaggctgaggcaggagaatgacgtgaacccgggaggcagagcttgcagtgagccgagattgcgctactgcactccagcctgggcatcagagcgagactctgtctcaaaaaaaaaaaaaaaaaagaaggcatataccactaaacgataaaaaaaaatttaaatttgcttttatgtcctcttcctttattttcatcttcctgaatgtgatcatctgtaattttaatatccgttcattttttcattatcaaaattggattagactatactaaggatgggaaggtctacagagcaaacaaactcatagaatgctggtaggaatgtcagtaattatatacacaagggaaaaccgttgagtgttatgtagcaaacatggtgacctgtgtttgctgtttgacctataatttataaatctagagaaatgtgtgcttatatacaccaaactacacaaaaacacttgttcctggaagcatcatttatgtcagacaaaaacaagacacataagtggcagtcaactctaccattcacatgcatttgtttggaaaaagatgaagcttcttccctagatgatgtttggtgcaagctacgcatgatgatatcaataattttgagctgctttcagctgctgaagcttaactctgtaatcatgtcattcttctccaggtatcatttattctttatttttgaggatctttcttttccctctggagacacctcagttcacaatcctggggcgatatggcagaatcttttttttcggattttggcttgttgtggtatctgaaggagctcagaaaggaagagttttggaaatttaaggagctcctcaaacaacctttggagaaatttgaactcaagccaatcccctgggctgagctgaagaaggcctccaaagaagatgtagcaaagc

SEQ ID NO: 22618 - DNA, 2300 bp, Homo sapien
ggagaaagtcctgtctctgccaggctgttgagatgtgctaggtcggaactaggcagccctggtagtctagagggtgggatcaggcccgttgatccatcaggctcatctccactgggggggagccagtgtgccacattccagtacattcaggtccaccacaccagccctgctgcagctgttcatcattggcttttatttatcccatcaaagttcttccatgctgccaggctccctcttttgcctgcccttacccagggataaaaacattttcaagtatctgctcactaaggaaggagtcatccccctctaggaattcacttatttggatcatttctgtatcatacctctatgacagctttatacttatgtcttaacatttttgtttgtttttgcagtgggagtgcaatcttgtgtattctcaagaaataagactccctttacgataaattttaactttattccatacaatttcatttatcttaagtagttcattaaatgatcaggatttcagtaatgatatgcataaacaaaaaaatagaagggaagatgaacgtgtaactcatgactgatgggccaagatgtaatagatactttgagctgaatacgtaccaggaaacagtccctgaactcgagttattgcctcaaaggaaaaactgggtatgaaatgaaacataattgaaggctacctaaaacgctaaggaacccccaaaaaggaaagaaatatgttcttgatgccaagacatgagagggaagcccttgaaggataaagaacaaagctaaaacagatctgtcgactccactgtatgagttgaataggttttattcaacctttttcctttaaagcaatatgggccgggcgcagtggctcatgcctgtaatcccagcacattgggaagccaaggcaggtggatcacctgaggccaggagttcgaaaccagcctggctaacatggcaaaaccctgtctctactaaaaatacaaaaaattagccaggtgtggtggtgcacgcctgtaatcctagctacttgggaggctgaggcaggagaatcgcttgaacctgggaggtggaggctgtagtgagcccagttcgtgccactgcactccagcctgtgcaataagagcaaaactccatctcaaaaacaagcaacatgatggtaaatatctttgtacctatatctttgtgataagcagtagtaagtaaaaatttctactatatttttactgtaaacatgaaaagaagctaaaactgtttttacatcttgaactttcatctttgttctgtattttctgccctgtactcgctggattaggcaatcaggaggcatgcaaagctgtcatgaggagaaaattcatgctgcaatgggaaagtcacacttttggaaaatttcattataaattttttcgtgacgtttcgtcagatgtgttctacatacttcaattagcctatgattctaccagctattattcagcaaacaatctcaatgtgttcctgatgggagagagagcatctggaaaaactattgttataaatctggctgtgttgaggtggatcaagggtgagatgtggcagaacatgatctcgtacgtcgttcacctcactgctcacgaaataaaccagatgaccaacagcagcttggctgagctaatcgccaaggactggcctgacggccaggctcccattgcagacatcctgtctgatcccaagaaactccttttcatcctcgaggacttggacaacataagattcgagttaaatgtcaatgaaagtgctttgtgtagtaacagcacccagaaagttcccattccagttctcctggtcagtttgctgaagagaaaaatggctccaggctgctggttcctcatctcctcaaggcccacacgtgggaataatgtaaaaacgttcttgaaagaggtagattgctgcacgaccttgcagctgtcgaatgggaagagggagatatattttaactctttctttaaagaccgccagagggcgtcggcagccctccagcttgtacatgaggatgaaatactcgtgggtctgtgccgagtcgccatcttatgctggatcacgtgtactgtcctgaagcggcagatggacaaggggcgtgacttccagctctgctgccaaacacccactgatctacatgcccactttcttgctgatgcgttgacatcagaggctggacttactgccaatcagtatcacctaggtctcctaaaacgtctgtgtttgctggctgcaggaggactgtttctgagcaccctgaatttcagtggtgaagacctcagatgtgttgg

SEQ ID NO: 22619 - DNA, 2300 bp, Homo sapien
cattccctactccaactcatgaagatatctaatattgccttttaaaatatgatagagttttgaatttcacacagaagtattaagtcacttgtaattatttttctctaaggtagggagaagggatccattttttttttttcatttaaatacaaatggcaccagctccatttaatgaatagttcacctacgccactgcccagaaatctgttataaaccagcttttcgtatttgcctacattggtttctgggttctatgtttttttcactattatttgttcatccgtgtgccaataagtcttttttttttttttttttttttttttgagacggagtcgctctgtcgcccaggctggagtgcggtggcctgatctcggctcactgcaagctcctcctcccgggctcaagtaattctcctgcctcagcctcccgagtagctgggactacaggcgcccgccaccacacctggctaaatttttttatatttttggtagagacgggggtttcaccgtgttagccaggatggtctcgatcttctgaccttctgatctgcccgcttcagcctcccaaagtgctgggattacaggcatgagccaccgcccccggccaaccaataagtcttaattaccatagtttttaaattaaatctttatagggtaggtccaactcaatcatcattcccacctcccacccacctatgtgcttcaggcgtctcttggcttgtactagtcccttctattttccacatacatttcagaattatattttgatatgaaaatttctattgggattttattgttttactgaatataaaggtctatttgggagcatattaacatcttcataataataattcctgtacaagaatgtaatgttatccttcatttttaaggattttgtatatggcaataacattgtatatcattcaataagatttacaatctcttataagaattatttctagtttatatttttcttggaactgcatgtggcatcctttaaaattttaaattccaattagtttttttttagagaaacacaatcagatttgtatgttgatttatattcaccaaagctgctttgaatcctaacaatttatcaatagatttaaggggagagagtttgcatggatattcaaattatctccaatatgataatttcgcctctttctttcagatccgttttcttgtcccagtgaacaggtgcactatgttgaaataagagtggtgacggaggccttgtttatcttgtatcttattgtaaaaggtattctttcatcactttcccgtccattatgagatttttgtttgctcttgcttttttggaaccctttactgggtgaaggaaattcttttatttcctaacttacaaagatacatctaaaaccatgaatagatatagactcttttatatttccccttttgcacctatgaagatgcccctattcttctgtaatctgttcaatatgaggagctctatcagtcatacccagagcatactccctcctgactaaagcagatacctgcgcataggactgagctatcagtcttcactagaggtctccaggtgattccaataggcagccaagacgggccccccgggtggaggatctaggacgtgcctccgcaaattctatcacctgttaaacatgcctttggttgcatttgttccacaaatatttatggcctccctcagatttgaaaggatccttgccaggtggttatgtagactagacagcgtattcccctcatggagcttactgtatagatggttatccgaaattgagattattggtggaaaacttctttcccccggcactgcctaagtcaattgttttggaggttcttggtcagatgccccatgagctccaacatcataaacggggtgtggaccgtctcctaatcagcagaccctgtttagtcctgggtgaagaaagacaattggggcatctgggcagaaacacgcaggtgcagcagtatttcccctccatcgcgaaggtcatcaagaacccaccttggccaatcaagagaggagtcagctggctaatcaccgggcaggcaccgcctttttcttcccgctgcctagcttgtttgctttcgaccagccaaggagacctggtggcagggttggtgagttacctttctggccgatttgtttgtttggattttaaggtctttttttattatgttacattggttctttagctttctctttggttaggagctggaaataatatgattggggaataaaatgactaaagttcctaagggcaggccaagctctgttacctttttcaagttcac

SEQ ID NO: 22620 - DNA, 2300 bp, Homo sapien
actcgcattgattaatctcaaaaacataataagtgaaaagaatcaagtcacagaatgatacactataattcgaaaatgaggaaaacaaaacatatctcttaggggaacatgtatcaccaggaaaaataaaaagaaaatcgaagggaatgaagttcacttcacaactggaaatttattttggtgggaacccctgaggatgcaacgggcatgctcttatgggtacatgagtctgcaaaggtccccatcatgtctgcttcccaatctaggttctggaccacagagacttgtgttatggttacagtaattccttaaagttctcattatgtttctctgcactccttgatgtgtatatttcaaaaccaggatcatcaccatcgtaacactgaactcaggattcttataaggaggaactaaaatggtgattgtaaaaggatagctcctaggacactgaggtttggcgtgaacccagaagatgactgtaacgattgtagggaagctggaatagcaggaaaaccatgcccaatgatgaaatctcgaccttgcgtctaaaaaacttagcgcctgttctgcctacgcagaaagacagtagccgatatccattaagttcttcttgcaggccaggcacagtggctcatgcctgtaatcccagcactttgggaggccgaggcgggcagatcacttgaggtcaagggttcgagaccagcctggccaacatggtgaaaccctgtctctactgaaaatacaaaaattagccgaggccaggcacagtggctcatgcctgtaatcccggcactttgggaggccgaggcgggcagatcacttgaggtcaagggttcgagaccagcctggccaacatggtgaaaccctgtctctactgaaaatacaaaaattagccgaggccaggcacagtggctcatgcctgtaattccggcactttgggaggccgaggcggtcagaacacttgaggtcaagggttcgagaccagcctggccaacatggtgaaaccctgtctctactgaaaatacaaaaattagccgaggccaggcacagtggctcatgcctgtaatcccagcacttcgggaggccgaggcgggcagatcacttgaggtcaagggttcgagaccagcctggccaacatggcgaaagcccgtctctactgaaaatacaaaaattagccgggcatggtggtgtgcatctgtaatcccagctactcagcaggctgaggcaggagaatctcttgaacccgggaggtggaggttacagtgggccgagatgacgccactgcactccagcctgggtgaccgagtgagaccgtatctaataataattaataatttcttcttgcacgacaggtttagttacggcagaaagatgttgtgccacacgaacattcttcaaggagtttagcatgtaggaaggaattagacatttaaattataaacagagtcaccccaactctccaaatgaaccattttggagagactggaggagcatccctgcagccgtgagccctgggaattctcaataggaacctccagcttgaaatatcccccgctctatacgacaccaggagcaaaggtctagaacagcccctcaaggggcggtgggcgtttcgcttcacatattttctggatctgttcatcaaaagccctctgagccaatggcaagggagcaattcgttggccaatcaaatggcaccacggatcttttcttcccgcttccagccgccaatcattaaggaccaggaaggcgtggagcggtgagtcagcgcttcgtgctgggctgttcgtctcttctatgtgctgatttcctgggttactttgggtcttccttttctttctcccttttaccctgtctcctttcttgaggctgatcgatcacagccaggcctctccattctatttacccagcgttttccttctctccagttagtggggtagatgaacgccctgtgtttataaggtgcctcccaggagcctgagacctgtgagaagaatggggggtggaggtgggggagactcgtcacgaagggagaccttggagcttcgagggtgggaatgttcttattagattcttcatctctgttgacacaaacatgtaggagaagctggagaacatagacagggatgaggtaaggggggggacttcccatgaaaggtgggacccaagccctctctgctcttgtgagcttgctctctgacctagggcagaaacgtctttgatactgtaattccagaatgtgatttaaaaagaaaatcacacttctagttgactcatactaattatgtatattagctgca

SEQ ID NO: 22621 - DNA, 2300 bp, Homo sapien
attaaaaagtccattaagtgtaagatctgtacattagataatatcattctattaatttcctgttttttatatagtgtggttatcaaaagagcttacttttatttttatttttagaagataaaccctgaagcatttagggtaaattattagatgtaaatttgtacaatgtgtacaaatcttgaacagatcaggaaaaatacttatataagagtagagggacaccatataaggtaaacttttaacatttggtgatcctaaggatatattcttgaagctgttctctaagtgtaaaatcacatcatttttttcttttaatagcgtactagcttccttgggctggcatgacaacgtaccacaaactaggtaacttaaaacagaaacctactgtctcatggttctggagcctagatgtccaaaatcaaagtgttggcagggtgctgctctctctgaaacccaggggagcccttccttgcctcttactggcttctgtggtttgctggcaacctgtgtcactctttggtttgcagctatgtaatttcactctgactttgtcacatgccattctgcttgtctctaccttcatgtggccattttttctaagatggagtttcactcttgttgcccaggctggaatgcaatggcgcaatcttggctcactgcaacctctgcctcccaggttcaagcaatcctcctgcctcagcctcctgagtagctgggattacaggcatgcgccaccacagttggctaattttttgtatttcaccatgttggtcaggctggtctcgaacccccaacctcgggtgatccacccgcctcggcctcccaaagtgctgggattataggtgtgagccactgcatccagcttgagaccgagtctcattctgtcacccaggctggagtgcaatggtgcaatctcggcacactgcaatctccacctcctgggttcaggcaattctcctgcctcagcctcctgagtagctgggattacaggcacctgccaccatacccagctgatttttgtatttttagtagagacagggttttgccatgttttccaggcttgtcttaaactcctgagctcagatgatccacccacctcaacctcccaaagtgctggtgttacaggcatgagccaccacacccagccgcatgtggccgttttcataaggacacccgtcattaagttaggggggccactcactccagtatgacctcgccttaactaattacatctgcaacaaccttattttgtcaccctataaaggggttaggactttgtgtgtgtgtgtgtgtttttagggttgggacacaattcaacccttaacagtaaaaaccaacttttattgatatagaaagataaatattctttctatatacgtttcatagtctaaacaaatggcataattggagaagggggatgaaaagaggttggctaatggataccaagttacacctgtaggtaggaataggtgctggtgttcagtagcactataggttgaatatacttaatatcttattattttcgagggtttttctaacttttatgttaggttcaggggtacatatacactggttatacaggtaaactcgtgtcacaggggtttggtgtacagtttttcatctcccaggtattaagaataggaccccatagctatcttttcctgaccctctccctcctcccacctaaggagaggattctgaatgttcctaacacaaagaaatgatacaggtatgaggagatggatatgctcattaccctgatttaatgatacgtatacatgtaccaacacatctctctgcagctaatatacataattagtatgagtcaactagaagtgtgattttctttttaaatcacattctggaattacagtatcaaagacgtttctgccctaggtcagagagcaagctcacaagagcagagagggcttgggtcccacctttcatgggaagtccccccccttacctcatccctgtctatgttctccagcttctcctacatgtttgtgtcaacagagatgaagaatctaataagaacattcccaccctcgaagctccaaggtctcccttcgtgacgagtctcccccacctccaccccccattcttctcacaggtctcaggctcctgggaggcaccttataaacacagggcgttcatctaccccactaactggagagaaggaaaacgctgggtaaatagaatggagaggcctggctgtgatcgatcagcctcaagaaaggagacagggtaaaagggagaaagaaaaggaagacccaaagtaacccaggaaatcagcacat

SEQ ID NO: 22622 - DNA, 2300 bp, Homo sapien
tgtaatttccgtagccgcggtgtaatttccgagactgcggtgtaatttccgtagctgcggtgtaatttccgagactgcggtgtgatttccgagactgcggtgtgatttccgagactgcggtgtgatttccgtagctgcggtggaatttccgagactgcggtgtaatttccgtggctgcggtgtaattaccgtagctgcggtgtaatttccgtggctgcggtgtaatttccgaggctgcggtgtaatttccgtggctgcggtgtaatttccgtggctgcggtgtaatttccgtggctgcggtgtaatttccgtggctgcggtgtaatttccgaggctgcggtgtaatttccgaggctgcggtgtaatgtccgtggctgcggtgtaatgtccgtggctgcggtgtaatttccgaggctgcggtgtaatttccgaggctgcggtgtaatttccgaggctgcggtgtaatgtccgtggctgcggtgtaatgtccgtggctgcggtgtaatgtccgtggctgcggtgtaatttccgtggctgcggtgtaatttccgaggctgcggtgtaatttccgaggctgcggtgtaatgtccgtggctgcggtgtaatgtccgtggctgcggtgtaatgtccgtggctgcggtgtaatgtccgtggctgcggtgtaatttccgtggctgcggtgtaatttacgaggctgcggtgtaatgtccgaggctgcggtgtaatgtccgaggctgcggtgtaatgtccgtggctgcggtgtaatgtccgtggctgcggtgtacttcccgaggctgcggtgtactttccgaggctgcggtgtacttcccgaggctgcggtgtaatttccgaggctgcggtgtaattcccgaggctgcggtgtaatttccgaggctgcggtgtaatgtccgaggctgcggtgtaatttacgaggctgcggtgtaatttacgaggctgcggtgtaatgtccgtggctgcggtgtaatgtccgaggctgcggtgtaatgtccgtggctgcggtgtaatgtccgaggctgcggtgtaatgtccgtggctgcggtgtaatttacgaggctgcggtgtaatgtccgtggctgcggtgtaatgtccgaggctgcggtgtaatgtccgaggctgcggtgtaatgtccgaggctgcggtgtaatgtccgtggctgcggtgtaatgtccgtggctgcggtgtaatgtccgaggctgcggtgtaatttacgaggctgcggtgtaatgtccgtggctgcggtgtaatgtccgaggctgcggtgtaatgtccgtggctgcggtgtaatgtccgaggctgcggtgtaatttacgaggctgcggtgtaatttacgaggctgcggtgtaatgtccgtggctgcggtgtaatgtccgaggctgcggtgtaatgtccgtggctgcggtgtaatgtccgtggctgcggtgtaatgtccgaggctgcggtgtaatgtccgaggctgcggtgtaatttacgaggctgcggtgtaatttacgaggctgcggtgtaatgtccgtggctgcggtgtaatgtccgaggctgcggtgtaatgtccgtggctgcggtgtaatgtccgtggctgcggtgtaatttaccgaggctgcggtgtaatgtccgtggctgcggtgtaatgtccgaggctgcggtgtaatgtccgaggctgcggtgtaatgtccgtggctgcggtgtaatgtccgaggctgcggtgtaatgtccgaggctgcggtgtaatgtccgaggctgcggtgtaatgtccgaggctgcggtgtaatgtccgaggctgcggtgtaatttccgaagctgcggtgtaatttccaaaaatgtaaagtctatatttgcctggatattgaggctatgtcaggtgactataggattcttgtatcttctggattattgtatctctgattcccccatccattattgagactttcatgaccatttgaatgagaaggtgagatgaatgtaattaaataactttccgccttcattgccatccccccagtactagcaagatactatataatggtaatcttgatccatttatttgtaataacttggcactgtcctgaattttctacaggttttatttatttattgttcctggtcactgtctctttgaggattggtatctctgctccagaaaagatggcagcctctttcttctctgattttggtcttatgtggtatctggaggagctcaaaaaggaggagttcaggaaatttaaagaacatctcaagcaaatgactttgcagcttgaactcaagcagattccctggactgaggt

SEQ ID NO: 22623 - DNA, 2300 bp, Homo sapien
gaggttgtacccacttaattccccttatgagcaaccaaacatgtcaccgaaatctccagaacagctgagaagaccaggaaagcaggaagccattggggaatgggcaaacaacttagcttaagatgctaataggatcttcaccaatgtcagatggcattttcaccagttagggacttcaggggactgaaagattgggggaatcccttgttctccccaaaaacttaaggtagcattacctactgtcagcagtctgtgggcactggattatatctttcacctgcatccaatcaaatccagtaactattatgcggggcatagggaaaatttcccatctacaactgccccctacatctccagtccatcagcagctactcacttgcagaatataaacatcgtactagttatttaaggaacagataactgtaaaggagttttcggcctggctgaaggatcagcctctaggctggtgctccagagatgactgtaagaactatagtatcagggagctgctgcctctcctgcaaagaggaaagtgggagatgggaagctcactgttagaactgtggctttagaaatacaccacgacagctatgattcagaaatcgggaagctcaccagtgtagcagctgcttaaaatcaatgaccacagcaactggttttagttttcgagacagtctcgctctattgccagggctagattacagtggtgcaatctctgctcactgcaacctccacctcccaggttcaagcgattcttctgccctggcctcccgagtagctgggattataggcctgtaccaccacgcccagctaatttttgtatttttagtagagatggggtttcaccatgttgaccaggctggtctcgatctcctagcctgaagtgatctgcctgcctcagcctcccaaagtgctgggattataggcgtgagccactgcgcccagccaactacagcaactggagacaagccttctgttacagaagagtccagcgtctgtgtgttcatggaagctggcagcaaaacaggcagaagatagactccactccccttccccttccagtgtcatgagagtgagggccaatcgcagaacttaatctgtaccttgatcttagctacgaggggttgtgggatgcgtagggcttggtcatcactgttgctggatcttttttttttttttttttttttgagacggagcctccttctgttgcccacgttagagtacagcagtgccatctcagctcactgcaacctctgcctcccgggttcaagcgattctcctgcctcagcctcccaagtagctgggactacaggcacacaccaccacgcccggctaatttttgtatttttagtagagacagggtttcaccatgttggccaggatggtcttgatctcttgacttcatgatctgcccaccttggcctcccaaagttctgggattacaggcatgaaccactgccccggcctgttgttggattttttgattggcttttcttttgagaattctgccattgaaagaaagctcactggcataaagttggaatggatgcgaggtgccattctatcctctctactgcatctcctctctcttctggaggcaactgcctaggtcaggtcctttttaggtggactttcagatctagtccctatatgtgaaacctatatgtgtatataaatcccttgtttatgcaaattgagtacatgctatagacaccgtcctgttgcttatccatatgaagagattattccatacttttaatatttgtataatagcttgtgtctcataaattatttaactggtcttgatagtcatatagctattttccatttattttgctatcatcgtagcaatgaatacctgtgtatgtgtctattgaaagcagaagttgtcaaactttacatagtagcaatgaatgtatatgtgtgtgtgtgtgtctattgaaagcagaagttgtcaaactttacgtagtagcaatgaatgtgtgtgtgtgtgtgtgtgtgtgtgtgtgtgtctattgaaagcagaagttgtcaacctttttgtgtagaggaccatatggtttccattttaggctttgtgagtcatacggtctctcatagctgttcagctctgctattcaatcaggaaggctcctgtagacaatatacccgtgaatggtgtagtgagttctaatgaaactttatttacaagaggagactgaccaggtttggcctgggggccacagtgtgtagacccctggaaagatacatcctgagaagaaaaaaagaatatatgcaggaatgcttaactttgtgggttt

SEQ ID NO: 22624 - DNA, 2300 bp, Homo sapien
cctctgcctcccgggttcaagcgattctcctgcctcagcctcccaagtagctgggactacaggcacacaccaccacgcccggctaatttttgtatttttagtagagacagggtttcaccatgttggccaggatggtcttgatctcttgacttcatgatctgcccaccttggcctcccaaagttctgggattacaggcatgaaccactgccccggcctgttgttggattttttgattggcttttcttttgagaattctgccattgaaagaaagctcactggcataaagttggaatggatgcgaggtgccattctatcctctctactgcatctcctctctcttctggaggcaactgcctaggtcaggtcctttttaggtggactttcagatctagtccctatatgtgaaacctatatgtgtatataaatcccttgtttatgcaaattgagtacatgctatagacaccgtcctgttgcttatccatatgaagagattattccatacttttaatatttgtataatagcttgtgtctcataaattatttaactggtcttgatagtcatatagctattttccatttattttgctatcatcgtagcaatgaatacctgtgtatgtgtctattgaaagcagaagttgtcaaactttacatagtagcaatgaatgtatatgtgtgtgtgtgtgtctattgaaagcagaagttgtcaaactttacgtagtagcaatgaatgtgtgtgtgtgtgtgtgtgtgtgtgtgtgtgtctattgaaagcagaagttgtcaacctttttgtgtagaggaccatatggtttccattttaggctttgtgagtcatacggtctctcatagctgttcagctctgctattcaatcaggaaggctcctgtagacaatatacccgtgaatggtgtagtgagttctaatgaaactttatttacaagaggagactgaccaggtttggcctgggggccacagtgtgtagacccctggaaagatacatcctgagaagaaaaaaagaatatatgcaggaatgcttaactttgtgggttttctctcctcttgccctcactgactcaggatacacaaagacctatcaagctcacgcaaagcagaaattcagccgcttatggtccagcaagtctgtcactgagattcacctatactttgaggaggaagtcaagcaagaagaatgtgaccatttggaccgcctttttgctcccaaggaagctgggaaacagccacgtacagtgatcattcaaggaccacaaggaattggaaaaacgacactcctgatgaagctgatgatggcctggtcggacaacaagatctttcgggataggttcctgtacacgttctatttctgctgcagagaactgagggagttgccgccaacgagtttggctgacttgatttccagagagtggcctgaccccgctgctcctataacagagatcgtgtctcaaccggagagactcttgttcgtcatcgacagcttcgaagagctgcagggcggcttgaacgaacccgattcggatctgtgtggtgacttgatggagaaacggccggtgcaggtgcttctgagcagtttgctgaggaagaagatgctcccggaggcctccctgctcatcgctatcaaacccgtgtgcccgaaggagctccgggatcaggtgacgatctcagaaatctaccagccccggggattcaacgagagtgataggttagtgtatttctgctgtttcttcaaagacccgaaaagagccatggaagccttcaatcttgtaagagaaagtgaacagctgttttccatatgccaaatcccgctcctctgctggatcctgtgtaccagtctgaagcaagagatgcagaaaggaaaagacctggccctgacctgccagagcactacctctgtgtactcctctttcgtctttaacctgttcacacctgagggtgccgagggcccgactccgcaaacccagcaccagctgaaggccctgtgctccctggctgcagagggtatgtggacagacacatttgagttttgtgaagacgacctccggagaaatggggttgttgacgctgacatccctgcgctgctgggcaccaagatacttctgaagtacggggagcgtgagagctcctacgtgttcctccacgtgtgtatccaggagttctgtgccgccttgttctatttgctcaagagccaccttgatcatcctcacccagctgtgagatgtgtacaggaattgctagttgccaattttgaaaaagcaaggagagcacattggatttttttggggtgt

SEQ ID NO: 22625 - DNA, 2300 bp, Homo sapien
gctctgtggctgtgtaacacttctaaaatgtactttactcacctgaaaatataaaactgtatcccgcacaggatatgtgaaatcgatgtgtcatggatggaaatctctatgaagaataagatcttattaagttgtaattttctctcccccgctctaacaccaagagtctttcttgtactattttattattcaataagcagacgctatcagaagcagtcttacagaatagctggagatccatttagcatttcatagcttataaaacaccttcctagagggtctaaatccccatcaaagccctgtaagataggatagccttactttactgatttaaaagcaaagataccaaaagaaaatgctttacaacagattacagagatagtaagtcaaactggcctataaatccaacttttctattttaagatctgacccactttacaacacctgatgggatctttcaataagttgaaggctataatccttctatccatccatgttctcactattagacatagtaaaacccagagtccttgaaataaatacttcattctcttcctttttctatatctttactgccctttgtagatgaaatctgggatagaaagagtgggagacgtatgtgaactaatttagaaaatattgtcagggcaataaaggttaaaaataaaatcaaaggttaattgccttaatcttcatctcattgattcatattcagttaccagctattaaaatgggccatattttattttgagacagggtctcactctgtcacccaggctggagtgcagtggcaccatctcggctcactgcaacctctgcctcccaggctcaagggatcctgccacttcagcctcccgagtagctgggactacaggtgtgtgccaccatgtaactttttttagtagagatgaggttttgccatgttgcccaggctggtctcaaacttctgagctcaaccgatcctccagccttggcctcccagagtgctgggattacaggcgtgagccaccaaacctggccaaccatgttatttctgataatctgacaagataaataaagactatcccaagatttctccattgtttctttaaaaataacagagatgggctgggcacggtggctcacacctgtaatcccagcactctgggaggccgaggtaggcagatcacgaggtcaggagattgagaccatcctggccaacatggtgaaaccccgtctctactaaaatacaaaaaaaaaattagccaggtgtggtggtgcgcacctgtagtcccacttactcagaaggctgagtcagaggaattgcttgaacccgggaggtggaggttgcagtgagcagagatcatgccactgcattccagcctggtgacagagcgagactctgtctcagagaaaaaaaacaacaacaacaaacaaaaaaccagggatggcctggcatggtggctcacacctgtaatcccagcacttcaggaggccgaggtgggcagatcacaaggtcaagagattgagaccatcctggccaacatggtgaaaccctgtctctactaaaaatataaaaattagctgggcatggtggcaggcacctgtagtcccagctactcaggaggctgaggcaggagaattgcttgaacccaggaggcagaggctgcagtgagctgagatcgcgccactgtactccagactggtgacagagcgagacttcatctcaaaaaacagacaaaaacacagggatatcctctgtttaatgcttgatccacaaattctcaattactaaattttcaatttactaatcaatactcaagtcaatcatatttagtctactcaattactaatttaggaattttttttgttgttattctacaatttctaagtttgtcctagaattcaattacatcaaagtatcttaaagcaacatttttttagagtagacagatgatttcaaatccactgtacagtcaggccaatgttactttgtaggactgggggggcccataataggtcttggagggggtttggaaggggtaattggtgattcaggaaaagagaagagatgagatagaagggattccagtgtaccttgactgctgaacttttttctaggctgcctccaaattatgaagcccgtgaaccaagacagaccaattagcttgtgaccaattgtctaacttcaagcctatacttatgaggaaggtagacggattatttgtgtctccagcttcatttacctttcctccctctccttttacccaccctgcttgctgtcttttttgacactcacttcctcacccaccaccttgcaa

SEQ ID NO: 22626 - DNA, 2300 bp, Homo sapien
gctgtctaaacgtccccttgtgtagtgtggaagttctgtctggtgctcgacacacaagaaggctgggatgtgagttctgaagaaaatgcatgcgttagctgagcttctttcaggcatgagctatagtgttgctggcggtgggctcaatgttaatgaatcaacgatatgtattaaattaggtttccttaaacagagacacatataaaacaaggttatgtattgactagtggatgaaaatgtgacgagaggctcacgggaacctaaccctataatcttggaggagtttgttggtggctgatgtgatacctcagttcttctcggtttaaaaatttaaacaagagacatacaacaaaagtgcagcatggagtaattttttttttattgtttcgagacagtcttgctcttgtcgctcaggctagagtgcagtggtgctatctcggctcactgtaacctctgcctcccaggttcaagctattctcctgcctcagcctcctgagtagctgggattacaggcacccaccaccatgcccacctaatttttgtatttttggtagagacggggtttcaccatgttggccaggctggtctcaagctcctgacctcatgtgatctgcccaccttggcctcctaaaactaggattacaggtgtgagccaccgcgcccagcccccttgctcagcttctactgggtgttcaatgatagcttaatgtcatttgattctcaaataagcttttcccctagtctttatcctccctgcttatacctgaaagggcttttcttcatgatgtttcaagttttcctctgtgtgtctttccccatcttttctccaacaatttctggagtagtccaatgaatttgggctgccagggtaggtcctaacatacatctcttctggagatttctctttgggagacattcgggggtcacacaccagtagcttcaagcatagtgttttgggccaggcatggtggctcatgcctgtaatcccagcattttgggaggccaaggccagtatgcacctgtagtcccagctactcggacgctgaggcaagagaatcacttgaacctgggaggcaaagactccagtgagccgagatccagccattgcactccagcctgggcaacgagagcgaaactccatcacaaaaaaaaaagtcttttgttctgctgtctatctgttgccttcaatactacctggtattttgacatgacccagcatacatgccggaccaggttctatgggggaatagtggcagatctgtctcaatcaccattagctgcctggtggccaaaatcgtgatgggcggaaacttctattttctctctttgttaccccttctccctgattagtttcccccgttcccatctctcaaatgtctttgatctttactgtgactaattaacttcaatgttcttcttattcacatttcaggtgaaccctctgaatgtgagttggtaagtaccatcatgcacctgtaacttttctaggacagctgtcactgttagtaaggcagataaatcaggtgctgatggcattgttccttctgggatgggatgaaagccagtgatctcgagtctaggtaaggttgctagagaaaatacccagttgaggccgggcccggtggctcacgcctgtaatcccaacactttgggaggccgaggcgggcggatcacaaggtcaggagatcgagaccatcctggctaacacggtgaaaccccatctgtactaaaaatacaaaaaaaactagctgggcgtggtggcgggcacctgtagtcccagctactcaagaggctgaggcaggagaatggcgtgaacccgggaggcggagcttgcagtgagccgagatcgcaccattgcacttcagcttgggggacagagcgagactccatctcaaaaaacaaaacaacaacaaaaaagtgtactaacacaagtagcaggaagtactgtgaagcgaaaatactcaaatgtgtaggcaagacagtgagaggaggtgatatttatggcttatgatttcaactctctccttttctgcaggtcacaagtgtcctgtggatataggagtcctttgctgaagtgagaaactgcatgtgttgggcaagatgaacttttctgtaatcacctgccccaacggtggtaccaaccaagggcttctgccttacctgatggccctggatcagtatcagctggaggaattcaagctttgcttggaaccccagcagctgatggacttctggtcggccccccaggggcacttcccgcgtatcccctgggcaaacttgagagctgccgaccctttgaa

SEQ ID NO: 22627 - DNA, 2300 bp, Homo sapien
ccaccacgcccagctactttttgtgtttttaatagaggcagggtttcaccatgttggccaggctggtctggaactcctggcctgaagtgatccacctgtcttggcctcccaaagtgctgggattacaggcgtgagccaccgcacccagccagtcctgcaaatttcttaaagctgcagctcactgtggctggaacgtggtcagcaatggtcatggaataagtagaggtagaaaatgtgtgactgtgttaggctcctccatgcagcgccacccactggacggaaggagcactagcaagagtcagccacccaggagcatatcacctttgtcctgggaccaagcccagctactctggacccaagggaggactgagtcaattaaacaagtttatccagatgtttgggtgtcacataagttataagagggagaagtgttaaagaagaagctattggccaggtgcagtggctcacacctgtaatcccagcactttgggaggctgaggtgggtggatcacttgaggtcaggagtttgagaccagcctggccaacatagtgaaaccccatctatactaaaaatacaaaaaaattagccaggcatggtggcaggtgcctgtaatcccagctactcagggggctgaggcaagggaattgcttgaaccagggaagtggaggttgcagtgagccgagatcacaccactgcactccagcctgggaaacagagtgagactctgtctctaagtaaataaataaataataaataaataaactattattggaagttggggcaggggggacaaaaatacacccatgatcctttttattttatttcttttttacatttcttttagatacaggggtacatgtgcaggtttgttatataggcaaacgtgttatgggggtgggtttgttgtacaggttatctcatcacccaggtattaatcccagtacccattagttatttttcctgatcttctccctcctcccaccctccagcctctagcagactccagtgtgtggtgttccctctatgtgtccatgtgttctcatcgtttagctaccacttataaatgagcacatgtggtatttggtttcctgttcctgtgttagtttgctaaggaataatggtctctggctccatctatgttcctgcaaaggtcatgatctcattcttttttatggctgcatagtattccatggtgtttatgtaccacatttttttatccggtctatcactgatgggcatttaggttgattccatgactttgctattgtgagtagtgctgcaatgaacatacacaggaatgtgtctttataatagaatgatttatattcctttggatatatatccagtaatgggattgctgagttgaatggtagttctctttttaggtctttgaggagttgccccactgtcatccagagtagttgaactaatttacactcccacacacagagtataagtgttcctttttctctgcgacttcaccagcatctgttattgcttgactttttaataatcaccattctgactggtgtgagatgacatctcgttgtggttttgatttgcatctctctaatacatgatccattttttaagaatacagcatctgttattgcttgactttttaataatcaccattctgactggtgtgagatgacatctcgttgtggttttgatttgcatctctctaatacatgatccatttttttaagaataaaaactttgttgaatttgagatcacttttaatctaatggagccttctaaccaaccatatattttctagattttagcttcactgaattattttacctgcttctaatttttcttttcgctaaaccttttgtgaaggctttgatattttgcttgcctcttccccaaaagaagtcatggagaatagaaactacaaacaatccattagtctaatggactaatcccaaacattccatgcatcttcagtttttccatagggcagagaatctttgaggaaaggaggtaaagggagtacccggcacgcagaatacctgccaagtaagcattacacgaatctgttttcttgggtagtgttttcatcttcttgttttattgttttatgtctctgcaggtctcgtgtttctctcttccaatcggttgtctttatcgtggacactgaggtgttctctgccttgactaaagatgagtgacgtgaatccaccctctgacacccccattcccttttcatcctcctccactcacagttctcatattccgccctggacattctcttgctaccccggctccccatgtgaaaatggggtcatgctg

SEQ ID NO: 22628 - DNA, 2300 bp, Homo sapien
gttagagaccagcctagccaacatggtaaaaccccatctctaccaaaaataccaaaataccaaaaattctggttaaaataccaaaaaaatagctgggtgtggtggctggcacctgtaatttcagctacttgggaggttgaggcaggaggatcacttgaccccagaaggcagcagttgcagtgagctgagattgcaccactgcagtccagcctgggtgacagagcaacactctatctcaaaaaaaaaaattaatttgaaggatatctagtcctggtttgtaaagtgtttctgttgatactatttatacatccattgaagctatatatttttttattctctgaatgttgaaggtagggagcaggaagtactatctactcttataaatggttttatcataatcaaaataatcaaaacaaccatggtagcatacacacacacagaaaacatcttttcctggagggtaggtaggttaatgaaaaccttgcctcttttaatgaaattaagtaggaattccaaagattggattagatttatcttatctcagtcctgaatttcagacattctaaaattataaaaatataagaaaccaggtgtggggtgtgcacctgtagtcccagctacttggggagtctgaggcaggaagatcacttgagcccaggagttcaaggctatatggtgagctatgatagtcaccacactccagcctgagggacagagtgagacactttttctaaaaatatatatgaggccagatgtggtggctcacgcctgtaatcccagcactttgggaggccgaggcgggtgggccacaaggtcaggagttcgagaccagtctggccaacctagtgaaaccctgtctctactaaaaatacagaaaattagccgggcatggtgacaggtgcctgaaatcccagctactctggaggctgagacaggagaattgcttgaacccgggaggtggaggttgcagtgagttgagattgtgccactgtactccagcccgggcgacaatgcaagccttcgtctcaaaatatgtgtgtgtgtgtgtatatatatatatatatatatatatatatatgtgtgtgtgtgtatatatatatatatgtgtatatatatatacacacactttagcctcacctgcagattcacaaattgaagcaatcctaaatccacttttatttttaattgacaataattgtatatatttgcgaggtacaatgcgatgtttagatatatgtatacatggcagaaaaaagctaacatgtccattgccttagttactttttgtggtgaggatgtttaaaatctacttttagcaattttggagcatatattaatacatcttttcttaaattccatggcaggttaaatacatcattattaactctagttgccatgctgtgcaggggatccctaaaactcatttctctgactgaaacttgtttgtaccttttcatcaatatttcctttttccccattttatcccccagtctctggcaaccaccattcttctctctgctgctatgaatttaattgttttagaatccacacaattgagatcctactaaatctttttttttctttttcttttttttttttttttttggagacagagttttgctcttgttgcccaagctggagtgcaatgccacaatcttggctcactgcaacctctgcctcccaggttcaagtgattcttctgcctcagcctcccgagtagctggggttacaggtgcgcgccaccatgcctggctaattttttgtatttttagtagaaatggggtttcaccatgttagccaggctggtctcgaccccctgacctcaggtgatctgcccgcctcggcagtagcgtcgtaagcctgagcgcttgtgtaccgtgacatactcttctgctcaggacgtctcggtctggcaggtagctttagagcaggtggtgttcagggttcccatgcatgctctgtgccagcccttccgaccggctcacttgttgcttcactgaaacctcacagtaacccttgaagaggcaggtactctgatttccagcttccagaggagagcccagccttcgatgttcagttactttccatggcgatgttatcatgaaggttgcaggaggacttgaacttggagctgctgctctgctctcagcatcaccacgtgcgtcgacagcctcttagagttacctatgaggaaaccgaccctcagccttggtaccatgacacacggatcgaatcccctgccctcgctgctgtctgctgcaatgttattagcaatccgttgcagcagaacactccccggg

SEQ ID NO: 22629 - DNA, 2300 bp, Homo sapien
tagaagtggctggaacattcactccaccaatatttacctacttgtattagttgtttgttgctgtttacaacattaccacaaactcggcagttaaaacacgtgatctcggtgtttgagtccagatatgactcagctggatcctctgtctcagggtctcacaaggctgcgatgaaggtgttgaccagggctgtggtctcatctgagacccaaccgggacaaggacctcttccaagttcatgcaggtcccaggaacatccattttcaggctgctggactgagggccttggtttcttgactgtcagccccaggccatccccagctcttttctgcttggccgtctccatatggcagattggatcttcaaagccagcaaaacagtcactcagcaagacagacttacaatctcatggcatcacagaagtcagatcccatcaaccctgccacattccgtttggatagaagtaagtcacaagcccctcccacacttgagggaaggggatctggcaagatgggaacaccaggatgaggatcatgaaaccgcctagaatctgatgcactactccacactggcagaaagctgtgttctactcactgctgcctgttggaaaagagtttctttctcttgagcctcttggccatttccaagggtagagggagttacccaggtgctacggctaggagggaggaactggaccttctaagtgctcttcacaagcctcctgtctccagatgtgtacacactttcctctttcatgcagcaagctttgctgagggtgggatgggtgggcggaatactgattgtggcgaagtgctaggaggctgcagatacagaccacttgcctcagagtctgtgtgtgtgtgtggtggcgggcggggggacgggggttggtgtttttttttttttttttttttttttttttttttgagacagttttgctcttgtcacccaggctgggttgcaatggtacaatctaggctcgctgcaacctccgcctcccgggttcaagcaattctcatgcctcagcctcctgagtagtggggactacaggtacccgccaccacgcctggctagtttttgtatttttagtagcgatggggtttctccatgttggccaggctggtctcgaactcctgacctcagttgatccacccgccttatcctcccaaagcactgggattacaggtgtgagtgaccatacccagcctggcctcagagctttgaataatagggatgataccttgatttctacccaactccttgtttcttattctaaattcctaaacgtagaggatgaagtaatgatgagtctgtataaaccctataaccctatgtgctggccgctgccctcaggctgatagtgcaggacaaagatccctgttctcctaaaatgtattaccttctaatgaaggacaaatgcatgaattgcagctgttctcacagctaaaatggcaggttcgcaagagactaggactattctatttttctagactagctatctttgaggtctgagaaaaacttttttctgcactgctggtttttcgtcaagtttgggacatgacataccatgaaaatgtacccttcctacatagtttttcgttttgtcttgttgtttgtttttaacatttgtaccacggggagggaagagcatcaggaaggcaacggacccggtcctggagggcaaccgtggggagtcccaggcccccgctgcctggtgcatcacatcgtgggtaggacaggtgggagcgctgtctccctgctgatctgggctcttatctctatgaggaaggaccctttcctcacccgtgagtcaaacgatagagaattcacctccacctgccagccacgctgtagctggggtgtgtgtggagccgcacaaactctgatgctttgagctgcatggcacagaacgtccacctgagatcactgcgtagaagcttcctgggaaggcaattccagggtcagtgaaccccgcgggacgccagctccctggttgagtttcccctgatggccgctgggtggcagcagagcgtcatcttccctgagaccctcccgggagcagggcgggctcctccccgcatccccactgtggattttctcaccgcaggcactgctgacggtgggaccggccacttccacatcggggtcccgcctgtgggctgtagggtgttcagtgacgtccctgcttttacctgccaggtgccttccctcccgcagttgtgacaaccaagaaagtcttcagacacagccggatgttacccggggcaccagcctgagacccgctggtccacgggaagcaggg

SEQ ID NO: 22630 - DNA, 2300 bp, Homo sapien
gaaagtgatttctctcacataaaatctcagctggcacggagcctctttcacgaagccatccagtgtctagctggctccctgtgtcttgtttctcctccatcctcagtgttggcttccatctggtgtgccaatgagctgttctcgatcttgccgttgtcaatttgaccagcgaagaaggggaatgggctggagagggaggaggctgtccctcccaacaaccaggtcactgcaggacacccactgaatgatctgattcagaggagcacaagcacatgacttttcttataaacaggtttcctcgtgtagagtttgtaccctaataatttgtttctattgctgttatgatagcacttcactctcttttttttttttttttttttgagacggagtcccattccatcgcccaggcaagagtgcagtggtgcgatctcagctcactgcaacctctgcctcccaggttcaagccattctcctgcctcagcctcccgagtagctgggattacaggtgtccgccaccacgcccagctaatttttgtatttttaatagatatggggtttcactatgttggccagggtagtctcgaattcctgacctcctgacgtctgcctctgcctcccaaagtgttgagatttacaggtgtcagccactgcacccggccacacttccttctgttctaagatatatttaaaaatttacctttgtgatatttctgaaggagggacacagatatcctcctattgacacacacagttaacacagcactgttcaccccaccccatggaaagatgttattaaatcaataatatacatcttatgattgatgctcactgagctttgagggtatacagtggccacaacaatagacttatatgtaacactgctaataggtaataataaccaccatcatttttgtgaacttactatgggccaggtattgaactaagcagctcttacacatattaccttgcaggttatcttattttttcccattccacagatgagaaattgaggctgagaaaggtgttattccaccagtgaattatagcttcttatcttttctgactaccagtgaggatgataacaattataagcgataagtcatctgccacttaggtgagagtcagccaagtacagaacagaggaaggaccagaaggaccagcctacaaggacactatggtttggacaattattttaaaatatgtgttttttgcaagaataccaacagtaacagctaacacccagtgcgtccttactaggtgcctacctaacgcgggggaagtagtggattctcagggctatgacacgaggcagtgtgtacagtcaagggttaaatacacgaatttagagccaaactccatgggttcgggccgaggctctggcattccgggtgtgtgacttttggtaggtgatttgactcctcacctgcaacatagggataggacctaccatgaggccctagttaggactaggacctagtgcgtgtgaagcacttggaggcgcacaatgtattttcatcacttcagaaaggaggaaactgaggccatggcacctgaagcgcagcactctctgtccagtaactaaggaacccggggtctctgtccagtaactaaggcacctggactcgggccactgggaggtgcagcggcagagaaggggttaccatgatagagacggtaggaggacccggggtggcacgagcgtccctctccaccacttcactctcctcacggcgggcccggggacccggccgcgcaggcgcgaggagcccgggttgtcgggggggcaccgccctagacacccggaagtctccgcctaacgggcccagcccgcacctcctgtccgggaagggggcggggccgaagcccctcggcgcggggcgccatagagcatggacggaggacctgcgtcctagacacttccggaagtggctccctcaggcgcccgccgggcaccacagagctgggggcggtggccgggatagcgggctcgccttcctagagcggcgaggacagggtggcggcccggggggcagggagtagggagaagggggggagcggcgcgggcggaagcggccgggaaggtcacttccggcctgggcgcccgtccccctgaccccagggtctgagtcgccgctgccgccgctgccaccatccgcgaggcaggagagaggaggaggagtgcggcgcggcggccccgggaccaaggaggtgaggggtgggggcgggggccgtgcgctgggggccaggtgggcgcgcgcttcgggaagctgggcttgggctgggggtgggtggggagact

SEQ ID NO: 22631 - DNA, 2300 bp, Homo sapien
cccggcctagcttgaatgtacttaatgctactgaactgtaccttaaaaatgattaagatggtaatttttatcttgtatatattttaccacaattaaaaaaaaaagatccctttggcgctgtgtggagcaggaactgaggggcaggaggcagaagaggcgagagtggaagcatgacagtgtctaaagaggccatggggacttaaaccaggtggtagccatagacgggagagctgtggacagattctgcatctattttgaagacagagccaataggacctgatgatagattgcatgtggatggtgatgaaaaagaggaattggctgggcatggtggttcacgcttgcaatcacagcattttgggaggccgaggaggcagatcacttgaggccaggagttcgagaccagcctggccaacatggcaaaccccatctctattaaaaatacaaaaattagctgggcatggtggtgcacgcctgtagtcctggctactcaggaggatgcagcatgagaatcacttgagactgggagtcggaggttgcagtgagctgtgatcgcaccactgcactccagcctgggcaacacagccagaccctgtatcaaaaaacaaaacaaaacaaaacaaaaaaccaaaaaaaaaaaaagaaaaaagaatcaagggctgcttttctatttttggcctcaacatttgggtgaagatggacttgctttctaagatggtggagtaatgggaaggaacaaatttcttcgcaaggtgggggagagagtgaaaaattatctactgcccaccttaggtttgagatgcctattaagaaatccaagaggagatgtcaagtaggccatcggatatgagtgggaagaagatcagcgtgctctaggagcagaaaggaggcatgactggaactcattaaacacgaggagaagacagtggtagacaggtgggccagggcagattaggccaccgtgggcaaactggtcacaaagttctgagtcagccactcatcgcttgtgaaacctggggaaagttgttcatttatgaatataagacgaacaacttccatgtaatgaatgcttgttatgggtaagccactgtcttcgtttttatggcgcggagtcttcagatcagccggggaggtggaggatgggagggggattctcttatccttgttgtacggaggaggaaatacgctgcgggctggggtagggcttgtatgagccataatcaggtctggaactgtctagataaaaacttcagctgatctcttaggatgtctgtctgctctaaaatccaaatatgcttcttcacagttctgagatgcagaaactgaggcctcaggacggggcagtagtctgtccaataggggcacagcgaggacgcgtggcaggtagcgctgtcccccaattcaccccaggggaaactgaggctaaagagagggcggtgtcctgtccaggttcacacacaggaagagccaaaccgaggcccccgcgctggccccctcctgagccactgcccaccccggaacaggagggcagcctgctcacgtcctgattcctggcaccgacatcggcccttaagttctgcccgggtggagagggaggacaaaaaaaaatgcgatccgtagtcaaggagacgtagcctgcactcctgattggcgcagaactctagcctggtctcctcctcctcctcctcttcgcttgccagcttctagagctccggaggccccacctcccaaatgcccggcggtgcccggcctcccctgatctccacaacaacgccgccatggctcctcctcctcctccctctttttttcccggcacttctgcgcatgtccagggcccgcgcgcagaccactgggaagcctcctcgtgcattctgggaaatgtagtccaaagcctgtcgcgctcagacagcccgcgacatttgcgccgtcaaggccaaataggctgcagacgacgctttcgcgtatcttgggaaatgtagttccagtgttggcgaagacgccacgcggtgacaaacaggagtaaggcggtccccaggcgagggccaattggcagccgcctttgccgcgatgcttcctgggagttgtagttcggggtgaggccggggcttcatggggagttgttgggctgaacgagcggctcggagtatgggattgggggagggggacgggggagtttggcgcaaagcctgctggggcatggagtcccggcgagctttgtgcgcatgtgcggggaggtgagggggcttggggggcctcgcctgagagagtgaggtgagcgaggggggaaggagggagggatt

SEQ ID NO: 22632 - DNA, 2300 bp, Homo sapien
aaaactgcgtctctactaaaaatacaaaaatcagctgggcatggtggcacatgcctgtaatcccagctactcaggaagctgaggcaggagaatcgcttgaacccaggagctggagattgcagtgaaccaggactgcaccaccgcactccagcctgggcgacagagtgagactctgtctcaaaaaaaaaaaaaaaaaataccgttgccgggattttactcttagatttgaagttgcggttatgaggtgattcgggcctcagcttcagtaattttttaactgaatgtctccattctcctgttgaaggacatttgggttgattccagggttttgttttttttttttttttaatagagctggtttacgtctctgaataggtttctgtgtgaatacacgtttacatttatctagggtaagcgcccaggagtgcagttgctgggttgcgtgacgtcttagtctgtttgggctgctgtaacaaggtaccataggctgctggctgaaaacaacgggaatgtatttctcacagttctgcaggctggggagtttgagatcaaggccaactcagtgtttggtgagggtctcctgctggttcacagatggtggcttcctgctgtgtcctcacagggcagaaggggtgaaggggtctctctggggtctcttgtagaagggcactaatcccattcatgagggctcccccttcatgacctaatcacctcccaaaggccccacgtaatctcattaccttcagggttaggatttcaacatagaatttgagaggcacacagacatttggtctgcagcagtcttctgtccattttcagactgggttgttttcttgccctggagattccttcatgttagtctggatgcatcctctgccagctagtagactttcacattttttttaaaagtgcctcatgacctgtgtgagccactggagttggggaccaccaataagagagagcccgtcatccaggagggggcaggctcttccatttgggggagaacaggggacatttgggaatcacagcctccatggttctaaggactgttcccatctcctcagagtctaggggacttagagaaatatatagccttcttggctacgttggccttgtcgagtttgtttatgacttttttatggtatgtctagccccagctggaatgtagtctcatatagtctcctgtgggttggggccttgtcttttgttcagtgatgtgtccctggagctcaggatggtgctgggcacatagtaggtgctacaaaaatactcgttgagggaatggctaacccttcccagcctcctcttctcctgctgtggagggaatggctaaccgttcccagcctcctcttgtcctgctttgatatacaggatttgacaggaagaccagggtatggtcagcttcctcacttctgtggagagagaatctgatctgtccagaaagatcgaatgacctggctgtagtcactcagcatctggcctcaggcacacaatagggaaaggggatagtttaagacggatgggggcagggcgtctgccaatcggggaagtgcagagaaaagccagtggggtaggcctgggaggtggggagaggcagctccagccagtacctggttagcttgacaggaaatgccccagtcagcctgcgtctcaggtcggaattgaaggggaggccctggggctccagaggcagctgggagcacaggaaaatagcacagggtagctgttcaatgtagaagccaaactcagaagattagcagaggacaggttgataatcaaggtccaaactcaatatttgaaaagaatagtagaatagtgcaaaccttcagcaagttgactaggaggaaaacaagaaacagcacaaacactgatggtggaagcaagcaaagccggggatggagcggatttgacaaccgttgagaacaccgtgttcaacgtacacaatgcattcgaagtcctagatgaaatggacagttttctaggaaaatataaatcaccaacatatgctcatgatgtagtggcagatgtgagagtctggaaaccagaggggggagatcaaaaggtgatgaaagaccttcgcgtatagaaggcactggattccagcactttatgtgtaagttctaccaggcctccaaggaactgatcattctcatctgttcttttttttgaggcggagtctcactctgtcgcccaggctggagtgcagtggcgtggtctcggctcactgcaacctccgcctcccatgctcaagcaattctcctgcctcagcctcccaagtagctgggattacaggtgcatgt

SEQ ID NO: 22633 - DNA, 2300 bp, Homo sapien
tttaggagagacggggtttcaccatgttggccaggctggtcccttttacacaaacttccagaacacagggaaggtgttcctcagctcactggcaaggctgccacccccacccccacccccaaccacctaacaggacaaggacagcacaggaaaagaaggttgcagccagtctcatgggaccctcaacagaacatcggcagcttgattccgcagtgggtggacagacctatgtgctggggcaggtggagcttagcccagatacacgaggatgcttcatccttaggggatcctcagcagaacatcagcagcttgatcccacagtgggtggacaggcctatgcactggggcaggtggagcttagcccagatacacgaggatgctgcatccttaggaagtctctcagttagtacacagacttcaaagccgaccagagtctctcagttaaagtacacagacttcaaagctggatatgagtcctgcctccaccttttccaagctgggtgaccttggacgcatgtctgggactctcagagccttggcttcctcagctgcaattttggaatctcgattcctgagccctccagggatgggtgtaaggagggctccatcaggcagtgtgttcctggctgtgccaaattggctcagtcagtcacacacagggtcacagcttattacagagaaaggacacagatgacaaccagccaagggaagagatgagtggaatgggtggaggaaggctctgtgctcggagctcccaactgtcctcctgccgtggagtgtggacggcgctaactcctcccggcaacaacgtgtgacaacctgcagggggtgctgctggccaggaacgcttccccgagctcggcactcggtctctgttggggttgtgtgtagatatgctgaccttcacctccatccctggcagaggccgagctgatgcacatggcccagacccccaaccctgagtcacgctgtgggctcagcccacccgggtggcccagggccccaggtgagcagaccctgccatcaggcagtgtgttctgggggcatagaggtgaccctccctggagccaagggcagaggccagacctctctggacagggctgagcctcactgcacagcagcagcatctcgtcagtctccacgcagcctgcagggtccgtcctgggtactggtgtcatctcagggaaggaaagcagcttgcccgaggtgacacagctggttcaggggcagggggggatctgtggaaaaaacgtactcaaagtatctttttctattctcagcatcagtgaccacagaagacgtctgtgaccaaatgttggagggggtgtcccctcacataccgaacaagcaatcaactctgcagcagacacaagctgggtgtcctctaatgcatttccaacatggtctccctggagacagtgccagatcccacaggttgagggctcacatcccaagactgaccccccatttctgatgccagtcacaagccccaggttatttcatctgtgcttccaactgacaggctgtacatcgggctcccacagcccttcctctggttccgttaatttgctagtgtgctcacagaaccagggaaacatgtttaccgatttattgtaaaggagattttaaaggataccagtgaacagccagatggagagccacgtatggtgaggtctggaagggttccgagcgcaggggcctctgtccctgtggacttgggatgcaccatcctcctggcatgtgggtgaggtctagtttaccttgctgtccacctccacgagttcagctctctggaagctccctgaaccctgtccttttggccttttatggagacttggttgagaggcataactgaagcatggacagccatgtagaaatgtgattagataaaacgggtgtgatcgaatccgagtagaccgagcggggaaacctcgcaaggcctgtgtgttcagacccttcttggcctcctttggctttctttcctccagggtaggggcaggaccccttctgaaggggggtgttatggcccacaatcagacaaattaggtcagaaaaattttttatggccagaggtgggggaagatttaaggatatttttagtttttaaggcctgccttgtggagaaagaagagcaggtgaaagtagggcagaaggtcagggagagactctttttctgaggcctaaagcttcccatcgttagaacaagaccgtaacaagggctgtgggagtcatgagccaggagccgtggacagagcccaatgtatacgtatcataaaatcacagggagggttaggaccccg

SEQ ID NO: 22634 - DNA, 2300 bp, Homo sapien
cagcctgggtgacggagtgagactccatctcaataaaaaaaaaaaaaagaaagaaatgagaagaaagtgacattgtgacatttcttgcaccacatttgagttttgcgtgtgtgtgtgtgtgtgtgtgtgtgtgtgtgtgtgtaagagagatagagcaagctttggacctaccccgtttacttttcacaaactagctaatgggcagtgaggcaaggacttcccactgtttctctgaccctccattgggctccaggtaacccagcttcaagctctcagcgtcgcctcctcagtcctgtctcccgtgcagtgggcgtcactccctcctcctttctccttcccagcaaagccattcacaccttcttgtcagtttgtcttctataaaagcttccccctcctcctcctcccctgcccactcctcctcctcctcctcctcctcctcctcgttgttgtcatcctctggatgagaagtgagggacttggagaaacagcggagggggctcaggagcccaccagggtgtctgtaatcccccacgtcgtcttctcactccatccctctcctggggtctccctttccccttgggatgagaaaggatggggtaagggctgatggggatgtgtaaagacaggacagagatacaagtgccagccacaaaccgacagaatgctggaaggaccttggaggcaatgtgtcctccacggtggagaggaggagacagaacccagccaggaccagggcgtcccctctgtcccttagacagcaaagggcaacagcaagagtaaaacctcttccaaggttctttcctctggaaagcaggtgacgtcagggcaaagagagagcgtgctgcagagacagatagatcaacacacatgacaggagagagacgcagcaacgacacactccttattcgttcacccaacaagtattgagtgagctccgggcactgttttaggggctgctgtgaggtttctcatctttggagctattgactttcggggctgggtccttcccatcggggaggcctttcctgagcactgtgggaggctgagccgcgtccctggcttccacccacgagatgccgggagtccctcccaagtcccaagtaaagatgtctccagccgggcgcggtggctcacgcctgtaatcccagcactttgagaggctgaggcgggaagatcacgaggtcaggagttcaagactagcctggccaacatagtaaaactccgtctgtctctactaaaaatacaaaaaattagccgggcgtggtggcgggcgcctgtcgtcccagctactcgggaggctgaggcaggagaatggcgtgaacccgggaggcacagcttgtagtgagccgagatcacagcactgcactccagcctgggcgacagtgcgagactccgtctcaaaacaaaaacaaaaaaaacgaacaaacaaaactgtctccagacttggtcacatgtcctggggtgaggctggggcagcatcggggcagagtcactcctggttgagagcttccggcctagggacgcagccatgaacaagacacagttgacacccctcatggggtctcctttagccagggtggtaggtggggggcggggagatagacagctcacaagtaaacaaataaacagggtctaccgtgcaagacagaagaaatgcaactcagtgagggagctgcggaggcttggagggattgatgggggcagaggggacagggctacggagacaccagtggcaggtggagacaaccaaggaagacacaggtcaaggcccagacgcagataagagggagggagggagccctcgaatagctgcaaagtctggaacaggacagctggaagataaaggggcacagaaggagggggaagggcagggtctaccaggggaaaccaaggcacagcagcatttcccgcgatgaagtgtgtgttttgacctcacagaccagcgtttgaaagcccctggagtggatgactgttcccccacctccatcctcttcactccctctcccttcttctaatcccctccctttcccccctcccttctattgtctcctcagaaggcataaaagctcagggggcgtgaaagagtccaggcgctggagcgaggagccagagagagctgcggagagctgccagctgcagcggggtgagagcctaggccaggagggcagaggggcggatcccagctgcaccggggtgagagcctaggccaggagggcacagggtcggctgccagctgcagcggggtgagagcctaggccaggagggcagaggggcggatgccagctgcagcggggtgagag

SEQ ID NO: 22635 - DNA, 2300 bp, Homo sapien
gcataatatgctttgtagtattacaaacattgttaaatggctaaattgagctaatattcatatgccctacctcatgtactaaccatttttggttttgagaatacttgaaatctaattttttttaagcagtttccaagtatacaatacattgttatgaactgaagtcaccatgttggacaattgctcttttgaattgatttcttcaattgaaatttgtactctttgacctatatcttcccaacccctaccccagccctggtaactattctactcactactactatgagttccactgggtttttaattattatttatgttatttacttctttttaaatttttttttgtaatttgaacttgtgttttagattcagtgggtacctgtgcagatttgttgcatgagtatattgagtgatgctgaggtgtgaggtatgactctacccatcacccaggatatgaggatagtacccaataggtagtttttcaaccctccctccctctatccctccagagtttcactgttttggagtccacgtcctgatttcctttcctctgtgtacctgccccggagcgggattgccggatcatgcagttgttggactttcaattttctgaggagcttctatactgtctcccatatcggctgctctaatttacatcccagcacagggcgcagaggacccctttcccccaaatcctcaccaacactcgttccatgtgtctttttgggaacagccactctagcaggcgtgaggggtgccttgtggtttggatttgcatgtccctgatgatgagtgataatgagcaccttttcctagacctgctggccattcacatgtcttcatctgagatgtccacacaggcgccttaagcccttctagtgggttatgtgttttctcgctctggaggagtttgagttgcttatgttttgcacaggagccccgtgagatgtgtggtgtgtaaatattgtctcctcctctgggttgtctcccgcctctgccgattgtctccctggctgtctctctgttctgcacttgctcaaagtccttccaggaagtgtggggcactcgccctccaggctaccagtgacttttcccaagacccttctgccagttttttctcccctctgcagaccttcaggttgcttcccccacctgtgtctaggaaagcagggctgtgttctcatagctgttgaacttggacgataattgatgcctggagagtatcactcagtggctcctgcctaatgaagctaggtttaggaattaatttttaaaaatcttattattgtatcaacccacttctttaaaatatcaaagagcactagactttaaatccattttctgagatgagattaggaatacagaaacccttagagacagaaggtagattagtgattgctaggggctggggtgggtgggcagggggtgatcactgatggggatggggttgcttttgggttgatgagataattctggaagtaaacagtggtaatggttgtacaacatggtgcatgtcttagtcccataaaatcgtgaacttgaagagagtaaaaaatgatgaaatttatgaatgtacattttaccaaaataacaaaatatctgtgtaggtgcttaatcctcataggatcctttaatgctgtcccttccctggagcaagtaaatgttctggagttaacaagaatatgtgttggggaaaatattacattctaactctttttctctatccttttgcataattatgactaagggctttgccttggatcttgtcctgatggggaaacataaagggcttactttattgttgcatcacattttcagagcttcacctaactatcttatttaatttatagtcaagaacaatgttgttccaattgacaggaaaactgattcagcctctgcacagtgatttcctagagatcagaatccaggggtcattaagattttaaaccagagtatgtagtcaggtatagacactggaagatttccactgtgctgaattcgatgctgctgaagaagtggcatccaggatgagggatttcgaagggagggatggatggagtagtaacttaaactaatgaggctcatacttttcccccccagacttctgaatgaacagtgaatctattactgaggaaaaccagaggaagcctgtgtagataggtatcaattagataccagctactggaagagctttctcagagactgattaaaaaattctccactagatatggctgcaaattgcacatcctcatggagtctaggagaatcctgcaacagacctgggttggagctgccacggt

SEQ ID NO: 22636 - DNA, 2300 bp, Homo sapien
gtgacctttgttaataataatatgttggggccgggtatggtggctcatgcctgtaatcccggcactttgggaggccgaggcgggtggatcacgaggtcaggagttcaagaccagcctgggcaagatggtaaaaccccatttctattaagtatagaaaaattcaccgggcatggtggcgtgtgcctgaaatcccagctacttgggaggctgaggcaaataattgctcgaacccaagaggcagaggttgcagtgagcctgggtgacagagcgacactttgtctcaaaataataataataatataataataatgtgttgggaaagtcttagccagagcaaggaataaagggcatccaaattcagaaggaggaagtcgaattgtctctctttgcaaacaacatgttatcatctataaaaacacctgaaacctccaccagtaaaacagaactgataaaggaattcagtaaaactacaggatacgaagtcaacatgcaaaaatcagtagtgtttttatacaccaacaagctagtggaacaaaaaccaagaaagcaatcccatttacaatagcaaaagaacccctaaaaacctggtaataaatttaaccagggaggtgaaagatttccacaagaaaaactattaagtgctaatgaaaaaaaacaaaaaagaccaccaaaaatggaaagccatgttcatagaatgtgaaaaagaccatactattaatagacatcagcagattcgatgcggtctcttccaaaataccaacggcagcttcacagaaataagactatgagtttacagaggggaggatttaggggaatcgggaattgggtagccagagagtggcttaggcagctcccagttaattccagtgaataattccattcttaactctaactcatttgttagagttgagttagagtcaacacctcagtggtaaacaagaaaaaatgtaacaaagtatgagaacatgcctcagaaaataattgttacaatttcttggcaaaatgaaccttgtattgagcactttactgacatagtcttacttcatcttcaaaacaacacatcaggaaagttctactcccaagaagtttgaagttcccagagtgaagcggcttaagattttccaaggatttaaaccagaatcagtgtaaaattaacagccctccaatttgtcctaaaggttagacgagaaggtttcctctgaaattaaaatgaatgagtcactacttgaatggattagtgtcatccaactgatggtgtgaacttcccaaattgtaatctaatcctgcctagcacttaattatcattccacattaactccatgatccacacagtaaaattcacacccaccgttaaggcttttcgtgcttgagagccctaactgaggggggctgagaactagggaaccccgtaggaccctcagtgtatctataaaccaccctatcaccgtcctggaatgaatgcagagtggggaccatgtgcctttctctggttcccactgtttttatataagggtaggttggctgatatcaaaccactgatttagtctagttcaaacaaagctttcccatgtcaactccaatattctttttaaaaaataaaaaattatcaccaatattcattatgtatcaacaaagactgtctctttttttcagtaaaaaattatcaccaatattcattatgtatcaacaaagactgtctctttttttcagtatcttgacattcatatgtgagagctttgctcaaactagatcaaatcactggtttgatactaatccaccagctcttaacatgttctttacttgttaggatattactgtctgtggcatgaggggacccaaaatggttaaaactcgcaaatctatattttctgaggccaccaaatacttcagcagtatgacaactcagtagagcgggaaatatttgcacagtaggcatgtttagtacattaatttcctgtgggtggggtttcagtgggaaccataatcaacgccgattacgtaaaatggactctatggccctaaaccaatcacggggcggcgcagggaaccggaaacgcggcctggagtcccgcttctccataaatagacgcagttcagctccaggccggttggagagcgcatcccagaccgagaaggtcggaggcagaagccgggaaggaggtgagtgtccagcggggatgtctgtcgggtttaggagctggcatgtcgggggttggtttcagaaagtttgggtttattttttcgtgcgttttctcggagactttgtgaaggcagcgggtctcctttgcaccccatgatta

SEQ ID NO: 22637 - DNA, 2300 bp, Homo sapien
accgtcttggggttttatcagtgtccaaatgacctggaagaaggaaaataaacaattctggtcccctcttgccaccctgtcccacttaaggggaaagggttttactcggaaggacttgtgaaattcatagtccctgggctcaggataagagactgaaacctttgggaggccgaggcgggcggatcacgaggtcagagatcgagaccatcctggctaacatggtgaaaccccgtctctactaaaaatacaaaaaattagctgggtgtggtggcggatgcctgtagtcccagctactcgggaagctgaggcaggaggcggagcttgcagtgagccgagattgtgccattgcactccagcctgggtgacacagcgagactctgtctcaaaaaaaaaaaaaaaaaaaaagaaaccttaccattaagacttgttgaaaccattaattgggaggccattaggccgaggtggctccagtagcctgaattcttaacctaagcaaacccaaacccaactcagtgtaactggccttaaccaatcagaaaccaccaattaacctcctactattgacttcccactggaatgatccaaataaggctctactctaaccaatcaagtattttctttgccttgtttctgagttcagcctgtaaaagcccttccctcatgcctcttcagagaggccctaagctgcatgtgatctggcaatgcccaattcatgaactgctatctgcttaaactctttaaaattttaatgtgcctaagtttatatattatttttgcagaccatagaacacttcccctctcacaaccaaatcttatcaccatgttactaaagacctatcatgcggctcattttaccaagtacatcatattcagctatcaggaaaaaattacaaggcactctaataggcaaaatacacagattgaagattttacttaactcattaatgagaaaaactggtgacgtattaaaaccaactcataagagaacccttccccgagccgaaaaaaagtcacatttatagatcaagaatattaaagtggctggctgcagtggctcatgcctgtaatcgcagcactttgggaggtcaatgtgggaggatcgcttgaggccacgagtttgagaccagcctgggtaacatagtgagatctcacctatacttaaaaaattagccgggcatggtggtgcacacctgtagtcccagctaatcaggaggctgaggcaggaagatagattcaatccaggatgtcaagcggtcgtggctgcagtgagctatgatggtgccactgcacttcagtgttggcaatagagtgagatgctgtttcttaacaaaacaaaaaaaattaaaattaaaatgatatgcagcagcaaaagaggcaaaaactggcctcctcacaaatggagatggaggagggaagtaagctgagcctcctccaatttacttttctgtaaacaagaagtaatttgaactgccatcagtgatccacaatgtgagttggtaaatagctcaaaacaatgacaaagtagaatcaaatgacctaaaagcccatgatctaaataatgcactgaagcacagtttctccattcattgcttattttgtgccaggcacatttatgagcacttaatcctcgcaacactattagctaagaaatattgttccgtgcacacatgagcaactgaagctcataaagattaaacaattaagaaaaagtcacacagcagacacactctacagctcaagtgtcaaccaaacacccacagagatgcatatagggtcacatatcaaatcacataacctcacggagaatgggcctaacctcacggagaatggggccatcagatacaccaaagcagacgctcggtggtcccaaccacctctcataacactttcccaaacttaagacgcacatgtccacgccaatgtattatcataggcccttccccccctcttaaagcctcccacgaagtctgaacctggtactgatatacgcttcagccctcagaaggcaaccgcttgattctctgcgcaggcgcagcgttctcaacaccgccaacgggcacaaagccacgcccccacggccgaactcacgcctacgtactcagtcaccagcggaaccctctccaccaggctccgcgtcgaggccctacggggcgtcaatacgcacgcgtactttgtgtcccaggtagctcgtctcttagccatgtacgcctctgcattccggtcactgggagcggggccgtgggggctgcacatgcgcactgcgagtcctcgcctactcccagaaaccacccgggcgcata

SEQ ID NO: 22638 - DNA, 2300 bp, Homo sapien
ggatcacgaggtcagagatcgagaccatcctggctaacatggtgaaaccccgtctctactaaaaatacaaaaaattagctgggtgtggtggcggatgcctgtagtcccagctactcgggaagctgaggcaggaggcggagcttgcagtgagccgagattgtgccattgcactccagcctgggtgacacagcgagactctgtctcaaaaaaaaaaaaaaaaaaaaagaaaccttaccattaagacttgttgaaaccattaattgggaggccattaggccgaggtggctccagtagcctgaattcttaacctaagcaaacccaaacccaactcagtgtaactggccttaaccaatcagaaaccaccaattaacctcctactattgacttcccactggaatgatccaaataaggctctactctaaccaatcaagtattttctttgccttgtttctgagttcagcctgtaaaagcccttccctcatgcctcttcagagaggccctaagctgcatgtgatctggcaatgcccaattcatgaactgctatctgcttaaactctttaaaattttaatgtgcctaagtttatatattatttttgcagaccatagaacacttcccctctcacaaccaaatcttatcaccatgttactaaagacctatcatgcggctcattttaccaagtacatcatattcagctatcaggaaaaaattacaaggcactctaataggcaaaatacacagattgaagattttacttaactcattaatgagaaaaactggtgacgtattaaaaccaactcataagagaacccttccccgagccgaaaaaaagtcacatttatagatcaagaatattaaagtggctggctgcagtggctcatgcctgtaatcgcagcactttgggaggtcaatgtgggaggatcgcttgaggccacgagtttgagaccagcctgggtaacatagtgagatctcacctatacttaaaaaattagccgggcatggtggtgcacacctgtagtcccagctaatcaggaggctgaggcaggaagatagattcaatccaggatgtcaagcggtcgtggctgcagtgagctatgatggtgccactgcacttcagtgttggcaatagagtgagatgctgtttcttaacaaaacaaaaaaaattaaaattaaaatgatatgcagcagcaaaagaggcaaaaactggcctcctcacaaatggagatggaggagggaagtaagctgagcctcctccaatttacttttctgtaaacaagaagtaatttgaactgccatcagtgatccacaatgtgagttggtaaatagctcaaaacaatgacaaagtagaatcaaatgacctaaaagcccatgatctaaataatgcactgaagcacagtttctccattcattgcttattttgtgccaggcacatttatgagcacttaatcctcgcaacactattagctaagaaatattgttccgtgcacacatgagcaactgaagctcataaagattaaacaattaagaaaaagtcacacagcagacacactctacagctcaagtgtcaaccaaacacccacagagatgcatatagggtcacatatcaaatcacataacctcacggagaatgggcctaacctcacggagaatggggccatcagatacaccaaagcagacgctcggtggtcccaaccacctctcataacactttcccaaacttaagacgcacatgtccacgccaatgtattatcataggcccttccccccctcttaaagcctcccacgaagtctgaacctggtactgatatacgcttcagccctcagaaggcaaccgcttgattctctgcgcaggcgcagcgttctcaacaccgccaacgggcacaaagccacgcccccacggccgaactcacgcctacgtactcagtcaccagcggaaccctctccaccaggctccgcgtcgaggccctacggggcgtcaatacgcacgcgtactttgtgtcccaggtagctcgtctcttagccatgtacgcctctgcattccggtcactgggagcggggccgtgggggctgcacatgcgcactgcgagtcctcgcctactcccagaaaccacccgggcgcatacgcggtgcggccgctgcttcaggtcggcgggctccagggagacctgggtgggcagcgtcgccgtttctcctttcttgggcagtatttttcccagcgccacgcggaggctgggccattatgaggtttgtgttgcgtcggggcggtccgtctcagaggcgctccggggaggagtgggcggct

SEQ ID NO: 22639 - DNA, 2300 bp, Homo sapien
ggagactcctgcctggtccttttattccctaaaatgggaaagtctgagaaccaaatttctggatggaacccaggtggaaagtttcaagataaggaaagcaaatatttatgggatttaaaaactcacaagggacatgacttttagaatttcaagggctgataggtcctccttctggttcctctcttggggaagggcagagtcctgcgacggtagagctgggggaggaaagagcaaacatgagaggctaggcttgcctcacagttcctagaatgccaagttacaagtccccacctgcttgccctctgcccaccaagaaaatgagaaggagggggaggcaaagggatcctcacccaaccccaggaaaccagctttagctgctgcaaggcaaaggggaaccagtggtcctttccctcccatttcccctaaacatccagtggttctgttttgctgcaaatgcaagtctaagacagggatgctgagggctgttctagtgactgagacccacatgttacctcaaggacaaggagggcttccctcaagccagggagcatagaaggcctgcatcatttgcatagccccagcctagaataaagcctttccaggactaggccatttaactctctcctgcagcaaatataacacctttgaaagtctacctggctcttttcccaaccgccaaatatacaaaaagctctacagcccaaactgaggctttgtgcatgccacttcatggagcatgccttgcatcaacaaatgggatagagttggaaggaacagtaagagacaaattacacacagcacgcccagtgctccattatcagcacataaatgtgtccttccatagagacacagcagtgcacaaagctgcatgtccaataatatttgctaaataggagaactgaaaattagtacgtaagtaggcaagtccacaagtagccaagaggttgaatcatttttggcacagccatataatgggatgccaagtgactatcaaaaatgactatcaaaaactgacaagcaaagatattaactactgaatcctttgagaacattcagcaaaaagaagtcaaactcactaacacacaggctaaaaacaaaacaaaacaaaaaaattggaagaaaaaacacccaagtattcgcagtgttgtcatttaaccagttcttgagctcactgttaaacaagaagtactctgtaaaggagtatataaggtgcctactgcattacaaacatttggttctaagtaacgtgtaagtgaaataattatgaatgttgcttaatatgatgtaataggcagcttttccttattatgaccacttttataagcattatttgtattaactgcacgatatcctatttacaaaggatggcctgtgatccactcaagtgtttccccattgctggacatagaatttgaacatataaaatgttcccaagtataagtttttctaaactagcggttctaagtcttctggggtcttgtaactctctgagaacctcatgaaacaagatttcctctcagattaaaaaaaaaaaaaggcacgcataacagtgaatgcaaaacatccgcaatttcagggggtcggagacccctgcgcacccacctaaggggtccatgcacctgggctatgaggctggaagcagaaagggggcgccagaaagcgcacgccgcgagggccggcgggaaatgtagtctcacgccggtaaagccacagagcgacgatgaggcgagacgtctgcgttcttctcaggcctgagacccaaccggcccgggcaccagctcctgctggaccccagagcgcctggaaagctccggaacctctcacctgccgcctcctcgggtccaagtgccaccgcggccgcgcccccggcagcccagggcgcgcttccaccacggtaccggtggattcgccgtgcgcagccggaagatggcgcagacgcacaaagcacaccgatgctgcgccatgatagggccggcgccgcagtgtcttccgggaaacatagtctttaggcgtaaaggcagcagcccggccttgaagccggatctcgcgatgtttcagggtgagccggacgcaggcgtgcctgcgcagtgcgcggaggagtgctgttcgtgtgttcgagtccctgggttgcttcctggggtctgtggtgctgggtgtgctatctgcgtgtgattctctagcgagagattgtgggcgagtgaccgagtgggcaaggggccgtcactgtgtgtgcgtgattttgacagtgtgtggtggtagcttctgactccgcgtgggtcgttgaatgtatgactgggacc

SEQ ID NO: 22640 - DNA, 2300 bp, Homo sapien
tggtgtatgacttcagaggcttggttcagagtcagaagtggccatttcatcatcctctaaatttctctttggcagattaatgaatgtgagaaagtaaaaatggtatagaagaaagttagcctgagagatggctggctttgtacctgtttggtctttttccttcctttcctccataagcaaatactgacgcatgtacatatagacacactcaacacagtgggatgttaaagggaaactagagccactcgccccttcccaagatcagagaacataggaaagatgatgactttttgcatctaccctctcctcttgaactcgcaacactgtcttgaaccacaaataaggtcaagtaggataaatctacaactgtctcctcaactgtccgctcacaagtgtgaaattcaaccatccttgctgaagttgtcttttaatatcagtaatcagcaataaccaacctctgagctttgcttatattattaaatcattttatttgaccctcaggacaaagctgcaagcccagcattacattcttccttttatggacaaaaaaaaaaaaacaaaacaaaaccgagataggcacgaagaaactaataaatggctgaaatgctatttgaatccacatctgtctaattctaaaagtgtgctttccaccacatcaccgcacctacaaggaaaatgcagcctctaccctctcctgaagaatgtgtaaagaggcaatatggtgtgttttggaaaaagcatctttgcagaaagaaagcattagcttcagtcatattagcatccttatccagcagcagtagcattattttacatatcagttactcctccccaacaactcaatgaattagatgccacaatcatcctcactttcaaatgtggagaccgaggcacatctctaagactggagttcaggcattctggctccagtcttagagatggttaagggttcacactcttaaccatttattacaccatagagctcaccaggtttgagggaaacaggatcaaatcaaaagagtcactcaggactccagtcctcactcaaggacaaactgttccacctcggacagggagagtttccgcattctgagacccagcataacaggtcctgaccggcatctggcactcggactcccaatcatactggatcacactggctcgggatgtgtaaagtccagggcttctcacatttgatgacaccaaagccgcctaaaaacaagagagaattaacaactacctacggcggtctgatatttgcccaagagatgccgccccataaaactcctttacatctttataacgtttttattttgcgttctccttcataacccacatttaactcaccatagatgtaatgtttaaaattagttaccagataaactcttacgcttccaaactttaaggttccttcgaaaccttctggtaaaactgttgttccacggaaatgggaacgtaacggatgaggcaatcttccacagccgcacacagttgtgtatccaccgctaaacggtcccagtcatacattcaacgacccacgcggagtcagaagctaccaccacacactgtcaaaatcacgcacacacagtgacggccccttgcccactcggtcactcgcccacaatctctcgctagagaatcacacgcagatagcacacccagcaccacagaccccaggaagcaacccagggactcgaacacacgaacagcactcctccgcgcactgcgcaggcacgcctgcgtccggctcaccctgaaacatcgcgagatccggcttcaaggccgggctgctgcctttacgcctaaagactatgtttcccggaagacactgcggcgccggccctatcatggcgcagcatcggtgtgctttgtgcgtctgcgccatcttccggctgcgcacggcgaatccaccggtaccgtggtggaagcgcgccctgggctgccgggggcgcggccgcggtggcacttggacccgaggaggcggcaggtgagaggttccggagctttccaggcgctctggggtccagcaggagctggtgcccgggccggttgggtctcaggcctgagaagaacgcagacgtctcgcctcatcgtcgctctgtggctttaccggcgtgagactacatttcccgccggccctcgcggcgtgcgctttctggcgccccctttctgcttccagcctcatagcccaggtgcatggaccccttaggtgggtgcgcaggggtctccgaccccctgaaattgcggatgttttgcattcactgttatgcgtgcctttttttttttttaatctgagaggaaat

SEQ ID NO: 22641 - DNA, 2300 bp, Homo sapien
ggaatgtgtactgggaagtggctgacaaaagacctatggattccatggaatggagaggctagctcagagcattctcatactcttaaaaggaagaaactggaagccaccctctaagacgaccctgaatgatccctgcctcctagtacttatactcttgtgtagcctccacctacttagactcacagctgattttgtgaccaagagtataatggtgtatgacttcagaggcttggttcagagtcagaagtggccatttcatcatcctctaaatttctctttggcagattaatgaatgtgagaaagtaaaaatggtatagaagaaagttagcctgagagatggctggctttgtacctgtttggtctttttccttcctttcctccataagcaaatactgacgcatgtacatatagacacactcaacacagtgggatgttaaagggaaactagagccactcgccccttcccaagatcagagaacataggaaagatgatgactttttgcatctaccctctcctcttgaactcgcaacactgtcttgaaccacaaataaggtcaagtaggataaatctacaactgtctcctcaactgtccgctcacaagtgtgaaattcaaccatccttgctgaagttgtcttttaatatcagtaatcagcaataaccaacctctgagctttgcttatattattaaatcattttatttgaccctcaggacaaagctgcaagcccagcattacattcttccttttatggacaaaaaaaaaaaaacaaaacaaaaccgagataggcacgaagaaactaataaatggctgaaatgctatttgaatccacatctgtctaattctaaaagtgtgctttccaccacatcaccgcacctacaaggaaaatgcagcctctaccctctcctgaagaatgtgtaaagaggcaatatggtgtgttttggaaaaagcatctttgcagaaagaaagcattagcttcagtcatattagcatccttatccagcagcagtagcattattttacatatcagttactcctccccaacaactcaatgaattagatgccacaatcatcctcactttcaaatgtggagaccgaggcacatctctaagactggagttcaggcattctggctccagtcttagagatggttaagggttcacactcttaaccatttattacaccatagagctcaccaggtttgagggaaacaggatcaaatcaaaagagtcactcaggactccagtcctcactcaaggacaaactgttccacctcggacagggagagtttccgcattctgagacccagcataacaggtcctgaccggcatctggcactcggactcccaatcatactggatcacactggctcgggatgtgtaaagtccagggcttctcacatttgatgacaccaaagccgcctaaaaacaagagagaattaacaactacctacggcggtctgatatttgcccaagagatgccgccccataaaactcctttacatctttataacgtttttattttgcgttctccttcataacccacatttaactcaccatagatgtaatgtttaaaattagttaccagataaactcttacgcttccaaactttaaggttccttcgaaaccttctggtaaaactgttgttccacggaaatgggaacgtaacggatgaggcaatcttccacagccgcacacagttgtgtatccaccgctaaacggtcccagtcatacattcaacgacccacgcggagtcagaagctaccaccacacactgtcaaaatcacgcacacacagtgacggccccttgcccactcggtcactcgcccacaatctctcgctagagaatcacacgcagatagcacacccagcaccacagaccccaggaagcaacccagggactcgaacacacgaacagcactcctccgcgcactgcgcaggcacgcctgcgtccggctcaccctgaaacatcgcgagatccggcttcaaggccgggctgctgcctttacgcctaaagactatgtttcccggaagacactgcggcgccggccctatcatggcgcagcatcggtgtgctttgtgcgtctgcgccatcttccggctgcgcacggcgaatccaccggtaccgtggtggaagcgcgccctgggctgccgggggcgcggccgcggtggcacttggacccgaggaggcggcaggtgagaggttccggagctttccaggcgctctggggtccagcaggagctggtgcccgggccggttgggtctcaggcctgagaagaacgcagacgtctcgcctcatcgt

SEQ ID NO: 22642 - DNA, 2300 bp, Homo sapien
caacattttattataaacaatgtttcagctgggctcggtggctcatgcctgtaatcccagcactttgggaggctgaggcagacagatcaggaggtcaggagattgagaccatcctggctaacaggtgaaaccccgtctctactaaaaatacaaaaaaattagccaggcgtggtggcacgtgcctgtagtcccagctactcgggaggctgaggcaggagaatggcatgaacctgggaggtggagcttgcagtgagctgagattgcgccactgcactccagcctgggtgacagagcaagactccgtctcaaaaaaaagtttcagttagtattttttgctgatatcatagttgcgtttgtttaatttcctcaaataaaattcccagcttatatgatgctctttgtcactggcaactttggtcagacaattaaatgaagcaattgaagggcacaacaggattttggaagggatggtacaggattgggagataaactagagataggagtttataaaatattttcaaagacagattgaagaataggaataagagtatgatattgtgaaatatatatttgatcttcctagcatagaacttctaaaatccttagaaactacaaagtaacagtaaaaactcattttgtatgctaatgagttgacagctggcaacccctatagagtttcaggatggggactggttatggaaagaccaagacatgactagaaggttgggacattcaaccccacccccaaccctaaggaggggacgggattttaatcaaccatgcctatgtaatgaagcctctgtaaaactcccaaaagacagggtttagagagcttccacccagctgaacatgtggaggttactggaaggtgcaacacccttttttctgtactttgccctacgcatctcttcatctatatcatttgtaatatcctttataataaactagtaaacataagtgtttcctgagttccgtgagccactctagcaaaatatcgaaccgcaaagagggggtggtgaaaatcccaatttgaaggtggtggagtcagatgttccagaggctagactttagtgggaagtgggaagggggaggcaggcttggggactgagccctcagcgaatggtgtctgacccatctccaagtagacggcgtcggaattaaactggaggacacccagctggtgcccgctgcagaactcactgaactcattgcttgcttgagatgtgtgggaaactcccctatatttggtcagaaaagtcttctgttatgattagttgtcgttgagataatagaaaaaaatgcaccttgcgttttttccactgattcagagggcataactgaaagaatgaagaactgaaagaatgatcttaatactctgcttcgcttttcttgataatacgcattacttcccaatatgcatcagtgtcctttattattaattttttcctattgaattcctcccgcattagaatgctgctccatgaggtggggattttgtctgcttgttcactgctgtgtgcccagggcccacgacagtgcccgatacagcaggcgctcaataagtggcgaatgaaagacagggcaaggcggagagagaagaaacagaaagggaaagagaaagcccgggccgccagagcgcttaatcacacgtacatcctaccgggcccctctccagctggctcaggctccacactggtcctccagctcccttttctcagcgatggactcacagccccacccggagcgctggagcgcggacgcggtcactgcgcgtgcgcctcaccgcgctggcaccccggcctggcagcctttggggacctgaaccagctgcgcctgcgcaggtggaacgggtggaacgggtgggggagcggacagtcgaacggcctgagagggctcagctggtccgggtgggattctgaaggccagcggaggtgggcttactagggaaaggggcgcagcagtaactacccgcaactgagcggcgggatctgcggccgcccggggccctcggccaacatcccagcatcctctgcgccgcgccggccccggactccatttcccagcggcccctgcggcctgccctagggctgcggcgcctttgtgagcgcggccgccggccaggatcgagccctggcccgggccctggcccagccccggcctccaaggaccgcgccgaaggaggtgcccactggagggaggaggcggtgaggagcgcgggatggagctgacgccgggagcggccatgccaccatgtgtgggaccgtgtgtgacagtgtgtgagaatgtgtgagacattaagg

SEQ ID NO: 22643 - DNA, 2300 bp, Homo sapien
ataggtactttgaaaagtaaagcagggtaaagggattacagggtgtttggcaggtgttctttttggagtcaacatccaggtctcccatgggcattttggtcaactccagagccaggaaggaccaccagcagtgaccctttggtatcacttgattggggaatctaagagtttgactttgatcttaaccaaagacttttctcttcactgaggtctggacttcaacagaaagaggtcagatctctagccctgtccttgagactctgagactcgaacgttattctaaacgatgccttcaatgttactctcaccttggaatgctttatttaaaaaaagaaaaaaaagggcgggtcagactcaatccccagagattctgatttaattggtctggcatagtgaactgccatcagctgtgactatttattagaaagctcccaagagactaatgtacgcacagggttaagagctacagctctgagtgcctgcagctcaggctcctttggggcctctgggaatgagataaattgatttggaggagtcagggggaggatgcaagtgacctctgcttggctatcttatcaaaaacagtcctcacagctgcacttccctgcagtaggggtattcctagccccatcctgcaagtgaggtaacctaatgtgttcccgggcaaagtggggaaatggcaggctagacatgcatatgcatagcctgtgttcttcctgtgacagctgtgctgacgtctttggagaaattgcctacgtatgtccctggcctctggggctggcaggttcaggccaggagtgatttttgaatatttgacagctggtacagcaaaagctgactggcccaaaggaggcaatgaggctgtggcagtgcatttaatggctggttttcagtatatcaggaccctcccccaattcaatacccagcacagcccccaaggctcaaaggggtgccagggcaggaggggaaggcccctcagttatttgcctcagaagggaggcacaaccacggttcagtaactctttgaagcatgttcccatccaggttccagccgtcctcacctcaggaggacatagctttgtgcctttcaaagccctttctcatctatcatcagggactcggaagacgagccaggtttacagccctgccttgatgtggtatgtgcgatccagccttcttttatttcatttgttgttttgaagatgtaattatacgttcatgacacaaaatgccaaagcgggttttggatttttccatactcacacatataacctggttcctttcttcagggacagtcactgctacaaactttttgtttatctttccagagccttttcaaagtcatgtatttgtatactatattttgtttttttctaaatgacttttctatgtttttgcccttataataccattttatcttggaggtttttcagccttggcgcagttgatgttttgaaccagatccttctctgctctggagggctgtcctgtgcattgcaggatggtgagcagcatccctggcctccactcactagatgccaggggcacccctactcccagatgtgacaaccaaaaatagcctcagacattgcagttttcccatagggggcaaaattacccccagttaggaatcactactatggttctactttgtttcttttaatatgtggtgtctcattatatgcatgtaatattcacttagccattctcctattgatgggctgttaggttgtttccaatctcctgatggtggtagtaataatgaaaatcttagcattggccctgcttcctggcaccactctaaatgtgttacgtattttgactcatttgatcttcaccacaaccctgtgaagtcattactgtgttttgtctcatcttacatatgaggaagctcaggccgggagaggacacatagagtgtctaagtccacacagatagcggacggcagagttaaatactgaacatagacagcctgctgcaggcccaccccttacccaaggaaatgtactgcccctttctataaactctgccattgtgaatacctttgtgtgtctctcattgtgcacatgtgcaaagatgtctgaagacatgtacaggaaataaggttgctggattaaagagtacaacaggggtaaataacgtgtatcttcggtcttaaagacattgccaaattgccctccattgaatttacaccaatttatctcctccagcactggataagaattctaatctcagcctttttagtgggtctcagtcttcgttggtctcttggatgcttggtatgtggttgacccttgaac

SEQ ID NO: 22644 - DNA, 2300 bp, Homo sapien
ccctccgctgctctcccgggtcagttcatctccgacccggacagagcagaaccagcgcagcccaagccttcttcacctcacgttctgggtgggactttccacagcctcgctgcaccccggtggattctggaggtcgcaggatgactgcgtagtgcgcacgcgcgggtgggcggtgtccgcctccgcgggtgaggccggctccaaacctcgtgaatgtgggggcgaaggacgctggctggctggaggcaataagccctcacacgggaacgtgtggttgtgggagcggggaaggcggcgaattggggaggttgggtttggttaaagagctcgaggaagggcctcagtgtccacacgtgatctcctgagaggatgaaaagcagggccaggcgccagtcccctaggagaccggtgtgcgtgccagcctcgggggtgtgcgcaggcgcgggacctcgcgcgtccgcctgcaccaatcgtgcgaacgcgcttgtgcgtgtggcgctgaggggtcggggcctcaggccggggctggtggtactgtccccgagaggcgggtgagcgcacgccgcgtggccttgtttgggggcggggccacgcgcccgcatgcgtggtgcgtgtgtgaaggggggtgcagcgcgcggtcccggggtcccggaggggagtgcgcaggcgctgagtccctgctcggctgtctcggtggtcgccgccggggtctgagcccgggaagaccgaggtaagggggctggcgagagtgtgggtgtgtctgagggcgtgggcggcgcgcccgccactgcgtggacgttcctgccaaggcgcgcgtgggtttgcgcatccacgatggcgtgggcgtctgcgcgggtgcttgcgtgggcggtgggctcgcgcctgcgtgggttctcggcccgccacggcgtggggtttgcgcccttcgctgctgtggttctcggggcttgtgcgcccaagtgtgaagttggcgccgcgtgtgaggcgagccgtgtgtgcctgtgtgtgagggagctatgtcgggaccgcggatgtgtatcgctgcgtgacccacgcgaaggaaacaatggagccattgggaagccgggagtgggtgtgtgacgctgactgtgaagatttgtgtttctggagtgtgtgcgtgtgtcagtgtcaggctgatgtgggcgtttattgtagccttgggttactgtgtgacttgcctgggcgtctgtctgccacttagcgtcagtggctttgcggttatgagtgtgtgactgtgcctttctggtgtatatctcactgtaaccatggaaatggaggcccacaggggaagaattcttagcagctctaagatgtgatgggctgccctggaaatctgtggaactgtttaattgtgcatgactttcctccttggtaaaatagcatattaatagcacctgcctgggtgttattgggaagattaaatgggatgacgtagctgaaacaccctgcacagagcttgtcacatactaatcaccgtgtttaggtgttggttatggtgctggtggtcgtttttctttgaccctatacagaggcagaggtagtggtgaatactggaggactttgcatctctgagcttcggactgggctatctttgtccacataccagggcatctgaccatctccagttgagcagtggtgcgctgcccccgccaaccacctgcgtcgtcagttttctgcatgtgtacatttgagtggaggacagagccctccactgacgctaagtatggttgtgtccccttcctaccaaggtagcttggaaaaataagagcatggactgtggcgccccgctgtctggtgttgactcctggtttcaccactggctggctgtgtgactgagagagcttacttaagtccaccactcctcggttcacttgtaaaacagtagtaataacagaaccaacctcaggtttatggtgagcataagtagaacttggcacaaggaagtgccacatcaatgatcatcgttttattattagcataataaccgcaggcgtcccacacctggagaataaaatccataggtagaaatgcaaaaggatgagccccagagtaagggttgcaggtccagaggtaaaataacttggacgtctagatcagggcttaggttcagaattgtgtaggcagggtcctgggagggcagcattagggtagaggaggtggggtcaggaacaaaggatcttcctgatggagatgtccctagggagcccatggggtcaagaacagaactttgaagtgtcagggactaagggatgtttccatataacacatgggtctggaaa

SEQ ID NO: 22645 - DNA, 2300 bp, Homo sapien
ggttctgttattactactgttttacaagtgaaccgaggagtggtggacttaagtaagctctctcagtcacacagccagccagtggtgaaaccaggagtcaacaccagacagcggggcgccacagtccatgctcttatttttccaagctaccttggtaggaaggggacacaaccatacttagcgtcagtggagggctctgtcctccactcaaatgtacacatgcagaaaactgacgacgcaggtggttggcgggggcagcgcaccactgctcaactggagatggtcagatgccctggtatgtggacaaagatagcccagtccgaagctcagagatgcaaagtcctccagtattcaccactacctctgcctctgtatagggtcaaagaaaaacgaccaccagcaccataaccaacacctaaacacggtgattagtatgtgacaagctctgtgcagggtgtttcagctacgtcatcccatttaatcttcccaataacacccaggcaggtgctattaatatgctattttaccaaggaggaaagtcatgcacaattaaacagttccacagatttccagggcagcccatcacatcttagagctgctaagaattcttcccctgtgggcctccatttccatggttacagtgagatatacaccagaaaggcacagtcacacactcataaccgcaaagccactgacgctaagtggcagacagacgcccaggcaagtcacacagtaacccaaggctacaataaacgcccacatcagcctgacactgacacacgcacacactccagaaacacaaatcttcacagtcagcgtcacacacccactcccggcttcccaatggctccattgtttccttcgcgtgggtcacgcagcgatacacatccgcggtcccgacatagctccctcacacacaggcacacacggctcgcctcacacgcggcgccaacttcacacttgggcgcacaagccccgagaaccacagcagcgaagggcgcaaaccccacgccgtggcgggccgagaacccacgcaggcgcgagcccaccgcccacgcaagcacccgcgcagacgcccacgccatcgtggatgcgcaaacccacgcgcgccttggcaggaacgtccacgcagtggcgggcgcgccgcccacgccctcagacacacccacactctcgccagcccccttacctcggtcttcccgggctcagaccccggcggcgaccaccgagacagccgagcagggactcagcgcctgcgcactcccctccgggaccccgggaccgcgcgctgcaccccccttcacacacgcaccacgcatgcgggcgcgtggccccgcccccaaacaaggccacgcggcgtgcgctcacccgcctctcggggacagtaccaccagccccggcctgaggccccgacccctcagcgccacacgcacaagcgcgttcgcacgattggtgcaggcggacgcgcgaggtcccgcgcctgcgcacacccccgaggctggcacgcacaccggtctcctaggggactggcgcctggccctgcttttcatcctctcaggagatcacgtgtggacactgaggcccttcctcgagctctttaaccaaacccaacctccccaattcgccgccttccccgctcccacaaccacacgttcccgtgtgagggcttattgcctccagccagccagcgtccttcgcccccacattcacgaggtttggagccggcctcacccgcggaggcggacaccgcccacccgcgcgtgcgcactacgcagtcatcctgcgacctccagaatccaccggggtgcagcgaggctgtggaaagtcccacccagaacgtgaggtgaagaaggcttgggctgcgctggttctgctctgtccgggtcggagatgaactgacccgggagagcagcggagggatgtttcttttggccaacagtggggactcacctgcacgttttgcgaagaggcccacagtcctttgcgtggcgctcggactacatttcccaacggcccctgcacgccctgggggctgttccatgcggtgttgcgcctgcgtagccggcgggctggcagtgagactgactgcgtcggggttgagactgggtggatgaggctcaccccggcggggagaagggacgaggaggggcggacagcggaaggtccgggagtgtccgccataaagtcgtttgaggtgaccgttgcgtaattgtgagtctgtgagagaagatgtgaagtatggcctcgtcccggtcatctgggcgtgcgggtcccgggttttgatcgcgcgtttgtgtagg

SEQ ID NO: 22646 - DNA, 2300 bp, Homo sapien
aatggaaaaattcacttttgaccagggacaacaatcagtaagtgctagctgctagtcacagaggtaatggtaaaagtcctaatagtagtatctgttagcttttatttttattattgctactacctaatcacagaaatgggaaaccaaaactagttcctcacacattctccctactacctagtccccaaaacttgctcagagtcacctgggaagaaagaaatcacaggccctgggttcccctcacacatatacccacctatgcaactacaaaaactgggtctcaacacacaggcgggtacacacacacagagtcaaaaacactggctttccttggccggtcgcggtggctcacgcctgtaatcccagcactttgggaggccgaggcgggcggatcacgaggtcaagagcccacatggtgaaaccccgaatctactaaaaatacaaaaaacttagccgggcgtggtggcgggcgcctgtagtcccagctactagggaggatgaggcagaagaatggcttgaacctggaggcggaggttgcagtgagccgagatcgcgccactgcactccagcctgggcgacagagcgagactccgtcccaaatcaatcaatcaatcaatcaatcactggcttcccacacacacacaacactcatccacaaaaactggctacggctcgaaaccttagtcggatagtattttaggctttatgggccacaagatctctgctgcaagtactgaaccctgccattgtgcaaaagcagtcatagaatagacgtaaatatacacaagtatacatattcaaaatgtgtggttccccacagagacgtacacaccgcaaaaactgggctctagagtcaacagtaaatagttcaggctttgtggggccacacagtacctgttcccacctactcaactctgcccttccgcagaagtggatgcagaagctaaacaaatgtccagaacatacacacatattcaaaatcagtgccccccgccacgtacaaaaccacaaaaatcgcctcagagacacacgtataagaaaacacaaaggttcgtcctcacacatgttcagggtaacacaatgtgggtctcacctacacaaacgcgcgatcaaaacccgggacccgcacgcccagatgaccgggacgaggccatacttcacatcttctctcacagactcacaattacgcaacggtcacctcaaacgactttatggcggacactcccggaccttccgctgtccgcccctcctcgtcccttctccccgccggggtgagcctcatccacccagtctcaaccccgacgcagtcagtctcactgccagcccgccggctacgcaggcgcaacaccgcatggaacagcccccagggcgtgcaggggccgttgggaaatgtagtccgagcgccacgcaaaggactgtgggcctcttcgcaaaacgtgcaggtgagtccccactgttggccaaaagaaacatccctccgctgctctcccgggtcagttcatctccgacccggacagagcagaaccagcgcagcccaagccttcttcacctcacgttctgggtgggactttccacagcctcgctgcaccccggtggattctggaggtcgcaggatgactgcgtagtgcgcacgcgcgggtgggcggtgtccgcctccgcgggtgaggccggctccaaacctcgtgaatgtgggggcgaaggacgctggctggctggaggcaataagccctcacacgggaacgtgtggttgtgggagcggggaaggcggcgaattggggaggttgggtttggttaaagagctcgaggaagggcctcagtgtccacacgtgatctcctgagaggatgaaaagcagggccaggcgccagtcccctaggagaccggtgtgcgtgccagcctcgggggtgtgcgcaggcgcgggacctcgcgcgtccgcctgcaccaatcgtgcgaacgcgcttgtgcgtgtggcgctgaggggtcggggcctcaggccggggctggtggtactgtccccgagaggcgggtgagcgcacgccgcgtggccttgtttgggggcggggccacgcgcccgcatgcgtggtgcgtgtgtgaaggggggtgcagcgcgcggtcccggggtcccggaggggagtgcgcaggcgctgagtccctgctcggctgtctcggtggtcgccgccggggtctgagcccgggaagaccgaggtaagggggctggcgagagtgtgggtgtgtctgagggcgtgggcggcgcgcccgccactgcgtggacgttcctgccaaggcgcgcgtgggtttgcgc

SEQ ID NO: 22647 - DNA, 2300 bp, Homo sapien
tacagagttaattaagttgaaatgaggtcgttagggtgggtcctaatgcaatctgactagtctcaccatgtctccatgggttttctctgggtactccagattcctcccacatcccaaagatgtgcacagtaagttaactggtatgtctaagttgtcccagtctgagtgagtgtgggtgtgtagtaggctacacaatctaggtttgtgtaagtacactctatgatgtttgcacaacaaggttcttaggaaattgcctaagaacccatttctcagaatgtatctccatcctttagcgatgtagactgtatttccatactgtaaatagtccccttgtggtggatttcaatctaccaatatgacatcactgaatgtggagttagaaagaaaggtacagttcatggctctcagttcctacagctcttttaatttcctaaatgactgcagcaataaagtatcttttgttaaaatatctggccttttgttcctggttcctgaaaaagctccagaacagctccagagccataaaggtgaaagacagtatttcaaccacacatgagtttatgttaatgaggtgatttttggaaactctcaagataatcccaatatttggggggagtggtggctagttgccagaggaaccagccatgtgctcagaggactggaactcacagctccaccctctacttctgggaaaagagagagcctgaaaattaagttgatcgccagtggccaatgatttaatcaatcacatctacataatgaaaccttgaaaaccgaaaaggcctgagttcaagcggcttccaagaaggtagacaaaaacacatcctcgtgctgggagggtggtgcaccccaactccacgggcacagaagttcctgcactagggattctctcggaccttgccctacatgtctcttcatctggctatttgtatcctttaaaatatcttttataataaaccagtaaacataagtgtttccttgagttctgtgagctgctctagcaaactaatggaacccaaggagccggctgtgggagccccaatttatagcacatctctctgaaacacaggtacaacaatctggagtttggaattggcatgggaagtgggggacagtcttttgggactgagctgtctaacctgtaggatctgatgttttccaggtagcgtcagaattgaattggagtagcggtcacctggctggtgtctgctgcagacaggtttttttgacatgttaagacattataagagacaatagaaaaaatgtatacgatacaaccttctctgagttatatttctccatagccctttttactgttcatcagactgtttatctaactcatgaatttgtggcttgtctctctccgcttcaaagtaaattacataataagaggacagggatttttttttctctgctgtatccccctgaattgcttttccttatttgtctcaccttccaatactaattctacagttctcctagtcagggctagtcccctaaaacggggaccatttccattttgttaaggggctgaacgcggttcaagcctagcagattggttccaaaaacgtcgtgttattcactgcctctgatcagtgacattcccatttgcagctgaaagaggtattaattcgccagagtcacaacacggtcggggttcctcgtcgctgtcttattccaaaataagcttaacacagaaagataatgacactcccacggactggcacagaaggccgcgctccgaatgacatcgcgatcacagaggcacagacagcgtcacaaagccccacgcgtactcacaccgaaggctcagccgtcgcgcgtttccctcccaggccccaggaactagtaactagggacgcttctggtctctaggcgaggagagggggagagcgcaatctttgcgcctgcgcacactcctgctcttacccgccggaaccctgggccacgcccggctcgcgtaatcacgcactgcgcaggcaccgcccgctctgctctaaggtccctctcactccttcagcagcccgaggacaatcccctcaacactaggccacgccttgtctccgcccctctcgtccgacccctggagagaggctggcgcctgcgcgatggggggttccagcgtcgactcacggagtccttcggatgagagcgtctgggtgccagacgaggccgggggtttgttttgggtggtttgggagtccgagctcgagggctgggccaggaagggcaggcgaggcgggcggctccgacgcgggtcgcgaaggcccagccgcgtcctctgtccccaggacgactac

SEQ ID NO: 22648 - DNA, 2300 bp, Homo sapien
gctgtttgcagcggaccctatccttgttggactgaacaaaggatgacaaacatgggaataaagacaaagacaaaagagtatatttggaagaagaggtctgggggctccttgcttccagtgaacacaggccctgagcctttacagcccttcgtatttattagagtgaatagggagaaggggggtggttgtcggtcagtagcttgatttacagcaggcttgcaagactgcattcgtcaaccaataggctctagatgtcccattagataacctcaaggagcatgacaccagggagtgattgccttcagcaaaccttctggtggctggagcagaagcgactttgcccacattctgcattcatgataaacagtttgctgtttgatcatatagcctccagtggaatgttgagttggccacgatccctttgccagctctctacagctgttctacctgttgacatcctgtgtcatacccaagcaggaagaaggttgtgtgagatgacaaaaggccagagttacatgccagctgtgtctctttccacacatccaccaaacccccagcaaatgtgtacttaaaattcattggttacagagccactactccttacaaggagactggggaggtgagtattataagctgggcagatggccacttgaagagcatcaatgttctgctgtggaaggagtgcaaaatagacaccagagagaccattagcagtgtctgccacagctattacatggctaggtccacctgactgaaactaagccttttctatgagactgaagtgctttgagagaaatgctgaccttgtcctttctgcagcttgcggctttcagtcacccttggattcagagatagaagtcatcttaattccatcactgaggccaggagacctgaaagaaatcaattcaagagtaaggagaccaggcgtgcagtgtgactgggcgtgcagaggtcagtgcatctgtgatgactggtgtaacagcatcactgcctgtgagccagcaaggcccttggctcccaggatgaagctctccagttctgataaggcccctgggggagagaccggtcctaaacatgttcaagaataaatccatcagctaacttcagaccgtgattcacacaggaagggaactttaagaggtcgccagggctggtatttttgagacgttaggcagccctctctgaggcgatgacaagtgaatggcataaaggagccagcccagacgaaaatttggggttagactatttcgacccaggacgtgcaaatacataggttacaaaatggaaaatggtattttggaggatgggaggcccgtgtagccagagataatgggagaaggtgagggggcacccaaaacaatcccacaagctctctacatcccccttcctagcccacacacatcacccatcagagtgatcctccggactccggaggcccccaagattgcctttcccttcccggtcggcagtgacgctcccgcaaggagctgacgcccaggcccttagcacctgtcacagccaagcacccttttactccggccctgcggtcccacccctcgccgcaagccccgcctcacccggtctgccgctgcgcctgcgcgactcccagaagcctttggggggtgggtgtgtagtcagagcggcctctgcttccggccacacccaggcccagcgttggccaccacttatgcggcggctgcggtccagggacaagtgagagcgacccgcagagggcaggacggacgggcgttgcataggcccggggccaaaccgtatcttgcaacctgagctccgagggccgccgcatccgtccctgcttgggactacgcttcccagcgggcattgcgccgaggccacgcccggttccggcggcgctgcctgcgcactggaagtgggaagcgccgggcttctctaggctgaggggcggggcggggcggggcggggcggggcggggcggggcggggcggggcggggcggggcggggcagcggggaggggtggggaggggcggggcgcggccgggggcggggcggctccgcggcgcggcccagtggatgccgggccatgggggagcgcgcgcggggctgttcgctgggcgtggcgggcgggtgtggccaggggtgtgggtctgtgagggaccggtcggaagggcgtcgcgcggcctcgggtgacatgcggggggcggcgagcgcgagtgtccgcgagccgacgccgctcccgggtagaggcgccccccgcacaaagccccgggcgggccgaggcccgactgtagggactccagccaccttggccctccctgcc

SEQ ID NO: 22649 - DNA, 2300 bp, Homo sapien
ttttctttctcgggattttggggtgtcagttacctttctatcttcagttctctgatggatctaagaaaagttgattttcagtttgttgaatgattttgttgttgtgaagatgggaatgaaggcttccgagctctttatatgccagagctaaaatgagaatattatcattttcatccaactcaaataaccacaaacgttacaagctctaagatgatatttgctgtttcatagttaaagtatcttcacagctagacttggctttattatgttgtttatgatgtctgacataaattggatccaggagagtccagtctagatgtcactgtgtggccttgggtgattgagtgtgactgggagggtgagttagtttctggtgagccagtatctatgatgctgtatcttggtcagctggggctgctataacaaaatatcatagactaagtgacttgactaagagactttatttttcacaattctggaggctgggaagttaaagtgctggcacattcagttcttggtgagggccccgttggcttgcaaatgggttacatcctgctgtgtcctcacatggcctttgcttggtggttgtgtaaacatggagacccctccttcctcttttttaataagtgcactgaccccatcataagggtatcacccttatgacctaatctaaaaccagttacctccccaaagtcccacctcctaacgtcatcacactaggggttagggtttcaccatagtaattttgggaggacatattcagcctataacatgttgtgtcatggtgagactggcaatgctagatttcgtgatttcctaaaaaataaaataaaaataaaaaactaagcacctactatgtgctgttttagtcactgagaatataaccctgaacaggacggaagctgtgtgccttcttggaaccctccttccagcagggagagataaaatggggtggggggaggtgaggggcgtaccgtatatcagagagcagtaactagtaggcatgaaataaaacaggttccacacgcgcaccatcagaaagtcacaagtgtgcaaagcagacaaatcccaatctcctcacttttctatcgcgtaggccccgcccgcgccccaagccccgccctgtcatggttttcctctccagagggtagccgctacgccttaccgactgcgtttcagtgctgtcccactgctcctgcacaccccacgcctgcgaccctacccaccacggacaggcgctcctgcgagctggaagccagttctctgcgtcctgagcctggcagctgcatctgaacactcggagcctggcgatggcttccagaaacccctgcgccgtgggtcgcttcagtgaaggggcctgtacttcggcgacccagactccgggctgagaggcctcctaatccaaccaggaggaccaggagaggcccaaaaggggacacagggcagtgaccgccaggcttggagaggagccgctcctggcaaagccagcgccctatttctgaacgccgcctccgttccggactacacttcccaggggctattgcagcggaggacacgcccacttccggaaaggacccaaagccgggcgagtgcacgtcccgccggttgctgaggagaagggaggtctgggcggggcagcggccgaggctggactggggcgcggcgggggcggtgtcctggttcctgtgtgggcggcgggcgtgagcgtgcgcgtgtggcctggtggctgtgagtgcccatacgtggtgagcgtgcggtgctgtgctgaggaggggcgagcgcgcgcggggatggcggcccggtgtgtgactgtccggtgcgtggccgcgaatctgcgcctgcgtgcatggcccggcggcgtgcggaaggcggtgtgtgttggaatgagtgaagcactttaagtggccaagagcaggaaacccggccggaggaggcttaccccgttctcccctgtatcgactgcgtagagcccagtgtgggcaaagtcctagagcccggggaagttgcccgggcggggcagcctcggctgaagcatttcctgtcagccctatctggaaggggcagagcccaggacagggctccatgtccacaggacggcgaggagcgaagaccatggggactgagtacacaggtaagagtgacagatgacggatgtggctgccggagtggacattgaggttttgggtgctgtctttcggggttcaggtgctggaggaggatgtcccccgtttctaaggctagtggacctggaagtcgaaagatttggagggtcaccttgggtcagagtggagctgggttta

SEQ ID NO: 22650 - DNA, 2300 bp, Homo sapien
ggtctggctgactctatcacagaagttatttgctcatataccagaaaataacagaaaataagtcctctgtgcagttggccaggatttgtgaacattctataagacaaattccatggagaattccatcttttccagagagaggcattcctttcgttacaacagagtccatgtgacttgcagacaaccaaatgaaaaaatcctcatgaggcctaggatctcattttgttttgtgacaaactacagtgttgaagcagtcccttgactccactgagccatgtttccttaattaggaaggaagaggataaagtatctgaattaattctagtttctttcatctaaattccactgccttctcaaaggattatcataatgatgataaaaatgaacacattacatggcagggactataccaagtgctttacatgtatgaggtcatttaatccttatgacagtactgtgaggtatataatattaccatctccattttacctaagaacttagagtcataaactttttaagaaaaaaaccccaaacctgctcagtggaggttctggcatatgaactatttagttatttaaccctttcagagtcagtttctttaattgtcaaaagtggctaagaaacctacctgaggcagtagttgaggaaactacatgacagccagtgactctggagtcagcctgttctggatctgaatcccggttcttccacttgctagtgattacttatcctctctatgcttctgtgtcttcatctgtaaaaaagaggtaagtagttcctacttcataatgttgtgaagtttggtgctgatactcccaaaaggtcttagaactgtgtctggcacataataaacactcattaaacattagctattactatagcatgcaggaaactaaacaagcacagaacaatatggctaaaaatagcccttcctccccctttctctttattggagtgggaggccagaggggagggagagaagcccaaggaatggggatatcttccgttattgactagaacgtgattaagccatagaaaggctggaatgcctcggcatttctgggtgaagctgtgaatctcgccttcttcccaaatcctacagtgatagatgggacaaggctctgacgggtaaaaatctaaatgctgagctattccttcaacagcagcagagtacccagaagtaatgctataatgggtaatattacgggtagtgttctctcccatgggcccttagtgatataccaaggacctgagtcaggttatctggttaggtgtctctggccaagtcaaggtccctccctaactaaacccagctccactctgacccaaggtgaccctccaaatctttcgacttccaggtccactagccttagaaacgggggacatcctcctccagcacctgaaccccgaaagacagcacccaaaacctcaatgtccactccggcagccacatccgtcatctgtcactcttacctgtgtactcagtccccatggtcttcgctcctcgccgtcctgtggacatggagccctgtcctgggctctgccccttccagatagggctgacaggaaatgcttcagccgaggctgccccgcccgggcaacttccccgggctctaggactttgcccacactgggctctacgcagtcgatacaggggagaacggggtaagcctcctccggccgggtttcctgctcttggccacttaaagtgcttcactcattccaacacacaccgccttccgcacgccgccgggccatgcacgcaggcgcagattcgcggccacgcaccggacagtcacacaccgggccgccatccccgcgcgcgctcgcccctcctcagcacagcaccgcacgctcaccacgtatgggcactcacagccaccaggccacacgcgcacgctcacgcccgccgcccacacaggaaccaggacaccgcccccgccgcgccccagtccagcctcggccgctgccccgcccagacctcccttctcctcagcaaccggcgggacgtgcactcgcccggctttgggtcctttccggaagtgggcgtgtcctccgctgcaatagcccctgggaagtgtagtccggaacggaggcggcgttcagaaatagggcgctggctttgccaggagcggctcctctccaagcctggcggtcactgccctgtgtccccttttgggcctctcctggtcctcctggttggattaggaggcctctcagcccggagtctgggtcgccgaagtacaggccccttcactgaagcgacccacggcgcaggggtttctggaagccatcgccag

SEQ ID NO: 22651 - DNA, 2300 bp, Homo sapien
agagaattgtgctgaatgaaaaaagccaattccaccattcacatactgtatgattccatttgtataacattcttgaaatgacacaattgtatatatggaggatagactaatgatcgagtctggaggaaagtgagtgtggctataaaagggcaagatgaaggatccttgtggaaatatcggaagagatccttgtgatggaaatgttctgtctcttgaatggaccgacgtcagtatcctacttgtgatattgcaagatgttgcccttgggtgaaattacctaagagacataggtctctctgtatgatttctatattatgttttacaacctgacgtgaataaatccacatttatctcagaataaaatatttcatttaaatacatcattaatcaccacctaaggctagctgctgttgatggttttgtggccacttggacattcagcaaatgtttttaaacttggctttgtggtttactatagaaaagggtctcagccaggcatctggttcctacctttcctcttgtgtaagctcccctgtctgtattacccaactaatctggaaagtagcttggctgtgaagattgtttataaatcataaaatgtggagaccaggggtcagaacaaaggaaactcacaacaaggattaatgctttttttcttatatctaaagatatagggaattgacatttaaagatctagttgttttttatttgcaattctagaatccagccacacctccttctataaaatagaactagtgttctggtgatccaagcagaggaatatggcttcatacacagaaacgggctgaggaaagcagaaacagagaacaagagtggatgggtcatttcaaagttactttccctatcatggttaaagcaaaggggatttcttttatcatgcctgctaaactggcctgtttgggacttggctattatctctctctttctctcctgagaggaggtcaggtaacaacttagttggagttggtggcctggaacttcagcatgagtagctccatttcgatttgatctgttgggcctagtgcaggaactcagtccaaaccgatagtctcctatacattttattctacacctatgctcattttcttctttgcacatctgtatgcttaaaaagtgttctttaaagataagcatgattatcaggtttaaagttgcctgggatggtccctcaggccagtccattggctggactgcagaaatgtctgcagcagatgtgacacgcctcttttatccccctcatttctctgcctccacccatcccttgtccttttctgttttccttcctccctcctccctctccttacccattctttcctctcttcagcctgtcctgccctccccaactcgacttcctctttctttcctccttttcccacccttttcttcttccttatagtcctttccaccttctcatccccctttccaccctttcttccttctcctccttgccgtctccattctcttcctttcctgcctccctgcccctccctcctcccacccgctccctcttctttctgttggttcctctcctctctgacctgttcttttcccttagtctctccccagcccttcctccttcccctccatccttcttccaacccctcctccttctccatctcttcttcttcctccccagctctcctccccaagtccctctccatcctctctcttctccccgctcctccccatccctcctccccttccatccttcttcccacctctcctacttcttttctccctcctccccccttccctcctgtccctcctcctcgcccctcctttccctccgtctttctttccacccttcctccctccgtctcttctctctccttccctttccctgcctcctccccctcaatcctccctctcgccccagcctccttggccgcggagtcctctgtgagatggaggagctcagttggctccgctcggctccactcggctgggctcggctgaaaaaagccggggggaggtggcgcgcgcgggtttctgggaagcgtagtccggcgcagtccgcgcaggcgcactgccgtcgggcgggcctagcgggcgcggtcattgtcctggcagagcggcgagccggtgagtgtggctgcggggtcgcgcccaccctctacctgtgccgggggccggaacctggccccggggagggcgcggcctcggggagacggcgtgcaggcccaggtacggggagtgcagggctgggtgctggtccagggcgtgcgggcgcaggagagggcgtgcaggccgggaccgaggtgcgcctggagaggctgagc

SEQ ID NO: 22652 - DNA, 2300 bp, Homo sapien
tccccattttgcaggtaaggaaactgagaccgagttaattcacttcccaaagttatacagctagtacattgttagatctgcatctggatgcccagttcctaaccctctcaagactctgtgacctggggcagctcacctggtctcctgcactaaatgtcttgttatcaaaggaggtgatgaggattggatgaaatgtctaattcttgacacttcatctctcttctctgcacactctgaactatctttggaatggcaggaaactcatcttctaaacatagaaatgaagaaagtttcccatcccaattacataacctatctgaaaactcgtaggcaaacccaatctcagtccttccataatcttactgtgtgtcctttgtacaactcatttaactcctttgtgcctcagttctcttctctgttaaatggggataataatactaccactttgggctgttggaattaaatgagataatattaacgagatggctttccttgtagtatttttttgataaatgacagttatttttgtttttctgaataaccagggtaattcaattttctatccattagggaaaggaggttaaatccttacctcataccattcaaaaaaattccagaaggttcaaacaaaataaatatataaaataagactgtaaaatataagattatacaggaaaatgtgtttatgagagtaaggggaggccaggagaagtgattcatgcctgtaatcctagcactttggaaggctgagctgggaagatcagttgaggccaggagtttgagaccagcctgggcaacatagtgagaccctgtttctacaaaaaatttaaaaattagccaggtgtggtggcacatgcctgcagtcccagctactcaagaggctgaggcaagagcatcacttgaggccaggagttcaaggctgctgtgagctatgatcacactactgcactccagcctgggtgacagagtaagaccttgtctcaaagagacaaggagggggaggaggggcggggaagagagggagagacaaggctgaggaagggcatcttaagaccctaaaagcaaaaaataaataaataaataaaaaggatatcttgtatttttattaaaattcaaaacttcaggcactgtgtaaacacaataaaaacataagggaggagccaggagaaaatatttgccacagatagagtaacaggcaaaggattaatgtgcagaatatagaaagaatgtctattaatcagtaagtaaaagctacataaacaaatagaacaatgcggagaggaggagataaacgggtaattcacagaagagagaataagcctgttcaaatacatgtgtttaattctcctcactagtaatcagggaaatgtagctaagatgatgcagggacgccgttttccccctacctatggctttgccgaaaattttaaaaatttaatgtagcctccatgagagcaacttggctgtagtcactgcattgtaaatttgaacaacaatggtcattgataataatagcagctattaggcactgttgtaagaactgtacgtgtattacttattattgttattattgttttactttcacagaaatcctgggacttggtaaccataattattcccacttaacagcatgggcaaccgaggcacggaaatgttaagtaacacacccgaggactcactagtaacaaatggcaaagccagccgctgccccaggcggtcgggcctcagggtccccgggctgccaccccctgccccagctccttctcccttccgcccaccccggactcccggtttgcagactggagaaccacggggggcgtacgcaaagccgctggccttggggcgtctgtcgcagggtacctcgaacataacctacgtgctcatcagctagagatggaccagctcggtaccacacccccctgcaaccacgccgcgggtaccccgcctctgcggctcatccactcccttccccacgcgcctccaggtgcaggcttcccgggggtggaggaggggaggaggacacccacgctccccaattcccccacctcccatctcccacctccccccacccccccgcagcctccgcgtctgcgcagccgcagtcagtgcggcgccagctctgcagagcccagacagggtccggttggggagggtgagtccttcgagggacccccgcgggcgggaaggaggcggagaaaaggggctgggggcgcgggcggcgatccggggatgcgcgcgcgagtatggatgcgcagagggtgtgtgtgcctgggcgagggtgaggggcagaaccgctccag

SEQ ID NO: 22653 - DNA, 2300 bp, Homo sapien
cagacatttatcgcctcacgcttctggaggctggaaatctgaaatcagggtgtaggcagggatggttccttctaagagccatgaagaagaatttgctccaggcctctctccctggtttgcagatggcggccttctccctgtgcctctacatatcatgttctctctatgcgtgtctctgcgtgcaaatgcaccctttttataaggacagctgtcattttgggttatggcccaccctatttactcattttaactttattacctctgtaaagaacctgtctccaaataaagtcacattctgaggaatagggggttagcattccaacatatatttgggaggggggtgagcataaatcaacccccaacaggtaaatgtggctttctaaagaaaattgtcttaaaaaccatatttaaaggaaatgaatatttgagttgtttctgttgtccatcctttgaggaaaatgtcccttctcatgaagcttccagaaggaagagggaagcacagaatgcctcttgaggtctacgaataagtaaaatatgaactgtaaataaagcatgtgtcatggtttaagggcagccgtggggctacataaagtaatgtggaatctcacaatcaatggcatgttggtttagtgaaatgcattttttttcccattctatcttcacagatttctctgcttttccaattatctaaaaatgatctcatgcctatgtttccaatggccaagggaataatttaggaaggctaacagaattccttcagagcaggcaccttaaaataatgccggccaatagtaaatgccatgtgcatgtcaactattaaaattatttaaggccgaggtggaaggattggagttcaagactagccagggcaacatagcgacacctcatctctacaaaaaataaaagttaaaaaaaagttagccagtgtggtggcacatgcctgcaatctcagctactcaggaggctaagatgggaggatcactagagttggggaggtcgaggatgcagtgagccgtgattgtaccactgcactccagcctgtgcaacaaagcgaaactgtttctaaaaaataaaactctctcctgcctctgccaggagagagcttgttcctccaaccccaggaggccaggcaagcatggacaggagccaagggagcagggtcatgaactttttcatctttgcaaagtgggcacttggcatcagggtcccatcaccagaaagcaccaaagcccctggcaccccacccactccatcctacccagggaccccaagtaggcaactgctatggcagtgggtccagcccaggccggcactgccagcctcctctccctgcagtaggcaccagctctacctcccccggcaggcaatgtcctggcttctcagcccagcaccatctgttcccctagacttctcaggggccagcccagtctgggccaccctttccctcatcctcggctcccacacaggtgacaggcccagcagatagcttctctctgggaaaggttggatgctgccttacatccccttctatccctcctcccatccacacacacaggcacccacccacaccaggtctgcttgtttctcacatgtagggagagggggggagaccaacccctttgtgtcttttgaaatacgaagaaaaatgtgtgttcaggagcatgactccagtgctgggctcttgggcccagttcagtctgtcttgtctcaaatctaggcacttttgcttcaattttattttttttaagaaaacaaaaacagaaatctgcactaatttacctggttcttaggaaaacttttttttattttttacattttttggtgtccgtttgtattgaataatttgctacatttgtaaaatgtaagaggtatatataatatatgtatatttctaacgtaaaaacaatttttttcttttcaagattttttcttaaaaagatgagagaaacatattttttcaggaaaaacaaactttaaaaaaaaaagaggagaaataaaaccttttctcccctttccccatcctctatctatccctgtttcccaggaacaaatcaaaaggtggattatcttctgaagaatggaaactgttagtccagaatgatgtctttttctcaatgcagtgagttatagattctctagttttctccctagggatgggaagggggcattgacgcaagcctggagaggagcccggggagcagggtcatgaagttttttcttcagtgaaggaggaatacaatcaagggttttgtattcagaatgttgtgcaatattttggaataggacattggtgtgtttag

SEQ ID NO: 22654 - DNA, 2300 bp, Homo sapien
tgtataaacccttccccttgagtgtggtaggaacctgggatttgccttcagccaatagaatatggcaaaggtaagggttggtcacttccacagttatctgagagctcctctctgaggtgaaaaacacctcattctgttttactatctccattacatttaccacccttatgaaattatataaattattgagtgtgtttgttctaccccaaccaccccattcctctgaatataatatccatgaaggcacggtcttgttttcttcaatgccgtatcccctgtgcatagcgtagtacctgacacatattaggtgttaaatatgtatttttatgaagaaataaatgtgaagcagaacaacaaaaaacaaaaaccagagctgttcttgtgtaaacgagggtgagagggctgggatccttgtctatttggtgttttcccaacccctcagcacagtcatttctgcaacacctacatgggatctttgagctccacaaacctggttgagacacctcttctctaatcagattaatacatgctattgaatagaaaccaccattgattgtaagatactccactatcttgcattccattaagaaagaaaaagacactgccaatcaaattgtgacactccatcaataaaacatcttgattttccatgctaaaatgtgctcctcagccttcagatcacagctgaaatgtcacttcctgatcacccctgctggccaacctgtgtcatttctccttctatactctcagcgaacacacactgcaattttaattaattatgtaattatttgtttaaaatgtcttctgaagcaaaaatgaaaacagaatgaaggttagaattatgtctgcttgcatactattatccagtggtatgttgataaacttgctctctcaaaaaaaattataaatagcatttgacagtttctatggtgtaaatattctcaccacagctgatgtcaagctatcaatagttcaacaacttatttccaacattcctgaatatttataattggctcttgtgagctgacatcagcttgctccagcacagttcacccaggaccaaacactgtatctgtacataataatggcttaataaatgattggttagtgaatgaataaatggttgtgagtcacactgaatgaatatgtagcaggtatttcaaagttaacagttcaaaatacagccctttatgtctccttcatacctgtggtttttccgttttcacctcagttagcagcactgacatctgctggtcactcagggcaaaaatctctaggcatattgatttctctctctccctcacctcttcccagcactcttctcattatatccatgagtcctgtcaattctatcctcaatgtgtattctattctattccaaacccatccctcacaccatccccatggccaccatgctaacccagcacatcatggcctggccacaacagcctcctgcctggattccctcccttcagtcttacctttcaaagctcatcctccctccaccttaactccccacaccctgcctatgcgaaagccacagggtgttgctgaaaagataagtcaggtcccatcatcctcccgctgcggccctccaggtcctccacgatcggaccccacccagctctgcagcctcctctatcacgctctctcctgcagcttttattcccagctatgctggccttagctcagttcttcaagcaaaccattcttctccctacctcggggctctgcacttgctcttccgtcagctgaaatacccttccccaaatctgagcatcaccgcctctgcatatctgagcttcattctagacgtcgtctctttggaaagacctctcctaaccacttctttaagtggcatcatcccctccccctctcgcacatccccccgttttattgctttctgagcccttatcactgttggaaatcaccgtgttgcataactttgcagagcctgagacaaggacttgggaagggtggtttatgcctgggaaaaggcaggccgggtgccgggatgtagtgcgcctgcacgccgtctccagactacaactcccagaatgcgcggcgccccgagcgtatttccgcttccggtggcgttttagcgggagatccgagcgtctcggctggtggaaggggcgaggagctttgcagttgtgtgcgagtgtgtacaggtgagtttgtccgtacgcgtgattaagtgtgtgcgtgtgatcaagtgtgggggcgagtgttgcgtgagcaaacctgtgagagggtgagagtccgtccgtgtaggtgagggagctagcaagagtgtgagc

SEQ ID NO: 22655 - DNA, 2300 bp, Homo sapien
cttttatttctgctttcatgagttttggttcgtggtttcttagtgatatctttgtcttgcgtttttgacttgttctggtttcataaagacagtttgaaagctttttatttctcctgtctggcatggtttatatagcatgggaatggcctttccccgaaggtatagaaggcatcaccccagtgctatttgagtccccagttgtttggggagttaattctctgacactccttctacatgtctttcatattcttagtctgtgtatttcttcctttaaaacttctgcagatacctgtgttttgactctgttcctgtggatagctgcttggtctgaagttccagaaaggatcctgttcccagacaggtgattacatatctgagggtatcttgttgcctgaggatgagggctagtatcatttcaggtaccagagtgttctcctgagtctgtctgccacataacagagttgggccgtctgcccttgcctgtctccctcacaggcacagacctctgctcttgccctgtcctgggttagagtgaccatgtctgaaatgtcacaccaatcatctggagcctggactctctggtctgttgccttcccttgctttgggattcttctgcccagcagagcattatctatgttgtgctctccgtggtttctcagtcctatgaaggaaggcagcaaggaaatagtccagtcgctaaggtcttcaggatcgaggcatttgcattggatggtgcccaagctccatgggatgataatatgcaggagagagcgtgggagggcagtttgcatagggagggaagtgggagcccatcactgagacgagtaaacatgagtttaccgtgattaccacattgatttgcaagtgataatgtctaatgagagactctgaataatggaaacaccttcagttttcctttagactttttccaaattaaaaaatttaaacttgctttccttttaaaacaaagggagaaaatttctgttgcatatggttttttttcttctctggaagtaaagccagtaggtagtttatgctcccagacctagatttctttcccatattgccttacttagttgcaccagatgtgctgaccagtcattaaaatacgcaataaaatgcaaataatagcaaaaatgctttaaggaaatgtatagctttacttggttacataaaaaaaaggagagattgaaaatctttacatttatgtccaatctcaaaagtttaaaaaatggaagggggcagataataaaataaagagaaggaaataaatgaactaagtaaagaaacagtaagaaaggaatgtcaaaacagaaagccggttcttttagacagattagacctttgtcaagattgatgaaggcaaaagaacgtgcagtagcatcaagaggctcaatggtcacttctcactgtgtgagggaataatgtcatattacctagagttgagtacttttaatatttttgaatggtcttccattttttacatgttgtatactgtgttttaataattgtgttaagggaagaaatgttaggggaggatttgccccaactcctacttccccttttcatttttgctaataaacgtgctgacgtctgattttagtactggctagggccttgaacatttctcttgtgccttgcattgggcagttaagtctttttaggtatcttagtttatttaagcttcacaattctgaaagggatggaggtgctgttattcttatttctcagattacagagagacttctagggcattagacaagttgcccacagtcccaagttagtagcccaagttagtagccgagctaactcctcgagtaggtctctgtgaagcccagaggtcatgcttgtaactgctgtgctgaggccaactttgtgcggttgtttgcctatttactggggactcccatatcccaaaagcattgtcgatgcctctggtaaggtggcctccactgctgcctggtcttcaacttctgggacatgtgtatatctccttacgatccacaggtccctgagtactgacggtcacaggctgccgcgtctttcctgttgactcatgtttggttcctccagtgaaaattttacttagagaaatgctgcctccaaagcacttgtctgccaccaaacctaagaagtcctgggccccaaatctgtatgagctagacagtgacttgactaaggagccggatgtcatcataggagaaggtccaactgactctgagttttttcatcagaggtttcggaacctaatctatgtggaatttgttgggcctcggaagaccctgatcaaactccgaaac

SEQ ID NO: 22656 - DNA, 2300 bp, Homo sapien
ataaagtgagattaagagcaagtttcttggccacataaggaattgctgaaattgtcaagcaatttcagtgggtttggaagggatggaagcctgtggggcatatatgttagcaggagagaatgtatggtaaaaccattgagttagtgacagtagactgctctatcaagaggcattttcagggccaagaggtgctgagcaagggggtggtaactgcaggagctctgagagcatgtggtgtcttgtggaaattaatgattcaggatccggagagaaactggtattgcagatagaggcctttgaggagacagggggatgatggagtctttaaaatatattaaaatcacctacaaaaccttaactagacattaggatcccttgggaacctgaaaaacaaagatctctgtgggacactgggaatctgcattgtttaacagctctccaggtgagcctaatgagagtagccagatttgaaaatctgtaacctaagtcagggtactaccacattcaccttcaatattcctgctggggaatttgttttgaacgtgtattttcataagaagcacagtgttttcattcgtatattatgtttatgtggcactgctgggcaaaaagagactgttgatggtctagggagtctaaaacacataaagcagcttctcagtgtagcaagcaaccactgataactccttgagtataatataaagtttaatttggggtattaaagtctgtgtgctccttaggtaaacaccttttggtaattaaccacatcttacagattttttcctttaaagttaaaatcatacagcatttttattagtcagttaaaatcgcgctgtgtaaatttaccagaatacagtttaattcttttctgtggagcacatttttggtgataaaaatgatgctccgtgaatatccctgtatagaatcttctgtatatccctgtatttcctttgcttttttagttccttgagagtggaatagttggaccaaagagtacattagtgaacttttagtaattcattgattttactgccagagaagaaatacgtatttctgccaaggaaattcacagtatggatggcagaagggaaaaatccctcttccaccccacattccttgtccctagaagtaactcatcaacaatttcttgcctacctttccaacagttttacctatatttgggtttatccttaaaaaacaaataaatgagaaaacacttaccagttcgtttctacaaacttcagtaacttgtatatttcactaaatctactgagaattcaatccttaataatcccatacaattctacctcattatttttctctctcattttcttgctgttttattaaatggcaatgcagtgggcttacgcagtggaaggtctgtattgacggctgctgggaaacaactcagtagtgtgtgagactgcccgctcccctaaaccgcacgtgcccggtgtttcaggtttgcatttctttatgcaaacaggtcgtgatgtttccttcgcaggtcggccagccgtttggattttcttgcgaattgccagttttatcccttttgcccatttttctgtcttggtttggtctttatctcgttggtttccaagagctcttcatttattaaggaaattagctcgatgtctttcatgtgtcccaggcggaaaagtcttgtcttccctgcaggtctttagacgttaatgtatgtgtttttgcggccaggattttcatttttttcatttagacagatgtgtacatttgtccctttattcttcagcggttttacatttgagcatctcagtggggtttcctccatttcgacccccatttctttgggggctgcacccccaccacccaacccaccccccttttccagacctggctttggggtccctcacggccactccctgacgtcagcccccagccttcgcgccaaactgttgctgtggcaaccgcagcctgattggcacgtcacagggctgtggtgagggggcccggagagggcggtgaggctgctgattggctagcacagaagccccgcctctgcggagaagccctgacaaggaggcgtcgagctgcacctcggtgcagaagtctgggcagctgcgggaggagaggtttgggaggcgcgggagatgtccaccctgggctggtggcgccgccgggcgccgggcgccatgagggtgcgctaggcggctgttcgtgcccgaggctgcgcagcactgaggtgaggtgagtgcgccttcggccgccccgcgcgcctcctgcccgcgggaccttggtgtcgcgacggctctgggccagag

SEQ ID NO: 22657 - DNA, 2300 bp, Homo sapien
ttgggtgtcttcctttagtgtacaaacaccttggatgtttgaggaaatccaaagacaaggttctaggcattttatacgtgttaactcatgtattatgttaattctcacaataatcctttggaactagtacgatcaccatccctgccttattgaggaggaaatggggtacagagagcttaagcaacttgccagtgtcatgcagcagggaagcgctggaggcagggctccaacccacgcagccttgctgcatgtttgtggaatgaacacaggactcaggcacacaaccatctggctgaggctccatgagcagccaggagcctggtcccaatgcagtctccttataggcacaaatggggtgccccttgagacaggaataataaaggtggtcacaggagaacggaaaattccaggcaacagtttcacatgactagcaaaggaaaccgttgaaatcgctgcgtaagctaggggcggataagactctgaaaaccagggtgtgggccaagctggctaaagccgactggacccaacatggtgctggattcgacccgtttcacctaggacctctcattatgtgctcattaacatactaagtcacacacccactgtgacagctctggggaacacccgtatttagtataaaaatgtgtggcaccgcagtaccaagaaatgtttacctttttccaagaatcttcatgaatattccaccccttggttaaataaatatttaaaggtagctccaaaccccgctgggcgtgatgctctgtggtatgcctgcacttttctttcttcagtacgtacttattcccgtcgcaatgaatctccacactttgttctgctcatccatgaattccttctcacgacagtgtcaagagcctggacaccagtcagggtcgaggcctcaccagcatcttggggcctcactgggcacagacgcgtgagcgcccggcctgcagacctgactctggcagccgctcaggccctcagagggagagatggaagctggcaggacgcagttgctaccgcgcggacccggcccccgaccagccttggcccctcgcgcgccgggacagggccacaaatgactgcacctgggcttcgctggcccaggcaccacgcgactctaagcgcgcccaaagcgaccctctgcgcaaactacccccggggacgacgtcacccgtgaggtcccgcggcgcctcctcctaaagctcggctgggaaaccgtccgcttccccaagacttgggggcttgtggccgagttgttttagttttcctgtaggattcacgggtggctgaggcaaacacgcttgaaggcctaagacttttaagtctcttccgcaccctctcttctgtctcttccacctggaggatgaccgcttttttgggggttttgttgttgttttgagacggagtctcgctctgtcgcccaggctggattgtagtggcgccatctccgctcactgcaacctccgcctcccgggttcaagcgattctcctgcctcagcctcccgagtagctgggattacaggcgcccaccaccatgcccggctgatttttgtatttttagtagagacggggtttcgccacgttggtcaggctaatatcaaactcctgacctcaggtgatccgccctcctcggcctcccaaagtgctgggatgacaggcgtgagccaccgcgcccggccgggatgactgttattaacaattcccggcgtggtttctagcaccagcccacctaccacaccccacctcgcttgaggctgaatgggtaacaggatgaacccgcccctgggctggttttctctgaaccctaactcctgccgttacgccccaccagctctaggccaggaactctatgtgccccggccacgctagagcccgtacctagacccgtaggtcgggaggcctgcgcccggcactgcgcagacgcagcgtgctgtgcccagaactcttctgttcccaggagaatcaggggagtcggcgccggaaggggcgggtccgagctgagatttccagagccatgggagccggaagtccaaggaactgtacctccatcatgacgactccggttacgtaaaaacattcaaacagaaaatgctggccaggctcatgcctgtaatcccagcactttgggaggccgaggcgggaggatcgcttgtgcccaggagttggagaccagcctgggcaacatagtgagaccctccccccacccatctctacaaaaaattttaaaattagctagctgagatcatgccactgcactccagcctggacaacaaagtgagactatgtctcaaaaaaat

SEQ ID NO: 22658 - DNA, 2300 bp, Homo sapien
aaatattttacattggtagtttagattttttttttagttgtcatattgaaaagtgatgctcccaggacactcaaaattattttcgtggccctccagtccttagcattactgctggcccacagctacttctaaaaactttttattgacaaataataattgtgtttatttatggggtacaatgtgatgttttgatacatgtttacattggggggatgattaaatcaagctaattaatctatttttgtggtgaaagcatttacaatttactgttttttaaaattatatatattttttgtgctagaattggactcctcaaactttaataaacattaaagttgtgcccggcaagtttattctttttaaaaacatatttacttatttaaaactttattcctggctggtgtggtggctcatgcatgtaatcccaggatttggggaggctgagggaggaggattgcttgagcctaggagtttgagaccagtttaggtgacatagcaagatcccttctttacaaaaaataaaaagttagctgatgtggtagcatgcacccatagtcttaactattcaggaggccaaggtaggaggattgcttgagccagggatttttaaactgctgtgagccgggatcacatcactgcactccagcctgggtgacagaatgagaccctgcctcaataaaataaaataaaaaataaaaactttattacttaaacattgagacagaggtttcactatgttgcacaggctggtctcaaactcctgggcttggctggatgtggtggttcacgcctataatcccagcactttgggaggctgaggccggcggatcacttgagatcagcagctcgagaccagcctgaacaacatggtaaaaccttgtctctactaaaaatgcaaaaattagctgggcatggtggtgcatgcctgtaatcccagctacacgggaggctgaggcaggggaatcccttgaacccgggaggcagaggttgcagtgagccgagactgtgccactgcactccagcctgggcgacagagcaagacttggtcttaaaaaaaaaaaaaaaaaagtaactcctgggctcaactgatcctcccaccttggctttccaaagtgctgggattataggtgtgagctgccacgcgtggccaaaatctacgcttttggcaaagaattaccaatgatccagctgtcccgcttatggcaaagctgaagggctatctgcatcccatgttcactgcggcgttattcgtcacgaccacagctgcttcaggattcatggtttctgctctcggccttccttactgtgctctagctgatctgatgcttgcctcattgtctttgcacaggcttgttttaaaggtgctgttgaactgctgtttagctttctctctctctctttttttttttttttgggacggagtctcgctctgtcgcccaggctggagtgcggtggcgcgatctcggctcactgcaagctccgcctcccgggttcccgccattctcctgcctcagcctcccgagtagctgggactacaggcgcccgccaccacgcctggctaattttgtttttgtatttttagtagagacagggtttcaccgtgttggccaggatggtcttgatctcctgacctcgtgatccgcctgcctcggcctcccaaagtgctggcattacaggcatgagtcaccgcgcccagccaattttgtatttttagtagagacggggtttcaccatgttggacaggctggtctcgaactcctgacctctggtgatctgcctgcttcagcctcccaaagtgctgggattacaggcgtgagccaccgtgcctggcttgcactttcttctttgagacccagtctcaataaataaacaaacacaaaaaaaccaaaacaaaaaaaaaaaagaccttcagaaggggatcactgaggtacaagtcagggcttttctgagtgggttagggagagcttttatccagggtgtggagcattctatgctggatgatccccaacttccaaagcgaattctgctatttcatggttcttttccattttccctcagatctgccttcccaagactttactgactggtgaagaacaggaaatgaacaattcccaggtgagcttttcaaaaaaatctaaatctcataatgaataaacgtatgacccacgttcctcttgctcagaattaactgtgctaaccttttggcatattttcctccttccttccatacttctattaaaaggtaacacacactctactttctgctttcctattaaagctgaaacatttcaagtaaagct

SEQ ID NO: 22659 - DNA, 2300 bp, Homo sapien
aagggaatctttttctttttgtctgagaaatagttctcaacagtgggcttaaaataatcaaaaccatactgtagacaaatgtgctatcacccaggctttgttgtttcatttatagagcacagatagagtagatttaacataattcttttctttgtttgttttttgagacacagtctcactctgtcacccaggctggagtgcagtggtgtgatctcggctcactgcagcctccgcctccgaggttcaagtgattgtcttgcctcagcctcctgagtatctgggactacaggcacgggccaccatgcctggctaatttttttgtatttttagtagagatggggtttcaccatgttggccaggctggcttggaactcctgacctcaagtgatctgcccgccttggcttcccaaattgctgggattagaggcatgagccaccgcatttggccagcataattcttagaggctttaaaattttttaaatggtaagtgagcattagattaaattcagtcaccagctgcattagtttcatgtaagagaatcatcctgtccttggaagttttgaggccaggcattgacttctctctagctataaaaatcctagatggaatctccttccaatagatggctttttcatctacattgaaaatctgctgttgagccaactgcagtggctcacatctgtaataccagtactttgggaggctgggatgggaggatcacttggggccaggagtttgagaccagcctgtctctaaaaaaaaataaaaaaggccaggcacagcggctcagacaaaaaaaaaaaaaaaatatatatatatatatatatatatacatatatatatatatatatatataaaatcactccacccctttccgttcacctgcaggcttgctctgtctctcaggctggaatgcagtggcaagatccttgctcactgcagccttgacctcttgggctcaattgatcctcccacctcagccttccaagtatctgggactatagtagtccgacacggcggctgggattcaggctggctgggtcattttgctttttttttcttttttttttttttgagatggagtctccctctgtcgcccaggctggagtgcagtggcatgatctcagctcacagcaacctctgtgttttgggttcaagcaattctgcctcagcctcttgagtagctgagtagctgggactacaggtgtgtaccaccatgcccagctaatttttgtatttttagtagagacaggatttcaccatgttgaccaggctggtcttgaactcctgacctcaggtgatctgtctgcctcagtctcccaaagtgttgggattacaggcttgagccaccgcacaccgccaagggtcatttgctaatacgatctttggatacctcttctcctgggaggaggtctagtctggtgcatcctgtcccatgaagtctggtttaatctcttggaattcagttggacgctcaattttggaaggtctccatgtctgcaggcaagggcatgtagcctgtgtttaaattcaacacccagactagggtggggatggattggcatgttgatctcattttgagagtattagtacagctgaagagattttgccagttggaggttggagcctgaattctttctgtcgggcggagagcactttaaggcattgttccacctccgctggccctatttcttttttcttttcctttctttttttttttttgagacgtgagatggagtctcgctcattgcccaggctggagtgcagtggcacgatcttggctcactgaagcctccgtctcccgggttcaagcgattctcctgcctcagcctcccaagtagctgggattacaggcacgtgccaccatgaccagctaatttttgtatttttagtagagacggggtttccccatgttggccaggctggtcttgaactcctgtcctcccaaagtgctgggattacaggcatgagccaccgtgcccagccaatttttgttgttttaatttattttcatcctctgacatttggataatgttttccatgctttctatttcaaagttaaggtaaaaaatttttacttgcatgaacttaaaaaaaattccattggaaactgattgggcagatttgaaaattaagctttcacaatcacaatttttatgagagttcattcagttttggagaagtcgaggaaagaattgggaattgaaattttgatgtggcctgataggatcaggtggggcttttgataggaagtgagtgttttgggttgtttcttgactggattatgatgcggaatac

SEQ ID NO: 22660 - DNA, 2300 bp, Homo sapien
aactgtatatttaaaatatatatcatttatatcatttttgtcaactgtacctcaataaagctaaaaagtaaatacaatatttaattggagtaaatataatataatgtaatatatatgtacacacacacaaagggtgtggtttgaggtggtaaatacatcaatcagcttgatttgattatggtaattatatcttttgtgtatttcaaaattcaaactgtatatttaaaatatatatcatttatatcatttttgtcaactgtacctcaataaagctaaaaagtaaatacaatatttaattggagtaaatataatataatgtaatatatatgtacacacacacaaagggtgtggtttgaggtggtaaatacatcaatcagcttgatttgattatggtaattatatcttttgtgtatttcaaaattcaaactgtatatttaaaatatatatcatttatatcatttttgttaactgtacctcaataaagctaaaaagtaaatacaataattggagtaaatataatataatgtaatatatatgtacacacacacaaagggtgtggtttgaggtggtaaatacatcaatcagcttgatttgattatggtaattgaatctgggattcaattatatgtgtatatcaaaattcaaattgtatatttaaatatatatcatttttgtcaactgtacctcaataaagctaaaaagtaaatataatatttaactggagtaaatataatatgtaatatatctgttatatggtatatcaagattatattattaatattatatattaatataatatatttaatgataatataattataatgaatatccaatattgtgtcaattaatttaaagcacatttataattgtaatactaatgttcaagtagatgtacatataatttacatcaaaatataaacatcaatataaacaaacagcagaaaattctgctctagatttccagacaaatttggtgaaaaaatattgtgatgaaatgtcatatacagaaaagaaaaacaatttatcattgttttaattaaataaagtgtaaaattttcctgttaaatgttatttcatgtcattttcctggttcgaaattgtttctccaaaatggcttgatatctggccaaattttatttatggatagtcaaatatatcaataaatgaaattcatatcacttctttatgtgctcttaataacagttaaaaaattacacaaatatagacatgtaataaaattttcccttttatcctgcactattgtagattacagctataaaaagtgacagccaccagccagcttccctcaagactgatcaatgactgatcaatgactggtcaatggtgagacatcttttttcaatgcgcaggtaccctcacttgcataacttgcagggtcgtgcacgtgcagggtgggatcttctttttatttacaatctttatgttttgttaagatggactttttacattacttaaaatatacattgctttcaaatactatttatcttgatcacagaatttttagcaccaccttaaattttgttcctgtctcactagcctcactcttatgtgatactaattagaaataacacttttaatttataaggagaggccactatgtcaaaagataggtggagagcataaaaaccccatttacaaaagactatatgtatataataagcattgaaaaatatgtgtaagcagaatagtactcaaaaatattcttttttaaaaaattggcaactattgcaagcttgtctccctgttcaggttccagtgatttgggacgaatttttttcccacaagggggttgggggagccaaggagcatgactctgtgtatgtgagttggcatgggccgaaatgttcttcttgtgatggcttaggtgtaggggttggtaataatttatacactggtgtaaattattaaatatcaattgacggaaaggggtcctatctagtcctttttagatggaggatacatgtttctaaggagtgatacaattactaagggtggaactagagatttatgtaaatggtttaaaaaagtgggcgggaccacctggctacgcatataaaacccagtctctgcgcagagtgacttgtctcccagacagtggctcagccttcaggactctcttccagcatggccgaagacacctattcacacagtaagttcccttgtgcttgactgagcttttgttggtttggggaaaaagtagggctaaaaacccagtggtcttgtcagaagttgtgagagttccatttttaaactttaactgtatctggataggggaaaac

SEQ ID NO: 22661 - DNA, 2300 bp, Homo sapien
tgcaggtatgtacaggtgcagacagatctttggctgggcttaagaggtctttgggtgttgagtctgagagattccttatgaggggttccagcaaagccaatttaggaggaattgtataaacagtgattcttgctgtagtttggataagtatggtgggactgaagcttgttttgcaggtaagttgttcctgctgtgatttgcttttgatggaagtcagggactagagagagaaaaactgtttccaaagaaaactatagtgctgccaggtgcagtggctcaactttgggaggctgaggtgggcggatcatgaggtcaggagtttgagaccagcctggccaacatggtgaaaccccgtctctactaaaaatacaaaaattagccaggcatggtggtgggcacctgtaatcccagctactcgggaagctgaggcaggaggatcgcttgaacctaggaggcagaggttgcagtgagcggagatcgtgccactgcactccagcctaggtgaaagaacaaaactctgtctcaaaaaaaaaaaagaaagaaagaaagaaaactatagcgttagattaacctttgagttaatctgagtggccacgtggtcatctatggtatgcagccacccacaatacccctcctcagcataaagcagccagaaagatcacgtccagattccccatgattgaggaattgataaatagaaacagggaactgaaaccagctccagtgtcccatagaactgatatttatggtttcttttgaatcaacacattatagacattgagcctccccttcctaaaactcgagacacttttatttgtcttatctgatttcctttctcaggaaaccaagcatcaggcctcccagatagtataaagaaactgaaacttactggattaccacatctggaaaaacgagatgctataccccttacccatgatgattgcctaactgaccatctgctgcctgttgacccattcctcttccttaccccttcctaattcctgttttctcaaacatagttacacttcttccctgatgtataaacccctagttttagtcagttgaggaaagagatttgagattgatctcccattttcctcagctgcagcaccgaataaagccttcatccctgacaatactcattgtcttgctgactggccttctgtgcagcaagcagcaggatctagatgcaaggacctggcctttctggtaatattgtcatcaaccatttaatgatgtagacttggtccccggctcatgctctgtgtattttcttctccatctacatgcattgccttgatggtctcactcaatatcatgacttgaaataacagtgtaaggtaactcctaaattcatatattcatgctcaaaccttcttccaacattcagtcgtaagtcgaattgcctgtgacagagatactttgtggttctgtagacatttcaaactaaccatcctgagcctccgaacctcctccacttgcagcctccccacctcagaagtgggcaaatccactttttgtgtggtctgggccaaatacatgactccctgcatcacgtagaggctgtgctggtccaaagaaggctcaaaagagggcagtttgcgcacacaacgtgtcggggcagggcttccagatgatcattcggcttttttgtgtcttccaagatgatgatccggggaggagggatgtgaaagggggtcagtcgccaggcgagctgaggacccagttctgcgcctttgcctgtgccctgacctgaaggaaagtccctgtctcccgagctccgattttcccgagagaagaatgcaatgtaacccttgcccctcggttccctccctccatccttcccctcgagttgtgcccaccgtaaagaggtgggtctggagcgtctcctcgggtcctggagtgcctttccctgggaggaaaacttgcgccgtgaagcgttcctcccgttgttgaacacatgaggaaaactacactacttagaaggctgtgcattatgcgtacggcgggagctgggccaacgacggcctaggacggggacgtttccgacggctcacgccggtgggggcgggacttccgggttgctcgctgcggacgccattttcttctgcacttctgtctggagaggtctgtagccactgagggccccggtcggggccgctttgcaggtccctagtcaggaccgagcaggggagtaggataggaatccccgccgcacctttgtacgagcctgaccccttccgtgggtttgttcctgggtcgccgtcaagctgcggtctctcctcccccgcccttcagcc

SEQ ID NO: 22662 - DNA, 2300 bp, Homo sapien
ctgtgattcagtttatcttcagctgcagccatactaaccttgttgcacttccccaaacacgacaggatcctcctgctttcattcccttgtcttaggtgctctctctatgagaccctgttacctcagatgctccattcctccaagtccatgctcagatataactgtcttttagacatttcccaactactctacctccctctaaccttctatattgtttacttttgtggttgtggttgttctttttgagttactgattgttggaattaaaaggtccccgagggccagggacagtggctcacgcctgtaatcccagcaatttgggagactgaggtgggtagatcatctgtggtcaggagttcgacaccagcctggccaaaatggtgaaaccctgtctctactaaaaataccaaaattagccgggcgtggtggtgtgcacctgtagtcccagctacttgggagtctgaggcaggagaattggttgaacctgggaggcagaggttgcagtgagccgagatcgcaccactgcactccagcctgggcgacagagtgaaactgcatctcaaaaaaaaaaaaaaattcctcaagtacaggaatgcataattattttgctatgtacatatctgattttttagagcagtgcctgttgcaagataggcactcaatcgatactcattaaattaacaatatacacatatataaaacagcactttcacatggttatgagtgacctaaggaaaaacagaacaggatgacgttgtagtgggggctgttttaaattgacagtttggagctgggcgcagtggctcacacctgtgatcccagtattttgggaagccgaggcgagtggatcacctgaggtcaggagttcgagaccagcctggccaacatggtgaaaccctgtctctactaaaaatacaaaaattagccgggcatggtggcaggtgcctgtaatcccagctactcaggaggctgaggcaggagaaatgtttgaacctaggaggcggaggttgcatgagctgagttcgagccactgcactccagcctgggtgacagagcaagactccgtctcaataaacaaacaaacagacaggtttgggaaagcctctgagaaaggaatggttggcctgagctaagcgccattaccctgatccacctattgtaaccacctaatgggttcattattttccctgctccccagatagagtcgacttatcaagacaggataattgcaataaagggtttaattcacatcaatcgagctaaatgagagaccagagttttattactcaaataggtctccccaaatattttgagacgagcttttttgtttttgggtttttttgtttttgtttttgttttttttgagacagagtctcgttctccttctgtcgcccaggctggagtgcagtggcatgatcttggctcactgcaacctccgcctccagggttcaagcgattctcttgcctcagccttttgagtaggtgggattacaggcatgcgccaccacacccggctaatttttgtagtagaaacggggtttcgccctgttggccaggctggtctcgaactgcctacctcaggtgatccgcccgcctcggcctcccaaagtgctgggattacaggcatgagccatcacgccaggccttcaattatatttctgcaagatatgttccctgtctaaaagaattcaatttttaatgtttttgaaacttatgtgtttgctaaacaaatacgtgggggctgattttacgatctgaggccaaatccacaaactgattacagggtccaacaaatatttggcgagtgggaggagaggggtaagtgagctggactggtggcgtcctggctgtgagcaggcacagccgcaggcttcagggagccccatcgcggtgaccctggagagtggcctgaatcggacgtgaccttgaagcaaggtggttttggggtcgccggctgcacaaggcgcgaagtggtttagggtcacgggctgcacgaggctccagcacgtcaggagtgggcgtctgttcattcccacgtgcatcgcggctctctcctagttgacgcatgcacaccccgtgggtgtatgcgttgttcattcccacaacggccatcaccacctctccgcaccctctgtctccttccttctcgggcctcacccctggccctcgctttcagtgcccagcccggaccgcagcactccagttccgccccaacccgggaaccctggactgaggctcccgtttctgtcctttctattgggcgcacttccgatggcgtcaggaatttcagccaataggag

SEQ ID NO: 22663 - DNA, 2300 bp, Homo sapien
ggtgcctgtaatcccagctactcaggaggctgaggcaggagaaatgtttgaacctaggaggcggaggttgcatgagctgagttcgagccactgcactccagcctgggtgacagagcaagactccgtctcaataaacaaacaaacagacaggtttgggaaagcctctgagaaaggaatggttggcctgagctaagcgccattaccctgatccacctattgtaaccacctaatgggttcattattttccctgctccccagatagagtcgacttatcaagacaggataattgcaataaagggtttaattcacatcaatcgagctaaatgagagaccagagttttattactcaaataggtctccccaaatattttgagacgagcttttttgtttttgggtttttttgtttttgtttttgttttttttgagacagagtctcgttctccttctgtcgcccaggctggagtgcagtggcatgatcttggctcactgcaacctccgcctccagggttcaagcgattctcttgcctcagccttttgagtaggtgggattacaggcatgcgccaccacacccggctaatttttgtagtagaaacggggtttcgccctgttggccaggctggtctcgaactgcctacctcaggtgatccgcccgcctcggcctcccaaagtgctgggattacaggcatgagccatcacgccaggccttcaattatatttctgcaagatatgttccctgtctaaaagaattcaatttttaatgtttttgaaacttatgtgtttgctaaacaaatacgtgggggctgattttacgatctgaggccaaatccacaaactgattacagggtccaacaaatatttggcgagtgggaggagaggggtaagtgagctggactggtggcgtcctggctgtgagcaggcacagccgcaggcttcagggagccccatcgcggtgaccctggagagtggcctgaatcggacgtgaccttgaagcaaggtggttttggggtcgccggctgcacaaggcgcgaagtggtttagggtcacgggctgcacgaggctccagcacgtcaggagtgggcgtctgttcattcccacgtgcatcgcggctctctcctagttgacgcatgcacaccccgtgggtgtatgcgttgttcattcccacaacggccatcaccacctctccgcaccctctgtctccttccttctcgggcctcacccctggccctcgctttcagtgcccagcccggaccgcagcactccagttccgccccaacccgggaaccctggactgaggctcccgtttctgtcctttctattgggcgcacttccgatggcgtcaggaatttcagccaataggagccagccaggaagtacctctctgagcggttggtgccgggtataaaagaaggccgcgcagccacggctgctcacgacgccgcggatcccgaagcctgtgtagcagtgagacatcagtgaggctgcaggacgagcaggattggaagcgccccggccagaaagtgaccccccacccctttcaggaccctgtgaacgggaacagccatccagagggttcaggaaggcgtccgcgccctcacctcttctccccatgagctcccccagagctgtggtgcagctgggcaaagctcaacctgcaggcgaagagtgtgagagccagcgccagagaaaggacgcagggaaggctggggactgggccaggggtcgggtgcacagaagacacatgtgttgacatctcccctccctctcctcctccccaacgctcttcttttctccccactccctcccttccctccaattctttctttcacctctccctcccctactctctcctccccttcctttctctctgcctcttcttcacctcctcctcccctccctaccttaccttactctttcttcttccccttacctctccctccccctctccctgccttccccttccctctctttctctcctccccttcttcccctcacctctcgctccctattcccttctctactgttctcctctcctctctttctctccccttctccttccctcccctctcccttcctatctccctcctcctcctctctttcagtggctacagcaaaccaaacagcccagcagcccagcagcccagccatgtgagtcccttgggattggtatctggaaaaggaaggaaggtgggacgtggggatgaagaacagactgggtgtgtggggtgctggctcctgggaacgagaactactgatagggctgggtctgtgtgagaagggaaagcggcagaggaaggataca

SEQ ID NO: 22664 - DNA, 2300 bp, Homo sapien
attatctgttgtgctcttgatttgcattttcctcattggtagggtggtttagtgtctttcatgattctgagccaatctatattttcttctgtgagatgttatttggtgataaatgcctttttttcaattaacttctttggctttctctttttgattttatttttgtacattatagatacctatcttttatcagttacatttgctgccggtatattcttctagtttttaattttgtccttccactctttttaaagtatcttttgttcaatgagttccttacatagcgtagtctgatttatgttttttttttacgtgattaatgattttgtaccttgtggaaaaaatgttgctttaccctaatgtcaaaaaggtattcttgtttattttattgtaagttgtaaaacttgccatttggcattcaagtctttatcaatctgaagttgattttgagtatagaatgtgatagaatacaatatttccattccccgtgttggtagccaatttttctagctctaattccttagtagtctctcatcactgaggtgctgtgcctctttgccatctaccaaagccccatctatgtgcaaggggatttctgagctctctgttcttctttattcccagtttgcattatgtctgtgccagagtggtacctctgccttatgagctctgtcctgagagtggcactgctcttcacagctgtcacctaggtcagaatcttgggaatcagtccccctgtgcctcatctttccctagattctcatcaccaccaccctctcatgcactgtagctcatttgcatattctttctcctaaggctatagtgtctttctcacattctctcgtgacaagtgggacttacttcactgggtaccttctattggaaaactgccttgatctttttctacccaggattagccaaactcaagataaggacacagtcctccaggactttgtcaagtctacccaaatcctcttaattccaactgcaaattcagggatttcctgaaaccaaccttaggtttcataacttgctaaaaagactcacaacactttctaaaacctattatactcacagttttgtttattacagacaaagcatacaaattagaagaggacacgggatgtggggctgaaggggttccaaacacaaagcttcctcagtaacttgttacccacccagcattgagtgtaaaatatgtgcacagagcattgcaaacccaggaaactcactggagctctggtttttagagtttgttgagcttcattacacaagcacggttaatcgagacattgcccacattgccatgtgaagtttccagccttcgtcccttttccagagttcagctgatatcttgtggctcagagacctaaccttctactcactggttggtctttctggtgccaccagacctcagccagagtcatctatttaggataaactatttaggtacctataatgagttacctttatataaatatttagtctggaattgaagcgatatctccactctaggccctgtcccctcacctggtctctctgcctggtctccctttcaaggagtcaggaatccaaggaaaataaaagaaacaaattatagatctggggttcaagatggcaaaatataacagacataaaggcaccatttataacttcattttttttactgaagtggtgagtttgtttcttctctttttacattactaacaagcccttctgtgtgttggatttctttcaggtgacaaaggaaaacccaagagcacagaacctaccacctgtgagctagccttgtctgaaggaatctctttttggggacaactaacacaaggagcttcaggggactcccagttggggcaacccaaggatcaggatgggttttcagaaatgcagggagaacgcttgagaccagggttagattcccaaaaggagaagcttcctggaaaaatgagccccaaacatgatggtttagggacagctgatagtgtgtgttcaaggattatacaggatcgagtctccttaggagatgatgtccatgactgtgactcacatggatcaggtaaaaatccagttattcaggaagaggaaaatatctttaaatgcaatgaatgtgaaaaagtgtttaacaagaaacgcctgcttgctcggcatgagaggattcactctggagtgaagccctatgaatgcacagagtgtggaaaaacctttagcaagagtacatacctcctgcagcaccacatggtccacactggggagaagccctataagtgcatggagtgtgggaaggcttttaatcggaagtc

SEQ ID NO: 22665 - DNA, 2300 bp, Homo sapien
gtttattaagaaagtaaaggaataaagaatggctactccatagacagagcagccccaagggttgctgggtgcccatgtttatggttatttcttagtgacttgctaaacaaggggtggattgttcatgcctccccttttcagaccacatagggtaactccctgacattgccatggcatttgtaaactgtcgtggcactgatgggagtgtagcagtgaggaagaccagaggtcactcttgtcaccattttggttttggtggttttggccagctcctttactgcaacctgttttatcagcaaggtctttatgatccgtattttgtgctgacctcctatctcatcctgtgactcagaatgccttaactgtctgggaatgcagcctagtaggttttagcttcattttacccagctcctatttaagatagagttgctctggttcatatgcctctgaaaaaaccatttaaatttaattataagagtctggccagagggggtggctcacgtctgtaatcctagcactttgggaggccgaggtgggtggatcacctgaggtcgggagtttgagaccagcctgaacaacatggaagaaccctgtctctactaaaaatataaaattagccaggcgtggtggcgcacacctgtaatcccagctactcaggaggctgaggcaggagaatcgcttgaacccgggaggcggaggttgcagtgagtggagactgtgccactgctctccagcctgggcaacaagagtgaaactccatctcaaaaaaaaaaaaaaaaaaaaaaaatttaagagtcacaaatatgtgaaaaagagaatgatgtctttatcaattttcaaaaattactattgccagtgatgaataacagtgttccttgcacactaatttagccaaaaatatttctccaaaagtaccgcatcgtgtaggaaattgactccatctccattccttgactattttcaatctcaaaattaaatctcttggagagtactttctgcacacctttctatttccttaaccatatatatcgtcaaaccattgaaagctggactttattctctcactttcatagtcatgaaaagaaaaaaaaaaagttactgatggggactcctaagacttcgcataatataatctttgcatagtctaggattgttaaaattcctaacaagactttataaactctcctgtctgcaaccagttaatgctgggttgggccagggttcccctctttcccgtcacttatccatctacgctcattcttttcatagcctcacccaatatcatgacttgaagtaacagtttacagtaataactcccaaatttatatatccacgctcgaaccctctgccaatgttgaatcataggttgagtatatggcactacgctttgtggtcttactgacgtttcaaactgatcatgcttgaaatgggagtactgggcttcccggcaagcctgctccactagcagcctccccacctcagggtacgggaagtccacacgtggcgaacgcgaagcctattacatcacccggaagtccctgcatcctacgaaggctgggcccggccaaaggaggcccaatagagggcggtctgtcctttcccagcaggctgggcacactgtcaggcgtcctcctttgggtggctattttaactgctcatttatccttttcttctatgaaaagatccagaaaagaggcaaagcaagcgagaagtcgcgggcccagcccacagcagggtaagcacctttgttcggggtctgaatcggggcgaatatccccgcctcctgacctcgattttcctgagctagaagggacctttcgaccctccgacttgtgcctatactaaggcggtggccctaagacgacgcgggggttctggtgcgcacttacgtgcagtcggatgcgctgggtgagttcccacacccggtagatgtaagggaaaaactgcattacccagaaggcactgccccttgcgtcggccgcggactctgggccattgacgacccaggacaggagagttttctgcgggccagggcggcggaggcgggacttccgcttcttcgtgtgacgtcatctccgtgggccggtttggccctgaaacagtgtggggcctagagcgctgggtgggcgcgttctgcggcctgagcagggacgggtagtgaagcggttacgccccttcttcgcgtcttggcgggagcctgacgccccgcttctcccctaacgaggtgtcccaccggcgcccgccgaggcctaggcctccgcagccgccctccgtctcctcagccccgacgctgcgccttg

SEQ ID NO: 22666 - DNA, 2300 bp, Homo sapien
ttacaggcgtgagccaccacgcctggcctgttttatttaaaaagttgtattaaatatatatttttttctttttttcttttttttttgagacggcattttcacccttcttgcccaggctggagtgcaacggtgcaatcttggttcactgcaacctctgcctctcaggttcaagtgattctcctgcctcagcctcccgagtagctgggattacaggcacccaccaccatgcctggctaattttttgtatttttggtagagacggggtttcgccatgttgcccaagctggtctcaaattcctgacctcaggtgatccacccacctcagcctcccaaagtgctaggattacaggtgtgagccaccgcacccgacctgttaaatatattttctatgccttttgtcatctctttgccttctggaactctaaaaatatgaaatttttttcccttgatgttatctaataagtctggtaggctttcttcactccttgtcattcttatttattcttctctcactggtaattccaaacaaactctttatctttctttgcttgagtaagtttgctattgatgctctctattgtaccttatattttatacattaaattcttcagctgcaggattcctgtttggtgattttaaaatatttctttcttaaatttctctttcatgttatgaattgtttttctgattttattgaattatctttctgtattatcttgtatcctattgagggttttttgtttgtttgtttgtttgtgagacagagtgtcactctgtcacctaggctggagtgcagtggcgtgatcttggctcacaacaatctttgccttccaagttcaagtgattctcctgcctcagcctcccaagtagctgggactacaggtgtgcaccaccacacccagttaatttttgtatttttagtagagacagggtttcaccatgttggccaggcgggtcttgaactcctgacctcaagtgactcgcccaccttggtgtcctaaagtgctggaattacaggtgtgagtcactgcacctggccttgttgagtttttaaaagatcattattttgaattacttttttggtaattggtagatttccttctagcttgttaacggaaagttattgtgttcctttcatggtgacacatttccttgccttttcatgtttctattgtccctgcattgatgtctgtgcatctggtgaaacaatggcgtcttcccatttttctacagtcactttcatagaggctttcacctgcacttggtccttagtgtgctagttgagaagggtgtagtaactctgtttccagataagtgaaatggtatagtctttgttcagctttatcaacagtatttaatgttggcagtaactttgttttcctcagtggcctaggttgtaaaagtttgtagcagtaatggcataggttgttaatggcaagggcttttttggagtcctcctattttcatttgccccacaatgaagttacttagccatgaagatacttcttgctgtcaagtatgatatggcctataggcaggtacagtggctctgggttccaggtgcaggtgctcagggcagctgtgggtctggggttctaggctcagcatctgatgaacctattgtggcacctgggttttgagctatagatttgctccatgtggtagaattggaggtaggtttaccacagagccaagatctgtaactctgatgtactccctagcagcttgggcccaaagggccaggttgtagctttttgtttctgggcggccaggcacagcacaggcccaactctagggaagaagtggtgctttggagtattgggccaaggaaacagaatacagctgcagtttggtaacctgaaccattcaggctcattggcaacttgggtttctggcatagcacagtttttgtttgggccttgggcaatagggagcagcccagtgatgactcagctccccagggagaaagctgtctcagcagcccatacttcagggtgttagtcctgccccctggcagctggttatccagctagctccctaaagtgagtactagagttgtttggcctgtagtgtggggtgtctcatctcatgccctgctttgtttccctggaatgtgaaggcccatgccagctcagcccagtattgcatagctactcagttcaggcaaggcactgcatccccagagggtaatgtgcctcgtcagctcaggtctagggtgtgtgaccttaggttggcccaggcaccattttcctgggatgcaggaagctgcttcagattaggtactggactgtgtgtctgct

SEQ ID NO: 22667 - DNA, 2300 bp, Homo sapien
atggttccaaaccatcactagggagctagtgcagtcgtttggagacctttagagttgccagaaatcttgcactggttctttctcatatgtgtgggctgatgttccttgaatctttgaagttgctctcctttggatggggctttctgcttttatattatttgatgcccttgggagttttactgtggtataagttgggtttagtttcatggtttcaattatgggtgctttcacaggccaaggctcagctgagcactcctgagctgcatgctgtaaacctgggtagaggggattaagcccttggctttgttctctggctgcttggggtgaagcacctgctgtgctagaggggctgaggtgttctcagtctgctggcaaaagtgctccagcagagcattgtggggactgcagagagtgcactgtggctgggggatggggaggccacaggcaagtgtgcaccacttgggcagtagaggggggctacctgcaagtgtgtgccaatggggtggcatggctgtggtgtaggtgagtgaagcaccatggtgtgaggggtccccggcaatgcctcccacctttttgaatctccagtgtctattattccactatttccatatgtatacatcatttagctaccacttataagtgataacatgcagtatttgactttgtttctgaattatttcacttaagagaatggccccccagttccagccatattgctgcaaaagccatgattttttttaatgactgagtagtattccatggagtgtatatatatatacacatatatacatatacatacatatatatacatatatatacatatacatacatatatacatatatacatatacatacatatatatacatatatatacatatacatacatatatatacatatatatacatatacatacatatatatacatatacatacatatatatacatatatatacatatacatacatatatacacatatatatacatatacatacatatatacatatatatacatatacatacatatatacatatatatacatatacatacatatatacatatacatacatatatatacatatatacatatacatacatatatatacatatatatatcgcattttctttatccaatcatctgtcgatggacacttaggttgattctatgactttgctactgtgaatagtgctacagtaagcatgtaagtacaggcatctttttgatatagtggtttattttcctttaagtaaatacccaatagtggaattgccagatcaaatggcagttctattttcagttctttgataaatctccatactgttttccatagaggttgtactaatttacattcccaccaatagcatataagcgttcccttttccttgcatccataccaacatctgttggttttttactttttaataatagccactctgaccagtataagatggcatctcagtgtgtttatgtgtgtgtgttttctctcatcatatctcattataacctcaaattcctgggctcaagcaatcctcttgcttcagcctcccagtgtctaggactacaggtgtacaccatcatgccttgctcttttttttttttttggtagatataacatcttactatattgcccagggtggtctcaaactcctgacctcagcaattattttgtgttggcatcccaaagcactgagattacatatatgagctacctccctaaaataagggaagtgagccagaagctctgggcccagcccatgatctcaatcggggcgaatatccccgcctcctgacctcaattttcctaagctagaaaggacctttcgaccctccgacttgtgcccatagtaaagcggcggccctaagacgacgcgggggtccttgtgcgcacttaaatggagtcggctgcgcttggtgagttcccacacccggtagatgtgagggaaaaactgccttactcagaaggcaccaccccttgcgtcggccgcggactctaggccaatgacgggccaggacacgggcgatttctgcgggccagggcggcggaggtgggacttccgcttcgtcgcgtgacgtcatctccgtgagcaggattggccctggaacagtgtggggcctggaccgctgggtaggcgcgtccagcggcctgagcaggggagggtaatgaggctgttacgcgccttctccgcatcttggcgggagcctgacgccccgcttcttccctaacggggtgttccaccggcgcctgccgaggcctaggcctccgcagccgccctccgtctcctcagccccgacgctgcg

SEQ ID NO: 22668 - DNA, 2300 bp, Homo sapien
gataatgagtggtctcattaatccatagatgcactcctctctcagatcctcatttcttctatcatcacagaccatcacctgggatcactttccttcaaccttaagaaggatcttaaaagtgttattttatgccagttatttttatccattaaatttctcattttgggcttcaaatagtcttatttcagtttttcttagccagtgcatttgtcgtgcatagaaatctgctggcagttatatctgtaactgactccgtatgttattccatgtgttcctgacacctaaatttatattggctttgagtggagacagataatttatattatacatatatataattatgtatgtgtgtatataaactacatgtgtatatatatataaatgctgtgtgtatgtgtgtatatatattttttctcaaagatatgaattatttctatgtcatctcataaaataaaccaggttataaaattttaactacagtgactcttaagtggacagtggagttaaaaattatgaagagcaattagtcttgatagttctgtgttttgaatcatacagcctataagaatgtgtcttctggacgatagacctacctgtagtttatgaaaccctcttgcatgtgatttttttcaattaaatgagtctattgatatattggtgtgcttttgtgcaaaaattataaccattaggggctcccacctgtaatcccagcactttggaagactgaggcagttggatcacctgaggtcaggagttcgagaccagcctgaccaacacggagaaaccccatctctactaaaaatacaaaattagccgggcatggtggcggatgcttgtaatcccagctactcgggaggccgaggcaggagaatcgcttgaacctgggagggagaggttgcagtgagctgagatcgtgccattgcacttaagcctgggcaacaagagtgaaactctgtctcaaaaaaaaattataactattatctatgatgctatttgatgagtgagggaataattgtacttttttctttttttttcaaaatcacactgatcctgaaaaggtggatctttgatttatcttcctaaagcagtgtatgtgagaaccttgtgttgaggaagactgataacagcttgtatgtatttagcacgatgtgccaggcctggtgttaagtactttttacctcacttcccatattcctaatgaggttggttgtagtgtttttcatcttactgatttttttttgtttgtttttgttttgttttgtttttggctaatgactttaaaagacctccagttcttgaacttcagctagggtcccatccccagagtttatcagaaggtataggttgggtccaagaattcacaggttttttaagttcatagtgaagctgatgctgtaaaactacatatcaaattgggaagcaatgaattagaagaggctcatgttttcgtcatgttacatgtaagttcctccttcacttttcgccatgaataaaagttccctgtggcctcaccagaagcagatacgggcaccatgcttcctgtacagccagcagaaaggtagctaattacatctcttttctttatatgttagaaaaattagaaggacattcaatgttttacaaaaaggcccacaaacgaaatacagacaacgttcaatttattaatacgtttcaatccccaaatctgagagaggtgaagcaggtttcccagggcctcagaagcaggattgaagaatgggtcccttgctggcgacttcagtggcgtggcattgtcccaggtggccatggaaatcagggtgcataccctttaaaagcagctgtggcctccgagatatcgttttcccagtcttttctccccctccctgcacgacgcctcttggcagacatccgggagaacccgaaaggcgctcgttgcctggttggatgcagggtacaaactacgttacccagaaatctgtgcccagctcattgttagccggcgtgcagccaatgacagcccagaaactgggcgtttcctgctgctctgggctgcaggggcgagacttctggcgtcgccgtcgtgacgtatttttcctatgcccggtccgtgcattctggttgtgaaggctgagttctagagatcgggtcggctttctacgcggctctcgtggaacctagcaaagaaagacagtgaagactgcaggaccttccttcgcgcttttgttacaatccatgacccctgtcgtgggacgggcggcctctcgcggaggtgtctgccggggctgggctcttaccgaggcctccacacacgtcctcttgtc

SEQ ID NO: 22669 - DNA, 2300 bp, Homo sapien
gggattgcaggcgtgagccaccgcacccggccttcatttttattttttgacaagtgtttccatttgttatctctatccctccaaacagttaataagcgatgttttcaagtatgaaataagaaatacatataggagacagaagcataatgtgtccaggttccagcacagccagtctcaacttcattctttgacttctcagactcttgctcaaactctactgtaaccttgctttttccccccttcacatgtcacagagagatttctgtaggactatttctgccactagttttgaaataacataatcactgttagtccaaactgcaccatcctgtaagccccctgccatctcacagaccttggtcagagtgaagcattccacggagtgagggccttgagaaacatcctgcccaactgcctgactttcttatcacatcgttctgggaaaagatccaaggaaggtcactatcacatcctgccggataaaaggccaaactgcctcaggaacatcttacgcacatcctttggccgggtgctgtggctcacgcctgtaatcccagcaatttgggaggccgaggcgggcggatcacctgaggtcaggaattccagactggcctgaccaacatggtgaaaccctgtccctactaaaaatacaaaaaaattagccgggcgtggtggcacgcgcctgtaaagccaactactcgggaggcggagttcaagaatcgcttgaactccgggaggcggaggttgcagtgggccgagatcacgccattgcactcaaggctgggcgacaagagcgagactcctccaaaaacaaaaaaaaacccaccatcctcctgggcagcaagtcataccctcccgccgcgccccctgccccccacccctgacccctctcatccaggcctataattgccccagcctgtaagcagtgaggggttctggcactaagctagttctccccatcacaggtctcgtgctggacataaaacctgcattgctgtagagctgccaactctgcctttctttaaccctcgccttcccttcaaaacctaacagttattattaatagatttctgtaattttcatttcacaagtattttcacagataatttcaactccctgtaaaatgataactcacttctcaggaaggagataagatcatgaaagttcacagtttttattggggataatacgttccctgtgtacatatactccaactatggaatggcacaaaatgtcctgtcaggaaatggcatgtatcagtcactctcattttcagacaggattgagacttttaaaataaatgtaaaatatttcagacatgaagtaataagtattattagaataaaagcattgcactcttggtaggaacacaatcactgactctacagacagtaatgatgttttcttctggatccagaggcacagcgtcaccctttcaatctacgtcggtatctcctgtcttcttttgtgcaaattcccagccatgtagtctttctttgttctcttggaccaaccatattgaagcttaataaatagaagtcaaagtttaactgtatgtgtatttgaaaagcaacatatggctgagaggcatgagtagagacagagtgcctttgtggtatagtgtgtccctttggcggtgtagccgttgagaacttgctgtgcttcacaatccgatatcataggtccctcacatttctgtgagtatcctagaccttacttcaagaaaatctggttatgtcgcctttaagagcaacccaagccccgtcctgtccgtggagtccggcactctgtttaccagctcccctgacggtgccactgagcctctatccgccatataaggactgaccaacgctctaaggcaagtccagaagcggtgtcgaaacttcataacccagaagacactgcggttctcggcagcgcgactgacccaatgaatgtgcaggaaggaacctttgcgtgcgtgcgtgcgtgcgtgcgtccgtcctcgtgctcgcgcatcgtaggagggcgggacttccggcgtcctcttgccgtggttgatttgattttctctggtgttttcactagttccggcctttggcgctctatgacgtcaccgaagtgacggagcggaaaagcgcgagaagcggcttggttccttgtacgcagaggcggtagtgacacaggcacaactgacagtggcagaagctcagctgacaaggactggggacggcggtgtccttgtcttgcctttgtcgcccccgcccctctcttccctggctggacttgcggagtccccgccgaagaacccgaggtgggtg

SEQ ID NO: 22670 - DNA, 2300 bp, Homo sapien
ggaaaaacacattttagtgtttgtggttggggggttttatatgagtttcatgcacttgagtaagtggcttgcaagaaaaaaagtaaacaactttggttctattagtttgaccctgtgattaatgaatatcaaacagacaaatacagaatctaagaaaacatagaacagtcctgtatacacatagcagctgggaaacctattcccagtgtgtcccatgcacctatcattgatctgaaacccaatacatatgtgctcattgaacatttactagagaagtaaatacacattatcacacagcttctctattcatttttatctgtggcaagtctttcagtttatcatctgtacttacccctctaagcagttaatgagcaatgttttcaagtgtgtaaaaaaattacattttggaaacaaaagcatagtgtgtccaagtgtccagcagagccacaggttcaacttcattctctgacttctcagaatttgctgtctctcactcaaacattgagatcttatctttttctcacattacagatcgatttctctagggcttctggttttttttcttttggaataacctacataattactaatagatttcggtaatttttttatttcacaagtgtttttcacatttcgactccctgtgcaaatacagttgtaaacacaggtgaaattttaaatcacttctgaggaagaagataacatcatggaattccacaccttttttgaggataagatgtgcatatgcttcaactatgaaaacggtagacaatgttgtccagaaatggcatgtatcagctgctcttgagaaataaaaataaaattctaagcaccccctaactgactgaatggatgccctcttgaccatgagaaccctagaataactttggaagctgaattcaccactatagaggaacgggaaatcagacacacctcattatatcccctaccacactacaatcattaggttttcttccctaagggctaaatagaaatcaaccttttcagaagactactagcttatcttccaaggtacagaacagagagaagatgagattattcattccttcatccttctctgagacatcttctttattcccttttcccctcacgtgtttactctatcttatgtaaaatgtagatttactgggcactaactaaagtttcacatgtctgtaatcatttgtctcactgccaacccctcttcctttttaaggaaaatgtataataaatactaaacctcctaagaacctctttggaaaaaccagccacagatgcttctgtgacttacatttttctggatgtgcccttaggctggtccagtaatcctccatgatttgtgacttatgcctcaatcactcattttggtcgtcactctcattttcagataggattgtgattcttaaaataaatggaaaatatctcagatatgaagtagtaagtattattagaataaaagcgttgcacccttcgtaggaacacaatcgctgactctacagtcaggtaagatgtattctctttgatccagaggcatagcttcaccctttcaacctacttcagcgtctcctgtcatccttcctacaaattccagtccatagccctaactgcgtagtctttctttcttcttctggaccaaacatattgaagcttactaaacagacgccaaagcgtaactgtatgtgtatttgaaaagcaataatatggctggcaggcatgagtagaggcagactgcctttatggtatggggtgtctctttggacctgtagttattgggaattagctgtgcttaatagagtcttaagtaataagttgctaacatttctgtaaatatcctatactacaatccaaaaaaataccgtatgttgcctttaagagcaagccaagccccctcctgtctttggagtcggggactccgtttcccagctcccctgacagtgccactgggcctttatctgccatataaggactgatcaacgctctaagacaagtccggaagcggtgtcgaaacttcataacccagaagacactgcagctctcggcggcacgacttacccaataaaggcttagaaggggacgtttgcgtgcgtgcgcaccgtcggagggcgggacttccgccgtcctcctggtggtggtcgttttggttctgtgtggtgtttcaccaacttcggcctatggctctgtctgacgtcaccgaagtgacggaacggaaaagcgcgagaagcggctcggttcccaccacggagaggcgggagtgagtcaactgacaagcgctggggacagtggcgtccttgtcttgcctt

SEQ ID NO: 22671 - DNA, 2300 bp, Homo sapien
ggccaggagttcaagaccagcctggccaacatggtgaaaccccgtctctactaaaagtacaaaaatcagccaggcgtggtggccatgcctgtaatcccagctactcaggaggctgaggcaggagaatcgcctgaacctgggaggcagaggttgccgtgagccgagatcgtgccattgcactccagcctgggcgacagagagagactctatctcaaaaaaagaaaaaaaaagtttgtttagtttctgttggtaaatatctagaaatagaattgtaggatggtagggatgtattgttggtaaatgattaacatgtttttaattttcagttttttcagagacggggatctcactatattgcccaaactggttttgaacttatgaactcaagtaatcctcccgtcttaacttccatgtagctggcactactgaacagctttaactcttccagaccttcagttgggtggttttttcttttcctttcgtttccttctttctctctccttccttccttctttttgtaatttgataaaccaaatttcaagactttggccaaaaaacagtcttctcctttactgaatatctcagtgctccattttatttttccctcaccaattctgcaggagagatcacaagactatgtccatatctttatttgtgggggtatgattttcagctaacatagctgctaagtgatttaatttacaattatagtggtagaaaaatagctctaacttctgaggttttgtaatttattgtaaaaagcggaatacaggacatttaaagtgacctgacaaggtcaatacaggactgaggactaattcattaaatacgtcttacgtgtcttagaggaccacagacagctagcaaccctactcctaatgtgtcccatgcacttagtattgtacctggcatcgaatgagtgttcatcaaatatgttagagtaataaatacgacagcacagtttccctattcagctttacttttctggtaactcttttaatatatagtctttacctctcccttcaagctgttaatgcacaatgttttcaagtttgaaaaagaatcagattttggacaccaaacttgagtgtgtccaaggttccaggacaaccttagcttttttcctcctatcacaaatatgtttctctataactatttttgccactttctttggatatctacataatcgtcattaatagtttcagtaatagccatttcacaagagttattcagagacaatttcaactccctgtgcagacactgttgatacaatttcaggcgaaatgataaatcactttccactaatgagatgagatcatgcattcccaaacctttatctcaggagtaagatgctttctttgcacaagggctttgactggtggaaggccacactattctggcagataatggtagataagtcgcttttccttttcagttaggtttcagtctcttaaaataagtggaaaatatctcagatataaagtaataagtatcatgtgaataaagtgttgctgggtaggctgaaagacaataactgattattcagaaaggaaagatattactcctcaaactccccatcatgccatgtctgggtcttttcaatgtgcccagcagagcacattgaagatcataaaacagtctccagagcttcgttctgtgtgtatttggcaagcacaaaagagctgaccgctatgcgtggaagaccagttctttatggttggccatgttccttcggatgttcgtcttttgggaacttgctgtgctttacagaatctgaaaggacaggtctctgaaacatttctctgacttgttctagactgccttccgggaaaatctggatgcttgccgtttaaaagccaatgaagcccctccacgtccttggagccccgcaactgcatttctcaaagcctcaggaggatcctcctggctttcatcctgaacgcgagttaacttaagttcagaagcggggcaggcagtggcctgggaactacattacccaaaagacacagcggcggacacaagcagcgagtgtagccaatgaaggcctagcagagcggcgtctacgggggttcgcaatgcgtgtgggcgggacttcctgcaacgcctcctggggttgtcaatatggctgcgttgggatctgttcaccttcaggctgagtcgagactgaggtgaaaaagcggaaaaacgcgagaaaaggtttccccgttgtacagaggctagagtgaggctcggttgaatcggttgcaggcgttggtgcctctgtcagcgtccaggtcactgccgctcccgccccgctcttc

SEQ ID NO: 22672 - DNA, 2300 bp, Homo sapien
ttgaacatatgggcaacaattagaaagctgtcagttcttagtcatgtcttagccattttaagcgagttgttatgtgggatgttgtctggcttcctggccttgttgctagacatagtattctgacttgggagtggttactgtagataccacattagatttctgaatgggttggtgtagattatgggtcagagtcaatttttatatttggtgtagccgttgtccatttgtatagcaaatttctcacacctaaataaggaactatccacgttagtgggatttcttatttttaactggttatgttgaaaattagtttaatattcattaatttcccacaaccctttcaaaggtttgtttttgccagaccttcagttgggcagagttaatttttccttttttttttttttttaaactggttggcaaactaaattgtaacgctttggccaaaaaatagccctttccttttctgaatataaagagaatgggttttaatttttggtcttttctttgttcttccttcactaatcctgcagaagagaccataaggcattatccaaatcttcatttgttgggggcatggttttcaggtagtattgccaccacctgatggcaatactattgctactcaatttttctctcactgctactcaattgcagtgagagaaaaatagctctaaatgccgactttttgtagtgcattgtaaaaagctgaataaagccagggacggtgtcctgtacctacagtcccagctgctctagaggctgaggtgggaagatagctttagctcaggagctgaggccttatcataaggccttataagactacctggaggcttcatctgcatgatataaccttggtcttcacaaccccttgtctttttttgtttttgagacggagtttcgctcttgttgcacgggctggagtacaatggcgagatctcggctcaccgtaacctccgcctcccgggttcaagcgattctcctgcctcagcctcccgagtagctggcattacaggcatgtgccaccatgcccgtctaattttgtatttttagtagagatggggtttctacatgttggtcaggctggtctcgaactcccaacctcaggtgatccgcccacctcggcctcccaaagtgctgggattacaggcgtgagataccacgcccggcccacaaccccttaacccagacaaccatttctactgattccaggtctttagatacaaactctttcaaccaattgccaatcggaaaatctttgaacccacctgacctggaagccccgcccctcccttccagttgcgcctttccagaggaatccaatgtacattttacatgtattgattgatgtcttacgtcttcctaaattgttaaaaccaagctgtagatgggccaccctgggcatatgttcttaggatatcttggagccgtgtcatgggccattagtcactcatatttgtctcagaataaatctcttcaactatttcacaaagttccacccttttcgtcgacagaaagatattcctccttcaactctccatcacatcctgtgtgggtcttttctttcttgtcccaacagaagcacactaacgatcaaaaaaaagtctccagagcctcagtatgtgtgtacttgacaagcacaaaagagctgaccgctatgaatggaggaccagttcattatggtcagccatgtcgcttctgatgttcttcctttcgggacttgctgtgcttcagagaatctgaaacgacaggtctctgaaatatttctcagacttgtcctagactgctctccgggaaaatctggttacttgcagtttaggagtcagcaaagcccctccacgtccttaagagccccggaactgcatttcttaacgctcctccaggagcctccagcttttttccgtaaggtccgcgcgcccagcattgtgaggcgaggcaggcagcagcgtgggaactacattacccagaagacactgcgggcgacacaggcagcaacgtgagaactacattacccagaagacactgcgggggcagggcagcgagtgtagccattggtctagcagagagacgactaatgaggtctcaattgtgtgggcgggacttctggcggcgccctcatggttgcgttagcatggctacctagggatctgttcactgatttagagggtcccagagctctgggtcgggactgaggtgaaagagcggaaaaacgcgagaagcggtgttccttctacacagaggctagagtgcggatcggctgagtcggctgcaggcgcccctgcctccgtcagcgtccaggtgac

SEQ ID NO: 22673 - DNA, 2300 bp, Homo sapien
tcctggaactttaaaaaattaaattaaattggcgcggtggctcacgcctgtaatcccagcactttgggaggccaaggtgggtggatcacgaggtcaggaattcgagaccagccgggccaacatggtgaaaccccatctctactaaaaatacaaaaaaaatttagccaggcgcagtggcaggcgcctgtaatcccagatactcaggaggctgaggcaggtgaatcgcttgaacgtgggaggtggagtttgcagtgagccgagatagcgccactgcactctagcctgggcaacagagtgagactctgtctcaaaaaaaaaaaaaaaagaaagcaaagaaagaaaaaaaaattaaattaaattaaaaaaaaaaaggaaaatctgtctgaaaattctcaccagttaccaacacttctttctgaggctaggaggagaaggaggtggtatgttaaagtcaataatcacactaactttatacatacaagaagctttcaaaatagtcatagtaaaaatggtactttataaggagaagctgaaaaaataggaaaccaaatgcatattggaaataaattatacaactaggacaatggagcaaaataagagattaaagcaaagaatcaggaactatcttgaaaataaatgatgagttcatataaataggaaaaacatttgtcaacaagtggtttgtgggaatctaaaaggttttcatacctcagagcctgagttttttttttttttttttgagaccgagtttcactcttgttgctcaggctggagtgcaatggcatgatctcggctcactgcaacctccgcctctggggttcaaacgattctcctgcctcagcctcccgagtagctgggattacaggcatgcgccaccacctctgactaatttttgtatttttagtagagacggggtttctccctgttggtcaggctggtctcgaactcccgacctcagctgatccaccagcctcggcctcccaaactgctgggattacaggcgtgagccacctctcgcctgagaatcttgatactgctgtgttattgattgctccacccctaaagagatgtagttattcatgggagaaaatacctcataattttccctgatgatagcaattccatagagacaccaaaagaatctaaattatggccgggcgaggtggctcatccctgtaatcccagcactttgggaggccgaggcgggcggatcacgaggtcaggagatcgagaccatcctggctaacacggtgcaaccccgtctctactaaacacacacacacacacacacacacacacacacacactagccgggcgtggtggtgggcgcctgtagtcccagctactcaggaggctgaggcaggagaatggcgtgaacccaggaggcttcagcctcccgagtagctgggactacaggcacgcaccacaacacccagctaatttttgtatttttagtagagacggggtttcaccatgttggccaggatggtctccatctcctgaccttgtaatccacccgcctcagcctcccaaagtgctgagattacaagcgtgagccaccgtgcctggccgcagttactatttcttttgtgattgatatatatgaatattgtgcaatgaaattccctcccaattgaattatctttccctaaaaataaacccaagctttctggaacatattgaatttcctatttaacaagttttaaggatatcttaggtgtttctgggattagtatttattttcaggatcttttgcatttacttgtgagaaatggcattgagataaaaatgtgtgggctcaaggtggtcatggttatttctacggagtcaattcacaatctctagacctgtccggtggaaaataacagaaatatatgtgcttaaaataaaatataccatgatgcaatgttgattgttccaaaaattatagtttttaaaaattcttcaagttagcatttgtactgtgctgaaggccttgttaccaattgtattgtagcgtttttttaatttcttttttttttttttttgagacagagtctcgctctgtcgcccaggctggagggcaatggtttgatttcagctcactgcaacctctgcctcccaggttcaagcgattctcctgcctcagcctcccgagtagctgggactagcacgcgccgccatgcccggctaatttttgtattattagtattttgtattattagtagagacagggtttcaccatgttggccaggatggtctccatcttggcctcccgaagtgctggaattacaggtgtgagccactgcacccggcctaaa

SEQ ID NO: 22674 - DNA, 2300 bp, Homo sapien
cctgatgacatctcagcccagttgggtgagtcaagggcctggtaaccttcaagcgtaggtcttggtttctctaaagcagattttggacgtttctaactacaacatgattcttttcttactgacagagtagggagtctgggaatgttagttgtgctttcaatcacaattcaaattctgtggaaattcactgaagaaaagagaatacctcgtgaagcgtgttttggtccatcaaaaattactaactgcttatttgagtatttattgcatagtcatttaggttttgcaaaagttgtcaaaaccaaaatgagtaacttgtgtaaaataaataaataagtaaataaataaataaagccaggaggctgagaaaagagggcactcaaacacacatgcttaagataagagctattactgtctctgagggctcttaatgcacatattcccgttaaaagaagttttgacaagaacttctcaaaccgcagcttgctacaggagttacaaggacagctctagatgtagtagaacacttgcctgacagattgtctccactaatgaactggtgttaacctctgccataaacatctgtgaccaatgttctttttatctcaaaacaaattatatatacttttcccttttgcctttgaaagcttctccttgtttcaagctctctggatatgcctatagtccctatagcctgcatgtcctggatttgcaaatcccctgtgcattcctgaatgaactcaacatctttgaagaatctctgttatttaggttgacagtttaaatatatcctacattgtgcttttctttgcctcacttcttccacttattttactattattttacctttctattgattatttatttatattccaaacatttcctcttctagtttgaaaagtatatacgctgactgtatttattatatttaggctaaaaattacaaacgtttaacacattagcgtgccatacaggattgtaatacatttgctttccacttggaaatataaaaaatttaaaactttgagcaactagcctcctttcaatttatatgtagttgaggttacgcacgggaattccatcattctaactcaataagtatatctacttatgttttacactgtaatatgctgttattttaatcaaaagatgcacttcttttcatcttcatttcttctctcattgcagacttttcacctgagatcaactttctttggccttgagtattattttaaacattattttttgtgtaaatgtatttccattacatttatcatttttggtttcaaatagttttatatcacacttccataaaagacattttgttgtgtatagacatctagtttggtggttatttcttctttacagaaagtgttcatgttgcccttttcattgccatatgacatttgatgaattctgtcttttcagacacttgtaaaacacttaaaatattgaatacatctctgtatatggagtatgaaatactatcttgaacaagagtattacttgttgggtttgacacaatcactgctgtataagcaggataaatattttctgaggtaacagacagaagggttattcacttacttcaaggccaccaaacatccccactccacgttccacatcatggtgtctggagtcttttctttcttgtgcctgacagaaaatgctgaggctcgccaaactaactctggagcatcaggctacacgcatttgaaaacaatatttgttaacttccagccatagaaatctgagtgacgtcagtgtatggtgtgtccattttattttttgatgagcattctctgcgtaaggaaggctgaaatcatgtctctaaacattcctttgatgtcaaacacgacgttcaccagaaatacagatatggctccttcaagaggaagctaagctccgtctgggccttggagacgagggacaccatttccacgcgcccctggcggtcttctctgggcttttaacctggaggtgaagcgagacgccgcttactagtgttggtgccgtgggaactacattacccaggaaacttggcggctctgggccaatgaaaacccaggaaataggcgtttccgttggtcctcaccaacgtcagggcgggacttcctctaccatcctcgggtggacattttgtttgcttttccattaatccactggtttagtttccagaacgcaatgtcagacctgaggtgacagaaaagggaaaacgtgagagagtgtcttcttccctgaagagaggtgggcctgaggcttgacagtggcgctgcctgagtgacctagccgctgggctgggc

SEQ ID NO: 22675 - DNA, 2300 bp, Homo sapien
cccggcatatgttgcttttaaaaaataaaatagcttcatgggatttttttgtgaattcaatgagatataagtgaatttcttatgtagataatgattttacctaaaccaaataattagatagtctacttggtcctcaccagtcatgttatttgcaattctacatatgagcctgctttagtgggttgtctcttcctgtgataaaattaaaatgtctacatatactctttatttcaaaactatcacacaattcactacaactttcaaaagaggtatagtttgttttttaattaaaaccacatctgtgaaacaaccagtagtgataaaacatagtttctttctttttttttttaatttatttttttgagacagagtcttgctctgtcacccaggccggagtgcagtggcacagtctcagctcactgcaacctctccctcctaggttcaagtgatcttctgcctcagcctcctgagtagctgggatcacagtcacctgcccccacgcctggctaaaaaatatagttcctaggcatcctttcttttcacatcacctcacatgcctgatacaccccattaagctaacatttgcatgacatttttgttaatcattttgataatcattctataaatgtctttatagttttactacatacatatattttcctaaatgatatactgtttcttatttccagattctgaattttctatacattttacactgtatgggtgactagattctataatatgttttttaggtttgtccacaaaggttcctgtcatgatggtaagctaatttccataatctattagatgattaatccagaatctgctcttctaatagatgttctcaaggaagtgaaacatttattcctgtgcttggtttcagaaggaggatattatttacatattgtcccactcctgtcatggactcatctctcctcactctcctcctcccctcccttccatatgccacataatggtctaactgaaataactaatgccatagctgccatggaaggggtaaagagcttgtgtctctctctattctaccatgttctcaatcccaatattgactcccctcctccttttcagagtcaagtagtactgaacacccagttccagaaagctccaagaaggagggagggcttcattttctcttgtcctcataagtcactccaatgctgtgttgaaattgatcattattcagccaacagatggaaggggcaggaaaagaagtagggaaattagattgacacgaggggactagattcaatgggaatggatgtagtgggactacacataataaagggttgacatcttttttttatcaatagttgtgtgttgtaaacaacagtctagcattctacccacctgtgaggaactggctttatatttggaaatggaagagcagtgggaacatggagcataaagggatgaaggagagaaatggagggggagttgcctcatgggtttgccgcctattgttgtgcctgtacaccaatgttgggtctttgaggaaggaaggagcacaaatgagcatgggataaaggaggaaagtaaatccttgggctcccatactctctcatcacctacatccagaattcagagccttttcttattgtcatacatcaggcattgcttggccaccgttaattttaatattgggtgtccttttgtcaaaggaaatttggggatctatacgtggctcttcccagagaaacctctttactgtggccctgaagatcctcttcaattccttcaaaagaaggaaagattggggtatcagctgcaggaaactgaaatccaggcccatctccaaaaacagcagtttctggatgagtccgagagaagttctcaaccctaatttctcctccatctcctattccgttatctccatctccatcatcatctccatctccgtctccatctccatcatcatctatcatctccaatctccatctccgaagttatgcccacttcctggaagtttggaggcacgggaactacattgcccaaaaggcgcagcgccgcgaggcggcgatccctgaccaatgaaaagaggtctgcccgagcgtgcgacacgcaatgggcgggacttccggcgtctcgtttggtattcactttcgcgactcaggtgaactaacctgcgagaagctggttgtgcgctgaggcgaccagcgccggaaggcacggtggcgactcacgctgttctcgccgctcagaggcgggtctgaggctcggtggcggcgcccagggtggcccgggccctttcctcggtcattgtctcccctccagctctactc

SEQ ID NO: 22676 - DNA, 2300 bp, Homo sapien
aatttgtttttaaaacacacacacacaaactaaaatttccgtgaacagaagaatgaataatcaattatggtatatcttaacataaaataccattcaacaacataaaagaataaactatgaatacaagtaaaaatatcatagataaatctgaaaatccctgagccaagtggaagaagccagacacaaaagttgacatacagtatgattccatttatatgaaatgaagaagctgcaaaactagagtaaaagaatgcagatcactggttattgagcctgcggtctgagggggaaggttctgactgaaagagtacaggaaaacgttatcaggcaatggtaattttctctatcatgactgtgttggtggtttcatgacagtacagctgacccttaaataacacaggtttgaaatgcacaggtccaattatatgtgaatgtttttcaataaatatactggaaaaaatttttgaatatttgagacaatttcaaaaaaccagaattcattgaaataggtatgccaagaatgcataacacaaaatatatgtaggttctattttatcattacaaaaccagagcgatattttcttttctttttttttgtttttgagacggattctctccctgtcgcccaggctggagtgcagtggcatgaactccactcactgcaagctccacctcccgggttcatgccattctcccgtctcagcctcccgagtagctgggactacaggcacctgctaccacacccggctaattttttgtattttttagtacagacggggtttcaccgtgttagccaggatagtctcgatctcctgaccttgtgatccacccgccttggcctcccaaagtgctgggattacaggcgtaagccaccacctccctactctttctacccaataaatatgaaggtctgtggaagctcagggcccttcctcactagaagcaagaagccccctgaccccttctttaaaacagatttattttgcctttgttttcatttctgcattcgttccccttcgttcagtcccatagtaactgtgacaggaatatggagcagaaatggatgaaggggagaaattgagggggagttggcttatgggtttgctgcctgttgttgtgcctttacaccaatgttgggtccttgaggaaggaaagaacacaaatgagaatggggtgaaagaggaacgtaaatccttgggctcccctactctctcatcacctacatccagaattcagagccttttcttattatcatacatcaggcattaatattgggtgtccccttgccaaaggaaatttaggaaggtatacgtggctttgcccagtgaaacctctttatggtggccctgaagatcctcttcaagtccttcaaaagaaggaaagattggagtatcagctgcaggaaactgaaatccaggcccatctccaattacaacaggttccagatgagtccgagagttctcgacactcatttctcctccatctcctactccatcatctccatctccatcttctccatcatctccatcttcatcatcatctccatctccatcatctccatgtccatcatcatctctatctccatcatctccatctccatcatctccatctccatcatcatctctatctccatcatcatctctatctccatcatctccatctccatcatctccatcatctccatctccatctcctactccatcatctccatctccatcttctccatcatctccatcttctccatcatctccatcttctccatcatctccatcttcatcatctccatttccatcatctccatctccatcatcatctctatctccatcatctccatctccatcatctccatcatctccatctccatctccatctccatcatctaccgtctccaatctccatctccgaagttatgcccacttcctcgaagtttggagccacgcgaactacactgcccagaaggcgccgcgccgtgagccgcgatgcttggccaatgaaaagaggtctacccgagagtgcgacgcgcaatgggcgggacttccggcgtctcccctcggcggttgctttcgctgccctcaagagaactcagcttgccggaagctggttgttcgctgcggcgaccagctccggaaagcgcggtggggacgcgctgtgttctcgcagctcagaggcgggtctgaggctcggtggcggcgcccagggtggcccgggccctttcctcggtcgttgtctcaccgccacaggctccgatggcggcggccacgctgagggaccccgctcaggtgagcgccgcgtcctcccgg

SEQ ID NO: 22677 - DNA, 2300 bp, Homo sapien
tcatggccgggtgcagcggctcttgcctgtaatcccagcattttgggaggctgaggtgggccgatcacctgaggtcgggagttcgagaccagcctgaccagcatggagaaatcccgtctctactaaaaatacaaaattagctgggcgtggtggcacatgcctgtaatcccagctactagggaggctgaggcaggagaatcgcttgaacctgggaggtggaggttgcagtgagccgagatcgtgccattgcactccagcctgggcaacaagggcgaaactccatctcaaaaaaaaaaaataataaaaaaataaaaggatcagaaataaataatagtggagacaaacgattgtgatgccctaccttgttttaacctgattgtctctctcagctgagagagccaaacagactccatttttgtttcttcacttgcagcccccttatccccctcccttaaggacataactagtgcaagctgactccaagcacatccaggaatgcacttactgatagacactgaggcacgctgtaccagcagctcctaggaacgcactcagttaatggtacccaaagcccctgcgtttatcactttgtgataattaagcccctgcacctggaactgtttattttcctgtaaatgtttgtgtaaccatttatcttttaactttttgcctgttctgcttctgtaaaaattgcttcagctaaactccccctcccctatttagatcaaggtataaaaagaaatctagccccttcttcggggccaagaattttgagctctagctgtctctcggtcgctggcaataaaaggactccagaattagtctcagagtgtggcatttctctataactcgctcggttacaacactatagccaaagattacattcataaagatatttttacaatataggtgtcttatttaatatgactccaatctaaatggtaatttttctaacctttcttaagtaattataaaatgtcaaaattataaacaattaaaaactaaagagaaatgaagacaatggatagcaacaaaagctaattgctaaatatgggggaaaaaagccaggcatggtggctcatgcttgtaatcccagcactttaaggcaggcgaatcacttgaggccggttctagaccagcctggccaacatggtgaaaccctgtctctactaaaaatacaaaaattatccgggggtggtggcgcatgcctgtagtcccggctactcgggaggctgaggcaggagaatcgcttgaacctgggaggtggaggttacagtgagcagagattgcaccactgtactccagtctgggcgacagagtgagactctgtcaaaaaaaaaaaaggaaaaaaagaaaagaaaaagaagatataatgtttctgcaatctcatttcagttccacttatgataatagatacattatgtaatttaagtcactaacacttgagggcaaaaaaacagaataaacacaaacgtgtgggataaggggatgctgaccccactgttagtgatcaccttggttggagacccaggttttatcatacagatgaagcctgcaggtagcaagtttcagagaaatagattgtaaatgtttcttatcagacttaaggtctatgctgatgttattgctgtaggggtagaatgaggcatgtccaaccccttcttccataatggcctgaactagattttcaggttaactctataatgctgagaggagggggtccattcagatagttgggaggcctttgaattttatttttggttatagtttctacattaaaaaaaagaaaaaaattaagggtcgcgtcaattctcaattgtcaacatttttaatgtattgtatgcaatatatgtcaacttttgtgttgagaaatgaagatcaaatcgtattcttttatcctgtgtatgtaataggctttgctgaccctagtttgatgggttttttcctttgtcctctctttcttggattgagtcctcacagcgcggcggactgcggcgtggtaggaactacaccacccagaatactgtgcgccgagcgtgccggggccttagaccaatcattgcccaggaaaggggcacctccgtaagtgcgcaatacgccagaatcttccggcgtctttccggtggtggtcgtttttgctgcctgcgagcgcgtccgcgggctgggcgtttccggctcgctgggtccgggccaggtaactggagccggaaaccggtggaggtggtgtccgcccgcagaggagcttgcctggtctcggtctgagcgtcgcccagcgatttgccaccgcacgcacgccggat

SEQ ID NO: 22678 - DNA, 2300 bp, Homo sapien
gaatcaacacaataactattcccatctcagcaggcagctctaagaactaaacagaaaatgttcacttaggcaatcagtggagtgcctagcacatgtaagtgcctgatgtgtttgggaactttattaatcccctgacaggcccagaggtaaatgtcgttatcacttccatttcacagtcagcaaaggctcagggagctttagaaatcaggcacagcctcacatttaaaaagcaaaagcagcatttgagcaccgctaaaacacctcaccaagctgccagagagcaggcaggtgggagtgaggggtgcttttagctacagccagcactgccaggatgggtgtggaactgcagccccgcagagacctgagaacaatgtctcagacaaagggaagtgcaagggcaaaggctgaaaatgggaaagagcttggcaagctcaggattccctggatgaatgcagtgagaaaggggacaatggaagaggagaaagaagatgcggtcaaaagggcaaaccaagtacagccttgcagaccatgctggtaggagggggtggatttattggaaatgtgatgagagtccctataagagaggcctattcaatcatcaaccatttattaagtacaataaatgtacttaagcctggctgttctgggtcttgggagagggaagcaacaggcactcacattccagggttggaaaaagatcctaaacaggcaactaaataaatgagtaaggcaatgtcagatggccttaaagattcagatgacaagaaaacagagcaaggagaccaaagagactctggtcagctttaaacggtgcaacagacgagacctctttaagcagcggacaccagagggagtcagaaataaagcaaaggagggagaggtggatgagaaattaacaactacgacaggagctgacagtaatctgggctatcatgaaagtaatcagagtgactgctagagagtaaccctgggcctcatgtgttatctccaaagggacactacatcctgcataccatcgccactgaacattttaatggactcgtttttcacctgtaactaaatgtcttaaacaggaaaatatactgttagttgcaacccagcgtcccttgccctaaactgaaagacaaattcctcagcctgccctaccaccttttctgccctggcatagcagcaaccgcagaaacgctcctcccacctctttcagccgctgcccttcgtgttgtagagacaggaggccaaggaggccagagggtcagactcctgctggggttgagtctccaaacctagcacaggcccagggagcagctccggaaacaacatcctgagcgacgtccccggaccgtgctgtgcactgagacggacacacacacatcacccagggagccgttcaagcttcctcaaccccgggggggggaagagtaaatatttctactttgcgcgcgcaaaaatgaaggacgaggacagtaacgggacttgttcaaggtcgcaggcccgagaaaggacatggttggaagagccacgaggaggactgcggtcgctcctctcacctgtgaggggttccgggaccctaaaagccctatttcataccacaacgccgcgcaccccagaaacggggacgctccccacgccaccgcgggcctgcattccggacccgggaccgcgcgacccccttctaggcctctaagaagcaacggcagggactgcactgaggacgaccctgaaacgccgtccttccgctcgtcgggcccgggacactgaggccgggtggccgcggggagccgagccagtctgctcacctgcgctgcgtccttcgtctccgccatccgaccgttggcaggacgaggccgcgtggggcagctcccacgggctcaaaaccctaccccgggtcctacaacggtgcggaggtgagccccagtcgccctaccatccttcccagcacagttctgagagcgcggaccaacacgccccaccacaaacgtccacgccagcgaggccggaagtcccgcccctgtgtcgcggtcgcctgccacgccttttcctgcgccggcccactgccttctaggtaatgtagtcttgtcccgtaagaggccaggcttggctctttttccttttttattatgcacaccatgtttctgtatatctcagatgatcttagcggagcaagtgtacacactggattgtaaatttttaaaacttcctattattcggatgcctcaacgtccctacaagcaggctgtgagcactcgcccaggcacccaggtaaacgagtttgataaagggggccctgccacgaggttccc

SEQ ID NO: 22679 - DNA, 2300 bp, Homo sapien
tctttcttgacacctacgttttggatgctacagagggtccctggggcatccagaaaagaggcaagcaggattatttgacatgttttgttacatgggattgccaaaatgatgtctaatcttcttcaggttatatttcagcaaatactattaatatgtgttccaaaactgcatgggatttagaaaactctaatgtgaaagtatacactatcaaccacaattaaggttgttatgttgttattgtaaaccacggagataaccaaattttttttgtcaatcatgtttttgactaaccaccctggacattttgtcatttacagacaattgttgtcttgttttaatcctcttcaaaatatggttcataatcagatgtaggaatactttaacaggtattcctaaatgcaggtttctgataactgaaaaacatacaggactcatgaaaagctaaaatgtttataaatatcaagcagaacaagagttaacagaataggctgaactaatagaaaaactgaaataatctttttgacttttgcttggaacattgctgatccttgttttgtttttcagagtcaaggaaacttcttttgagctagctacagcctttaacaattgagtaaggtttactcctgagaacaaaatttggaacatgtttgtttctctctgccttattggttctttaaggaccactgcaacatggtcttgggaattatacttcaagaagcctataaggttaaagggtgtttatactcacagtgatataggaatagcactgggtggttgcaggaggatggaaaaattcgaacaacaaataaaaacaagaactaggcaaagaaaccataggataacagaaaacccaaaataagagaaagaatggccaaaatcccagtcaggatgacatgtccatgactcttctgggcaaagccaaataagagagaaagggggcagtaaccaggtgggtccctgaatttccctccttttccagaatacctaataattattccactctctaattaaagaaacacccacaaaataggaatgctgtgtggtcacaggagaagggggaaaacatcaagctgttaaaattagctactccaacaagaagactgggctgatgagaccttaacaaacaggattggggctaggctgtcccatgacgctagatttgacccatttcctaccccagacctaattatacactcattgccacattaaatcacacacccaccagtgccaggccaatccaagcacgcccacatttagtataaaaatggttggcaccccaattctaagaaattcccaccttttcctagaaaaacctcatgattatcccaccccctaattagaagagcccataaaattagaaacccaaactccattgtgcatgacccgctctccctcgtacgtccgcatttccctcttctcttgggaaaagtacactcttctcaaaaatgtgtactttttcttcccaataaaagcttcttgcctttggcttcattttgactcatccctgcattctttctcacgatggtgtcacgaagctggactccggaagcgggcggggactcacggcccctggagaccttcctgagccctgggcaacaccagtccacacagaggaggcagacgtcccacagacggaaccccacgagcatgtcccgggaatggctccacgcgggaagcgggggtccagatccacgccagtcccagggacagtgcctggcgtcagggtggaggaggacgcagtaaccaggcgtaagattttactggtacatgggaatgtcactgggtcactcagaggaggcaagcggggaacctcgtggcagggccccctttatcaaactcgtttacctgggtgcctgggcgagtgctcacagcctgcttgtagggacgttgaggcatccgaataataggaagttttaaaaatttacaatccagtgtgtacacttgctccgctaagatcatctgagatatacagaaacatggtgtgcataataaaaaaggaaaaagagccaagcctggcctcttacgggacaagactacattacctagaaggcagtgggccggcgcaggaaaaggcgtggcaggcgaccgcgacacaggggcgggacttccggcctcgctggcgtggacgtttgtggtggggcgtgttggtccgcgctctcagaactgtgctgggaaggatggtagggcgactggggctcacctccgcaccgttgtaggacccggggtagggttttgagcccgtgggagctgccccacgcggcctcgtcctgccaacggtcggatggcggagacgaaggacg

SEQ ID NO: 22680 - DNA, 2300 bp, Homo sapien
gggattacaggcgtgagccaccatgcccggtgagttatgtttaattctacaatagattgttgttgactgtagtcaccttgttgtgctatcaaatactatgccttattccttctatctgactatatttttgcacccattaactatccccactttcccttccatttctgctatccttctcagcctctggtagccatccttctaagcttaatctccgggagttcaattgtttaaatttttagctcccacaaataagtgagaacatgtgaagtttgtctttctgtgcctggcttattttacttaacataatttcctccaatttcacccgtcttcttgcaattgatgggatctcattctttttttatggctaaatactactccattgtgtatatgcatcacattttctttatccatttatctatggacagttaggtagcttccaaatcttggctgttgtgaatagtgatgcaataaacatgggagtgcagatctctattagatatactgatttcttttctgggtggtgtaaactgtatcatatggtaattctatttttacttctgtggggaacctccaaactgttccccatagtggctttactaatttacactcccaccaacagcgtatgaagtttccctttcctctctgtcctggccagcattcattattccctgtcttttgcataaaagtcattttaactagagtgagatgatatctcattgtagttttgatttgcatttttatagtgatcaatgatgttaagcatgttttcatctacctgcttgccatttatctgtcttttaaaatttttagttttatgagtacatagtatgtatgtatatttatgggatacgtgagatattgtgatacaggcatacaatgtgtaataatcatatcagggtacacaagcatttatcatttctttgtgttacaaacattctagttataatactcttttagttgtttttaatgtacaataaattactgttgactgtagtctctctactgtgctatcaaatactagatcttattcattctaccctgtcttaaggaggccttggtagccatgctgaggttatggggtgctgcttccaaaaccaaaagtattatgggcagctggtatgaaggatcataggcttatggtctgtgagatcctgtatgtttaagaaagcccagtcttattgccagtaattactgttttaatggtgtatagcatgaggctgaaagagacagtttcctgcattggaagcttttactcaacaaatggccgttgtatgtggttcagagattccaagaggcatgagaagtgtaaaccaaaaataaaattcccagccccccaaccatctgaatgcatccttcctcttggccaagggcattccaaagttaatctgaaaaactagttcaggacgtgatgggaagtgagggtcagacttgccctcctccccttggaattcaggcacaactgaccagcattaacattaaaacagagattttaagacttcttgtagcaataagacagtgaattccagcctgattgtagtatagcattacatgacagatagcaggccctgaaaggaattgaagtattttactctaaactttatttatttgacatattttgaagaggccctgcaaaggtgtgtcttgtggaatctgcattttgctgagaatcccctttcctctccagggtttttttattttcatggtccaggaaagaattaagagtctggcacctttcaaagtctgataggaaacatttacaatctattccctctgaagcctgctgcgtgaaagcttcatctgcttaataagaaccttggtctctacaacctcttatcttaacccagacactcccttcagtgggtatgggactgcggaaatcggccagcggcccctttaaggagcagcaagtccctgtctcgctcttggtgtcgcgccttttcctagcgccctccgcgggccgcttagcccttgttccgggtgaatctcagggagggcaccggaaccctgggcttctgagaactacattacccataatgccgagcgccaagctgcaaagacgcggagccaatcaacgttcaggaacggacctgtctccgtttgttgcatacggtaaggcgggacttccggcaccgctccgagatggtaattttggtggttctctacctcggcccacgccgcctgagttagaaacgctgcctccggcacagagcgggggtcgccccgctgcgcatcagccggtgggtcgctggcgctggtggcagccgtgcctgggttcccgccccgggtcgcccgccgctccc

SEQ ID NO: 22681 - DNA, 2300 bp, Homo sapien
caggcaattccgctagttctatgcctagatggacacacatgcttgaagtttggggagccatgtttgatgtgatgtggcaactctgaaaggacagtgagggtgagggcaggtgttaggtggccattgtgggggctgctggcctctgggaccagagggtaatgaggtgcacaaccgtgtcacctagagggtgccagtgttaataaggaaaagggttgctgtccgacgcacacagaagccaatgccatggcaccaggtttttgagaaaagcaaacctttattgcaagtcgacaaacaagaagacaggagtccagctcaaatctgtctccccaatatggggtttggggcagcttttaaggattaggaaggacaggttggtaagcactggaagggtggattttgattggaaggacttcaaacaaatctattgatggcaaggcggggatggggttgttatcacccaacattcagagacaacagaccccttgctttcggaagtgtttcagcacttgggttccagccatagcctgatattttggtttcctgtggtgacagggtggagtctggtaggtgagacttcagctccgagtgttgggtcaatgttttcttttctcttttctttttatttatttatttatttacttatttatttattgagacagggtctggctccgttgcccaggctggagtgcagtggcataatcataactcactgtaaccgtgatctcctgggctcaagcgatactcccacctcagcatcctgagtagctaggattacaggtgcaccaccatactcgggtaattttttagtttttgtagagacggggtctggctatgttgcccaagtggtccttccacctcagcctcccaatgtgcttggattacaggtgtgagccaccgcgctgggcctgacattttcttttctgcacattctctagctgtgtaacttgcaactctttagctctgtgcctgcaaaataactggacattatgttaccaacagaggatggccagatgagactggtccagtggttaaacctgcaccttcatggaggccattatgagtatccctacaggccgagtctcagggtgcccccagaagcccataccagccgctgtaaggcagagcatggacttcccctcggggactaaatcccattcttgggctccagaggccttgttcctaccactgtacgccaccgcttggggtgccctgggaacccgcctacctccctactgccctgagggcggttggagatggtcccagcaggtgtgggagatgaggtaggagacgtcttcaacggggtccaaggctcatctggacccagttctcagccgaggggcggtggagagggcgtcagaaaacgcaggaacggctcctagacccaggaggggactcagggaagcagaggcgctttcctcggcggctctggggccttcccagctcgcccggcccccctggaggagacgtcccccggggtggagctacggagaaccccttcccatgggacgtctcggccccgcctcccgcctctgggtacagtcaaagggctcaggtcagagcaggagcagccgggggcgcggcccccacgtggcctcccgggacacgtgcccacagcgcgacacctaagtcgctcctttcacagaatagccttggccccggcacggcctcgaacgccttgaccccgcaagggaggggcacgaggctcctttgctcccgcaggagcgtcgaatacgtatggaatacgcgtcggtgtggatctggcctcagcttcctgagcctgaatcaatgcttctaatcacgtgggcgctcagccgcgacgggaccacagaaatcgaccagcggcctgtttaaggagcgacaaggcccagccctctcctgcattgtggcgacgccatttccctgcgcccccagcgcggccgcttggcttttgtttgaggtgacgctgggcggcagcatccttccctcagccctggggaccagcggggactacagaacccagaaggttttgtctccagccgcagggatgctgagccaatccgcgctgagaaaagggtcgtttccgctttgggaccaatgggtcggggagggacttccggtatcacttcagtggcggtcatttttgcagcgcttgggtgcatccagaccgtcagagctttgggagcgctttgtttggcgacagtcggaaggcgcgaggggaggggtcctcccgctgaacagtgggggttctaagggtcggcggcggcggggttgacggctttgcctaggtccctccgcccgtagctgtcgggtcccggccccgc

SEQ ID NO: 22682 - DNA, 2300 bp, Homo sapien
caacagagcaagactcttcctcaaaaaaaaaaaattaccattagacactcaaatatgcaggcaaaatgagtcctttgtggagtcactcagaagggctccccacttacctttctatatgaaatcatgctggagccacaccttctccctttccttttcagacaggacttaaattcagcaactgaagagctatctgctctatgtgtcttcagggtaaacatttccagagccaagccaaatgtacttatagacttatatatgactgcactaaaaaaagcaaagtaagtctatgttcagttcaattaattatgttcaatattctttttttttttctctctactgagatggagtctcactctgtcaccaggcaggagtgcagtggtgtgatctcggctcactgcaacctccacctcctgggttcaagcgcttctcctgcctcagcctcccaagtagctgggactacaggcgcacgccaccacacccagctaatttttgtatttttagtagagacagggcttcaccatgttggccaggctggtcttgatctcttgacctcatgagccacctgccttggcctcctaaagtgctgggattacaggcatgagccaccgcgcttggcctagccacaagattattaatagttgtgacgtataatgttttgtgtcgacttgcctgcattaagggctacccaaatagttgggaaaaccttagtacaggatatgtctgtgagaatgtttatggaagatattagcagttgagtctgtagacaatgtaaaggagatctggcctcatcagtgttaggggccaacatccaatgctttgagagccaagatagaacaaaaaggcagagaaagagcaagttactctcttcttgccctggatcatccaccttctgttttccaacattaaagttcttggatcttgggcctttggactctggaacatacaagaatgaccctcacccagttctcaggccttcagcctccaactgggaatttcaccataggctcccttggttttcaggccttcagatgcagactgaatgataccacccaccttcgtgtcttaccaggttgcaaaaggtatatcctgggacttcttagcctccataactggatgagccaagtcccataataaatcccctcttgtacatctatgtatcctattggttctgtgtttctctggagaatcctgactaatacaataggtttcagtaattttcatttcacaactgtttttctaagatgatctcaactccccatgcaagcactgtccctgcagtaacagtatcaatgatcaaaatttcccatcaaagagatgaaagctaggtgtcccaaacctttattctggtattctgatgtcccctttgcacaagtgctctgactgtgaacactacagacactgttctactttaaaatggcatatgctaagtggctcttctgtttagaaagttgctacaatcctaaaagaagcatatctaagaatatggaggaagaaatattatatgaatacaacactgttccttacagggctagacacactcaccgattacacaggcaggagaggcattttctgtgagacaaaattcctctttcgtcctccagcttcggtgcgatctaacggatgttttatcattcctgtcatggcgctatgtaaactctatttcccttattccttactgagcataatgaaactcacaaagctgactctaacgttctactttacataaatgtgtggagaaagaaggtaatgtttactaggctctcgccaagggtagaggcattttgtatctgaataactctgactacctaggtgactagttgtacacaataccctccaaaaatctctgtatggtaccttaaaaaagcagcgaagctcctcccttgtccaaggaggctggagacaccacctctcagccttcccctccacctttctccatagcaacggggtcattcctccctgaggtccaggagaagggcgacctctgccagcccaagaagcggtgagaactacattacccagaggcccgtgagccaggttcttggcgtggagccaatgaggctcaggggagggacatttccgctctgtccaacttgtcggagcggaacttccggcgtcctccctgtggcgggcactttggcttgtgtcagttccatccgcgggtgccggatctggacctaggtgctgacagcgagaaggcgcgaggagagtcgttttctcagctgcacagccggggcctgacggtcgccggcggtggtgacagctttgctcttgtctccgcccggatcgtccaccgctcccgg

SEQ ID NO: 22683 - DNA, 2300 bp, Homo sapien
catccacaaattggcctctcttggctatgtaatattacatatctttccagcacttctcaatgccttcaccttctcttttctccattatgcctgccacattctaacattccatataatttagcatttttttcatatttcctcctctttcttgagtacagcgtaagctattggggtctgtctcttgttttgtaaatgtcccatgcagttaagatagtgtctgaaatacagtaggtgttccttgaatatttcttagaactatgaataagcataatactacagcatccctgttcaccttaatattctgatagcactttctaaatgttttctttacttctccttccaggtattattgagtgttttcaagaatgaaaagaggcctggcatggtggctcacatctgtaatcccaactttttgggaggctgaggtgggaggatcccttgagcccaagagtttgaggctgcagcaagctatgatcgtgccactacactccagcctgtgcaacacagtgagatcctgtctccaaaattaaataaataaataaaattacattttggagactaaacgctgcttgtagtcatagttctaacacagctgtgtgctcagcttcatttgctcacttctcagaattcaatgtctcctgctcaaattttgctgtcatcttaaccgttttcacttatcacagatatgtttctccaggtccatttcgtcatgtatctgtgaataactacagaattattaactttgagtaatttggccgggcgcgggggctctcctgtaatcccagcactttgggaggctgaggcgggcagatcacgaggtcaggagatcgagaccatcctggctaacacggtgaaaccccatctctactaaaaatacaaaaagttagccgggcatggtggcaggcgcctgtaatcccagctactccggaggctgaggcaggagaatagtgtgaacctgggaggcggagcctgcagtgagctatggtcgcaccactgcactccagcctgggcgactgagcaagactccgtctcaaaaaaaaaaaacacaaaacaacttttgagtaatttaaacaattcacaaatgtttttgtctttctttccccatacactcgcccttttcttttttaaaaccataaataaatctcaattctcaattcagacactgtcggtgtaattgcaggtgaaatgagaatcacctcccagccaagaaatctgatcccaattttccaaatctttatttctgggttcagacaccacattttcagcccctgtcttggcatataaaagcatttataatggttcttcttttcagataagaaacatcaccaaaaggaaatagatatatctcaacttttgggctaggaactctcatttggataaaagaatatttctcctttggttggacattagtgaccatacaggcaggaaaggtgccttccttgaccaccttctctcgcctgtcttcctcctcatggttctctcaggtattttttttctgaggaaaccagaggaagagctctatattagtccacttgcctcagggagctccagcatccctccatagccactgtctggagaccattcttccactccatggccctgcctggggacaattctctgttaactctgacccaactgaggctcacaaaactgactcaaagcttccctctacagtacacatattttttaaatgaaggaaatttgactgaactatgagtggactcagagtgacattggatgttgtgtgtccatttggtggtgtggcttcagggaacatctgtaagaatatatcccaatatttcggggatccctgcagacctcactacacaagacctggttgagggtcctttaaaaggagcgaagccacgccctgacctcagagtctcagggcataatttctcagcgcccctcgcagtaccatttggcctttgcccagcgtgcaggggagttagccgtcaccacggccaagtgcacatgagaactgcattgcccagaaacctgtgcgccgcccggcggcggcactcttaggggcgtctccctgcggacggaagctctctgggcgggacttccggtatcttcctcgcggtggacatcttgtcggctcttaggtggaaccatcggagcagaagctcggggttgctgggcggttccgaggtgacggaagcgggagggtgcgggagaagtcgctgttcgctctgcggagtggctcgccagcgaagaccccgcctgcgcccccggggacggacgaccgcggtgccagggtcccgcgacctgggaccccctcgcggctccgggtggtc

SEQ ID NO: 22684 - DNA, 2300 bp, Homo sapien
ttatgtcatttttcactagtttctcagttgattacctgaaagtatgaatttttaaagcacaataggattcagcagtctcaggtaggaaaaaggtaacctggaaagatccctgcatgtgaatgcacacacagctttcagggatctgaggaaattcagcatgtgtaggatatagaggagatacatggtaggaggtgaagcaatatgtaatggttggttctgtaatataggcccagccaagaactctaacctttttcctaaaaacaatgacaagcccattgtgagatctaaccagatgtacaatagtagtcattccacttataaatttttgtagtaaatgtgtaaacaaatacattatatatttgataaaatcatttcacaacttttaattttattttattttactggtattaatttgtcctaaaggatcatttttattgtgaaacgtaaaatttgatctatctaatatatataaaatgtatatgtgtacatttaacaatgtgcatatatgtaccttaaaataatataaactttctgggcgacggagtgaggccctgtttaaaataatgataataatttgatattttatgcattaaaaacttttgtctgggcatggtgactcatgcttgtaatctcagcagtttgggaggctgaggcaagaagattgcatggccctaggagtttgagactagcctgggccctatagggagactccattcctacaataattttttttttaactagccgggtgtggtggtgtgcttgtagtgccagctactcaagaggctgaggtgggaggatcacttgagcccaggaagtggaggctgcaatgagctatgattgttccactgtactccagcctggacaacagagtgagaccctgtctcaaaaaaaaattaaatgttttgattatacaaggaaaatgaacattcatgtattaaagcttcatgttttatgaacaaaactgactttgcaggcaggagagcgttttctgggggcaccagaagcagggaacttcccttgtccgttggcttcagggctgcccactatccctccactatcttcccattgtagccctgtctggtgtcttttgtccctgacaaaacctacaaaaagtgactttaacacttcaggctgcatgcatttgaagagcaataagataacgttttttcgcttcccactaccagtggagatctgctggggtgggctgcatggaatctgaaatgatgtctaaatactgaagtgaacctctacactagagactgatatacagctgacccttaaacgacgcaggggtcagggataccgacccctgcggaattgaaaatgcttgtattacttttgactcccctaggtcttaactactaatagccaactgttgcccggaagccttatgaagttgcccggaagccttatgaattacataaactcccagtcgattaacacattttgtatgatatatgcatgatatatgcataatatatatgatatatgcattttgtatgatatatgcattatatatattttagtataagaactatacttgtactaaaacagaccagagaaagggtatcaggaaaattgtaagaggctcgttgacattacacccaattaaaaaaaggaaaataaaagaatacggaagggaaaatacatttactaatcattaagtggaagtggatcatcataaaggtcttcatccttgtgttcttcatgctgggcaagagaatgaggtcttgctgtctctggggcaagaggtcggggagctggaagaggcaggaaaaggagcacactcgaagtaacgtttattggggaaaaaaaacgcctacgtgtaaatggacccgcacagctcaaacctgtgttgttcaagtgtcaacctacttaagacctcaaacaccgaagcccctcagtcgccctggaaggcagcagacgcagcttcctagcgctcccagctgtctgcacacaaggcgccctccgtcgcagcctgggggagactacattacccagaaagccttgcgtcgagcggcagtactttgatccaatgaaaatccaagacaggggcatttccgtgtgggtctacccccgccccccccagggcgggacttgtggcgtcttcgcagcggtcattttggctgccctcccggaggtccgttctgtctgtcagccgctttggtacgctgcatcgggatcgaagtgacggaccgtgaaggcgcgagagtcaggtctgagggtcgggggcagagccgcccgcgaggccggcctggggatagcgatgctcgggttccccccgggtcgcccgcagctcc

SEQ ID NO: 22685 - DNA, 2300 bp, Homo sapien
agcaagactttgtctcgaaaaaaatagaaagttaacagttttgtttattttcctaccaggtttttattattattattattattctaattgaaatcactgtttcctacatactgaggcggattggctttgtcttcttggaaacaaaggttattttcctcactcacactggagcggggatactcaccagacacaagttgagatgatgctggatgtaaacgggtcatctatttttaccaaaggcagcactacctgccttcccaattgatcagaaaagcatttgatagttgtctttgtaatatccttatttgattaaattactatgtggatttcacatttatttttattgttttgtgcctgtttattctatgcctaagttggggtatcaccaggtcatttcctccaccatctgtgtttccccaaggataaatcctcctgctcatgcccttcactcctccattagcccattccctagaaagctgctggttttacacagtggctgtgtgtctttgccttcttaatgtagcattcagagtcccactctggagccaggtatcaaatcctagcccagccacttacaggctatgtagcactggccaaggtactgaacttctctgtgcctctgttattttgatgttaaaatggagttatttaggatctactttacaggactgttgtgatggaaatgggttaacatacagaaagcactgagaacagagtcaaatatgccctgactgcttaaaggttagttattatgatccctgatgctattactactcttactgatatcatcgtgcctcaggtctaactgctcccagagttacacaccagcatgtccaacagctggctgtatatctgaactcaaaaatccaataacctcctccaaacagaaattgccagcttttccccaaaccttttccttacagctccttacagagctcaaggaactccttgagactgcagaagcagacaggaaatgctttcaacccaccacaaattaacaactggcctccagtggtactcacattgtctacatttttcattgttttttttttgtttgttttttgtttgtttgtttgtttgtttttgagacagagtctcactctgtcgcccaggctggagagcagtggtgcgatcttggctcactgcaacctcggcctcccaggttcaagtgattctcctgcctcaggctcccgagtacttgggattacaggtgcctgccaccatgcctggctaatttttgtatttttttagtagagacgaggtttcatcatgttggccaggctggtctcaaactcctgacctcaggtgatccacccgcctcggcctcccaaagtgctgggattacaggcatgagccactgcgcccagcccatttttcattgttgtagcagagaagtatccctgcttccatcaagagccaattttcctgtcacagttggtttaatgacatagttggtgacaggacctaaaccaccagtggaaaattggctcttgatgggagcagggatacttctctgtatggagtatatgtggatgaaactccttggagaaatggactagtacacagtcttataatgtgaggattcagaacataattcctaatgtggggaagtcaagcagacatttcatcagtggagtaccaggagattcaaactctgtacccaacagtgatagggggacaatctaagccccaagaggctgcatgcctgatggagcagatgaaacacatggctgtaattagctcccaccccttcgatacgttctcaactccaccaaagcctcagcctgtatgagggtggaaagtggggagggagagtgcagggaagaaggcacagcttccaccacactaggtgaccaggcgcttctcaccattttaactcctccatctctctcaagcctcatgttaagtctatcaaacatcatatgctttctcaatataaaatatgcaccaatttctccctttccactgatataatcctagtctcaacccctgtcatctttttgatggattaggaatgccttctctgggtcccgggccccctctgtttcaccagcctggaattggcacaggagtcacagcattagccttgccctctgccacccttgtaattcataaatctctgaaaacttaaaagtttgagcaaaagtttgtcatgtttctatgagtaatttataataaaacttgatcagaatttgtgagactaacgtttgtctttatattttccttttttttttttttttttttgagacacagtctcgctctgtcgtccaggctggagtgccgtggcgtaatctcggctc

SEQ ID NO: 22686 - DNA, 2300 bp, Homo sapien
aaaaatacaaaaaaacaattagctaggtttggcgacatgcgcctgtaatcccagctatttgggaggctgagatgagaggatcacttgaacctgggaggcagaggttgcagtgagctgagaacagaccaccgcactccagcctgggtgacaggctcaaaaaaattttaaaaagatgtttattgtaacttctaagggaggaattaatatttttttttttttttgctggcaactttgattaatttaaacatacaaaaattagctgggcatggtggtgtatgcttgtaaccccagctactcaggaggctgaggcaggagaatcgcttgaacccgggaggcagaggttgcagtgagctgagatcgcgccactgcactccaccctgggagacagagcaagacactgtctcaagaacaaaaacaaaaaagcccaggcgcagtggctcacctgaggtcaggagttcaagaccagcctggccaacatggtaaaaccctcgctctactgaaaatacagaaattagccgggcatggtgctggcgcctgtagtgccagccacttgggaggctgaggcagaagaattgcttgaacctgggaggtggaacttgtggtgagccaagatcaagccattgcactctagcctgggcaacagagtgagactccgtctgggaaaaaaaaaaaaaaaaagaactgataaacaaattcacctgtgtagctgaattcaaagtcaacatgcaaaagtcaacatgtaaaactcatatgcccttccatacactaacaatgaaaaatctgaaaaggaaattaagaaaacaatatcatttgcaatagtaatgtatatggtcaaatgatctcaacaaggctaccaagaccactcaatggggaaacgatgatcttttcagcaaatgatgctgggaaaatgaaatattcacatgctaaggaatgaaggtgaacccttacctaacaccaaaaacacaaatgaactcaaaatggactaaaaacctaaacataagacccaaaactataaaacacttaaaagaaaatatagggtgaaagttttatgacattgaatttggccataatttcttggatttgacaccaaatacacatgtgacaaaagaaaaatagaccaattagacttcatgaaaattaaaactttagtatatcaaacaataacaaagtgaaagaggaacctatttaatgagaacaaaatacaggttgaatatccctgagccaaaaatctaaaatccaaaatgctccaaaatccaaattttttttttctttttttttttttggagacggagtctccccctgtcgcccaggctggagtgcaatggcgtgatctcgactcactgcaacctctgcctcccaggttcaaacgattctcctgcctcagcctcccaagtactgggattacaggcgctcgccaccatgcccggctaatttttgtatttttagtagagacagggtttcaccatgttggccaggctggtctcgaactcctgatcgcgtgatccacccaccttggcctcccaaagtgctgggattacaggcgtgaaccactgcgcccggcccgcccgactaatttttgtatttttagtagagatggggttccgccatgttggccagcctggtctcgaacttctgacctcaggtgatccgcccgcctcggccttctaaagtgctgggattacaggcgtgagccaccgcgcccaaccccctgaaataatatttgtttgcctctaggggcaccctgagcttcgtggagtctgaaataatgtctctaaacacttaagtgatcagttacggaaaacacttcccagaaatctgggaaaagcccctttaagaaggagtaaatacctccttctcccctagaggccgaagtcgccatttccctgcacggggcacagcacctcagaatacaagttcgcagaggtcaaagcagtggacacactccgaagagctccgtggagttttggaaactacattatccagagtgcagagcgcaaaacggcggcggagttgagccaatgacagcccaggatagcaacacttccgcgcacgcgcagcgcgacgggccggaacttccggcgtcctcctcgtggcggtcattttggcctctgtcctgtttgtccagcccgccagtttctgcagtggaggtcgcgactgagggacgggacagagaagtcgcgaaagtgggccagaggttctgcgacaccacctcgggtgagctgcgccaggcccgggatagggactgttgtgttcgaatgcccgccccggtcggccgccgctccccgcctagtccacggagc

SEQ ID NO: 22687 - DNA, 2300 bp, Homo sapien
gtaattccagcacctcgagaggccgaggtgggtggatcatgaggtcaggagttcaagactagcctggccaagatggtgaaaccctgtctctactaaaaatacaaaaaattagctaggcatggtggtgggcaactgtagtcccagctactcgggaggctgaggcaggagaatggcgtgaacctgggaggcggagcttgcagtgagccgagatcgcgccactgcactccaacctgggtgacagagcaagattccatctcaaaaaaaaaaaaaaaaaaaaaagtacattaccttgctgagaattaaaaagaaaattttatattcgagtgctatttattttgcggctccaaaactttataacaaagcagcagagatttctcggccaggctcggtggctcatgcctgtaatcccagcactttgggaagccgagatgcgtggatcacctgaggtcagtggttcgagaccagcctggccaacatggtgaaaccccgtctcttctaaaaatacaaaaattagctgggtgtcatggcgtgcgcctgtagtcccagctacttgggaggctgaggcaagataatcgcttgaacccaggaggtggagaggttgcagtgaaacaagactgcgtcattgcactccagcctgggcaataagagtgaaactccatctcaaaaaaaaagaaaaaaaaaaaagaagagatttctcacctatataccctgagtgtctctgcagccagcaaagcagatgaaggcctgctgggttggagccctaggccctccaatgctgaaatgccctgtgaagtctccatccatccaggcactctagtaacctgcttcttctgcctggaatttattctaaaaatacccacatggctcatttctcacttccttcaagtgcatttcaccggctttctgattaagaagtcccacctctcccctttgtctcttatcaaagtagcatttctttcattgttttttgagattgatgttagacttctagaaggaatatatctcagatatcaagtaagaattatgaaatggataaaagcgttgctcagtgaattggacacagttattgactggacacagtaattggacacaataattgactatgcaggcaaaagatgttttctgttggaatcagacagaattctacctttgtactactgtttcaaggtgatctaacatttctcttctatcttctagaagcactatcatgccactatctgaagtagtttttcacctgtccctgaccaaaagtgcacagactgacttcaatgcttcggagtgcatacatttgaaatgtaatatgatagaggctgggtacggtggcttacgcctgtaatcccagcactttgagaggccgaggcgggcagatcacctggggccaggaatttgggaccaccatagtgaaaccctgtctctactgaaaatacaaaaaattagcctggcgtggtggcgcgcgcctatagtcccagctacttggaaggttgaggcacgagaatcgattaacccgggaggcggaggttgcagtgatcccagatggcgccgctgcactccagcctgggggacagagggaaactttgtcttaaaaaaaaaaaaaaaggaataaacttatatggtaatgtttattagcttccctactagtggatatatttcgtgtctgaatggctctatggaatgatgtacatatttggattggcagccttagggagcgtctgataataattttagcctctgggagcctgctgaactttatgaagtttgaaataatattccccaaacacttgggtgatcagttgcagatggcacctctaatatgctgtctgattacgacccatttaagaaagggcgaagtccctccactgccctaggacttggataagccatttctcatcgcccagcgccctggagcttcgcttttactccaagaggttggtgcaaagggtccccggcacccacctcgggatctatgaaaactacattacctagaatgctctgcgttgaacgccacgctactaagccagtaagagctcagaaaaccgactttccttgagagtcacaaaaagaaaggacgggacttttgggggggcctcttcgtggcggccattttagcttctctgaggtgtgttcaccggatcagagatagcagagcgccgagttggggccacgaaggcgtgaggggagtcgtcgtccctcctgcacgaaagcgtctaagccttggcgacgccgccctgggggacccacgtcaggcctgggatagggaccgctgtccccgggtccctaccaatgtcgcccgtcgctcccgg

SEQ ID NO: 22688 - DNA, 2300 bp, Homo sapien
ttagttcttcttgttgaattgatccctttaccattatgtaatggccttctttgtctcttttgatctttgttggtttaaagtctgttttatccgagagtagtattgcaacccctgcctttttttgttttccatttgcttggtagatcttcctccatccctttattttgagcctatgtgtgtctctgcatgtgagatgggtttcctgaatacagcacacagatgggtcttgactgtttatccaatttgccagtctgtgccttttaattggagcattgagcccatttacatttaaggttagtattgttatgtgtgaatttgatcctgtcattatgatgttagctggttattttgctcattagttgatgcagtttcttcctagccttgatggtctttacaatttggcatgtttttgcagtggctggtaccagttgttcctttccatgtttagtgcttccttcaggagctcttttagggcaggcctggtggtgacaaaatctctcagcatttgcttgtctgtaaagtattttatttctccttcacttatgaagcttagtttggctggatatgaaattccgggttgaaaattcttttctttaagactgttgccttctttagaatatttatttagggtattgtgacaaagtcaaaaggtgatgcaggacaaaaatcattatatgcaggacatgtcctgtatgtataggaatcttggaaattttattagtgatgtctttcatgctactaacacatttgaaaaacacctactgagagctcgtatgtgttccttggatgtgtattttaacagtgaattatcaagacagcacaacttcactgttgatttttaccattctgatatcttctttacaattgctcagcattttcaggaaaaaagagtcacattttgttgacaaagtgtggtcaagatcacaacacaaccatatgcttaacttcattctttcacttatactttagtattcaggctcaaactttactgagatcttaactttgtccatctatcacagatatttccttagagcaatttctttcattatcttcaaataactacggaatcattattaatagctgtcaggatttttcccccggggataatctcacctcctaacacagacaccatacttacaatgacaatgacaggttaaatggtaattgcactgtgttttgctgtgatggagacatcactgattacccaggcaggaagagttttctgaagaaatctgtccactggtttcagggagactccacatcatccctcttccttcttccactccaaggccttgtttggaatattttctcttccgtctctgaccaaactgaagctcacaaaagttactgtaaagcttgagtgcacacatatttaaaaagcaacaaggtaatagttattagcttctagctgtgagtgtacgcaaagagacattgtggtgtggtgtatctatttagttttgcagctttggggaacatctgaaatgtctcaacatttctgcgatcggtgcatactacactccagggaatctaggtccaggccttttaagaggacagaagtcagccgggcaccatggctcactcctgtaatcccagcactttgggaggccgaagcaggcaaatcacaaagtcaggagttcgagaccagcctggccaacatggtgaaatcccgtactctgctaaaagtactaaaattagcctggcgtggtggcgggcccctgtagtcccaattacttgggaggctgaggcaggagaatcgcttgaacccgggaggcggaggttgcagtcagccgagatcgcgccactgcactgcagcctgggagacagagcgagactctgtctcaaaaaaaaaaaaaaaaaaaaaaaagaggacggaagtcctgtcagccctttgaaactcgggttacttttcccaaacaacttggccctcctacttcgagttttcccaagagcccaggccgagaatcccctgccttgaaggatagctcagtgggaaccacactctacccacaaacctatacgttgcatacccaatgagggcccaggagaggggtgtttcagtgcctgcggggggtgcgtgggcgggacttccggctcctccttgtagcggacattttgtttctgtcaggctgtccctggccggggttctgtaacgcttgtgtgggccgcaggtggaggtgttgggaaagcgcggaggagatgttgtccccagtgtcccgagacgcgtctgatgctctgcagggacggaagtgcctgcgtccccgatcgagacgcctgccgctcccggcagctgtccgcgccca

SEQ ID NO: 22689 - DNA, 2300 bp, Homo sapien
gaggaaaaagaaaagggggaaatcatgatactcatcccagcatggtggaaatctttagatggctattagatggaaattagatgaataaaataaaaactgatcggattaaaacaaaattctgaatataacactattgaaggttgggtggaccaaaggaagttcctgttgatcccccaacattaaagggccttaagctaagttgctgtagttcctgaagtttggataaattttaaaagccagaaggtaaagatataatgagaaaccccacctggaatgcctagggtgatggttagactggttaatcaaggtagcacttggaaaaaaggccaaagtctcctggcctgaaccctgggtggaaacctgaagacatctgcacaagaaagggtaaaatggtctggagagaagagtcctgggactacaacataaagtaaaagttgacaggactatgaaagttggaatgttaaacatgcttttttttttttaagttgtactaccaataaactgagttctttccctactttgtattggtcacaaaaaaaagaacacccaatttgggaaaaaaaaaaaaaaaggcaagcaagttttatttctgagcagaaatggagaatgagtaagctcttgctctaaatgcctcttctccctgaacatagaagacataggttttttaagaactgagcggctgggtacagtggctcatgcctttaatcccagcactttgggaggccgagacaggtggatcacctgaggttgagagttcgagaccagcctgaccaacatggagaaaccccgtctctactaaaaatacaaaattagccaggtatggtggctcatgcctgtaatcccatccataacattaatttattaggcaaaacactccttgccatggaaacagaaataaagaatagtcacaaaaaaaaaaaaagaaaagaaataaataaagtctgttttatctaatacaaaaaaaaaaaaatagccacttcccagcaataacatgaactcctggatttaagacacaaccaatatcaacaggtggagagcatcttctgcatacgtgccccacctttgaaaactgcagccatttatcactaccaaaatagcatttctttcattggtcttcctgtaagattgataaatcttagataaattaatccagaattaattgaatataagttggaatctcaagcgagggatactaagtggataaaagtgttgctcaatgtactggacactatgattgattttataggcaggagagttgtcttctgtgggaatcacagacagagattcagcatgtattcctgctttagggaacacaacatttctcctctatcttccttgtcttgtcctatctggattagttctctcttgtccctgacagactgagaaactgactctaatgcctcagagtgcattcatgtgaatttataacacaataatgtttatcagcctctgctgccagtaccgggattttgcgactgaaagactgttcaaaacgttatgataatttggatttttagtctttgggggcatcctaaataataagtttagcatcggagagctcgagttccccaaaatctaaaataatattttttcaaatacttgagtgatcagttacagacactaatctccaaaaatctcaatacgggttctaaggctaggtgagactatcctctaccctagaaggacatgcactttaaggacaggccgctgagatggagctgggcctttcctgcaagtaagtgaacgtgatggtagggtatacctgacagcatagtttgacaggggatatagactttcaaggagaaaatagacatgaaatagatacatgcagaagtatagtcaaattgagggaagatgacacttaggccagagtagtgtttattcaccactctgtgcaatcaagcgcctctgagaaggccttctttaccgccttggaactgtcttggaacctgaggaaactacataacccagaaatctctgcgtcgaatgacagcgcgtcagagccaatgagggctcaaaataaaggcgtttccgcggaaacagtataaaggtgggacttccggcgtcctctactagtggccattttgattggtgttgggtgtattttccagtgagagaccgcggagtgttgggtcgtgtagaagtgactgaacccagaaggtggagacgagacgttgtcccgactgcacagaggctgctctgcagctccttaaaggcgctaggcgtgacccgcaccaaggccgggatcgggaccaccgtgcccgggtacctgcactgctcgccccctcctttcgaccccg

SEQ ID NO: 22690 - DNA, 2300 bp, Homo sapien
ggagagaatagacatgaaatagatatatgcagaagtgtagtcaaattgagggaagatgacacttaggccagagtggtacttattcaccactctgtgcaatcaagatttgagatgactttggtagtgtgtggggggtttcattacacgtgctgaatatgctcagggagaaatatggtcatctgtgacagtaggtcttgggccttaaatggattaaaaacaggactttttttttttttgagacggtgtctcactctgtcgcccaggctggtgtactggtgtatagtggcgcaatcttggctcattacaacctccacctcccaggttcaagtgattctcctgcctcagcctcccggtagctgagaatacagttgcgtgccaccacgccccactaatttttttttgtatttttagtagagatgtgatttcaccatattggccaggctggtctcgaactcctgacctcatgatccacctgcctcagcctcccaaagtgctaggattacaggtgtgaaccaccatgcccatccaggactgctctttaaatggcaatggtattaggtgaatggaagttggtccgtgttgctgaagggtaagccattgtagcacagaagtggaataagaccatggatatctgaagttacatgtggttttgcatggatgtggagtaatgcaaggaggcattcatagaattattagggactaccactgctaatgggaaccatggtcattttgtgttattattggatcctgtttgaatatgtgaagcatattggatgctgtcagccatattgtggtataaagccaaaaatggaggcccaatatgatgtgtcaccttgacatctagtgatattggtatgacctcaaatgacctgagaaccaattcccttcccactaggctcttttagataataatcagcatggcctaataatccttttattagggagaccaggcagaattcctggttattatactttgtagtgagtttcaattttatccttacccacagtgttattcaaacaagccagttgcatcctcctaagggattcgggggtcatcacaccctcttcattttaaaagcttgcatatcatagtttctggttatgcactcttatccatagtgcaacccctatgtggtccttcatgatgagggatgtcctcttctagactttgagtgtatttgatttttaaacatatttatagcacctgtctagtgtttgatgtcatgtgtttggtcattaatataactgtaaggtgaaaatctcacccttactggtagaaggaagaagagggtataaacatactttaacttgtggggaggcagaggccaatgtgggaggcagtttagtgggggtggccatgggcatgtgtctgtgcagtctaaagaatgatgtgtattttggcctagcacagtggctcatgcctgtaatcccagcacattgggaggctgaggtgggtgaatcacttgagctcaggatttcgagactaacctgggcaacatagtgaaaccttctctctaccaaaaatacaaaaaaaaaaaaaaattagccggcacggtggcatgcacctgtatcccatctactcgggaggctaaggccagagaattactcgagcccagtagacagaggttgcagagagctgagattatgtcattgcactccagcctgggcaacaggagtgaaaccctatctcaaaaaaaaaaaaagcaaaaaaaaggaatgatgtgtatttagagaaggagtatgtctgatagactgaggatgctgcattgggatttacatgacttcatctctaccaggggcattggctatcaggaagttatggaccgctttatatcagcaccaaaacatagaaatctattgtttcacccacttcttgtggctgatggctgtacaccatgaccagtgagcccatgagaagatagtgacaccagtgggcctagtttctccttgtagtttaggaccttgggaggaggaagggcaagggtggataagtggatgagcatatggagtgtttgtggtttcatctgtcatcatcacggcagggcactgtgacctttgaagatgtggctgtgaacttttcccaggaggaatggagtctccttagtgaggctcagagatgcctttatcatgacgtgatgctggagaacctgacacttatatcttctctaggtaaggcactcacactcttctctatgacctcagctattgtctgtctgtccccatcttttttccccatggcaagactgttttcctcacttcaggagcctgggcacaggttcctctgttagttccctgggtag

SEQ ID NO: 22691 - DNA, 2300 bp, Homo sapien
tcactgcaacctccgcttcccaggttcacaccattctcctgcctcagcctcccgagtagctgggaccacaggcacatgctgccacacctggctaatttttttgtatttttagtagagacggggtttcaccgtgttagccaggatggtctcgatctcctgaccttgtgatccacccgcctcgggctcccggagctgggattacaggcgtgagccaccgtgcccggcctcatttgtttgttttgtagagatggtgtctcattatgttacccaggttggtcttgaactcctagggtcaagtagtccttccagtttggcctcccacagtgctgggattataggtgtgagccactgcacctggccaaaaattatctttgtagtatttagttttctttcctatgggctatcatgtgctgattttttctgaactgttggttggctattcttctctcttgtctttctcttattctttatgtcatccatgtctcatgtaaattccatgtatatctttgcagtgggactgagagttctcagtgatccagaagttgcagctaaacccaggctcagcatgatgggcccagagggaggccacctctgaggagtaacaccctggaggaagacataacattagggatttaggaaagtcatgctagaagctctctgatttcacaagtatttacctggcaacatgacgagccatatgctgtttctgtcttccccattcttgagagtttcagacttcaccgttctataccctgtcacttctcctctgatgccagcccaggactaatcttcacatctctggatcccacctggacccatttttctcacatttccatctgcagtggactccaatactggcatatcaattttgtattaggaagtgtgtacacattgctaagccatacctgaccaacagctgctttgttgtactcgtattttcttgtgacacacaaacaagtgtatctttgttgtactcgtattttcctgtgacacacaaacaagtgtatctaacagaggtattactccatggaaataattgcagaaacagaatgttgcctttaggttgaagataagtcttcttcatattactgggttagaatgattacagaatgtagggggccacatgatgtgaaggagccaacaatacatgcactacaggaagcagaggcaattccttcctgtgcaaacatctaaaggaccttcataaagcatgtgggtgctatataaaaggatatgtctaggcccaagtaaatataagtacaacaaagcagctgttgatcaggtatggcttagtaatacttcccttcggaagtaccttgcattttaccagcattttatttcttttaggttgttggtatggagcaaaagacgagacaccttctaagcagaccctttctatacaacaggagtccccactcaggacacattggacaggtgtatgtaccaagaaggtccacctctggggaatgtgtggccctctcctgggagatatcttacaccagggaacacaacacaatcagaaattgaatgggtttggggcatatgaaaaaaaattggatgacgatgcaaaccatcatcaagaccagaagcagcacattggagagaaatcgtacagaagcaatgccaagggaacatcttttgtaaagaactgtaaattccatatgtcacatgagccatttatctttcatgaggttgggaaagactttttgtccagcttgagattactccaacaagaggacattcacacttcagggaagtcaaactttgaaactaagcatgggataccccttcagggtggaaaaactcattacatctgtggagagtccacaataccgtttagcaacaaacactcacttgtccttcaccagagacttctccctagagaaggaccttatgtatgcagtgattctgggaaattcactagcaaaagtaatagttttaataatcatcagggagttcgcactggaaaaagaccttatcagtgtggacaatgtgatgaatcattttggtataaggcccacctcactgaacaccagagagttcacactggagaaagaccttatgagtgtggagaatgtgataaatcttttagtcataagcacagtcttgttgaccatcagcgagttcacactggagaaagaccttatgaatgtgacgaatgtgggaaatcttttagccataagcgcagccttgttcaccaccagcgagttcacactggagaaagaccttatcagtgtggagaatgtgggaaatcgtttaatcacaagtgcaacctcattcagcatcagcgagttcacact

SEQ ID NO: 22692 - DNA, 2300 bp, Homo sapien
cctcaggctccggagtagctgggactacaggcgcctgccaccacgcccagctaatttttttgtatttttagtagagacggggtttcatcatattagccaggatggtctcgatctcctgacctcgtgatccgcccgcctcggcctcccaaagtgctgggattacaggtgtgagccaccgcgcccagccaactttttttttaagtatagaaaattttacaggttgggcgcggtggcaggcgcctataatcccagctgctcggggggctgagacaggaaaatcacttgaacttggccaagaggcggaggttgcagtgagccgagatcgcagcaatgcactccagcctgggtgacagagcgagactccatctcaaaaaaaaaaaaaaaaaaagaggtggagatttcccagaactgaggttccctcccctttttagactatatagggtaacttccaaacattgccagggcattggtatactgtcatggcgctggcgggagttagtatgctaatgcattataattagcgtataatgagcagtgaggatgaccacaggtcactttcatcaccatcttggttttggtgcgttttagccagcttctttactgcatcctgttttatcagcagggtctttgtgacctgcatcttgtgccaacctcctatctcatcctgtgactaagaatgcctaacctgggaatgcagccgagtatttctcagccttactttatccagcccattttcaagatggagtcactctgattccaatgccactgacaatgataagcacttgccagcaaagaggtgaacgcatggatttaaggcacttgaaatatctcagtgtaaaagcaccctgtgcatgtagcaggacgagccgcagacaaaacctctcagacaccgagttgcagaaggaagggctttattcagctgggagcattggccagctactgtctcaaaatctgagctcccggagtgcacaatttctgtcccttttaagggctcacaacactaaagatttcacatgaaagggtcgtgattgatttgagcaagcaaggggtatgtgacaggggctgcatgcaccggtggtcagggaggaacagaacagggcagggagtttcacaatgttcttctatacaatctaaggaatctatgaataacatcggcttctaaatcataagttgatttttaactactgggtttaggccaggcgggcctaggcctggtttcgggcctggcgcggggttgcctgtctttggttttacttccttgttgtttttactgaatataaaacaatgtgagagggtctctctcttctctcatgcatacatactccatgtttgaacaccgcagccattgtcctgtaacataatagcatttgtctcattagctttttgatgttgatatcagatttctagaggaatctgtaggttaaagatataaataaaagtgttgctaatgggctgagaacggtggttcacgcctgtaatcctagcacttcggtagaccattgcaggcagatcacttgaggccagaagttcgagaccagcctggccaaaatgaggaaaccccgtctctactaaaaatacaaaaattagcagggtatggtggcacacgcctgtaatcccagctactcggatggttgaggcacgagaatcgcttgaacccgggaggcataggctgcagtgagccaagatcacaccactgcaccccagcctgagtgacagagagaactatgtcttaaaaaaaagacaaaaaaaaaaaaaaaaggaagaagccgagcatcacaaattctgaaataagaagtctccaaacacgcgggcaatcagttgcacacagtacccccagaaatgtgcgtatggcctcttctaagatgggagaccctcctccgcatctggacctggagtcgccatttcctagcgcccctcgcagtggagcttgcccctttcttcggaaagtcggaagaaagccaccttaagcgctgcccatgtctgggaactacattacccagaatccgccctgcgaaatggtaacgtggctgagccaatgaagcttcagagaagccgtgccattgccggggcacgtaaagtcaagccaggacttccggcgtcctagccgtggcagccattttggcctgtcaggtccatccggcgatgctgggtctggacgagctcgggaggagtggttgtggccattgcacacaggcggatctgaggttcggcgacgccgctggtcgcgacccgggacaggacaacgacaggaacaccgccgagcccgcgttccccccccgcccagagtcatggcggcagca

SEQ ID NO: 22693 - DNA, 2300 bp, Homo sapien
gggcctcagagaaatgttagcactgatgtctaagagatggaattatgctcagcacataattggaatggtcactctgatggttttggcttcaaaatgagattcttctttttttttttttttttttttttgaggtggagtctcactctgtcgctgtataaaatggaccaatcagcaggatgtgggtggggtcaaataagggaataaaagctggccagccagtagcagcaacccgcccaggtccccttccacactgtggaaactttgttctttcgctcttcgcaataaatcttgctgttgctcactctttgggcccgcactgcctttatgagctgtaacactcaccgcgaaggtctgccacttcactcctgaagccagcgagaccacgaacccaccagaaggaagaaactctagacacatctgaacacctgaaggaacaaactccagacataccatctttaagaactttaacactgcccgtgagggtctgcggcttcattcttgaagtcagcgagaccaagaacccaccggaaggaaccaattctggacacaatacctttcaaacaagggacctgtccaggcttccttctgatgaccaacccacctctaatgctggccagtctatttcacacaaagttctaagttttcctggtgtcatagtaacactgtaatctcccttaaatcctttcttgaaatgtttcaacatagttcctagtgaagtgggcttactttgtgcctgacccatgcttctttgagacaaaacaccacgctcacaccacacgcacaccacaaaacaaagaacaggtaaaaagggcacacatacacttttaccgtttacaccaaaccagaatcaaaatccaaatcagagtatccagaaatccaagccaggtcaaaaccaaaacgaaagtatcaagcaatccaaatcaagtcaaaaacaaaaaccaaagtgccggtacaggcatgccgtgggtgatcaggccacccttccactcaaatggagtgggcaagttccaaagactagtcttaccaagtttcagatgtccggactccaagtgcctgttccttcccagtgttcagccgctgcattgatcctctgtgggggcctgccacacgccactctggcgaggtgttccactggggcaattgcctacccgggagtgctctcaggttctgcgtccctcaagctggccagagtcccctgtagggatgctccacagggcaggcctaagctgcctaaggggctgcctcgactatctgttaatcacctggcttcccagtcagggaaccaagaaatgtagcaggacaagccgcagggctgtattcagcctggagctttggcaagactcacatctccaactaccaagctccccaagtgaggaattcctgtcccttttaagggcttacaactctaagggggtccacatgagaggtttgtgatcgattgagcaagcagggggtacacgactgggggctgcatgcagtggtaatcagaacggaacagaacaggacagggattttcacaatgcttttccatacaatgtctggaatccatagataacataaccggtttggtcaggggtcgatctttaaccaggcccagggttggcacctggctgtctgcctgtggatttcatttctgccttttagtttttacttgtttctttggaggcagaaattgggcataaaacaatatgagaggtggtctcctcccttaacagcacaaacgcttaattaacatttctttttcttttgagacaggttctgtcgcccaggctggagtgcagtggtgcagtcatagctcagtgcagcctggaccacctgggctcaagcagtcctgacacctcagcctctcaaaatttgggattacaggcgcgcgccaccgtgcgggtcaggaggcttccctgagggccccggaggtggagctgggcttttccttccgaagcgcccctgggaatctctctctttacggccttggaacctgggaaactacattacccagaaagctctgcgtcaaatgacagcacggcagagccagtgagagttcacattgaaggcgtttccgtgtgcgcaagtaaggtagaggcgggactcccggcgccctttagtagcgaccatttccattggcgttagggagtccttggagcgctgtgttgggaccgtggtggtgactggatccaggaggtcgagagtcgttcttctctttgcacagacgtgactctgcagctctttaacggcgcccgctgctctcaacccagcttaccccacgtggtcccatggcggcggccgcgctaaggttccccgtt

SEQ ID NO: 22694 - DNA, 2300 bp, Homo sapien
ttatatatataaaactgacttcaaattcctaaaaggagttgaatataagttagaatatcaagtaaaggatactaagtgggtaaaagtgtggtgcaattaattgaatgctacaattgatttgtgaaccccccaaatgtgagacaggtctcagttcatttgaaaaatttattttgccggccaggcgtagtggctgactcctgtaatcccagcattttgggaggccgaggcaggcggatcacgaggtcaagagattgagaccatcctggccaacaaggtgaaaccactaaaaatataataattagctgggcaaggtgctgcgcgcttgtaggcccagttactcgggaggctaaggcaggaaaatcgattgaacctgggagacggaggttgcagtgagccaagatctcgccactgcacttcagcctggcgactgagggagactcaatctaaaaaaaaaaaaaagtttattttgccaaaggtgaggatgcatgcccgtgacacagcttcaggaagtcctgacggcacgtgcccaaggtggttggggcacagattgtatgttttgttttgttttgtttgagacggagtcttgctctgtcgaccatgctggagtggagtagcgcgatctctgctcactgaaagctccgacttctgggctcatgccattctcctgcctcagcctctctagtagctgggactacaggcgcccaccaccaggatggctaatttttttttgtatttttaccagagacggggtttcaccctgttagccaggacggtctggatctcctgacctcatgatctgcccacctccgcctgccaaagtgctgggattacaggcctgagccaccgcgccggctggtttaatacattttaggggggcatgagacatcagtgaatatttgtaagaattacatcggttctgaccagaaaggcggggacaactccaagcagggaggggacttccaggtcacatgtaggtgagagacaaatagttggattctttttagtttctgataagtgtttccaaaggaggcaatcagactatgcacctatctcagtgaggagagcaatgactgaatagaatgggaggcaagtttgccctgagcagttcccagattgacttttccctttagcttagtaattttgaggccacaagattttcctttcacagattctatcagcaggagagttgttttctgtaggaatcacagagattcagctttgcactcctgctgtaggggagcacatccctaacttccttcatttgccttaggcactctaaggcttctgagggccttcagacacattataacacaacaacgcttatcagcttctgcttccagtgcaggtattttgcgactgaacgactgtttcaaacggtgtggtaatttggatttttagcctttgggagaatcctaaataatagtttcagcttgagctccctattatttaccttgagctccccgaaatctgaagtagtatttttccaaattcttgagtgattagttacagacactagtctccaggaatctcaatacggcttctaaggctaggtgagacccctcctctgccctagaaaggcgccttttttttttttttttttttttttttgagacagagtcttgctctgtcgcgcaggctggagggcagtggcgcgatcccagctcactgcaaggaggttcacgccattctcctccagcctcagcctccagagtagctgtgactataggcgcccgccaccacgcccagctaactttttttttttgaatttttagtagacacggggtttcaccgtgttagccaggatggtctcgatctcctgacctcgcgatccgcccgcctcagcctccaaaagtgctgggattactggcgtgagccaccgcgcccggcctcagggcgcgcttttaaggagagttcctgacatgacggtgggcttttcctgcagatgcacctctgggtagcgccctctttacagccttgaaacctggtcaactacattactcagaaagctctgcgttgaatgaatgccgtcagagccaatgagggctcggaaagaagcatttccgtgtgtgcgcctaatgtagggccgagacttccggggtcctcttgtagcggccacgttgatctgcgatacgcgtgtttgcccagtgagtggccccggactgctacgtgggactgcggtgaatgaacccagaaggtggagaggaaccgttctcggtgcacagaggcggctctgcagcccggtgagggcgcctgctgctcccgggcagtgctttccccaagtagtccgatggctgcggctg

SEQ ID NO: 22695 - DNA, 2300 bp, Homo sapien
ggttattaacctttgcattaatctctgcttccagtggaagaattttgcatcaaaggaccacttgaaatgataggtgaatttagatctatagcctttgggagcacctacactaactctgaaataatatttttccatacactagggtaatcagctacagctaataattgcaagaaatctcaataggagttttaaggaaaggcaggatgatcctctgcccagtagaaagatctgcaatcttttatttatttatttatttaattttatttttttccaatacagagtcttgctctgtcgcccaggctagagtgcagtggcacaatctcagctcaccgcaacctctgactcctgggttcaggagattctcctgcctcagcctcctgagtagctgggattatatgcatatgccatcatgccaagctaatttttgtatttttagtagaggcggggtttcaccatgttggccagactggacttgaactcctgacctcaggtgatccacccgcctcagcctcccaaagtgctgggattacaggcgtgagccacccacacccagcccttatttttattttttagagaagaggtcttgctctgttgcccaggctggagtgcagtggcacgatctcggcttaccgcagcttcaaactcctgagctcaagcgattctccctccttcaggctccctaaccctaaccccaaccttggggcagctgggaccactggcctgcctgacctcaccccactaatattttttattttttgcagagacaggatatggggaaaagaaatcagattgttactgtgtctatgtagaaaaggaagccataagaaactccattttgatctgtattaagaaaaattgttctgctttgagatgctgttaatctgtaactttagccccaaccctgtgctcacagaaacgtactgtattgaatcaaggtttaatggatttagggctgtgcagcatgtgccttgttaacaatatgtttgcaggcagtatgcttggtaaaagtcatcgccattctccattctctattaaccagggacacaatgcactgcggaaagctgcagggacctctgcctgagaaagcctgggtattgtccaaggtttcccccactgagacagcctgagatatggcctcatgggaaaggaaagaccttacatcccccagccggacacccttaaagggtctgtgctgaggaggaggagtgaaagagggaggcctctttgcagttgagataagagtaaggcttctgtctcctgctcattcctgggaatggaatgtcatggtgtaaagccaaccattcccattcgttgtattctgaaataggagaaaactaccctgtggctagaagcgagatatgctggcagcaatactgctctgttgctctttgctacactgagatgtttgtttaaagtgaaacataaatctggcctatgtgcacatccacgcacagtacctttcattgaacttattcatgatacagattcctttgctcacgtgtttccctgctgaccttctccccaccatcaccctgttgccctgccacactcccctcaccaagagagtaaaaataatgatcaataaatactgagggaactcagagaccggcgccggtgaaggtcctcacatgctgaatgtgccagtcccctgggcccactattctttctctatactttttctctgtgtctaatttcttttctcagtctctcgtctccacctgatgagagatacccataggtatggaggggcaggcccccttcaaacaggattttgctttgttgctcaggctaatctctaactcttggcctcaaatgatccttctgacttggcctcccaaactggtggaattacaggagctagccaccataccagtcagggcgcatatcttaaggatactcctgaggtggagctgggcttttcctgcagaaccgcctctgggaattgtgccctttaccctccttgttacctagggaactacattacccagaaaactccgcatggaatgacagagtggaagagccatgggggctcagaataaaggcatttcctgtgtgcacgtgacaatgggtccggacttccggcgccctctggtggcggccattttgattggtgttgggtttatttgtcggagaggctcctgagcgctaggtcggcactgcggtgactgaacccagaaggcggagaacagttgtcctctgctgcacagaggcgactctggagctctgtgacggcgccaagcgtgacccacccctgggccaggatagggaccgtcatgcccatatctcctggctggtcaccc

SEQ ID NO: 22696 - DNA, 2300 bp, Homo sapien
cttggcttgctcttgaattatttcctttatgaagccaggaaccctcctggattgagccccaattttgggatttgctagcatcactagagcaattttctgtgggaaccagtggccaactgccagcttcactacctgcttcagggtgtaccaacatccgtctatttccctgtcattagatctttattattattttatttttttgagacggagtctagctctgtcgccaggctggagtgcagtcatgcgatctcagctcattgcaacctctgcctccagagttcaggcgattctcctgcctcagcctcccgagtagctgggactacaggtgtctgccaccatgcccagcaatttttttaacatgggttttgctgtgttagccaggatggtcttgatctcctgacttcatgatctgtccacctcggcctcccaaagtgctgggattacaggcgtgagcaaccgtgcccggctaatttttttatttttattagagatggggtttcaccatattggtcaggctggtctcgaactcctgacctcatgatccacctgactcagcctcccaaagtgttgggattataggcatgagccactgcacccagcaatttatttattttttattttttattttttttgagacagagtctcactcctgttgcccaggctggagtgcaatggcatgatctcgactcatcgcaacctccacctccagggttcaagtaattctcctacctcagcctcccgagtagctggaattggaggcatgcagcaccatgcctggaaaattttgtactttcagtagagacacggtttctccatgttggccaggctggtctcgaactcccgacctcaggtgatccacctgccttggcctcccaaagtgctgggattacaggtgtgagccaccatgtctggcctttatttttattttttgtgggtatatagtagtgtatatatttgtagattacattagatattttgatgtagccatgccatatgtgataatcacatagggtaaatggggtctcagtcacctcaacatttatcctctgtattataaacagtccagttatactcttttagttatttttaaatatataattaaattattttgactatagccaccctgttatggtagcaaatattaggtcttattcatttttgctcactgttttttgtacccatcctgtcatcatgtcttatggagaattttcttttgttcccaacaaaacaatgaaactcgcaaaactgactgtaatgattcagtctacgtgaatttaaagagcaatcaatacttaatgttctcagctctgagtgcacacattgtaagtctgaatgatgccaatgatatggccacttagataagtaaagtttgggagcatctcaaatagtatttttattctctgggtgcaggatgagcttcctagagtctgatgtgatacctatttgatgcttttacaaagaatcaataatcttcctcctttgaggtgtgagcagggctttccagcagccctcagaatgtaacatggtctgcattcggtttgctcttggaggataccaccattgttggctgagagctctgggaagtactttacccagaaggcgctagttgcaaggcccaggatgagggatttctgggcatgcttgtcaggccagggagtactgggttgggactgagaaggcacaagaggagtagtcatctctgctcccaagtggcaggtctgaggctcataggcactggctggggtgatgcctgctccacccacagttgatggcagcagccacactgagggacctagctcaggtaaatgctgtgtattacaggcttcaccccagctagagtaatacaggtagaggaaccaataggtacaaaggcttggaggtgcatctgagccatgaacatttcagaacctggtaaccatgttgtgtcatggaaagtggggaactacattacccagaaagctctgctttaaacgacagccggtcagagccagtgagcactcggaaagaaggcatttccacgtgtgcacgtaacgtaaggccgagacttccggggtctctagtagcggctgtgtatcggcgatgcgggtgtttccccagtttgtggcccctgagtgctgggtgggaccgcggtgactgaacctagaaggtggagaggaatcgtcctcggtgcccagaggcggctctgcagccccgtgacggcgaccactgctcccgggccgtgcttccccaagtagtccgatggcagcggctgtgccgaggcgcccaactcaggtaattgtggtgccttctgtgccctcagg

SEQ ID NO: 22697 - DNA, 2300 bp, Homo sapien
cctcagcctcccaagtagctagtattacaggcacctgccaccacagcaggctaatttttgtattttcggtagagacagggtttcaccatgctgaccaggctagtcttgaactcctgaccgggtgatctgcctgcctcggcctcaaagtgctggaattgcaggcgtgagccactgtgcctggccagttgtaactatttatcactgtctggactcataaacattttgagatgactttgggagtgcctggggagtttcattcagcctggtgcatatgggcagtgaaaaatatgctcatctgtgatagtagatgtggtttggttcacaaatccaggggctgggctttaaacggcattaggtggacagaggagggttgctacagctgaggtctcagctggtgcagcacaaaagtgaaatagggccatggctatctgaagccatatgtggttctgtgtggctatggagtcattccaggagacgttcacaggatgatttgggattaccactgctattgtaaaccatggaaattctgtgttaatattggatgctatttgtatttgtcaagcatagtctggatgcttatccacattttggtataaggccagaattgaaggcccaatatgatgtgtcactttgacatcttgtgaaagtgggacaaccttaaaaggtgtgagtacaaatctcattcccactctgctctcttgaataatgtatcctagcctaacagcccgttttatcaaggtgataaggcagggttccaggttgttatattttgtggtgggtttcaattccatccctaccagcagagttatggaaacaaaccattgcatattcccaagggaatcatgggccgttataccctcttcatcttgtgaaataattttatttgtaggcgctgggtgtggtggctcacccctataatctcctcactttcagaggccaaggctggtggatcacttgagaccagaaattcaagaccagcctggccaacatggtgaaaccccgtctctactaaaaaaaaaaaatacaggccaggcatggtggctcaagcctggaatcccagcactttgggatgctgaggtgggtggatcaggaagtatggagatcgagaccatcctggctaacacagtgaaaccccgtctctactaaaaaaaaaaaaatacaaaaaattagccagctgtggtggtgggcacctgtagtcccagctactcgggaggctgaggcaggagaatggcctgaacctgggaggcagagcttgcactgagctgagatcatgctactgccctccagcctgggggacacagcaagactccgtctcaaaaaaaaaaaattagccgagtgtagtggtacatggctgtaatcccagctacttgggaggctgaggcacaagaatcacttgaacctgggaggcggaggctgcagtgagccatgattgtgttcctgcactccagcctgggtggcagagctagactatgtctcaaaaaaatcccccaaaaataaacttttacttctggggatgccagagaggggctgaaggttggggaaactctggtgggggtggccatgggcatgtgtctgtacagtataaagaatgatatatatttaatgagagcgaggttgtctgatggactcaggcagctgccttgggctttacgtgaccttggatatcgctgttcagaagggggtgtgggctttttttgttttttttttttttgagatggtgtctcgctctgttggccagggtggagtgcagtggtgtgatctcggctcactacaaaccccgcctcctgggttcacgccattctccggcctcagcctcccgagtagctgggactacaggtgcccaccaccatgcccggctaattttttgtatttttagtagagacagggtttcaccatgttaaccagcatagtctctatcccctgactgcaagatctgcccgaatcagtgtcccaaagtgctgggattacaggcgtgagccaccgcacccagcccagaagggagtggacctttttatgtcaggacctcagcatggatacctatttgtccacctacttcttgttgctgatggcatttgaccagcaggcccatgaagagacaaaggcaccagtggatgtggtttcaactccgtgttggggaccttgggaggaggatgggcaagggtgggtgtgtgggagaggtgggttgtggtacctcagcagaggggctgcttgtggtttcatctgtcactatcatagcagggcactgtgacctttgaagatgtggctgtgaacttttcccaggaggagtggtgtcttcttag

SEQ ID NO: 22698 - DNA, 2300 bp, Homo sapien
cactcataaggcccttctccagtgtgaacaagctgatggctaataaggctgcccttctgactaaaagatttcccgcactcctcacagggataagctgtctgtccagtgtggactcgctgatgttgaataaggctgctctttcgactataagatttcccacactctccacaatcataaggtccttttgcagtgtgatctcgctgatgattactgaagctgacatatctgctaaaggattttccacaatcactgcacacataacatccatctctagtgaaaagtttctggtgtggaataactgagtgtttggtgctgaaggcttttgtgcgttttccacaactgtaattagtttttccctcctgaaagggtgggccatgcatagtttcactgtctgtcttctctacagcagcttcttcttggcacaatcctgaactgggcagaacgtccttcccaaactcgcggaagacaaatggctcctgtgacaccctgagcttacgtttctttacaaacgatgcttctctgacactctttctgtagaatttctctccaatatgctgcttctggtgctgatgaaggtatgcagtgtcatccaagttttttccacatgctccactcctgttcagcttctgcttgtgatgagtttcctggtggtcagcaaagtgaaaaacatcctccaagatgaggccacacatttcacaggggtgagccttcttaggagaaacacctgccctaggagtcctgctctgagactctctttgtacagaaattctctgcttacaaggtgcctcctcatcttttgatccacaccaacaacctgaaagcaagaaaatgctggtcaagtgcaaagtacctccggcgggaaggcacagcccacccacaagtacgtctcacaaattgaggaattaatctatagaaatatttgcaggaacacaatgttggcttcaagttgaagatggggctgctggctgggcatggtggctcacacctgtaatcccagcactttgggaggctgaggcgggtggatcacctgaggtcagaagttcaagaccagcatgaacaacatggtgaaaccccatctctactaaaaatacaaaaattagctggatgtggttgtggacacctgtaatcccagctactcgggaggctaaagcaggagaatcatttgaacccagaaggcagaggtttgtagtgagcagtgattacgccactgcaccccagcctggacaacagagtgagactcaatcacaaaaaaaaaaaaaaaaaaaaagatggggcttcttagaattcctgggctataaaggtcacagaatccaggaggcttcatgatgtaaagagcacaagcatatatgcaacacagggagtagaggcagggtctacagctccttcctctacaaacaagttgtgtacaggaccttatctcctgatgacatgtgagtgctatatagaagaatatgggccgggcacggtggctcactcctgtaatcccagcactttgcaaggccgaggcgggcagatcacctgacgtcaggagttcgagaccagcctggctaatatagtgaaaccctgtatctactaaaaatacaaaaagtcagtcaggcatggtggcatgtgcctgtaatcccagctacttgggaggctgaggcaggagaatcgcttgaacccaggaggcagaggttacactgagccgagatcataccattgcactccagcttgggcaacaagagcaaaactctctctcaaaaatatacatatacacacacacatatatatatatacacatacacacatatatatacatctatatatatatagaaacatgtgaagaccaagaaaacatgagtacaacacagcaggggtggtcatagatggtttaaccatgggcatacacttcctaatacgtaatcaatacaccaatatcagagacaactgcagatgaaagcaaaagaaaaatgggtgagatgtggagtccagaaatgtgagtattagtgctggggtggatatcactgcagaaatgaaaaggtacagaactaacacatgtgaaactctcaacaatggggagaaaaagacaaatagtgtgtgcctactcatattgccccaaaaatacttggcaaatgtaaatggtttctggtatgatttggataaacccctgaagtcatgccctcccccagcatggcactcctgagggacaggctccctttgagcctatcgtgatgagcctgaattgaaccacatcttgtcaaacatggaggactctccatctcacacccagtacataggacccgacgatgtaactatgaaag

SEQ ID NO: 22699 - DNA, 2300 bp, Homo sapien
aagcatcgtttgtaaagaaacgtaagctcagggtgtcacaggagccatttgtcttccgcgagtttgggaaggacgttctgcccagttcaggattgtgccaagaagaagctgctgtagagaagacagacagtgaaactatgcatggcccaccctttcaggagggaaaaactaattacagttgtggaaaacgcacaaaagccttcagcaccaaacactcagttattccacaccagaaacttttcactagagatggatgttatgtgtgcagtgattgtggaaaatcctttagcagatatgtcagcttcagtaatcatcagcgagatcacactgcaaaaggaccttatgattgtggagagtgtgggaaatcttatagtcgaaagagcagccttattcaacatcagcgagtccacactggacagacagcttatccctgtgaggagtgcgggaaatcttttagtcagaagggcagccttattagccatcagcttgttcacactggagaagggccttatgagtgtagagaatgtgggaaatcttttggtcaaaagggtaacctcattcaacatcagcaaggtcacactggagagagagcttatcactgtggggaatgtgggaaatcttttcgtcagaagttctgctttattaaccatcagcgtgttcacactggagaaaggccttacaagtgtggagaatgtgggaaatcttttggtcaaaagggcaacctcgttcaccatcagcgaggtcatactggagaaaggccctatgagtgcaaggaatgtgggaaatcatttaggtacagatcccacctcactgaacaccagagacttcacactggggaaagaccttacaattgtagggaatgtgggaaattatttaacaggaagtatcatcttctggttcatgagagagttcacactggagaaaggccatatgcgtgtgaggtatgtgggaaattatttggcaataagcacagcgtgactatacatcagaggattcacactggagaaaggccgtatgaatgcagtgaatgtgggaaatcatttctttccagctctgcgcttcatgttcataaaagagttcattctggacaaaagccttataagtgcagtgaatgtggaaaatccttttctgaatgttccagtctcattaaacacaggagaattcacactggagaaaggccttatgaatgcaccaaatgtggaaaaacatttcagcgaagctctaccctccttcatcatcagagttcacacaggagaaaggccttatgagtgcagtgaatatgggaaatcgtttgctgaagcatcccgtctcgttaaacacaggagagttcatactggagaaaggccttatgagtgctgtcaatgtggaaaacatcagaatgtctgctgtcctcggtcttaagcgacttcgtgttgagatggagtcttgttctgtcacccaggctggagtgcagtggtgcagtcttggctcgctgcaacttgggcctcctgggttcatgcaatcctcctacctcagcctcctgagtagctgggattatgagtacacaccaccacgcccagctaatttttgtgtttttagtggagatggggttttaccatgttggccaggctggtctcaaactcctgacctcaagtgatccacccaccttgactcccaaagtgctgaaattacaggcatgagcctctgcacctggccttcattcttttcgtattgcttagaatatgacatgctgaaccaggcatggtggctcatgcttgtaaacctgatgctttgggaggacaaggtggttcattggaggccaggagttagagatcagcctgggcaacatagccagacctcctctctacaaaaagaaaaaagaatgacatgcttcttgtttttgtctgttataaatgaaactgctatatttgaatgcagttgttcatgtaggtatgtttcactatggtaatatggtggtgtgcagtgcctgagtcacgtgatagattaaagtacaactcttttttgagacagagtctcactctgtcacccaggcgggagttaggtggcatgatttcggctcactgcaacctctgcctcccaagttcaactgattcttctgcctcagcctcccgagtagcagggattaccggtgtgcaccaccatgcctggataacttttttttttatttctattagcaatggggtttcaccatgctggccaggcttgttatgaactgacctcaagtgatctgcctgcctcagcttctcaggtgtgacctactgtgcttggcctaatgtacaactttttaagcaatgccaaac

SEQ ID NO: 22700 - DNA, 2300 bp, Homo sapien
gcaataagcacagcgtgactatacatcagaggattcacactggagaaaggccgtatgaatgcagtgaatgtgggaaatcatttctttccagctctgcgcttcatgttcataaaagagttcattctggacaaaagccttataagtgcagtgaatgtggaaaatccttttctgaatgttccagtctcattaaacacaggagaattcacactggagaaaggccttatgaatgcaccaaatgtggaaaaacatttcagcgaagctctaccctccttcatcatcagagttcacacaggagaaaggccttatgagtgcagtgaatatgggaaatcgtttgctgaagcatcccgtctcgttaaacacaggagagttcatactggagaaaggccttatgagtgctgtcaatgtggaaaacatcagaatgtctgctgtcctcggtcttaagcgacttcgtgttgagatggagtcttgttctgtcacccaggctggagtgcagtggtgcagtcttggctcgctgcaacttgggcctcctgggttcatgcaatcctcctacctcagcctcctgagtagctgggattatgagtacacaccaccacgcccagctaatttttgtgtttttagtggagatggggttttaccatgttggccaggctggtctcaaactcctgacctcaagtgatccacccaccttgactcccaaagtgctgaaattacaggcatgagcctctgcacctggccttcattcttttcgtattgcttagaatatgacatgctgaaccaggcatggtggctcatgcttgtaaacctgatgctttgggaggacaaggtggttcattggaggccaggagttagagatcagcctgggcaacatagccagacctcctctctacaaaaagaaaaaagaatgacatgcttcttgtttttgtctgttataaatgaaactgctatatttgaatgcagttgttcatgtaggtatgtttcactatggtaatatggtggtgtgcagtgcctgagtcacgtgatagattaaagtacaactcttttttgagacagagtctcactctgtcacccaggcgggagttaggtggcatgatttcggctcactgcaacctctgcctcccaagttcaactgattcttctgcctcagcctcccgagtagcagggattaccggtgtgcaccaccatgcctggataacttttttttttatttctattagcaatggggtttcaccatgctggccaggcttgttatgaactgacctcaagtgatctgcctgcctcagcttctcaggtgtgacctactgtgcttggcctaatgtacaactttttaagcaatgccaaactatgacttaagaatgaaattattgctcatttgtatatctatctaccatcagtgtccaagaatttctgttctatcttaccaagagggagtatggttagtatttgaaattgtttattattttaataagtggttataacttttgagtcagtggtttatgttttgcattttttttgttttgagacaaagtctcgctctgtctcccaggctagagtaccgtggcacaatctcagctcattgcaacctctgcttcctgggctcaagcactctgcccacctcagcctccagagtagctggaaatacaggtatgcaccaccacaactggataacttttgtattttctgtagagagggttttacctttttgcccagtctgatcgcgaactcctgggctcaggcgatccacttgcctaggctccaaaagtgcttggtctacaggggtgaggcaccctgcctggcctcacctgtaggcttgttttttaaaatgaattttatctatttcccatttcattaatatatttaaaaataatgaaataacaaagacgtatgttggacttcattcattcttcagtgatgtcactttgctgcaaggaatatttggttttcttttttttttttttttccagatggagtctagctctgtctcctaagctacagtgaagtggcatgatctcggcccactgcaacctccacctcctgtgttcaagcgattctgcctcagcctcctgagtagctgggactacaggcatgtgccattatacctggctaattttatttatttattttagtagagatggggtttcaccatgttacccaggctgctctctaccttctgagctcaagtgatccacctgcctcggcctcccaaagtgctgggattacaggtgtcagccactgtacctggctgaatacttggttttcagtaccacaagaactatgagctggttatccacttcatgtggaat

SEQ ID NO: 22701 - DNA, 2300 bp, Homo sapien
cctgtcccgtttagtgtaacaaaagaaagttaagaaatgtggataaaagattgtaagttagaaatggcaagataatcagctatatgaagaatcttggccaggtgtggtggctgaggcctgtaatcccaccactttgggaggctgaggtgggcggatcacaaggtcaggagttcaagaccaccctggccaatattgtgaattcctgtctctactaaaaatacaaaaattagtcgggcatggtggcgggtgcctgtagtcccagctactcgggaggctgaggccagaaaatcggttgaacctgggaggtggaaggtgcactgagccaatatcacaccagtgcactccaacctggtgacagagagacacatcatctcaaaaaaaaaaaaaaaactcaatccataaatgttatactttataactttataacagcatgttatatgggcttagatattatccctaaatttttttttttttttttttttttgagacagagtctcactctgtcacccaggctgaagtgcaatggcatggtctcggctcactgcaacctccgcctcccaggttcaagtgattctcttgcctcagcctcccgagtagctgggcctataggttccctccaccacgcccagctaatttttgtatttttagtagagatgggctttcactacgttagccaggctggtctcaaactcctgacctcatgatccacccccctcggcctcctaaagtgctgggattacaggcatctgccaccgcactcggcttatccctagaaatcctatgatagcatgatgtataggcacctaaaggcatggcacttgagaaatgtgaataagattgtaagttacaaatagcaaggtacagtcagatgttaacagtctcagcccctaaatgtcaccttgtattacagcatgttatataagcacatacaggcacatacatgaaatagtgatacttcattctcagtaatatcttcatccttctcactggaaagatctttgatgatttttaatcaacataggagtttcaatgatatctagaagtttaaaagggctcgttcaaacaaattatgaccacacacactgaagagtatgtttgtctcttgtggtgtaaatttttttttattacaccaaattatgttcacacaaaacctttgtaatcagggggaattaaagagccttcctggaaaatggaggttgcaatcagccgagatggtgccatcgcactctagcctggggaatagagtgagatcctgcctcaaaaaaaacaaaaaaattctttattttctccataaactacagtttatataagcaaaagtttcagtactaagcaattttagtctctgcagtctcttgtcttgaattaatacaacttttgttaattctcttatgaagttaatcttcctgcttgtatgtgaattaaatatatgtcaaactttttttgtacaaaagattcatacctctttcctgtttgaaattattttactgtgtttcatcaatctaatgtttatttttattacaccagtaatttcctcattgtgttgaatcttacagtggcttataaatctacatgtacctagaaatgtttagccagtccatgtatatttgatgtggcacattttttcctttgaatcacatactctaagagaagtaacttcctcttgctaacctctactttccctaagtgttgaattaatcctctttagatgattataattctcttttcaatagctagaaagaatctataaggaactttcctggctgggtgtggtggctcatgcctgtaatcccagcacttcaggaggccgaggtgggtggatcacgaggtcaggagttccagaccagcctgaccaacatggttaaaccatgtctttactaaaaatgcaaaaattagcacctgtaatcccagctactcaggaggctgaggcatagaattgcttgaacctggcaggcagaggttgcagtgagttaagatcgtggcactgcactacagcatgggcaacagagcaagactctgtctcaaaaaaaaaaaaaagaaatcacagtccatgtctgaggggtgtacattgcttatcaatttggagagaaaataatagataatgtaatacaatgttaaaatagattaaaaattgagatagaaaaactgctcaatttatgcttcacataaaattgaaaattaaatcaagcctacacataaaggcattttttatatatatacatatatgtgtgtgtgtgtgtatatgtacacacatatatacgtatatatgtgtgtacatatacacacacacacacatacttttt

SEQ ID NO: 22702 - DNA, 2300 bp, Homo sapien
gggacagactttatgagtgtggagagtgtgggaaatcttttagtcataaaggcaccctcattctacatcagcgagttcaccctagagaaagatcttatgggtgtggagaatgtgggaaatcttttagttcaatcgggcaccttaggagccatcagcgcgttcatactggagagaggccttatgagtgtggagaatgtgggaaatcttttagtcataagcgcagccttgttcaccatcagcgcatgcacactggagaaagaccttacaagtgtggagactgtgggaaatcttttaatgaaaaaggacaccttaggaatcatcagcgagttcacactacagaaagaccttttaagtgtggggaatgtgggaaatgttttagtcacaagggtaacctcattctacaccagcatggccatactggagaaagaccttatgtatgtagggaatgtggaaaattatttaagaagaagtctcacctccttgtacaccagagaattcacaatggagaaaagccatatgcttgtgaagcttgtcagaaattttttagaaacaagtaccaactcattgcacatcagagagttcacactggagaaaggccttatgaatgcaatgattgtggaaaatcatttacccacagctctacattctgtgttcataagcgaattcacactggagaaaagccttatgagtgcagtgaatgtggaaaatctttcgctgaaagctccagtttcacaaaacacaaaagagttcacactggagaaaagccttatgagtgcagtgaatgtggaaaatcttttgctgaaagctccagtctcactaaacacaagagagttcacactggagaaaagccttataaatgtgagaaatgtgggaaattatttaacaagaagtctcacctccttgtacaccagagttcacactggagaaaagccatatgagtgtgaggattgtcagaaagtttttagcaagaaggaccacctcattgcacaccagagagttcacactggagaaaggccatatgaatgcagtgattgtgggaagtcatctacccacagctctgcattctgtgttcataagagagttcacactggtcacaccaccttatgagtgcagtgaatgtgggaaatcctttgctgaaactttcagtctcattaaacacaggagagttcacactggagtaaggtcttgtgattgcagcaaatgtgggaaaaaagttacctgaaggtcttttctccttgaatatcagagagttcacactagacaaataaaatacatttgggcaattttgtagccacacctctttgctccttcaagatcagagttaacactggatcagggccttaccagtgtgacatgtgagatatttatgtagaaatctagcttcataacacacaggagacttcccactgcagaaatgccttttgaatgtaatgaatgcaagaaagccttcagcctttttattggagcctcaaacattgacatgagaaaaacaccatagatgtatatggaatgttatttctttttcaatgtaaccctttgagagtgccacctacctagattgaatgtcatttattgagcatctgcaaaagttccaagtgtgtggcagctacagtgcatttttcactatacccaggtaccttgctagattttttttgagacaggttgtcactgtgtcgctcaggatggcgtgcagtggtgtgttcacatttcactgcacccttgatctgggcttaagtgattctgttgcctcggcctcctgagtagctgaaaccacaggcatgcactaccatgctccactaatttttttaagttttggagagacagggtctcaccatgttgcccaggctggtcttaaactcctggctcaagcgatccttccaccttggcctccaaacatgctgggattacaggtgtgagttactgtgcctggccttttttttttttttttttaacttttaatttctgatcgagtcacagaaggatttgttgagtagcttcagcacttcttcctttgtcatttttttctgtctgataagtcatgccatggacgttacccatttttatcccagaggcctcttacgttgacttgaaaagacggactatgtctttcagagatcttgtgggtatcacatcaatcttgacaaattttctaccctccaagtcatgatcctaagaacagcttgcctcccatttctccggtttgtgctattatgaaggccttattgtttcagccttcttcaatcttgagggttgttgtcactgtatgggtggttcagaaataagtaggtcctgttactatg

SEQ ID NO: 22703 - DNA, 2300 bp, Homo sapien
tatggcctgtatcttgtgctgacctcctatctcatcctgtgacttagaatgtcttcactgtctgggaatgcagctcagcctcattttatccaacccctattcaagacggagttgctctgttaaacacttctgacagctgtggtttcttcccacaaagaggttgcagatggggttaggttcttgttctgccagcttggctccttcccaattcctgttaacttactgatttattagggccccatagattagaaattatcatttaggagtcatgcagccaggggccacaagactgtaaacatccccagttgttcctagggatggtatcaccattgcaaaagctaagattggtgctggagatatttttcagaccctgaacttgatggatctgatggcaccactcagatgggtaaactggcttatctggtcttgtgcctccctctcccccagaacccactcagcacaagagaacaactttgactccctatgatttcatctccaacccaaccaatcagcattccccaattcatggccccctatctaccaaattatccttaaaaaaccccagtctcaggaggcggaggttgcagtgagctgagatcgtgacattgcacttcagcctgggcaacaggagcaaaattctgtctcagaaaacaaacaaacaaataaacaacaacaacaacaaaaaaccccagtctcgcaattttcagggagactgatttgagtaatactagtaagactccagtatgctgttcatccaactctgtgtgaataaaactctttttcttttgcaatttccctgtcctgataaattggctttatctgggcagtaggaaaaatgaaccctctgggtgtttacacgttcattttaacaatacaataatggttattaatctttgcattaatctttgcttccagtggaagaattttgcatctgaaggaccatctgaaatgataggtgaatttggatctgtagcctttgggaacatctacactaactctgaaataatatttttccatacactagggtaatcagttacagccaataaccccaagaaatctcaatgtgagttctaaggagaggcaggatgatcctctgcctaggagaaagatctgcaatcttttatttatttttttatttttatttttatttttttttccaacatggagtcttgctgtgtcacccaggctggagtgcagtggcaggatctcactcaccgcaacctctgactcccatgtacaagagattctcctgcctcggcctccccagtagctgggattacaggcgcatgtcaccatgtgggttaatttttgtatttttagtagaggcggggtttcaccatgttggccaggccagtcttgaactcctgacctcaggtgttccacctgcctcggcctcccaaagtgctgggattacgggcgtgagccgcccgcacctggcccttatttttattttttagataagaggtctcgttctgttgcccaggctggaatgcagtggtacgatctcggcttacagcagcttcgaactcctgagctcaagcgattctccctcctcaggctccctaaccctaaccccaaccttagggcagctgggaccacaggcccgcccgaccacactccgctaatattttttattttttgtagagacaggattttgctttgttgctcaggctaatttctaactcctgacctcaaatgatccttgtgacttggcctcccaaactggtggaattacaggcgggagccaccataccagtcaggacgcacatcttaaggatactcccgaggtgaagctgggcttttcctgcagaagcgcctctgggaattgcgccctttaccctccttgttgcctagggaactacattacccagaaaactcagcctcgaatgatagcgtagaagacctctgagggctcagaataaaggcgtttcctgtgtgcacgtgacaatgggtccggacttccggcgccctctggtggcggccattttgattggtgttggatttatttgtaggagaggctcctgagcgctaggtccgcactgtggtgactgaacccagaagtcggggagcagttgtcctccgctgcacagaggctactctggagctctgtgacggcgcccagcgtgacccactcctgggccaggatacggaccgtcgtgcccatatctcctggctggtcgccctatcctcccgactctgcttaaaaccacgtggttcgatggctgccgcggctacgctgaggctctccgctcaggtaattgtggggccttctgtgtcctcaggtcacctcatcgtcaccc

SEQ ID NO: 22704 - DNA, 2300 bp, Homo sapien
cccaaagtgctgggattccaggggtgagccaccatgcctggcatggctgcccatttttatggttatttcttgatttttttttttttttgaggcggagtctcactctgtcacccaggctggagtgcagtggtgcaatctcggctcactgcaagctccacctcccgggttcacgccgttcccctacctcagcctcccaagtagctgggactacaggcacccgccaccacgcccagctaattttttgtatttttagtagagacaggatttcaccgtgttagccaggatggtctcgatctcctgaccttgtgatccacccacctcagcctcccaaagtgctgggattacaggcgtgagccaccgcgcctggcccctatttcttgattatatcctaaacaaagggtggattattcatgcctcctttttttagaccatataggataacttcctgatgttgccatggcatttgtaaactgtcatggcactgatgggagtgttgcagtgaggacgaccagaggtcactctcatggccatcttggttttggtgggttttagccggcttctttactgcaaactgttttatcagcaacgtctttatggcctgtatcttgtgctgacctcctatctcatcctgtgacttagaatgtcttcactgtctgggaatgcagctcagcctcattttatccaacccctattcaagacggagttgctctgttaaacacttctgacagctgtggtttcttcccacaaagaggttgcagatggggttaggttcttgttctgccagcttggctccttcccaattcctgttaacttactgatttattagggccccatagattagaaattatcatttaggagtcatgcagccaggggccacaagactgtaaacatccccagttgttcctagggatggtatcaccattgcaaaagctaagattggtgctggagatatttttcagaccctgaacttgatggatctgatggcaccactcagatgggtaaactggcttatctggtcttgtgcctccctctcccccagaacccactcagcacaagagaacaactttgactccctatgatttcatctccaacccaaccaatcagcattccccaattcatggccccctatctaccaaattatccttaaaaaaccccagtctcaggaggcggaggttgcagtgagctgagatcgtgacattgcacttcagcctgggcaacaggagcaaaattctgtctcagaaaacaaacaaacaaataaacaacaacaacaacaaaaaaccccagtctcgcaattttcagggagactgatttgagtaatactagtaagactccagtatgctgttcatccaactctgtgtgaataaaactctttttcttttgcaatttccctgtcctgataaattggctttatctgggcagtaggaaaaatgaaccctctgggtgtttacacgttcattttaacaatacaataatggttattaatctttgcattaatctttgcttccagtggaagaattttgcatctgaaggaccatctgaaatgataggtgaatttggatctgtagcctttgggaacatctacactaactctgaaataatatttttccatacactagggtaatcagttacagccaataaccccaagaaatctcaatgtgagttctaaggagaggcaggatgatcctctgcctaggagaaagatctgcaatcttttatttatttttttatttttatttttatttttttttccaacatggagtcttgctgtgtcacccaggctggagtgcagtggcaggatctcactcaccgcaacctctgactcccatgtacaagagattctcctgcctcggcctccccagtagctgggattacaggcgcatgtcaccatgtgggttaatttttgtatttttagtagaggcggggtttcaccatgttggccaggccagtcttgaactcctgacctcaggtgttccacctgcctcggcctcccaaagtgctgggattacgggcgtgagccgcccgcacctggcccttatttttattttttagataagaggtctcgttctgttgcccaggctggaatgcagtggtacgatctcggcttacagcagcttcgaactcctgagctcaagcgattctccctcctcaggctccctaaccctaaccccaaccttagggcagctgggaccacaggcccgcccgaccacactccgctaatattttttattttttgtagagacaggattttgctttgttgctcaggctaatttctaactcctgacctcaaatgatccttgtga

SEQ ID NO: 22705 - DNA, 2300 bp, Homo sapien
agtgcaatggcgcgatctcagctcacagcaacctctgcctcccgggttcaagtgattctcctgccttagcctcccgagtagctgggactacaggcgtgtgccaccacacccggctaattttttttttgtatttttagtagagacggggtttcaccatgttagccaggatggtctcgatctcctgaactggtgatccgcctgcctcggcctcccaaagtgcgaggattacaggcgtgagccaccgtgcccagccttattgttctttataagactgatgtcaaattactaaaaggagttgaatgtaagttagaatatcaagtaaaggatactaagtgggaaaaagtgttgttcaattaattgaacgctataatgatttgtgaaccccccaaatttgagacaggtctcagttaatttaaatagtttattttgctggccaggtgtggtgactcatgcctgtaaccccaacacattggagggtgaggcaggcagatcacgagggagatcgagaccatcctaaacaaggtgaaacccccgtctgtactgaaactacaaaaattggcgtgatgccacgtgcctgtactcccagctactcgggaggctaaggcaggagaatcacttgaacccgagaggcagaggttgcagtgagccgagatcgcgccactgcactcgagcctgaccaaagagcgagactccgtctcataaaagaaaaagtttattttgccaaggttgaggacacatgcccgtgacacagcctcaggaagtcctgacgacatgtgcccatggtggttggggtacaggttggttttatacattttagggggacatgagacatcagtgaatatatgtaagaagtacattggttccgaccagaaaggcgggaacaactcgaagcagggaggggacttccaggtcacaggtagacaggtagagagacaaatagttggattctttttaatttctgataagtccttccaaaggaggcaatcagaataggcatctatctcagtgaggagagggaagactttgaatagaatgggaggcaagtttgccctgagcagttcccagattgacttttccctttagcttagtaattttgaggccacaagattttcctttcacagattctatcagcaggagagttgttttctgtaggaatcacagagattcagctttgcactcctgctataggggagcacatccctaacttccttcatttgccttaggcactctaaggcttctgagggccttcagacacattataacacaacaacgcttatcagcctctgcttccagtgcaggtattttgcgactgaacgactgtttcaaacggtgtggtaatttggatttttagcctttaggagaatcctaaataatagttttagcttgagctccctattatttaccttgcgctccccgaaatctgaaacagtatttttccagattcttgagtgattagttacagacactagtctccaggaatctcaatacggcttctaaggctaggtgagacccctcctctgccctagaaaggcgcctttttttttttttttttttttttttttttttttttttttgagacagagtcttgctctgtcgcgcaggctggagggcagtggcgcgatcccagctcactgcaagctctgcctcccaggttcacgccattctcctccagcctcagcctccagagtagctgtgactgtaggcgcccgccaccacacccagctaactttttttttttttgaatttttagtagacacggggtttcaccgtgttagccaggatggtctccatctcctgacctcgtgatccgcccacctccgccttccaaagtgctgagattacaggcttgagccactgcgcccggccagaagggtgcgctttttaaggagaacccctgacctgatggcgggcttttcctgcagatggactctgggtatcgctctttttagcgccatggaaagtggggaactacattacccagaaagctctgcgttaaacgacagccggtcagagccaatgagcactcggaaagaaggcatttccacgtgtgcacgtaacgtaaggctgagacttccggggtctctagtagcggctgtgtatcggtgacgcgggtgtttccccagtttgtggcccctgagtgctggggggggaccgcggtgactgaacctagaaggtggagaggaatcgtcctcggtgcccagaggcggctctgcagccccgtgacggcgaccactgctcccgggccgtgcttccccaagtagtccgatggcagcggctgcgccgaggcgcccgactcaggt

SEQ ID NO: 22706 - DNA, 2300 bp, Homo sapien
gtgtgttctcttctttgcagccagatgatgcctgcagacaaatgggactgtggtaacatcacctcctcgccgccctcttgcctccccaccgaatttttacctctaagcatttcatgacctggtaccaactctgtagttaaccttcaaagtatgtttacatgggttgacagaaatgggaatacctccatacatcctgtgtcatggacttaggattctgggtttagggtttctccagtgttctcagatcaaaggactgaaaaaatggcaagtaagagtcccaggacatcacaagctagagaacatgtgaatggggaataaggccagtgagggaatggaacaccctctaattccctctgtgggttcctttttttgagccagagtttcgctcttgttgcccaggccggagtgcaatggctcaccgcaacctctgcctcccgagttcaagcaattctcctgccttagcctctgagtagctgggattacagtcatgcggcatcaccacgcctggctaattttgtatttttgttagagacggggtttctccatgttggtcaggctggtctcgaactcccgacctcaggtgatccgcccgcctcggcctcccaaagtgctgggattacaggtgggagccaccttgcccgaccccctcagtgggttctttacgtgcttttgtagccaggagtgtctgaggggaaagcagacgttacaaaggggatctgataagctcaggtctccttgaaccttttcttatcgctggagccaggtgacctcagactggttgacctgcgtgtctcagtgcaaaatgtcatctctaccacctatgtgatctatcaacaaaggagtcaacctcccagaaccctaaggtcctcatctcctctactatgttcttcctttggcctttgggaaaccttaaaagcctggacttggatcgcatccctcctttcttcgaaactctccatggcttctagcgtcttcacagcgaatacacagcccccagcctgctcttccaggagaagcttcgcctcacacgttgttccctacaggcgcctgtggaccccaggttccatcctcccgggtctgtcctccaggccatagcccgcgccggtccctgtgcctgtcgctctccccaccgcatcccacaggtgtcagaaacaaggacctctcccgcgaacgcctcagtgtcccgacgccgggtccgggctgcagacctgtgaacagtcgccgctctctcgctgcttcaggattcgggttaggatgaggtgacctgagggcagggaaggcacaattacctgagccgggagcctcagcgcggccgccgccatcccgagtacgcggggaaagcactgccgggagcggcgggcgccgttacggggcctaagatctgcctctgtgcagcaagaaggactcttcaccttctgggttcagacaccgcggttcggacccatagctccagcgcctctcacctcacaaaccgcagaaacacacccaacattaaccaaaatggtcgctaccagagaacgctgagaatcccgccactacgttacgtgcgcacacagaaacgcctttattctgagcccttactggttctgttgcgctgtcattcaatgtagagctttctgggtaatgtagttccccaggttccaaggtagtaaagctgccgcttcccaaaggcgcttctgcagggaagtcccagccctacctcagggggttcattaaagcgcgtacccttttagggcagaggatggtctcgcccctccttagaggccatattgagattcctggggaatccctgtttgtaactgaccacctaagtgtttgcaaaaatattaattcacatttctgtaaattcaagctcccaggcgctaaaaatactgtgaaggcccccaaaggctacaaatccaaattcgtgtatcactttatacaatcgtttagacacagaatgcttgcactggaagcagaggctgataaacattactctgttataattcacatgaatgcactcttgttaccggatagaatgtcttggctgtgagttgtccagttgttggcgcattgaacaaagaagtgaacaaaacacacaaaaaaagcaacgaaagaacggaccaatgaaagcgcagatttattgaggggaaagtacactccacagaagtggaatgtaggtgtgggagcaggcgaccaagcggctcaagaaccccgattacaatgttttttagggttttattaggttggtgcaaaagtaattgcggtttttgccatgaataagctagaattttataataccccaagagttctttaaaggc

SEQ ID NO: 22707 - DNA, 2300 bp, Homo sapien
cagcctggccaaaatggtgaaaccttgtgtctactgaaaatacaaaaattagctgagtgtggtggcaggcacctgtaatcccagctacttgggaggctgaggcaggagaatgaattgcttgacccaggaggaggaggttgcagtgagctgaaactgtgccattgtactccagcctggacaacaagagtgaaactccttctcaaaacaaacaaacaaacaaacaaacacctgtaaagtcagctgggagcagtgacttatgcctgtaatgtcagcattgtgggagaaggaggcaggcaggtcagaggtcaagagtttgagaccagtctggccaacatggtgaaaccttgtctctactaaaaatacaaaaattagctgggcgtggtggcaggcatctgttatcccagctacttgggagactgaggcaggagaatcgcttgaacccgggaggtggaggttgcagtgagccaagatggcgccactgcactccagtctgggacagaacgagactttgtctcaaaaaaaaaaaaaaaaaaaaagaaagaaaaacttctgtgaagtgtaaatttttttcaccatccactcatgtttcaattgacctatttctgtcatcgcagttattagatagtcgttggtaataagtttctgtaactggcatttcacctgtttttctggtatcatattagttcctcatgcagaacactccccgctgtcacaagagaaacaaatgataatcacttcccaggaaagataacaagctcgataatttaacatacgcctagtgtctccaggtggagattatcaccaccattaccaataccaagctgagatttctctttcattgttctttacctgagactgacttcaagttcctaaaatgagttgaaaatataagttagaataccaagtaagggatattacatgaataaatgttttgctgaatgaattggacacaataattgactatataagcaggagagttgtttttccatgggaacgactgattgacctttgtactctttctttagcctctcctctatcttccttggcatggtcctatctggattagttctcttttgtccctggcagactgaaaaaccaactctaatgcctcagagtgaggcaggagaatagggaattagggtaaccaagaatgaaggcataagcaaaagaacagcaggtgcagctagttctaggcaagatgaggcagcacacaggccacgtcctcactcctgtggtaacaagacagaagtctccacttcagcctctgattggttgtgcaccagtccttcataggattggaggcctttaaagaactcttggggtattataaaattctagcttattcatggcaaaaaccgcaattacttttgcaccaacctaataaaaccctaaaaaacattgtaatcggggttcttgagccgcttggtcgcctgctcccacacctacattccacttctgtggagtgtactttcccctcaataaatctgcgctttcattggtccgttctttcgttgctttttttgtgtgttttgttcacttctttgttcaatgcgccaacaactggacaactcacagccaagacattctatccggtaacaagagtgcattcatgtgaattataacagagtaatgtttatcagcctctgcttccagtgcaagcattctgtgtctaaacgattgtataaagtgatacacgaatttggatttgtagcctttgggggccttcacagtatttttagcgcctgggagcttgaatttacagaaatgtgaattaatatttttgcaaacacttaggtggtcagttacaaacagggattccccaggaatctcaatatggcctctaaggaggggcgagaccatcctctgccctaaaagggtacgcgctttaatgaaccccctgaggtagggctgggacttccctgcagaagcgcctttgggaagcggcagctttactaccttggaacctggggaactacattacccagaaagctctacattgaatgacagcgcaacagaaccagtaagggctcagaataaaggcgtttctgtgtgcgcacgtaacgtagtggcgggattctcagcgttctctggtagcgaccattttggttaatgttgggtgtgtttctgcggtttgtgaggtgagaggcgctggagctatgggtccgaaccgcggtgtctgaacccagaaggtgaagagtccttcttgctgcacagaggcagatcttaggccccgtaacggcgcccgccgctcccggcagtgctttccccgcgtactcgggatggcggcggccgcgctgagg

SEQ ID NO: 22708 - DNA, 2300 bp, Homo sapien
ccacccaaaacacacctccccgcttgccaggctgcaagcaacgggaaggagagaagagctgtggctcttccgggagcccaggcctcgagactccggagccagggctgtgacatgctgcaacaccctctttggggttctgctgttcttggtgtctccgagctttccggcgccaccatttttccctcgtctagatgctggtgcctgcagcagaagccgcctgcagtatgtctggtccagtcgcagacttgcaaggagccggcgcctgtgccagcgcctggagctgcccgccccgccgcagcagccagcgtgcctggctgtgtgcactggctggacccttcacttgctcgctcacacaccccttgcggctccgcgcctggctcgcccttggtaggtgtgggatccaggtgcagcctgctgggccgagtgggtggaacaagcccagcgggtgtgagcaaaactcaagcagaggcgcgaccacagaggtttctggctggcgaagcgacacccattattagtagctttctgtaatttgtattttacaattctttttctgatatcgtatcaattttttatgcagaacagccctataataatgggggcaaagggccgggcacagtggctcacgcctgtaatcccagcactttgggaggccgaggtgggtggatcacctgaggtcaggagttcgagaccagcctggccaatatggcgaaactccgtctctactaaaaatacaaatacaaaaaaaaaaaaaaaaaaaaaagattagccgggtacggtggcgggcgcctgtaattccagctacttgggaagctgaggcaggagaatcgcttgaacccgggagacagaggttgtggtgagccgagatcgcaccattgcactccagcctgggcaacaagagcgtaactaatgggggcaaagataatcatttcagcgttgagaagagatcttgaatttaagatacaccctacatttgggattcagagcaccctttgttccacctgttaatgctctagctagccatcatgccttttcaaaataccattccttttgttgttctctttctgagcttgatgtcaaattattaaaaagaagtgaatataaaggcatggagaaagtgagattagattcatgcaagtgttgcttagtgaattggacacaatgtttgactacacaggcacgagagggacccagagacagggatctacttatgtcctgctgctgcagggtgcctccgcatcccaccttcatcctctttgtcatgaacctgtgtggagtgttttttttcttgtccctaatcaaacatacagagactgagaaaactgactccagtgcttgagtgcatgcgtttgaattgcaacatagtctttttttttttttttttttttttttttttttgagacagtggctcgctctttcccccaggctggagtgcagtggcgcgatctcggctcactgcaagctctgcctcccgggttcaagctattttcctgcctcagcctccggagtagctggggactacaggcgcccgccaccacacccagctaatttttctttttttttttttttttgtggtattttttgtattttagagacggggtttcgctgagttagccaggatggtctcgatctcctgacctcgtgatccgcccgcctcgacctcccaaagtgctggaattacaggcgtgagccaccgcgcccggccgcaacatagtcatatttatttgctttctcaaccagtggatatattttgtgactgactgactgtatgtaataatatgtgcatctggatatgtgcctctgggaacacatgaaatgacacgtctccaaacaaacactggcagacagcaatcggtagaaacctgggtacgtctcctttaagaaagaacgaagcctcgcctccgccccaacctggagtgtccatttcccagcgccccctacaggggtttggcctttacttccggaaggaggtggaggcgaccctcactctcccgccgtgcgcctgtgggaacattacccagaatggcctgcgttgggcgacggcgaccttcagccaatgaggcctccgaaaggtggtgtttccgtaagcgcacgcgcggtcgcggcgggacttccgttgtcctccttgtggcggtcgttttggcatttgtctggactgattacttggtagaaagccccggagcgctgggtcagcatcatccgtgactgactgagaaggcgcgagaggagtcttccccgctgcacagaggcgtggctgaggctcggcggcgcccagggtacccaggcccggcccggaataagga

SEQ ID NO: 22709 - DNA, 2300 bp, Homo sapien
aaagatggatcagaagacttgggtggcttctctccagttcataagtatttctaaaactgggggccaaggatccttcctggataggcttcaagggtattgagtggaacttgggctcataaagctcatctaatttttaaagggcccatggcttcccagtggttgagaaatgatggcctagtgatgtcattgggaggctgttattttcaccttctgactcttctagcttgggctcacttaggtgtgtaacatttgattgtagtcctttcaaggcctgacacattagtggtcacctgataaatgtggcaggggcaagttagttattgatggattttttttttacatgatttgtgcaaaggcccttggagagaatgaagttagcagtattatctcatcttggagaaagcagcataatatatccagaatcatactaccagtaggatgtggatattgtattctaatagccagagtgaatccaaattatctgatttagagattccaaaggatttcataagtcatatgcaatataccacaagcatcctggtaacttataaccttattactaagattattatcttgaaaaaatttctaggccgggcaccgaggctcatgccagcattttgggagggacaggaggattgcttgagctgaggagttcaaggccagccttgcaacgtagcaagatcccatctctgtttaaacagataagagtttttttaatgtcttaaagggcctcctggcagggcacagtggctcactcctgtcaccccagcactttgggaggccaaggtgggtgaatcatgagatcaggagttcgagactggcctggccgccaacatggtgaaagcccatctctactaaaaatacaaaaattagctgggtgtggtggcagatgcctgtaatcccagcggttccagaggctgaggcaggagaatcgtttgaacccaggaggtggaggttgcagtgagccaagattgtgccactgcactccagtgtgggtgacagggcaagactccatctcaaaaaaaaaaaaaaaaaaaaaaaagggcctcctgttggtcaggtcacatcacgagtcaaaagaaagtcccagacttctgcttcttcctggaagtattcccttcctctcacctatcatgcacagcctggacagtattgatttcagtggtccctaacatccagcactcccaggtcccctctgtctccctcatacatgacatagttcattgccttttttgagcccgtcttctattcctcccatctctgaagcctagggcccactttcagtcatcaggagtccccctttaccttcctgctgtgggtctcccctgtgcacattgcctcccttctaagggtgactgctttccttccactttcttttctttctttctttgtgcagtggtacgattttggctcactgctacctctgccttctgggctcaagtgatcttcctgcctcagcctcccgagtatctgggactacaggtacacgccaccatgcctggctagtttttgtttttgtgtttgttgttttatttttttgagacagagtcttgctctgtcgcccaggctggagtgcagtggcatgatctcagctcactgcaacctccacctcctgggttcaagtgattctcatgcctcagcctcccaagtagcttgaactacaggtgtgcaccaccacgcccagcaaatttttgtatttttagtagagatgggctttcactgtgttggccaggctggtcttgaactcctggcctcaagcgatctgcccaccttgacctcctaaagtgttgggatcataggcgtgagccaccgtgcccattccttttttcctgaacattttccaagtgaggttgttggaaatcacggatggggaactatgcatgcggagggctgactgtaattgatttctttctgcctcctcactaatctgcacactgcaggcagggacctggtctcatcatgcctgcacctccaagcactgccctcttacactgtagtctccccattggtcagcatggttccatgaaggaactccattatcacagcaaggactgacctcacactggtggctccaagtcactgcccaaacattctgaagggagtagaacttcttgattcctcagataaatagaggacagatgctggactgtagctaagtatttcctttcatctacgggataaaatactgataatttgagagtgatggacaaggttcagagtggtttcctcattttgtttttgtttttaatggaatgccaacttcatttatgcttgccgtatgcagatggactccatcccac

SEQ ID NO: 22710 - DNA, 2300 bp, Homo sapien
ggggctgagaaccagcccctgcccctcccccttgaatgaggaaagagacccacttcctcattctatagatgaaggaattagggctcagagaaggttaggaaagtacctaaacacatgaatctctcattggccccccctgtgctattgggtaccatctctgagaagcagtgtctggtcacaaccttcctgggcctgaaccctaaacggccacacatgaattctcatgcatcttgagatgtcaccatcaccttactgctcactggttttctttttttttttgagactgagtctcgctctgtcgcccaggctggagtgcagtggcacgatcttggctcactgcacgctccgcctcctggcttcacgccattctcctgcctcagcctcccgagcagctgggactacaggcgcccaccaccacgcccagctaattttttgtattttgttttagtagagacggggtttcaccgtgttagccaggatggtctcgatctcctgacctcgtgatccactcgcctcggcctcccaaagtgctgtaggcgtgagtcaccacgcctggccactagttttctgattcctccttgttccagctctgcacagagacagatctggaccacctgccctaaagccccacctggtccccattctattccccagctgtggcagagcactacagccagaggccacaatatggcagcccacagctgaccaggctcttgactcaccccaggaggcccatgggtcaacagctgtcatcccccaagattggtccgtaagggcacctgcacagaaggatcaggttaggactgtgacaccaaacctagtgattcaaggcgacaaaatacaagaggaggctgactcgctaatgggcactacaaaattccataaacagagcccaagggtgtgtaaaaaaaatgcaacataagctggattcacacaggcaatgcacaggtgagtcactattaattaacaccgttttaaaattaccaaccaatgctatataagtaaaaacaataaaggtaaaaatatatatgagagcagtagagacaatattttattatatgtatcactgttgtttaggaaaccccacaaaccaccagaaaaatcccttaaaactaatgacacctctcaggagatgactataaaacataaaagttagtgtcttttatgccaacaattttcctcctttaccaccaatcagttctaattttgtaccaagatagacagacccccttccatcctcaaaagtcctcagcccatcaccagctctgacccatgactgcagcagctaatgataggggaggcccaggagaaacacaacttggactcaccccaggaggcccacgggttgatggctgccatcccgaggactgattgaccaggcacctgcccaggaacacagcaaatcccaacctagtgacaaaagtgaaaaaagacaaaactagtcctttctcacagaagaccaagtgggaacaaagaagggaatccatccaccgaagcaacaaaaaaacttgtaaggagcatcgtaagaaaagagaatttacatgtcaaaaaagtaacacaattcctggagagaaatgaaaggtaatttgcataagctggaaaaaagagcatgatcctgaatgagagggtacaaatttgtcagctattcccaagagacagccagtcacaacacagatggaacttttggattaatctgacaattattgtaaaatcaacttgcaatcctcatatattagtggttgcctagagctgggggaaaaatgaaatggggagtgactgcttaaggggaacaagggtttctttgtggggtgatgaaatgttctaaaattagataatggggatgattgcacaactttattaatatacaataaaaccggtgaattgcacacttttaagtgcttaaagtgaacattatgttatgcaaatttaatcccacctccaaaaaaaattcacctccaagatttactaagcctaagcttgtgtgtgtgtggaggacttagagatgggcctggcgcccagacccctaactcctcaggttccagatctttgtacaagtcagcaacctctcgaatggattcctgggtatgtgtataaagcactagaacacacagtgggcctcaggagcaccggaatcagcgcgaaaacgcagaatgcaaaccgtactttgcaccattatttgcaacttgacagtgaccgccgccgtcactgcatgtttaagggaacccggagctgtttccaacccaggtctgacgtccttcacagtgctttgtgtgaactggcagggggagaaacgacggctg

SEQ ID NO: 22711 - DNA, 2300 bp, Homo sapien
ggcgacaaaatacaagaggaggctgactcgctaatgggcactacaaaattccataaacagagcccaagggtgtgtaaaaaaaatgcaacataagctggattcacacaggcaatgcacaggtgagtcactattaattaacaccgttttaaaattaccaaccaatgctatataagtaaaaacaataaaggtaaaaatatatatgagagcagtagagacaatattttattatatgtatcactgttgtttaggaaaccccacaaaccaccagaaaaatcccttaaaactaatgacacctctcaggagatgactataaaacataaaagttagtgtcttttatgccaacaattttcctcctttaccaccaatcagttctaattttgtaccaagatagacagacccccttccatcctcaaaagtcctcagcccatcaccagctctgacccatgactgcagcagctaatgataggggaggcccaggagaaacacaacttggactcaccccaggaggcccacgggttgatggctgccatcccgaggactgattgaccaggcacctgcccaggaacacagcaaatcccaacctagtgacaaaagtgaaaaaagacaaaactagtcctttctcacagaagaccaagtgggaacaaagaagggaatccatccaccgaagcaacaaaaaaacttgtaaggagcatcgtaagaaaagagaatttacatgtcaaaaaagtaacacaattcctggagagaaatgaaaggtaatttgcataagctggaaaaaagagcatgatcctgaatgagagggtacaaatttgtcagctattcccaagagacagccagtcacaacacagatggaacttttggattaatctgacaattattgtaaaatcaacttgcaatcctcatatattagtggttgcctagagctgggggaaaaatgaaatggggagtgactgcttaaggggaacaagggtttctttgtggggtgatgaaatgttctaaaattagataatggggatgattgcacaactttattaatatacaataaaaccggtgaattgcacacttttaagtgcttaaagtgaacattatgttatgcaaatttaatcccacctccaaaaaaaattcacctccaagatttactaagcctaagcttgtgtgtgtgtggaggacttagagatgggcctggcgcccagacccctaactcctcaggttccagatctttgtacaagtcagcaacctctcgaatggattcctgggtatgtgtataaagcactagaacacacagtgggcctcaggagcaccggaatcagcgcgaaaacgcagaatgcaaaccgtactttgcaccattatttgcaacttgacagtgaccgccgccgtcactgcatgtttaagggaacccggagctgtttccaacccaggtctgacgtccttcacagtgctttgtgtgaactggcagggggagaaacgacggctggggaacgaacggggttattcgtcccatcaatggcctcagaagcatccttatcacctgcttccagagctcccgacccaaatttcctcctcaagaccgacgcggccgcgacgctgcaaaagctcgtcccggcctcacctggctcgcggccggcggtcccccttgaaggcggcgcagcaggatcggggtctgcccgcctggggcgtttggcttttgtcccgcgccgaggtccggcccaggagtgcgcttgggagctcccggcgcggcctcggggacaaaggcccgcggagccgacgtgcagcagagttcacccaggcccgtccgaccagaaaacgaagaacgcccggaggcgggaggccggaggcaggctgctggctggagaaccgacggcaacgacggcgcaaagccggcgcggaaagggcaggcgcaggacccaccctgacgccgcctctcccagccggctctcctgaccccccaagccccgcagctacggcggccccacagcctgagcaaaggcctcacctcagccgcggacaatggcggctgcttccccggcgtcgaccggagcgcgccgcggggtctgctgggagctgtagttccaggcgggcacttccggcgtcgggcagcggcgccgccatgacaggttcctgggccgcgccgcctcgccctgcctgggcggggttgggacctttctggcacctgcgtcgaagccggcggcaggatggactttgttgtcccggtcccagaccaccctcctccaccgtcgcctcccactgcaaaaaggcctgggtaagtcgcggccccgcgggcctcggtttgcccatccgcaaaa

SEQ ID NO: 22712 - DNA, 2300 bp, Homo sapien
ttctgtactgtatgagactatcagttacgatacgaagaaaataaaaagagagtaatacaattgagaattagggagatgagtcacagctggctgttaccaggatgtgacatctgtgctgtgatctggatgaaaaaaagaaaaccctggggctgtacaaggaagaagattccaggaagaggaaacaatacgtacaaaggccctgaagcaggaatggacttaccctgtttgaggagtggctggggtccagaaatgggcaggaatgacaggagatgagcttgagggactgaggtggggtgtgggataggacagaggccagtcctgctgagttttctaagctgtgagctggaatttggattttactttaattacttgggaagccagtgcagaatgtgaggcaaggacctgatgtgagatcctaaaagtgcccttggctgcctgctggaggatgagctgtagggggctggagtggaagtggagagacactctcttcttacttctgtcactcttccttctccagcctctctttctctgcttgatcctgagatggaaattgtggctgtaccatccatagattgctttcctctcagtgcccactctgactgggttcaccttcctgccagctggggcctgtcccaacaccttgccccttccaccttacctctctcatggtcctctccctcgaattcagcctgtcctacttgaaattttcctctcccttgaattcagcctgtcctacttgaacttttcctctccctctgaaagggctactcccctttgcccacccacagtgagtgccaacaccacccaacaacaaaagcccaacccacaggccagctttttaaaatgatcctccattactagtggaaatatcttcaaaatctctcttgcccactgctcactcaagtctagcttcctaaatggccatgctttctttggtatcaccacctacagtccctcagtccctttttttgagacagagtcttgccctgctgcccaggctggagtgcaatggcttgatctcggcttactgtagcctccgcttcccgggttcaagcgattctcctgcctcagcctcccaagtagctgggtacaggtgccctccaccaagcccggctaatttttggtatttttagtagagacgaggttttatcatgttgcccagactggtctcggaactcctgacctcaggcgatccacctgccttggcctcccaaagtgctgggattacagctgtgagccaccgcgcccggcccgtttttgtttgttttaatgccgggtcttgctctgttgcccaggctgaagtgcagtggtgcgatcatagctcactgcaaccttgacctcccaggctcaagcaatccttccaccgcaacctcctaagtagcggggactacaggcgcgcgccatcacaccgggctaatttttgtattttttttgtagagatgtggtctcgctatgttgcccagggtggtgtcgaactcctgaactcaactgatcctcccgccacagcttcccgaagtgctgggactacaggaatgagccaccgctcccgaaccgctccatgcatatcgatagaggaaaactcacagggtgcgtcgctggtaacccatgctcccataaagcctggcctctggaaagagacttgggaacgagccctgacgttctcagccgtcgagcttcacagagaagggtagctcgaattaggttccttatcttaaagagaataacagcagtcactttctcacaatcttgcgaacgccaaatggaaggatccctcgagagcgctgagaactcgccgagctcctcccgggaaacccggtaccacgaggcgccattttgcggatgggcaaaccgaggcccgcggggccgcgacttacccaggcctttttgcagtgggaggcgacggtggaggagggtggtctgggaccgggacaacaaagtccatcctgccgccggcttcgacgcaggtgccagaaaggtcccaaccccgcccaggcagggcgaggcggcgcggcccaggaacctgtcatggcggcgccgctgcccgacgccggaagtgcccgcctggaactacagctcccagcagaccccgcggcgcgctccggtcgacgccggggaagcagccgccattgtccgcggctgaggtgaggcctttgctcaggctgtggggccgccgtagctgcggggcttggggggtcaggagagccggctgggagaggcggcgtcagggtgggtcctgcgcctgccctttccgcgccggctttgcgccgtcgttgccgtcggttctccagccagcagcctgc

SEQ ID NO: 22713 - DNA, 2300 bp, Homo sapien
gctgccacccccagaggtaagtacttctttcatcatggattacttgcctgttcttgaacttcatataaatggaatcatacagtatttatcactatacctgtgataatgcaatattgttgtgtggatatgtggctaattattatttatttatttttttgagacggagttttgctctttttgcccatgctggagtgcaatggcgcaatctcggctcaatgcaacctccacctcccgggttcaagtgattctcctgcctcagcctcccgagtagctgggattacaggcatgcgccaccaccccggctaattttgtattttagtagagacgggggttctccatgttggtcaggctggtcttgaactcccaacctcaggtgatccacctgcctcagcctcccaaagtgctgggattacaggcataagccaccgcgcccagcatggctaattatttttattgctaagtagtaatccattaaattgacgtatcaaaatttctttatccattctcttggttacagacatttggattatctcctggtttggaccgtcataaataatgccactgtgagcattcttgtacatatcttttagtggacagatgtttgcctttcttttgaacaaacaggagtagaatctctaggtcatagtacaggtttatgtataattttataagaaattgtcaaacttttttccaaagtgactgtaccacattatactcccatcagcagggtatgagaattccagttggcaccatgtcgtcccatttgatgctgtatttttatttttggtcattctagaggatgtgtagtggcaatgtcctttattttaggataagaatcagcaataataagaaaagaatctatgtagcaattaccttgccctttgtttatacagaacagttccagctcctttactggactaagatcgaaaaccccaactctcattgcatttaccttaccccttcctatctcgggggttgtcttagtccatttgtgctgctgtaacagaatagctgagactgcgtaatttacaaagaaatgtactgccttacggtctggaggttgggaagtccaacatcaaggtgctcacatatttggcgatgatgagttcaagatggtgccttggacactgcatcctcacctgacagaaggtaaagggcagggtggtggagggtgggggtggggggagagaaagaaagagagagagagaaagagaatgcaagcacatgcagaatctctccatgaaccttttacaatggcattgttgacgaagagtcaaactctgtaaaatatttgaagagatttactctgagccaaatatggtgaccagtggcccctgacgcagctctcaggagatcctgaggacatgcccagggtggttagggttcagcttgcttttatacatcttagggagacatgagacatcaatcaatacatataagatgtatactggtacagaaagtttccaggttataggcagatttaaagatttctgattgccaattgatttaaagagttattgtcaatagaaaggaatgtctggggttgtggaactcaaggttttaccaagcagatgaaacctccggagataacagactgtaaatgtttcttatcagacttaaagagtctgttctatcactaattctagaagggaggagggtataatgaggcaagtccagcttctgcttcccatcatggcccgaactcatttttcaaattaactttggaatgcccttggctgagaggaggggtctattcatatggttggggggtggggggcttagaattttattttttggtttacaacattaatccattcatgacagcagagccttatgacctccataaatcccattagaccctgcctcccaacactactgcactggggagtaagtttcaacatgaattttggagaggataaaaacattcaaatcatagcaggggtgtttttcttcatctggtttcctgacacctttaggtcaaaggtatctctctcatttgagttccctctcaaaagtgaacagagctacctcatctctctttagaatatgaattctagtcttattttatatgaacattgaggtttgtgtagcaggtatttggtgattgcatatcttaaaacttggcttctgtactgtatgagactatcagttacgatacgaagaaaataaaaagagagtaatacaattgagaattagggagatgagtcacagctggctgttaccaggatgtgacatctgtgctgtgatctggatgaaaaaaagaaaaccctggggctgtacaaggaagaagattccaggaa

SEQ ID NO: 22714 - DNA, 2300 bp, Homo sapien
actccagcctgggcaacaagagcaagactctttttaaaaaaaacaaaacaaacaaacaaaaaaaaactgaaacctctgctagacaccaggctgcctcccaatggatctagagttaccaggtggcctatgatggtgtctagatccagactctagagacagactaagtcagtgttctctcaagggagatttcccaaatgggtggcagttataaatgcacacatgagccttcactgccccaaagggccacgccaatttcagctaccaagaaaatgaaccatgtcattacaagtgcctaattttcaagaaggagaataataagcccttagcaccctaatttggttttcccatagtggtttctgcacaaagtggcattcacacacaacattccagggaccagccgccagcagcaaagatgcggagacacggctctgattatccagctgaggcagcccctcccctccctgccactcctgggactcttaatctccaggcctcgttttattttattctaggtatttatatttccatgaagcatctgctttgtttactggtgtttgccccatgaacatgggcttccaagggactaaagccctatcagtccctctcactgatgtgctcccaccccagtgtccagaacagtgcctggtacacataggccctcaataaacagctgtccagcagatgctggaccccctggaggtgggtcctcctctcttttcttagctcacactctcctgcttcttcttcagcaatgagcagcttcagctatcctgagctcagtcccagagctgaggaccctccttgcatcatgatctcacccccacctgatttcagatacaaaacgagtatctgtggaaccctactattctggcacatggttacattgtagacattaatattaaaacttatttatatgaaatgttcttatgtaaggtttcgttaaagtatatgaaatataggacacattgatactaattccttgtttttctttttctttctttctttttttttttttttttttttttttgagacagagtctcactctgttgcccaggcaaggctggagtgcgttggcaggtctcggctcactgcaacctcggcttccccagttccagcgattctcctacctcagcctcccgagtagctgggattacaggcacgcaccaccatgcctggctaatttttgtatttttagtagagacggggtttcaccatgttggccaggctggtctgaaacacccgacctcaggtgatccgcctgcctcggcctcccgagttctgggattacaggcgtgagctatcgcgcccggcctccttgtttttcttgagtttacatataactgaggtttcttttttctttcttttttttgggggtggggggacggagtctcgctctgtcacccacgctggaaaactggagtgcaatggagcaatctcggctcactgcaacctccgcctccccggttccagtgattctcctgtctcagcctcctgagaaactgggattacaggcatgcgccaccacgcccaggtaatttttgtatttttagtagagacgggggtttcaccatattggtcaggctggtctcgaactcatgacctcgtgatccgcctgccttggcctcccaaagtgctgggattacaggcgtgtcaccgcgcccggccgacgtcctgtatttttatttgctaagagtggcgatcctagtctgggacatacttgtactaaacatatttatattaaaaacaatgttttaacatactactcttggacactgtataaaacggttgcgtgtctggaatgccgtcgttttgccccgcggccccatcgtacatgcgcatccccgcagccgccaccgtctccactttccgcagcagcgtccctgacgctgcgcgacccgttgccaaggcgactggaaccgcggcccgaggtaactggagggcacggcgggggcggggcgctcatcccaggcggcttctgattggcctcggccgcctcgtgcgtcacagccccgcccctgcccgggagtcccgcagcggtgacttgtcaccgacgcccggcgtgatccagcggaccaatggcggccgcccgcggcgcgcagggtgcggggatggggtccgcccgcggcgttgggcgcgctcgccagcccaggggtcgccatgaccgagtggcccaggcccgagcgaagcccgcgcgcggtgagtccgccgcggcccatccgtccctccgcccgccagagcgtccatcgggacgcccacccgggagggtctcggcgccgcgtcggcgggagctggcccgggat

SEQ ID NO: 22715 - DNA, 2300 bp, Homo sapien
agccctgggcacttcacgctctggaagaccggagtctcagacgccacctttctccctggcagccagggtctcttgggtcagaggaggcctggacactgccaggttttgaagctgtcaaaaagattttttttttaaagggagaaatatgtccagggagctgtaactgttacagtatattttaaatgtatgtgttgaacagattaactttttgaacattaacatacagcatgacacagttctgctatccatgctgtgattgcaggattgcttggaagctgtactgatgtgcagcccacctgctcatggtggggggtcctgttccaggccacagagaggcaaccagcaatgctctgcttggagattcgtacaggaagccaagaaggagctgagaggggcccagccagtggttacaagagacagcaggaggttcagaccacagcaagggtggcactggagtagcctccagctcatcttatttgactggtagagtgttattaaagcctttgaaatccctaccagcttttaaaaatcaagagatttcacatagaaatcctgatctctgggttctttagagaaatccagacctgggacgctgggcttgccagtccgcacgaccccacttggctggagccaagcagcacttgcccctgtagaaagagcccgcccctgcaaaagcatgtacggtttagaaacctggctgagaaaaacagaggatcagaaggtctgagggaggaaacagaggggcaagtttgagggagctgggcagggccgcctggccaccatcagggctgagcaggctcagtgtggcaccactgacagcttctcaccaggactatcagaccgcttgggaaaaagacttcaccatgagttgtgtgttcataccttttgatccagtaaaaggaaacggttgggggtgggggtggggggcaagagtatacattttgtgaaagaaaaaatacacaaaaagatgttttgtggcatttgggtttgtgagttcgagaactgaaaaacggcattttatgtataatggaaagcctctttactgctgtagagtgaaaagcaggctggctttcagtgcgacggtcacaaatgtggggctttacagtacttggaatgtacaggacgcccttaaaagccaagaagcttgcctttgctttgtttacatcagtgcattatgattttgagccattatatctcttcataattgccactgttttagggcttatgaaatttaaagtcttaacttgtgtgttaaccagccaaatctttgcaagtgtctgtgtgtggtacgagaattcgtattgtgttctctgctgttttcagagttgtttcagtcaaagaaaaaaaaatgcccgtcttaaaacttttcctctgcttcaaatacagctcccaagcccaggctgattggaattaatctgtcctcccttaaaagggcaaaagcacaaggctcagccctggctttcccagctcctctggtctcgctgctccacggacgtgtgacgtacgctggtgaaacgaagcccgcttgaatgggggcttcactattgtgtgctgctgaacctaggcctagcgcctggcaggctttggtgaatgttcagaaaatgacaattcatttcgtgtcagcgagggcacaccagctttgaatattttgctgctgttcaaatgcacaattttgacaattacctagcaatgtccaaagtcgtcataattgttagtgtcttgcacgtgatgttccttataaccatgtaataaatacagtgtgaagtctccatggctgcctcagtgtggaaaatgcaaagactcccgtgtgtgcgatcttggtgaatgttttggttgaaagtatgtgttttgaaaaaatcattgctttgtttgcagcagtaaaactgacggtagagtttccaacacgaaagcccgtgtggtcgcgccgggagctcacggcgttccaagcggcacttatcccgcgttgatgcccaggcaccccgcgcgccctgtttcaccaggcccagtcactccagctccagcagcactgagagctcacgaacgccaagggcgagagcgaggtgggggagggcggccggaaatgcgcgcgcggctctctgggaaatggagttaggctcgcgccggcgcagtgtcggctgccggtgccgcggcctttgtctcgcagtcaggagggtgagctaggccggcgaggagggggaggggaggccaggccgggccgggccgggccgggtgcggggggtccggggatcttcctgaggccctggcggggcgagtttccagcagcgcgcgtctgtgtggag

SEQ ID NO: 22716 - DNA, 2300 bp, Homo sapien
ctcccgcctgcgtttccgggaatttgtctaccaggaggctgccgggccccaccagaccctggcccggctgcatgagctgtgccgccagtggctgatgcctgaggcgcgctccaaggagcagatgctggagctgctggtgctggagcagttcctgggcatcctgcctgataaggtccggccctgggtggtggcacagtaccctgagagctgcaagaaggcagcctccctggtggagggcctcgctgatgtcctggaagagccaggtgggctgtcacagaggagaagcatggctcagaggagatggggaggggatcctggaaggccccagtgccagccatggcttgcctgagatagttaagttccccacactgctgaggcagctccttggtcctcgggccaggacagatgcctgggctcctgccttctagatgtaaggaagccagaggaatgagggaaagggaccagcctcttttatttacttatttatttatttatttatttttgagacggagtctcagtctgtcactaggctggagcgcagtggcgcaatctcagctcactgcaacctccacctcctgggttcaagcaattctcctgcctcagcctcccaagtagctgggattacaggcgcctgccacgatgcccagctaatgtttgtatttttagtaaagacagggtttcaccatgttggccaggatggtatcaatctcctgacctcgtgatctgcccgccttggtctcccaaagtgctgggattacagttgtgagccaccacacccagcccagcctcttttttttttttttttttttttttttttttttttttgagacggagtctcgctctgtcgcccaggctggagtgcagtggcgggatctcggctcactgcaagctccgcctcccgggttcacgccattctcctgcctcagcctcccaagtagctgggactacaggcgcccgccactacgcccggctaattttttgtatttttagtagagacggggtttcaccgttttagccgggatggcctcgatctcctgacctcgtgatccgcccgcctcggcctcccaaagtgctgggattacaggcgtgagccaccgcgcccggcccccagcctcttaacagtaaatattctgggtactttgcaggctggaggtctcctggtccaagatgaggtgcaggatgggtagtgatgtggccctggagcctgcaggtccctgtggtttaactgtgtgattgttgttggcacgtgtcctgacctcttggggtcacaggtccctccactgttgacagggatgctgctgggctcccctgcgggctcatcctcaattcttagcgatggagtgtacgagaggcacatggaccctctgctgctaccaggcgagctcgcgagccccagccaggcccttggagctggggagatcccggcaccttctgagacacgtgagtgcccagctagcctggcagcctctgctgggccttaggtggggtgttgggcagaggcctgtggttgggagagggcagaagggcagccagggagtcaggggctccatggtccatgctatcattgggacttcctcctgtagtttctctgaatgttagacattgtttattaaattagtcttcagagattatgcagatcatccatacttaccacaaatagtgaagaaacatcaatacataaagaaaagaatctcccaacccccgaccatgaaccctctgaaaataaagggtctcaagtgtcctgatgcacgtcccctcatgtctccctgcacatcacacatgcataatcagggcctggggtcgggctctgtgtgtgtggtgtgctgtgtctgagtgcttgctgttcgaggggtgggtcccccaggctgtggttgggtctggttctttagttgcccagcatcgcgtgctcagcccatccccatcctagaggtgggctctctgccccttggagtgaagctgccctgacacctcctgacttgtgtgcccatatgtgaggctctgggcactgtgggtggactcctcaggaccactgggcaagtggtgtgtgagttcgacatttcacataaaatagaaacttccatgtggttttccagaagttttgtggctgttcattaccagcacggaaggtgcccactggcctggatacagcccagcactatgtggtgttgctttttaggatttccacgaaggccaggcacagtgcctcatgcctgtaatcgcagcactttgggaagccaaggcgggcagatcacttgagcccgggcattcgagaccagcctgggcaacatagggagacccca

SEQ ID NO: 22717 - DNA, 2300 bp, Homo sapien
cctgttctagatgtttcatttctgtggaatcacacaccacaccccaccccacagcggtgaggtctttgcgccccatattctggtggagcactgtcagagcagaacttgacgacctgagaagggctcacagcacctggcctggtgtggtttactctatggttttccctataaaactgggcttgctgcggctgtgggaaatccccttccagctgtctctgtggaccttcagacccaggcggttcctgggagaaggtggacagctgcagttcacacccttgtgtgtccatagccagtgacatgagagcccgaggccgactggaggcctggacagctgtgacccgctgggttctgtttagtgagctcattgttggtgcacagttacaatcaagagagttcatcctgaatactggcttcacttaatgatagggctgccctgtatgtggggattcagctgagggtggggcacaggttggcaggacctgaactctctcagtcattgtggtctcccccaccccccaccccccattgtccttgctcctgggtacttcctgcccctcccgcctggttctgtggatgctttggtcaaagcctacatcctgcaccatttccagaaacggggaggtgggtggttgttcagtggcctccagagggagccccccgctccctacgcttttttctaaataattttatttcagatttgtggtggttttaactggaggaacagtcttgacacctagctccttcatgttattagaaattgacatccctataatctatcttttttttttttttttttgagacagagtctcaccgttgcccaggctggagtgcagtgacgcagtctcggcttactgcaacctctgcctcagggttcaagcagtcctcctgtctcagcctcccaagtagctgggaatacaggcacccaccaccacacccagctagttttgtatttttagtagagacggggtttcaccaggttggtcaggctggtctcaaactcctgacctcaggttatccacccatctcagccttccaaagtgctgggattatgggcgtgagccaccgcgcctggcctatttcaaggtttttacatccaggtttacatagagattgtcaagtaatttttcattttcatcctattcatgactgattttttaaaattctggtaatgatgctgggcgcagtggctcacacctgtaatcccagcactttgggaggctgaggcgggtggaccatttgaggtcaggagtttgagaccagcctggccaacatggtgaaaccccatctccactaaaaatacaaaaagtagctgggtgtggtggtgcatgcttgtaattccagctactggagagactgaggcaggagactcgcttgaacccgggaggtagaggttgcattgagccgagattgcgccactgcactccagcttgggtgacagagggtgactcggtctcaaagaaaaaaaaattctggtaatgcacagaatgagttaccctccatttacatgctactttttatctacatgagtacaacactgaggttctactgatgcctaacaagcgggtttcttggaaatctgtgtgaactctgggtgtggtgtctttgttctctggcagctggggtggctgcgccctggccttatgcaaggccattgccttgtccgtgtcctctgcaggtctgtgggttctggcaccacctgagcccactgggcatctggtcatccctggcacctctcctttggagccaccttgtccctggctagacagtcacattttccagtgccgttttggaaagatgttgcctttggagaaggcgtttgcctcccccaggagctccccagccccgccggatctgcccacgccggggtcagcagccggagtccagcaggaagaacccgagaccatccctgagaggacccctgctgacctggagttctcccgcctgcgtttccgggaatttgtctaccaggaggctgccgggccccaccagaccctggcccggctgcatgagctgtgccgccagtggctgatgcctgaggcgcgctccaaggagcagatgctggagctgctggtgctggagcagttcctgggcatcctgcctgataaggtccggccctgggtggtggcacagtaccctgagagctgcaagaaggcagcctccctggtggagggcctcgctgatgtcctggaagagccaggtgggctgtcacagaggagaagcatggctcagaggagatggggaggggatcctggaaggccccagtgccagccatggcttgcctgagatagttaagttcccca

SEQ ID NO: 22718 - DNA, 2300 bp, Homo sapien
tagaatgtcttccaacagcacttaagagttccgcacttccctttaaactctggtagccacagagagagaggttgatagttgactctctgcaaacttctggttcttttttttttttttttttttgagacagagtctcgctctgtcacccaggctggagtgcagtggcatgatctcagctcactacagcctccacctcccaggttcaagcgatcctcctgcctcaggcctcctgagtagctggaattacaggtacccaccaccacacccagctaatttttgtatttttagtagagagggagtttcaccatgttgaccaggctggtctcgaactcctgacctcaggtgatctgcctgcctcggcctcccaaagtgccgggattacaggcgtcagccactgtgcccagccctgtttttttgttttgttttgttttttaaacagcttattgagtgtaatttacatactgtgaggtttacctatttaaagtggacagttcattggtttttaatatgcagtactcaccgttgagcattttcaccaaccaaagaagaaatcctgtacccattagcagtccctcctcattcccccaaaccccagcccctggcaacagctgatctacattttgtctccatagatttgcctgttctagatgtttcatttctgtggaatcacacaccacaccccaccccacagcggtgaggtctttgcgccccatattctggtggagcactgtcagagcagaacttgacgacctgagaagggctcacagcacctggcctggtgtggtttactctatggttttccctataaaactgggcttgctgcggctgtgggaaatccccttccagctgtctctgtggaccttcagacccaggcggttcctgggagaaggtggacagctgcagttcacacccttgtgtgtccatagccagtgacatgagagcccgaggccgactggaggcctggacagctgtgacccgctgggttctgtttagtgagctcattgttggtgcacagttacaatcaagagagttcatcctgaatactggcttcacttaatgatagggctgccctgtatgtggggattcagctgagggtggggcacaggttggcaggacctgaactctctcagtcattgtggtctcccccaccccccaccccccattgtccttgctcctgggtacttcctgcccctcccgcctggttctgtggatgctttggtcaaagcctacatcctgcaccatttccagaaacggggaggtgggtggttgttcagtggcctccagagggagccccccgctccctacgcttttttctaaataattttatttcagatttgtggtggttttaactggaggaacagtcttgacacctagctccttcatgttattagaaattgacatccctataatctatcttttttttttttttttttgagacagagtctcaccgttgcccaggctggagtgcagtgacgcagtctcggcttactgcaacctctgcctcagggttcaagcagtcctcctgtctcagcctcccaagtagctgggaatacaggcacccaccaccacacccagctagttttgtatttttagtagagacggggtttcaccaggttggtcaggctggtctcaaactcctgacctcaggttatccacccatctcagccttccaaagtgctgggattatgggcgtgagccaccgcgcctggcctatttcaaggtttttacatccaggtttacatagagattgtcaagtaatttttcattttcatcctattcatgactgattttttaaaattctggtaatgatgctgggcgcagtggctcacacctgtaatcccagcactttgggaggctgaggcgggtggaccatttgaggtcaggagtttgagaccagcctggccaacatggtgaaaccccatctccactaaaaatacaaaaagtagctgggtgtggtggtgcatgcttgtaattccagctactggagagactgaggcaggagactcgcttgaacccgggaggtagaggttgcattgagccgagattgcgccactgcactccagcttgggtgacagagggtgactcggtctcaaagaaaaaaaaattctggtaatgcacagaatgagttaccctccatttacatgctactttttatctacatgagtacaacactgaggttctactgatgcctaacaagcgggtttcttggaaatctgtgtgaactctgggtgtggtgtctttgttctctggcagctggggtggctgcgccctggccttatgcaaggccattgccttgtccg

SEQ ID NO: 22719 - DNA, 2300 bp, Homo sapien
tacatggatgcactgcaccttcagtgcccctgaccagaccttagctgtgcatctcttccatttggcagttcctgagttatatccattaaaataaactggaaagactgggcatggtggctcatgcctgtaatcccagcactttgggaggccatggtgggaggattgcttgagcccgggggtctgagaccagccttagcattatagtgagaccccatctcttaaaaaaaaaaattagctgggtatggtagcgcacacctgtagttccagctactcgggaggctgaggtgaggatcacttgagcctggaaggtcaaggctgcagtgattcatgatggcaccactgcactctagcctcagtgacagagtgagaccttgtctcaaaaaaaaaaaaaacatagctttcaaaactgagcaatttttttaaaaattagaaaatgggcaaaagatacgaacagatactttaatgaagagggtatacaaatgccaaaaaaatcattaaagtgtgctcaaacttgttagcaattaagggaaatgcaaattgaaaccacaatgatatatcagtacatacctatcagaatggccaaaataaaaaatagcaaaacacaaatgctgataaaaatgtgaagtggattcacacattcattggtggtgggagtgtaaaatggtccagctactctgcatgagagtgtggcagcttcttacaacactaataagcacgtgttcattgtgtgacctagaaactgcactcttgggcttttatcccagaaaagtgaaaacttacgttcacagaaaaatctgtacacgaatgttcatagcagctttatttttaatagcaaaatacttaaaacgatcctaatatctctcagtgggagaaggtttaaactgctatataccatagaatactacttctcaataaaatggaatgaactgttgatacatactacttcaatgcctctcaaaggaattatgttcagtgaaaaagccaatctgaagaggccacatactgtatgatcccacttatatgacactgtgaaggcaaaattgtagcagtggactacttagattagctgttcctggggttatgggtggggagggagtgactaccaagaggcagcaggaggatttttgggcagtggagctattctttgtcccgagtttgttggtggatatgagttaaaattcataaaactgaataccaaaatgtgtggtgtatgtaaatttaaaatatataaactgttcagatatacattttaaaaatcagttcacacaaaaacgaccaaaatggcatcctcataagcgcctctatctggaaaactgaaatgggaagcagctcctggccctatcctgccttccaggggggctacatttatatggggctttgccaaagccctcaccccagctgccactcacatttccctcatttcagcagctcctgaatccctggggtgggtaatctttgagttctatccactccttgaaactgtagaacccattttagcgcatcagtgtctctgggtctccacctcttgtctccccagtactgggtctgctggtccctgtctctgtatctctgtccagatctgtctcagcctcgagtgctccttttctctgggtctctctcttttcctgagcctgagctggtctctttcttttcttgagcccatgctggtctttccctttcttgatcctgggctggtctccctcctttcttaaccgtgagctggtctctccctttccgtgtccgactctgtacatctctgtttcggggaccccagggcgtcttggtctgcccccgagcgtctgtgggccttcatgcttctctccctcccggtctgcgcgtctttttgtctttgtttctccgtttctcaccgtctttgtttctccgggtctctggctgtcaggggtctattatttacccgcttgtttacttcgttgccatggtgcccaaaatgacgcaggcgccggagtgggcgggacgccgggaggccacactcgcgtctgattggccatgcgcactgtcacctgtcacggctcccttgctcgccccggtgcgcggcacagcctcgcggcattgtgggagtcgtagtccgcggtgaggcccagtgcgcaggcgcagtttgccggccgccatcgcgcactggggctccgggcggctgggaccggcctggggtagctgcgcagcaggtgggtcggtcccggggatgcagcgcgggggtcagagagcgaccccaacagggtagacggtgaggacgcctcagtgggcagcgttagggaaaggggccagggtgttcccggggttgg

SEQ ID NO: 22720 - DNA, 2300 bp, Homo sapien
gaccacagttgacctcgggtaacaaaggtggagaagtgaaactgccaatcaggagaggctactgtaattcaatcacagaggatagaaactcctgaccaaagagaatatgagatgtggactaggtgagttccagatggattctggggtagcctgggccattgcaagtttggctgaaatgagtgggacatgagatagagaagaaggtatcctggattatctggatgggcccaatctagcacacatgcccttaaaagcagagattgtgggctggagtcagatgctgaggaaggagcgagtagagagctgaagtgtgaggaatctactccctgttcctggctttaaaactggaaaggggctgggcacagtgcctcacacctgtaatcccagcactttgggaggccgaggtggatggatcatttgaggtcaggagtttgagaccagcctgaccaacatggcaaaacccatctctactaaaaatataaaaattaaccgggcatgatgtcatgcacctgtaatcccaattgcttgggggtctgaggcaggagaactgcttgaacctggaaggcagaggttgcagtgagccaagatcgtaccactgcactccagcctgggcaacagaacaagactccatctcaaaaaaaaaaaaaaaaaaaccaaaaaaccaacttatgttcatcagaaagcaatattatgcaagtgaaagggcaagtgacagagtgggagaagaccattgtagagccaacaaaagattggcctccaaatatataaagaactcagcatctcaataagaatgcaacttaatagaaaagttggcaaatgacttgaaccagccccctcataaacaaggaaaagtccaaatggccaataagtgcatgaaagtgtgcccaactttactactaatcagagaaaccacaatgagatgctacttcacatcacactaatggcaaaaatgaaaacaacagatagtaccaagtgttgacaagaatggggagcaactgggaatcttatacaccactgcagggggcactgtaaactagtgttatctcctaacctgaacaggtgcacccatgaagagacagctgcagtcctaggcattcacccaacagaaatacaaacctgcttatcaaaagatgcacacacaatgttcacagcaggttcctttgtagtaactcccaactggaaacagcccaaatatccactgacaggaaggaaaatgagcaaatggtgtattcacagtggagcattttatacgatcacataaaatgattattgtgccctggaggattacacaaccaagtgaagtggttattgcaccatggaagattacacaaccacatgaaagggttattgtggcgtagagtattacacagccttgtaaagtggttattgtgccatagagtgttatgcaatggcgtaaagtggttattttggcacggaaccttatgcatggcaatgggtttttgtgccatggagagttacacaaccgcatgaaggggttattgtgccatggagtcttacataactgcgtagaggggttatcgtgtcgtggggtcttatacaaccgtgtaaatgggttattttcgatggagcatcacacaactgagtaaaatggttattgtgcacggagcgttaaacgaccgcatgaaggtgtcagcgtccattggcgcgttccacacccctgtagaggagtgactccaggccccagtccccgacgccgtgagaggaaggagacacagcagcctacgagtgggacccgtgtgaacgagattctgccgagaccacgcgcgcccagggtggtgcaggctcgcaagcggatatacggctggtcaacctgagagacaaggtgctcgtccgcagcggctcaaggcagcccacgtgcgctcccggcgtctttccgtctgttaaacctcacctaccagcagaagcgaaggacaaagaaccccgaaaggcagcactgcgagcgctcccaggttctggctgccaggcagctgcggccacggccccgccccgggccggccccggccccgccctcgtcgcactaggccccgcccccagcgtccggtgtcaccggaatatcgcatccgggaactctgcgcgcccatgcggagagtcggagggcgagctgacgaggacgctacggcggcgggaagtgagttccgtcctctcgcggcctctcgggtctgtttcctccgttcccgcccaccggtcgcggagccaaggcctagtgagggtggggtcaaggactccagagcggctggggctgggcggtggctgcgtggtcgctctttctgtctgtgagg

SEQ ID NO: 22721 - DNA, 2300 bp, Homo sapien
cacacacacacacatatacacatatacatgtatatatatttaaattgcctagaatgtagacatatatgtatgtatgtattctgaggcaagggtctattttcattttaccttaaaaaatagaaagaaggctgggcacaatggctcatccctgtatttgcagcattttgggaggctgaggtgggataattgcttgaagtttttgagattgaggcttcagtgaaccaagatcacaccactgcacttcagcctgaatgacagagcgagacccgatcccaccaaatgaatgaacgaatgaatggacaaccagttgtcttaatattgtgaagtctgaatggacaaggatggtgacaggaagattgatatgcatgaagacacatgcaaccatttacagaatgcccttcatcccctagccttggagactgctttgtacatgatccagtttttttttttttttttttttgagacggagtcttgctctgtggcccaggctggagtgcagtggcacgatcttggctcactgcaagctccgcctcccgggttcgcgccattctcctgcctcagcctcccgagtagctgggactacaggcgcccgccaccacgcctggctaattgtttgtatttttttagtagagacggggtttcaccacgttagccaggatggtctcaatctcctgaccttgtgatctgcccacctcggcctcccaaagtgctgggattacaggcgtgaccaccgcgcctggccgacatgatccagtttttataacaaccatgcagggcagtctttgacagtttttgttttgttttgttttttgagatggagtctcactctgccgcgtaggctggagtgcagtggtgtgatctcagctcactgcaacctctgcctaccaggttgaagtgattctcctgcctcagcctccagagtagctgggactacaggcatgtgccaccacgcctggctgattttttttgtatttttagtagagacggtgtttcaccatgttggtcaggctggtcttgaactcctgacttcaaatgatccacctgcctccacttcccaaagtgctgggattacaggagtgaaccactgtgccccgccaggtcattgacagttctaagacttagacccagaacttttaggtcaccaagcctgtgctttgtcctatccatgaatgcagaactttgatgacagagctggggtgagaactgttccttcagtgctgttgtaagctcattgtgaagtcagagctttggaaatgtgtactgatgggcagtgtgtgacagggacaagaatgcagtggctgggatggaattctagggggagcagggatgcttggcctctggtctctcacatctcaaactaatccttttggtgatgatttatcccgaggtccattcctcctgcctgctctctaggaagatgaaaatgctacatggctctttttgaatctgttcttggttccattccttggctacgattttacctcttccttgtataaatttgaatttaaaagagaaaacaagtaaaaaaatacacatctttacacctagcccatcatcattgtctgtttctcttacagataaagcttcatatacctaagtctgcatttttcttctttttgcagtttgggatatgagattgaaaatgacgactcggaattttcctgagagagaagtaccctgtgatgtagaagtggaaagattcacaagggaagttccctgcttgtccagtttaggtgatggttgggactgtgagaaccaggagggacacttgaggcaatcagctttaactctggagaaaccagggactcaggaagcaatttgtgaatatcctggttttggggagcatttgattgcaagctcagaccttccaccgtctcagagagttctggcaacaaatggtttccatgcacctgactcaaatgttagtggtctggattgtgaccccgccttacccagctatcctaaaagttatgcagataagagaactggtgacagtgatgcctgtggaaaaggcttcaaccattccatggaagttattcatggaagaaatccagtgagagagaagccctacaaataccctgaaagtgttaagtcttttaatcattttacctctcttggtcatcagaaaataatgaaaagaggcaagaaatcgtatgaaggtaagaattttgagaacatctttactctgagctcatcgcttaatgaaaaccagagaaatctccctggagagaaacaatatagatgtactgaatgtggcaaatgcttcaaacggaactcttctcttgttttgcatcaccgaa

SEQ ID NO: 22722 - DNA, 2300 bp, Homo sapien
tatctaataaagggtgcctgacttttttttttgagacgagagtatagctgtcacccaggctggagtgcagtggcacgatctcagctcactgcaacctccgcctccaggattcaggcaattctcctgcctcagcctccggagtagctaggattataggcacccgccaccacccccggctaatttttgtatttttagtagagacaggtttcacaatgtttgccaggctggtcttgaattcctgacctcaagtgatccacctgcctcggcctcccaaagtgctgggattacagttgtgagccaccgcgtccggtctccgactgttcttttaaccagatactgttggacttttctccatatgatctttaagttgttttattctgtgagctgggggcggggggagtctttgaattggaattgctatacttttgtttagtagttttgtgaagattttttttttttttttgagaccgagtactaggattgcaggcatgagccactgtgcccagccaatttttatatttttagagatggggtttcaccatgttggccaggctcatcttgaactcctgacctcaggtgatccccccagcccggcttcccaaagagttggaattacaggcatgagccactgtgcctggtctgatacggccttcatggagaaattaaaaaaatactttccattcaggaataatatgtcagtgtgttctgaacttaacttcaggtctgttaatgaggtttttgtattttcttcatgaagatcctttattgcttttgctaattgatttccaagttgctccaaccatcactattgtgagtgacaatttaatcactattatggcttagaattttttttctaattttcatttcaaaattgtgaagtatttcaacctgcggagaggttcggagagtaatagaataatctataaataataaagatgacacccatgtatcatcgagattttacctgtgttaacatgtagtcagattttcaggttttgatttgttttttcctatcaagcatcacaggtgtaactgaggtctcctttgtctcctccccaactctttcccctcagttgccactttcttgaggttggacaatctatctggtccatgttattgttactttactacttatgtatcaatctctgtataacatatagattttgtgtcttttatttccaggtaagttgtatcatgtggataagtgcacagtttacttttcgaactgtttttggagaactgtctatcttgtatataagttagtccttttttttttttttttttttgagacgaagtctccctcttgtcccccaggctggagtgtgatggtacgatctcagctcactgcaacctccgcctcccaggttcaagtgattctcttgcctcagcctcccgaggagctgggattacaggcgcctgccaccacgcctagctaatttttgtatttttagtggagacggggtttcaccatgttggccaggctggtctcaaactcctgaccttaggtgagcccagtccgtttgttttaaccaccccctattgctccgttgcacataccacagtttctctcttccctgtcagtaaatatttaggcttccccatgctaaagtttaagagaaccactgaaagaatgaaaatgtgtagttttcattttcaaccggctattgttactacagaggaaagttactggctttgtttacatttcttagatctagtcattttaacaaattaggcctcccaaaatgctgggattacaggcgtgagccacgcacccagtaaataattatattgccaatgaataatgagtgtacttattctgaattttaacattattatctcaaaaaaagattatagataaagaaatattttaggaaattatgcagtaaataaaaggaaggctctataacaaaagaatgatagcatcgggttaaaaatcagaggagaccataggagaaagtaaatgcctgcgcgtccgccccgaggcaagtccacgccagggtaatgaataacccggtacccgcggccgccccagcgttgggcgggggaagctcggggactccgcgcacgcgcacatccttgtcccggcagccgcgcaagcgcaatcgcccggaacatggctgccgccggccgccaaccgtaagtgccgacgcatccctgagccctgcgctgcctccgtttcctgcggagggaagtcttggcgggtggaggtccgccgggtccttgtggggcggcgaggggcgcgtccgcgggtgggtttcacctgggtggtgggcatgtcgggcccgctagggcgagggtct

SEQ ID NO: 22723 - DNA, 2300 bp, Homo sapien
tacccgagcatggccagagcatacgccgaggctaaggaggcaccaagagcgagcgagggctgccagcacgctgtcacctctcagtgccactgcactccagcctgggcagcagagcaagactccgtcttaaacaaacaaacaacaacagaaaacaacagagacatgcaaagcttagagaacatgagtatctgctgggtgaacgtgggtggcggtgaccttctcacactgatggtagaagacgtatgaaaggaaatttcataatatataactaaaactattttaaatatttatgccattctcgctagcatctaggaattgtacttgtagcagttcttccgaaatgtgcttcagtaattaaacagtggatttgcattgaaggtttaccatgcagagcacacaggtattagctaatacagtcctcatacatccctgtatgttatactctactctgatggttaaatgacaaaattttagagaaatgaaatcttttgactcagtttatgtaactagaaagcatatgtgctaataagcagatgctaattggcttgaatccattagtcactcatttttatttttttcttgtgagacagggtctcactgtgtcacctgggctgaagtgcaatcacagctcactgcaggcttgatctcctgtgctccagtgattctcctgcctcagcctctcaaagtgtgagattacaagcatgagcctccacggctggcccatagtcactcaatctcctgtttaattactatcgaaataaatgcaataatggatacttggatcaagcacatattgtcgaatattaattatctaacccagggcctgggtacgtgggtgttcacacaattttttttttcttgtgagacagggtctcgctctgtcgtccaggctggagtgcagtggtacaatcattcctcaacatccccgggctcaagggatcctcccgcctcagactcctgagtagctgggactacaggcgcgcgccacgaagcccggttaattttttaaatttttttgtagagacgagttctcactatgttgcccagactggtctcaaactcctgagctcaagcgaccctcccttcccagcctcccaaagtgcagaaagtacaggcgtgagccactgtgccaggcccacacaatcgtttcaaattttctgcatgtttgaaaatgttcttaataaaatgtgggggtaagataaatgcaatatttatcaattttgcagttcttacctctttggctgagggaattgcttgctcctcagggactctttctttctcttttcttccttccttccttcctcccttcctctctctctttctccctttctccctttcttttgagactgagtttcgctcttgttgcccaggctggagtgcaatggcacgatctaggctcaccgcaacctccgcctcccgggttcaagcgattctcttgcctcagccttcctgagtagctgggattacaggtgcccgccaccacgcccggctaattttttgtatttttagtagacggggtttcaccatgttggccaggctagtcttgaactcctgacctcaggagatccgcccacctcggcctcccaaagcgctaggattacaggcgtgagccactgcgctcggccctcctcagggagtttcaaaactaactgtcacaaagccactggttttctctgtattaataaaaaaaacctggcaagaacgcccaggatccgaaagtgagcttcagtctcaagacagtcagcgaccgccctccgggccagcgtcggggcactgaggggcctctggaaagtgaatcacagggagcaccgcggggtttcaggattttggctgtccgctgcccaagccttggcatcacgggcgtctttccctctcacgttggggtcccttcaaggtcggcgccaggtatcctcccagaaaacctgcacaccgcaacgcccagcacccccacagcctccctgctgccactggggggcgccatcgtcgcggctaacgcaacccgagggcggaagcggtggagcgccgcgccgcggggttttctgggagatgtaggcggtggaagcacactcatgcgcagcaacggcgccgcagtgggcgctcatgcgcaatggagggtccggcgtccgccttggcgggtgggagtgatgacctgcactccccaaaccactgcgggatagaacggggccgagtgctctcaggggtggccgctaccggggcggcccgagacacggctgcgggttccagccaacaggcccggagtcgcggcctcggctccgccgtgggtgcacgggctagggctg

SEQ ID NO: 22724 - DNA, 2300 bp, Homo sapien
aaaattagccaggtgtggtgatgcacaccagtagtcagtcctagctacttggaaagctgagatgggaggaacacttgagcccaggaggttgggccagcagtaagccatgactgcagcactgctctccagcctgggcaacagaacaagaccctgtctcaaaaacaaattcttttaatcaaaaatcaggttttatcctataccacataaatagaaagaaatcattagaagaatttccacctgcctgggcaacatagtgaggtttctgtctctacaaaaaagtacaaaagaggccaggcggggtggctcatgcctataatctcagcactttgggaggctgaggtgggcagactgcctgaggtcaggagttcgagaccaggctggctaacatggagaaaccccgtctctactacaaatacaaaaattagccaggcatggtggcacacacctgtagtccaagctacttgggcagctgaggcaggaaaatcgcttgaacccaggaagcagaggttgcagtgagccgagattgtgccacctcactccagcctgggcgacagagcaagactctgtctccaaaaaaaaaaaagccaggtgtggtggtgtgcacctgtcccagctatttgagaggctaaggtgggcggatcacttgggcccaggaggtggaggctgcagtaagctgtgatcgcaccaatgcattccagtcggggtgacagagcaagaccctgtctcaagaaaaaaaaaaagaaagaaaaaaaagaatttccaagggggtttgcttccttgtgattatgaagggctagacgtatcctattcaaatccagaacaaaacaagactattagtaaacatgactacttaacatagctctgtcatactagctaggactatacaatgttaattttttaaagttgaaatatggaaaaagaagatatcaaattacttattaattggggatggtgttgtatctataatagacacgaaaaatccaatgaaatattattagactataagatatctgcacagtctctgagtaaatactcctatgccaaaatcaacacactaacagcaacaattaaacaatgtgtagcctgaggttggatcctccacagtgaccaaaaaaaccaacaacccgtggaacaagtttagcaggcagtgtacacgaccaccagagggaggcagagggctgctgagacctgccaggaaatatcaagaaagaggacacagggtcctgagcactgagagagatcattagggccctcaggtcccaagaagacaagaccatactgggacctgggacctaaggaagataagaaaacaccagatgtcggtccttgaggaagccaagagaatacctccttgtcctgagctcccaaggaagatgagagcaccctgggcccaaggatgggtggcacacaccaggtcctggacagctacagacttaggtttcctctccctagacatgagcacctcagcttccaggagcaaactggaccacagggggacactaggcagaggatcctgctcctcctccccaatgcctggggtacagttagccctgatcatctctccagaactagggtagacgtttggcctcattcccatcacacttgtggtccacctagtcttccctccttccccttgcacacccctgaccttcctactcccttcctctaatccccagaactagggtggacgtttggccacgttcccatcacacttccggtcctccgagtttccctcccctccctgaccttgagtggacacttggccctgtccaccctcactttcaggcaggacccatctcccagaaacataagtgccgtcagtcccaactcctgcacacttccggctctcccagtcctccccttctttctcgactttgaaactggtggaacttcagtacctctccccactccccccgcgacttccgtcttccagtccccctccttccccaaaagttgcgtggactctagccccgcctcctacattctccccgccctccctgtccccgcccctccacccagatggacggccagttaggcccgccccctgcacttccggccctacccgcccttcctcttcccaagggacgtcataattaatcccgcccccaccgccacccaaccaagcatcacccattccagcacttccggcctgacccctgtccagcgcctttcctttctccagcttctgctctgccccaagagtggtcgccttcgtggcagggcacgactctctcccagctcgggtcgccgcccacattagtgtggggccctgcggcctagcgtccctcaccagaggcctc

SEQ ID NO: 22725 - DNA, 2300 bp, Homo sapien
tggaaaaagaagatatcaaattacttattaattggggatggtgttgtatctataatagacacgaaaaatccaatgaaatattattagactataagatatctgcacagtctctgagtaaatactcctatgccaaaatcaacacactaacagcaacaattaaacaatgtgtagcctgaggttggatcctccacagtgaccaaaaaaaccaacaacccgtggaacaagtttagcaggcagtgtacacgaccaccagagggaggcagagggctgctgagacctgccaggaaatatcaagaaagaggacacagggtcctgagcactgagagagatcattagggccctcaggtcccaagaagacaagaccatactgggacctgggacctaaggaagataagaaaacaccagatgtcggtccttgaggaagccaagagaatacctccttgtcctgagctcccaaggaagatgagagcaccctgggcccaaggatgggtggcacacaccaggtcctggacagctacagacttaggtttcctctccctagacatgagcacctcagcttccaggagcaaactggaccacagggggacactaggcagaggatcctgctcctcctccccaatgcctggggtacagttagccctgatcatctctccagaactagggtagacgtttggcctcattcccatcacacttgtggtccacctagtcttccctccttccccttgcacacccctgaccttcctactcccttcctctaatccccagaactagggtggacgtttggccacgttcccatcacacttccggtcctccgagtttccctcccctccctgaccttgagtggacacttggccctgtccaccctcactttcaggcaggacccatctcccagaaacataagtgccgtcagtcccaactcctgcacacttccggctctcccagtcctccccttctttctcgactttgaaactggtggaacttcagtacctctccccactccccccgcgacttccgtcttccagtccccctccttccccaaaagttgcgtggactctagccccgcctcctacattctccccgccctccctgtccccgcccctccacccagatggacggccagttaggcccgccccctgcacttccggccctacccgcccttcctcttcccaagggacgtcataattaatcccgcccccaccgccacccaaccaagcatcacccattccagcacttccggcctgacccctgtccagcgcctttcctttctccagcttctgctctgccccaagagtggtcgccttcgtggcagggcacgactctctcccagctcgggtcgccgcccacattagtgtggggccctgcggcctagcgtccctcaccagaggcctccccttgcctagctggaccgccgagggacatcgacgagtatcctcctcctgctgtccccggcttcgcctgccgcccctaaccggccagtcaagatggccgccgctgggtgaggcaagctggcgcgccgcgggggcgtctgggagttgtagttcgggacggcgggctgacgcacttcgccgccggccgacgggcgccattgtgcggcgcgcgccgggtgagtgccgcgcgaaacctgcgtccgtcgggggctgcgctgggcgggtccagaaccgttagttgggggcgagcgcggcctctgcattttccgccgagctcgggtaccctgagccggccgtgcctgcagtcctcccgccgctctgtgggatggggtcggtgacccggaaccccgaggggagacagtgctttcggggcgccgcggtggagagaacagatcgcctccggaagcgtggggtctgggccagggaggcgatcccctccgatgcgcgggacagaggaggctcggtgtcctctcggggaggggaaaactggtcctatccagtcctgtgggagtcctatgactcactctgggcgttttccagtttgggtggacttgtcatttcccgctgagggagccgttcctgggcggaggctgcggtagctccccagcggacaccttaagcctctccctcccctcccaacttcggtttcctcaggactctgcccacttccaccagagacacattgagaaggaggaaactatggcctccaggcttccgacggcctggtcctgtgtgagtagaggcttccttcagcttttgagtccgctactgcacctgggaggatgcggatggtggtgagataccaccttccctgagatacccccatcctccagagcacctcggggagggggtagagattggttgggcatgaga

SEQ ID NO: 22726 - DNA, 2300 bp, Homo sapien
tgtgatggaagggagcagaggttggagctggcactgccagtggggactttagtcctaaagcaaagcaaaatgttcttctaaaacagtagggctcgatccctgagttccagaaactggtggcaccactggatttgacctttagagatttaccaggctgcatgtgtggtggatggtggacagaggatgggggcgaggctggacacaggctacccgcagctattgccatgccctctgatggggtggtgtcttggataggagtgatggtgatgtctgactggggagagactacacgtgtggagtgtgtatttgggaataagactgcaagacttggtttcttcatcaggctgagtttcacagagcgtgcatgcttctgcattgctcacctccattttccacatttcacgggtgcccagaagatgtttctgatgtgaacgaatgattgactggttgatgtttgtgattgcaggaaaggggaaggtatcctgcagggggatggtgggattctaagaggccagggcatcctggagatcgggtatccgaggcagcagggcaggcacttgcatgagttgtgtcagatgcaccaagtctggggtgctgtacttggcagaataattgccccaaaggtgtccatgtcctgactcctggaccctgtgaataagttgcctcacatgacaaaggggactttgcagaaacaattaaggatcttgagagggagagatgcactggattatttgagtggatctaacataaccacaggggcccttaggagagggaggctggagggtcagaggagatgtaatgataggagcagctgatagaggaagaagccataagccaaatgtttggggcagcctctagaagctggaaaaggcaaggaatggattctcccttggagcctccaaaaggaacatagccatgctgacaccttcattttagcccagtgaggcacaaaccagacttctcatctccagaaccataaggtaatacatttgcattaatctgagccgctggcattgtggcaattcactataacagcaataggaaactagttagttaggtgccaaggagacagttgtggggttaatgaggtgaaagtcagtgaattcaccctgtgtttaacctcaggggtgaataaaataaattagtgccacagaagacaatgggaagaggctttccagagaaccctgagaatctcacattatgtgatcagtgtgttagttgggacgcttgagtgtgactgctgcaaagccttgcacagaatggctcaagggagaaggagaatttattggaaaagttccagggtgctcgagcatcaggcagggctggacccaggagctccaatagtgtcctccagacttgtcctgtccctcattcttacctcttctgccctccactggcttcatcatgggcaggctgtctccctgcatgggatttctctttcccaaatgttccaactaaggccttgttggctccaatcatctggctataggctgtgttcatcccagatctaatcactgtggccaagagaaagggatggtccagtgtgccagcctaagtcatcttgtggcccaccttgatggtgggggtagattagcattgtggaagcctgtggaccatttggggtcatgtgaggaaggttagaatgaaggagccgtggttacaggggcccttgggccaggtggagctgttgttttcttaggtggaggagacttggtgacgttcacctcaagatggctgcatttcatgggtccagggaaagtctcaccttccatgaggtgggaggagagagggaagaaggaagaggtgcccaaataggcagggtgcagggcttggaggccggaaacaggggctttgactctaaggagggggcgtcagtcagctgcctcacaggaggggctggggccctcagcagcccccggaaagggaaggagtgggaccagagtctcagcagtgaggacactggtgccctgtgacccttggagggtgagccatcccgggcccatccaggtgtgggcactcgggcacgtgctgtgaggggagcagagctggtgggaagggaggacaggagcagaggctgtcatggagccacagtacgatgcaggggtgcggtggccccatgggttgcagagaggccacccttgccctgcctaagggtccccacacctgctgacctcctctggctggtgtctcctcccagtacttcctgcaggacaacctgccgagggcaccacctgctgcctcgaggtcactgcccagcaggaggagaagcaggaggatgcagccatctgcccagtgacagt

SEQ ID NO: 22727 - DNA, 2300 bp, Homo sapien
ttttttttgagacggagtctccctctgttgcccaggctagagtgcagtggcgtgatcttggctcactgcaagctccgcctcctgggttcagggccattctcctgcctcagcctcccaaggagctgggactacaggctcccgccaccacgcccggctaattttttgtattttttgtagagacggggtttcaccatgttaaccaggatggtctcgatctcctgacttcgtgatcggcctgcctcagcctcccaaagtgctgggattacaggcgtgagccaccactcctggcctgaaattttctataataaaaacaaacaagatcatttattatctcataatgaaaagtccctgaggtgagcataggcaatgttgattcagtggcacaaagaggattcattccatcatggatactggttctttccatttttctgctgtgccattctcagcatgttgcctttacctcctggggtggcttcctcatggtgccagtgtgcttgtaattgtcctacacatcacatacagacatcacggtccaggggcaaaagaagacacattgctatcttatgtccacttttaagactgagggaaccggccgggagcggtggctcatgcctgtaatgccagcactttgggaggccgaggcgggtggatcatgaggtcaggagatcgagaccatcctggctaacagggagaaacaccgtctctactaaaaaagaaaaattacaaaaaattagccgggcgtggtggcgggcgcctgtagtcccagctactcgggaggctgaggcaggagaaaggcgtgaacccggaaggcggagagtgccgtgggcctagatcgtaccactgcactccagcctggtggacagagcgagactccgtctcacaaaaaaaaaaaaaaaaaaaaaaaaaaaaaaagactgagggaaccttcccaggaaacccctagcagccttatttctccttggccagaatatccttgcctaattcacacagcaagaagcttgagtccattctgattagcttagaatccatcaagatcctcccttagggagttagattctagatttcccggaagaatctaaaaattgcagggtcgtgctagccaggtatgaaaataagcaagtaaaaagatgatgactgttgggtaaagctatcgacaaggtcagctacaaaacagtcaagccaaggaaggctagtcacagatgcaccccagacacaaaagcacagtccaggagctgagggtgcctgagccacagtggttcccgcctacctggccttcgtaggaaagtttcctgtggtctccctcattgaagagccaggacgggtcaggcggtggtgggtctcagacattgagccccacaacgcactgagactgaacatcagaccatttataataacagaactctgtcccacaacttctgcagcaataggtacaaaacagaacttggtcactgccagcctccctatttttttccctgtcccacttaggagctaccacagaaagccaaataggctcgactgagcgatcacctaggacgaatcgcctccagttagcgtgcttccaccttccactcggaatgctccaagcagggcactcccggggctttgtttctatcactaggacgcgtccccacgcccaggctgtccctgagtccctgccacaggcgcagatgttggcgggcgcccttgcccctgagctcccggttaacggccttggactgttctcatggctcagtcttggtctctctccccagcagggcaaggcgccgggaaggcacccgagatgacagcgccgagccccataggcgctagtcccgccctggacgccgaccgccgcctccacagtctcggcttcggttgctggatgagaaccagcgtggcccgtttaagggggaggggacaggcgctgcaaggagcagagccgcgggaagcaactccctaagccacaatgctagtcgcgaacacaggaaaaagctcatcccgccgccgcggggccccatgctcccgccggcaatgactatgcctgtgggagcaacggctaccggcgcgcggccttctgggagttgtttgttgcgcggagcgcgggcacgtccgccggccaccggaagcaccgccattggccggtgcgtgcaggtgagtctggcggcctcaaggttggctcggaggtttcactgttagccgggtgcggccggagcgcaggaccaggccagagccgccccaagtgatctgggcgtgccggagaaacgagcagggcctgcgggggtccctcatgcggcgaggccgagcaagggcaggggcctgat

SEQ ID NO: 22728 - DNA, 2300 bp, Homo sapien
acacattgctatcttatgtccacttttaagactgagggaaccggccgggagcggtggctcatgcctgtaatgccagcactttgggaggccgaggcgggtggatcatgaggtcaggagatcgagaccatcctggctaacagggagaaacaccgtctctactaaaaaagaaaaattacaaaaaattagccgggcgtggtggcgggcgcctgtagtcccagctactcgggaggctgaggcaggagaaaggcgtgaacccggaaggcggagagtgccgtgggcctagatcgtaccactgcactccagcctggtggacagagcgagactccgtctcacaaaaaaaaaaaaaaaaaaaaaaaaaaaaaaagactgagggaaccttcccaggaaacccctagcagccttatttctccttggccagaatatccttgcctaattcacacagcaagaagcttgagtccattctgattagcttagaatccatcaagatcctcccttagggagttagattctagatttcccggaagaatctaaaaattgcagggtcgtgctagccaggtatgaaaataagcaagtaaaaagatgatgactgttgggtaaagctatcgacaaggtcagctacaaaacagtcaagccaaggaaggctagtcacagatgcaccccagacacaaaagcacagtccaggagctgagggtgcctgagccacagtggttcccgcctacctggccttcgtaggaaagtttcctgtggtctccctcattgaagagccaggacgggtcaggcggtggtgggtctcagacattgagccccacaacgcactgagactgaacatcagaccatttataataacagaactctgtcccacaacttctgcagcaataggtacaaaacagaacttggtcactgccagcctccctatttttttccctgtcccacttaggagctaccacagaaagccaaataggctcgactgagcgatcacctaggacgaatcgcctccagttagcgtgcttccaccttccactcggaatgctccaagcagggcactcccggggctttgtttctatcactaggacgcgtccccacgcccaggctgtccctgagtccctgccacaggcgcagatgttggcgggcgcccttgcccctgagctcccggttaacggccttggactgttctcatggctcagtcttggtctctctccccagcagggcaaggcgccgggaaggcacccgagatgacagcgccgagccccataggcgctagtcccgccctggacgccgaccgccgcctccacagtctcggcttcggttgctggatgagaaccagcgtggcccgtttaagggggaggggacaggcgctgcaaggagcagagccgcgggaagcaactccctaagccacaatgctagtcgcgaacacaggaaaaagctcatcccgccgccgcggggccccatgctcccgccggcaatgactatgcctgtgggagcaacggctaccggcgcgcggccttctgggagttgtttgttgcgcggagcgcgggcacgtccgccggccaccggaagcaccgccattggccggtgcgtgcaggtgagtctggcggcctcaaggttggctcggaggtttcactgttagccgggtgcggccggagcgcaggaccaggccagagccgccccaagtgatctgggcgtgccggagaaacgagcagggcctgcgggggtccctcatgcggcgaggccgagcaagggcaggggcctgatgggatcgggatctctccggcctcagggacggggaaggccggtccagtcaggtttcccctgcaggagcgcccggctgggtctgagcttgtcgggaggctctcctgctgcagagctgggagggaacttatagtacctcgcaggtacgggcaggggtggaactgggtgggactgggtgggactgggtgggactgggtgggactgggtgggccctcccgacagagggtgcctgggtcgagggctgcaggggcgggggattcaggctggcgtctggagctctggggctgccgacccagcgggcctctcccggctcctttttcctccctcaactcatcttctgcggcttatccacaggtggcagccaagagcctcctggcacagcggcaccaggcaggtgacgcctattggaccccagaggtcatcccagctccagacgtggacacattttcttccaatggtacgtgaagcttgaaccttgcagagaacatgtgtattttccaagtgaacagaagattaaggccagtccacgcagggcaggggtaactggggtg

SEQ ID NO: 22729 - DNA, 2300 bp, Homo sapien
tctgcaaaacggaatgagagctcccacggggcaaatggtagaatagtggtttttgtaagatagagaaaaggctaattagttaacactaggttacttttcttgtaaggattaaagcagaggggacttccttattatgctgctcaggtagactggaaatctggtttgtttagggatctacctgcttaaagtatcagtctgattatgtggcatttagcctaagtgactctgtcttggtttggtctggtctcatgaggcctagagcaggagctcagtccaaaaccatgtcctctcataattttgtgtaacttgcctaacacctgctccttctcaggaacgaggcccagcaaaaagcagagacggtacagggccagaaggatctgagagagtgtggccagcttgagccctcaggagtcggccagaaggatctgagagagtgtggccagcttgagcccctcgggagtcagctcctccgtccccactggtaacgtcttcaccccttcaacacggtgtgaagggccatgtcatggttgatcttcagtccctcagactacaccatcagccccatgggggtgagcaaataacaagtaactatactgttccctgctatgtgtctggctcttggtaaaatttaaaaaagttaaaaattgttgtggtttgaatgcaacatttttgaatggaaatctgcttccccatttttcttttttaataactttttattttttttttgagacggagtcttgctctgtcacccaggctggagtgcagtggcctgacctcggctcacggcaacctccgcctcccaggttcaagcgattctcctgcctcagcctcccgagaagctgggactacaggtgcccgccaccacgccgggctaatttttgtatttttagtagagacggggtttcaccatattggccaggttggtctcgagctcctgacatcgtgatccacccgcctcgacttcccaaagtgctgggattataggcgttagccaccgcgcccgacctttaataaacattttaatggactacaacagacccacagaaaaagacacatcacaaagtgaacacccacagggagaagcaatagggctgtcagaggcattcgacccagagcgactccattttgagtgagggctaggaaaatgaggctgggctgcattcccagaaaagtaggtattcctaacctctagatgtttacggttaagggaacaaattaataatgggtactaaaacagacccagacttgggagtgtccagatatcccggtatctagagaacaaaggcattcctaattttgctttaaaaataatatcgattcttgaaaaatacagtaagaaaattaatcctttttcacaaacccttgtagcagagcacatctccccaaaatctatttttagcccaaatatacacaagcattgtacctagggtgcatacgttcctcttactttcaggaacgtcctactgtctatggggtagctgtttcacaactttactttctcaacaaacttgcttttactttgcactgcggactcgccctgaattttttcttgcgcgagatccaagaaccctcccttggggtctgaatcggacccctttcctgtaacacaaccaccgctcccagcctccccgcttccagccgctaagcccaaagtcttttatatgaacaaacctctaactcgtcctgtgactttgatgcgtgtgcgttttaggcaccggggagcagagggtaaagcggcgcagctccgggcctcctcccgcgcaagttcccgagaagagcaggtccggcccgcgcagacgtgcacggtccccagccattaggaggagcagacggtccccacccccacaatcagtcatctctcggggtccgcccttgcttcctgcccacgagtgaggcctctggttgcccgcaacctaaggggcatcgcagccccgagcaacaccgcccccaccagccttagctgagtgctcccattggccagaggccagcgggtgggggctcccattggccatcggccataatgcttccattggtcgaaggccagaccagcggagactcccattggccgagggctgtggttcgccgcacggcctactgggagttgtagtcgccgcgtcgccggtgcggccgccattgtccggcgttcggcgagtcgggtggtccctttggctggagtgcctctctggtctggggatcacctcaggcgctgtccttcactgggcgatccagcatggaccccgaggacgaaggggtagcgggagtgatgtctgtggggccgccggcggcccggcttcaggtaa

SEQ ID NO: 22730 - DNA, 2300 bp, Homo sapien
atagaagacataaggcaatatgatcactgaagcaacatgctacaatgcaggctttgaagacaggcaaagggccatgaggcaaggaatagaaggtctgtacctctcacagctggaaaagacgaggaaacattctaccctagaaccttggtagggagggtagctctgctcataccttgattccagaccagaaaaccgatttcagacttctgacctccagaacctaagaacaaatgttttaagccacaaaatttgtagtgaattgttacagcagacacagataaccagataaaacactggaccttgaagctctccattctggtccttgtctcctgtgatggacagtctccaagatgctcccccaccacctctgccaatgacctccagccctggtgtggtcccctccaacactcaacaaggttgactttgtaaccagtaagacaccgtggaagtgacaagagtgtgaattctgaatccaggtcatggaaggtgttacagtttctaccttgccctctcctggatcacttgttctgtgggaagccagatgccatgttgcaaggatccctagcagttccaaagagaggcctacatggagaacaactgaggtctcctatcaacagacatgtgagtgagccatcctggaggtggatcctccagactcaggtctcaggtgacaacagctatgctgacatcttcactgtaacttcatgggcctgaaccagaaccaccagctaggacattccattactcctgtcagaactcgtgagatatttattgttgttccaggtcacgaagttttgagttacacagcaacaggtaactaatacactttctctcaagcctttcttacgactcattccttgtcccccatccacagcaagaacaaaataaaacgtggtagcatttcatgcaaatttggagcaacacacatctgaaaacctgcaacctaagattatcaagtctcactttgtgtaccaaatctgaaataatgcaaatccccatgaacaaaccaacgacaaaaaataaaaaaaagtataatttcaaagttgcagagcttgaggaaggataattattgttgtttcctgccacgcgaggcagctttatggagaacacaggccgcaaccactttgtctagaaagtggagctctgatggccagatggccctgcaaacactgaccgccctgcactgcagttctcccacagtctcgcaggggacgaccctggtggtcactctcatcacactcagtgcgtggtgacccatcattgcccccaagaggttgtgcccaagccccagggcaggggctccgcggtgctggggtcccggtgggtgtccgctgactccacgcgttaaagcatctctattcgatgattcttgccatctgggcacccggccaacgctacaattactgttatcagtcaacacgaggacagaccttcctggaatgggcaagggtgtcggcggggcggagcagaacgcaggagatgggcctgctcgattctctcgggaatgaccgaccccagccctggggaggacagagccgcgtggagcatgcgcattcgggggccaggcgcctggttggaatcccggccccctctctgaccagccaggacggtcaccacgccccgacccgcgtctgagtttccccacgtgtcaagggcattaacagcggtgccgctctcatcgcgccgcgaggtgaaagggtcagtctgcgcgggagacgcttgcccggagcccgccgccgtcgttattgttgttattgttacctgaagccgggccgccggcggccccacagacatcactcccgctaccccttcgtcctcggggtccatgctggatcgcccagtgaaggacagcgcctgaggtgatccccagaccagagaggcactccagccaaagggaccacccgactcgccgaacgccggacaatggcggccgcaccggcgacgcggcgactacaactcccagtaggccgtgcggcgaaccacagccctcggccaatgggagtctccgctggtctggccttcgaccaatggaagcattatggccgatggccaatgggagcccccacccgctggcctctggccaatgggagcactcagctaaggctggtgggggcggtgttgctcggggctgcgatgccccttaggttgcgggcaaccagaggcctcactcgtgggcaggaagcaagggcggaccccgagagatgactgattgtgggggtggggaccgtctgctcctcctaatggctggggaccgtgcacgtctgcgcgggccggacctgctcttctcgggaacttgcgcg

SEQ ID NO: 22731 - DNA, 2300 bp, Homo sapien
ataactcacaccagagaggagcagccccatgggcgaagccggcggcgtgaacaatcctcgagcaggaactcacacctggttcagcatcaacacccgaactccagaaagagctctgcaggcggagcaaaggcagggcagccggaaagcagagccctggctttgtttgacatccaaaaaatcatgcaagagaaaaaccctgtgcacgttattggggtggaagagccttctgtgggtgcttccatgttatttgacatcagagaatccacataggagagaaactttgctgatgacttttaaccacaagtaaaaaatgtggtaagtccacatagtgtactcatggaaggaggggctgggggtagaaatgtcatgggtgacttctgactttctaaggaaatgatgcttcccaagcacccgaggttggttggtcccaaatctatcaaactcagtgccctctttagcgacatattttgtgacattccttccattacaccacagtgagttcacaggtaatataacctacccacctgtgtaatgtcaaaaaaaatcaatatgcggccccattttgtaaaggatcattaaaatgaaagtaatttatggtagagtaaattgtagagtaacgtgtactgacttggtgcagtatttctccttgtcactgtgggcccaattttgccaggagacctagggcaatagcctgttgcttgtggactggtagagggtatgatgttgaccatggcaatactgtgaggggccttcccatgtggaacgtgaccttccaaagtagtgactaactcttggaaaagtttttaacaacataatatgctattgcatttctgggaaattctgggtaaattccaagcatgcagcaattagtttgtgcttatgtgtgaagtccagttaggttctcagttcataccctgaaaactgcttattccacatctgttgatgtggtccactgggggcagttctgttcctcaccatcttggcagcatgcatggctcctgcccacatttcaaccacacccccaacccaattacgtgaccagcccccacgaaatttcacagcattccgtgcaggggagtgtcacagctcctcttgaaaaacatctggtgttgctatgagccagaagttcttttttttgttttttgtctgagatggagtctcgctccgtcacccaggctggagtgcaatggcgcagtctgctcaccacaacctccgcctcccaggttaaagcaattctcctgccttagtcccccgagtagctgggattacacgcacctgccaccacgcccagctaatttttgtatttttggtagaaatggggtgttggccaggctgatctcaaactcctgacctcgtgatccacccacctcggcctcccaaagtgctgggtttacaggcatgagccactatgcccagctgagccagaggttcttaactggtggtgcttttgcctccagggcacatttggtgacatctagggacatttttggttgctgtgcctggaggaagggtgccgccgtcatgtagtgggtagaggccagggacgctgctcaacatcctttagtgcccgggacagctcctcaacaaaggattctctagctcaaatgtcaatagtgccaaggtggagaagccacctgggtataaacccagcccagaaatgtagctgacatttttaaaacttgcagccagctgtggtggctcacgcttgtgatcccagcactgtgggaggctgaggagggcggatcctttgaggtcaggagtttgagactagcctgggcccatggcgaaaccccatctctactaaaaatacacaaattagccaagtgtggtgacatgcgcctgtaattctagctacctgggggaggctgaggcacgagaatcgcttgaacctgggaggcagaggtttcagtgaaccgagattgcaccactgcactccagcctgggtgacagagcaagactctgtctcagaaaaaaaaaagaaaagaaaaaaaaccttcaaattgattaatcagggctggactagactagaaatcatataagcttgattttaacagatggcatcattagctagtttatacatgatgtactttttagtacatcctttacggttttgcagcattcataattgatgtgaaataaggaagataatcctttttttttttttgagacagagtctcactcttttgcccaggctggagtcagtgttgtaatcactgctcacttggcagcctcgacctcctgggctcaagtgatcctcccaccccagcctcccaagtagctgggaccacaggcatgtgcca

SEQ ID NO: 22732 - DNA, 2300 bp, Homo sapien
gcacacttctaatcccagctactccgtaggctaaggcaggagaatcgcttgaacccaggaagtggaggttgcagtgagccaatattgtgccattgcactccagcttgggcaacaagagcgaaactccatctcaaaaataaataaataaataagaaacatttgtttatatgtacacacataatctctgaaagggtaaaagtggcatactggttggccagaagaattgggaggacagtgatgaggaataattttcactctttatcattttatatttttggaattttgaaacatgtaaaattattaccagttcaaaaaataaatttaaacaaaaatcttaactgtttcaaattaaagtaagtttgataatttctttcattgtttactgtctgcatcccccatacagtgttcacatgagcagagagtgtgtgtcttggtcatattcatacttgttctatatatactcgtgtgtgtgtgtgtgttcagttgacagaaacagttgagtgtaaaacagcttcaactcgatgataccaaagatacaagataaaggtccctggagggtggctgtagcgcacacatacatttccaagttactttgttaaatttcctgtatcaatgagccccaattatgagagccccctacatacaagttttagccaatagccaagtcccccatttccagtgttatcttcatgtcctccaaggtattcaagttgtttctgcaatgggtaactgggaagaaatcagcatccagtctgaaaagcagtctcccataggtcttttgtaaggagatccaacatggacatcttccagaatgcactgtacaacatggtagccactagtcatgtatagctatttagatgtaaatttttttaattaaaaaaatttttcatttatagcaacagggactcactgtgttgcccaggttggtctcgaattcctgggctttagtggttctcccactgtggcctcccaaagtgctgggattacaggcgtgagccaccatgcccggcccagagctgatagaatttttaaagtccccctgtgatgatctgactgtggtaggagtagggaggtgtaacccgagtcagtatgcacattgggagcctcctccactaggtcatacaggccttctgcgtgtagatggaattatcatgtcccacactgtaccccggcacctccctcgattaaggtgatttgcatcatgcagggcctgcctgttatcagagagtctcctggacatacagaaataggaatgtacagggactgcatacacctgttgctcaatttctagctaaatggctggaggtgggggataaagaaatggcattcatacggtgtaatactagccatgtttcagaaagttttcaaaaaatgtttagtggagaaatgtgcagggtcagtggaagaaaacctgtaaaattatattatgattgttttatactctatacggacaagcctaaattggagggcattttggaaaactcgcttggatacatgaaaactgccaagatcattataaagaaacaacaggatccattctagattgaaagcaacttgaaatgagacagtagagtgtaatgcgtgtttagtttgtgcttgaataaaagacgaaaactacgtaagacattgggacaactggagaaattagcatatgggctggggattgggtacaggcttcaatgtcgttacttgggtgagttgaagaatgtacgtgttcttaggggacatctgcttaaggatatacaaggttcaggggggaaaaatatctccaaacgatatacttttatatctatgtgtgtacatgtgtgcgcgtagagaaagaaaaaagtacatacgctgtatatttcaaagaacatataaaaccatggatgtcaatatacttcccttccggtgcgctgcctgcgcagaaccgagaggttctgacgatccgcagctcccacgctccccttccggccccgcagcgctgtgaactccatttcccagaaggccttgtatcccgtgcatggccgtttccaggcaggaaggcgaagggccttctgggaggtgaggtcctgggcggccgctggccaccaggcggaagtgcgtaccggaagtgccggcggcagtgtgtaagacgctcacgggcgcgcggactatcgggcggctaggctctctgaggaggctgccacagtggtgagtggtgtgtggaggagaggcgagggtgattgtgagggatggagaggcgcccgtggcctaagtgtgctgatggtgggagtgaatgagtggacgggtgggacctgtgaggggaacgcgaccccggg

SEQ ID NO: 22733 - DNA, 2300 bp, Homo sapien
cccacccttggatataaagcatttagcttgcacttgtttctctgctagtgcatatttgacatggaatttaaattggcaagaaatgtgtgcagaccaggctagacagaatctcaccgctggacatgggaacattacagaggaaatgctattgggtagtgactcttattcagatctggtgcaacaattgacacttccagatgctgcttaccatcagtgcgcctggccgctaagcgtgcctgggccaccattcctgagaaaggggtctcaataaaatcttttccgcatatcatgcaaaaatcacaggagccctttgcacaatttattgcacagttacaacagtcagtgaggcatcagattcctcatactgctcctgcgaaaatgcttactttgaccctagcttttgaaaatgcaaatgcagattgtaaatgtgcattagcacccgtgagatgtacaaacagcttgggaaattttctcaaagcctgtcaggatgtgggaactgaactccatcgttcaactgtgttagctcaagtaatagctaatttagtagtgaacaaatctgaaaagggccaagggttgagccctaaagtgggaaaatgttataattgtggaaaaattggacatttcaaaaaagaataccatcagacctctgggcagaagggatcttacaatgcaataccgcccccccctccccgccccgctccccccaacacacacacacagaaaaaaaaacaccaggactttgccctcgccgtaataaaggaaatcattgggctaatcagtgttgctcaaaatttcatcagaatggcaccccgctctcaggaaatgagaatggggcctgggcccctcaaacaatgagggcattccccatccaggccacaaccctgctacaggggtgggttcctggaggaacattgactccctctcctctggaacaccggggagtgcaggattagatcgctcagtcagagaatgggtcacgttagttggaggagacaaacccaccagaattcccacaggcatttgggaacctttgccaacaggatatacaggattaattttaggccaaagccatctgaacttacagggcattactgtgatccctggattgttgactctgattatgaaggagaaattcaagtaattgtaatgtcacaagatctttgggtttttaaacctgggaaatatattgctcagctattgcttattattattctctgcaaattacacccttcttcacgaaaggagaaaagaggaaatcaagaatttgggagtacaactacacaggaaatttacctatcccaacccatagcttctaattgacccacctgtgcagtgcaaattaaaggaaagaagtgttgtgggtgtatggacacaggagcagatgtttcagtaatatccaaaaacaattggcccctgctactaacctctgcatccttagtgggagtaggaacagctcaaagtgtttaacagagtgctgaaattttactttgtgtcagtccagatggacagccatgtacttttcaaccttatgttgcaaatatacgtgttaatctctggggctgagatttacttacagcatgggatgtgagacttacaaatgaaaaggttgataatccaggatttaaaatattgaaggaaatgggatatcagagtgggaaaggcttgggaaagttcctacagggaaaccccggtccggtatcggtaactgggcaaacagataggaaagggctaggtcatcaggatttctgataggggtcattgatacttcttctccacccactgccttgctgctagagtggctgactgataaacctgtgtgggtggatcaatggcccctatcacaggagaaaactgactcaactccatcagctggtaagaaagcaattggatgcaggacatataaaagtatcagttagtgcttggaattcaccagtatttgtgacccccaaaacgtcaggaaaatggcaactgctgcataatttgagagctgttaatgcacaaattaaaccagtgggtgcattacagcaaggtctgccatccccggcaaccattccaagagattagcctcttgtagtaatagatcttaaagactgttttttcactataccattacacaagaaggacaagcctcaattcgccttctctgtgccttctattaatcagagagagcctgtctcttgtgatcaatgaaaagttttattaccccaggcatgctcaacagtcctacgttatgtcagcattttgtaggaaaagcattgaaggagcctcggaatatgttttccaccacctacatcattcat

SEQ ID NO: 22734 - DNA, 2300 bp, Homo sapien
gctgaggcaggaggattgcttgaggccaggagttcaaaagcagcctaggcaacacagtgagacattgtctctacaaaaaataaataaacaaagtcgtatgtggctcacaagcccttcaagatctgcccccacaggcctcccttttctgtccttgtcccctcccatctccttcccttaatccaccccagccagtcttcctcatccatgcctcctcctgacgtgggcatttgtgttccatctaccttgaacttactctccctgagttcttcgctctattcaggcctcagcttaaataccaacttctcagaaaaatgacttctttgtttaccatctgcctccccacacaataacatcacctccataaaggcaggccatgcttatcatcattgcagtatccaatctgcagtggtgctggctgcctgttgtgggtgctcagtatttatctgtggaaggaaaagaatatatgctcattccagctgctagcagtctgcagggcaaagtctgagaataataggggatgtgagcacaggctggggccaagaaacaccaccagcaccaccaagcaatcatacacaccctgcctcaaaaaggcctcacctgaacataggctgggccaccaacctctatgtatcgggccccaagccagagtctcctgctcaatgtctcttacacatacacacacacacagagaagatacattctcacacacagtccaggcatcgactgaatcacacaatcacactaccattcacagtcaccgtaacaacatcacacacagtctagggcctttatactgtgtcaggtccaccccattacctctaagtatctgtctcagacacaattacacctggtgcaggcaaacacagctgcatgattatcacatatgatgattaaatcacaggtcacacacacgcagagtaagcacacagaacaacccacaaacctggtcacagagtgactcatgcagacagacgcccagctcaaattcagtaaaaaatgatacacatttataaaaatgattacatgtgttcacagagagccacacatagctacactcaatacacaccctgacataggcaaccacaccgctcacctctcacaaaggcaccttcagtacttacacagacactcacacccacaagccctcagacaggcaccctctcccctcactcctaacatgggcaccctcacctctcacccaggtacccttgttactggtggagggtgtccaggttcttggcatcttgaacaaataattggacaaaatgcacaaagaaaagaatgaagcaacaaaagcagagatgtattgaaaatgaaagtacactccactgtatgggagcaggccggagcataggggctcaagagcccggttacagaattttctggggtttaaataccctctagaggtttccattggttacttggtatatgccctatgtaaatgaagaggacgaagtaaagttacaaagtgatttactccatgtacgccctgcataaatggagaggatatttcctaccatagctgcagtttccatttgatttacttctaggaagtccttaggttccctgcctccagacccgattttcttgcctcacccttacccctcacccctcacacaaacaccctcagccctcccaaagccaccctcagcctcacacagccgccctcaccctcagcctcacacaggcaccctcagctctcacacaggcaccctcagccctcacacagccgccctcaccctcagcctcacacaggcaccctcagcctcacacaggcaccctcagctctcacacaggcaccctcagccctcagccctcacacagccgccctcaccctcaccctcacacaggcaccctcagcctcacacaggcactctcaccctcagccttcacatttccctcacctccaagtcccgcctttcgcgcatcgcctgctgctctcccactcagcgccacctcagtcccacaaaggccgggctgggatcctgtggcctccgtgctgaccaacgtcaactacaattcccagcaggcaccgcgcctgggtacacttgagcttccggaggacgccgggaattgtagtcctggcgggcgtgggcccttgaggtgtgctgggagctgtggtccgggtcggcgggcgcgcaagttggctagtctctgcggccacctccggaagggtccgccggctgtgctggtgaggtgggtttcgggggtgttctccgtcctgatccaggctggagaggggcacagcaggtccagaagccgcgaacctctggggcggccagagcgagatgcggggtacc

SEQ ID NO: 22735 - DNA, 2300 bp, Homo sapien
agagcaaaattctgtctcaaaaacaaataaacaagaaaaggttttaaaaattgataaaccactagcaagaaagagagagaggacacatcaggcttgagagaagtgacatcatcatagactgtgcagacattaaaaggcataggcatattaggaactagatattactaaggcagtaaaccagatcactagcaaattcgttgaaaaacacaattcatcaactattggttgataatactgatacgcatcttctgtgtgccagggccttgaggccctgctccaggcagaaactcggcagtggttgggaaggcatcagatgtcagatggcacaagaggactcagagctgagggataatgggaaagaacacagaggaatccagccatttccacagcgtccagctctgctgtgggaggctgggaacagcccagcactaccaccctggactgggaggacaagaccacaaaatgcagcttccctgaacctcctcttggtgatggggttgatgtggtcgaggtagaggtgagtatgtctggagcctcaagcaactgcccatacctgctgggaccaggccgaggtgcccagggagtaagaggcagcatcctggaagagcacagatgaaagaggccctgagaagtgttggttggccaggtgctgtggctcacacctgtaatcccaacactttgggaggctgaggcgggaggatcacttgagcccaagagttcaagaccagcctgggcaacatagtgagactcatctctacaaaaaataaataatagaaagaaaaatgtgagttggccaggcatggtggctcatgcctgtagtcccagctactcaggaggctgaggtgggaggatcacttaaggccaggagttcaagacaagcttgggcaacacagtgagaccctgtctacaaaaaataataattagccagacgtggcgatgcatgcccaggctcccagctacttgggaggctgaggcaggaggatcgcttgagcctgggaggtcaaaactgcagtgagccggactgcaacactgcactccagcctgggtgacagtgtgagaccctgtctcaaaaaagaaaaaagaaaagaaaactgtgctcttaagagccagttctccactcctctacctcaggagccaccccagaacccatccactttgaggacacgagatcccagcccactcagccctgggagtccaaagacattttaaacagagcctctcttcacatttattaattcctgggaggaatgagggaggcttctccagccccccagagaccccggccttgtgctgcaacaggaggggagggagccagtccagaatccccggcacttctgaggacaccaacagcaccctgggcccgcggctgcatcagctttctagacaacgggagaaaagagaaatggtggaggaggggaaatcctatgccctcctcctcgcggaaatcaaggccgacctccctgacgcccccccggaaggaagcgcgtggtcggctgccagccgagacccccatctgcgcctccagctgcagggcctttgctgggcggttcctcgcccgcaattcccccacgagccctggggagacccagcgctaaccaggggtgcccaagggaggagccgggagaggccctcctggaggtgggcacagcccaggcaaacatcagcagacggaaccagcacccgggacccagggaaacgtcacctgccaccaggagctccacagggtcgctgagctccgattcgaaggtgtggggcacccaggagcggtagcggcacctgtagttgccggcgtgctggggccccacgaagatcagctcgaggttcgccgcggccccgggggtgcggaccgtcttcacggccttcgtctcgccctcgcgcagcagctcgaaggtgacgtcggggatgggtccctcgcagcgcaggacggcatctcggcccgccaggaccgccccactccacgtcgcccggagctgaggcctgggagggggtcctgggcggagcgggcgggtggtcgggccaggccacgccccaggccacgccccaggccacaccccaggccacaccccaggccgcgcccgcgcctgcgcctcagccccggcttcatcttccctgtcttgttcctgggcgcagagggctcctccggcgccgccgagctgcgcccgctgccttcacaccccggacatccgcgccacacgtgagtgtccccgcacccctcccccaggaccgtggaagtcccagattcgggcctgctctggggcttctggggtccccagcctcggtcactctgacgggtgaaggga

SEQ ID NO: 22736 - DNA, 2300 bp, Homo sapien
cttctttctctctctctcatctctgccccccaaccccatctctctccttcattcctcccttttcttctcctttttgttttttttttggataacttacttttattcttgcaggccggagtgcagtggtgcagtctcagctcactgcaactttcgccttctgggttcaggcagttctcctgcctcagcctcctgagtagctggtattagaggcgcatgccaccatgcccacctaattttcgtatttttagtagagaccgggttttgctatgttggctgggctggtcttgacctcctgaccttgtgatctgcccgcctctgcctcccaaagtgctgggattacacttgtgagtcaccatgcccagcctattcttgcagtgttataagccaccatccacaattgatgaaaaatgtttaatcttggccaggcaaggtggctcacgcctgtaatcacagcactttgggaggccaaggcgggtggatcacaaaatcaggagttcaagagcagcctggccaacatggagaaaccctgtctctactaaaaatacaaaattagccagctgtggtggcacatgcctgtaatcccagccacttgggaggctgaggcaggagaattgctttaacccgggaggtggagtttgcagtgagtccaggtcatgccactgcattccagcctgggcaacaagagcaaaactccatctcaaaaaaaaaaaaaatgtttaatctttaaattgtacatctatatcctatgactccaaattttatttatcactctccttaaagtctgaagaaaatgattaatttactaagctccaaagacaacacagtcccactgacataacatttagtatgatgtcctactctcctgttagaattaagaacagccagtatcaaactggcctgaaatctgattgggttcctgggctcagaataactgtagtaaatttgtaaatccacactaagacacaaaattaaactaggatgtgtatatctatcttacaagaaaacgtttcacagtaaaaattaacattatgattttaccaaatttcaacattatagtttgttaatccaatcaagctttcaaaattcctgattagcttacaattaattgcaaataacttcatgtagtttggctagcatttcaaaatggatagggaatataacttttaaaatgcgaaagtatattatacatattgcacttttctgctaggctgggctagtatcttccatggcaagatactcaaactattgaataaaatacacatttaaatcaagcacttacatgtacttcattaatttccctgaaattatcaacagcattaccaaaatcttccaggattttgtaacatttgattccttacagttttgttttgtttgtttgtttttgagacggagtgtcactctgtcacccgggctggagtgcagtggcgcaatcttggctcactgaaacctctgcctcccaggttcaagcaattttcctgcctccacctcccgagtagctgggattacaggcgcacgctgccacgcccggctaattttttgtattttagtagagacggggtttcaccgtgttacccaggctggtctggaactcctgagctcaggcaatccgcctgcctcggcctctcaaagtgctgagattacaggtgtgagccactgcgcccggcaccttaaatacacttttaaagttaaacttatggagggaaaaccctcatctattgacatagattgtatgtccttttttggtccctccatgaaggagcaccgttttctccatcatttcttcttcccttcacccgtcagagtgaccgaggctggggaccccagaagccccagagcaggcccgaatctgggacttccacggtcctgggggaggggtgcggggacactcacgtgtggcgcggatgtccggggtgtgaaggcagcgggcgcagctcggcggcgccggaggagccctctgcgcccaggaacaagacagggaagatgaagccggggctgaggcgcaggcgcgggcgcggcctggggtgtggcctggggtgtggcctggggcgtggcctggggcgtggcctggcccgaccacccgcccgctccgcccaggaccccctcccaggcctcagctccgggcgacgtggagtggggcggtcctggcgggccgagatgccgtcctgcgctgcgagggacccatccccgacgtcaccttcgagctgctgcgcgagggcgagacgaaggccgtgaagacggtccgcacccccggggccgcggcgaacctcgagctgatcttcgtggggccccagcacgccggc

SEQ ID NO: 22737 - DNA, 2300 bp, Homo sapien
gtacgacctcaagatctggaggtcagacctgtgccctcacgctctgctgggctctgagtcctggagacgtcgatgaggaaatcagagggacaaacagagctggggacggcggggatggggagaaggacacatcagccgtgcgcctgcgggaccggggccggggcggggggtccagtatgacgactgacatggccagtaataaaacaaggcagccacagagctgcagggatctgaacaagaaaacctggggccagcctccctgctgccgaccaccacgctacacgtgacctacgggcttgcgtccgtgggaaataagccgaaattccaggcgtccccagaccctcgaccaccgatcgcctgctccccgccggggtaggcgatgggggctgaaccaaggcccagagcgccgccgtcggacgcccaaggaaagaggggaaagacaggaggccccgaggggcactgaacccgcgcccgccctcgctggtgccccgccagctcaccgtccacgtgcagctccaagcgctcgctgggcgcggagcccccgaaaggcggcttcaggtccacgtagacgcagctgtagttggcggagtcagccacggaaatgttgtgcagctcgaagagcgcctcggtcccagcggggctctggaaacggtgcacgcggcgcccgcccctgtcctcgcgcaccagggcgaagcgcgcgccctccaggggcgccaggcaccgcagccgcaaggccctgccggactccggctccggggagaactccggcgcgggcagcgtctctgcggagcagcacacgggctgacccgggcgcccagcggctggctcggccctaacgcgtggtctggcctcgcgctctttgccttggctgagtcttctgcccgcaatgacctggccagcttcctccctcgcctcctccgggcccgccccacctttgcatcccagtccttggatatctcacacgcaccctttcactgtttcttagtaatttgtttgtctacagacacagacgggaagcggggacggggacatgttttgtgcatggcttgatgcctggtgcacgatgccgctcagtagtggatttgctccacgagcgtcttctgagcaccgccccaatgcccgccccacggaggggcccctgtggtccgctgggcatggggttcgctgtccggtgctcagagtttgctaaataccatcaggtccaaggcaagcgagcggaggagctgcctcagcagaggccctcagtgctcacctagacctggcagctgggatgggacctgccaggtggtgccccctgtggcctgggccagacctgttcacccagttattccctgtggggcctgaaggttgtcacgctcatcatcatatttgcagtttaggaccctgaatcggcgggtgggcggataaagttggtattggaccctggcccagagcactgcacttccccagactctacacctggtactgctcctgctccccagggacccagccgcgtccctgtccctgctggccccggctcaccatcgctcagaatcagctcgaccggcgcgctgtccccggaccagccgttttggttgtcatgcagccggtagcggcaggtgtagtgacctccatcccccagggccaccgcgttcaggtgaaagaagatgcgatctgggctggtgctgctcctgggtaccagcagctctttctccccgcgccgtagctggaagtccactccactcaggggagccacgcaggtgagggtcaccttgttgccagggtgcaggacctgggaggactctccatggtgcatcagcacaggcggtggtggtgcagctgcaatgcaggcagcattactaggctgccccatccctggagctgccctctgcccagtccccagacctctgccctccgggtggcaatcccaggaacacccttccattcttttttttttttttttttgaaacggagtttcgctcttgttgcccaggctggagtgcagtggcgccactcagctcactgcaagctctgcctcccaggttcaagggattctcctgcctcagcctcctgagtagctggtactacaggcacctgccaccacacctggctaatttttgtatttttagtagagacggggtttcgtcatgttgggtagactggtctcgatctcttgacctcatgatccgctggcctcagcctcccaaagtgctgggattataggcgtgagccaccgcacccggcctcacccttccattctttgggcatcctctgcccaaactcctttgcaaccatcagacccaggcaaccgtgtggccagc

SEQ ID NO: 22738 - DNA, 2300 bp, Homo sapien
ctgcattcctgaccgaggtcagaaccagatcaatctcagaatctcacctgtgtaggtctgtttcatgggacttttcttttttgggggagggggcagggtttcactctgtcacccaggctggagtgcagtggtgcaatcactgtttattgcagccgcgacttcttaggctcaggtgatcctcccacctcagcctcccaagcagctgggatgacagacttgcgtcactacacctggctaattttaaaattttttgtaaggacagtgtctcaccatgttgcctaggcgggtctcaaaactcctgggctcaagtgatcctcctgcctcagcctcccaaagcgttgggattataggcgtgagccaccgcacctggccagggaaccttctttataccaagtaccacaccagtcagagtcaagtcaggaaatagaaaccacactaggtatttcaaacagaggggatataagttagggactgattgtgcaggttttgcaaggctcagagagcaaaagtggatgttgcagaatctcagagctggatacttgcaggaagctgctaccacccttagggctggagaacccagggaagctaagaggagggtgcaacgaggctggtgttgggactgccaaaggaaacacagaatgacagctccatctctgcagacctcagatttgaccaggcctctggctgcctgggcagcctcattgccaatgggctgaaaggttctgtcactgttcagtggtctgacttctgagttctgtgcacaccctgagctctgctcctctggcctggccaccagtccttgtctgagtgccccaggtctggttatgacttcaggcctcagcacctggttgtctcttctgcaaagaatgcattctcccccagtccacccagaacacacagcctccatccaggtactggctctgagcaggacagagagcatgcagcaggtgctcagcaatatggaaatgggaccaaacagagggagtctccacagctccccgtccctcacagcagaagccagagccgctgcagtgcccagctggtcttcatcacgtctatgagctctgcaatcgctctgcagtcgcctcaactcctggtctcctctgctccttctcactgcacccgcatctcccatgtttgcactggctgttccctctgcctggaatgctccttgcccagttatcccactgtcttctttgcatctggcacacagtagatgctcaataaatgcctgtggaatgaatgagtggggaggatgcagtgcagggggcagatgagggctaggcggttgccctgggccctcacactcgtagcggagctaggctgggacacccagggtggggaccagacctccccgggtgggaatgacaggatgtccatggaggctgagtgtgaaagcaccacggtctcacccctgtcctgttccatcccaacaggctgtggtgaggagagggggaggcaggggaagcgggaggcctggcctccaggcagcaggctatagccacatgagtgaccaccagcagctcaggtaactgagcacatgtcacgggtaggcctgggaagcgcaggtctcagctgaatgacctgggtggaaatccgactccagagccgtggtgggtcacaccatgcagaatgaaccagtgatggagaaggaaccacagtcctcaggaagagtgagggtgcacctccagacagcccatgtgagggcaaccgcagaaagtctgaaaagaggtgaaccccacctttggtgtcacatgtgcagtgtggtgtgacagggaggggctcgctgggcttcagccccggcactctccacttgacctcagcagctccaggtagagtggggagaactcagcgtctccttctagaacaggttctaggatccatcactgaaatgaggatgaggtggttttaacatcattttatcactcttgatttagtttattaatcatacatgattattgattataattgttgctgggcatcctgaggcctcagaagttcaccctttgccctgaccccatgggggccctgcccccgccttccgggaaggacaaacacgggaagaggtcagtgcccgagccaccccaccgccctcccttggggcctcattgctgcagacgctcaccccagacactcactgcaccggagtgagcgcgaccatcatgtccatgctcgtggtctttctcttgctgtggggtgaggcctcctggggtctgggtccctggggcgggagggggcgggaacaggagccttacgggggctgtctccgcaggtgtcacctggggcccagtgacagaagc

SEQ ID NO: 22739 - DNA, 2300 bp, Homo sapien
caaggaggccctcccacccttggcctctctctctctcagggatctgggctgcacagccaccccatgccttggaccacctggtctgacctgcacagaggcctggtgtggacattgcctgggtaacagccactgagatcctccagcctggacatgctgcccatactgtgtggaggggactacccagggatccggccagggtggagtgggtgaggcagacatagctgtgtttgggtcaggcggtgtcctccagccttcaggaatggagacgggtccatcgtgttcctcacaaactggagtctccaccttcttgacacttggggccccaccctgtgaagcaaggagaggagagtggtgccacagtagggccagtgcaggtgcgtgggcaactttgagtccttctgcgatgctggcgccccctcccctcctgctgggccgggccgggtgtggggatgtgcacgtggccctgtcaggcaggcccagagtgctggcccatcccccgagtgtctagcccgcctgctggccttcctgctccaggctccagagggcattgggcatccagggacctggaggagaagagtgggggatgacagcccacccaccgtcgtgtccccctcaggccctctgtctggtgttctttgtattctctaaggtacttgccttttctctcctgttttaggtcacaggcgcgagatggagtccccaagagggtggaccctgcaggtggccccagaggaaggccaggtcctctgcaatgtgaagactgccacgaggggcctctctgagggggctgtgtctggaggctggggggcctgggaaaactccacggaggttccgagggaggcaggggacggccagcggcagcaagccacactgggggcggcggacgaacagggaggccccggcagggagctgggccccgcagacggtgggcgggacggggctgggcccaggagcgagcctgcagaccgggcgttgcgcccttcgcctctcccagaggagccgggctgccggtgcggggagtgcggcaaggcgttcagccagggctcttacttgctgcagcatcggcgcgtgcacacaggcgagaagccgtacacgtgccccgagtgcggcaaggccttcgcctggagctccaacctcagccagcaccagcgcatccacagcggcgagaagccctacgcttgcagggagtgcggcaaggccttccgcgcgcactcgcagctcatccaccaccaggagacacacagcggcctgaagcccttccgctgcccggactgcggcaagtccttcggccgaagcaccacgctggtgcagcaccgacgcacgcacacgggcgagaagccctacgagtgcccggagtgcggcaaggccttcagctggaactccaatttcctggagcaccggcgcgtgcacacgggcgcgcggccgcacgcctgccgggactgtggcaaggccttcagccagagctccaacctggccgagcacctgaagatccacgcgggcgcacggccacacgcctgtcccgactgcggcaaggccttcgtgcgtgtggcggggctgcggcagcaccggcgcacgcacagcagcgagaagcccttcccctgcgccgagtgcggaaaggctttccgcgagagctcgcagctcctgcagcaccagcgcacgcacactggtgagcggcccttcgagtgcgccgagtgcggccaggctttcgtcatgggctcctacctggcggagcaccggcgcgtgcacacgggcgagaagcctcatgcgtgcgcccagtgcggcaaggccttcagccagcgctccaacctactgagccaccggcgcacgcactcgggcgccaagcccttcgcctgcgccgactgcggcaaggccttccgcggcagttccggcctggcgcaccaccggctttcgcacacgggagagcgacccttcgcctgcgcagaatgcggcaaggccttccgcggcagctccgagctgcgccagcaccagcgcctgcactctggcgagaggccgttcgtctgcgcccactgcagcaaggccttcgtgcgcaagtcggagctcttaagccaccggcgcacgcacacgggcgagaggccctacgcttgcggcgagtgcgggaagcctttcagccaccgttgcaacctcaacgagcaccagaagcggcacgggggccgcgctgcgccctgacccgaggacgccctgagcgggaggtcgcggacacacggcattgcggggtctcgggcgtgagtgcgctgtctgctggcccagactttttcgggccgccggtgcgggcgccctcc

SEQ ID NO: 22740 - DNA, 2300 bp, Homo sapien
gtacgctttacccaattcccctaaaggtggcatcttgaaaaactagaggccaggtgcggtggctcatgtctgtaatcccagcactttgggaggccaaggcgggtggatcccttgagctcaggagttaaagaccagcctgagcaacatggtgaaaccccatctgtactgaaaacacaaaaattaggcgggtgtggaggctggtgcctgtaatcccagctactcgggagtctcaggcaggagaatcgcttgtacccaggaggcggaggtcgcggtgagcccacatcacgccactgcactccaacctgggcaacagagcgagactctgtctcaaaaaaagagaagagaaagaaaaactagagtacaatatcacaactgagatgcagaatatttccatcacgaaggatccccgtgttgcccttacagagccgcatacccttccctcctacctctgctccccgttaacctctttttgtcaactagtaatctgttctcatttctaccattttgtcattttacgaatgttgcataggctgggcgaggtgtctcgcgcctgtaatactagcactttgggaggccgaggcgggtggaccatctgaggtcaagagttcaggaccggcccaccggccgggtgccgtggctcacgcctgtaatcccagcactttgggaggctgaggcgggcggatcacgaggtcaggagatcgagaccatcctggctaacacggtgaaaccccggctctaccaaaaatataaaaaaattagccgggcatggtggcaggcgcctgtagtcccagctacttgggaggctgaggcaggagaatggtatgaacccgggaggcagagcttgcagtgagccaggatagcgccactggactccagcctgggcgacagagcaagactcttctcaaaaaaaaaaaaaaaaaaaaaaaaaaaaaaaaagagttcgggaccagcctggccaacatggtgaaaccccatctctactaaaaaataaaataaaataaaataaaataagccaggcctgatggcaggcatctgtaatcccagctactggggaggctgaggcaggagaatcgcttgaatcctgggggcagaggttgcagtgagccgagattgcgccacttcattccagcctgggtgaaagagcgaaactccgtctcaaaaatagaaaaataaaaaataaaaaaattagctgggtatggtggcacgcacttgatgtcccagctccttcggaggctgaggtgggaagatggcttgagcctgggagatgagattgcaccactgcaccctagcctggatgacagagccagaccctgtcaaaagaaaaaaaaaaagaaaaagaaaaagaaatggagtcatacagtttttaagcttttgggattgggtggtaacttttttaaaaaacataaataccatacaattcatccttttaaagtgtgtaattcagtggtttttggtatattcagtgttgcacagtcatcaccactaattccagaatattttcatcactcccacggctgtatctcccatttctctcttccctgcagatcctggcaaccgctgatctactttctgtctcttacagacttatctgttctggacatttcacataaatggaataacataatatgaagtcttttgtgtctgaattttttcatttacacttagcataatattttcaagattcatccatcttgtagtatgtatcagtatttattctcttttttttttttttgagacagagtctcactttgtcacccaggctggagtgcagtggcgcgatctcggctcactgcaacctccacctcccgggttcaagcagttctctgcctcagcctcccgagtagctgggattacaggcgcctgccaccacgcctggctaatttttgtatttttagtagagacggggtttcaccatgttggccaggctggtcttggaattgctgacctcgtgatccacccacctcggcctcccaaagtgctaggactacagccgtcagccaccgcacttggcctaacttaaatttttaaaacacttcctggaggggacaaacaggacccatctgctggtctgactctgggtgtcctgttcacagtctctgtcttagttgttctgtgtgtgggatgaagggtgccaaggagacagggcagggcagggaccctcaagaaaagcggggaggcggggggaagggatggtacaagcagccatggcacctcagtgtgtccctcaggcacctggacacacaggtgggcaaagatgctgacactgggggccagaaacgccgatacccccattcttccat

SEQ ID NO: 22741 - DNA, 2300 bp, Homo sapien
gtgcagtggcatgatctcagctcactgcaacctctgcctcccaggttcatgcgattctcctgcctcagtctcccaagtagctgggattacaggtatgtaccacacacggctaatttttgtatttttagtaaagacggggtttcaccatgttggtcaggctggtctcgaactcctgacctcaggtgatccgcccacctccacctcccaaattgctgggattacaggcctgagccaccccacccggccaataaaaatttttttaaagctaaaattgactctcatgcaaataagataaaatgaacatatgttaaatattttaacttaatgagagaaatagtaagatgttaccagttacttgatgatggaggaaaggacgaaaagccaaggaatacatggaatgcagctctaggtgctgaaaaaggcaaggaaaggttctacgttagagcttccagagggagctcagccctgtcaacatcttgtttcagctcagtcatatcgatgttagacttctggtccccagaactgggcgggaatatatttctgctgttttaagccaccaaatttgtggtaatttgctgcataaccacaggaaactaacacaccatccctcagttctgcttttctgtatggactccattctcttaacagattcatccttcagcggggcaagaaggctgcagctgccccagctgacagatgctcacagcctcaggttcaaagcagatagaggccctaacagttcagagagaagtcccacgatgctcacaggtccaaagtgaccactgccagggccagagggatggactgccctgtgctgtggacctgggccatgtacccacacctgcccaaaccacctgggctgaggtgagagctccctagtacaaattgggaaaaattggtacaaaaagagctcgtggaggccgggtgcagtggctcgggtctgtaatcctagcactttgggaggccaaggtgggaggatcacttgagcccagaagttcaagaccagcctgggccatatagcgagaccccgtctctagctattcatttattttagcttacagcatctggtctatgttgttttttgagacggagtcttgctctgtcacccaggctggagtgtgcagtggcacgacctcagctcactgtaacttctgcctccccggttcaagcgattctcctgcctcagcctcccgagtagctgggattataggcacacgccaacaagcctaatttttgtattttcagtagagacggggtttcaccatgttggtcaggctggtctcgaactcctgacctcgtgatctgcccgcctcggcctcccaaagttctgggattacaggcgtgagccaccgcgcccggtttatttatttattttagccaacagcactcggtgttcccagacggtctcccaagtactaaccaggcccgaccctgcttagcttctgagatcccgactcaattttttttttttttttttgagacggagtctcgttctgtcgccccaggctggagtgcagtgtcgcgatctcggctcactgcaagctccgcctcccaggttcaagcgattctcctgcctcagcctcccgagtagctgggactacaggcgcccgccaccacgcccggctaattttttgtatttttagtagagacggggtttctccgtgttagccaggatggtctcgatctcctgacctcgtgatccgcccgcctcgacctcccaaagtgctgggattacaggcgtgagtcaccgcgcccggcccccgactctattttaaaaaccgcgtggattccagcttggtgggtgttccacagcgcgtgggtgtgagacgcagctcagtggcgtcaactcagcaaggttccaggggtggtaaagacggcctggggccggaggaggaccgccagggagaagctacgttggcccgacttgcgtccgcgacccgggcagccccaggcgcctgtgtagctgttgggtgtgtgccgcagaggctggccgggtgcaggaaggggcggagcgcatccatggcaacgcaggacgcccgagtagcttggctgtggcgccgtccccatgggaaccagaaggcgcgcgcccgcagccgcggcatagttacgcaggcgcagtggggagaaacgcgacgccttgggccgctctgccgaatgcaaccgcgcccccaggagacccggtgcccgccctcctaccattccacgcggctcgagcccgcgtgcgggcctctttcaggccgctcctagtggacgcagaggcgggccgaggacggtgagtgacgccgacggacaccctcggc

SEQ ID NO: 22742 - DNA, 2300 bp, Homo sapien
gaggtgggcagatcacaaggtcaggagttcaagaccagcctggccagcatggtgaaaccccatctctactaaaaatacaaaaaattagccagacatggtggcaggcacctgtaatcccagctactcaggaggctgaggcaggagaattgcttgaacccagcaggcggaggttgcagtgagctgagatggcgccactgcactgcagcctgggtgacagagagagcctctgtctcaaaaaacaccaaaataaataaaataaaataagaggatatctgccttgcacagaatagggaacacaggacaaaaggagaagaatctgagctcctgtgccgagtgaagcagtgatttacgagggtgccacaagtgtgtccatctcacgctctgcatatgatgttagccatccgggattcagagtctaaaggctgtgctggacagatccatctttgttctggaaacaatgagatctagggaggggacaggaggattgtgcacttatcacgtgtgaggctgagaaacctcacatcacatcacaatgaggaaaatatttatttatttatttatttttgagacggagtctcgctctgtcgcccaggctggagggcagtggcccaatcccagcttactgcatcctccacctcacaggttcaagtgattctcctgccttagcctcctgagtagctgggactacaggcatgcatcaccatgcccggcaatttttttttttttttttttgagacagagtctcgttctgtcgcccaggctggagtgcagtggcgtgatctcggctcactgcaagctccgcctcccgggttcacaccagtctcctgccgcagcctcccgagtagctgggactacaggcgcccgccaccacgcccagctaattttttgtatttttagtagagacggggtttcaccgtgttagccaggatggtatcgatctcctgacctcgtgatctgcccacctaggcctcccaaagtgctgggattacaggcgtgagccaccgcgcccggctccccccccccggccttcacccctccctccctctctctctcttttctttttttccttttctttttttgaaagagtttcacttttgttgcccaggctggagtgcaatggtgcgatctcggctaactgcaacctccatctcccgggttcaagtgattctcttgctttagcctcctgagtagctgggattacaggcacgcaccaccatgcctggctaattttgtatttttagtagagacggggtttctctatgttggtcaggctggtctcaaactcctgacctcaggtgatccatctgcctcggcctcccaaagtgctgggattacaggcgtgagctaccgtgcccggccgtcctttgttttcacttgctattcaattgcttgcttaggagatgaatatttatatatgcacgtgtgtgtatctcagcaaagtccactgttgtaagcagaataatggccccctgaaagatctgcacgtcctgtttcctagaacctctgactatgttacttcacaaggcaaaagaactgagtgtgatgaagttttggatcttgagatggggagattcctggattatgtgtggttggcctagtgtgatcacaagaggcagaagggtcagaatcctataaggagtataaggagatttgacaacaaacccagaaagagagagatgaacatgtcttactgctggcttgaagatggaagaaagaaaagtaggtggcacctagaagctggaaatggtcagcaaacgtcctccccaagagcttctggaaggaacccacactactgaaaccttcacttaggacttacgacctccagaactctgagataacaagtttgcactgtctcaagccactatggggtggcagtttgttaaagcagctttaacaatagataactaatacagccacagtgtaattttaaaatagtaatagcaggcgccaggcgttgctaatgttcacacttgcttgaatgatctgggctgcctgtctccctactcagctggttatacttaccgttatcatacccattttgtagatgaggctgccagccttgagagcaccaccgttacctggttgaagaggggaggggaagtccagcattggcctctgcagcgtggatctcccggccaggctctcagctgtcaggtgagtctcacctcacacctctcagaagacatggacaatggcagtgaatggagccaggaggacccggagtgtcggcttgccactgagaaacggagggcaggagtaagtgagattttggggagctggcagctgagcaacgggggagt

SEQ ID NO: 22743 - DNA, 2300 bp, Homo sapien
cgcacctgtgcctgccaagtggttaggcctttcattggtgcttcaaactccactccagggctgccagtcaccccatgccagccctgcagggacaaggcctttgtgtggtggccaggcctgtggtaccaccagaatcttcactccagagggaggccctttctgtgcctgggagtgggaagttcttccacataggctcaagactcctccagtagcagtgcatccacaggtgtgagaaatcctacttgtgtcaggccgggtgcagtggctcatgcctgaatcccagcactttgtgaggccgaggcgggtggatcatgaggtcaggaattcaagaccagcctggccaagatggtgaaaccccatctctactaaaaatacaaaaattagccgggcgaggtcgtgggcacctataatcccagctactcgggaggctgaggcagagaactgcttgaacctgggaggcggaagttgcagtgagctgagatcgcggccactgcactccagcctgggcaacagagcaagactgtctcaaaaaagaaaaaaaaaaagaaatcccacttgtgtcccaattggggccagtggctgaacctgtcagacatctgcacacccacacagagccagcagctgcactcctttctctgtgacaattgtcaaggccttcctgtgcaactctcttcagccaccaagggacccacaaggcgggcagccctccaagtgcccttcagcctcctgctcgccctcaattagcttggtaagccctgagttttgtacttgggcagggagatagacctcctgacaaggctttcgatgtgcagacacccaaaggatggagaaagggagtggaacagtcccagcatccctgaagcagatgcagtggaggcagaaaggtggggcaaactgggtcgttacatgcaatatatgtgctggactggccaacaaaattagatgtccctattgagggcaggagccacacaatagatgggggcaagagctgggggttacaaatgggtaggaggcgtgaccagttcatcctacctgggagggcccgtagagtcagcaacacccaaaggggctggggaggctgtggttccccaatggggccgcacgtgttagaatcaactaggagccggactaggggcctggcgcagtggctcaagcctgtactcccagcactctggaaggctgagacacgaggatcgcttgagcccaggagttccagaccagtctgggcaacatatggagaccctatctctaaaataaataaataaataaaaataaaaaaactatccaggcatggtggctcccacctatagtcccagctattcgggagggtgaggtgggagggtcgcttcagtacaggagttcgagaccagcctgggcgacatagtgggaggaggaagggagggggagaaggagggggagggagagaagaaagaaaattagccgggcgtggtggcgcgcgcccctgttaacagctactctggaggctgaagtaggaggatcgcttgagctcaggaggtcgaggctgcagtgaaccgtgatggtgtcactgcattagcctgggcgacagagcgagaccccgtctcaaaaaagcaaaccaaaaaaaatacaaaaaaatagacttaactgaggagttttgacgcgcatatgctcgggcccagtcccagattctgatgttatcggtctgactcgcaacgcgctcaccaagacacttcagagctccccaggtgcttcccagcccaactctcccacccgaggggagcctgcgaaccgcaagtcggttccgggttgggacctcttagaaatcagattgggagaggaggctatcaatcataatcatgaccagtcacccgctttcacgagaaggaatgggcgggaccctacgtccccgtccagaacgccgtttctttggcgacgacttaggtccacgccccgccttttaggtgtagccggcctctgtttctatgataaccgaagcccaagcctctccctacaccgctttctccgcagcgtcaaagcgggacatgacgggactacgtttcccagcagtccccgcgcgggttcccgcctgcgcttgctgtggcccgggtccctcagtgccgcggcggcccggaggtggcgggaggacggctccgcgctgcatgcggggcggggaccagggacccgtgcgggccgcctccagagagtaagtggcattctgcgcggacccgcaacctcggcctgcgaggcggggacctcccggcgcatagcgcggccaccaccccagtcccctctccacctccgcgcgcggggtccggggcaga

SEQ ID NO: 22744 - DNA, 2300 bp, Homo sapien
aagatgtccattatcaaatgaccatggtagccaggccacagggttcacattgacgttgcctcattgcattctcatttccacactgaaggggaaaacaggttcagaggggtgggctcactgtcctgatgagtgctgcctgttttctcccaccctccctacaaccagcacccccatgcccctcactcaagaccagggagaagcccacctagcccctcctgcaaccacacagaccccagtgggagccccaaggctgctactctgcacaggatggagggcaggggtaaaggccattaggcggtggcagtaggccgtgcccctcaccagaggctgaggtctgaccccttgaccagcccagcttcagggcatgtgtcctttcatgagctgtgactgaccacagtccaagggcccactgtggggagtcctcagcatatttggacagaaacgccccagaattggggtaagaagagcctttacagtcaggcagtgaagaaacacagctgctgggcacctgctatgtgcacgcctcagggatgggagtagggggcaggcccagccctgggacctgggtcaggtggctgggcccttcggatcccgagttggagggataaccccttggaggcagagatgggcatcagagacagggcggccccaggtggtcctggagtcgcctcgtaaaggttatgtctatgcctgctgcaggcagagacacagtcaaagtagttgctacctctggaaagtcccagttctgctcatgagcctagatctaagaggctgggacaggcagaggggtatgaaggggtcatgggcaggcagactgtccacactggctgccagggtggccaagtgagtagagtgagctggggcactcactaccgtgccaaccccacgcacggatgaggaccccgggtcgaaggcccacatcctcaatcccacgcaatagttcaggccctgtgagagggttcgctgtctgctcccagccagggctgagctgttcagaggccctacctgttcagaggcagctgggggaagggacagaagttggggggcaggggattgtgtgctggcgggaataatctccttcatctcatggctaaatcttccatccctcctttcaacctttggccagaaacctacgtttctgacccttggagaggtcggccagttcaagaggcacccctgagagccacgtctgcagacacgagggcctcgtgacgtgagccctgagggcagggggctgcaacccctcgcgcgggctccccggccgtggaggacacaaggacaaacacgaagggtccccgacctgccgaccccctcctcccggacaccgcgcgtagcctgtaggctacctccgcgctccacccagagacgggtcgcgctgctcccgccgccgcaaccccgggccctcgtgccggcggtctcccctcttccacgggcgagattactgcatagcagaggtgaagggcgcggaggctgtgggggaacccagcgtggtatggcaggaaaggtcgagcagggaaacaggcccagccagaggctcgggatccggggctcgcgagcgtggtgctcctgggccgggcggtgggggaggggccgcgtgtggcaggcacatgcgcacggcaacctggacctgcggagggcggcggtgaccactgggcctcactccgctaacccaggtccgcatcaggcgcgtgccggtgaggcggctgtggccgcggcgaggagtcagagggaactgaactggctactcccgcggcaggtgggatttaaggtcagcagctgaacaaagaagcgagcgctggccagacttttttctttattagacatggctgcgttggtctcacggaaatctctgcgcttttgcaggcgcccacaagacagggcaactacggggtagcggacatccgccaggcacgcttctagggccgcttctgcaactgcgcatgcgcttgggctgcacccattccgtctagcccaaaaggttcctctacaaccttcctccggattggtctatagggacacgatggccttttacgcaagcgtcacccgtgctgacccggaagttttcttcccagttaaaagtgttggcccgcggcgcgcggcctcttcctgtctgtaccagggcggcgcgtggtctacgccgagtgacagagacgctcaggctgtgttctcaggtgagaccgccgcggggccggggatcctagggacggttcatggtctttcggggatagtgccccgcggcctgggccttttctcattaggtctcatttctgtctctggaaaagaaaatgtagaagaaacgg

SEQ ID NO: 22745 - DNA, 2300 bp, Homo sapien
ccaggtcagggcccgtggggcgcggcgtccaggcgggggcccagggcgaccccggcgggggcctcggcggaaaccaagagaagccaggcgctggagcgagcgccacgagctggggccgcggggggccggaggaggtggcgtgcgggatgaggaagaagatgtagacgcccgagaccacgaggcccgcggccaccagcaccgccagcgccacggcagcgttgaagacccaggccgggctggccagcgacaagcggcgcgacagcgggcggcccaggcgcagaggcggcgggggcggcggggcgcgggccttgcgcggcccgggcgggggcggcggcggccgcaggtagagaaggccgcggcgccggtcgaagcgcacggagccctggcgagagggcggtgcgcgcgcgtcgcggggcaggagaccggactgcgtgggcaacgcggggagtccgcggcggggggccaggcgcgtgggcgcgcggcacaccggacaggccaccgcgttgccgccgcccgccgtggccaacgataggcgcgccaggcactcgagacagaagacgtggccgcagtccaggcgcttgggcagcttgaacacgccgtcgaaggacgacacgcagatgaggcactccaccggggaggcggggggcaggatagggccggagcctgggctgccgtccccttcctcctcctcctcctcctcctggtcttcccctctgcttggggagcggggcgcagagagcgagcctggggagctgggacccgagccctggggggcccgggaatggcggagccagaacggccgagggcagggcatccggatggacctgggaggagaggaggtcaggcagggaaggaggcggtggagcctggagcgggttctgagaccagcagggaatccagggaagactggggactgtactttagagaggatcccccagtacagagcaccccatcccgagaagggtgtagctagcgtcgaggagcaggggagatggggaggcccgaggcggagactggggataggaatggacccacggggtaccagttcctgaattggaaacggagagacagaccgcagttgaacacggagatggggaggaccccagacagggatggaaaggacctgacccacagaggagcagagataggcaccccccacagagtaatgacagaccgcagccagcctgtgggcgccttcctacctgtggaagcctcctccctctggccagtggcgtgtccctgtctgttcctggcctgccagcagctgggctcaaaagtaccctcccagggggagggtgctcaaccggcaccacccctccaggtcccaggtacccgctggacccgtttgactgcctgccccgccccctgggccagccccaccaggatgaacaccaagcctgtcttggccagatgttgggggcggtggaagggtgatggcacacggtgggtgggcttgggcccaccccacccttcagaacctgatgagtcttctaccagagtcaccagcctgtggccctgggtgggtcccaacctgtccccagcagcctgatgacactgcatggacactggcagaagggaacccgtacagcccacagaaactgggtgtgcaggcccagggtgcagccacaaccagtgtagccggggaggtaaccaggagcacaacctcgccagtgtgaaaccaccccacactccaagaggggggtgaagctaggggtctgaaatcgtgtgccctaaacagctgagctttcctcctctccccagtgctacttcaaggtgacaagcctctcaggatggtcttgtgactacccagacctcacaggcacccaagccacccatccacccagaccacagcaacatctcatgtgccacgccctcagaagttatggataaccccatctcatttccagtacctgctgggacactccaggcagcctggcctgcatccagtgccccacctgctagccctggggtgccatggttctgagtcagcaatacttccaggtccccacaggccaacaggtcaggaaggtgagcagctcccaaggccaccagggctatgccacccacatccccccaccgaagacagacaacagcacaggtggctgggactgccccaaagggcagacaggtttattgggcagcagctgggaaaatcagcggttggacttggccacacgctccagctcgtccttcttcttaatggcataggagttcgaggagccctgcaaggagacacacagctctgaattctgaaggacccccacaaatgcccaacttaagaccccccaaccggagtgccc

SEQ ID NO: 22746 - DNA, 2300 bp, Homo sapien
tcaggtaccaggtgtgagaacagctcaattccagggatacttccatccccagcttgcaatctccatggctgagcctctttgataacttttgtgctattcctggtttcaagtctacctggtccatcaatcagtgctcttgtctgcactccagttgggggaactcatgaactgtaaagggcaatcctgtgggggaatgaacaggttggtcagtccagcctagggcagactgacccaccatgacagtccaggggtactgatgacaggcatgtaccatgagcttgggggtgtcccacctgtgtctccactggagagaatacacaggtgtcactgaggaacagggttgcaaggactgaggatatggggtcagctgaggacatgttaaggagaggcaaacattgcacagctaggcactaaggagagagaaagggacacagcggggcatggccagaaaactggaattgagctgagtggaggcaccaagacctgcgagggcacaggctgggcaccaggtgtgagaacagcccactcctgggggcattcaccaggggtagatctcttcagggtccctctgccacaactagttttgagttcatatggtccacctgctggtgggaatgtagaagccttcagacctatgaaggatgatgagtttttgagagtccaggccaggagaggccaaaacaccatgaccccagcaagcgagaataatccttactccaagacaaacacagacctgcaaaaaatgaacattcagggaaggctcccaggcaggacccagtgggcccacacgcacccatgtcagtgcatgcagtgcctggaatcttacaggaagtgaccgagctgaacgtgaccagctgtgaagattcagagacttctgagccccgatcttggccactcacggcccttgggtagaatgtgtggggtgtccactcagccacttgttagaggaggtggcatgatctgggcctcagtgccacgaccaacagcgacttccaaggggaacatggaaagaacagaggaaaaaaaccagagttgaggctggggagagttatggtgccagtggtctcacccagcactgagtgcaaagttctccagcaccacttcaggtagaagctcctctggaccttgcctaagaactccgttcgtccgggaggacgcaggcccacctgctctaacatgaacgcgtctgaattcagcggaggacacccaggagcccggttattctcctgccagcgtcctcccctgatgtgtccctgaccccgtgctctgacgtactcagccatgtactcactctcctctcccaggcccccatacctgagatcaccatggcctgatatggggtagactacaagcctaccgtgcctcagccatgtgcagggcgacctgtccctggcatccacacctgtggcccatacgtcgcccgcattgtggggcgccgaaaacccaacacaactgaaacacaactgctgaccttccccctaagccgcctctaaacgaggtccctcggcccctggtcccagccgctctttgaagacttgcctgatgacaggcatgtaccatgtttttggctgggacatttttctgagccttgctccgggctccgtaaagcggacacggtgccagggagagaatttcggggcggttgcgggcacaggcgggcttctgcggaggccctggcgaacgcccccgcgcggcgcggtccgatggccccatggggccgcccctccactgtgaggtcaccggggttcagcaacattcactgcggctaggacgcgtacaggtcactgaggcagaacttcccgattctcgcgccttcgttcgtttctgcggaccagcggagactcctccacaccgcccaccgcccaatgatcccactgccgcaaaccgccccaaagccagcgccgaaagccgacgccggaagccccgccccacgcagggcccgcccgaacgttcccgttcctgggccgccattggccaagtctgaacggccccacgtcgaggctccttatgggaaatgtagttcacgtcccgcttcaggagctagcggcgccctcccttatcgccttggcaacgacccagccgcgccgcgaggagagccgggaatggaggtcgtggcgtgaggggcgccgagcgaggggaggcgcgggccacgggagttccgggagttccggcgttgcccggcagtccgcagtcctcggcgggaaggctgtcccggcgcctcaggcagctctgcgtgggccggggtgacttcctcgcgatcccctgcgcgaggtgaagggcagggacctttgccgcgcctt

SEQ ID NO: 22747 - DNA, 2300 bp, Homo sapien
tctgcacatgcgtctccagagggcctggcacagcaactacgaccccatcctgtcccagtcctgcggcacatctccaatggctcccactgccaagggcatgccccagccgtgcatcaaagacctccccctggaatcatacgcagatctcctgccctcctccaactctgccctggcacacgccgccccccacctggtgggccccctcattcctcggaggcatcctctgctcacctccgcctccccggccattggaccgtgcgggcagaacccgtggactggacccacggcctcagccgaaacgcgtcccgggcgcggaaaccctcggccgccgtggaaccttcccgggaagctctccccgcgcgggtgaaatgcgtccgaagacagggaaccgcttcccggagccgctgggaaggaggacggtacggaggcccgggagacccacggcgcctgtccgcgagcgataagtctgaggaagatggagccactcgccggtggggcacggcgcgtggaaggcgcggcaaaggtccctgcccttcacctcgcgcaggggatcgcgaggaagtcaccccggcccacgcagagctgcctgaggcgccgggacagccttcccgccgaggactgcggactgccgggcaacgccggaactcccggaactcccgtggcccgcgcctcccctcgctcggcgcccctcacgccacgacctccattcccggctctcctcgcggcgcggctgggtcgttgccaaggcgataagggagggcgccgctagctcctgaagcgggacgtgaactacatttcccataaggagcctcgacgtggggccgttcagacttggccaatggcggcccaggaacgggaacgttcgggcgggccctgcgtggggcggggcttccggcgtcggctttcggcgctggctttggggcggtttgcggcagtgggatcattgggcggtgggcggtgtggaggagtctccgctggtccgcagaaacgaacgaaggcgcgagaatcgggaagttctgcctcagtgacctgtacgcgtcctagccgcagtgaatgttgctgaaccccggtgacctcacagtggaggggcggccccatggggccatcggaccgcgccgcgcgggggcgttcgccagggcctccgcagaagcccgcctgtgcccgcaaccgccccgaaattctctccctggcaccgtgtccgctttacggagcccggagcaaggctcagaaaaatgtcccagccaaaaacatggtacatgcctgtcatcaggcaagtcttcaaagagcggctgggaccaggggccgagggacctcgtttagaggcggcttagggggaaggtcagcagttgtgtttcagttgtgttgggttttcggcgccccacaatgcgggcgacgtatgggccacaggtgtggatgccagggacaggtcgccctgcacatggctgaggcacggtaggcttgtagtctaccccatatcaggccatggtgatctcaggtatgggggcctgggagaggagagtgagtacatggctgagtacgtcagagcacggggtcagggacacatcaggggaggacgctggcaggagaataaccgggctcctgggtgtcctccgctgaattcagacgcgttcatgttagagcaggtgggcctgcgtcctcccggacgaacggagttcttaggcaaggtccagaggagcttctacctgaagtggtgctggagaactttgcactcagtgctgggtgagaccactggcaccataactctccccagcctcaactctggtttttttcctctgttctttccatgttccccttggaagtcgctgttggtcgtggcactgaggcccagatcatgccacctcctctaacaagtggctgagtggacaccccacacattctacccaagggccgtgagtggccaagatcggggctcagaagtctctgaatcttcacagctggtcacgttcagctcggtcacttcctgtaagattccaggcactgcatgcactgacatgggtgcgtgtgggcccactgggtcctgcctgggagccttccctgaatgttcattttttgcaggtctgtgtttgtcttggagtaaggattattctcgcttgctggggtcatggtgttttggcctctcctggcctggactctcaaaaactcatcatccttcataggtctgaaggcttctacattcccaccagcaggtggaccatatgaactcaaaactagttgtggcagagggaccctgaagagatctacccctggtgaatgcccccaggagtgggctgttctcacac

SEQ ID NO: 22748 - DNA, 2300 bp, Homo sapien
tgcatagagaaacactggatgtgaggtaataaccagggatttgggtagactggtgaactagggcacatgccatcatggacaaaggaatagccatagttccccatcaactgggactgtgcagggtgagggtgtgcagaacaactccagagctacagacctttgtatttgccatgttaaagtttttgccacagttaaagcagataaatgcaatgtcatgtacattcacttcacctctctcaaactgtatcttggcacccatcactccccaggtaggaactgggagctgagagaagtgatagcctgacgtccaggaaagtggtttttgcagtctggccagggtttctggtcactaacacacacttcatgccttcacagtcttgctggccaacagagtgggcacaggcagatgggggcatttaacacagttgacagagctggtattttagaaggagctagagatccagaaccttgtagaatatggtgtttggcaccttttttttttgatatggagtcttgctctgtcgcccaagctggagtgcagtggcgcgattttggctcacggcaagctccacctcctaaatggctcacgccattctcctgcctcagcctcccgagtagctggaactacagttgcccgccaccacacccagctaatttttttgtatttttagtagagacgggttttcaccatgttagccaggatggtctcgatctcctgacctcctgatctgcctgccttggactcccaaagtgctgggattacatgcatgagccaccgcacctggccggcacctattttaaaaagcttatttaccatgtaatttcagcatcatcacatgtgagctgctgctgtttctttgacctcccccatacaaggaagtactcatgagagcattggctgggatgtgaacaggagtccccataaaggagaggcctggccaggtgcagtggtgcacacctatagtcctagctgcttgagaggctgaggcaggaggatctcttgagcccaggaggttgagtccatccagggcaacatagcaaggccccatctctagaaaagaagggtggcctgggctcacatcactgaacagcagtttcagtagccactgctgcttccacatctgtcctagatccctctctgttctccctgcctatgtgaatgtcacctaacaggctcagtagtgggatatgtgacaggaccagtactccatgactggtcgttcctcaccctgaccatggcacccttgccctgccaaagattgtactcctggctgaacgttaggcagtgtactccaggtagaaaccccacacaagggagtggatcaaaccttcaccaacagtagaccatttatggtgaagaccaccttttcagatgtgacatggctcacagtaagagcacttttcagttcatgcacagcaaaattcataagtgagaggactcaagggccaggcatttgtgaaggctttccagggtaactacccccttccagcactggagtaccagaataatgagaagctcaaaagagaatgtggaaaggccttcctttctccatcaccagagtactcatggcacagggaagccatgaagaagagctgagtgagaagatgctgccacacagctctaacatcagataacaccgggcaggccatgatagggagaagcccttcaagagcagtggctatgggaagacatgaagacttttgccctcttcaaccacctaagaacccacactgaagagagatctttaaatacttggtatgaagaaagaccctcaagaagaaatcgattcttatctataaccaaaaaattcacagtagagaaaacccctgcatctaaggaatgtgggatggtcttcagtcacctctcctatgtgagaaagctatataaagtacctatgggaaaaaggcattacaaatgcagtgaaaatgggaaagccttcagctatagacacccccttttaagaaaaatcaccagagaattcacaagagagttatgggcaacaaatgtgggaaagccacagctcccagaatcttaggcggcactgtattactgctattgcagaagccatctgtattagttacctattgctgtgtaacaaattactcaaaacctagtggcttaaaacaatagtcactatttcacagtctctataggtcaggaactttggtgcagctagctgactcctctttagggtttctcacaaggctaacatcaagatgtcagctgggggtgtatcatctgaaggcttgactagggaaggctctgcttccaagcaaactcatgtaattggcagcattca

SEQ ID NO: 22749 - DNA, 2300 bp, Homo sapien
ccagaaaaattacctacatgtactgctaatgtggaaaagccttcagaagctactctgtttctgaccagcccaggaacctttgcagggccatctcacccatgcagcataaggcagaagccatagtcactttccatcttgcctggatccaaaaatttgcagcagtcctgtcctcatgcatggggaaaacagtaccctgagccttccttcctgtgttctctagggattcaggactgtgctcagctgaaccgatgctggttgaggggccttgagggaaatctaatttgagctcaggaagatgcacattccttgtggatgtggtcaagtctgtgtttaacccctaagatgtgtccattgaggccacaaatcaccctccactggaatcacctaccttgcctgcactaactggtgataataaagaccttattgatcaggtcacctttaatcttaggggttctgttggggtaggttgagaaaatgaatggatagattggggagtgccttttgggggcacaaaatctgcctaagggcacagtagaagagcgggtagttgctctgtcctgttgtagcctactttgcattgctgtgtgaaagactgggaaagactgaaaggctctggattgaacatagtggcctgtttcagttaccgtagggcccagagcttacccagaggaaaaataaactcatctacaacactaaaatagtcacagggtcaccaaggcaaagacctagaggggtccatggaggactctatgtgcatagagaaacactggatgtgaggtaataaccagggatttgggtagactggtgaactagggcacatgccatcatggacaaaggaatagccatagttccccatcaactgggactgtgcagggtgagggtgtgcagaacaactccagagctacagacctttgtatttgccatgttaaagtttttgccacagttaaagcagataaatgcaatgtcatgtacattcacttcacctctctcaaactgtatcttggcacccatcactccccaggtaggaactgggagctgagagaagtgatagcctgacgtccaggaaagtggtttttgcagtctggccagggtttctggtcactaacacacacttcatgccttcacagtcttgctggccaacagagtgggcacaggcagatgggggcatttaacacagttgacagagctggtattttagaaggagctagagatccagaaccttgtagaatatggtgtttggcaccttttttttttgatatggagtcttgctctgtcgcccaagctggagtgcagtggcgcgattttggctcacggcaagctccacctcctaaatggctcacgccattctcctgcctcagcctcccgagtagctggaactacagttgcccgccaccacacccagctaatttttttgtatttttagtagagacgggttttcaccatgttagccaggatggtctcgatctcctgacctcctgatctgcctgccttggactcccaaagtgctgggattacatgcatgagccaccgcacctggccggcacctattttaaaaagcttatttaccatgtaatttcagcatcatcacatgtgagctgctgctgtttctttgacctcccccatacaaggaagtactcatgagagcattggctgggatgtgaacaggagtccccataaaggagaggcctggccaggtgcagtggtgcacacctatagtcctagctgcttgagaggctgaggcaggaggatctcttgagcccaggaggttgagtccatccagggcaacatagcaaggccccatctctagaaaagaagggtggcctgggctcacatcactgaacagcagtttcagtagccactgctgcttccacatctgtcctagatccctctctgttctccctgcctatgtgaatgtcacctaacaggctcagtagtgggatatgtgacaggaccagtactccatgactggtcgttcctcaccctgaccatggcacccttgccctgccaaagattgtactcctggctgaacgttaggcagtgtactccaggtagaaaccccacacaagggagtggatcaaaccttcaccaacagtagaccatttatggtgaagaccaccttttcagatgtgacatggctcacagtaagagcacttttcagttcatgcacagcaaaattcataagtgagaggactcaagggccaggcatttgtgaaggctttccagggtaactacccccttccagcactggagtaccagaataatgagaagctcaaaagagaatgtggaaaggccttcctttc

SEQ ID NO: 22750 - DNA, 2300 bp, Homo sapien
gtggcgggcgcctgtagtcccagctgctcgggaggctgaggcaggagaatggcgtgaacccgggaagcggagcttgcagtgagccgagattgcgccactgcagtccgcagtccggcctgggcgacagagcgagactccgtctcaaaaaaaaaaaaaaaaaagaactgtaacactcaacacgagggtccgcggctttattcttgaagtcagcgagaccaagaacccagaggaaggaaacaattccggacacagcaggacactggccagtgccagggccagcagcacctcccagagggaacaatggaaaggcggaggaaaacctagatttcatgtgtaggggaaagaggagacacagtagccttacctagtgggcactggagtacaaagctctgtagtatcatgtcactgtagaagcccccttggacctcactaaggagccccacattcttggaagatgtactgaccctgtcctcaaaggtcattaagccctgcaacaccaagccaatgggcagacagatgtgatctaagcactgagcgtgagccctagccactggtcctccaacctaaaaccctccttcccaaatcctatcctcaggccgttcactgggccaggccaccaacataatgcagtctggacgtcctgaagccacaccagaattctatatatccagaggcccatttgacacctccactcacaggtctccagacaattcagactctatacctacaaaatccatcgctaatcttccatgaaacatcctcctcctgccaactgccaacctctattctccacaggaggcatcctaattcttcctaactacttgggatggtccttcacccctactcatgcttattccacttatctaaggtagcaaaaaattccattagctctatcttgaagatccactgggaatctgatcacttctcccatccttcttgcttccgttctggacaggccactatcataactgtctggaacaatactgcaataacctcccccacagtctccctgcttccagccccactacaaccaccttctccagtagtgtgttcattcagcaaccactgaaatactttccaaattctaactcaggtcatgtccatcccttttctgttcaacacctttcatggctcccaggcgccctcggtgtgccaggagaggcaggactcctcttacgctctccactcgctgccaagggggcatgagagcctgcctgaacgctcaggtcagggtcaagtccaagtcttcgcatatgcagatccctcctcctgtaccctccacgtctcaacaaactggattctgaaatggtgacccccaacctgtgaacgctccacactgttcagtggggcccgcagaggacctggggcagatacttctcaatcggagacttaggacaatggtgctgagtccagcggagtgggtgccaggagacctttggcgcacgttccatgcctacagccgggcgcacactgggtcaagacctcccaatgcgtagcttttcttggcctcggcctcgcgctccctaaagccaacataacgccaagggcgacgactcccgagagccgcggacacctccgcgcggtgcaacctgagggtcccactgggccggctttatctaaggcacagggtggggaaggggggtgcggtgttgtggggggcgaacactgggctcaggggcgatattcgccgcggtgggggcgcttgtatgtcaagaaggcggaacttccccgactctcgtgccttcctcgctcctgtttccatgggcccagggagcctccaagattccgtccctcgcctgacaacgcggtcccttcagaagcagacaaaatcgagaaatgccaaagtgatggtccgaggacgacgacggaagtcccgctgccaggctgtgattggccagcgtcttacactccgcccggaagtgcctgtctcctcggctgccaatggccagccctgaggcaccgcgagggtccttctggataatgtagtttgcgttgcctgagcagcgacgcaataaacgccattcctcaatcaccttggcaacgacctagcagtagcgtgacgggcatagggaaatagcgtcatagacggcggggatccttgagccaatgaaagctcggaccagtggcaagtccgagctgtcattgagaggcgggacttccggcgccgccattgcggtcctcattttgctgctggtgggttgggctacagcaggcctctggagccacaccagggcacgggagtgggtgcagggaccgtcaccgcgccttcacacgcaccatagtgcccggctaattactct

SEQ ID NO: 22751 - DNA, 2300 bp, Homo sapien
accagcccatgaaagcagctgggagggaggctgtaccctgcaaagccacagagctgcagctgcccaagaccatgggaacccactgcttgtatcagtgtgacctggatgtgagacatggagtcagaggagattattttggaactttaagattcgactgtcctgctgcatttcagactttcgtggggcctttagcccctttcttttggccaatttctcccatttggaatgggtgtatttatccaacggctgtaccccaattgtatctaggaagtgactaacttgcttttgattttacaggctcataggaagaagggaattgccttgtctcagatgagattttggactgtggacttttgagctaatgctgaaataagtagactttgggggactgttgggaaggcacgattggttctgaaatgtgagcacgagatttgggaggggcgaggaacagaatgatatggtttggctgtgtccccaaccaaatctcattttgaattgtagctttcataattcccacatgttgtggaaggggccccagttagaggtaactgagtcatggggacagtttcccccatactattcttgtggtagtgagtaagtctcacgagatctgatggtttcataaggggtttcctcttttgcttgactctcatttgctcttgcctgctgccatgtaagacgtgcctttcaccttctgtcatgattgtgaggcctctccagccacgtggaactatgagtccactaaacctctttttctttataaattacccagtctcagatatgtctttatcagcaacgtgaaaacagactaatacaccaggcatcgtggctcctgcctgtagttccagctacttgggaggctgaagttggaggactgtttgagcatgggaggcggaggttgcagtgacccgagtatgcaccactgcactccatcctgggtaagagagtgagaccctgtctcaaaaaaaaaaaaaaaaaagtaaaaaaaaattgcttgaaatgttaataatgcctctaagcatttgattaaatcacaatagtacttaagtgttcttaaattctttcaaagcaggaaaaatttaaataaaaacattcaaaaattgtcgagctatcttacactatagggatctacaagtagaatcaattctgtggacagttatagctgacagtagacagatatttatagatggaggtgggtatagaggaagacaaaatgaattaacgtacttgacatctgagaactgtctaaggatcctaaaaacaagaccctcacagggaagcaacaaagagagaatcgtttattctctgccaacaacatggtcagtctacattgagactgccctgccttttgttgttatgtgtcaaagacacttagattggtccagagaaaaaaggaacaaagcatccatgttgtgatgtgtggggcaaagcaagaactagatggtctaaggacaagcaaggctggggaattaccttctgctcgtccaagttacaaggaaaacaagttttgggcgagcgtccaagaacaatcacagaatcaagacaaatgacaagcgggtagtgtcattacaggctgagaattcttggtgtagaggttgaaaaacggaccttaaacctttacgggacactgacacacagagagatcaaaccctcgcccaggatgcacagtcagtgagatgcaaagctgggaagggaacccggagctccaggcatctgctcctccacctacacctgccctacccggtgcgttttctcctccctgctacctgctggtgttgccttctggaacctccgcagtttctgctttcacacctgcagggtttagtctccagggctgcttaggtgggtgccaggaactgggaatccccaacgcgggacaacctgccgggcgactcaaccagtgccacggagcccttggaaacccgcggcagctgcgctactccatttccaggcgcccagcgcggcggcgcttagccgttgccatggagactggtaatggccccgcctccgcgccgaaaaacaggcaggaaccacataacccagaaggctgtgcgcaagcgtctgcgcgcgtattggggcaatgtgagctctgggggctggacttccggcgttgggactgtcacttggctgctcgcgtcaggccacaccggtggtctgggctgtggcgcgcgggtcggggcccgaggcgggcggccaggaaggtacggaccacgagcagccggccgcgcccccaagcctcggtatcttcgagtatgacgtggtcggcccgggggcggtcgggccccggcgggaaccacgcg

SEQ ID NO: 22752 - DNA, 2300 bp, Homo sapien
gtgctgggattaccggcgtgagccacagcgcccggccacagcttgaatagttctaagtgttggggttttttttcttcagggtttttgaactttaatacttccttttttttttttttttttttttgaaacggagtctcgctctgtcgcccaggccggactgcggactgcagtggcgcaatctcggctcactgcaagctccgcttcccgggttcacgccattctcccgcctcagcctccccagtagctgggactacaggcgcccgccaccgcgcccggctaattttttgtatttttagtagagatggggtttcaccttgttagccaggatggtctcgatctcctgacctcatgatccacccgcctcggcctcccaaagtgctgggattacaggcgtgagccaccgcgcccggccctgaactttaatacttctaagtgttggggttttttttttccccctcagggtttttgtttgttttttcctgagacagggtctctctcttacccaggctggagtgcaggggctccatcatagctcactgcacactccaactcctgaactcaatcctcccacctcagcctcccatgtagctggtattacaggcatgcaagaccatgctcagctaatttttatatttttttataaagatggggtcacattttgttgctcaggctggtctcaaactcctaggctccagtgatcgctcaccttggccacccaaagtgctcagattccaggtgtgagccactgcgcccagtcctgaaatgttcttaaattctttcaaagtagcaaaatttatattaaaacattccaaacatgatgagctcccttgctctacaaggatttacaagtagaatcaattaggtggacagttatagctgacagttgacagagagatagttatagatggaggtaggtatagagggagggaggcaaaaagagttaaggaactggacagctgagaactgtctacaggttccaaaaacaagacaaagaaccttttattatctgccaaacaagacagtctacattgagactgctctgcctttcgtttttatgtgtcaaagacacttaaattggcctgtaatcccagcactttgggagaacgaggtgggcggatcacctgaggtcaggagttcaagaccagcctggccaacatggtgaaactccatctctactaaaaaatacaaaaattagccaggcatggtggcgcacacctgtggtcccagctactacggaggctgaggcggggggatcacttgaacctgaaggcagaggttgcagtgagccgagattgtgccactgcactccagcacgggcaacagaacaaagaccctgttaaaaaaaaaaaaaaaaaacttaaatgagtcccaagaaaaaaggaaaaaagaatgaatattgtgatgtgtggggcaagacaagatctagatggtctaaggacaagcaaatctggggaattaacttctgcccatccaaattacaaggaaaacagatgctttgggcaagtgtcgaggaacagtctcatacttaagacaaatgtaggcttacgggctgagaattcttggtgtaaaggttgaaaacggaccttaaacctttacgggacattgacacagagaggtcaaacccgcgcccaggacgcacagtcagtgagaggcagagctgggaagggaacccggagctccaggcatcggctcctccacctccacctgcgctacccggtgcattttctcctccgtgctcactgctggtgttgcctcttggaacctcggcagtttctgctttcgcacctgcagggtttagtctccgggactgcttgggaggacacctggaatgccgaaggcaggactacacaccgggcgaatccaccagcgccaccaagcccttgaaaacccgaggccgccgcgcgactccatttcccagcgccccgcgcggcaggggcttggacgttgccaaggagaccggtagtggccccgcctccacgcagggaaacaggcgggaaccacgtgacccggaaggctgtacgcaagcgtccgcggcgcgcactgggccaatgagaaccgaagggctggacttccggcggtgggactgtcacttcgccgcccgcgtcaggccacaccggtggtctgggctggggaccgcgggtcgggtccggtttccagggggttcctggtgctcgaggctggcggcgaggaaggtactggctgagggcccgcgtcgggcccgccctgcgcacgcgtcgtgatcaagggcgccggccgccggccgcgcccccaagcctctgtttctcagagtgcgtcgtggg

SEQ ID NO: 22753 - DNA, 2300 bp, Homo sapien
ctcggctcactgcaagctccgcttcccgggttcacgccattctcccgcctcagcctccccagtagctgggactacaggcgcccgccaccgcgcccggctaattttttgtatttttagtagagatggggtttcaccttgttagccaggatggtctcgatctcctgacctcatgatccacccgcctcggcctcccaaagtgctgggattacaggcgtgagccaccgcgcccggccctgaactttaatacttctaagtgttggggttttttttttccccctcagggtttttgtttgttttttcctgagacagggtctctctcttacccaggctggagtgcaggggctccatcatagctcactgcacactccaactcctgaactcaatcctcccacctcagcctcccatgtagctggtattacaggcatgcaagaccatgctcagctaatttttatatttttttataaagatggggtcacattttgttgctcaggctggtctcaaactcctaggctccagtgatcgctcaccttggccacccaaagtgctcagattccaggtgtgagccactgcgcccagtcctgaaatgttcttaaattctttcaaagtagcaaaatttatattaaaacattccaaacatgatgagctcccttgctctacaaggatttacaagtagaatcaattaggtggacagttatagctgacagttgacagagagatagttatagatggaggtaggtatagagggagggaggcaaaaagagttaaggaactggacagctgagaactgtctacaggttccaaaaacaagacaaagaaccttttattatctgccaaacaagacagtctacattgagactgctctgcctttcgtttttatgtgtcaaagacacttaaattggcctgtaatcccagcactttgggagaacgaggtgggcggatcacctgaggtcaggagttcaagaccagcctggccaacatggtgaaactccatctctactaaaaaatacaaaaattagccaggcatggtggcgcacacctgtggtcccagctactacggaggctgaggcggggggatcacttgaacctgaaggcagaggttgcagtgagccgagattgtgccactgcactccagcacgggcaacagaacaaagaccctgttaaaaaaaaaaaaaaaaaacttaaatgagtcccaagaaaaaaggaaaaaagaatgaatattgtgatgtgtggggcaagacaagatctagatggtctaaggacaagcaaatctggggaattaacttctgcccatccaaattacaaggaaaacagatgctttgggcaagtgtcgaggaacagtctcatacttaagacaaatgtaggcttacgggctgagaattcttggtgtaaaggttgaaaacggaccttaaacctttacgggacattgacacagagaggtcaaacccgcgcccaggacgcacagtcagtgagaggcagagctgggaagggaacccggagctccaggcatcggctcctccacctccacctgcgctacccggtgcattttctcctccgtgctcactgctggtgttgcctcttggaacctcggcagtttctgctttcgcacctgcagggtttagtctccgggactgcttgggaggacacctggaatgccgaaggcaggactacacaccgggcgaatccaccagcgccaccaagcccttgaaaacccgaggccgccgcgcgactccatttcccagcgccccgcgcggcaggggcttggacgttgccaaggagaccggtagtggccccgcctccacgcagggaaacaggcgggaaccacgtgacccggaaggctgtacgcaagcgtccgcggcgcgcactgggccaatgagaaccgaagggctggacttccggcggtgggactgtcacttcgccgcccgcgtcaggccacaccggtggtctgggctggggaccgcgggtcgggtccggtttccagggggttcctggtgctcgaggctggcggcgaggaaggtactggctgagggcccgcgtcgggcccgccctgcgcacgcgtcgtgatcaagggcgccggccgccggccgcgcccccaagcctctgtttctcagagtgcgtcgtgggcgtccaggggactgtcgggccgcggcgggagccatgcgctctcccaccgtgcggcagcccaggaggctgcgcgctgggcgttccacgtccatgatggccggggagactgaggcgcggggcggccccgggacgctgctggcggggaaaggctgggtggtccacgcctttcttccctccca

SEQ ID NO: 22754 - DNA, 2300 bp, Homo sapien
tgccatctgaagatggtgggggcagaacccagggaaggagggtgagtgtctgagggacatcatggaaggtggctgttgggatggggagcttggtcctggctcacagccataccttaaactaagcttgtccaacccactgcccaggatggctttgaatgcagcccaaaacaagttcgtgaactttcttaaaacatgagatgtttatgcaatttttattttttttagctcatcagctgttattagtgttaatgtattttatgtgttgcccaagacaattcttcttccaatgtggcccagggaagccaaaagattggataacccagccttagaccatggctgtctcttcctccctgctcttttaggaccagatggcctttgaggatgtggctgtgtacttctcccaggaggagtgggggctcctggacacagcccagagggccctgtaccgccgcgtgatgctagacaacttcgcacttgtggcctcgctgggtaaggtcctagatactccatgaaatgggcaactgataacaagctgactggccagggctgccccctcacctccctggtggctgacgagcaggcctataccttgcagccaggagccatgtggaataggggtctggtcctatagacatgcagtctggttggctcaaccactccctgtggcgctgtccggctgtggcctctccgagccttggctcagtccccttcctttggtgccctgggcacagttgctgccctggggatgaatgagctattcctgtgagccccttgccctgtgccatctttagattctgcagttgcacagatgacattttctgtttccgtgaagccctgactcctgccctctgtttggaggtgggttatcttgagctggggctggactctaacctgcacctcctcctcacaggactctccacctctcgacctcgtgtggtcatccaactggagcgtggcgaggagccctgggttcccagtggaacggacacaaccctgtccaggaccacctacaggaggcgcaaccctggtgagagggagctcagggtggggtgaattcaggaccaacctgtggtcatgcctctgtccctggttcccagactccccagaagcaccctcctcccctccctcccacccgattcccttcccttccatcatcagcccctcctggaggctgcagccttagctgcccttgaaggtggagctccaagggcacaggagcggggttgacacagaagggcactcaggctatggtgagaccatctcagagtcctgctatcagctgggctggcctcaaaccctccatggctagtcactgccataattgatgggtcatttttttcacccttcatctttgtgttcagcaaacatttcctgagtgctcacagtggtcaggcccagtccaggcaatgtagacacagcctcaatcaggacgaccctggtcctgcttttctggggctcatggtgtggtgggagaggcagtcggtaagcaggattcaggagtatagtctagagcactggatggaggtcattgcaggagcaggttggggagtgggtgcctgagaagggggacaggggcggggggaagggggtaagcaatggaaagagtgtgggtggaatagccagtgtggagatgtatgcagcatacagcagccgctagttttcctcagcttcacatcctgggtgtcggggggctgccaccttgatcatgggagtgcccagtgtagtcagtgccatacctatcagggcagattgttcctccaaaccccagcccctcctgcagggccagcctcacctctacttttcccctaagcttttgtgccagctccggggttccttcttgcctgtccactcagcctgccctggtcctctcctaaccaggatgccccaggcaaccactgtttctctgcctttaggttcctggagtttgacagaggatagagatgtttctggagaatggccacgagctttcccagataccccacctgggatgactactagcgtcttccctgttgccggtgcctgccacagtgtaaaaagcctgcagagacaacggggtgcctccccatctcgggagagaaaacccacgggggtgtcggtgatctactgggagaggctcctgctaggctcaggcagtgggcaagccagcgtcagcctgcgactgacctccccgcttaggcctcccgagggcgtccggcttagagaaaagacactcacagagcatgcgttgctggggaggcagcccaggacgcctgagcggcagaaaccatgtgcacaggaggtccctgggagaacctttggga

SEQ ID NO: 22755 - DNA, 2300 bp, Homo sapien
cacgggcgagaagcccttcgtgtgtacgcagtgtggccgcgccttccgtgagcgcccggccctcttccaccaccagaggatccataccggcgagaagaccgtccggcgatccagggccagcctgcacccccaggccaggtctgttgccggggcatcatcagaaggtgcgccagcgaaggaaaccgagcccactcccgcctcgggcccagccgccgtctcgcagccagcggaggtctgaggtcacaggttgcagccctggccttctgtgaatcccttccacagctaaagggcatatgtcctctgcagatccacagcagagaaaaagtcccgtgcttgctagtcagggacaagggaggccctttggctgtgatttcatttgcacgtggggacaggatttgccagttcacccacagatcacacctccatccccaaagaggtagcactgcagcaacatcagggggaggacgtggtggctgaactctagtggggccgagactattcagagccagtaggaggccgacagtcacagcactgcactgtggtgcggcttcatgtgatatgacagtggatgctaaggtgagagggatgcaggcatgggttgggggtggcccagagaaacttatgacagctgtacacaaactggccgctggagagatgcccgctgagggtattctcccctcaacccactgcctctgttcatccaagacttcctaggggccagcctagcagacaagagaccacaagggactggggatcagggtctgggctctgtcagccgccacctctgggaaagagaaaaggtttgggtccactgaacatcatgtttgtagacgctgacaggtggggtcctaatgagagccaacacatgctcactgccagctcctgtcctgagtactgggaagtttctcctgaagccctgtgagatggctctgtggctggtatcccgacttggaagatgaggaaactgaggcacacggcctggcctggcttcacacacatagccgactcaggagagggatgcccatgggggaacatgtgactctcagcattggaaggacagagctaggatgatggctttccggtggcactcgttcaggtttttgcccaagtctcagcttggccaaggcctgtcactgactggtttaccaaagtcgatgtgaggaggaggctttatacctgaggggatgatgttaacttcagacaagatggagctgctcacttttgccgggtttggtggccacttcacccccaaccctgtctcacccccattatccctcctcaattggaggctggacagagctgaataggaaagacttgctattgcctaaggctatgtgtgacaccctcctgaggacctccccaccccagtgtaatggcccttcatggcagggacagaaaggtggactgggggccatttgcttcctgtggccttcagcagaccaggccctgtccctacctggagcctcacctccaaggaaattcatgttctccttaatggaaaaaaaaaaaaaaagactaccatctgcaactcagagtaggtgttgcagtttcctgtacagcagtttggacctccagagcacagcctcttgtccctactccagagcatggttcagtcttaatagcagttcaagagcttctctgataaaggtttctttttaaacatttgtgtgaacggtagcaacctgacacctatttcaccctcatacaatgcagatggtattgaacataccctgacatgccatcagcgtttgtcatcatcacagaagttcctggacttggcttcaacctgggtaccctcaagaggccacagagtagagatacagcctgtctgcagcccagggagggagtgggatacctgtatccttttcagggtcagaggtgggttggggtagccaggagctggatgaactgggatagagtggggctgtctggagcagcagccctgctagatgagtcctggtggatcctggcaatgggaggatggtaggtggagaaaccaaggcagggctgtgttccttctgctgctgagatagagggtgtggccatgtgtgatgaccctgcaaggttgactccaaccagtgggcactccatcccatggcttccaaaatcctgcagctatcctgccctatacacaaagagcccagatccaggccccacacacttgatattggggccagactcttccacctgtgaaacctcacaggttcctgcagggagtggagacacacagaacctagctcccctggagcctgcaagacttgggccaccagaatcccagtaggtccctgaaccattgtccc

SEQ ID NO: 22756 - DNA, 2300 bp, Homo sapien
ggagcccatgggagtcaggagcaaaagcatctgtcaaacaagtagatacccagagagtcacgtgaaatcatttctatgcctctgacagacgcttcttgagcgaagtttctgccctgagcccgcctgaccccttaggctgggctcagtaccctaccttgtcttcccaccagccgcctccctccatcaagttcctttccacgtctgcttgtgcccctgttgtccctcagtttgtccaccctcctccaatcttcccctccccaaacccatgactgatcagtggcccccaacctaggctcccacctccatgcaggtcttggcccctcggctgacctccctccaacctccccctctgctcttaattttgaataggtagtgactgtaaaagtatccctgggcttctatgtcaaaaggtcagactgaacacatgcatctcactgggctcagaaatccactgaaaccacagaggggagtatttaaaacacataacccacaagtatgaggatggtgacagaggagtcaggagcaatggcattcctaagctagaagtgggtgagagctgtcactaagttagggaaggcaaaatactacgtggcgacttggcgaagaggagagagttcccaccaggctgactccagaaccgcagaaggctgagaaccagcagcccagagacgggagacctatatcaaagctgcctggggaacaactactgaagaagcccttaacgccccagtgctctccccacatggtggagggtgaaagtttttgtttttttttccttctgggactctgcatagtcccagagaaaaggcctaagcacctcatccccaaaaacaacctgaggaggccgttggaaagctccgagttgacaagtctcatccacgcacatgctcggtgcttccaatcggtgatcaagaccactgctcttcatccagagcaggcagcagggattcccaggtatccaaagaaaccaaaacaggcggtgtaatttaggactgactaagtaatggctcggccacttttaagtgtggaagcaaaactgaccccacagatttagaaaactgtaacactgcttattgggagaaactagtgtcaccctggctagttctgctccccaaattcaaaggtaaataaacggttgagcatgtccgatcagcctggagggaaacctccacccccgactttgtaggactgacatctgaagacgtcagagactgcggtcacaaccgtcggtacctccttagggcgcttaacagaggtcaaagatggccctcgcaccctcctggcgggagaaagcccaggctcagggtggtcttctacaccaccgcctctcccgggtccacttggaagcgagtcccagcgaactactcgacctaggaaaccactgggccgccacttccagcctcttcggaagtcgaggcaacgctcctgaacgttgccacgggaacagctggaggcgggcggatatgccctagcgttatctaggggctggcccggggaatggcgtgggggcggcggggccaagcaagcgccacctctgattgggcaaaaccccctcccctcacctgccaatagaaaccggcccactgtacagacgcgcaagtttataacccgggaagagctgctctcagagcggagggagaccatataaccctgggactctgccgtacctcctagaggaacagagcgcctctcaggcgtcagaggctgctgcaaatgcgggtcagcgggtcacggtcgcgcctgtcttgctgatgctcatgggaaatgtagttcaaagggcatgggcggtgccttcggtgcaggcgagagattggtcagcgcggcgtcgccggggcaacacccggctgaggcgccccgcgttgtgcggcgccacatccgggaagcggcctccaagcaaccgctccgggttgaggtgagcgcaggctgccagagtgggcgcagcctttccaccccgtgggagggcttggggtcgccctctggggcctgaacggctcctgctgtcggcgccctggagggcccgcccacttcccgacaggccgcgcgcgtcacctcagccttcgctcaggcctttcctaccctcaacgccgttccggggggccgggcctggcaagtcctcttggaacgcctccctcttgccttccccttttggggacagatcccgaagttcgagcatccctcggataggccgggtgtcaggcctggtctctcaggcccgtccaggtgggcgtctttcactgcagaccttcagggccgggatgctgtggccatccctcgactccgcgcaacgtggagctttggcc

SEQ ID NO: 22757 - DNA, 2300 bp, Homo sapien
gatgactgtcggcagcatggcgtgacagtgatcctgtatgtgggcgagctcctgcggtacttgtgtaacattccccaggtgaggctctaagattagggctccatggtgaacacccaagtatgaaatcccaggtaaaggtctcaggtaaagattcaggtactgaactcaagtccctcagataatacacctcatgcaagaaccccagataatgagtttcagacaaggcttccaataatggtttctttgatagctgtgctaccttgagcctcagtgtcctcatttggaaaacagggataatagcccctacccctatcatgagaatttccattaaaaattaattaattaaaattaaatttccattaaattaaagttctaggtaactactcttaggtgagaccccagatgaggcctccagtcacctctggtaacgtcccccaggcaaagctctgaggtcgcccctgcaggtaaccctctatttaagactccagtaactactctcatgtaagtaacccaggtagatcccttaggtagaggtcccccatcaccttccaggtaactcccaaggtaaggacccaggataacaccccctctaggtaaaggttccaaggcatgccccaagagcacctcctcctcacccttctggggacattcctgtagcaaccagaggaccggacacatacagtccgcctggcaatgggcaatggactacgggctgatgtgtgggagaccttccagcagcgcttcggtcctattcggatctgggaagtctacggctccacagaaggcaacatgggcttagtcaactatgtggggcgctgcggggccctgggcaagatgagctgcctcctccgagtgagtgtgcgggtacctggtgtgcagctgccctgaggctgagcccacaggacctatgtcaacactccaccctccaccccagatgctgtccccctttgagctggtgcagttcgacatggaggcggcggagcctgtgagggacaatcagggcttctgcatccctgtagggctaggtatgggggttgaggagcctttcctgggtggcaggggtggcgaccctcagtcttctgcttggctggaacgagctgctcaaaagcttgacgttggtgctcactagaggggtctgcagccttcatctggaccctgagccagtggcctgccttaccaccatctggggcctccgcctcagcttctcggctctgtccagctcccctgccttgatctcttgctctgatttactgggtctctgggtgtccatctgatttgttctcttgagctttctgtggaagacggcattccagccattggtcccttgtcctgtaccttctgttagtgtcttctcccagggccttgcaaggtcctggtcatatctattctcactgccatttgtctgtccgtcttccatcccttgttatccttttcctgtttctcatgggctccccataccgccttctctatacttctctctcattttctgtgtcgcttgtcgcagtctctcaaggtctctgaatgtctctctcatctctggatctccctgtctgtgtctttgggtctgtccttggcagggtgctgggtgatgaagagtccaccgttgttgaaaacctccagcagggggcttggctggtgggctccaggggttcttgttcctgctcctaccccaggggagccggggctgctgctgaccaaggtggtaagccagcaacccttcgtgggctaccgcggcccccgagagctgtcggaacggaagctggtgcgcaacgtgcggcaatcgggcgacgtttactacaacaccggggacgtactggccatggaccgcgaaggcttcctctacttccgcgaccgcctcggggacaccttccggtccgaggcagggtttctcggggcggggctggcgcggggccacggacgctttcagatcctagagggagtcaggctgaagaggcgggactttcctgtcgtaagagggcggaacttggagtcaggacttctcacgcgaaggcggggcttctcgattttcgagggggcggggctgactgggcctcctgatccccaaaaggggcggggcgggggcaagaggcggggcctctccttcccgggggcgtggtcacaagcgccggctccctccttgcagatggaagggcgagaacgtgtccacgcacgaggtggagggcgtgttgtcgcaggtggacttcttgcaacaggttaacgtgtatggcgtgtgcgtgccaggtgcggagggttctcattttaaacttccaacagctttgtgggtggaggggtcgttattc

SEQ ID NO: 22758 - DNA, 2300 bp, Homo sapien
ggagaggagggggtgtccctgctgggcaggaagatcccatagtgaggggagggttctctgataggcaagggatcccggggtggtggttcgggaggggaggggagcccctgctaggtccaggagcccaggtgggggtggggtggggtgggggcggggagctgtagagtctgacttgcgttcgcggcccgccctgtcttccgcaggggagaagccgcaccagtgcgccgtgtgctggcgatccttctctctacgcgactacctgctcaaacacatggtcacgcacaccggcgtgcgcgccttccagtgcgccgtctgcgccaagcgcttcacgcagaagagctcgctcaacgtgcacatgcgcactcaccggcccgagcgcgcgccctgccccgcctgcggcaaggtcttctcgcaccgcgcgctgctggagcgccacctggcggcgcaccctgcgccctgatggcgctggggcctggcctcgcccacggtggatccggggcctcccgcacagtcggccacgcccgctgcgggacccgtggttcccgccactagaccacgctccctcctgagcgcaggtcctctctctcccttcaccctttctccataccagggcctaagtccgccttactcctctcctccatgtacttgaaccctccaggtggtgccgggctggggctggggctggttagaccacttctgagaactggactatttcctgcgtaaaccgggcgctcaggcgcttggacccggcccaagatttgactccggttctcaccccgccctctcctggggtggtggtgggggctggggggccgcttgcctgccccagggtcaggctgggcaaggtccctagctctctacccaagctgttactccctcatggggcgcctaaggagactcaagtggacccatcatatatgggggctgggcctcgggactctcgctctaataaaggactgtaggccatggggcctaaaccacgaagctgtgagcacctggatcagtgcgtgccttgccctcatagacaagatgtgagtgtcagggttcagcgtccctgttcttgggtggcatccatgcggcccacaggctgtcctgggcaggaacaggatggtccactttgccatctaggacctctattctgtaggggctaaggtgggctgcatatataaccagcacttggttctcttggatccctcagtcctgtggggagtaggataggcaggccacatctgaggtgggtctccgagagggaggccacgtgaaagccccatcatactcctggttgctgctgtccacgacctttaaggcccctcccatagatcttccagtcaggctctaagggtcttttggacttaagacttcccctccccgaccttgatggacatggctgagcaccttacttgtggggagcccagggggatctttggggccaggttgcactgagggtatataagcccccatatatctgcccttggtgctgggggcaaagttcagggagggctccgatggccgtgttgggggcaggaaacagtgaggggtgggatcctggggctgactgctgggcggttggggacaccacccctactggccagccagtgtcccaggcccctgcatccagcggagagagcagccactctttgcccctctcctcttcagcacaatagtggctcctagcctaggtgccctgccataaggatttggagctggtggagtggggtatggccccaggccataccccagcctgacctgccaggctcctaggccaatggcagctcctctgggttcaccttctgagactgcttcctcaaggtgagaggccagggctttcatgatccaactgtgtgcatcatgggctgacttcagtctcctgaaccccaggactccatcgtcgtcaaagccagaggtggagcagagagtcagagcaagcacatgggtggggggcagagctgggtttgaatccaggcgatgccagtgttcctgtatttactgagcacttgctgtatgcctggcaggagggtacgattcctcggatcatgggacaaggggcttagcctggctgagcccctctcctcagggtttcagtgggtgtcacaggaggacctcccaatgaggtccaccttgctgtcctgttgcttttctgtttggcctgattggagtgttcccaagggcagggatttctgtgctctgagtgtctggtacccagcagggatgggaggggaggcaagggagttagatgccagccctggagggtggatggggcaagcaggacagcaggaaggaggctagtggtgcccaagggg

SEQ ID NO: 22759 - DNA, 2300 bp, Homo sapien
agatgtatttgttttctatcgttactataacaaattaccaaaactccataggttaaaacaatatccatttattagctcaccattccataggtcagaagcccaagtaggtcttctgtgggtctcataaaggctaaaatcaaggtgtggtatggactaagctgctatctggaggctctggggaagaatttgcttccaagctcattcaggttgtgggcggaatctagctccacgcacttctagggctaaggtctgttttcttttctttctttcttttttttttttttttttgagactgagtgtcgctctttcgcccaggcccgactgcagtggcgctatcttggctcactgcaagctccgcctcccgggttcacgccattctcctgcctcagcctcctgagtagctgggactacaggcgcctgccaccgcgctcggctaatttttttttgtatttttagtagagacggggtttcaccgtgttagccaggatggtctcgatctcctgacctcatgatccgcccgcctcggcctcccacagtgctgggattacaggcgtgagccaccgcgcccggcctttttttttttttttttttttttttttttttgagacggagtctcgttctgtcgcccaggctggagtgcagtggcgcgatctcagctcacttcaagctccgcctcccgggttcatgccagtctcctgcctcagtctcccgagtagctgggactacaggcgcctgccaccacgcccagctaattttctgtatttttagtagagatggggtttcactgtgttagtcaggatggtctcgatctcctgacgtgatccacccgccttggcctcccaaagtgctgggattacaggcatgagccactgcgccgggccatgaggtctgttttcttgctggctgttgttgcagctcttctcagattctcagcatgacacctgtcctgttgcatttcctctcatggacctctctaccttcaaagcctctggaacccttctcctacttcaagtttctccaccttcctcttctgcctttaaggacccttatgataccttggacctaccaaaataatccagaatcatatcctattttaagatcagctaatgagtaaccttaattatttccgcaaaaaccctttcaccatgtagtgtaactattcataggtgagataatcatatttacaggttctggggatttgggcacggaaatctcggagggggccattttcggaattctgtcccccataccagattgacttgcaatgtcccagaatctcacagggtctagctcaggggaggcccagagcagggtgaggcagttgtctattcctgtctgcgttgtagtagaaggtgccaaggccgagatggggtcctttccccagtcccacccacagcgggcgggcctggagcgtctgcagtagtggtagcttgcttgcacctcctggcggccagggaccgagacctacttcagctctcacccgtgtcacaggaataaggccacttccccggttcgcagtggggtttaaactggccagaacacgttgggcacttgggccgggaactgccttcccattctgcatcacagggagcttgcggattgatcgcgcaggcccgccacacccctgatctcctgggcgacgccggaagagtgctctggtccagacattcctcgcgacgcggcagccctagcctcttcgactttggttccgactaagaggagagccggagtgcagactggcgggagctgatcgccataaaaataccggaaacgtgcttcggcctagggtttcccctgcgccgccgcgaccgcaggcctccgttccgccggggtaacggcccggaagtgcggccttgtagtcggtcaggaggaagcggccacggcagagcctggtgcctgaagaggagtcggaggtggggtcgaatgggcatccccctgccgcagggcgggcgaggaggctggggcgtgccaggggaggggcacctgcgctccgctagaagcgcacgctgagaacgcgagggggcgctgcaggaccggggtacggcgggggccagagtgcggggtggcagcggcgggtcagaggggtgctttgggcgtagggtggggcgcgggcaatggagcagagtatgggagaacgcgctcggagtaaagcacacggcgcggcgaaggcgtggcgggagtgtgcggcgccggacccgggaagctggcctgggcgccgggtctcgagtgcaggcctttgttctgaagtgtccaggccggccttgcggcgtcgggactgaggaatggagcccgtcgcgggg

SEQ ID NO: 22760 - DNA, 2300 bp, Homo sapien
gaccctgtctgtcttctggaggctttgttctagtcatgcgtttggacagttggttccctctttcactgccgagtccctctgtcctctgggataggggaagtgagaactgctccctgaggaatgagatcacgaaggggcctggtaaaagctgggaaggcacagaaataaagctttcagtgagggaaatgtgaggaatgcgttcatcagatgggaaacaaatagtggcatttattggactctcactgtgtggaggccctggatctcaccagatgtatttgttttctatcgttactataacaaattaccaaaactccataggttaaaacaatatccatttattagctcaccattccataggtcagaagcccaagtaggtcttctgtgggtctcataaaggctaaaatcaaggtgtggtatggactaagctgctatctggaggctctggggaagaatttgcttccaagctcattcaggttgtgggcggaatctagctccacgcacttctagggctaaggtctgttttcttttctttctttcttttttttttttttttttgagactgagtgtcgctctttcgcccaggcccgactgcagtggcgctatcttggctcactgcaagctccgcctcccgggttcacgccattctcctgcctcagcctcctgagtagctgggactacaggcgcctgccaccgcgctcggctaatttttttttgtatttttagtagagacggggtttcaccgtgttagccaggatggtctcgatctcctgacctcatgatccgcccgcctcggcctcccacagtgctgggattacaggcgtgagccaccgcgcccggcctttttttttttttttttttttttttttttttgagacggagtctcgttctgtcgcccaggctggagtgcagtggcgcgatctcagctcacttcaagctccgcctcccgggttcatgccagtctcctgcctcagtctcccgagtagctgggactacaggcgcctgccaccacgcccagctaattttctgtatttttagtagagatggggtttcactgtgttagtcaggatggtctcgatctcctgacgtgatccacccgccttggcctcccaaagtgctgggattacaggcatgagccactgcgccgggccatgaggtctgttttcttgctggctgttgttgcagctcttctcagattctcagcatgacacctgtcctgttgcatttcctctcatggacctctctaccttcaaagcctctggaacccttctcctacttcaagtttctccaccttcctcttctgcctttaaggacccttatgataccttggacctaccaaaataatccagaatcatatcctattttaagatcagctaatgagtaaccttaattatttccgcaaaaaccctttcaccatgtagtgtaactattcataggtgagataatcatatttacaggttctggggatttgggcacggaaatctcggagggggccattttcggaattctgtcccccataccagattgacttgcaatgtcccagaatctcacagggtctagctcaggggaggcccagagcagggtgaggcagttgtctattcctgtctgcgttgtagtagaaggtgccaaggccgagatggggtcctttccccagtcccacccacagcgggcgggcctggagcgtctgcagtagtggtagcttgcttgcacctcctggcggccagggaccgagacctacttcagctctcacccgtgtcacaggaataaggccacttccccggttcgcagtggggtttaaactggccagaacacgttgggcacttgggccgggaactgccttcccattctgcatcacagggagcttgcggattgatcgcgcaggcccgccacacccctgatctcctgggcgacgccggaagagtgctctggtccagacattcctcgcgacgcggcagccctagcctcttcgactttggttccgactaagaggagagccggagtgcagactggcgggagctgatcgccataaaaataccggaaacgtgcttcggcctagggtttcccctgcgccgccgcgaccgcaggcctccgttccgccggggtaacggcccggaagtgcggccttgtagtcggtcaggaggaagcggccacggcagagcctggtgcctgaagaggagtcggaggtggggtcgaatgggcatccccctgccgcagggcgggcgaggaggctggggcgtgccaggggaggggcacctgcgctccgctagaagcgcacgctgagaacgcgagggggcgctgcagga

SEQ ID NO: 22761 - DNA, 2300 bp, Homo sapien
cctcagacaggattctccccacacacaccctgcttccctcctcagacaggattctccccacacagaccctgcttccctcctcagacagggctcccctccccacacagaccctctttccctcagacaggattttccccacacacaccctactttcctcctcagacaggattctccccacacagaccctgcttccctcagacaggattctccccactcagaccctgcttccctcctcaggcaggattctccccacacagaacctgcttccctcctcagacaggattctccccacacacaccctgcttccctcctcagacaggattctccccacacacaccctgcttccctcctcagacaggattctccccacacagacgctgcttccctcctcagacaggattctccccacacagaccctgcttccctcctcagacagggttcccctccgcacacacaccctctttccctcagacaggattttccccacacaaaccctactttccacctcagacaggattctccccacatggacctgcttccttccctccttgggattccccactgttgaggttcagtttccccatctggaaaagcatcaaagtcagggtagctgctgacgaaaacatggggaggggatgccttggggggctgggtgggatttcacagactcattgctctttagcctcttgtgatttatatatatgtgtatatatatatatatattttttttcttgatggggggttggggggcccggcgtggtggctcacacctgtaattccagcactttgggaggccaaagtgggtctatcatctgacgtcgggagttcgagaccagcctggccaacgtggtgaaaccccgtctctattaaaaatacaaaaattagccaggcgtgatggcaggcccctgtaatcccagctactcgggaggctgaggcagaagaatcgcttgaacccgggaggcggaggttgcagcgagccgagatcgtgccactgcactccagcctgggcaacagagcaaaactccgtctcaaaacaaacacaaaaacctttctctcctcttttgagatggagtttcactcttttctcccaggctgtagtgcaatggcacgatctcggctcactgcaacctccgcctcccgggttcaagcgattctcctgcctcagcctcccgagtagctgggattacaggcgcctgccaccacgcccggctactttttgtacttttagtagagacggggtttcaccacgttggccaggctgctctcgaactcctgacttaagatccaaccgcctcgacctcccaaagtgctggaattacaggcgtgagccgccgcgcccggccacatttttctccatctgtggtctaggctggcgtgcagtggcacaatcccgcctcactgctgcctcggcctcctgggctaaacggagcttcccgactcgcctaagaaagtggtgggattacaggtatgagccacggcgcccggctgtgatctacatttgattcagtcaagtttctgtgtttctcaagtttaactatagcgtggttaaaatccaaaagtcagcacccgagctcacacaggagcttcctccctcttgggatggagactctcctcccctctccctggacacagcccttcactcggtcttggccccgcctacttctccatcggccctgccccctatcccgaactcttagtgacgcagaggctggagacgactctacggcggcgaagagacgcgggttgaggaagagggacggattgcccatgcgcttgggcgcacagcggcccgcttctgtgtggtctggaggtggagctgagaggggaatcacactctataaaggttcgcataccccactggcggattcaattgcggcagtgacgtcacagaggccccgccccgcccccacaagagccccaccgacgtggggttggcggtggtggaaggactaggagttggcgcgtgcgtactggcggcctctcccgcaccgaccggcctgggccccgcccccgggcgtgaggcgcccaatgcgcgtgcgcggcggcgtcggcgccagttatttctgtcccgccccccggcctcggctctttctgcgagcgggcgcgcgggcgagcggttgtgcttgtgcttgtggcgcgtggtgcgggtttcggcggcggctgaggaagaagcgcgggcggcgccttcgggaggcgagcaggcagcagttggccgtgccgtagcagcgtcccgcgcgcggcgggcagcggcccaggaggcgcgtggcggcgctcggcctcgcggcggcggcggcggcagc

SEQ ID NO: 22762 - DNA, 2300 bp, Homo sapien
cagcatatgcaaacagggaaaggcatggtgtgaagggctttctgggtttgtggttccctggcacacatctggtataagatgctgctagggaaagtagactgtgggtccatggattataagtgatgatgatttttggaagtgttttagcttttgagttggcagagacttacccaaagtttggtttggcatttccagcttttcacagacacagctagctttggtttggaaggagcttgagagtcttttgagtctagccaagttttggggccagaatcctcccatgagtggccttttggtagccatactgtgattcttcccatcccagaggacagcattggtggaagatagcgggaaggtggtggctgtggggcctgagcagccaggagggatacgcaggggctgcagggtgtcctacattccagacgtcccaggcaaaggtcagggtgcaggaatgagtggcattggggaagtcagtttccccaatgagccctgatgctacatattttggatttggttggtatgtgggaccagtgtgtttgatcagttttctaatggggagacaggctttggaggttattaatgggttggtctttgggtgggattatgctgagcaccaagattctgctctagagggggtgtgaccaccattctgagggtcctggtttgacatttcatctctcccagtatgagaacctctacaaggtttcctctgggcccttggattgtaagagaccctggtgttctcttgtcagggaagagggaggaagttaaccatgaaaggagaagaaaaggaatccagggtggtgtgtaggcagaattctgagtatgtccacttggagaagtgttcagtaaagggaacagtgtggggaagggtcagcgggggtggggggtggggtggggtggtcctctttttctagacgctgttatccttacccttacattgttgttatctctagaagctagaagaaagggatgtgtttctcagctatgttggggcagaggattctgggagcaaggagttgggcttgcaggcctgtgttcttccctggccacaccctctacatcttcccaataaatggcccagtgtcacagaacaggccggaaatgaggccccaactcattctgcttcctgagttgggggtggtgaagggcaaggtccagccttatgattcccactccccagggccagccaagtctcgggatggtgaacgtactgtctattgcaacgtacacaagcatgaaccccttgtgctgttttgtgagagctgtgatactctcacctgccgagactgccagctcaatgcccacaaggaccaccagtgagtcccaaggcatagtggttgggtgggtgggtgccaccccttccgtagcttagtgctcaggaacacatctgtctgctctcaggtaccagttcttagaggatgcagtgaggaaccagcgcaagctcctggcctcactggtgaagcgccttggggacaaacatgcaacattgcagaagagcaccaaggaggttcgcagctcgtaagtgtgggttctggggctgtgggggtggcccagggcagcaagaccctacctagcctgacctgctgtgtcccctagaatccgccaggtgtctgacgtacagaagcgtgtgcaagtggatgtcaagatggccatcctgcagatcatgaaggagctgaataagcggggccgtgtgctggtcaatgatgcccaggtaagccttgtgccggtgagaagggtccctgagccccctctgctgattgatgatgctgtctggggtgaggagtgatcctagtattcttctgccttctctgcttacctcatacaccttctatctgcagaaggtgactgaggggcagcaggagcgcctggagcggcagcactggaccatgaccaagatccagaagcaccaggagcacattctgcgctttgcctcttgggctctggagagtgacaacaacacagcccttttgctttctaagaagttggtgtgtactggtgggctcctggctggtgggttccaggcaggtggttcccaatacctcaaatccctatttgttgttggtgtgctcattctttcctccctttcactcccaaccagatctacttccagctgcaccgggccctcaagatgattgtggatcccgtggagccacatggcgagatgaagtttcagtgggacctcaatgcctggaccaagagtgccgaggcctttggtgggtccccagctttacctcactctgttattaccccacgtgctgcacctacttacgtttctctcttctttttgcaggcaagat

SEQ ID NO: 22763 - DNA, 2300 bp, Homo sapien
atgctgagcaccaagattctgctctagagggggtgtgaccaccattctgagggtcctggtttgacatttcatctctcccagtatgagaacctctacaaggtttcctctgggcccttggattgtaagagaccctggtgttctcttgtcagggaagagggaggaagttaaccatgaaaggagaagaaaaggaatccagggtggtgtgtaggcagaattctgagtatgtccacttggagaagtgttcagtaaagggaacagtgtggggaagggtcagcgggggtggggggtggggtggggtggtcctctttttctagacgctgttatccttacccttacattgttgttatctctagaagctagaagaaagggatgtgtttctcagctatgttggggcagaggattctgggagcaaggagttgggcttgcaggcctgtgttcttccctggccacaccctctacatcttcccaataaatggcccagtgtcacagaacaggccggaaatgaggccccaactcattctgcttcctgagttgggggtggtgaagggcaaggtccagccttatgattcccactccccagggccagccaagtctcgggatggtgaacgtactgtctattgcaacgtacacaagcatgaaccccttgtgctgttttgtgagagctgtgatactctcacctgccgagactgccagctcaatgcccacaaggaccaccagtgagtcccaaggcatagtggttgggtgggtgggtgccaccccttccgtagcttagtgctcaggaacacatctgtctgctctcaggtaccagttcttagaggatgcagtgaggaaccagcgcaagctcctggcctcactggtgaagcgccttggggacaaacatgcaacattgcagaagagcaccaaggaggttcgcagctcgtaagtgtgggttctggggctgtgggggtggcccagggcagcaagaccctacctagcctgacctgctgtgtcccctagaatccgccaggtgtctgacgtacagaagcgtgtgcaagtggatgtcaagatggccatcctgcagatcatgaaggagctgaataagcggggccgtgtgctggtcaatgatgcccaggtaagccttgtgccggtgagaagggtccctgagccccctctgctgattgatgatgctgtctggggtgaggagtgatcctagtattcttctgccttctctgcttacctcatacaccttctatctgcagaaggtgactgaggggcagcaggagcgcctggagcggcagcactggaccatgaccaagatccagaagcaccaggagcacattctgcgctttgcctcttgggctctggagagtgacaacaacacagcccttttgctttctaagaagttggtgtgtactggtgggctcctggctggtgggttccaggcaggtggttcccaatacctcaaatccctatttgttgttggtgtgctcattctttcctccctttcactcccaaccagatctacttccagctgcaccgggccctcaagatgattgtggatcccgtggagccacatggcgagatgaagtttcagtgggacctcaatgcctggaccaagagtgccgaggcctttggtgggtccccagctttacctcactctgttattaccccacgtgctgcacctacttacgtttctctcttctttttgcaggcaagattgtggcagagcgtcctggcactaactcaacaggccctgcacccatggcccctccaagagccccagggcccctgagcaagcagggctctggcagcagccaggtgagcaggagagaggacccaggaaggggtgggcagggaatggggtccagtagcaggagagaggacccaggcagggggggtgggcagggaatggggtccagtagggttcctgtcccactgaggcagagggttctgctttgttcacagcccatggaggtgcaggaaggctatggctttgggtcaggtgagtgggtctgcctagtgggtggggaagggccccagtgctgtttctaccccaacctgccagtcttctttctccattttctaaggagatgatccctactcaagtgcagagccccatgtgtcaggtgtgaaacggtaagtatggcacctcccctgggggtgaggtggatggagggtgggggtgtactcatgccaggttgctgcatctacaggtcccgctcaggtgagggcgaggtgagcggccttatgcgcaaggtgccacgagtgagccttgaacgcctggacctggacctcacagctgacagccagccacccgtctt

SEQ ID NO: 22764 - DNA, 2300 bp, Homo sapien
aggaagagacagattctttgtctaggctgggaataaaaattgaggaatggctgttgtaagtcaaaagaatgactgaaaacatggagggaaaaggaaccctcaggagtgagcctggggcctttcttttaccatttacagatcaagagaagtgaggaggaccttacaaaggagcccagggagttggtggcccaagaggcagaggagggttaggtcagaaggagggagggaccagtgaccattgggttagccagagtctctggaaacttcaagtggaattgcaaattgggctggtggggagggacaaccaactaatggggtgtcaagaagtgtaggataatctcattcctgtgtccttgatacccttgtctactctgcaggatgctgttcgcatcatggcaaaagacttggtgcgcacccggcgctatgtgcgcaagtttgtattgatgcgggccaacatccaggctgtgtccctcaagatccagacactcaagtccaacaactcgatggcacaagccatgaagggtgtcaccaaggccatgggcaccatgaacagacaggtgcgcttttcccaatcccccttcccactcccacgacccatggggatcacactcacactcctgtcacttccagctgaagttgccccagatccagaagatcatgatggagtttgagcggcaggcagagatcatggatatgaaggaggagatgatgaatgatgccattgatgatgccatgggtgatgaggaagatgaagaggagaggtatggggaaactggatgggagggtggagatgtttgcctggccctcacggagtgcatagccctcactgagttctctctcttccctagtgatgctgtggtgtcccaggttctggatgagctgggacttagcctaacagatgagctgtcgagtgagtgctccaaatcctggaccccatttcccacccaaggcccagccacagctccaagccctccctttccctgcattactcccctccgctgcctgaccccacctgctcaaacccccactttctctgcagacctcccctcaactgggggctcgcttagtgtggctgctggtgggaaaaaagcagaggccgcagcctcagccctagctgatgctgatgcagacctggaggaacggcttaagaacctgcggagggactgagtgcccctgccactccgagataaccagtggatgcccaggatcttttaccacaacccctctgtaataaaagagatttgacactagtctccaggcccatgtgacttttggcctgatgtgggaccagactggggtccctgggaggatgggcatcactaaggcaagaggcacttggtactaagctaagggtgggggtttggggcaggggtgaacaagcaaagtccacctgggattttcaggagctgggagcttcaggtgagctgtgggcccttctccatcacctctcccaagatactggactgcccaaacaccctggtaggatcttgagagtccaggcctcatctgccaggctgtagtgtccaacactgtttggtccagtgatggtttaatgacaacactcaaggacagtccagaccaaccaatagaggcaagggggtggccttgggattcacacaggctcgactgtagagtaactaaatcataacacagagatgaatgataatgttaagtggactcagcaaagggagacagggaaaaaaaccacatctggaaggtctcagttcactgtgggaccttctgaagatgagaaacagctacagcaccaaaatttaggaagcattcagtagagtggctgtgctacacctggggctaaccctgcctacacagggatgtaggtcacacctacccagtatcccacagggtacccaacaagcctctagtgtgtacatcctttgccctgggtgaccctccccatacccagaaagggcaaggaggcagtcttccccactccctaggcatccatacacatgggcttcgataggtgggggacaagacccccctcccttgtgccaccagtgcttgataaggctgactagtagatacagtcaataaaccaggccccaggaccacagtcccccaaccagccaacgcctgaggaactggtgaagtttttattaaatccacagaagtaaaaaccatatcgtgaggaactgggggatggggccaccagggagtgggagtcaggccaccaggggagtggggatggggtgacaggacagagaacagagccaggctgggctggccatgggggctccagcctcaggggccatcaccagggccaccagacagctcctggg

SEQ ID NO: 22765 - DNA, 2300 bp, Homo sapien
tccctctctctctctcttcccctccctctttctgttcccgactctctgctacccaaacccagacataaacgagctgaacctgcccaagacgtgtgatatcagcttctcagatccagacgacctcctcaacttcaagctggtcatctgtcctgatgaggtgagggtgcatatggctgaattcccaggagcaaaccaagggtgtccccactgagaggagggagacatgttctgcccatcgggccccacaggatggaaccctaaaattttcttctcccccttttcctcccagggcttctacaagagtgggaagtttgtgttcagttttaaggtgagtcccaggcgggcagggatggctccctggacagaggaggcagcagctgaggcccttccaggcacctacccatctctcttttcttttcctggagccaggtgggccagggttacccgcatgatccccccaaggtgaagtgtgagacaatggtctatcaccccaacattgacctcgagggcaacgtctgcctcaacatcctcaggtgaggacactggccctctaatgccctcctcagcgctgcctgccaggcctccctcatggtcttgtgggcactacatcagactctgtcccttcccacccctttgttgtctgtggtttcttgatttcccagtcatcttcctcatggcctgaccttggttttctccttggcctgtcctgctccacaccctccctcccagcctctcacatgctcactctcctatgccctggatctgacctgcccaacaccagaggggcctgtggcagtctcccactcaccaagccctgaccctgatgctctctgtccacagagaggactggaagccagtccttacgataaactccataatttatggcctgcagtatctcttcttggtgagtaggaataggtggttgggtctggggagattggccttctgtccctctggcctgttgaccccccctacctgtactggccacaggagcccaaccccgaggacccactgaacaaggaggccgcagaggtcctgcagaacaaccggcggctgtttgagcagaacgtgcagcgctccatgcggggtggctacatcggctccacctactttgagcgctgcctgaaatagggttggcgcatacccacccccgccacggccacaagccctggcatcccctgcaaatatttattgggggccatgggtaggggtttggggggcggccggtgggggaatcccctgccttggccttgcctccccttcctgccacgtgcccctagttatttttttttttttaacaccatgtgattaaggtcggcgctgcctcccccgacccactcagcgatgggaaatgaattggcttgtctagcccccctgctgggtgcttgttcagcccccactctgggctgtggagtgggtgggcaacgggcctgggtagctgggcccaggcaacccacccctccacctctggaggtcccaccaggctattaaaggggaatgttactgcatggcctctgcttcttacttctatggggtgggaggggcagctgaggtccattagggcctgcaaagctggggtggtggaaggtgtggtcacaggtggcattggagcaccctacaacaggctgcccagtgcctggggcagctctaaagttggtggggataccatgactgtgcctggggttggttgggatgaagcctactctaggatgagaagcgtaggcaggatccagtgacctgtggcttcctggccaagaggccagcaaagtggaagaaacaagccatctctagctttgcccctttcttgtgtgggtgggcccaccgaggaggaggagccttctgaggctccttctatctgaggcctcaggcagaagtcaaggtctcacgaataagctgggtcctcaagtggaggttgggtggaaagcgcccaccccggtactggcttgggtcactcgggcgggactcaaaacatgaaacactcggacgcgcagaggaaacgggagctgttgcgcatgcgctcggacgctggcccgttccggggcacgggcgcacgcgcgctcctggagtttcccaaccttccgggtgcgggcggggcatgttacgtcacgtcgtttaatccggaaacggcggcggcggcgacaggaccgaggggccttagttggtgggcaagtcggggatcccagaaagagaagcgtgacccggaagcggaaacgggtgtccgtcccagctccggtgagtggcccctgctggaccgtggatcccgggcgggcgtgcgggcggcagcgtacgaggccttctac

SEQ ID NO: 22766 - DNA, 2300 bp, Homo sapien
cacacgtcttgggcaggttcagctcgtttatgtctgggtttgggtagcagagagtcgggaacagaaagagggaggggaagagagagagagagggagccagcaggacacttagggcgggtgtttgttagcagagcccccatcgtctcctcctggacccccaggcgcctctcctgggctgtgctccacacctccagccctctccctgctccccagcttggctcttgtggatacacagcataccccaaacatgcatgttcagctgtgtatgcgtgtcccaactcctggcccagggtgacccccaacttttctgtatccacagctcccaaatgcccccactcccaaacatcctctgaccgccctaaaccccaggctccccatccatgacctccactctacagtatctacctgttcacccaaactcaaagatcctgcccacccccaccaaccctcagtcctcactgtccttcctcttctctgtctctcagacccagctttccatgtgacccccacactctcaagtccccaacccccgccaccctaccccaccccctctgactctgaggttcacagcacaatagcctaaatttcccctcacccctgtctccaatccctggtactcattaaccttccctcctccacctgtcaccccaaaccccaaattgctgtgactcaggcaggcccatgagtccctggtcctccaacctacttcacccgtttgactcagagattcccagagaccccagcataataaactaaatcctcttccactcatatccccaacccctggcctctactatccctctcttctccgcctgtcaccccaaacccaagttcccgtctaacccccagactctcgagtcgtcagttcctccactccactgcctgactctgagattccgagtccctagtagcagacaccaggccttcctaatatcctaaaccaccacataccgggcccctatctctgaccccctccccgtgactgcatgatcccaaccctcaagacttgacctccgaccccccccacgctcggggcccttcacctctgaccctcagcaaccgcattaccccttcctgactcccacatcaccctgcctcaggccctgacctccgacctccggctccaaccccatcccctgaccccctacccttctggatccgcagctgcgccgccgacgccttcttgctgctgcccttggtgccgcccgccgactcctcctccttcttctgctgcttcagcgagaacagcttgatcatcctgccgccgccgccgccgctgccgccgccgcggggcccgggaccccggccacccggccccccgccgccgcccgcgtcgcctccgctcctcggacccgcagctgcggcctcctccgctgctgccgccacccgcccggcctgccgcgccgctccgctcctctccgcgcccaccgcgcggcccgcctcggctcccgtagtccggctccggcctggcccagcgcctcggactcgctcggcagcgctcggccaaattcggctgttctcgggcccgcccggccccgcccccactgcccggggccgctccttccttgccctcgccaactctggtctcaggccccgctgcagctgcggactcggggctcccccgaccgtgccgtttggccgctcagctgatccctccgcgagggggtgcggctaggggtgggaggaggacacggcagctgcggtgacggcgggcgggtactggaggatcgtcttccgcggcagcagcggctttagcgcggaggtcggcaacggcctcgggcgccccgccgcttcggatatttccgccgcctgcccgctttggctcttcccgcccggcctgcgttgtgcgcctgcgcagccgccgcaaacccgcgttgctcagcgatggagtttggggttcggcctccttcggctggactcgggcatttccgttcatggagatgacgcttcggcggccttgcaggtcacttccggcgactttcgcggggccgggcaggaagcggagttagtcgccatctttgagtggggcagacgtgggccgcttttgctcgcggtcacttcatcttaagttgtatatatgtgcagagcgcggcgcgggtggtcacctccgctgctgccgccacccgcccggcctgcctttgaccctatgggtcacagacaaggcagggtgatcgcggcaagaccctgagtgagactagatgcgttacccagagggtgcgaggtcgagtaccttccctgtcccatcgcaaacccaaagatccccgttcctggagattctgattgaggtaaactaacaaaac

SEQ ID NO: 22767 - DNA, 2300 bp, Homo sapien
ctgttccagcctgcccttaacagatctgcaagtgaagagaggtgtttgtagtctctgccctgcacagtgatgcctaggtgggtaggtctggagcccagccttgtctggtgatgaaatcccatgggattttcccttgacactgagaccagggcctccaagggctgggagaacactcaatcctcagggaggttaccagcctcctgagcaccagtcctccttgctccaagtcagcgttaatgattcattcccatgatactacctctcccaccccagctcagctgtacagctacccttaccctaacagcaccctactccctaaagtggtcctgagcggccaaagctttctacctttatctacctatcagtaggagtacccgctgaagagttgtactcatggggacattcagcatctcacccttagtactagaggaacaaagggaagcagtggggtcacagcacttcttacagctgggagccaaggatcccacttggatctgccaacccccaggtttgtgggtggtactgtgcctaaacttgatgcctgcaacctgcatgctcccctccacaccctgtcacggctgtcccctgggccatgggccaagccaaaccccaggaaaggacccagacaggccagaatctccctagccaaccaagattatgcgatccagcaggagcaaactgacacctggtgatccagattctgcctcaggatgtctttgtaaaactcctttacacctaggaaaccatttcctagttttaaaactagaagatttcacctggaaattcagatttttcaagactttcctgttctcgtgttcacaagcagcaggtgatgagggtgtaggaccctgcagatggaaccccagccagtctgagaagcaaaggctgcaggccctgggccagtttccctgccctgtggtgatcattcccatcgctagagctgaaggcttctcccaccctggccccatgcacattggaaggtttcagtcaggagtagattcagcagcaaaccagtggaaacgcagcttaggtgaaagtggacagatgctgagagcataagttcagcatactgcaggcttcagggcagcgtctccaggacccagtgccattgcctgttttgccctagccatcttccccttccatcccattgtccaggtccttcacacagcccctctcccccaaccctccagtgggtgacttgggtgcaggtaacacaggctgaaaggcagtttcaaagaaggggcttggccttggccagaagccactcctgggggagcatctgcagaatcagaggagtggcgcctgggcccctccgcaggcaagtgccacaccatgcgctcacggggctggcagtttccgtggtgacggccggaagtcgctgaccggcagagttccgtttcctcccgccctccgaggcacgctgagctgtgattggatgggaagctgacccccgcctccatccccttttccagatagtgggggaagcgcagaggctgcagtgcgtgtccgctggaacttgaggcccacgccaatagcggcccgattccgcccccacgtcgcgttccccaagtgtccaccccgacaggtcttcccctacaccactgtaaccctccacagtgcttaccactctctggcacaatacatgttttgttagtttacctcaatcagaatctccaggaacggggatctttgggtttgcgatgggacagggaaggtactcgacctcgcaccctctgggtaacgcatctagtctcactcagggtcttgccgcgatcaccctgccttgtctgtgacccatagggtcaaaggcaggccgggcgggtggcggcagcagcggaggtgaccacccgcgccgcgctctgcacatatatacaacttaagatgaagtgaccgcgagcaaaagcggcccacgtctgccccactcaaagatggcgactaactccgcttcctgcccggccccgcgaaagtcgccggaagtgacctgcaaggccgccgaagcgtcatctccatgaacggaaatgcccgagtccagccgaaggaggccgaaccccaaactccatcgctgagcaacgcgggtttgcggcggctgcgcaggcgcacaacgcaggccgggcgggaagagccaaagcgggcaggcggcggaaatatccgaagcggcggggcgcccgaggccgttgccgacctccgcgctaaagccgctgctgccgcggaagacgatcctccagtacccgcccgccgtcaccgcagctgccgtgtcctcctcccacccctagccgcaccccctcgcggagggatcagct

SEQ ID NO: 22768 - DNA, 2300 bp, Homo sapien
cgcatgccccccaccacgttttcctcacttctctacgggccttcctgagattagcaggatcctgcaccaatcacggccgtcattagaactccgtcggtgccccaccgcgtctccatggcaactccctacaggaaggggcctctgctacttcctagaccgcaaaatggagaaaggcttggcccgatgctttccggcagatgtagtcagcaggcccttcgtgtgtacgtgcgcgcgcggcgcgatgacgttcctctgtgatcatgggcgaggggcgggccctgaacgtctccatggtaacctggggacacgactcgacatcgcctgggtaacccggagacgcggcgggcgttgaaaatgcaatggggcatgtgggatgaagaggtggggaagggtactggggcagagagatgccgatcgatagaaacagcgaggagagacggagagagaccagagactcaagggcaaagagagacgaaggaccggcgggaggaagagagagagagacagagagacagactcacagactgggaggaccggagactcgacgcgaggagagacagtgaaaataagtgaacaaacatagagacacgggtccaagttataagagggctgagtggatcagagggtcagggccgggcaaacaggtgtcagaacagttagcaagagagaggcagatcagaaagggatgcagatgaaagagacacaaagaaggaaacgcagaatgggttcacagagacaagaaatgcagatatccagactcaagaggtagacaagaagggagagggacagaaacaagaagggagaaaagggacagaaattagagatacagtaagatggattgacagttttcgaagacctagagaaagatgacagcacgaagagagacagggagaatccgaggtaaaactgttaggaaaacttaggagtccagatgctgtccagttatatgctaccctgtacaggttgataggttgcaaatgctttctgtccagtgtatcgctttgtagctcactaagcagttttgtatccaactttgtgcttttatttcagtgtttttctttttctttctttcttttttttttttttttttttgacggagtctcgctgttgccagactggagtgcagtggcacgatctcggctcactgcaacctccgtctcccaggttcaagcgattctcctgcctcagcctcccgagtagctgggactgcaggctgctccaccacacccggctgatttttgtatttttagtagagatggggttttaccatgttggccagactggtcttgacctccagacctctggtgatccgcccacctcggcctcccaaattgctggaattacaggtgtgagccaccgcggccggccagtgtttattcttcctttcctgtcttcctagaatcatcttgctgcttccctcagtacggtaaataaatcttttgacacatgctcactgagagtcatgtttttaactgttttgaaattatatttggcagtctgaagggaacctgttctccgggctaggggacaaacagggaaaaagaaaatagtggccgggcgcggtggctcacgcctgtaatcctagcactttgggaggccgaggcgggcggatcacgaggtcaggagatcgagaccatcccggctaaaacggtgaaaccccgtctctactaaaaatacaaaaaattagccgggcgtagtggcgggcgcctgtagtcccagctacttgggaggctgaggcaggagaatggcgtgaacccgggaggcggagcttgcagtgagccgagatcccgccactgcactccagcctgggcgacagagcgagactccgtctcaaaaaaaaaaaaaaaaaaaaaaaaaaagaaaatagtgacacatacccaggaaaggaaggaggaagggagggtgatgtaagacaaagacattaggcggcgagaaagccagcctttggtcagaagcagcttctggcgcccctggctggactctgtgcggtgcggcctcgttgccaaactacattttccggcagtacccgggacgccgggcgcagagcggagagcgtcgcaaggggcgggcctgacgcagcctcctccctgcccggccgtcgccaggcaaccttcccccttcgcggccgagatggaccctgggctcggcgtcctccggaaaactgcactgtgaggcggggcgatggggaagggccgaagccccgccagcccagctaaagcagacggctcgcactgcgacccgaaggtgaggttgatcggccgcgctggggccccggcttcggggcaggagctgcagcccct

SEQ ID NO: 22769 - DNA, 2300 bp, Homo sapien
catatcccagttccccgaccgaaccaagaggaggggctgcagctcctgccccgaagccggggccccagcgcggccgatcaacctcaccttcgggtcgcagtgcgagccgtctgctttagctgggctggcggggcttcggcccttccccatcgccccgcctcacagtgcagttttccggaggacgccgagcccagggtccatctcggccgcgaagggggaaggttgcctggcgacggccgggcagggaggaggctgcgtcaggcccgccccttgcgacgctctccgctctgcgcccggcgtcccgggtactgccggaaaatgtagtttggcaacgaggccgcaccgcacagagtccagccaggggcgccagaagctgcttctgaccaaaggctggctttctcgccgcctaatgtctttgtcttacatcaccctcccttcctccttcctttcctgggtatgtgtcactattttctttttttttttttttttttttttttttgagacggagtctcgctctgtcgcccaggctggagtgcagtggcgggatctcggctcactgcaagctccgcctcccgggttcacgccattctcctgcctcagcctcccaagtagctgggactacaggcgcccgccactacgcccggctaattttttgtatttttagtagagacggggtttcaccgttttagccgggatggtctcgatctcctgacctcgtgatccgcccgcctcggcctcccaaagtgctaggattacaggcgtgagccaccgcgcccggccactattttctttttccctgtttgtcccctagcccggagaacaggttcccttcagactgccaaatataatttcaaaacagttaaaaacatgactctcagtgagcatgtgtcaaaagatttatttaccgtactgagggaagcagcaagatgattctaggaagacaggaaaggaagaataaacactggccggccgcggtggctcacacctgtaattccagcaatttgggaggccgaggtgggcggatcaccagaggtctggaggtcaagaccagtctggccaacatggtaaaaccccatctctactaaaaatacaaaaatcagccgggtgtggtggagcagcctgcagtcccagctactcgggaggctgaggcaggagaatcgcttgaacctgggagacggaggttgcagtgagccgagatcgtgccactgcactccagtctggcaacagcgagactccgtcaaaaaaaaaaaaaaaaaaaagaaagaaagaaaaagaaaaacactgaaataaaagcacaaagttggatacaaaactgcttagtgagctacaaagcgatacactggacagaaagcatttgcaacctatcaacctgtacagggtagcatataactggacagcatctggactcctaagttttcctaacagttttacctcggattctccctgtctctcttcgtgctgtcatctttctctaggtcttcgaaaactgtcaatccatcttactgtatctctaatttctgtcccttttctcccttcttgtttctgtccctctcccttcttgtctacctcttgagtctggatatctgcatttcttgtctctgtgaacccattctgcgtttccttctttgtgtctctttcatctgcatccctttctgatctgcctctctcttgctaactgttctgacacctgtttgcccggccctgaccctctgatccactcagccctcttataacttggacccgtgtctctatgtttgttcacttattttcactgtctctcctcgcgtcgagtctccggtcctcccagtctgtgagtctgtctctctgtctctctctctcttcctcccgccggtccttcgtctctctttgcccttgagtctctggtctctctccgtctctcctcgctgtttctatcgatcggcatctctctgccccagtacccttccccacctcttcatcccacatgccccattgcattttcaacgcccgccgcgtctccgggttacccaggcgatgtcgagtcgtgtccccaggttaccatggagacgttcagggcccgcccctcgcccatgatcacagaggaacgtcatcgcgccgcgcgcgcacgtacacacgaagggcctgctgactacatctgccggaaagcatcgggccaagcctttctccattttgcggtctaggaagtagcagaggccccttcctgtagggagttgccatggagacgcggtggggcaccgacggagttctaatgacggccgtgattggtgcaggatcctgctaatctcaggaaggcccgtaga

SEQ ID NO: 22770 - DNA, 2300 bp, Homo sapien
ggcataattcaaaacataatcaatcacatccaaattgcagctagagatagcaacattcacctcacttccagaacaagtacacagaaaattattaagcatatgaaagacttgaaaaacatttgtgtaggcggcgggtgcataaggttgggtgttgatatgaaacatttaataatttcaataatcctagcactttgggaggccaaaatgggaggatcacttgaggccaggagtttgagaccagcctgggcaccatagtgagaccccgtctctattttttttaaataaagaaaaacatttgaatgatttttttcttaactgacatttagaaaacatccacctcaaatcttcctaatccacaaacttgtctagcacccctggaacattcaccaaaataaatttttaaatgctgaatcataggtaatatgatagatgaaacagttgaattaaattataaatgtacaacaaggaaatgctggggaaattatcaaatattttaaaattaataaacacacatagcaataaacaatgagtggaagaaaaacatttcaaagaaaggtggaaaatattttgtatcaattaaaaatgaaaacacatctcggcaaatgactggggatacagatagaacagcgttaagggacaataagcctcaaatgtctgtgttagaaaagaaggaagagctgagtaaataggtaactttcacttgcagaaatactacacatcagcaaattaattccaaagtaacgtcgaggaaaaacataaaatggcaagcaaatatatacgtgcatatgtacatacattcataaatgacaaacaggacagaaaaatcagtgacatcaattttgttccttagaagaaacaggaaaattgaccccaaaaaactttccaggccacatttggtcatgatggaaatattttggcacttcctggttaagctcaacaccaacttgcacccaaaaccaataatttcatttctaggtaaatatgtctaattaattcagcatatgtatgcaagggatcacacagaaacacgattatcaaggcccgagttataaaagagaaaatccggaaacaacacaaatgtccatgataaaaagaatggataattacatgttgataaagttatgcatggactattaaactgcaatccaaaagaataaaatagagctataaaattcaatatgtatatggtgtcatagaaacacaaatgtgagaaaaagaaagaaaaatacaaaatttatattttttaaaatttgaaacaactatatatgtgagtgcttagggtgtgtgtgtgtgtgtgtgtgtgtgtgtataaccatatgtatataaatgcacacatacgcacacatatagaatgtcccggccaggcatggtggctcacacctgtaatctcagcactttgggaggctgaagtagacagatcacttgaggttaggagttcaagaccagcctggccaacatggagaaacctcctctctactaaaagtacaaaaattaggtgggcgtggtggtgggtgcctgtaaatccagctacttaggaggctgaggcacgagaattgcgtgaacctgggaggtggaggctgcaatgagccgaggtctcaccactgcattccaaactgggtgacgaagtgagattgcatctcaaaaaaaaaaaaagttctaaaagttgtgacttgggtgtggcagattgtgacatactgccagctgctagaaatgctggggcaggaggattgcttgaactctgaagtcaaagaacagcctggggaaaatagcacatgaagaagagtttgaatctcagataaaaacaacaaaaatacatcaaaagtctttaatgtaagccaagcattcagtcatctcctgtatgagagattggatctgagacgtgttttgagttggttatagtgaaggatgcaaggtgtcaattctagttggaacaatttccaggaagccatgttctgctcttgaccaaacagccactgggcctcatgcaaggtagaaatagcctgcatacgtcatcctcccatgatgtggtcagcatgtaaactgcatgagcccctcacaacatcctgtgtgctgctgaactgagctggggcgcagccgcctgtctgcaccggcagcaccatgtcgctcatggtcgtcagcatggcgtgtgttggtgagtcctggaagggaatcgagggagggagcggtggggtggagatctgggcctggagtggagatatgggcctggagtggagatatgggcctggagtggagatataggcctggagtggagatatgggcctggggtggagatatgggcc

SEQ ID NO: 22771 - DNA, 2300 bp, Homo sapien
tagcttacttcctagtctacctgaggctgcaatcacactgaggaactcacaattccaaacatacaagaggctccctcttaacacagcacttagacacgtgctgttccacctcccttcagactatctttcagccttctgccagcagtaaaacttataaattttttaaataatttcaatgtagttttcccgccttcaaataaacatgtctgccctcatggtttcggtaacgagactcttctcttgcctaaggcttccggtgttatcattaccatgtccacataaccccatctgttctccattgggttctcagccctggactctgagcttctggaagcagaatggagcctgaattgtctctgagactccaatttccatccaaagatacagcacataggaggctccaaggatcgtgaatcacatgaacaagtgatattcttactctctgcagacctggaaagctggcagagtcattccacgatgaaacatttgtagagtcataggccttgttagtctcatctccacggggacacatatcaacatatcatctttcataatataaatatacagtcggtcctccatatctgtggggtttacaggtgtttattgaaccaacaataaatcaaaaatattttgagaaaaaaatccccgaagtttcaagaagcaaaaaactatgttgaatcgacacaaattgagtggcgtgtaggctgtgtcaggaattataagtaatcaagagatgatttcatgtatacaggaggatgtgcatgggttctatgcaattgctatgctattttttttttttgagacagtctcactctctcacccaggctggagtgcagtggcgtgatctcaactcactgcaacctccgcctcccaggttcaagcgattgtcttccctcagcctccccagtagcctcccctaggattacaggcacgtgccaccatgcacagataaatttttttgtgtgtgtatttttagtagagacggggtttcagaatgttggaccagctggtcttgaactcctgaccttgtgatctacccagctcagcctcccaaagtgctgggattacgggcgtgagccacggtgcccagcttcactatgccatttcatgcaaggggcttgagcatctgcagattttggtatctgaatggggatcctggaaccaatcacccaggtatagtgaaggaccatggtatataatttttatttgtcaatcttaaaaataaagcataaaaaatttacaacaacaagataaaaaataagaagtgtttttatagtgtgaggataagtttagatttattttttcctacgtgtaaccctatggtcctgtgttatttgttgagaaaatattctattccaccttaaactacatggcagcctttgtcaactataaagggactgtgtatccacagatgtattttagacacagttttctgtccagtggttctctgtatcccctctcatgaggatgctgcattttatataaacttatagaaccccttaaaatttggtaacctgagtcctctgatttgttattataggttatttagtttgcttttttttttttcttgagacagactcttcctctgtcacccaagctggagttcagtggcttgagctcagctcactgcaacctccgcctcccaggttcaagctattctgatgcctctggtttagtactagaaactcaagcaggaaaattagaatggcttcttgtcacaattactctgataatgttaataatacctgttagacattttgcacattacatatgaagaagagtttgaatctcagataaaaacaaaaatacatcaaaaatctttaatgtaagcacagaattcaatcatctcgtgtatgagaggttggatctgagacgtcttttgagtctggtcgtagtgaaggacgcaaggtgtcaattctagtgagaacaatttccaggaagccatgttccgctcttgagcgagcacccactgggcctcatgcaaggtagaaagagcctgcgtacgtcaccctcccatgatgtggtcaacatgtaaactgcatgggcagggcgccaaataacatcctgtgcgctgctgagctgagctggggcgcggccgcctgtctgcacagacagcaccatgtcgctcatggtcgtcagcatggcgtgtgttggtgagtcctggaagggaatcgagggagggagtgcggggatggagatcggggcccagagttggagatataggcctggaagtggagttatgggcctagagatggagtgatgggcctagaagtggagatctgggcctggagtggagatat

SEQ ID NO: 22772 - DNA, 2300 bp, Homo sapien
gctcacctatgtttgacagctaaaaatatctccaataatttctctggctatgactttagtacagacatgaaaattaatgagaagaagataattcattctttttcttgaactcagaaggctcaggacttaagttcttccttataatttatagaagatttgtgttttccactagcctaagttcccaacaaatatatataggcaaagttctaaaaagcaaacaaacattaatttgtagttttcacaaattgtcttttggatctgagatgaatgaatgctggcaagggtatttccatgatggcaccatgtgtagggcaggagctttggagagtggccaggtccgtggagggacagtgtctggtggatagagcactaaaccagaattaagggcctgtcttatgttagcaaatgattcctgcactatagaccaggcgtcctttgtccataaaaagaagggagataggcggatggttttcaacctctacattttctagtctgtgtagtaataatctgtgttgcatgactgaaacccagaaatggaaaacaaacaaaaaaaagttgtctattgaagtacgtgagaagtaaatttatgaataagctccctccaggtagccatagcatgtgcaggcagtaggtagacttggtggtataaatagtggggaggtaataatgtggcatacaaatgaaaccaaagtaaaacctgacaacataaaaataaaagcagcctgctctgatccctccagacccaggctggttcccatctcgaattagccaatgtcaaaagagtgacctgaatgagaatttagttgacttcatagactaaatcctaaagaccttttaggcttggacctatgaaaaatataagaagtttagttagcttgtgagaactttcacttttatgacaaagagaaatagttgaaggaagagggaaagtgagagcaggtttgggaaggcactaaggatggaggcaggaaaaaggctcatgggcttcttcctcccctcatgtctccctccacctgaatcccgtttgttccagactggagacaatggcaactgtcttctgagaagtttcacattatttctcagagcaggggtacagtcccacagaagctaccccagtttttatatggaattggcagtcaccagcactataaagattttctttactaatgtacttccctagacccaaaacagcacaggcctctttgaaactgcaatgcagagacttactgcccggctaccaggggtggggtgtatgaggagaacagagttgcctgggctttctccagatcaccggaacagtgtctgctcatgaccttagccccttcacagctccccacctcccagcactggtgttcccactggaggagaccagcagggaaagccacgacagagtgtgaacacctggtcagtggggcggtcctctgacttcctgcagaagtcccttgttctgagaccagttctgcaacttctggaagatgtggaagcaggaatttaagctgtgctttttctgctgaaatttataaggattcattttaggatttcttgaaagattcagaaaacttgagacgaacaaaggtaggttttctaagtgaaagagaaaacaaatatatttggaggtttttgtcctcttggtagatagagatttacaacttataataaaagtgtctcaattataatagaactaaatacgtttataagtttcttgccccatggggtaaagataattgcttttcaaaactgagactatcacaactgggcaatgactcgtataatccgcacacaagtcctctggggaacccatgagcagtagttggttgtacatgggtaattttggtattctgtttcccagagcttagtttatgaaaatatctcttttatctgctgtgatgtagtcatcttcctgtctttcaattcatcaaactagggacttgtcaaaatttagatctttctggttttctgttttgcgtagaatatataagttgctgcttttaatactggcataaataacttgtcctttgggaaattaggcataaaacattgcttaatttcaaggcaaaaatgttcggacaattccacagctatcttcacatttatccttgacacaaagaaaaaagaaatacctgtagaagcgcatcgaaagctcctggaacagagttgtgtctcatatttgcaaagatgcagaaaaaataaacccgggacatccagctttcttttcctttcttctttgactattctgagaagctatgcgactaggagcacattttaggtaaacacgtggcttgagtagccataaggccact

SEQ ID NO: 22773 - DNA, 2300 bp, Homo sapien
ctggcactttctgtgctgggagggcttccctagttcacaggttcgccatgttgccagaacgtggggccctctctcttgttcattgttcattgttattaaggacgtatggtagttctcagccagtgtagtgtcctctctgtcttctctgtgtttcagtgaaacacaaatccagactcgcttaagcagagagtttacctgaagttctcattttgagagagggaggggacttcatgacacagggtgaatgctctgaccccaaagaacttcaagcatctcaggcagaaaagcacttttgttttaggaggagggagtaaccaagcctagaacacctgggtgaggcatggaggggcccgtggcgcagtggacagtgggcaggaaatgggtcagcccactgggaagagatggaggggagggtggggtccccatcgcagcattcatgggtgggcttggccgagaggagaagctgagtcgaagttcggctaacaagtatttttttaagatagatcagtggagtcaaagcagttcagctacacatctgtgggacaaaaatgggaatgcagagggtctgattctggccctgtcactggtgagtcttgtctgtgtcatgtggggaaggtggttcttttcagtggctgctggagctcaaagttgtgggagggtggctcttaacttgccctcttttccccatcacagggcaggggaaagtccgatgttggcagtagttactgaaacagatttttgtccctggtggatttcatttggtgtccagagtttaactgttacggagttctctatgctacaattttgttgagttcatatttcaggggccctgctgctgtgtacggtggccttcagccaggacgtgtcttggccctggccgtgagagccatctgggctgggtgaggctgtgcccacctcagaggtggggccaaggacctctgtcttctctggtggaaagagcccttctcagggtctaaacagaaacatgggagcttttgtgaaaccattataatctcctgggaacagaagcttaagggttttagtctcttgatttttagtattaaggagtttgggattgtatgcatacatcaaaactcagtctttcttggctatatattttatagctttaaaactcctatattaaataacccttccaatactgctacaaattaaaaacctggaccaagtggacctcaactaactactgcagccacccctgctgggggcaagccagagcccactaaaacaggacatttggctacatttacagggctgtttaaatgatttgaagcaacagatgtgtatattgacttggaaggttttgcaggaaactgtgtttcagtacttaaatagcatactgtaagggctgaccttgatccaaggggtcacaaatgtcacctcgttgggaggtgtcttttccaggatctacgttataattatgatctccttggaagcaccaggggagaaattccagatggttttgcaaggataaagtgagagcaaatgaacatccaggttatgtattcttactctattaatttctacttgaactcatttttaatgtgtttttactaatattaagaaaataagccatgatataaagtgttggaaaggaaaaccctgactgcacaccccagccccgtaacagaacacagaaacgcgcagggccttttcccttctgtctgcctttccggcctctggacacagaaacgcgcggggccttttcccttctgtctgcctttccggcctcttgacatggaaacacgcggagcgttttcccttctgtcttcctttccggcctgttgacatggaaacgcgcggagccttttcccttctgtctgcctttccggcctgttgacgtggaaacgcgcggggccttttcccttctgtctgcctttccggcctgttgacgtggagacgcgcggggccttttcccttctgtctgcctttccggcctgttgacgtggagacgcgcggggccttttcccttctgtctgcctttccggcctgttgacgtggagacgcgcggggcgttttcccttctgtctgcctttccggcctgttgacgtggagacgcgcggggccttttcccttctgtctgcctttccggcctgttgacgtggagacgcgcggggccttttcccttctgtctgcctttccggcctgttgacgtggagacgcgcggggccttttcccttctgtctgcctttccggcctgttgacgtggagacgcgcggggccttttcccttctgtctgcctttccggcctgttgacgtggagacgcgcggggccttttccc

SEQ ID NO: 22774 - DNA, 2300 bp, Homo sapien
gcagattatacaatttaaaacacctattttacacaaaaagaataaaatacctaagaatacagctaaccaaggaggtgaaagatctctacaacaagaattacaaagcactgctgaaagaaatcagagatggcacaaacatggaaaaacattccttgttcaaggataggaagaatcaacattattaaaattgccatactgcctagagcaatttatagattcaatactattcctattatactaccaatatcattcttcacagaattagaaaacaaaactattttaaaattcatatggaaccaagaaagagcccaaatagccaaggcaatcctaagcaaaaagaacagctggaggaatcatgctacccgacttcaaactatactacaaagctacagtaatgaaaacagcatggtaatggtacaaaaacagactcatagaacaatgaacagaatcgagagcccagaattcatgctacacagctacaatcatctgatatttgacaaagtcaacaaaaataagcaatggggaaaggactccatattcaataaatggtgctggaatacctggccagccatacacagaagactgaaacaggaccccttccttataccatatgcaaaaaaacaattcaagatggattaaagacttgaatgttgttaaaaacttaagccaaattaaattttaaggagtttaattgagcaatgaatgatatgcaagtcgggcagcccccagaatcacagcagattcagagagactccagggatgcctcgtggtcagaacaaatttatagaccaaaaaaggggaagtgacgtacagaaatcagaaatgaagtacagaaacaactggattggttacagctcatcattttccttatgtgaacacttagcagtgtatgagtggttgaagtatggctgctgggattggccaagactgagctattgttacagatgcatactcctaagttaagttctcaatcttgtctacatattaagttaggtggcagttcatctacaaggactcaaatattgaagtatggagttcttctcaggtcacatttagcctgttttaacaatgtaaaacctaaagctgtaaaaactctggaagataagctaggaaattccattgtggacataatcgctggcaaagattttatgataaagatgccaaaagcaattacaacaaaaacaaaaattgacaaatgggacctacttaaactaaagagcttctgaacagcaaaagaaactatcaacagagaaaacaacctacagaatagaagaaaatatttgtaagctctacatccaacaaaggcctaatattcagaatctataagaaatttaaacaaattaacaagcaaaaaaacaactccgttaaagtataataataataataagtggttaaaggacgtggacaaaagatttaagcagacactttacaagatatagaaataggaaaaagtgttcaacatcattagtcatctgagaaacgaaaattaaatccacagtgaaaggccactgtgtaccactaaaataactaaaattttaaaaactggacattgcaagtgttggtgaggatatggaataaccagaactcttataaaagtttctggtggaagcctgaaatgtgtaatcactttagagaactcttaggtggctccttacattgttaaatacacatttaccacatgaactggcaattcctatcctaggtaattacccaagagaaataaaacattttttctttttcttttttttgagatggagtttcgttcttgctgcccaagctggagtgcaatggcgccatctcggctcactgcaacctccaccttccaggttcaagtgattctcctgcctcaggctcctgagtagctgggattacaggcgcacgtcaccacatctggctaattttttgtatttttagtagaaatggggtttcaccatgttagccaggctggtcttgaactcctgacctcaggtgatccccccacctcggcctcccaaattgctgggattacaggtgtgagccaccgtgtccggccataaaacatttttttacaaaaggcttacaaaggaatatttatagcagttttatttgtaatagccaaaagctggaaacaacccaattgtctatcaacagtgactggaaggacaaattgtgctatgtccacacattagaataccagttggcagtcaaaaaggaagagctgatctgtgcagcaatttgagtctcagtaatttcatggtgagtaaaataagctagacagaaaagaacacacactgatgactatatgaagttctggcacagac

SEQ ID NO: 22775 - DNA, 2300 bp, Homo sapien
ttgatacttttgttctgtttaggaaaactttattctcaagagatttctcattccgcagaaataaggatctggcatgtcaacacaaacataggaagttgaggcagtcaaagggaaataactgctaccctgactctgctgagagcctcacaagtccctgtgcacgccagcttgtttgccagtgagtggcgtcatgataagacaaaattctctgctctgagacctaagcacatgaagtttttaaaaaaattttctctgagaagatcccattttttactctaaaagatcagaccagtgtggcatgtgtggaactgctctgtaccaagatcacactcttcagttggagaagaggaagggcaggaataaataaagggctttcctgtctcccgagggagcagagaaagctttcgctgtcctcttccttccccagccacagcctggggttgggggactggaaacaagctcaggctagcacttgatgttcagacggtagtctgaaagtttgactagggagttaatgatctgaccagagagacaggtttttattttgagaactgacaagctttgtgtccttaaaacaaaggaagtagttaaaccaaggccccagaaaggtaagaattgacttaagaaacaaaggccatagttgtcaagcagtggagttcaaaatgcagttttgttaataaaagtagcttaaagcaacatttgaaagcctctctaaagattagatacatacactttcttttggctaagatttctttagtttattctaaatatacctttagcagcattcaagttcctttgatcttagatggaattttatcagtttaatgagttaacctccatttcacataaagtataaggtttaataatttgattaatatgtaatcagtaagaacttggaaaaccaaatttagtaagcttgctttcctgtaagtattcctttcataattagagtccattgaagaaaataatataagggaagcaaaagtttgggaatctgaactctggtaaggaaagtggtggagaggggcccttgggtcttcttgctttcattcctgaccctccgtgtacaactagattggaaaccgtagtcagctttgtcacctcaggtggcaatttactccgagtaggattctcatgtccctgtttgtccccagtgactctagcattgagtttatagaactgcgatcaatacctaaaattatttccagatcttaagctgatttatgcttttgaggtttccaaagtaaaaattgtctttccggtattttataagaccttctaatttaaaaaaaaaatgtgttactatgaaaatttaaaacattttaacttttgttttaaagaaaactttatttgaaagtttcttagcttgaggtttggcagccactctttttttagaaaaaacttaaatatttatagagattttgcctgattcaagggacttaagacgtttatgagagtgcagatgctaaccatgatgtgaggtttaagaggcttcattagtaatgacctgtgtcttcatcagtatgatagaatgggacatcagcactctgatcaggtcatgctctatatgccttatggtacagcagaggaaaaatgggtgagccatcatttgatgctgaggatgggatttgaggcttatgtctaaatttttatttgcatattctttttgttctgacagagaaattcactgcatgtaactatgaccacgcatgattttatcagaagttgattagaatctgtaacattttctgtagttcagctgacacactgaagatgtcctcactgtgaccagccttgtcaacagctggatcacagtgacataagctgtgtctaggatgagtcttgcggtctgcagccgtgtgaggctgcatctgattcccaagtccaatggctctcttcccgtgtttacagatcaggccatgacctttccctacagcaggatgtttgcaagattaactctcaactgaggaatttgcttatttgctctaatactgcttggttgagagagttcaaagtagaaagtcttctgaggggataagattcatgtattatttacagtgcttcagttgcatgtatcagaaaatctagtctaaattgctttaacagaaaaagatgttgctggtccatttgacgaagaagtccagagcggcttgtgacttcagtctggctttgcagagcccaggtgctctctccaccttctgccaggttcccctatgaaggctttgctctcagactctccccttgtggagacaaaaatcccacagcaagtggaaacagaagtgccttggaaaaagttattc

SEQ ID NO: 22776 - DNA, 2300 bp, Homo sapien
tctctgatcgctgggccttggcgctggctgctgagtttttccttctttaaggaagtgtggaactggtctcaatcggttgaccaccttaaggaaataggatttacactgtggacagagatgtgtcctttacacttcatttgaaccaatatgcccatgctcctgtggaggctgagttggaaagtgacacgaagctgcccccccgcaagagagcaggtgctcggtttctcttctgcttacaggagatgcatgtcctgatttcttgttctcctaggtgtttttattgagatgtagggaatatctgaattcataacgacttagaaaatctgtacacacagttgagagaacaggtctcgaggctaaggtgctgtttactcccgtgggctggcctgttattaaaatacttgtgcagcgactgatgtttacaaattactatgttggaggttaaaatgatcaaagtgataacctccatcctgtctatcatgtttgaggagaattggttatttggttcactaatgttctgtttaaagaaaatttctgtaaaactagtaaatgttacccctcatcttttgtaagttaaaaaaaagtttaaaataatgtttgctcatcaaaagtgatttgatacttttgttctgtttaggaaaactttattctcaagagatttctcattccgcagaaataaggatctggcatgtcaacacaaacataggaagttgaggcagtcaaagggaaataactgctaccctgactctgctgagagcctcacaagtccctgtgcacgccagcttgtttgccagtgagtggcgtcatgataagacaaaattctctgctctgagacctaagcacatgaagtttttaaaaaaattttctctgagaagatcccattttttactctaaaagatcagaccagtgtggcatgtgtggaactgctctgtaccaagatcacactcttcagttggagaagaggaagggcaggaataaataaagggctttcctgtctcccgagggagcagagaaagctttcgctgtcctcttccttccccagccacagcctggggttgggggactggaaacaagctcaggctagcacttgatgttcagacggtagtctgaaagtttgactagggagttaatgatctgaccagagagacaggtttttattttgagaactgacaagctttgtgtccttaaaacaaaggaagtagttaaaccaaggccccagaaaggtaagaattgacttaagaaacaaaggccatagttgtcaagcagtggagttcaaaatgcagttttgttaataaaagtagcttaaagcaacatttgaaagcctctctaaagattagatacatacactttcttttggctaagatttctttagtttattctaaatatacctttagcagcattcaagttcctttgatcttagatggaattttatcagtttaatgagttaacctccatttcacataaagtataaggtttaataatttgattaatatgtaatcagtaagaacttggaaaaccaaatttagtaagcttgctttcctgtaagtattcctttcataattagagtccattgaagaaaataatataagggaagcaaaagtttgggaatctgaactctggtaaggaaagtggtggagaggggcccttgggtcttcttgctttcattcctgaccctccgtgtacaactagattggaaaccgtagtcagctttgtcacctcaggtggcaatttactccgagtaggattctcatgtccctgtttgtccccagtgactctagcattgagtttatagaactgcgatcaatacctaaaattatttccagatcttaagctgatttatgcttttgaggtttccaaagtaaaaattgtctttccggtattttataagaccttctaatttaaaaaaaaaatgtgttactatgaaaatttaaaacattttaacttttgttttaaagaaaactttatttgaaagtttcttagcttgaggtttggcagccactctttttttagaaaaaacttaaatatttatagagattttgcctgattcaagggacttaagacgtttatgagagtgcagatgctaaccatgatgtgaggtttaagaggcttcattagtaatgacctgtgtcttcatcagtatgatagaatgggacatcagcactctgatcaggtcatgctctatatgccttatggtacagcagaggaaaaatgggtgagccatcatttgatgctgaggatgggatttgaggcttatgtctaaatttttatttgcatattctttttgttctgacagagaaatt

SEQ ID NO: 22777 - DNA, 2300 bp, Homo sapien
ccccgcgcgcctgcgcagtcccgcaccaacgccaacagggcagcgcgtgtgagagccacgcctgcgcaatcggctccagtgcgcctgcggaggcggtcctatgacggtagtaggacgggcggggagggtccgcgggtcacctgcagggactgggccgccgttcacctgcaggggcggggctgcaggttgtccggaggaggaggagctgcgggggtggggtcacctggagggagtagggccgcggaaggcgagggggtgtgtgtgtgtggtggcgggggttggcgggggggagtcacctggagggggcggggctgcgggtcgcttggaggggaaggagccgcgggaggtaaaggttacctataggggacggggccgcaggagaggggtacctggaggaggaagggccgcgggtcacctgcagggcgggctcaggcctcgcggctccgcgggccgcccacctgggttggggcacagcgcgagtctcgcgcacgtggcgggctgtggtgcctgtcgttcgagttcgcatagaggggctgggcgggtcacgcggggaacctgccttgagccccgcggggtccacgccggaccagggcggccttgggcctgggcgctccctgagacccccacccccaacaccgtgcttggagccgccgcggggctctgggcttttcgatcttgaggacggggcggttccgaagtccctgagggcgaaggcctgagcgcggcccggcgggcgcgtggtttttgtcccgcgaaacgtacacggcgggtgttttgcgccgcctccttcgtcacctgccgcaggtacgccctcgctggggcctccttgtccgcggggcggggcagcgcgccttcctcttcctgggcagcctcgggacggggcgccgcggccgggcgggcagcagtgagtacccggggacccacctgtccggcagcaccctcccctctcaagagctgggcggtggtgggaggaggaggacgggaaaaccggcgatgcctctggggtttctaggtcgcgcgtctgttaaccgcaaaccgcccaaagttaagatagagcagcttccaggactttcttgaccacagcgattttgattgaagtttagccaccgtcttttccatttttagaaaagctattccgaagtttggaatgatgacgatggtcgtgttatttttaacttcctgatatttgaacggcgaggtgtcagcgaccatccttccgttccacagaagcgtctctgaagtttgggtcgaatgcgcgcgcttggaatgtgcgtggaacccgcggcaggcgcggggaggaggccttggctagggcgccggcgaggttcgagtttgccagccccccaacctggaagagaagggccagcccctcacacccggaagggaagggccggtccccccaacacctggcgccggggtcgcggggccacagggcgagcgcggggtcgcggcgagcacgggtcctctctgatcgctgggccttggcgctggctgctgagtttttccttctttaaggaagtgtggaactggtctcaatcggttgaccaccttaaggaaataggatttacactgtggacagagatgtgtcctttacacttcatttgaaccaatatgcccatgctcctgtggaggctgagttggaaagtgacacgaagctgcccccccgcaagagagcaggtgctcggtttctcttctgcttacaggagatgcatgtcctgatttcttgttctcctaggtgtttttattgagatgtagggaatatctgaattcataacgacttagaaaatctgtacacacagttgagagaacaggtctcgaggctaaggtgctgtttactcccgtgggctggcctgttattaaaatacttgtgcagcgactgatgtttacaaattactatgttggaggttaaaatgatcaaagtgataacctccatcctgtctatcatgtttgaggagaattggttatttggttcactaatgttctgtttaaagaaaatttctgtaaaactagtaaatgttacccctcatcttttgtaagttaaaaaaaagtttaaaataatgtttgctcatcaaaagtgatttgatacttttgttctgtttaggaaaactttattctcaagagatttctcattccgcagaaataaggatctggcatgtcaacacaaacataggaagttgaggcagtcaaagggaaataactgctaccctgactctgctgagagcctcacaagtccctgtgcacgccagcttgtttgccagtgagtggcgtcatgataagacaaaattctctgctctgagacc

SEQ ID NO: 22778 - DNA, 2300 bp, Homo sapien
acaaaagtatcaaatcacttttgatgagcaaacattattttaaacttttttttaacttacaaaagatgaggggtaacatttactagttttacagaaattttctttaaacagaacattagtgaaccaaataaccaattctcctcaaacatgatagacaggatggaggttatcactttgatcattttaacctccaacatagtaatttgtaaacatcagtcgctgcacaagtattttaataacaggccagcccacgggagtaaacagcaccttagcctcgagacctgttctctcaactgtgtgtacagattttctaagtcgttatgaattcagatattccctacatctcaataaaaacacctaggagaacaagaaatcaggacatgcatctcctgtaagcagaagagaaaccgagcacctgctctcttgcgggggggcagcttcgtgtcactttccaactcagcctccacaggagcatgggcatattggttcaaatgaagtgtaaaggacacatctctgtccacagtgtaaatcctatttccttaaggtggtcaaccgattgagaccagttccacacttccttaaagaaggaaaaactcagcagccagcgccaaggcccagcgatcagagaggacccgtgctcgccgcgaccccgcgctcgccctgtggccccgcgaccccggcgccaggtgttggggggaccggcccttcccttccgggtgtgaggggctggcccttctcttccaggttggggggctggcaaactcgaacctcgccggcgccctagccaaggcctcctccccgcgcctgccgcgggttccacgcacattccaagcgcgcgcattcgacccaaacttcagagacgcttctgtggaacggaaggatggtcgctgacacctcgccgttcaaatatcaggaagttaaaaataacacgaccatcgtcatcattccaaacttcggaatagcttttctaaaaatggaaaagacggtggctaaacttcaatcaaaatcgctgtggtcaagaaagtcctggaagctgctctatcttaactttgggcggtttgcggttaacagacgcgcgacctagaaaccccagaggcatcgccggttttcccgtcctcctcctcccaccaccgcccagctcttgagaggggagggtgctgccggacaggtgggtccccgggtactcactgctgcccgcccggccgcggcgccccgtcccgaggctgcccaggaagaggaaggcgcgctgccccgccccgcggacaaggaggccccagcgagggcgtacctgcggcaggtgacgaaggaggcggcgcaaaacacccgccgtgtacgtttcgcgggacaaaaaccacgcgcccgccgggccgcgctcaggccttcgccctcagggacttcggaaccgccccgtcctcaagatcgaaaagcccagagccccgcggcggctccaagcacggtgttgggggtgggggtctcagggagcgcccaggcccaaggccgccctggtccggcgtggaccccgcggggctcaaggcaggttccccgcgtgacccgcccagcccctctatgcgaactcgaacgacaggcaccacagcccgccacgtgcgcgagactcgcgctgtgccccaacccaggtgggcggcccgcggagccgcgaggcctgagcccgccctgcaggtgacccgcggcccttcctcctccaggtacccctctcctgcggccccgtcccctataggtaacctttacctcccgcggctccttcccctccaagcgacccgcagccccgccccctccaggtgactcccccccgccaacccccgccaccacacacacacaccccctcgccttccgcggccctactccctccaggtgaccccacccccgcagctcctcctcctccggacaacctgcagccccgcccctgcaggtgaacggcggcccagtccctgcaggtgacccgcggaccctccccgcccgtcctactaccgtcataggaccgcctccgcaggcgcactggagccgattgcgcaggcgtggctctcacacgcgctgccctgttggcgttggtgcgggactgcgcaggcgcgcggggcaagagggtggcagtgcgcctgcgccgcgtcggcgtgcggaacgccgcggtgtctcggcgcctctgcgcgcgggaagatggcggaacaggctaccaagtccgtgctgtttgtgtgtctgggtaagagggcgccgacttactcatgttctgacgtcctctggagagttggatcgggcttgtgcgctgtaggttgtgccgccggcctagg

SEQ ID NO: 22779 - DNA, 2300 bp, Homo sapien
attatagtaaaatttgtgtaataaaagatgtcgataaggaatcacaccttttctgtattacatcttttactatattacacaaattatagtaaaatttgtgtaataaaagatgtcgataaggaagcaactcatgatctgggaaagcaaaggaggaaatatttaggtttgactttataaaataaaaaggctttccaggcaaaatgcataatgggcacccagcgatgaaggctcagtaagcatgtgaagtgctaccgaacaacgaaaggttctggaaggcagtgtcccgagggtgtgagcaggaaaaggtacaggagataaagtgaggagtctgtaaaaataaacagaaactgcaggaaatgcaaactcacagaaggttttaagtaaccggactactgacaatttaggccttcctctcagggtggaggcaccgaggaatataaccttgtagtgctacaccaaaggaagatccctgaagaccaaacggaaaataaattatgtttgaagtaaggcaagctaagtgttgaaattctaggagtgaaaataatttaagctggaaagttcctgaaaagccattaataaaatacactttcatttttcatgggccaaagttatatagggacctccaggtctcctttgcttggcttttacaatcaagaaacccgaaaccgtaaaacttcatctccctttaactcagatccctatctaagcatgggctaaggaaactagcaaacaaaacaatgttgtcataggactcaggaggcccctaagagaccacatcagtccgacaacctccaggcctacctgggcccattggaggggaacgagagggattctagtagtcgcaaagaaagtaccttggcttgtaggggctgtggctgcagatgccaagagccccggatatatggcaggcgcgaggggacccaggtttagcgggcaggctgggcgggtgcacggggcggatggggaacaggggcgctgcggcacactcctagaacaccctaggcctcccagtccctggcctcctccccctcatggttcctaggccggcggcacaacctacagcgcacaagcccgatccaactctccagaggacgtcagaacatgagtaagtcggcgccctcttacccagacacacaaacagcacggacttggtagcctgttccgccatcttcccgcgcgcagaggcgccgagacaccgcggcgttccgcacgccgacgcggcgcaggcgcactgccaccctcttgccccgcgcgcctgcgcagtcccgcaccaacgccaacagggcagcgcgtgtgagagccacgcctgcgcaatcggctccagtgcgcctgcggaggcggtcctatgacggtagtaggacgggcggggagggtccgcgggtcacctgcagggactgggccgccgttcacctgcaggggcggggctgcaggttgtccggaggaggaggagctgcgggggtggggtcacctggagggagtagggccgcggaaggcgagggggtgtgtgtgtgtggtggcgggggttggcgggggggagtcacctggagggggcggggctgcgggtcgcttggaggggaaggagccgcgggaggtaaaggttacctataggggacggggccgcaggagaggggtacctggaggaggaagggccgcgggtcacctgcagggcgggctcaggcctcgcggctccgcgggccgcccacctgggttggggcacagcgcgagtctcgcgcacgtggcgggctgtggtgcctgtcgttcgagttcgcatagaggggctgggcgggtcacgcggggaacctgccttgagccccgcggggtccacgccggaccagggcggccttgggcctgggcgctccctgagacccccacccccaacaccgtgcttggagccgccgcggggctctgggcttttcgatcttgaggacggggcggttccgaagtccctgagggcgaaggcctgagcgcggcccggcgggcgcgtggtttttgtcccgcgaaacgtacacggcgggtgttttgcgccgcctccttcgtcacctgccgcaggtacgccctcgctggggcctccttgtccgcggggcggggcagcgcgccttcctcttcctgggcagcctcgggacggggcgccgcggccgggcgggcagcagtgagtacccggggacccacctgtccggcagcaccctcccctctcaagagctgggcggtggtgggaggaggaggacgggaaaaccggcgatgcctctggggtttctaggtcgcgcgtctgttaaccgcaaaccgcccaaagttaagataga

SEQ ID NO: 22780 - DNA, 2300 bp, Homo sapien
tacacttccccattaacagcaaccatgatgcattatgccagcataatcgacaataccaaccaaaactatacaagggaatggaatattatttagtaaccatccttaaccaaactactgtttaataaacttattgatttcatcattcagccttcaatgagtcttaaaaatcaaatgatgcccactaccaatgtgaaacaaggtaagccttctaattcgtctttcacagaagttaacttctacaaaacctagtcagcgtttatcatatattgtcctaaagctgaaaacaaaatgaaaaataagccacagttattgccatcgacaaaattaaactcagctgggatttcaacagactatcaaataattatagtaaaatttgtgtaataaaagatgtcgataaggaatcacaccttttctgtattacatcttttactatattacacaaattatagtaaaatttgtgtaataaaagatgtcgataaggaagcaactcatgatctgggaaagcaaaggaggaaatatttaggtttgactttataaaataaaaaggctttccaggcaaaatgcataatgggcacccagcgatgaaggctcagtaagcatgtgaagtgctaccgaacaacgaaaggttctggaaggcagtgtcccgagggtgtgagcaggaaaaggtacaggagataaagtgaggagtctgtaaaaataaacagaaactgcaggaaatgcaaactcacagaaggttttaagtaaccggactactgacaatttaggccttcctctcagggtggaggcaccgaggaatataaccttgtagtgctacaccaaaggaagatccctgaagaccaaacggaaaataaattatgtttgaagtaaggcaagctaagtgttgaaattctaggagtgaaaataatttaagctggaaagttcctgaaaagccattaataaaatacactttcatttttcatgggccaaagttatatagggacctccaggtctcctttgcttggcttttacaatcaagaaacccgaaaccgtaaaacttcatctccctttaactcagatccctatctaagcatgggctaaggaaactagcaaacaaaacaatgttgtcataggactcaggaggcccctaagagaccacatcagtccgacaacctccaggcctacctgggcccattggaggggaacgagagggattctagtagtcgcaaagaaagtaccttggcttgtaggggctgtggctgcagatgccaagagccccggatatatggcaggcgcgaggggacccaggtttagcgggcaggctgggcgggtgcacggggcggatggggaacaggggcgctgcggcacactcctagaacaccctaggcctcccagtccctggcctcctccccctcatggttcctaggccggcggcacaacctacagcgcacaagcccgatccaactctccagaggacgtcagaacatgagtaagtcggcgccctcttacccagacacacaaacagcacggacttggtagcctgttccgccatcttcccgcgcgcagaggcgccgagacaccgcggcgttccgcacgccgacgcggcgcaggcgcactgccaccctcttgccccgcgcgcctgcgcagtcccgcaccaacgccaacagggcagcgcgtgtgagagccacgcctgcgcaatcggctccagtgcgcctgcggaggcggtcctatgacggtagtaggacgggcggggagggtccgcgggtcacctgcagggactgggccgccgttcacctgcaggggcggggctgcaggttgtccggaggaggaggagctgcgggggtggggtcacctggagggagtagggccgcggaaggcgagggggtgtgtgtgtgtggtggcgggggttggcgggggggagtcacctggagggggcggggctgcgggtcgcttggaggggaaggagccgcgggaggtaaaggttacctataggggacggggccgcaggagaggggtacctggaggaggaagggccgcgggtcacctgcagggcgggctcaggcctcgcggctccgcgggccgcccacctgggttggggcacagcgcgagtctcgcgcacgtggcgggctgtggtgcctgtcgttcgagttcgcatagaggggctgggcgggtcacgcggggaacctgccttgagccccgcggggtccacgccggaccagggcggccttgggcctgggcgctccctgagacccccacccccaacaccgtgcttggagccgccgcggggctctgggcttttcgatcttgaggacggggcggttccg

SEQ ID NO: 22781 - DNA, 2300 bp, Homo sapien
cccgaaatcataagagtagtgaagctagcaattcagatacggcaaagagaagccataagcactacccttaagtaaaaaggtgaaagtttttgacttcttatggaaagaaaaaaaaaacttataccgaggttactaagatctacagtacgaacaaatcttctatccatgaaaatgtaaacaaggaaaaagaaattcctgatcgtctgctgtcttgcctcaaactgcaaaagttgcgaccacagttttaaatgcttagttaaggtggcaacggtattacatttgtgggtgtaagaaacgagcagacacatgttccaattgacagcaattgggtttggtactacccacagtttcgggatccactggggagtcttggaatgtatcccctacagctaaagtgggactactgtatatgcaaggatacacttccccattaacagcaaccatgatgcattatgccagcataatcgacaataccaaccaaaactatacaagggaatggaatattatttagtaaccatccttaaccaaactactgtttaataaacttattgatttcatcattcagccttcaatgagtcttaaaaatcaaatgatgcccactaccaatgtgaaacaaggtaagccttctaattcgtctttcacagaagttaacttctacaaaacctagtcagcgtttatcatatattgtcctaaagctgaaaacaaaatgaaaaataagccacagttattgccatcgacaaaattaaactcagctgggatttcaacagactatcaaataattatagtaaaatttgtgtaataaaagatgtcgataaggaatcacaccttttctgtattacatcttttactatattacacaaattatagtaaaatttgtgtaataaaagatgtcgataaggaagcaactcatgatctgggaaagcaaaggaggaaatatttaggtttgactttataaaataaaaaggctttccaggcaaaatgcataatgggcacccagcgatgaaggctcagtaagcatgtgaagtgctaccgaacaacgaaaggttctggaaggcagtgtcccgagggtgtgagcaggaaaaggtacaggagataaagtgaggagtctgtaaaaataaacagaaactgcaggaaatgcaaactcacagaaggttttaagtaaccggactactgacaatttaggccttcctctcagggtggaggcaccgaggaatataaccttgtagtgctacaccaaaggaagatccctgaagaccaaacggaaaataaattatgtttgaagtaaggcaagctaagtgttgaaattctaggagtgaaaataatttaagctggaaagttcctgaaaagccattaataaaatacactttcatttttcatgggccaaagttatatagggacctccaggtctcctttgcttggcttttacaatcaagaaacccgaaaccgtaaaacttcatctccctttaactcagatccctatctaagcatgggctaaggaaactagcaaacaaaacaatgttgtcataggactcaggaggcccctaagagaccacatcagtccgacaacctccaggcctacctgggcccattggaggggaacgagagggattctagtagtcgcaaagaaagtaccttggcttgtaggggctgtggctgcagatgccaagagccccggatatatggcaggcgcgaggggacccaggtttagcgggcaggctgggcgggtgcacggggcggatggggaacaggggcgctgcggcacactcctagaacaccctaggcctcccagtccctggcctcctccccctcatggttcctaggccggcggcacaacctacagcgcacaagcccgatccaactctccagaggacgtcagaacatgagtaagtcggcgccctcttacccagacacacaaacagcacggacttggtagcctgttccgccatcttcccgcgcgcagaggcgccgagacaccgcggcgttccgcacgccgacgcggcgcaggcgcactgccaccctcttgccccgcgcgcctgcgcagtcccgcaccaacgccaacagggcagcgcgtgtgagagccacgcctgcgcaatcggctccagtgcgcctgcggaggcggtcctatgacggtagtaggacgggcggggagggtccgcgggtcacctgcagggactgggccgccgttcacctgcaggggcggggctgcaggttgtccggaggaggaggagctgcgggggtggggtcacctggagggagtagggccgcggaaggcgagggggtgtgtgtgtgtggtggcgggg

SEQ ID NO: 22782 - DNA, 2300 bp, Homo sapien
atgggaaggggaaagagagaaacgaaaaatgcctccttttatgtgcctaaggtctgtttgacataaaattttactttttcctgagtgtattttagcagaaatgttcacatttcagtcatgtagcttgcaaaaagaaaaagaaaagcctcgctgtgaaatcaaaccatctgtttttcaagggagcggagagaacgcagatcccaagggtgtggggcggggtccggaaccggcacatttcatatcttctctctccacgctgcctccccgcccagctctgccggacactttctcctcctgaggagacagaccccgtgcaggaagagagaaaggacgcggggacgggcgcagacggggcctctccgggagctgggggatcggggcgcggagccttccgcccgcaccgcccgcgctcacgtgcgcctgggccagcaccttcccgccgcggtcctgcgactgccccgatcatggtgcaggcctttaattctcgcccactccgcctctctgattgcactcagaacacctttcccaaacagatcgcggacttggaagacgtccagctcttgcccagaaagcaccaatcgaatgggaaagtgcgcaactgattgataatacattttacaagaataaaataaaagaggcaaattgctgaactttcacagatgtgccgggcttcggccaaagagccaaactttcttaaagacgagtccgggaggcaagtgccctcctgcgggcgttccctgccggggcgcgagggacccgcgggccgagggtccagcgcagaggagcgcgcagatggcgcggtccttgccggggagggaccttcgctcgtcctctcgcagggggtctggggagggggtgcaggtcctgcccctcctcgggtggtcagctgtgcgcacctcgggggccgtggagagtcctcacccgcccatctcctgcctcctggccgccccgcctcggggaccagggcttggggacccgaacctggggactgggctcgggcggggcagacccctcgaggtccggagagcggatccctccaaaacggatggactctaattgacttattaaatgtcgaagcaatcaggcagctccctttttaatagcccaagatctacatttagacaaaaacagaaccgagttcctggtaaaggcgtttcttctcatcctgtcacaagtgacaggaacggagggaaacagactgggggaggggcggggggaggagaacagggggaagaggaggagacggggagtgggggaaggtggggcaggagaggaggagacgggagatggggaaggtggggagggaaggggcgcgggagacggggcgcgggcgagggggagacgcggtggagatgcgggtggggggaccgggcgggggcgggggcggagttgagggggagcgggagacggggggaggcgagagcgaggtgaggcggggggactgacgaagatccgcatgggggtactaacacttcagcggcttctaattaaagccccgctcggagcccttggggacccgcctgacgtcggcgggcgcggggataagaagctccccgaggtctgaggcgggactcggagccggcgcaccccaggtcggccgtgggtccagcgctcggagcggccgagtccccgcgtcccgtgcgctccgcccgccgggcatggagtagtggcgcagctcggggcgcggggacagacgtgcgcacagacggcgacgactccggcggctccaggtaaccggcccggccacgacgcgcaggtggctcccgggtggcgccgggcaggtgcgggagggcgccatggccgggaggtggaggggcttccagcacgtggcgcggccggggccagcgcgagggtccgcacccggcctcctccgtgggcttcggggactcggcgctcgccggcgaccaccgcgcaaaggcgacgctggaaacttgagcgcggccgccgggcccggcgcgcggcgccgccttcttggagagcggtaggcgcgggagcgcggcccctccgaggtccgcccgcggccggggagctgcctggcacccgcggcttccaaaggggaaagaaagttgcgcccgcgccaggcgcagcgcgctcggcggacgcggcctttcgggcgaaagttaggaggggccgggctggcgggcgggcgggttccgggggctcctttccgcaccagcggcggtcgctccccgtgggcgggacctcgggcgtgatcgtcgaggagaccgcggctccctcacctgccggcttgttcctcggggtccgcggaggtgaggggccgggtccagcgccagcggctc

SEQ ID NO: 22783 - DNA, 2300 bp, Homo sapien
gtcacagaggtgggaaagtgggaggcagggaggctggagggtgggaggcagggaggcaggaaggtgggaggctggagggtgggaggcagggaggggggagggtgggagacaggcaggctggagggtgggagtcacagaggtgggaaagtgggaggcagggaggcgggaaggtgggaggcaaggaggcgggaaggtgggaggcagggaggcaggatgatgggaggcagggaggctggagggtgggaggctggaggcagggaggcagggaggcaggagggtgggaggcaggaaggcttgaaggtgggaggctggaggcacggaggctaaggcgtgcagttacataggctgcatatgttttatcttggtttgttacttgctgttaatcttgtttattgttctttggccctacaaaatcttttagctattgtgaaaaaatatttatttatttttttccttgcagcttatggaaagtgtaagattatatattttttcaaatatttagttctatttacattgctttttatcacatgcagatttctatctgagtagtgtattatgtgtcttgggatctgacttttttaaatggagttaatattcccaatattagttatttaggaatccatgaactgacctcaaataacgcttttactacatactccatggatataatttgggggactacatcgggtaaatatttattaagtgagaagatcagtggcttattcctcacctaatccttgttcacactaaccttcgtcactgcctgttcctgttccccaagccccactctaatgctaagtcatcctggcatttctttgagttaagcagcaataactccttattttgacattgtatttttgaccaatcacagcgatctgtttaacctcccctgcccttcggtttaagacatcaccttcagcaggtattagtgtttcctcttactttgctgaagtaacaacactgtagtggaaacccgttatttaattcagcctgtgacccacctgtgactcttcaggctacaataacctgcaagcttctttgctgttcaattctcgatgcatgctcatcatgttctaatttaaacgccatctcctcctcctgaggcccctcctgaggcccctcctggccctgcagctggagtccagggctagtcccccactctgctttcctcctagcacggcctgttcctgtctgccttccacagcgggcgctgaagaagcacggagaatctcccctggcccctgttctcaccctcactgcatgttccaggagatcctgtgacctcagtcaaagctgggggcagttttcgaaggaggcttttctctccaattcttcagcttattgtttcagggcatagcatccctgcataaatgaacaattttattttcaactaaaggttttgtcccatcataaaacattttcaccatgagtcaaggtaacattctgatttttttttaatggaaagaagtaacagggaatgaaacatacaaagccagaagaggtttggaatttgaatggaatccaggtgattgataaagcaggggtgttgcttcatgtcaaccgcccacttaccgaactggaaaaacagtaggcaattcattgagggatgattttacagacctacacagagatggaaattgactgcagaaaagattttggaaggctcacctcagcctctttctggagaaccgtgttgatcaagcgtgcaatcacaaacgcaggcatccttccaccgtggtgaggaggcgactgtgggctgtgtcacaaccctgatctgcctttctcctgatgcccacagacgtttgagaagcatcgctgctgccgtggagcacacggagtcagtgagctggggctgaggcttccttattccctgcaggtgtctcctgtgatgctgcgtgctggagagaacccaaggtcagttacccttagagctcctcctacgatccagtccgcgtgatcctttgaataattgccttctgctgtttaccgacagattctctattcctagaacaggagctaacactccataaccgttatctgtatcattgtggtaagtaaagttctctgacaagttcctcatgtgtggaacaagagtaacacccaatgagctgcctgaaggattcagtgtcttggtgttcacaaggccccagcacatcgtctaggacgtgagacccacacgccgccctcagtctcctcagttcactgtttcccccggggaaacaaccgccagggcctgtaggaaaacacagcaaactagaaagtccagttggaagagatttcagatgtgctacagcctccac

SEQ ID NO: 22784 - DNA, 2300 bp, Homo sapien
tctgtagcccttatccttgaaaccaagttgggcaatgccttattttatgcacagaacttttctttcccagtttgcaatcttcctcccattcaaagcagtgcatgagcacagctgccaccaaggacgcatcttgtgtaaaagacagcacttccggaaacccaactctcctgtgtgcagctggtgctcagcacctccctggtaggcaacaggaactcaacagattcctctcaactctaacatccaaaaagtagttttctttatagcttccaagagtgaaaaacgggagtgccctgggagcaggcacatgacagagggttgggaggtcttgtaaaaatatgtatatatttcgaagacacagacagaacatacacagtttcatttcacacagtgatctgagttgtggagtttgtgttgttttactcacctagacacagaaagtgcccgatctgtagtctgtagcttcgggaggacaagcaggtgaggagcacgcagagcgcgtggaaggtggccagccccatgagccagggctcagtccagtccgtctgctgtaggaacacaccagcagacactcactgtcctgccactcaaggccgggttcacggcccacccacagccttctcccagcgcaggaggcaggggcctctcactcctgagtcctcctgggctactcaccaagtatccagagagcattgccaggcctcagagaaacatggggacaggaaagggagaaggaaccaggaggatggaaacaggattctcccctcagtgcaactataattcatggaattcaaagttcaagcacacagaactgaaggcatctctgatgtgctcctttcgtttgtggaacagaatcatgtttttaaggtgggtataattaaaggaattaccatcctttacgatgataattggttatgataattggtgacgacaaggaaattaagacgattgctcaaagagatgcacttggctcagccccaaaggtaaaacatgaatcatcatttcagactccttagtcagcactgaagacctcagggaatcttgagccatcgccacgtgcaagacttgattttctccaacctctctgcaatacactgaactctccagacagtgccgcactccgccgcctcctggactccccgggaccctgctgtacctggggacagtgtctggctcagggacctgaagtagccaggctcagatccactgctgctcagtccccacctgatgctcagatgccaatcccagcagtcctcaaccctccccatcccctccttgagcgccctcctgcagaagacaagccctgccctccaagctgcagccccgccctgccctccaagctgcagccccgccctgccctccaagctgcagcccggcacagccctccagaactcctgtgtcactactctctgctggggaccgcagcggcttctccagagccgcgccatgacataaggacacaagcgcatctactcccatcaatgcacccaccagaagaccagaggcacggaggtgaggggagcacggctttctgcccagaccccatcgagtgcccatgtcaccccttggcggccacgtggggcgtgggctcccctgggatctgtcagacgaacccggcacggcgcacgccccgcccacactgggcagcgttcctccgtgccaccccacacgatcaggctccaccacgcacgccccgccgcactgccagaatccgcccacatggcccaagccccgcccgcaagacgctggactggccggcgtgcacctcccacacgaacaaagccctacccctcgcgctccgcccacacaactcagccacgcccgcacggtgcaggacgccagcccagcccaagcccgggccacagagcgccggagccagctcactgcgcacgctcctccacaaggccccgcccggccccgcccctccccgcccaacggcccaggaccccgcctagcgctcgcgccccgacgcccggccccggccccctcccacagggcccaggaccccgcccacagcgcgcgcccccgacgccggccccgagccactcccacaggtctcaggaccctgcccagcgcgcgcgctccgccacaaggccccgcccacggccggggccttcttggccacaggccgggtgctctgtggggcctaccctacgcctctccgccgtcctcccccgaactggtggttacgcgggccgcgagttaccgtgagcacggctgggatgctgacggggaaagagctgacagagaaggcggacggcatggtgttgggaagcccgctctcacagcaaccgccgaacccg

SEQ ID NO: 22785 - DNA, 2300 bp, Homo sapien
ttttcccataagaagaaaccatgaccttctacactgaaatgagagaatgcatgttaagtagcataagcagaaatgaccacactgtggaaagattttaagaaagatctgggaggggttaaagctattaaaaaaaaaaaaaagtccaccactagaactatttttagaaacattaaactagttcaagagctaacatatgcaattaaagtatatacacttaataattcatgatgttaaaataacagaatgtttaatttgaaaatgtcaaagttggggtatagatgttaaaataaagggaaaaaattcgctggaagaaaattaactttatatttttgtatctgtcgttgaacaacgaagtgaagcgtaagaacatctggtaaatctccaaagtgaagacagataaccctaagctgacccagactaagagtgcactgcccttagggtcgcgagagcagacaccttcccaagtcctgcagggtccgaggagtgggcaatgtccccggctcctgcagggtctcggggcggacaccgtcctcattgatgctctgacccttctagggagtcccaggtgggacagggctggcgtggcggtacagcgccctgagcctttgaaacaaacctcctaaattccacccgcctccgcctgctcctctgttaacgaactaaagacgccctcggcctcctggcggagcgagcacaagtcccacagcagcgtagtaagttttccgtattacagcgaccaccaggaaatatcgcgatatctggacctagcaatgccatgaaattaccgcgagaggaagcaagcgcaagtttcgtgagaagggcagatctcacgagagaggatttggcgccctcctctgtggattctggccaggccgggttcggcggttgctgtgagagcgggcttcccaacaccatgccgtccgccttctctgtcagctctttccccgtcagcatcccagccgtgctcacggtaactcgcggcccgcgtaaccaccagttcgggggaggacggcggagaggcgtagggtaggccccacagagcacccggcctgtggccaagaaggccccggccgtgggcggggccttgtggcggagcgcgcgcgctgggcagggtcctgagacctgtgggagtggctcggggccggcgtcgggggcgcgcgctgtgggcggggtcctgggccctgtgggagggggccggggccgggcgtcggggcgcgagcgctaggcggggtcctgggccgttgggcggggaggggcggggccgggcggggccttgtggaggagcgtgcgcagtgagctggctccggcgctctgtggcccgggcttgggctgggctggcgtcctgcaccgtgcgggcgtggctgagttgtgtgggcggagcgcgaggggtagggctttgttcgtgtgggaggtgcacgccggccagtccagcgtcttgcgggcggggcttgggccatgtgggcggattctggcagtgcggcggggcgtgcgtggtggagcctgatcgtgtggggtggcacggaggaacgctgcccagtgtgggcggggcgtgcgccgtgccgggttcgtctgacagatcccaggggagcccacgccccacgtggccgccaaggggtgacatgggcactcgatggggtctgggcagaaagccgtgctcccctcacctccgtgcctctggtcttctggtgggtgcattgatgggagtagatgcgcttgtgtccttatgtcatggcgcggctctggagaagccgctgcggtccccagcagagagtagtgacacaggagttctggagggctgtgccgggctgcagcttggagggcagggcggggctgcagcttggagggcagggcggggctgcagcttggagggcagggcttgtcttctgcaggagggcgctcaaggaggggatggggagggttgaggactgctgggattggcatctgagcatcaggtggggactgagcagcagtggatctgagcctggctacttcaggtccctgagccagacactgtccccaggtacagcagggtcccggggagtccaggaggcggcggagtgcggcactgtctggagagttcagtgtattgcagagaggttggagaaaatcaagtcttgcacgtggcgatggctcaagattccctgaggtcttcagtgctgactaaggagtctgaaatgatgattcatgttttacctttggggctgagccaagtgcatctctttgagcaatcgtcttaatttccttgtcgtcaccaattatcataaccaattatcatcgtaaaggatggtaattcctttaat

SEQ ID NO: 22786 - DNA, 2300 bp, Homo sapien
gagtgagaatggacacagatgaaaaccatcacaccagctgggtgcggtggctcatgcctgtaatcccagcactttgggaggcccaggcgggtaaatcacttgaggtcaggagttcaaaactagcctggccaacatggtgaaaccccgtctctactaaaaatacaaaaaaaattagccaggtgaggtggcgaacacctgtaatcccagctactcgggaggctgaggcaggagaatagcttgaacccaggaggcggaggttgcagtgagccgaggtcccaccattgtgctccagcctgggcgacagagcgagacatcgtcttaaaaaaaaaaaaaaaaaaccaggaaagccaagcccgagatttcccaaactcagcaacaacagtcgtgatgttttgagaggaaggttgagaaacacaaaagagaggaagatgcactatctacctaacgggatgttcctggagttgaatacaggaagaatagagaaaaatatcaatgaaagaaatgttttcccataagaagaaaccatgaccttctacactgaaatgagagaatgcatgttaagtagcataagcagaaatgaccacactgtggaaagattttaagaaagatctgggaggggttaaagctattaaaaaaaaaaaaaagtccaccactagaactatttttagaaacattaaactagttcaagagctaacatatgcaattaaagtatatacacttaataattcatgatgttaaaataacagaatgtttaatttgaaaatgtcaaagttggggtatagatgttaaaataaagggaaaaaattcgctggaagaaaattaactttatatttttgtatctgtcgttgaacaacgaagtgaagcgtaagaacatctggtaaatctccaaagtgaagacagataaccctaagctgacccagactaagagtgcactgcccttagggtcgcgagagcagacaccttcccaagtcctgcagggtccgaggagtgggcaatgtccccggctcctgcagggtctcggggcggacaccgtcctcattgatgctctgacccttctagggagtcccaggtgggacagggctggcgtggcggtacagcgccctgagcctttgaaacaaacctcctaaattccacccgcctccgcctgctcctctgttaacgaactaaagacgccctcggcctcctggcggagcgagcacaagtcccacagcagcgtagtaagttttccgtattacagcgaccaccaggaaatatcgcgatatctggacctagcaatgccatgaaattaccgcgagaggaagcaagcgcaagtttcgtgagaagggcagatctcacgagagaggatttggcgccctcctctgtggattctggccaggccgggttcggcggttgctgtgagagcgggcttcccaacaccatgccgtccgccttctctgtcagctctttccccgtcagcatcccagccgtgctcacggtaactcgcggcccgcgtaaccaccagttcgggggaggacggcggagaggcgtagggtaggccccacagagcacccggcctgtggccaagaaggccccggccgtgggcggggccttgtggcggagcgcgcgcgctgggcagggtcctgagacctgtgggagtggctcggggccggcgtcgggggcgcgcgctgtgggcggggtcctgggccctgtgggagggggccggggccgggcgtcggggcgcgagcgctaggcggggtcctgggccgttgggcggggaggggcggggccgggcggggccttgtggaggagcgtgcgcagtgagctggctccggcgctctgtggcccgggcttgggctgggctggcgtcctgcaccgtgcgggcgtggctgagttgtgtgggcggagcgcgaggggtagggctttgttcgtgtgggaggtgcacgccggccagtccagcgtcttgcgggcggggcttgggccatgtgggcggattctggcagtgcggcggggcgtgcgtggtggagcctgatcgtgtggggtggcacggaggaacgctgcccagtgtgggcggggcgtgcgccgtgccgggttcgtctgacagatcccaggggagcccacgccccacgtggccgccaaggggtgacatgggcactcgatggggtctgggcagaaagccgtgctcccctcacctccgtgcctctggtcttctggtgggtgcattgatgggagtagatgcgcttgtgtccttatgtcatggcgcggctctggagaagccgctgcggtccccagcagagagtagtgacacaggagttctggagggc

SEQ ID NO: 22787 - DNA, 2300 bp, Homo sapien
aggggcttcatccagtcttttctggaagcacaaaattccaggtaaatggaatagagtccatgtcagcattcacataccaacagagagagcaggccatgttctactggccacattaaaatagcaaagagaaagagattaattttattgatatattttatttggtccagtatgtccaaaatataatttcaacatgtaagcaaaataatacaattgttgataatgtattttacattttggtacaaagtctttgaaagatggtgtatgtttgaaattaaagcacatctcagactggcgacattgcacaagcttcacgtctaaatgtccggcagcctagcgttgttcagaacggcagggcgggaggaatgtggaagatgaatgtcctgggactgaaagtgaagctgctgagggccagagttttaacaattttggaaacttgggtgccagggcgcacaatatatgaaagatctgggagggcggctgaggggaagatgaagagaaaaaatcccagtgaccgtagataggctgtggttaatattaatagcaaaaagagtttgaccccaaattacagaagttacaagaaaacagacaccacaaaagaaaggcaggcaccagacaggactgacgatgaaactaacccatggaaattaataagagtgatgtttcacatagtaacgaaatatcatcagggagatacacagtaacaggctgaactgaagaggacagatctattccctgtaactgaaaggtcctgttgaaaatagctgaacaaacacaggggagtgagaatggacacagatgaaaaccatcacaccagctgggtgcggtggctcatgcctgtaatcccagcactttgggaggcccaggcgggtaaatcacttgaggtcaggagttcaaaactagcctggccaacatggtgaaaccccgtctctactaaaaatacaaaaaaaattagccaggtgaggtggcgaacacctgtaatcccagctactcgggaggctgaggcaggagaatagcttgaacccaggaggcggaggttgcagtgagccgaggtcccaccattgtgctccagcctgggcgacagagcgagacatcgtcttaaaaaaaaaaaaaaaaaaccaggaaagccaagcccgagatttcccaaactcagcaacaacagtcgtgatgttttgagaggaaggttgagaaacacaaaagagaggaagatgcactatctacctaacgggatgttcctggagttgaatacaggaagaatagagaaaaatatcaatgaaagaaatgttttcccataagaagaaaccatgaccttctacactgaaatgagagaatgcatgttaagtagcataagcagaaatgaccacactgtggaaagattttaagaaagatctgggaggggttaaagctattaaaaaaaaaaaaaagtccaccactagaactatttttagaaacattaaactagttcaagagctaacatatgcaattaaagtatatacacttaataattcatgatgttaaaataacagaatgtttaatttgaaaatgtcaaagttggggtatagatgttaaaataaagggaaaaaattcgctggaagaaaattaactttatatttttgtatctgtcgttgaacaacgaagtgaagcgtaagaacatctggtaaatctccaaagtgaagacagataaccctaagctgacccagactaagagtgcactgcccttagggtcgcgagagcagacaccttcccaagtcctgcagggtccgaggagtgggcaatgtccccggctcctgcagggtctcggggcggacaccgtcctcattgatgctctgacccttctagggagtcccaggtgggacagggctggcgtggcggtacagcgccctgagcctttgaaacaaacctcctaaattccacccgcctccgcctgctcctctgttaacgaactaaagacgccctcggcctcctggcggagcgagcacaagtcccacagcagcgtagtaagttttccgtattacagcgaccaccaggaaatatcgcgatatctggacctagcaatgccatgaaattaccgcgagaggaagcaagcgcaagtttcgtgagaagggcagatctcacgagagaggatttggcgccctcctctgtggattctggccaggccgggttcggcggttgctgtgagagcgggcttcccaacaccatgccgtccgccttctctgtcagctctttccccgtcagcatcccagccgtgctcacggtaactcgcggcccgcgtaaccaccagttcgggggaggacggcggagag

SEQ ID NO: 22788 - DNA, 2300 bp, Homo sapien
aggacctggggctgcagaaagactgcttctataggctttattatttatttatttttatttatttttgagacagtggcaggatctcggctcgctgcaacctccacctcccaggttcaagcaattcgcctacctcagtctcccaagtagctgggatgacaggcatccaccaccacgcccaggtaatttttgtacttttttttagtagagatggggtttcactacgttggccagactggtctcaaactttcatgctattctgagcattatgactaaatcttgcactgtcctgctccatcctgaccaggaccgggtcatctctttgcccagcagatccatgctgtgcacaccacatgcctgttagtggcttagtagctctcctgggtcagcaggtccactgatgcagatcacaagtgcctgagttcaggcagcccttattttgcttaccaagggctccagatcagaagagcagtgaggctggcagcttgtagatggcaaagagaagctgtaaagtgctccctttaagtgaaaaggtgaaagttctctacttaagaaggaaggaaaaaattgtatgctgaggttgctaatatctaccataagaacaaatcttctatctctgaaattgcatagaaagaaaaagaaattcctgctagttttgctgttgcacctcaaactgcaaaagttttaaccacaggaagaacacaggaggtcggcaccacacaattttcaacaaccagatctcctgagaattcactcaccctcgtgagaacagcaagggggaaatccgcccccatgatccagttacctcccaccaggtcccacctccaggggcaaatccacccccatgatccagtcgcctcccaccaggtcccacctccagcactggggactacaattcaacatgagattcgggtggggacacaagtccaaaccatatcaggtattgaatgtgtgggtggaagacttaaggataaacaagttctgactgacggccgtcgggtttagtgccatccacagtcccagacacccaccgggtctggaatgtgccccgtgaggatgagtgggagctactacatttcatttgtccacaaggaaactggagctgaaagaagctgcagagttcccgagtccacacaccccgcaggcagcgcgtttacgtcagagctcccgagtccacgcacctcgcaggcagcgcgtttacctcagagctcccgagtccaccgacctcgcaggcagcgcgtttacgtcagagcgcccgagtccacgcacctcgcaggcagcgcgtttacctcagagctcccgagtccaccgacctcgcaggcagcgcgtttacgtgagagctcccgagtccacgcacctcgcaggcagcgcgtttacgtgagagctcccgagtccacgcacctcgcaggcagcgcgtttacgtcagagcgcccgagtccacgcatctcgcaggcagcgcgtttacctcagagctcccgagtccacgcacctcgcaggcagcgcgtttacgtgagagctcccgagtccacgcacctcgcaggcagcgcgtttacatcagagctcccgagtccacggacctcgcaggcagcgcgtttacgtcagagctcccgagtccacgcacctcgcaggcagcgcgtttacctcagagctcccgagtccaccgacctcgcaggcagcgcgtttacgtcagagcgcccgagtccacgcacctcgcaggcagcgcgtttacctcagagctcccgagtccaccgacctcgcaggcagcgcgtttacgtgagagctcccgagtccacacacctcgcaggcagcgcgtttacatcagagctcccgagtccacggacctcgcaggcagcgcgtttaggtcagagcgcccgagtccacgcacctcgcaggcagcgcgtttacgtcagagcgcccgagtccacggacctcgcaggcagcgcgtttatgtcagagcgcccgagtccacgcacctcgcaggcagcgcgtttacctcagagctcccgagtccaccgacctcgcaggcagcgcgtttacgtgagagctcccgagtccacacacctcgcaggcagcgcgtttacatcagagctcccgagtccacgcacctcgcaggcagcgcgtttacgtcagagcgcccgagtccacggacctcgcaggcagcgcgtttacgtcagagctcccgagtccacgcacctcgcaggcagtacgtttacctcagagctcccgagtccaccgacctcgcaggcagcgcgtttacgtcagagctcccgagtccacgcacctcgcaggcagtgtatttacat

SEQ ID NO: 22789 - DNA, 2300 bp, Homo sapien
ttcacacagatgaatagtaaggtccttccacttcacagtgtgcattactgatcagatacgccacttcacgaggctccaggagttgattccctcctttctaggcaaatatgttgggccaccttcaaggatttatgcacaaataataattcctgattactcatcctgtaacctgtaatgtgggattctggtaaaagtgaatgggagacggcagcttacgtctgaagcatcaaatggcctctgcctccagtcctagactttctggggtccccttcccagtcctctgtctgagatcaaggagccctttttgtttttaccagttagtgtttctaggttttaggtttctctctacagagaaaaaacaaactaaactataaaaacaagaagaaaaggcagatgtgttgtcccctggatccgaggcctctgtcccgtctgctgtcacccctgccccttccacagcggccttcggtgtgtttcctgtgtcacgtccaggtgtgtctgtggaactgaggtggagaaataggaatcatgtgtctcctctatcttgtccagagctgaaagttctctatgttgttttatttgcatttccctacaaggctgatcaaataagaaaattgttggagcttattgcaaatttactgaaacctgaagaagaaacaaataaaacacatcaagcagagactatggacacataccccaggcaagagtggtggtgaaagttctcagcagcctgaaccgcacatgtgtgaactgattggaagaggtgctggcctttgcctgcccgggcttggggagcagaaacagctctgcttcccaggaaattccagtctttaaggcttcttttcacagaattaggcttttccataggaaagtctcttgaatttgaccccatttcttcttttccccttctattgctattaccttcaagtaaaacttcctcactcgtatcttatgttgactaccacttgaatagttttaaagctgtttgtttcctttctaaggatcttttccttttcatcccattttcttacaggctgctggtgttacatttctaaagcacaggcctccctcttatgttcctctgccagcctttccattgcgtatgagacacatccctaagttcacatggagataaccaaggcccttcgccaactggacagcacccggcggctcctacctggccactgtgcttagcggtcctggctttgccacagcctctgaacattcgcagagctctgccctcgctccacagccgtctcccgcctctgaacatttgcagagctctgccctcgctccacagccgtctcctgtggatggtcccagtttcaccacagcctctcaacatttgcagagctttgccctcgctccacagccatctcctgtggatggtcccagtttcaccagagcctctcaacatttgcagagctctgccctcgctccacagccgtctcctgtggggtgtccgagcttcgccacagcctctgaacattcgcagagctctgcccttgctccacagccgtctcccacctctgaacatttgcagagctctgccctcgctccacagccgtctcctgtggggtgtcccagcttcgccacagcctctgaacagtcgcagagctctgccctcactccacagccgtctcccacctctgaacattcgcagagctctgccctcgctcccaaccatctcctgcgtgttgtcctttcagggtgctgcacccacagacgcttaatcattcttcaagacacaggtccgatgttgaagttgtgtttcctaacttgcctacactgctctctcttcttggagcgctatcacctcctctgctaatatttcactccctggttcatattttatgcagttttcacaatactatcactttccagtagatcgcgagccctggggtgcagaggctgttgggtcatcctcatctccctagtgctgagcttggtttccgacttgctgtgggccctcaggaatgtctgtggaaataaactgacttgaattaattaaataaagcaattcagcttatgagaaggcagagtgttaagatgtggggtcacagcaaacgaagggcacggcagaggcacagcaactcccctggtgacccagtgaaggtgaggaccccaggaggaactgaaataccagacccagtgtaggcgaggaggccgggaggaaatgaaacaccagacccagtgcaggcgaggagcccgggaggaactgaaacaccagacgcagtgcaggcgaggaccccgggaggaaatgaaacaccagacccattgcaggcgaggaggccgggaggaaa

SEQ ID NO: 22790 - DNA, 2300 bp, Homo sapien
actcatcacaaaaaccagaaagttgaattttggtaacctcatgggggacattccctcgcagagtttcaggatagtcagggttttactttttattgttattgttattgcagtagaaccctagtatttaaaataagcaaaataacccttacgtgcagtcctgacacagatgcataaaagcagataggcagttaaaacttgaattaattagcctttcaaaagcagccccagagcgcctacgacgtcctggaatcacaaaattttattatagaaaggattccagagattgttagccaaaactacattattttacaaatgaattaacaattacctttggtctgaaaaacaaaaatatatgtgtctattcatttaacgataaaattttaacaaaaacttgtctctcaaagtcaacatttatgcatgcaacacgctgtttttccttcttcaggccctggaatagaatgtccctttgcaaggtaatgagacaatatctttgtgctatttgtagacatttaatttctcagagattatatgcacgctcttttaaaaatgcaatttaaaggcaaacaataatctcttgtactttttcttattctaggttttgctacaaataaaaagtaatacaatattttttaccaattcacccaagaagcatattttgtaacagccactgtgccacgtataaaaagacctggtttttgctattcaagagcttgtcctctggttaaactgagtgctaagaagtgctggcagactgccgtgaaggtgaaacaggaatacagagaatagagaaatggggaagggcgtctgtgttcgaaacccaggtctgctcaggggtcaagcaagtcggagtcagaaaaagtaaagtgtttaacatcgagttttcaatatttatttgtttacaatgcgtcacattctgctcctagatagggttaacctctgaagacctcagatttcgctgcttttccttgccgtggagagggaataaaacgggcatcgtggcctccgcgatgggcgctcgtgcctgggtcgaaggactggggggcggaggatttggaaagggagaaaaatacgggctggcttctttttaaaaaatgtgggtagccttgcctgcccccgccgcactggaatttatcctaaacttactttcatttacattaaaacaagacgatttgagtctaccaaacccaatactgcatctgtgaggctccttttggcacaaacctgaatgaacagcgggaaacgccgtctcccctggcgtctgagatctggggtcccctccccacctggtctcctcgctcccgccccagccccgtgcgccccaggagggcaccgccgagcgccgggtccccgcagggttcgggagactccgcggaccggaggagggataggacccccgagctttgggggcgggaagggagggtggaaggaggaggggagcggggttggggaaagttggagcttcggtatcttttctccgggccaggccgtcctcggggccctgcgctgcgtctccaagtgctgggaagactccgcggggaaaggtctgaggacgcggccggctggcacaggtgtggcggcttcagagggccggggagaacccatggcttcgaggctgtggactagaaatgtccctgattagaagctgagaacctttggccagggaggtggggcggcggggaggggtcgtcaagccggtccagagcgcgcccacctgcgccacaagggagaagaggtgccccccgcccccctccgcccaccgccgccacgatgcgccgcggacctcggcgacccagcccgggtagaagcgcgcgctcccctcctccagcctcgtgcgccggcccctgccccgccagccccgctatggtcccccatccacccccgcgggagcgcccctgtccccccatcctgcacttcccccagagtcgcgcgccagtttcccgccccgtggaagcgcccctctcccgacttcggctgatccccgctcgccgccctccccgcgggtgcgcgcccggcccctccctcgcccggggcgggtctgcgtgggcggtgctccgggtcggcgggcggagctccggttccccagccctgcgccccggtggagcccgagccggagccggcagaggggcgcgggcgcggacgcggcgcctggcggggccctgggaggctcggacggggtcctggcgttgagctcggccggcccggagcgcggacccagccgcaggggcggcgatgggcaccgagggacccccgcccccggccgcctcccgcggacgccagggctgcctgctggtacctgcgcg

SEQ ID NO: 22791 - DNA, 2300 bp, Homo sapien
caaactatgcatctgataagggtataatatccagaatccataggaaacttaaacaaatctaacaaaagaaacaaacaaccccattataggaaacttcaacaaatctaacaaaagaaacaaacaaccccattttaaaaatgggcaaaggacatgaacaggcacttctcaaaaaaagacgtatatgtggccaacaagcatatgaaacaatgggcaacatcactaatcattagagaaatgcaaatcaaaaccacagcaagatatcatctcacagctgtcagaatggctattattaaaaagttataaaacaacagatgctagcaaagttgtagaggaaagggtacaggtacacactgctggtgggaatccaaattagttcaataactgtggaaagtagtctgtagatttcttaagttacttaaaatcacattaccattcaacccagcaatcctattaccaggtatatacacaagggaatgcaaatctttccaccataaagacacatgcatgtctatcctcatcccagcactattcacgatggcaaagacatgaaattaacccagatgcccatcaacagtggagcagataaagaaaatgtggtccatatacaccatggaatactatgcagtcataaaaatgatgaaattctgtgctttacagcaacatggatggagctggaggccattatcctaagtgagttaatacaggaacagaaatccaaacactggatattctcatttgtaagtgggagctaaatactgagtacatatggacacaaataagggaacaacagacatgggtcttacttgagggtggagagtatgagaaaggtaagaatcaaaaactacctattgagtactattattacctgagtgacaaaataagctgtacaccaaacccccatgacacaaaacttacccctctaacatacctgcacgtgtacccccgaacctaaaacaaaagttggaaagaaaagaaagaaaatcattaaagaaatactagttaaattgagaaatatttgtgaataagaagatgcaataaaatgatggcaaatgtcccaaaattgatcaatagtcaatgtaattccaatcaaagcatgaattagtttgaaacttgacaaaaaaggccctaaaatttaaggaaatgtaaagtcccaagaggagctaatccaccattttaaaaaagaaaatttggtatctgtcgttagttctaatatgcattcataattcagcatctgtgaaatcaagttctatcatacaacagatgtttcaaatttcatttgtagccttagttctttgtagtgttacataaaataatggtgtatgtaaatgttaatggcatcttagaactgaagaaatatggtattattaagtcataataattggaactctgggaaaaagatggtgcaggcttagaaaatcaaccaaaagaacagaacagaggaccccaaatcagccccatcattccaaggagacttgattttgacaggtattgctgacggctagtgtgttaggctgttcttgccttgctataaagaaatacctgagactgggtagtttatgaggaaaagaagttaaccagcccacagatctgcaggctgtgtaggacgcatggcaccagcattgcttggcttctggggaggcctcaaggagctttgactcacagcagaaggtgaaggcagagcaggagcaagagagaggcagtgggaggggaggtgctgctcatgtttactcaaccagatctcgtgagaactcactcactaccaggaggacagcaccaagccacgaagaatcggtgcccatgacccaaacacctcccaccaggctccacctccaacactggagatcacaattcaacttgagatttggcagggacaaatatccaaactatatcggctagcaataaaaataaactgtactgaggcaattgattatacacatgaaaaaacaacaacaacaaaaacagtagattggatccttacttaagtctagacatgttaaagactttaagttgaaagcttttaaaataaagatcttcctgactgttggggcttagcaaagtttccttgcaggcagaaaaagcaaacaccacgtggtaaaggctgacaaatccaactatggttaactgttctttacactaagcaccgcactgagagcaacacaaacaaaactgcaggtgaaggtgtctgcagcacacacagtgagaattcgccctagaaagtacaggatatgtaacatgctgcgggacagatgcagagaggccactttccctctgaagaggaatcacacaccttagcatgtgcc

SEQ ID NO: 22792 - DNA, 2300 bp, Homo sapien
gctcggcctcccccagctgtgcatgcaaaccccctcttcccaggtctccatcggcactcggcattttcaagcgtccttctgtgatgaaaagagcatccagtcagtatttactttacattttaatgctttcttcttcaaactcttccttgagtatttgccccacgctgtctcattttaccacccacctttctggctgtgtgaatttcctgcgaatgccttaacaaagggccacgtgcttagtggctttactccatcagctccggaggtcatagatccaaatgagacttttggcagcaaggtccagggacaggcctggttgtgcctggagaccccagaggccctgctcctggcctcctccagtttctggaggctcatggccacggccctccagtctcagtttccatcatcacttccccctttctcccctcagactttcccacctttgtcttgtaaggagctgtgtgctaacactaaggccagtggataatccaggctaatctcccctcctcaaaatcttaactgaatcccatctgcaaagccccttttgccatgcaggttgcagtcacaggctgggggactgtgtcccctagacgctggtgctctgagctactcttgaggtcttttccatccacattctcccaagaagaatcccattcactcacagtccactactgtatcccccctcaggactcccaaatgtgtctttttaagctggacttcacccaacagctgaaagtacatttccaaatgcccaagagctcactgcccgcctgtgccacgggcacctccaacacaattccaagcctgagtctgctgctcctttgcttgtcacagccagtctcctttcttctctggccttcctagggccagtacatgagattttcacttgcttaggcatcaaaccgaggatggctgaatcctcagaggctctgtgcttttcttctgttcccaacagtaactcatcattgagccatggaatcctctttaatgagccaccgagtctggtccttcctctctatccaaaccccaccctcctagtgaccattctcagggtgcgtggggggattatatcactgttggctgatctcctccctgctcttcagagcttgtctaactcatttgttatcttcacccatttgaggggtgagtgatgaggattgaggggagaatgttaaaggcaaatcatcacattcttgggcttcagaacatcttctaacaaagattaatgttctgaagcctttgcatcgtgttttagcatttggtttcaaattacctagaggaagcatcagtcacatttggagaagggaaagaaaaggagaaagatgaagatgattttcacaaactagaaacccataggacttccgggggcatgaagaggctccaagtctcaggagcaggtcattgaagatgtgttattttatcattttcatgatgagatacagcctgaaagcagatcacccatgaaaacatgtcatctcccagtgttcggaatgcagtcatggtgaccttcctacagaacatctctgtctttgtggggactcttttgatgggtgcatgatgaggattgaggggagaatgcatgctggtgaacacacactgaactgtgctcatttttcacctcaacaaattggaaaaaagtgtactttattcacctcttagtgataagaaaactaggggcttggggacaggaagcaaaaggctcagagttgtagagcgagtcatcggtgggcctgggagctgcacccaacccaatcctcggaagattaacagcccctttttcacagggtatttaactgtgaaagtaagagggaggaaaatgcaagtgtcacaagtctggatttagttggtttattctttctccctgtataatttttcccctcttcttcctaactcattcggccagaggctggactgcatgtggaccccgatgacatggcactttgtttctgaccagtcaggacacacaagaggcccggcgcaaacacaacaaagcccgcagacattctgtccccacgaagaacggacgccactcgacttcctagcatcttgacgggctatccaagcgcggagtcagtttataaggtgggtaaccaagtccctggaaggcaattaaggcgcccatttcagaagagttacagccgtgaaaattactcagcagtgcagttggctgagaagaggaaaaaaggtcaggttgtaaagctttttatttttccattttctaagagaaattcatcattggaacttgtaaagtggcccaagagtggctgtaatttgggccattatagcaggtatgggtggcg

SEQ ID NO: 22793 - DNA, 2300 bp, Homo sapien
actccagtaatgactgtttttaatgtttgtgggatttgttaaaaataactcggtctgtgttcaccatcacagtatctggggtttctttgttccaactgtggggactccagagggcggaagccaaggttgaaagcctaacatctccattgtccttcccattatgtcgtgaacgtgtccctaacttaacaaagtgatcctttttccatcataactctggatgtcacccttatggtctagtacaataccgccaagaaaccacagttttcaggaatcactttgcggttactggtttggtgctgcggaggacggaaggaaacactgtgtactcctttatcagttgcaatgactgttcagacatggacagtaaattggtgtggcttttctattaccgtggtttggggaagagaaggaatagaaatcttcagattttcattattattatttttttctgaccttgagcataatcttaagttataggaaaaattttatcttcaatgtgttttatcaaaaacatacctccttaatgattattaacccacaattaaaagccgtaagtggaccatcctggctaacacggtgaaaccctgtctctactaaatatacaaaaaaattagccgggcatggtggcgggcacctgtagtcccagctactcgggaggctgaggcaggagaatggcatgaacccaggaggtggagcttgcagtgagccaagatcgtgccactgcactccagcctgggtgacagagagagactccatctcaaaaaaaaaaaaaaaaaaaagccctaagttaagtactctatgatgttatcgtcacatgcttttaaaattgtctgcatccttcccagcatgcaaactgcttttcttgttgttttgtcctcaagaagcaaactcatcaggacataggattggagcctggctgagtgactagtatgcacctgtttatagaggaagttcctggaaaacattcatgtttgtattatttaaaaattactgcaccagaaattaactcagagaatgaccactggtcatcatttcttatgattcagggtgtgtaggggaagggagcaggatgtttgatgccgtgttgtggccgcacactctgtggagactcgggaccctgagcttgccgggaaggctctgggctgggctgtgtccggcggcctctctctaactcctcggtgccctgcctcccatgccctgcagtcaggaactgctggacccaagactcgaacccactgcctctgaccttgagtcgggtactctcttcattttaccaaatgtagagcaacaacgtgtacattgaattaaaactttgatatccgaaacacggatagaattgcagagttcattggaagcttcgcatccgaaagacaaaatcgtgtaattttaggaacctgagtgcttgtaataaaacgactgcaatttattagctctgtggcctttaccaactcacgtgacctttccaaatctttttttttctttgtaaaccagagacaattacgccgtccaccttgtgagtctgctgtacagatgacctgagatgttcctatcaaagtgcttagctcaggctaggagctgaattctcctttcccggtcatttgagcacagccttgcccctagagccctcaggctcagagaccctcccccacatcccataattacttttagaaaaacacagagactcactcatgctttcgggcagcagggaaaagagaagattctggacctcttccctgacttcctacactgcctgaaggtaaaggcaacgaagttatgatgagaagcagctgaagttatgatgagaagcagctgaagttatgatgagaagcagccgcatcagacccagaacatctggcaattagaggccagtggctaatagctcaagccttgcagaggccaggaatgtggttacaaaagacggtgcacctgggcccagcgggagccttccagaaactgccgcacagccctccccagcaccctccttcctgagtgactgagttcccccaggcattccaaacacacctttcctgtctttgtgtttgctcagcctgtcttctcctcccctcatccttgttgcttgaaatatctccgtagctccccattgcccacagccggatccacggtgactaatctccgggaaggcgtccagcgtgagccgtgaggcctgcacctgcgccggacttcaccactcaccaggagtctctgcccgccgcccccagcgcggttctcttccctgctagacgtaaagtcctggggacaagcacagcccaggtgagctttgctccaccatccttacctta

SEQ ID NO: 22794 - DNA, 2300 bp, Homo sapien
ggccgcagcctgcgtcctgctgtgctgcccactcagagcatcaggggcggtgcacacccaggaaaccttgaaatgagacccagctcagagcatcaggggcggtgcacacccaggaaaccttgaaatgagacccggcgtgacctgccaaggttatatttccctcctcctcctttcccctcaccacagtgttgggagacagggggaacatctcagcaacagcacctcagccttcagcacacgctcagatgcatctgggacaaatgacttcagagagtttgttctggaaatgcagaagaccatcacagacctcagaacacaggtgaggtgcctggcggcctgtgtccccccactccaagattccacagcagcacagccctgcccgaaccttctgggtatagcattttattcccaggcaactgttcaactgcccacacaggacccagaccctggagccttgggggtgtcatttctgcacgctgggtcaggccgggccatgtgccactggtgtccctgggtttcccagcagatgggggtcaccaggcaggggcaatctgtgtcacggccgtgtgactgccagccaggtgaccttgctggagggaacacaggattaggatgctgtaggagagttcagacatgaagtcctgttcttaagcctcttattcaggaataactctgaatcatctctcccagggcgtggtaaggaggcacttccaggtcagccctccacaactgatccagcctctccgggtgtgaggaaagtcctggtgtctgtggtacgaccacagggattttcagacggggctcttctctggcgctctgtggaaatgagttctgtcctctccttcctatcccaggaacttacttctgctttcttcagtgcctgtggtgggggttatctctgggattttacgtaagggggtggagattgagacctatggctaaatagaaggaagtgcgctcactccgctggtgtggatgggattcccaaggtgcgcaggtcctggctgtctgcagcacatttaatctgtaagcacagctcctttcctactcacaggactcttagcccttaggtttgggagaaacttccatcatctcctagtgtagccccaaggtaacccccagccacagggagaggtaccctgactactcctgtgcctgccccctcatcccgtgcagctgcaggtcctcctgcctctgcagccttgagaccaggtgcaagtccccaggcagctgtcagagtggacgacatgtggcaggtcctcctgcctccgcaacctagagaccaggtgcaagtccccaggcagctgtcagagtggacagcatgccgcaggtcttcctccctccgcagcctagagaccaggtgtacatcccccaggcagctgtcagagtggacagcgtgtggcaggtcctcctccctccacagcctagagaccaggtgtacatcccccaggcagctgtcagagtggacagcgtgtggcaggtcctcctgcctccacaacctagagaccaggtgcaagtccccaggcagctgtcagagtggacagcgtgcggcaggtcttcctccttctgcagcctagagactaggtgtacatcgcctggcagctgtcagagtggacagcgtgcagcaggtcttcctccctccgcagcctagagaccaggtgcacatcccccagcagctgtcagagtggacagcgtgtggcaggtcttcctccttctgcagcctagagactaggtgtacatcgcctggcagctgtcagagtggacagcgtgtggcaggtcttcctccctccgcagcctagagaccaggtgcacatcccccggcagctgcccaagtggacagcatgcagtgttcactcagctccacctggcactaggagagaagcagagacaaacccaggctgacccttggggtccgtgctggggcctgggtgccctaggggggtccactggggaggggggtctgtgaaccccaaggtcattcagggcaggccttgtgcacaggtgaccctggacagcatagcagaggcagagggggaccagccaccccacctgtgtcggcaaataccaacgccctatgccctcccatgttgctgattctgtccacaatgctggacttccttccaccctcaggatgaacgggcagctccctgggtggcagcgctgggtctgagaaatgtggatgttccttgtgattttgcagctgctgacagcacagggtgtgtgccgtctgtggtcatttccctgcaccccatgtgtgcagaggtgttcgtgtatcttggtgactgcagaggcacacacag

SEQ ID NO: 22795 - DNA, 2300 bp, Homo sapien
agactaaatgctagtttacataaaattgtgtttattctacggtaagaccaatggccagtgaggacacagccctgtgtgcatcctgttcagtaagcaacaaaatctgtcttgatcctagggttcagttggtggtcactgatttgagttttgtagaaaagggcagtgagaattatagaatatatatatgttaaaaatcgagtagagctttgaatagcagttgaaacaggcatcatctgctgcgtagtcgagttctaagatgagattagctgattcgtagtagaagttgtgacatgttgcttataagcctatatttctaaggaattggaagaagtcgatgaaaatgtttgttcttgaacacataaacctaagttttttgccctatctttgcttagcagatattttctttatggcaaatatattttcaatatatagtagaatcaaatgttattctttaaaaatgtatatacttttaaaaatacacatgaacaataaactatatacatttagctatatatagtttattgttcatatgtttattttaaaaagattggaagggtatacattatgatgttacgtgtggttatccctgaatagttggaaaaggtgtggcttaaattttcttccttatcttttcttggcttttctaaatttgttataataaatgcgtttgtgtgtgtgtgtgtctcacatatataatagaaagtagggaaaatcctttaaagcattgtggagagatgcagcaaagaagtaaatattttctttgttaagtaaaattctaaataatgtaaaatagtgatagaaagaaagaactgtttttatatttgctgtattttttaccacgtgcagctttgttaggtagatttcagttttctctttattttttaggttgtatggctcgacactcaacatcgacctgtttccggcgctcgtggtggaggacctggtgcctggcagccggctgggccccaccctgatgtgtcttctcagcacacagttcaagcgcctgcgagatggggacaggtgagcacgtgcaccagaaaggggagcacgctcctaagccaccttcttagggactccagaggagaagagctgtcctggttgagactgagggaggcacgaggccctagtgtcttctgtgtgtccccggttgagaatgaggaaggcactgaggccctggtatcttctgtgcaccgccttgggcttacatgtccttgcagcctcaaaactcaaccacaccaggttcaatgatgcttttcccaccccttcatttataggaatatttctgttcctgtaaacctgttggacagtccatacagctaaaccactgtgggactttagaggagtttgggcttcgggcaagatctttgttttatctctagtctactgttattactttactttaatgtagtggaaaggcagaccctacctattacaaactatttcagcagacctgaaataactgccatgccagttttgttttgtttttttaaagttgcccatcgtctttgttgctagtcagaagagctaacactgtcgttctttttttttttttttttttttttttttgagacagagtcttgctctgtcacccaggctggagtgcagtggcgcgatctcgactcactgcaagctctgcctcccgggttcaccccattctcctgcctcatcctcccgagtagctgggactacaggtgcccaccaccacacccggctaattttttgtagttttagtagagatggggtttcactgtgttagccaggatggtctcgatctcctgacctcgtgatccgcccacctcggcctcccaaagtgctgggattacaggcgtgagccactgcacctggccaacactgtcatttttacaccagattgtctgcctttggttttgttatggggtaggggatgtgagcagtgtgtgagtccatttttaagtgacacctaatcaaacctagtggtttctgtattgctgtgaactaagcaggggagattttaactcagctcctagtgacctgtgagtctcctgcccttctctgatcctgctttcattttgggggatccaggttgtggtatgagaaccctggggtgttctccccggcccagctgactcagatcaagcagacgtcgctggccaggatcctatgcgacaacgcggacaacatcacccgggtgcagagcgacgtgttcagggtggcggagttccctcacggctacggcagctgtgacgagatccccagggtagacctccgggtgtggcaggactgctgtgaaggtgcgtgccaggggcaccatgtctgttcct

SEQ ID NO: 22796 - DNA, 2300 bp, Homo sapien
ttcattccagatggttttccaagaaaccgactcatggccttccgtaatcacagtgctgaggttgtgcccttggagactttgtcatacttttactccttactccaatttggctgtcagtgattattcttgttttttataatagctttatcgaggcattgttcccgtgccagacaattcaccccgttcaggtgtacagttaggtgggttttagggtgtctgcagggttgtgcagcctaaataatgaagaaagcagcgaaagcttattttgattttgtggtgatggggagccatgggagggtttacggaacgttgggatgatgtttatattctagaaggagctttctggcagccctcgggagagggaatcggggagtgtgtgagggaggcagggaggccgggtaaggcctgagtggtgagaacctctgtgaagccaagggctctagtgctgcagaggagagagaagaggaggcacggttcccagagtgacgggagcacagggagggctgggcagagccgccccagcctcctgacccgggctgtgcaatgctggggagacggaaggaggcaatcctggaggagcccttgctgacagccccaagttgggtcgagggccttggttttggttgccgggcagaatggcagcactgagcagagccatctccgctgcacacacacacacactcgtacccgtgcttgtgtccgccccactgcaggcactcacttgtacacacctgtgtgtggttgtgtttttcttctcgtgatgctcacagaatgtacatggagacagattcgcacactgaggtgacgaggcagagatggaagcctaggcctgcccttggtgtggttccctcatggctgctgaggggagccttagagaaggccgctccctgtgcgggcctggagctccggagcagccaccagggacgggagcctgggagccgtcagccctcgaggaaggcctgggagccgtcagccctcgggtggccctcggatggccctcggaagccatgtggagtcacgggcacgcaggaggcaggagaggccattctccccttgcccagggtggagggtgaagggcggggcagctgtggaggagggaggctgggagttgctccagctgtggtgtctgccacctgcctgtgcttttagaggcttattctttcagggacgctttagctacagagtactattttttgtcttttcttcagtgaaaatagcgacccgtggcgtatccactccgcacaggtgtttggctttcccagagggcctcgaggggacgccgaaggctgtcatttggggctgtctgcccaactctgagccagcctgtctctagggtgctcagaacatggcaccctgaggcatagacatcatgtagatccgcaccatagacggggctgtagagaagccagtctggcacttttgtgggggatgtttgtggctgaattacacctttgggcatctgtggtttccttttggacacagagaactcagcgtgtgttgtcatttattttcatgtcatggtttagactaaaaaggtttccattttctggttgggcacagaaaggccccggatcacctccgagccccaggacgcagatgtgacctcggggaacaccgtgtacttcacctgcagagccgaaggcaaccccaagcctgagatcatctggctgcgaaacaagtgagttggggccaaacagaaatgcccctgtgcatctctcggagttacactcagacacccaaaccacacctcactccccaccaaggcccacgtccacttttcctcctccacgtagggaaaagtacaaaggagaaactatttctgctccttttccggtcttacatggcagggggtgtgacgacgtttctgccaggctggggccccttccccactctctcctgggcagcacaggggtgccctggctgggcaacgcgtcactgcggcccttcccggtgggagggagggagagcatgctggttgttctctccctgcctgctgacgtctggcagcagcctgtttgctctggtcactgttgttggcagccttgacctggggcattgtgaccaacctgagtgggtgcgggaggggccctgacctctgctgggacggcgtcctcaggagcctggagcgccatgcagctgctgacacaggttcgctcagctcccgtgtggatctaacttgtctcccaaacaaaggaagtcttctcttgtgtccacaaacatgctgtggacctgttaaggctaagacggccctggctgcggctgtcagggtgacggagggaagtcctaccgctgaccattac

SEQ ID NO: 22797 - DNA, 2300 bp, Homo sapien
gggtgtgtagctagaatcatgctggagtaacggcttctggactgtgagctggccccattaaagtgtgtgtataggatcctgcaaaagtgatagcctctggagtgtgaatgggacccactgaggtgtgtggataggatactgcaggggtgatggtgtctgcagtgtgagctgcagccctggggcatgtggataggactctgcaaagagacagcatctgtggtgtgaatggcaccggtggaatgtgtagagaggatcctgcaaaagtgatgtcctctagagtgtgaactggacccactggagggtgtggacatcgtcctgcaggagagatggcatctagagtgtgaatggcacctccggagtgtgtggataggagcccgcaggagagagcacatgtagagcgtgaactggacccactgaaatgtgtggacaggattctgcagaagatacggcatccggagtgtgaaatgcaccactagtgtgtgtgcatagaatcctgcataagttttggcatctacagtgtgaactggagtcactggaatgtgtgaataggatcttgcaggagagatgtctgcagtgtgagctggacccacttctgtgtgtggatagtatcctgcaggagagatgttgtctgcagtgtgagctgggcccaccggagtgtgtgaataggatcctgcaggagaaatggaatccggagtgtgagctgcatccgctgtagagggtggataaaatcctgcaggaaagatggcatctggaatgtcagcgggagccaccgacctctgaggatgcaccccgcaggtgtgatgcggggccagttccaaggctgggttaggttttaccctggcttctgtgttgtactctcattctcttcctctttcttctaatacctgctctgggaggcatcaggccatgtccagtgtgcaggccatggagacccacacggcaaggaactggaaccccctgccagcagcctcgggggtccagtccttagatggtgccctgtggtcagcaatgcacctgtgacctccgggctatgtctcgtggtagttgcttttgtgttttaacatagcaacaggaaactagcctattacccaccaatcccattccaggctgctttcaaacgcagctcaggctagaacaccagcacggggacacagctgagacttggggtttgcgacgggaacacgcccatgctgtgcctctgaatctggcaccgtcaccctgtggcctgggttcagcaacttggcctcaccttccttgtctgtgaaattcagactgggtccttgtgagatgattggagagaatgtatgaactatgtgagaacgccacctttgtgcgtatctcacgcagtgtcttccctcctttccaaagtcttctgctgtctctagacacacccgacgtggggggggggggttccctgggtctcctcctaggtctgtcccaggagggcacgcactgaaggccgcgagaatcccgggggctgcattgcgccgcgccaaggactccacacaggacctttcattttcccaactgtgctgagccaggcggccggcagagagcaggtggctgacaggccccggggagccggaccgcctgggtctaatcttcccgcagactcccttgctgtgcgctttggggcttgggcctcagtttcctcaaaaggaatgaggggcttttttggaacgttaaataatttcctacgtggttgcgggtagggagaaggagaaagagaggagcgcgcctgcgcgcctggaatcgtgcccggatcagagcaagcgctctaaaagtgttacaaacattaaggcgccaactaaaaaacccgtagtgagcgcaggcagaaaccacgggtaagagaagtggagaagcttcgcgtaggccccagggtcccgagccccgagtctcgagcgcagaatcaggggtgccaatgctctcctccgcgcccccgagcgctcgccttggccatgcgggccgccccaccgggatgagggcgctcaggccggacgctggggccccgggttctcgccccgccccgccctcggggattcagaggggccgggaggagcctcgcgcatgtgcacagctggcgccccccgccccccgcgcacagctgggacgtgggccgcggccgggcgggcgcagtcgggagccggccgtggtggctccgtgcgtccgagcgtccgtccgcgccgtcggccatggccaagcgctccaggggccccgggcgccgctgcctgttggcgctcgtgctgttctgcgcctgggggacgctggccgtggtggcccagaagccgggcgcagggtgt

SEQ ID NO: 22798 - DNA, 2300 bp, Homo sapien
gagatatatgtgatttcagtctgcagagcttggctaggattcccaatagagatgcctaataaacccagtattgaggaacacacgtgcacctttctgcaaggtgtctgccatctttgtgtgggttgggtctgtttcctggagagcgcagggtgtgtccactgtcagcccctcttccccagggatgctcctgcgtgctcagcaggcacttggctgccacaggatggcgagggctggccctgggaccacatggatctgagggtggaggcagaagtgtggcctacagcctgtgtccttcgagagggtccccttccttcctccagggacaggatggctgttgtggtagcaaactcaccctgaggtggtctccgagtgtcaggggctgaggtgcaggacccggatatctgggtccctggcagtcagaagccaccgcctcatggctgctgctgtgtccacggtgaaaccctcctctcctgtgaaggagccactgcctcaccagggctgctgtgtccacagtgaaaccctcctctcctggagggtttctctttctcaggagcagctgcttgctgctgaggactgagtgtaatcctagcagaagggaaatgtttagttttgtttctccttttgcttgcctctcaggagcctcggttgttaacgttatcactgctgtggcttggctgtgtctcctgaagggatatgttgatggcctggcccctacacctgtgaaagggaccttattgcacctcgttttctttttaacatgtgaaccataactcttctgcaaatgtgagcttttgccctaagctcctcaaatggcatcgacacgtgggaggaaaagatcctcaatgaggagacacctgtcctgctgcacagccctgtggcagcttggcctccccaggcagacccagcaggggcacccagctggtggtgctggctgttatagtcgtggtggttgtggtagtgagggctgttgctgctgttgtcagagctgtggctgtgaggctgttgttgctgtggttgtggctgcaaccttcattgtcatagatatagctgtggcagctgtagttgtagccttctctccacttggggcactcaggtccaccctatctggctcagggcttcggctccggggtcctggaggagggagcaggcagtgggctggagtgggtgtggttgacgctggagggcagcctctgagcagctcccccaggacggaagcgaaggctgcaggcggggcttgggtcaggctcctgggagaagcagtgacgaggctgggtgcctgcaggaagaccctcagctggctgcatgttcagccctgcaggtgggtcgtgctcctgggaggagcagcgatgaggctgagtgcctgtaggaagacccgtggctggccgcatgttcagccctgcaggtgggtcaggctcctggcacgagcagcgatgaggctgggtccctgtaggaagatccgtggctggaggcgtgttcagccctgcactgccagtggtggcggccctcgtcccgtgtggtcaaatttacatttatatttactgaaatctaacaatttttaaaagttctctgtcacaggagccaaacttcaagagctgagtagtctcaggtgtccagtgaccattacgtggcacagtgttggcctgggcctcgccgtccctggcacgacccatgggatgaggccgcgcctccccccccagcggggccgccgggcagaggtgatgtgggatgctcagtgactttttagggaacgtgccaagccctctccatgggggttggggaacgtttttagtttggattctaaacagagagtgattcttgctatggaacaaatttaaataatagctaataaagcagactagacttactaaacatattcctatgcttaggagcctgcattaagcattttagatacatgaccccaaccaattcttccaacaatctgtaatgtagattcagtttggtattttctccacgtctctctagggttaggtaattttgtgcccagcagagcagggcggtgctctgtcctctgggaaatactgccttcctggaatgttccctccaacccagagtgctgagaaggctggcaggatagaggccagaacatgtctgacgtcagcgccagcctggacggagagctcggatcccagagaaggctgagcacagggaggagaggggcatgggcctctgcatttgagctgctctcgtcctgaagtttgtgccctgggccctgtgagaactcaggggccagcctgtgacaccccggccaggccatgcgagggtggcgccgggacgccgcc

SEQ ID NO: 22799 - DNA, 2300 bp, Homo sapien
gagactctgtctcaaaaaaaaaaaaaaaaaggaagatggatccaaatcctaagaaatgaactgtggatgtgagccctgagcagagcatggagctgtagctccaatgcccaggaaaggagggattgctcccctccctccagggctcgggaagggcctgcaaatgaacccctatgtttctaaaatttggaaggagaagacgagggggagcgactttttgttaggttcaaatctgggccctaaagaagggatcacaagtgcagataaaggtgaaagtcaggatctaaaatcacagagctccttctctgtgcccagcattgtatgtatcatgttatcacttccagttttcacagccgatgatgcaggtatttctgccccaaaatacagacaaggaagccgaagcacagacactcgggccaggtctgcacagcctatacatagcatcgcctcttccttctctcccttggcgcaatacctggaagtggccgctcagatccttctcacaaatagtcattctgtagagaatctccactctggggtccatagcaagtactggctttccatcctatgttataagccaaaaagggaagttttaaatactgaacaagttctaattccattgctcctagagttctagtgcttagttggtgggtagggaaacgttcccttgttttcatcaagcatgaaaagtagcaagaagtaagcagtataaaggttccagccatgcattaagatgctacagtgagaacagggtgctgcggggggccctggactcctgggggtgttcagtgctgaaggggaagctaggtcctgctgtgctagggatggaacagaggccctgggctacggcgtgtggaagagaggaccccgtggggcacaggtgccgagctgcccaccaagtgagtgggggcaggtaaagaccacacccctccaagcacaggcttctcacaggtgccctgggctagtgccccagaagagaccacagggcctcttctcaccaacagacatggctttcagatgagagctcctgagccccagagcaggcattctaggagtctagagcagccctgtgccaaggccaaggcttcctggaggccaccgcattgtcggagccaaatcttgttgcagatttgttctgtttggtttagttttgcccccagcccaggcctccatggtggcccagagctgtccctggctcccaagtccacagggagtgactcagggacagggcagggggcagggcctacaggagctcggcctctgtggtggagtcaggggctcggcttcccccacagcaatcctacatctggggagatgggatcctgggtaggactccgtaattctccctgggtaagacactttaattctccctgggtaggataccgtaattctccctaggaaggacaccatagtaattctccctgggtaggataccgcagtaactctccctgggtaggactccgtaattctccctgggtaagacactttaattctccctgggtaggatatcgtaattctccctaggaaggacaccgtaattctccctgggtaggacatcatagtaattctccctgggtaggataccgtagtaactctccctgggtaggataccgtaattccccccttggttcctcttttcttcattcatgcattgaatgacccgctctgtgcaaggcgtcgggctaggaattggggaaccgcagaggaacactcgcatggtttacactcccaggcatcgcctctcagaggagcctgtagaggagagaaccgtgtgagcctgcagcggccgcactgtgaggacagccaggcccaggcttcttgcaggatgcagaggccacgcagctgggaacgagccacagacaaggcagggacatcggccagcccgaaggatggcggcaagggttgcagggagagcccagcgaggatggcggggcctacgagtcgcgtggaagaactcgggtccccctgaggaagcggagagcctcggatgatgctaaagcgctggcctggaggtgttcccagcccgggggccggtactagcaccgcgcgcctggaagcggaagcgcctggaagcggaagcgcctggaagcggaagcgcctggaagcggaagcgcctggaagcggaagcgcctggaagcggaagctggacagacgaggagaggccttgggtgtgacatcaacggaacctgagggaagcaaaactcagcaaggacgcacccggtctgctggactggggctttgggttggtgacgtggacgatgagtctaattttggggcatccgcgcagttgtgcagcggtcagt

SEQ ID NO: 22800 - DNA, 2300 bp, Homo sapien
ccagagtcccatcattcatccacgaagttgattggaccccgccggactctccactctgacctccacctcctggcccagccccgctctatgctccagcctttggggtttgcttttgttttagttttctgagcccctggtgttcttacatatgttcatgtctttcgcagattgttttaattgggatgtattgaaatgctttgtttccctcccagacatcctttacatatctgtgaaagctcatcagcagcctcacctcttcctgaaagccttgctagcacccgtgcatgcctgccctctgtgtacaggacatagagccctctgcacgttttcattatgggatttatcacacttcatcctttcattccgcaaatgcctattgagtgtctatgacatgccaggtgtttggtgcatggtgtacacaggagtgagaggttctaaaatggtatttgtgacttgtctaaatcccttgttagagcataaagccttggtgtgaagatctgtgccactcatctctgaactccagcatagcccatgacccaaaatagaggagttgcccaaatagtacacactggtcagggtcatgactgaatgatcattcactaccccagatccaaagccaagctagtcaaggtgtgcaggagcccccctgcagaataatgggccagtgagagaggccacacctctcaccctgcagaataatgggccagtgagagaggccacacatctcaccctgcagaataatgggccaatgagagaggccacacatctcgttctgcataaatggagtatttgcctgcggtagtttgcctctatgtctcccctaacccacctatttttttgtagtatatatattatttctacaacaaaagtgaatttgtaatgtagctttgaaaatcattctttctcaatgagaacacttggaaacaggatggggaaaatcacacactggggcctgtcgtggggtcggggaagcggggagggatagcattaggagatatatctaatgtaatataccaacatggcacacatatacatatgtaacaaacctgcatgttgtgcacatgtaccctggaacttaaagtataataataataaaaaaaagaaaatcgttgtttctcaaggaaagattgtgagcttctgctgtaaggaagggtctcatccaagcctgggccaatttcagcgtgatttagtggtgattaccgctaacactgaagttgttttctggaatgctggcgtgggactaataacatctaagactgaggaagttctgcagaactttgaatgatgcagttgctttcatacaacattgacaagccctagggctcatcttgtttcaggaggttatcaagtctaaagatataatttaatccataaaatatacaaatccaaatatatccaaagctctttcacgacatagacatttttatattttacataaatatatatgtaaatataatgtgattaaaataaatcttgcttcagatgtatattatacatagtatatatttggtaaaatgtttcataaatttgtattgtcaattacatgttatacacattatgcaaaccaatctcatgaattttcgtaggatctctggaattataggaacgaggaactaggagacttggactaaatgtgaatggtaactagacaaatgtgagcggtatttatttgcactatcacttcattaacagatttcagcacacttcggggaacatgtatgttatgtctctctggtgtttgtgctgatgacattcatgataagcctttaagtaccttgatcaaggcccccattggtctgattttaaaagacagtaacacagatattttttttctctctctcccctgccttctctatttttttaattagtgtatatggttgtcccttggcgaaaaaaagaaaaacacaagataaacagccccaggaacctgctcctaaacgaaagccatttgccgtgaaagcagacagctcctcagtggatgagtgtgacgacagtgatgggactgaggacatggatgagaaggaggaggatgagggggaggagtactccgaggacaatgatgagccaggggatgaggacgaggaggacgaggagggggaccgggaggaggaggaggagatcgaggaggaggatgaggacgatgacgaggatggagaagatgtggaggatgaagaagaggaagaggaggaggaggaggaggaggaagaggaagaagaaaacggtaatctttaaaatattagcaaagtaacaagtcgtgatttgggtccactgttcaaggtgaattgccggctgttactacg

SEQ ID NO: 22801 - DNA, 2300 bp, Homo sapien
ctggatgaccatgaaacatttgatgagatgaatttcacgtcaacctgcctgaccttggtagtcccagattagactcatcaatcaaacaatagcatctactctaaatactcaggttcctggtgttgggtttgcatttgcacgtctctgcaaaatggtgacaaacaaggggcccgtcggtgtggtcctgctgatagcatgacagctactgttacacagtaatgcctttgagattgctgtccatgtgaagatgccaaacacgcagtcagcaagtgttagaactgggactccctcactttaaacaagggcaccgagaggcagaaaactgcaatcatttgtttcaagtcatctccgaattctctagagagctacctaggaggaaggtcttctcaatgcagggctccttcatagggactttatgtcattgtctaggttgactatgtgtggaaaatctcacttagaaaattaaaaaagacaaaaaataaaaataaaaaatgaaaaaatgtttaatattaggtaaaaatatcctcctggaaagtaatggaaaaatgaagtttccctgtgtcatgggtcatttttaatattttggagagttagtcagaaacttatagcacatgtgcaacctagctgatataaccaaaccaggcagagtaaagtctctctgactcttggaagagaccaaaataatcagtaaaatgattttgtaatcatcctcctgaccgtgcccttagttaaaaatctaagagcaggtgccaagagggactctaatgcaagccaaaaaattggaggccatgttgttataagggcccaagccacatgctccccagtcaaaggaggaagggaaagagactcgatcttgtaggaggaaggacgagatgtgtgaaaatcgtttactgattttttattgatagaggccgtttttgcaatgctgactgcccaatcagcaagcctcacacttcagttatgcctttgaggctaaaatacatgattcaatttgcacatgttggattttgaaaatgtaaagcatgaaatttacactatcattgactctactactccttacacaacttctgcatctaatccttggaatgttgatatttaccatttggaatatgtatcttaggcttagtgtattttctaactaattccacatttaatatacatatattgaaatgttaggtaataaaaatgagatgttacctgttgtctcacaaatttgcctttccactcttactaacccctaggatcagatactgttttgatcattaactttaaaactagatgaacaggtggctttgcccatttgtaaacaggtgtgttaacttgtccctggagagcagatacatcatttcttggctggcaccatggatgtggatctcttaggaaaaaggattgtttttgagctaatataatcccaggaacagcatattagctaaaaaaacacttgggcagcaaaactatctccattcttgttctcaggactgtgaaaagaattgcaaaacatcttggaagattcagaatacaaattcagtggaaaatttcacatgttaattcagtaccaaatgtgccacattaaacaaaggacgagtaagaaattgatctgaaatttatctgagcaaattattaagattttatttcctattatatacaagaacctagcatcaaccaacccttctcactttatataatctcagaattccatttttaagcaaagacatgtggctttttgatgcctgagctacttaaatttccatactctgagagactataaaatgctaattctaacctaacttgtcttttacagggagtaatggcaaaattcttaattctaaataggcaggtatatgcaatcaggtctgactcaagggaaatgtggcaaatagtcattggaattgtctgaaatacatgaccagtttctaatttgaattctcctctcctccttgttttgatgtttctgcagccaatggtgagccggtggataaccaggttggcagcccctttcagctgtctgcactggggcaggactgcttatgtcacagagaaggcagagacaagtgaatatgacacaggggatcttcctgtttgcttggaaggttggccctcagtcaataacctagggcttcaccatgccaaatccaaaatgttctgttgttgatctctggtatcaacagctcagaaactgcagaacagacccctgacagttaccaacactttcctccaaacagcattctgtttactgtttcatgtattctcaggtaagcaaaggcttgctgcgttggaactctgcataatggaaggggaca

SEQ ID NO: 22802 - DNA, 2300 bp, Homo sapien
tttttttccgccgactgtaaatgactcctattctttgctccacagaacatccgatgtggtgcccaatcagctgaaaaagctgcacagacgtcattagttccgtgtgtgtgtgtgtgtgtgtgtgtgcaagagagagagagaaagagagagaggagactgcagctgccttgccgcgtgccgagtggagtctccattagggcagcgctattgatttctgattcacactgcagcaacagggctagagctcagaagaaaaaaaaatcacgtctcagaaacaggaattacaaagacaaaaataagtagatagatagttttatacaaaaatcaagcatctgttaccaaaggaaagcaaaactgacaatttagcaaaatttaaagactgtttataacatagaataagatgtataggagaagtagagtaaaatgagtttagaaaaattattcgttctaatttttcaaccatttttttgagaggtgataatggtctaatttccagaatgccttgaaaaaccctggaatactcggcagaggtgctgcaaagtaaagcttatttgagggcaatcttgaagctatgcctgagaattttaaacaacaaaatatccaagatttattttttcaattgtgttcgattattttattagctagtagctttctctgttttaattctctgtgttgcataatatctaggatacagtaacaggctggttgcaaatgctcgaaacagaaataggtttcttcataggctgtgtttcagcatgtccaactgtgagcctgtgaagcagagcatcggagttctctcgaggtctgttgcttcagatttggttagaaattattgaatctggagtgtaaaaatcttgtctgggccttttaggcagcttgattttaaaactagcccttctgccccaagacttatcaaccgcccccccaccctgtcccaaaagaaaagctgaagtaagttcagtgttaaaataatggtgctgtcaggcaggcagtctgcatgtgagcagcagaaaattagaagaatagaaccatccattctcgtttccccccgcgacatgcacgcacacatacgtgcacacacacacacacaccacacacacacacacagacaacaccagtcagtgaagggggaaaagggtgatacctttttaaaaaatgaaaggcagtaagccattattagcaagagctatattgagcatgcttgccagacaagcagcaaagctgagctccagttccgcccagacatgtgccttgccattttcattttaatcagcctgctcaggatggctgctgattcattttgcaggatgtccccctgggagccaaggtggaagcctgaggcgagctgctattgcatcaatgcagcacatcagagcgagagcgcggaggcagagggaggagagaaagccttcagcaccgcatcccgatttcaatatggctagttagaaggtcctgcatgaaaccgagtctattgcagaaaacataatgaaaggaaaggaaaagaaaaaagtcacattgtcatttcattatccaactattctctcccccaaccccttcttgccaccaacagacacacacacgtacacattttacagtgaccatgaaagatttcaagccactctgtggaagtgtgtgtgtgtgtgtgtgtgtgtgtgtgtgtgtgtactatttacctggtaactagctggggtggtatacctgatttagctggagactttgatttgtaggactgacaaccttattatgcagtgagtttattattgatattattctgctctcggttgccatggccaccttgtgagagacattcaattttctctcttccatcatcattatctatgaggccatctgttgtggaaaatgaattcagcctcatttgcatgactgataagcaatttttttttttatctatttaacagaaggtcatatgccggggatttggagcttgtgaaaaaaaaatgtggaaaaaaaaaaaagcctaggagaggatgagtgggagcgtgtgcatgggggtgtgtggaagtcaaacagatccctgaggcctgcgagcctatcgcgctgcatttgtcattcctgcccgggcgacattttttttttccctaagctactgcacactaaacagtgagagagcttttccctgcagtcttgttgaagcaccccgggttttttgctcattgttggtgggtgcattttaattttttcattccctggactatgggttatgatatccatactcactgaagacaaaaagccaccttttctgcgtcttggtggcatgcatgtgtctcatcatcctttca

SEQ ID NO: 22803 - DNA, 2300 bp, Homo sapien
cactcacccacacacactcccactcccacacactcccacacacacacacacacagtcactcccactcacacacacacacactcccactcacacactcactcccacacactcacacactctcactcactcccactcacacactcacacacactcacacactcactcccactcacttgccctcatggagacattttattagaggaagacataagataaaaatctataagtaaactacatattagatggtagtaagtattaagggaccattttctacaaggaaaggggataagaagtgtggccaacagtggctttactggaagctgacatttgaatgaagacctcacaaagatgggagagtttgctgggctcatcactgagggcaggatgtgcagcaggttcaaaggtcctgagtcagaacgtgctggtgtgtgtggggaggcagtgttgctgcagggaggtgagagccagcagtgacaggtgaaggcagaaagtgttgggaggctgggtcatatagggctctcgggcattttaaggactttggcttttaccccaatgagatggacagggtggtgacttgatttgacttttgttttattaggtgtcttattcagagtcattgatactgtctcagtggcttagtaaaaaaagtctcttttttgctcacatgtcacagtctgataagaggccccctggatgggcctcctcccagccagtgcaggaatccaggctgcctgaggccggaatcagaggcctcagaataactgcagccagagaagagagatgggtcggggagcactctctgccttggactagaagtggcacatcgcttctgtgcgaggtccgttggcgagaacgtcacgtgcccaggctcactgtgagggcggctgggagcaccattgtcgcgtgtccagatgaggagacgatgtgttgcacacagcattgtctgccatatcaggaacgtgctggctgctgtctggggaaggggaggggacaaggcataagcgggaaaacgaattctccatgcgaagcaggtctcctctgcctcccgccgccctaccgtcaggagctgagagaacctcctggcccctaagatttctcttgagacctaacaccaaggccacagcaagtgcccctgcatcgtgccccaacagcgccaaccgcaacccactgtgaaagggccaggtgggtgtctctgaggatcccattttgcaaacgaagaaactggagctccagggtgtcactggcgaatgacaggcacaaccaggacccaaactgatgcccgactgactcttcccatcaccatagagtgttgcagacactagtggcgtggcagggccgccgtcgatggctcttcagtgtgcagcagaagacacggccgaggtatgtgtttctcagaaggcaaaggcatgcatttcagggatatcttaagattatatcttcctagtttttttttcagtataacatgcactttttcatgaaatgattatgatggtggatacaattttttaatgctcttatttagtgataaaattcactggcaacaccacgtagcttctcagttacaaacaacaacaactcacgtaacaaatacttactgagagcccgtgatgtgccaggtgcaattctagactctggtttcataatgaccccagcactgctgcctgcggcttggggcctcctccttgtctgagctcttgtaaatagggagtgctgatagtaggcagattatgtaggtttgactggctttctgagaacaaaattctgtggtcagatagaaatatatgaatgttgttttggatgataaaagcggtcttccaagaggagtcgggttccagctacctgactgattttagatttggggaacttcagggaagcccaggtcgcattgtgttccttttgcaccagctcatttctgtggctgcagggctggggagagtctgttcctgacatgtggggacattcatgtagtgccatttatcccattatcaatggtcattttattcaatccatgggtcccgccagtcactgggtgtaatagaagcacaattccttctgaatggagggttcctcccttactttagggttctagaatgggggaaagaattagagaccccacccttcaccaagcaggtcgcagggcagagagagcatgggcttggaagaggggcagacctctggatgatttggggtgccctgtactcctgtggaactcacgtctttgaacttcagtttagttgtgtgttaaacggaaacaataatgttagatttgttatgcaaaattagctgctataaaagccctt

SEQ ID NO: 22804 - DNA, 2300 bp, Homo sapien
catttattcattggtggacacctgggttgattccatatcttggatattgtggataatgctgtaggcaacatgagagagtgcaggtatctctttgatatagtgatttcaattcctttcgatataaaacaagtagtgagattgccaaatcatatggtagctttatttttatttatttttgttgttgttgttgatacggagtctcactctgttggtctcactctgtttcccaggctagagtgcagtggtgcgatctcggttcactgcaacctctgcctccctggttcaagtgattttcctgcctcagcctcccaagtagctgggattacaggcacgtactaccacgcctggctaatttttgtatttttagtagagatggggtctcaccatgttggccaagctggtctcaaattcctaacctcaagtgatccacctgccttggcctctcaaagtgtagggattacaggcataagccactgcacccatctatttttaattttttgagggacttaccaaactgtttttcataatgtctgtacttatttatattttcatcaacaaagtacaaggttctcttttctccacatcttcatctatacttgttacctttttaaaaaataaggtcttgctcttttgcccaggctggagtgcagtgacacaatcatagctcactgcagcctcaaactcctgggctcatgtgatcctcccacctcagccttcttagtagctggggctacaggcatgtgccactgcccctggttaagtagttttacagacgccaggggtggggcaggggcccattgggttgctcatgctggtcttggactcctgagctacttattgtgttagactgaggatctttaatatcccatcctgtttccaggcttctgaacctcaacgtgtcctgaattgaactcactcaaacccacttgtctttctgtgtttccctcctaaaggatgacaccaccatccatgtggctatctaggccatcctgaacttcaaaatcatctttcatctgggatcttcttctcaaattccaaaattcagtcacaggcctcattcattccagaaccctgataactcctgagtccattcatttctctttaaactcaccaacgttacttgaattaaagactgaactatgtattttgagggttctagatactgccttcccaccagcacgtgtttccagtcttcccacttcccaggccacccatcagcctgttgccaaagtgatctttctcacataagcatttgagcaaaactttctagacatccaatcacagaattctccagacaaagttgtaaacttagcaactgacataggcatttaatggggcttcacaatataggatgggtacatgagtaaatgaatgaagtaactgtttttctaaatttactttatatacataaaaatattatctacctttgaacgttgaatcaatcattggctcaacactttgatggcatagagggggagatcagaaaatatttttaatttcttatttagaaagttaaaaaaatatgccctgggttgtatggttatgtaactcaacccttgaaatgtaaaaattttgtctgtatgcacaattaattttaaaagtaaaggaatatatattcatagcctaatctatgtttttatcacgtgcatggcctcataaaaaaaaatatatatatctcagagtgtctttttttttctttttaaaatttggaaattagtaacgtgctgtttggaatctttgtataatgaaattcattgtcatatgaaccatgcatgcttaatttctcttagtttctctattttgggataattaatgtactgagtttttcaaaagacaggtgaaacatgtattttcctcaaagcctggatactcttgggttgtggaggaattttcagggactgccctgccatagagggtctgtttgtcttattcttcttaggccaaattgtatgtgaaatggagagacaaatgttttattgctaatttcagtatgcactcattggtgagcacattttctcctaatggccaccctcagtgctgcaaaatgtcactgagattgtgcagtgaaagccttagaattaaccactcatattaattataggttctactgatgaattcatttaactttgacctgggaagaaaagtcataaattcacatccatgaacaggaggagaagaaggggaactgctatagagactgtgagttatttatttatttatttttctcagcactttttagctctgcaaacacaatcttgccaggattattttcaggttatttgtctagagtccagaggaaa

SEQ ID NO: 22805 - DNA, 2300 bp, Homo sapien
aaaagatgctcggctttactcacgagagaatgcagattaaaacaccaagacatcatttctctgtatgatattagcaacagtgcatatgttgctgaggctgcctggaaacgtgtgctcacctgtgttggtgctgagtgcggatgggcaccactcaacaccagacagaggcgtggcccactctcagaattacaaatgctttgatgtttaatccaccagtccccactctgcagattgtatgctgtagatacaccttgcacacataaaaataaaagatgaccaggtttttaatatcagagaactggaaactatactgggacctgaagcggccgtggaataaacagcgttagagtgacagaccccataagtacccacagaccagaaggtgctctgggcactgttaagtggaaaaaggaaagtacctgattcatgttacagcaggctgccttttgtgtcaaagaggataaataaaaattcacaaacagtgaagtattactctattacactgggaatggggagaggatgctgtgggtgggaacagggcggtaatgagacttgctggggtgtgcgtctttgtatgctatctttttatcttttatatatatatattatatatatttttttgagatggagttttgctcttgttgctcaggctggagtgcagtggtgccatctcggctcactgcaacctctgcgtcctgggttcaaacaattctcttgcctcagcctccggagtagctgggactacaaggtgcccaacaccacgcccggctactttttttgtatttttagtagaggcagggtttcaccatgttggccaggctggtctccgactcccgacctcatgtgatccacccgcctcggcctcccaaagtgctgggattacaggtgtgagccactgtgcccagcctgtatgctatcttaaaaaaaaaaattgttttaagacagtttcgctcttgttggccaggctggagtgcaatggtgcgatctcaactgaccgcaacctccgcctcctgggttcaagcaattctcctgcctcagcctcccgagtagctgggattacaggcatgcaccaccatgcccagctaattttgtatttttagtagagatggggtttctccatgttgatcaagctggtcgcgaactcctgacctcaggtgatctgcctgccttggcctgccaaagtgctgggattacaggcatgagccaccgtgcccagccaaaaagattttctttcatctttttttttttcttttgagacacggtcttgctctgtcacctaggctggagtacagtggcgctgtcaaagcttactgcagcctccacctcctgagctcaagtgatactccagcctcagcctcctgagtagctgggactacaagtgtgtgccaccattcccagctaatttttatttttgttagagctggggtctcactacgttgtccaggcgggtcttcaacttctgggctcaagcaattctccagcctcggcctcccaacacgctggggttagagccatgagccactgtgcctagcctttttatatgttaccttgatctttgaatcatgttgtaatacctgttaataaatatttgataaaaaatattcgaaaggtctgccttcaaagagggcaggtaaagggcatcggtgctgtgggactctgaccagcagaaaccccagtggccaggtggacacatgcttagctgaggtgttcagatcccaccccagtctttgcagctcccatctgctctgtgaaactctgtgacatggcacagtgtgtgtatctgagattcgtataatatgtagtgtgctccttttaggtagacaacatgctttaacctaacattttgaaacccagaagaaaattgatggggatcacatttaggaactgaatggatcccccaaaattcatgtcaaacccctaatccctggcgtggccatttggagaggggcctctaaggaggtactggggttaaggttataagggtggggaggccctgacccgatgggatgggtgtccctataaggagagaccccagagtgctcgtgctccctcctgcctgcaggggcactctcccgggacagaccacgcaccagcctctgcgagccaggaaggagcctctgcagaaacggaaccagcgggaaccttgacctgagacttgcagcctccagaactgggagaaaatagatttctgttgtttcaagcccccgagcctgtggtattttgtcccagcagcctgagcaggctgaaatggtaggttgggatgcttggtaaagaaaaaaaggaaattcttgttaagggtg

SEQ ID NO: 22806 - DNA, 2300 bp, Homo sapien
cagatgcgtctttcacacggaatcaggcacagtggccttctgtgacatgtgtttataaaaaatggttaagtatataataaattgaacatctttgagattggagaattatgtgagatttccacattatgtttactgggttcaatactgtccttgcttgttttattgcaggcaagcaaggcaaatggcctaaaatgctgtggcttatattttgataagaaatcaaaaaaccattggttaaaagatgcaactcagaagtctggaagtattctgaaagcatccatttaccgtccagttgacaggtttgagtctcctgcttgtataggtgacttgtgcccatgggtacattaaaggaacatgctgcccagggcctgggcggacagctcagtgggcaggatgtgtgctgggtctcagccccatgtgcctgcttgctgggcagttagtatagggcaaagcctgcctgcggcgaccctggctgctaggccattctctaggaacagctgcgactcataaagaccaagaagcataaataaactttcaaaaatttatttggctctttcgttaaaaactgtgcaaattaaaaaaaaaaaaaaaaaagtaagacaccggctgggcacagtggctcacttctgtaatcctagcactttgggaggccaaggcgggcagatcacttgaggtcaggagtttgagaccagcttggccaacatgacgaaaccctgtctctactaaaattacaaaaattatccaggtgtggtggcacgggcttgtagtcccagctacttgggaggctgaggcacaagaatcacttgaacccaggcggcagaggttgcagtgagccaagattgcaccactgcactccatcctgggcaacagagtgagactctgtctcaaaaaaaaaaaaaagtagtaaaagtttgacatgattatttatttagttttaaacctttttattataaaaacatacaggaagtgacacaaaacaaatgtatagcttattgaatgattatgattgtaaggtgaataacctttgtgtccaccacctggtgaagaaatagtactttgccagataccccaggaggctctcccaagtgcccctccagccacagccctcttcttctccccctccttgccccaacaagtaatcctgacttttacagaaatgactttcttggttttttgatggcagtttagtcttgtctgcttttttttgtttatttttttatctacttcagtgtccatttgcagtcccgtcggcctcactgttttccctgccgtttatctgttgaagagcctgggctgtttgtcccatggcttcccacagtgtagattttgctgaccacgtggtcatggtgtagttcagcatggtcctctatgtttcctgcacattggcagctgggtccagaggcttgatgagcctcaaatttgatccctttggcaggagaacaggcggttaggagctttcctcaggaaagtaccatgttgacggcagctgatgctcagtgccaagatccattaattatttggggttgcaaaatggtggtattctcattctgtcgttttgcttgcctttattagctggaatggttttctaagaaagtgttttcttttttatacttatctggttacccagtggtacagttcatataggaagggcaggataaatgcttgattctttgctcttgtacactaagtttttaagataatgcattagttgtctgtcaaggaaggtgagtggtgaagggtttttacatatatacaagaattcatgggctgggcatggtgtcttatgcctgtaatcccagcactttgggaggctgaggctggaggatcacatgaacccaggagtttgagactagtctgggcaacatagtgacaccctgtctctacagaaaattaaaataaaatcaggtgggtgtggtagtgcctgcctgttgtcccagctattctggaggctgagatgggaggatcgcttgggcccaggaggtcgaggatgcgtgagctgtgaccatgccaccacattccagcctgggcgacagcaagtccttgtcttaaaaaaaaaaaagaatttgtggagttaagcatacttggtgggtttcaatccgttgtgatttttatctttatttagctcagactagcttattcggtcagtgagagggagcctcttcagcttggctcttgctttcttttgataagtgtgcacatgtgtgcatacatgtgtgcacagaccacacgcacagtcattgatagctccctgcagcctggcatgtcaagatgctctaggcccaatttatagagcttctgct

SEQ ID NO: 22807 - DNA, 2300 bp, Homo sapien
acttctcgggctcaagcaattctcccacctcagcctcccgagtagctgggattacaggtgtgcgccaccatgcccagctaatttttgtattttagtagagatggagtttcatcatgttggccaggctggacaagtatttttttaaaaaaagacaaggaattatggcataaaaggctgaatggaacaggagagctgagtcctggcttatccctaatactgtaagtaatatgaaccactatttgtaactgctttcagtctgttccctaatttgtaaaatgaaaacaatcacacgaggttccctacatgcctagagggtagctatatagatcaaatgccatctggcatatgaaagcctttgaataggttaaaatgtcacactgatatgagaggtgactaccttctgaaacttccgggcttgcagatttcctgacaaaggcccaggcctcatcctctgtggcaaacttcttaaatctggcagcaggaaaccggtccacctgtgctctgcactcattcctggaaaagatgtgcaatgttatttccttcttccttctctaacttatccccttttttattgagattcttaaggttggaaatacagttgtcccttggtatctgagggagactgattccaggaagtcctccaccccatcacagataccaacatcagaggatgcttaagtcctttgcataaaatggtgtatttgcaaataacccacacacatcttcttgcatgctttaaatcatctctagtttataatacctaatacaatctatatagttgtattgtctttttatgcgtattttaaaactgtattctattttaattttttccaaatatttttgatctatggttagctgaaactgaggatgcaaactggatatagaggaccaatttttgcgtgaaaagggcagagtcgcaccttatagttttatcctgcacgtcagactctacacctgtgttctactgtatgccagccagccagcacaccagcaccataaggctttcgtcaaactcaaagcataacaaaatactgcggtctttgaaaaaaatattaaccatttctttacaacaaaaaggtcaacttctgagatgcttcttcctcaatactgtagctgccgtgcatggggaaacacaggtaacgaactttggtatcttgtagtgggaagagttctggtggtacagtcagaacagctgggctcaagtcctttctctgtcagttacatgccctgggaacttcctgaccccaagaactatacctgaaagtgagaataatccctctcacctccaagggttgttacaaggatccaactgcaaatactggcttattagaatttgccttttttaaaagggaagattaggtactgagttccaatcccaatttagctggtacggaaagtcttctggtaacgggggttcgttctgattacgtgtcactttttgttgcactttaactgcaacaaagatggaggattaaacacagggtttattaggccacccctaacctttacgcgacgtttctgatatttcaaacaagtcttcggtgcgttccagtcccaggccatgagcctcctggaaccccgccggccgagcaggaaaacgaggcggtcccccgaccacccacagccacagcgcgcggcacagactcggaccgccaggctcccgccgccggggttagccgggctccggcctccctcgaccccgatgccggcagggaggcgcctcggcgggcgggccactcaccaggtcagaaagaccccggtcttgcggcccctcctcacggcatagaacatcccgaacccgcgagagccgcggcggcagggcaaggcggccaaggcgactctgtgggccaggaacagaagccagctcatcgctcactcccggcaccgggaagcatttcgactcccggcccagcgtgggcgcgagccgccggcgctcaacaccgcacttccgtcaccggcgcgggaagatgacgcacgtctgggcggagtcctgatgagggccggggcctagggaggggcggtgtcgtagggcggagcccggagctcggcccctgacgagcccgaactcgtcaacttcctgtcggtacttgaagaagcggagccagggctgagatcccgaaggcgggcgaggtctgggatggggcggggcctatgggagcggggctgaagccctgggcccggcagaggaaggtcgagatggaccatgttgggccccttctctccccgcccccaggccgcagttcgggggccacgccccggcgtgctcgggtcaccgcgggaagcccttgaaccccctggcg

SEQ ID NO: 22808 - DNA, 2300 bp, Homo sapien
atgtggatgatcctgcaagcgtcctcaggtaattccaacctaggacttctcagggaagatgagtccttgtgatacaggaccagccagtgggcacagaaaagcaagcccttggtaggtcaaccctcagatatgctgacgaggtgggggcagctgtcaggtcatcctgagagccttcccgggcatctctgggcttcctcagatatctacacaagggtaggatgatcagtcataaatggactttagggacagctgtgtgtgtctttttattttaaaataagaatccgtcttgaagtgcaataggtaggaatgaggaatgaaagctatggccaatttaaattaaaattaggaaagctgaaatgtttaaaattgatgttctttggccaggcacagtggctaatgcctgtaatcctagcactttgggaggctgaggcaggcggatcacttgaggtcaggagttcgcaaccagccgggccaacatggtgaaactctgtttctactaaaaatacataaaaattagccaggcgtgatggcgggcgcctgtaatcccagctacttgggaggctgaggcaggagaaatgcttgaacccgggaggtggaggttgcagtgagccccaatcgtgcatcgtgccactgcactccagcctgggcgacacagcaagactctgtttaaaaaaaaaaaaaaaaaaaaaaaaagatgttcttcgatttcacagaggaacacaacttaccacgccaatgtacgcgtcgcttttgcctgggccgttccttcttcctagaatgtcctgcttctttctctttgtctaactcatgtgaatgaactttttaaaaaattagtatccttcaaaactgtatttgctcaggcgttctgatgtgaggccctcctgactctccaggtgcgggtgcttctctgctctgtgtctctcacctccaacagcttgttctgcctgcgcactatttgctgatgtgttatctccggggattctcgaatttctcaccttcatccccaaggcctgacaaaatacatggcaggtgtgcaaaaggcttgttagaagaccttaagaaaattaaagaaaagtggtttaaaaataattcgaataacaatgtttgccaatggagactttttttttttttttgagacggaatcacgctctgtcgcccagatgcaacctccacctctcgagttcgagcgcctctcctgcttcagcctcctgagtagctgggattacaggcgcaggcgaccacgcccggctaatttttgtatttttagtagagacagggtttcatcatattggccaggatggtctcgatctcctgacctggtgatccacccgccttggcctcccaaagtgctgagattacaggcgtaagccaccacgcccctccaacccatgaacacttttaaaattacttgatttgcttacagagcaaaaggtcaaatggggagaattctaaaagttaccttctcaactcagttttctcccgggtcgtggtgcttgaggcactggatatcccctggttaaacacccacgtgcagtggagcagggaggggacgcgccccttcgggggtgggcgcccaaggcaaggggaggaatgcggcttccacggcctcccctctcgccctcctttgtgcttattctaattcatgaattctaacatctttctgcccactaaaaaatgtgcattcattcatctggccacagcccttactgtagatccgcatccctggagctctcgaggagccgcggttaccgcacgtgggtgccgggcgccagggggttcaagggcttcccgcggtgacccgagcacgccggggcgtggcccccgaactgcggcctgggggcggggagagaaggggcccaacatggtccatctcgaccttcctctgccgggcccagggcttcagccccgctcccataggccccgccccatcccagacctcgcccgccttcgggatctcagccctggctccgcttcttcaagtaccgacaggaagttgacgagttcgggctcgtcaggggccgagctccgggctccgccctacgacaccgcccctccctaggccccggccctcatcaggactccgcccagacgtgcgtcatcttcccgcgccggtgacggaagtgcggtgttgagcgccggcggctcgcgcccacgctgggccgggagtcgaaatgcttcccggtgccgggagtgagcgatgagctggcttctgttcctggcccacagagtcgccttggccgccttgccctgccgccgcggctctcgcgggttcgggatgttctatgccgtgaggaggggcc

SEQ ID NO: 22809 - DNA, 2300 bp, Homo sapien
ctctatcaacttctatcaggttctaggttttaaaaatcacatttcttaggatctcatgaggctcaaagctaaagagttagaaaggaaaagcatttatgtatattaacagcacattaacagctaaaaagaaaaactcacataatcatattagttcatagaaacaatgcatttgacatactccaacatccattcatgattttattttattttttatttatatattttttttgagatggagtctcgctgtcacccaggctggagtgcaatggctcgatctcggctcactgcaggctccgcccccggcggttcacgccattctcctgcctcagcctcccgagtagctgggactacaggcgcccgccacctcgcccagctaattttttgtatttttagtagagacggggtttcaccgtgttagccaggatggtctcgatctcctgacctcgtgatccacccgcctcggcctcccaaagtgctgggattacaggcgtgagccaccgtgcccggcccatgattttaaaaaaacctctcagaaatagaaacagagggaacttcctgaatttgattaaaaatacctgcaaaatcctagagctaatattatacttaatggtgaaagactgaatggttttcccctaagatggagaacaaggcacggatgtccttgctcaccactcctattcaacaaaggactggaaaccagaaataactttaattttttttgttctcaagtgataggttcacagagaaaaagctttactggatgaacttttagattactacttttatagagcagcagagataaaagccaggtcgaaaagtgcatgtggagtaaggaaatggacctagttcgacaaaagggctcagaacgactgcccagatgagattgtagacgcagctgtagtttactttctatctggaagaaacttcaagttatccttaattttccaaggagacagtcacttaccttttaaaaaacattattagagaagcaccgggcgggagcatatctagcattaaaaatgtgggatgaataccatctctgcttggtaaaggtggttgggaatcctgagagagggcacctagtgtggcttctgcatttttcacagtgcctggaccacggctgaaagtaactcttgcatgacatttgacagaagaggaaaccgaagctcagattaaattccctgtccacagcgggatcattcggcacgagttcctccctgtctggaatgctcttccccagcaatagatcctgcggctcttccgtgtctcagtctaatgtcattccgttccaggattcccgacttcttaaagcataaataatccctccccaccctctcattgtactgttatgtaagttattacaatatgtcattatatatttagtcatactgctttaggtaatgtcttctccactgaactgtaagctccatgagggcaagagttcagtcggttttacttaataattagcacctagtacagtactagcatagaatgaaggcctcgcaattttttttaaatttatttttagacagggtcttgcgctgtcgcccaggctggagtgcagtggtgcaacctcggctcacggcagcctcgacctttcggctccagcgatcctcccgcgtcggcctccggggtagctgggactgcaggcgcgcaccaccatgactggctaatttttttttttttttttttgtagacatggggtctcgccatgttgcccaggctggttcctgagctcaagtgatcctcctgcctcggcctcccaaagtgctgggattacaggcgtgagcctcagcgcccagccaagttagccttttttaaacgtcctgtctccggaggttgccgaagttggttttcttcggcctccttctctctcccaggcccagggctgggacgaggccggttcccgcctgcaacctgcactgaagacgggaaccttgggagccggtaccggaacgctcggaaacggcaccaaagtacgaatcctagggcggaaaagcgttaccaagacactcgtccccagagccgcttcctgggactctctagcctcctaccgcttctcagtgatgttccggtttccgccctcctcctcgcgctgtttccgcctcttgccttcggacgccggattttgacgtgctctcgcgagatttgggtctcttcctaagccggcgctcggcaaggtaggttggcggcctgctctccgacagaacttttcttcttgggttgaggaaaacgccttttggagtcaggccctggaggggcgagccttgctcacagggtggggatacagccgattaccc

SEQ ID NO: 22810 - DNA, 2300 bp, Homo sapien
tttgagatggagtctcgctctgtcgcccaggctgaagttcagtggcgggatctcggctcactgcaagctccacctcccgggttcacgcgattctcctgcctcagcctcccgagtagctgggactacaggcgcccaccaccacgcccagctaattttttgtattttttagtacagacggggtttcaccgtgtcagccaggatggtctcgatctcctgacctcgtgatccgcctgcctcagcctcccaaagtgctgggattacaggagtgagccacagggcccggcctgtaacaggtttcttagtttgatcatctatgtaagcaacccactagacttgtggaaatttaaatatgggaaatcattttcataactcaaaacacagcagtctgtcactttacagacttcttgtttcgactcttaattaaagaacgtactttatctttctttttaaaacttattttttctattttttgtagacagggtcttaccatgttgcccaggctggtctctacagtgatccacccgcctccacctccccgtgctgggattacaggcctaagccacggcgctctgcctgtactttatctttctacccaattggattcataaaaggattgttttcatgactccaactaccaatgcagtctaaatacaagcaattttagcaaaattcacaaacagaaacgtgctgcaacagtagaacagatacctgagcgataaagacgacatgcttcccactgaactttttctccaattcgcgtactagccggacttggattttctggaaagatttcagttgaggaacgggaacaaagattatgatagctttccgaccaccaccaacttcaatttcctaaagaaaaaaacaaaaatccactgtgttaactgcttcagaaagtaaacgttgtggtcaaattagaggataagaagaccttatcactaacaccgtagctgcactacaaactaatactagttttgagttaatcataaatgcatccttcggaaatgttctcatctctctccaaccttcacatttccttattccaggaagggagactgttcaggccaggaggccaatcactaccacttctgcacccccacttgcggcaactccgggctaagggtagagagaatctcatcctgagctccccacagctctttgccgtatctataactaagtaagggcaaataaggtccgaaatgggcccaggccctccctactccacgtttctccaccgcccgcatgtggacagcttaagccgcagggtacctgcaaccccactccccgcacctgggcggtatcactcccaaacaacacggccgaacctgagttcaggttaggcggccaggcggcaagtcatcatcaaccgtaacccaggtccaaccctctcaggcactgcgcggggagacgcgccgcaacctccctcccagccgagggagcgccagcttaccttagctgccgtaatattcagctccctgagctgagccttgaggtccgagttcatctccagctccagaagagcctaagaagcaacgaacagcaggaccgaccctgagcgcgcgtccgagcaccccgggcccaacacacgcgcggccgcctcccctcccgggcggggcgcctccccccaccccagaccccagggaaaccctctcacctgggagatgccggactcgaactcgtccggcttctcgccattgggcttcacgatcttggcgctcgaactgaacatggctttctcctgggagaactgaaggcacagcggtcagcgttacgcggcccgggctgcaggcgccgctggctcgccctcccgcccgcaccccccggccaggccccgctcgccccgcagaagccatcggaaagcacagggcgggtaatcggctgtatccccaccctgtgagcaaggctcgcccctccagggcctgactccaaaaggcgttttcctcaacccaagaagaaaagttctgtcggagagcaggccgccaacctaccttgccgagcgccggcttaggaagagacccaaatctcgcgagagcacgtcaaaatccggcgtccgaaggcaagaggcggaaacagcgcgaggaggagggcggaaaccggaacatcactgagaagcggtaggaggctagagagtcccaggaagcggctctggggacgagtgtcttggtaacgcttttccgccctaggattcgtactttggtgccgtttccgagcgttccggtaccggctcccaaggttcccgtcttcagtgcaggttgcaggcgggaaccggcctcgtcccagccctgggcctgggagagaga

SEQ ID NO: 22811 - DNA, 2300 bp, Homo sapien
gggtttccctggggtctggggtggggggaggcgccccgcccgggaggggaggcggccgcgcgtgtgttgggcccggggtgctcggacgcgcgctcagggtcggtcctgctgttcgttgcttcttaggctcttctggagctggagatgaactcggacctcaaggctcagctcagggagctgaatattacggcagctaaggtaagctggcgctccctcggctgggagggaggttgcggcgcgtctccccgcgcagtgcctgagagggttggacctgggttacggttgatgatgacttgccgcctggccgcctaacctgaactcaggttcggccgtgttgtttgggagtgataccgcccaggtgcggggagtggggttgcaggtaccctgcggcttaagctgtccacatgcgggcggtggagaaacgtggagtagggagggcctgggcccatttcggaccttatttgcccttacttagttatagatacggcaaagagctgtggggagctcaggatgagattctctctacccttagcccggagttgccgcaagtgggggtgcagaagtggtagtgattggcctcctggcctgaacagtctcccttcctggaataaggaaatgtgaaggttggagagagatgagaacatttccgaaggatgcatttatgattaactcaaaactagtattagtttgtagtgcagctacggtgttagtgataaggtcttcttatcctctaatttgaccacaacgtttactttctgaagcagttaacacagtggatttttgtttttttctttaggaaattgaagttggtggtggtcggaaagctatcataatctttgttcccgttcctcaactgaaatctttccagaaaatccaagtccggctagtacgcgaattggagaaaaagttcagtgggaagcatgtcgtctttatcgctcaggtatctgttctactgttgcagcacgtttctgtttgtgaattttgctaaaattgcttgtatttagactgcattggtagttggagtcatgaaaacaatccttttatgaatccaattgggtagaaagataaagtacaggcagagcgccgtggcttaggcctgtaatcccagcacggggaggtggaggcgggtggatcactgtagagaccagcctgggcaacatggtaagaccctgtctacaaaaaatagaaaaaataagttttaaaaagaaagataaagtacgttctttaattaagagtcgaaacaagaagtctgtaaagtgacagactgctgtgttttgagttatgaaaatgatttcccatatttaaatttccacaagtctagtgggttgcttacatagatgatcaaactaagaaacctgttacaggccgggccctgtggctcactcctgtaatcccagcactttgggaggctgaggcaggcggatcacgaggtcaggagatcgagaccatcctggctgacacggtgaaaccccgtctgtactaaaaaatacaaaaaattagctgggcgtggtggtgggcgcctgtagtcccagctactcgggaggctgaggcaggagaatcgcgtgaacccgggaggtggagcttgcagtgagccgagatcccgccactgaacttcagcctgggcgacagagcgagactccatctcaaaaaaagaagaaacctgttacagttcggatgggggattggtgcaaactgaagtctatggggaatgaagtgccaggattgatctggaataaaagtagtattctgggtcataggcatggggaaaggcgtatctgggagattttgtccactggcgtattagtagaggctgtggattctgaatgatttattcaagaatcaggaagtaactccatagaagggtttgctcagtcaattgttcgtctaagttgtttagccttctcgaactttgaacttaccctgccattcttcttgcttttaaagcagtatggcagttacagctttttgtcaatttaaagtcttttttcattttgttacatgataatttttaccttacagaggagaattctgcctaagccaactcgaaaaagccgtacaaaaaataagcaaaagcgtcccaggaggtgagtattttagtagtttcagaaatgtgtgtacccctcttattaacaactcttaatttgtttaagttgtagtttatgaaaacagatgttcaagtgggaatttttgagtagcagcatttggtttcctgtatagttgcacatgatacgttttagaattctagatgtaaaacatacatgtattcatgtagccattgtttgcctactaggtcagtgctg

SEQ ID NO: 22812 - DNA, 2300 bp, Homo sapien
actctgcctttaaaagtttttcaaagtactaagccatagaattcaagttctagaaaagctggcacctacctttccacataccacagctcgacacaataacacattaccagactcccaacactgtgttctagtggttttcagaacaagaccgagttaaaaaaaaaacattcttagcactactagtactagctgcaatcagcaaattatcccagccttggatcagtttcctcatccactgagagtaacaatacaaattaaacatgttagagggcacaggcaacactaggattttttttttcttcaactcatccttagggaagagtccacagggatttaatagttcacatttgtaaaacaacatactaatcagagactaacaaaataccaaaagatctagttcaagaagacaactaccaatatttgagtttatgccagataacctgtaagtcaatcaagttcataaatcattttccatcagcatcttcaactgcagtgatattttaacctgtgatgttatcaccaaaatccacctacatttttttacctccaatccacagcaaaaataaaaatcaaagataaatccaagcccatgtcaactgtgtctagcatgctatatcacagaattaaagtaatgatttccttctcatcattcctatcctgtgcacaaataatcggaggaaatcatctcatcttgtgacagcactgacctagtaggcaaacaatggctacatgaatacatgtatgttttacatctagaattctaaaacgtatcatgtgcaactatacaggaaaccaaatgctgctactcaaaaattcccacttgaacatctgttttcataaactacaacttaaacaaattaagagttgttaataagaggggtacacacatttctgaaactactaaaatactcacctcctgggacgcttttgcttattttttgtacggctttttcgagttggcttaggcagaattctcctctgtaaggtaaaaattatcatgtaacaaaatgaaaaaagactttaaattgacaaaaagctgtaactgccatactgctttaaaagcaagaagaatggcagggtaagttcaaagttcgagaaggctaaacaacttagacgaacaattgactgagcaaacccttctatggagttacttcctgattcttgaataaatcattcagaatccacagcctctactaatacgccagtggacaaaatctcccagatacgcctttccccatgcctatgacccagaatactacttttattccagatcaatcctggcacttcattccccatagacttcagtttgcaccaatcccccatccgaactgtaacaggtttcttctttttttgagatggagtctcgctctgtcgcccaggctgaagttcagtggcgggatctcggctcactgcaagctccacctcccgggttcacgcgattctcctgcctcagcctcccgagtagctgggactacaggcgcccaccaccacgcccagctaattttttgtattttttagtacagacggggtttcaccgtgtcagccaggatggtctcgatctcctgacctcgtgatccgcctgcctcagcctcccaaagtgctgggattacaggagtgagccacagggcccggcctgtaacaggtttcttagtttgatcatctatgtaagcaacccactagacttgtggaaatttaaatatgggaaatcattttcataactcaaaacacagcagtctgtcactttacagacttcttgtttcgactcttaattaaagaacgtactttatctttctttttaaaacttattttttctattttttgtagacagggtcttaccatgttgcccaggctggtctctacagtgatccacccgcctccacctccccgtgctgggattacaggcctaagccacggcgctctgcctgtactttatctttctacccaattggattcataaaaggattgttttcatgactccaactaccaatgcagtctaaatacaagcaattttagcaaaattcacaaacagaaacgtgctgcaacagtagaacagatacctgagcgataaagacgacatgcttcccactgaactttttctccaattcgcgtactagccggacttggattttctggaaagatttcagttgaggaacgggaacaaagattatgatagctttccgaccaccaccaacttcaatttcctaaagaaaaaaacaaaaatccactgtgttaactgcttcagaaagtaaacgttgtggtcaaattagaggataagaagaccttatcactaacaccgtagc

SEQ ID NO: 22813 - DNA, 2300 bp, Homo sapien
tgttttgttagatttacacctaagtattccttttttaaagcaattgtaaatgatattattttgaattttggtgtctatgagttcattgttattttatagaaatctgcttggtttttcattgtttattatttttttgagacagagtctcgctctgtcacccaggctggagtgcaatggcacaacctcaactcactgcaccctctgcctcccggagtcaagtgattctcctgcgtcagcctcccgagtagctgggattgcaggcatgtaccaccatgcctggctgatttttgtatttttagtagagatggggttttgccttgttggccaggctggtctctaactcctgacctcaggtgatcctcccaccttggcctcccgaagtgctgggattacaggtgtgagccaccacgcctggcctacttggttttttaaatgtttgccttgtatcctgtcacctgtcacactgatttaatagtttccaggagctcttttgtagactctgggattttctaagtagacaaccatgtcatctgcaacaagggacagagttattttatttttcgaatctacatgctgtttatttccttttcgggccctgctggtgtgcctagaactttagcactgcattgagtaagaggtaagagtggacacccttgccttgtcttgatctcaggaaggaaacattccatttttgcccatgaagtatgatgttagctgtggctttgcctttgacagatgctctttatcaagttgaggaaggtcccctgcacctatttttctgagagtttttatcatgaaaggtgttggtttatgccaaatgctgtttctatataaattgagatattcatttgattttctttgttagcttgttaatgggtttttatcaaaggagctttgaatattgacatagcctcacattcctggatgaaaccccatttggtcatagttgataaatctttttctatattgctgaattctgtctgttaatattttattaaggattttctcatctatattcatgagggttattggtctatagtgtttttgttctgtctttgtctggttttggtatcagggtaataatcaactttataaaatgaattggtaaatattccctcctcttctattttctggaagaggatgtgtagaattggtgttaatttttctttaaacgttttgtagaccctcctgtgaaaccatctggccctgaaatgtctttctggggagcgtttaaattgcaagttcaattcccttccttggcatagggctgttgaattatctgtttcatgctgggcatgttgtagttcgtgttttcaagaagtggttcattttgtctaagttgtcaaatttatgtataacttcaataatacgttttaaataaagaatccattatttttccttaattttattatgtgtgtggaatttgtgtttttacagttttattttatgatttctcagtctaaataaatattcacctttgaacctagcttcttatgattgtaattttatatgtatctttttcttaaagaaggttccgctatcccccaaaacatgcaagattcgggctgcatagaagctggatctgtccagcccctgactaacatttgtttctggcattaaatgaaacttgcctttaaatgaaacttaaatgcgtagagtgagtttccggactcacgtgtggccaggtctccacaggccgtggtcaagctcttgctgacttttgaagcgaaatcccatatgaacaaaggaaaggagatcagtcagctgccctcgtttctgtctgattggtgccaggtgatgagcgtccctcctctttatgctcttttgaatttccacagtagtcatgcttattttttcaaaaaacgaaaagaaagaagagaaagccaaaaaagaaacaaaattgggatgttcgggttggagagttagcaggggcatctccaggagggtcctgccccccaccccaaagccggcctcagggagttccaggcgttcccacactccccaggcaggacggtggacgcagcgcagacaggaagctccccgagataacgctgcggccgggcggcctgatttgctgggctgtctgatggcccgggccgaggcttctccctgcgcctgggactgcggccgcctctctaaatagcagccatgaggcgcctgggggcagtgtcctcgcgggccagcgacgggcaggacgccccgttcgcctagcgcgtgctcaggtaggagactctgcccggggctgcagctgagggtttcacggggctatgacagtgcagaggggaggcaggcaggcttcc

SEQ ID NO: 22814 - DNA, 2300 bp, Homo sapien
ggtcgggaggagcccgtccaggcagccagcacctccatcatcgcaggctgatctccttgcctcctgggagcccagggaggccggggatggcggcattattctgagggtgctccagccctttccatgagaatcctcatgtcttggcaggaccaaggcaggagggttgaagcccctacggagctccgagaacagcctcacgtctggctcaggccactgctctgggaccacctctctgccagctcttgttctcctcccgccccacagatgggtccacaggacgtctgctgtgccacgatggaaagttctgtagctgtgcagcccagcctgtcgcctctgccgcatgtggctgttgggcactagaaacttacctcataagacagagcatccaaacttttaacttcactaaattaagttgattttagcgttagagaagtattgaatttagcatagctagtggctgccacgtcggatggggcagctagctggcagagccctgtgctcaacctctggccatggcccagcagccccagcatcgccctggagcttggagaaatctcaagcctcaggccgtatctcaaatctgcagcgtcagaatctgcactttaaccagctcgtaggtgatttggaagcacattagattgtaggagccagctcggtgtggagggcagaggtcagggtgtggagggcaggggtcagggtgtggagggcagaggtcagggtgtggagggcaggggtcagggtgccttcttccatggctttatcggtgccacagcctaggcttagcgaaaccacgaggataaaaataggcccttctgttctccgcaccgtgagctttgtgactgatccgaggcggcgagcgggggcactgcactgctgtggcggggaagtcacggctgacaagaactgccagggacgaagccacgtgcattaattcattaaaatacagtcagctatggaaggcagcataggatgtggtttcgttcttaaagaatttcatctggatgggcagacagatgtgtaaacatggactcaaaggccgggcgagctgagatcagacaacaggcgctggacgcatcctaactacggctgggtggcggggctgagagacgggctggggttgggggtggggttctcagttggaggtggccttgagccggcctttcaaatggctttgctttcctctgggaaagctggagttcaggaggagaaggccggtcaggccctggggaaagaaaacccaggaaggaaaaaggagcgtgtgggtgatggatctccctgggacgcaggttgtctttctggagccccaagggcccctgtgcgcgccatctgctgtgctgggttctggttccagctcagtccctccctgcgcaggtgacctcgggtggctttcctgccttcaaggccccagctgattcatctgcagagtggatagcttgccccgcagggtggctgtggtgaagcaaggcaacgtctgttactgcatgtcgaagccgggctcagctgtttctttctgcatggaaagttcttctgcagacagtggggcctttgaaggcaggcggcacgtgttgttttgtatgccacaggcctagcatccacttggcaaggtgccctttcttaagcatctgtgggcttctttaaattccatgaaaattttgtgtgtatttactttttctggggctgaggggctctagccaaaccctcccaagggcccctgtcttctctagtaggtcaggacccactgctgggtgtgctcagtgttttctgagttaatgatgattagtgaataggtgacgtctagagataaaactttaagtcaggttactggccggaccaggaaggtgggggtttcaggcccaggccagtggccggaggcagctttgttagggacagggaagggccctgggaccagcagggaccatgtctggcttcgggccttgtgcgagggtcttgcagaggcctgcttggcttctccggggaggggctgctccccctgttacttccacctctctgcaacccttgtgacatcatacaggcacagccaatctctgcaaagttctgtctctacctcaggcccctatacattctctctgagctggcactcaagcaccgtgggaccttggctggcttctggggagcaagagatccatttatgaatacttgatttctgactgctgggtgagctggagtgtggtttataaataccttgctatctttaaggtgggctttgccaaaagaatagggtgacagagatgaatttcagtcatgcaacgaaccctcgacacttggaaggtgacagaggg

SEQ ID NO: 22815 - DNA, 2300 bp, Homo sapien
ttatttcctgctaggtagctgcctacttttcagcactagatggcaccttaagtccaggattgcttcatttgtagtaagcaatcaaattactgcccatcagaataggggaggtcccagggagcatattctagtggtgtgggaaggttagctaggtgtttgtctctaggggacctgtggaacaaacctcctacaacatggtgttgctgaacagcaactctgatttggtgtttcctctggctgagttacagggtttgcagggctggggatgtctcaccctcagtgtgaagcctccaccttatggatcatgagaatgggtcactgtggccccaatatctcaaggtaggaccctgtcccatgagtcagggctgggtcaaataaaggagcccccgcctctcaaccacactcacccagggcttagcctcagtaacaggcatataggggcaggatgagaagccctgatgtcctgcctctcctgggaagacagccctgcaaccatgggctgcacttgtttgcagtctccactttgctgatctgggagagggtgtgcaggtgaggtcttggttcaaataccgcagactctcactgttcttactgaattttagcagatattcttgaatagatgttgctgaattttccgtatgcccttaggaccatttccagagacctgaagtgttttcccatccctcaacccccctaaattttaccagctccactgaggaacaggacagcaaagctctcctgctgtcatgccagaagtggttctctggaaccttattttagatgcaatgtttctctggttatgatgctttaaagtgagacatgaaaatggaaagatctaaacacgtttactaatattaattactcactgaaataatctattctaaaaacagtgcaagaaaatgaatgagcaaagcttacaagagagtcagaccttttccccacttgttaatttaacatacactgtggaataactactttgagctacagactgagcattggccataaaatcattttcctgacaatgtgtagggcagaaccaacagagtgtatgcttcatgaagaaagggctgtgagtccagattgtcatttttgtacacctgacacttagcacagcatggggaacacaggagaagctccataactatttgttgttagatttgacagagtccttgtccttatgaagtgaataacccagtgggagacagataagaaaaataactttggaaagaggccgaggtgggcagatcacctgaggtcaggagttcaagaccagcctggccaacatggggaaaccttgtctctactaaaaatacaaaaattagccaggtgtggtggcgggtgcctgtaatcccggctagttgggaggctgaggcagcagaatcgcctgaacccgggaggcggaggttgcagtgagccgagatcgtgccactgcattccagcctgggcaaccagagtgagactctgtctcaaaaagaaaacaaaagaaaaaaaacaaaaaactgcaaaatagtgatacatacaacaaaagtattttggtagagccataaacatttctatttgactatttctgatccaccaaaatagcaactttatatgtccaacccaatttgtacaggattcacgagttgagggagggtctaaaatagtttctgagtggaagccctgcttttctgggttgaatatgaagggtccctaagcacatgaaagctctttcctaattggtcagcattgatggcctgaagaggagagatgggcaatgcctgcatgcagatttcatgtcccagctcttactggcatctttaattgctccatgaggattccacctgggatccaggtgtaaagggaaaggaagctggggaaacctggctgatgttacagggacacactgggtgggaatgggttggtttaaatgagatgtactcagaggatgaagagtcatttctgggattccttggcagctgtgactaaaagcaagtttggatattaactctgtaaagaagaatcttattttttaaaatgtgaaatcgacttcactttcaacagacgaatatcttctatgccattaaagccaattataatatttaatgaactagaatggcagtgatattactctcataacccggctcctgctgaatgactccctctaggatattttctagggttttatgccaatgaagtttttggttttatttgttgtaaatagcaagacttccattgttttaccaaaaaattttcagatcactcattttcactaaatttgtaaaataaaaacatatagggcatgttttagtacaatattt

SEQ ID NO: 22816 - DNA, 2300 bp, Homo sapien
ctgtccccaccgactgcctccctggcatcccaggcaaagcccagcctgaggcagtccctggttcttcagttggaaaacacaaaatcattccacacaacaggaaactagctcaaagatttactacttacagatgcagacgggagggtgtaagaaattggagggcagtcctccgtcccccggtcacgtgcaatgggatgagagtcaggcagagagagtgagtgggaaccagcagtatgtttacatatatatgtgggtgggtgtgggtgtgggtgtgtgtgtgtaagggaatagcgtgtgggaatgatttacatacttttaagttcttgggcaaaggcctgaatggtccatttaaaggaagactgggttgggcgcagtggctcacacctgtagtcccagcactttgggagcctgaggaggtcagatcacttgagtccagaagattgagaccagcctgggcaatatggcaaagccccatctctacaaaagaaatacaatttttaaaaaaagctgggtgtggtggtgcgtacctgtagtcccagctactgggtagtctgaggtggaagaatcacttgagcctgggaaacggaggttacagtgagccaagatctcatccctgcactccagcctggatgacagggtgagactttgtctaaaaaggaagcctgggcaggaaagcagaagctctacttgctgggtgagaaatgcctctaaattctgaatcttgagccaccagcttgagccactttggtgtggtgtacaactagaaactgtgtcaagaatgaccgagacttacttctggtctgcgaaagttaaactggtattcaaaatagatgctgaggccacacaaaattataagaatttactacaatctgataatgcagacaatgatttgtttccataaatgttaatctgtctatccatctacgtaatacacacatgccgtgtgcaatccgggacaagtaatattctgaaatgaaatccatttaattgtgagcatgctataacctccagaatgtgaacacatatttgtcttttaacctctggagctcagcacctacccagctgcagaagggagctcagagtgtgtttcctgattgaaaaatatttaacaaactatggcagcctctcagagggccgtcagcagtcaacttctggttctgtgtggtgagtgaaactgtgtggtgtttgctgggttcatcctggcatgctgtgacttgggtcttcttcgttgtgatggttcatgaaatgcttcatcatttgcagagaccatatgtcgtcctggtggcttctggggactctcttagactccaactttgcaaaagtagatccaaaacacccagtagtgatcaacccatccttgattataatttcagtcgatagatttaagacaagcagctcttaccatccatgcttctgtcccccagtgactaagagcaacccacctacggccatggagcttggaacaccgtggtaagtcctaacctgcccttgccgccccgggattctgagtggggcttacatgtggagatttcccatgggaagtttagatctcgggctgcccacctacctgcaagatgacaggaggctctttgactcctttccaaaagaagaaataatatatgatatcaatacatctgtgtccatctagatagatatctagcaaacttctttataaaatagcttctaaagaaaagcaatccgaactagttttatcaagtgcagaatgctgggaaacacaggtcattcgcaaagctatctgggatggagtaactttcacaaaaaagggaaagaaaataaaaaaaaaaagagagagagagagagagcagatcacgatagagggagagatggacaccacacccagcaccgtgtagctgcctcatgctccatccaagccaggggtgccaataccacatccccttcataaagatgaagagactcgtcctcaggggggcggaatctgatggaggttaccgaggcagcgaattactgacctaagattctaactccaatcttctgattccaaagcctttgttacttgctccaccccacaactgcctcacaagcatcccagagtccagtcagcagacagcagaagagactgtcagcagaccaccttggaggggatgcttggagctgcctaacgtgtgattcaaagatgaattccatgtgtttggagaagaagccctagcctcaacacaaaggttggccacattccagccaaggtagcacggagtgaaggcccgtggagggagagctgggcttttctgaactacttcagtacaccttgctgtgccttggcc

SEQ ID NO: 22817 - DNA, 2300 bp, Homo sapien
gaccccaaaagcaaatgcaacaaaaacaaaaataaataaatgagacctaattaaaccaaaagcttctgcacagcaaaagaaaaaaatcagcagacagcccaggagtggaagacctcacgctatgtgaagccacaggggctgcacgtggaaacagcaggagcagcagggccatgggaggccgctttacagtaataagagggcgtggtgccctggttcccatgggatgtcatgactggatttttttgaataattctgcaggctggcagagagctgaagccctctatacaggggcaagcagggcgcaaacctgaccctatttgtgagaagagtggcttgagtagggggcggaaccactgaagcaaactgaggcgagggacttgcggtcaggccaggggaggccctcctggtttccccagatggccctggttttagcttttacaccacaatcagactagttatgaaatcctcatgaaaaatcagctgcgtttccacacatggactacagcatttagaaaataccactgttaaaatacgaaagcatgcacaagcagaaggatgccaccagtagattcaaaccttttggaaaaaaaatgagcctttattcaaagtaattaagtaagactcaaatcaatgtagaaatgtattagattcatggattgaaggactccttgtaaaaacttcaactcttcccaaaccttgtttcaagaattcagtttttcatggaatttgacaagtacattctcaaattatatagaatttcaaaaattgccagtatattgttgagaaaggagcagatggagagaatcattcttcctgacattattagttaatataaatctacaatatttaggatggtataggctggtactgactgatataaatagatcagaacagaaagaaacagaataaatggccctaaaataataaaaacctgtatttatgaaaaaactagttttattgtacataagccagtacaaaaccgtcttcaataaatggtgctagagcaactaattcatatttattttgtaaagtaaaatatatacttattctatgtacctatctcccaaaaaaattaaacccacatggattacagatttgaatgcaaagtcaaaaatttaaaaaatggtaggaaaaagtggcagaatatttagtttcccaaataaaggagttcataaacaagtctgtgatgcccaaactaaaaggaaaacaaatattgttaacttggtttacataaaattaataaattatattaaacaaaaggcaccatgaagacattaaccactgggagaagatatttgcaaaacatataacccaaaagagttcataatatataaacatgttacataaaaaactgataaaaccaattaaaaaggacaaacgtgcacacgcgtgcacacacacacacacattaggaaaatgagcaaaaaacataagccatcattgtacagaagggaaaatagaaatgtccataaaaacatgaaaataaacgggaccttagtcatcataaacatgaaaattaaagccacagtgatttagcatttcacatatggtaatataaaatggtaaaataattttggacagtaatttagcatttcttaaaaatgatgacatgcacacatgctttgaccaagtacctcttctcccaggcatgtgtcctggaacctcctgtttaggagcactagattaacatgaagagatttgcgtctgttatgagttattgccacccagctctgagaccgccattcttgaccctgctttgtgatatggagatgggccctgtgaacagttctctagctgctgtctcaaagtgaggctctgtctctagacagagctaggtggggcactgtaaaacagtcgcaggggagaggtgctccctttttttggtgcttttgtgctgcttgtagcatggcagccagcaagttggtgtgcaagaggctcagtagcattaatctctgtgactctgatgggccagctgcatcctgagcccctgaaaacttcttgacttcttggtgcactggaccaatggaccggctctacccacgtcttccagcaagtcccttctcccagcaggtactgctcctgcgcagtaaagccttctccaaagaggcgggggtctcagcctggttcttccttgttcctcgtcctctgaggtagttgctgctttctgtgtttgctacttttgtactccttagcacgctctttcattccttatagtagttaagagtaggtcttactagttaacaattcttcacatgaaatgttcacactactggcaatgtttctctcctggttgatacagt

SEQ ID NO: 22818 - DNA, 2300 bp, Homo sapien
cccgactctgctggcctgagcatttgggtgagactgattcagacgtggcagcgtgaggggacagtgggggctgccactgctgctgtgagtggcggtcgaggtggcagcagtgccggtgacttccaggtggtggtcggtccctggcacgcagcagcctaaggcagcagcagagctgtggggtggcttcctttgtgctggatgggggccgcagagactcccctgctgggccatggccctggtgaggctccgagcttggcccccagaggctccccttagcctggccctcggcatggctggtgagagtgagctgcctggcacccctccccttccacccagcccctcacgttgatctccttttctgcttaatcagccggagccagcttttgtgaattgcaactaaaagtgcagcaaatacacgtgacgttgggctgtgtaagtccccaggctggggatggttacataggtggacacaagggcactggctgtcaccacaactgagtgcagctgtgagccagcgccactgtcacttttcagcggtcttcatatttaatctccacaactcttgagtcacaatttcagttttacagatgaaaaaaacggagtcagatttcgtgtccctgctgtggctgcccaggccctccctcctgctgaccttggccctggagcttctgcccttttcctctgttctgttctcagtattgatccctctctgctgcatgccagacgccctgctggagcgccccgagctcagccatgcagacacggctggcctggcctttgggagcctgtcgtctgatgggaagacagacacaaagcaagcagttcacccagagtgacagtgacaaggtggcgggggttccaggatgcagggagggctgtggatccgcagcgggcctgggcttctggcaatggccactgcaatggggcacaacctctggttccgcgacgtcacgtcactgccatcgctgtcttcatccggcctgtcgccatccaccaactgcactcaggatcagcttgctaaagcccagcagcagaaggagaagcagccaacagaaaagaactgggaggcaaagaaaggagagtgtggtgctgggaggatgagacagcatgagaaagccaaggacctggatttcagaagagggattgtcttctaattgcttgaaaccgcagtttgccactcaccacacgttttatttaaatttaaattttaattaattgttaacatttaaattttttgtagagacagggtcttgctgtgctgcccaggcttcaccagaaccacagaatatcaggcggtgactctgatcctgtgattcattagacattggcccagaggcaccctcgttaaactcaaagctgattgagtttaggaaatcaggggttttctttttgctgtatgccggaaagttttcaggtggctggatctggaaccccaagtcgctgagggagtattctatacacaggtttcttgaattcagttccactctggagattttcccactgctggcgtggcctcaggagccctgtaaaagagtcctgtgagcttctgctttatcgcatctggcagtctctccgccttcagagccctcatggtggtcctgtcaaatcctaactgatgcgctgctccgccttctggcctcctgacccttgttttagaagtgagaagcccagatgtgagttctaaatttgtttttattcccacgtgttcctgatagaaacacctaccacatctaacacctaagacattttaaatggtgggtttgagtatccacaggtatcaaagatgactaaccatcccttgccacttgtcactttatttttatcctactgtgttattttatcaccttgagactgtatttaatcagtctctgaaatgaaaataagaggtttgaggtgtcaaacaaatattataagaccagaaacacttttctcgtttggttttgtttttaacacagttcaggtatgtttggccaccattgtgggtacctgagtaagaactaattactcaataatgagcctggcccacttggaagaagaaagagcattgtctgacttagtgacctggcctgggagactcctcagtgttcagatggctgtcccctggcaggcacagggagtgaaggccagttctccttggagcattctctaacttagtgacctggcctgggagactcctcagtgttcagatggctgtcccctggcaggcacagggagtgaaggccagttctccttggagtccccgggacctgcctccatgcttgttgttgtgaaggggtcagaaagaagatgtgtgtttgttg

SEQ ID NO: 22819 - DNA, 2300 bp, Homo sapien
gaattcatcccaaggctgctcaccaagttagggcgtccacagtcagtgctggatgaggaagaccacaggattgcaacttaggagacttaagttttgccgtgattttgccaaaaatcagtcctgtaatctctgacacctgaactttgtaggttccatttttgtcatctgcaagaaaggaaacttaaccgtggttacggctaagacccttttctatttcctgctctagacattcattgtcatttgcctttttgaaaacattttttgagcttttgttgtgatcgagacaaaacagtaagtactcaggacagagagatgagaagactcagtcccaaactccaggcacccaccatctaatggggcagacatgagcgacacagccagtgtgtcctggtcagctagtgcagtttcaacgctgctttagggtcctcaccgtgaccatcacctcaccgtgaccgtcagccctaaagccaaggcaccacggaggccctgccaggggaggaccgtgctgacctcgctgggaagagcggatttcagaatcccactctggctcctgatccgacagtggaatatgccctgggcccaggtctttggacatcttcccgtgaagtgagggtggaattcaccaccgatccctcggataagatgctgtcgagaattggcttttggaatccttcattgtgaagagcagcctgtatcatttgagctcatgcgtggctgtgggcagcgtggcctttgtggagatttccactgctgaggagtccgtggatgaggcagcgtctgtgccttctgttcactgggagtgatgtctgatgtgcccgcctggtccaggacgtgctttttaagctgtagaaagaaggtgctgaactagagggttcctgagatttcttttagcttcgaggtctggaggctctctgctcatagtgaaaactgtatcctcctctacagattaacaagaaagtcaagatacaatggttcttgtttaaagatgcattttccccttgatctctgcaccaaatgagaagaaagttgcatttttgagtggttactttgcattgtgaaaataagctgagagaagaagtgggttttcgctggaaaatagtattcttagtctcctctttgtgaaaccagaattctgagagaaaatgaccgagagccctttgaaagaatggagtacgtgagaggtggggagaaaagttggaatccatcagcctcatcgtcaagtgcctgcttaaagacggggcggcgggggcagaggacgctctgctgcactcaagatgctgatacatttctcaagcatgccggcttgtgtgtctccggttaaagtttccttcccattttctgtgcagatgttaaaagattgactcctttccttttttcagggtataggtgctcagctgggaaaggtgagagttaaattttctcatgatgctggtgccaagaaatagcaccttgaaaagagaaagaaatcaagacatgatctccagggagctgtcgtttggagcacattcccgagagctctccctgggccgggaggctgcgtggtgtcgttcccctcagcagcatgcttcaggtggagcctcctgccctgttcagatatgttagataaaaacaccttgacagtgccagcccgtctttaattttcacaccatctcaagtaaaatatgttttgaaatgaaaacattttgcattttattttaagcttatttttggggctctaattttttttaagactaacaaaaacagagtcaggtgacctatcttctctggaatagccgtgcactaaccaaattgtcagctgaagagggttttgctttggaggcataagcccagacaggtctgaagttgagtgtatctgctgaattaacaacagaaagggtttcttttggtcctttttcttttgggattcctatggaaatagttcactggggtcactttggtgagagagaggaaaacagcatgaaatatcaattcacctgagttctgtttgttgtgatttcagggaacaagttattatttcagttcaatgatacttcctttagggtgtgggttgctaagtcttatttaccataaactgtgagtttcattgctgcctggtctaataaatagttcatttgttagtgataaatgttaacatagcctagcaaagagagcgtctgtgccctcccaccttagtgcaagaagaggaagcagagttgctgggggctgcctctgggactttgtatgcaggacctggagcacacaggtgcagtgttgtccgcaggtgtggtgttttcctgcccgcaggtgcggtgttgcccaca

SEQ ID NO: 22820 - DNA, 2300 bp, Homo sapien
gaagtcaccatgggaccgcgcatgctatcaacagccaggccgagcagcacctgccgccctcccagtgacccacctggaactccagcccgtagatcactggtgcatcgtcctccatgctgcggggaagcgacccgaccccggccactcacacgctaaggacctcgctacggccggcgcgtccccacctcgcgggcgtgttcccagcgcccattcattccctccccgcagcaaacgactccaaactggaagtctttctggcccagaacagcttccgtagtggccacttcctatttttcggatgtgtcatcaatctgttcctcaccagcgaccaatggcagcggcgctggcttgtgcgcatggccacttgggctcacatccgggctctcagcgcggggactcctggaggtgagaacccggcccagaggaaataagttggtgggcggagcgggccgcggaggccggctgtgggtggaggccggctccgagcgcaggccgtcgggagcaagcggcgattagccttagctagccatcgcatctaagaatcgctcacgccgtagttgggcgccgccatgtattgtcatttgtatgtacttggcgttcctgagcgctgggccagcgcttcacacgcactgccataaggagcttcatccaaccctatgaataagctgttacacttccattttaccgatgagacgctgcaaagttgagtaacacagtcgcagcgctcattggtccattgggtagccaggatgggcacctgagctgactcccttaggttcggcccaaggtgccctaagtcagggccatgcctaatgcatttctgcaggtgcccagcactgtgtggcaaagaaagcactaccaaggatggggttatgaaagccggcaccgcaccactggtggtcctggactgcatatgcctccgaatgggagtcggaagggaaggccctggggttcctagaggtctccaaagactaaagacttgtggtggagagactgcccctctttcgcatcctgctcaaagtgcctgccctggccttgggccagcagaaatggcatcgcaaggactccaaaatacatcatagctgaaccacgccgctagcctggttccaccggggcttccaggaccacgcacctttcctccatttctgtgattagctttcccctctaccctttattgatctccgtgacggaaatggttgggtctcgttttgctcagttgggcaaggcgcgtggtattgagttaaggctggatgagtatctgttgagtgtatgaaattttagagattacatgagaaatcaaatgagcaggccgggcgcggtggctcacgcttgtaaccccagcattttgggaggctgaggagggtggatcacaaggtcagttcgagacctgcctggccaacacagtgaaaccccgtctctactaaaaatacgaaacttagcccagcgtggtggcacgcgcctgtaatcccagctactcgggaggctgaggcaggagaatcgcttgaacccgggaggcggaggttgcagtgaaccgagatcgcgccactgcactccagcctgggcgacagagccagagtcggtcaaaaaaaaagaaaagaaaagaaagaaatcaagtaagcaaaaacaagaaagaaagaaatcaagtaagcaatggcccagacatgagaatcatcctattcaaccactctgtttgccgatattaacttgcggagctaagagggccttcatacttcgggattaaacccacccatctatcactgatatctttatcattaattttattatacaagtactgcaggtgcatggtaagaaacttacaaaatacagataaacacaaagacaaatccatagaaacactgatttctaggatatgctggtcaataaaaatagcctaagcgactccctttcacccgccccatctgccacaggcttgcctattgcctctgagtgacagaatcaggctaggtggagtggagtctccgttcccatttccaagtacagggtccgctcccctcaactaccggctcctggttgcctgtgcgcgttcacacctagggctccaggccccgcccacagcagacgaaccggaaacgaaccccatttccggcctgggggcagggcctcgggttcctgcatcgggcctgagcagaactaggcgcgccgcggcccggcacgcgcaggcgtacagagctccccgggggtgccagttcctctccgattcccggcttctgtcaccttcctcacggaccttggtcacggccgcaggtgaccccttagcccagctccagtgggcgggtggc

SEQ ID NO: 22821 - DNA, 2300 bp, Homo sapien
ctccgggctgaggccaaagccagtgtgctccctccccgaggtggcgctacacggtcccatcccctctggactgccgaggccctgatcctcacctgccacccgcccactggagctgggctaaggggtcacctgcggccgtgaccaaggtccgtgaggaaggtgacagaagccgggaatcggagaggaactggcacccccggggagctctgtacgcctgcgcgtgccgggccgcggcgcgcctagttctgctcaggcccgatgcaggaacccgaggccctgcccccaggccggaaatggggttcgtttccggttcgtctgctgtgggcggggcctggagccctaggtgtgaacgcgcacaggcaaccaggagccggtagttgaggggagcggaccctgtacttggaaatgggaacggagactccactccacctagcctgattctgtcactcagaggcaataggcaagcctgtggcagatggggcgggtgaaagggagtcgcttaggctatttttattgaccagcatatcctagaaatcagtgtttctatggatttgtctttgtgtttatctgtattttgtaagtttcttaccatgcacctgcagtacttgtataataaaattaatgataaagatatcagtgatagatgggtgggtttaatcccgaagtatgaaggccctcttagctccgcaagttaatatcggcaaacagagtggttgaataggatgattctcatgtctgggccattgcttacttgatttctttctttcttgtttttgcttacttgatttctttcttttcttttctttttttttgaccgactctggctctgtcgcccaggctggagtgcagtggcgcgatctcggttcactgcaacctccgcctcccgggttcaagcgattctcctgcctcagcctcccgagtagctgggattacaggcgcgtgccaccacgctgggctaagtttcgtatttttagtagagacggggtttcactgtgttggccaggcaggtctcgaactgaccttgtgatccaccctcctcagcctcccaaaatgctggggttacaagcgtgagccaccgcgcccggcctgctcatttgatttctcatgtaatctctaaaatttcatacactcaacagatactcatccagccttaactcaataccacgcgccttgcccaactgagcaaaacgagacccaaccatttccgtcacggagatcaataaagggtagaggggaaagctaatcacagaaatggaggaaaggtgcgtggtcctggaagccccggtggaaccaggctagcggcgtggttcagctatgatgtattttggagtccttgcgatgccatttctgctggcccaaggccagggcaggcactttgagcaggatgcgaaagaggggcagtctctccaccacaagtctttagtctttggagacctctaggaaccccagggccttcccttccgactcccattcggaggcatatgcagtccaggaccaccagtggtgcggtgccggctttcataaccccatccttggtagtgctttctttgccacacagtgctgggcacctgcagaaatgcattaggcatggccctgacttagggcaccttgggccgaacctaagggagtcagctcaggtgcccatcctggctacccaatggaccaatgagcgctgcgactgtgttactcaactttgcagcgtctcatcggtaaaatggaagtgtaacagcttattcatagggttggatgaagctccttatggcagtgcgtgtgaagcgctggcccagcgctcaggaacgccaagtacatacaaatgacaatacatggcggcgcccaactacggcgtgagcgattcttagatgcgatggctagctaaggctaatcgccgcttgctcccgacggcctgcgctcggagccggcctccacccacagccggcctccgcggcccgctccgcccaccaacttatttcctctgggccgggttctcacctccaggagtccccgcgctgagagcccggatgtgagcccaagtggccatgcgcacaagccagcgccgctgccattggtcgctggtgaggaacagattgatgacacatccgaaaaataggaagtggccactacggaagctgttctgggccagaaagacttccagtttggagtcgtttgctgcggggagggaatgaatgggcgctgggaacacgcccgcgaggtggggacgcgccggccgtagcgaggtccttagcgtgtgagtggccggggtcgggtcgcttccccgcagcatggaggacgatgcaccagtg

SEQ ID NO: 22822 - DNA, 2300 bp, Homo sapien
ttcgggctcccggtgaaacatggcaggaaaaaaaacgttttactccttttcattggattttttattcatttatacttaacaattattggatgaatgtataagggaattagtagctgaccaggctgaaccggaaacttcttcaaaatgtataacttggattatgtactttaaaataatgttttgggaaggctgactcattgggaatactatgatggaagtgttgacagtgagaaaagggtagtcttatctagagatcagctaagtgtcattttttaagtaaaaaaggtacgtgttgttttattctgaaaaaaatcccttatcttttatcatagtctcttagatttccttaacttgaatttgttcactatgagagtaaaactacataaagtaaaagtttttcaagaaaaagaacaaatacttttttacagtttgagctctttgtctcattctttggctggtcctggtttccccactcactagcggtgtgatttcggcttacatagcctcccaaggcctcagtgtcctcatctgcgaaacgaagacagtgatagcagctgtctcgaggggtgttctgagaatcacacaggcatatgtatatatagccaggggcatagtatgtgcggataaatgttagctagttgtgttgtcagcttcagccatcagtgcttagtgagtgtgctgttttcttactgtttaaatttttcatgtcattcgcactgtatcagatttccagagtcaggcagataatatgagctggggcgtggggcgggggtaggggcggacggcatggggaagtcaagagactattacaaattgaagagtcttgggagggcttcatggaagaggagggacttagctgactctcagaatgaagtagtgtttatatggctggaacctcacacctactggaatggctactatgaaataaaaacaaaataacaagtgttggcaaggatgtgaattccaaggcttgtgcactgttggtgggaatgacaaacggttcagccactatgaaaaacagttttttggtgcctcaaaaaaattaaaaatagaattaccatataatccagcagttccttctaggtatttacccaaaatgattgaaagcagggtctcaaagagctgtttgtacagccacgttcattgcagcagcatccacaatagctaaaagatgggagcaacccacgtgttcaacaacagatagctggataaacaaaatgtagtgtatgcataccatggaatatttttcatccataaaaaggaaggaaactctgaccaagctgtagcataaatagcccttgaggactttatactgagtaaaatcagccagtcacaggaagacagttatcgggtgattccacttattttatagtagaatggtggatgctctaggcgggggagatgggtatacgggggaatgtttaatggggatggaattttagttttgcaagataaaaagtgttctggagattggttgcacagaaatgtagatgtacttaacactactgaacttaaggtggtcaattttatgtgtattttaccataatcaaaagcacatggataagaagctggagaaatggaagtctgcgtcatttgaatctataagcaatactcatttttcggttgaggtgaatgaagatcacgctcaggggccttctctctgtctttgctttcagggtcatggaggacgctggcggcggcgaggagaccccggccccggaggccccgcacccccctcagctcgcgcctccggaggagcaggggttgctcttccaggaggaaaccatcgatcttggcggagatgagtttggatccgaagagaacgagaccgcatcggaaggctcgagtcctctcgcggacaagctgaacgaacacatgatggagagcgtcctcatctctgactcccccaacagcgagggcgacgcgggcgacctgggccgagtgcgggacgaagctgagcccggaggggaaggcgacccaggcccggagcccgcgggcaccccgagtcccagcggcgaggccgacggcgactgtgcccccgaggacgcggcacccagtagcggaggggccccgaggcaggacgcggcccgcgaggtcccaggcagcgaagccgcgcgcccggagcaggagcctcccgttgcggagccggtcccggtgtgcaccatcttcagccagcgcgcgcccccagcctccggggacggcttcgagccgcagatggtgaagtcgcccagcttcggtggcgccagcgaggcctcggccaggacaccgccccaggtcgtgcagcccagccccagcctcag

SEQ ID NO: 22823 - DNA, 2300 bp, Homo sapien
tcctggccctgcaggacaggctcccctgcctccactccagcccgtcctggtggttgtgagccgcacttaaccctgccaggatgcggcttgtactgggaggcccatgggctccgagaggacttcccttcaacctccaggcaccttgaaactgcccagcagccaaacctcagagctgtggaagctcctggacgtttcaaagacccacttaatatttaatagtcagtgcagcattaatttcattgctccccgatcccacatatcgaaacctttcacagtttagtacagggatgatggtgaaagagaaaccacagggaaaatccgaggcagtggaattgtttaatttctggttgcttctcctcttatttgtaattaatatccattcagcatctttaaagcttacaaaatgcttcaagtacattctcattggagttccatgatttgtaaaacaggcatgtgaaaaaatgggaagctaaggaaataggaattcagaaaaggtacactgaaggtacgctgaaggtcagcctgaacttgaacccacgtcttctggcaccggacatccctgttcttgtcactgcggcactttgctctgtgtgtggaaagcgtgaagggcccctgcaaatggacatgatgctgcctcctccacaggtttatttttgtgaaatcaaacagaatactgtttgtgcttaaaaaccatcctgcgcccccatctgtaaaatacatcgtccccggtacttcccagcaggcgctaagcaccacccacactgccggcgcctgaccagacagctccatggagctcctgacccagcttcaacccgtcgggaacagctcccagggaatgtgcaggaaggtgcctccaacacccggccctttctgcccctcggcccctgtggtcactctgccctccacagtccttctgcccctgtggctggtcgcttactgctctgtgcatcttcctgaagcacttggcactgttgcctcatctctgtcctcttcctcctatgccctcgcctgggccctcagcagcttccagcagggagggtgtgggtgcagtgatttggatcatgcccctactcctcagagcctcttcccaaacgaaccgggtgtggcgtgctgggcctttattcttctgggacacaaacacgggactgctgattggtctctgatatagaccctggagtctgctccttttgtctggggcaaaaggaaccaaggaggaaattccagccgcaccacatttgcaaacgacacactgtcgggctttttttgcaataactgcatttcctaaataattcagtctttggattgagaacgtgtctgtcactttcctttatagaaataaccttttgtaaattaatgtactgttactttataaagccagacaactgtctctagatagacagcaataaaagctaccaactgtgaactgctgtttcttttcctttcactcatggatgctcttctgcatcacactgggacctatcaattgacattaaatgacacaccctacaaataaaacaatagtcactgagggtcagaaggttgtgtctgatatgcctatgttcctgtcaacaataggggctttctccagctgtccccttctcgggctgaagcacctcagtgacccagatccctgcaggcacttggcgtcgttttgtgtgtccctctgccccagccaggagagtgctttttgcagagggaggggtgtagcctgcctggtgtctccgtgtcctacctgtgtgccctcccagctgggtaggtgggtctggaggggtgtagcctgcctggtgtctccatgtcctacccctgcgccttcccagctgggtaggtgggtctggaggggtgtagcctgcctggtgtctccatgtcctacccctgcgccttcccagctgggtaggtgggtctggaggggtgtagcctgcctggtgtctccgtctcctacccctgcaccttcccagctgggtagatgggtctggaggggtgtagcctgcctggtgtctccgtctcctacccctgcgccttcccagctgggtaggtgggtctgggccaaaagcagctgctgcaggtggagctcccgtcactcacatgctctgcgtttgatgcctctgctaagatggagcctctgtttctgcatttatgcatcattggggtgggaaactctgtttccttttttctagacctttctcttcctgctgcccttctgaaggacctcattcccccttctcccctcattggccgtgatagtccacagggaacgtcagccccagcgcagcttgtgctgagaccaccatggccctgtggtg

SEQ ID NO: 22824 - DNA, 2300 bp, Homo sapien
atgcaggaccactcaccgctatggctgagaggacctcagcaagaaccaaggtcacctctgaccgagttcccagagagcaggaacccagggcagggtggggagacgctgaggtggaagaagggaaggaagggccagggaagcgctgtgaagctgggaaagacttgagcacgttttacagaggggcacgaccccaggctccaggaggggtgcgggcaccttgaccgtctcgacgaggagggtggttttacgcacacagccacgtaccagcatccctcaggttgtacgatctgaagacatgcaggttcctgtacatcagccatagctcaacagagaccttcaaatagaaaaagaagagactgacttctggctgccagcctgagccgtggagtgtgctggctacagtcagggaaagagtggggagagcgtcctccagcccctgccaccctgtgaggcctcatcatgctgatgtgacaccgaagtgcaagcaaaaagaaaatgtaggtaagtgggatttcaccaaaactaaaaactgttgtgctttaaaggacaccataaagaaaaagtaaaaagacaacctatggcatgggagacattgcttgcaaatcccgtatctgataagagacttacatccagaatatatgaagaactcttacagctgctaaattaaaaacgattcatggcactagcatgcagcaggggagagactggactcaactctgacttcacggaggacaggtgggaactgacaaccagggaccagggtcagggtcagcgtccctggttggaaaatcacccagaggaagcttcaagaaggggtttctggccaagcagacttgataggatcgttgctgacagccggccagggtggtaggatctccaggtgctaagacaccgagggcggggacttttcttaaactgacttagcaggattcttgctcacactggattctacaaggacagagaaggaaggcaaggtcaagcttgtctggtagaggaggcttctgcacggatgcagcctaatttatgcattgacagcctgcctggttcccagcaggccctcgggttctgcagagagagcaggtgagggggggtcaggggaaaggagagcacccctggggccggctctgctgtgctcacgccgggacgggaagaggagctggtgaaggagaactcaagaaaaacatggaagagaagctagggtactctgaaatagatcgcatctttcttttattcgtttatgtacattagcctggggggatttgcccagttggaatggaacagtttttctgataagctttaaaatacaagaatgttttataacataaaaatttagactaaagttttccgtgttggtttttgggtagggtttttctggtgggtttttttgtctgtttttgagacgaggcctcgctctgtcacccacactggagtgcagaggcgcaaatgcagctcactgcagccttgacctcctgggctcaagcaatcctcccgcctcagcctcccgagtagctgggaacaggaatgcaccaccatgcccagctaagttttttgtagagagggggtcttgccatgttgcccaggctggtctcaaactcctggcctcaagcaatcctcctgcctctgcctcccaaagtgctgggattacaggcatgagccactgggcccagctgaaatgagttttctgtatcaattgcagacctatgcttctgtgactaaagttgatcagtggtaaatatgaaaagaactgggttttctagctgactacagatttaatatcatctagcaacctatgtggctgttaacatagctgttctgtctttggatggtttaaaatcatctgactcccacaccacagagaagaatcattcttgccttcctctccagtcaacagctcacagccatggactgcaggacactccgccttgagaacactttaaaatggccattgcccatctgtaatggcttccgtgccaccaaggtgatgaggaatcccaaaactgtgacagagaagcaggtgaaggagctgagaactggagctctcccccacccctcagtgcctgtattagttggggctctctagagggacaggactcatagaatagatgaatctatgaaggggagtttattaggagaattgactctcgatcacaaggtgaggtcccacaatagctgaggagcaaggaagccagtccaagtcccagaacctcggcaagtctgctctttccaacttctgcctgctttattctggctgtgatggcagctgaagagatggtgcctacccagattaagggcgggtcggc

SEQ ID NO: 22825 - DNA, 2300 bp, Homo sapien
ctgcagtgcggtatctacctcgagtaggaagacggcaggaaaaatcaaagtgtcttgaaaatgccaacacattaaccagcttgaagccatactcaagtgcgataattcatattctgatttattaatatcccagtcataaaccccatggcaataaatacatctgtgcctgtaaaaagagggcacacttgaaaaataacacatgtccaggaatatcttactcagcaagcaggcagagcctgctctaaattgacgaacttggacacagtgaaaaccaacagctgtcccgcttgggaaactaacagttgggctccttggaaaaaatacctgatttagaatctaacgaatgtgtttataaaggacccatcttcttttttttgttttttgagacagagtctcgctctgctgcccaggctggactgcaatggcaagatctcagctcactgcaacctccgcctcctgggttcaagcaattctcccacctcagcctcctgagtagctgggattacaggcacccgccatcatggccaggctggtcttgaacctctgacctcaggtgatccgcccacctcggcctcccaaagtgctgggattataggcgtgagccaccgcgcccagccaaggatccgtcttctctaacattcggcttgaagagagacccccccactactttacagtgatgccttcgggaagaacagccttttacctccctaggttttctccccgcctagagttctgtttcttactacattacatttccgctcgcttagtgtttttcaaccctcgagctctcctcaaaccgttccattgtttaagatactaacaaggggctgccctgacccaggagacagtgtaagtgtagggatcagggaacagaagcaggaacgcaagacgccggatacaaacgtgaacatgctgcaggattccacgtgcatcaaattctagaaaagccaaaacccacccacataggttgcttaggatggggtggggggactaagaaggggcatgagaaccttctttgggtgatgaaaatgtcctatgttgttctgcctgaggtcatgctgcatttgtcaaaattcaaaaacactgaaaatgagtacattttattgtatataaatgacacctcaataaaaacgaaagatgtgagcaacatcctgggaaaagaaaatgtgatttcaccttaagtgctttagcagaattctattatatgcctcagctcttactctttcttcttttttgagacagagtctcgctctgtcacccaggctggagtgcagtggccacaatcacagctcactgcagcctcgacctcccaggctctaagaatcctcccaccttagcctcctgagtagctgagattacaggcatgagccactgtgcccaggaacttactcttgcctgtaaaaatacagctctgaagtgaagaaatcccaggcgccacatcaaggaggcgaaactagagtccgcaggaggccagccccgcacgaggagtttcaaacactaaggatcctgacagggaaaagttatatgaagcaagaaaggcaatttaaagcgatagtttatcatatgaatgtttcgttcttaaaaatgaacaagctctatttataatgcccatttagaaatgaatccattaaaaaaaatcagtagatcagcacttattttaattactgagatagagtcacacttgacagaagcaagccctgcggtatatggcatcatcacaccaccggtgggtattttaatcctaaaactgagacagagtttacttaaacatttaaggcttgagtttcctctgtacagtgtggaggtgattaagaaaattaatcctaacatgaagatttttcatccagttaaaaaaagaaatactttaaaaacgacctgcccttccaaaacatgaagttaacttggagtttttctgtgatatgacaaactaggcataatcctatctcggaattgttgagtagaaaatttatgtactaatactcctgttaaaattcaacagctttattgtgaaagaatccagagatctcacactgaaaaaatactaacacagctcatatataaattacttatctataagaacaattatagaaggaatctaaatggggcaattttaacaaaccaggcaaaatatcacatatacctgaatataaggtaactccaagccatgagtataagattaaggcagttactttattttgaacaaggaagtggcataagcaactcagtgtgtgccccttagggtgggagctcttccccctaccactccccaccccaaggcatcattttggagaaaaaagtgt

SEQ ID NO: 22826 - DNA, 2300 bp, Homo sapien
acgtttaacgtcgtttgcctcacaagattgctctgaaggtgcagggagaccgcggcagcacacacaaggcacgtgcgatgcctacggtgagcttcacctgcccggcgcgtctggcgaacggctggccccgggccgcgggcctcaggcaggtccgagggtgcccaggacagggtctgggcttgaatgcctttgcttccgaaaacagcggagccgtggggcctcccccgcgccggccctgcctccaaccagccgcccaatcccggctcccatgcgcgtccacgcctccctataagacaaagcgcggccgacgggctccgagcgcggcccctgggttcgaacacggcacccgcactgcgcgtcatggtgcaggcctggtatatggacgacgccccgggcgacccgcggcaaccccaccgccccgaccccggccgcccagtgggcctggagcagctgcggcggctcggggtgctctactggaaggtacgcgagcccaagcctcgcagagcgtgcgggcgacgccgacccccaaacgccgcgcacagcccagcctcctccaggtgccgggcagcggcctgggagccgcggcatgctgcgcatgctcagcagcgggatttgggggttcgtggcggctcccggtgcctggggtgggctgcgcatgctcagcagtggggctgggtggtcagggcctcctgcgcggcgcctgggtgtgctgcgcatgctcagcagcggcgttgaggggtcggcggtcagcccccagcgcctgtggtgtgctgcgcatgctcagcagcgaagtttacggggttggcggtcggcttccggcgcctggggtgggctgcgcatgctcagcagcggggctggtgggggtcggcggtccgtttctgttgcctggggtgtgctgcgcatgctcagcagcagagttggcgagtcaggggcctcgcagccgggactcgctgcgcacgcgcagctccgggattggcagcgacctgaagggtcggccggcagggctgcaagattcgccggaggcgggctgcgagttcgtgggctcgttgggcttgtccgacgccctgcctgcctggctaacctcggtcaaaggcccaggggtttcttctatcggaggaagggggactccgcttgaaagtgtcctgggggagggaccgggcgccagcagatcgaggcggggtcctgccgcggtctgtcggggatccccggggggtagcgctcggtggtggggtgggggcgtctccagtgggcggtggagctggcttgggtcccggctgggcccggtgtcagccctgcctctgtaacgctagctttgcaaggcggggctaggctttgcaccggtgtcccgttgcttgcacagcaccagtccagatccgctcaccttgtttatttgcaaatggttttgcagtaacaaaggtttactgcaaaagagagggccagggtaggcctcagggataggctgaggggtgactggatctaatcttcattcatgtgatttaaatgaaatacacagggttacctggacaccacactttttcccttgggaaaggattatagaatattccagcataatctatttggatatcatcttgttctatcctaaataacagaagagggaagtgacaattggcataccagtgcgaaacagggcatgcatgttaatgtttacatagtatttgtcttttcctaggataaggtttaacacttaccttgctggagggtacttcttcaaagcaatcaagtggtttatagttttccattaatgagaggagaataaattttgacttattatgtttatccacaatccaaacaaccagagggttcaaattaatacacttggggagtttcattgtgcatttgacggttttaagaacaagaacaagagtgagattacaggtcagcttcttaatgtattcaaagaataaaataagatttattttaatagacatcttttagattattacatgggctcaaacatagtttttcctaccgtctagttctgctctgagtcagggctatcaaaattaaatcatgtttactctgtggttttaatgtcctgtgtgtttttatattcttcctttcttttttttttttgctctttttgcccaggctggagtgcagtggcatgatctcggctcaccgcaacctcatcttcccgagttcaagccattctcatgtgtcagcctcccgagtagctgggattacaaggtgcacagcaccatgccgggctaattttgtatttttagtagagacagggtttctccatgttggtcaggctgatcttgaactgctgacctcag

SEQ ID NO: 22827 - DNA, 2300 bp, Homo sapien
ctatagaaaggagggttgaagcagaaaaggggcttgactggattccatgtttttttgtttgtttgttttttgagacagagtcttgctctgtcacccaggctacagtgcagtggtacaatctcaactcactgcaacttcagactcccaggctcaagcaatcctcctgtctcagcctgcagagtagctgggactagcggtgcaaaccaccacggccagctaatttttgtacttttagtagagacggggtttcaccatgttgcctcggctggtcaagtgatctaccctctttgggctcccgaagtgctggaattacaggcgtgagccacagtgcctggcatctggctcctatttttaaaaggtcactctgggtgctgtgcatagaatggattgcactggggcaaaaatggaagcggtgtgaggagggggaatttcagtagtcaattccatcaggcaagaaaagactgcagaaagagttgggctggagagaagtgaatggatttgcggtgtgtttcgaaggtcaaagcaacatgacttgctgatagattggattggatcttgagggtgaggaaaagcaaaactgagagtacacctagatttttttattaagccactgggcagtcagtgctgccgttcactgagacgggaaaggttagggagaagcatgtttgggggtgtgtgtggggaatcagttgttttggccatgttaggtttgacacactgattagccatgtatgtgacaacaccaactggatactcaagcctgaggttctggaatgaggtccaggttggagatgtggctgcaggagccggcagcacagcatggaaagtcgcctggagtgagtggataggaacaggacgaggagagtctggaacgctccactaaccagtggttagaggagcaggagctaggaggggcctgggaaggagcagccaagatgccctcatgaaggaaaatgagaaaatgtttcaagaagggcgtgggcaactgtgacgaatgttgctggtaagaacagaagtgccatgattggatctggcaatatggcagtcattagcagttccccagtggtgagaagcgaagccttattgcagtggcttaaggagaaaatgcgaggtgcgagattgccattagattcttgcatgaaggtttgtcatgagtgctgcagaaaaatgggcaatggcgtctaaggtgtgttcttcaaggatgagtagaaactggtcaagtgaagaggtggagaggtaggctctctaaggaggatgtatttgcaaagccattagagcaagggaacagaaatgaaataagtgtgtatttttcttgcaatatttctggaagttcaagagtcaattgcatgcattggggttgtgctcttacagcagtctcatttaaatcctgtctgctttatcattatttgttaaagagactgagggaatggctgagataatctgatctttttcaactcgttggtttgaaaagacatctaggatggtcaagcggctggactttattagctacattgaaaaattcagaatgggataggggaagcttgtttttattctaagactagcacattacagtgtatggggaagggagaaacgatgaaaagaggaaacaagaggaagtttaaaaagtacagggtagcactgcagaatgccgacactgcaaaagtctggcgagcggggaggtggaggacaatgtctcacctgggatccgagctgtgaagtctcaactgtgcccatatggactgcatgagcttaacaaaatccttattcttttttttttttttttgcatttgctttccatactctaaacacgtttaacgtcgtttgcctcacaagattgctctgaaggtgcagggagaccgcggcagcacacacaaggcacgtgcgatgcctacggtgagcttcacctgcccggcgcgtctggcgaacggctggccccgggccgcgggcctcaggcaggtccgagggtgcccaggacagggtctgggcttgaatgcctttgcttccgaaaacagcggagccgtggggcctcccccgcgccggccctgcctccaaccagccgcccaatcccggctcccatgcgcgtccacgcctccctataagacaaagcgcggccgacgggctccgagcgcggcccctgggttcgaacacggcacccgcactgcgcgtcatggtgcaggcctggtatatggacgacgccccgggcgacccgcggcaaccccaccgccccgaccccggccgcccagtgggcctggagcagctgcggcggctcggggtgctctactggaaggtacgcgagccca

SEQ ID NO: 22828 - DNA, 2300 bp, Homo sapien
gcagaaagaggggtctgggcagaggaaagagtaagtgtcctgaagtgcaagcattggatcttagaaataagtgtatggatttagaaataagaaatattactcaatgttggagagccctaaagcttggttctcagatctcttcccttttctgtaaacaaccccttcagggttaatagtcccagatcgtgactttcaatacaagtatattgaacagctgaattcatatttctagctacacgtctccttcgaactccactgcccaccttatgtctccacctggaactcaagcaggcatgcgcccaaacctgctgctccagcgtttttctcaggcctgtaaatgttgttatgagttgaattatgtcctctccaaacattcatacatgaaagtgctaatctctagtccctcagagtgaatatagggttgttgcagacataattagttaagtcaaaataaggtcatacaggagtagggtggctcctaatccaatatgacagatgaccttattaaaaagggaaactttgatgcagaggcatgcacaaagggagataccatgagaaggtgaaggtagagatccaggtgatacttccataatccggggaatgccagagattgccagaaaacaaccaggaactagagaaggatggaacagagtcccactcactcctcagaaatagtcaacactgctgacaccttggtctctgactttccacctccagaagtgcaaggcaataaatttctgctgttaaagctgcccatagacaggactttgtcatggcagtcctagcaaacaacacaaatgataataatgctactcttccttttgctctagcccaaaacctagaccctcttccattcctgcaccttcaatcagtctatctgcaaaacctgagcacatctcaccacctccctgctcctggcaggcctccaacaccatctagcctgcagtcataaagtcacctcttaaccaatctacctgctctttctcttgtttctctgcagtgtcttccttcataacacctttcaaaatgtgttagatcgcatcactactattctcaaaattctctaataatttacatacacttggtttaatttctatgatgacattgtcaatgcatatttttattatcttcccaatctttctatggcaattggtctgttcaaatttccacttcttaattcagttttgttaatttatgttttcctagaaatgtataccttttctctagagttacatgtttattgccatagggttgcgtgctgtgttttcttacaattctattaatctattctaggacttacatgtttcctttgctattcctaatctctttctccttttgctctttttttccaactcagacaaaaggaatttatctgttttattattcttaataaggaataaataatttataaacatttaaacttactttttctatttttgtttttttgataatattaactttggttattattattatttttcctactgtcctctttttctttttcttttttctttttttttttttttttttgagatggactttctctcttgttgcccaggctggagtgcaatgacacaatctcggctcactgcaacaaccgactcccaggttcaagcagattctcttgcctcagcctcctgagtagttgggattacaggtgcaagccaccatacctggctaatttttgtatttttagtagaaacagcgtttcaccatgttgaccaggctggtctggaactcctgacctcaggtgatccacccaccttggcctctcaaagtgctaggattataggcatgagccatcatgcctggccgattctttacattttctatagatctacaatagcagagatttttagtgctcacctgcatctagttctcatctcatgggtaatatactatctaattttttttgtttatttttaaacatctttttcttttcctctttggtagggggatacttactctttgagctgagtagcacttattttggtttcaatgttttcattttcagtaatcaatggatatttttcactctctatgttctctggtaaccctgtgatttaaaacctccattgtcagccgggcgcggtgactcacgcctgtaatcccagcactttgggaggccgaggcgggcggatcatgaggtcaggagatcaagaccatcctggctaacacagtgaaatcccgtctctactaaaaaatacaacaaattagccaggcatggtggtgggcgcctgtagtcccagctactcgggaggctaagtcaggagaatagagtgaaccagggaggtggagct

SEQ ID NO: 22829 - DNA, 2300 bp, Homo sapien
atgactgtaaattcttttggttcctatggccctggaaagaataaattgccagcattatcaagatttaagttggtctgaatattccaagtattcgatgcagtgtttttctttaggatgagtcggggaagtgggggacgggggcgggaatggcttatcgcaatggcggtaattttttcaaatcatgatctgtgtaaaacacggtattattttatgatattagaatcctcagagaagatccaatacttaagaaatgtagtattaattgcaggagggcacctgaaaggaagcagattcggataattttcccagtcctacacggctgatttctctggtgaagggatccgggcagtgtcttaggaactgctcaaagttcccagatacccagtgctggggggtgtggagaaggcgagggtggcgacagaccatacctatgaagcggtgattttctttaattgcccccagaatatccgtagaggtagtagggactcaataaagaaacacaaaggagacgaacacggcacgatcgccggggtccgcggctgctctgcgaggcccagcgcgccccaggtcgcggctccccggccgccagcgcacctttccatctccagggaaaatatttagacgggaaactcgagtgcaccttattttctctttggtttatgagtgacccagaaggcttctagctcacaatcgcacgatttcaggacgaggctgccggagaagcgctggcgaccgaggatgggggaaggacaaagaggaagaggaggcctgggaaggagaaaggagcggcggaggggcggggagaggacggggcggggagaggaggggcggggagcagagggagaagggaaggagggcgccgggcccctcgcagggacgccgggcggggcgcgggcttgctggagcctgcgggacccagagcccgctccggagccagccctgggagtggccagcttgaacccgagggccccgcagaccgttactccggcccccgcccggggcggggcgcgcgggggcgcggcgcagcccaacccgcacagccgcgtccccaaacaccaccgaggagggaaaacagacggagaaaaaggacaaaacagaaaaatgcaaaacgggggagggagctcaccgcctctcgagctttaaattgatttctttgccttacaaaaagggagaaagggaaaaggagagcagagcccacgtgccgggaaggttgctgtcttcaagcgccaccttccgtcggccagggccgccgcggggctaccgggcgggctcggggcggcgacccgggggagcggccgagccccgcgaggggctcgccggggagcagctgcgcccaccccggggcaggccgggcgcggctgaccgcgagccgggcggaggccgccgtctcaggctgggcgcgtgcccgagtgtgtgcacccggggagtgagcgcgcgccgtccgctgtcgccgtcgggcctcccggggactgggcacaaaggcgcgcggggcctctcccgggacccggtcctcggttagcgccggcgcccgaaccatcccggttcgccccgggccgcccgctccccgtggtgccgcgcgccgcttccgagcatcccgggaacaggcgcatctgtgcacacacgcggattttttaaaaataacatatttctagacatgcctcctctccccccacccccatctttgcaaagcagcccggagggcggggtggaggggcggggcctccgagttaataaaggaagatgggcggagccggcccccagccattggctagctgggggagtgatgtcacccatatgacaccctgataactagttgagagagagacctcaactttttgcagaaggagcgcgcgcgcctgggagagctcggggtccggcgcttgcggtaggagccacgagccggagagaggggtcccgggctgcctcgaccgccgtcgccaccgcctctcctgtcgcgaccgcagctcccaccgcgccggcggccgtcgtcgccgaagccaccacagccgctgtgtgcagcctggaagggggggcgggggggagggggggagccgcgaaagcggggtgccgaggactttgcaacttgcccaggaaggtggaggggtgggagggggagggggacctccgcacgagacccagcggcccgggttggagcgtccagccctgcagcggatcatggtgcagcaggcggagagcttggaagcggagagcaacctgccccgggaggcgctggacacggaggagggcgaattcatggcttgcagcccggtggccctggacgagagcgacccagactggtg

SEQ ID NO: 22830 - DNA, 2300 bp, Homo sapien
tatgggcaacctggctaccctctggcagtcttaacccttggacttaggtcctctgcaactgcattcatcacttgtgtttatgtgtttgtacaactgcttacattgattacagggttcatgtcccttctgtttaaactacttttttggaggctgtggccctgtctcattaatctcagtgttcctagcacctcacgttaggcctatcagatgattggcgctcagcaaatgtttgctgcatgaagttggtgcatggcaccttctgtgttaagcttctccagtccgcccaactacactgtgtgcagccgtggagattccagcccaaaatgttaataacaaactgcatcaactattttataaagtggtgtagtgtatccggtaagtcagaggagggatggattgtgtgtgtgtgtgtgtgtgcaggtgtgtatgtgcaagtgtgtgtgcctgtgtgtgaaacacattactttgcagtttggaaggcctgggtcctgctctgtggtccctagctaatcatttaagctattctgggcctcaacctccttatgtgcagttatttgtggtggagtgattaagatttaaggctctaggcctagaaagagaagtccaggtttgaatcctgctgacactacttggcccttgggcaagttactaagcctccctctgcctcagtttcctcatctgtgaaaagtgaataacagactgtctcccagcaggttcttgtgaggattaaagaagataaaaaatacaaaattctgagcctgatgtctgacacagagtaaggatttcccattgttgggcttctcactactctaatctcaggacatgctgtggcacctgaacaagataatataggtgtgcatgatgggtgtttttgagacagggtctcactctgttgcccaggctggagtgtagtggtgcctctacactgcagctgaccctcctggctcaagcagtcctcccacgtcagcctccctcatagctggaactacagggactcaccaccactcctggctaacttttaatctttttgtagagatggggtttttctacattgcccaggctggtctcaaactcctgggctcaagtgatcctcctgactcagcctcccaaaatcctggaattgcaggcgtgagccgctgtgctctgctaggtgtgaacaatttttaaaaggagtactactaaaggaaaaggtattaatatatatgtaaagaatcttattcctggcctccatttttgcatgatcctacagtgctagagagagtacaaatattttccatactaaaagagtaaagtggtcaatgtaaattgtccatctagtaatgagtaatagagtattccagtgatttaaggaaaaaaccaaattcttggttatatttttaccttcacccccttttaaacaatgtcttttatgtggtatggacttaagtctctttcccccaggagtcctcagtcctttcgtttttcctccatcagcattcagagaattcccacttgagtcgcagggaacaatcacgtcagctagggaatgtagaaatgtaaaacaacaatttaggaggcgaaagggagtatcaagttagcgaaactgcaagggaaactgggggcagcagagcgacgtgccagcgtccgtgttgggcgggtgtcggggggacccggacaccccgccctccttcctgcagagctctgcgggccctgtggcatccatggagaccctggctccggtttcacaggaagggaaggtgtgtgtcacagtccctaatggatcagctaccaatcattagccaagtccttctcttacttttctcctcggagagaaccaagcttagacaatagcatggctttcgaggtgggaaggacctcatgaaggagacggaaaagagtgactgcagatcttacatgtaggatctggcggagctcagcttaaagccgttgccacccagccatgggcattttctccacattttgcaggcatcctacaactgaaaactgggtcgcaggcatttgaattggcccagaggacccctgcaccgcctaagccctcctggctttgtcatggttttcagaattagaggggaagcatgcataagaaagcagagggcgtgggcaggagctggggctgcctccttcccaaacactgacggctcctgttgacacagacttgaaaattctgagcgctcatggacatattagcatactacaaatatctaaaggggctgtgaaatatcactgagaaggtctgtacattgattttctatatctttcattgcaaattagaagcaaagggaaaaaactttggccactcc

SEQ ID NO: 22831 - DNA, 2300 bp, Homo sapien
tggtggctgtgaagatgtttgccaagcctgctgagaaggctcatctgtggcatccaaaagcagagatttcaactctggacccctgtgacctgcctttgtaattatggatacccagcactgttttgaaatatcagtggacatccagtttttaaaagccctcagagctttgggagacacccctttatctctctggcatgtcagagaaccgattcaacccttctcatctcctcctccttccctctcttgggccatcaggatgcggcagcaactcactgtgcatgtttttacagctcttctccagtaatgctgccatttccactgcagaccacaggataaaaggaccgcttcaccgtggcccaggatacccttttaagtaggaggtaactattcagtttcgtagtggcccatacataaacttgattatgttcttcgttgctccaatatactatttgtgtgttttgttttttccagagggagaagaaagtactgctttgatctaaaattaagcaaacgttcttcaataaacccaccatgagacttgaccactaatggtgaccagcagtggctttgtcatggccctgcccactgggggcaggcacatgccggggccagggcaggctgccagctggtgagcacgaataggtggctggtggagcgcatgcagtgggaagggcagatggctccattttgatttgttagcaggccacttcctcggaaggggctttcccttcagtggggtctgcaccgccagcctcagctgtcttggagcagatgtgtatagttagagatggggaccttttcactgtaaatactgctcacatgttcctaggctgactttactatgtgcagagcctcttctcaaatatccaaatcccctctgttgggtactacagaacagatgttaccctgcctcctattacattaatttacgaactttacatatgctgagttacggaccctaagctgttgcatgtgcttggctcttatgttccaaaaagtacatttgtatggttttgtggaaactgtgctgttctgcttttgcagtctgtgagattctgattttttttttctcatcagcaattatccttgtcttggaacatcagagcttgaagaaagggattctagcagcccacctctctccttcctaatccagatggttagaggcttagagagaggtggtggttgctctgagtttaccagattcagtgacaaaccccttctaatttctaatcaatctggcagccttcatttaccaaaagttgacttttgatagtataacttttatacaccgtgagacaacttattttaaaaaacagtttagaaatatttaatttttttttgaaagactttttaaggtcaggcaccatgggtcatgcctatcatctcaacgctttgaggactgaagtgggaggatcatttgaggccaagatttcaagatcagcttgggcaacatagtgagactctgtctctaaaaaattaaaaaaaaaaatagccaggtgtggtggcgcatgcctgtagtcccagctacttcggaggctgaagtgggaggatccattgagcctaagagatggcgattgagtaagccatgattgcaccactgcactccagcctggacgacagagatgtcagaaaaaaattagttttattattattagtttataataatattattttaatattaatattatttaataatttcatattatttattattattagttttattattagcaaaactgagtggaaggcacagagattttccatattcttcctgcctctccaacaaacatgtctccctcattatcaacatttcttcccagagtggtacactttttataattgatgatcctacactgacacatcatcatcacaatgagttcatagttgacgccagggttcactcttggtgttgtacattccaggcatttggacaaatgtataatgacatgactccaccattttagtatcatacagacgagtttcactgccctaaaatcctctgtgctccactgatacttactccttcatccccttgctccctcagcccctgacaaccactgatctttttattgtctccatagtttggtcttatttaatattttttgaggttgcactgttgccccaggacatcgtatgagtagagggttaaccaccttagccaagagtaatttggtctggtgagttctccaccttcaggacaaaagcatttcagaaccatcctaacaatagtgttcccataagtaaccagacactgtttgtatccatagcaacatggctccatgagccctgcttccgaggag

SEQ ID NO: 22832 - DNA, 2300 bp, Homo sapien
tgaggtcatatattcctatataataagacataagcaaagtgcagtcactgagaatcactagcagtttacaccacgagtatcttcacagcccagaaaagacactgggttgagttaaaatgaaaactggaataaatacaatgagaagatagaaagcctgctgagaacactggggtacttgagtggaactttaaacagtgtctttgctaatgtgtatggtaactgttcagattgtctgtttctttaagctaattgttttctgattgttgaagcaataataactcatatcttgcttgagaaaaaattaaaaagtatgaaaaatcaaatataattatcacactaccaagaggtattactgcttccgtgttgatatgtattcttcttgtattttctacagatacgcacccacacagacactttcatgtttataatagaattcgaatgtatatatttatatcttataactggatttctttcattgaaataatttgatcaggtatcttttctcttggatgcgtcctaacagttctttctttctctgatagagccagatcaaggaaagagacaggaaagcagatgattttacctgccttccctaagtgcactcgggaagagaaggatcatctcaaaaagggttaaggaatgagatcatggaaatcacttacacacgcggtcgcggcttggacttggctagtgaggccggcctgcccactctgcttccattcactcagacacagcttgggcttttcctccaagtgctggtagcagtcatttatgagggaggaaaggagcagaataaacacacttctcagctcccaggcactctgtgtgtgtagacagaggctcgggtggatgagaaacctcagcacacccatgatctttgtcaaggctggagacttgcagtgcacactccaggcctgtggaaatggttccacctgggtccctctattgctcctcagctgccacattagggcacctcgcccaagtccacgtgtgggatgtgcctgcctgtggcccacctaacgtatgcagtctgtctggagtgccaggcacaggctcctcacgtgggcttcagctggaattgaaaactgcatttctcaaggtcagcttttccttgccccacaggctagctttagtaactagcaatgtgtgtgcacgtgtgtgcgtgtgtctatgtgcgcacacgtgtgtgtgtgttaagtgagtgggagaaaggaaggggaggggagacccagctatataagcacgttatttattcccaagtctgtcctagttaggaaaatattccctaggatctcagtatgaattaacattctttaaacacacacacacacacacacacacacacacacacacacacacacacacgcctcgtgctctccttctcctcctcctgacatgatggacggcaggcgcagcccaggggcccgcaggtcacgctgtgtccacgaatccctctgggggctcttctttccctgggtcctccatgaaggtctgaaacagcccggaccctgctccccatttcttcccagctcaacctgcacctcccccggcttcaggcgctgaaggaggcagggttcttctttgttaaggatccagagggcaggcaccgagggtgctggaagggctgaagggggtggagggagaagccaccctgccacacaggctcccgtcggccccagcaagagcctccccagctgccggcagcatcctgtgatccccggagagatttttcatgagggctgtatatttggagagagagaggaaaaggcagctagcccagggaggaagcaaccccacacgaatagcggctgcatcataaatatttctagatagcaaatagcccattaaaagcccacattgtaatgccttggaggggggctgcctttccctgcaataccccgggaccgtcggtaaagcaggctttgtcatcgtctgcgttttcgccgcggcgctgtcctgtctcagctcctcctgactcagctgaagggggctggtgaataatgcatcacctagggagaggcgctggggctgcggggcacagctgagcgtgtgcagagggagcccctcaggctttctctctgtctgcctccatcttaccgtatccagagaccacactaaaatggtggctgacgtggagacagaggaagctcctttctagttatggccacaaggcaggatgctgaggtgttgtctaggtaagaagcaaatcttaaccttgggtctcctttctgcacatgcaatcctgtatggtgatgtctctgacgttcagggagctaagtcacaatgcttttatgttttca

SEQ ID NO: 22833 - DNA, 2300 bp, Homo sapien
caaatgggttgactctggatgcaaaggaatattttcacatttttcccaatagaggaaagcttttagtgccaaaatcctcaaaggagaatgaacatcacacattacacatgtatgtataagggtagaataatatggtacaaaatccagtgagtacaagcacacaatgggcattcagtacaggttaaatgaatatgcaagaaaaattcaaagttgttgttgctgtttataagggtggtgattattaatagatgcaaatgtatactcccttttgtaatcacagcaaggtaaaagtcttatctctgatcattaccatgaggacacttaaatatttagccctggggacaaaatggtttgtaggcaggacgtcctgtgtgtttatgcacacataaaatgccgccctggccccaggactgcaaggcctctgactgcatcatttacattcaggggtggtcctgatcaacatggccccatagaataatagagggaatttcagatagtacagcgttagataataagcgctttccactgactctgtttacatgtggaaattagaagcgctgagtgaaaaagagtagtgaaaataaagacaggaagtatatacacaacaaacaatttttcctctctgcaaatcggattattcccttgcgcaccccctgcaacccccatctatgatgtcaaactcaatggactgttgaactaatagcctgggagtcaccagcgtgagagtgtgtatgtccacgctgtgcaacttgaattaggctggccaccacggctgtgtacagctaccccaggaagagcccctcccctcctcagcatttcagtggaaaacgtgctgactgggacccagctacaggaatcacatttgggcagagagaatggcttatccttttcatgaggggtcttgactcaagaacacttgccaattctgcttgaccgtttcccattctttacggtttttcctatcactccttagactaagaaagaaaaatctgtaggaatgattcggtgggatttctcttttgttcctaaataaaccttatccctggatgagctcgttcacactagggaagttactaccactggctttgaagccaggcagatctgggtgttccttcccatgtctttatttgctttgtgggggatcttttcccagcctttctgctttcatccttcttagtgagagcttcttcagctgcagaacaggggcaataatgcctaccttgctgggttgcagcagagaatgctgcttatgcaggaaaataaaaaaacacatagcacacaatgggagcttaatacataagaattataaacagtcttttgtgtatatatcaatgtatttcatgtccttaatgtttatttaaagcaagtacattcttttgaattaagcataaaaaggtcataaaatgccagagatgtgcttatttgaaatgtttgcaatgctttgcaattgttttaaaataaggagatgatataacagggtgttacctccgccactaattagttacgtaatcttagattatgtcacttccctgggtctcagttgtaaacagttgcttaataaataatgtttgttttgctttcatcaataatccagaattaggcagtgaaatatggaagctacattggtaggagcttctgtgatggtcaggtcctggaggaaagtgtgagttggaacctccaccttcctccctaccaacgccctccagaaacactgctcactggatgcaggggcgcttctcctgtttctagttcacttggtctagaggccagccaggtaggagtcatcctgttcttggaggcaatgtggcccagacccaggctctagcagcaggtctgactgcagcactttctccctcggggtggctcccagtcccagtgtggtgggcccacccttccttaccaccaggcgcctctcctggaagctgcgaaaaccttcccccctttcaggcactgggaatcagcattctttggcgtatgcctggatttgccccagaattatcctgcaaagtctctcccctcctgacctcaaatgttcctgtccctacaaccagacggtagaccccagggcctccggggctccttccagtgcctccttgtcatcttttgaatcacagctcatgaggcaacccacacaggcaggctggagaggagtggcaagaagctcaccttcggacagtagtgagcagagcaacagaggcccccagagacttcgcacaacggaaaagagatcaactcccgcatttgcaggggacgtgaaagtgcaatactgtgaggaacaaaaggaagcctcatctctggaa

SEQ ID NO: 22834 - DNA, 2300 bp, Homo sapien
agagtctttaggatttgctaggtatacaaacttatcatcagcaaacagcaacagtttgacttcctctttaccaatttggatgccctttatttctttcttttgtctgattgctctggctaggacttccagtactatgttgaatagaagtggtgagagtgggtatccctgtattgttccagttctcagagggaatgctttcaactttccctggtcagtattgtgttggctgtgtatttatcatggatggcttttctacattgaggtatgttccttgtatgccaattttgctgaggcttttaatcataaagtgatgctggattttgtcaaatgctttttctgtgtctattgagatgattatgtgatttttgtttttaattccatttacatggtgtatcacatttattgatttgcggatgttaaaccatcccttgaatattctttgtatattgtggatgcaagtctttcgcaaaatgtgtgatttaaaaatatttttccaatgtatagctgccttatctttctttcaatactatattttaaagagtagatgttctttcttttgatgagattcaatttatcattttttctttaatagatgatttttttgaatttaatctaagttcaaatcataagatttcctcctatgttctcaactagaaattttgtaattttcagttttgtatttaggtctatgatccttatagagttaatttttgtgtagagtgcaagatattgattgtggtttcttgtattacatatagaaatctgattgttccagcatcatttgtaaagactatcccatctccactgaattgcctttgcaccttagataaaaatcaactgggcatatacgcatgattatatatgtggattctattcatgtccattgatctagatgtccactctttctgtaatgtcagtcttgagtggtgtagctttacatcaaatctgggcatcaatgtgagtcctcctaactttgttttttctttttcaatttgtattatgggttctagttactttgtctttctatataaattgattggaattgtgttgaatctatagacaaattgagagagttgacaacatcgaatcttccattctatgacaaagtatatatttccatttaattagattgtacattatttattacatcaatatttgaaacaaaattttagcatacagattttgcataaatttttaaagttttgtaactacctcaagcttattgtactattgtaaatgataccatttttcaaatcaattttcattttttgtggctaacatatttagataccattagtttttctatactggcattgtactctcatgcctttccaaacttagtattaattctgtttaaagattcttttggattctctttgtaaccaattcatgtcatctacaaaaaaaaaaaaaaaaaaaaaaagaaaaagaaaatggctgggcacagtgtctcatgcctgtaattccaacactttgggaggccaaggcggcagatcccttgagctcaggagtttgagaccagcctgggcaatatggcgaaaatgtgtccctacagaaaatacaaaaattagctaggcatggtggtgcaggcacctgtagtcccagctacttggaaggctgaggtgggaggattacttgagcccaggaaaccgaggctgcagcaagtagagattgtgctactgcactccagcctgagcgagaccttgtctcaaaaaataataataataataataataatgttttatttattttcagttttcttgtcttttttctgtattgtgtttattgaacttgctaagatctctagtataatgtttaatagtagtagcatgatttttttgatgatgtcttatatttggttgaggaagtttatttctatatctaatttgctgacttttgaaagaatcatgaatgcattttgaattttatcaaagactgtttcttcatgtatcaatataatttcttttttttacactttttagttttttcatgatgaattgtacagattgattttatttttaaatattgaaccagccttgcattctcagactaatctctacttgatcatgatgcattctattttggtggattcaatttgttagtattctgtaaggacatttgtgtttatatatatctgtcatatgtatatatatatcatatatatatcagtcatatatatatctcacacatatatgtaagtgattttatgctatgtatctttttttcttctgatatctttttctggtttcaatgttagtttaatgctagcttcatcaaataagttgggaagtggtctttta

SEQ ID NO: 22835 - DNA, 2300 bp, Homo sapien
cagaggcctgaacacagagacagaggaagggagagagagagagagggcagctctggaggaggcgcagagtatgggcagatgtcctcatgaaaaatttacaaggaataatcagaggccccttctctcccctctggccaaagtccccctaggcttgttgcccgggccgctgtgagaatattggaaaagtccccctcgttttgaaggcaatctggttctggggggttaatgcccagcgttgatgcacttggctgtcctcttgagaccgggttgcaaatgcagttcaggcaaaattgatgaagtatcagttaatctgaggctgacagtttagagaggtcacagctgcgaggggctgccagggtctcccagagacaggactaagaagagttaaagccagggagggcccggtgaaaggaagcattcatcttcttcgcctgggcatttctcaaacattgcgcctgccaggatccctgagcctctctccaggtgagcagtgtgagtggggaggctttcactctggtgcgcacagtcatgcctcctcccagacaaatccaaacccacatgcctggtgttcctggctccttgggaaggaagaaggagggagttgctgctcctaattgaaacaggcagttaggtctcctatgcaaatccccttgctgtaattggcactgtgagtgccgcctgctcattcctccgtttcccgctaggggaaggtcatcttggtaagagatgtgtccacacggggtgggctctgagctgctcagaaggaactctgcagaagtggggaaccattgactcacacccttcccataggtggtttccttcaggctccagcaattttttacaacaaggtggtacaatgagaaaaataccgctctgctgttagaccacatatttcaatccttgtacttcctaagagttctgatagtccaagaggctgggggctatggccatgtttctcactcgaattgccctggtactgaaatgcatcacgtgtaggggagactcagtgtttgtgagcacacactgagtgactataactgagtgatttcagagagacagaagaaggcatgcaaatgcacttgtcttgagttgttttctaggggacatgctcagggctctgggacctacctagtcatctcgctgcctggagaggcggctgcttggccatgttatctccatgccttctaaattaggatgcggctttaggttcacattcataaataattgggttttatgggataggaagcagcaagggctttgcgttgatcggccctgggttgggtcctggcctccctaagctttgagaatgattttatcatcaccattgcctgcttatgggaaaatagggcggcagttagtcgtggagtccctgtgacaaagtggcaggtggatggctgcgccgggggtctaacctgcgctgtcacactccgttccctcttcctttcagtgacaagaatgcaagtaatagtgctgagaatcgtgtgctcagctgtgctgggctgagcattttatgtgcatgaactcatccctccctgcgaacttgtgagaaaggtattattattatcattattaatattattattaccgtattctctctgcttacagacagagagattgaggtgtggcaagtaggtagtaaaatccaccttcttcttctgtgaggttcctcctgttcccaggggtgtggggacggtgagtggtggatgggtgaggtcttacaatgcaaaactgctgatttctacatccgaaaaaaatcatgaatatgaacgattatagccagattgaaactatcattattttcggtaagaaaaagtgcgtctattcacagaaagtcaggtacttttccccaaaatcacatgggaaaagtgtgcaaatacagaacagcccttccaggaaggaactattttctccgaaacaggaaattgttgtacattcagacacaccataaatacacgtctagtttgtacatggcaattccagggtctgaggctcttccttcctggccctagaatggcgtctcttgcgctgtgggcttcctgttgaggcaggggctgaggaggtgggaagcagaggctgagattttccttcaccacggtcacagaagatgcgctgttccaggggcctgggtgggagcagcccaggagcctgcgtctcccctcctcggccctgggaggcggctggactgtgccacacgggacgggtgctgagggaccgctgggtgcccacctccctgacccctcctgcaggggtgcctgccaagcagcctgggcactgccgtctggaagatgcgccgtgccggt

SEQ ID NO: 22836 - DNA, 2300 bp, Homo sapien
aatttgcaatgatccggctttagttataaccagtgtctgataagaattagatatttatcttatagtaacagtgtgatacagttttttttaagcacttgtctgtatttgtaacaactatggaaggaaaacaaaccttgcatgatctgtgttttccagatgaggagatggaggctatattagcttagatgacttttacctacatgtacaaaacaggtggggcgggggacacaggcagaataatgtacagttcaggtaacacagggaatttattatgtggataccactgtgtacttttcactgtggagaggagttcaattctaaaatgatcaaaattttaggattttaaagaattgggccgggcatggtacctcacgcctgtaattccagcactttgagaggccaaggcgggtggatcacctgaggtcaggagtttgagaccagcctggccagcatgatgaaaccccatctctattaaaaatacaaaaattagccgggcgtggtggtgcatgcctgtaatcccagctacttgggagggtggggcaggagaaatgcttgaacctgggaagcaaaggttgcagtgagctgagatcgtgccactgcactccagcctgggcaacagagtgagactccacctcaaaacaaaaataaaggattgaaggtggtaatttgaaagtacaaatgaggaggggcccctgggtatctctacgttggaatgtttatatcataaatatttattgtgagtgatggtccttttatattggatctgaattgtccatttagtcctttaaaattggaagatggcatgaacagggcaagagtataataaactatgctgataaatgaaatcgttctaattcatttattcatttatacacccaaataacattctttcattgcatatctattatgtgccagacatgcattactaaaaaagatttcccactcaagaaattacctaatggaggagacaatagatattacacttataacaagtagttctgatttgcaatgaggagtttttcagtagagtcacgtagaaagggttttgagagcacagaggagaaaacagtcaattctgtttgggggcttcctaggagtctgaagggagaggagagttttgctggctgagaacctcactctcaccagaggaaaaggtaagcaggtgcagactaggagggatgttctgtgtcttaccagaagaccaagcatttcctgtaggttgtaggaagccactaggcatttttaaatagagactgatttgacttttgtgtatggtaataactttgttttcctcccccaaaatcactttttaaaacagccagcagaaggagcgactgacttgcttagggaggactttcatggagctgggcagggcatatttgtctccctgtctcatactgaggcaccatcagcagactggatagttgggagaaacaaagaggcttctacctcaggggtcccagaatgtgaatttcattggcaagttcaagtgaaaacagtgtaggaactgacatggcctttccaggattttagtctgccaagacacagcccttaaatacaaatgaactgccaaacaggttcattgtcccctgtcaccctccattctttcatagaggaatgcggacagcaggaccaaaaagatgtgatgacagaggggaggccacactaaatggtagtttgagatgggtcaatggagctgtgtgaagaacacactgcattattactgttgtcaattttattttttaaacaatattgtataactttttttagtttataaaatttaattttatttaacttatgcaatactagaaaaacttctgtagagccaaccctggtttcatcattcctggctgctgattttcagatgctactttgacttcttctgcagacagagaactcactaccccattccttctcaggtactggcacagcacggccacctatgccatagccactgaggtgagtgggggtctccagcacctgcccccagcccatcaccctgtgtaccagtggccagaggacctgctcaaacctgaccttatcctgctgctcactgtgagtcctgaggagaggttgcagaggctgcagggccggggcatggagaagaccagggaagaagcagaacttgaggccaacagtgtgtttcgtcaaaagtaggtgtcccagtgcaatgcaatgtgagcggcaggcattcctgaagggagatgaaccactggcactggctttaggattgtgaggaagtgatattgtttccagttttcaaacacaagagacaacatcctctaagttacttcagcccc

SEQ ID NO: 22837 - DNA, 2300 bp, Homo sapien
atataaacatccagctgtggctctcagagtctctgtcctacaaatttgaaggggcttgaaaatctaacagaaatttttatttatgaatgaagatatatcttcaacatcttcaacacttatataatattgactaagcccaaatactgcagtgttattaactttacatctcttcgtagggcgaaggtaggtgaaaaatagagaggaaaacttaaattaaaaaaggtaagatgcttcatttagcaaactgtgtgtcaggttttctttcagttggaggctcagagaaaagttaggaagaagctggtcttcctacttaccctcaaggtgctcagtggtgggaaatagactggcacgtgactgtggagtgtcaaggtccgaggatacaaatagccttggtgggggacacaggagaggctactaacccagatatgtggggggttataggctatatcatgtcccccaaaattcatgctcaggcctagcccccagtgcctcacagtatgactgtatttcaaaataaggctttcaataggtgattacattaaaatgagaacattatgatgggccctaacccaatctgactggtgtccttcccagaagaggaaatttggaacttcaaggagacgccaaggatgcaagcacaaaggaaaggtcccgtgagaacacagagagaaggaggcggtctgcacgctagaaagagaggcctcagaaaaagcaaaccctgctggcaacttgatctccagcttctctggccacctgaactttgagaaaacaaattttctattgtttaggcggcccagtccgtggtattttgttatggcagccaggatagactaatacatccagagaggtggatggcatagggaaaaggtcaagcaggcttgaggatgcagtactgtcttagagaagaaaagggagtaactagaagactcttacttccatatactacatacacgtgaaaccaccggtacatgctaaatgtccaaaagtgaaattcctgagaaagaataaaaactattctattctcaaagagctaaaaaattttaaactcctaattcttctttcttcttagcctattaacccacactccaaccacctatctatatttcacgtttgttaagactttttttttcagaattaaatataatcccaagtttaagtccaatactattaagacataaaaaaaaaactgctttcagctcatctaatgttttcaatcttcgtctcaattctatttttttgagagagtttccctggagaatattatctttttgtttgtttttggtttgcttgacatcatttttaaaaggcatcagttaatgagtaaacacagaataaaatatccaaataactgcgcaaacactgttacactgttaggcagttacactgttaggcagcaacagtgctgatgctggactgtggcaggcagagggtgctatcctgacacacttcaccttagtgcaggaaacttcaatttggtggaagaaaggcgatttcgaggtgccaatctgggcgacacttcccagttggagagtcagcaaaagggagagggcaattccaagaagagggaaaagcttgtgcacaggtgagtgtgtgcaaaggtgagtgtgtgcacaggtgagtgagtgcacaggtgagataagatacaggagagggaagagccagaactgcgccctgttcccgcaggaaagcagctctgcaggattagaggggcggggacgcgtggtcagagctaggagttgaggtcggggagggagcccatggtctgcagggcctggtcagtcatccaagggcagtagtgcgcctgcaagtgggcgttgaagagcccgttacaccgggaagggacttctctgtccctcgcgcgtgcacccccgcccccctccatgcacccggcataagccgcagaggaggaactcaaaccagggtcggggccgccagccacccgcagaacgcacacggagctaccttggggccgacggcgcggggcctcattcggtgtcagccccgggagccggcgcctggggaccgcgcaggcccgcggagccgcgcacctggggccccggggccaagcgtctgctcccgagcgccggccgtttatcgcgcacatctcgcggcgaggaggagaggccggaagggcgccccagccccagggctcctgccccgcctgggcctccggctttcgtttccccgcaacgcttcgctttcgtttcccgctggcgcctggctccctccgggtttcgtttcccgccggcgcctggctcccgccaggtttcgtttccgaggcggggccgagggcggcgtcg

SEQ ID NO: 22838 - DNA, 2300 bp, Homo sapien
ctaggcagggacttcttagaaacattccaggcccatattttattctcccagaaaggagaaataatgcttgagttatcctcaccaggagatttggccatggaaataccttttacccaaattcccatctattcagttatccccaacactacctgccctgttctctaacagctataatccaacactcatgataatccctcagattatgaagataatagttgtggatactctcaaggatataattcatctagaagggttaaccctagaaggagctagattaggaaggtttttccggtcccaatttaaactagattctgcttggaattcataaatgatcagaaacccttcctgaactgttcgcaggattgcctgctctaccacccaggccatcagggtgcaacagaggtccatagactcccttgctcgtgtggtcctagacaaacacattgctttagactatctcctccctgcacagagtgatgtttgtgctgttgctgccactttccacagggtaaatacttccaggcaggttgaatttgaaacatctaagatcttaaggctagccaaatctctgaaaaacagcttcaaaaagcctcctggctggaccttctaggttaagtttctgatctccagatatttccagccggcttcccctgcagtagggttccttctgcatgccaccctacaagtcttgatcctccttatgtttgggctaagcatttggagcctctttaagattttcctagcctattttaacagatgcctgcaagagacccccactaggatcgtgctgacctaacctttgagacttcaaaggttgctccagccagaaaggggaaccaagttaacccaaaagaatttgattcaaatttaacaggtgcctgtatgcctctcatgatcacatgtttatgaagaagtgagatctatccaaaagtggttttcaattgtgcaagaccatggcatgagagtttaagaaactttgggctgagatttcaaggacctgagacatatctactgttgaatatttggtaatcattaagcatacaattttgcagatgttaaatgttaagttaaacatgtttaattttttttaagtaaaataaatcatttctgtttctattcagaatatgacagtatcagaataacaggagctaaccctaactgaacacttaaagtttgccaggcactattctgaattcttcacaaaaattagcagttttactctgcacaaaaatcgcctgagatacgttgctttgctgatgaagaaatggaaatccagagaaataaagtcgcttactcagtcacccagctacatgatttgtggctctggaagttcagctactaggactcttccaacttcctacaggtgtcacgaaagcacaagaccacacacttacacacagttctgatgaaagagggctaaaaggaagatttcagtaaaaaggtcaacaaggctttctaaaaaaactgtaaaggtaaataaatgatgtgtcgcagtaattctcaccaattaggaagcatcttagaaaagcattggatttcctctagttaaaaacatctataaaaagtgatatcaaaatataggaagatgtaaatatctaaattttaacactgtcaccttgcataaattaggctgaatagctgatggaataagacctaaattcaattttgttccatgcctttttactgtgatctgaaaggggtcttgaggtgaatgatcctgtactcatcctccaccagccaatcagtctgtttattatttggctttaaaaagaaaccccttcaccatgatggagcaaaaactgttacttggctatgtcaagagaaagcaatgcaacaagtacaaagcgtgctgattaatgcaccttgtctatctctatcagacagagagctagatattgatagagactgctatcctcatgtgtaactacatcaagctagagagactgttataatacaagtggactgaggcagccgtgagcagagaaaccaggaatgctcgccccgatctctagtcttcagtcttggccctgtttcaactttcagtttcacatgtggaaaaatcgaaactctaactcagctgagtgttagtcaaagaaggtgtgtcctgctccccaatgacaggttgctcagagactgctgatttccatccctatataaagagagtccctggcatacagagactgctctgctccaggcatctgccacaatgtgggtgcttacacctgctgcttttgctgggaagctcttgagtgtgttcaggcaacctctgagctctctgtggaggagcctggtcccgctgt

SEQ ID NO: 22839 - DNA, 2300 bp, Homo sapien
ttcaaggccctaagagggaatatgtagaaaaatgctgttctctagaatcgtaagatctaagcatcagaaagtgaatgccacaaacattaagtgtggcagatgccatgatcaacacagacaaagactaagtattacaccagctcagagatcagagatctagggatggggaactccatgataggccgggaagtctttgcagggaaatctgcatctgagtgccttttgaggcctgctgcaaacaaaactttcaatgccagtgtcccctctcactatctccccaacaatggttgcattcacaaagacagagcaggggaatgaagtcacatgtattaccacatgagcaattacaagtctcagttgggtcagggcatttttgcaccttaactctcttcctgcagccccagatgctcctttgcagtcccccagcttgagtgttatacgtctgtgttccatgagaatgcctgcatcttaatacagacccctttattgtggggaacacagcacaacgtctgtgcatttgcagtcacccacctgtgcatcccctgaatccttcattcataagtagtactcaaccaggaacttctttggtatcccagctcggacacgggaggtgtgaatatatttttcataaagcccaggcctttatgcagaacgattttcatcctctagtgagaggctgaagtaacaaagtgctgttgttaagattcttcccattgtgcatttttcttgaataatgacatttctaaaaagaatctgaaactgaggcattagaaggcaagtgctcgttcatatatttgaagaggtcaaatatttaccagaataacttctcaatacagaggggacagctttattttattttactataaagatgtatgtgtagcagaagacaaattatgcagagctttgagttagttaagaatcatctgatttaattctttggagaaatgagacaaattgtagctaaggactatggagttgttttagtttgccagttatatttaatttgactatttctttatttattgagagacaaagtctcactctgctgcccaggctggagtgcagtgatgcaaacacagctcacttcagccttgacctcctgggctcaagcagtcctcctgccttggcctcccaaagtgctgggcttacaggtgtaagccatggcacttggcctatttgacttgtttaatccctccgaagaactcatacatactattgccacctcattttccacgtaagaaaatggaagcacgaagaccttaataacttgcttaatggctagtaggtggtagagcttgaatttagaccacacagtgtggagggtatgctattaaggaaaaacgatgttctagtggggtttccatttaatattgcagaaaaaagaatctatatatttaagaaggtgttatttcatgcacactcgtaggttttgttcatatatgcacatctgacgtataatttaacatttgtgtaacttcaagcttctatggggagtggcagaagatgcaggaattctattaataccttcgcagatcttagattccaacaagctggataccttaagaaaaataaagaaattgctgtgcttggatcccagatgtccattccaccttttgggacctcccggggggccctcttttcttcatccttcaagacaaggatagtggggtgaacagacagactttccttgcgagggttggctcaggaaggctctgggctcatctcacagccgccccagcgagggtcggggaggcaggtgctggctccggtggggtctgcggcagagcaggactggagcccagggcgcagctgcacagctcaacgccggttcgcgccctggtttacagcgttgggctgggtcaccccttctttcctagcttgctgctgtgtgttccctcggtgtaggaatcaggggagtgtcttctggaggccactaaagcaggaatagcattttcatgttagcgtgcacgggcggtctccgcagcccctcctcgtgccggagcctgtcctggggcctgcggggcggctccgggcctcgggccggcgcaggcgggcggcagggggcgctgtgcggctcggcgcgggggcggggccggggccgagcctcccgcgtgcccggcctctgtgcgcgctcgcgccccgcccgcgcagccgcttctccccgcgcgggctctcggcaggcgggaggcggcagggctggcattgcagtgcgggccgtgcgggctgcgcgggcgcggggaggcgcgggcggcaaactgcgggcacccggcaccccgcagccagtaccgggcggaggcgtc

SEQ ID NO: 22840 - DNA, 2300 bp, Homo sapien
cgggaccctggcccggggcgccctgtcccgcgccgcagcgcagacccgcgaccgcgcagggcaggcagggggacgccaggtccctaagcgcccactgccctggggcgcgggcgccgcctgcgagaggcagggcagggcaggagcagagcagggacgaggtcagggacacgggcagggcagggcgggcgtcctctgaacggagcccgcgagtccccgcccgggacgctgccccccgcccgctgccaccgggcgccggggcaggacccagcggggcaggcgcggccgcaagccccgagccccaaggccggccgcgcagcgccgcgtcccgccctccccgctccgcggccggcccgggcgatgcggacacaaaggggacgcgcgtcactctacctgggcctgctcgtccgcggtgcgcggctctgacgcctccgcccggtactggctgcggggtgccgggtgcccgcagtttgccgcccgcgcctccccgcgcccgcgcagcccgcacggcccgcactgcaatgccagccctgccgcctcccgcctgccgagagcccgcgcggggagaagcggctgcgcgggcggggcgcgagcgcgcacagaggccgggcacgcgggaggctcggccccggccccgcccccgcgccgagccgcacagcgccccctgccgcccgcctgcgccggcccgaggcccggagccgccccgcaggccccaggacaggctccggcacgaggaggggctgcggagaccgcccgtgcacgctaacatgaaaatgctattcctgctttagtggcctccagaagacactcccctgattcctacaccgagggaacacacagcagcaagctaggaaagaaggggtgacccagcccaacgctgtaaaccagggcgcgaaccggcgttgagctgtgcagctgcgccctgggctccagtcctgctctgccgcagaccccaccggagccagcacctgcctccccgaccctcgctggggcggctgtgagatgagcccagagccttcctgagccaaccctcgcaaggaaagtctgtctgttcaccccactatccttgtcttgaaggatgaagaaaagagggccccccgggaggtcccaaaaggtggaatggacatctgggatccaagcacagcaatttctttatttttcttaaggtatccagcttgttggaatctaagatctgcgaaggtattaatagaattcctgcatcttctgccactccccatagaagcttgaagttacacaaatgttaaattatacgtcagatgtgcatatatgaacaaaacctacgagtgtgcatgaaataacaccttcttaaatatatagattcttttttctgcaatattaaatggaaaccccactagaacatcgtttttccttaatagcataccctccacactgtgtggtctaaattcaagctctaccacctactagccattaagcaagttattaaggtcttcgtgcttccattttcttacgtggaaaatgaggtggcaatagtatgtatgagttcttcggagggattaaacaagtcaaataggccaagtgccatggcttacacctgtaagcccagcactttgggaggccaaggcaggaggactgcttgagcccaggaggtcaaggctgaagtgagctgtgtttgcatcactgcactccagcctgggcagcagagtgagactttgtctctcaataaataaagaaatagtcaaattaaatataactggcaaactaaaacaactccatagtccttagctacaatttgtctcatttctccaaagaattaaatcagatgattcttaactaactcaaagctctgcataatttgtcttctgctacacatacatctttatagtaaaataaaataaagctgtcccctctgtattgagaagttattctggtaaatatttgacctcttcaaatatatgaacgagcacttgccttctaatgcctcagtttcagattctttttagaaatgtcattattcaagaaaaatgcacaatgggaagaatcttaacaacagcactttgttacttcagcctctcactagaggatgaaaatcgttctgcataaaggcctgggctttatgaaaaatatattcacacctcccgtgtccgagctgggataccaaagaagttcctggttgagtactacttatgaatgaaggattcaggggatgcacaggtgggtgactgcaaatgcacagacgttgtgctgtgttccccacaataaaggggtctgtattaagatgcaggcattctcatggaacacagacgtataacactcaagctggg

SEQ ID NO: 22841 - DNA, 2300 bp, Homo sapien
attcatgtgtttcagtaatgcagaaacaacggagaaaggaggctagtcttggaaatgattacttcttaaagaaaagaaaggcacctccaacttcattcttcgatctcaatgttagaaaattccccagagaaaacacggagagtccctcttccttagaagcactccattccattccccgcctctgggctgcctctgagatcccacatcctgtgaagccaggggttccttgctctaagagagtctgagggctcaatatcatcctgaatggttccagaccacccaacgtgcagggcagcgagcacggcttcatcctcttctattgcaagtgaggtatgggaaaaaagggacagcagacagaaccagaaaagctgatgccagggctggaccagccacagcttttcatgtggcctgggctacctgacccctcctttccaagctacgaggttcccatggttacaacaagggttcataggccaggtgggtgctggcccacctggttctgtgattgtcagtctccaagggcaggcttccttcccatctctacccccagagggaaaggcttccaggagggagaaatgtgaacaaaagtaggcagtggggccacgtggtggaccacaggggaaagaatgttctcagaggcaggcaacgtagcttgtagctcccaaccctgccgccgcctgccagagtggcacttctacccctgaacctcagcagcttcagccaaacagtgtgaggtcccttcaaagtcccaaaccacactgaatccccaggagacgtgacttactctagcaacagtctggatacagggattaccaactagcaagctgagggcactggaatctatttataaaatatatgcattttacaatgctctttgagtttcccaaatcctcatggcacagatgacctgggggtgcctgcatcgtgcatttgagtttgcccttcattagttcctcttccagagttgctgacattagaatcgggagctctttaaaaacacaaactgcaaaaatcaaattgcactgggtctggaaaatttccatcccattaaaattgggttatttgcacccattttctcatgaggtcctcaatccatccacagcctttgatgcctgatgcaggtggaagcccacagccagtgggggtctgactcggaagccacagtaaggcacaccacaccatgccttcccttccacgcaacaccgcggaaatcactctaaagcagggctcagatcaccctcctcctccaaaaccatcaatggctcccactgacacagagtcaaacccaaagtcttggcctagaattcaaagatttcatgatttatcctcttctgacccctctagtcacatttcctttgcacgctttaaaaataaaaacaaaaatgtaaaaggcattagaaaagtgcaaaaaacaaggttccctaatctcagtaccggagaagagaatacaataaaaaaggctgttgtctcctttggagccactgggtgaatcccctgggaaagttcacggtgtcacacaccttgtccctcccccttcctgcgctggagcagctctctctggacagaggcccttcctgccacctctgacctgccccacctgcaagctttgactcagacaccccctcccttgcaaaggggactccctttgcagggacaccctgactccctcccttccctcctgggggctcccacagctccacaggcgtctacaccaacttactttctacctggcatttcatttacaaatccatcttatctgccaggctcaactctcaaccccagccccattcactggggcatgtcctccttccatctcccaggccccattacgggaagtgttttcttcccaggctcttagtgcaggagctagaccccctctcaccgcagggcagcagggatccactggggatagttccctggggccttacctcactcctctgttaccccagccttgatcctgcaggaggcagcgcaggatgtttgttcaatggatttttttttttttttttttttttttttgagacggagtctcgttctgtcgcccaggcgggagtgctgtggcgcgatctccgctcactgcaagctccgccttccgggttcacgccattctcctgcctcagcctcccgagtagctgggactacaggcgcccgccactgcgcccggctaattttttgtatttttagtagagagggggtttcaccgtggtctcgatctcctgacctcgtgatccgcccgcctcagcctcccaaagtgctgggattacaggcgtgagccaccgcgcccggccagttcaatggat

SEQ ID NO: 22842 - DNA, 2300 bp, Homo sapien
gattgaaatgaaacaaggaagaaaccctcctattattaataaactggacaaagccatgcaagcaaccacattgctcctaaacggctgccctcccaggctgacctgataccatgcacctgcaggtctgactgagtactgttcatgtcagaactgggacagtgtgcccggcagagtccagaagcatctcctagtgcagcggtcgtggtcagtgcttgagcagagaaggcaagactgtggggacagagacaggatcctgctcaagacttcaggccccactggatttgtgaaaagacctgtgacttctctgtaaatgttcctgttttattcatctctaaagtgagaattgtaccagggttacttcttttgtgggaatcctctgaggattaaagaaatcatgcctatgaaacttcaaaggaaaaccttgaaggcctgtccaaaatgcagattaacaaattaccattggaattacccaggtcagaagctgggttttgggaatggggagggacaggcctgctgacagcattcagagtccactgtggagaacttcattggctcataaaagactgccctctggtccacaaaaatggaagtatttgacccatgtcatttttttcctagttttcagttaaagatagcctagatgaaataatgccatatttccattttttctctaattttctgttttggtggtggttttgttttaaatttatggtgaaaatgccagtggctcttgtgttatctagaggtgtgctgtttaatctccagatatttggagattttccatctatctttctcttactgatttttagtttaattccattgtgatatgaggccatactttgtatgatttttgtttttttcttgtttgtttttacatttaagttgtgttttgtggcctggactcttccctttgaactaaaggaatgtgtattctgctattgttggatggagtattctttatcaagtagatcgagttgattgttagtgctattcagttcaactatgttcttattgattttctgcctgctgaatttttccattcctgataaaggggtgttaaagtctacagctattagtagtggatttgtctgtttctccctgcagttctgtcagttttgccatatgtattttgatgctctgttgtagggtattacatgtttagcattgttatgtcttggaaaattgatctctttattattttgtgatgaccctctttgttgtgatgatttttttcttgctttgaactctgctttattcgaaattaacatagctagtccagctttcttttgattagtgttagcatggtatatctttttccatccctttatttttaacatgaatcttcctatttgaagtaggtttcctgtggacaatgcaacatgtagttgacacttgctattttaccctccctgaatatctgtaccttttaactggtatatttagaccattcacaattacacacactttaaaaatagaaaatactgtgtattgctatttggagatttttttttccttaatatattaagttaccttattcctttacaaaattacatagccaaaggaattgctttctaagttctttaaaattggtgtgtgttttatctcaccattctaaataaactatttttttcctgtggtaatgcctctactataacaagcttctcattttgtgcctaatttggtatccggtcagataaatcaattggttctttgtgagcagtttaagcctaagactcagcttcatttttatgagtgataccttagaatcaggaatgacggcagaattagccaaatgccttttatcacaataagagaattttaaacaatactcaatcaattgataaccaatgaaccaacaagtttgttccatagctataatttgacaaatatctccactgctgaagagtgtattttgttttcccccagagaagacaagtgcaaaataactcactgcagggcaactctaaagggatccctgtgtttcccagtgtacagactattagtatacgatgcatgcaaacagagaggtgctttattgaagcgggacaagacctctattcatagtaaagtcaaacaaaccacgcatgtgaaaacctccacttatagcggctgcataagcttaactgcgcagagctatactgctttttgaaatactaacttgcaagttcagcaacagctaagaaaacaatcctagacttggaaattgaaagattggaagagaagtggagggattcctttggaaccctttacgtacgtatgtgtaaggaattgtaggtaagtgggagggtctctcttgagca

SEQ ID NO: 22843 - DNA, 2300 bp, Homo sapien
tggtcctttagaattattcaatgacaagattttacttcttaagtttccttttgttaaatggatattataatcaatgttgtcatttctcttttaataattttataatcatgatattgcataattgcacttgtaattaagacactggtcaactcatttaaaaataattaaatgttacttaaaagttacgacctctatcaccattgcttaacttaccacattacttccacttctggttttgctagctgcagtttttaatcatgatatttgagacattaaacaatatactatccatatctcttataaaagcccatgaggaagatactattataattacaattttatgaataaggaagattaagatcaaaagattgaaaagatttgtgcaggtcacagagttagtgagtggcaaattcaagactgggatttattatttttcagtcctcctgagcaacagacttgctgctttatgttttatgggaactttctggatggccctcttttgcctttattcaactttcttgttttcaataaacagatttagatttagatctctatatttgtatttccaactttctataatctgcacacagtgatattttccctcttcaatctgttacctttagtcatttttagttttgttttcttatttatcaaaatcttctgataattttctctagcatttttgtcttcttttccctctactttcctattcttgtgtctgattaaaaaatgaattatgtaaagtcattataaaaagtagctgcttttccatttactcattattgaatttgacctcaatgtaggaaagtaaataagtgacacacttaaaccatttaatcacgtaacatagataaactgtcctgaaataccatgttgcaaaatactatgctacataaagtcatcttaggctcattttggtttcttgcacaatttcagtgtatttgtctcatgagatgatagtgctcagtgaggtgtgagggttcaccttgacaagagagtgaggctatatataaacaggtaacctgcaccccaggggctgcaggagaggcttttgcaacaacataaagggggaattcaaaatggccacatctaaaagcatacaggagctttattccccttagtaatttgaacttccctgctattctgggagatcatgagatatactcttgttctattcctgaggtgtgcataaaatgagttctcttatcaattctgcctgcccagtacagataatttagtgacagaacagagagcttctttgtgtgaattctacccagttgcctttgcaaatgcggcatgtgatttcatgtactttttacttttttattagaagttactgcatttgaattagctacaatccctctttttaatagattgtatcaaaaatgtctacgttccatagcattggtggaaccatgcattatgtctgaggacaaggacgggaaccttccgtggcgtgctatcagcagctttaaataggcattgagtttgaagatagagcacatgatgaaggaaagtcagaccccagtcggctatttagctttcagttctgaggaacctgtcattgcttgcttctgtaaacccagctaatgtgatttatctgatccatttcaatgcaagagaatgaaatggctccggtataacaaccaatacagaaacagcagttacaaacttacagggctgctgctgcttaaatatctaggctaagtacttttaaaattagcactttcatcttgttagtggtctgtaaatgagaacccctctaagcaatcagatgttcacaaatagggccatttcccatggaccaataatattcaaaagactaaagctgtcttgctaaggaggtttgactttgtagcagggttttaaaagatatccaaatacaccacagagaatcttcttctgggagaacggagtgtgtgactctcctctgatagtcttggaggaactgatgtcactgcccccgcacccctcttgtcctattctaatgtcatgtctttccctatgtctttccaccagtgcctgtgggctcctgaaggaaaggagagatgagatcattatgggcagaacttagaacctctggatgaatagagacgaggtaaaattctggcacctatccacagcctgaaccttggagaacacctccctttcatatgacttctgcaaagggcgtgtttcagctcacagggacaaagagtcactgcaccagagaaccagaaagaggtgaggaggagcatgtgctttcaaccattcctgatgtctcccgtatgtcatctagccaccttgttgctgcctttcac

SEQ ID NO: 22844 - DNA, 2300 bp, Homo sapien
aagaaacaagtcaaaactcttcctaaggggtggaaacttctcaaacgtaacccaagccaagaacattgacttattttggaaagtttctttaaaaattcatcaggctattgtttctgggtttgagtttgatttggtttgaattatgttagtacaaaataaatattgtaaataaataacagatataccctttaatttcagagctgaggaagaaaagtacactttgtgctggatttgcagccagccagtttccagacagagtttctgaaaatcaggcctcttccaatagtctgattgtgtgtaaaccagtcagcataggaatatctctatagccagcacctggccaagcagtggtcaaagaacaaatcattgcaagtccccatgtggagaagtcatagtgtcacaaacctcttaaggaattttacaagtcatcaccaatgtgcatttgggtccatcagctgataaagctgtaagaaatggccttagtaactgtcagatatggacctctcattgatattgaaacagtaaaagttcccttgtcccccaggcagggtgtgtgacagggggagtggctagcttcctcagtgccccactgcacaaacctctaggggagcatacaaatggtcaggctgtggggtgaccccacagcagtgtctagtgatgaatgtttccctttcctgaatccccagggggggtgtgtgtgttacagggtgctctttcagcttagccatccttgggtggcttgtgtttaaccgttcaatcccaaggacagggggctttctgtatcctggggtttcttgccttcctgtaccagaagaatcggatcatacgtgggcttggagaatgagtgcaaggttttattgaatggaagtagctctcagcagatgggggaggcagaagggagatggagtgggaaggtgaaggtggttcttccctggagtcgagctgctcagctgcccaggttttcctctgcctgccccggccaaactccgcattgttttgccggtcaatggcctgccggcgtcagtcggtgtgctcttccaccggcgtccttttgatgcccagctacttgtgtctctgcctgctagggtcttggggtttttataggcacaggttggggctgtggtgggccacgctggtcttgggaaatgcaacatttgggatcgaaaacaggagtgcctgtcctcacctaggtcaatgggcacaggcccaggggtggagccctagccagggaccatgcccttcccttcccagcacttccctgccccgcttccgtatcaatactgcaaggtatcatgatgacttagcagagtggtcatgctgttttttgcttgtatagcactttgcagtttgtaaaagggtcccatttacaggatctcccttgaacttcagagagattaagtcacctgcccacatgaaataggctctcattgtccaaccaaatttagcttacatattttttgaacactgatatggtttagatttgtggccccactcaaatctcatgtcaaattacaatcatcagcgttggaggaggggcttggtgggaagccactggatcacaggggcagatttcccccttgttgttctcatgatagtgagtgagttctcatgagctctgcctgtttaaaagtgtgtcgtacctccccctgctctctcttcctcacctcccctgctctctcttcctcacctccccctgctctctcttcctcacctccccctgctctctcttcctcacctccccctgctctctcttcctcacctccccctgctctctcttcctcacctcccccgttctctcttcctctctcttcctcctgctccagcgggtaggacatgcctgccttccctttgccttcttccatgattgtaactttcctgaggcctccacagccaggcctcttctagagcctggggaaccataagccaattaaactttttttctttacaaattacctagtctcaggtagttctttatagtaatgcaagaacggactaacacaaacactttctatgtgccaggcatgtaataaccatgctcatatatatgccctcattcgatctatttgaccattcctattttacagacaagaaaatggaggcaaagaacattggagtcactccctggctacacacactgaggtgataaccaaggcaagacttgaacaccactctctttctgattgcaaacctggttcttttcttattataatgttatagtaaatagcaaatgtcataaattgttatttacttactttcatgctgctcccactgggcaaaaagaacaaagaagaaataagagg

SEQ ID NO: 22845 - DNA, 2300 bp, Homo sapien
gtaagtgtgtgataaacgtcagttatcacttggagctgctcagtggaagtctaccctccttgacttaatttctcttgaaatagttaataattgttaccatttgttatcttccatatgcccataactttgcccaagctctttcacttgactctttggcatttaacagtgaggagcctgaggcttaaggtcccctggatggtgaatgtcttgagttggaagctgtacgcaggtttgcctgatgcagaagcctatattccttccactccatgatgctgaaacaggttttcattcttccctttctcccaggaacaccagccccatcttttcaccatggagcttccagagctgactttgaagtataaagagaaagaccggatgttgggccacagtagagggcttccaccaaaggaggggtctgggggcaaagcaggcaaagaggcaagctccaggcaggggctgccagcaagcaggcttctctcgatgggtacaacagtgctgtaaagctgacaaacagagtttggcttcacttgaaggtgtgaaaagaacagcctgactctgagaggcaagtccgccaagcccaggaccctagggcacctggttctcaccattgcctgcaatgccgcagccacttcccaagtcaggagggcagctgaagtcctgcactggggacagttgggtcagctgtgtctgttagacatcccccgatgacacagaatgcctctctcctctgagagcaggacagtgtgtttagacagtccctggtaaatgtgagcagccatgagaaaggcagccttaagtggctcaaattaacctcttctatggatacagagttgagctccatcattcactccccacgagagaaagattgctgtggccttaagcagtggaagcagaactgttattattatttttaagttgatgcaaaaaaggacttctttctccactttgaatatgttgtcatcttgggtgaggcaagaggaccatgtaaggtggtgacaagcactgttggcttttttgggagagcattggctgactccatccactactctggggtgacaagacgggaaaaaccacggtttaccaggcaggtgttgggattaagatacactttcattttcaaagcactttgcagtcattaactaagtgctcacccctaattctcttctaggttgagcttggccatggtctccccatgctgtctcccttgcctcttctctgagtctcaaggaacatgctgtcactggcagatataagaacatcttgtgctttatatatatttttaaaccttactgggttgcttgtctaactcacccctccagtagcttagtgagattaatgcctctttctaaactgtgataaccaagagatactttccagcaaatgcgaatggggctttaaagtgctgcgaggcaggatgacaagatcttgggtgagtttcaggtattacaaagaacattttgatttccttttcagaggaaatgtagaagggctttatcagcgtaggtaacactatagagctgagtgaaatgtaaatgaaattcccagttttcattttcccgcttcatttgatatttgtgggttttagaagtaggaccagctggattcatctgcagaaaaagccatgtggctgcggagctccttccgttgttaagaagtgtgcctttgggctaaggggaaatgttctgaaggcagatctggatgtgaattttggttcagatatttattaaccgtgggaccctaggcaagctggtttctgagctttgatttcctcatctgtaaaaggaggataataatggatacctcaaagagttataaagatcagaagtaaaatacatgcaaagaagtagagagggctgtttcaagtcgcttacttttattttaacatacagctggtgggccaggagagagtgaaaacaaagccactggatagtgagaggatagagggtgctccacagacgcgaactgcatctttatgtttacatagaagggagagtgaaggagcaaatgtgggcaacagctgtcagtgacacatcattaccccaacagccagaaacaagataagcgccttgcaggggcccttaactgactgctgggttcgatggttcaaagagaaaaagcacgtgataactttgaaggaggctgcctggctgagctgatcggatcacctagagactggaaatgctttctgggtaagtatatacatctctactacccatctcccaacccagaactgagcattgcagatgaaagatacttgcctgttggttttttttcttagctgattgtttcactctctgtaa

SEQ ID NO: 22846 - DNA, 2300 bp, Homo sapien
aagtagcctttggtattttttaatctaattaagttgcttgtgaggctttcaggcagcaggaggcagccaggaagcagagcctgtggcctcaggtccaggagctgagccttggattgaaggggagccagggctgctgggggcaggggaccttgcagagagagcagggactgacccttgcaggggagttggcctggcagcagccaccctcccacacctgcctcctcttttgggaggcttctgcggtcagccgtcagccgtggcccgcaatcaaggcagtgggcgggcctgtgggaatgccggccatgtgagcgcacctgtgccgtcctcccagctgtgtacttcacaacagggctgctgtcagcaatggccaagtgctgcacaccacccacccactctccatggttctgtcacatctgctggcacccccatctgggttgaactgctttatttatttttatttaaaaatggacaccagaattctttatgtctgggaatgagccaaactggcccagtgttgagtgcagaaatattccatcttccttctgtgcccagaattatttttgttttcttcgatacccaacctagatacggctacagcaaggaaatcgtttgagtttcaaaaccaaaactcctttcctgtttatctgtgttgaaaaaaaaatccaccatcattgatcacgaggccagtttatctctgtgggtggtgttcgatccgtttgctttttcatctggtgcctgctcctaatattgtaccagaggaagcagccattatattttggagccaagaggagctaattgatactgttattataattaatgctagtcctgactcaggagggacctggcggtggaaagcctttgagatctttgacctcagcaccatctgagtgggaatcccagcccggtcacttaggagttaggggccacaaggagcctcacagggcctcattgtccaccatgtgaagtacagtgggccaggcccccagccatgggcagtcacagtgggtgtgcaggcacagggtgctggtggcccttcctgatgctctgttcatctcacatgctcaccggcttgctgtgtgtctttgtccaccaggatagaagctcatgagggcaggggcttctgccagtgttgttcattgcactatctccagagtgtggcctggcacagaaggatatactcaagcatttgttgaataaaggaatgaatgagtgaatgaatggacagcagggaatattttggacggcagccttttcaaaggacgttcccttcatgatcaaggcaagggggatgccttagaacagatgccctgtggaccagaagggagtatccaggttttagaagaatactgcacctgaggctttgagatttggggcagcagagggtggaagttgctggaaggaggctgagtaaaatgacatagctcctgaacatgggcaggtccccagagcaagagttcgaatggggcccacatggtaaagatcttcatatttaaaaaatgacacattttgcttatacattgttgagtaaaatggtttctctcctactaccttgaccttgatggctaggttcgaatttggaattcagactccttgagacttcaggccagcagaaggccttggaggaagctgcttccagcccctgctgccctcggcctcccttccccctctcacatctcctctcctccctccctggacttcactcttccctgtcagggtgctccacccacaggggtgggccttgggcctccccaggctctgggatgtccaggggatcagacttgggccctggaagtaggtttggagacatttaggctaggaattctgggggcttgggtacaaggcgtggatgggatcaggtctccctgggaaggctcgtgccctcccccatcgactctcctgtccctctcttcatgataggagtgctggacccaggacaggggccccctggtcccatcaaagggctgtgctggttcagggaatacccttccccttatgggctgtgacaaacaaaatcatcttaaggggaagccccttgtcatggggcaggaagcaggctgcacagggcaatttctgcttccctctgataggaagggttgggctgacactgagctagggtggccatgcctcgccctgacctcaggcccatgggccccgtggatgagcaggggcatgcaggacaggcctgcagggcagggcagggcagtagggttttcatcggcaaagccccgtgatcctcacagtagccccaggagttggaccagcctggacccttaccccattttacaggtgaggagacagag

SEQ ID NO: 22847 - DNA, 2300 bp, Homo sapien
tggactaactgtggcatcagacgtaattggggtttgaatcctggctctgcaacttccacatgggtggcttaacttggccaggcgcagtggctcacacctgtaatcccagcatttaggcgggtggatcacgaggtcaggagatcgagaccatcctggctaacacggtgaaatcccgtctctactaaaactacaaaaacaaaattagccgggcgtggtggaggggggtgcctgtagtcccagctactcaggaggctgaggcaggagaatggtgtgaacccgggaagcggagcttgcagtgagctgagatcgcgccactgcactccagcctgggcgacagagtgagactccgtctcaaaaaaaaaaaaaaaaaaagtgacttaacttttctgattgtcaattttcttgcccataaaataaggaaaaatacattttaacccgtagagttgtttcagagatgaaacgaagtgacatatgaggtatatttgatatgacagtcaacaccagttaagggtttatcctgtgctggtcactattgtaagctcttctaagcactgtgtgaactcattcattctcctctaatgacccttagaggtaggtaacattattattatctccattcttaacattttctaaaaacagttatagtgagagaaattaacgtactatacaatttacccattgaaagtgtacaatccattgcttcttggcatatttttaaaaattgtggaaaaatatataaagcttatcatttttataatttatattttataattcatatcagaacctggcgatgtgaattatattcatagggttgtgcagccgtcaccactatcaacttccagaccatttttatccctcccaagtagaaacactgcaccatgttatgcccattctacagatgagaaaaccgaggcacagaaagatgaggaaacttgttcaaggttatgcaaccagtgtctggcagagcccgtgtgtgagctcaggtcatttggctcagagctggtgctcttcacctgcaggaggagctgggtattctgtagcctctaactgagaacccattccgtgccatgctctttccttcggccattgtaacaaggctgcaagacagacaacgattgctgttcccattttgcagcttaggaaaccgaagctcagggaagttagacaactttctcagggtcacagccatggtgagcggcagagccagcttttgaccccggggtctcactgaccccagagttcacagcagagtcgcagagctttcctggtgtccagcttagagagcacacagtaggtgcgcggagtgcgagctgagctgcccttcgagatgcagttccgagggaagcctaggcccgggagaccccagcgggtcctgcagataaaggaaagttctccagtcagccccggaggaacgctgatcccgctgatcccgaggcagggcccgaggttcctgttcggggcctccctgctgtgaaggagtcctggacccccgagaggtccatggaattctgcaggggaaggcctgatatggaggcctgtggaagtcaccgaggagcccctctcataccacctcacacttatttcttcaggacttcaaagtgcctcgccgggaggaaaccatgggggtctgcctgaagctgttaaagtagccggcaggattcgatgtgtgccctgattgccagggtaggggcggggggtgtaaaagagagaaagattatacacaggcctaggaatgatgaaaggtcttaagcaatgagggggacttgaaaagaggcgaccaacaggtcggctggtatgcctggagacgggaggcggtgcgtgtggagagtagcaagctgtgcggaatgaggctgggaaggtgagcctggaggccctccctgaggctggattgtgggaggagcggtgggcaggaccttgaacatgaccctgcgaggcgggccgggagggggcgtggcatgctgcggcagtgggcgggctttggctggggctgggcatagtcacggcagtgggcgaggtgtcgcctggccccgccccgtgggtcccacccccggggtgcacccccctccctggagctctggctgcgtgctggctcccagaagaggaacctgctgcaggcgccggcgcgggcggcgaggacgacctgtttttctgacccagcccggaagcgctggtgcaggtggtctctgaatgagggttcctctttgcctctgatgtctggaaggggaattcagcaagagggactccagtctggagctctgaccccaacttcctcaatccaggccctcaaagagggcggcctg

SEQ ID NO: 22848 - DNA, 2300 bp, Homo sapien
ccccgctcccgccagctcgcgggcggcccaagattgttttccaagaccttatctctcactcaagttaattttctcttttaatttggtgatcggaacaaaagacacaggaaaatcctttgtgaaagctaacgcagccacaaatcggggcacttcacagcatttgtaacaaaatatttgcagtgcccgtagttaagtcggcccctccgccaaacttcccaaactttgctttctttgaaccaagctgaaaagtgatctccctaaaaggggatcagaagattgcaagcaattggatttagcacggagttctacctggtgctctagagagctctgggcacacaggatggtgcgggaatcctggaaggaattacagcctgaatggtggcagggcaggggaggagccactgtgaagccgtggtagtcgctgaaacgctttgttaatgccatttattagctgtatgcgacaagaagtgtaagaggttaggcaggtcttcaaaaatatccaaaaagagaaaaataaacattcccttgtttgctttttgtggctttgctcattttcttcccctcgagtggcccttcatctaaggctgttttaaacccaaaatcggttatctggtttcagggtaagggctccctcttgccaaggtattaaataaacaagtacagcaaaaacttgaatccttatgtaatccaaatgccgtttcctcgaaaaccacaacaaatgctgctaaaccagataacaggaccgggaacattcggccccccaacccccaccccacaacacacagcctccgcccccagctttagggccagcagaggacatttatgttcaggaactcctctccaggacagataaataattgctactaacactctcaactgcagatgagcacccttgagggatccggatgccataaactgtccgggagtgttggcatctggttcttaaagccaggaccccaggaggcgtctgcgtctgcaagctgacttggaagtttctggcctcttgatgttctcagtcgaaaatggtgcattagaaaggggattggtctggcccgcgctttgtagtagtaatgagggcgcgaatcgcgctaggctctgcgcgcgcgaggctccgccgagcaggaggactggggctgcacatcctcccggctcccccagggcggagaggggggccgttctggaagaaaaaattgtttatgcgcaacctccgagggttccgaggagttaggcagtaagacggtgtggaggttgggggggcggggcgagtctttcaatctttcaaaggtatttttaggaatccaggatcaaagccattcggcgagaaaccgaaataatccaaaggagtaaataaatctcgccatgtgctaagacagtgaccttctccccatccacccttccctcgcgccagccccaccctgaacgcctcggttgcaaaaacaaaataaagcaaaaccttttgctttggcaacctctaagccacattatgcctccttttgcaaaaggaagatttctttcttctccctctcccggcttttttccttcgtcctctcctccgcccctcacccgcccacccccccccccccccgagcccttttcttttcttctcggtcctctttccttccccaaatcactcgaaacttaagacgtgcagcgtctgcaggtgcgcgcgggccggcggccgggcctgggcgagcctgggactgccgggcctcgcaggcattgatcagctgggcgcgcgcgctgagtgacggcgcggttgccatggcagccgcctgagcggcgccgcgaggacaaggctgcagggcggcgtgaatgggcggcgtcacgcgcctggcgccagagagtctgctccggggctccggctccggccccgccgcggcctggcccgcgcgccgccgccgccgccaccgccgccgccaattcatcacctgtcagggatcactcgcggggtcacgggcggaatggacacagctgtgagaacaaaacccgggaaagaaaggcgaacgctccccattgcgccagatgtgcagggaggaccttgagacgcgccccccgcccccgcaggctcctcccgccccccggcgcatcacgcgggggtggcaaaggcggcctggccagcgcggagctcccggcccggagctgcttctgattaccgcgaggggcccggacgcgagagccgccgcggggcctgccctagaggcggagtgagtgagtcctggagccaggctgggggaccttacgggccggtctgtcgctgccacggggtgggggcgtcccggtggggagtcgaggggaaccgc

SEQ ID NO: 22849 - DNA, 2300 bp, Homo sapien
aactttgcaaagtgtaaagtgaaaccgcacaatgctcattaccgcccaacccagagcctggctgtggggataatgaggctggcacggatgttaacatacggtgtccttggaaaaagctaggaatgcgtcagtatcgaagagctgcaatgtccaagaatcataagtaataatttgagaatcccaaagatgtttgtttacattggctattattgtaaaatagtcaaagtataacatcatgaaccaaaatagtgtcaaaacaaaatctgttccactgtggcacgtatgtgacagaaacacatgcacacaaagtacatcaaaaggctcgaactgtgggaggactcggatagtaaatcacttccagacttaatatcagaagagatacggtgcatccaacgctgtcagggacagagtcgcaggcagcattgcctggcctggggaaggccctccgcaaacttctggctggacaggaaacagtttacctccttcctccaaactgagggggctgaatttcaggaaggtgagctccacctcagtgccacccactctgcctccctggagaggcgtcatggggcgcatagctgtcacgtgacggtcagagactgctggccccaccagctgagaaattaatcattaattgaaggaaaaaacactgtttccccattatcgagcttttctttcagcttctaggcctgccccttccgctttctgaaatgcaaaggaggtagagattgaggcagaaagtaaataagatttgaatattgcctttcctggagttttctagttcattgttttctggagcaaatattttcaaaaacaagaaactgacacactgtggtcaaaacagaattctagataagctacaattatgtgaaaattaaggtatttaagtaaatagctgcaaactttttaaaacttagactgaaagaacgagttcttaaaagattttcagccaaaaaaaaaaaaaaaaaccttgaacccgtattcagtactagtgctgaaaagattccaaacctcatatgacagaatatttttttttccttagtgtgaagatgtctatcaatggctagggccacctatctgtcacaaagctttggaactcctctaggtgttggaatgtgacaccagaaatcacaattagtgcataattaatcacattactttgccacctacacggaagggcacagaccggcagcctttcaagggcagtgtatgtaaatgtagtttcaatatgcaaattctcctaattatttccgattaatacgatcattataatagccctgcctccttcttgaaaaggaaccctgaaagcgccctgcctgtgagagctccttagcgaccggtgaggttgggcatggtttgcaataagtactcattttcttgagtttacagtaatgcctcccgcgctgctccgggttgcaaaagcccacactaagcctgtcgtcgaatgcgtgcgtgggtggtttgtttgtgttaacataacttttccttatctgaagagacgaactcactctacaaacgtgactcttcagtgacaacctaatttgcgttttcactttcttctgaaatgctttctatctttcctcacgctctccctccgatgggttgcagtgaactgtggcttcccccctgcggtgctgaactcgcccgtgtagctgtgattttagagctgccgacagctctaaggtgtgtagggcttggtctgggaacacccccagggcaagggtcccgccgcgcgcttggaattagaattaagaatgcatatttaggcgcccagggtctgcccccttctccctcctccttcccctcccccttcccctcccccttcccctcccccatcttcccttctcttcctcctccctcctcctctccctcctcccgcctccctcctccccgccccccgcccgccgctccccgccccccgccccccgccagccccgcacttactgtactgtactctatttaccaccccagctgggctcgcgccccgcccaccccgcggggattggctgcgaacgcggaagaaccaagcccacgccccgcgcccgcgcccaccaatggaagcgcccgctcgtcttgatagacgtgccaccttccgccaatggggacgaagggaagctccagcgtgtggccccggcgagtgcggataaaagccgccccgccgggctcgggcttcattctgagccgagcccggtgccaagcgcagctagctcagcaggcggcagcggcggcctgagcttcagggcagccagctccctcccggtctcgccttccctcgcggtcagcatgaaagccttcagtcc

SEQ ID NO: 22850 - DNA, 2300 bp, Homo sapien
gcataggaaaaatgtaaagtttgaatgtaaaatataggactttttggaaatcaaaataatttagaattttaatgtgttctaggtctcaagagagtctgaatattagatttttttttcttttatttagtttcttgataagtaaatggactccacagggtcagcagtgactgtcctagcttcaaaggaatctgttttttgtttgtttataaacaaatgttctatttgttatatcttgtataatagtttatattggcatttaaaacaatgataaacttaaattcctatagtagtttagtaaacctatacttaatatacctttgtcttttaaatgtgagataataatgggaaagtactgctgtggaactcagatgtttttccaaataatagcactgtagcccatttttagagtcttatgtcaagttatcttcagtcatctacaattttttagttaatataaataggataatttcccagatgaaaagatgaaatgcaactaattatcagtggtattcaggccctgtcaagtttagtaggcccaagctatattctcactttaatgacctcaaacactaatatttcctgtaggaaaatggagcatgaacctggggttacactttctggaactgttctcttaaggtgcattgcaatttcttatttttgctatctccctctttagtctaattcgagaaaacataggacctagttagtcatagaagcctagtgcctaaactgcctgtgtaaatacatctcatatgagctgggaagaaagagaatttaggataaatgtgacaaagaaaggattctagaatttaaactttcagtttttgaaaaatggtggccatataagtaattaggtactgtttaaagagtcccgagaaatgttactccgtttttctatttggacaaggagacaaaggtggaataatagcattttatcatgtattccatcttttaaaatttaactgtgtggtaggcagtgtgaaatgcaggtttttatttaccagtcttaaaatctgctgtgtaagtttgcataaaatagctccgttgataccaactgaaaatttgaaactgagaagcttattttaaaaaatgaaagattaccttaccatctagcctgaaatactatgttcactaatttcatgaataacaataatgtaatcatgctttttaatagtattttatcatttttaaaaacatttacagttttctcttgtttttaaatctagctactttttgctgtagttatttgagattttttagtgttaaaagcagaataattcctctaagctggcaggagtaaaaagggtggggaaggtttcacctcagtgtaacaaaaccttatgaactgcagtctttatgtttagcctgtataatttgatatcttctgtttatatgaagctggttacaaatgtatgccattgttataaatctcacataaacagtggattccccacgttttttaaaaaaaatatgcttgcttatttaggttataaactctagggtgtaaactagaggtgaactccaggaacttgtaataacattattcttggaatttgtgccagggtgttttcatatattccagactttttggtcttatttaggctaatctttttttattggtaaggaatagtattaagattccagtctgcttcttttaaaaagattatgagttaatattggttaaactgcttagaacctgacagatggtaagcttgtaaacatattaaatatagagagaaactcgtgtcaaactgtaaagtgcaaaactttagttgctcatttttctgaaaaaagcttatatgaaatgaccaatataaaaatgtaagtaatatttcttaagtttgagtttagcatcttatggaatatgagtgaggcttttttttcttttgttttgtcatttgcattaaagttttggagttgtatcttattggtttcatttgaaaaatctcattacactttcatttctgtaattgtttaccccttttttgttacatgtttttccatagccattctttgccccatacctttacacgccaaggtattaccctggcggctcccaacatctcatctcacgtccatcagtaaaaacgagtttgcccagagatcagaacaatggcctagtaagtatataaaagggtaacgcaaatattaatttaataataaacatagatagcatttgaggtttggttatttcctttacatagtaaaagagtgcaactgattttatacatagttttaagaaacaacctattactaacataaaatgtatttattttcatttctggtaaatatctatggaa

SEQ ID NO: 22851 - DNA, 2300 bp, Homo sapien
gagattaatatcagaaaagaatttgaggttttagtagataaatattgataagtatttagttgagtggtttcctaattaaaaattgtgctgtatcaaatgtactttatttcaaatttgttttattggattattttggaagataagattaaaaaattatcttagacatattcgttgttcagaattttcttttgatattgctttctttttagctaattataggctagatatattcttaggatagaatatttatttttattcactcattataggctagatatattcttaggatagaatatttacttttattaactcatgcttttttttgttttttttcgagatagtctcgctctgtcctccaggctggagtgcggtggtgtgatcttggctcactgtaacctccatcttccaggttcaagtgattctcctgcctcagcctctcgagtagctgggactgcaggtgcctgccaccacgctcggctaatttttatattttcagtagaggcggggtttcaccatgttggccaggctggtcttgaactcctgacctcaaatggtcctcccacctctgcctcccaaagtgctgggattacaggtgtgagccaccacacctggcctattcactcatacttttaaaatagttttccagttctctctgtctaccggttccttcatgactttgcatgcatgcatggtgcatttgctgttccttttgtctgaatgtcctcactctgcttcccttgtctctgccagcccgtgccttcccaccagactaacttgggttcatccttcatcgcttagttctagtggttagttacattcttttttttttgtctttttctttttagtagttatattcttaaggaaatcttcccttaactgccgcttctaaatttggtgctcattttctcttttcacacagcactgtgtgtatatctccagcatagccatgtctccatcaatgctcacatctcaccttccagggaagaggaatccagccatgaaaatataatttctgtgtatgagcagatttgctgaggaagtgagggcctggtgatataggaagaattggattggggcttatatatctatatgtatatctatatctatctatatatctatatgtatatatctgttagtagtagggaaaggaataactcatattggaactaaaacaaataggtatcttagtctacatacaaacaaaatagataatgatgaagtaaaattgacaatgtttgaaaatttaacaacagtatcagcagctcagaatttctaccaaatcatggtgaaacatgatacaatgaaacaaggcatccgttctgaaagtttgaggattgcgactgtctacatgtacacaagcctagtggtagaacagcaaatcagagtcctcagaaaatcccagcaatagacagggttgttttaaaatacgtaaataataaatattagaaacattacaactcagttggtaggttacttacatagaccacccttagtatgtgaaaatgaaagcctgtgggattgcccattcatctatactacaacgagaatggactggcatatttggatctgtttatagtccatcaataggatctcagcagatggcactttagaggattggggtccattgtgggtgaatggatgttctgctcaatgatcgtgggtggcgttgaactgtgtgacacagttctgaaagatgtttgcctgcatatacgtggtcgaagaagtatatctcaccagtggcaaatcaaacaaccaaaaaattgctttagaattaaaattgtgtttaagccctaaaagctttacttaatgcagctctttggattttagaagccatggcagtactagatttgaatttgtagtataaattaaatggtaaattttagaaatttaaaatatttgtgaatatactaaatgttttacttaacatactatcacacatctattaatttttaaatgcttttgtattttttaaaaggacgattactgagagccaatcagattagtttcaactgggacaggcttgctagctggatcaaccttactgagcagtggccataccggacttcatggctcatattatatttggaagagactgaaggtattccagatcaaatgacattaaaaaccatctacgaaaggtaccttttgtgacctctttgtattttactttattttaggttgagttaaaaaaaaaaaaaaaacgcgtataaagcagacaatacaaaataatatgtataaaatgtatactcctggatttaatcattcttattaattccattataattttggagttgtattag

SEQ ID NO: 22852 - DNA, 2300 bp, Homo sapien
ggagagttgggggaggatgtgggggcagagggtggaggaagcagtgagaggataagaggaggatggaggggattgagggaaacagctggaggctgaggaaagatggggttggggggtggtgggaagggtagtggatgctgggggaggcagccttctatttccataggacaaatttgatactcttctaatcccttcagtggccttctatttccctagaacaaattcccaaatggtacttaacactcaaggcccttcagaggctgacccctgctccatctactgccccctcccatgctgccaccccagccccaaggctggcaaatattgacagttcctggaactttgggccaccctccttctcatctctattcttttccaaagtgttgttccccgacctggacattcttcctagccccatccaactgatgtgatggacaaactatacttcagatacagctggaggtgcggggggggggggtcccttcttttgtgaaccttcctagtggaccccaagcagagttggtaactccatcctctgtgcttacctccttactgcactgtgcctaggacatggtcaggactcagaaaggctgtgctaaataacgcacatttaacctgtttccttgtcttctcccctactctaaggttggcttcatccttatatcctactgatatggtttggctctgtgaccccacccaaatctcatctcgaattgtattccccataatccccacgtgtcaagggagggacttggtcgggggtgattggatcacgtcagcggtttcccccgtgctgttctcgtgatagtgagtgaattctcacgagatctgttggatgtaaaaggggcttttgacccttttgctgggcacctctcttcctgcagccatgtgacgaaggacgtgtttgcttccctttccgccatgattttaagtttcctgaggcttctccagccatgcagaactgtgagtcaattaaacctcttttctttataaattaccctgtctcaggtggttctttatagcagtgtgaaaacgggctaatacacctaccatacttctaacccccaacgcctgacccaccctgccctgtttacaacagtggctggccttagcaagtcattatcgaagaaatcacaccatttaggactccactgtacacgttggggtgttcgctccttgtttcatgaggggcacaccaacttccgtttttgtttgtttgtttgtttgtttggagataggatcttgccctgttgccctggctgaagtgcagtggtgtgatctcagctcactgcagcctcgaactcctgggctcaagtgatcctctcacctctgtctcctaagtggctgggactacaggtgtgcaacaccacgcctggctaagttttgtatttttgtattttttttttttttttttttttttgtagagaagaggtctctccatgttgcccaggctggtttcaaactcctgagctcaagtgatcctccgtcttggcctcccaaaatgctgggattacaggagtgagccattgtccccaccccgcaccaacttctgatgaagtcaggctccttattggctttttcctgagttgccaggttgacacattggtgggtgcttttcgatggttcgcaacctacgcacgtcgtaatcatccttggaccttttcaaaaatcaagattgacgcttgttggcagcaaggcctaggaatgtggaggctgaaggaggtgaggggaggtgctgggagacctggaaggagtgtgaactacaggccccgcgaaaggcagaggtctcgctcctggatccggaagaaggctgctgagcgggctttcatttcttatgtatgtgcagtttcttctgaagatataattgatgtttatttctctgaataagcttgattataatggaaaatagggataataaattaactgtaataagagtgacattgacactgaaaaaccttgcctggggcgcttgtcctgggtgtccccgccccgcggcccctccagccccgcctgctctacgccccgccccgcccctcccctccacgcccagggggcgtggcaacccggagtccctcccctacccagggcacgtgatctgtcagttcgcggagagggaagaatatggccgccgggtgtggtgagggcgacgcgcttgcagtcgccgtctcttgcttccccgtcctctgacatcgcctgcagccgagcgggcccgttccgccggagctgaggaccaggttgggagaccgtcagtgtggaggccggtccgcgaagctttgccgcgggattggggaggagtcggg

SEQ ID NO: 22853 - DNA, 2300 bp, Homo sapien
tgaaaggccccctctgagatcaaagaatagctttagtgggagtaacttgagagaggaagctgggaaggtgggatgccctgtgagacctgggtgtgcagatccactctttcaggggcagcacagccaggcagcgccagaattgagagtagccagggcaccgagagacgatggcagggcaggatgtcgcggtggatgtctgcttcacccaggaccatggcggagcttggcgggaaggaggtaacaaggtgggcgccccagttttcagtgtgagagggaggccatcaaaaggcatttgtacacattctcaggaatgtctttggaagaaatccatgacatcccttgtaaatgttaacatacaagagaaaatggtgataatccatcacctcatagatgttcccaacaataaataaacttgtcttacgtagaatgatgttaccacattagaaaaacaagattaaggaaagagaaatcactatactaccatcgatgttaagtaatttttgtttttattttttagcataataatatattattatatttaaagcttcattattttgtgacacaaagaaaaaagtttccttttttttcagatgtcaacaagtttcaagatgtttcttgataattggaatattcagacagctctttggctcaaaaggtgcgttccttcaaaaacgatctttagatgtgctttggcgtctagttctcgaggttgagcttcattgagttcaggttcttgattaaattaacggtgttgagtgacattgtgacctcagtgtcagccgggaaacactgttagcctcctcctaagcaagtcagtatcgaatgagaactattttggcttgagtcacgaatgcagctatcctgcaggtgcagctatcctgccctctcaagcctcctttaaaggcctctgccaatgtcagaggtcaccagtatcctcctttgcagctcctgattgtgttcagtagagatgtggtttaaattaacaagtgcctgcacaagcacagtacttatgcctgggtactccagaacagtcctggttttaaatatttcaattcaacaaatctttatttgttaggcaagggaaacaaacatgagtaagataaaaagactcagctcctgaaagtgaaagagttcacaattttattaaagacacggtggtgtaatcagacacatgctgttccctgtggtgaggatgaggagagagaaagcaggaacagcgagggcacagagggatgcgggaagaacttcctacaagtgtgggtgcttgagctgaggtttgtgtcaggagcgtgtctcgtgaacagggcaaggtagaggcaagccaggctgggtggagtaacaggtgcgaaggacagagctggggaacagcacaccctcccaggggttctcttatcgtccctgtgagcacattgccctatcttgaatttacttcataaaaaacggcccctataacgatacggtgataagcagcctttttttatagtgtccttttttaaatgacaaattaaacatctttatcccttgagatggctagcatacgctgtcatctcttcacagtgcctggcagtctccccagtggctgcagatcctctgagctaatctgttgtgttattttttgttattgttataatttaaatttgataccttagggaaactttattttcagctgagttctctatccctgtcatagaagaattgtagactaagcacagtctatctgccggaaggagtagtgttattaggtcagttgaaagttattgattttttttaaataaaataatgtaggataaaagcaaccttactctttttgtaaattgtatagactcccaaatactagaaatgatcatttaagttactatatataccaatatatatactatatataccaataagaagatgagaattaactttatgttcctaaatttgacacttaatagctatagcctccctgagatcatagagaagtgattgcctaagataagttgtatttgtttttctagttaccctaaatcctgtcaggtaataaaagaatgatcattgcaggctttgtaaactcgggtcactcactccacttggctctccatgtttttcatggtttctagggtgtgttatgaacgaacctccttcagtccaactatccagacgttcattctctctgccatttggcacggggtatacccaggatattatctaacgtttctaacaggggtgttaatgacattagcagcaagagctgtaagtatcaagaattttattttacaattcaatggtccacttgaactgttaaaaaggctgagtac

SEQ ID NO: 22854 - DNA, 2300 bp, Homo sapien
ccaccatgcctggcctatttatttttttgagacagggtctcactctgtcatccaggctggggtgcagtggtgcgatcacagctcactgctgggattacaggcatgagccacagcgctcaaccattctagatattaaataatttcatgtagttaccccaaatacagattatgttctgtcatgtctgactaaaataaaaatttagcttaaggaaactcctttctgcagacattatttgttctagctctgagattgtatctccatgctgcttactttaggttgcaatatgttcccaacacccacctttcaagtttttaaaatggcatttcaattttttcttcagtttgtatgctcagccacctgtgcgcttcctctacttttctaaagtgaagaaaaggaaaaaaaaatggtttctttctaatataatattaataggtctgggtttttggattaatatactgtaataagcagctctctaattgattacaaatcccactggaacactcccctgggggaatgaaggtcctgttctttttactcttccttttatcctctattccatttcagctgagaatccaccaaactaggattgagtcgaccagtgaaaggattctaggcaagacgggattgcactgatgagttccactgcctccttttcagagagacaaacgtaagcccacagactgattactaaggcaggtgtatttttatctgtgctgccttcttattcaagactctaagctagtcatcaacccaatggtataactgatagctgacgggagtttctggaatgggtgttaagtgtgagagagatgaaggcctagtgataaggtcggctctaaatgtagatttacttggattccaatctacttaccagctgtgtgcccctgggcaagttacctcttctgtgactcaacttccttgaaggagggtgtgtaaaagtgtctatttcacacggttattgtgaggattaaataccaaaagtattaaagctgtggttaaactctcagtaaacattagttatttctaccaaagttaaactgccaaatccttgagtcttgatttgtcctcataactgctgtggcatttctcctcttttaaagtcttctgaacagaagttgacgtttgcattttaaaggaactcaaatggcttacttttacgaagttggggggattatatatacacgtgacccgccagggtatgtaaacctggcggacttcaacagtctgggggtgcctgcgctcaaggggtgaagggatgcttagaaactttctcaggaagaaggtggggccttcaacgagggcggctggctacaaagaactaaactttcacacagcaaaggggagccggtctccctgcgcccgcgggcgtcgaacccaggcccagctctcaccacccaaaggcccgggtgcggctgcagggtgacgaaagcgtcagaccccggggctgctctcagctttgggctttcacccggcactctcccagacaaaggggcttctcagccaggtcgctgttttggtttgtcgtcctcccagcccccaccttcgtccccaacttcccctggcgctggctcggcggcgtccctcacatcgtccctccggccgccaccccgggcccctttgttgtctgccgtctctcccagagaggggtggggggccgcgacattccagggaggagaaaccgaggagtgaggggcaaagacgctcttccatgctctcacccgaggagcgcgccccacgacgctggccagccgttctccggcgacggcccgggccgcgcctcggcgccctcgcccgggtcctcggcacgggggaggggcgtggcgcggccggcgctctctgattggctgcgggcgtcagggcgtcgcgccgcgattgggtcgcgcagctgtctggagcgagagcgcgcgaggtggggagggggccgctggaagctgctggaagtcgggggcgggggatgcggctggggcgccggggcggggacgacgggggcgacggcaggacgggccgcgcctgtgcagggcggtcgggggcggcgggcgcgggaggaggtggcggcggagggggaggtgcgagccgggcaccgcccccggcccctccccggccttccccgcgcagagctccgaccgcgggcggcccaggggcgggcgcgccgctgcatccccatcctcgtcgtcgcccggcacagcgcgagcgggcgagcggcgcgggcggccggagcgccgaggcccggccatggccaccaccagcaccacgggctccaccctgctgcagcccctcagcaacgccgtgcagctgccca

SEQ ID NO: 22855 - DNA, 2300 bp, Homo sapien
gtaaggacattaccagcatactcttcttctcttgatgcatttaaaaaaatgagtatgtgtagagtgtttccttgatccatgttgaactttaattttattgttatttattggaagctactcattcttatattaatctcagaaaggcattagctatgttttgctctggtcttgctttaattctaggcttatgcagtaggcaagttagatttctaagggatgatggaggaataaatggctctagcattctaccaatttggtatcctctttaggccaccaatgaacttggtaactaattgttgttttccaccagccttgcaatgcaacacagctttgcaattttatttttttgaggctactaaagcttcctgtatctgcaaaattaaactaaaagaaacaagaaccggagttgtatataaagagagaacagagaataccaagcttaactttgtccttgtagaagtattgattagtctggttaatgctgtactagacatcaaggaaaaacccgactttctttcttagatccctcatagcctcatagagaccagccctctacaaatcaagacttgaaaagttattcagcatattccctcatgtcaaaaactgtagctgggaaactaggtaggcgggaacagaatctgcctggtgttggagaggatgtattaatataaataataaacacaaaacatgaattgtagaaggttgcaaatagaggaaaacttcagacaccaaaaggatcaaaaaacataaaaagaaacagatacaatttttaaattgtaacttgttgtctagtgcaatgataaaagctatccacgaatacagcgattttagaaagttaaattttacatgcagtgctactaaaataccaaaggccatacataatgtctgacccaagctgccacctcatatagcaacttcttacatgggggctttaaaaagattgtttgactggtctactgtcctgcagtgtcaggagacggctttgtctgacatattgaatttccagtgtctctcacacttcctccttttcagatgcacaaaaggtttttgtaaagtttctcttggttttaccgctggcagctacagaaaccatgccacaagtctggtgtagagttatagggtgtgattttatttgactggtatcttcagagcttctggatttttcagtataaccgagaatttccttaagagctgtaaataaaaatcggtaccagttcgaaccctttactggcccggttttgtgtgaggttggctggctgctgtagcacgttctccccctcctcctcctcctgcaccccctcggttccctcctctgcctgcgggaataccacttcagggcgttcagcagccttcccagggtgggtcctggcctagtaccctaaaactataaccgagaatacctatcattgggcagcctaggaaacgcgactgggacttttagtaggggcccctcaccgctctgaagcactcacacttgagtcagggaacatgggtttgaatccccacccggccgtttatcttgtgctcttgggcacactgtgtcccctatataaaataagcacccatctcttcatctgtctcctaggcctgcgacgatgcaatgactgcacgcaaagcgcacattcacggtcaggtcacttctggcgtccggctgtggtccccgcagggtgcccgccggcggagcgcatcctccggcagggggcgagctccgcaccccgctttcctcatgggccggcgcggcccgccgttcaagtggggagcccagaggtgctccgcgccgtgggcggggggcggttggcgcgcacaaggccggactccggcggggcgcacctccacacgcaccctcgcgggcagcgggtcggagtcggggcctcgggccggctgggggcggggcatgggcgcggcgcgcggggcccggaacgccgagacaatgcggcgcgcggcggccaggaacggctcggcgggccggggcgcgcgccgccttccttcctgcgggatccgcttcccggcggcgcggcagcggcgagcgcgccgattggcggcccggtcctcccgccgccccgccccacgcccggccggccgccgcccccggcccggacccgcccctctccgcgggaggcgtcggggcccgcggctgggtggcgggtagttcccgccggctgtgcgcgcccgcctcggggctcgctctgagaggacgcggcggcagcggactcggagccctcggcgcgcaggcgggcggaccggccgagctgcgcggggctgcgcgccgcccctgctccgccgccaggccccgcgcggct

SEQ ID NO: 22856 - DNA, 2300 bp, Homo sapien
atcgtggcctctggtgcagtaaacaatttttttaaaaaaagacagtgtctctctgttgcccaggttggagtgcaatggcgtgcttgtggacagcctcaaactcctgagctcaagcgatcctctcacctcagcctcccgagtagctgagactacagatgcatgccaccacgcctggctaaaaaagtttttaaattttttgtagtgatggggtctcgctatgttgcctgggctggtctcaaactcctggctcaagcagtcctcctgcctcagcttcccaaaatgctgggattacaggtgtgagccactccactggatggtaaacaattacattaatagagaggcaagctgcacctacattttagcagaattcagacccttcccataatcctaatcttgaggcctttcattagtcttccaaaggcactttcaagttccctaacaagaacagagtcagttttcacatgcacacgtatgtttattgcggcactattcacaatagcagagagacttggaaccaacccaaatgtctgtcagtgatagactggattaagaaaatgtggcacatatacaccgtgcaatactgtgcagccataaaaaaggatgagttcatgtcctttgtagggacatgaatgaaactggaaaccatcattctgagcaaattattgcaaggacagaaaaccaaacaccgcacgttctcactcataggtgggaactgaacagtgagaacacttggacacagggcggggaacatcacaaaccggggcctgtcatggggtggggagacgggggagggatagcatcaggagatatacttaatgtaaatgatgagttaatgggtgcagcacaccaacatggcacatttgtacgtatgtaacaaatctgcacgttgtgcacatgtaccctagaacttaaagtataataaaaaaataaattaattaaaaagaaaagaacagagtcagttttagggagggactattaccatccttgattcaaacttacaccacaaactaaattcttcccatggttagcttggcctgtgcccaggaataagggaggacagccagcctgtgaggccagaagcaagatggagtcagccatgctagacttttttcactaccatgttcttgtaaaggcggtttcacaagcagcagacaccagctggctgtcctccagttcaattagacactatctacttggaggtagtgttagatcccacaggctgggggctcagtccccaagactgtcttccaccccagacaccagtcacaaatcaacctccagaacttctgaccaaccggcttcaagttggggttcccacagccccctctttgggtttgaataatttgctggagtggctcatagaactcagggagacacttgtgtttactggtttattataaaggatattgcaaagcatacagatagagaggtgcgtagggcaaggtgtgggggaggggacatgggggttccatgccctccctgggtgccaccctccaggaccctctgtgtggtttgccatcctgaagctcgagaaccagtcctctttgatttttatggaagcttcttggtgtcagcatctcttcccccagggtacagggtgagaccctctctggggagggccttaagacccacagtcagaaaagtgggggacgataagagtcctgccttggggcaggagaagttcagagagattctgtctcctgaggccttaacactccatgttataaccgaagactgtaacaagggatttgagagttacgagccgggaactgtggatgaaaactaatacagtttacaaagcctttgctgggacataccagctttgagtttcaaggttacgctgtgaagtaggcagaggggcgggggcttcacctgagacccagagatttccatgcatttgccttggactagaaggcaggcctcctgcctgcacacttcagtgggtccagatgcatggccgagtgtatgagcaacagcactgaccatccctctgttctctcagctgacccaagccttatctggaagatttaattctcacgttcacgttgaatatgaatggcgactactccacgaagacctggatgaaagtgatgacgacatggatgagaaattgcaggtctgtgccaggttgctaaccattaagagttttgatcagcttcatccagaacagtgtgggtcctaatctgtaattaaggcagaaagctgttttatagaaatgaaaatgtagcttactttatgctttcattgatctcagtaggctcttggttttacccttcccactaccatctcctgtctcccag

SEQ ID NO: 22857 - DNA, 2300 bp, Homo sapien
cctacaatcccagcactttgggaggccaaggtgggtggatcacttgaagccaagagttcaagacctgcatggccaacatggcaaaaccctatctctactaaaattacaaaaattagccgggcatgatggcacacacctgtaatcccagctactcgggaggcagaggcaggagaatcacttgaacccaggaggtggaggttgcagtgagccaagatcacaccactgcactccagcctgggcaacagagccagactccgtctcaaaaaaataaaaataaaatatgcatatctgtgccctcctagtcttaaacagctactgaattatgctgtaataaatgggctttccagtgctaattatttctgcctctataccaaagtggccacaggccatgcttctcttggcttctgggctctcttctgccttcccttatgactccctgggatttacgctttccatgctgctgtttttcgagagaaacaaatcacgtgttgaagtcctggctaaggagccgtcagctcccagcagttattgggactctgagaaccgtggttgtcagctgtgaggtgcaggttccttgttctcagaagcgttctagctggcgggagctggacaggtttcctctggaacacaattttacctggtttcacatctgactggcaggaaaaagggaagcagggcaagtgaggttagggctacccgggacagacggggatggacggagccatgtcgtcagcgcccagtggagttctgactgtaaaggaacacaccggtacgccctccttgtgaaggatgctatcccttccccaccaccggtgattttgtctctgggataaatgtgaattttcacacctgttctcttagggtaggagtcagcaaactatggctcacaggccacatccagcctgctgcctgttttttagggccatgagctaagaactaagaatggcttttatatttgtaattggttgggaaaaaaaaatcaaaaggatatatatatatatatatatatattttttttttttttttttttttttttgagacggagtctcgctctgtcgcccaggctggagtgcagtggctcgatctctgctcattgcaagctccgcctcccgggttcacgccattctcctgcctcagcctcctgagtagctgggactacaggcgcccgccaccacgcccggctaattttttgtatttttagtagagatgaggtttcagcatgttagccaagatggtctcgatctcctgacctcatgatccgcccgcctcggcctcccaaagtgctgggattacaggcgtgagccactgcgcccggcctcaaaaggatattttgtggcacatgaaaattgtgtgagattcacttcagcactcagaaaatattattggaacattagccacacctgtttttttatgtagtctggggctgctttcacaccacagtggcagagttgaatacttgaaacagagatgctagaatccacaaaaccagctgggtgcagtggctcacacctataatcccagagctttgggaggccgaggcaggaggattgcttgagactaggagttcgagaccaggctggaaaacatagtgagaccatgtctttacaaaaaattttgaaagttagccaagcatggtggcgtgcacctgtagtcccaactactcaggaggctgaagcgggaggatcacttgaccccaggagttccgaggctgcggtgaactgattgccgcactgcactcgagcttgggtaatagggcaggaccctgactcaaaaaacaaacacaaaggccaggcacagtggctcacacccgtaatcctagcactttgggaggccgaggtgggcagatcacctgaggtcaggagtttgagaccagcctggcccacatggtgaaaccccgtctctactgaaaatacaaaaaatttgctgtgcgtggtggtgcacacctgtaattccagctactcgggaggctgaggcaggagaattgcttgaacccgggtggcagaggttgcagtgagccgagattgtgccactgcactctaacccgggtgacagtgcaagactccatctcaaaaaaaaaaaaaaaaaattcacaaagcctaaaaagtttactatctgcctctttaaagaaaaagtctgctcactgctgtctcagaggatcaggccttccctgcgagtgttctgtagttagggatgactgccggccagggggtcagccaggtcagtgtagtgatgtctgcagagacatttacacccagagacacagatggaaaacaaatggctagactggtcaaatgggaggg

SEQ ID NO: 22858 - DNA, 2300 bp, Homo sapien
gtggtgggcgcctgtagtcccagctactcaggagcctgaggcaggagaatggcgtgaacccgggaggcggagcttgcagtgagccgagatcgcgccactgcactccagcctggacgaaagagcgagactccgtctcaaaaaaaaaaaaaaaaaattattcatgcatcaaaatgaggccaatgatcctgattggcgattggatgctccgcaggctcatcaaatgcaaagatgtctcaagctgaacccatcatcctcccctccagatctgctcctctcctctcctctccctgtcaggagattctattattgctggaggaagccagaaaatcatgatttccttgctgtccttcaggccccacatccaatctggcaccaagacccactgtataccccacctgaagagctctctgagccagctctccaccagggcccccgtcatcctaaaccatgggcacagacactatttttttagaaactgatgaatgtgatggatcctcaccctataaaaatgcacatccatacaaagtttggcatgaatttaaggaattcacaaacccaaggatatttcgtggataagggaccttgtcctactggattccctaacactttaaatctacccccacactgcagccaaaacgattaaaatgatttctttcaaacatgaatctaatgccactagcctgctgaaaatctttcactggttctccaaagtcagagaccaaagtcaacgttcttcagcacgacacgccaggtcctccaggacccagctcctaatcacctttccacttccatcctccacaacccgggcacagttcattgatctcagcaaggcaaagctgctcctggttctcagcgcgatgctccacgcgcccctgctttgcaccgcccgggacgtccttcacctgtcaggcacttggctacttcttacctttcaaggcccgtttcaggctgcaggccttcctgggatctcaaggctggggtaagggacccacagcttgagtgtaccccctgatcacagcgccacgatctgctgtggtctctgatctcactctcccagctgcacgctggtcaaaggcggagctcggtgactcctctgcattgccagggcgcctggcaggggacgcgcttactgaagccgagaactttctggggaggtgacaccccaacagcgattcccatgtaccaaacgcctaccacgtgccatgcacggtgctaggtgcacagatccctctcaccctcaccctcaccgaccagcaaggctgcaggataacagcccctttcaaacgaggatgccaaagcgcccgaagagtcagtgacctgcccagggtcaccagagtaaggacggatgcggccaagctcggggcctagggagagccggctccgaagttcctcccagacgccagcctgcttggcacctgtctgtcaccgtgatggagcaccttccaagcgctgggtgcggaggatgtgacagcgaaggggacagacaaccccgaccctgagaggcgggaggcggccgaagcggggcagaggaagaggcaaggaaacggcccgcggccgcccgccttgccgcccctccggggcgacagcggctcgggaagctgcagtccgcaagcccacgcccgatctgcgtggttccaagctcctccacccgcgccccgggagcgcggccccgcccggaaccaagcccgagcccaggcatccctcctccgcccgccccgcggccccacccatccttcctggccgtccgcgccgctctcgggaccgtgttcccgtcaggcctccgcgagctcggccccaagcgggacgagggctgggcgctcacctcgcagccgcgggcccatccccgggttgcggacttcggggtccgcgtgggagtgccgcggcctttggcgcccaggcagctactcccgttcccgctccagcgccggcttttccagccctcctgcccacgtccgccgggccgcgcctccaagactatgcgcaggcgcagtcctgacgtcctacccccggttccaagaccccaagtggtgggaagcctcgcgagcggcgtcccccgaccggaagtcgaggggaggagtctagtgccgcgggctccggagtgacggaagttgtgctcttggtgaatggggttcttccttttttatttaccggtggctgtgcttccaatttaggaagaccccggcgacctgttcctcacccccgcttcgccctcacactttcgggatgtctgcgattcctgctgaggagagcgaccagctgctgatccgacccctgtaagggaccagcgagagagggaatga

SEQ ID NO: 22859 - DNA, 2300 bp, Homo sapien
tcaagctgaacccatcatcctcccctccagatctgctcctctcctctcctctccctgtcaggagattctattattgctggaggaagccagaaaatcatgatttccttgctgtccttcaggccccacatccaatctggcaccaagacccactgtataccccacctgaagagctctctgagccagctctccaccagggcccccgtcatcctaaaccatgggcacagacactatttttttagaaactgatgaatgtgatggatcctcaccctataaaaatgcacatccatacaaagtttggcatgaatttaaggaattcacaaacccaaggatatttcgtggataagggaccttgtcctactggattccctaacactttaaatctacccccacactgcagccaaaacgattaaaatgatttctttcaaacatgaatctaatgccactagcctgctgaaaatctttcactggttctccaaagtcagagaccaaagtcaacgttcttcagcacgacacgccaggtcctccaggacccagctcctaatcacctttccacttccatcctccacaacccgggcacagttcattgatctcagcaaggcaaagctgctcctggttctcagcgcgatgctccacgcgcccctgctttgcaccgcccgggacgtccttcacctgtcaggcacttggctacttcttacctttcaaggcccgtttcaggctgcaggccttcctgggatctcaaggctggggtaagggacccacagcttgagtgtaccccctgatcacagcgccacgatctgctgtggtctctgatctcactctcccagctgcacgctggtcaaaggcggagctcggtgactcctctgcattgccagggcgcctggcaggggacgcgcttactgaagccgagaactttctggggaggtgacaccccaacagcgattcccatgtaccaaacgcctaccacgtgccatgcacggtgctaggtgcacagatccctctcaccctcaccctcaccgaccagcaaggctgcaggataacagcccctttcaaacgaggatgccaaagcgcccgaagagtcagtgacctgcccagggtcaccagagtaaggacggatgcggccaagctcggggcctagggagagccggctccgaagttcctcccagacgccagcctgcttggcacctgtctgtcaccgtgatggagcaccttccaagcgctgggtgcggaggatgtgacagcgaaggggacagacaaccccgaccctgagaggcgggaggcggccgaagcggggcagaggaagaggcaaggaaacggcccgcggccgcccgccttgccgcccctccggggcgacagcggctcgggaagctgcagtccgcaagcccacgcccgatctgcgtggttccaagctcctccacccgcgccccgggagcgcggccccgcccggaaccaagcccgagcccaggcatccctcctccgcccgccccgcggccccacccatccttcctggccgtccgcgccgctctcgggaccgtgttcccgtcaggcctccgcgagctcggccccaagcgggacgagggctgggcgctcacctcgcagccgcgggcccatccccgggttgcggacttcggggtccgcgtgggagtgccgcggcctttggcgcccaggcagctactcccgttcccgctccagcgccggcttttccagccctcctgcccacgtccgccgggccgcgcctccaagactatgcgcaggcgcagtcctgacgtcctacccccggttccaagaccccaagtggtgggaagcctcgcgagcggcgtcccccgaccggaagtcgaggggaggagtctagtgccgcgggctccggagtgacggaagttgtgctcttggtgaatggggttcttccttttttatttaccggtggctgtgcttccaatttaggaagaccccggcgacctgttcctcacccccgcttcgccctcacactttcgggatgtctgcgattcctgctgaggagagcgaccagctgctgatccgacccctgtaagggaccagcgagagagggaatgaagccacgggctgtgaggggcgcgaggggtaaccggagactggcctcctccgtcgcccgcgctcccacctaccccggcagcctgcctttggtccgcgcttgcgggccaggcttctcaggctcgaggggttggaggaccgttgatcggaaggggcctgctatagagtgaacgggattttgctttttcatcagtttcaggggagggtatgttggagtcggaaaaaaaaaagtttta

SEQ ID NO: 22860 - DNA, 2300 bp, Homo sapien
ttgcttaatagccttcgctggctccctgtaattgacttgataaaggtccaaactcctgtgtatacgaggtgcttcctaaactggacctcaactgcctgtcgcttcatctgctaactcaactctttagctacagccatgaggaatctggccacaagctgtgaccactctcactttcatatgtgccacttccactgcctagaacatcctgggccccccagtctttaactcctactcattctttaggactcagctcaggcatcacatttttcaggatccacgaggtatccttttttcctcaatctgtcagaaatcccttttccatactttcacagtgctcagtgcaatgcctgcctgcgttcttagattagctattatttacaaagcacctaccgcgatgttcactcttcaagttttatcttatttccatatgagaaaacgggttcagtgagattgttgtcctactaattggtcaagtagataatggacttcaggtctgacttcaaagtaatagtctcctattattccaaagtatctctccaatatttcccactgtgcactgtaattctctccaaaagagcgagagcaattaactgggccctctgttgcgtctatatccccatgtgtggtgcttgacacttgctcagtgtttgctcatcacaggaagacatgacaggtgtgaactaagcagaaggaaacggactatgtcccaagcaggtgctcaatgaagccttactgaatgattgtgtaaaggagatactttctaccttttggaaagcgtatattcatgttgtgccaactagtatctaacaataaacatgttgtgggttcgaaatgctcatctgtaggaattcaagttctctacatttgcatctccccttcagcagcattcccgactgatgaggatcgtgtccactgaaaggccactctccttatggacagtcgagggctgagtttttgtccctaacacctctgcactttctcttctccagctttacaccttccttattctactagggcctgagctgagaagatcgaaactcacggcaagtccctaatattttctaacttctggcacatgtgaagccctggtgttaagaaacagacttaattcttccctgcacggctgtagcctcattcaggtcctcctctcatcctgtcggtcataagcttcaccggctccctcacagcttgccctgacgcgcagagatccgtgcttgtgctaagtgaaaacgcttcttagcgtgtacgaaagcgagcggtggccccgtaaaacttttttttttccgactccaacataccctcccctgaaactgatgaaaaagcaaaatcccgttcactctatagcaggccccttccgatcaacggtcctccaacccctcgagcctgagaagcctggcccgcaagcgcggaccaaaggcaggctgccggggtaggtgggagcgcgggcgacggaggaggccagtctccggttacccctcgcgcccctcacagcccgtggcttcattccctctctcgctggtcccttacaggggtcggatcagcagctggtcgctctcctcagcaggaatcgcagacatcccgaaagtgtgagggcgaagcgggggtgaggaacaggtcgccggggtcttcctaaattggaagcacagccaccggtaaataaaaaaggaagaaccccattcaccaagagcacaacttccgtcactccggagcccgcggcactagactcctcccctcgacttccggtcgggggacgccgctcgcgaggcttcccaccacttggggtcttggaaccgggggtaggacgtcaggactgcgcctgcgcatagtcttggaggcgcggcccggcggacgtgggcaggagggctggaaaagccggcgctggagcgggaacgggagtagctgcctgggcgccaaaggccgcggcactcccacgcggaccccgaagtccgcaacccggggatgggcccgcggctgcgaggtgagcgcccagccctcgtcccgcttggggccgagctcgcggaggcctgacgggaacacggtcccgagagcggcgcggacggccaggaaggatgggtggggccgcggggcgggcggaggagggatgcctgggctcgggcttggttccgggcggggccgcgctcccggggcgcgggtggaggagcttggaaccacgcagatcgggcgtgggcttgcggactgcagcttcccgagccgctgtcgccccggaggggcggcaaggcgggcggccgcgggccgtttccttgcctcttcctctgccccgcttcggccgcctcccgcct

SEQ ID NO: 22861 - DNA, 2300 bp, Homo sapien
catcctctctgccctgccttccctccccacaaccacccttccagatacagctgatcagccacaaaatcctgaagatctcatttgcatactctctcacactcacatcactcactacaggctctcgtcagctagacttagaatctttcaatatctcactgaatctgctctactcaatccatgcttttattcatccatgcttttattcatctgctacactgctgccaggagagattttcctaaaacataattcccacaatatccatgcttgcttaatagccttcgctggctccctgtaattgacttgataaaggtccaaactcctgtgtatacgaggtgcttcctaaactggacctcaactgcctgtcgcttcatctgctaactcaactctttagctacagccatgaggaatctggccacaagctgtgaccactctcactttcatatgtgccacttccactgcctagaacatcctgggccccccagtctttaactcctactcattctttaggactcagctcaggcatcacatttttcaggatccacgaggtatccttttttcctcaatctgtcagaaatcccttttccatactttcacagtgctcagtgcaatgcctgcctgcgttcttagattagctattatttacaaagcacctaccgcgatgttcactcttcaagttttatcttatttccatatgagaaaacgggttcagtgagattgttgtcctactaattggtcaagtagataatggacttcaggtctgacttcaaagtaatagtctcctattattccaaagtatctctccaatatttcccactgtgcactgtaattctctccaaaagagcgagagcaattaactgggccctctgttgcgtctatatccccatgtgtggtgcttgacacttgctcagtgtttgctcatcacaggaagacatgacaggtgtgaactaagcagaaggaaacggactatgtcccaagcaggtgctcaatgaagccttactgaatgattgtgtaaaggagatactttctaccttttggaaagcgtatattcatgttgtgccaactagtatctaacaataaacatgttgtgggttcgaaatgctcatctgtaggaattcaagttctctacatttgcatctccccttcagcagcattcccgactgatgaggatcgtgtccactgaaaggccactctccttatggacagtcgagggctgagtttttgtccctaacacctctgcactttctcttctccagctttacaccttccttattctactagggcctgagctgagaagatcgaaactcacggcaagtccctaatattttctaacttctggcacatgtgaagccctggtgttaagaaacagacttaattcttccctgcacggctgtagcctcattcaggtcctcctctcatcctgtcggtcataagcttcaccggctccctcacagcttgccctgacgcgcagagatccgtgcttgtgctaagtgaaaacgcttcttagcgtgtacgaaagcgagcggtggccccgtaaaacttttttttttccgactccaacataccctcccctgaaactgatgaaaaagcaaaatcccgttcactctatagcaggccccttccgatcaacggtcctccaacccctcgagcctgagaagcctggcccgcaagcgcggaccaaaggcaggctgccggggtaggtgggagcgcgggcgacggaggaggccagtctccggttacccctcgcgcccctcacagcccgtggcttcattccctctctcgctggtcccttacaggggtcggatcagcagctggtcgctctcctcagcaggaatcgcagacatcccgaaagtgtgagggcgaagcgggggtgaggaacaggtcgccggggtcttcctaaattggaagcacagccaccggtaaataaaaaaggaagaaccccattcaccaagagcacaacttccgtcactccggagcccgcggcactagactcctcccctcgacttccggtcgggggacgccgctcgcgaggcttcccaccacttggggtcttggaaccgggggtaggacgtcaggactgcgcctgcgcatagtcttggaggcgcggcccggcggacgtgggcaggagggctggaaaagccggcgctggagcgggaacgggagtagctgcctgggcgccaaaggccgcggcactcccacgcggaccccgaagtccgcaacccggggatgggcccgcggctgcgaggtgagcgcccagccctcgtcccgcttggggccgagctcgcggaggcctgacgggaac

SEQ ID NO: 22862 - DNA, 2300 bp, Homo sapien
aaagatgaggtttaacttaaagtgtgccttgtgaccattgcaaattatggctgaaattattaagaagaaacaaaaattatgtaagtagttggtataaaatatgctgaaataacagaaagtagaagaaaaagtgattgaaattcacagtatgaataagtattttaaaaaaaaaaattttttttttttttttttgaggcagagtctcgctctgttgcccaggctggagcgcagtggcgcgatctcagctcactgcaagctccgcctcctgggttcacaccattctcctgcctcagcctcccgagtagctgggactacaggtgtccgccaccacgcctggctaattttttgtatttttagtagagacggggtttcaccgtgttagccaggatgggtctcgatatcctgatctcgtgatctgcctgcctcggcctcccaaagtgctgggattacaggcgtgagccaccgcacccggccatttaaatttaagccatttggcaaatacacattatgatcttaaagaagatgacagtgttgaaatgcttatggctttctacttaagtgctaattctagaagtattattatataatctgcgtaactgctagtttacattttaaatacattataatttaatcctaaaattcagaaaattgaatttaaatcaagcccaaacctttgggcttcttggatctgtaccgccttctctcttaattttaagaactgcaagatccctggactcccaaggatcagttttcatctgttctcatgtggacactgttcttccctgtctttgtgattttgtagaactctcttacgtctcagaatttttcagtgaggtgctgtcatcagatggcatgtagtgtacattgtaaaaaagtgtaagtttattggacttggttttgattttttttaatccttctttttctccccttgaatatttacagtggagctgggcaagaagtaggaagatcatgtattattctcgagttcaaaggaagaaaaataatggtaattactatttttgtactcagtttaatagtatggctctgtctgtattgggtgttagtcttttctcatagactagttatctttttagctcccagaaaaatgttatagtacatgtaatctatgctgtatagtgttaatgagaaaaactaatacacacttctacttagtaatttagttgattaagaagatatattctatgactgtaaaattgtcagctagatctgttgaactgttacctcttcaaagtccctcttccactcctgaagggttgagccagcctaactgccccacccccagtggaagatcccaagggcccaagcactctgaacacactgagagctctagccgcctccagcatgtggggatcaagccttggcctagaagcttggatccccaggtcccactggggctgccggccttggccaagtcactttgcttctctaagcctgaaaggtagaggggttagaggagatagtttctaaggtactcattagaaagtcagttctgtgtctcagattcctttgattcctctttcttctcaactcctcccaatctgaaaagaacatgtataggtcagacatagtcatccttttagtcatctgttttgttaatttggtagtaacgccataaaaataagtaactttaatgactgagtcttaagaatttgttccctaatgccttaaaatatttaaattaccctgatcaggtaagtttcccatttctaattattatcttctcacgagagtcgatctggtagtagtaaatctataaacttttaaaattttaatctgatatcaaagtttttgaaaaagatttaattcgttgttagaatgacgaccaaaagtagctggaaagaagctgttttgtactttgcatcctgtgacccctaaatgtgagctatattttaaatttgttgggaagttagaattgttaatggcatatttgccacatttaataagaatcatgttccaagtgctagtgcctggagtccatcttgagtatatgggtgatggaactagaattattgcctatttgccgaatgaattttaataaaatgtgcaggagattgtgatctcttttcctgtttctttcagctcgactgtgggatccaccctggcctagaaggaatggatgctcttccttatattgatttaattgacccagctgagattgatctcctattaattagtcagtaagtttttccctttattaatgacactttttcacggacttttactatcaagatcattctttactagattttgagagtttggttttttaaaagagtgttttc

SEQ ID NO: 22863 - DNA, 2300 bp, Homo sapien
gatgaacttccctggagtatcatttactagatcaaactgtgggctttgatgtaaatgtagtttactagactttccccagtctttcaccccagcctcaagtcatcactaattaggaccgtgctgctgtcaggaagcactgcacgcccacaagtgtgtagggcggccgttctgtttcatggtaatcagtcccaccatgacctctgcacacacagatgattgttcttttttttagtttgagacccggtctcgcagtgccgcccaggctggagtgcagtggtgcagtcacagctcactgcagcctcaaccttcccggctcagtgatcctcccacctcagactcttatctgggaccacaggcacacgccaccacagctggctaattttttatgagatgatggtttttttaaagagtattcatttatcttctatataatcattatagacttaattctaacagtcttgtttgtgcctcactttcagactgtagaatgtgaagagggaagtgaagacgatgaatccctccgagaaatggtggagctggctgcacagagactgtacgaggccctgacgccagttcactgagactgtgcctgtatatgaactttgaaaaaatacttgactctacttttgttacctaaaataaaatgcattcgtttctctgggggagcctgtttacttttaatgtcaaatggcctttatttcaacagcctgaatactgctaaattgctaattaatttgtccattattctagaactaactactagatcaactgcccattattttagaattttggattcttcttccaggcatgtatgtgcagctcccattgaaaccatcaagatctgccgatagcaaccgctgctggttaccctctcctctggggtaaccaatttgagttaataataaggattctaagttgcacttgaatcttttctgtcttcatctccactgctgctgttcgagtccaagtctactctcccctctgaattcctgcaaccacctccatctcctcccctatagctgattcctggaacagacctggcctcaagcctctgctgcttgaaggccttaatgaagtccttgtgataaagatgaagtccaggcacctttgcttgctctagcaggggctctcaatctgggctacccgtgggaatcacgtggggtgcatcacaagtgcacctgtgcccaagtcctgccaccaggaggtgagttagtccggctggaatgagggccctaggttggatcttagttgtaaagctcccccaggtgatccaagcgagcttgggacgagcaacctaaagaaagtcatgctctacgcccatcgccccgccccagggagcggggtcggcctctgcgccggcgcccctggcccttctgttactcatctacagctccgtgatttcaaggcatccttcccacccgttcgtttttagctcggctgccgaacttcattgcacagttgaggtaagaacgttgcattacaaccacgttttaacaggtgaatcccttggaagttagtcagtgctccgtgtccgcggggttctgcatctgcgcatccaccccacggcgggaaaaagaaaagcggccggctgcgcgcgcactgaaggtgcagctgctttcccttgtcattcgcagaaccacgaggtactgccagggtttccgcagtgcctgcgtcctcgtgggtgttacaggccctccagagtgacgctgggcgcaggaggccgcgcgcgcatcccacgacctcttccaggggggcctggagcagccctccgccccaccgagagccagctgtgcttcccgccgcgcgtcctgaggtcacactcctgccctttgccgaacgcacctgcgcccgcggagcgcggggtgggcttagaagggcccccaaccgcttttcttccgggaaccacgcagcgggacgcgggctccggactccctgggggcagccttgctgtgggtgagcaagcgcggaggccgagcttcttgcaaacggactccaaggggcaacgaccttcgcgcgtcaccaaagtgactgcgtgggtgcccacgagcccggctcccgcaacccacgggcggccactgcgcaggcgcctctcgtggctggcggccccgccccgccccgcccggctgctccatggcgctgtgcgaggccgcgggctgcgggagtgccctgctctggcctcgcttgttgctcttcggggactccatcacccaggtacggccgccccgacgctcggcctcccgccccggcctccctgcggggtcgctgccgagcaggccgaggctcctcgccgtcctcttcgg

SEQ ID NO: 22864 - DNA, 2300 bp, Homo sapien
ccatattcctttggctctttatctcccccacgtggtgctcttttatcttaaaagtatgcacaattgataaatgaaagatgaactgcaaattggaataatttgggtcctgatttgtgaattgaaaagattacttgaaatttggaatgtccctggaaatctaggacttctggttattcaggccaggcgcggtggctcacgcttataatcctggcactttgggaggccgaggcgggtggatcacctaaggtcaggagtttgagaccagcctggccaacgtggtgaaatgccatctctactaaaaatacaaaaattagctgggcgtggtggcgggcgcctgtaatcccagttacttgggaggctgagacaggagaatcgcttaaacctaggaggtgttcagtcggttgtagtgggccaagatcacgccattgcactccagcctgggcaataagagcgaaactctttcccccaccacccccccccaaaaaaaagaaaagaaaatggatcgggattttttttttaaacggcatttactaaacagctaagtaccttctatgagcaaggcactgtacaagagctgttggggataccaaaataatacaatctacgatctactaaagttacaagccggacattatggtgactggatgttcagaaaagaaaccagatgacattattatggtacaccaaaaaagccccccaaaaaccgtactcaactgtcacattcttatggaatacaatttttacagattgtatacaatttgcatgtgaaattctgcttactttttgactaggtatgccactaatgggtatgtttaataaagatattttatacttcagatgtacagaccaggtccggttaattttagccaacaatgtattgttgaaaaagacgctgatattttactgcggcaaaccaccattaacataaattttaaccacagtttgagtattttattaggaataagccttgaaacttgaataggactagtattcctaacaatttaccgtttcataataaaggctgtctcactcttaagtggaaaacgtattatgtcctacttttataaactttggttgaactaaataaaacagcaacatgtacccaacgtttttagactgttttattcagtaccataaacattcactaaactatacagagctaaaatcatgcaaaagattgcaaaacaaactgccttgggaaatttccagtctaagctaaatggaccaagtataggattgaattttaagaagttggtgggaagattccagctcttgtactcacaggtaaggtcctaggattctatttgttgaagtgtctgcagaccctctccctacagcaggggcgtggagcaaatgtgcattcaggaagtgcttattagtccccccaaaacctttttcgtgacgacagacggatggaggcctcagacgactccggcagtaggaccctgaaccaaatgcctgagctgcgctcgaaaggctcgtctcgcaggagctggcgagtggcacgggcttcggtggccgggctcggggctcggggctcggggcccggggccggggggggcggggggtccgtgcccagggcactctgtggctcgattcatgtccccgccctcccacctgagcacactgggcagagagcctgcggcatcgggccagtcgcgcctcctcgtccgccctgggcaggtcgctgggccccaggccgctttctacagctcctttaataaaatggacagcaggggtcctaaccagacgtgggcatcaagacaaaggaggcggccagacgcgcttgagggcctgctcgctagctcccgcccccccattccgcggtcacccggggacagaggccaggccggactgggtggagttgggactcatacgtctgcgtccaggaaggcgccgggcgagccccagctagacgtgacgggcggggccgaacacggcagcggaccagaggcccgcggcgcaccggcgtggggcggggcaagcggagcctcccgggatgccgcgcggcagccggcttccggctgtgggtggtgcgggggacagcggcggccggaagctggctgagccggcctttggtaacgccacctgcacttctgggggcgtcgagcctggcggtagaatcttcccagtaggcggcgcgggagggaaaagaggattgaggggctaggccgggcggatcccgtcctcccccgatgtgagcagttttccgaaaccccgtcaggcgaaggctgcccagagaggtggagtcggtagcggggccgggaacatgaggcagtctctcctattcctgaccagcg

SEQ ID NO: 22865 - DNA, 2300 bp, Homo sapien
gggccccagggattccagaaataacagcagggccctccattagaaggctggaacatagtaaggcatttctgcattaagacacaggccctttccaatccaggccgctcctgtctgtcaaagcacaaagcaaccttcacaagtcaggacagggaggggcagtcaagagggagtctgaatttctggaaagtcggcaccttctcctcccatctgtctgcactctcaaatctcccattctagagattctccggatttgctccagtctccactcagaatgggaaattctttatgatccattctccttagacctgctggaatcgggatcatagcagcgtgaacccagagggcaattctcatcttaagatggcacagggaccacgcgccagacgggcagggcagccaccctacctggatggagttagggaactggggaagtgcaaggagagacaggagtggtttaagaggaaagggagctgccagggatgaccctgaatgggaggggcctgggggaatctttctcgcttcagcagggtgttccccaggaggagaaaatcagaaatcaacatccagggagaggatttcagcttttcaagtgacctctcacaaataataccagaaacaaaagcgtgtgcacatgtgacaacgatgtgaaaaatgatgtatttaggtgcataacctggaaagcctaaaagatacataaaaattgctttttttttgcggggagagatgttatgggcagggtttttttttgcgggggtgggaaggggtagtaataggtgttttcctgcaaattgtgcttaatgtcatttctcattttaaagaaaaccacaatacttggcattgtcacagaaactcccctggatcttctgggacctaccttttcacaagggaattttttgttttaggatgcccatctgaaaacttgaatttatcatgtaaatgccatactgaagacaccgtctccagaatcaattcttctttaatggggatgcggtttgcttaattcggagccctaatggcaacgtcattaaggtctgggtttagtgtcttgggatccaaacctttgtcacggatagaaaggtggaggaaagaaaggcccccgtgctctaaaacagctgaatatgtcaccctccgaagtccagcctcggccagagcccgtgagatgcaatgcaccatccgcagcgggagacgcagccgccgcctaggaggtcgtgcgcgcctctgggtctcgtgccgcacccagaagtgccggggtggcggggaggctgaggggagttggtaacggcatcgccatggcaacagtgacgtccttttaccctggatctaattggaggaaaccccgtggccgaagccgcagcctgccggccaaccgaacttccccgtaccgacccaccctcctagcctccgcgttccctcccgctccgcccccctcgcccccttccgcgcgctcggtcctcattggccagcggcgcgctgggggcgggactctcgggagaagctcggcgcatcattgggcggtggaccgcccctcggccccggggtaggctgacacgggagggtcctcagctaaagccaaaagcagatcaaagtggtgggactcgcgtcgcggccgcggagacgtgaaggtgagcgcctgggtcggcccgcgggcttcctccggccgcgctcggattgagggccgggcggaggtgccgcccttgagagcagccggttgtcgatgccgctcccctcagggacggctccgggcgggaaggtgcggggccaacggtcgcttccatcttgggccggccgggcgggggtggcgggagcggccgcggctcgggctccctgcgcgcggggcctccgcgccgcccccgcctcctccagccgcgggccgcggcctccccgggtgcccagcgggggagggggcgggggagagggaaattcaagcggccgcgtgtgcgggagacaaaagcgggcggcgggccgcattgtctgacggcgctccctctctgctttttgttctcgcctcgccgccccgcccctccgcagctctcgaggctcctcccgctgcgggtcggcgctcgccctcgctctcctcgccctccgccccggccccggccccgcgcccgccatggagaagactgagctgatccagaaggccaagctggccgagcaggccgagcgctacgacgacatggccacctgcatgaaggcagtgaccgagcagggcgccgagctgtccaacgaggagcgcaacctgctctccgtggcctacaagaacgtggtcgggggccgcaggtccgcctggagggtcatctcta

SEQ ID NO: 22866 - DNA, 2300 bp, Homo sapien
aacccgagttctttcaggcacagaagcctttagctatgtagagggtcctctgaatcttcctaaaatgcaattttatactgtgttattggttggaagcagtttttacccatgattccagatgattgcaactagatgagttggtgttcaataaatatttgattgaatgaaagcagaaatttcagagactaaggtacagaaagcagcaaaaacttgcccaaggtcactgggggagaccacagcacagcctagactttctgacaaagaatttagtgtgcttgctccttctggtagtccctctctaccacagaggttccatcccctgacaatttcctctcctgggtctctatcccccatccacctccactggcttctccccttgcccgggttgcctctaattttggtgagcttgaaattcactggtcatacagaaggcattttatctgaccttccacatgcaaattctttccattgggatttctcggtgtccagctccaccccagcccacagggccataaacactcatgtgtctgtagcggggccccagggattccagaaataacagcagggccctccattagaaggctggaacatagtaaggcatttctgcattaagacacaggccctttccaatccaggccgctcctgtctgtcaaagcacaaagcaaccttcacaagtcaggacagggaggggcagtcaagagggagtctgaatttctggaaagtcggcaccttctcctcccatctgtctgcactctcaaatctcccattctagagattctccggatttgctccagtctccactcagaatgggaaattctttatgatccattctccttagacctgctggaatcgggatcatagcagcgtgaacccagagggcaattctcatcttaagatggcacagggaccacgcgccagacgggcagggcagccaccctacctggatggagttagggaactggggaagtgcaaggagagacaggagtggtttaagaggaaagggagctgccagggatgaccctgaatgggaggggcctgggggaatctttctcgcttcagcagggtgttccccaggaggagaaaatcagaaatcaacatccagggagaggatttcagcttttcaagtgacctctcacaaataataccagaaacaaaagcgtgtgcacatgtgacaacgatgtgaaaaatgatgtatttaggtgcataacctggaaagcctaaaagatacataaaaattgctttttttttgcggggagagatgttatgggcagggtttttttttgcgggggtgggaaggggtagtaataggtgttttcctgcaaattgtgcttaatgtcatttctcattttaaagaaaaccacaatacttggcattgtcacagaaactcccctggatcttctgggacctaccttttcacaagggaattttttgttttaggatgcccatctgaaaacttgaatttatcatgtaaatgccatactgaagacaccgtctccagaatcaattcttctttaatggggatgcggtttgcttaattcggagccctaatggcaacgtcattaaggtctgggtttagtgtcttgggatccaaacctttgtcacggatagaaaggtggaggaaagaaaggcccccgtgctctaaaacagctgaatatgtcaccctccgaagtccagcctcggccagagcccgtgagatgcaatgcaccatccgcagcgggagacgcagccgccgcctaggaggtcgtgcgcgcctctgggtctcgtgccgcacccagaagtgccggggtggcggggaggctgaggggagttggtaacggcatcgccatggcaacagtgacgtccttttaccctggatctaattggaggaaaccccgtggccgaagccgcagcctgccggccaaccgaacttccccgtaccgacccaccctcctagcctccgcgttccctcccgctccgcccccctcgcccccttccgcgcgctcggtcctcattggccagcggcgcgctgggggcgggactctcgggagaagctcggcgcatcattgggcggtggaccgcccctcggccccggggtaggctgacacgggagggtcctcagctaaagccaaaagcagatcaaagtggtgggactcgcgtcgcggccgcggagacgtgaaggtgagcgcctgggtcggcccgcgggcttcctccggccgcgctcggattgagggccgggcggaggtgccgcccttgagagcagccggttgtcgatgccgctcccctcagggacggctccgggcgggaaggtgcggggccaacgg

SEQ ID NO: 22867 - DNA, 2300 bp, Homo sapien
gagccatcagaaagctgtcgcaagatcacacactgatgctcacacatgcaagacgtagaggagtgttctccaggccctcactcagactcaatttcctgctaattcattccacaaaatatttaaagatcttcaacgtgccagatgctgtcctaagggctggggtttccagcatgattaagatacagtctgtgcttagaaggagcttgaccgagagcacagaggtgggtgcctaacctggaggtcagcaaaggcagggaagatcccctttctcttcagttgcaagatgttcagttaccaggtttcctggtccacagcagtctagaagtggttacttagaaggtgggagcagaattagtcccgacacttcatctgaaatctactccacatttccgcagatgattttgagtagagtaacagctagggctttgaggagcccatatctatggtctatgcaaggcaatcagtggacaaggcagagacaacaaacccataaagagctcatgaaaaacctggagaggccagggccagttagcatcggggtacatggcccatatatcccaggcaggccctaggtacgcagcaattagccttaatcatcacaaaaaaaatggtcattatatttcatattttttgcttcatattatatgtagacatataccttctctctctgtctctctggacatatatgagagttgggatttttttaagttttggtacataatcatctccctaattatgactcatctccagacaattcgagatagttgaagagatgaatgaccacaaaacagctagagaacaatgcacacaggagttgattgtgtgcttctcacaataagtgctatgggagttgagagaagggaaacatgagtgtgggctcaggcaccagaaggctatggagtgaaagggacccctgtggggacagcaactgaggtcatgccagtctgtgtttccatccttcctgctgcccagtggaggggcccctgggaaaggggaggaaggcacaggtgtttctgtttgtgctggaattgcttttggacagggctgactcccgaaaaggtggatctggatacaatgtcggaatgtgaccagccaggagagctaggcagccatggtgcagaggactcttctgcctctccccctcctgccctaaccagctcagcaccaagcacatgggcactttaaaagcacaggccatgctgggagactcactgtgctaccctcaaccccttcagcaggagcagctctgtgaaaagtgcaagtgtgaccttcattttgctttgtgacttaaaacccttcaccgttactcagctgcagctcagcatggtggttggactcaggagccagatgacctgggttcaaatcatggctgcactactcacaagatatgtgactttgggcaggtcagctggccgctctgtgcctcagtttccccatttataaaatggggatgatggtagtaagagtcctaccccgcagggttgttaggaagctccacggaggaaggctggtgaggagctcccccactcctctcctgtcttctctcctggctccattccttctctctgcttcagcctcttctgggctttgctctgctgccatcttcccctggctacctgctcatctctcaggtcttcaaggaaatggcactttctccatggggtgttctagggctctgagcccctctcagctaggtgagctcccccatcctggattccccaagcaggtagttacttgatgttgcttcccctggtccacttgtccaatagctgaaggtatctcagagagggcgtgctacgtccatgtgatttgcctgtgtagccccagtgcctagcagagtgcttggcagatacgctgggtgccaagaaagcaatggccaaatgcacgaattcacaaaggatggaaggaggagtccataggccagtgcacagtgcccaaaggacagagctgaggctgctggtcaggacagcttcaggctctggccaggctccagcacacagctggaggcacccgtgactctagctgggaggggctggaagatccaggcagcccctgaccgccctccttccccttagtcatgtccagttctgtaaacaaattctcaactgcaccagaaggcctgacagttaagagaacccagtgaagaaaccttttgcagagagagaaaagaacccttttgaatgtgatcaatcacgctgatttatttggatgatttctcttctggatttccttaaaccagggaaaacccaggtaagatatttggggccctcattcatctagacaaaatacataaaagtttg

SEQ ID NO: 22868 - DNA, 2300 bp, Homo sapien
aatacattatttattcaggtcggatatgaagctgcctttccttttaggaacatcagccccacccgcacattgtcactcatttccttgtaccctggcaagtcattcaccctatctggacctcagtgctctcctctgtaaaatgggtggaacaccaggcagggggttgggctctaagggcttccagggtctagagcagcccaaagacccagccaaagcgggcctcctccaggaagccctcccaccttccctttgtgcttctgcagcactctgccatcccctgtcaaagctctcaccacctccatggcttcacgcttacacacctgtcttcccaccagagtctgagctccttgagttctgggaccgagttggatgaatttccacatccccaggcccagcacagggtggggcgtagagtctcagtgattgttgaatgaatgaatgaatgaatgaatgaggctccagtgtttgagcgaatgtggcttcttcaccctgctgggaggcctgggtttgggaagcttcccctaagtgtagctggccactcatccctgggaattctgagatgattttccctctgaggactcagctggggagggaagacataggttaccatggcaacagattttttttttcctgccggagcaaacatttctacagaaacctcaagagatgccagccagtgcggggcgctgcctgtttctcccacgccctccctggcctctgagcccagagctggcccttctcactgggtttctcaaagctgcccactgtaaggctgtgcctgagacctaggtcagccttggcctcacatcccccgccccgtgcaggccctcccaccggtctgttcacagcccaggctgtcagcagtgggggagccaggcccagagaggggagccatagggtgccctctcccagcccagacaggcttcctctgccatccaccagtgccctccacctcaaacccaggtgacagcgccttcttccccctcccccattcacagggccccgggaggctaccagggggccacctagaggagctgggaggggtgggggtcctctggagaggggcaaggtctctgagctcagatcctgccagctcagacccatggacctcgggtcctgctggatcccgtctgggaccctggggtgggaggccccaggaacaaaactcagagaggccttgtgactttccccaggacacacagcgagtgagggaggaggcaggagttgagccccggtttctctggagacaaggcccagcctctgcctcctgtcctgccaggctagactccaccttccactgcctggaaacaggggacagatggccccttctggaagcactgggggtgcagagtgcctcgcgagcactgaaggtgttgagggtctggctcatgccctgcactgcccgtgtgtggactgcagcgtggaaacagtgctcagagaggctccgtggccttgccccagctcgcaagtggtggcgtaggacgccgatgtcagtgctgtcgggctctgtgacactgtgctatctgtccacgcccctggaccgtcttattgaagacaggcaaggaggagagaacagggaaggcggaggggtgagtggctggtgggaccacagcccaggccagggccggggcagggagcaggggagggcctttgacaccaggcagctccctcccagaggccataggcacatggaagggtgaggccgggagaagcagttgagctcagtggcccaaagcagggactctgggacctgccagacaagagtcaaatcccagctccacctcttcccagggttcgtttgcacttgggacagctgtttctttctgatcacagctttctcacttgtaaaatggggagagcattcagtggctccacctggcggtgtatgaggatgaatgagacggatgcatttgagggctgctctgggggaggccgctgctctttcgtgatttgaatcccatgcagtccctgggctcctctgccgctcttgcctctctgtatcccggtacttggcccttagcaggcactcccaggagctgctggaacaggctgagtcctggcgcttatccgagctgtcttgtttgcacgtgctcgtctcccacccactcactggtgagctccgcaagagtgtacttctctccgtccctggagcgccacggcgtgctggtgcatagtaagcatctgtccatgtctgtccagttgaatttcttgagagtcatttgaccttctcagcagctctggaggtaggtcgatcagggttcctcatcccatttcacagatgtgaagacccaggttgagat

SEQ ID NO: 22869 - DNA, 2300 bp, Homo sapien
atattctcctgcctcagcctcctaaagtggtgggattacaggcgtgagccaccatgactggcctatttctttcttaaaaatttggtagaatttggccaggcgtggtggctcatgcctgtaaccccagtactttgggaggccgaggtgggcaggtcaggagttcaagatcagcctggccaatatggtgaaactccatctctactaaaaatacaaaacttagccaggtgtggtggtaggcgcctgtagtcccagctatttaggaggctgaggcaggagaattgcttgaacctgggaagcggaggttgcagtgggctgagatggtgccactgcactccagactgggtgaaagagcaagactgtcttaaaaaaaaaaattggtggaattttcacatttattggcctagagttgttcagaatatgcccttatgatctttttaatgtctgtggtatttgcagtgatgcccctacatattggttagtgatgccactgatatcagtttattttgattttctttgctccgttgctcagactggagcacagtggcccgattatagctcactgcagccttgagctcaagcaaacctcccgtctcatcctcccaagtagctaggactgtaggtgtgcatcaccaagctgggctcttttctttttgatcaatctttccagagtttatcgaatgtattagtattttcaaagagctaatgttagttggttgagactctcttcttaaaaaatatcttttaggctgggcgtggtggctcacgcctgtaatcctagcactttgggaggccgaggtgggcagatcacttgaggtcaggagttcgagatcagcccagccaacctggtgaaaccccgtctctactaaaaatacaaaaattcgccaggcgtcgtggcgcgtgcctataatcccagctacttgggaggctgaggcaggagaattgcttgaacctgggaggtggaggctgcactgagctgagattgaaccattgtactccagcctatagagatgaggactcaatatgttgggcaggctggtctccaactcccgccctccagcaatctgcccgccttcgcctcccacagtgatgggattacaggcaccagccaccacagcaagcctttgtggagcctatcgaagcttgctttctcttttattaatttctcttttttaaacatttccttcatcccattatttttcagtttaatcttttttctaacttcttgggatgtacgattatatcaaaaatcctcttctcaatgagatctctcttgaacatcacatttcagactgaaatcaccttgttgttcccattctcctctcctctttatttttctccttggaactcaccaccacttaacataccacatattttccttatttatttttgtctctccccatcagaatacaatctccatgaaggcaaggacttttgtttactttgttcactgctgaatccccaggacacaaaccagttcctgtttaataaataaaacaaggaatgaatgtgttagatgaagaaacaataagagctaaatttattgagcacttactgagactcaattatattcactcatgcatttatttattcagttatttacttatgcagagaaggggtctcgctttgttgccccggctggtctccaactcctggcctcaagcaatcctcccgactcagcctccccaggattacaggcgtgaaccagcacgcccggtggagactcaattataaggggctcacagataacatctaattcttacagaggagtaaactgaggcacaagtaagcaggagagccgtgattagaaacctaggtctaactcacagcccgtgagctttcctccaagccccgaggcttccccttaaaaaagccagcaaggggcgagactcggagggcagaacccacggagggcggaacccacagaggacagagcccgcgctcgcgagcacggccttgtccgaccccccgtgccgccggaggagcaagtctgtcttggaatgaatgatcgtcggaacggagcttgatcaaaccactcagcagtaggcgtcgcccactttcttattggttggttttggttctcaagagtaggaaagttaggtagtccgcgaggggtctgcgagctttgcggagcctcgcccccgagcgcgcggtttccctgccgcgcaggcgcacggaatcctaggcgcggatctcgcgtttccggccggaagcttctccagcctttcccggaagctgcgctcgctacccgggtaacgggtcccggctgtggaagctcccgcggcgccgcgatggacctcgag

SEQ ID NO: 22870 - DNA, 2300 bp, Homo sapien
gtaagaacaaacaacaggctgcatggatccagtgctgggcccggggtcagaggacagaaactgcgaagggcggtctcaagtgaggctgccgattccggtccctgaaggccttggaccagggcacagaggagggactgctggctgcaggagggccctgtgacctcatgctgctcctcacttcacctccttcccttggcttccacgcttccattgcttccgacctcggtgtccccgtcttctgtctcctccactggctcttcctcccagcctttctgtgtcggaggctcctggatccagcatgggtcccatcctctttccttcctgccttctcatggctttaaatggcctctagacgtgggcggcgcccagatgtgagcttcagcccagacttctcccttgcactccagcctcgtacccaggagcccacctgattcatggatttttatctcccatacatcttgagcttagcacgtccaaaacagactctcgttctcccccaaatcttctatgccccaggtcttctgtatcccaggggatggcaaatcattcctccagttgcccagctggaaacgctgtagtcatccttgattctctctttctctcacaccccatatccaattttcagacaatcctgctggtcccaccttcaaagcatatccagaattcggccacttcccaccacctcactctattgccctcggcctgcatcatggcaatggcctcctacctggtccccaccacgcagcagcagagaactattttaaaatgtgagaccctgtcactaccctgctccaagcccctccaaggcgtccccacctagcccagagggaaagccacagtccttacggaagccggcaaggccctgctcaatccgctcccctgcgcccactatctctgaccgcagctcccgcctccctgtgccccaccagccacccgggtctcctcaagggtcacaaaacacaccagggtccctgcctcaggtacagtcccaccttcgtggcccctcatctccttcaagcctgaaagcctcgctcctccccgcctccccagggcctgcctgctttaccttccaaccagccacaccatttacttgtttttgtattgcccgttaccccaactaggaaggcgaggagttgtgtctgttctgttgactgccctgtccccggcgtctggggccgcgcctgtccgagggtcaggtccgacgctgggcatgtggggactcagtgagcggaccctgggaaagacggcagctcgggaaggacaagtgggggccgtcgcggtggagtggtgcccggggccggcccggggcgcgcgactgcacgggcagcgtggggcggccgcgcggggaagtggcgcccgggaggctgcggggcacagacatcgcggagccccagggactgccgccgaggggaccgcgggagctgcgagggcaagaaatcctaaaagcgcgcggccgcggtgggccaggagaagggacattccggagacggctctcgggggaagccacgggactcgggcgtgacagcctgcgagaaccgagaggtgagacgcgcgaccggggagcgcggcgaccggcagaggcgcccccgccgggcgagcgcaggggcagcgcggggcgctggggccggaacagcgggcaatgtgggcacggggcgcggaggcctgagtgagcgaagaaggaggcggctgtacggccggggctcgtcgcgaaggggatggccggggacggcggggacggcgggggcggcgggggcggtggcggggcgcgagcgggggcgctctcggtgcgcgcggaggttggcgggtgcgcgccgcagccgcagcgctccctctcctgtcagggcaggcgcgtacggccgcgagtcgggcgcgcagccccgggagcgcagtcccgggcgcaacctcgcggaacgcgcggcccccgccccccgccccgcgccgctcgtccccgtcagccccgccccggcgctcttctcgccgaccaatcaggaggcgcgaccggcctcccagccccgaggcctcgcccccagccggcgcatcgccagccaatgagcggccgagcccggcgcccagtgcgcgcagcccgcgcggagccggctcagagcgagaaaagcaaacccaacccgtcggggccgccgctccggacccgcagccgccgccgccgcctcctccccccggatcgggtgtactgtcccaacccgaaagtccagttctgcggcccggcagcggcgagcgggcgcgatgacacaggagtacgacaagtgagtgaggcgcaggagtccggccgccgcgggggggcc

SEQ ID NO: 22871 - DNA, 2300 bp, Homo sapien
aggaacagccatgttaacccttcatttcttctaagatccaaatgagggcttcatatgatcactgtctttagatacgctgggattcatacgtccatcacccaaaggacaagtctaactcagtgttctattccttttttggttcttttctttgcaagggaagtgaaaagtaggcaaatgttagtgagtgtcctgtagaaataactcaactgagatttaaccccattgcgcactccaaaatggctaaggtgcttaaaaatggctttcagcgtgaaaattctattcctgcatccttgttttcaccattaaagacaaaacactgctggccaggcgcggtggctcacgcctgtaatcccagcactttgggaggccgaggcgggtggatcacaaggtcaagagatcgagaccatcctggccaacatgttaaaaccccgtctctactaaaaacacaaaaaattagctgggcatggtggcacacgcctgcagtcctagctactcgggaggctgaggcaggagaattgcttgaacccaggaggcagaggctgcagtaagttgagactgcgccactgcactccagcctgggcgacagagcgagactctgtatcaaaaaaaaaaaaaatactgcttcatgtattaacaatatgcttttcaagctttatcaaaattattatgtaataatgactgatgcttatacagccaaagacctgaaacaaataattcagtttatttgaaaaagaaaataggccaggcacagtggctcacgtccgtaatcctaatactttgggaggctaaggcaggaagattacctgaggccaggaatttgagaccagcctgggcaacatagtgagactcctctctacaaaaaattttaaaattagccaggcatgacctataatcctagttactcaggaagctgaggcaggagaatcagtcaaccccaggaggttgaggttgcagtgagctatgactgcaccaccacacttcagcgtgggcaagagcgagactctgcttctattaaaaaaaaaaaaaagaagaagaagaagaagaaaataaatttacacctatcacaagaagtctgacaagtaagtaccactaaaattgtcacccttcatggacagacatgaggatttacatgcttctgagacgcaggagtagtacacctagtgttatcacacgggcctttctggcacaaaacttgtaccaacgagtttctcccattctcaaaagtttcagttaaaaatatgtaacttcataattaatgttttaggaacttaatttatagtaagtcaataaaacaagctataagaacagatatataataatttccacttcaaaggaactcttcatggctatgtttccctggtaagagtttcttctagcatcattagttattacacaagtttctgctcatattcaaagaaaaaagagcttacctcaatccctcagccccaacttagttagacgcatggcctcatactaggaaataatcaccccattttttttttttgagatagggtctgtctctgtcacccaggctggagtgtagtgatatggcatgatctcagctcactgcagcctccaactcccaggcttaagtgatcctcccacctcagcctcctaagtagctgagactataggcatgtgtactaaccggctaatttctgtatttttttatttatttatttttggtagagacagggcctcatcatgttgctcaggctaatcaccctaattttaataataaaactatctcctaggcttctttcacctctgtatttcttgtattaaggaaagaatacagtgccagaatgtagccaatggctagcaactggcgattctgggtaaaggtattcaggaattaattatcctcttattttaagttttatgcaggtttgaaagtttttaaaacaaaaagatagcaaaaataaactgtaaaaaatatacactacattcatgagaagacactgtcattaagaagcttctggtaatcccaaacagatcctgtttttatacaggtactgatgacaacacaatgattacacaggttagtcacacagagtgacaatgagacaaaggccctgtggcaaagctgtgcttcaactcagtctgctgttttaagtagcaccctaaagacgtagccacccccaaatgtgtgtttctggtcagaaggaagaatggagaggtgaatccagaaggagagcggtatgcacgctgcattagaaagacagtggcctcggccatggaccagactagggccccagatgcacacatcctagctgtgacctctgagtgagaagtcgcac

SEQ ID NO: 22872 - DNA, 2300 bp, Homo sapien
taggatgaaagcactaacattctcctcctccaaagggatagttttagtaataacttcagtatttgcttatttgtttttgaggttttctttagaaggatgtgtggcagtggtctattaaaaaaattaagcaccagtgactcttgaacaactgcctgagtaaaattgaataaagcaagttaaattgtattcaaattcctgttgaaattatttgtgaaatattttagattaaaactttcagaaaatttaattaacgtttggctagccatgaaaaactttaaaaagacaccttttaaattgtcttgtgttttattatcaatcaaggaatgaaacatatttaaaggaagaatgatcatcacccagtatcccattatcgtgatgattgctttattcattgttttgatgtgtatgcaaattttatgtagcgtagttgtgttcacagataggatttggtagtgtactttcttctacttagtttgtttcataaacattttctctgtattttaatcttcataattatcctttggaagaggacttgtggcttttatcttttacttttcattatgggcattttcaaacataataaaaatagaaaaacagtataagcccacatgtatccatgaccagcctcaacagttatcaacacaattcctcttgtttgatttgttcttccctcttcttcaactttgagattaattcatgtttttattttatttatttttgctggaacattctgaagcaaactgtaaatatccttacaattgctgctatatctagttttcactattaagaagtcttaaggaacaactttctagactttttccgttttaggataaattcctgggagtgaatttatggttcagggttcaaacagttttattgatcttgaaatgtacagaattctcaatttgcctgtttcttgaagcttcagcctatatgatttctgggggctttgaaaattcattcattttacccactggaaatcatcttgtattgctcaaattatttatcaaaccaaaatttaattttataaaaagcagatgtgtctactgatgcaatgtaacaataggttttcttgggtgaaagagaaagccaggcccggcacagtggctcatgcctgtaatcgcagcgctttgggaggctgaggcaggtggatcacctgaggtcaggagttcgagaccagcctggccaacatggtaaaacccagtctctactaaaaatacaaaaattagccaagtgtggtggcgtgcgcctgtaatcccagctactcgggaggctgaggtgggagaatcgcttgaacccgggaggcggaggttgcagtgagcctagatcacgccattgcacaccagcctgggccataagggcaagactctgtctcaaaaaaataaaaaattaaaaaaaaaaaaaggagaaagccaaatggcataggtggtaggaaaagtggtgaccaagtaataatagctcatacttcttgaagactgtgtgtcaggcattattatacaccttttagtgtatcatctcatctcaacctgatgagaatggatgccattattgtccccattttgcagatgaggattcagttactaagagatgaagtaacttgctcaggtgacacagaacttgaacccaggcaatttgaccctggcgtctatgctgtaaccccagttgatcagatcgcatagcttcaggtttctagtaaaacacagtaattgtttttaggattatggaaagtaaagcttgttagaggagagctctgagcccttagtatttcgaatgaaattttacttaataggtttggattttatttgaccgataaccagaaagcctttttccctttatctagtaatgggtagttttgatgttttctgtttattctgtcaagtgttattgcacaggacccaacagcccaatgccattaggaaaataaaaattgtcaaagaactacatcagcatcgcgtttgaaagcagttttcttttcttaaagaaacagcataccaattgtgacagagcagcccctcatctctgctggagaaaacagagtgcaagtactgaaaaatgtgccatttaacattgtccttccccatggcaaccagctgggcattgataagagaggccatctgacagctccagatacgacagtcactgtctccatagcaacgatgcctacccactccatcaagacagaaacccagccacatggcttcgctgtgggaatccccccagcagtgtatcatcctgagcccactgagcgggtggtggttttcgatcggaatctcaatactgaccagttcagctctggtgct

SEQ ID NO: 22873 - DNA, 2300 bp, Homo sapien
ccaccgcactgctgaatggagtttgcagggtccacacacaacacagaaagcagactccagaattagtccagagaagtcactaaccaaacaaaactgcagccacaaaacctgggtaaagggagaatctgatttccacagtagccacattatgttacctaaaatgtccagttattaacaaaaacttaccagacatgcaaataaacaaaaaattatggcccatgcacaggggagaaatcaacagaaacctcctgaaatatcccagagactggatttattagacagagacgttaaatctgttgtttaaaacatgctaaataaactaaaggaaagcatgtctaaagaattaaaatatgaggacgatgatctcactgcatagcacctctgcgtctgcaggccagagccaccccaccctccaaaagttgcctgcaaacagctaccagattagaaatcggtctgaggaggcactaggagccccctcaagtccaagggagctggaatgaaagcagcagtcagcctggcctccgaggaggcggtggcttcaggcagagggggcagtcctcaggcactgttgagctgggcacaccctgctttaaggatagatccaaaagaacagaaatgacaaagagcccggcgcagtggctcacatttgtaatcgcagtcactcagaaggccgaggcaggaggattgcttgaggctaagagtttgagaccagcctgaacaacgtagtgagaacctgtctctccaaaataataataataataataataataatagtaataataagctaggcttgatcctgtagtcttagctacttgggaggttgaggcgggagatctcctgagctcaggagttcatcaaggctgctgtgagctatggccacgccactgtactccagcctgggtgacagagcggaaaaaaaaaaggggggagttgggtattgggtgtgggatggaacctggaaaggcacagcctttgtacaccgtgcagggctctggggacagtcgagagattgccactctgtctgctgctgtgacgagtcactgcccacagccctggggatgacgatcctgcctggtcagccctgccctgtctgcctgaaggtgccggagcagcctgagggcggggttctcctcttgtttggtctctccctcaggggatgcttccagaggggctactggtctcaggagcagcctggcagcctggcagcctcacccccagcctgcatggcccgcaggacatttgctttctcttatcaagaccagccctgtgaacagagccaagtgcttcgtgtgggcgcctggcaactgagccaccctgctggctgccacgctctccctgtgctccgtctgcagtgacaggggagggactccaccaacccacacaggcccgatggtgagaggtgacaacctgctagcagccctcgctggctctcggcgcctcctcggcctcgacgtccgctctggccgctcgaggagcccttcggcccgccgctgagctatgagggcccctctctggggctggccgaggccggagccggctccctctgctcccggggaagtgtgaaaagagaggcgcgggcgggagccaggggtgcgcgcggcgctcctgggccggcgcgggttccgggtggacgcgggcccgcgggccccagcactaggcgtgcccggctggcgcctgctgggcttgattggaggctgggtcccgtgcgtggaccgccgttccctcttcacggggtcgttggccacgatggcgggtctccgtctttctcgcttcccctcttttcctcttggttgtcggggacgagctccctctgggctgccggagtacctgggctaggtgccgcagagtccccggcgagtgacagtaagaggtgaagcgggctgggctgccgggacaggtgaggacttggagaacttttctgtctagctaaaggattgtaaacacaccaatcagcgatctgtgtctagctaaaggtttgtaaacgcaccaatcagcactctgtcaaaacggaccaatcagctctctgtaaaatggacagatcagcgctctgtaaaatggaccaatcaggtctctgtaaaatggaccaatcagcaggatgtgggtggagccaaataagggaatgaaagcaggccaccggagcctcggagaggcaaccgtttggggtactcttccacactgtggcagctttgttcttttgctctttgcagtaagttttgctgttgcttactctttgggtctgcactgcctttatgaactgtaacactgaccatggaggtctgcagcttcactcctcaagccag

SEQ ID NO: 22874 - DNA, 2300 bp, Homo sapien
cccgcctcggcctcccaaagtgctgggattacaggcgtgagccaccgcgcccggccctgagttcagtttttttaaggacacaattagaggtgctcacgggatgttcaagcagggaggctggtggataccttcgattcgctcgttcacctacgtggacttattaaacagccaggctccctggccttgggagagtccttctggtggggagacagatgataaataactgaagtaatggaaaaggggcagttcaagaaaagtgttgtggaggaagaaaacaagaaagcccgccagaaggggactggaggtcggccccgagggtgtgtccgctagagggggcctctccaggtggactgcgggtgagagtaaagggggcatgtgggggaaaagcattctagggaacagcaagtgcgaggacctggagacggcagaggggctggtgggacaggcgcccaagaggaggcccaggctgtccctccggggcgtggggagaggcatggggctgggtccctgcaggagctcacaagccacagtggggagcagaagcgttacgctgagtacagtgggagccactgaaagggttaaagacccctgggggtgctgagtgggaagaggctctgggagctggagtggacgcagggagaccagttataaggcgaatgcaggagtccaggcaaaagagaatattccagtgtgtatcttaagacttaactttttacacacagaacaccctgcgcccctctcagagcctccggggtcttcatgcgagcagtttatcacggttctttcgtcttaaaccctcttactatttcagcaaacaccctctcctcagcctggtcaacccctctgcccaacccgagtgggccccgaaggaacaagtggggaccagagtcctgctcatgtgagtggtggggcccagcccgttcccctaagaccagaattctctcgctcagagcaaagccccggggtgccgggattctctctctgctcccgctccctggatggagcttttaaaaaaggaggattcctcactgcggcctctgccccttgcactgagcgccaacccgcatcacagctcagcaaaggcgcgcgcagtgaacagacggaggaggggtggctcctcgctgagctgaaggctgcggcgacgaaaataaacagcatggttcctgctctccacgaacctggcgctgcagacgtgggcaaaccacaccaagagacgcgagcaaccgaaatatagggagaaaaaaaaaggtgccctggacagcgggctagatgtctcctgcaggctcgaggacttcccggagggggcggcgttttctcggggcctgggaagaatgggcgggtttcagcgggcgccttctgggtgactgcccgtttcggcttcccctgaccccgtaacagagcggaagaggcccagagacgccagaggaggggcgtcagcgggacactcaggccaataagctctgactcccgctgtctgcaaaaatgaccggatgcaggaatgtcacctagaaccggccagctttccgacctctccggtcaaggacgcattcctaagagacgaagggagaatgacagaagttaaaaacaaccaaacaaaagccaggttgaggcctctaggtgggtctccgctaccgatggattcagccggtggggctgcaggaggttcctataagcgtggtcccctctccccgcaccgagtccggccccggccctgggatttccccagccgccgccccgccccctccgccccgccgcccccgccgccccgccgccccctccgcccccgccgccccctccgcccccgccgccccctccgccccgcttgcccctggcgccgctgcgacctttcccttactttccagggcctcaggccccgcccctcgctccgaccaaaacacgtgccgcgtcccgccctgcccgatcacgccgcggccaggctccgatcacgcggccccccgcggcgctcattggccggccgggcacgaattggctggtggtggccggccccgccccggcaggggcgcggtgtattttggttcgcctccgcgccccgccccgccagccgctccctccgcggccgccccgcccctcccgcgccgcgagggccgcgccggggcagagccgcgcgggcgggcgaggcgcgtgccggccgcaggagctccgggttgccgccgccgccgccgcccgcagcccacgtgcggccgctgctgcgcccgagctcacgccccgcggccgctttgttgctcccggccggcctgcacgatgcacacgccggacttcgcaggcccagacgacgcgcg

SEQ ID NO: 22875 - DNA, 2300 bp, Homo sapien
actgcaagctctgcctcccgggttcacaccattctcctgccttagcctcccaagtagctgggactacaggtgcccgccaccacacccggctagttttttgtatttttagtagagatggggtttcaccgtgttagccaggatggtctcggtcttctgactttgtgatccgcccgcctcggcctcccaaagtgcttggattacaggcgtgagccactgcgcctggctggatgctacatttttaattaatttatttttgttttttggtaaagattgggttttactttgttgcccaggctagtctggaactcctgtgctcaactgatcgtctccagcctcccaaagtgctgcgattataggtttgagccgctgtacttgtacttcgcctgatttatttttaaatatattttgaaagattagcttgaaatctttgggtgctaacatagctgcatcttaagtgtgggaggaataaatgccttttggaggatttcttgacccaaatcatccaattccagagtaataagataccactttcttctgagtttgatgaacacgattttaaaatgacatgaattaaccccttgaataaggtgcttagcgtttcctttctctttaatatgtattttctcacctcacaggggagaagcctttcaactgcagctgggatggctgtgataaaaagtttgctcgttcggatgagctgtcacgccaccgcagaactcacacaggggagaagaagtttgtgtgcccggtgtgtgaccgacgtttcatgcgcagtgaccacctgacgaagcatgcccggcgccacatgacgaccaagaagatcccaggctggcaggcagaggttggcaagctgaacagaatcgcctctgcagagagcccggggagcccactggtgagcatgccagcctctgcctgaaaggtccattaggacatcactcatgggatttttaaaaagcctctttccaggaatggaactgatggattcctctcccactgcctcacccaaaaaaaacggtcttggcggcctaggggaagatcggggagctggttttgatgaaagtatgttaacttttcttttccacttgggaccctgttcagtatcttttgtagtttcagaagtttttttgttttggttttttttttaaagaaatggtagaaaatttgataatctgaatcaccagcattcaaacaaatatttcggcaataaagtttacaaaatctggatttttacaaccttttctattgatgttttgtagaaataagacagggtactaatttttatactggtttttagaaaaatatttatattgttggtgctcaaatcaccaatttctagctagatcattttgcagccttcttttcagtgtttaataacaaagtttttcctaatggcccttcttttagtaaactggacatgttattccactacaaaaaccacaagttatctggccttttagatctttttggaatcggacctggttgagtaaggacctcttaaaagggaaaaataaattttgccgtcagcttcttcataacgttttcaaggaaattctaggcaatcattcctgtcaccaaagaactaaaattttggttgactggaactagtgagctgtgtccatggtgtgtcatgaaggatgtaccccagagagtaacatgagccactgggcagatcccagggaccagtacttgctgcaggatctagtctgtaatagtcttggccatggctctgctgaaagcaagccattcagtttcttgtttgtacctaaaacaccaaaaaagaaacactcaaatccagctgctttgtcaattgtcagttctgactccttttgctgtggccttatccgtactatattgtgggtagagtaacttctcagaaaaaaaggaaatgtctgtattggttggatgaaactccaccagagcacagcttagctggggcgagatgcatgtgaaggcaggcagtgccaagattccgcttcctttgtttgccaaatactagaaacacaaggaaatgcaagttacgctaaatggcagtaatactacccaactgcctttctgttcattttgtttgaaggaaattgttttgaccaaacagaaaattacttggaatggtgtgttttacagtctacctagaaaatagatggacaatatttttcaactgtatgagcacgtagataaccgagagaatgtggccacctgtgttcaagaagccactgatactggtttttgttaaacattggaagttcaggcaatggaataaatgtaggaacatacagaatgttgcactaatttggtagcctggg

SEQ ID NO: 22876 - DNA, 2300 bp, Homo sapien
attgtttgttgttgttgttgtttgttttgtttttttttttttttgagacggagtctctttggttgcccaggctggagtacagtggtgcgatctcggctcactgcaacctccgcctaacgggttcaagtgactcctgcctcaggctcccgagcagctaggactacaggtgcccttcaccatgcccggctaatttttgtatttgtagtagagacagggtttcatcctattggccaggctggtctcgaactcctgacctgaagtgatccgctcgcatcagcctcctaaagtgctgggattacagcctcattttttttctcttctttttcttttccctctctgtctcacctctcttctctctctcttttcttttctttctttctttttttttttttgagacagagtccagctctgttgcccaggctggagtgcagtggcgtgatctcggctcactgcaacctccacctcctgggttcaagtgagcatgcccagctaatttttgtatttttagtagagacagtttcaccatgttggccaggctggtctcaaactcctcacctaaagtgatctgctcgcctcaacctctgaaagtgttgggattacaggcatgagccaccacgtccagctagattataaatactttcttgttcttttttttttttttttttttgagacgagcctcactctgtcgcccaggctggagtgcagtggcgcgatctcggctcactgcaacctccacctcccgggttcacgccattctcctgcctcagtctcctgagtagctgggactacaggcgcccgccaccacgcccggctaattttttgtatttttagtagagacggtgtttcaccgtgttagccaggatggtctcggtctcttgacctcgtgatccacctgcctcggcttcccaaagtgctgggattacgggcgtgagccaccgcgcccggcctcttgttctctcttaataataaaaataaatggatgtgaatctgagtcccatttttattccattttcttaggcatatgttttttaatgtctactcctgaagtgataaaatagtagaatttcaagtctgtggttgggaaagtttagccgaaattccattttcacaattattctggaatccaatcaatcaggataaaagttaatgtcaagtcaagataggtgagttaaacccaggacttttgaattgccctgtcttggaaaggctggaatttaaagttgcaggaggtgggcaagggaaggaagtaatcacatttaagtaaaacacagaaccaaccaacaggaaggctcgctgggtttgaattcggcagctttggagtgttttctagtctgggttgtggttagttcacttaaaaagaaaagcggttaagggaaaaaaaaaaaaaatccgagaccaaaagctagacttatgaccaccacctaggtatttccttttgcttctttcctgtggcggggggagggcgaggtgggggttgctttgcctttctccttcattttcaaagtttttctttcccaaaagtagtgactatttggaggttttgatgaggctcaaccttcacacatccagtctccgctggggcaacagagggaaggagaaggccggagggggctgttggtgcccggaggatcgccccttccctcccggggcgtctcaggcctggcggacactgaaaggtcggggcgcactgacggccggacctcgcgaacgcagcgcgcgcagccctcagggtctttcccccgcccaccccgcgcatcgctagggggctcaggctttgggaagtccccccaagctcccgcggcctcccacgggcccggcgagcgtcgtctggggagcgtttccataaatgaacaaactcagccgggccccccgcagggttcagcaattccagaaggccgggacagggctgacccgacggcggggagcgaggggacccgtgggcgggagtggggggactgtagggggagacccgggaggggaggccgcgcccgcacccggtgctcctcgccggggtctcgggcccgcccctccctagggccggtgtgcgccccctcgggacgcctatgcagccctgcctcgcccgcccctccccaggctccggctcgcacccccgtcctccggccgcgacccccgcccgggaaccctagcccctggccgcggtcgcttcccggacctcgccccgcgcctccccctgcagcccgccccggccgcaccccctagcgtccccgcccccggccgcgccccctcatgggggccccctcggcggtccgggaggcggcgggcgcgccatgggcagcggc

SEQ ID NO: 22877 - DNA, 2300 bp, Homo sapien
tctgtttacttaaataaaaccaaaaaaacgagcaccgagggaaaaaggagtgaatcccggggctagcagcagcctgcggcgggcgctctcccgggagtggctgcaccgcccgacctccccggaggcggaaccgcccgcattgccgcgtggccctgggcgccgccacctcctccgcagcggggcaaagttgccggacctgggggcaggagggccacgccgagatgactcaggtttagcgcgggaggggaggatggcgacttcacccggcctttaacaacacgtacgcatctttcggcgtcttctacaatggctatgttaattacgtggccaggaactaaactatcaatgaagccacctctgactacttcagttacagtgagtttaacaggagcaaaaaagcacgtggcgccctagggcaaccgaaacgagggttttagacgctgattatgggaaattgaaatctgagttgagtatgagatgacaccaataaattataattttgttagataatagctttatcagccataaagtaatcaataaaaataccagtttcctggagatggatgctttagtgtgtttggggtgaaaatggcgatgaatggcgagttgctttaaacaaatcatggtacaccaaagttttagttgtggctttgtgtaaggaatgtgatgggcacttattcctgcaacacgagaatactatgatttacaagtccgtagtacttttaagaaatgagagaaacagacctaggtggggagggtacctgtcccaccccaccctctttaaagtatcttatctagaaaaggctttgtgaaaaaaaaagtcccgggtctctctcaataacagccctgagcgcagctgttgaagctttctcaggttaatgatttctttcttggatcttaaagtttctttctcttcctttatttttggcattttgcccgttgcagggcctggcaaatcagaaagccacatagaaaattaaatgaaagctattgctaagttccagtctctacaccagtggagttttcaaactcctcttcagcatatttgacgcccaatgagtagtacattaattcctagtcctaaaatcattctgtgaactttctcccaggaatttttgctcagtttgcaattaaaacaactttttttcttctctttttaatggcagaggcggggtctcactatgttgcccaggatggtctccagctcctggcctcaaacaatcctcctgccttggcctcccaaagtgctgggattacaggcgtgagccaccgcgcccagccacagtttgcaattcttaaggcaagggtgacaataggggtcaggggtctgacaggagacaggatttctgtggaaaactgcaccaagggccttctcgccatgtcccgtagtttgaaggtttacaaaggactgcacattttacatgagtcatctcaacgaacgctctcctcaccgcattaacagtccacgcggttacgagtcccattttactcacggggacaccgaatctgtaagaagcctggtcgcttgtcccagcaaaacgagccacggggctcagcggccctaacttttaggctgtagggtcctcgccgaccaccccgccaaaatgtcaggcctcggggcccttgcacccccaccgcagggacacggatcgaaagggtcgcagcaacgcctcccccgcacccaggagcgttttccaggcctttgcaccaacctcgttggctaagccccctgcccggcggcggcccggctgggaggaggtgctttcgggaggcggggccgcggcccggggatcctctcgcgcccgcgggctccaatcgctgctcctcacgcaatcctaaacggttcccgggcgaaccggggcccgcgcgcgccaaggccgccgagaccctcaggggctgcggccctggtcccgcgggacctgtgggggcctgggcggcggcgcccccgacccagccagcggacgggccggggggggaaccgggaggtcccggggggcgtccacgggggtgtccccgggggtctccggaaggcgccggcggaggctcccgcgctgcgcttgaaaatcgcgcgcggccccgcggccagcctgggtaggggcaaggcgcagccaatgggaagggtcggaggcatggcacagccaatgggaagggccggggcaccaaagccaatgggaagggccgggagcgcgcggcgcgggagatttaaaggctgctggagtgaggggtcgcccgtgcaccctgtcccagccgtcctgtcctggctgctcgctctgcttcgctgcgcctccactatgctctcc

SEQ ID NO: 22878 - DNA, 2300 bp, Homo sapien
tattcaagtggtatgccaagatttttaggactcactaattgttgatttattacacatttttagttcacctagggataaaaatgactccagaatgactaagacagtcataggcattcccagcacccgtggtcatgtctgctcttagcaaggggcctaaatgcactttattattcacttagagttgtgaaggtactccttttaaagttggatgtctaccaatgtaaaaccttcttttgaaaaaattcctagatgttgggtaagacaaactaaaacctatgtctgaccatctttgctcatttggtaaagttgttgagaagctagaatgtggggctgcagtgggatggacggggaggacttgcctcctaagaagcctgcagtatagtataggcaaataagacttagtaggagttacataaggcagaggcagcagtgaaccctgagactgatttaggcatgcaggagtttggctgaataaaggtagcttaaggtctgttttgttttggagattggaggtggggggattagaaatgggctgctggagtagtctagatacaaaggtcagctttagggtggcgcgcggtggttctcgcctgtaatcccagcactttgggaggctgaagcgggcggacaatgaggtcaggagatcgagaccatcctggctaacacggtgaaaccccgtctctactaaaaataaaaaaagtggtggcgggcgcctgtagtcccagctgcttgggaggctgagacaggagaatggcgtgaacccgggaggcggagcttgcgctccagcctgggtgacagagcaagactccgtctcaaaaagcaaaaccaagcaaaaaaaacaaaggtcagctttggggaccagaaccttgtatggagtggaagtggtgaagctgcaacctaaagtagccgttgtagactttgaagtacatgaagaggaaaagtggtaacttgaaaggactgaggaaacattgggagtaaagagatttgaacatgtttataggtggaaattgagaaaagaaggcaaagattaggggtacgatcgggggcaaatgcccagaaggggaacaggaaggtctgctggggaagcctcaaaaacaagggagaggcagacccaggtctcagagagagggacagtgagatggaaagaatgaacgacagctgggcatggtagtctgagctagtagtcccagctacttggcaggctgaggcagaaggatggcttgagccctggagtttggttttaccgtgagctgtgatcatctcgctgcactctagcctgggcaacagagtgagaccctcatctctttaaaaaaaaaaaaaaaaaaaaaaaaaaaaaagctgcccaatgtctggtgcccttggcttcagaacacaaagtcatctgggtaggaacagtctgggaaatgagtagcctctcaaggtgggcaccagaataaagggaggcagaggagggtggtaagggagatccagttaactgtagtacccatggatttgctttcctgacctgggatcgacagtgtagcacagagtcctagtaggaagcaatcttagtttattggtttaattattttatgatataggtgtggcaactgaggccaaataatgcacctaatcatagtctgataatagcacagcagttaggattttatggttcttcaaatttaaattctatgattcttcaaattgaacaatgatctggacttgaaataattttaaaggcaacaaatgtccctgctgtactggactatgttttactgtctgtagaccctgaagctcaatatgaactacagaatacccaaacttgtattaatgtaaatcaagtgttgaggtttttaaaagaacactggagggaaaaactgaccagtaaaaataaaacatttcggtgtgagttcttcctttaggaagaggattggcaaatacttgaatttggcctttgtcccagagctcttatctagcagttggtaatcggaggtcttttactgtaatgcttcaattgctgataccgtatgtgcctactagggaatttctcttcaatgccattgaaacgatgccttgtgtcaagaagaaggcagactgggccttgcgctggattggggacaaagaggctacctatggtaaggagacccttgcccctacttaaacctgagcttcattttccaagtaatgttactggatttttggcccttgaataccaactcactagaatcatgttggtgttaactcctaaataggtgaacgtgttgtagcctttgctgcagtggaaggcattttcttttccggttcttttgcgtcgatattct

SEQ ID NO: 22879 - DNA, 2300 bp, Homo sapien
tctggcacttctaaagtagaagttattattggcaaaggcactggctcatatttctaagagatcatttagaatgccaggggcagcagaggatgggtcttccttgcagagagaagtttgatttacatttcagaaggatctttcctggcattttaggccacttggcattaaaaagagacttgtggggcattgtctggaaggggacttttgccactgtgagctggtgacaagctgactagaagtgggggtgtcaaaggctggaatcaccacattgctgggggcggatgaggggacagttagtggatttggggtctgttctttctcatctctcttggtgacccttcccctccatcaggaaatgaggtgctgagccatctctatggtcccagccttcggttttgctctgtttggggcgtttcagagagctggactgtcccaggccccttgggaattggaagcaagtcctagaactttctggaacacagagagtggtctgttgggccttcctttgcttcctcagttcccaccctcctcctccactcctttctaggactttccttcctccacccctggatcctccaatgttaacggagcaggggtcaggaaatagcccgtgggtgggatctggttcaccgcctggttttatacataccaggagctaggaatatgttttaaaaatcaaaagaatggctgggcgtggtgtctcatgcctgtaatcccagcactttgggaggctgaggcgggtggatcaagaggtcaggagatcgagaccatcctggctaacacagagaaagcccctctctactaaaaatacagaaattagctgggcgtggtggcgggcacctgtagtcccagctacttgggaggctgaggcaggaaagtggcgtgaatccgggaggcggaggttgcagtgagccgagattgcaccactgcactccagcctgggcgacagagcaagactctgtctctaaaaaagaaaagaaaaaaaaatcaaaagaacatttcgtgttgcatgaagattctatgaaattcaaatttcagggcccataaatagcttcgttggggcgcagccacacttgtttgtttacgtatggtctgtggctgccttcaccatggataagagactggaatagctgctgtggtctgtattttctatctttacagaaaatgcttgatgagctctgagtaaggcctgaccatgttcctgagagctccgtagtggacctgatgggaaagtagtggatggcattggtggtggctgagccagcagggtgcctgctcagagagccggttattaatggagtgctaaccagtcactctagatgagaaatacacagatcacatttaaacacagggaaagctgtttacaggaaaatgataaaatagcagaacgtaaagttatgggtatactgtgcttacgttgtcataaaaatgtgtacatatggatagagaggaaggtgtcccacgtggagaaatgaaaaggtgccttagggggcaggttgggagtaagagcagtttttctttctattctatttttctgtttaaattttcctataatgttcttataataagtgttgatgagcactcgcagccaccaggggaagcagctacccaggcagaaggctattctgggtctcaggtgggctttagggagagggaccctgagctctggaccagggttaggaggaggtgccccgggcatgtggaggctggcagccctcgctcctgtgaactggcggctggggctgcatctcgcccacgtcgctgtcatgtgcggggcccacgttgtgagttgtgtgtctgctcactattgtgctgtagcctctggaagttgcttaggagcttgggatttcgtggagaggtgggagttagttgcttctgtccaaagaggtcggccaatgggggccattctgagttcagaaaccgctggcttggagcccgatggacccagccaggcccagctctgctgttgaccagttatgtgctctgggactcaggttaagtctgtgggtggcaaaactggcacctcccatcccatcttccctccatcccctccccccacccccatgtctcactctgagccttagggagttggtgccacctagctacgctcactgacacgcatctcatgctgtgctaggatgttgtccccatgttagtgtgccctctccagggagactgccagccctcgtgggtgtgcatcttctgcttctgcatccttggtcactgccagcagaggtctgggcacatggtggtggacagtggctattaactgtggttgtgctggaatggaggaggcctgg

SEQ ID NO: 22880 - DNA, 2300 bp, Homo sapien
tgttacattagccccaggaaattatacaacatcttacctgaatttgctttcttctttgctctagttaaattcaaaactacatattgaataacgacggtgtgctctctctccatgaagcttcggggtgggtagacagtcctcctcttgaaggaacaggagggacgcaagggaagggaccaacttgtatctcatctgagagagatacactcctggaataagaggtctgcggttaagtgtgtttctctagaagttcagaaacagaggaagcatctgcgggctaagctgctgagggctaggtgagagctaactgacctaagttttgaaggatggatgggtgacaggttggagggggaagatggaaaagtcacatgggagaggaacagcatgggccaagtgtggaggaaccagtgagtgggctgggtttcagaaacaggccttggtctgcttttgagccctccctgaacttttccaccccaaccccacctcctgcctgtgtctgccatgcacctcccttcctgtgagtctgtggacagactttgcccctttgccctgtgtgtgcttgggagaaatctgctcagtttctgtggcagggatgtttctacgtgttcatcaaaccggctttgtttacttccgaaacactcatgaagaccacagctgccagagccccttgcatcctggtgggactgtgcgactacttctggcccatggatgtgggtggaagtgacgtgtgcttccccaggcctggctcctggaccccaccgacggcttctcacctgtaaccccaccagccttctacctggatacttcacggggagctagagtggccttggctaagaaggaggcatggcacccgcgggtaccgggccgccttcatcagtcggtgcactctggtccaccgcccacatgccttcatgtaatcttcactgtagggcccacagggaggggaacttcctcgaggtctagctttgcctttccgccttcagagccaagtaagaatgaggggtctgggctcggcccaccttccctgcaaggccctgtgcccgctcccctcaaagctggtcttgcatgttgctctggcggcctctgtagcaggagttcactctgttttccgtggaggaggagtggaaggagggattcaagctctcccctagagacgctagaaagacagttttgtctcagcctcatacgatcgcccagctccacatttctggctgtttctgtggttacctttcttcggggatgtttggggcgggaggtgggtgtgtgtgtatatttgctcttctgaagccgtttttccggagctcctggtgggggtgggggtgctctgtccctggttcctctcgaggcaggtgcaggggatggaggatgcccccctccccgagagccaggaggcgccgaccctgggcaggaggtgccagaccggcgcctctcccgcgtggagctcgaagaccacagatgcctggaagggaggagcaccttccgtggttaggtggggaaaccgaggcagaggcggcccaatggactcgcctaaacggcctggggagtcactgcaggtaaccagagctggagccaggcttcccactccaggcccggggctctcccccgaacaggcgtgggaaggggtgcgagctgcacgcggggctggggctgggggtgcggggctggggcaactcggctcttccccttcctaggccgcccgggccacttcctgcggcgtgggggcggggggcgcgggcgcagggctggcccctcccgggcgccgcctctcggcctcttctataccagcaggccagaggccaagggttaggggaacagaaccggtgcccggctccgcccctgtcccgaaagccactgggggctgggacccggcagggccaggtttgggccgcgagggccgaggagcagcgaggtgcaggggctgcgagggccgagccgggcgctgagggtccggcagggggcgtggagggggcggggcccggagggggcggggccgtaggaaacttgagcgcccgcctctggccgcgcgccccgccccggcccccgcctccgggtcccgcctccaggtcccgccttcgcgtcccttccttcccggagctggcaggcgggccgcggcggcggcgggcagcggacgggcggactgacgggcgcctccaccttgctccctccctggctgccggcttccttttgtctttctgggcggcgatgagcgcagggccggcgcagcagctgcgggcgcacggaggcccgcgctgctagtcactcctcccggcctcggcgcgcttgtcccgggcagcggcccg

SEQ ID NO: 22881 - DNA, 2300 bp, Homo sapien
cctggatacttcacggggagctagagtggccttggctaagaaggaggcatggcacccgcgggtaccgggccgccttcatcagtcggtgcactctggtccaccgcccacatgccttcatgtaatcttcactgtagggcccacagggaggggaacttcctcgaggtctagctttgcctttccgccttcagagccaagtaagaatgaggggtctgggctcggcccaccttccctgcaaggccctgtgcccgctcccctcaaagctggtcttgcatgttgctctggcggcctctgtagcaggagttcactctgttttccgtggaggaggagtggaaggagggattcaagctctcccctagagacgctagaaagacagttttgtctcagcctcatacgatcgcccagctccacatttctggctgtttctgtggttacctttcttcggggatgtttggggcgggaggtgggtgtgtgtgtatatttgctcttctgaagccgtttttccggagctcctggtgggggtgggggtgctctgtccctggttcctctcgaggcaggtgcaggggatggaggatgcccccctccccgagagccaggaggcgccgaccctgggcaggaggtgccagaccggcgcctctcccgcgtggagctcgaagaccacagatgcctggaagggaggagcaccttccgtggttaggtggggaaaccgaggcagaggcggcccaatggactcgcctaaacggcctggggagtcactgcaggtaaccagagctggagccaggcttcccactccaggcccggggctctcccccgaacaggcgtgggaaggggtgcgagctgcacgcggggctggggctgggggtgcggggctggggcaactcggctcttccccttcctaggccgcccgggccacttcctgcggcgtgggggcggggggcgcgggcgcagggctggcccctcccgggcgccgcctctcggcctcttctataccagcaggccagaggccaagggttaggggaacagaaccggtgcccggctccgcccctgtcccgaaagccactgggggctgggacccggcagggccaggtttgggccgcgagggccgaggagcagcgaggtgcaggggctgcgagggccgagccgggcgctgagggtccggcagggggcgtggagggggcggggcccggagggggcggggccgtaggaaacttgagcgcccgcctctggccgcgcgccccgccccggcccccgcctccgggtcccgcctccaggtcccgccttcgcgtcccttccttcccggagctggcaggcgggccgcggcggcggcgggcagcggacgggcggactgacgggcgcctccaccttgctccctccctggctgccggcttccttttgtctttctgggcggcgatgagcgcagggccggcgcagcagctgcgggcgcacggaggcccgcgctgctagtcactcctcccggcctcggcgcgcttgtcccgggcagcggcccgggcccgctgcagccgccgccggcgccgaacttgggctcgggaagccggcggaccgcgtcctgcgccggagcaggtagggaaggggcgggctgcggtctgctggctgctgaagtgtgccccgggcgtgtgcacccggcgtgtgcaccggcgagcgctgcgatccggctctttgcgtgtgtgttgtgcgcgcgtgtgtgtgtccgggagtgcccgcgtttctctgcgcggtggagttgtgggtgactgcggacggtggtgtgtctttcgaatggcgtgtactcgtgggcatccatgtgtgccttaggtgtgcacattttggactgcgtttgtggaattgtgtgtcggggcgcagttgctggtggggagcggtgcctggcgggtgtcgtgtgtgagcagctgtgcgcagagcggggtggcggggtgggtgtgggtggtccagccccacgcccagagccccctgtccctgctggtcggcgcagtgcgtagcttaggagcctcgaggacagctgggacccgacgggcaagggcgggcctcgcgggcaggctgggcagccctcagggaacaggtccgtgcggcccacgtgggtcgcctgtgagcttctgccaagggtgggggcccacgcggaggcgatccgctcgttcctcccagggccatggggcgacgaggagagccctggcctccccgcgacccgcactgcgacctgggccagacgcgccaccttccccggtcgcggtttgcttctctttaaaatgaggacagctcctcccttgggggctgtggtgacaggtgaaatg

SEQ ID NO: 22882 - DNA, 2300 bp, Homo sapien
tcctgggcttaagtgatcctcccaagttagccttataaagtgctgggattagaggcatgaaccactgcacccagccacagttttaaatagggtggtcagagaaggtctcatgagaaggtgacatctgagcaaagacttgaagaaaataagggcagaagccacacgaaaaccccagcaggacagcaggtgcaagggaacagcaagtgcaaggatgcttccaccaaggggctggaaaatgaaaggcttgacttcaccagctgcctcccaaccagggggcccagtgagtttaggcctcactggccctttctggctgaggggcagcctgctgcgaggggtttccctttctgaataaagagtcaaagtcccaagacagatgatttttgacccatgcatcttcttcctgcctggaaagcagatgtgattcctggagatggggcagctgttctgtggccatgaggttgaaatccatgtgctaaagacagtagagcagaagaagactgggaccttgatggcattcttgagctaccgcctgaaccttggatctcctgcacctgaactttgctctgtgacacaaagaagaccctttcttatctaagccactcttatctaagccaccgcttgtcacgttttatgttgtttgcagccaaatgcattcctcattgatggaatgtccaacattgtccccaagtcccccagatagatccctgggggctcttgacagacagacagcaggcaagcctgggacacacgctgcccccttctgctttcctgtccctccatcgtgttaagctggtctctcaggtgggcatcaggattcagctatcccaggctgaccctgaggtccaccatgactgtgctgcagccaccaccactggccgcttcatggcatgtttccagcacaactctctgacctggctcccccggttccccagacgcgttccccacggagtcccagcgtgtatgcatggggtcacggtgctccacgctctcaaccgttggttgcaggttcccgtccagcctctcaagctggctgctcccctttctcagttgtcccctgtgcctcttgtaccctaacttcagtgttagagcacctttcagggggaatggcgtaaaaaagccttcctttccagtagacagagtgccctggccagcagaggccaaacacattcccattcagctttgtttcatgctggatctggccccaggcctgcacctggccctggcagtgggcgcacgttaggtgggattgctgaagacaatgggtgactgaggcagttacaggtgtcagccccagatgaggctccccaacctgtaccctttaccctggagctggccccatctctcacagcccagtggtgtactaccttaggtaagcaccagttgcgcctcactctaatgaaaataataaaagctcaaatgaccagcactgtcctactgctttatacgcatgacctcaggtaatgagaattagcccacatccattcattccacaaatatttatggagtgcctactgtatgccagggattcttccaggcactggggagacatttaaaaaacaataacaacaacaacaaaaatctgcgtcttgtcggaacttccatatacacttccactggctacttcatggaaacatctggaacatctgatttttctagtcttcccattactaaatgtggcacaagaacgtagtctaaaggatgtacttcaccatgcaaaagctcttgtcatttcagaaaaggaaggagaattaagtaaaatgtacttcaagaaagtcagttaagaatttttccagttaatgaaaatttaaaatgattggctttcatcttgctgttttccagggtcccactattaagaactcactcatcctgttgttattaagggtgaaacccagacatttccttatgtaaaagccaattaaaataaattaaatgcaaatactgtttcattgtcatgtcagttttgagaaccggatcaatcagaggttgtggaaatgccaaagttgttaaggctgtggttaccatgacaacagctctattgtgtaagtggtctgttatttgggaattcttccttaggtcaggctaacagtgatgtcatttctcagggaaggggacggagttctctggagtcaggtctggggccaggagacctggtgagcaaaaactggggttcagccagaactaccagttttgtgaccatgggagacagtcccttccccttttgcctcagtttcctcgctttggggatagccattgcacagctgtgagtatattgtggccattcagcacttctcaaaagttgc

SEQ ID NO: 22883 - DNA, 2300 bp, Homo sapien
ctgcgggtcttcctgcagccgcagagcagagctccggggaaggagcaggcctccttccctccttctatttcccctgctgggctctccaggcaagggctcaccttcccagcatgcgggcaggagtttgggctttggggtgggctggcgggagaggaaggtatgtgggcgatagcagtgtgagtggcttgtatgtgcaacagtcagagccctcctggctccctgagccaagaactggcctctacgttccagttaatgtttctatctgaccacccccaggctgctaggggaaccctacctgccaagacatccaggccctctgcctggaggctgcatactgggcagtgctgggaacgactggttgataggtgtgccgggaagctgggcgattctggcagtgcaggacacttccggagtgtgaggaaaattgcgtcattggaacaaagtgattcctcacagagaggcacaaagtccgcatcaccacagaatcaaagatgtctcattcagcgctggagctataacgttctctgatgggttttgatggttaatctcatcaagaattaagcttgttaagggtggagctaacccccctctccctccctctagtccggggaacacggtgcccggtgggcgctcaaggactatgtaaagataaagttgataggggcgtaccacccccacatcccttcacataggaagaagactcacttctgcttacggctagcgtttgctctgtttctgtggaagtcgtgcctgctccaggaagagctggatcatccattcattcatttatgcatgcattcattaaacaggtattcactgactgtgcctcagacctggttttgggtaccaaggaagtttttcaaaacctcacagggctttgtagctataaagatatgtaaggatccttgggttatctgaagcccagagaagggagataacttgtccaagagcacacagcaagttgggggcagcgctgggccagtgctctgagctcctccaaccccgcccccacccacccaaggctagatctagatctacccactcctctccttaactcttcatcggctgtactcccaccctaaggagtcgaaatccccaccctagggagagacatatcctgtctggattgtccaaaagggaatgaaaggtaaaaatgaaaaaaaaaaaaaaaagtgtccccaattcaagtgcagtgcctccctggtgcgggcattccagcgtggcctggagtgagtggcagtccacctccagaggcgtcccctgggcgctcctagggactcgaatttcccacgcggctttttgctttatgtattcactgtttagacgttttcggtcaaagcattttgggacttccgtaactctcagagcgcgccagggagccgcccttaaagatacctagttactgatgagttccatccggtaaagcagagggtagtgggcggcttggagactcaggatccgggtcccctcacgctcctggctgagtccctggcttcacaggggaaactacctccgcaggccaggacccatctagttacaggatacctcgatgttacaaagacgaggcttccagcgcgggggcgtggaggcggctgccagccctgcccgcagcgtgctggcgacccccgggacgccccttccctcccgcgcctctgctccctagctggtgggagcagagcggcaccgggatcacttccaggtcccttgcaccggaggaatgggcggcagcagggtccggagtcggcccggcggggcccacgtggccagcacatcggtcctccgctcgcgatttcccttttccgctctcgggcacgaggtactgaacgccaggtggaagcacagctgtgcagctacaggctctgccgttcagctgccgcgggccggggccggggcctgcggcgtcgtgcgcgtgcgcggaccagttccaggcgggcgagaccgccgcagggcggggcggggcgaggcggccgcagggcggggagggcggggagaggcggccgcagggcggggagggcggggcgcgaagccgggggcgggggccacgcgtggggcaggcggtgctcggctcggctgacgtcggcccgccggcgccccaccagctccgcgcgggcccgggttggccaccgccgggcccccgcccctcccccggcggtgtcccggccggaaccgatcgtggctggtttgagctggtgcgtctccatggcgacccgccggtgctataagtagggagcggcgtgccgtggggctttgtcagtccctcctgtagccgccgccgccgccgcccgccgcccctctgccag

SEQ ID NO: 22884 - DNA, 2300 bp, Homo sapien
acaatgaaaccctgtctctactaaaaatacaaaaaattagctgagtgtggtgacaggcacctgtagtcccagctactctggagactgaggcaggagaatggcgtgaacctgggaggcagagcttgcagtgagccgagattgcgccaccgcactccagcctgggcgacagagtgagactccgtctcaaaaaaaataaaaagaaaggaaaaaaaaaaagaaaaagaattgctttatcgaagggacatgtttcatggctcctcacaaaaccatttctatagataactcataacactgtaaggttatgttttttagatatttttctgttctatagacaatgatagacacatctgttttaataatacaaatgggatcacactatatatgctgttcctgaacttgatttttgtaactaacaatatattagagatattttcccaggtctatacatattaatatgtagggtgatctacctcattcttttgtatagagtatttcattacatggctgacccataatttatttaactctctgtctacatacagttcaacctaaaaatctaaagaaataaccttttaaaatcttttttcaaaaaaagtttacattcaaggagacacgtgcttgtttgtgagatgggcatattgcacactggtgaggagtgggcttccaatgcacccgttacccaaatagtggacactgcatccagtaggcagttcctcaacccttaccaccctcccagcctttggggttccctgtgtctgttatttccatctttttttttctttttctttctttttttttttttttttttgagacagagtctcgttctgtcacccaggctggagtccaatggtgcaatctcagctcactgcaacctccgcctcccgggttcaagtgattctcctgcctcagcctcctgagtagctgagactacaggcacccaccaccatacccagctaatttttgtatttttagtagaaacaaggtttcaccatgttggccagactggtctcgaactcttgacctcaggcgatccacctgcctcggcctcccaaagtgctgggattacaggcatgagccaccatgcccggccagttatttccatctttatgaccatgtgtacccataaaaatcatttctatagtaagtataacccaagttattttttaaatgaatgtagtaactttgcaaagcatttgtatgtagtaaaacaatggaaatgtcatttcggttatcattttctttctttttttcactatatggagcttgatagttttaactccaccagttagaatagagttttagcatcttttttattcatttgtcagaagagcagaaacaaatactttataacatttttgttataaagtaacaaaaacaattttcataacattctcttaagtaccatttatggtacaacaattgaaattattaaagttcctgggacatttctatggatttcccatctcttacgaataaccccgtgttattcttcagctacaggagagggtggggtgcgtggggctggggcagaagcaggagatcacttgggaagcgccatagcatcgtgggtgggtgatggggctggcccaggggtaacaagggtagagccccaataggttttgcaggtaggattgacaggatgtggaggagaggagccaggcatagctctgacatatttggccttagcaatgccaaaggtgggactgtccttgcctggtaccacaaaaaccacagcagaaataagtttgggggtgaggaggtaatgagggattctgttttgaccagaatcagcttattttattatgtacgtattatttatatggggacaggttctcactctgttgcccgggctactgtgcagtggcatgatcacagctcgttgcagcctcaacctccagggctcaagtgatcctcccccctcagcctcccaaagtgctgggattacaggcatgagccattttatttttttttatttatttattgtttttagagacgggcttgctatgtcgctcaggctggtcttgaactcctggcctccagtgctcctcccacgtcagccactcaagtagctggaattgcagacttattttagattgaatgcttttcatttttctctttttgaaacaccctgtggttcatgttcttactcagagtaacagtccatgtccccatagcagcccacaaggcaccacgtggccccggctggcctgtccagtgctctcccctccgtccgctcgtcctctgcatgctggcctccctgtcatttctagaacactcaggcattctcttaagccaaggcc

SEQ ID NO: 22885 - DNA, 2300 bp, Homo sapien
aggccattgcacgcgacctcaaaaaaaaatcttgattctttttgctcactacgttcctcctctccacctttcaatgtgttccttcttgattcttctccatgtcagttagcagcaccaccgtgcacccacttgttcagactcaaaactgaagagttctctgattccttcctttttgtcacctcaacttccctctaccaacagtccaatccattagcaagttccattaccctatctacaaagtatgtcctgaatctcactgtgttttagcatcttctttgttaccaggcaagcccaagccaccgaagtcgctcacctggactacctaattcatcccgacttgaaccctccccagctagacatttgtcgcacagcagcccacacaacagtgacttccagcagcactaagaataaaacttgaacttcctacctttcctaccaggcctacctctccagcctcatccaccctgctctcgccccctcactcagcatagtgcaatcacacctgtgcctcttccgtcctcctacatgtccagtgcattcccatgtggggcttttgcactttctgttctcagcactgaaaactcttccccacatcttcacacgactggctcctcttcatcatccaagtttctgctcatatgtcacctcttgtagagaggccttccccgaaggttttatccaaaacactttctctcaatattttatccaaaacagctctcttctaatcattcaccacgaaaagtactttttgactaccttaaattgccttatttgctcacttgtttatttcccttttccccaacagggaaccttatctgaaatgtccactatagatcccaatacttaaaacagagttgcttgcacacagtaacttctcaatacatgtggagaatgaatgaacaaaatgagaaagctcatggggtgtgaagaacaactggaagacagggaattattcaaaccagaattttaggaagaaaggaaaaacctaagcactggctccaaatttttgtagaagcagacgcatggaaggagagctatatttattctgttttccaagggcaggactcaggccaacagtggcatgctataaggtgacatatttgaaaaccactttctaacaagtgcagagtctcaaaatggaaatgagcttccacaaaaggtagtgctcagtggtagtgcttggacagaggctggatcatcacgtataagaaacaaaagacaagtttcagagcctaagtgtgtcatgctggacaagtcacccttccccttgctggatctcagctgcatattaaacgcattattaaatctcagctgcattactaaacacgagaagattggaagagaattaccgacttgtccaagccctctccaactttaagactaggaatcaggttaagttcaacaagtctcgaaaatactgtcctctacaccataaattctgcagatgcgaagtctgtatctcccttgttcactgttgtatccctaagacctggcaaatgatagggactccacaaacagctgatggccatatgggggagagatgtgtcaacgaatctgccacgttttcctcctcgatgtacggcagggactgtgaacacccaaagaggcccaaatggttgcgttctctggaacagagaactttacaaaagttccagcaaagctcactgaccctgattatcccttggtccagtttctggcgcggtgacggcagtgtccttgtctcccaatgccgacacctcccccggaaattgtcagccgcctctgggcctccccgagtcggggggtgaccagcgtccagctaaaacagaggctagggccgaggagaggggcggctgccccacgaggaggacgacccccaagagctcgagagtgagggggccgggaagtgactcacctcaggaagggacttgccgcagctgaggctgtaaatcttcacctcattgaggctggagacctgcatggcgccgcacaacactgttcaagtcccgggtcctttcccaccagcgtgctcgagcaccgtaatcccgggacctccgagcccctgctccgcggcgtgcggccgctggcgccgactgatgacgcacttcctggagccggaacacgcgggcaagttcccggaagagggaaggtggctgaatccgggaagagcggcggccgggagaaaaactagtgaggctctgacaacccggcgtggctgtcggcgacgctgctacgggcaagactagacacaagccgggcgcggtggctcacgcctgtaatcccagcactttgggaggctgaggcgggcggatcacctgagg

SEQ ID NO: 22886 - DNA, 2300 bp, Homo sapien
ttttattttacaaacacttacatggtcttactatgtgccaagtactgggttccaaacgttttataaatatgaatgtatttcatcctcataactctgtgaagtggatactactgttatctccattttacacaggtacagagaggttaggtaacttacctaaggtctttcagttaaaaatggcagtcgggatttgaatcttgccagtctggcttcagagtctgtgatctttatttatttttcaagagatagggtcttgctgtgttgcccaagctggagtacagtgttagtcacaggcatgatcccattactggtgagcatgggagttttgacttgctccatttctgacctgagccgcttcacacctccttaggtaacatggtggtccctggctcttgtggggtcaccatattgatgccaaactgaggacacccaacgctcgttgcgtgctacagccaagaactcctgggctcaagtgattctcctgcttcggcttcactagtagctaggacaataggcctgcaccaccaagccaagccagagtctgtgatctaaccattctattatgccacctttcccaaagatgtttacagtttttcttaactgtaaccagtgtagaaaattaaaaatttgtggaggatcttaaatttgaggacagagttaaggaatatatccctacgtacatggctaaatgtaaatatgtagcaatgcctaatagaggccaggcactgttctggtactctgggtaggggtggatggggtggatagggaatataaggacaaatgatatagggtccacgaagaactctcaacctaattctgatgcaatgtggtgttggtatttgagagtttccaaaatgttgtgggtaggagagcaaaacaataatatttgggttttagaaagtaaggcataaaataatttgttcattaaatcaaaggaagtaagaagatcacttgggaaagttataatccaaaaatagttaagtatttgagtttcagcaggaggaatgaaaacagattactttaaggaaatatttcataattagaaatatccaggtttagatactgaaagtgagggccagagataggaatgggttgaagatgacgccacagtcttcttttttttttttttttttttttgagacggagtctcactctgttgcccaggctggactgcagtggcacgatctcagctgacggcaacctctgcctcccgggttcaggcgattcccccacctcagccttcagagtagctgagattacaggcgcgcgccaccaggcccgactgatttttgtatttttagtagagacggggtttcaccatcttggctaggctggtcttgaactcctgacctcaggtgatccgcccgcctcggcctcccaaagtgttaggattacaggcgtgagccaccgcacccggcctacagtacttctaacgtaacatcgcagaaacactggaggagagaagagaatacacttccactcggaattcgcaccctggtcgccttcattcgctgggttcactcgctgaactgcctcgcccccgcccgggaggatgacatctcggcctgggcagagactcgaaagcctcctcctgccgctcgggatgctaacagcagggagagctgtgtctagtttttttttttttttttttttttttgagagggaatctcgctctgtcccccaggctggagtgcagcggcgcgatctcagctcactgcaacctccgcctcccaggttcaagcaattctcctgcctcaacctcccgtgtagctgggactacagatgccggccaccacgcaaggctaatttttttgtatttttagtagagacggggtttcaccatattggtcaggctggtctcgaactcccgacctcaggtgatccgcccgcctcagcctcccaaagtgctgggattacaggcgtgagccaccgcgcccggcttgtgtctagtcttgcccgtagcagcgtcgccgacagccacgccgggttgtcagagcctcactagtttttctcccggccgccgctcttcccggattcagccaccttccctcttccgggaacttgcccgcgtgttccggctccaggaagtgcgtcatcagtcggcgccagcggccgcacgccgcggagcaggggctcggaggtcccgggattacggtgctcgagcacgctggtgggaaaggacccgggacttgaacagtgttgtgcggcgccatgcaggtctccagcctcaatgaggtgaagatttacagcctcagctgcggcaagtcccttcctgaggtgagtcacttcccggccccctc

SEQ ID NO: 22887 - DNA, 2300 bp, Homo sapien
gttttgtttgttgttgttgttgttgttttggtttggtttggtttggtttggattgggttttttgttttcttttttgagatggagtttcactcttgttgcccaggctggagtgcaatggtgtgatatcggctcactgcaacctctgcctctgggttcaagcgattctcctgccacagcctcccgagtagctgggattaaggcatgcgccaccacacccagataattttttatttttaatagagacggggtttctccatgttggtcaggctggtctcgaactcctgatctcaggtgacctgcccacctggcctctcaaagtgctgggattacaggtgtaagccaccacacctggcacaaaacaaagtatttacaggtaaccaggtgtatagaaagagtggtgccacgagccaggtcacagatacttctaaatgtgttgctcagtctctgagaagccaggtccatggctttgaaccttgcagatgggaaaatgtggactaaaatagaaagcatgtgttcttcctcaccctgattatctagtcctgcaggcttgttgggagcagtagaaaggacataagactcagccacaggcccgagttccaactgtagctctgacataaccagctgtgtgacactgggcaattcacgtaacttctgtgggcatctccacccttgtttgcagatgagatctgcccccagctctaagatgttttccctggctggataaaatgtcgtgcctggataacgtccaagattggagaccaccccgctttaatgtctaactgggccactccttccctggaatagccacttaatgtcctcaaacataccggagtttccccatcccttggtttcaggtatcctccctcaggaagatgttgcaaggactgactaatgcacattagtgtcccaataacgatgcctgctgcaggtgctgggacttccaagtctaacctaggctggcagtacgaccccactgtgatcttaaagccacctttctgtcccgtctctggggcttcccatcccaccctatgtgattacagcttaagtctcagatgatgtcaaatccttctgccaaagaccctgatgcattcacaagaatgggttgatagataaggctagtttacacaggagggggagtccacgtttaaggaagcaagaacaccgtctccaatgccccctcgaaggacactcttgagatcttcatctttcccagaaaccactgaaaacatcgcccacatggaaggatgctttaaagccttctccttcggtccagagaaaatgaattctccgagttttcctttggttttgtcttgtttttaaccttcacacgttaatttccagggtttccccctcctggttccagacagcaccgatcatgaactcatctctgatcgtcgtacggtgagttgtaaccgcccccccaccccccatccacagggcaattcggaaggtggagagggtgaggtgggagtttcctgggcaaccgggcgcacacccgcgcccacacggacaggaaaagcttcgctgtctacgcaggtgcgtcccgagcacctgcgcacctgttgcgcggctccccacaggtgggccctgtctcttgcactggcctggagacacctgggagtaggtgattcccctgagatccgcgcatgtctctgtgaggcgagagtgggtgggcaagcggggctgcggcggccgcagcgggagggcggggtggtcccgagctcagagccttttcccgactcccacccggctcagccgtccacgcgtcccggacgcggcagcgcagtcgtgcggcaggagaccccgtgggacgcgccgcagaagcccccagggccccggccctcgcgcgtaggggactggagaccctgcgcgtctcctccgcgccttcctgcccggcgcctgcacctgctccccggctctcgggcccctggctggagcgaggcgggaggcggacggcccgtatgcaaatatcctgcggggccggggccgcctccagagcccgggataaaaggcggggcggggcgcggggcagcgaagccgctgcctcccgggagccggcagagcgctccggccccgcacccgccgcccgtcgcccgcagccccctaccgcgcggcccgcgccccgccggctcccggtaaggacgcaccgcggagcggggacccgaggcaggggcggggtggggacacaggcacggggtccggctgcgcaccagcctgcgctttcccattggaaacgtgggcagcgtgcacctccgcgcgcttccccgcggccgggctggtagcatctccgcaggtgctgc

SEQ ID NO: 22888 - DNA, 2300 bp, Homo sapien
ggagtccacgtttaaggaagcaagaacaccgtctccaatgccccctcgaaggacactcttgagatcttcatctttcccagaaaccactgaaaacatcgcccacatggaaggatgctttaaagccttctccttcggtccagagaaaatgaattctccgagttttcctttggttttgtcttgtttttaaccttcacacgttaatttccagggtttccccctcctggttccagacagcaccgatcatgaactcatctctgatcgtcgtacggtgagttgtaaccgcccccccaccccccatccacagggcaattcggaaggtggagagggtgaggtgggagtttcctgggcaaccgggcgcacacccgcgcccacacggacaggaaaagcttcgctgtctacgcaggtgcgtcccgagcacctgcgcacctgttgcgcggctccccacaggtgggccctgtctcttgcactggcctggagacacctgggagtaggtgattcccctgagatccgcgcatgtctctgtgaggcgagagtgggtgggcaagcggggctgcggcggccgcagcgggagggcggggtggtcccgagctcagagccttttcccgactcccacccggctcagccgtccacgcgtcccggacgcggcagcgcagtcgtgcggcaggagaccccgtgggacgcgccgcagaagcccccagggccccggccctcgcgcgtaggggactggagaccctgcgcgtctcctccgcgccttcctgcccggcgcctgcacctgctccccggctctcgggcccctggctggagcgaggcgggaggcggacggcccgtatgcaaatatcctgcggggccggggccgcctccagagcccgggataaaaggcggggcggggcgcggggcagcgaagccgctgcctcccgggagccggcagagcgctccggccccgcacccgccgcccgtcgcccgcagccccctaccgcgcggcccgcgccccgccggctcccggtaaggacgcaccgcggagcggggacccgaggcaggggcggggtggggacacaggcacggggtccggctgcgcaccagcctgcgctttcccattggaaacgtgggcagcgtgcacctccgcgcgcttccccgcggccgggctggtagcatctccgcaggtgctgcggcgggccagttcgtccccaggccatgggcagtcaaggcggaaaggagctgcgttgggtctgcgcggggttaggagagaacaaaatgccctcggattggagcgggaccgggagtccgaaaggaagaggttccaccaggggtctctggctcctcagagcttatcctgctttcccccagccgtccggagacgccgcggggaggcaagcggaaagggggaacctggccgagggggaaaggtgcgggtgtggacacctgtgaaggagcagcacgaatcgaatcggccgtagaggctgcagacgcggccgcgaaaccaccggccacgccgggcaagggacccagcactgctgagcgggcacctcgcctagtggaaaaaagactttagtagttcccctcaccccctactacttttttttttcttatttaaaaaaatcctctgaagtctatttttaaagctaataccaatcacaaggttggccagtttgacctgcggtttgacctggtagcctgttgtgaaaatcccttcctcatcccacgccttcctccaccccatcctgcatcccagaagatgcagtgtggaaggaagacaaatattcccccagaaggtgtccgcctccagcttactgtcctcccgttttatgatgcctgataggggttgttcactgaggtggagagaaagaaaggaacctctccctcctcctctgctcctgaaaaccagccagaaccactgcagggaccaaggagctttggagtttcgggaacacctgagggctgcccaggtggagataagagctttgcttttgcaaatggatgtccttggagctcatcctagaaaggatgaattggagggtagggagtggtgaggcggggatatctgacacatctctccttctgtttctgtttgtgtatgtttgtcctggttctgggcagtcactgggtaagagaagactggaagcatgtcggagttttggttaatttctgcccctggcgataaggaaaatttgcaagctctggagaggatgaatactgtaacctccaagtccaacctgtcttataataccaaattcgctattcctgacttcaaggtaaaattcttggggaggagtgaaaaagggatggattggtcagggggagac

SEQ ID NO: 22889 - DNA, 2300 bp, Homo sapien
ggttcatctcccgctgcggggggtctctgcccctctggaaagcttctgagtgaaaacccatgatttgcttgttttaaggttcactgttcgtgaattttactatgatgagaaggaaattgaaagggaaagggaggagatggccagattgctgtctgataagaagcaacagtatgtgagtatgtgattgagcagctcctcccgcccctacccggaggcctggggatagaagagtcctcccaggtctccagctctccctcctccctctcattgtccccaggctcctgggctcacaccatggggaccgtctgttctcatgggacgcctgagcagggtctggggggaggggcggtgagcacaaaggagcccaggcggtggagctgggggcgggagccgggggcccacccaagctggcgctttccacatgtgttctcactggtcctgagcaccgccctgccaggaaggggttgctagctccacagtatggagaaactgaggctctgagaggcaagctggccagaggaccctgccaggccttccttggactgagcaaggcacgtgggctccaggcgggagcatctgtgtgcagggtgggcagtgctgggccttggagattgcagccgtgaggtttccagggcgccactagcccctgtatttacctcccgtgtccttagtgcggagagggtgcttatctggagacttccgaccacagccactcagaaacccttcacggaggaggacagcgtagctcaccagggagcaaaactagatgctcacgtttgaattgtgagcaggagagctttgggaaggtccctccaccgctccgggaagtgggcaccttccatactcaggttctcctgctgcgatgctgggctaggctgggcaacttggaaggagcctgtctgggtggaatgtttttgggacccttcttcctcatgcccaccagggagggttccgtgagcaccttccagtccagcctctagtgacagggcaggaggaatgagtagaaagttcttgaggcctttgggggaaagtcactgtgtgaacacagcactgtgaggactcccatggggaggagcgccgtggccgcgggcaggctgggagtgctcccagtgtccgtgctgccaagtgtgtgctccgggctcctggggacctggcctgtctgtcagcgacctttttgcagggactggggatgagcagccaccccgtcacaagcgagcccagccacggagcccccgtagtggggttctcggagcccctctggtctggtctgtttccctttagggaggaaacaacagctgataatatacaagtttatatagggggtttttcaccctcctcctccgaaatagcacagggcgctcacacacgtgtgtgtgtgtgtgcgcgcgcacgtgcatgtatgagtgtgtgtgtggacctgtgtgtgcacagcaagtgagacacacctcagagccagacgctgctgggctccggctgagcctgcggggagggtgtcgcctcctgaggacgaggagccgagctggagctggggacccccagccctttggatgctccagtcttcagagcagggcccacagacccagacaccaggcaggaaagattttccccagtgaaagctgagctccaaagtgttttcttccttaggctcagctcacctgaaaccctcgctacctgggcacgccctggctgttctcttcagccaggctttttcccagctcgattcagtcctggtcccaaccccctgcgcagtatctctggacggggctagaccgtggcagcctccacaccagggaggccctgctgggggacaggtggcgaagcagggcctttggcacccacctgggcactggcccaggcctgccagacccccggggaacagggtgacacacaggagcctgccgcctgccacgtggggctcaggttgccagctggcgtattttacatggcgtagccttcgcccacaccaccctgggggccctgccagggtctctctgtgggcgggaggtggaggcactctcagcttgggtagtcccactggcctcctgagaatctggccccctctggcctatctagaagtgcatgaccaaacgtcttgcatcctttttgtcactcatcaaccagagggacagaccaggccctggggtttgagtgtactttgagagcagagtgggatgtccctgtgtttcccacctgtttgcagagacagaatgggaaagggtgagtgtcctaactgcatgcccaactcatctcctgcactctgcatgccgaggtgccccccgaatgccaggaaggcatctgtg

SEQ ID NO: 22890 - DNA, 2300 bp, Homo sapien
gccaactgggacagagaccacacagcacacaaagggcactggcagtgtgggccaccgcagttcgagggttctgttccaagcaggattgctacccaaacacagcaggcctggagaggctgcgatcaactcacaaccctgagaaaacaaactcgatcgtgagtgcgttgtggaagctgtgatgtctgtggcccatggggacaaagttaactgtcttaatgtaaagacaaatgaaggggccctcttctggtaagagaattaaattcctccatccagggaggaaaagcatgactttccaggctgagaggaaaaggaaggacttcgctgtaatccagtcagcaacagcagcaaatttaaggggggaaatgtgtcaaatgcaggaaaggggtcagaaaaacaaacagcattcattgcccctcaggcgcccttcagggaaagcagacaggcctggaggaacaggctcgcagtccactgccctttgctgtgaatcccaaacagccctgcgatcaccggttgggcttcccacgcaccttcacattcaggaggagctgcccggggtaccaagctgaggatttctgtcccgggacaagcagcctccctggggaaaatcaatgctggcatgtggcttccaggagaggcccccgtgacttcagagggctgctgtgcctctgagttcagtttgcctgaaaaatcttccaaacgcagctctagtgccacttcctccaggaagcccaccagccggcccccaccactcctggacccctgcctaagaatacttatgccttacacactacaatatggagaaattactaatacaaaaacaaaatgtccgagtccactccaaacataggagggagaatcaaggcggaaagatacagtggtcttaacttgtgcttgaaagattttacttttaggtcgggcgtggtggctcacaactgtaatcctagcattttgggaggccgaagcaggcggatcacctgaggtcgggagttcgagaccagcctggccaatatggagaaaccctgtctctgctaaaaatacaaaaattagccgggcgtggtgacatgcacctgtcatcccagcttctcgggaagctgaggcaagagaaaccctgtctctgctaaaaatacaaaaattagccgggcgtggtgacatgcacctgtcatcccagcttctcgggaagctgaggcaagagaatcgcttgaacccgggaggcagaggttgcagtgagccaagaccccgcctttgcactccagcctgggcaacaagggcaaaactccatctcaaaaaaaagcaaaaaaatttttacttttgccgggcgtggtggcccatgcctgtgatcccagcactttgggaggccgaggcaggaggctcactgcagcccaggagttcaaggctgcagtgaactgtatcatgccactgctcgccagcctgccccacaaacatattttttttcacttttgcatattttacaaagcacacacccacgtgagcgcattgccagccccctcgccccccaggacaaagtggagaccctgtcagcgaggaggctaccgcttaagtccctggggttctccagagaaggaggagaaggctctgcagagccatgcgccctggacggaagaactttcaaaagtaattcaacaaaatagaaacttgtcgaattacattgcagacagcgcgtgcggagcaaatgtgtgtccacggaatattcgtcgggcacaagaggaattccctgtcagctcccaggaccgtgggtgccctgaggccgagtcacgctcccccgggataaagagggtgggggcgcacacaggcaaggaggaggcggggtgggggggtgcagaataaggaactaaggtaaaaacgcccagtactggactcccctccgagcagcaccccgagagggcccggaggagctgaggcggtgcgagccgagactgccagccccgcccccagcaggccccgccttccgctgctcgccaccgcccccgtgaaaaaaaaccaaaccggtaacctctacccggccgcctcccattggatatgtgagtgagcgatgtccgcccggaccaatgagccgcagccacggcttggcgagcgccttccggcccgcccccgcgcggccgcccctcggaccaccggactggcctggggcgggacgtgggcgcgggggcgcggcgtgcggcacgctgcagggctgaagcggcggcggcggtggggactgcacgtagcccggcgctcggcatggctctcctggtgctcggtaggtgcgggccagcggagggaggcgggcgagctggggtcgg

SEQ ID NO: 22891 - DNA, 2300 bp, Homo sapien
gccacaggagcctcggcctgcatccaggccacaagggtttactaagcaccctgtcagtcctgccaggcgctcagggaccaatgagatcccacctctgggagtcactgcagcccagaggggtgaggggcagtgccacagagaggccaggcctccgtggaaggagggagggagggtggccagccccagggagggagggaagcctcacaggagaagggcacacgtgtccagaatgttccctctccacagagagggtctttctctccaaagcacactgctgcaggcagcatccgtggcccacatagaaagaggctcgcctttgatccagcctgagaggttcccttttttgtctctgctcagaagcgcagcctgaaaggagagtgaggcactgcctccttttgaaatcatgcaattgctgctgagaccccaaagaaagatacaaattcactgggatctttccccagatctgcgttgctctcactgtagaagctgttgggactttgcaacagtatttagaaaacacctaatgcccagtttaaatcttcttcagaagtctggggatgggggaagggagaggaaattattttagaattccgcttccgtgtggcaacatccaaagataagagaaacacagagagcactggtgggacctgggaggaggcaaagatttctctaaacaagcgtctggggcttccaataaccagacactggctgccacttcagggtcttggcacctcgagctccaagctccacttccagacacttgatggcttccagccctggggatgtcatttaacctttccaggctcgatgtccacatccacttaacttcatacatctccctgcagagcccactatacagcaagtacatgccctggaatccaggccctgcctccgggagttccaatctgtgtatgggtataagagggatgtgtctctattcataggggcttacaaggctggtgccaaccatactggcactctggaaacttctgagaaggggctcaaacatgttctgaggagagggcccagccgcctctacctggcagaagtcagggaatgagcccgctgtgggtttttgaggttctgggggccactccccttggctgtgaggcttattaccccactgtggtgatggactgaaaacccccagagggggtggggacacaccaagctcagagacacagcagcaaagtgggggcctgagaaagctgcctcccaggcctgctgatcgggaaattccaaacgggaaaggatgattaacaactgcgggagccggaggaggggagaggagagggaccggacagggaaaaagaccccagatcctgggcctgcccgagggcaggagccagcctggccaaagtgagactagaggccacacagacatgggccccttccgcggaactggcctgtcgagggagcggggctgtccctgacacagagcctgggctctacatggacacctgtccaggcaggggaggggatgctttctgactgctctgcctctgggaaatggggactcctggcctttctccatgccccaatatcatctgtgagctccctcccacccatcacttggccttttaaggagagtgaccccagagggctggagttctgggagcctccagagtcccggcttctgcgggtctcagtggctgggggggcggggggtgggaccagcgctggcctcgaccttgccttttctgcgtccgccaaatgtccctgggggcccaggtgatcctcaccgcctccttaccctgttcctgtggcaagccacagcctggcctccaagccagctgcccctcccctcaggagatgcctcatctggggtcgccctcttctgccctggacccgacctcctggaaggaagaccgaggcgggagatgctgactgcaggattcagccagcccagggcctgagcctgggcccttcggtccaccacagccccgattttttagtgtaaatattgtatctaagtacagcacatacagagaaaagcgcacgagtcctgagcgcacagctcaaatcccacacgcatccccgcagcagcctgcgcagagcaagggcagagcgcccccttgcggtcacttcctgtcactactcaaccgagggtgcccgctgcaaggttaggtctcctggcctcgtgcttcaaacaggaattaatagaatcccaccaggtggtgtttgtgaggcgtagatggcgaggatatctgcagctgcagtttgctcattctcacggctgcactgcattgcactgtgtgagcagaacacaatttatccttccactgctgatgggcatttgg

SEQ ID NO: 22892 - DNA, 2300 bp, Homo sapien
tcggcagcgttaaaccctgagaccaggaccaggcactgcctagcatctccagcaccaaggacagtgcccggcacacaggaggggctcagcgagtatttgttgactgactgttgatgttgcagcctttattcgagtacaaatctacagaatacggtaattacatacccagcattttaaaaattcagattttcagaaataacaaccacctgaaagaaaccctggatcttgtgggttttcttcataaacttcagcacctttgtcctttctcatcaacgctgtggaaaatgctgtacggtcaggcctgccgctgaatgaagtcacttcctactgaaccctggggtggccctgtgcgactcctccgatggacaaggctggccctggcaaggggaacgtccacacaggcctctccagcagaagagcaagaaactggaaggttctctgatgataagtcctgctctctgagaagcagcacagtcaaatgtagagaacacaggactaggggctgtggttagagcttttgccatagactgagtgtttgtgtctccccaaaatccatgcattagatcctaatgcccagtgtgatggtattgggaggtggggtctttgagaagtggttgacgggatccgtgcccttacacaagaggccatggagagctgccttgccgcttccactgtgtgagcatgcattgagaagacccaagaaatgggtcctcaccagacaccagatccgcaggcgctctcatctttggatttcccagcctccagactatgagaaataaatttttgctgtttttaagccacccaatctgtggtgatttttttacagcagcctgaacagactgacagctttgttccccagtttgtcacctcctgtgtccttgggccacacccttaacctcagtcagtgacagttctccccctgcaaatgagtaaactaaggagaccttgctttgagggagatgtgtcctgtagagagaacactctaattaatgctaattaagctgtttcctaatacaagccaaagtaatcattaagaaaacaatgtcaatggtattagcatttggttacactcttgggaacagctcagaaaataaaagcctatgaatgattccagaacatgcttagagctgcttccttgctgctgccacccagatctgactccttaataagcctgagaagtctccacgaggagctgttcttgcctggagcctctggaaaattgacataactcacgacgtgtgtcagattgcagcaaagatggagctcagagaggttccattcctgcctgctccatttttgaaaaccaagagaaactcatcagagtggcaagagagtggccagctctgaggaaaagaacccctgggtggacctcaacacccacccccggcactttctgagccactgctttcctctgcaaagtggggctataatctctaccttcagggagaacgcagattacagatactatatgtacacagtaggtaaccaatgaatggtgtcaaacgtccaccatcttggggcatgcggagtgcagggatccggccacagacccgggccctcttccagctgcccaatcagagcccgctgcagcccactcctcacctgcaggccccttgcccccaactcatgggcagggtccctctgaagctgttaccctcattactagaatgtaaggtcacggggcaatctgtgtggtccacaggtgcatccctggcacctagaacacacaatcaaacattcagtaaatgtttgttgagggtcatatgaatgaatgaatgaaggaagcgcccaacgccagccttttagccaacattctctcatcacgagaattttctaggggctcagacaccagtccctgggtccctccaattccaaagacacacacaactatccagacagttccctcaaatgcctcccccagacttgggagagactagtgcacaggcagcctctccagagcagtccctgcaccagcctcctcaagctccccaaactctcaccctgccttattctccctggagtgggtgagggcccatgctggtagaacagctctcaaccgcccaggcagagatgggctacctgacaccttgtgctttcttcagaacccctcagggcctcagctgaagctcagacagagtgcctgcgtgcgcgcgcacacacacacacacacacacacacaacctaattttcaacacacttgcacaaatatagaaacatcatggggaaaaatgcaaaatacctatgatttctggaacaagatccaagatgacaaagatattccctgcttattctgctcatgc

SEQ ID NO: 22893 - DNA, 2300 bp, Homo sapien
ctccctcttccaaccagatggccgcccctcagcgccccctgtggagaaattcaggaagcaccactcttgtataatacatatacccctcttgttaaggtcattaccccaaactgttaattattatttacaaaaaacatattatctactagaatatgaaccctgtccccacacctagggtggtgtgtgtatgtgtgtgtgtgtgcatttgcacacatgtgccataagagctcgataaatatttgaataactgagtgaatgaatgggtatttagaagcccattaagctcagactaggatgcaatttgaacttaaccctgcaggtactcggacagctgataaggggagtagcatgcataaggattggaagaggaagctggggtgtgtgtaggaggtggtgtgtagcactgtactggggagaagaataggcctcagaacccagcaggacaatggttaaatcccagctccacagagtgatctcggcaggttacctgacatcttgtttccttaggggttgctgggaaattaaatgacaaaaatgcaaagcactcagagactgcactccgatgcccatggagaataagtggcaactcttattattactcaacctttctgagcctcgatttcctactctgtagtagcatgtcattgtctgatgctaaatggaaatgaagtaaaatttgtaaaacgaagtttcactaaataatacttcatgtgatgtattctaatatattctgttttatgctaactcattaaagaaaaaagaatactgtcagtgacccagtaaattgatttcataatccattaacggacatgtccttaagttttaaaaaacccagcctacagaatacatttttaaatagactttatattttagagcacaattcaacagaaagtacagagaattcccacatgccccctgtctccacagctctcccctgcgcatcaacatctcacacagggtgggacacttgtcatggtggaccaccccacatggacacgtcatcatcgcccagcaccgagtttgcattaacattcgctcctggtggtgaacattctatggattttgaccattgcataacgacacatatccgccattatggtacgtttcactgccctaaaaatcctctgctctgcctattcattcttccctccagaatatttttaacacgatctcgaggccatagatgatatcagtaatttgcagtattgatgatagtggtgaaccggaggagagagacactgttaggaagctgctgtagtggttcaggtgagtgaggacagaaggacagctgtggctgcaaaggctggaagagaggagggtgtgggacactggtcaggaagagacaggccttggtcaaggagtgaggaacggggaagcaggagccactggaccctaggggtctggaagctagtggccttggtgtgggactgcagagagataggaggtgccagacggcagggacttcaaggcagaattgaaatctgctgaacagcaggcgtcggtcagctgggacagccggaaagctcgggatcaggaggcggtcaagctgagctctgctctcattccgccgcgtgaccttgggcaagtcccttcccttctacaggaggctggactagatgtcctccttgtacagcgttgcggggaaggtgagacagtgccaccaacacagcagggcattgctgggtcggggggatggggcaggaaacgcttcaaggatcaggcaggattttcctcccaccaggaaaagccggcgcgggtctaaggccggaggagggacccagacataggagtcaccttctaaggggcttcctggagcacattttcctgcccagcaacaggcggcagcattctctccccactaatcctctccaaacagcagtgagagagaatgcctgccgcttcaagccaggtcgcaacccctcggtgacccgctgcgcccgaggaggggccggcggtgcgcggtggtggcggcgggcgcggcagctgtgcccgtctgcccaagggttaatccgtcccctgcagctgccgcgcgtgccttgcagaatttcaccagaagagggtacagtttgaaaagctcctgacgtcaggctggaattcctattgtgtttagaaaaggctcgggcaaagccagcccaagttcgctctctgcacacctcgagcacctcgcggacggcgtgggtccgccagctccgggacctgccgccgctgcctgcgcgccccggggcggaggacggtgccagccgcccacgaggagaccccgctcccgcaggaggccgagctgaagcggcggagcgcgccgc

SEQ ID NO: 22894 - DNA, 2300 bp, Homo sapien
cttgaacctgggaggcagaggttgcagtgagccaagatcataccactgcactccagccccagcaacagagtgagactccgtctcaaaaaaaaaaaaaaaaaaatccgttgaactattcagcctctacatacatcaggaactcaatcagttgtgatggtttgtcacagatgcccttgctggccttttttgccctggtccctgtgtctggagcctgtggccagggctggaggtatctgagcaaactgcatggctgttcccagctgctcagggccacagcctgcggtcagcctgacaaagcctcccaggacacacagcaaggaccccccaggacacaccgtcctctctaaagacactcacgggatgccttctgggggttcagggaagccagaaccgctgctccttgggcatggcaggaacctgtcgtcgcagtgcagggagcacagacacctccacgaaaacagcactcagaaaagcctgacccagggtcctagctcacagaggcccaccccgccgcactcctgctgtgctcatctttaccaggaaaatttaagtcactagatgccaccctgtgtcatcccagctccaaggggaggaacagaggagagacagagtcccaggcctgcagctctgattttagactaatgtttttccaaaaggtcccatccctcagctccgtcctcatgcaagtgtgggaagacgaagctggcagctctttctggcctggctctcagccctgtcttctccacgccagccctccgcccgagcccagtaggggcttcgttgccactgctcacccacaccacgccatggcaatggtgacctcacctgttttttgcccctgtcctgatggttctgttccctgcagctcccttggggctcacagcccatcggtatctccccactgggtgcaggataccgtggaaaataccccggggcctgcccccatgtgccctgccacccccgtccttgtctcctcccccacatctcccaaaataccaggctctctcttgcatccaagcttttgtggtcaccccagtttttctacctggcaagtcctttcacctgtgaagtcccaactccttgctgcctccctcatagaagcagaatccagcaggggcacacaggactggctacagtgcgagctcagtggttcactggctgccctgctgccctgcaccccgggcactctgcgcaggcctctattcgtcagggctttgtctgcacttagctcttcccttacaaagataggaagcagcgcgccagctgaatggacccacagagaagctgcgtggaaggaactgtgaatctgccagcacctaccggaacagcacaaaactcagagaaccggaagcagagagtgcaggaggcagaagtgatgagagcagcgggcgtccatggagctcagctgagccagaccaggagaggctgccacggagggagcctggttgtacccagttagagcagaaacagggctgagggctcggaccataagccctcagattctcactgttcctttcagctggtgactgactgtgtgaccgtgggcggtcacttaatcttgccggtaagggcctcagtttcctcatctgtagaatggcgttggaaaggcatggctgggaggtctcagataaagcagagtgctgtgtgaacgctctgggtttgcagacagagtggatgttcctagtgcattgcactcattttcctcgcccaacataagctcatgacttccgccatcgttcccaaacaagcaggaagcttcacactgatgcctgatccacaattcccaaagcgccctcagggccaccatttcttgcgagcctcgcagcatccacgagggggcagcacaggactaacatcgccccacggcctgacgggctgccggaagcaagtgcaataatggtgggggtggcccccaggagccccagctttgctccctccccctcccccaccctgtgcggaggactccggccttggggtagggggctgctgaactgggcgtggcatctagtcaggaactctctgccccccagccctagggctcagatcacacacacacacacacacacacacacacacacacacacacacacggggcccgcccctttcctaggagctgtccgttcccaggacaacagtcaacacagcacaggcgggagttcaaaacgaaactgggctcaaatgctctccccagcccggagagccctgtccccatcggccactctgagctcgaggcctaaagggacagtgaggaggaccctgcccaggctctcccggggttaggagggacagagtgttccagg

SEQ ID NO: 22895 - DNA, 2300 bp, Homo sapien
ataagggctggggtggcccccgctgctccccctcatcctgtggccttcctcactccctgtgcctcagctacacgaattctttgttttgttttttagatacatcaaactcttggctccttctcctatttcatgtctcagcttaaatgtctcctcctcagagaggccttcagccggctctgcccccgaccctgaactgtttccttcttaccgctggtcacacttcatacagatttgtacttgtttgcttctctgcttgctttttggctgccctgtcctgagtatgaaggctcggtggagccatggccaggtctgtctagtcccttgttgcagtctggtctcgtttcagagcggctcatgggtatttttggttgaatgaatgcatgaaggagcatcctttccccgagtcaggtcagacagccagctcctctaacccagactaggccagcaggctccagctcaagggattaccggccgcgtcgcagtcggaatgaacgaggtggggctgctctgacccagcggcatctggtcttggcttccatcttcctcgcttcttaggctcaggctcgggtctggctctgggctgggctggtgacccaccttcccccgggcatgccatgccctctgtccctcagccagatcatttgccctcccatctccctttctccaaaaccttccccaacttgcagtcaggctgcggagtcagggtggaaaagggagggcaggtactcaccagcgctgctggccccgccgctcggcctccaggagctcccgccacagctggtcctgctgcacgccatcgcaggcagctccctgagccacccgctgcgccttcagagcctggggggcctggcagccaccagcaagacccctgctggccatagggccaccccgggcagctggggagaccgaggctggtggcctggtggggggcaatcggtacccagctgatgtggttctctggagcccaggggtggggtggctccccatggtgcaagtgtgtgtgtgtgtgtgcgcttgtgtcagagagagagagagagagacctgtgcctgagctcagctcaaacctcctcctggaacactctgtccctcctaaccccgggagagcctgggcagggtcctcctcactgtccctttaggcctcgagctcagagtggccgatggggacagggctctccgggctggggagagcatttgagcccagtttcgttttgaactcccgcctgtgctgtgttgactgttgtcctgggaacggacagctcctaggaaaggggcgggccccgtgtgtgtgtgtgtgtgtgtgtgtgtgtgtgtgtgtgtgtgtgtgatctgagccctagggctggggggcagagagttcctgactagatgccacgcccagttcagcagccccctaccccaaggccggagtcctccgcacagggtgggggagggggagggagcaaagctggggctcctgggggccacccccaccattattgcacttgcttccggcagcccgtcaggccgtggggcgatgttagtcctgtgctgccccctcgtggatgctgcgaggctcgcaagaaatggtggccctgagggcgctttgggaattgtggatcaggcatcagtgtgaagcttcctgcttgtttgggaacgatggcggaagtcatgagcttatgttgggcgaggaaaatgagtgcaatgcactaggaacatccactctgtctgcaaacccagagcgttcacacagcactctgctttatctgagacctcccagccatgcctttccaacgccattctacagatgaggaaactgaggcccttaccggcaagattaagtgaccgcccacggtcacacagtcagtcaccagctgaaaggaacagtgagaatctgagggcttatggtccgagccctcagccctgtttctgctctaactgggtacaaccaggctccctccgtggcagcctctcctggtctggctcagctgagctccatggacgcccgctgctctcatcacttctgcctcctgcactctctgcttccggttctctgagttttgtgctgttccggtaggtgctggcagattcacagttccttccacgcagcttctctgtgggtccattcagctggcgcgctgcttcctatctttgtaagggaagagctaagtgcagacaaagccctgacgaatagaggcctgcgcagagtgcccggggtgcagggcagcagggcagccagtgaaccactgagctcgcactgtagccagtcctgtgtgcccctgctggattctgcttctatgagggaggcagcaaggagttgggac

SEQ ID NO: 22896 - DNA, 2300 bp, Homo sapien
gtggtcctgggggcactcatacctctcaaaggcccctcatgctgcctgcatccccaagtgctagcgcaggctgaccccaggtgggagcagttccctcctaaggctagtcctgggggcccagatcctggccaacccctggaataaaggctggggcagaaggggaagaggagggagggggattccactgccatgtggcaggaaccaggcacttccaaccaggaccacctccttgcatcaagggacctatcacatggcatgatgaaagtaaaacacctggcacgcaggaggcactcaacaggttctagatgttcctatagtcattgctgctgatgcttgttaaaaagctctttacgctgggcgcggtggctcatgcctgtaatcccagcactttgggaggccaaggcaggtggatcacctgaggtcaggagttcgaaaccccgtctgtactaaaaatacaaaaattagccgggagtggtggcacatgcctgtaattccagctacttgggaggcagaggcaggagaatcacttgaaccccggaggtggaggtcgcagtgagcagagatcgtgccactgcactccagcctgggcgacaagagtgaaactccgtctcaaaaaaaaaaaaaagctcttctctattttcttcttcaaaaaatttatatacatattatttatttatttttgagacagggtctggctctgtctcccaggctagagtgaagtggcgcgatctcgactcactgcaacctccgcctcctgggttcaagccatcctcctgtctcagcctcccgagtagctgggaccacaggcacgcgccaccacgctcggctaatttttgtatttttagtagaggcgggggtttccctatgttgctcaggctggtcttgaactcctggcctcaagcaatcttcccgcttcgcggggtcaataacgatcagtatcgatctagccagggcaggtccaagccgtttcctttaagggttcccttctgaacatccttttctcatttagacttgggaggcaggactcagcacctgtttttttttttccataggcggaggtgatgggccggtgaggctggagagaaagagcctcggccagaattccgaactccgaagctgacccagctcccgtccctcacacttcccggctgagatttatggcacaaaaccagggatcgtggattctggcattgcattttggtgcttttttgcctgcttcataaccaggccctaatacacaggcgattttcagaggttggaaaatgcgtccttccctttccctcagtttgtggcttagacggccacgtccaagttactttatcaggagaaatccttaagaaacagtttcactgtgaagtgctcaagttcaaggcttccggtggcccctcagggcccacgccgctaggagggaagccttcagtcccaggctggagacaggccgcgtgctctgaaagggcacaaatgaggcgaccctggggctctggtcccagaaagtctctccagcctggttccccacctgtaagtcgggagggtgcactcagcccttaagcaggaggctttaactcctgaaatgcttagtgagagaaactaaaacacttgcagggagggaaaaatcccggcagaatggcccatcccccggggccatttgcctctcggtccacccaacccgtggaaaagccggacttccagggcggctcccggcggcggctaaactatcgggtggcaagaacgcggaaatgcgaagcagctgctggtggagcccgcaggccagggtgggactgtcgcccggggcggggctaggaggggaggggcggggcgaggaggggcggggcgaggcgaggttggccacgggattgggctaggtgaggccgaccgggagggggcgaatctgggggcggggcgagatgagggtagtccgaggactgagcgagcccgggcgggcccgtaggcgaggcgagatgaggctggccagggggcggggcgggcccgggcgggaggggcggggcggggcgggcccgggcgggaggggcggggcgggcccgggggcggggtgcgtccaggggaggggcggagcgaggcgggtccggggcctggcggcgcgcggaggggcgggccctggccgggtggtcccgggcggatcccgggaaggcggaaggcttcggcagagctgcgccgccgaggctgagcggtcccttctcgctgcggccgcccaggtgcccgcgcccgtggcgctatggaggcggcgctgctggggctgtgtaactggagcacgctgggcgtgtgcgccgcgctgaagctgc

SEQ ID NO: 22897 - DNA, 2300 bp, Homo sapien
ttcacattatatggtttgacataagggtttataaggttgtttgtccaactaatgaaaatgcgcttaataaaaaattctgaccttgggtaagaattcgctttttaccgcattgccgctttcatgtacatacatgagtgcatgcacctatcaatgtgttttcttcccaacacttattaaatataaaacaacctgattttgtgctcgtttctcgtttttcttgaggccctgaagcttccaagataaatataagactaaaatttgcttgttccttcacacctgatttctcctagaaccataaatacctcctatggggaactaagaaatcatgaatactgggattttcttattggattttttacttttgttttgtggggataacgagacagaagtgaaaggaaaactggtgccggtattactgttgaaattaatgtacagtgaatgtttttaaagtattaattttaaaaaaccatgttctctagaaacaagttttaaaaatctatatgaaagttttaaaatgttccagctaactaatggataagcataccagtaaagccaaagtaaaggttagtgcctttaaaactaacctgtgttagagttacatgaatctggctctaaagtatctattttgcatccatttatatatagatcttaaacagaaatactctaggttgccacaccacagttttaagaagttatgctgctgctgttactctcttctaggattctggtggtaaagtagagaaactcggacactatattaaccttactgaaacatgctttaaatcgtgtctaaaatctgatttgagcaagtcactgccgagcttctgagtctgcattgacactgctactgactcacctctccttccctggaataaggcttcagcttccctatgctgtgaagacaccatttgtaagcactttgaacataagcactgtgtgacagcgctggatatcatgcttgggggggggcctctccctgactcccatccccataataatgagttttgtttggaattgtaataagtaatgaactgcatggtttagaaaattataaatatttgatcagctgtcctctctgaaaaaaattgcacccctttttcttttttaaaattttgttgcatcttcgtagtaatgtaattgtattttatgcctgcttttttataaaaaaataaaataaaataaatggagacataagcattttcatacttctcctgtgaaatagtcctggaatacggcaaccttctaaagtttacccaaaacatttgctttctctataagatgggtataaacagtgggatgaggatagtaaataagtcttagaactaaggctgtagacttgtgtttcttctgccctatgatttaattcatggagaaataccaaatttcaaccaggagcctgtctctgatctgatttgggtgttttaagacgcacgcaaataatagaacaaactcatttgaattggtaaggatagggaaaagaggcaggatgtctgttttgtcaggaaatagtgtgctgattgattgataggtgattttctagaaagtgtttctctggcaatcagtggaaccttttctagggcacttatttgctatgtgctcttgggcaggttattcactctgagcctccgtgttttcatctgtaaaatggagatatagattgtgtctactttacaggatcactggcagattaagtaagtatgatgtgtgtagaatgtctgagatggctcgagtgtttgttgccttacaaagggggaaaaacagagaccctgtcacctaagtatgctcttaaaggagttgctttaagcagtgataaagtactaatgttatctaaatataacatttgttggactaaaaatcatataatttgtattgatgctaatggtcagattataactgcaaatgaaaaaagattaacttgcatgtttaaaaatatgacatctgtaattttaacaactacagaatgaataattttgtctttagataccatgtttctcttcctgttggtcccaagcagtagttctaaaaggattaaccagtttgtttaaaaactataccttacataaaatagtcatattaatgattgacagttttaagactcagcagaattcaaaatatgaaaatttattttgcataggaaacaataatctctggtaaacatcattactgcatctaacaaaacaatgccttcaattaaagggggaaagtgagtttttaaacattagggttaatttagaagaaaatacagtatataataatctcaacatcatgtttagggtaaaaatgctataatgtgaaaaaag

SEQ ID NO: 22898 - DNA, 2300 bp, Homo sapien
tataaataagtatatgtagaacatgcccaggatatatatcttgttgatcactactcttaaaataaggttttcatgttcggtatttggaccatggcttcctgttattccaccaagctacatacaaatatacaaccagtcaaaattaatttggaaactgagaaccacagtgtttttttttttttttttttgagacaatctcactctgttgcccaggctggagtgcagcggtgtgatcacagctcactgcagccttggcctcctgggctcaatggaggaggcctccaactcagcctcagggggagctgggactacaggcacaggccaccacgccccgctagacagagtgctccttttgccttgcatattattttgtcatcagaaaaataatccataatcatagattatctcattattttgctccaatgcataagtgggagtgtctagctccctctgttctcctggtggcctctgtggaggtctgaatgagtagctcaatacacagacttaaaggactctctggatgtgaagtcagtgttactatctgaaagggaaaagctgcattggatggatcatcggggcctcttcctgcatgagtccagctaggggtggttttaactaacctaaaaccaaagaagaggctccaactaatccaatggtttggatcaaaatgcaacttttacagggctggggcttcaccctatcttcgggtttatctctgacatgccagggagacagttcttaacattcttattacttaatggatatcagattgttgcttttcggagtggtttttccattttttgaaatttaatttgttcttaagtatctttacagaaaaaaatcccatttatttaagaagtactgtattctctggttcttatagctgctcattttacatagttttagtgtgtacaaacgattttttttgtttcatttatttctaatataccttctcatgtacttgccaaaatttcatgtttgacacagtctgcatacctgccaggattcttgctgttaatgtgaaggcgcctgtttgggttactcaattgttggacaactgggcccattcccaggttttggtcatcacgaacattgtgaatagccctgctgttaacatctttctgcaagttctcccccttcttcgccctttggatcatttccttggaaatgtacttccttaaatgggtttactgggtcaaaggggctctatgaacggttttatagctcttggcacataattttcggattgcgccctgggcggatctaagcgatggcaccggccgccgagagggcaggaatgcggcggaacggtcccgataaccacccctcttccgccccccaaaaggagaagaccccgcgaaggcctgcggctggaaagcctttttccggtgctctcccgttctcttgaagtggttagtgtctaagccgggcagaaacgctttcaggatcccaggccctcctgccccaggactaggattccacccgcctccgctaattcggaatcccagacacccagggccccctctcaggctcgcctcgaaacccccggccctgcggcccctcgcgggcgccgagctcggtcgctattatttgggcgcgggtgaggcgaggcccgcatagctgcgcgctgagtcagcgggggccgcggcggggggcgcggccgggctcccccccagcgcacggtgcgctgggcccggcgtctggggttccgcctcggggccgcggggtagtccgcggggtccggcgggaggggcagggggcgcgcggaaggacccggcctgggtgcgtctcccctcccccagcaggagctcggccgtgaccgcgcgcccggctattcgcctcagagaacctcgccagggggaggaggcgagggcgggcgaggaaggggcgcagaggagaaagcggagcgggacagacgcaggaagggaaagaaagggaggaagcgcggtgcgcggggcggggcggggcggagcgcgcgcagggccggcggggacgcgcgccggcggctgcgggcggaggggcttgtgggtagcggcggcgcgcggccggagacgggcggccgcgcgggagtgtgtgcgccgggagctggctgagggactgcaaggcggccggcggcgaccatggcagcgggccggcggcggccgtagtggcccaggcctgggcttcagcctcccggggccccagagggcggggcggtccgggccgcggcggtggcggcgccacttccctgctcccgcccgaggactcctgcgggcactcgctgaggaccagcggaccggcggcgcgaatctgactgaggg

SEQ ID NO: 22899 - DNA, 2300 bp, Homo sapien
aagattatgtcttggggaaaagccaggtcacaggcacaataagtgtgaggattgtgccatttccccgactctccccagctctgtgctcatgctctttctttagcctggaccacttgctactccgtcctgatccacaccccacctttacttgcccaaccccaactctggttgtagagaatctagtcgtccttgaagaatcttcctaaagatctgaatgccaaattaattaatcagttgtggagtcaaagcctgcctctaccactgcctactaggaccttgagtaaatttttgtaatcctgctgatcttaattttgctgatctgcaaattgggcagaaaaatacctatctttcagttttgatatgagatttacataagcaaatgcatgtggaatgccaaacacatagcagatgctgaataaatgccttcaaatggccatttctaacggctctgggaaattctccattctgcaacaatatgcagtcttctcgagacctccgctacgttctctttttttctcatcgtttatttagcaaacattaatagagcatgttttatttgccagacactttgctagatgatagagatacaaagattagaagccaggcatgggtgtctcacgcctataactccagcaccttgggaggctgaggcaggaggattgcttaaggtaaggagttcaaaaaataaaataaaataaaacataaaaaaaaattagccaggcatggtggcatgcacctgtactctcagctacttgggagtcttagctgggagatcacttgaggccaggagtttgacgctacagtgaattatgaccgtgacactgccctccagcctgggtgacagaaaaaaaaaaaaaaagattagagaaggcctctgacctcacagtctagtggggaaccagcttcttcggggatttttccctgcctcacctcgcccacctcaggctgtgtagaaacccccagtctaaccagttgtttccctccaactctgtacataccacggtgtgttgcctttttatttcaaacatgtgctggcctctgttctaatcacagcaacctgtatccattaatccatttaatcctcacaacaaccttatcaggtaagtattgtcattatttgcattttccaaataaggaaactgaggcacagacagattaagtaactggcttaataaggtcttctagtttatacgtagaggcagccaggacttgaaaacacaccttctggctccagctaaattaacatgctctgtttacttatctgtccccactgaaattggaggttgaacccgtggcatattcaaacgaataagtatcgcctgtgcccaccccaatatctgacactataggtcaacgataactcattcgtcaaacaggaaggaggaaggaaggaaggaaggaaggaaggaaggaaggcaggcaggcaggcaggcgggcaggcagaggtaaaacgattccacaatggtgtggttgctcacatttactaagcatcaacactgacctgcctgtaagatgcgctaacagagctcacgaataaatgaaggctgggtgtggtagctcacgcctataatcccagcacttgagaggccaaggtgggaggacggcttgagccccagagttcaggaccagccggggcaatatactgagaccctgtctctactaaaattaaaattaaaaattagccaggcacagtggcgcgcgcatgtagtcccagctacttgggaggctgaggtggaggatcgcttgagcccgggaattcaaggctgcagtgagccctgaccacgccactgcactccagcctgggcgaccaaaaaaaaaattaaaataaaaaaaaggaataaatgaacatctctgcggctcagaactttcagttatcacctcagaactttcagttatcaccgtcgagaattccaggcgaccgctgggttttcccggttgcctcttttctctcacccctgttcccttcctctggaattcggctccacctcttccttttcctttgccagcctctccgtggattccgcggtccgggtttcccgggcggcagccgccgggagaggatcggtgcgtgggagcgctccggcagcggcgggcatgcgcagaggggggcggtgtactgcgcatgcgggaagatggcgggccgggcgacttgagatccgcgggtctccctcctctttttccgtctgcgtcgggagctcccgggcacgtgaggccgtgccgcgtttactggcgggcgggacggcctagccgggcggcgcctcggaggaagccgcggaccccttaggtgctgggcccttgga

SEQ ID NO: 22900 - DNA, 2300 bp, Homo sapien
ctttctactattgtttcgtactttctgtcatttgaatatgccatattaaatatgttgaaattatctttgctaaggagtcaacattagcaagaataaagtgggaaatgttcatttattcctgaagagtttagcaaagatcatatattcgagtcattaattcttgcttcttaactgcttgaaaatcaacccgcgtataggagcccttcatcagtcaacactctcatggcacttatttctggtaggggccgggaaacagatgggaaagacaacttcctaggagctctggtcttggagcgagggaggttcatgaaaattatacctatgttcaattgtggccaataaaataaagaaaatcaagtgtgaatggtttccttgatcagggcttgcttctgaagggcagagctgataacgtcctcactttgagcaaaagccacaaagtagttatctttccttacgcctttagtttttgtttaaaggttcattacgaactttagcagtgaaaaaaagtgtggcaactgggtcattctgacctagaagcaaccaaaatacttctgattgccgcagcagacaatgatgaatcatacctaaacaagtttgctgccttttcatttctgtgggtcgtaatcagactcattgttttgtagccagtgagacatttgcagcagcatgtttgggtctgtgggaggagggaggcttgcagatcttcccagcgatgtgtgtgcttgtccccactagcgcagtggaaacagtgttcttgttatccaggtttaagccctgttagggatatggcttgtccattgtcatcgtgatgatactgcttaaagatatcctttgttgagcacctgccatatggcagacggtgtaaaaggtgctttacggtcctggtgtcatggaaagccttccaacaaccttatgatagaggtattattatcttcattttgccaagaaaactgaggctctgggaagttaagtcagtcacatagccagtagataccaggcacccataaatgtttgttgagtgaatgaataaatgaaggaatgaatggcaactccaaactaatgggagagaaatgcaagaagagagagactgatcaacatgagacaaaaaacttggtgctacaagttaagaggttttgcacatcccaattattcatttttgcaatttttaagctccactttcaaatagagacggggattgggatgggatttcaatgcaggcgaataacacaagacagatggaggaatatgtttatgatcagcaaagagatcactcatcttgaaaaaaacagataaatgggaaaacactgaagtgccagccacagtactaaatactctactacattatctcatttaatcctcacaaagtcagctttgaagtcagcactgttatctctgtttatggctgaggaaactggagctcagggagtgagggaggctgtccaaggtcacacagctccggtgggtgagggggcagggactggacccaggcacacccagctccacagcgtccctgagactctgtaaacagaagccgggaacaacaatttcattatttatgcttgaatttaattttgtgtttgatggaggaaaaaatggatgatacacagattgctaccaacaaaacccaacaattggttctttgagattctagcttagtgcagggagaaaggcaagccggtgatgaacgttttggggtagccagaaacaatgaactaggggtgactggtgtgaaattcagttgtgtggaccatattttctaaactagaatctgcacaccatgctctcccgccatgttctcccctaggagaaaattgtagcttgcaggcagaaatgtaaacacataatcaattctactataacttgatatatgtgttcctaaaaattattgcaccatgcaagattgggcaataaaaaccgcagggtttatgacgaatacaggcttagggcaacagctctcaaaaacttcatcaatgacacattttttaaaaagataaaaacctaataaaaagggcagcaccgttttacacatgctaaatggttaagagatacataaatactgcagtagagatgggattttacctcaaagtgcaaaggtaaatgaaataaagttttttcaatggaaggcttgcagctcttgaggacctgccaaatggaagaaggacagagacctggagccctatggaaagttctgacaccatgtgtggaaggacatggcttttaacacgtgtggtgactggaggtaggtggtaggtgcttgaggctggtgtgtgtgcgccttttgtatattctcaagcagctgg

SEQ ID NO: 22901 - DNA, 2300 bp, Homo sapien
ctacctatctttctatacagtaaatgtatcttgctgaatgttgtatcctaagtgtgtctgcatcattgacaaactcttcatgcacatagcttttatgcatttattgcaggctgtgttaagtatgcattttttgctgggtattttgttagtttccagtttcccaccgtcacacacggtgccctgagtggcagaaggcacggggcactccacgtacagaccgcgtacagtgtgcctccccaacgagtaaagccctggcactagggatgcttcagagctgcagatgctcgctcgggcagaacctccagcgggtgccacccctgcctggcgatgaaggtgcagggatgggtggggtctccactgccctttctagggaggcactgcccagcctgggaacgaagaagcccaccacacaagttctaccctttagcgcctggcaattttggggactgagcccaggaacagctgggaactctcctccctgactggggcaccaagaggagtaatccacctctttaacctttttttacaaaagataaatgaccttgaaccctctgggtcatattcaagtcacttttgcaggaagttagtgatcctagcaagaagagaaaaagcaaagttaaaggtatttgcacaattggagtgggctctcatgatttattttctttcctttttgaattaggatttgatcaggagtcctggattcgtaagagtcaattgcaacagggatgtaaagagagctctggacaggagcttgtgtttctttctttctttctttctttctttctttctttctttctttctttctttctttctttctttctttctttctttctttccttcctccctccctccctcccttcctccctccccctctctctcactttcccttccttctttccttcctttcttccttccttccttcccgtcttccttccttccttcccttctttacttccttccttcctccctcccttcctccctccctccatcccttccttccttcctccctccgtccctccctttttccctccctctctttcttttccttccttccttccccctcccctcccctcgtgtcccctcccctcccctcgtgtcccctcccctcctctcccctcccttcccctcctctcctctcttctcctcctttctcccttctcctcccttctcttctcttctcttctcttctcttctcttctcttctcttctcttctcttatgatagggtctcactttgtcatccaggctggagtgcagtggtgcgatcacagctcactgcaccctctgcctcctgggctcaagcgatcctcccacctgaaccttctaagtagctgggacttcaggtgtgcaccaccacagccagttaatttttattttttgtagagatgtggtctcattatgttgcccaggctggtttcccactcctgggctcaagcaatcctcccatctcggcctcccacagtgctgggattacaggtgtgaaccattgtgcccagccaatagctggtgttttcttgaagatttcctgggcctctccagggggtttttgttgttggggcatgttccatggtattcacagcagagttgtttgaaggggcacgtgctcgcttatgtggcttaggtccacgctacctgtagtccttcggaggcaagccaggctgccagctgactgtcttccaccacaaagcctgtgttcttctcctgaccctttgttctttgcacagcgtactgtggctccagtccaagtacacaaacttccatgtagtttaaaaagaatcagtttaactgttggtggttagacagattggtatgtacctgtgtggagagcactgtgacccagcaaaacacttcagggctaagaagacacgaaacggtggcatttgccatctgacccggcaggcgctggggcagatgaagctccagttggaagggctactgctgaattttttttttttttttttttttggttgttgttgtagctctgggagcagatactagctctgaaacttttcccctggctggcttggctgcctctccctgccgggcaggggccaggaagcctgggtgtcaggcagacccgagccaggctctgcacagcagggcattacgcgccccacgcatcctcttccatccccaggcacagatcaaaggcgcagcccaggaggcgggagcccctgcacactttccacctctgctgggcttagcctcttggctggttggtctgtggagtgcctgaagtgaccagctttttgtaaggtacggtttatttgactttgcaagcgagcacctgctttgggggtt

SEQ ID NO: 22902 - DNA, 2300 bp, Homo sapien
gctgagctgtggctgtgggccaggcagtctgagttggagagacaaacaaattagacaccagtcgcctctcagcccagcttttctcccttcagtaacacctgtggagtttatgagttcctctagggaaaatcggagaaatctacatgagaatgatgtcttgtttcctgctgggaggaccgtcaaagagtttataggagaccatcctgcagtctcaatgcgtttattgccgtgtcatatattgggggctgactattgccacattactggagcaccccattcccatccttcctcagctgttgaaagtgagacaggttgaggacgcagtccggagagtgttgcttttttcaagtcttgttttctcaaactttggactcaccagaagtaagtcaccatgcttctgtgttggctggggaattcttccagttagaatttagttgtagggaagttagaagaggagggagcatgggtcagtgatgtctggaatttggggtgttctagtgagatttggggtggggtcatgtccctgtggctggccagggtagtggccctgaagggccaggttggcagggcttctaggagaaggccatctcccagaaggagatggaaccccaggtgggagggtatgtggtgtgttttggatgtgattcagaatggaggcagtgaggcagaaagggaagggaaagggaggccgggcaggaagccagggttggggttttgctcttatagacttgactccagaccatggcccttccttctctgccatggatccttctggaggagagggtatcacaccgcttgaggctctgtgcacaggcgggttctgtgggcatccgcgagtgagtggatggcaagtgagaggggggccatggggatcggaacacttggcatcgtgacctctcagctctctcttcagacccccatgcactactcttctctatgacagtgagaccaccactgcctccgactctttccaaagcccgaggtcagctaggctcctcgtgctactcaccctgcacagaggcagtctttagtcctctttgagtcttggtctattgcagtatcctcctagaagccttccttaggaagccgcaggaatctcaaacacagcctcatcagccctgcctaactcctttggtggcttgacgtggttaatttcaaacaccttagcagggcttaggctgaacgggcccctcgttgccctcctaccccctgtccctgcatacacctcatgctggaaggacctgtgttgcccaggcacacaataggtgtctcgcccttgggtcaagccgatgccttgtatacgttctgcctggaaagccccttcttttcagacagcaaacctgtactcaactttgatgactgagccttccatgaggcccgccaagactgacctgatagaattttccattcccttctctgtttccctccaggccttcttgcccccatctcttctattttgcattacactgctgacctgcacttcctgtgtctcggtgaggttcttcagggcaggaactgtgtctagttcagtttcacccttagcaacaagtggtaatgaaatatttctgccaaggatccaattcagattatgtaagcatttacctttgtttaaggcaaaatcctgattctggaagaggaaagttctttgcttctcacagggcaggcatagaacaggccagaagctgtccatgtgtggcttgggagagacctggctatctgtacttgagccctgagaccccgaaggcccccggctgcatctgctcttggagcttggggtggcctgggtggtggtcgagtaggatctgcagcgtgggatcatcggcagagtcaatgccattcccttgcagatccactctcccgtaagaaactgttctgggctctgagaggaacgaggggaagaggggagatgggtgagcttccttgctgcatttagcaactcagtccctgggggaggtgtagacactgacacactccctgtggccccagggagaacaaacccagagcccagtgagggtgcagtatgagcaaagtgctggggcggggggagggcagaagagggagcagttgattttggcttaagagtaaactgaagagagaacagacacggggcggctgagcagcagtgtgttcatggagaaagaatcaaagcgcacatcttgtactttgatgcccataggaagggctctcctctggcccctctggctttgtttggagcagaaaacaacaaagtgagttcaggtaatacctggggcagtgggaattagctaattagttttctggaattctaacagcggtggcat

SEQ ID NO: 22903 - DNA, 2300 bp, Homo sapien
tgaagtctatttgcctgttcactcattctttccttcgtttgctcagcttcattgagcttctgccgtggtcccagacccggtgctgagtgccgaagattaggaaaaaacaaatcactccctggctgcaggagctccgctctggtgggttgtctcctgttatcacccacgccactagtattttttgactatgaaatctactttggttgggcaaagatagccgtggtcaccactgtagaagcatcaaacaaaattagatttgatctgttttgtgcagtgggctaacgtacgctacgtgggggtagacttttggctcagctgaagaaatctctttgatgaagctggggatgttgcaatgggaaaccctggggggattcagcagggcttggctggtgatatgtaggcaccagaatggctggcacatggcaacacacacatacatacacgcgtgggcacggcacacacacaccgtgcacgcaggcccctcttaaatacgttattattgcatttggtatcatgcttgtagatagagtagagaggattgtaggaaagtgagagaagcaccctactgttaattaagaaataagaaagagcatgtctttttcctaaaacacaaaaactggacggggtattcaggaagtagagtgcaactctgagtttcgaccttagcatgacgcaggaccaatgaccgaggcagttccactgggccccactgtctacctcaaatgaagaccaacattctttcagtcatgttgtgtgtgtttttttacgtggccatggcgtgtctgtggtaggcccgaagaccacggtgctcaggaaacagagctaggacagggtgcagggcttggaggtgcaggcagggcgtcacctgcttctgctttgagccaggaacctcggaaaagaaagcccagcaagtctacgtctcacacgagcaatctcagaatagagactgtcctctcggttctcaggcgtgctctgctccctccgctgcctctctgtttacactgcacccctcgctgtaaagccctcgtctcccggactcctgctccccacagccatatgtccaagccctcctgaggccttaagactcagctctgtgccttctccatgaagttgtcttagattccctttcctctgccccccttgtcacttctctgtccctcttttatgacaaatgtcacatacttgcctttatagcaactctttaccttgcctcttgcccactgcagtatttgtaaatggtgctacccaaatggtagcccttggtccggcagaacctgcatcgccccggagcttatgagaggcgtgaattcatggacccatcctggaatcagaatcaggccccacttctgcatcagaagccctgggtggcaccagcaagtgtttggcaagcccttgagaagcagtgtctttgagaacgtgacctgtgccccaggcaccagctttactccccgagcccagcaggacatctgcatataacacacagccgaagtcagaaaatatatttttggtgactaaatggagtacctggagtacaagataacacacacacacacacacacacacacacacacacacacacacacacacgccacctttgggagctcagcagccccgagaggatttgatagcttcaccgcttcacctggttttacaaatgcggagactgaggtttagggcagttaagcttcttgcttagcatcatgtaggtaaagaatggtggaaagatatttgaacccgacctgggcaattccacctctgagggctgtcctcagaatgaatcttctgatgggctgggcacggtggctcacgcctgtaatcccagaactttgagaggccgaggcgggtagatcactttaggtcagaagttcaagatcagcctgggcaacatggtgaaaccttgtctctactaaaaatacaaaaattggccgggtgtggtggtgatgcgcacctgtcatcccagctactcgggaggctgaggtgggagaatcacttgaacttgggaggcagaggttgtggtgagccgagatcacgccactgcactccagcccggggacagagcaagacactgtctcaaaaaaaaaaaaagaatgactcagtcttctggtctctgtggtgatatattgtcccaactcaccttgccagacagccctgggagaatgcagggcagaatcctccctgcttggagtcagggaggcaagacctggcaggcagcacccagtgaagctctggaaggtgctctgcccacaaggtgtcccattggtggtgctggaggagtgacaggtggcggctgcttggctctg

SEQ ID NO: 22904 - DNA, 2300 bp, Homo sapien
tttgtaattagtctgtcaaaatacgtttagttatatttctaataattcactgtgatcgaagtgaacacagagatgggcctttagaactcgggcctccggtagctgcatttccatattgattgctggtggttctcctgtttctagtaggaaccagaggcaacttagtcccctcctcagagagctgcacattgtgctgatagagacaaaataggcatttataccatttattcatctgctcattcattggacaaatatttattgagcagctactaagtgccaaatgctggaaaaacgtaataacaacaaacctatgtttttgttttccagctggaaaaaacaaaggactgtataatttgatttctaaagaaggcttctcattcaggttcccacaaccaccttccagaggcaacacaactgcgtataatgccggagttgcctgtggtagagtgacggatgtcttgggtgacttggcagcagcaggccggtgggcgcggccgtcacagacatggtctctctgtgttccttgcaggttcccccgcctgcacagcgcggtgatcaggacctttgttctcgtgcagcactacgcggccgccctgatggccgtaagcggcctcccgcagatgaagaactacacgtcggtggagacgctggagatcacgcagaacctcctcaactccccgaagcagtgcccctgcggccacgggctcatggtcctgctgcgggtgccctgttcgcccctggcggtggtggcctatgagcggctggcccacgtgcgggcccggctggcgctggaggagcactttgagatcatcctgggcagtcccagctcaggcgtcaccgtggggaagcacttcgtaaagcagctcagggtaggtgctgtgcgcagggaggggcggagggcctgggggtacctgggagagctgaggggcccaccagaggcagggagtgtcacgaaccccacagcgtggccaacgtggcttccctagacccagccacccctcagcctcctctctgtgcttccccacctctgccctccgccccagcagcacccccacacccctgcagcattgccttatgactttagacctctgggcaacagcctgctttcttttttcctgggcatccatttcctctcttctttgtttagctgatgcttctttattttcccctttgagacagggtctcactctgtggcccaggctggagtgcggtggcgtgatcacagctcactgcagccttgagctcctgggctccagggatcctcccacctcaggctcctgagtagctggaaccaccagcgtgtgccaccacactcggctaatttttaaaatttttaaaattttctccatgttgccccggctgatctcaaactcctgagttcaagcaaccctcctgcctcagcctcccaaagtgctgggttccaggtgtgagctgccctgcttattttctgcagcacttaggttggtgtctttcctctttcaggaagccaccctccccctctgccatgcccagggcagtgccatgctccctgcctgtcatctagcccctctcccagatggtggggggcaatggccatccccacagaactcagcccccaaagcctagcacagcgcctggcccatagtaggttctcactcaatctgcaggtgacagaaaatgcaaaaggtttagggaaagaacaaatgagtggaaaacaggaatgaaagggaggacactgtcaggagagagcacaggcaagacataaggaacagctggttgggcgcggtggcttacacctgtaatcccagcactttaggaggccgaggcgggcggatcacttgaggtcaggagttcgagataagcctggccagcatggagaaaccctgtctctactaaaaatacaacaattagccagatggggtggcgtgcgcctgtagtcccagctactcgggaggctgaggcaggagaatcacttgaaccctggtggtggaggttgcagtgagctgagattgcgccactgcactccagcctgggtgactcagcgagactctgtctcaaaaaaaaaaaaaaaagacttaaggagcagctgacaacatagacttcctttcacggagctggtcagctgatagagatgtcttggacatgctctggctggctaatctccatgttctagccgactgaaaatacggtggccaagtggatggtgtgcttatttgcagtctaaagaaatttccttttggtcagaagatatagttcaaggagtttaaattggtgtgggaggccatcaggattcctctgagctgggctggttgggaagggag

SEQ ID NO: 22905 - DNA, 2300 bp, Homo sapien
aaccacatttcagatgaagtctgcagccctgctgaatttgtctccttgctttcttggacataccagtgataaagacaggatttgaacccagtttgttcagtgttaaagcccattctttaaatcttatctcttttgttgaatagggataatttctctattatagggttttatggggattaaatgtgacacacacagagcaccaagactgttttttttagacaaattctagctatgttgcccgggctggagtgcagtggcaccatctcggctcattgcaacctccgtctcccagattcaagtgattctcttgtctcagcctctggagcagctggatttataggcatgtgccaccacgcctggctaatttttgtatttttagtatagacagggtttcaccatgttggccaggctggtctcaaacttctgacctcaagtgacccacacgcttcagcctcccaaagttctgggattacaggtgtgagccaccgtgcttggccaaaacctattaaatactcataggcatttctcccctgccttcctatggacatgcactctgcccatgtgtgtactatagtaggacatgtatttaatataatcaacatgttttataatttgaattgggccatctagatttttctaccttagacacttagtaagcaccatagactacaatgatcaccatgtgagatgagacatggcaaatggaagagtgtggtttgggctacgaatgttgttggcatcagaagggagaagcccctaggctggagcactctgagaggctttctataggtggagtgacaggagctgagccatactggctggggggcatttagatagaggcaagaaaggaagctatgcaggttttgctggcattggccaccagtgtggtcacctggggggatggtgctggggtgaagcacagggctgaggtcctctgggtcaggactctggccggagtggaagtcagacttagggacaggagagcaaagccattctcacagcaaacagcacaaggctgttgctctggatggagatagctctgaatgcacattcttgcctcattagaacattcctgaaaatggaatatgtgtcaagagccttgcagatacaatggggtttcccagcagcccacggactcaataacaattccactccaagcatcatcctttgtgcgcatttaaaatttagtcgtgcgccacataatgacgttttggtcaacggactgcatctgtgacgttggtcccatgagattctaggggaactgaaaaattcctatcacctagtgatatcgtagtcatcggaatttgtggcaagaggcattactcaagtgtttgtagcgattcgggtgtaaattaacctgcactgccagtactatcaacagtctagcacatgcaattatgtacaacacatagcacttgataattataaacaactgttactggttttatgtatttaccatacttttattatagtatacaccttctacttattgaaaagcagttaactgtagaacagcctcgggcaggtccttcaggagatgcttcagaaggaggcattgttctcataggagatgacacagctccatgagtgttgctgcccctgaagaccttctagtgggacaagatgtggaggtggaagacagtgatattgatgatcctgatgctgtaaaggctgggcgagtgtgtgtgtgtctgtcttagttttaacaaaaagttttaaaagtagggccaggcgtggtggctcacgcctgtaatcccagcactttgtggggccgaggtgggtggatcatttgaggccaggagtttgagaccagtctggcgaacatggtgaaacctcgtctctactaaaagtacaaaaattagctggatgtggtggcacgcgcctgtaatttcagctactccagcctgaggcaggagagtcgcttgaacccgggaggcggagattgcagtgagctgagatggtgccactccatcctggagtgacactccagcctgggtgacagagcgagactctgtctcaagaaaaaaacaacaaaaacaaataaaagtagaaaaattaaaatattaagctcatagaataaggatatcaagaaagaagacatttttgatcagttgcacaatgtgtttgttttaagctaagtgttattacaaaagagtcaaagagtttaaaaggttataaagtaaaaaagttatagtaagctaaggttaacttattaatgaagaaagaaaaatatcgtttataaatcgagtgtatcctaagaggagagtgtcaagtctccagtagtgcatggccatgtccca

SEQ ID NO: 22906 - DNA, 2300 bp, Homo sapien
cggtgagggggcttgaaaccagctggtgcgggtgcagaggccgcgtggccccctggctgccctctccatgtggcctgcacctgctcgttctgttttctcttcctttgcctcccaaggctcccttgaccttttttatgaaactgcctcagtgtgtcctccttaactgcctccccgagtcaaaatccctttctccctcatctctgctcccaaagaaagggctctgtgggtctagaagagccatggcagagattaaagcagtgtgtgctcgtctgcctccttccctgcagaccctggatgcatgcatagcacatgctaggaggggatgtcagtaggaagggccgtgggtcggtggggtcgtaagaggacgttcaagctgagggcaaagctgcgctggaggtcacacccagagcagcacgtgcacagatgtggggtgtgaggctcctgggaagtggaggctggaggaggtgactaagggcgcagccagacttggtgacttggtgacagagcccaaggtctctgaatgtcagttttcacacctgtaaaatggggatgatgacagtactgctttgtaggattgttaatcgcagcacacaggacagaacggtgcctggcgagccgtgttataggagtgtccaagcatatgcagctagtgttaatatgtgattgcatgtaactgtgatggagaaatacatttattagaattaaaaatgagctctgtagcatgaatgcttgagttggtgacccagaacagggctctggtcaggttcaaagccacggggaccagaaagcttgatgcctgcttggcacagcagggtgaggccccatgcggactgaggatgggagcaggctctcgtcgtgggtgtgtggcctcgggcgtgcttgccctgtcaacagacctgggtgtctgcactttgcactggagtcaccccgtgggtttcttgtgctgtagggaagtggtgactgtgagctgcacgttgtcacagcagagtgggcctggggtcttctgggaagcaggccggactctgacggcaagctctgtcctttcccccacaccccagctgtatgagtccaccctgcacgcctttgccttctcttactccatgctaggagaggagatccagctgcacttcatcatccccaagtccaaggagcaccactttgtcttcagccaacctggaggccagctggagagcatgcgactacccctcgtgacagacaaggtactggctcagagacctagtgggacagatccaagtggcttcaactggggactgagccggggactagagacagagcttcctgtgagggagtgcagacaccgatacagggactgaacttggaggaggctggtgtcgcgcacgggctctggagtcactccaattcaagcctcagccttgctctaccatttactagttttgttacttgaacatgtcacttaatatctgcaagccttggtttcctcattgttacattggagagtagcaacttgcaaaagcttgtggtgagaactgtttggaataactgatgaaaggccctatcttccgtgcccggaagataacaggagctgggtagacgttcatcccctccctgtcttttcttgaatgctctgccaggtaacattttgcgtaggcttaggtagataggacagcacagtgaatccctagggcccattaccaactccagcaattgctaactcatggccagccttgtttcatccgtccctctctcctcttctgccttcctgttttgtttggaagtaaatcccagacctcaaatcatgtcatctatctatacatatttatacctatagatatagatatttcagtgtgtctctctaaaagacacatttcctttatcttttgaagaggtcgttctgaacgttccattgtctctcaccattcttacagagatgctccttgtagagcttttggtttgacggtgctcacctgatcacctcagagtcagttggctgctctttaaccagccccgctcaaggcaggccatgtggagaagctgcttttccttctccagagtgctaggcacctgtggagttgcccctggcctttcagatctggcagcctgttattaagcagtgaaaatatttgtaatgtacccaagaggacttcattgttaggtacctcctaccccacgggctggggttgggtgttgcggtgaaattccaggggtgaaatatgagagctggggtttctccaccactccactcaccttccagccttcctggcggagctggccatgagcaccagctgcatgcacagtgttgtggcaggtgctctgaggaa

SEQ ID NO: 22907 - DNA, 2300 bp, Homo sapien
gtcgtgacaaatgttttttattttgtctcagatttcacatcatatactgagacttctatatagaaaagacacttgggtctgtagcagtttattaactcattaaaagctttttaacctgtaagataccatataaaattattccttttttttttttttgagacagagtcttgccctattgcccaggctggagtgcagtggcacgacctcagctcactgcaacctccgcctcctgggttcaagcaattctcctgcctcagtctcccgagaggctgggattacaggcacgcaccaccacacttggctaatttttgtatttttagtagagacagaggttcaccatgttggccaggctggtctcaaactcctgacctcatgatccacccgcctcagcctcccaaagtgctgggattacaggcgtgagccaccgcgcccggcccatataaaattattctaaacaatgatttcagagaagcgagcactgtgcgtcaccacagcctctccactgcccagcaatttcatcatctctcctacggttttagggcgttgattcatcccttaatttccttaagatcacaagaaattaagtggacacgacctttcttttaaaattaaaacttcagggccaggcacagtggctcacacttgtaatcccagcactttgggaggctgaggtgggtggattgcttgaggccaggagcttgagaccagcctggccaacatggtgaaaccctgtctctactaaaaataacaaaaaaatagccagtcatgatggtgtacacctgtaatcccagctacttgaatggctgagacacgagaatcgcttgaaccctcaaggcagaggttgccgtgaacagaaattgtgccactgcactccagcctgggcagcacagcaagactctgtctcaaaataaataataaataaatacaattaaaacttcaaaataccatttaggaaggagctataaaccattaaaaaaatcacatattctgacaaagaaagccctcttcctttctttgtccctcaattgcaaaacacatcagactgaatatatgtctaaccacttctgctcaatttactttctttgtgggatgttctcatttgtagttacaactggctacataatttgcaagactctatacaaaatgaaattgcagggttccttgttcaaaaatgatgcagaattcccagatgacaacagcatttgactcaggacaaggccttttcaagcatgggaccccatgcaaaaacacagtcacatgcctaagaatccagccctggttgttaatgattcttgtcgttcaataaatgcttataatttcaataaatttattgtgcagagtaaaagtatatttacataatctcaatttcaatgtagatatggttatatgcccacatggaagattaaactgattatcaccgggccataataactttgctgaagacaaaaaagtcaggatccctgggttccaatttcaattctgcccctcagtaaataccaggggttcttggatgaaatgagaaggcctctgggcttttcagctctaaagttcgggtgttctgcatgaatttagaaaagtgaaaggttttaaaacatgctaaaaacacttctcacttcatcccctagctccatgagaatgacactctcaaaggactgggaaagtgtggcaccatgaggatgtattctcagtgacaaaggagcttcctggggctcttaggatggcattgaaacagccctttagcaagaacaataacaaaatgctgaagtgctgggaaagtctttcccaagatctctcccgagctgcacacacacacaaatcaacacaagggccaaggcgcaagacgaaagcaccatgtctatttatgctgcaggtagaaacttccacacacacgttcgctcatttcatcttcccagaaattctgcagtgtcgataataaagttgcaaaaccagattcagagaggttaaaaaacttgcccaagttcacaaagttcgaaagtggtggagttcggcccaactcgggactatcagcccctgaaggaacccaaccccctttccaccagcacgcgcttccctgggttgaactgaacccagacgtgtgaccgacgctaacgggctggcactcgcggtcccacgttggctcagggacaccctttcgggggcgtgtcctcccagttctagaggttcccagagaagaggaggtgctcactaaccaggcagctcgcccagactccgggcagtgagagggagggagcgccggccgcgggagcgggatggaaaccagcagcccgcggcccccgcgg

SEQ ID NO: 22908 - DNA, 2300 bp, Homo sapien
gatttaatattatgtctgttttctgcttatgttttattggatattaattatttttctgattataaaagcatgttcattgtagaatatgtagcatatacaggaaagtttaaataacataaaagcctggggactttgtaaacagaggtggtgcttccttcaccgaaggctccttgtaatgaagctgcagagaggatgtcaaacccgccacgtgtccccttgtattccatcgctcttccaaccccacaaccttcctgtgtgtttgataaacgcttgttgacagatggacgggatactaagccccaggctaaaaccctcagcaggccccttggctgatccaccgtggtctagattcccccaacccctgccccggcagtctctgtgcggtgcccatggccttttgccttgggggaggcaggcctccatggctctgaagggtgatgggggccgggggagtctggcctgcttcctctcaagctgcagagctggcttcctgcaaggctctgcttctgaaggggcctggtggccttggccttggctcaggctggtgctgcacctggaggaatctggcctgcttgctgaagggtggctgcagagccgtgaaactgggagcgtcactgggagttgctgctggggactgagtctgggactagtccttggatggcagggagggctgggcccagagttggggcttcagcaaagaagagaaactgggacctagatcaggcaggcccccgatggactgacagcagtccaggaatgctgaggggggatgcaggagatgtgggtgggagaggtgggagctgtgactgccctggccagaagcccaggcagggctggctggcttctgggaagcgtaaaagtggctcagccaccatagggctgttttcattcctggggctggaaaatggcagctggcagcagcgtgagccctcggaggcacctgctaagttggcagcatcacctgtgctgttggccatggccattcccagagactctgggcttggtctctgcgccacaagtatttctgggccctgagtgtgtgcagagctctgtggtggggtaacggggcgatctgggggcggtgcgtgaaaggcctggtctctccctcttctgcaggaggtcaaggtggaatgggaatgggtggggctgcagctggcaagccacagagttcacagggcacaggtcaagagtgattcagcctggcagggctggaggaggcctctctgagaagctggccttggaggaggaataggatttcaataaacagagctgacgggggtggagctttctagctgcggggtcagcttgagcaaaggctggggaatgagtacagtgtgttcccctaaagctaagtctgcaggggttgttccttggggcgttgggactttatttttttcttagttggggtgtgtgtggtgacattcgtcttggtcaggcaccctgcctatgaaagatagcaggcagtcacgggccgaatatgtaagacccagagtgaaggccaaagttcgggggccacgaggcctggactcacaccctagcattgtcagttacaacttttgatttgctgaaaatgtagttgtctcatctataaaatgaagcttataatacctaactatatactactcacaggtgcttgataaatggtagctattattaataccagcactacacctgaaagcagatggcctgtggtgacaggctggactgcaaatacaatggtgccaagacactgaatccctctacactggcccagtggactcagagagcactgtaggggaaaatgcatggagccaggtcctgcatttgtctctgtatgaagaactctgagttcagtcttcctttagtcacttagcttggcattcaaggcccctcaaaggctggccccacctctccgcctgatatggtttggatgtgtgtcccccacccaaagctcctgttgaattataatccccagtgttggaggaaaggtttggtgggaggtgattggatcatggtggccgactttccctttgctgttctcatgagagatctggttggttaaaagtatgtagcacctccttctattgtcttcctcttcctcctgctccggccatataggacgtgctggcttccccttcgccttctgccgtcattgtaagtttcccgaggtctccccagctatgcttcctgtacagcctgtggaactgtgagccatttaaacctcttttctttataaattacccaggttcgggtatttctttatagcagtgcgagaacaggctagtacacccccgtcggctctgttctttccttctaccacg

SEQ ID NO: 22909 - DNA, 2300 bp, Homo sapien
acaaatgtaattcttcccctgaatgccagcccttagacactaggcctccacatctccatctcccattcctcacactgggtttccttttgcagattaagcagcttcagatatcacacttagaccatggtttggtcaccccttttgtcctgggtcattctcttccaaacaggagatccatcattgtcacggctctgcagtgtaatggccagtagggactgcagtttgtcaagggtggtatgacctgcagagaagcccaggggaaatgaattcctttgtttcaggctaataggtgtgtatttgtgcagcccaagatcacagggttgggaaaatgcaaagctacatgatcttactctactaaggctggcgggagtgttacataagccagaatcttgtagcccattgaacatgcaggcttcagtaacacccctttcagtctcagtagaatactgtacacttttgaggatgagaatcatgatttcagaagcaagtggatgttttttagctcccaaattttaataaggaagatctgaaaatactacagaagagcctagcacttagaacaaatgattggtgaatattttaggaacaatcacactctcatataggacaactgaatgtgctagattagcacatgacttaaaaggtgctgttgcataataaaaagtcaacaaagcatgtgcaaatcccacgctgttactagaacctactaccctgcctttgaacattagagcatactttgtaggactctgcagtgaacacacatctatccaaggtaccatgaactagagacaaaagaaaaaaaatctcttccctgtaagaatttaccttccaaatgtggcttttccatcaaagttcaaaagcactgttcaaactggggagaggcaaggcaggttttgtatgcctggaagatcaagagagttggcttgactctgtgttttcccaaagagtgagatgacccatggttcatgaactgatatttctaagttgcaccttctttcctgaatgtagagatttggtactaggcatagtgattgtgcctaagtcttgctaatgagaagaaaacccccttgaatcctaagcatctatgtaaagactgggaaggcgggctgggtgcagtggctcatgcctgtaatcccagcacttttggaggctgagacgggcagatcacgaggtcaggagatcgagatcatcctggctaacatggtgaaaccccatctctattaaaaatacaaaaaattacctgggcatggtggctggcgcctgttgtcccagctactcggcaggctgaggcaggagaatggcgtgaacccgggagacggagcttgcagtgagctgagatctcgccactgcactccagcctgggcaacagagcgagactccctctgaaaaaaaaagagactgggaaggaggagcacagggatgttccttgctgttccgtgaaaagtttgggctcccagggtcacacctgagcagacttctgatgcttaagtggcagttccatcatattttaaaggattccattctgttgaataactttccattttagcatgttaaaaacttctaattttagttgattggacaataattcaaaaattgtatactgtaattattcttcattttatctctctgatttaggcatcttgatgccttttttattcaacaacatttattacaaaaatctcaatatcaaacttagccgagataccatcaaatttccatattccctccctcaatgtctttctcagttttttggagtgcagcattctgaattaaaaatctcttctagttagcttgctatgaattcagaaatcagtggagaaatttgatttcgtgaaagaacctgcccctgctgtaatccaagccttctatcggcctctggtgtggaccaggctcaagtctgaatccagggctggtctcctgcgtgccccctcctgaaacctggctcactcctcttcatctctttctctcctcctctgaacaccaccaaatgctgatgtcatagtccccgtggggggcatcagaatcctgccgcccaacaatggcctttcccaggagagcccatgcgcagggcatggatgaaagcaagctggagagggagagaggatgggaggcgaggaggcagcctgagggaaggaacaggagggaagagagatgaagggcaagaccggggccagccatgcctgtcctaacagcagccacccagcagtggcccagcctgctgagaactagaaaatcagaagaaaaaggagaatccaccaggagacccaggttcgcatgagcaggggcctttatctgaagtt

SEQ ID NO: 22910 - DNA, 2300 bp, Homo sapien
ccgattcgtcatggcctcagatggcagcctaaggagttagcgttttgtcctgaaggtccgggagagccattaaaagcttctaagcaggaagtaaaacattatgaaacctctgttttattaaatgaatctggctatggcggacatttcatatgccgggcagcagctgaggtagaaagggcttctatgatggtccagatgcttggtgatcaggtcaagctatggctgtgaattgattgccatggagaactgatgaagggacagtgcatttccatcatcttgagtctatgagaatggatcactccagcaataacgctgccagtcaccacacaggctcaaggtggggccacagtagcctctctgccgtgcgttaactcctgatcccgccctttgagatgagagtccttgtagctttatctcttaaatgtccttcttggatttaggaaagctgaatcttcatttgtttccacattcatccataaaagaagggccagaaatccagggagaaaaaagtgattccgggattgtgcccacgtgtttccctgccaggagcctcagagtgtcagaccacactggctggctgtttcaaaaagtctctgacagccaccttttcccaactcagaaacaaaacagaacaaacaaaaaaatccatgactttaaaatcccaatggaattgcgcttcctataaatgtgtgtttgctgattgtttttgcatgattaatggttcccagggttacataaaattctagggacccctctttcccatggaaagggaaagaggatcaagtcaggaaagggttagggggcccagagacagatgtcgcctacttccaaccatgctgtgggctctctctgagtcctggtttaggaattgaagttccggtacctattgttctcatccctctaaaaggaattaggctctgaggattcctgtcaggatccaacttggggagttccctgtccctgaaaatactctcaacatcacaggctggcccatgcatctaatggcaattccttagcattccacatgtttgtttgtttgtttttgtttttgtttttgtttttgagacggagtctcgctctgtcccccaggctggagtgcagtggcacaatctcagctcaatgcaggctctgcctcctgggttcacgccattctcctgcctcagcctcccaagtagctgggactacaggcgcccgccaacacgcccggctaatgttttgtatttttagtagagatgggatttcactgttttagccgggatggtctcgatctcctgaccttgtgatccgcccgcctcggcctccctaagtgctgggttacaggtgtgagccaccgcgcccggccacgcattccccatgttaataaaatattggggggaaaattattgtctacattagaattttataaatgtgaaccatagtttatcattcttacaagaattccttgagaaagcatccagttacactgaaaagctggcaagacctgtctaaaagcccagagcgaaccagcaaacagaatcaaaactccctgtcttgttgcacagctccagtctccccaaattccagtcactgcccccttcagcaagccagggcctgagaagcccgatgggggacacattgacctgtgtcaccgggaagctctggaagcatcgtgattccccaccctccctgcctgccctttaccttagctttcagaggaaagtctcatctccccatcagaaggcacattgtcaggacctggctcagcttccattaacttcagataaaggcccctgctcatgcgaacctgggtctcctggtggattctcctttttcttctgattttctagttctcagcaggctgggccactgctgggtggctgctgttaggacaggcatggctggccccggtcttgcccttcatctctcttccctcctgttccttccctcaggctgcctcctcgcctcccatcctctctccctctccagcttgctttcatccatgccctgcgcatgggctctcctgggaaaggccattgttgggcggcaggattctgatgccccccacggggactatgacatcagcatttggtggtgttcagaggaggagagaaagagatgaagaggagtgagccaggtttcaggagggggcacgcaggagaccagccctggattcagacttgagcctggtccacaccagaggccgatagaaggcttggattacagcaggggcaggttctttcacgaaatcaaatttctccactgatttctgaattcatagcaagctaactagaagagatttttaattcagaatgctgcactcc

SEQ ID NO: 22911 - DNA, 2300 bp, Homo sapien
ccagaccctgctcatcagagctgaccctagccgtgctgggccccccagctcatcattttcagaatgagggctttgagttgaattgtcctatattttcagacctcccatctccacatttgaataatggacttattttacacaaaaaataaacttaagtggcctgaagttggactggcttcctggaaagcctttccacatagagtagacttcttcccaggccagctcctccctggaggtgggaggggagggtgcaggagggcttccttctggggccttgcaacctcagcagttttgggcagccgtgatgcacttgaaactctggtctctgagaaaacccctgtggaggtagctcacctacaaactgcaagattctctttgtgtagctcccacgtctgcaatgtcagcatgggacaggctgcctagataggagctgccccaagcccagcgggagcgtgtccacacttgaccagatggacgggagccgcgcccctggacaaagctctccaagcagctgtccccaaacatctatctcaagcttgctggcttatccaattcactaagctgccgcattcgatgctgtttctaagctggcctcctccctggccctctgcatctcagcagagcagcggttccatctccacactgagacttgcctttgagtatcgcatcacacacctccaccggttccattcatcagtaagcctgtgggttttgcctccaaatctctctgaagtccttccgcttcttgctgagtagcccctgtaatctgagccaccatcatgtcccccggtttcctgcagtgccacctgtctgctggcttctactcctgcagtccattttccatggagtggaggggtgactttttaaagaagtaaattagatcatataattcccaggtttaaaattctttttggaccaggcgtggtggttcacacctgtaatctcagcactttgggaagccaaggtgggaagactgcttgagcccagcagtttgagaccagcctgggcaacatagggagacctggtctctacaaatagtttgaaaaattagctgggcgtggtggcatgcacctgtggtcccagctacttgagaggctgaggcaggaggattgcctgaggccagaaggtgaaggctgcagtgaaccgagattgtgccactgcactgtagcttgggtgacagagtgggaccctgtctcaaaaagaattggtttggaataacatttaaataatacctaaactccttgccttggcctacaagacctgaatatttggcccctgccttccctccagcccacagcaccggccccaggacctttgcacctgccatttctgctctccagaaagccctgcctcctccccatctttgtagtcataggtgtttcttgtcatttagagtttcagttcaaatatgacaccctcccattgatggaaatcatttcaccaccagacgttatgtggctcattgtttatccgctgcctgcctcccggctggagaggcgcagggagctgcctgtccctcctgttcagagccaccgttccgcacctggaccaccgcttggcagaggcgggagtggaggctgtcaccatcaggatgaaggacaggggtggcccggcgtggagaagctaagaagagatggcgataggtcaacgcgattgcgcctttaaggtggaagaaacgaagggcgagggtcagtaaagtcaaggacgggctcagatcccgccactggtgataagcgggacccataggaccgacgtgatcgcggccaggccctgggtggtttacctggacttttacctggctgccttttctctgcacccctccgtcctcactcccccagtcatcggcataggtcaagtcagagtgttgaagaaacacacgagtttggctctggaaaggaaaatcagaaaggcggcctaaggggccccacccccaggaacgctaagataggcggccaggggtgagcgggcagggccggccagcaggccctgaaagcagccgggccaccagcgcgtcccgagtccccctcgcaccgccccgcttgccccgcccctgccctctgcccccgcccctgccccgcccccgaaggcgagctgcgctgacagccggcggcgggctgggtgtttgcaatacaaaggcggccacgcgcggcgccgctcggtgagtagccgccgcctccagcctcccgctgtggagcaggggccgcagcctcgggttaggcggggcggggcgcggcgccggggcgctgaggacgcgtggcgaggcgggggctcggccccggggcccgaggaccgacggccgg

SEQ ID NO: 22912 - DNA, 2300 bp, Homo sapien
tttataaactccattatgtatttcacatgcgcagaacatcccaatttggacaagccacgtttcaagtgctcaggagccacctgtagctggtggtttattatattggacagtgcagatataagacctttctagattctcattctttctctaggtctgtggagataaaatagtggagggaaaaatagtggtttaggaggaaaataatgtagaatatttagaacccaataatagatgaaaaaatctgttcaagcactgtatgttaattttaaggatttaaaagaaacactttaaacacaactctgagcgtgtttaatgctcaaaacatctgtaatgttttgcctcatgaatgcagcataatgactgagtcaggttatgtagctctgactatcaccaaatggaatgacaaattaggataaatagctacatttccacatttggaattaggtattttctgtaaagagacaattgacagcacacacgagcacatttttggattatgtagtttgattaagcacgaaagtgtgaccagagatgatcagttctacacatgggtgaaacagaaagtgaaataggtcatttggcagtttcctgcttttgtgtctcagaaaattcatgctgatttcttagcaatttcaatatccggtgctctgccattatcagatgtctgagtttctttattttcttaaaaatgtcgttgttgagagtagtcaaatactttacgtaatatatataatctttatataaagtatatatactttgtaattatatataatcttatatataatctttatataaagtatattatatatactttatataatcttatatatagtctttaaagtatattatatatactttatataatcttatatataatctttatataaagtatattacatatactttatataatctcacttgatgtaattgacctctgattttgtctttcttttaatgtgtatcacgtggtggtatccagtagcctggtagattgcaaaaggactgcccctcatcttgcagttgcggccgagggaggtctgtctagttcttgccctccacagtcttccctgttccatccttcggaaaggtagaggagttattttccccattgggatatattcaataatgaaaaatttgatctaactcttactataagtctattttaccattaaccaaattacttatgaagaaaatacctgtagattatatgaagtgaaaattttgatttaacttttacaaatcgatttcactaaccaaattacttatgaaaaatatgtatatagattactcttttcctttcgttataagcatttgtagatgatcagatttttttttttttttaattcctaaatttgactctctggaaattatggttaagcatataattttacctaattctgtgaagtgctttgaaaatgagaataatgaaatatagcttgggaatatgatcttctgttttctgtctcgggttgtttgacaaataagtttacaagatatttttggaataccactttaatttattataaacatttaagtagtttattgggctgtctgaataatggagtcagacactttccacagcatttctagaacagaatcttggagaatggcctgggctgggtctcaggctgaggatcaaaggttggtgtgttcactcgatgtagtcatctcagatttctgccttcattccctcagttttgacctacctactttgtggacttacatggtttactttgtaagccttagcaaatgaagctacgattaatttgtacgtggaaaaccttttgtctttttgattaaagatccagacctcaggatgtacttcattcagaggctacatttgcagaagaaaagtccgtttaaaatgaggaaaacaaagttgttaatagttaaaactaactagccttattgggactggcaaaaatactgaaaactttgataaggctaataaataccttgtttatgaacatcagtcattgaccttgtaagcttacttttttgaacaacccttgatcttaaaataataatatttcatgacggagcactttggagtcatctttctggtaaatcccacttggcagtgggccccattcctgcgtcctttttggtctgtctgaattccctcagtgacggtcggcagaaagcgcatctgtgtttgtgcacgagacctttggagaagggttgctgtggcctgaacgggcagcatttatggtggtggcctgtttgctgttggggagggacttgcagcagactttctcgtagggctgggctccttatgcgtgagttgcacgcctgagtgc

SEQ ID NO: 22913 - DNA, 2300 bp, Homo sapien
gtgtggggggtgtggagaaatgaggcctgagaaccctgggcgcttgtgcgttttgaggctggcagagctgatgggagcaggcgagctgctgtgtctgggaagcggtggctgctgaggaggagaacacccggacactctggagtcctgggagctgagtgactcaggtgctctgggagaaggaatgagcccccgaggcagatgctactggggagtccattcctacaagaattgagagttgatacctgggtttggcaagatgggcatcagggtgacctgtgcagggacagcaaggaagggaacaagagaacaagagtctgctaggagtgtgaggagaggaaggaaagtgaagaagtggactcaatgcttgtagtcagctttttggaagaattttgctacaaaagggaacagagaaatggtatcttagccagagagagactaaggatgttttggtgtgtgtgcatgtgtgtgtgtgtgtgtgtgtgtgtgtgtgtgtgtgtggttgttttggcttggcttgttttaaggatgaaatgagagattgcagaatatttatgtgctgatgtgaattacccaaaagagaggaggaatttgatggggtgtgtgtaggggcgaatgaagcaaatgctggagcaaagtgtgtgaattggcaggtggctgtggtcttgtcgcaggggctctagccaagagctgggaccagggggagtacaaggggctcaagcgcaggcaggtgagccagtttcatccatctgaacctcagtttccatagcagtaaaaccaggggaaaatactcatccagccatgttctcctgaggattaaacaaagtggggaatgcaaaagcacttagtgaattacagtgaaatgtatttaagcctatttctcaattgcaagcaagattttgtagaatgtggacttttgtatgtgggggaacttgaaacagtgccattctccacagaacagatatggatcaggatttatgaatgcagaaaggttccattttctgatgccatgaaatgtgaatgttttatgtctttcaggaatggatataaatttctctactgttctgcccgtgccatcgggatggcggacatgacgcggggctacctgcactgggtcaacgagaggggcacggtgctgccccaggggcccctgctgctgagtcccagcagcctcttctctgccctgcacaggtaccaggcctgctccctgcacctccatctgtgagcctgttcagacccgctctcttcctaactgcaagttttgtaagaatagcctcctcactggtcttctgccccaatatccatgctccatagcaggcaccagaaaaatcattccaaacacaggtctacacctgcattggctcctcatggctttcaggccgagtccagactcaggagcttggcgcttggtggctcctcatggcctgcgcctcccctcctctccaggcgtgtttctctcgtctctacatctcagtctgtgtctcccagacaattgtctctgcttggagcctttgcacatgctgttccgtctttttgggtcactctcctgctccatctcttcttgagtggcctggctgaatcttaatgtccgttggacaatgagcctctatctcatctccttagggatccttaagtggcctgtctgcgaaccaccatcattcacctggcctttgacacccatcatacttgtcattttctgtcttagatttctgggaacactgttcattttacgggtcctctaacagaccactggccagtttctgattaccttcctcccttcacctatggggccatatcaaggtagctaagccagactaactctggccccttggagttggaggaagaaaacactggacgtccctgtagttggaggcccagggcaatttactagacacctctcaaagcaaaagctattgtggtcaaccataggacattggtccctgctgaaggctgattgtaaatatcataaacttggtctttatgaatgtcattgacgtgattctgcctgaatttgaagaccagatgaactgtttgctgctgctaatcatgcaaacagtggaagaatctagatgggccccaaatgctgtgttgattcttgtgtattttcctttagctctgtaggtaccttttccatcacggcgttgttttgtgtaagcagtagcttttttcctgtagtaaaagatgtcaaattgagacatgcacattctaggggagaaaagtcaggcacaacctagtgtatttcaagtcctcagagctatcataacagcactgatctcaatagaaatcctgatattttagtgaaa

SEQ ID NO: 22914 - DNA, 2300 bp, Homo sapien
gatgcccaggtgagtctggacctggggagcaataattgcaaatgattctgtccacgtaattttccgtccattgtcccagaatgctccatgtcttttgtatgttacaatctaggtttctcggtggtggtagacgtgatggtagtgctattagtggtaacgatattgacaataataaaacacttttaaagtgcttatgaatatttctggtactattctgaatactaaatgataatgtattttgtcctcacaatgcccttgtgaatgaggaactaatattttcctgattttacaggttagaaaatgaagggacagagaggtttcctttttttttgactaatttccttagaaaggaagtatattactttgctagggctgccataacaaaataccactgactgggcggctgcaacaacagaaatttattttcttgcagaaaggcggctgacagtccaagatcaaggtgccagcagggctggtttttcctgagacctacttccttggtttgtagatggccatcttattgctgtgtcttcacatggtcttgtctcagaggcatgcatgtctccagccaaatgtcctcttcttgtaaggacaccagccctattggactaggaccccacacttataaccttaactaagcctgtaaaggctctgtcttcaaatacagtcacattaggggctagaactttgacatgtgaatttcatatcataaatacagagaagtgcaatttggtggtaatagctaagatgaataggaattctgatatgattttgagacacattctcacttaaagtctcagcatataaataaagtttaatcaccttgaagatcagacagcttcttaaatataatgatccattctcaattacctattagtgggaggccacgataatagagaactgaattccaaatataattaaaaatattcgtgtcactgcttagatgccatctctttctttaccaaacttaaaaaaagaaaagtctctcccctagagctcttaaaccacatgattcagctactaaccgaagctcacccttttggatttcccctgctgtactgtggtcgaggtgctaattagcagggaaagtgccaaatggcaggcagccagaggaaaagcagagaagctgaaagacctgcacaaactgcaggtttgtgagttgcaaaattgagatatgcctctaatgagttatgtattaaagcccctctgccccatgacagcaacgtcaccctggcagagacctccagtttccttacctggtaaacggggattataataataccacattcccaggcttgcagggtattagaccaaatcagctaagagcagcagactaagaaactggtctttattgagcatatattttatgtcagacacttggcaacatgattcatttaattctcacattgattctataaggtaggcatggctagctccattttgtggatgggtaaactgaggctggagaaacttgccaagtgtcacataccaattacacttgaacctcactccaaaggctttgctccttctactgacccgtgttgcagaaatgcctggccttttgtgagcactcggtaaatgtctgtcattgttggagagaaaaggaaaaaaattatctccttgctatgaatttaaacaatatattttaaagctgctgggagcctttttgtcctggttttctgcatctgatttacctgtcccattttaaccattcatgtgaacattgttatgtaactagcacatgcttttactgtgtataacttagtgttacataaatctaaaggctgctgactgctagcaatcttttaaatgtaatgagctgaaagatttgctttgagccttggggcaggatagctttggcttaaccatttgctgagttcagcttttaggaggataagtttactgcatcccttcaataatccaactgaagcctggattccaagcaactgtagatgagatttaagtctccaagaatgttagaaacttaaataaaacaaggcttaagcagaaagtcctcacaatggtgtccacattccatcaggatgacgtaatcgaaggttggaaccaggcggcctctgcctttgtgttccgggacccctcactcagtgcagagggaaattgacacagccatgatgaggcctggctcacaagagccatagttactgtaggagtttctgtggctaaatatgcttagctattggtgggtttctcagctatgacaatggtctccgtaaaaacacagaacaaaaatttttggttaattgaggtcaaattttgtgttaaaggagggttaatttccc

SEQ ID NO: 22915 - DNA, 2300 bp, Homo sapien
catgaagacaggaaatatatttttcaaatcattgtatcttcatatccagtgtctggcacatagtaggtttcaataaatatttgctctggattagttcaaggtaataaaaatcacattttctgggaaaactccctgacgttcaggaaaagtcattccctcctccatgctcccttgaggccttgatattctaattgccacattgttacacaatgacattatttgtttcccagtctttctgccgggctagaccctgcgctcttgggtggcagagaccagatcttactcatattggatccctaacactcagcacagagcccggcttatagtaagccttcatagatttcctggaattgaaaatataattctaaagcaaccacatgaggtgagcagggcgggtattatgcttctcatcttacagatgaagaaacagggatctagggagaaaaaacaaggtcttcacccaatttccatttgaaatcagagacccagccagggctagcacacaggtgtcccaacccctaattattacaaagctctcttggccactgcatagaggaggctaggcacctctctttctgactcaacagcaggggttgcttcgagactgttcctaacacaggccaagtgtcttcctggggtaagactggattaggggaccctgctcggtcagtggtcctggtgatcgcctagggaaatagatctattctgctgggatctgggactgaatcctaggcaggtttgtggggagtaggatggtgagaggtgctggaaggcacgggtccacttcttaaccttccttttaactctgtgctgctgggtggaagctttatagtcaatgtcctctccatctctggccacattcccaggactcctgatcattagagtgactgttgtcccaagtggacataattataaatagctcccttcttttactgaaagtgtcctacagtggacaataatttagtcccctcctccagtggaaaatatactacacgcatgcaaaagctcagagggctccaggagtcgtcccaactcccctttctcagttccttgggatttttttttttaagtttgtcctctactagatcgcttctcattcaccaggatatcttagatcaaggctggcgtttgaagcctctgcctgagttcaagccccttgcttccggtgttcctgtccaagcccgcggactggaatctcccaaggaagttacgaataattcggggggggtggcgaaatggggggtggagtggggcgtgaaactgcagccttcacctggctaacagaagaggactcaggacgcccagcaccctggataggacccaacagcgctccctggaggtgtgggtgcaaagttttgtctagcttggcctccaaggccctccaggcaatgcactgggaagggaagaattagtgattaaatttgacctgaatcaaaagatgccttcagttcctcttctgctgaaaacactagaaatacaagcccaggatgtggggatcgggggcaagcggtgacaccaactaaaaggaagcaatggatttccttttaaatggagaggaggatgtcggagagataccatgaaacgaattctcgaaactccaggcagcaataccgatgaaagcgcattcttccaaaacagagctcctcattcagggccacatctgagcctgggggcccaatgctcagagcgtgcctggctttctggggaaaagcgccaggaacatgaacgagctacgaagagctggagcgggcgctgcgggagcagcgtgtggggaacggctcgggagtcgctgctggtaaccccggcccagccgcccgcagctgggctcgcagccggctcgcagccgacacccagggtgctgcgcccggggccccgggccgcggaaggatatttcactttgtttacctccccggccgggcgagggagctgcgaggccggtgctggcgcccccggcacggagctgcaatggcagcggcgcggggagccgcccgaggactggcagcggcggggctgattgatgggcgcccggcgcaatgaggggggcccgggcgggggcggggcggggccggctctgggctgagccagtcgcgggggcggcggggggggggcggaggctccgtggaaatgtgtcggtgacattgaatggggagaccgagcgcgagcgaggcgcgcgcgcgcacacgcgcactcacggccccgctcgctccgagatccccggccacgtaagtaactattaataccgcctcgccgggggatgcgggcgtgctgagcgcggggattggcctcgggcaccgtcggcc

SEQ ID NO: 22916 - DNA, 2300 bp, Homo sapien
tgaaagtgtcctacagtggacaataatttagtcccctcctccagtggaaaatatactacacgcatgcaaaagctcagagggctccaggagtcgtcccaactcccctttctcagttccttgggatttttttttttaagtttgtcctctactagatcgcttctcattcaccaggatatcttagatcaaggctggcgtttgaagcctctgcctgagttcaagccccttgcttccggtgttcctgtccaagcccgcggactggaatctcccaaggaagttacgaataattcggggggggtggcgaaatggggggtggagtggggcgtgaaactgcagccttcacctggctaacagaagaggactcaggacgcccagcaccctggataggacccaacagcgctccctggaggtgtgggtgcaaagttttgtctagcttggcctccaaggccctccaggcaatgcactgggaagggaagaattagtgattaaatttgacctgaatcaaaagatgccttcagttcctcttctgctgaaaacactagaaatacaagcccaggatgtggggatcgggggcaagcggtgacaccaactaaaaggaagcaatggatttccttttaaatggagaggaggatgtcggagagataccatgaaacgaattctcgaaactccaggcagcaataccgatgaaagcgcattcttccaaaacagagctcctcattcagggccacatctgagcctgggggcccaatgctcagagcgtgcctggctttctggggaaaagcgccaggaacatgaacgagctacgaagagctggagcgggcgctgcgggagcagcgtgtggggaacggctcgggagtcgctgctggtaaccccggcccagccgcccgcagctgggctcgcagccggctcgcagccgacacccagggtgctgcgcccggggccccgggccgcggaaggatatttcactttgtttacctccccggccgggcgagggagctgcgaggccggtgctggcgcccccggcacggagctgcaatggcagcggcgcggggagccgcccgaggactggcagcggcggggctgattgatgggcgcccggcgcaatgaggggggcccgggcgggggcggggcggggccggctctgggctgagccagtcgcgggggcggcggggggggggcggaggctccgtggaaatgtgtcggtgacattgaatggggagaccgagcgcgagcgaggcgcgcgcgcgcacacgcgcactcacggccccgctcgctccgagatccccggccacgtaagtaactattaataccgcctcgccgggggatgcgggcgtgctgagcgcggggattggcctcgggcaccgtcggccgtcccctttaatttttaaatacacggtcccctcttttctctggggggggcaagcaagaaatcaaagaaggaggagacaagccgtcaattttctccaaaacaaaccccaccgggcaatttggtctcggggtagggggagacggggtgattgcaaattattccaggacgagatccagttctccagcgggaaaggggcaaaggaacgccgcgcgttggaagggccagggacgcagctccccttgcagcgcccgcaggacccccgcaagctcgtgccggcgaaatcggagaccgccgatctgtcctcgttctctcctgcacgtctggctgcattcggaggaagacctggggcgcgagcgagcggcgacagcatgagcctgtgctgacctccgcgcggcgggccgagcccagggctttgtcgcggtacctgcgcccagcccgcgccgcaactctgtgcccagcttttgcaatcttttgttggcagcgctgaccgcaccaagttaaatgctcccttgcaatttttcttttttttgtttgtttgtttaatttttggagagctcgcgatcttggaaaagcctcagacgccatctacagttaaaacgtaggtaactgccctctcccgcaccccccccttacacgccccccaccctttccaccaaaaaaagggggtgcagcgcggattctggctgccgtgcgtcgccagccggtagacccgtgcttgtttcctttctctttttgtttggcttctaacgcgttgggactgagtcgccgccgtgagctccccgaagactgcacaaactaccgcgggctcctccgccccgtctgcgattcggaagccggcctgggggtcgcgtcgggagccctggcgctgcagctccgcaccttagcagcccgggtactcatccagatccacgccggggacacacacacagagtaa

SEQ ID NO: 22917 - DNA, 2300 bp, Homo sapien
aggggctggaggttttccattgtaatccactagctaaccagacaaaccaatgcacatccctgggccttcaaatgttgtaagacctggccttgcctgtaagaggacagccagtggcccacctcttgaacttccctacctcccgctggtccaatatagatgctgacttttgaactgtggaaggaacgaactgtgtatagagagatgtttacagatgcccaattgtcagatcatctttatttgcagggcagtcacgtatattgggcagagtttgggctttggaatcacccagatagacagacactagaatcccaatggttagtaccttgttcagggacctcaggccactcagcctctctgaaccatcatttactcatctgtggggatgactgtcagctgtttgatgaggattttaagaaggcaattccagtgtgctttcccaaattgctagatcataaaattcacctgcaaagtctgtcctcattcaagagatctagaatgttccccagaaaattttattttttgaaagcaagtttgggaaacatagataacttgttaatatgaaacattaaatacatttttaaaatgtgtatcctttttcacagaacatttaaaaattattaacgttcaaagattaacaaaatctaaaatgacaaagattttttgatccagtcatccgtgaaggctttttaaaatctgtgaatggaaccattgttcttaattctcatgtgtccattctaatatccgagcaaatctcattctgctgaaaatcttccttgcctgtttttaagatgatgaacagacttcatacaatcctactcagtacaagcactgcatttttatttacctaagtaatttctttgattcttctaaaactaaactcacatgagttattttttaaaatcacaaatatgaaaaatgttacactttaatttgacttactcctaactaagcatatatatatataattcttttgatgtccaaatatctcccaaggaggactgatgacatttgaagcatatttgcccaccaaaataaataaataaataaataacgttaaagtattagtgtgagtgtgatcaatattcttcccaactagagattcccagagtttaactagagtcaaatctaaagatcacagattttttttgtaaaaatcttagcttttccttccaataaattcacatggtttttgcctcatgaatttccaatacttcatcccccatcccagcaggcagtaaagtccaaccttttcattcagggttaaggttgccctgagccctcctgaactttctagccctgcctcttgtatcctgcacacccagccagatgtgtgggggacaccctgagctaactgacctccatgctcttttatgccaattccctccaccgtaaatgagcttcttcactttcgatcatcaaaatgtgaagacttgcaaaaagtcactgccaagccatttctgatttttcgactatgcccaatgctgcttggtccacagttagttaactttcacaggcacgtttctgtaacattcccgctgtacttcccacatgagaaatgctgtcctccggtttgtgttcaacttactgggtgtaaagcccgtctgcatacaagctccttgcgactgtgtgactccctgtctccacggccagcgcctaacactgcttcaaccctgaagagttgtacaactttttttggtgtgaactaaaatcaccaataaaaatgatattgaaatgattgagcttgttcaactagtcagagaacagctgggtccatttggttttacattggccagaattagtctcagctgctgtgtgaatgattatttttaaatgtaaatatacgggattctggagcttcattctgtcctggttcttatgacagaatagtctctttattctgctcccattccctgaactacatacagctttaatgcattgataaatcctttgcagggtgttttgtctgtcgctggtagccttggagttacaggaaaaattctaggaataatcaccaggtggcgccagagccacattacaaagcgcctctgaggtctcctcccaagaacggggtgtgtttgtcctctagcactaggtgggtttgctccctccctagatcttccatccaggatagtcctggaaatgatcttgatgctatctgttcctcgttacagcagacctgctcaacttcagcagctagaaggaggattgtctttcaccagctgcaggagcctgttcccactacagtgagataataatttcgtttttttcaagccaagaagtatttattgaaagccagctat

SEQ ID NO: 22918 - DNA, 2300 bp, Homo sapien
atgacatgattgtatatctagaaaaccccattgtctcagtccaagatttaggttttcttactagctttaccttttataagctgtttttgtaaattatgaaattctttttgttttaattttctcaggtaaaaatatttattagagtatctctgaaaagtgattaaacatcaaatgaaataatgatgactaactgaacttttagaacatagtaaccttttgatacagacaagaggcacgtagattctgggtagaagagagtgattcctcagcaaatgccccaccatcaagcctggaaacctacagccctaaatgaaaatgtacattcctgtttttgcacccaaatgttgccttttggcccaacacaccccccgcatcctgtacccaggtgtattagtttcttttcacactgctgataaagagatacctgatattgggtaatttataaaggaaagaggtttaatggactcacagttccacttggctatggaggcgtcacaatcatggtggaaggcaaaagacacatcttaaatgatgaccagcagagatagaatgacagccaagcaaaagggctttcccttatgaaaccatcagatcttgtgagactaattcactaccatgagaacagtgtagggaaaaccacccccatgatttaattatctcccaccaggtccccccgacccacaacacctgggaattacgggagccacaattcaagatgagatttgggtggggacacaaccaaaccatatcatcatataaatccaaaccacaggctccatgagcagatgagcagagtagcagaagagctgtgtggcagaggagagaagagaaggaacatgtgaacgtcgaaagttcatctggggacagtcagggaggagatcagccatgggatggccaaactccaggggaagattatcttcctactccatccccctccagctccccatccatcccactgagagccacctccatccagcaataaaacccccgcatttaccatctttcaatttgtccctgtgacctgattcttcctggatgccggacaagaacctggcaggggggcattgagctggttaacacttaagccatctgcagatggcagagctacaagagcactgtaatgtgcacactagggctttgggagttgcagtcacccacccctagatgctaccgtggggccggagccaaaagtgctcacccttactcctacacctgcctgtctgcatgctccccctcctgtaaggggtttgagggcatggcaggcaaacagatgagccacacccttgtcacatgtcctgcgagggggatcagggacctctcccatttcacttttacagatgttagatatattaatggcatagtgtaacttctgattttatttttatatccttgtaacttatgtgttaatttttatatgtgtggtgaatatgttttgccttcccaaccttcttttctacctttctctctcctactagaatgcctctcttgttcaggtttctttctttcattgcatattcatctactttacttaattaaatggaaagaccaataattcattttctatgatgaagtgtttctttccttctgtggcatggaacaggacttagcacagagtcacactatgtacatatggaatgatgaataggacgaacaaattgtatatggcatcggtattcatcttactacaacaaaatgttaaagcaaataagatggaataacaactaatatttagtttaaggtacttttctatggggtgtgtgtgtgtgtgtgtgtgtgttttactagcagtaggtactgggctctgtatggtatattagtaagagagttcaagcaaggcaagcagttgtacttgtgaacctattctcttaacccctgtgtgataatgctatcagagaacacatagactagaagggcttcagtcttagatgacattattaagctactgctcagacatccctggaatcagacctactcctagacttccaattatattatacgtcattgtttataataatactaagtaaagatttttgttaagtgagtataaaagtgtcttgactgagtcctcaaactgaccatcgggctgtctgataccgttgtagacctgattgaaaattcttgatctggccacataccctgtttacattgatgcagattcaactgggtgaaataactgtgaactgggcatgtgaagagaaagctgaaagccatgatctcaagatggaaacttcagtatccagcaaaggtatttataatcttgagacagacagaacactttctaccagtgcagtgctctcaca

SEQ ID NO: 22919 - DNA, 2300 bp, Homo sapien
cctcaggctggagttcccatccctgtactcctgtgtctatgacagcaggatgctctcaggctttcatgtcctcttcatagctgtcccttcattatatgctggtaccaatattaggatctttgctctaggctgatcctttttatttatttatttatttatttatttatttatttatttggagatagagtcttactctgtgacccaggctggagtgcgtggtgtgatcttggcttactgcaacctccacctcccaccctcaagcaattcttttgcctcagcctcccaagtagctgggactacaggtgcatgccaccaagctctgctatttttttttttttttattagagatgggattttaccatgttggccaggctctgctcttgaactcctgacctcaagtgatcctcctgcctcagcttcccgaagtgctgggattacaggcatgagccaccatgcccagcctgaagttttctgaagagttcttaaaatcaggatactaggctcctagtaaaggcaacagcagcggaaaaaaaggaatgaattagatactatttaggaggcacaactgatagagaattgtaactggctataggtagagatggagtttttgggctggatgactcagaacaaaatgatgattacaaaaaatgaggcaggtaattgatataactaagttttttttaatttgactgcttgttaatcattttatcagccttctcaaaggaagtttctgcatctgttttcccttcttgcctccctgaacctaaagaataaaaacaatggcagcaacatttttctgtggagctggcttataggataggactcggaagcagcacaagtcactccccctcactcccctttctggagtaaacgtgggcaggtggggagggaagcctgcattctgatttagcctcccaccttggcggacaataactcacctcttggcaccagaagacaagtcacagctgctattgtcttgataattatgtttactcaagcagcggagtgggagtcctgtggtcaagggagtgtgacttgccaggtgctccctgtctagggcctctttccccctgaggtggatgaagctgttctcaggagcccttacaaccagttataaattactttcagtgagctaaggtcaaaggcatggggagaatagtaagtgacaacattgaggatttatatgaccccttccctactaggagaccaaacacttcaaatatatgatctcatttgccctcctctgatccctggaaaatggagggcttgagggaggcagtggttagaggcaggtgtgaaagctctggtaaacaaccttgaatgatcagtatggcaatatggttttctttctctctcatttttctttagtacttttttctttctggttttagacaaatgaagcagactaatttttccaggatttttttaaacatttttacttccctcccttagtttgatggacttcagcaaggttgtgagaatgagtctacatttattggggttcttttgctttgatccctcaaggaaatgacatgctgataccaaaatgcatattaataatcaggatcaataaataagtcaactctgatatggagaaatccataaggtcatttattgaaaacattaactattaaagataaataattacggctggaataagtgcctacgatttatttccaagcatttgcatctaccacttgctatgtgaaactcttccatgaatgagaaatctgttctgtgcttctttaaagacacagggaggtttgaagtgaatcctggaaggtatctcatatctgactagtccaaggtcacacagcatgctactgggagctctgaccttatcacagagtctctgaaattcctattcaggtctctgccttatttgaacattgcatctgttgctatttgccatacaaagtaaagtaacttgaaaatggtagaaataaacaccacaaaggcaaaatagaatggtaaaaggattagaggaatgacacaggaaaagcgattacaagaatttaatctgtcacatgaagctttgggcaaagaggataaagggagggtgactgcttacaaattgcacaggctgtaaggggaggatttggggagcccagacttgccaatgggtaagtgagtctagtcaagatgtaggatttcagaaaactcactcagaagagcaggatgaagataaaggaggcatcattcagcagcaataaccagtaagtaatggtagagatctttagggtgtgggcaagtgaccctaaagacttgcaatgttagtttagcaatctgtttgcaatttt

SEQ ID NO: 22920 - DNA, 2300 bp, Homo sapien
atgagttgtaaatgtctgtgcacaaggcttgatcttggggatggagggaggatattttttaagttattcaaacgctgagttgctttcaaagagttcttctcagacatcaacaatgaactcttcagataccctcatcccagacagccctgaagtccagtttataacaagaccaataactcactccttatctctaaagctacttgttcaattctcttgacttcagggccaaaatgagttgtttattacttatggcaagtataaaaaaggccatctcaacctgtggtcagttccacgaatggcaacttgttttctgataacttgcatgcacatggacaatagccaaatttccaaaaagatttaggtacatcaattgtataccgatggtcatttaaaaccattttttccagcaatattttagcatctaatttgataaatcactgcatttggaggctgtgggggtgtacagagaccttcagaaagcaaacataaactggaggcttggcggtttgaagatattcaagcagaaaagtctagcaaagaaaaagggggttgtaatatggatcagtctccatgtaaccttgagccaatcatctaacttctctgaaacaccagttttctcattttatgaaacaagattttattcaataaacactataacttagtgaaagactggatctggtatcccgtaggcttggatggattgctggtactagtattggagcttttgtttccctgtttgttacaattcggatattagtgagtaccctacagaggaataatgattaaattgtctacttaatttactcttaagtgtctgaccacgtataagtggtcaatacaggctgttttcatttttactattactgatggaacacactgcatgactagcattgggaaagaggcccagaatacaaggttgtgcagaatgcaaagtctattctcaaggaattcgctttgtagggaagaggtggggggttcaaataggaagtatcaaattcctcattgggaaagaaaagaggcttcatagaaaagctgctggagcccaggcttaaagatgagtagcattggggccagaaccagatgtctaagaactctttgaggcttaatgttaggaacttttgaaactattggtctggaatgttgtatatatgaagttcattttttcagcatccaatattcagaacacattcattcattaactttccatccagaaatgtaatcattaactactgctggagcctcctttcccacaaaaccaaacaaaacttgcttagcaatcccaattctgaggcttggaaaacacttttacatcctactctctgcttgcatgtatgaactcacatacatgagttgtgaggtactcctcctatattcagaaaattggaggccaatatcataggcacagccagggaatgcaccggccaaagctcaggcttttgggtggcatttgacaccaagctccttttaaatcgggcatcagctctgggtcagcagcctcactccagtcaaagaagaggagccaaacgtcgcaggagcaatttcaaagacgtctggggaacgaaaagggtcttcgatccaaggaccagcctaggggccatcgggaaccaaggctctgggggatcccagcagggcccagacgcccgcctcgggcaatgtcgctgcctgccccgggccgctcgcagtgcctgggccatactggggtgccctggggtttcttctccatacccagactcagcttccccgctggagtctgtcttcctggaacacggaacgcgggcgggctgtgttctcagtcacaatcagctcggatgagctggggggcgcgggcgcaagcgggcatcggcacctggcagaaagcgccgcgccccccgcgggtgcgcacacctccgctccccggggcggcgcgcggtcgggtgtgcggggtacggggcggggcggagcggagcagagcaaagcgcacaggaggcccgcctctgctcccctcccccgccggcgaagattgacacagctcgagcacccgccccaaccaatgagcgcgtcctggggcgggccctgggaccggctgctccggctacttagagtcgtcggcgcggcggtgggaaagcagagccgagccgggactgtccagtgggagcaggcgccccggccagcgcagacctggaggcgcacgggcgccgcaccgcacgattcggctcggggtagagcggagccgcagccccacgcgcagcccaggacccactcgccaccgccgcttcctcagcacccatggggaccaggagactttaaaggagtttggggtt

SEQ ID NO: 22921 - DNA, 2300 bp, Homo sapien
tttggatcctgtgctgggtaggagggagaggggtctttgggctaaaagtgaacctctctacacacacacgctcccacccacacccacacacatacactgcactggctttctccatccttcccctgcctctttgttaggttattttagacagagcagcctcgccctggcgcagtcccattggccctgatggggacaaggcaagagaagtaaggggcagagtgcacctgcctgtgagggcaggtgtgcccgggtgcttgggcgtacgtgcaacggcgagcgtgcaagcgtggagctgaaattgtgtacgaatgtgtggggtctaagtgtgccagtgtgtcgtcgcgaaggtttgtcattgtgggtgtatgtgacatacaccagtataccaggctgccagtgtctggactcccaagtgtccaaaatgttgctggtgtcaagtgaatgcctgagaatgtgtctgattgtcattgtgcgagccgctgtaaggggaggaaggcaacctagtgcaaaactgggaggtgggctggagagggtggggacagaaatgggagcttgctcccagctcactggccttaggctcccttctccctttcagcccacccctcggtccttcctgggtgtccgtctcccacactgccacagccagcactctcctccccaccgggaccccgcaagctctccagccagcctgggtgttttcttctgggagttggaccgagttcccggaaggggtcggaggctgtgtggtggcgtctgctctcgcctgacctgtggcggcttctccgcccctcgtacccctggggaggcacggaggactcggctggaaagggtgactccggtgagggcacgtaagctagccggcaggtcccaggggcactgcacgtcttggggagggacaccgaaaggggcagcccggactctgacggtgtctctgcctctctgtgcctccgcagatccccgctcctggccctcgcctcgccacctcattgatgggcaaccaactggaccgcatcacccacctcaactacagcgagttgcccacaggggacccgtcggggattgaaaaggacgaactgcgggtcggggttgcctacttcttctcggatgatgaggaagacctggacgaacgcgggcagcccgacaagtttggcgtgaaggcccccccgggttgcaccccctgcccggagagccccagccgccaccaccaccacctgctgcaccagctggtcctcaacgagactcagttttccgcctttcggggccaggaatgcatcttttccaaagtgagcggtggccctcagggcgccgacctaagcgtctacgcggtcaccgcgctgccagcgctctgcgaacccggcgacctgctggagctgctgtggctgcagcccgcgccggagccgcccgcgcccgccccgcactgggccgtctacgtgggcggcgggcagatcatccacctgcaccaaggcgagatccgccaggacagcctgtatgaggcgggcgcggccaacgtgggccgggtggtgaatagctggtaccgctaccgcccgctggtggccgagctggtggtgcagaacgcctgcggccacctgggcctcaagagcgaggagatctgctggacgaactcggagagcttcgccgcctggtgccgctttggcaagcgggagttcaaggcgggaggggaggtgccggcaggcacgcagcccccgcagcagcagtactatctcaaggtgcacctgggagagaacaaggtccacaccgccaggtttcacagcctggaagacctcatccgcgagaagcgccgtatcgacgccagcggccgcctgcgagtgctccaggagctcgccgacctcgtggacgacaaggagtagccgcctaggggctgccggcccctctgcctcccccgcacctcgctcccttcccttccccgcacccggacttcgcagtcagcggttctcaacctctgccccgccccgccacgcgcgtccgccgccggtggcccgggcccgggctgcacccccgcatccccaagccagcggcaggaagtctcaggaactgccccagggccgaaagggcgccgctgcgagcgcctggctgacagccacagcggtggtgacggtgctgggagaccccgcgtgcgctttccccttgagatgtaaaccgggaacggggaaggggctgaggggagaaaggacatggccttccccgcgagtccatggccagtgactgtggcccgactcgaaaacaaccctcttctcaaaagggaccatcaccgccccgagcgtgcgcacacagaccggtcg

SEQ ID NO: 22922 - DNA, 2300 bp, Homo sapien
gtgattgttctctatcagggttgagccacttttgctaatgtcaagagcttgatttttagaatcagtcaagttatgcaataacactcaagttatttaaccattttacctctgctttccccatctgattagtagggctgagatcacacctttctcaaaggatttgaggagaaattaaatgagatgatgcatttcaaagcaaagtatataacaaacacttgatgttcagctcagagcagctgccttgctggtagagatcacagtccaagaggcacggctagtgccctggaggtcgagcagcaggcccagcacaacctgagaggctctggagaacacaaaaccaaagccgctgcagtgcccagttggcccaggtacagtgcctggtggccagtgtggaggcccagctggccaagattgtgatcaacctggggctgcagaaccagcagtgccaggggcttctggacatccaggcaacagcaatgggagctcagcccattctaggcctgctggagggcaaggactgcaagctgccttgcagcccccatgcaatgcctggggcatgtgataagcccctcggtctctgcatcaccaatccctgcataccttgtgcccctagttcctgctgtaggccctgcaacaccttttgatgctagatactccagggacagtaggagagttgtgtgaggacagaaggcatatttgtgaactggtcctgcttctctcatgactgtcagacaatgggaacagtgccccagtgcatctcataaatcatagtccactgggaaaagaaacatccaggtctgtggcctggctctaagcctgggcccacctagtcctctccatccaaggcatctcttgttcgttctgtcctcatggtctgacaggtttgaactgcgaaggcctgtcaaatgacgtgttttgtggcttttctctgctgcttcgacctttcttgcagttccccaaatccctttgtaaatctcttaataaacgttctcttgcaacacagggggaaagtagcaaacaaacatagtagaggatttagcacttaaagatagagtaagtatttggccaatcactggtagctaagagatgaaaagtagtcagtggctcacctaaagtgggttcctcccttcttggatatccttgcctctctgtgtgccatctatccattatgcttgctcagagggacacacaggttattccataaaatttgtcatgaaagccaaggtcagccaagtgtcatgctatgtctaaatatcataaatccttgaaaatgcatgtttactcatcactgataactttttgagtgagcaaatgtgtgttcagagagggaattatatacaaggagttttaggtatggcatgtaccaagcaagtttagaatacagagaaggaacaatattcttgcccaaaagcaaggcaggtagaccgatgaatgactaccataatacaagataaaagataaggtgggaaatatttatacagtacatttagaacattgagtgctaacctgggacatttaagggtgcttttgcggaggaagtatagtttttctgtgcatttttaaactgagacttaaagagcaagtagacggttaatcagacagagaaagagcaaaagttacactatgtgcaaacacctggaggtgtgagagtccagcacccagcagccatactgcctaatatggtagccgctggccccatgtggcttattaaaccctttaagtaaaattaaaaatgcagttcctcggttgcactagccccacctcaaatgtagcttgtgccttgtggctgcggtattgggcagtgcagatacagaatgtgtgtgttgtgtcagaaggggccccgcacatcactttgtgtggaatgcttaggtggggagcactgccatgacccgagaggaggaggaagaggccacaggatgcggccagccaggccagagtgccatgctcaggagcttgtttcatgctcccaaataatcttctgcaggtttcggcatcccggatgaaaagtctgcctgtttctttgccccagatgcttggtgagactgctctgtgtcacgtgttctttcaggcatacaccgtacttttttgaattagaattcccgatgtatgaggaatgtgttttacaaactgctaccctgctggtattgatcattgtcacacaggtttgtgtagcacagccttctactctgaaacgtgagggccttgcagatttcaagagcagacatgctgggtgaaagctaaaactataatgtgcagaattcccaagagaactttatcctgagtttaaatgcgagcttact

SEQ ID NO: 22923 - DNA, 2300 bp, Homo sapien
aatggcttagagccagaaatctggtaagaagtggggactacggaacttgtttgaaagctgcatttgcagtgcatttccaatttcattggaaatagtactttcctaaagatctcttttatcaatatttatataggattaggaaaatgtcccctgtcagcattttttttgtttgttttttgagacggagtctcactttgtctcccagtctggagtgcagcggtgcgatctcggctcactgcagcctccgcctgccgggttcacgccattctcctgccgcagcctcctgagtagctgggactacaggcgcccgccaccacgcccggctaatttttttttttttttttttttgtatttttagtagagacggggtttcaccatgttagcccggattgtctcgatcacctgacctcgtgatccatccatcttggcctcccaaagtcctgggatgacaggcgtcctgtcagcattttaaagtcataactctgttgagtgacttggagggagctagtaggaaaggaagggtctgggggcagcttacctcctggtgtggtcactcatgccatgtatttcagcctagtcctgcttttcagaatgaccagacatgtacaatgactgcttttaggaagtagaaaaaaaatgagagtctgtcgtaggagtctttatctctttttattaaaacaaaaaaatcaacacgtccttttgaggatatagtaaaaatgtacttgagtagctgacagaagactacagcccaggatccaaagcagcacaaatcagtgaggcctgagaaggcgctaggatctctcagaggcgtctgcttcctccatcaacaaagcacaaagtttagacttagttttgtattcttgaggctaagagcttaatattttaatattagaaaaatataactcctgcacattcttgaggatagtattttattaattagaaaaatataactcccatatatctaacacagtatacaggaatctgatgcgtgtcactgaataaatgggtgaaaacgatgtttcgaatctttggaaagaaggaaagaaaaaaaaatagctcataatcctaacaccttaataatatatatatatgtatatgcatatgtctgaatacatatttcttatatttttatacatacatatactttatatgcatgtacaggttgaatttcctgaatctaggaatctgaaatgctccaatatctgaaacttttttagtgccaacatgatgctcaaaggaaatgcttattggagcattttggatttcagccttttgaattagggatgctaaattagcaagtattccaaaatccaaaaaaaatctgaaatctaaaatacttctggttccaaacatttcagataagcaatactcaacatatatatatatatatatacacacacacacacgcacacatacacacacacataaaatagaaaatatataaatgcacacatacacacacacataaaatagaaaatacataaaatacatatattgtatatgcagatatagtttgaagtttaatgtaaacattatctagagagttttatattctgatttctaagttttaacattctatgacaaacatattccaaaatgtttggatactgtttttataattctaattttaatgactacataatattccagcctgtaatttaaaataagctagttatcatttcttctatcaattagattacttttgaggttatattaatagtcttattccagttaaaatctttatgcctgtatttattttcttctttggaatttttttcttataataagtgatcagaactgggaatatggctgtagaaatgactcctcatttttgcactgtaactggcagtcagtgtgaatactagtttcatcactttacctgctttggatattaacatttttaaaaatcttaattactagtttaatgatgcaaatggcacctcactttttgttttcttcacagaagaaaaactagtataacaagtgctatttattggttaaaatcatatatacaaaaatttcacttttgttctaactcattaacacttgctgaatatgcaataggtaataatgcagggttctttggtctcactattcttttttttaagctgtctgtggaagcccgtaaagagatgactagaaaggctattaagacagtcaaacattttattgagaagccaaggaaaagaaactcagaagacgaagctcaagaagctaaggattctaaagttacctatgcagatactttgaatcatctggagaaatcacttgcccacctggaaaccctgagccacagcttc

SEQ ID NO: 22924 - DNA, 2300 bp, Homo sapien
aagtaagagaccagttatttaaaaaacaagtgtaatattcaagttatagatgaaagagatgccatgggtaatagaggggaggaaattataagaaataattcaagcctattgctttgaatggaagattatgcatcctcagaaatgcctattacattacagcataccaccatgaccttccagaatattagggatacagtcttgtgaagagaaaggcatgttatgtaaaaggagttgggaatcagaatgacctcaggccccttaggaaaaacactagaaactagaaaacaatggagcaatcctttgaaacttttggaggataatattttttgctatagatttctgtatcagctaaaatcactagtcagatatgaagttaaacacctaaaggtttataaaatgtactgttgctgttgtaatgtctatggtaattgatagtgtagagttgaagaggagactggggagagtggaaagcaagaagagagctgggctaacaagcctgtgtcctttctggtattcatgcttggggagaggagggaggatgctgtagcaaaggtgactgagaaggggcagccagagggaggaatgcttcacggcatgacagcagactgacgaggggcaaagggcatttccagaaggaggagcggtcagttctatcaaagggtgctgaggaggaaataaatatgcagaactgaaggaggtatcagaggaactcagcgttactgttggcccctttttcttgcaaaaatagagcagatgtaagagatgccaggaggagtgagtgatgtgcttcgtgtgggcagagctggggggaaatccctggaagaatgttaacaacactgtgagactagtaagtgaaggaccattccatatatagggaagttttattgtagtggcaggtataagcaaagtaggttgtcaaaggcatttgggtaaaatgccccaatgtttacaggctgtgtttctgctaataattttaacaaaaataacagtaaataaaattaagcacttcctttgtgccaggcagtgctctgttattttgaattttcacaacattcttgtatagtgttttccccgtttaaataaaaggaataaataggaataaaggagatcttagactagttttagttaaggaatttgcaggtttcacagctttcagtgatggaattgtatgtctgattctattctgactccaaagctcattgccttacaacaagaaccattgtagcaccagtcatgtactgccagcttgctttagatgaatgactatccctaatggaacatagcatttttacatatgcccatctgatacttgttactttgtattttttttttgtccttaaacatggaaggcaattggccatgatcattctcgttaaaaactcctcatgatcagcaatccccacgaggttagccctgtgtgtgttcctccaaatgtggtttcttttttttttcacagttgatagggaatggtatagagtagtcctgtgctgtgcaaatgtcagtacagtactaaattgctggcacctagtagaggtatattatcaacataaataaggtgtatttcctcttatttttatgaacatcgaaaacaagatttcttaattcaaattcaagttggaatcactggggatattttcctaaactaggcctggctggccagcacaggagattttgattgagtgggcctgcggtaagcacccagctgtgtatattttgtaaaagcttccctcggtgatttttgattttgttagtacttatttgattgatttgtggcatagccgttttgatgtattatgccttctgattttttaaatcgggaaaacggggggaaaataaattacgcatccaaaaaagtctcatttatcttgtaagggtgcgtgtgcatgtgatagatacacaaaccacatacatgtatgctccctgtctcttactttctccccatctctgtccctgtctttctctcacaaaattatatgtttttccaacattctagtcagttattaattggtccttttgtgcttcacagaatggttgttgagccgaatctccaagatgaaagtgaattcttgtatgctgcacagcctgagttactaaggttcaggatgacccagcttacggtggagaaggttatggactggtatcagaccagagcagaggaaatagagcattatgctcggcaggtgaggggaaatggcagctgctgctcagtaatgttagtggaactgccttggatccttaggattcagtacacggagtcggggctgacagcagtgcaggaatcatgtatataattgcaagag

SEQ ID NO: 22925 - DNA, 2300 bp, Homo sapien
catgattcttgagtatacagagcaattctgaagttatcttacataaagtgtacctgaagccagtgtatcagatattctctaattatgcatgtgttaacttttatctagtttttttttttttagtaacttaatttccccctcttctgtaggcatctagttttataggtgacttaagctatgccattgctgggttgatatttttagaatataaagcaagtgcacagtggtctgcagaactcctggtcatcaattaccgaggagaacttagaagttaccttgtaaggtaaaaatgtgctttggaagccatatttgaaataatgtttatttctctggtttaatgtcagattttgatatttctttttttttttgctttctgtctattatgaaaaattgcaaatataatagggaatttgaaagagtggtgtggtgaacacccattacttccacttgggttctacaattaggattttactgtgcttgctatatcatatttctattcatatatccacccctctatccggctattaatcatttcgtagtaagttggacatatcagtactcaaatgctttagcatgcatattattagagtttaatatttgcttatagttttcttccttttgaggtaaaatttgcatgcagtgaaatgcatacatcttgattataccagctggtgagttatgacaaatgcgtacatctgtgcagttcaaacctctgtcaagatacggaacattaccatcatgctagaaagttccctcatgccccttccgagtaaatctctttccatacccactcccagaacaactagtgtttaaaatttttttaaaatcacagattagttttgcctattctaatagtttacgttaatggaataatatacagtcatccctctgtatctgtgggttctgcatttgtagatttgatactgtggattgaaaacattcaaaaattgtgtctgtattgaacatgtacagactttttcttgtcattctctgaacaatatagtataactactatttacatagcatttatattgtattggatattataaggaatctagagatgattcaaagtatacaggaggatatgtgtgggttatatgaaaatactatgccattttattttatttttttatttttatttatttatttatttatttatttatttatttatttatttctgagacggagtcttgctctgtcgcccaggctggagtgcagttgagtgatcttggctcactgcaagctctgcctcccgggttcatgccattctcctgcctcagtgtctcaagtagctgagactgcaggtgcccgccaccaaacctggctaatttttttgtattttaagtagacacagggtttcatcatgttagtcaggatggtctcgatctcctgacgttgtgatctgcccgcctcggcctcccaaagtgctgggataacaggcgtgagccactgcgcctggcctactatgccattttatatcaagggcttaaacacttacagattttgttatcctctgagcatcctggatccagttccccagggatgcctaggaatgactgtagtatgtactcttttatctaagtcttctttcattcatcatattttgagattcattcacatttttacatacatcactagtttatttctttttacttacaattagtattttattgtatgaatagctcatgattttagaaatccattcttctattgatagaaccctgtttccagttcttggcccctgcaaataatgctgttacaaccattcttgtacaagtctttatggatatacattttcatttctcttgggtcagtatcttcaagtgggattgctgggtcataggggagacatagtttatttttataaaaaactacactttttaccaagtggttttatcaattaccttctcattgtgacgtattcgagttctggttgttttatatcctcagcaatatttggtattgtctgtcttttaaattctaaacattttattgggtatttagtgatattcattgtggtttaatggtatttacttctttcataccctcttaaatttagtgttggaacaaatcagagctaccaagaaagtcactgtttcagcttcagtagtcattatcctcatggaatcaacacagctatttaccaccctggtcacaggtaagtaaccatttgttctcatatttagtgggacatagaaatgttggcatagattcagatagaagaaactattctgattcttatgttgacttcttaatttcctcctcttgtgcgtagttatctttaatatctataatactgt

SEQ ID NO: 22926 - DNA, 2300 bp, Homo sapien
gcaatgtgggcggggctccccggaggtatacagtttgtcagccttgtgcggtagggagaagacacgtctggtgttcacaatgaggggtttgattgaagggcacagctgctatgcagagaaatactatggggagacaatgtgtaaaagattttctgggaagtctgtcatttattcaacaaataatatatattttgtcctctgctctatgccaggcactgttataaattctggggatatagcagggatggatatagcatttgcatgcatatagatagagcacctggcatggcttaccttttagtgaatggagacagataataagcaaatatactgtatagccatttaagtgatgacaagtgtaatggaaaaaataatagagcagctctggaaagctggagttggagaatggtcattgcaaatttaaaaatgagcagtcaaggtaggcttcagagagagacgacatttgagcaaaaacttgaaggagataagggaggaaccaggtaaacatctggtagaaagccttccaagtggaggggacaggctttgcagaactcctgaagttgatgtgtgtctggtgtgttcagaaatagagccagtgtggctgaaggtagtagggggagcaggaaatgaggtgtgagatttaggggagcaggcagatgacgtagggctttgaggtcattaaactttgagagaaatgggagctggttagaggcttcccagcagaggcttttaattgcatcaccgcctaatgcatcttgatggatatcatgaatataattatctcaagggatattcagtatttgtgtttcttttgatgtgaaacagtgtaatactttgtacagtatatattcattcatgttacagtaggctctgcttataactgtccacaaagaggtatttgttgaatgaatgaatgaatgaacaaatggggttgaccttttcgctccctccatgcgggttctcaacctattatttcaactttattgcccctacaccctttctcaacttgggttctattcacccgtcttgttgagtactaattaggaaaaaaaaaaaggcaggctagtgggagcagggaaaaacaaagagataaggcaaattagctatacgtctgtctttcttcatggtccaaaacatataaacaaaaggaagaaacaaataagccataggtctacttttctttatggcccaggacatatggcccttctacccagataacgtacttaactcacaaacttcctgcttaccttcaaatgcctcaatttctgaaacacttcagctgacaaaaaaaaaaaaaaaaaaagaaagaaagaaaaaaaaaaagcaagttaactccctgctacctggtgttatcaatcactccaagttccagtctataaaattctcaacaagcctttgtttcctagcaatgagctcctcctctgctgagtcggcccgctgctccctggcaacgaactttcatactttctttaatctgtctttctttatctaccactgtcttggtaaattcttttactcccacactgagaaagtcgtcactcactggcgacacgttgaaagagttctttcaactctgtatttctgcctctgtctctgctcattccatttcccgctacttgaaatgcttctccagtagattaaaattctgcctattgttaaagacgcagggacaagctccacgtcctccaggaaatccctgcagactctggccttcgttgccttttctgagctcctgtagcatccttcctctgctacctttcattggataactttagttgtttattttaaaaccactgtttgaactctctctacgtgttaggcaaagaatatacaaatgaacattagcatttcagtggggtacctttaccatttctgttttatggaaactgagttataagagaggctcaatgacttggccgatctcatgtagattaatgaacaaggagtgtatcaggaccgggacacaagtcgttcccaagacaagcaatagtccctgtccttcctactcataaaagggttaacctagcatttccttgccgtgaaacaaaagcggccgcggatagagaagcttgtcctgtgagggattccgtagagacactcctccgctgcctgagtcctcggcgaacatggcggcccccgagtcagggccggctttgagtccaggcactgcagagggtgaggaggagacgattctctatgacttgttggtcaacaccgagtggccaccggagactgaagtacaggtgaaccaggcccatctacagcagcagccagcttggcgcgggcgcttcgtgggtaga

SEQ ID NO: 22927 - DNA, 2300 bp, Homo sapien
acgattcccccacagttaactcctgcagcaggcttctctctccttctctctgtctctttttctgccctgccacctcaggtcctcctagggacggcttctcagagcagtccttacgcttcccaaactctcagatcaaaagttctcagagtatttccctgaaatgcattcttttcacagaaatcttttctcttaatttgcatctttaattttttcatactttatctcttccttgagacagggtcttgctctgccacccaggctggagtacagtgacaccatcatagctcactgcagcctccacctcctaggctcaagagatcctcccacctcagcctcccaagtagctgagactacaggtgtgcaccatgcccaactattttttaattttttttggagatgggggtctcattatgttgcccaggctggtcttgaacttctgggctcaagtgatccccttgcctcagcctcccaaggtgttgggattatagacatgagccatcatgcccagccgatttttcacactttaaaggtgggcattggcaaaaggcacaaaaattagatttcagatttccctttggcaagtcctgcataatatgggtcttgtatctctccttggaatgtgggggtacttggtatccattcaaaactggtacactgcataactctcagggtcttatttagacaaaatataacaagaatagagaatataatgtgaatagtgccccctggaagtgtaaagctgcagggctgagtgtattgtcctgggcctttggagcttcaggtgaatcctgttacatgtaatagtaataacagagctagttatattgtcaccatgtgctatgcactattttagatgctttatgtattttatttgatcctcataactatcatatgagaaaggtactattgttcatccctatttcacaggtaagtaaactgaagcccaaagaagcttcatgacttgttcaaggtcacacagcaagcaagtggcagacctagaatccaaactcagaatatggttcccaactctgtacttctaaccctattctatcttttttattttttatttttttgagacagactctccctctgtcgcccaggctagagtgtagtggcacgatctcagctcactgcagctttcgcctcccaggttcatgtgattctcatgcctcagcctccggagtagctgcaaccctattcttttttctttttttttttttttgagacggagtctcgctcggtcacccaggctggagtgcagtggcgcgatctcggctcactgcaaccttcgcctcctgggttcaagcgattctcctgcctcagcctcccgagtagctgggactacaggcatgcaccaccacacccggcttcttctgtgtgtgtgtgtgtgtgtgtgtgtgtgtgtattttttgtagagaaggggtttcaccgtgttagctaggatggtctcgacctcctgacttcgtgatccgcctgcctcggcctcccaaagtgctgggattacaggcgtgagcccccgcgcccggccgctgcaaccctattctatcttgcctgagggttccacttttctccatgacactctggggcaggctacagatagcacagcacgcgccctcgcattgcgcagatgtggctcagatcccacgctgccattcggtagatatgtgtctttagataagtgacttaactttcccgaattttagagtcctcatctaaagattctaataccttcctgacagagtgagtgtctggttgggaggattcctcatttactttccccatctctctgcaaagagaaaggagttaaaattgcatggaagtcaaacccgaaattataaaagcgacatcaaacatgggtgaagggagggagacctaaatcattacttagtttaaaaaaaaaatgtaacaaatacctactggctgccaggcactcactggcattggtgctcagggcaatgaatccagtccatctctccgggtcattcacacaccaaggccctgctcacctttggaaagctgggggactgagtggggagggcacggtgtggtgtcagcctgagcccactggatgaccctaatcaccaaacatctgcttccttctctgtagctgtgaccctgataccgcgtggtgtgctccgaacacatggtgcccagaacgaaggcggcgtccagaagccctaggtcccagaggtccgctcagcggcaggcgcataaggcggggccggcgcgggcctttccttccatcggaaccgttctcccggggctgagtccctgcccggactccgaacgccgaagacca

SEQ ID NO: 22928 - DNA, 2300 bp, Homo sapien
cactccagttcggattcttcttttgagaagaaaaaaatgcatcctcaacaggtgcttttggctaaaatcacaatgaaccaagaagggaatgagcgtgatgaatggagctcctggctgcaaatgcacgagggtgtctgtcctcgtgctgggatgcactcttggggtgccagcacagagcaccagaaaccggtacccagggagcccagtatcatttggctttgtctcttttgtctctttattctttgtgtctcatttgttgttctgtactttgagcaattctgtattcagaaatggctatgttgaactatttttggtctttggaaaaaaatacacccctcataacgaggaactttgcttttggggacctgagaagccttgataagccagagcttgcattcctgtgccaggtgttgagatgacatctgttccttccgcagagacttatctgctgtaacccagccccaggtcctcttctcagcatcagacacagtgggaacaagccctgccagctttctgccctctcagagcacaccttctaatagaacagagagagcaaactcaccagattacagctctgtgtcactgtgtcacttgctcctctgattctcgcagtccacaattgcagaccccctagaagtacggagcttacaaagggcagggcacagaggctggcagagaacctcctcggggccagccttgctcccttaccctctcagcaataccaggtggtaggtgccatcgccattctggagatgggcaaaccggggctcagagcagtgagaccatttgaggaagtcagggagccagcccagggtggggctcctcactcgggggcaggcattcctcaaacactttctgcttcctatgctctgaagtctccctcccagcctcggtggaggagggcagaggcaggcacgctcacatttcctagccttccgctcgtctctcaaggccaatcctttcttgaattgctggttcctttggggccaaatatgcactttcttctttaggacgggggatgctcccgtccaggactcctcatgcacggagtcggctgagcccctgtgtgggatgtgtgttctcccacttcctcctcctgtgtggcatgtgccctgcctgccctgggaccttggtccccatacagctctggtggcagcagggagtcaccggcaacatggagagaagaggtggaggctctgttgccacaagaacatgcgggagcgttactaagagatggcccattctagcaggagaaaaccaagcacttgaaggcacttcaccttgaggcctgatagggaaataccagtttcctttatcttcccaccccgccacgtgaaaccacagacacctgtggagagtgaagccacggagcccatgacaaacgcccggccagaggccagagcaagcagcaggtacgggagcggggcagggtttagaagacaggatctcttcaggagggatgaagggacaaatagggggagactggggacaagtctggttcttgcaaggttgacaaggttgcaagagtgaccagcctgggctggcgcagaggtgactcatgcctgtaatcccagcactttgggaggccgaggcaggcggatcacctgaggtcaggacttcgagaccagcttggccaacatggtgaaaccccgtctctactaaaaatacaaaaattaaccgggcgttgcggttggcgcctgtaatcccagttacgcgggaggcggacacagaagaatcgcctgaacccaggaggcagaggttgcagtgagctgagatcgcgctgctgcaactccagtctgggcgacagagcgagactccgtctcaaaaaaaaaaaaaaaaaaaaaaaagagtgaccagcctgtgcttcctcagcctctcccatggtcccctcctccgctggccccatctgaggaatgtgtgctgcccagggctgaagggccaggtgctccgagccaggctctgacaagggctgttggcagaaaaggttttctaaaatggcttctatagcaaccaaagagcggagagaggcagcagcctggctcctggttggcttagggatcgcgggctgtacggaaggcggcagcagctctgcgcctgcgcagtgaggggagcgtgctagaacaggagggtggtttgggagggctctgcacttcctcgtcccccacctcgcgtttgaggaacgcgaggtgagagtagaaaggaaggcacctggcctgcagcctgcctcctttcttccacaaccttggctttatctcccaccaggaggggacctcatggaacattccggcttgctagtccaa

SEQ ID NO: 22929 - DNA, 2300 bp, Homo sapien
gtgatggtcattcatctgaggagaaaggacaaaggtaggactttgaatcggagcaactgaacccatcctggcctattttcacagtcttgccacagaagatctggccaccttagaaggactcattcagtgatcttggtcttgaataataccatgagtacttactatatacaggtacactgctgtgccgtaaggattccctctggagcaaaactgacccaggtcacaggttagtgagggagactgagcctgtcttccacagtgtcacggaagtgagcactaaacaaatactcccaggcatggatcattacaaatggaggtgagtgctggacaggaaaggacaggatgctaggcgagaattcagcaggagggcttggtggcgattagggggctagggaaaagcagaagtggggctgtaaaaggcttttgcaaagatgaaggcttttacatttgtgagggaaataacaataataaaggtgcttggaagggctgctcatccgcattcatgggcctcttcctagaactctgggaatctttctccctagagctctgtaggcgtccagggtcagggctggaaaggccttcacaaatgctaatctgtgagcattttatgggttgccccctgaccctcagcatcctcctccttaactagatccaatggtgaggtgaagaggtgggggcgatggagaatggcatttccagtttggagaaaaaagtagggagaggcggggaagccttcccaccccaatcccagggccaggttcccctctctccaaacaagcctaaggaatgtttttcaaggcaaaatcccacctcactgtgtatttggttgtgaagggggctgtccaggagatcagggttgtttttggagagtttggagggcaggggcaataatgtctgaccccctgcaaacaaatacacctgtaagaaaagctagaccagagtgaagtaaagccaggatttgatggtggcgggaagggaaggggccaatgctgctgctggacagaggggtgttattttccccagaagaatagcatgtcgtggtcatcatcataataatagctgacacaactattatgggctggggacttataagagctttcataactctcaggtaggaggcactacgaactccatttcacaattgaggaaactgaggcacaaagaaacgaagtagtgacagcagctttcctttttcccttcaacagtttggaatcaagctgtttgagccgaggctgggtctcaggaggtgtggacagcacttccatctcggtaaatcagattcgcctgcccataactggggagaatggtggctttgaaaaggttaacttgggagccctggggacggctgcagggaacgtacgcccattccccctaggaagcagagccaggccgcctcctcctccgcagtggtgaggacgcgtggacagtcccgcgggggcggcgggagacctgcggagtggccgcactccaggtccgcgccaaggccgggcagctccgctttctgctcagtctccgcgaggtgtcgccttcggccgaagaaaccaccgcggcgccaccctcgtagctcgcacttatttatttatttattttcaaacaaggggggcgcccctcttctttcaatttgaaactggaaacatccagaggtcttgttcctaagggggcgcgtcctctccctgctattttgcaccttcggactacccttctttcgtaattacacaggagcaacctccctgcaaggccttgctcaacgttggcctcgcgctcagctgcacaacacgcagtcaaagcgggggctgggttagaagcatcggtctcccctccccaacacacacccccggagccctccgtaatttttttttcttttaatgacaagcaattgccaggctcgcagggtgggtgctgcattgcaccgctccgcgcgcagctggttctcagagtgcagccggtgcaagcccgggggtccaaaagggcgggaggagcacaccctgggcttcccagctttgcagccttctctctgcaaagaaaagcaagtggcttttggcgcgaaagccttggcgcctcccctgatttttatggaaatcaggagggcggggtaaagccgctttcctctcctttctccctcccccttgtctgcgccacagcccccttctctccccgccccccgggtgtgtcagatttttcagttaataatatcccccgagcttcaaagcgcaggctgtgacagtcatctgtctggacgcgctgggtggatgcggggggctcctgggaactgtgttggagccgagcaagcgctagccagg

SEQ ID NO: 22930 - DNA, 2300 bp, Homo sapien
gggcagctccgctttctgctcagtctccgcgaggtgtcgccttcggccgaagaaaccaccgcggcgccaccctcgtagctcgcacttatttatttatttattttcaaacaaggggggcgcccctcttctttcaatttgaaactggaaacatccagaggtcttgttcctaagggggcgcgtcctctccctgctattttgcaccttcggactacccttctttcgtaattacacaggagcaacctccctgcaaggccttgctcaacgttggcctcgcgctcagctgcacaacacgcagtcaaagcgggggctgggttagaagcatcggtctcccctccccaacacacacccccggagccctccgtaatttttttttcttttaatgacaagcaattgccaggctcgcagggtgggtgctgcattgcaccgctccgcgcgcagctggttctcagagtgcagccggtgcaagcccgggggtccaaaagggcgggaggagcacaccctgggcttcccagctttgcagccttctctctgcaaagaaaagcaagtggcttttggcgcgaaagccttggcgcctcccctgatttttatggaaatcaggagggcggggtaaagccgctttcctctcctttctccctcccccttgtctgcgccacagcccccttctctccccgccccccgggtgtgtcagatttttcagttaataatatcccccgagcttcaaagcgcaggctgtgacagtcatctgtctggacgcgctgggtggatgcggggggctcctgggaactgtgttggagccgagcaagcgctagccaggcgcaagcgcgcacagactgtagccatccgaggacacccccgcccccccggcccacccggagacacccgcgcagaatcgcctccggatcccctgcagtcggcgggaggtaaggagcagggcttgcaaaccgcccggcgcccagggaagcgacgagcgccggggcaaggcaagccctggacgggattgcgacgtgcgcaccgggcgccctaatatgcccgggggactgtttctgcttccgaaacaaaaccatctctgggttttcccagaaaagccagttccagccccgaaggcatcctggctagaggagacccgccctaatccttttgcagcccttaccggggggagtaatggcttctgcgaaaagaaattccctcggctctagaagatctgtctgtgtttgagctgtcggagagccggtgcgtccccaccccaggctggggttcttctccaaagggtgcccctggaggaagaagagggggggattaggcagggcgaggccgccgcggtcgcaatctgggtcacggctgctccagcttggaggagaggcggctctcccggcgaccctcctcgcgcgggcgcccctgccattcccgggaacaggggctcagcctctccctccctggaagaggacgttgtcgtgggtttggaagagcaggggtgggcttagagagcttccaattaagctattggcaggagtatccctgcagcgggtgaatgccgaggggcgtttgctcaaatttggggaggggaaggatttgtggatatgggtgtctgttgttggtctctgtctagagaaaggcttttttttatttgcaaagttttctaaatcccctgctatcatttgcactcctgaggttgcatttttacaaagggggtagaaggtactccaaataccattcccggtagctgggtcggagagcctggggcttcccctgagcagccggccccacaccgctgcgagtgcggttgtctgcgtgctcgtgagagctagaattctgcagccaggaacagccccctcccccaggcagtgccttgtgtgaatgaaatggcagtttccaaagttgcggagcctcgccaccaccccctgcatctgcatgccccctcccaccccctgtcgtagacagcttgtacacaaaaggagggcgggagggagggagcgagaggcacaacttcctccaccttcgggagcagtgggcagagtggggggcttggagggaagattggggaacctggttagagggggcgcccattgcctatcccctcggtctgccccgtttgcccaccctctccggtgtgtctgtcggttgcagtgttggaggtcggcgccggcccccgccttccgcgccccccacgggaaggaagcacccccggtattaaaacgaacggggcggaaagaagccctcagtcgccggccgggaggcgagccgatgccgagctgctccacgtccaccatgccgggcatgatctgcaagaacccagacctcga

SEQ ID NO: 22931 - DNA, 2300 bp, Homo sapien
cttaagacacagacaaatgaacacaatagaactaatcagtgagtcctcccaggatgtgagccttcctggagaggctgctgagtgcctgccctcaccttcaagggcactgggttacagatacaactcacatctcaaattaggcctggaattcaggctggaagacaaaactacagccagtttccactgcacactggaaagaggaggccccctgagaatgtacacaactgctgttgcacttgcagccagctgctgaatggagggagggagggtgcccccaccacccccagcctttcagatcccgggcccgcctgctggcctcgcatatcgccgcctgctggccacgcaccaggagcaaatagcccaccacccaccgaggatgggggaagggaaaggtaccgacatttgaaaaaaaaaaaaaaagaaaaagaaaaagaatagaaaatcggctctagccatctgtgcaaccctcctataagttcctgcgccttaaacagggctttgcacagcccttgaatcttctcgggatgtctttccctcccctgacctgggccagagagtccctttcacccctgcgctaacaggtttctgtccaggcagtgcacccagcaaccccctaaacccccacccggtttagccaccaactttctccaattttattcctcagactgcgctgcaaaagagaggtgggggaccgggtgagggcccgtgatggcctagaggagggctccccaggagagggtggaaggaactttagtgaaggcgagaattggagagcaccccttttgcaacggcattctctcagccccttctctttaccccgaggagagacttgggggaaacaggacctctctgcccctagcactgcctccaaaatgctccccaggccaagacatacgagcactaacaaaggggacgcgacccggggtccagtgccccagggaggcagccggacccgagttcggtctttacctgaatcgctcagggtgtcctctccggaggtactgagggccttgtggtcgccgccgctggtctggcggccgcctgggcgcggaggggcgacccccggggccccggctggggcggcaatacccgcccccgaggcgaccgcagggcccgccgccggggcactggccggggctgcgggcacgggcgctggctcgcgcttgttcacgggaaaggggaagaccacggcgggatccacgcactcggcggccgggtgggcgagctcggcgggcagggcggccccggcgcggccggctcccgcagccccgccgtgcccgcgacccgcagggctggcggcgccggctcccggggactgggcggtggaaccggcggttggcggcccgcggccgtgctgcagcttctcgctcacggcgcgctccagcttctcgcgggcggagaagccgctccacatgcagtcctggaggatgaccgggttgggggtgaggccacccagtccccccaggccgaacgcgtcctcctcggccgggctgccccacagctcgttctcaagcagcatctccgtgacccagctcgggggctcggagctgtgctccgcgaagccacggctgggcgacagcgggggcgtgggcagcagctcaaacttcttccagatgtcctcccccgggggggtcgagtcggggccgccgaagtagaagtcatcttcgtccgggtagaagcagggctgtagcgagtcaaactcgaggtctgggttcttgcagatcatgcccggcatggtggacgtggagcagctcggcatcggctcgcctcccggccggcgactgagggcttctttccgccccgttcgttttaataccgggggtgcttccttcccgtggggggcgcggaaggcgggggccggcgccgacctccaacactgcaaccgacagacacaccggagagggtgggcaaacggggcagaccgaggggataggcaatgggcgccccctctaaccaggttccccaatcttccctccaagccccccactctgcccactgctcccgaaggtggaggaagttgtgcctctcgctccctccctcccgccctccttttgtgtacaagctgtctacgacagggggtgggagggggcatgcagatgcagggggtggtggcgaggctccgcaactttggaaactgccatttcattcacacaaggcactgcctgggggagggggctgttcctggctgcagaattctagctctcacgagcacgcagacaaccgcactcgcagcggtgtggggccggctgctcaggggaagccccaggctctccgacccagctaccgggaatggtatttgg

SEQ ID NO: 22932 - DNA, 2300 bp, Homo sapien
cgagagcaggccaaggtagaactggctgcctcaaaagagagtgtgttcttacagatggaaatatctcaaaaaggccagagatatcccggtagaaatgctataaaagttatgtaagaactacatagagcagatgtctgcaaacttttctgtaaagggccaaatcataaatattttagagttgtgggccgtcctgtcttttttgcaactactcgcctctgccactctcatgtaaaggcagccctagtcattacataacagaatgagcacgtctgtgttttaataaaacttgtgtttatttacaaaacacaagtaatggaccggatttggctgatgggtcataccttgccaatccctgctttagaggattggttaaatgactctgtgctattagaaatatattgaagaacaagctataagggactgtttagagaaacagacaagtgggagtggtgaaactgttgcaagaaaaataatggaggtagatagggcaatgggttcatagaaaaatattcttgggattaggttagaatgtagatgcagagaaaagtccaataggggcagaggtctttccctgcaaagccggtcatctaacccatgtgtttagggcaccgtctcatctcatcctgaatcatgaatggctgtctcatgcacatgacccaaaaacacatatctgtggttttctaacagtgtcagaaattgagattactaaatatgtccaggtccagctgagcttagaaagaaatttacaaaacactgtggccatggggggtttcctcaggggaggctgcctgcccagccatgtgggattccttctcttcctcgtccacatgcagcacacctcacgtagttatcgggagagactcaagcaggtgatctccgagattgtcaactgaggctgggaattgtgttctttgaaggacctctgtgggccacctccaacatatctatttatccctttgattttcagaaaaagctcttcagagtttattggaatctctgacttgtccaccctacacaccaacccaacacctggaaagggaacaggccctggcaaaggagtttgccgaaattttacattttacccttcgattcgatgagctgaaggttaggccaaatgtgctgtgaaaatttaataaacttgtactgagtacctactgtttacagctgttctgttagtgctgtggggtgggtgggtagagaaatgagtaagatgtaattccttccctagagagacatataatgtggtgagaatttgcattccatgtggtaaaagtaatttaagatgatgatttgtatatggaaattttaaatctgccaaatgaaatcagagaaaaccttttcaagtatctgttccacattgagaccaaatatactttccctgaaatctagcccacagggcatattttaaaataatgaagttgtgggtccttatttctaaccagaagttgctttgactcttatgtaacaaagagaagtcctggagtatttataaaatctagtgtctgggctcctcctaatgcatataccccatctgatactgagagatgaccttcgctcttgtcctctgaatttcagatgaggaacccggctattcagaatgacttcagctactacagaagaacaatcagtcgcaaccgcatcaacaacatgcacgtgagtccctgggtcgccttgacctttgcacccttctccatgactcttttgatttctgcatcaggcagagcacagacagaagacaatgtccttgtctgtaattcagttccagagaaaagtatttggaggatttggactttctctttataaatccatcttctcttcttattttcatcagctagacattgagaatgaagtcaataatgagatggccaatcgaatgtccctcttctatgcagaagccacgccaatgctgaaaacccttagcaatgccacaatgcactttgtctctgaagtaagtgaagttgagcaacgaggtgcttttttccttaattccacacaagagctgcaagcaggactaatgtacatttgtgtctcccatttagaacaaaactctgccaatagagaacaccacagactgcctcagcacaatgacaagtgtctgtaaagtcatgctggaaactccgtaagttaaatcagagatgtattcgtggttgagacttcacccagccagtgtctgttaagatgatgatgttaatgatatgtaacatttgggtcaacaccctaaagttttcatgtatattatctgctttaatttcactaagaactctgagtggtaggtgtcactatcactactgcatagctga

SEQ ID NO: 22933 - DNA, 2300 bp, Homo sapien
gtatacatcagcaaagtatagcaaggattgtattttaaactaaatcttagggcattttgatgtggagcttaccacttctttttaaacagtcagctctactgtgtttttgcaggcaattcaaaatcccaatgacattcagcttcaagaaaaagcttggaatgcggtgtgccctcttgttgtgaggctaaagagattttacgagttttccattagactaggtgagtatgtatttgtagttttcatggcccacatacggagttctgttttgatgtttgagtaggtagtgggaacagcgtggcatattggaaaatgtcccacatccatccactgtatcaaatgagaggccatttatgagcaacaactcttgtcattttcatttctttcaatccaccacaaagttcttcccctgaagttattggcccatttagtgtgtctctactagtgagtatcttcttggtcctgttctcatctgtgtccaattcttaatagttttactgtgggctgatcacatttctgaataacagagaagttaaaagataacaggttacctgctcacccaacaaataacttgcttgtctggagtcatatgataaatttaatagagtaaaatgcaagaaaaacaatgtaacattatttccttaagctttaaaaaactgtgcaagtacaggatggctttgtagatgttgagtaatgccaaatctggttggaaataggatcaatgtgaccagcaatatgacaaaatcactccccagggaggatgcttcattggttaatacagtatatcttgaatgaagaaggcatgttctactctacttttgccataaaatgagtgccacagattaagaggaaaacagagaacttgaaataccttgggggagtaatgaccgtgatgttaagaggactagaagctgagacgaagggaagtacttgaatgaaccaaacccgttttccaagaagagagggtttctgatgactctcagatagaagagagtaaaagagaacatagacttctttctatgtttcctcaaagggttgacccagtgaatggaaattctgaggagccaaatttttgctcaacagaaggaaaacaattccttacgagagcaggccaaggtagaactggctgcctcaaaagagagtgtgttcttacagatggaaatatctcaaaaaggccagagatatcccggtagaaatgctataaaagttatgtaagaactacatagagcagatgtctgcaaacttttctgtaaagggccaaatcataaatattttagagttgtgggccgtcctgtcttttttgcaactactcgcctctgccactctcatgtaaaggcagccctagtcattacataacagaatgagcacgtctgtgttttaataaaacttgtgtttatttacaaaacacaagtaatggaccggatttggctgatgggtcataccttgccaatccctgctttagaggattggttaaatgactctgtgctattagaaatatattgaagaacaagctataagggactgtttagagaaacagacaagtgggagtggtgaaactgttgcaagaaaaataatggaggtagatagggcaatgggttcatagaaaaatattcttgggattaggttagaatgtagatgcagagaaaagtccaataggggcagaggtctttccctgcaaagccggtcatctaacccatgtgtttagggcaccgtctcatctcatcctgaatcatgaatggctgtctcatgcacatgacccaaaaacacatatctgtggttttctaacagtgtcagaaattgagattactaaatatgtccaggtccagctgagcttagaaagaaatttacaaaacactgtggccatggggggtttcctcaggggaggctgcctgcccagccatgtgggattccttctcttcctcgtccacatgcagcacacctcacgtagttatcgggagagactcaagcaggtgatctccgagattgtcaactgaggctgggaattgtgttctttgaaggacctctgtgggccacctccaacatatctatttatccctttgattttcagaaaaagctcttcagagtttattggaatctctgacttgtccaccctacacaccaacccaacacctggaaagggaacaggccctggcaaaggagtttgccgaaattttacattttacccttcgattcgatgagctgaaggttaggccaaatgtgctgtgaaaatttaataaacttgtactgagtacctactgtttacagctgttctgttagtgctgtggggtgggtgggtagagaaa

SEQ ID NO: 22934 - DNA, 2300 bp, Homo sapien
catttggttttatactctgggagtgcagctaatgctatcaacttatttttcttctaaacaaaaatagagttgcaaatagtgaaaaacagtgtctgcatatatgaattctctctttttttttttttttgaaactggaaatgtgactagagaattatttcttaaagagagtcatggttttccactgaatagccttaaagccaactctcatagaagtggttttgaactgagagccaagaaagcggtcatagaaaataccatgagtacatccaaaattgtcaccccttaaagatgagtgcctcccttggcaagggcgtgcaggcaggctttagaggcattgctaccactcctaaaatgactagagaaacacccatattctagactatttgggggaaaaaaattgaataacctatttcaaaatactagcacagtaaatgaatcttgaggaagaaattctctgtttttggaggattgaggggtcacccaatgtgtattctgtgttcccttcacactcagaatcccccccaaccccctcagctggagggcttctctcagccaacccggattcccagtattcttcacgttgggtggcagcttgcttcttctatcgagcaaactcttccagaagacttcaccccacataattttctcttttccttcatttcctaaagaaacacctcccttcctgtacatgctattgagtagcactagtgtagagccaacccctttggaatctaatggaagctatgggctgtctccccagaaaaaatgagcgtgttcattcaacaatacagcaccctacacataccttcagctgaccacactctctgaagtccccaggcaggggcctcctagggatgtggagccccaggacttctactgtgcagaaaagagcatagtcttcagattcacagagtttcaatgtcaaatgtgactctatcttttattttcttgtagtatttgaaaaattgtttagccattcgaacctcctttttatccccccaatcaatgtgatgataattatagctacctgatgtttgctgtaaggtttgaatgagataaagtgtgtgaaagcttcaagtatagtgccacacacacagtgggcactcaataaaatgctgatgttccagtttctctcataaattatagtagtaataactataattactctgttacttaatatgtagcggggacatactattattttcacattcaattaatatatttgagtacttatgatttatcaggaatgtgatacgtgcttctagatagattaaattgtttaatttaactagtgctgtttccctaaatagaatgtgcatcacctgaatgcggaagccatgtcttctctcagtgcataccccacctgtaagtgccctggggattgagtaattctctcagagtaattgttaaaggtagcattttcattagaaaaccaaaggaggaagaagaaacttgccacccaaactgttatcagattgccttttcgtgggataggcattgctttttccttttattttgctgtcaccaagagagtcagtgttgaggaagataaagcagatctcctaggactggagtgggcagccaccccaagtccccgacttcagattgctagaaaatctacgtgttaactttttatgctttggcatttcatttcttttcagtagaagtatttatgaaccactttggttgggttttctttattagacatttgttttccttagactttgtgctatatgacatggggtacacatagacacaactgtttggttaaaaagtaaaatctggccaggcacgatggctcacgcctgtaatcccagcactttgggagaccgaggcgggtggatcacctgaggtcaggagttcgagactatcctggccaacatggtgaaacccgtctctactcaaaatacaaaaattagctgggtgtggtggcgggtgcctgtaatcccagcttcttgggaaactaaggcaggagaattgattgaacacgggaggcagaggttgcagtgagctgagattgcgctactgcactccagcctgggcaacagaatgagactctgtctcaaaaaaaaataaagttggaggaggagccaagatggccgaataggaacagctccggtctacagctcccagcgtgagtgacgcagaagacgggtgatttctgcatttccatctgaggtaccgggttcatctcactagggagtgccagacagtgggcgcaggccagtgtgtgtgcgcaccgtgcgcgagccgaagcagggcgaggcattgcctcacctgggaagcgcaaggggtcaggg

SEQ ID NO: 22935 - DNA, 2300 bp, Homo sapien
cctaaatggcagtttaatttcactataatctttatgataataacctttaaacttgttattagtattactgataaagttaaaagactttcatctggtaattttgtcttaggaaacattcaattattaaattccacactgatcattagaaaaccctattatttcataatgggctgggcaataccatgcaggtatccctcgattattgaaacagaagccatctctaagtgtgtggaagtgaaatctcatgcatcaaatagtctactcacaaacttgagctgtattagtagagacagatgggtgtaaagtgaaaagtcctctcatggtctgaaatgatagtgttttatggggatgaatggtgtttgtggctgattagtcctcactcttcccaaaacctggccaaactcaaggtggacagattaagccagaaaattttaggggtgtgtgtatgtgtgtgtgtgtgtgtgtgtgtgtgtgtgtgtgtgtgtagtagacatggtttacctcatggcaagaaggcttttctcatagagccactcacagataaaacacctttgccagacggctgcggtggttcacgcttgtaatcccagcactttgggaggccaaagtgggtggatcacgaggtcaagagttcaagactagcctgaccaagatggtgaaaccccgtctctactaaaaatacaaaaattagccggatgtggtggcaggcgcctgtagtcccagctactctggaggctgaggcaggagaattgcttgaaccccgggggatggaggttgcagtgagccgagatcacaccactccactccagcctgagctacagagtgagactctgtctcaaaaaacaaaaacaaaaaaaacacctttgcaggaattgacaacagaggctggtctagggcatggggaaaactcaaaaagagaacgggaaagtgtttcttctggtcctaaggaccccttccaagtgggaaaatatttcactctaactagacagtgccttcctgccctctgtgaatttttgccaaaaaacagaccaagagcctctgtgggcagttcaggagagcctttcagagtgcaaaggaagcttgggcaacaagtcctcccaggggaaacaccctggatctcagaaaggagaggggcctgaacaccttctcctgatgcttcccgcctcctctgatcccagcccacacagggccccaacccatgcagcttcgggcacgtaccttggcacactatggggatttaacacatgtttcatgatgttctggctgatggactgggaaaggaagcacccgaagccggggtccccaggagctctccctcccctcaacaggagctctgactcacaacctgtttggcactgctgagtcctctccggtttcctgaatctccctctctctaatgcaaaaagcctccatggcagatgttttagaacaatgatcacgtcaatgacgctgtaacccactactttctttttgcatcatagaattttttaagtgtttttgcagacttactctttaaggttaattacatgttttggattgagcctttgggaagactttacagtggtcctatcggataactgcgggccccaaggctggagatctgttaatagggtgggcagaaagggactgggagcgagactgggttcagaatctcaagtaatttggagtgtgcctagggattgggatgatttggctgggcattaatttgaaggtgaatatgcgtctagagattgcggggatttctttttcttggagggcaaccgtgggtgtggaggaatttggtgtgcagaaacagaaaggtctggttcgggcttcctctgggaaggcaaggccaagtggccaaggctgagaaggggcaggggcgaccgtgctggggcgggtccgcaccagctcctgggagcagagagcagagccgggcaaagagatggggttgtccaggctagggtgaggacgcggccggtgacagcgcgggtggggatcccccggggccggggcggggcggctgccgcgagccgggctgggggcggggcggggcggggagggacggggaggggcggggcggggctccgaggccgtctcgcaggctgcggcggccgcgggagaggcgtactcggcggcggcggagcgggcggcagagcagggcggcggcgactcggtgagcgcggcgcggctgggggcgcggcaggggcgcgggcgggggtctgcgggcgcggggctcggcctgcacggggcaccgcggggcaccgcgaggcggggcgggcgcctccctgccatccttctcctcccggacgcccctgcag

SEQ ID NO: 22936 - DNA, 2300 bp, Homo sapien
aagtcagaataggactggaaaagatggctcatgcctataatctcagcactttgggaggccaaagcaggaggattgcttaagaccaggagtttcagaccagcctgggcaacatggcaagacacctgtttctacaaaaatataataaaattagccaagcgtggtggtgtgtgtctgtagtaccagccacttgggaagctgaggcgggaggatcacttgagcccaggagtttgaggccacaataagctatgatcctgccactgcactccagcctgggcaacagagcgagacccctgtctctctcagaaaaacaaaaaaaaatcttacgtaatataattatcttacgtaacacaccttttctgtaatgattaataccctttgcttttggaataaaggtatgctatccatagaagtaaattactatcattattctttaagaataaacgagtataaatccattcttcaattccggtctcttttcattttctaataatgactttcaagttttcttccaatttttaaaaaatatccccatgccttaagttccacccttcttggctcatatattttacacacaaattttctaataaataatattaccaggagttcccaggactatgagcttagacctgttacactactggaatttcacacttttactgtcattctccgttttcaattcgtccacgtcacaaagcgagtgagaatattacatggagtattttacacctgaaaatctactgttggtattgtttgtttgtttgaatctgggaagaaataaggtggaagtaaggctagaaatttctataaagaacataatttgcaactgaaggaagaaaaatagctcttcagttgtttctggttaattgaggattctaccagatacacaggaaggaagaaacaagcccctacctacagcaccttcctcctcctcctctatacccccccaccccccaaaaaaaatccagggtgtgaaagttgtagagttggggacgtggctttaggtaacgggacaactggtaaagctgatggcattcttcactcaacatgggacagtgttccagtccctctaccacaggagcgcccggcagcgtaatctccgcttttttgtgatcaccagtgccatccgcaaatgcctgaaggaggaacagcgggctccctcacttctgagggaccctgccacattcctcccttcaagtacattctcccatcctaaagaggggatttgccttctgtaatttaaacgataatattccttaggagtcttagaattggctttcttactgtgacttcgtatatacaactcgactaaaaggcatgccaaaaaaattaaacagcaacaaaatattagaagctgaaaaagataaagctacataatagctggatattaaacattacaatatcgcatttaggacgcaaacagcgctgcagtgcaaatggaactttaaaaaatctgcccgcccacgtagacaaagctactttacaaaagcgcacgcgtcgatatcaatcgtaccctacaacagagcatggtttaaagtatcagtgtacattttttcctaaacacaagttgcaagtaagttatctaaaatcgaacaccgccacgaaagagacctccagggtgcaataaataggtatatctcgttgaagtggagaaatggcatcatgaccctttgggttgatgcagattacagtgcggaggctgttctcgagagagaaactagaactcagcgtaaaatgctgtagtaggggaaatcgaccaaagacgagattttgaaagccttttgaaagtcgtttttctagctaaaaagaaaaagtgacttattcaggactgactccccctgccagtcccaggaaacaggagcagcccggcgcgcccgggagccccgcagcgcagtgcgcactgcggctccagagcgaagggctggcgcccgccagattctaaacgtgctcggctgccgcagcccgccggggccgcgcgccgtggtccgcgcgactccgcgctccgggtttccgcggtcaccagcactggcggaagagccctgccgagaggggacagccgcgggcggtgtcccgggagtcccgagagcgcgctccccctttgcgcaaccttcccgaggcgtcctgcccgggaagccagttcctgggttctgggctggctaggttggcagcgaatgaggcttaggcatcactgcctgaggccctcacttagcatgtcgacagccacagacttgtctggcggagtttctcctggtgcccacttaagtagtctcaagtttgttcaaagctggactcctcgacttgga

SEQ ID NO: 22937 - DNA, 2300 bp, Homo sapien
aaacagcgctgcagtgcaaatggaactttaaaaaatctgcccgcccacgtagacaaagctactttacaaaagcgcacgcgtcgatatcaatcgtaccctacaacagagcatggtttaaagtatcagtgtacattttttcctaaacacaagttgcaagtaagttatctaaaatcgaacaccgccacgaaagagacctccagggtgcaataaataggtatatctcgttgaagtggagaaatggcatcatgaccctttgggttgatgcagattacagtgcggaggctgttctcgagagagaaactagaactcagcgtaaaatgctgtagtaggggaaatcgaccaaagacgagattttgaaagccttttgaaagtcgtttttctagctaaaaagaaaaagtgacttattcaggactgactccccctgccagtcccaggaaacaggagcagcccggcgcgcccgggagccccgcagcgcagtgcgcactgcggctccagagcgaagggctggcgcccgccagattctaaacgtgctcggctgccgcagcccgccggggccgcgcgccgtggtccgcgcgactccgcgctccgggtttccgcggtcaccagcactggcggaagagccctgccgagaggggacagccgcgggcggtgtcccgggagtcccgagagcgcgctccccctttgcgcaaccttcccgaggcgtcctgcccgggaagccagttcctgggttctgggctggctaggttggcagcgaatgaggcttaggcatcactgcctgaggccctcacttagcatgtcgacagccacagacttgtctggcggagtttctcctggtgcccacttaagtagtctcaagtttgttcaaagctggactcctcgacttggaaccaggagcagctggagatttgtcaatttagagctcatttgccacgggagacgctcttggtgtccccagcaccgaagggtaggtcaactctacagttttcctgaacatgataaggtgtgtgaagacgctgtgcaaattgtacagcgctctgcttaaggagaacctcgatcttcatctcgcccccagaacttccctcccttgaaaataaaactcccacctgaatgtaaagcccaggagggggttttgttaaccgcacttattcccaaagcataaaggaatgtctaatagttttgcaaatgcttccatgaataattgttgaatgagttcatgtacaacatacacacttgaggaaaactggtctggttgggaacatctgggaattctccttgcttttctggtagggaagcgaccgaccaaacatttattgggcactactccttgccaagccttctaggctttggcaggccaatggggagccggggggagggctggcaaacctgttagttgttcaaggacacaaagggggctttataagatggcctaatcagagcccttaaacgtgggttcgcaaaatggttcattcccgccctttcacccaccccctcccaccccagacgcaaagcatatgttaaaaacacttaagtgcatacagaaggcgcttggctcagggtacacagggcaagaagcctcggatcccagctccctttaacacacattttttcaacgccgttctggaccgagactgtccggggcactgggtgctgcaggacccggctcccagtactcctagcagaagaccctctgatgaaatggcccatgacaaaatgaccaccataaccgttccttcagtaagccaggtagacgtgctcacagcttgctgggaagtcttctttcggagatttctgcagttttctccttcaccttacagcctaacaaagggtgggccgggggtcggctaggacagaaagcagcgggaaaagcggctccacgtgttccatctctggcctcggccttcagcccccaggttcggtaaccactgggcgtggcgagtccgggtaacccgcagtccctcgcgcccgtccaggtgcgggttgctccggtagccggactcccttttcctatatactttccttttgagcttttgctaaaatctggagacgtggaatccacccgcggaaactccgagcccctccgactgagcatgcgccatcgccaggcggcttttggtcacaggctcccgagttctcctagctggggctgcggagctggggggagggaagagaggaaaggggagggggtgcctggagaggcggaggctcgcgcgcctgcgcatccagctccagggaccctaggttttctatgggattcccaatctgcagcagagatttacccgagcgtgttgcggcagcggctg

SEQ ID NO: 22938 - DNA, 2300 bp, Homo sapien
ggaaacctttcttccagtgtgaccccttccctttttgaaggtgtgtatttgctagtattctctaagatctgccacctctaggccgtaccagggcatttgttcacacactgtctctgcctcctctagggcttggaccttgttccttccctgtcaggatagcactttcttattccgtaccaccctttcattctgggagtgtaatttgcctggaaatttatgaaattgactgctactaggcccccttagtactctctgcccctccctgttcttcccagttaaatctgtttgagattctactgttatgttttttacgtgtggtgtattttttacgtaatattttgtttatataataggcagtaccaagaagcaagagagacctatcttgatctggatagtaaagtgaggactttaaaaaagtttattaaattactgggagaaatcatggagcacagattcaagacatatcaacaatttagaaggtaagtacattgaaaaatgttactatatattatacatttttgtgtttctctgttttcatattatttatataattctgttatagcagagactattaatgcttgctttgttattcagttcttaggattctctaatttaatcagacaattccgaatctgaagggctctttatggtgagcttatccaacttttccactctgttagatattctttatgcttaataggtcttttatgcttaaataggtcctttgaaagggaactcattggttctaaaatagcttattttacccttgactattgcatgtttttaatggatacaagcatttggtaggaactataaaggtaatacctcagttgatttaccataatctactagaatgacgtagctccatgaatgtagaaactctgttttgtttactgctgtatctctagtttctataatcatacctgatacataccaatatacattggttggataaatgaatacagaattagggaaactggatattaacatatccagagatgtacagactcacagagatagattgactccaactgatcacaagtgacagaaataaacagaggataattgatagggagggacggtcctttaatatacatgaatccgagacagccctagtccttccatttgcctctgtttttctccaggcaaattccctcagtaatacactttttaaaactgtctttacaccaaaaattctaccatcttaagcttgtacaaattaaaaaaaaaaaaggtacctagctcttatattccttagtgaaactacaggttagtttttgaaattcctgtttcagttttacaggcatattagtagggcttgaattaaataggacccatttttacccttttgaggctacttttagccttgttagatgagattagagcagccgttggttgtgggctaattttttcctacctctgaggcagtgctattttgagtactctaccgataccttgtaaatcacaaggttttcactctggccaataagaacatgaactattcctggtcgtgtgtgagctgtcggaattacttctatttcctttggatatttcttttcccagcctcaaatggtgtcctcacacctatgcactgaccagtactcagctcaagactggagcagaaccctttatagatcctctggagtttattttgcctccccagattcccagctccagctcctgaaacaagagcaacagctccactttgatttctactcctttgtcctctgtcggtgaagagcagtgtggggcattggtggggttcaatttgtttcctagaactagcaggcagttctagtcaaatgacctgatagtcactatctgatagccagagtgtgaaaaccctcagagtttggaagaagttaatttcaacccccttggatgtccttgagggattcagtggaggaagtgactgcagatatggtggaagtggcaagagaactagaattagatgtggagcctgaagatagccagagtctgaaaatgcttgttttatatattttgtctcgttttttagtttcaggcagaagaataaacccaatctctattactacataaatctgttccagatgcagtaagatttatttttatatcattactcagaaatttgtatttaaaaggtttttttaaagtactgatcttacagtttacaggcatacctcattttactgcagttcactttactgcactttacaaatatttcattttttacaaattgaaggtttatggcaagcctgcttcaaccaagtctgtcagcaccatttatccaacagcatatgatccctttatgtctctgtgtc

SEQ ID NO: 22939 - DNA, 2300 bp, Homo sapien
ttattattggtatatgaactatagataattattttttaaaattctctctattgaagaaaaaatatacttcaataatgttattttcttaaaggtcagacttaatgaggcagaacaaaagtacaaggatattcaagacaaactagaaaagattagtgaagagacaaatgcacgagcaccagaatgtatggcattgaaagcagatgttgttgctaagaaaagggcctataatgaagctgaggtgagataaattttctaaactggaattttaaaagccacacagcaaatataaaggctgttcttctatccttttttattatattttattttttttgaaatagtcttgctctgtcacccaggctggagtgctatggcgccatcacggctcactgtagcctcttatctcctgggcacacgctatcctcccacctcggccacctgagtagctgggactacagacatctgtcaccacagctggctaaatttttttgtatttcttgtagagacaggatttcaccacaatatccaggctggtcttgaactcttggcctcaagtgatttacctgcctcagcctcccaaagtgctgggattacatgtgtgaacctctgcacccagcctcttctatttttttaattattatttttctgagacagagtctcaccctgtcacccaggctggagtgcagtggcgcaatctcagctcactgcaacctctgcctcctgggtttaagcgattttcctgcctcagtctcctgagtacctgggactataggggcgtgccaccacgcccagctaatttttcgtatttttagtagagacggggtttcaccatgttagccagggtggtctagatctcctgacctcgtgatccgcccaccttggcctcccaaagtgctgggattacaggcgtgagccacagcacctggccttctattttttaaagtagagattttgtacctgagttgaaattagtgatgctttgagattttaaaaaatgtaatggtttcaaatggccattttgtgcttcatttaaaaaatatattcctgtatatattcagcctctgaagatttgacaaaagtggacgtgaatgggatatttgtgttttcatttttgtaaagtgtgtctaatttttttggttaggttttatataaccgatccttaaacgaatataaagcattaaagaaagatgatgagcagctttgtaaacgaattgaagagctgaaaaaaaggtagggtagttactttgaaattttcatggctatcccattttgtaataaagtaaggtagatgcattggagtattatattttatgtattgttgttaatggaattttattacatcggtttgtgttctttaaatgttaggctgttcattgaactaacatttttcactttgggttatttactgttagtactgaccaatctttggaacctgaacggttggaaagacaaaaaaaaatatcttggttaaaagagagagtaaaggcctttcaaaatcaagaaaattcagtcaatcaagagatcgaacagtttcagcaagccatagaaaaggacaaagaagaacatggcaaaattaagtaagttgcaacatccttagaatgatttttttcaattacttttacatcatatagttttgttcttgtatgaagagagcaaatatggttgtttcttctacataataagggatctttttaaaaagattttatttttatgttaaatactttgcagagcagggctaactcattggcagtgcacctacagccagctggatcttttaaaatcacttttcaagacttttcttatagttgtagagttgaacaatttctgggattcctagcccatcattgttgcattactttttttatgccaagttttgaggactccagactgtttttctctggtaacacaattattttcaaataaataattctgcttttggtttttagggtagctagctgggtcgttcactgggatgtaggtgttatgggcaaaggttaaatgtttctgtaaaactatcacatatatgttctgtttttctgcttttgttttttaggagagaagaattagatgtgaagcatgcactgagctacaatcagaggcaactgaaagaattgaaagatagtaaaactgatcgactcaaaagatttggccctaatgttccagctcttcttgaagccatagatgatgcttatagacaaggacattttacctataaacctgtaggccctttaggtatttgtcttaatttagcgaggttataataaactttagaaataagtttttattttcagaacgattgaatg

SEQ ID NO: 22940 - DNA, 2300 bp, Homo sapien
ttgatttttctgtctaccctgtgttccaagtgcttccagagtaatctaacatgcagacttaggagataagagacagacttaggtcgtcttcctgttgtcaagaagattaagttgtaagctgttcattgtagaatgcgaggcccttctaccccttcatctcgtctcctgccattatcctttcaatttaagctctagcaatatttaatttctaaagtattaatacctttgtacatgctctttcatctgcctctaacaccttcctcaacttatttcctggtacacttagattaatttttaaaatctcagctcaaaatactacttgctctttgaaggcattcctgactttttctggccaacctctggtttgtttctctgtgctaccacaattaaaaataaatgtaccctactttagtattattgtatacagaatgtatcatcagtttgtgttctgtttttctgctaaattatatctctctcttttgtgttatctgaggacatttgttatcatgtctttgtatcccaagaggataacacatttgttggataactaactgtgggttaagatcaaattatattatagtattttatataatgttatgttatgtttatttgcctgatgtcttgagtgaagttaaatttattattggtatatgaactatagataattattttttaaaattctctctattgaagaaaaaatatacttcaataatgttattttcttaaaggtcagacttaatgaggcagaacaaaagtacaaggatattcaagacaaactagaaaagattagtgaagagacaaatgcacgagcaccagaatgtatggcattgaaagcagatgttgttgctaagaaaagggcctataatgaagctgaggtgagataaattttctaaactggaattttaaaagccacacagcaaatataaaggctgttcttctatccttttttattatattttattttttttgaaatagtcttgctctgtcacccaggctggagtgctatggcgccatcacggctcactgtagcctcttatctcctgggcacacgctatcctcccacctcggccacctgagtagctgggactacagacatctgtcaccacagctggctaaatttttttgtatttcttgtagagacaggatttcaccacaatatccaggctggtcttgaactcttggcctcaagtgatttacctgcctcagcctcccaaagtgctgggattacatgtgtgaacctctgcacccagcctcttctatttttttaattattatttttctgagacagagtctcaccctgtcacccaggctggagtgcagtggcgcaatctcagctcactgcaacctctgcctcctgggtttaagcgattttcctgcctcagtctcctgagtacctgggactataggggcgtgccaccacgcccagctaatttttcgtatttttagtagagacggggtttcaccatgttagccagggtggtctagatctcctgacctcgtgatccgcccaccttggcctcccaaagtgctgggattacaggcgtgagccacagcacctggccttctattttttaaagtagagattttgtacctgagttgaaattagtgatgctttgagattttaaaaaatgtaatggtttcaaatggccattttgtgcttcatttaaaaaatatattcctgtatatattcagcctctgaagatttgacaaaagtggacgtgaatgggatatttgtgttttcatttttgtaaagtgtgtctaatttttttggttaggttttatataaccgatccttaaacgaatataaagcattaaagaaagatgatgagcagctttgtaaacgaattgaagagctgaaaaaaaggtagggtagttactttgaaattttcatggctatcccattttgtaataaagtaaggtagatgcattggagtattatattttatgtattgttgttaatggaattttattacatcggtttgtgttctttaaatgttaggctgttcattgaactaacatttttcactttgggttatttactgttagtactgaccaatctttggaacctgaacggttggaaagacaaaaaaaaatatcttggttaaaagagagagtaaaggcctttcaaaatcaagaaaattcagtcaatcaagagatcgaacagtttcagcaagccatagaaaaggacaaagaagaacatggcaaaattaagtaagttgcaacatccttagaatgatttttttcaattacttttacatcatatagttttgttcttgtatgaagagagcaaatatggttgt

SEQ ID NO: 22941 - DNA, 2300 bp, Homo sapien
gggatctacaaggccaaaactgttttaatgataatagtaagatgttatttgcccttttcactctcattcacttatgagtgtacagtggagttttccagaggttacatggcttgtgagatgtcattgctgtgactgatggaatatatactgtgtgtcccttgttttaaaagttgctcagttttggccagccgtgatgactcacacctataatcccagcactttgggaggccgaggtgggcagatcacttgaggtcagaagttcgagatcagcctggccaacatggcaaaaccccatgtctactaaaaataaaaaattagctgggcatggtggcacgcaccttaatcccagctacgtgggaggctgaggcaagagaatcgcttgaacccaggaggtggaggttgcagtgagctgagattgtgccactgcactctagcctgggagacagagcaagactccatctcaaaaaaaaaaaaaaaagaaagaaaaagaaaaaaagttgtttagttttaatttctaatataataaatattgatagacataagcaaaagctctttgaagtcctttgtaaaagagattacaacctttgagaactgcttccctccatattggactgcggacaaagagactcagatctggaacttggagctatttccttagccacagcaactgctaggctagggtggcagtttcagtttcccatatggtctccagtgacactgcagtgggagtggtcttctcacctctgggcaatgggaaaagtcccgactttccactaggcctcctttgatactagccaactaggagaaggagtaagtaacaccgtattacttcctgtatgggtggaaatctaggctctctaggtggtctccgctgacaccattatcatggctccctacttgtctacatagcctttgactctaccccagttagggtgttgagatgccaccttgtagcctcactagggtggaagtccagactacccacttggattttgcttgcatgggtaggggagccaggtatatacatggtatggagagggttgctgtggtctaatatttgggggatttcagtacattgagcctagaactgttcctcatattcttatatcttagaaatttttgattatgttagagatttttgtctccttttagcaaacaattaaattagatacctatcattttaggtcttaaatgtactctaaaggaaaaaatgaaagcagcagtcaaagaggtcataaagtttaattttaatcataaactatcagctttgactggagatccagtattcatatgtttagcaaaatcatgtgtaatttaaaagatgttaattttctaggtttaaattttgtagtatattggcaaaaaatagacaatcaacctggactttttttttagggaagagttaaaggaaaccactggtgctaagcaatgtgcttcaaaatatgattctttgggaaaacaacttaaaaattaaaagttttatctgattactttataacttgtgaaaattgtgcattgctttggaataatttcaggagtcaccatgccatctctatgaatagatttagaaaactagaaaccacaatttcacaaaatcttttaccttttgtgagtttagtagtcacaacatttaggtaggcttatactgataaaatcttggctatgaatacctctgaagtaaaatcaactagtatagaatatgcagatgttaaagcaatacaaacttactatcttacgcttctgtggattagaagtccaacacagatctcactgggctaaaatccagatgtcagtagggctatgttctgttttagggcctctaggggaaaatctatttccttgccttttccagcattttttgactcatgtccctcttccttagtgcaagatgcaagactaatttactttaatttttaaggtaaaaatggatggacatagtacctaaagtttaattagccttgttagatttattttgttgagtttaatatatatggaacttgatttacctcattgttactataaatatttgttcagacctgatggccaaaagaaaggaagaaaatttttcctctcctaaaaatgccaaaaggccaagacaagaagaattggaggattttgataaagatggtgacgaagacgaatgtaaaggtactactttggtaagcgaaaaattacaaaattatgctttttgatatgtttttcttgtaacattcatcatatcacattctgtgataacttaaaatcaagaaaaagtaatatgattttttaaaagttgaggtaaaatctgttctgggtaattt

SEQ ID NO: 22942 - DNA, 2300 bp, Homo sapien
atgaagctgaatattatgtagctgtaactgtaatggtaatattgtcttaaaaggcatttgtttaggttaaatatccttctttggatggtaagtaatgtaccctttaaatggtattcgacttcataatatataaggttcttcattgacttcaggataggataaagtcccagttattttccatggtttacataacaattcaactctaatgtgcatgtgaatcaccttaagtcttgttaaagtgaagattctgattcacttgctctagggtggggcctgagattctggatatctgataggtggatatcttcccaggagatgtagatcttgcttgccagtccttggaccacactttaaatatgaggagtctacaagtccttttgtggtctgtttcttccctaatgctctaactttattgcttcctagctgtgccttataatttatgacactgtatcatggacttgcttttagtatccccctgtagctgcactttgcaaaatgtggtgcaggaatccatgagactcttgcaagggatctacaaggccaaaactgttttaatgataatagtaagatgttatttgcccttttcactctcattcacttatgagtgtacagtggagttttccagaggttacatggcttgtgagatgtcattgctgtgactgatggaatatatactgtgtgtcccttgttttaaaagttgctcagttttggccagccgtgatgactcacacctataatcccagcactttgggaggccgaggtgggcagatcacttgaggtcagaagttcgagatcagcctggccaacatggcaaaaccccatgtctactaaaaataaaaaattagctgggcatggtggcacgcaccttaatcccagctacgtgggaggctgaggcaagagaatcgcttgaacccaggaggtggaggttgcagtgagctgagattgtgccactgcactctagcctgggagacagagcaagactccatctcaaaaaaaaaaaaaaaagaaagaaaaagaaaaaaagttgtttagttttaatttctaatataataaatattgatagacataagcaaaagctctttgaagtcctttgtaaaagagattacaacctttgagaactgcttccctccatattggactgcggacaaagagactcagatctggaacttggagctatttccttagccacagcaactgctaggctagggtggcagtttcagtttcccatatggtctccagtgacactgcagtgggagtggtcttctcacctctgggcaatgggaaaagtcccgactttccactaggcctcctttgatactagccaactaggagaaggagtaagtaacaccgtattacttcctgtatgggtggaaatctaggctctctaggtggtctccgctgacaccattatcatggctccctacttgtctacatagcctttgactctaccccagttagggtgttgagatgccaccttgtagcctcactagggtggaagtccagactacccacttggattttgcttgcatgggtaggggagccaggtatatacatggtatggagagggttgctgtggtctaatatttgggggatttcagtacattgagcctagaactgttcctcatattcttatatcttagaaatttttgattatgttagagatttttgtctccttttagcaaacaattaaattagatacctatcattttaggtcttaaatgtactctaaaggaaaaaatgaaagcagcagtcaaagaggtcataaagtttaattttaatcataaactatcagctttgactggagatccagtattcatatgtttagcaaaatcatgtgtaatttaaaagatgttaattttctaggtttaaattttgtagtatattggcaaaaaatagacaatcaacctggactttttttttagggaagagttaaaggaaaccactggtgctaagcaatgtgcttcaaaatatgattctttgggaaaacaacttaaaaattaaaagttttatctgattactttataacttgtgaaaattgtgcattgctttggaataatttcaggagtcaccatgccatctctatgaatagatttagaaaactagaaaccacaatttcacaaaatcttttaccttttgtgagtttagtagtcacaacatttaggtaggcttatactgataaaatcttggctatgaatacctctgaagtaaaatcaactagtatagaatatgcagatgttaaagcaatacaaacttactatcttacgcttctgtggattagaagtccaacacagatctcactg

SEQ ID NO: 22943 - DNA, 2300 bp, Homo sapien
tgggctgggctcagtagctcacgccttgtcatcccagcactttgggaggccgagatggatggatcacttgaggtaaggcgctcaagaccagccagcccaacgtggtgaaaccccatctctactaaaaatacaaaattagccaagtgtggtggtgcatgcctgtaatcccagctactccggaggctgaggcaggagaatcgcttgaacccgggaggcaggattgcaccactgcactccaacctcggcgacaagagtaaaactctgtctcaaacaaaaaaaaaaaaaaaagaggaaaaaaaagaaagaaagaaaacactgagtttcaagtgctcctaaggtattttgagatagaggccagtcagtagtaaaggatactctgcaatggagaaagatttgtgggtggagctaaggaagctactggaagtagtttgaatttggtgaccaagaaaagcatgctcagagagaaaagatgttaacttgtttaaatagtgaatcaaaaatgctaacattaacctaagcaactacgcttgaccctcagtcagctggacttatcgttgtgtataaagaactatggcatttaattgtgtcttaaatataatgcaagctatcacggtaaaattttgagttacttactaattcctaaaagtaagccaagtacagctttaattatttttcctaactttggtctaaaaatgacagtcaagatttaggtaggttttacataaaattctacagattcagtaaaatacactcagtaaaataaacctttggggaataaaacttgtttttcactgtaatacctttaacatgacttgtgtactttttgccaggctcaatactaactggtttatacggattgcagacagatgtcgatatataactacataactttctcttcctctctgtgtccacatatttaagaatcctgtcagctaggtacagtcaatccctaagaattggttccaaaatgacagcccctctctctcactcagataccaaaatccacagatgctcaagtcccttatatgaaatggtgtcatatttgcatataacctccccacatacttaaaagttatctctagattacttatataacctaacacaatgcaaatgctatgtgaatagttgttatactgtactgtttagggaataatgacaagaacaaaaaaaagtctgtgcaaccatccactttttttcctctgaaatattttcagtcccttgattgagtccacggatacagaggatgcactgataactgtattatttcttccaacttgcataagaagaactgaaacttaaagaggtggtaccaacctgctcagagtcacacaattctggctttttgtgatataaatacacgcttttaggcaatatactagtggcctccaaacgttttgtacttgcacccattaagcaaaagaaatttgaaatacatgttccaacataaaattaataccctatgtttcacgtagaaatcaaatgaaataaatctaaatagaagttctaatatgttccctctctacccacacacccatggaacaaactgcatgccactgtatatactattgtacatgttaaaagatcacactgcaaccatataaaagtcaggagatttgggtttttcttttttcctttgaatatatattactgagaagtttgcctttaaaacactggcttttaatctactactcgtgacatatgcagagtaataagcgctcacaaaacttctgtcttgagggctcaaacaccaaatgattgctctaagaattttcacagtattacctcaaaccctattggttctacaacctttctctaccctagagtcctgttttccgcaattcccaattgggattcttctccggttcatttctgtaagaaatgagggcagagaaatgccatcagtaaacctttgaacacatgttaatttttctaggtaatacaatttgcattttcgtaaaactgggctttaatgacaaatccgatttcagtgatctttgcatacaccctttaaacacaccagttgccgcctgcgagatatcatcagactcatgctaagagccactccctaccccagctttccccagacctctccccgctttacagttattcgccacagcccgggagagtctggggacggccgcctgggaggggacggccgcctgggaggggacggcccggagcagacgccaggtttcccgcggctcaggagaccggtgccgcctcggagagcgcgcgaaggtgccgccggccgcccgacccgcccgaggaacggacatctcccgcccgggcccgcaaggacg

SEQ ID NO: 22944 - DNA, 2300 bp, Homo sapien
gcccataaatcaatttaagttcctaaaacttccttaaaagctaataagcttttattggttaattataaaactgaatgaggtgagaaaaacacagaaccttgttaatttcactaatgaatcaaatttaaagaacataaagaggtcaggggcttaactgatgcaaaaatacacactttattaaagcaagttttgcaatttagttcagctttaagaaaaacattagaaaatttacttcggaaaagcagaaaatgcttaaatttcccaatttccatttagatgagtatatattcatataaagactggtaaatggtgaaaactatttcaatgcaagattatattttaagggatttaccacataatctcagtaactaatgctgttctttaaaattattttttcaattttattttcatatgaatttagcctaaacgttgaggcatacttcacgtttatcaataaatacttattaaatgtctactatttaacaggaaagctttataggtgctggagatacaataatggaagatcaagccctgcatttaaagaccttagtagggtaagtgagactgcagataaaaagggcttaagaggtaagaaagcaagctatagttgtatttaggaaaaaaggtcccccacttaggaatcaaggaacggttcctgaagcaagtgacatgtaagtagggacctcccaaccgtgtttcccattggttacaacaaggccagatgttttggtctattttgactatgtcatatttttcgttgatccatggcaagggccacagtaggaatataatatatatgtgattacttttagaaataaaaagtgactttgatgtaaagaattccattaccggaggccagaatttcaacatcaatttatttggaggtggagtgaggtggcagtcaatgcattattttccccacacagaagagaagattttggagtatgaaaagtaggttacttgttaggtcagcatattcatgggaagggttgtgtaaagactgaagcgggagtgtggggttgagaagggcgctgaaacctaagccaaggaagttaagacttcattacttctgacgtttatttagggggtttacactctaggttaccgtgggggaaagactgattgtaaataactacaataccttaaagtaattactataacagaactatatccgaaatacaaggttaacacggaaaagggaacacccaactgtgcctatggggaccagggagggctctcccgggatggctttgagcgaggcgtgggaattatccccatcgcatgcccgggggaagcacagcgggacccagcagcttcggccaagcgcaagcggccggagaacgcgcagctttcccgaggcggggtgacgcagggccctcgcgagtggaaaacaggggccaagtcgcggcctggcggctcggttcggacttcctactttattcaaagggagtcattgaaggcgttttcggaggagcagcgaacaaagagctcgtccgtaagccagatggtcaaaggaatcagtgggaggacccgggcggcgccgtctctccacgtcccgcgggacttacccggacaacccttcctccttggctctggaagaagccccttcgtcatttaccagtttggcctgaatcctaactactgtgcctccaaatttctgaattttctcaaaaggaaaaaaaaaaaggaaagtcctctttctttacccaagcaaagactagctccccgggctcaaccgccaggcccaggagcaccaggaagcgtttcgaatccagcgccgggcccgcgcggccccgcctcttccgggaagtgactgacccctttcccccaatggggcccgctcggctttcccttgccggctcccagccggcctagcggacgcatgcgtagaccagctgccgggggcgctcaattatctttcccttttacttaggcaaatcactcacctcccccgagtccggtcactgcggagccgcccgtgcctaccagcttcccccacccgctaaggggcacttccggcctctcagactccggcggcgcgaaaccccgcaactgcgcaggcgcgggcggagcccgaagggagggagggcggggcgcaggcgcggttagtaccgcggtgggcgccggggctcccgggaatctaccttctcctgcggccggcacgcggttcccagggggccagcggcggtcagccgaggtcgagacgcccgcagggtggccttagcggccggtcgtaccacggcagccccgccgatcaggttcctttgggagacttcgacttgttggcggtagggtgaagg

SEQ ID NO: 22945 - DNA, 2300 bp, Homo sapien
gccaaaaacgaaattaacttttaattagtagaaatctttatagtactatacatttttcttaaaatcttttatgaagcaggtaatgttttgctctttgcacaagagattaagaaatgattattttacatgatttagctttttgatacagttttcacccagaagattaatgttttatttaattttatatattactctttactcttctttctgatatagagaaatgttcatgattctgttttgtactctggcacacagagtcagtctgctcacatactgctgcctaacttaagattcttcaaaaaaaaaagactgattggatatatatatacatacatatatatatatacaattttttttaatagagataccgatatatagatacacacacacatatactctctctcctgtcttgcagttctgctgtccttgggccttggggccacatttaaagcttgtgactgagggttttcccacactaggccagcaactttatcagccaccaaagggaaaataattaggtaggtgaaagggaatagatcagcctgatatttgagaacataccgtttttgtgacctcattttttttcctttttttaaaaaccactttctattaaaggtttaatcggtggaatgaaacatcttgtaactctagtccacaactgctagtcactaaaaaactggctcattgttccgtatgttcccatccaggtaaggagacatagggaatggttattagtatctcatacccatgttttaattcttgttcacatagtactttttacatgccaatattaataatactttgaagggttttacattgtcttctccactagattaggaattccttgcagtcagttttgttatatacacatagtagtcactcagtaaatgtttattgaaaccaataatgtgatgtagatgataaatataagtacagtttcaaactatgataccaaattacttagatcttaaaactatgttttcaatatagaaatccattttaagaaaaaaatatatactaataagtcttagggaaaatggaactgaaaccatttgttaatatattggtgatttatatttatctacttaaatgattcttcattgtcctgtaatgcattttgtgtgtgaagacagtgacttaaaactaatttctaatacatgttcactattcttgaaaatagcttggatcttcttcattagtcttggtttaaaaaaaaaaaagacactacggaacacgtactggatcagaaaggcctttcattcccaaaagagattaggatatcatgttaactcatcttttaaaagaaattctgctatatctagttgtcttaatatatttttattaacattattaaattatagataaaatcatggaagaaaatcaatgtttttataaataagatgctattgtatagttttttgataacttataaatgacaattttaggtcatatcaagtatatgtgctcttacatattctcaagacaatgttgaaagtaatcacactttgcttttaaagggaattaaatttccacacccgtgccacagtcatcatttgttcatgttccaaggatagtttaaaaataactgtaactgagagctagacactagcagaggtaattaactgctatattcttttaatacactcgttaaagaaactattctattagagctattctattaagtaaataatcttttttgctagtaattacatcctactttttatgcatgtagcttccacctaaaccagaaagttttctgttgttgattattgtaaatgtataatttcaagtgtctaattaacactttcagatagaagaataattttttctaaagtgtcatgtgatagtaatagctcaagatctacttgagcccaagaattactatggtgtctattactctattcatcctaaatgtattgaaacctttctatatgctaggtagtgtgctaggcaatattaattttggaaaatttagatactggcaaaaagaatgtatgtagaaagtaattataaaaggcaaaaaatattatactttttttgggtctccataaaggttcacctaaggatcatgaacgtaatggatgcagattatgtaaaagtgataaatattgtgagccacatgactatgaatactgctgtccttgtgagtggcaccgtacagaacatgataggcaactcagtgaagtagagaacaatattaagaagtaagtttttttaaaaactcatgatttttcctggcatgacctatacacatacctttggttgaattatttccatataatctttccccatatctagat

SEQ ID NO: 22946 - DNA, 2300 bp, Homo sapien
tcaagaaaaagcatggtgggtctggggagttgcaggtgtttcatgtgctcagactaactggagtgatattcaggcagctgggtagaaagtggcaagtgagaggcacacaccaaataaacgctgctcattatgactatacccctcactcccaaccttcctgccagagatgagcacatcttcattttcacctgcagacctgttccaatttaagaagctaatgagcacttccctttccttcaggactaaggcaagtactaatctagctgatttctgtcatttgaactttagtgagaataaaaagtcggggacaggtttggctctggggagggaagggaagacatggatgtgtgataggtgggtaagagagggagacctccaaacgaggcctggaagacagactgaaatgcatcccacattagtggcatgtgtctccatccactccaggagtcctctgaaaccacagaggagtgagcattattgtcaacgatgattaaatgattgacccctcacagattaaatgcatggtttatctagatgtttctctataggcacagttaattaagagggaacgggatgtcatatcgggaggcataaagactgggcaggaagtgggtgtgtggggaaaaggaggcagttagttcacagcatgcccccggtaatggagactggggttggggaaggggctacataccgtgtgtgtgaatttaccactttgcctagctcaaccttggtcaacattcaagagtaaacttttggggagcagacctgcctcaggggtcatccgatgtggtcctttttattatttcattggcttcacatgattaccctgggagagaggaaatttccttacagatgacaaaatcagggctgaaagacgaagtggctccctgcagggctcagcagggtaagaagtcctgtctgtctctgtctcagatctgtggcccttctctgtgcccactcctacatgcccaccgtggaggcccaccccttctgtcctcagctcctgcagatgcacaggggcccttactggctcccactgtgtgtgccttcccgactgctcacatgttccgcccagaccccaggagaaagacctcactgccaactcttctgcactgcaggtgccttctgcagtgcttagagattctgaacatatttccttctcaagtaaaccatgctggactttttggataaacttagtgattttaaaatgattaaataggtaactgctgggagagatctggaagcattcttctaaggtgttgataaaatgtaaatatatttttagaacaatcttagagcttatgctaaagatgaactatgtaagaaagttaccttcttcagccacttgtaaatagcagtgtggaccaatgctttggatcctcttccacaggagaggagacaagattggaggaaccaaagaaccatggaattagggacaaatggctcagaacagtgctctgcagacacatgcatctgtactttgcttcccagaagccaaatgaaactgttggagcttggtgggctccaggcctcagggggaagaccaccctaggctttatcttttcctctgcccttcctgcctgctgttagcctctcctctggaccaaaactccctttaaggggaaaacctcctctttgaagcccacaagatacggtgaggattactgcctttttctgatttccaacgtgggtttttcattaagcaaagaacaattagaaaacccacacataacatagggtattcagtaagttcaggaaagtgttttccaccatctctttgcccccattccctccccagcgcttggctcaaggtctggagcttgaatctgcatcgtcttcctaggtgcttgcctgaggtgagtggtcagcgggtgctggcttgggggcagctggcagggcgtatgctgcgggtaggaacccagggaacactgggcgccttagcttggagcagctggctccgaggaattgttccacgtctgcacaacttaaaaatctgcagtttgggggcgggagggggagcgcgggggtgggtcccgaagcgtcccatttctcctcctggctgttaactgagcgctctcgctcagtgcagcgaggccagcgatgccttctggaccacacgctgtcctcgccgaggtcctggtttgttcctcaacgtcggctgaaggcatcgtcccctgacttcctcttccattcgtccttccgaaaggggacccgactggttcctcttctacatatgaggcgcatctgcttggtgcaaatgtccaagcacctcttctgactcggtgagtggaggaataaga

SEQ ID NO: 22947 - DNA, 2300 bp, Homo sapien
tcacatgattaccctgggagagaggaaatttccttacagatgacaaaatcagggctgaaagacgaagtggctccctgcagggctcagcagggtaagaagtcctgtctgtctctgtctcagatctgtggcccttctctgtgcccactcctacatgcccaccgtggaggcccaccccttctgtcctcagctcctgcagatgcacaggggcccttactggctcccactgtgtgtgccttcccgactgctcacatgttccgcccagaccccaggagaaagacctcactgccaactcttctgcactgcaggtgccttctgcagtgcttagagattctgaacatatttccttctcaagtaaaccatgctggactttttggataaacttagtgattttaaaatgattaaataggtaactgctgggagagatctggaagcattcttctaaggtgttgataaaatgtaaatatatttttagaacaatcttagagcttatgctaaagatgaactatgtaagaaagttaccttcttcagccacttgtaaatagcagtgtggaccaatgctttggatcctcttccacaggagaggagacaagattggaggaaccaaagaaccatggaattagggacaaatggctcagaacagtgctctgcagacacatgcatctgtactttgcttcccagaagccaaatgaaactgttggagcttggtgggctccaggcctcagggggaagaccaccctaggctttatcttttcctctgcccttcctgcctgctgttagcctctcctctggaccaaaactccctttaaggggaaaacctcctctttgaagcccacaagatacggtgaggattactgcctttttctgatttccaacgtgggtttttcattaagcaaagaacaattagaaaacccacacataacatagggtattcagtaagttcaggaaagtgttttccaccatctctttgcccccattccctccccagcgcttggctcaaggtctggagcttgaatctgcatcgtcttcctaggtgcttgcctgaggtgagtggtcagcgggtgctggcttgggggcagctggcagggcgtatgctgcgggtaggaacccagggaacactgggcgccttagcttggagcagctggctccgaggaattgttccacgtctgcacaacttaaaaatctgcagtttgggggcgggagggggagcgcgggggtgggtcccgaagcgtcccatttctcctcctggctgttaactgagcgctctcgctcagtgcagcgaggccagcgatgccttctggaccacacgctgtcctcgccgaggtcctggtttgttcctcaacgtcggctgaaggcatcgtcccctgacttcctcttccattcgtccttccgaaaggggacccgactggttcctcttctacatatgaggcgcatctgcttggtgcaaatgtccaagcacctcttctgactcggtgagtggaggaataagacaaagcatcttgttctgcactgtgcctgagtcttcaggcagcgggaccgatggcaaacattggcaggaactggagctatatgtactctccttcgcactttgttttaaaacaagtttgggcctcgcgatttcctgaggaaatccaggcaaattagcaaagtgtcgcttgggccgcgactttagaaaggcggttgccccagccgccggggccgcgggggaggtcatctttttcccgcagggccacggcgcttccggcccaggagggcgcgcaggtgggaggcgcggggcgcgctcctggtcccacccggacagcgcctgccgctccggggtgactctgcacttgggcctgggcgggggcgcgcggccggcagggcagcatctaggtctatgggtctgtccgcctgtctggcggtcggagccccgcagtcctcagccgcccgcgccctcggcccggggcgcccggctgcgggcccgaagcgaggggctggcggagctgcgaccaatggggcggcggccgagcggcgggccccgccccgtcccgtccggccccgccccgcccgcagctcccgggagcctcgctctagcggggcgggaccgacggacagaccggccgacgcgggccaccccgctctcctcgccgccgcggcggcaggcgcggggccgcgccgcgaggcctgatccctgcagcgcgggcaggcggcgtcgcagagcggagctagctggatgcgtccggactcctgcaggtacctggctggcgtccccacctccctgcgcgctccggagacttctccgggcgaccctgcaactttaccgc

SEQ ID NO: 22948 - DNA, 2300 bp, Homo sapien
ccaaaatcaaagctgaactgaatgaaattgagatgcaaatattcatacaaaagatcaacaaaaccaaaagttggctctttaaaagattaaataagattgatagactgctgttaatctagactgctatctagaataataaatttaaaaagagagatgatcctaataaacacaataagaaacgacaatggcaacattacaaccaatcccacagaaatacaaaacaaaaacaaaaacaaaagaaacaaaaaacaaagttctcagagactattacaaacacctctatgcacacaaactagaaaatctggaagaaatgaataaattcctggaaacatacagcctcccaagattgagaaaattgaaatcctgagcagatcaataatgagtttcaaaattgaatcagtgataaaaagcctaccaatcaaaaaaagccctggaccagacagattcacagttgaattccaccagatgtaaagaagagctagtgccaatcgtactgaatttattccaaaaaaaatcaaggaggagggactccttcctaactcattccatgaagccagcatcattctgatactgaaatctggcagagacacaacaacaaaagaaaacatcaacaagtcaacaataacaaataatggggaaagactccctgttcaataaattatgctgggataactgactagccatatgcagaagattgaaactggactcctttctttcaccacatacaaaaattaacttaagatggattaaagacttaaatgtaaaacctaaaactaaaaactctagaagaaaacctaggaaataccattctggacatcagccttggcaaagaatttatgactaagtcctcaaaagcaactgcaacaaaaataaaaattgacacatgggacctaactaaactaaagaacttctgcacagcaaaagcaactttcagtagagtgaacagacaatctacagaatgagcaaaaatacaagctatgcatctgaaaaagatctaatactgagaatctataagtcacttaaacaaattaacaagaaaaaaacccatttaaggaactgggcaacagatatgaacagactattctcaaaagaagatatatgtgcagccagcaaatacatgaaaaaaagttcatcatcacaaatcattagtaaaatgaaatcaaaaccacaatgcaatactatttcataaaagtcagaatggctattatttaaaagtcaaaaaacaacagatattggtgaccctgcagagaaaatttaacagttctacactgctagtgggaatgtaaattaattcagccactgtggaaagcagtgtggacatttcttaaagaacttaaaacatagctgccatttgacccagcaatcccactactgggtatatactcaaaggaaaataagttgttatactgaaaagtcacatgcgtttacttgtttcttacagcactattcacaatagaaaagacagaatcaactattatgctcattaacagtggactagataaataaaaatgttcatcaatggtggactggtatacatatacaccatggaatactatgcagccataaaaagaatgaaatcatgcccttcgcagcaacagggatgcagctggaggccctcattttaagtgaactaatataggaacagaaaaccaaataccgcacattctcacttataagtaacagctaaatatcgaatacacatggacacaaagataagaacaatagacactggggactgcttgaggagggagggtgggaggcggatttgtgggttggaaggctacctatcaggtgctatgctcactgcctgggtaatgggatcatttgtacaccaagcctcagtgacacgcaatttacctatgtaacaaacctgcatatatatccccaaacgtaaaataaaaacagataagaaaaataatgtcattttgttaaaaaataagaaaaagaaaacagatcttctgattttaactatccttgatgaaaactttgccattgtcaaaagaaaagcataaacgaacattttctagatgaaatcattatggataactaccttgagagcctttccccacttgcaaaagggtagcagtaagggagagctgggggaggagccaagatggccgaataggaacagctccggtctacagctcccagcgtgagcaaagcagaagacgggtgatttctgcatttccatctgaggtaccgggttcatctcactagggagtgccagacagtgggcgcaggtcagtgagtgcgcgcactgtgcgcgagccgaagcagggcgaggcattgcctcacttggg

SEQ ID NO: 22949 - DNA, 2300 bp, Homo sapien
atgctaatggttaggcaagtacatatcatggaaacaaaactctaaaccaaggggcagcaaacttcatctaaaaggccagatttctttttataatctttcaaaaatgtaaagaccatttgtagccagtacataccatactattgtacttaaatgactggtacagtcttccaggcccaatgtactcacttacttgtttacctttaagacaccttgtttgagagtagttgtcgtatatgctgtgactcctattactctataaggctgctgttgtttttccatattatttctaatgttgtggacaactatttgcttgcagaccaggaagcctaaagggtatattttaaaagtctgtctccagctatagattctggtgtgaggaagagcagttatctgccttcaactccctccccctgacaaacttgctgggcctggccagagatctgagggactctgtatttgaatatttaattgattccaaatgtcctatggaacactgaagagagaacatgttactaatcacccttcaggagcttggcccccacagacaggttcagatgttccacaagccttctctgggcgatggggagttaaattagttacaggctaacatggagaaaggtagtttattcctagaggaaactaagacggaatgcttagttttatgcagacagtaaggaaaagcttttgctaagccagatgtgtaatcaaagtgcagtggaagcacttttaagcaactaccatctaagagatttgctgtaataactgattctccattctttttttctaaaaaaaaaaaaaaaaactaatgcacatagcatgtgaaactctaggctgataggctttcttctagcacacaacagcccttctgcttcctcttgttctattatatacttaagagtgagttgtgtaccatttgttattcacttagcaaatatttattgagtacctattatgtaaccgggcattattctagttctgggcatgcaggaggcaacaaagaaaacccaacccaatttgtgcatgcatatgtcaactgtgctggttaataatcacattacaaattattaatcatactgcaagtcaatgaaatgtgagtacaaagaatttatatgaaaagtagaaaagtagttttgtaaaaactaaatgaaagcaagtcactaaaaatttactgttgactaaagtttcaaagcaactatcaaatactaaaaataaatacaaaattataaaaggagtctgtagttagtgctttgcaagtaactttaaactttgagtccattttaagggcaaaaaagctagaaatccgactctactatttaagtgaatacaggaataccacagagatacttctgattttgttccagatcaccacaataaagcaaatattaaagtgagttacacaaacttttttgtttctccatgcgtgtaaaagttatgtttatactatactgttgtctattaggtgtataagaccattatgtctaaaaaacaatgtacataccttaatttaaaaatacgttttttgctcaaaaacctctaacaattatctgagccatcagtgagtcattatattttttctggtggagggtctcacctcgatggctgctgacttcagggtggtggttgctgaaggctgggttggctggagcaatgtctgaaaatacaacaacaatgcaggttgccaaattgataagactgttccttccatgaaatatttatctgtagcatgtggtggtatttacccacagtagaacttccttcaaaattgaagtcaatcctatcaaaccctattgctgccttctcaactaagtttatgtaatattccaaatcctttgctttcatttcagaaatgttcacaacctcttcaccaggagtagagtccatctccagaaacccactttctttgttcatccctaagaaacaattccttatgtctttaagttttatcatgagattgcagcagttcactcacatctttaggctccacttccaattatcttgtgatttttacctcatctgtgtttacttcctccaaagaaggtttgaaccctcaaagtcatccatgagggttggactcagattttttcaaatttctgttaatgttgatattttgaccttctcctttgaattatgaatgttcttaatggcatctagaatggttaatactttcgcagaagattgtcaatttattttgcccagatccatcggaggaataactgtggcagctttagccctaggaaatgttatttcttaaataataagactttaaagtcaaaattactccttaatccatgggctgcaga

SEQ ID NO: 22950 - DNA, 2300 bp, Homo sapien
gactaattagattcaaattcaaatcttacttcataagttataatgaggtctctttcctcccttccaaatagagttattaatttcatggcctttggacccatctggtacagattaatcatttcattaagttccatgcataaactacacagcagttacactgcaggtctaaggattcctccctcctcttttcctcctaccctctcctgctctctctacctccaccttcatctctactccacctgtacatatgtattccacccctggctctagatgagagaagaccacagctgaaacacatcttctgatgctccctaattttatgtaaaccagtccaaaatatatcagttgtgacatgtgacactgagtacctaccattttgtaggtgtcctcccatgcaaagaccacaagaggtacgcagacacaatcctatcctctaggaaacttgaaaccttaacaatctggtcaaggaagtcaaatgtgcaaactcaaacagccaatactagaaggctgtttgtcttcagtgccagtgagggtcacacatgaccctgagggtcacacatgaagggagcagagatctttataggctggaagtggtcaggaaagaaagacttgaggtagcctgtgattttgatggatgggcaagatgtggatgggtagaaaggacaataaagtggaaacatatgctgggggatcaatgagtttgagtagcagcttcaaattggggatagggtggtgtaggaccacctctcatgattcctgttcctggtgccttgtataatccccagtaagagtgctctttcccacctctgagctccattctcattactcataagaaacctcctggaatccatccctttttctttgtattctgactattagttgcatgttacatccttcccaaatgtaagggagtggaagatggattatcacaattattggggagtttgtctcaaacgacacaagctgtggttctttttccttgtctggagaacctgcaatgggtggagggtgggaagtgggagatcacagttccagaaagtaagcaccctgagagcagaaatggtgtcccatttctctgtggctctaacagggaacaggcagggccaggcacatattggatggagaggcagacgaacgaatgagtctttaaaagtagcttggtctacagctatgaagtttgtagcttgaagaagggtccctgtgacactaaccctgatattaatgaggcattttacagtgagccaagcactttgccttccatcgttgtgtgtaatagtcctatggagagggcagggaggcatttgtaaatggcctgctcagaagcctatatttacaataagtccaagcttttcccactgtacctctgccagtgtgaagatcatttgaagatggctttcttttttttaatagggaccaatgacataatgtcttgttcagtggttctcaaagtgtggttcccagatctgcagcagcagcagcacctggaaacttgttaaaagtgcaaattatcaggccccatcctgtacctattgaattagaaactctaatactggggccctggttttttgttttcgttttgtttcattcccccaccccgaacccccaccccaagtcctccaggtgattctgatgtgcatttaagtttgagaactactcgaccattctatttccaactgattcatgttgcttaattctttgtctcatctatgaaaaacagtcctacctcagacttcagcttgtcagggcccattcctcagaaggtgaattgaactgaatttacaagtcccaagagccctcaaaggaaaacacacgaaatgccctgaggagtggcatttgtaacagggcctgtacagagatctgtgattcaaagtactcatcagacattcccatggggaagtccgccactactctgggatttcaatacgtatgaaccccagcaccctgaacactgtgctggttgcccagcctccatcattaggctgggaggagcttccacggagggcgcaggacccagggcgctgaactctcacaaccaatcaggcgacccccccagagggaaactacaagtcccagcatgccccacgcgcaccgtcaggggccgacccgccgcgccccagcgttctccgcgtacaggtggtctcttgggttccggtaaggcggcggctgcggaactcccgtggaggggccggtgggccctcgggcctgacgatggcagtggccactgcggcggcagtactggccgctctgggcggggcgctgtggctggcggcccgccggttcgtggggcccagggtccagcg

SEQ ID NO: 22951 - DNA, 2300 bp, Homo sapien
caggcttatcctcgagggaagaagtgaggaaaagggaggaacaatggtgaaccatactaatatccacataagaggagtcacagtgaaaaaatatgtttgcatcttggttttggatgctctttcaagtggacccccacatagatgctccaaacagaagtgaggactagaccagagttagaatagtacagaagagttcaggttgagttaagagtcattgaggccagggatcttctcactgggtgctgctatattcagcctgacatgactattctgcaggcacacgtatagaaggagttggtgatggggttttacaccgttgggtttcttctttccatcacagggatcacaagaatcatcactgcggaagacagactctcgagggtaccttgtgcgcagtcaatggtctagaatatcccggagcccatccaccaaggctccatccatagatgagcctagaagcaggaacaccagtgctaaggtagaggtaaagatgaaagggagtagtagatgatagaataataacaatggttaacatttattgatgctttctacgtgccaggccctgtttatgtgctttacatgtgttagctaatttagcccttgggagaactcccttctgcccgtaaatcccattttgccactgagaaacctgaagtacagagggaacttgtttaaggtttcacattaataagtggtagagctagcattaaaacccaggggctccagatctagaggctgcacacttcctccttccttccttcattcaacaaatagtaattaactgtgattctcagaagagggaaggaaatagtcaccaccagagaaaaagagtgtcagattgtgtggggctttgagtttttaattaggcctgaccacataagcaattaaaaaaaaaagttagttttgagattaagattttggaagcagagcgaatgacccagacccagccactgggaaagcatgcattcctacctaattcatcatctctatcggatttgactcaatcatctaaacaaaaacatgcttttttgagtcatgtgtgaaacaatctgaaatcatatatggatacctaataacttcttgctcaccttagtaaaggagttttttctctagaatggcccttccctatttgggaagatgattctatgtaactgtgcttcaccggcacaaggagctctgaaggccctggggagatgctccagtctccagacaagagactttcccagccatcactacatcattcacatggggagcggggagagacatgccctgaggtgctatgtagagtgttctggtgagaatgtctggcccactttgctcatggagttaactggaagtcgcacactaaggcactggccaagcaagatccattctgcatgccctctgtcctacctgcaggcctctgactgagtaggtatatgccaagcaggggacagaactttgcaaaccatgtgtcagctgcctaagggggaggaagaggactgggtcctatctactccaaacaaataaaaacgtgtgaaatgcttatggggaagctaggggagaatgaaagcagacagtctctgtgtctgtttaacagaaatatcaaacagctgaggcctagaaatgtccgagtcccttaagccctacttaaggagctgagatgaaccagcacccatcaaaggtctaggaatggaataggcagaagggacagatccttgaccggagatgggcaggcaggcctcgacttcagacgcccattgtcttgctgcagctccccagcagctccacgagctcccggactccatccacctccccaagcctgcatgactcctcaccgccgccgctgtccgggcagccctcgctccagccacccgcgtcgccccagctgccccggtcgctggactcgcggcctcccacgcccccagagcccgatcctggctcccggcgcagcaccaaaatgcaagagaatccggaggcctgggcccaaggcatcgtgcgggaaatccgccagacccgggactcgcagccgctggaatattcgcgcacgtcccccaccgagtggaagtcctccagccagcgcagggggatctaccccgcctccacccagctggaccgcaactctctgtccgagcagcagcagcagcagcgggaggacgaggacgactacgaggctgcctactgggcatccatgaggtcgttctacgagaagaacccgagctgctcgcgcccctggccggtgagccagcccgccgcccctggcagccggggcgcccttccttgcagcctcttccagccgccctcctctccactgcgcaggg

SEQ ID NO: 22952 - DNA, 2300 bp, Homo sapien
aaacagtggctgtctttgaagaatgcatggcctagtaggaaagacaatagacaaaggacaactcattgctccataaaagtatgtacaaaagacacaaggaacacagggcaatatttcactctgggaacttcccccaggtcacactgagctgggtttcgaagaacacaggagagaagaggagaccataaggaaataaggctggtgtatgcaggcaaatacaagtcacttggtattagtagaacatagtgataaagtatagagtgaagggcatgcaagtagcaggtacacaggaaaacatcatgaggctcctggtcaaaccaagtgaagaaagtgtttatccaggaatgaagcattactagatttacatcttgtaaatattactctaaataaatacggtggacagatctagaagtggagaggatttaaggccatgaaacctgtttgaaaggctatattctgaaaatgtagtcccaggatggtcagagacctggaacaaggcaatgataatagagatagaaaaaaggaactggattcaaaatatcatttggaattagaagtaagaggtattatggtgactgctatgtatgtgtataaggtgagtgagggttgatgaaaagattttaaaattagttcaggagtcatacagctatgccattctctcatgcaactaacattctcatgcaactaacattgatgagatttttcctgcatgcaagacacagagcataaacggatgaatatagactgctctagtggatcttggtctaacttagaagttgtgctccttaaacatataaataacactaatcttgatcacattgcagctacttacttagcatgaaacagttcaaataatattccaataagtatctcctccaaatgaaaatgaaaacataaatatttgagtagagttccataaagtgagtcatcttcttgtgctcttttacttggttttccctatctgttgttaatttgttggtaagaaatccctttccactctagatctatgagtaattaaatgataggaacagaagacatgactttcaataaatttgtatgagattaaggtccttatatttagaaatcaaactaatattggtgaggctagagccacaaaaagtttgagctgtagtgatgatgaaaacaagaaaaaattgaattctaaatggcaaggaaaagtaagttccataagtagcaatcttcagagtaatagaaaaaaaaacaaacttattctacataaacaacttcacaattctctaatatttcccatgttatcagtctttaaacaataaatgctttatatctcaaatctatgaaccaacaaatttctatattaaaacttgtttatataattctttttaataaaatatgtgttaccttttactcatgcttgttagaacaggggaaactaaggtctagagtttatacctttttatattggcaaataaataaattttgtgttttctttatccttttattctgaaagccaaagttcctaatgccctgagattaaaaattaataaacattctttgtttccttgtcaagaatgagcctggaatgaggtcctcaaaagagagtctagaagcagaaaaaagaaaggaatctgacaaaacaggagttcgtctgagcaatcaggtgagctgatctctgtagcagaggtgaggaaattaaggagcagaaagcataatggaaaatgttagggggcagggagttctgggagagaagaccaagctgttgagaattgtattaaggcgtccctaatgtcctcatgagaaggttaaggaactaggaaaggttgggccctgccttcccctccatccataccctagtgttcacttcgaatgtgtggaaccacagcaggctcctctgctcagcctacacaggggggagactggtctttgttcaaatcagggaggggagggggtctggccatggcattgaccactttctgcacaatctttcagatgaggcgtgcagtcaatccgaatcactcgctgagatgttgccccttccagggtcactcgtcgtgtagacgctgcctttgtgcagctgagggaacagcccttggcccctgccacacaatacgtatttatattcacatgtgcctgttgtgggagcagggccagcagatcaccatgatgagggtgagcagagatcacactaccgattctggaggggaaccacagacaacctgggtgaggggaagaatatggcaaatagaaactcttttactttgctgttccggggggtccttcattcttgtttctcctaaaagaaaagcttgagggctccattcctt

SEQ ID NO: 22953 - DNA, 2300 bp, Homo sapien
tgaaaataaagggacataagggttaaaagatgaaggaaatgaggtatcatttttagtgacagtcagagaagtcctctctgaggagactgcttgagagcagagttaaaaaaataaggaattaaggcacgtgtatatatgggccgctgcagcagatggagcagcaaatttaaaagtcttgcgacaagaacatgcttaacccattacatggcttggatatttgtcccttccaaatcttatgttaaaagatgactcccaatgttggaggtgaggcctagtgtgaggtgtttgggtcatgaaggtcaatccctaatggatggctttgtgccttcccatggtaatgagttacgaggatatctgactgttcaaaagaatctgggacctcctcccttctctcttgctcctgctcttgtcgtgttacacatttgctccttctttgccttctgtcatgattgggaagcttcctgaggcctcgccagaagcacatgccagcactatgcttcctgtatagtctgcagaactgtgagtcacataaacctctgactcaggtcagttcatgcttttgcctaggcttccagactgtggaggaagggactccagcccacagccctagatttgggatgtcaggcttccctaagtgaagtcctacccatgaaacctataacagaagcctctgctctctccctcgaaggagtgctaagaagccataatgagtttataatcctgaatagtagaaataaaacacctaattacaatgagatgaaattcacattagctgctctggccccaaacacagcatactaagaaaataaagatgctcttggtacttaggggtgtgattttaatagaaaaggtaaggttctctgaagttactctgaaacgtatagcacttacaactttgattgtctacataacttatacaaatattacacaataacatcataaccatgcaaaaacaaatgacccctgtacaaattttgggtagaatgctgggggttgggtgtacagtggggagtaggggagagatgaaataacttaaacccaggcactcttacctacagcctgaatgttttactaactaaaagactccttggataacttaaattaaaaccatcaacaacttccgatattcaaccttagctatcaacttgtcccatgaaaacaggctggaaacctgcctcagtccttgatgatttcaccagctcaggttggcatggcacatgtctcctatctaaagcttgggtgaagataaaaggagaaaactaaaatggagaacatgtttagattctgtaaaccagagttaggggctactttttacaaatatcaattctatttgtaactgtatgtttcctgttacttgccaaaatgaatcacaaactcatttgtggacccaatcatttatccatgttcactctcccagactttggggggctttcctcagatctggaaactatttttgacagctgagattttgttctagacatggagtttagacttgagtttgagtttagctttagtgtttaaagggttaaggatggggcagcccagggttaagggttaaggatggggcagcaaaggtaacattctacactgagtctagccatggggaaggggctttgacagtgtcttcctcaacaggttttgccattgaaagaaacatgagacattaaagctaaactcaaactcaagtctaaactccatgtctggaacaaaatcccagctgtcaaaaatagtctctagatctgagaaaagccctccaaagtctgtctggcagaatgaacatggataaatgattggatccacaaatgactttgccattcattttggcagtaccaggaaacagacagtcacaaatgggattaatataatgaatggcagagaaatgcttaaaaagatttaaaaaggaagtggtaatattgatattgctacatattgaacatttgaacaatgtttagacatcaatttctgaaaacaaagacaatggctatgagcagatacactcaaaatgaagaaacatttattttttgttttttaagaaaaggttaatcacatattcatagagtcagtttgttactatggaatcacatatgatgtcataaatttgacattctaaatgcaaagctagactgagcaagggaagtgacaggaaatggagctggggagacaaaaatgtggataacaacaaaagaatttcaacaggtaaaaaaatgagtcaaacatctctcaaacagaaaaaggtgagtgaaccgagtgtcttagaatcttgccatggggctgaagaaatgtggatatcagtccatcat

SEQ ID NO: 22954 - DNA, 2300 bp, Homo sapien
tgaaaatttcattttgaaaccagaaaccaagcaagccctgactgtggaggggcgggggcggggggtgggcgttgagcatagcatgatgatgaaccaaggttgacttagtcttttccaggaccccccagaaactcccccctttcacgacccctaaaattcagctgcattctaggtctggagaggttaggctatctggagacttagttctgccaaagtgtgcggcccttgtaaatgcctgtggtgaaactgcaaaacctctgcccagccctcaggagctcttgaagcaaaatagaacttgacatttttagatggtgtttgagtttttaccctctggattcagaagaagcaagaccacagtacacaaaatgaaggctactaccccagtagcggggcattgcaatccacccaagagcaggaaactgaagtgatgaggggaccgttcctctggaaacccacagctttgcgtgcactgagggatccacaacagaacacgtggacgtttcccgtctggtcttgcctatttgtgctttcatagccaaagaaagtcaataggaaaaggagactcatccatcattttgtcagtttatgacttatttttgagtatccactaatgctaggtgtccaggtagatatcaacaggaggtaaaggagtatagtgcttgacccataataaatattcaatatatgttatttgctgataaggtgattgcagatgtactatttttttttttaatttttgaggacctaccagatgtcagatactatgcataaaatcccctgttaattctcacatcgcaacaaagcaggcaatattactcctattttgccagtaggaaaactgaggctcagagaggttacaaaacttaattttaaaagtcatgtatctcatacatggtggagttaggcttaagatttagctgtgtttgatttcaaattctgtcttcgttccaccatgctgctgttgtttcttctctagcagttctcagagcctcaagagaaggcttttccctctaggagtgtactgcatttgctccttctggcctggagacctgcccctttaataggtaacctggatgaaagaccccagagcgacctccccacagtcacacctcctagttcctttctggttctcacatgggcaggcactgataaatcagctcacggtacacaggctcagtttgaatttcaacaaaattttctaaaaacagtaaccagatgcaattcaaatcacattttgtccacataaggaatccattccaagaaaagtcagaggatgcgtctcagtcagatgagtggcttctaatcttccctggccttgttttagaactccaagaagaaataatatccagattaattttagagttcagtcattgaatttggtctcaggaaaattgcatatataatttagtcttataacgataaccccgagatcaaagatcactcaagggtagtgatccctctagacacctgtcacactcaaaacaatttcctcttttcagtttaaagaactatttcagactttgttttctcacaggctactttgaagaaacaggccaccatcctgggagtaaaacagagttcttcacgaattacatcatttatttttcaacaaatattaacttaatttggtttagtttaataagagcgcatgatcacagatttgataaccaaatggattccttgacataaacttcagtcctggtttagctctcttccaggaagaaaaacaaagtctctcaaaggtaattggtatatcactcttccaaagtgggaaaaaaaagaaagggtaggctttcaattttcttaaacataaaactcaaaatccacatataataataaacaaatggtttaaggcattttatgtcataaatgtcctgccattatttagttatgaattttcaggttcaggaattatgctaaaacccaagagtcattatggaatgtctgcatatttgatttccaaagctccagataggttttaatgtgttcaatattataccactgtactccccaaactatttctgtatcctcagagacatgtcctaatagcaggcctctgtgtcttctgcttagtgaaaagtgtgaataatagctccaaaaagaatatatatgtaatatatagcttttttttttttttttactttaacatatgttcccacatagccaaatgattcaactcagtacagttaacaacttagaaagggattcattgaattttccaggtctcttcatggccagagttgctttgtaaggagaccctaaatgtggaataatcaacatgttaaagtaatctagatgtt

SEQ ID NO: 22955 - DNA, 2300 bp, Homo sapien
ccctccctcctcccaaagagcacgggctgtgtcctaggagcccaagtataggacctcgaaacgtgcggtgccagcccgctctcatctgctagggaccgtttcctccagtgcgccaggcgtgccgctctggacctaaaaaggcagcaggggtcgcgcgggactgaagaggaggggacgcaggttgggagaggccgggtccaagcgagagcagctgccaaagtctgctgcccgggtcagcaaaaactttgtctttcattgcgcaggcgcagggcagggttggggggcaggggagggaggggaggaatcctgaggcaaggggcgggggtgggggtggtggaggagggagggtggtggattaaaataagtaggcggctcggtgctaagggatgagtgagtcggagctcggcctctccccggcacgttctcagctgctcctggttcagacccagcgagggagccgcgagcgaggctcaccgtccccggcgtgcaggatccggggctgctgagcgctcgctcccgcgtgtccggcgcttggagtccccgcggcaggagaggagtcgggacactagagctccaggggcgcctgtgggctccagggcctccggcttccccagtccccttcagctaaagccccagagacgtgctcagccccaggacctctgcggaacaaggtaattgcagtcctgggcgcctgggctcagcaaagcgaatgcgggcaggactcccaggttccttgtcactgctcggcgggtgcctcctctctctcaatgcccctgaaggaagctcttgccaaacgaatgctgtaggacttttgtgaaagtgagagcagggtggttgggggtgctgcctcaggacttcctgcgcggggtcctcggcctctgaccgctggggattaaggggggcgggcctccgctactgcggccagcccgcccggctctgcggaatcacgggcgaggtgcccacggactttgaaagtcaatctgtgggccccctttaagaaaccagagcaacttcagcgggcacaaactttcctgagacgcgctcctagctctggctgacgcccaggttgacgaagaaggaagggagagggagtgaatggccacagccgcagccgaccgcgccagggacaggtgcatgccccagctcggtagcgctttcgttcaagtttgtcttttgaggagttgcgctctagtatgaggccgcctagacccgagagcgcagggctgcgagtctgaaccccgccttgcactcgcgctctaacttagggatattctccataggatgattgctctgtgtcgtcaaggcctggagcggaacccttgattgtcctggtgcagggaggcaatgcagtgggcgcaagcactgctttccaattcgagacccacacacagcactagtggaaactctgtggagccctagggtctccgggctggggacaggaaaagttctgttactcccctgactgtccgctaatccagccgtcaggagagaaagaagggggaaaggggtgaagggctgcctgctgaactaatttctcctcggaaatgtctcggagaagaatgaaaaaccacgtttagtcctttttcagcagctcaggcagtagcgggttgggttctcaatgtgtaaagtagccgcaagggtttctttgttgccacaatttggtaaatttcacccaggctaagagctgcgcattggctctgcggaacaaaaccacgtgcaaggctaggtgtcccaggttcacaaccccctagggaagagaagcgctggaggggactagcagcgaccggcggcgtgtagatgttccatcccaggctcctcgaggtaattgctgttttattaagattggggaatggatcaccgaggacgcagcggacatttaagtgcagccggatgaccgccttgccaatgggttcgttagatctcgtttgttgggagaatgctatagaagtatccggtgccggtcagtcctcttcacgggggtccggacgcctgtcaccactcgttggagattcgatgtcaaggctgattttcttgggttgctgctgggctcccccaggcgcaaactcgtggagttcgctcccgttctcattaatgcaagcagttaacttgctcacgctcaattagccccgaataaaccactttaatagactctgcacacttcattaatgcccagcataggactggccgcagacctgggattggcgctccaccgcgcgagggacgcgagtgcccgcactgcgcagggactcgggatcccgagcgcgaattgcgtctgctgtgcgtggtcgggtccccttatt

SEQ ID NO: 22956 - DNA, 2300 bp, Homo sapien
cagtggtgaaacaactcggttgcatgtttcttctttaagatcaggaacactttctctccgagagctctttagggatcctactacttagggctttctggaagttctgaggcatattggccaagggccctgttttagaaaagaaagacaaggagaaacataaaagaagcccagctgagttatgaggggtgcatagcaggagtttgggtatttacaccccaggaggttccatcccacctgaatgaccagccactattcctaagtgatctggacagccagaggccctatcgtgtgggcattttttttacttcttaacttttgctgctggtaatggaggttacccaagctttgcttatttggagagcctgaggctggaacaagcacactccctgtgcccaaggtggaagccagcaaagttcagcattgccctgtgtagactttccctccaggcctttccttgcccttgaagctttctgttctggaatctctaggaaggaggtgtgatctcagctctcttctcttccaagggttcttactctagcaagaatgtcactacatcctagcaactgctaagattccaggagcatggacaaacttatgtgaatctcttacttctgcactaacctgaggcactgggtaaaagctgttcgttggagcaaagattgcaccccctcttactcctcctcaaacaagacgaagttacccaggggttagaggctagattctgttctaaaggcctggggatataaggaaatcctctttcaactatgcctttgagggaggggagtcttcattaccatctccctaggtcaggtattacaaccttcttcacctcccaagaaaatcagattagctttgcaaaccaaagctggagatagcagaagctcctcgggagagaagcagtacagtacttagggacccacggaatctaggatccagctccaagagtcactcagcagcaactctggggcaaaggcagagagtgcagttgtgtgatctggacccacacaagtcccaggaaaccagtgactcctccttgccaaacccaaggcctggaagggtattccagaaaggcattagggagggattgggctggggtcagccggaggtcagctttcagagatgggtagtcaagggggtgatggtaccctccataatgcctaggcaatgaagatagaatttttaatgtccagaactctgattcctttccgattaaaaactccacctgaaccagctccttgactcagaggccctggaactgacaactttgcagctcgtctagcttgccagtgcggctctctaaactctgatccatcctaaaacaaatatgtaagtagagagtgccactgtgcattggggtgaaatctcagagagttctgggccccaggaaaataactttcctgacctcctttccctactctttgttctttctactggactccagaacttagggtctggggtcaaccataagcactcagatgttacagctcgcttgcttcggtgaccctggccctcccgcaccaggaattaaccagcgctgcctgggttaacaccctggccccgagcacgcttggatagccaggagctgctccacactcggggtctgccgcctctggaaagagattctgggaggagatgcgactctgtcaggcgccaaagtgcgttgaaacccaagccgcggtgtggggatcccggtgcacagagctactgcccctccctccctcctcccaaagagcacgggctgtgtcctaggagcccaagtataggacctcgaaacgtgcggtgccagcccgctctcatctgctagggaccgtttcctccagtgcgccaggcgtgccgctctggacctaaaaaggcagcaggggtcgcgcgggactgaagaggaggggacgcaggttgggagaggccgggtccaagcgagagcagctgccaaagtctgctgcccgggtcagcaaaaactttgtctttcattgcgcaggcgcagggcagggttggggggcaggggagggaggggaggaatcctgaggcaaggggcgggggtgggggtggtggaggagggagggtggtggattaaaataagtaggcggctcggtgctaagggatgagtgagtcggagctcggcctctccccggcacgttctcagctgctcctggttcagacccagcgagggagccgcgagcgaggctcaccgtccccggcgtgcaggatccggggctgctgagcgctcgctcccgcgtgtccggcgcttggagtccccgcggcaggagaggagtcgggacactagagctccaggggcgcctgtg

SEQ ID NO: 22957 - DNA, 2300 bp, Homo sapien
ccacctttaacattgtaagtgaattttctattgttttaattctttattacatacatttttctgcccaatctttggaacaaccagataattatgagattcctccctcagcacatagcccaccccacagagtaaaatgcacccttctggcaaataagcagatcccaaagagaggagtgagaggtaggggctagaccaagcattagtattgtgtttttccaagtttaccactcagaaaagtcattcctaaagagtagaatatgtgaggcatggagaggggctgaaaaactgttcctctgtggaagttcctcaggataaaggttcaaatagttaggcatagtctcccagtaatgttaagcagcacaaaaattgcatatgttgtttgatgtaaaatgcagattcctaaggcctagtctgattcaagatctggaataggaccaagggtatccaaatatgtaaatgaactctcaatgattctaatgcaggtagttggttaacccactttgagggacattacattagaatcttacaaaatgttctccgaaaaaagggattatatagtcaactgttttggaaatattaaataaaaacaaattaagcacacttttcttgattcataatatgataaacattgaacagaatgcaacataatattcctcaagctttttttcagaccacttattaatgatttgagggatgccactgcactaacacagtttgaaaggtgctgagttgagtgcctggaacaagagaactaactattgtcatctgtactggttagaatatacctgaaattcagtttacagcactaccatgctttaagagagttgttgaaaacctggagcatgttgaaagaatttggtctttaggggtttgctaatgatatcacctgaacaatggttgaaagagactgaagagactcttaggttaaaatggcagttcaaatatgctaaactcacatttttcaaaaccctaccaaagccataggaaagagattcaaaggactaggaaataaagcgagaagacaacagccatacattttggaagctggaaagcatatgaagcaacagtaaatgagttatgaaaaccaaaacagtggaatccaaaaccagagtggagagagctgggaatcaatgtgttacccacccacagattcttcaaaatctctggaattctcaggacaggacagctccagtttcctttgtaactgggcatgatggtggaaaagaaaatataaagaattgtgtgaaaacttctggcaaagcagtcagatgtttaggttttcttccaagttctatgccactgggtaactgaccttcctccactctagaggtttatcatctgaagagggtagaacagagaaacctgggatgggggttggctggcacaggcgttagtacagttaagatgggctatcctactgaaaataaggtatacgcattaaatattgaatgctgagttccccagacctattttaacccccagccctaacaagtctcctagaattccctaacaagtctcctagaattccctaagcaagaaaatgaaagaacatacttttaaaaatctgattatccccaaagaaaagaccaaaaccaggggctcactgcaaaatagccaaccacatcacctacctgaaagctcaatgtcaacaaccccatttacaaatgcctacagccatattctgggtgccatatgccctcccagaaccttcccactccccattgagagtcagtatttatttctctcccattgagaatgggtggagctttgtgacggcctcaatgaatgaaaggtattgcatgatttttgaggccaggtcatcgaagacaatatggcttctgcttggccctttctctctctggattcctgcccttagaatcttgccaccatgctgtgaggaagcccaaattttagccaatagggagaggcccactgaagacgaattgaggcttcagccaaaagctagcatcaactataagacctgtgagtcatggactccagctcctagatttggaacctttcagctggagcctctgatgtcagaagtgccgttcttcctctgccctgttcgaactcctgaaacacaaaatccatgaacgtaataaagggttgtgttagactgctataccttgaaataatttcttataagtcattaataactgaagtaagcattaattgaacctttaaacagttaaacttacaataattattttgaagatcatcttgccttaaaaacttcaagatctttgaggggataatttgccatcttagtatttagaagaactgtgtttgtgtctata

SEQ ID NO: 22958 - DNA, 2300 bp, Homo sapien
gccatttctgctcatgtagccactacccctaaagaggcaacacttgtaaagcatccatggagtaaaacaagtctgcacatctcaacaactcaagggcactaagcaaagaccatggagctgcagcaacaggatgctattcagactgttaggaggcccacacataactcatttgagagcacaaggttaataagtggcagagccagaactagagcctaggtccttgcactcacggtctgagctcatcagtgtgtgagctcacttcacccactccattcctacagctacagagttccccgtggaagtctcagttgcacaccagagaggcatctgggggaaaatgttccacctggtctcatggcctaggagacaaagaaccctgggttaggatctcaactctggacttagtaatgaccctgaataagcctgggccctcatgtccttcccacctgcaaaatggaggctgtatccctgttctaggccctctgcaacaaagcatcacaaacttggtgacttcaaacgacagaaatttattctctcccagttccggaggccagaaatctgacaccaacttgtggaaagggcctccaaagcctcgaggaatctttcctggcctcttccagcttctggtgaatgcaggtgttccttggcttgcggcagcagaactccagtctctgcttctgtcttcacatcactgctgtccactcttctatcccaagtctccttctgcctttctcttaaaagaacacttacattggatttaggatccacccagatgatccaggatgaactcttcttctcagactcccaattacttctgcaaaggctatgtttccaaataaggtcacattcacaggttctaaaggttaggtaatgaacatatctttgtggcagaattggggtggaggggagcggagggaggctcacggttcaacccatggtaaggagtttggaccacgtgaattccaggtctcactcagctctgaaaacatacaaaaatggcaaagggcaactatctctaccacataaagaatacatccaagtgcctcaggtcaacatcaacatcccaagaagtaaatggacagttcacacatacaattagaagatgctctaattagcaagcagacacacgtgggagttttgcctttctaacgtcagagagatgcaaactaaaaaatttgtttaatctcagaaaactaaaaccaaatgctggcaaggatgtgatggaactgagacttaaacatggatctgccatttattccctgggactggctcagggtaggcacttattgatttgacttgccgatggatggttaattggcaaaactctttggggggaaactgtggcaacatattccaagaaccttgaaaataaagatggctattggctgaaaattcctcatctgtactgagaatttatcctaaggaaatcatccttgtgaacaaatatttgtctcagcattatttataacatctaaatagtgcaaacaacctaagccttcaagagaatgggaacaattctgcacagaagttccgcagccgtgaaagtgatgttaaaaccgggagaacagataaggctagttgaataaatcgggaccactgaggaggaggcaggggaggtttaggggtgccagcaatacttcgctgtgggtgatcaagaacatgatgtgattgctgtagaatcacttccttaaactgtgcatttgtattatgtattttttatgcttaaaacacattttaagaaaaaccgaagattttattttttctttttaacagctgaatccaagaatcctaggacactcttaatttgtcccagaagtgtgaagtccacctagggcatagccgtgaagggctcccagaactgtacggggaattttgaggctggggtaccgcagtgaagtgcagctcacccgggcggagcgcacctgacctggcttccacacctggtggagcgcctgggaggcctcgcggataaagccccgggcagcgcgtgacccgccccagcccagtagtggagtccccgccgcgggccccttgcttgcagggtaggtgtggcccggtcgtcccactctccgccccctcctgctcctcctcgccgtgcccaacccgcccgcttctcctgcctaggctcttctttctgctcctgtcgccatggccccggcctcggcgctcaagcgaccctctcgctccgcccaggtcagtgaaggatgggatgcaagtgcccgccaagccccccgtttcccacgtggagttcccacagggcagcagggaggggccgcgccttctctaactgacccgaaccg

SEQ ID NO: 22959 - DNA, 2300 bp, Homo sapien
ttgccatttgttcttgatatttaatgttaataaatgttttactttttaataaatctgttaatattccaactgttttttaatataattcctttcctttgtaatcctatgttttaaaaacacttgaaaacattgaaacgacataggcttcaccacacttgtaaaggtgccatagcacaaaaaaggttaagaatcttactcctatttagaaacccccttcccaaatccccaatttccattacatatcctgctattttcctcttagatcactggtttttagacacataaatattcctgttattccttgaacagaacaaagcaaaacttctagtcaggtgcggtggctcatgcctgtagtcctagcactttgggaggctgaggtgggcagatgtcttgaacccaggagttggagatcagcctggacaacatggggaaacccatcaccacaaaaaatacaaaaattagctcactgccaaccacttccacccagaagggattcttgtgcctcagcctcatgagtagctgggattacaggcacccgccaccacgcccagctaattttttgcatttttagtagagacggggttttgccatgttggccaggctgttatcaaactcctgtcctcaggtgatctgcccgcctaggcctcccaaagtgctgggattacaggcatgagccacagagcctggccatctccactttttcttatcccccaaaaggattaacatccctggctttatgtagaatagtgtacgctgccacatcagtgtttgagtcattccccagaggagaggggaatcccccctccatttttttttttgcaacatcttgtcttccctttgctgttgcttcccccaacacacttggttttgttctatcctgtacttcagatttgttttttgttttgtttttttcatattgaaaagatgacattgctccaagaggcaaaaataaatgggaactgaaaaaaaaaagctttttatcttatttatttaatcttttaattcacctggaatgaatattatgtcaattgggagcttaaatgcttaaatgtatttttccccaaatggttaactaatcctcccaatagcactcatttgaataatctgtcctttccccatatatgttacatgtcttttacaaaatacagcctatttgaggtatgtttctgggcttttgttctattgagctgtccatttgcttacaccagaaatgccagtttatttttttgtagtcttgcaatcttttaatttctactagtgctttttaatttaaccttaatccactgtatttgtatttttttcagtggtggtaaaaggaaaaaattaaaaatctaatgaaagcagccaaaagcacacaatttatgtcctgttaagacttccgcatgtaagtatcatgctccaaatatatttttcatctttactttttatgacggaaagggctcaagtactttgggaagcaaaacagaatcgagggacgccgagaagatacacagcaggcatgtagggtagcgtggttggcaactgttcttacaaaattttaatttgaattatacgtaatgtacgtaataaattactatttggatttccctttggcataaacagccagggaatataactaacatcaaagatcccagactctcgacacaatatactactaatcgtaacacaattctagagggtcaaaaaaggtagagaagtttggaccgtggaacagacctggtggaatgtcgacacaaagcgtttcagggtagacaaagcctactcagaacaccctaaacgcggagttttgctaagttgggacgctaaaaggcaagggaatgacaggacgtccgcaggctaattcgccattaagaaacagaaccgcggcttcttccacctccagcgtcatcggcccccaattcgctgtaacaaacggatagtgtctcgcagcatcagacaacggacttggaaatcagtttgcgaccacgcatctgcgccttttctaggaaaagaggaaggcgggtccaacactggtaacggcagaaacatagttcacaagggccactgcaaacgccccgccagcagcggaaccgttatctcgcgagacgacggatccccataaggcacaaacctagcgccaaggttggctgtcaaggtagattccagggtgtggaagtggctttgtggtgccacctctaaccgctcggaggtcaacccccattctacaccgaaaactaggccttggctgctatggaaggacagcggcaagaaagccacgcaaccctaacactcgcccaggctcatttcaacaatggagagta

SEQ ID NO: 22960 - DNA, 2300 bp, Homo sapien
tatattaaggtgtttggacttaagtccaacagcacttgggaggccaatgaaaagttttaagaatgggagcaatgtgataagattgttctttagaaacatctctgtgctacatatgaagaatagagaaaggaaggaaagataatgggcagctgtatcaggaaactgctctggcaattcaggtgagagattatggtggatggtagccatccaggtaatgacaagggaatggaagtaagtagattttatacatactcaggaggcagaatagataggattggggatgagaggatggaagtccccagggcagtatccagagttttagcttgggcagctggatggatggtaatgcctttcattaaaatagtgtggagaaagattgattttaagggaaaattcctctgttggatatgttgattttgtcatgccataggccattcaagtaaatctatccagaccatagttagacatacatatctgcagctcaaaaatgtctgtgctgaacacaaaattttgggaaccaccagcatatgcatggtaatttaaaccattgaaatagttgaacaaaactaagaggcatttgtagagttaagaatcagcaacatttaggctggggacagtggcttatgcctgcagtcccagcactttgggaagccaaggcgggaggattgcttgagctcaggagtttgagaccagcctggacaacatagcaagaccttgtctgtgctaaaaataaaaaaaaaacaaaacaaattatctgggcgtggtggcatactcctgtagtcccaatcacctgggaggccaaagtgggaggattgcttgagcctgagaggttgaggctgcagtgagccatcatcttaccactacactctagcctgggcaaaagagtgagaccctgtctcaggaaaaaaaaaaaaatcagcaacatttaagggataggcagaagaaggatgtcgagaaatataagagtcttagagataaaggagtatatgggctaatggcagccaagagagttcaagaaggagggagtggtaaaaaaaaaaaaaaaaaagtatcaattggctttagcaacaggccatcagtgacgtccatgaaggcagtttctttcttttttttaaacaacagaaatttattttctcagagttctagactctagaagtccaagatcaagatgtcaacaggtttggtttcttctttttttatttattatttttatagatttagagggtacaagtgcaggtttgttatatggatatattgaatattggtgaggtctggactattagtatataaccataacccaaatagtgtatgttgtaggcagtttcaatggagttgtggggcagaagccagattgggaggggttaagggttgagtggcagttgaagtggagactataggtgtgaagaactctttcatgaagtttggttgggaaaggaatggtagaaatagtagttagagggggaacttggggttaataaaagtgtttattttatttagggtgatggtttcaaagagaaatagatctgcatgtgtttaaatccacataagaaaggccctggagtgaagagtttaatgagaaagagaaaatgagagtagtcgataaagggagatctttgcaaaggtaggaagggattagatcagagaatacatagaggaattagccttggataggggactgactggggaaatacctcttcttttgtattagtgggcaacgcagaaagtgtaagcatggactcagttatgttctgaattgttgaagatgggaatgaggaatttgttttttgggtgcttttattttctttccaaaatagaagatgggctcaactgctaattgggagtgagatccagcatcagagtttagaagaaaggggagaaaggttgaaacagctgctatttcagatgtcttttcaggcacatataggtgctcagtaaatatttattggccaaataaattgaatgaatgcatgaatgctgtgaagaatttgtgagatctttagaaaaacaaagatttcgaaagccgttgttggaggatcatgaccttgaacaacttttaataatgttttgttttaggcaatcgtatttggggaaaagacctgaagggtatacagctatcccatgtaacatggtctgcggacagtaaagtcttactttttggaatggcaaatggggaaatacacatttacgataatcaaggaaattttatggtaagtaagtgtatgcatcagtcttgtttatacaattttatatgattatcgtacatatcattcatgtttgtatatacatttattttttatggc

SEQ ID NO: 22961 - DNA, 2300 bp, Homo sapien
tcttttggctttgaaacttgcaactttgagaacaaaacagtcctttaaattttgcactgctcaattctgtttttcgtttgcattgtctttaatataataaaagttattacctttacatattatcatgtctatttttgatgactcatcaattttgtctattaaagatatttctttaaattatactgaattaacagttattttgatattcaacagtttcttatcaaaagacagaagtttgattctcctcctatagtttaatctcacactcctgaggctaaaagtgtaagttcaggttcaaaagaaaggcttcaatataaaattatctaaatttggataaaataatgatgagctttacattaatataagctcctgagaagcaaatatatcctacagatgtaaatataaaatataaactttaaggaaggaacaaaaactaaatataccaaggaaatatataaagcatctcttacttttcaaaaattttgaaagggtatgacatagagctacagtagtattttccagacttttttgagcccaaaatcagtaatacatattaatataccacagagaaatggtggtatagaaggaataaatgagagttcatgtgcaagaagggaaagataaagagaggtgagttttcaggtgtcaccatcagtaactagcttcaactaattatgtcttgaccagtttattggaaactcctgggttagataatactaatttgtctcatgcgtccagtatagggagcctatggacaggggccaatgtatcttaaacagacacacaaacaatggaaagcaaacattatctgaatgggattgggttaagtttggaaagaattcctcatggagactgatttgtgctggtttggctaggcacaactggcctgttaagagggtaggaccatatataaagtggcttgggaagcagagccggatggaatgttgccctgcagaaagcatattggcttacttgaggtgggggctccctagtaaaaacatttaggattgagggaagatctgattttggatggagtttagatttgctaggaaaggcactagggactattgtcaattctataatagattgtgctgggtgagacaaatcacccaggtcaaaggattggaggatttttattttatttttgtctgagatgggaaaagactccaagtggggaaattaactactgatgcataaattacatgctagattatggtaaaagggaaaaccagaaataaaaacataggtgagaccaaataatttcatgagtggttctacttggatttctgccctatgccttagactttgaggctttgtaactctcaagcattccaaaaggacaaaggagaatgaagaaagaaggtaagaaaaagaagagaatatgtaacagtcgactctagacgagaaaacaccaaacgctcaaatatttgtaaaatgggaggccatgccccaatagcaattgtacgctgtaattacccaacgtttacagaaattcctttaaaaggaccctcggggttgcggtaataattaaactgttaaaaaatatcaaaacaagcggaataaacaaaatcttctattcctaaattgctctagaggttctccaatccccaaagacacagagaagggttgtaagatctcagtacgcacatttgcactttcatctggccagtggcgccagcctatcaaatacagtaaatggcttttccctttcaagaatgttggaactttggaacttacaaaatactaaataatttgcccttattcgaacgggcgcctctcctcttaggtttatagtaatgccacctgaggcgcggctccatagcgatcatcacaggtgtggcgggagggagggcggcagtgaccacgagacggggcgcagagggcgagcgcacggctggcagtgacaggtcgcgacccagctccttgcggagagcagaaaggcccagacgccagggaacaggactagcccagctaccgcctcgcgcctcgcgccctgcgcccacaaacccatcgacgtccgcgcaggcgcactacgccggtgcccggtgcgagggcgtcaccggaagtgtcccgcggcgccccggatgcgaccgggcaacagcggttgccagggcgacgggagctttccggagctgctggtactcccgattggagacgtagaaccgttacttgtcgagggccttagcggccgccgtgaccctctcggggatcccacgatgttcttctacctgagcaagaaagtgagtttcctggggggcgtcctcgtttctccgccattcccgcagcctgcggcgattccc

SEQ ID NO: 22962 - DNA, 2300 bp, Homo sapien
tttaggaaggtatttgtgatggtgaattttaatgtgtcatcttgactgggctaatggatgcccagatagctattaaatattatttctgggtgtgtctgtgaggatgtttctggaagagattagcatttgaatcggtagactgagcaaagaagatcaccttcatctatgtgagtggagtgggcatcatccaatctgttgagggcttgaatggagcaaaaagacagtggaaggcaaatgtgttctctgctggagctgggccaaccagcttctcctgtccttggacatcagcattcctggttcttgggtctctggactcagattgggccttatgtcattggctctcctgctcttgggccttcaggcttggactggattacaccactggctttcctgggcccccagcttgcagacagcagactgtgggacttctcagccttcataatcgcatgaaccaatccctcataatctcaattactccccccaccctctctctatatgtatgtgtatataaaatttattggttttgtttctctcaagaaccctgactaatgtagggttcaaaggctttggggatcattctaaaagcaagacgaaagacaaatgtccaccagagcttgcaaatactgtatttatcaatccctcctcttcttggcatagtttctttcaaacttcttagtgtcctcttcccattattacaaacttctcgtttcttctaaggtccttctaaattggtgagttctcagtgggagttgagtgaccttttccctcagtgtgactatcactgcccaatgtcattgatacattatacaactccccatccccacttcccctcagctcctgttaaccaccattctttctgtctctatgaatttgactactctagattccccatgtaaatggaatcatacagtatttgtctttttgtgactagcttatttcacttaacataatactctcaaggttcatccattttgtagcatctgccaaaatttcctcccttttaaggctgaacagtattccattgtacgtagatactgcattttgcttttccattcacacaaagagagacacttgggttgtttccgcctcttggctattgtgtataatgctgctaccagcatggggtacaaatatgagaagtgaggtttaggatcgtgtgaggaggatcacttgtagagggaaaatagtgaaataggacgaccagataggctctgttggaactcgcgcccattgttttaagacgcagctcaaatgtcacctggttttagaagtcttcctggtctccgcaggcagtcagtatctctttcctaaatccaccacattcccgtagacagacaccacatttatgcaaatctccttctcacagacagtgagttccatgggggtcccctggcagcctccagccctgtaccatgctaactcttccggagaggaaatggggcctcgggagagcctttgaagcctgtgttggtacaggctgtccttccagctaacggggctctctggggaatgtatgtttgactttctattcccggtaatataagttcaaatgtttgtggatatttgaagctcggatgaaagcgtttctattcatgcccctagaatctgtgaggccttttctttctttttttttttttaaacaagagcccacagcaaaacttgggttacttggctgaggaaaggaatgtagagctaggagcagggtttcatcttcagccccagtcgggcaaaccagtggcagaagggaaagcagagcccaggggtccccatcccgtacctggggcgcaggccccgctggggtgggagggagagtggagggccgggcaggctgcagccgcggatggctgccccccctgccccggtgttactgggaggacggaggttgcgacagcagccgagcccacccagttgcagccggctcggggcttagggcaggggcgggaggtgaccaccgcgccgctggccgcctcgcccagacattccgtttctgccgctggaatgcgcggacaaggctccttgttggccttgggcggggttcgccgggccggcctggcgctcgaggccccggggcggggcggggcccgaggccgcgggacctttaaatccgagcctcgcgtgggctcctggcccccgacggacaccaccaggcccacggagcccaccatgccgcgcccggcccccgcgcgccgcctcccgggactcctcctgctgctctggccgctgctgctgctgccctccgccgcccccgaccccgtggcccgcccgggcttccggaggctggagacccgaggtcccggggg

SEQ ID NO: 22963 - DNA, 2300 bp, Homo sapien
caggctggagtgcaatggcgagatctcggctcaccgcaacctccacctcccaggttcaagtgattctcctgcctcagcctcccaagtagctgggattacaggcatgtgccaccacgcccagctaattttttgtatttttagtagagacggagtttctccgtgttggtcagtctggtcttgaactcctgacctcaggtgatccgcctgcttcagcctcccaaagtgctaggattacaggcgtgagccaccgcgcccggctcccctgatcttatctttgtattcttttttattgtattgtatttatttctgtctgccacatttcatatcaagacagaataacagtgctgcacattaggatcacctaattttaaaattgacattttaaaaatgtcaatgcccaggtctcacccatgacagttaaatcagaaggtctggaatagtaagcaggcatcagtggttagtaaagatcctcaggtgatgccaatgtgcagcaaagtttggaaactattggcacaacaggttttaatctcagttgtgacactggccttgcaatcttggatatgtaatttaacttctctgtagagttaaataacgtaagagtacctatctcagttagttgtaggaatgaaatgattgaaaataaagtgattggatctgtgcctagaacaaaataagggatacgaaattgtggggcggggttaagataatctactccctacataagtagagaaatgtcataattcattctgagttagccagccacaccccatcctttagcgtgggcgggcttaactactgcttcccagatggtttgaaaataagctccatggacaactccttcagtggtgaatagtctctgctctcctaaaatttgtattttattggggagataatcaacaaatacatacataatttcaggcagtgttcaaagaagccatgccaaagaaataacctttactctgaattcagtgtggtctctggctaagaatatgccctggcagaagggaagccctttctattctctgaaaagaagtgtgtttaccaaagcattaaatgataaatacattttttaacggtgaagtcacaggtctcacagaaatacaaaatgaacacgtgtaaaaaatttatttactcattaacccggggaccagtaagctgttagaaccagctctaagcagaatttaaagcacccatctatattgttgaatcaggactggggaatgaatttacaaatcgatgcaaaatggcttttcccaaggaagggtaagataacaatacgaggggtcttaccgagttgtgcagagcaccacaaagaaaagcggacagcccctctagcaacagaatgcccgggacggtgtgccaaactatggctgttttttcattgaagacattcagtaattttttgtccatttcaatgtgtttcataatttctccctacaaaaaaaaatcactcatctccaaaaacccagcagctaagtagttcttctacattatcttgctttcatttatccttaatccttttgcctttggcagggttggatggtctttcttcgcccccaccaaggaggcttcggagggaaaagagggtgtaaatccaatccctccactcctccaggcaccctcccatttccgccacaggggcgaggatggctcaaggctgggcttggctctgtcccttccccgcaggccccgcccccagcccgcgcaataattgagctgcgcgcaaaggtcacgttatcagcctgtgacgcttcccatccagtacgtggcacacattgctcagaaaagccccttgtgcccgctttctgccatccgcgctgtctcgtgtctccctttttccattaaatgcctcttttcttgcgggtctcatctcgggaatagtgcactacggggacatacctatccccaactatcctaggcccgagaaccagcccttgccttcgcgtaacaggcggagactcgctgaggcgagttgcacttctaattgggcgtgaggtcttgtcaatccccaagttcttccaatcagaagtccggtccatccagccttccgctccccattggcctgtgtggaggaagaggggtgggtaagccgaagtcgctgcgctcagtgcgcaggcgcgaagaagctggcaggggcacgagccgggggcgggtttgaagacgcgtcgttgggttttggaggccgtgaaacagccgtttgagtttggctgcgggtggagaacgtttgtcaggggcccggccaagaaggaggcccgcctgttacgatggtgtccatgagtttcaagcggaaccgcagtgac

SEQ ID NO: 22964 - DNA, 2300 bp, Homo sapien
tgagaaagaggaaaacagatgtgataagtaaacagaagtgtctgcccaaccagtcggcaactaaaggcttcagcaaaacatttcctaatgggaaggatggtcagactcaaacagcaataagatataattttacttgcatcagctggcaaaatataaaaggcccaacaccaagtcataggaggatgtagaaaaatggaaatgctcataactgctgttgggagtgtaaattactataagccctttggagagcaatttgcttagagcaattgcttacaacaattcctgagaaagttgaagatgtttatacctataatccagagctctacttctagagaaagcctcacacatgcactcaagaagacaagtataagggccaggcacggtggctcacgcctgtaatcccagcgctttgggaggccgagacgggtgtatcacctgaggttgggagttcaagaccagcctgaccaatatggtgaaaccttgtctctactaaaaatacaaaataaataaataaataaaaaattagccggcctgtggtggcgtgcgactgtaatcccagctatttaggaggctgaggcgggagaattgtttgaacccgagaggtcgaggcgattctccctgcctcagcctcccgagtagctgggattataggcacctgccaccatatccggctaatttttgtatttttagtagagatggggattcaccgtgttagccaggctggtcgagaactcctgacctcaggtgatctgcccgcctcggcctcccaaagtgctggggttacaggcgtgagccatcgcgcttggccgtgagtgacttttaaaaaatgaaaagactccatcaaatcctccctgaccccagtttcctctgttgtgagcagtagagaaaggtaagattccaaaattcctatttttccaccatactgggttgaagggatctgtggagccaccctctggtagaggtagaaccttcgaaaagggcatttttaatccacagggactcctcgagctcggctggacctccgtggtgccgtgctgtgagaccatccatcactcaggcactcagcgagcccacatcggcccccaagaaccctgatgaaggtcttcctgccccctagacagacttggggagacggacaccccaaaagcgagagctctttgaggtcaaacaggtgctcaggagcaggggtacaagcaggccatcatcttttagtgctgtgaggaggagtggggggatgagatggggacgcaggaggctgctcggctccagagcctgctccacggtggaaggtggaggagagtccagggtcccacggtcagtccctgcgtggcccaggaaggtttaattcttttaaagaggaacactggacacttcccgatattttcttggtccccagctcaggccgacccaagttcttgccttccgcctagggaagacaggggaggacgacgccatctttggtctcagggcccaggtgcgaaggtcgtttggcaccatctctcctgcctgccagatgtgggcagggcccgtccggttcttcccctttgctctctcggccgtttcccctacacccgcaggccttccacagctttttgaactgaggcccagggcctcgcaggggatctcgaaggagcagcaactgcacggtgctcctcagatccgcgtgcccgaggtcaccggggaacaaagaagttacttatttttccttttagctcagatgaagagagagggcgttgtcttccacagaaaaacgctgcgaactccgcccccgtccccctttttcttgcagcccttccgtgcgggtgcagctgtttaaactaaggccccaagtctccagcactttgtggagtgcaggaagaacgcgagcgtacgggagaatctgggccggcggggcgcagcgagccgcatcgcagctggaggacagccggggtgtgtctgtgtgtgtttgcccgtcggttgaaggccccatcgcccccgggtccccgccctgccccagaaagcgttccccaagagagctaggagtcctgcgcacctggagcgcgctccgcgtccacgcccagagggcgctgcacactcgcgcccgaggactgcctgccccccttcagcccctctcccgggctgcgcctccgcactccgggcccgggcagaagggggtgcgcctcggccccaccacccagggagcagccgagctgaaaggccgggaaccgcggcttgcggggaccacagctcccgaaagcgacgttcggccaccggaggagcgggagccaagcaggcaagaaccttaggagcgggccgggggt

SEQ ID NO: 22965 - DNA, 2300 bp, Homo sapien
aagcctaaacatcgtaacatataatttaaatcatcttttctatgacctgttattttttaaagtgttgttacaattgaaagtttataatttagccttttttcacagtcgatgaatgattagcagtctgtctaccctcttagatattttaggtacactttgtttcatatctcatagtcatactgttggagataatttagacatatagtaaaacttaaagagccagcttctttatatttaaggttatttctgaattatttttaaatgtttggcttgacttttcctttttggaggaaaataatattgcatgtgtcaaaactggtttcttggattatttgtcaggggaataatgctgctcttattagagctgttgtcttttcattgtcagttaaattgttttctgaaataaataggaatttaaaatgtagccatattttagaaaaatcactttgacagtgtccttttaaattagcatagttaatgtagcatacattgccagttttaccaaaaccaactcaagaataactgtttattacatgtgcttataattcacttttgcaataaaaatgcatatagacacctagtattttcttactatgatatcttaaaatgtaaaatcttcaacaaaacatgatcagtctcagaaactgcattggctggtataaaaggttgaatagcattataatcttttgcctaatgtggtagcataagcctggtttttttacccctttatagaattttgaatttggcaaaaccaacgtaattaagttttccgtctgtattatactcttaccttggtctacccatgatgtactctccttaatttttttctttataccctgtatgacctatttatatatgacttgtgcttaaataagatttaatagaaacttagatcccttgaaaagcattgccatattggtccgaatatagagcttgtcatttaaaaatgtatttggcaggttcagaaatgtggtttgaaattttcttagatgtaaaagttattcagttaaaagaggctagtgcttagaaataggaaggaaacgtacttgaatatatgggctttaagtgagacttgagaactgagagtttggacagcccttagagatgcatgctgtggaatttgattatccagacaggtgttgattaacagccagatcttgattagctcttctgagcatgtatagctcaccagggcctacatgacctttattttctgcactataaaaggaaaaaggattagaaggataatagttacatttgatattaagtaaaaatttggtatgcattgtattaagggatgtaaagtaagagaaattgtgtattatcaaatgacaaaaacctgatcagccttgagtaaggggctcaggaggcagtagtactagcatcttaggagtagaagagtcctgtgggataagtgaaagtatgtctttggtttgataacagtgagagctattaattttagaaaagtcgagttactttgtaatgtagttaaagaacaagggagaatgcgtagtgtaaaaaatactgttgagttagctgctcactgtatttcacaactgatcaatattcgggccaatatggacttaaagggctatgttttgaacacagctagatgacaaattaaatatgaatggtgaaggaaatgtactaattatttattcatataatcttttcttggcattgagttaaagtctaagaagcaggtttcagagattaggatactatcagaatttaaacttaatggaatttaatctctagcatgtcctaatgcagacaacttgcaattccagggtttataaatcataccagggtattaaagcacagtaatcagatgtgtcagtggtaaatatgtgtgaaataatgaatcatatgactgctctgttaagtatttggttctttattggggtgcatttatacccttttatgattaataagttagtatatatagttatcacagtaattatcttctccaaaatgtttctaaaaataattattgtgatcacttctgttattgcccagcgagagttggggatagattttattcagttaacactgtatgtaattagggttttttttatttcttcttcagttggcagttctgcaagtagtagtgccacaaggagagagtctctatctactagctctgacttgtacaaaagatctagtagcagcctagcacccatagggcaaccattttacaatagtctgggattttcctcctctccaagtccaataggcatgcctctgccaagccaaactccaggacattcacttacgccaccgccatcactttcatcaca

SEQ ID NO: 22966 - DNA, 2300 bp, Homo sapien
cattattttcctttctttttctttgtcttttcttttttttttttttttgagatgagggggctctcgttctattacccaggctggagtgcagtggtacgctcatggctcattgtagccttcacttcctgggctcaagtgatcctcccacctcagcctcccgagtagctgtggctataggcatgccctaccgaaacaggctaatttttgtattctttttgtagagacattgtttttaccatgttggtcatcctatgaccaaataggaccatatggagaacattagatcttatcttttttttttttttttttggagacagggtcttgctctgtcgcccaggctggagtgcaatggcacaatcatggtttactgctgtagccttgaccttccaggctcaagtgatattcccacctcagcctcctgagttgctgggaccacaggcatgcaccaatgtgccaagctaatttttaaatttcttgtaaaaatcgagtgtcgccatgttgcccaggctggtctcaattcctgggctcaagtaatccacctgcctcggcttcccaaagtgctgggattataggcatgagccaccgcacccaaattagattcttgcttcctaaatacaacattttcaatttagagagtcatctttgttttatttggctttgacattttataggtcactgaagctctgttcattttttttccactattttcctattcttcaaattagaaatcttgttgatatattttcaagttcactgaccctttcttttgttgttttataatctgctaagtgcatccagtgtaatttttaaatatttttttcagttttagcattggttatttttgtagtttttctttctctgctgaaattttgcatttgttcattccttaggagcatatttttctttaaatctttgaacacagctatggtagttgctttaggattgctgtctgctaattctaacctgggtcgtcttggagtggttattaattgactttttcctttaggtcacattttccttttttctcacctgtctagtaattacagattatattccagacttcatgattgatgtattgaagatgctctagattctgttgtttctttggcgaatgtggaggttgtgtgtttgtgttttttttgtttgtttgttttgagacagagtctctctgcgatgcccaggctggagtgcaatggcacgattttggctcattgtaacctctgtctcccagattcaagcaattcttctgccacccgaatagctgggactacaaacgcgtgccaccgcacccagctaatttttttgtatttttggtagagacggggtttcaccatgttggccaggctggtctcaaactcttgacctcaagtgatcacccacctcggtctcccaaagtgctgagattatagtcgtgagccaccacacctagccaaatgttgggttttgttgggactcagcctccaaatttctgtgacttttgtggtggtcagcagcagaaatttctgctcaattcttttagccttaattgagctccttggagtctgtctcacatatgtgcagttcaggcgtcatctgaaaatcccagtgtaatttatacacgggacatggcgtgtcctctctgggattccctttcttactttccagcagctctggttgctctagactgtgtcctttggtttcttcaggccattaaggctggattcttaaaggaatttaaggaccctacttccacatctaggccttccctcgggcagaaatgccatttaaaaaaaacaaacaaccaaacaaaaaaccttactctgtgctactcctttctttaaagtatagactgttctccagtttctgggctttaattgtttttcattgccttcacatagttgttggcacacagaataattcaagaacccttgacctaatgtttttctacaggttttaaggtagattgctgtcataaactgggaaaacctgtcttccctacagaaatcagtgcttccctttctcagatcatgctaatattagtcatagcagcaatataatataaaaatagttgaagaagtctgtttaaacatttctttgtactaatttttgtttttgttattcaacaggtttgatctgtggatgaaatgaatcatgattttcaagctcttgcattagaatctcggggaatgggagaggtaaatgtttgcaaatactaagaacttacacctcactttattttgagccattgtaacttattttttttttttaaccatctcccttcctggaaatagtggtcatatcttccaaactatatggagggg

SEQ ID NO: 22967 - DNA, 2300 bp, Homo sapien
aagggtagaggcagccagccaggcacagaaacatgtgaaagagagacattgtcagcactctccttttctctctcaactccactctttctctacaggttccctgtcttacaggatggaaccagtctgcccaagggatcccaggtccaagagactttcgaggttggggtctcttagtcccaattccatattctaagggagggcctgtgatggatttatctagtttcacccacactaagcaactgtatataaagactcttctgctattatcagctcaacggaggggaaaggagaaggaaggcaaaatgtgtacaccccagcatctcccattcttacttgatcgtgagacatttcttaaaggaacatctattaacactgaacacagcacactagggaaatgctgtcgtgggtgatggggagcaatgagatggttgaagcagaggcctgagcgccaggaattggatttgcattttagatagcagtgagcagaactgattggagggagtgagactggagacaggaaagctgattaagagccagctacagaaatccagacctgggaagcaaggctagcattagtgaggaggcagaggaagactgtctccagaattacttgggaagtaaaaatctgcgaggcttggtaagttatttatatttggagtcggggtaagaggaagagacaaggatggttctcagaggtgtaatttggggaatgaataggtggtgacactgccaattacagagacagtacaagagtggggggtaggggatgggtgtgacttcagtttttaacatgcttggtgacaagaaaattcaagtgaaaatatctagaagcctgaaatatgagcctaaggtaggggcttgggatggatttcaatgtcagacatttttcagtaatagttaaaaaccgaagagcccatgtgtattcaacaggcacttgcgggcacagtgtgaaacaaaacacaaggtccttgccctcgtggagctcacagtcgcctagggaagacatatattaagcaaactatacgggaggccctgaatatttacgaagtgcagcatgtcaggagagccaggagctgtgcaaacaaaccatcaagaacaaatcggacacggtgcctgttacagctgtgtgacctggagccggttaggttagaatcctggaatcaccactgctttgcatgggggtccaggacagcaaggcagatttggagtttccaactagcctgtaaacggggaaggagagagcgcttagtacgcgagaaaaagaaacagccaacgagtgagaatcactggcccagctggagaacgacctgagtttcctttgtgtgcaccgggaccaagcactgggggccgacaatttgctgagagctggctccacctgcctggggtgcaaccacgagaagagtgacagccctctcgcagggtacaatcttccacccccagatgcatctccctcgtctggttgtggggaggtacagagtgaaagttaaaggcctgaattaacgtccggctcttgtgggcgccagcactctggaagcgaaatgccaggagtaccccacggtgggcggcgcgggcgcagacacccgcacacccagttgggggaaaacagtgagcaaccgggtaggaagccgagggtaagaagattcagaaggcgaggccccacgcgggaagacagtcgaacacagcgtttggcaacagtacgcctgcgctctccgagcccgccgcggcggagcccaggagggaagcgcgagcccgcaaggtgagggcgggggagggcacgccggagaggcggccaaacacgtgagagcgcggagaacgtgcgcacgcgcagggcgcccccggcccgcgcggcggcagcgcgggagcagggacgcaaggcattaaaaggagccgcgccttggtgagcgctccccctcccctttctcccggggtgcactgcgcgcgcccggtgggcgggggggaggggagggcaggcggcggtggcagccatgttgttgtgagtctctgtgtctcaccctcggtacttcggtggttcggaggaggagggggaggagaaggaggaggtggggtggggggggagggtggtaggtggagaaagaagacattgccgccaccgaaggcggaggagggggaggaccgccaagagcgacgccgccgtgtgcccaacggtcggtgtccccggctgaggcagcgcggccgcagcagccctgtaagtcagtccgcgttcgctctttctccggtcctttggcgccgtcgaggatggctccccaggctttgtgcggcggcctcggcgggagccgatc

SEQ ID NO: 22968 - DNA, 2300 bp, Homo sapien
tgggctcaagcaatcctcccacctcagcctcctgagtagttgagattataggtgcaggccactctcctccccacgccatcccattttatttttctcagggacagggacggggttttgtcatgttacccaggctggtcttgaactcctgagctcaaacaattctccagcctgggcctcccacgcccagggatcacaggcatgaggtactgtgcccggcctggttagataattgttaaagcgaagtgtggaactgaggtaagaaacccccagaaaattccacctgcgtttctgagcattcgggttaattccccacagtcatttactgatccttgtaaatgccaggcattgtgctgggtcttcaagatgcggagataagacagaatcctggccctccaacaactgacagagaccgagacagagacggagacaggaggcaaccacctcccggtcatgtggtgggtccctcctttgctgaaaaaacagtttgcagacatttcccatgcaatggatagacagagcccagcccatgctgttaatactttagcactcatgagccccagcatatgcagctcctagagtttgccccgctccttcccaccttcctgcttgtgttcaggctgtttctcctgcccgggagccctccccgactcccctttccccctatccccttcttcctcttttatccgtagaaatcggttgacttgggtctttccggatcaccggtactgtcatttcatgcaggatctacaggataaatgagttcagtcctggcgtgcatcaggaggctacgccccaatagaggggacaccccctaacccgctgtgccccatttgctagccccttactcctcccctcttctccagcctcaagccttttcgtctgctcaggggtcttggggtggttggattctattgaacccggaatattgtacgttctattgtacaatagtgtatattctattgtacattctattgtacaatagtgtatattctattgtacattctattgtacaatagtgtatattctattgtacattctattgtacaatagtgtatattctattgtacattctattgtacaatagtgtatattctattgtacattctattgtacaagtgtatattctattgtacattctattgtacaatagtgtatattctattgtacattctattgtacaatagtgtatattctattgtacattctattgtacaatagtgtatattctattgtacaatttatctcagacagttctctgttttaagaaccgggatcagagttcatagtgaaaagaggggccgaaggggcttcttcctgtccggtaacttcctccaagtgttcgagcctcgaccttccctttccgttgtcaagcttgggccactccgcacctcttcccttaatcttcacctagagacctaagctgggggttgggaagggtaggggcggcgggacttggaagagccagtttgcagccagccggtcgcctctcgggtccaaacccgaggctggcccacggcgagtacccgggtggggccctaaaccacaggaggggccacctccaaaagaaaagagaaaacactcttgtttgggaacaaaagtgtgtgtgtggggtgtgtgtgtgtgtgtgtgtgtgtgtgtgtctgtttatttaaaaacaaaaccacgttaaaagagctgcccctcccccacaggcccgaccacccgccgggagtttgccaggaagaggggcaattctgaatgggagtcgccaacgccccactgagtgaagcctgtctcggaaccgctcgcccagaccctggaggctccagacagccagctcccggaccccgcgcgcaaacgctgcggcgaaggaggggacccgggtaccgccagagccccgcagcggcagcagcagcgcggactccccggtcgctgcctctcccagcccggcggcctgggccgtcaatcaagctggccctgccccgccctcgggctgcagggggcggccaatcagagctaagctccgcagcgatgagctcagccggctggtttcccattggacggctatattaagaaagtggccggactctttaaatagcgggcgctagggccgcagccctcatctgccaccgcagtctggttggagctgttgtcttgtatgctcagcgaggcccggagagacccgggagagagctaggccgagtccaccgcccgagtctgctgcccgagcccgcgttacgcacaaagccgccgatccccggcctggggtgagcagagcgaccaccgcccgggagcagcgcggcgagacgcacggtgcgccc

SEQ ID NO: 22969 - DNA, 2300 bp, Homo sapien
ttggctggggtcagctttgctgtctgccccaggaggccatggcccttgtttggtacccacttcctaggagtcatgagagccgagctggctctgcctgattggtaagaataaaggggagaatgtctgagtaagagcaggcgagccctggctcctccaggtctcagaggagcagaagctgaagatttctggaaagcacttgcccttagggtggagaatcgaggctccctccacctcacctccagcaccacaagcagggcctgagggtggtgcacagcagaggaggtccctcatggcctgagctgggtggagaaagcacaggaccaggcagatgggccttcttggagcagtccctgccactgcgtctctgctccccatcactacccttgaaacatgccactttctccccagagaacagcaggatcaatcctgttatccctgcgccatcctatatcaccttcctcatgggacatttggaggggacaagaggataggaccatgagtatgaccatcctcaatctagacccagcctgcctgtcccttccctgctgtgtggccttgggcagacactcagcttctctggaccactgtttcctcatccaacaaacgagccctgcagagatccttcccctgggactgggctctgagctcagaggatgctctgtcctgcagccttccagcagggaaccttccagcagggagccttcctggctttcatagtttctcctcgcctcggctgggtgcctgggattctgccagacctcagactccagactgtgggaatggtcaccttgcggggacctgcccctccagcacccagggccattctgctatttttatctgccattggttaatctgtatcattgtgtaggccagcctctcggtgcagttttgccgcagcgtgttaccaacatgagctcagatggtgacctcacatagtgacctcagtccagtggaactgcccgccaggcggacaggcacacggaatttcagtttccagtaaagagcatattctcattattttcaggaaccttaaaatggctaatagacatcatcagcagggattgaatgcctgttaaagtaattattaaagtaaaatcaagtgtgtttacttactggcggtatcacttacagtgacgtacacagatcctgagcattcagctccatgcgtgtttacttatccagcccgtaactaccgcctggatcaaaactaaagtactcctacaccccagaagcttccatcctgccccgtcctggtttcttacagcagggtctggcccagagcaggacctcctcagccagtcggcaagtgcactgtaatgggacctggggtggcagagtcggagccggggaggtgggcaagtcccagagaggcttcctgaaagaggggggctgctccacagaacccaagtgttaactagaacaatggtggttttaccatgcaaaggaaacaataaggcacttaccaaagctgctttctgccctcctgagtcctagccctgaggtttgtggctcaagaccaggtccatccccatttctgagtggctgtggagtgtggttctctgagcctggcccccaagtgctgagaccctgagaccaggcagctgtctctaccttccgaatgggagtgtgatctctggcctgtgaccgcatggcagactcaaggcctgaaggcgtctaagagctggggttgtctggcagctggtgcccggtcctggcagccgcctgctcctcctgacagtggtcatttcttgaacacagggcacagctgcccacagtagcgggggccttaccactctgtcattggggaaacctgcttctcaaccaccttcgctggcctgcttttctcccctgggatggaggacctgtccttcccttggccgtgtgaccatctgttagagatttcagaaagacttcagctccacctgcctggactgctctgggtggccccctccaggacttccctggtccctctggcctggtcttttctggcccatggcatccagcccctccactgcagggcccagcgcctgtgtcggtctgaccggaccacctggacacttgtgggaaatcctcaccttgtgctttgtctgtgattctccagctccaagaagcccaagaaacatcccaaagtggccgtgaaagccaagccctcgccccggctcaccatctttgacgaggaggtggaccctgatgaggggctctttggcccgggcaggaagctgtctccacaggacccctcggaggacgtgtcatccgtggaccgtaagtagagccccatggtctgctcctggtgtcctctc

SEQ ID NO: 22970 - DNA, 2300 bp, Homo sapien
ccagcccttcaaacactgcctgtctgaaacagaacccatcatcctaccaaaaatatgctccttctccaggtgccctgccacagagaatgataccaatgtccagccactcacaagagccaaaccatagtggtatcttatctcttcccgcccacacccattggattcccaagtcttgaccaactccttctcctaaggccctcttacccgtcccctcttctccacctgggtggccatcaccctagttcatgggaccattgtctcttgtctggattgttctgcagtccagctcatcttcataccttcaacatgctccaaaaccctgcccacgccctagctggcccagccactcctatgtccctgaccctctgatggcgctgtgttggcctcaggatcaggcaaagccctggccttggtgcactaggctgtccacaccctggctcctgctggcctcttccccctgttccctggtgttcctatcctgtcgctagggctttgcacgtgacattccttctaatctattctatccatatttcttcaggttttcccttggacttcagctcctttagaaagcctttccagacccccacccactccccatgtaggagggcaaagaagtccactgaaggcatctaaagtgtcttattcactgtgtttctgtctgttggataaatgtgagtgcaatggtgactgctcgactgcctggcactacactcagactcctggaatgctgaagcctatactgctttctgtccagaccctgaactccctttctctaaagtagggcatgccaatttaaacaaaacacggaggaccatttgcagccatgaacacggccctgcagacggacaggccgatgagcagcagagcagacaggggttcccgccatcatcccagctcttcactgcagccttcaagggtctccctcagaactttcattcattgtcatacttcattcatgattgctcatcttgcctataaacaaatctgagacaaataataaggcatatcaatgtccgtatttattcaagagatacattggggaaagtcatttttcaaaatcttttactgtaggatttcttcactaaaatctgtaaaaactggtagatattgttggtgatgctggtggcggtggttgataggctcaggaaacatggctgacatcgccctgccgtgaattctggtatagttaagcccagcttctctttctttttgtcactggggctctgggtggagggagtaacagaacaggggcagcagtttgcaccttctgctggccctgtttgcagactcagcttttctttccctgggctacgttggcaggtgatacgatctctctgttcctcaccccatggagaggtgaatctaaaatgagtgggtctgttagggtctgcatgtctgtacgttccccttctgaggggaactggctcctggaccccgttgccctgctccagctggggacccaagtgcagccatcccaggcaggcccggccccgggaggcctccaccagggctctgccaagcagcagaggctgcctctctaaagatcccctgtcgggagagtgcctgccatttatggagcgggcaggcagtaggaaccagataggcgagctagctggaggcagcaagctcaaggggactgggctgctgcgtggcgttcactgtgcagcttgaagaagaccccacgaagcctggacagagccccagcttggtaaatatttgttgaccgatcggttgaatgaaatggtcttggggcagagggggagtggttttgtaatggggactggcggcggaaacagcagagtcccgtctctctaacggctaaactttagcgcaaaacagacacaccgattaaggttcaccgtgtgccagggccaggctgggcttcttctaggtggttgcggcgggcgcggctcagcctgggtgctccggaagctccgagcagcgcaggccgacggcgaccgtgcgggacccgcccagccgcgcttccgccccgcctctggccacaggcgcgaactgcgcggccgctgccaccagggggcaggccagggcagcgggaggcagggcggggacgcggtgacgcgggcactgccgggtcccgtgactgcgcgccccgcccggagtccccgccgccgtcatgcagtccccggcggtgctcgtcacctccaggtgagccagacccccgcgccccacaccgcacagctcgcagtccggggcgcccgggcggagaggcggggggaggccgccgcctcctaggccagggacctggtgcaggtctccccagcgccctcggtggcttatcc

SEQ ID NO: 22971 - DNA, 2300 bp, Homo sapien
cccccagcccatcactttactcggaaccactggatagcacactgtgcatttatgcgcttcctgttggctgtctcctgtgtccatcctaaagctccatgtgctcgccctgtgcgttgctcaatccacaatgcaccgaaggctacctggcaatgagtatttacataaagaaggaatgaatagagggacggataaataaataaatgactgtgccctcaccatacagaccaagaagcacaggtgggagaagtgaagtctcagttggagcacatacagcgagtggacagtggctccagcagcattagcccaccccatgtgtgtcctccaaagccttccaggtgcgtagaagctgcttctctctctgccatgatcacccctggcactgggaacacactggtggttgggggcaagactacatcacctcctctgtgccagcctgttatgccagccacacacaggatgaggtgagaatccgctcattttatagattaggaaattcggtctccaagaggctaagtggcctgctcccacaatgacagcaagggtgcatccctcattcctaagccccaacgtggcaggggtgtcatgtaatcaacaaacgtttgtcactggctgtgccaagaatgtgctaggacccttccgctctctgctctacacagccgggtaaactgaagccaagacaaggcaagcgacttgctgtcacccaggactccccgcgtgtttgcacaaatcttagccgagttgatttgtaaaacacccaaacactgcgggcgcatggctgcagggggaaaggaagccaagtaacacagtaggacccagcatccgcgtcagggagagaccggggggctggcggagtgggggcggcggtgtttgtcaccgactctccaatcccagtcctagaagcagggtggactatcccagctcgatcatcccagattccccaggctcctgctaggagaagtccctcagcgccggcagcgctgaccctggtccaggggtccgcccttcccggtaatgtcaggcctttctccttggcatagatcggccttggggtctgcgaggactgaacctcactaggcctctctctcccacccgcaaacattctcgagtgttatgcggctcaatgccccaaggtgagcaggcgccgcgtctccgcggtggccgagagggcaatggctgaggagttcgtttgggacgaagcagtggagcaggggaactggggagcctgggccgggcctctctgtgggtcccagcgcagcgcagccaggcaggcgtcgggacctaggcggctttggattcggcgggcgacctcgctttgaagctgatcacccgctcaaggtgatcacgacgtgccgacccagtctagattttgagttctgcagaaaatgcaattttaaaggaaaaggacccgcctgcccttcttcggcagttcgtttggcccaggccttcgatcagctgaaagtttccgatctagggggatgtccaggctgccggcggagcagagccgataacccccctctcctgcgcgttcccctgagacttggcctccgcaacctgtcccagccgcggagcaaactgctctgcggcccgcgcgagtgcgccccagggcttcgccgctgccgggcgtcccctccatccacctcgggacccgcgccatcaccgcggcggggtaagaagctcggaggcgccatcccggggctctgcgccgtccgctctcccggctcctggccgctcacgcacacagccggtagctggttttcgttagccgctgccctcgcccagaaggcgggtggaaggtcgccagttggacgcacagccaaactcttagcgcactcccgcgcgagatcccccatcacccggggctgccgtcctcatttcgagctctttctagagcttggctcccgctgaagcgcaacttccgcgcccaaaccttgcttttacgacgggcggtccgcgtccaaaggtctcttacaggcctgccctttcagctcctcgccctcccttcctcccctaccggccccctcccctgctctggccgcccgctgcaatcctttggggtctgtggctgagtggggaaccgccgacccgcgatccggaacgcgactttgaggccgccgggagcatcctgtggcctctctctgcgcggccacccggccgcggcgcgaagcggtctggagggcgagcccttccgcggccccaactctgccgccccgttcccggcattgggaaccagggcagggagggggcgggtgtttctctgcgggggagtggggaggaagctgggcgggtgcgcgcggtgcccc

SEQ ID NO: 22972 - DNA, 2300 bp, Homo sapien
ctcccttgttctgtcactgttctaagccataagggatgcatgtctcattcattgaaaagtgaactcatgtttggtttataaacttgaagttttcatttcaaacccacttagggggggaattctaaactgccatgaccacgtttggcccaggcttacggaaacagctggtgtgtgctactgccagactgaatctgagcatcactatcagtaagtaggaatctgaaattgctccaaagagaacacatgaagtgcagctttcagatgaagttaggcagtggtaggggggctgcctgtaaggtggtgctgcccctgcccccagagggccaggccagggctacagtgtggcttgggaaaggggcaagtgtcctcaagaacaggaactcctctgctattgctctctccccatccctcttagcctgccttagcccaaaggtgtgtgttgcctttgggagcaaaccttgtgcagttgtttgcagattggggcatgcaaatccttctgacatgcacatgtcctgcctgctgcagcataggaaatgctccctggaccagctcaccaggcctgcctttccgccaagcctcggtattctgaaacggattgtgttagttctgcctgtttaatttaaagcctgtccagaatgtcataatcatcctgaaaatagataggtttgtttttatctcaatattgtgaccttgaaagctttatttgggcaattgtgtgagcacactctggggttctgcagtggagcctggtgactgaggggaggcaaacgtgctggagagctgggctcccagagtctcagccaagcttcaaacaccaaatccacccttgttcatgaccctgcttaagttaccggacctcactgtgcctcctttattcatcaataaaatggttaataatagtatgtagcctcatacagctattccaaaaatatgctataattcataccttgtaattcagaccttataagagtatctccgccgggcacggtggctcatgcctgtaatcccagcactttgggaggccgaggcgggtggatcatgaggtcaggagttcgagaccagcctggccaacatggtgaaaccccgtctccactaaaaatacaaatattagccgggcatggtggtgcatgcctatagtcccagctactcgggaggctgaggcagaattgcttgaacccaggagggggaggttgcagtgagccaagatcatgctactgcactccagcctgggcaacagagcgagactccgtctcaaaaaaaaaaaaaaaagaaagagtgtctggaatgcactaagcattcaataaatgtttttattactattacaaagttagttatagcctagttatgcttctaagcactttaaaaagactatttgcctaactgttcctcttctcacatccccttttcagatactttcattgtgttaatgaaaggtattagtgatgctgagtatgtggccaagagaccccggaatgcccaatgccattctaaacaacagccaccactccccataagatgcctcaaggagctgttgtataggaaccataatgaggggaaaacacaatagtacttgatttttaccaaggcttgggcccattattctagtccagagaagtctgatgaactggacttagcccttctctcagttagttgagtaaaaccattccagtacatttgcccccttcttggggcacagatccagggaaggacagaaacacagaaggagactggcgctcagggcctcttactttgccagagggcctcgccagaggaaagcagaggccctgggttagcatctcagtgcagtctcacgtgagaaagagacaagccagtcacttgatggcctcgtggcttgtatgtgggagggagaggatcctggccctttacatgttagccacacggaaaggagagtgctgctctgcacaccgctgtatacacagatggttgttccagctactggagagtgagccacacagtgccccataggacctactcctcctttggcgctcccattcccaccgctcccctctgtgcctgcagagagaagcagggttcacgggcgggaagcatttgtgttttcacctccatcctcagccactttttaaaaatctttggagatttcagttctcattttctcaagaatggtaattgagccagttaggaataaacggaagagaggaaacaaggtaactggaaaaactgaagtccctaaaccatctccctttctttagcaattctgcaagtccctaaaaacagaggctcagaaagactgcagtgaaatgttgacactttgcagctgc

SEQ ID NO: 22973 - DNA, 2300 bp, Homo sapien
tggagattaaacatggattagaaaagaaattccaagataaattgagaaataattttgaactaaatgaaaatgaaaacacaacttatcaaaatttataggatgctgcaatgagccaggatcgtgccataaaataaaattaatatatcagagatgtatgtactccatgtccattgaaacacccttcacaatagcaaagttaacagaatcaacctaagtgtccatcagcagatgaatggataaagaaaatgtgtatgcactcaatggaatactgctcagtcttaaaaaagaagttttgtcatttgcaacaatgtagatgggcctggagaatattatggtaagtgaaataaaccagacacaggaagacaaatactgcatgtcctcacttatatgtggaatctgaaacaacagaacttataaagtggggagtagaatggtggttactagagtctggggtggtgggcagtgggagaatgaggagaggaatgttagagggtacaaagcctcaaatagacagaagtaataacgttttttcctttgggatatattgcacagtgcagtgagtatagcaaaaacagcctttataacaaatgatgctggaacaactgaacgtccatgtgcaagaaaatgaatctagacacagaccttatacttaccacaaaaaccaactcaaaatggattatagctctaaatatgaaacacaactataaaatgactagaagataacataggagaaaacctagatgaccttggatatgatgatgactttttagatacaaaccaaaggtacagtccctgaaagaaataacagataagctgaacttcattaaaattaaaaacttctacagaaagcagggtcaagagaataaaaagataagtcatagactgagagaaaatctttgaaaagacacatctgataaaagactaatccaaaatatacaaggaactcagaaaactcaaaataagaaaaatataaaacctattttaaaatgggccaaaaaccttaacagatacctcaccaaagaagatatacagatgacaaataaacatatgagaagatgctccacatcatatggcatcaaagaaatgtaaattaaaatgacagtgagataacgccacacctgttagaatggccaaaattcagaacactgacaataaatgctgaaaaggatatagaaacagcaggatatggagcacctctcattcattactggtgggaatcaaaatagtacaaccaccttggaagacagtttggtgatttcatacaaagctaaacatattcttaccatgtgatccagcaattgtgctcgtaggtatctacccaaagaagttgaaaacttagtgcacatgggcatttatagcagctttattcataattgccaaaacttacaagcaaccagtatttccttcagtaggtgaatgaataaatacactacggtacattcagatgataggatattttttagcattaaaaagaaatgagggggcctggacatggtgggtcacgtgtgtaatcccagcactttgggaggccaaggcaggagaatcatttgatcccaggagatcaagaccagcctgggcaacacagggagaccctctctctacaaaaatataaaaaatgagccaggcatggtggtgcacacctgtagtcccagttacttgggaggccgaggtgggaggatcacttgcactcaggatgaggctgcagtgagctgtgattttgcctagttataggctgagagggtggtgagtggtggttcttctcactctgaagagatctctagtcattctaaaacccattcatttgtcattactatatagaagagacaataagtaatggacctatcctttaagaaaacctctcatcaaagtatgcttctttattgcaggtaattcgtgcctttctgctctttccaacaattgaacgaatgtctgagtcacccaatggcagaattgccactccacttttgtgctggtttcgatatgttctctatgttactggctacttattattgaaaccgtgtcctgagacaatcaagtccttgctaatcagaaggggccttcaagtaatgaacctagagaatgaattttcaccattgaatatattagaaccattctgccttggtaagcacagattttaaaatgtgtatgtttattcttgtatcacaaaatgtttacacaatactctctgacagtggacaaatatcaagcaagcaattatttactagtttttttttcctcttccaaaagtttaaaactagaaataaataaaattagaaatagaatgaattttttcataagaa

SEQ ID NO: 22974 - DNA, 2300 bp, Homo sapien
caagggtgagccggtggtgttaaatagcaacttttactgaagtagtagtgtccagaagcagcagagatactgctccttgcagagcagggctaccccataggcagtgtgtccagagtagcatctgaaaggcagttcttctgtcatatttataatcatttttaattacaggcaaattaaggggtgaattatgcagaaatttctaggaaaagggtggtaacctctgggttgtcaggttgttgccatggaaaggggcattaatatggaaagctgcttcctccctgcccctgttttagctagtcctcaatttggtctggtgtccaattcctgcatcctacctcactgcatttttaggttaagccaatatataacctccatatattgatttatgactttgcctataacctctgacacccctgcatttaaaaacccttacctataaacaattagggagttcaagacttaagcactaactgaccagttctccttgcttgggaccctacaataaatgcctcactttctttcactataatcctgatgtcagtgtttggtcttgctgcacaggcaattggactccagtttggtttgataacagctcttgagagattggaaaagagagagtccctgagagagtgggttgttttccacctcctgtttggtctgttttcacatgtatcagcttcccctttgaccttctaccatgttgtgacactgcacaaaaaactctaaccagaactgagcagatgctcacactatgccccttgagctttccaatgtgcagaaccatgagctaagtaaacctcttttttaaatccaagcatactttgaagatattgggggttcagttccatactaccacaataaagcaaacatcacaataaggcagttcacagaatttttttggtttcccagtgcatataaaatttatatttacactgtactgtagattattgtgtacaacagtattatgtctaaaaaaagtacatactaagaaaagaaaaatagcccagagctgtctgagctatgtgaggtatgcaaaatttattagacccggacagaagtgaatactggcttccgccacgccttcccatgccttagggcaattgttaaaggcattttgttctttattagctgcctcacccattatctttatgttcctggaatttgtgatacaaggaagaaagcatagccagtcaatagcttaagttttttaaatataaattcttggtaaacaagttaagctctgcctcctctcctttccttaaaaaccggctcacgcctgtaatcccagcactttgggaggccgaggcgggtggatcatgaggtcaggagatcgagaccatcctggctaacaaggtgaaaccccgtctctactaaaaatacaaaaaattagccgggcgcggtggcgggcgcctgtagtcccagctactcgggaggctgaggcaggagaatggcgtgaacccgggaagcggagctttcagtgagccgagattgcgccactgcggtccgcagtccggcctgggcgacagagcaagactccgtctcaaaaaaaaaaaaaaaaaaaaaaaaaaacctactccgactgctgctaattggagtgtatattcaaggcaacttgaatctaagctcctgagtggccattctcaagcactgagcccaaataaactctatacttaatattattctctgaattttcttaaagttggcaacaccttaattaaaaaaatactttattgatcatgcttatgaacatgatcaaatgagaatcaactttcctgtgtatgtggggaagatatgcaactagtaacgcagaaagagggaaatgggaagagggagaaaagaggggcagacatggaacaaatgagagagaaggaaagggaagccagaagccagaagcacatcaaggatgacagaaaataaaaggcggataaaattcaaatgaaaaagaaaggaaaaccccgacaccctccaagaggtctctctgatctggaccaccggctccaagccagtaagaaatctcccagccagctgtgcgccgcgcgccaggctgacatcggcttcccggatcagctccggcgcggtactgtgacgtcacctgaggggggcacttccggtctcgtgccgccttcccaggaccctcagggagagcgggcagccttccaggtggacaggtgaggtacagcttgccgagctcagggtgactgcccaaaggaaggacgggtgggcaggcacgcgggatctggcgccccttcttctctatggttcctcgcagagcccctgttgccctgggccagatggcccgt

SEQ ID NO: 22975 - DNA, 2300 bp, Homo sapien
agaacctgccttgatgttatcactgctctagtcatttcattttattattctctccagctaaacctccctaacctagttagccactccctgcccttttcctttaaactcccacgatgattctaccatacttcatacaaggtttggctttgttttgttttcacaggacatttatgtgttccaaataactttttcctttttaactaaatcaagcagcaaagcacctggagggtcattggtttgggatgttctctcttcacaaattcagaacataataacctaagatcataaggattatgatcagttacataatgtcccatttgaaattagaagtggaaccagacggatgaactgtagatagagcctgtcttctctagcacttacactgagctctcctgggtggcttgactaccatgatacaaagaaagccctctggaagtataagggaaggaaacattactatagtctaaggagatattgaaaaacaggaaagataggagatgaagctggacctttcaggctacgtaagatttcaaagggagaaaggccctccaaggagatcaacacctcaagcaagatgctatagtcaaaaatattggggcctattttttaaaaagaaataagttaatcagtgttgctggagatcaaggttctggagtgaggaaaggcacagaaggataaggctaggtaagtgggccatcaccagatcatttaagactctggatggcaaactgagggtagacttcattctgcaagaaagaggagccaacagagacttcacaaaattctctagaagcattgaggagaggaagatattccaatggtaaaagtgagaggttttgaaaactttaatcaggacactggctatggagaagaagaggaggagggaaagaaactttgtaggaatcaaacaaatcaaatttaagtaggctggatatggggaagtgggagtgaaggactggtataaagaagaagaaaaaacaaagatcagacaatgtttatcaaaatattctcctagtgcaaggtccaagggagacactcaacaaatattctttgaagttggtgattccagggtttggagtataagtgactggtgatgatatttcctggaataagggaaaaatatcaggcattgagaggaagacaacagggtcagccatgggcatgttgcatttgtgggtagagatggctaattggcattggatatacaaatcaggtgagagatctgggagagagataaaatggtcagtgtttaacatatagatgaaacccccacaataaatgagctcttccaagaagaatgtatagaagacaacagaggctggacagcaaacatctcccaaggatttactcttgtctttgttctcttccatacattcttcttggaaaagcacaggcctggcagagagcagatactcagtaaacatttgttgagtaatggaatgaataagtttaaggagaatgtagattgcatttcatcagacaagtacacagagatgggaccttacttttgttgagcatcagttatctgccaggtactcactttacttgtggtttctcctttaagagaatgaaataatatcactcaaagctttacaaagctttaaagtccaggtttatagtgacctcagcttttgcaatgtctgcaactctcatgccttcccttggactcttccctaccctcaacatttttgtatttaatctccacataagaagtcagagcaaaatgaaactcctttgaacttgggacactcttcacattctcttctgtaaagagaaatcccagatgaccagaaaccttgtggttcttctgggactgttgcatttgtttcttgagtttactaattcatcactttctaagagctggcactgtgcaacatgtggaaagaagacaaggctcagccagcgagaagctcaaaatacagttcaaatgtgtatgtgcacacattttgggaacccaaaatcaactgatagaaaactaaggtttccttggatagagcctgcagaaaatctctgcacttatgtatagacctgcatcacaattgcaatggaatctgtaagtaagcactgtggtctgtgggcacactcagaagagtaggcctaattctgtcttagaagcacaggtaacggtggaagatcatggaagtcttcacagaagacaagatatcaaaacagagccttgaaggctaagtaggtttgtttatttgcttctttgtttttccagatagaaggggccacataagcaaagatgaagaaacataaaagagcctcagtgtggattttttgaaaggtgggacatgaag

SEQ ID NO: 22976 - DNA, 2300 bp, Homo sapien
aagaccagcctgatcaacatggtgaaacaccgtctctactaaaaatacaaaaattagctgggcatagtggcactcacctgttatctcagttacttgggaggctaaggcaggagaatcgcttaaacccgggaggcagaggttgcagtgagccgagattgtaccactacactccagcctgggtgacagagggagactccatctcaaataaataaattaaaaaaaaaaatatatatatatatgtatatattctctatggatgctgaccattggaccctggtttcatctgcacgtaacagagtaagcttggacttgtgcttgtaaattaaagctcgacacctccttttggcttctctatacctgaatattcttactcactctccttaatgtgaatatgcatggaagcaggaccatttcctcaaacactagcagcagcgaaccctgtggaaagtcagtccacatagaataattcaaataaagtgttcagagaaatggggtttcagagcaattactttttccagacctttcacaaatcagtggtgtaggtatgaccagccttgagttgagacctctgtaatatccatctttaataacattaatatgctgtggatgagcaactgatcactggagggagtttagctgcccataggagttcatggctaatgacaatatctgaataaggacaggtgtggagcccaggtgcaggaagcaggcgaaggtctttctgtgagtctcctctgagggaactgggtctttatacatagttactgtttcagaattgatccttctggaatcatcagtcttcaccagtagcttgttacatctggggttatctcataattcaaacaaagctgacaagttgtaacaatgagcacacactgacttctgcaacaggcgctgtccacttcccatccgcactctaccggcttgctcctggccgcctcccactcgccttcctgggtggtcccccagcagttatacctacctggttgtcgccccctctatcctaccacaattgctcactagcggtttcctgcgtacacagcttgtctccctaaccagagtggaggtgccttggggacacagccaggctcagacattcactcagctcatcatagtgccatcccatcaataaccccttctgagtgatcctgggttagtaaaccgagtgtccctgaaattccactaccgctgattccctccagctgggcagaggcagcgagcgctggctgaagcttccggtgggaaatgggcagtgcctagaagagaaggaaacgatgcatgagaaggttccagatgtctatgaggaacatgacgtgtcctgtccactactctgcttttcctcgtccgcctccccaccactggaggaaacctagaagctggtgcaggaaatcctcctctcaacaacccaagaacactttgcacaagaggggtgcgccctcggaggttgctcttccccagaggcctctcctcgctggggtttcttgaagacagatacttggactcctgctgggaccaggcaggccacccatcctcaggggcagtgactggtcactcaccagacctccctgcatcccccttctctctcctcccccagcacgggctgaaccccgcagccacagattctgatcaggattagggtgtgggtgcaaatccaaggtccaccaaaatggaaaagaagtaaccgatgggaacacgtctccaccaagacagcgctcaggactggttctcctcgtggctcccaattcagtccaggagaagcagagattttgtccccatggtgggtcatctgaagaaggcacccctggtcagggcaggcttctcagaccctgaggcgctggccatggccccactgagacacaggaagggccgcgccagagcactgaagacgcttggggaagggaacccacctgggacccagcccctggtggctgcggctgcatcccaggtgggccccctccccgaggctcttcaaggctcaaagagaagccagtgtagaaaagcaaacaggtcaggcccgggaggcgccctttggaccttttgcaatcctggcgctcttgcagcctgggcttcctataaatggggtgcgggcgccggccgcgcattcccaccgggacctgcggggctgagtgcccttctcggttgctgccgctgaggagcccgcccagccagccagggccgcgaggccgaggccaggccgcagcccaggagccgccccaccgcagctggcgatggacccgccgaggcccgcgctgctggcgctgctggcgctgcctgcgctgctgctgctgctgctggcgggc

SEQ ID NO: 22977 - DNA, 2300 bp, Homo sapien
attcagacattatcaaatgaaaaatgcaagttttaaaatggtacatatcatgtgagctcattgaaaagatatatatttgtgtagatacagatatttagaaaaacttaagaagacatgatagacatatttgaaggcatggggaaaatccccagaacaatatacagtgaaatgtgaacatctgaatttcctgacatgggtatctgaaggagagtcttaggaagcactttcatatcttgattctgaatatttaagtagtacctggatcttaaaaagtgaaaaatgtatttacatattatagctgaataagcacacaaaattattacactgtaatagtcaattggtatccatgggttccacatctatttggagtcaaccgatttgtgaactgaaaatattcagaagaaatatggatggttgtatctgtctgaacatgtgcagacattttttcttgtcattactcctgaaacaatacagtataacaactatttacccagcatttaaattgtattaggtattttaagtaatcttgagatgacttagaatatatgagatgatgacatagtttatgcaaataccacatcattttacacaagggacttgaggacccacagattttgctatcattgggagtcctggaaaatgcaaagtagcaaaaaagcagaataaaaatcactaaaattacacaatttactggtagcaagcacagtgcaccgtatacatactgttttctttgaaaattttgaaatcaagcactgtggttcttctatttgtctagaatctccttcatcttgcatatctcatgtcagaggcctgaatagtgacaactgatattcagaacaacgataatgactcgcaagagcatcaggcagaaaataaatactcaatttcttcattagactccacttaataaagtgtaaagtggattaagacattttaagactttctacaaaagttgatatgtacaaaatattagtatctctctattatcaaaaaaagtccaagaataccattgaattatttccacttgtgcagcagacttcttccccaagtctcacacttcaaacaaatagctccaccaatttagtatcacctttctttcattcaataaggagtcctctttccctcacattccacgtccagttcaaattccatggctcttctctgcaaatatattctgagctaatccttttcttaccatatcttgcagcagtagtgctgcaaagaatattcttaactatctaatatttacacatgtgtgagtattgcttttttagtttccaaagagtgttagatcaaaagttgttagatcaaaattttcaaagaaaacaatatgtatacgatgcattgtgcttgctaccagtaaattttgtgtaattttagtgatttttttttctgcttttttgctgctttgtattttccaggactcccagtgatagccccattcaagccaaccatattctaccaagacttcggctatggtctctgtactctactttctccaagatcttttcttcacgaaggacccagcctttatcctgtttggttttccccaaagcaagtagcttacctggtgaaaggtaatacaagcagacactagctgtcaatctaactaaaacgtaggctctttcagaccagggatcttgtcttgttcagtactttggtctctatggtgccaaaaagagtgacatgcacgtgtaatgtaactctggcactccaggaaaacctttataaatgaaagagcaagaaatagattgtgggggaattgcttaagaagttcaggagtgaaagtagcttggactatggtgatggtggtagaaagaaaagcaatcaaatgtaaaagagtttggaggtaaaatactcagaactgctgacagattggatagcaggcatgaggaaagggacagtgatatgatttggttggttcgtcacctagatctcatcttgaattgtagctcccataatccccacgtgttgtgggagggacctgatgggaagtaatggaatcatgaggttcctgtgctgttctcatgacagtgagtaagtctcacgagatctgatggttttataaagggtagttcccctgcactcctgttaagaaggacatgtttgcttccctttccaccatattggtaagtttcctgaggtctccacagccatgctaaactgtgagtcaattaaacctctttcctttattaattacccagtgtttggtatgtctttattagcagcatgataacagactaatacagaaagtgttaggagccaggtataaaaacgggatagatcgctgtgcccttgac

SEQ ID NO: 22978 - DNA, 2300 bp, Homo sapien
tcaccctctcttaaggtcacgccagttttcctggctgtcgtcctcatgaagggtggcttcctccctgaagtgctccgctctgtcccctcccttgagtcccgggcttcacacacacaaactctgttggatgttttttccaggaaatgcagttattctgacactagtgggccatttccccggcgtcctcattccatttctgacagtgctcctgctaccctcagtagattattattatttattatttatcagccacgacactgtactctgcttcctacaaaatattaaagaagacacaatccgtgcgctgagtttacagccaaggagagcagaggcctggatcagacatcacagggggggagctgagaagaaaatatttaccggctcagtcctccttggccctggtagatggaggcaaggactggcaaagccctccccaggccagctcctcccagctgggcccccacagccagctccccacactacctacagcaccccaactccaatttctagcaaggcctcaggcctcaggcctttacccgggggagcggagggagggtggaggatgaggattgggccctcaggcctttacattcagacaggggtggaggaggagggcaggtacagatatttcctctgaaactcaaaaccaggtaaaggggatgtaggggaggagggagaggtcggggaataaaaaccagattaggagagcggtcggggtggagaagactgtgcccagagtgaaatattctagcataatggaaaagccctcattgggggtcccacacgcctctggccaaatctcttctattagggttagaagttagggtctgtgtagacagcatgtgtagaccgagaggtggtgggactgagaagtcagtgtagacagtgtgagagagagcgagctgtggtgggggtgagtagtcggtatagacatcaaaggctggtcaggctgttaaacagagaaggcttcctggattcctaagggtcagtatgaacagaaaagtcgcgcgccccaggagaggcagggctgactcagaaggctggtggacactttgcagggctctccctggtccttcagaggtgtggacaattcctgctcctttccaaggctggagtgtcataaagagggcggaagctgaaagacgattggactttttccttctcaaacttttccgccagtttcctcaggtgttgagagcagacggggagctcgcctcagtcccgggcccccaaccctgggccagcaaggccaggaggccacggcggagcagcccgtgccacgcgccgtgcgtctgccgggcgcggccgcggagccaggcgagccgggggccaccgcggggggcgggggcggcggacggacggaccgacggacacacccgcgagcactccaacctcggacccggcgcgcggcagccgggaatccctcgggccggggaaactgcgcacggggcccggcctggccgggccgggccagagggccccgcctcccccacccgccacccccgcccactcgggcgcccgtgattggctccgcccgcccctggctgcgcgccgaagcccgcctccctcgcagctaaagcagacggtacccggagcggagcgagccagaagggagcatggtccccgcgccgcggccgcgccagcccccgcgccgccgccgccgtccccgccaccgcggatctcgccgcagctccagccccggccccggctccgcagcgcccgtccgcagccccggcggtcgccgcgcttgagcgcagcccccgcccggagcccgagccgcgagcccggagccagccccagccccgcggccgccgcggctgcggggagagggcgggggcgatgctgccggagccgccgccgccgccgccgcctcgatgagagccgcgccgcaccgctcatagccgcacaggctgacaggcaggaggaccgacttccctctcccgggcatcctccctgggctgccgggaggcggcggcggcggaggaggaggaggaacgaggggagaaggcggagagcaggaacgcgaggaggaggacctggatccgtttcctccggccaggacccgagcggccccagccaccgctacccgccggcgctgtccgctctccatcagccctcctgcgcccacccgcgaccccgggctctctgcgcgtcgggccggggccggagccgcgcgccggaggtaagagccgggccgggctggagcgcctcggatgcggcgccggagggagacccaggtcctggccgccgcgtggggccgggccgggccgggcgtgggagcggggccggaacccggaacc

SEQ ID NO: 22979 - DNA, 2300 bp, Homo sapien
agctgtactgttgaaacatgttagcgttttcctaccagcggccatatggtacttaacgaaagtgaattgttcacactgcacaacccgcgcctcctgatgaatactagcattttgttttggaaaatagttcttccatcgtgtggaatatttttcaatgcagtaagtagcaagttggaagccagcaagcccttgaatgcaaaaagactcccatcacctcaagatgctcttccctccatcccagcccatcccctgcccccgcccagctgccaagcccagctccaccccagctcccacatccctcctgggcccagttcttagcatctgcttctgaatctgctcaggagagtggaggccaccaagggttcttgccccatcccaccagctttgtgtctgtatgaacttagaaatggaaaacctgaagccatacacagagcacagagctctgtctggaaggatgcagacatgggcagagtctccccagagttgaaaagtagggtggggtgtttaactgggtgtgtggcctcacagaagggttcgttttctatctgtaggatgtttgttttaagaagtgcaaagttcaggttgacacctggatgcacagtgaggtagagggggtaagctgggactgtatctgggactcggcagaagcctggctgagaagcctgtctcctcctcgtcacctgtacagacaagtttcaaataaatagtgagcgaaagtcattgccacgtggtggccagacagctgggaccagggtgcagccaccctgtgggttccattaaccaaaaacaggcatgttgggttcttgttgcctgggacgtttcaaaagcagaccactgccaacatgggacctatttggggggtgaggctcagttttgtgatgctcaagggagaagaacaggcgaccgtccccatcagttccatcccccacccacccactaccagattgctctggcaaggggaccctccgcctccctcgtggggctctgtggcctcagtgagctgagaccctgcctccgagccgccaggacggagctgctttattgcagtctgccctgggaccaacgggatttcacttgccagtaatatctattccggaactttccctagaaccagagtcacttattaaagcttaataaaaggccagattgactgcagttagtgacagagaagacctgccgcaagtcctggtacccaagacgctcttcacaaaaccgtgggcccataaatctcacttatttccaattccgcagcaactgatcccaagttacaataatgatcctaggttcagctgaacatgtccttaaaggaaatccttctgggtgaaaaatagcagaaatgtgctcccatctgttcctcatcagcagactgcactatactatttgctttccacgtctgtgccctggatactttctcaccctctttgacacctgggaccatagagatgtgaacctgaaagaaccaagtcgccacgactcccaagtgccacctcagtaagggacctcaacgggacgaccaaggcccagtggaagcctcgacggcccttgaccatggaagctgcccagagcatctcaaataagtcagcagcctttccactgggcctattccacaacgaccccccacagaccagaacccgctccactggggccatgcctgggagttactccaaagagttaacctttcctggtgggagaggggtggaggggaaggctgaggccatttgacatgtgctgcctggtctgaacatgatgctgtgctcagacactgaatttgatgaagtgcattgtaaaatttaaaaacaaatttaaaactctattaactccctgtaatggcctcctcctgcagtacatagacaacaccggctcactggcaaggagaaaaagtactctggtttgcagtgtgcttggcttgaagcagaatggagacggtgggagctggtgaagggaatggggagcccacgcaccctctgcacccagggcagcacccagggcggcacccaggcccctgctagtggagctttgtgggatgtgcatcgccaaggttagactttttcttgctcctatgttaaaatctcactttcactttcctttgaagctaaaacacttccttcaagaatgcaccactggagtgacaagattgtaagattatcttaacttgggactgaggcctgggcggtggggagctcactagaggcctgtggtttggggtcagcatgggggtgggtgtcaggtgggaggaggtgtgttcccagcctcacccactacaccctctgcacggggagaaggatcagggcagggagact

SEQ ID NO: 22980 - DNA, 2300 bp, Homo sapien
aggatctcttagacaccagcttctgttgctgaccctacccctcccaattatgttccctgcagacctggtcttgtcttccacgtcattatccaagtcacggattaaaatgctgggagcttggcgacatataactagagacttctctttaggtctcttgtacccttgggccattcaccccatcataagtaaatcacctccatggcactgtgtctctgtgtctctgccacagagtcccctggggccccacccattacgctttgaagttctgatgcatttttccaggctctctggctaatcctggaaagagcagagcttgggatgacatgctttggcttaagacacccaggctggctcataatgacaccacctcccctcttcaggcttggggacagttcccattagcagcacattctagaatcttgccattacttcacttatgtttgttggcttccagttctccccgacctctctcgttatcaaaatcataaatatgcgttgcacatgtattgcgtgccctgttctgtgcatcatcacaaggcttacagcaatagtgcctgctgctgaggaggaaactggctcgggaaaggcttgggcctacggtccctcagctgggaaggggcgatgcaggcctcgtaccgtggtctatgtgactccgagccttgctcctcaccaccagctggtggctctcccttggacagtgggctggtagtgacccgccatcttagctcctgccccacctcggcgccattttctttctgagagggagctcccagctccacattctatcctgtggggcttgtggtgctgagtggccccctgccccctactccccttcctctgtctccccatcctcagtgtacactgccacctcagagcagctgtgaaaaccaaggtaccatttgggccatggagacctggacccaggctcatttagtcagaggcatcccagactggccttccctgtcatggtgtctcccagtttccctcacaggcccccttaggtcaccccgcctggcacagctgacctcgcctcttgtgttggctctcaagagatgtatctggaccccacctcattcagccatatttttcttaaggactaaagtggggttctcttgtttcccccagggctggccgtgcccaggttgcttagcacaaggcctgccctccccagcaaggcccggccagcctttccatacgtcccccaccagggtccctcccctcctgcgaggaccatgcccggccccgggctctagcgccctcacctgagggcccagtgaacacccccatctccaccatccccttcccctgcctccctcagaggcgagcttgcagaaagggaggagaaaccccagcatttatagggcattcaccacatgccagacactctgctagttttgttttgttttgtttccaaatacatcttcctcattctgttcttcctggtagtcccctgaggtaggatttaacagatgagaagaatgaggctcagaggaaataaggacttgctgaggtcaggcgtggtggctcatacctgtggtcccagcactttgggaagctgaggcgggcagatcacctgagctcaggagttcgagaccagcctggccaacatggagaaaccccatctctactaaaaatacaaaaattaaccaggcatggtggtgcacacctgtaatcccaactactcaggaggctgaggcaggagaattgcttgaacctaggaggcggaggttgcagtgagctgagatcgcgccactacactccagcctgggtaacagagtgagactctgtctcaaaataaaataaaaaagaacttgctcctgaggctcttagctactaagtagcagagctgagagtggaacccaagtctctcaaagggctctgcttccttctctctgctctgctgcctctcacctctcccaggcaggcctcacttcctcctctgagccccgatggctgtttgttcgtagaccccctagcacacttatcctgggctgccatgatcacagattcctaatcggtcagttcctggacgcaggtgtctcgttcccctctgtgacctagcacccagtgcagggccggggatggtcagtgtttgttgaatgaaaatgtaaccggcagatgacgtttcttccatctcccttgcaggcacagggccatgggtgaccacggtggccgccgggaaccagcccaccctgattgcacactcctatggagtggcccagcctcccaccttcagcccggctgtgaacgtccaggccccggtcattggggtgaccccctcactgcctccccacgtgggg

SEQ ID NO: 22981 - DNA, 2300 bp, Homo sapien
aaattatcagagaaaatagttaaaatgaaatgttttgccattcttgaacgaaatcgtggtacgtctaggatattaagttctacttatttttcaagacccaattgatataagtgatttctggtacatcttacctagtgtcttttcaccccttgcaaggtctctgctctgttttgctacctctgttacagtactcccagcatagtatcataatgcttttcttctgatactctaaaatctttgacagcagagaacaaagacattttcttcagttttataactgcagtgtctggcatgatgtttgacatacaaagcatgttcagtagtaaatttacttccagaactttcaaagaaaggccatcaaagcattgattaaagggttggagggaactgtgcatgaaggtagtctacaaaagcactggaacgacacaaggtgaaattttatgaacttttaaatgatttgactttaggttgagataaataattccccatccagtttttgaattctgatgtttacctttcattgtttcttcttctcttagaatttcagagctggaaaaggcattgacagtttatataatttagtcttctttattcactttattaccttaagccaattacttaaatctttctaagccccagtttccccatctgtaaaatgaggaaataatacttacctcattgttatgaaggtagaatgatatcatatttatggaatttttaagggttcatttcataggtttaatccagtaagtggttagaaatgacaaactgaatgaattattcaaattttaccacaaatgtgtggctaaatttgggcaggaatatgatgtctttgattctaatccatattttcacagtgtcatggttggtctatctttccatactggtgactttctccctttttttatttgcagtttcctgtttgatttgggctgggtaacaaaaatcacaaggttaactctttcagtacatacttattaggcattgctaaataccaggcactgggataggtatagaaaaataggtgaataagaagtggtctctgttctcagggagtttggtgtctagaaggtagaaggtagacattctagaaaaaccataaaaattaaatacagtgtttaatgccatagtagacaaatttggatgaggtaaagagcatttaaacagcatatcttggaaggtggacacctggggtcaaagtctgagtaggtaaacagaagaggtgagtaatcaccaagtggatggagctgaaggatatgagaataattggcttaatttttttggagtgtgtcatggagcataaactagactagaggtatagtttctttgcagtggaaccaggattccagagattacagtgaaatagacttggtagggaaagagcacagtaagggaagtcaatggatagggagtacaaagaaatacgaggataagagatggcaatgttaacattcttccagctgtactattatagattcgaagtaattacttttcccctcttaatgtaaaagcctttgagattgttgccatctgttacaaccagctatcctttttgctattatctgatgactcttactagatatgtagtatcattcattaatgacttgggtaactggacattcttccattcctgtttagcccatgcggttgaacccttcaacagcatagcctaggactaggttaactataaccccatgtgaatggtctatgaatattgaacatgatactggaagatgaagacattgcaatttggtatgatatgtaagcttttaattctttatatatttaatgtctttgtgtgtgtgtatatgtgtaggttaaatgtatctttagaatacagtatgaagaggtcttgtatattcaaaggcctattgaagaagacagaagaaaattttttcaagaattgattctcaatcaggcatcaatggctccaccacgaaggaaacatgctggtaaagtttgtaaagcctttaggaaaatgggagggatggagttaagaaataccctttcttggagtcagtttattttagccctttcttcttggaagtgaggacagtttgtcaggttctgtttatctttagatgacgtgtggaagtgtccattgtgttcacctgacttgagattgggaagtatagccttgttaaagctttgctaaacaggacttcttcttatgacttcaaccacatcctgtggtagatgtcacattatggggctcaaaaagtcatagaaaaaagtcttcagttctcctctgttttagtcacagtaagtacccaggagttgaactggcaggttgtgaacac

SEQ ID NO: 22982 - DNA, 2300 bp, Homo sapien
atatatattatcaaatatatgatttacaaatattcttaggttatatttttactttcctgatagtatcctttgaagaagaaaagtttttaattttgatgaagtccattttttttttggttgccaaggtttaggtgtctactatattttctgaatgcctttgaaaataatttttgtaaatcacttgatcctgcattaaaatataatcatgctacagttattttgttagcattaaagactgataagccgggtaccatggctcacgtccgtaatcccagcactttgcgaggccgaggcaggtggattgcctgaggtcaggagttcgagaccagcctgaccaatatagcgaaaccccatctctactaaaaatacaaaaattagctgggcgtggtggcgtgcgcctgtagtcccagctacttgggaggctgaggcaggagaattgcttgaacccgggaggcggagattgcagtgagccgagattgcaccactgccctccagcctgggcaacggaatgacactccatctcaaaaaaaaaaaaaaaaaaaaaaaaaaagaaagactgataaacgttattgtaagcagcagtgtttacaattcttttaattttgcctgaaaattattttacagctctatagtatcaaccctccttgctcttatggatggattagataataggggtgaaattgttgttattggtgctacaaacagacttgactctatagatcctgcactcaggagacctggtcgttttgacagagaattcctcttcaacctgcctgatcaaaaggtaagagtttttgttttcaatatgttaacatttatatgtaattctactataaggcatatgttctgagggtgatattttatgaattttcattgttcagattttctgcttaaggatatcttagctaatgctttaaaaacctatgtaattatggaacagtttttttctattaacaattataagaaagtttgtgatttttaggcagcaagaggaaagctcttgatagatcactgtagatgcttacttgtgctttagttctccagattgtagtaattgtcctgtatggcagtttctgtgtccctagttagccaaagtaactttattctcataaaataatgtttttatagagtattagtgggtttatgaataaggactcagtacctgaattttcatagaaattgctatatttaattaaaagcaacaaactttattcattatggtataaagtttttttaaaagaatgtactaataatacagggtaatgtttatcattgattctgtaaatgttatatgatatacaaatttttttttcccaattcaacttcaaacttttaatattattcttggtttgactagtataatctgactggcttttcattagaaactcaaatttgagaggaagagatacatgcaaaggaggtactgtatgtgaatatgtatagctttgtttttggacctctatgtgaaatgcctggtttacatacctagttgtgaaagtcttaagtgattcggactgtatggaagaccatagagaaacaaaggcaatggcttccctgtgtagagcagttcatacctcagtttgacatcagtctccacagtcaccagtagttgactcagatttggattgacaattcaatttacaggctttaaattggcaccaggttatttagctttgtcaggacaggaaacatagcatatacagcattattttcattgcccaagtgcagccttcaggaatgtatcagtgcatattggtgtgtttatttgtagtagatagggctgaagtaggtacagtctacttccacatggggaagcatcagcttttttgtttgggacatctaacaacagtccaagcacagcttttatactcttcagtacattgggaaatgtgcttagttctgagacacagcacaggaaagccatttccttgatttcccatttgtcttctgtactatcttagctaagtaggcctcagagtctatatgccaatcacagcccttacagtccaggttcagttcacacaaatcaagggtttaacagtaaacaaggtttagaacagcactgtctaatagaattttctgtgatgatggaaacgttctattttggcattgttcttcgagcagcgtgcattttggtagacactagccgtatgtggctattgagcacttaaaatgtggctagtgtaactaaagaactgcattttaaattttatttagtcttagttaatttaaaatttaaataaaatggcattatgtggctcatggcttactatattgcacagcatggatcttgaacatcg

SEQ ID NO: 22983 - DNA, 2300 bp, Homo sapien
atttcctattacagacagagcattcacctttaaaataaataaataagcctgggcaacgtggtgaaaccctgcctctataaaaatacaaaaattagccaagtgtgttggcatggacctgtagtcctagctacttaggtggctgaggcgggagaattgattgagctggtgggtggaggctgaggtgagctgtgattatgtcactgcactccagcctgggtgagagagtgagaccttgtctcaaaaattcaaaataaataaataaataaataaataagtagcttctagaactcactaagcaaaagactagtgatcttgtgaagtaatgggcagcataggaaaagcaatataaatgacttttatggatatataatgtatccatcttataaataagaattgaaaataaaatgagataacattctttatcctaaaaaattagcaaaggtcaataagtttgataatacattgctggtgagcacccttaaatattgctggttagagggtaaaatgatacttcagtggatggcaatttgcaaatatctaactagattagaaatgacacatgccttttgagctagtagttctacttttaggatttattatattaatatgtttatactcatatgaaatgataaatacagttatttatttactattatttgttacaatattgttgccaataggaaaatattgaaaacagcctaagtatccataagaaggggacaggtttaactgtggcacatccatacggtgggacatcatatagctgttgaaaacgaatgaggcaggctggacacagtatctcagacctgtaatcccagcacattggcaggccgaggtggaagggtcacttgagcccaagagtttgagaccatcccgggcaacatagtgagaactcatctctccaaatacttaaaaattagctgggcgtgttggtccctgcctgtagtcccaggtactctggaggctgaagcaagaggattgtttgcatttgaggttgtagtgagctgtgatcatgccactgcactcaagcctgagtgacagagtaagaccctgtctgaagaaaaaaaaaaaaaaaaagaatgagacaggtcttaagtatacggaaattacttaacaacatacattgttatataaaaagaatgtgtaggctgagtgcggtggctcacgcctgtaatcccagcactttgggaggccgaggtgggtggattacctgaggtgaggagtgtgagaacagcctggccaacatgatgaaaccccatctctactaaaaatacaaaaattagccaggtatggtggcacatgcctgtaatcccagctactcgggaggctgaggcaggagaatcagttgaacccgggaggcggaggttgcagtgaaccaagattgcaccactgtactccagcctgggtgacagagcaagactctgtctcaaaaaataaataaataaataaataaaacctaaaacaaataaataaaaagaatgtgtgtggtgtgctatcatgcgtgtttaaaaaatactctttggtggccgggtgtggtggctcacacctgtaatcccagcactttgggaggtcgaggcgggcagatcacgaggtcaggagatcgagaccatcctgactaacgtggtgaaaccctgtctctactaaaaaatacaacaaaattagccgggcgtggtggtgtgcgcctgtagtcccagctactcaggaggctgaggcaggagaatggtgtgaatctgggagacggagcttgtagtgagccgagatcgtgccactgcacttcagcctgggtgacagagcgagactccgtctcaaaaaaaaaaaaaaaaaaaatacactttggtttgtgtataagtatgtatggaagaataaacaaactgaaaacagtagttgcttactggaggagacatggttgttggaaactgggtggtaagatttcctcgttgctatatactccttcatacctgctgcatgttgtaccatttgcttttattacctattaagaaaatataataaattttaaaaatgaaaacaaatacaataaatattatttgttttcttcttactaggcatatttgatgagaccttctataatattttttgatgaaatagatggattagctccagttcgctctagcagacaagatcagatccacaggtaatttttctttatctgattatcttgatttcttttttacgcattgacttggtagttagccttagcccttagctaagtgctatgaggcttacaaagaaatttaaaacaatctgtgtctgtgaggactacttctttctcttagtacagg

SEQ ID NO: 22984 - DNA, 2300 bp, Homo sapien
attctcaacagtttgcacaactttcagatttaaccttatttcaacctaagagagctgtaagcccccaaaatagtctattaaataggacgttataatgcccaaaattttatcaaagaaaagccaaaacgattttcaaagatataataaaaatatttcagagtagtatggtaaaatattcctgtctctgcctagatccattctgttagtgtcaaaacagtgtaagacacaaagaaaagcacacacaaaccgcgatcttgtagacccctagaacataaaatattgctttcccccaataagaaccacaaaatggtgtggaattaaaggagcattttaaatgaacagctttttccagccaaattacttagcaagtcaacctcttttagacagaagcaatacactcttctctgaattcagaaacaatctcatagtaaaacaaacgtgtcaattcctttaaaacaataaatatctgtgcttagctttataatgtaggtaataaaatttcaagatctttcaatcagttttttaattcaatcaccagcgtctttaaatgtcatttttgcaactgcatgactatggtgttcattcaccttttgtaatatagtcccataacaaaaatgtagacacccaagaaaccacacagttttggcatgatggtgctgactatccgaaacattccacttgtttctttcgacgtgctccttctgtgacctgaaagctctggttcctactagcaccttggtgagctagctggctggttccccagctataatatcatgtttgatctctcctgcctggagaggcgatagcgttgattttgtttttaaagttggtgtcagagcagctacaaacttttttcagcatccctgcctggctgccaactggagctctctgttcacttcctcaccaacttgaaccacccccaaactgagagtaagctggagttagacagcggcaggaactgacacactttcaagaagggtttgacaccgcagaaaactttcacttctccaacccttccacccaggggctctggcccttcgctcttgcttccccgctagaattcccctctggggcaggacaaggacacggacagcagatcgttcgaatgacgccgaaagggacccccaaagccctctcccctggactcaagggctgttcttcacacaaaagagccgggccagcttgaaaagcaaaggggccagcgtcgcggcccttctctgggtgccaccctccaccgcgcccgcagaccctgtctccagccgcccgagcggtctccactgtaggcttcctacccccaacccggccagacaaagccccggcagcagggccggcacttccgagcctccggactcgggacgccgcgctcttaccctggcctcatccagagtgacgccggcgccaccgcttcccccggctttggcggcggggcagctggcggcgcgggtcttggaggagcgggtccgagaggagatgaaatggctgctgcctccggtcgccccaggctctgctccggccccaggcccaggcccgggaccaggagacttggacccgagaaggcggagagagctcttccgggtgttcaccatggtccagccagggggacggagtccacgccgcgcccgggagagccgagcaaggccggcccgccggccggtcagtcagggccagcggagccgagccgggcaatgagagacgagccggcccggagcgtgcggagcgcagacgagcacaagagagagccgggcagaggaagggaagtcggcgtgagcaggcggcgtgcgggaagcgggggcggtgctgcagaccggcagcacagacactccgccggcttcgccctcctcagcgggagccgagcggagccgccatttctacccctttctctcccgttctcgctctcgagctccgtgcgtcaaggctccagcgccgcagggccaacgagaccgcttccggccgcagccacggcggggcgctgcgaagccggccagcccttcccggctgctcgctcctctccctgccgcctccagctgccccgcccccggcgcggcgtcagcgctcggcggccggggagcgacgctctaggctgtcagctcggtggtttccagctctccccgaccgcagggctggggcgaccagaaaagccagactaatcaggacgagttcgggcgtggaattgggcctgaagccctcatgcccagccaggcctgaatgccccagaccccaccgtcacccccgtggcctggatggagcaggggacggccggcgaaggcgcggggtggaaggggagcggcgacgaaggcgcg

SEQ ID NO: 22985 - DNA, 2300 bp, Homo sapien
ggaggtcaaggctacagtgaactgtggttgtgccactgcactccagcctgggtgacagagtgagaccctgtctctctctctttctttttggcagggagaggatctcactatgttgcccaggctggtttccaactcctggtctcaagccatcctcccgcctcggcctccaagtgctgagaatacaggtgtgagctacagtgcctggcccaaaccagcctctttccacaggaattgatacttgtttatgctgctcagtgatgtgatagctacttgacccaggaaaatccaggtatggttccattatgaggaatcccacccattaagacatcaactctaagtggcaggtgaagtgtccaggagaggatgtggtatgcaaattgtgtcagaaggatttatctattctggaatccatactggttcccaaacaaaaaaaattgtcatttccagtgttgtacagttttttggaatgattgggagcttagatggccagaatgctctaagtttgatgccatttggtcattttcaggacttttcctgagttttcaatttttcttagtttaataaacagtttaataaactcctgcccaataaacagtaggctatgtctaatgtactgtgaattttatttttttttttttgagatggagtctcattctgtcacccaggctggagtgcagtggcacgatcttggcttactgcaatctctgcctcccgggttcaagcgattctcctgcctcagcctctcaagtagctgggattacaggcatgcaccacgacacctggctaattttttgtatttttagtagagagggggtttcaccatgttggccaggttggtctcgaactcctgacctcaagtgatccgcccgccttggcctcccaaagtgctgggattacaggcgtaagcccggcctgtactgtgaatttttgaaatgaacctaattcctactttacagcagagcttttctttctttctttttctttctttctttcctttctttcttcctttctctctctctttcttcttttttttttttctgagacagggtctggctctgtcatccaggctggagtgcagtggcgtgatttcggctcactgcaacctccatcttctgggttcaagtggttctcatgcctcagcttcccgagcagctgggattacaggtgcccaccacaacacccatcgattttttgtatttttagtggagacagggtttcaccatgttggtaaggctgatctagaactcttgacctcaggtgatccacccaccccggcctcccaaagtactgggattacaggcttgagccaccgcacccggcctacagcagagcttttcatatgaattgtgtggcttaatttttttttctttggaagttaaattgcaaatgctttatctgtgggttcagctttttgtattcttaattcttcagcgggccgggggcagggggcggcgatagaggcggctcttacagggtactcattctttggctccgccttagatctggctaaggggatagaaaacgaccctgcctcgctttgtttaaaaacgcagagttctagcatggtgtttccccccccccttctcttcttaagcttaccaagttccagataccgcccagatgaattttttttttatcacagctgtcattctcatttctacaggcatgaaaagtgcgactcaagttcagtgtcttgcctcgggtagcttggggattcccagtcagctcctcgcgccttcgtcgccgctccccttccaccccgcgccttcgccggccgtcccctgctccatccaggccacgggggtgacggtggggtctggggcattcaggcctggctgggcatgagggcttcaggcccaattccacgcccgaactcgtcctgattagtctggcttttctggtcgccccagccctgcggtcggggagagctggaaaccaccgagctgacagcctagagcgtcgctccccggccgccgagcgctgacgccgcgccgggggcggggcagctggaggcggcagggagaggagcgagcagccgggaagggctggccggcttcgcagcgccccgccgtggctgcggccggaagcggtctcgttggccctgcggcgctggagccttgacgcacggagctcgagagcgagaacgggagagaaaggggtagaaatggcggctccgctcggctcccgctgaggagggcgaagccggcggagtgtctgtgctgccggtctgcagcaccgcccccgcttcccgcacgccgcctgctcacgccgacttcccttcctctgcccggctctctctt

SEQ ID NO: 22986 - DNA, 2300 bp, Homo sapien
agctgggcatggtggtgcatgcctataatcccagctacttgggaggctgaggcaggagaatcactagaacctgggaggcggaggttatagtgagccgagatcatgccattgcactccagcctgggcaacaagagcaaaactccatctcaaaaaaaaaattgaaggtatcaatactcctcaaattgatctaccaattcaaagcaatccctgtcaaaatcccagtggcccccccctccctttttttttttttttaacagcaatggaaaagctgagctaaaattcatacagaactgcaagcgacaaaacaatcttgaaaaagaggagcaaagttggaggactcaaacttcctgatttctatacagctactatacagctgtatacagctactatacagctacagtaatcaaaatagtatggtactagcataaagataagatacataatcaatggaatagaattgagagtacagaaataaatttatacatccatggtcaattgatttttgacaagggaagaatcctctcttcattaaatggtgctgggaccaaaaaatcggaagagctctcacagaatggtcaaagaaaagtctctttgcctaatgggatcaatttaactccttattgtgcttcaacagacacggtctcatgagcagtgagatttgaactcaccacaggctcccaaaatcactgaacaggagatgagggaggtggtggtggggggaacggcatgggcctgtaggtgaggatcaatctcaatctgagtccccgcactaaagacttacaaataaatcccgatttaggcaaaccgagactttattcggaaaggattattgcaacaggggggaaaaggactattgcaataagggtggagaactattgcaataggaagaaggactgttgcaattgggagaatgctggactataaaataaaaaacaaatctggatatacgtaaggagagagttcagtggaagagatccaagaaaagggaaagaaactattgcaactgagagtggggattgggggaggctacagcaaccgggagaactctccaaccatgagatctgcagcgatctcctgggtcaggcagaaaagggctttccttttacagagatgagtgaacagggctagaaagacccgggtgtggggaagtggggagaagactggaggtggcagcgatgagactatacagagactgtttccctggggtccgtctattttcaggcggtggatgaggagggctgctcgctggctgcggctgaggctcggtcaccgtgtagagaggcccagggagagctgcttcactcaagtcctgtcaagtcaaggcagccgggatttgtccacatcgtgagtacaggcaggtcagctaactatttgcgaggcgaagaactggaatttagagggtctgggcctgaccttgtcacagctaacgacgggggcatccttgagtcctgacaaagtcacatgcggaagggcggttgcgtgtagtaagtccttttaggaacacaaaggggccgggcgcggtggctcacgcctgtaatcccagcacattgggagaccaaggcgggcggatcacctgaggtcaggagttcaagaccagcctggccaacatggtgaaaccccgtctctactaaaaatacaaaaattagccgggcgtgctggcaggcgcctgtaatcccagctactccggaggctgaggcaggagaatcgctcgaatccgggaggcggaggttgcggtgagccaagatcgcgccattgtattccaacctgggggacaagagcgagatttagtctcaaaaaaaaaaaaaaaaaaaggtgggtgggggtttcttcaacttcgttgtccacagggctcaggtcaagttcaacattgtcagaatgcagggatgtctctccatggtttctgaggctgaggaggtacccaggtaagcacactctgggttctctggtgagcacacaccgagctgcctgcatctcccctacccatgaaggcagctagccgccgggccagtggtgggaaggggaggcggccattagcgccgttcccgccgggacttgaagcgcccggccgcggcaagccccgccctcggcgcgcccccgcgtccgcgcgcgctcctcgggtctgcgcggagccggcgtcggcgcgcgcttgggcgcctggcgaagaccgagagaggctggcgggatctcagcggcgcggccgcggaacctgaggcggtctggggcggcggcgctccggctctgaagggctccagccaaacggagcccgcggccaaacggtgcctgcggtgcctgagctgagt

SEQ ID NO: 22987 - DNA, 2300 bp, Homo sapien
aggcctggagtacattgacatgatctcagttcactgcaaccttggcctcctgagctcagcctcccaagtagctggggctacaggtgtgcaccaccacgcccagcttattcttttctttttttatagagatgggatttcgccatgttgcccaggctggtctccaatcctgggctcaagcagttctcctaccttggcctcccaaaatgctgggattacaggcatgagccattgtgcctggctgtattttctattgtaactatttcctacgatacatctctactctactctactcttactatacatttccactccactccactccactctaccctgaacctcttataaacatagaccgtttcttactcgtcttcatatctccctgccacctagcatgtagtagatactcaataaatatttgagtaatttgaatgcacatgatgaagtttaatagaatttacacattaaataaataacatgaaggaatgaaatttcagctactctggatgctcagctttattggctttgtatttagtaattactaatggagcactaactaccatctgaacagaagaaacagttaaataccagaaagcataaaatggttataatgatattactaatatttgagagtgtactgtgtgccagtatgtatactgatacttactatataccatgtttaggcttttatatatattttcatttaatcttcacaacaaccatgtgaaatgagtggtggtatctgtatttcacagataagcaaagcaaatcacatagaagttaagtttattgtccattgtcagtgtgactaaatgaaggcacttaaatacaaacagcaacacccagacttttagacaatatgctatactgctatgtgactatgctgattaaaggaaggggaaaatcactagtgttataagaaaccatcttagggtgtaactatttctgtgtaagaggtatcatgtcattgctttggaaaaggcataatactttgtgatgatatggagtattttaagagtatatacgagaggactacctagggaaggaaaaaaatgtatacctaagttaaagcactgccctgagtatcggcattttagtaacaatatagtgatggccttttttttttttaagagatgaggtctcactatgttgcccaggctaaaatgcagtagttagtcacggcattctagtgggctcagtcacagcacactacagcctcaaactcctggcctcaagtcactcctcaagtgactacagacgtgcaccaccacgccaaggctcagtgatagctattctccatgacagtctagcatagtgattaagagcagagacattggtagcttgagttcagttcctagcactgcctcctagtagctttgtggtctctggcaaatttcttaagctttttcttcatctattaaatggggataaaaataatacctacctttagggtcattgtgaggatttgaatgagttggcacatgtaaggtacttagaatagttctttataagatgtcatggttaggatcacagacttgggagacagagtggcagcatggttagttaacagtatctaactttgccgggcgtggtggctcacgcctgtaatcccagcacttcgggaggctgaggcaggcggatcacgaggtcagatcgagataatcctggctaacatggtgaaaccctgtctctactgaaaatacaaaaaattagccaggtgtggtggcgggtgcctgtagtcccaactactccagaggctgaggcaggagaatggcatgaacccaggaggtggagcttgcagtgagccgagattgcgccactgcagtccagcctgggggacagagtgagactccgtctcaggaaaaaaaaaaaaaacagtatctaacttatatttcctggcacagtataagaggtataaaagtatgatttataatactttataaaagtattatttatagaatttgagaaatcgtatttctgtacttttataaattttcctgcatgatttcaaaagagaacaaccagaaaccatcttttcctggcaaacagaatcttagataatatttctttttcttttttctttttttttttttttttgagacagagtctctctctgtcgccaggctggagtgcagtggcatgatctcggctcactgcaacctccgcctcccaggttcaagcgattcttctgcctcagcctcctgagtagctgggactacaggtacgcaccaccacgcctagctaatttttatatttttagtagagacgaggtttcatcatgttgtccagaatggtcttgatct

SEQ ID NO: 22988 - DNA, 2300 bp, Homo sapien
ctgaacgcgcctgctccctgctcgtgcccagggcattctgtggcctcccctgaccacctcagcccccagcctgttcagggcttcctacgaggcacctgggagcacaggattgcatcccacaagaaagtgaggtgagatgaaggggctctccggggactctcacttcccagggaaacttagaaattcagggtgagattaacagcaagagggaaacactcgcattgctgatgaagttccggcgtggaatcctcttacgactctccgaggggtggcagccccggtcactccaaggagaccgaggtgccctgccctgggtcacgcagctagagatagcagggctgcgcccctcgcccggagccgcccctcccaaggggcttctccttgtacagctcactgtacagctgtaccgggcttttatgactttcggtaaaactgtcatcctcaagacggcaagatgggatcatatccctggcttcacttggaagttctttctaaagttctaaaaacttgctaggcctgttttgggggatacaagagtccccattagggggagagggggactgtcacgttgaattctgcctgttcttaaagttttctggaagctgaaatgatgttcacacaaatgtcagaaaagaatcatcctgcccccagtgtggttttcccctgtgggtaggaagagtgtgcaaagtgtgataaacccttatctggggagaccttcccttcacaagagcctgctggggtgtcctgcaagatgtggaaatgggtgaagccatgtcatctccactccctccagcccccagcaaacgatgagaaaagagcccagcttcttccaaagaaacagcactttacacagggtcttcatggccatttattgcttcaacggatatatactaagcacctactgtataccaagctttgttctaggtactggaaacaccatgataaataaaaggtggagttcatgctctcagagagcttacattcctgtagggagaggcaggaactaaatgaaaatatagcaggcggtaagtacaactgagagaggtgagaggttagggaatgcctcttggaggaggtgacatttaagctggtgacatcaaaccagaatgacaaggagtcaccttccaggcagaggaatgggaagggcaaaggccctgaggcagcaacagacttgatgattttgaggaataggaaggagcccggcgtggctgaaggagagctatttgaggtgaggtgggtagggggccgactgggtggactccttagccatgatcaggacttggagttttattcaaactgcaatggtattgactgaataccatggatctggaaacaaacaaacaaacaaacaaaacacacacacacacacacacacacacacaaaaacagacaaaaaaaccctgcaatagcaagccattggagagttttaatcagagaggagatgggatctgattatttatttatttatttatgactgagtctctgtcacccaggctggagtgcagtggtgtgatatttgctcactgcaacctctgcctccctggttcaagcaattctcttgcctcagcctcctgagtagctgggattacaggcggccactatgcctggctaatttttgtgtttctagtagagatggggttttgccatgttgggcaggctggtcttcaactcctgggctcaagcaatccacctacctcggcctcccaaagtgctgggtttatagggatgagccactgtgcgatttatgttattacaagagcactggctgctgggtggagtggattgtagggagcaagggcagacacagaagccacttaggaggcattcactgatagacaagaactggaaagaagaatagatgactcctaagtttgtggcctgagccactgaggggaccagcggtgccatttgctaggagctggattagacaatggaatggccatcaggagctgtatgtagaccatgctaagctgagacgcctgccaggcatccctggagggctgtgggtaggcaggctatgggtaaatgagctatcgcctcatttactcatcgaagaaacaactttgtgaagttggcagggatgttgcatttgacagatgaggaaaacaggcttagagagatgatgtgatttattcaaggtcacatagaggggtaggtgacaaaggcaggctcaagcccaggtctcctgacctgcagcttacacggccgtgctgactcagtaaatgatggcggcttcagcaggaagcccagggtaagatgtccagaagaacttcccccctggaaatgtttagaggtcaggg

SEQ ID NO: 22989 - DNA, 2300 bp, Homo sapien
gccatgttgggcaggctggtcttcaactcctgggctcaagcaatccacctacctcggcctcccaaagtgctgggtttatagggatgagccactgtgcgatttatgttattacaagagcactggctgctgggtggagtggattgtagggagcaagggcagacacagaagccacttaggaggcattcactgatagacaagaactggaaagaagaatagatgactcctaagtttgtggcctgagccactgaggggaccagcggtgccatttgctaggagctggattagacaatggaatggccatcaggagctgtatgtagaccatgctaagctgagacgcctgccaggcatccctggagggctgtgggtaggcaggctatgggtaaatgagctatcgcctcatttactcatcgaagaaacaactttgtgaagttggcagggatgttgcatttgacagatgaggaaaacaggcttagagagatgatgtgatttattcaaggtcacatagaggggtaggtgacaaaggcaggctcaagcccaggtctcctgacctgcagcttacacggccgtgctgactcagtaaatgatggcggcttcagcaggaagcccagggtaagatgtccagaagaacttcccccctggaaatgtttagaggtcagggtttaggatcttttttctcttcgtctcacttcctcttaggatgacatgggggcaaaatggggctgagaggttgctggaaaagccctgaagacatcacagagactcaggatgtttactgaagtcatggggtgtggggacctgttttgtgtctgttgggagaagggcttagttcctgtgtctcctccaggacagcagagccggtcgcctctcattctgtacaaaggtgtgctatggcattggtggggtccccaaccagatagcctccagcgccacagccttttacctgcagcttttcctgcttgatatagcacaggtaagtgtgggcagtagcccagtctctgctggcatcttccttggggtctggtccttccacccccacctctgcttctgctcccactatccttgtagacagcacttctgacacgagctcaacaaaaagccagaagccaatgagggcaaggtactcaagaatgtttactgcagcctgtttgtagtgggaaaatgagaaacaatgtagatccccgacaatatagaagcagttggctaagtaagctgtatcatagccacataatagaccaagcctgtccaacccgcggcgggacggctttgaatgcggccccacacaaatttgtaaactttcttaaaacagtatgaatttttttgtttttttttttttttagctcattagctatcattagtgttagtgtattttatgtgtttatatgtggcccaagacgattctttttttttttttttttttgagacagagtctcactctgttgcccaggctggagtgcagtggtgtgatcttggggctcactgcaacctctgcctcccaggttcaagcgattctcatgcctcagcctcccgagtagctgggatcacaggtgcacaccaccacactcggctaatttgttgtttgtttttttttttgagatggagtctcgctctgtcacccaggctggagtgcaatggcatgatctcggctcactgcaacctctgcctcccgggtttagcaattctcctgcctcagcctccagagtagctgggattacaggtgtgtgccatcatgcctggctaattttttgtatttttagtagagacaacagtttcaccatgctggccaggctggtcttgaactcctgacctcgtgatccacccacctcagcctcccaaagtgctgggattatagacgtggaccaccgcgcccagtctacagctaatttttgtgtttttagtagagacggggtttcgccatgttggccaggctggtctcgaactcctgatctcaggtgttccatccaccacagcttcccaaagtgctgggattacaggcgtgagccaccgtgcctggccaagacaattcttcttcttccagtgtggcccacagaagtcaacagactacactaacatcactatcaaatagactatcatgcagccattcaaaataatgatctataccagttgacttagagtgatttccatgatgctctggtgaaaaagaaaagttagttttagagaagagtatataaaatgatcccattttaacaaaacaaagacaggctccatatgtgtgtgtgtggatggatatgtatatatacatatgtatctgtccatgtttaaaatgtgagcatggagaaaat

SEQ ID NO: 22990 - DNA, 2300 bp, Homo sapien
gtagtcccagctactcgggaggctgagggaggagaatggcatgaacctgggaggcagagcttgcagtgagctgagatcgcgccgctgtactccagcctgggtgacagggcgagactccatctcaaaaaaaaaaaataaaataataataataataataataatattcccacaaagaaaacatgagaccaaatgatatttccaagttctagcaaactttcaatcaaggatcattcctacctcacacaaactcctccacagagcagaaaaagaaggcacactctgctactcattctatcaggccagagtaagcttcttaccaaaaccagccaagcacattaaaaaggaaagaggccaggtgtgatggctcaagcctgtaatcctgggacactgggaggccaaggtgggagggtcacttgagcccaggatttcaagaaaagtctgggcaacaaagggagaccctatctctacaaaaaattttaaaaaaattagctgggtgtggtggcacacacctgtagtcccagctacttgcggggctaaggtaggaggactgcttgaggccaggaggttgaggctgcagtgagctgtgatagtgccactcactctagcctgggcaacagagcaagcccctgtctcaaaaataaaaaaagaatttacgggctaatcttacccattaacagggaaaggaagaatcttaaacaaaataatagcaaaatgagtagcaacgtataaaaaataaatacaccatgaacatactgggtttattccaagaatgcaaagtttagcattaaaaaacctatcggctgggtgtggtggctcacgcctgcaattccagcaccttgggaggccgaggcgggaacacgaggtcaggagttcaagaccagcatggccaagatggtgaaaccccatctctactaaaactacaaaaattagccaggcacagtggcaggcgcctgtaatcccagctactcaggaggctgaggcaggagaatcgcctgaacccaggcggcagaggttgcagtgagccaagatcacaccactgcactccagcctgggcgacagagagagactctgtctcaaaaaaagaacacaaaaaacctggcaaatgaaatttaccacacagagcaatgcagagcatgaagtcaggaactctgcagagggacccctcaattatccagcagaggctgggctcagtggctcatgcctgtaatcccagcacttgggaggctgaggtaggcagatcacttgagatcaggagtttgagaccagcctggccaatatggtgaaaccccatctctactaaaaatacaaaaattagatgggtgtggtggcgggcacctgtaatccgagctacccaggaggctgagacaggagaatggtttgaacccgggagttggaggttgcagtgagccaagattgtgccaatgcactccagcctgggcgacagagtaagactccgtctcaaaaaacaacaacaacaacaacaaaaaccccccaaacaaataaaattatccagcagaatactgattaaagacataaatatgaagacaaaacttccataaaaaggaagataggtaaatgtgtggcttccttaaaattaaaatgtttgtccaacacacaaggtataaagaaagaggaggccggcaggagttcgagactatcctggccaacatggtgaaaccccgtctctactaaaaatacaagcattagccaggcgaggtggtgcatgactgtagaacattaaacaatcctttgaagaatttagctcttttctccctgcctccaaagccagcaaatatgagattattttctattgttccagtgactgtaataatagcagaggtcaaggaaacatctcttgtatgagagttgtcatggaatcagatttgttgtaaagaaccatttatattctggactgtccaccagaagaaggaatacagacaacatatgcatatataactgcaagattattgccggttcctctatagcagcaataatcgcaaagaaaatactaccaaaacatccaaaacagccacaataaccattagtgattttattgaagacttattcacagtattttgacctgagaaatggtgattttaacatacccttttaggtgcccacattgatcttagttaacagtcttgtagttccctctttaggcttcaagataattgtgatttcatcgcaccccagatacttccaagtggagccaggcctcagactgttctcagtcactgctctcccacagctgattacagacattgcctgtgcttcctaccccagcagctgtctagtgcact

SEQ ID NO: 22991 - DNA, 2300 bp, Homo sapien
agtcaacccagtcctacagacttgtggggggtggggggcagaaggggcaaaggccggcgattaaaccatcattttatttttatttttattttagacagaggatcttgctctgtcgcccaggctggagtccagtggcgcgatcatagctcacagcaacctcgaactcttaggctcaagcgatccttcttcctcagcctccacccaagtagctgggactagaggcgcgagcaaccacgcccagctaatcttttattttttatttttattttttgtagaaacggggtctcgctgtgttgctatctaatgaaaccatcactttaattagatgcgctcagtgccgtgcagttcagagcgttgcggaagcacagaagaggttcctaccctcgctaggcgtcctggatctgtaggagcagagctgggggagggagggaggacaccagtaattgctgactctcccccatacccctaaacccctgttctccatctcgtgtagttctgctcgacgcacatttattgggtactcaattttcaaggcaaagaaatgcgccctggggataccaatagaattaagacaggttggctgtcttccaggtactaagtctgagagggacggggacacacagttactgcatggagtgattagtgctgtggaatgaatgaatgaatatgtaaatgaattctactttgagttcctcctccaccaaaaaatacattcaggaatctagaaaaatattttttggaggaggtaatatttgtttaaagggtaattgggacttttaaaattttttccccctcattattacctgcattgttccaaaaattgatgtgaggccaagtatatcaatttttggaacaatggctcacacctgtaatctcaacactgtaggagaccgaggcaggaggattgcttgagcctagaagttcaagaccagcctgggtaacatagcgagatcccgtctctctctctctccttttttttttttttttttttgagacagaatcttcactctgtcgccaggatggagtgcagtggcacaatctcggctcactgcaacctccgcctcccaggttcaagcgattctcgtgcctcagtctcccaagtagctgggattacaggcgtgagacaccagcgttcggctaatttttaaatttttagtagagacagggtttcaccatgttggccaggctggtctcgaactcccgacctcaggttatccgcccgcctcagcctcccaaagtgctgggattacaggcatgccatctttatttttaaaaaaagaaaagaaaagaaaaagaaaaacataaaaactgatgtgaagatatgattctcctgagtggcactggaagataggcatggggagaaaagcctggcaaactggtccagaatgagccccaagggtgttcttcctccatttcctcatccccactctcccggatgcttaggtcccagatgaggttgtctgcatccctgaaggtgttctggctgtgttgttaaagaaagatgattgtcgactgtactgtgagggtcaggacctggaattcctcataggtctgaagaagcctaagggacgcactaaatccataggctgcggccagagcaggcacgcttagggtcggggtagaacagggatttgtagctgggacaggcccatgcagcggcttcagctcaatgcacagtattttgtgtacagataagaacattttcctgagagattttatcagattttaaagaaggttaaaaagccgtggtgatcctagggctcctggactccttagacaagagaaccgacgagaagtggggaaagagctcaagtgcttaagggagggaaaatgtggcgggcttgcggtcggtggttttacggggactaccactcccagcgatccgtgcggcagagccagagcttattggccagtgggacgaaccctctgctaatgtgcatattcaaaagccaatagacggggccatctcggagcgtgcctatcctatcagaggaccacccacctatcagaggaccgatatcaccgcccacctatcagaggactgagggccggtgcttccggtggctgcccagaacttcttatgtgcggcggcgtgatgttgggcggccacagagagattggtgtttttgtgaggcagtgagacctaaggtatttcatctccactgctgccgggcctggcgggtgtggggaggctgtagggggtcaggagggaagtggatcggctcttggtgggtagggggcgggaaggaggagattcaggcgtgcagagaggatgaggagaatggggcgggccgcgtgtg

SEQ ID NO: 22992 - DNA, 2300 bp, Homo sapien
ttttccctcccttaagcacttgagctctttccccacttctcgtcggttctcttgtctaaggagtccaggagccctaggatcaccacggctttttaaccttctttaaaatctgataaaatctctcaggaaaatgttcttatctgtacacaaaatactgtgcattgagctgaagccgctgcatgggcctgtcccagctacaaatccctgttctaccccgaccctaagcgtgcctgctctggccgcagcctatggatttagtgcgtcccttaggcttcttcagacctatgaggaattccaggtcctgaccctcacagtacagtcgacaatcatctttctttaacaacacagccagaacaccttcagggatgcagacaacctcatctgggacctaagcatccgggagagtggggatgaggaaatggaggaagaacacccttggggctcattctggaccagtttgccaggcttttctccccatgcctatcttccagtgccactcaggagaatcatatcttcacatcagtttttatgtttttctttttcttttcttttctttttttaaaaataaagatggcatgcctgtaatcccagcactttgggaggctgaggcgggcggataacctgaggtcgggagttcgagaccagcctggccaacatggtgaaaccctgtctctactaaaaatttaaaaattagccgaacgctggtgtctcacgcctgtaatcccagctacttgggagactgaggcacgagaatcgcttgaacctgggaggcggaggttgcagtgagccgagattgtgccactgcactccatcctggcgacagagtgaagattctgtctcaaaaaaaaaaaaaaaaaaaaggagagagagagagacgggatctcgctatgttacccaggctggtcttgaacttctaggctcaagcaatcctcctgcctcggtctcctacagtgttgagattacaggtgtgagccattgttccaaaaattgatatacttggcctcacatcaatttttggaacaatgcaggtaataatgagggggaaaaaattttaaaagtcccaattaccctttaaacaaatattacctcctccaaaaaatatttttctagattcctgaatgtattttttggtggaggaggaactcaaagtagaattcatttacatattcattcattcattccacagcactaatcactccatgcagtaactgtgtgtccccgtccctctcagacttagtacctggaagacagccaacctgtcttaattctattggtatccccagggcgcatttctttgccttgaaaattgagtacccaataaatgtgcgtcgagcagaactacacgagatggagaacaggggtttaggggtatgggggagagtcagcaattactggtgtcctccctccctcccccagctctgctcctacagatccaggacgcctagcgagggtaggaacctcttctgtgcttccgcaacgctctgaactgcacggcactgagcgcatctaattaaagtgatggtttcattagatagcaacacagcgagaccccgtttctacaaaaaataaaaataaaaaataaaagattagctgggcgtggttgctcgcgcctctagtcccagctacttgggtggaggctgaggaagaaggatcgcttgagcctaagagttcgaggttgctgtgagctatgatcgcgccactggactccagcctgggcgacagagcaagatcctctgtctaaaataaaaataaaaataaaatgatggtttaatcgccggcctttgccccttctgccccccaccccccacaagtctgtaggactgggttgacttcccagagcttactacagattagatgctaaataaatgtctattggacggatgcgcgaatgaatggatggatggaggatgtggttgtgcttaccacgctccctggtcagtgggttaatgtcgtcaggcggggccaggctcgctaacagccgggcggggtcccttcccccgggccccgccccggccgaccccacctttccgcgcggctccgccccgccgcccccttgccagtggcccctccccgcgcaggtcccgactccagccgcacctcctccggctctgcagtggcggcgaggaggcgagccggagcgacggcggggctggggccggagccgagccggggtcgggcagcagcagggaccccccagaggcggggcctgtgggaccgctatgggcgtggagatcgagaccatctcccccggagacggtaccgggctccctccggagccaggggaggggaggggtcccggg

SEQ ID NO: 22993 - DNA, 2300 bp, Homo sapien
gttggccaggctggtctcaaactcctgacctcaggtgatccacctgcctcggcctcccagagtactgggattacaggtgtaagccatggtgcccggccggttgtctttttcttgttgatttataggagttttgtatatgttttggatatgagtcttttgttggttatatctatcccaaacatcttctcccacactatggcttgcctttttactctcttaatagtatattttgaacagaagttctttttttatagtttatattttcttcttttctttctttttaaaatttttttctttcttttttatttttgagataggatctcactctgttacccaggctggagttcagtggctctagtcttcagggatcatggctcactgcagccttgacctcctgggttcaaggactcctcccatgtcagcctcccaagtagctgggagtacaggaacatgctaccatgcctggctaatttttttttggtttttttttgtgtgtgtgtgatggagttttgctatcgttgcccaggctggagtgcaatggcacgatttcagctcaccacaacctctgcctcccaggttcaagcaattctcctgcctcagtcttccgagtagctgggatttcaggcatgcgccaccacgcctggacaattttgtatttttagtagagactgggtttctccatgttggtcaggctggtctcgaactccctacctcaggtgatctgctcgcctcggcctcccaaagtgctgggattacaggcgtgagccaccgggcccggccacctggctaatttttagtttttctgtagagaggaaggtctccctatgttgcccaggatggtctcaaactcctgggctcaagtgatcctcctaccttggcctcccaaagtgctagtattacaggtgtgagccactgtacctggcctgaacagaagttcctaattttgatgaagtctgacttatcaatctttccctttatggttagtgctttctgtgttcagtttaagaaatctttgtctgtcaggccaggtgcggtggctcctgcctataatcccagcactttgggaggccaaggcaggtggatcacctgaggtcaggagttcgagaccagccttgccaacatggtgaaaccctgtctctactaaaaatacaaaaattagccaggcatggtggtgcatgcctgtaatcccagctactcgggaggctgagacaggagaattacttgaacaacccaggaggcggaggttgcagtgagctgagattgagccgctgcactccagcctgggtgacagagatgagactctgtctcaggaaaaaaaaaaaaaaaattgtctctaggtcatgaagatatccttctatttgttatcttgtagaagctttattattctatctttcatatttaggtttatgattcatctggaattgatttttttgtgtgtggatttggtaggggttaaagttcattttttccccatatgaatatactgttgactcaacaaccttaatgcaagaaaaaaaaacctttatttgctgcattgcagtggtatctttgtccaatcaaatcaccatgtaagtgggtctgtttctagactgcatggttttggcttaacttgtagcaatagataaatgaagttatttatccaaagtagattaagtcacatgaaacctgaagaaactaaggaatgagaaaggaaagtcggtatataaatggagtgtgtgaatgtgtgcatgtgtgtttgcatatctgtgtgcatatttgtacaagtatgtatctgtgtgaatgtatgtagatctgtgtatgtaaatattttcttagcatctatttggccaccagggcttttctcctgagtgtgagtgcataagtgcatgtgagcatgcacaagtatctttgtgtatttgaatatcttagcaaccttagcaaatgcatgcgattgtatttgatcttgttagcatccatctgcatgtacctctgtgtagccagaagggttttcttctttgcctcagttagtacccagggcaaaagcttaatgtattctactcagaaagtagttaaataagactgtttctctaatatatattttagttgtaggaattaggaagtagcatcatagatgctcctacactaagctggccctgcttcctatgttaaatatgacacatctgaggccctgggagaggaagtgatttgcccagtctcacacaatgagttagagccagagtgaagtcaaaacccagtctctggatgtacaagcaaggtctttttctagtcccaaatggccttttgtggtggtccagggactg

SEQ ID NO: 22994 - DNA, 2300 bp, Homo sapien
ccatatcatgtttcgcacactctgctggattgctcccattggcataaagatacacctatatcacacatcttttaaaaagtcaactatctggccgggtgcggtggctcatgcctgtaatcccagcgttttgggaggccaaggcaggtggatcacttgaggtcaggagtttgagaccagcctggccaacacggagaaaccctgtctctactaaaaatacaaaaattagccgggcatggtggtgggcacctgtaatcccagctactcaagaggctgaggcaggagaattgcttgaactcaggagacagaggttgcagtgagccaagactgtgccactgcactccagcctgggtgacagagtgagagtccatctcaaaaaaaaaagtcaactatcatccaatttccctacttcctatttaaatgagaactcatggacagagtgtctttgctgtttccattttctcaacttccaccatcttttcaccccactgcaatcaagttttcatccactgaaatgattcctatcatcaaggtcaccaaaagtctccatttacatatacaatggtcaattgcttgtcttttctttctttctttctttctttctgtttttttttttttttttgagtcagggtcttgctctgtctcctgggctgaagtgctgcgcagtggcacaatcatggctcaaggcagccttgaattcctgggctcaagcaatcctcccacctcagcctccaaaagtgcggggattacaggcatgagccacctcactcggcctaacttcatcttacacctctaagcgttttactgttgactaatctcttttttgagttttttttttttaaaagtttccgtaacactgtactctcaaacactagaatgtaagcagaaggacttgttttattcactgctgtattcccaatacgtaagactagtgtctggcacatagtagctattcaataaatataattgatgaattatgtcccacatggcaagcagaatacatagtaggtgctcaaaaaatattgttttaattaatgtgttaatgaaggatccgaaaagcaccatgatctgaggggaatcccaggtcctagttgttggtgaaccattaagttagttgaggactcttctgagatatcgactttaagtcaaggagataatcctaacgccaggtccttaggtgcgggtcaagcaaagaggctataggggtaacactatcactgacactagggtagagactgaggaactctcaaaaggggtggggacagaaatgtggctcaaggagcatatctctgaggatggggccggatagtgtcttcgctgacaggataggaattctggagttctccgctctggggacggaggaggagcaagaatgctccgatccacgccgctaagaaagtcaaacccgaagttctcccaccctccgcagaacacccgatactcacgttcgccctcttggccgcttgcatcgccatcttggcgggctgatgaagttaccgtagcagatactgaaattcctccggagctcgctcggcttcgggggttacaccgcgttagatgcaggacatcaacatccaggacccgccggaagctgttacagcggaatagcgccgtcttacgctgagacgcgctgacgtagcagcccccttcgaatagactccggggtaaaaccgagcctgagcgagactcgaggccggaagatggaaaggcgagagtccaagacacttccgggctctgtaccgtaaagggcggggcgtagcctccaaaaggcgagatgttccggtcggggaggccctgagcagaggaacccgggtggagagggcggggcctgaggagggcggagagctggggcgggtctcaggtgagtaactggggagcggaggaggcggggcttgagcagggttatgacaggtagggcgggacccaggtgagtagcgggagggggcggggcctgaggagggtgcggagagctggggtggggcccaagtgagtatccgggagggagccgggcctgagcaaggcggtgagctggggcgggacccaagtgagtaatggaaggggcggggcctgaggagggtggtggcggtggggcggggcccagatgtgtagcgggaggtggtggggcctgaggagggtggcgagaggtggggtggggcccaggtgagtagcgggcgaaggcggggcctgaggaggactgagctggggcgggacccaggtgagtagcggaagggatcggggcctgaggagggtggtggaggtgcggcggggcccagaagtgtagcaggaggtggttggggctgagg

SEQ ID NO: 22995 - DNA, 2300 bp, Homo sapien
ccaaattgataccagcagattgacaggagaaaagcatgtactttttttttttttttttttttttatggagacagggtcttactctgtcacccaggctggagtgcaatggcacaatcagcctcctgggtagctaagactgaaggcataccaccatgcctggcttgtattttttatagagacaggttttcaccatgttgcccaggctgatctcaaactcccaggctcaagtgattcggccaaagtaagatgcttttgtaatttttagacaaagaacaataaatttgagaagaaataagacaaaatctggctagggatagtaaatttctagggaagtcactaggagatatatgggggtggggggtgtaaaactagtggaagataagggttacttccttaagtgtatttattcagttccattgcagccccgtttccagtctctggtgataagggctttttgccctagtatggggagggtacccctctcagaggaatctttatgacttgctacatgcaagaagagacaggtcagctagccttttctgaaactacaatttctccaatgctttcacctcaaaattaacaatatacctatcggacatattctgagatggcacatgactccttcaagggtatttcacacacatgctaggaagtgaggggttaagtgtccctgtgtgctttttcagatacgtggcttcagagagagcaagaaggctgaggaggatgaggagggcagggtgaggctctctccccaggctgatgatctcctttcccttgtcttagtacaagcaaatgctggtgaatgctttcacggagcaaattctgcctcacttctccacggagggcccccaacgtctgctgccggttctggacagaatctacccagtgaccgaaatccaggaggcccataagtacatggaggccaacaagaacataggcaagatcgtcctggaactgccccagtgaaggaggatggggcaggacaggacgcggccaccccaggcctttccagagcaaacctggagaagattcacaatagacaggccaagaaacccggtgcttcctccagagccgtttaaagctgatatgaggaaataaagagtgaactggaagggtggcacgcggactggggccgccgcggcggggttgaggtgggagtccggacgggcgtcgcagcggggattactgaggcccgatcagctgacgctcaacctgagggcccctccagggacggagattctgggtatagttacagcgtcagccgtgacacaagccgccagaaccccacatattccgccttgcgcacagctagaggcccaggcccaccacctccggcacctgcccgcgcgccccgcaaccagtgggcaccacagcaggccccagccctgcccgctactcacctgggccccaccccacctctcgccgccctcctcaggccccaccacctcccgctacacatctgagccccgccccacctccaccactttcctcagccccaaccacctcctgctacacttctgggccccgccgcacctccaccaccctcctcaggccccgatcccttccgctactcacctgggtcccgccccagctcagtcctcctcaggccccgccttcgcccgctactcacctgggccccaccccacctctcgccaccctcctcaggccccaccacctcccgctacacatctgggccccgccccaccgccaccaccctcctcaggccccgccccttccattactcacttgggtcccgccccagctcaccgccttgctcaggcccggctccctcccggatactcacttgggccccaccccagctctccgcaccctcctcaggccccgccccctcccgctactcacctgggtcccgccctacctgtcataaccctgctcaagccccgcctcctccgctccccagttactcacctgagacccgccccagctctccgccctcctcaggccccgccctctccacccgggttcctctgctcagggcctccccgaccggaacatctcgccttttggaggctacgccccgccctttacggtacagagcccggaagtgtcttggactctcgcctttccatcttccggcctcgagtctcgctcaggctcggttttaccccggagtctattcgaagggggctgctacgtcagcgcgtctcagcgtaagacggcgctattccgctgtaacagcttccggcgggtcctggatgttgatgtcctgcatctaacgcggtgtaacccccgaagccgagcgagctccggaggaatttcagtatctgctacggtaactt

SEQ ID NO: 22996 - DNA, 2300 bp, Homo sapien
cactgcaagattacatcgaccaagggctcactaagataaaatcttaggcactttcaactactagttttactgggatactttagtatacttagtggttggtattattagattttttttaaagttactccttgcatcttaaaagttcttatttagcacttacattacacattcctcatctatcttaatccattccattttcttaatccaatcagttttagtgtcgatttttgcaaagtttgttatttacaactatttcctttccatctgtctctgttctaggatatttatttggttcaaacctttcctcgattttggacagatgtgtatccggatgatgtgtctctgaatccttatacatcctcagacatgttttttgccctaacaagtgaattatatcttaatggggtatattgagttacagtgcttttcttctagtcaatagacgctagtctactctcttctagcttccagattgcagatagaaacttgctgggcacagtggctcatacttgtaatcctagcactttgggaggctgaggcaggaggattgcttgagtccaggagtttgagaccagcctgggcaacataatgagacccctacactacaaaaaagagagagagagaaagagggggtggggaaggagggaaggaaggaaggagggagggagggagagaaggaagccattttttttaaccaattgtgagtaacttattctttccacacttgttagaacctgaaattttataaaatataggcatgcatttttgttcttatgaatccatcctttagtgaatgttttcaatccgtataatctggtagaatttaggaaaactgtattcttttatttggttaactattgaatcttcttcatccattcctcttcctccttctaaaattccttttttttttttttttttgagacggagtctcactctgtcgtccaggctggagtgcagtggtgcgatctcggctcactgcaagctccccctcccgggttcacgccattctcctgcctcagcctcccgaatagctgggactacaggcgcccgccaccacgcccggctaattttttgtatttttagtagagacggggtttcaccgtgttagccaggatggtctcgatctcctgacctcgtgatccgcccgccttggcctcccaaagttctgggattacaggcgtgagccaccgcgcccggcctaaaattcctgttattctcatagcagggtctcctgaatttttccttaagtcccatcattttattatttccatctctataggcttttgctctgttgtgttaaagaaataattattcaatgatacttgttaaagcacattaaggaagactttatttagcaccatcgctacaggtttagggaccactgcaatgagttcttgcagtggaggagacaggttgggatcaactctgaatgcatcacggacaagtgggaatgtatagccaaggagcagtgtagggggtcagtggatggaaaattggtaagaggcatcaggggtaagggggattctatctaaactgacctaacaggattctcactgaagacaggccagggtggtcggatatcacttgggggatggtggaggatgagatattgagggtgatcagatgtcaaggatgggaggttcttactaaaacaggaatttacaaggagtgctacggatatgtagtggggggaggccagggatgctgctaaacatcctacgatgcacaggacgatctcctacaataacgaactagctagtccaaaatgtcaatagcgccgagattgagaaaccttcatgtagcttacggatacagcttttacccaatcgccagcatccttctcctggggctgaacctctcccccaggactgtcaggaggaggcgagtgataaggatcccaggactgcgttttgccttccttccccacccccactcccaacggctcctttctcttctcttagcagcacccagcttgcccacccatgctcaagatgggcgggatgccagcctgttacataaatgtgccaaaagcctggccatgcctggaaaatggaccaatccgcccgccaagaggttgggtctcgttccctagagagaaggaagtttcctctccttgaagtgagagctagaatcgcactttctgtcaagctgagagaaagactcttttccagaggctaaaaggacaagaaaatctgatttgcttgcttctaactttgcgttttaaagggggaaggaggaaaggaaagagggggagggtggttctgcttagccccacccctccggctaccccaggtccagcc

SEQ ID NO: 22997 - DNA, 2300 bp, Homo sapien
cagtgagctgagatcatgccattgcatcccaggctaagcaacaagagtgaaattccgtctcaaaaaaaaaaaaaagtcatgtctgcttcattttttggaagaatagaaataataagtaaatcaagtcttaggtccaaacttgttttttcttacattgaaacctggtgatgctacacacaagctccgctcctggattttgatgagggctgcactgtccacatgcttggttcccaagagggtgtctaacaataagctctgcaaatggctcatgttccctcaactctgaaagggaaagtgcagttgaagccattgactctggctagcttttaaaaggcatgtgaatacaaatgtccttaagacactgcagacagttctaagatcagcaagtgtactttgaaaaggtacagggtgaaaacggtggtccatcattcagggcccaccagtacccaaagaggaaaacagaatcatagaaaaatcacagctcacacagaataggttatgaagctgagtttggaaaatcacagcctggtgattttctggctatgtcaatggtttacatcaggattatctgcgatttaaaaacaaacattacacactgagaaaaactctgtaaaataaaaaataaaaacaaaaaacaaaacccagccaggatggagagctaccctgctaagttaaacacgactaaaagagattatgcgtggccataaacccacacattcccttcccggtgacctgcatcagcgccagctatgaacgctgatcaacatcccaatggactaaaaacaccttgaaggcacttaaacccacatttcccgcacaagtccccaagccttggacccccctcatcaggacctccggcacaggcgcccgtttcccgccactgccttccagtggtttggtccccgagcaggacccaaggcggggcagggggtggtgagcggtgaattccctggcaccgaggactcgagggagcggacgccaccccgctctgtggtgcccgcaaggacccggcgaccaaggacccgaccgtcaacggacgcggttgcgggtgggtggcggcggcaggattggccgggccacgcgccggtcaccgagaagcagcgactccagccccttccgcaaaccaagacccgccacctagagccgccgcccaatcccctttgggcctgaagccgtcctccgccgccccggcaccgcccgcgcggactcgctgtggaacccgcggcgcagggggcggagtgctcgcgcggcgctgcgtccgggagacggtgggcgccaacattcgcgcgttccgcagacgcgggcgggctcccttccagccgcagtcggacggctccggggtcgtcgggccgggcccgagtgtgtagcaggacggccgcgggcctgctggccttgggagggcagagaggtgcctgtcgcggccggcgacctccccgccaggccgggcggtccccgcgcacgacgcgcctgcgcgggaggcccccggcccggggctggcgtggaggccgcaggcgcccggcctagtgggtgggaggaagggccgggagtgggcgcgatgagcgagagcgggtgcggacgcctacgacatccccgtcgcacccgtgcctcggggaggacttcgagccgctcagagctcgaagactcgcgcagtatgaccgaaagcccctccctgccttctctaagcagctcagcctgtgtttctgtggccagaaagttgcagttcttcccactcgaggccaccaaagtcagaaaagtgttgcaaatgggactccgagaggccaggctgaagctgccacactggctggaatgggctgccttggagggggacgtgggaatccattccaagggacgggggattctttcaaagagcatctcgcctgcttataaaggaggctggctctgaagccgtcatctggagtctgtagtgaaggcctcttgttagggaaactggatggttagtgttcaaaatccattttgcgtgtgtgcaaggacacaggtggtattaaacagaagagaaaatcagatgactgtgaaatgttcaatactaaataagatgatttttagtttttccaggggcattgttatttgtgaccacaatgaaaaatgtagacagtgatgatctggtaactggcacacttcccaagctcaagagctcaaaagaatggttggagcccaagcccctttgttttatggaggtatatatcaaatagtgtgggatttggagatttttttacttggatcgttgcagtaggaagtggcttgtgctaaatatattgttttttctattgtttgtttttatt

SEQ ID NO: 22998 - DNA, 2300 bp, Homo sapien
actgaatatgtccaccatcttgattgtggtgatgttttcgtgtgtatacatgtcaaaacttaccaagtttgtacactttatttgagacagggtcttattctgtcacccaggtggggatgcagtggcacaatcacagctcactgcagcctcaaattcctggggtcaagcaatcctcctgcctcagcctctcaagcagctgggactataggtgtatgctaccacacctggctattattgttcgttcgtttgtggagacagggtctcagtatattgctctgcctggtctagatagaactcctgggctcaagcgaccctcccacctcagcctcccaacgtgctgggattacaggcatgaggcacagtgccagacacacactttaaatatatgcagtttactgtatatcaattacatcttaataaagctgtttagaaaaaagaaactacaatctaaaaacaatataactggctgggcgcaagggctcacagctataatcccagcattttggaacaccacggtaggtggattgcttgagctcaggagttggggaccagcctaggcgacacagtgtagagattttttgtatctctacagaaaatacaaaaattagccagacatggtggcgtgcgcctatacttccagctactagggagtggaaggatggcttgattccaggaggaaacatagcaagaccctgtctcaaatataaataaataaataaatacatcatatcaaaatttgggtgatgcagctaaggcagtacctcaagagaaacttatagctatgttacattttaaaaggtatataatcaatgacctatgattccaccttaagatgttagaaaaaaacagcaaagtgaatatacaaagttagtaaagtgaagggaataataaacagaatgaaataaaaacaaacaatagaaaaaacaatatatttagcacaagccacttcctactgcaacgatccaagtaaaaaaatctccaaatcccacactatttgatatatacctccataaaacaaaggggcttgggctccaaccattcttttgagctcttgagcttgggaagtgtgccagttaccagatcatcactgtctacatttttcattgtggtcacaaataacaatgcccctggaaaaactaaaaatcatcttatttagtattgaacatttcacagtcatctgattttctcttctgtttaataccacctgtgtccttgcacacacgcaaaatggattttgaacactaaccatccagtttccctaacaagaggccttcactacagactccagatgacggcttcagagccagcctcctttataagcaggcgagatgctctttgaaagaatcccccgtcccttggaatggattcccacgtccccctccaaggcagcccattccagccagtgtggcagcttcagcctggcctctcggagtcccatttgcaacacttttctgactttggtggcctcgagtgggaagaactgcaactttctggccacagaaacacaggctgagctgcttagagaaggcagggaggggctttcggtcatactgcgcgagtcttcgagctctgagcggctcgaagtcctccccgaggcacgggtgcgacggggatgtcgtaggcgtccgcacccgctctcgctcatcgcgcccactcccggcccttcctcccacccactaggccgggcgcctgcggcctccacgccagccccgggccgggggcctcccgcgcaggcgcgtcgtgcgcggggaccgcccggcctggcggggaggtcgccggccgcgacaggcacctctctgccctcccaaggccagcaggcccgcggccgtcctgctacacactcgggcccggcccgacgaccccggagccgtccgactgcggctggaagggagcccgcccgcgtctgcggaacgcgcgaatgttggcgcccaccgtctcccggacgcagcgccgcgcgagcactccgccccctgcgccgcgggttccacagcgagtccgcgcgggcggtgccggggcggcggaggacggcttcaggcccaaaggggattgggcggcggctctaggtggcgggtcttggtttgcggaaggggctggagtcgctgcttctcggtgaccggcgcgtggcccggccaatcctgccgccgccacccacccgcaaccgcgtccgttgacggtcgggtccttggtcgccgggtccttgcgggcaccacagagcggggtggcgtccgctccctcgagtcctcggtgccagggaattcaccgctcaccaccccctgccccgccttgggtcctgctcgggg

SEQ ID NO: 22999 - DNA, 2300 bp, Homo sapien
tttttcatatgttgacattgaaatttcattttgtgtagatgttgggattatgtctcattcatttatttattcatcattcacttagtaagtatttaagtgcctgtttttcccaggtgctctgccaggttctggggatataaggatgagccaacataggctctctgccctaaagttagtgggagaaacagtaacaaaagattttaatactatgagattaactgacttagttgtggtatgtagaaagagacacagagcctgcagcaagagcctaggtgaagactcagtgaagcactacctattgaaaggagaatctttcaaatccttaacagttattttcaccatgtaaaaaaggcgacattgccagggaacatcaagtaaagagacaaatgctcaggtaagcttttaaatcatatgagattgaaataagttgattcagtaaatcagggaaacttttattttcaaatgaagtaaggaagaagctaggtagaaattaaaaatcctattttgtatcaccttttgcttatacttaatgtagtttaagccatcagtatattatacttttctgtgtatgtcgtctactcaacaggaattttctgttcgcctgctatttgggtcagtcatagatggtcccatgttatgagaaagatgtaaagatgagatagattcagctccttttctcgagaagattataccatataaggaagtaatttgctgaatggtctctcagttagcctgactagaatctctaaatcatggtctacacagcagtaatgaggaactttggcccctcaagtgtcaatgaaggccaactggggcacctggattcctatctccatctggcagtaatgaggtggtaacctcattaaccctgttagattggtgttggagaaagccagctaaaacagaaagtttaaataagatccagagtctcataatataaactgaaaatgttcagacttcaatagagaccagcactgagatgacaaagatgttagaataagctcacagacttttaaagttgctatgagaaaactgcttcaatgagcaaatatggatacacttgaagcaaatgaaaaaataaaaatcctgagcaaacaggagatacaaagaagaaccagatgaaaattgtagaactgaaaattacaatagccaaaataaaaagctcagcagttaagctcaacagtagaatagagaagatggaggaaagaatcagtgagctggaagatagaacaataaaaattacccaatcttaaaaaatgagaaaatagactgggggtggagggaagaagagaggcttaagtggctgtgggggctataataatattcatgtcatcagaatcccagaaggacgagagaaacaggcaggactaaaaaacatacttgaagaaacattggctgaaaacagagtaatccttgtagtggtgtcctgatacacctgatacaagataatatcctgtatcttgactgtagctatgtcaaatcttggttgtgataatgtaccataccttaaactattaacaataattctagatatcattaaatttgtagtcagagttttcgcattttcctgattggcccaaatgttttgaagtcggtttcttcacatcagaatccaaaccaggtccacctgtggcaccttcacccttcagtgggagtaaggagccggacgcgtcacttaaaaccattcctcttacgttgtcaccctcaatcttacaggtaaatggcaaattctctttcgtattagtgtacatgcctcgataaaagtccagaagggcggcgggggcctcggcggttgaaggcccgcgtgccctggctcctgcgaggggagggcgcccccgagacagacgtggagggagggcgagggccaggcgctgggcttcatcactgcgtttccgttttctgtgaaatcaaatggcgcctttccctttcccgggaagtcggtgtcaccgcccgtttgctgtgaaatcaaatggcgcccttccttttcccgggacttcggcgtcaccgtccagctggcgtcggggcagcaccccgggatctggcgtggcgcatgcgccccgacgctcgggcccgcgggctcctttctccgtcgccgctccaggacgcggcctcgggggagccctaccgggacggagccgcggggcctgcgacttcccccggagctggcctgaggtggggcccggggaggcctacgggcctgggggtcgcggagcccagggagggctgtggcagggccaggggggcgcgccccggaggaaaggcccgctttggcccgaggacgacacgggagtgggtagccg

SEQ ID NO: 23000 - DNA, 2300 bp, Homo sapien
gccctctccccatccttctgcccctgcctcctcccccttctcacttcaccagacttcagtccacgtcctgtccccaccagtgacaccagtggcctagttagtggctcagctcactttccctgccccagctccctgcactgatggcagtcactgaggcgctgccttccctctggaccccatggccgccttcccagttcttcttccacccttgcccaggcctctccccgacctctgtagcgctctccctcggggaccccaccgacccccagcttcagggtcaggctagccacactctcccaagcccgcgcctctgaacagcaccctccagagaaccacctgccccgctgctcccacatcacacatcggcttttcccaagggaccaccagcctccttccagcagcagctcctcctgggaccctctgtggacagtagtgtggtccctggccacccaggcccctccctggcacctcacacctggtcagctgcactgcagtcctcctccctcgccactttcccatcgccctttcctgtccccgtatcacaggcccccgatctcccacccaggctgcagcacaaggctctctttcctctctgccacccatcctcttcatttctggagtattcttttttccagagctgctcttatacctcttcctgctgaagtatcttccctattgcctcccaaattaacgacacatttcttaccccacactcagggcccatccccactactacctgccacccagccccatccctagctctttcctgtgcccggcccatccagctgcctagttgagcagcccattgttgccctgcctggccttcccatgtgagctccccctccagctcaagtgctctgccctcaccttaaattcttcccatccttcaaggcccacgtcaaacacagcctcctccatgacaccctcttgccctaaccagtgtgacttctacctggaccccccgctgtcctgaggctgcgatcatcctccgggcgctcatcctctgttgcctctgcttgcgccctctcagtccctgcttttctcacttaatggccataagctccctcaaggcaactccctcccacatcggggccagcatgtgacttatgccagtggggctccagatttgttgcaccggtgatgtcctctgtgttcatggcacagatcactcacctgctcagtggagccgcaatggtctttgtaaagcaccccccaccccaccctgccccaccgtggccttcagaccagagctcccacattcttctccagcctccacatgaatgccaggccccaacctccctgctgcatctccagctgtgccaggccagcctgtggcctccaccccacagggggcctgtgctctgagccagctgcatctccaccttcctccccgccggccccctgcatctccaccttccttcccgccgggcccccccatgcagcctgccctcctgcctgggcctcccaccagcttcctggctgctatagttgcagctctttatgtgtttttttattcaggtttcccccattttgttatatactcctaaaaggtatgtttaaaacagcttttgctaatttagtgttattttaatggtactttaaaagcttgctgttgaaaaatcaatgattgatcatttcataacgcatatgatctcttaattggccaaagatgtcaatccggtttttctgcctgagttttgcttcccatcagcatctgcatatgttgctgtgcatcgtccgtgcgttcagtccttcccacatttgtcaattactttgtgccaggctctgtgctaggcttaactgagcctggactttggtatctgatgtttaaatgttgaccctgccatttagcagctctgagtggatcacactccagtcctttctaagcctcagtgtttctcatcagtaaaatggggagctacattatcaggtaattatgcagtttaaataatataatttacataagtctagcacatgcctaacacaaagtaagtatccagtaaatgttagctgctattaagtgctgcacaaataccatgtattattttattaatattactatttgctaggcaattgaggggttaatataaggatgatcgaaacagtccatgctctaccctggctcctgtctggcagaggagacagacattacacacgatttcagacccagcaggctgtgggctgctcataagcgagggatactggatgcagaggagggaagggatctgggaggtagatgtgggatcagacctgcatcttgaaggatgagtaggatgctgacgggcagagaaagcaggcag

SEQ ID NO: 23001 - DNA, 2300 bp, Homo sapien
tatggcacttctcggttggtgatatctatcttcactgcacgcctgtgggctcactgagaacagggaccgtgcagccttcatcctgtgttcccaaaacttagcctggcccttggtcggcctttccataagtagtcagtgaattgggtgtgtttatgtctgcacctctctggccaggatagatggcctagaagaaaagcccatcattttgattaatcccctacaaggatcagccctgctgctggtcagattccagtcctaaggcactgtaagtaggtgtggaggtctccctaacactaggacagaggtgagcaggcaccgggtgcttgccccatactctgaggagtgaagcatcaggtctgggtccaggattctgggtgaaaagcaccattcacaggtgaggccttcttatgaccatcctcatgaaggttcccagaggcctgaccagcttattcccatctgcttacctcaccaagcccggcacaaagcagctacatggatggctagaggggcatgaatgaatcagcaaataaacaaacagatggacagccagactcttccctgtccctccatagcagcctccgagcaggccggccgtctttccagggctgctctcacaggagtggcctagtgtcttcagtctgatttggaactgtaaaactctctttagagagtgcccagcacttgtacttgaattctgtgaatccatgttcaactcaactctgtaaacatgaattacaaaccacgatgtgcaaagggctatgccagagaacagagatgaaagaaagttcttgtcctccaggaattcagagtcctgttggatggagagaggtacagtggggccagtaaggctgaaacctggggttagtgaccaccccagccaggaagaactttcccagttatgttttggacaaggacaagtttgctactccaggaggaggaaacagaagtgggatggcatgtatggagggagtcaggggcctacaggccatccagggtgactggagtgtgaagtagctgagggccaggctggtgaggttggcagggggcaggtctcataggccctggaacctccaggaggagtctgtgtcttatcacacggacagtggagagctttgagtgattctaatagcagcatgtcatgggcattttggaaagatgacatatgagaagagtgtctcaggtaacttctctatttccttaaggtgtttaaagtcattccctaggaatctcagttatgcagttgaaacttagatttagaatcaaaaagagctgaattttagtcctaggcctttcatattctgtctttgtgatcttgagcaagtctccctctaagcctttatttcttcataggtcaattggtaataataatacctgactcagcttcgcctccatcacccgtgaagctacttgagaaccctgcaaacacacacgcgtgtgtgtacacacacacaagcatctgcatatttgtacatatcagtgctttgtaaatccttaagtgctatgtaatacagatgtagagtattactatttctccctcagcagccaacttctaaaacccacatctgcttagagttatcttaggggtggcataagttgttactctggttctcctgttgaatgtctcacaaattgttgtctagaactctacgatgctccacctaacaatggcctgcttcctcaatcctgcaagcttgtacagtgcctaggtgttcatgcccatggctttatttaaccttcataacatccctaagagagaaatctgaaaatctcctcttaaccagattactagattcagtccttggaactagccttgataagagctgcactagcaaaaagaaagaacattatgcagtataaaatgtgtcataagtatgcttatttggatgattagcttcagtttatgttgacattatttgatctgattagtttcagtttatgaagacattgtttgatttagaccacacgtaggctgtgtatccacacttaagctaactagtttttctatgttttgactttaggtttttcagaaacgcatggcagagtcaggctttctcactgaaggggagatggccctgatttttgttaactggaaggagctcatcatgtccaacacaaagctgctgaagtgagtcctgagcatcacctgtcattgccgctgaccccaaagcccccagactgagactcacacaaaaccctctgcaagggcttcttagcaaaggaacttcaactgctttctgcttcctcaggcttgttattttattatcattttatgaaatatcctgtgactgtaaaatacataa

SEQ ID NO: 23002 - DNA, 2300 bp, Homo sapien
tttttgcatgtgttttataattgattttctagcactggaaaaaatgttttcttttgactttaggaatgggaagcatgcccaatctgtccattcctcagccattgcctccagctgcacctataacatcattgtcttctgcgacttcagggaccaaccttcctcccttaatgatgcccactcccctagtgccttctgttagcacatcatcattaccaaatggaaccgccagtctcattcagcctttacccattccttattcttcttcaagtgagtactttgtttctaaagagtcattatttcatgtaaagaaagaaactatttgtgtttgaacagatacaaatttctttcatacttttccttctttttcttttttagcattgcctcatgggtcatcttatagtctgatgatgggaggatttggaggtgctagtatacagaaagcgcagtctctgattgatttaggatctagtaggtatgaatagctaactctgacaactttttatgctttcagtaagaagtctttatttaacaaatgatttttttaaagctttgagcttacctaagttttactttataatggccaagtacaaatacttaaggtaaatttactacttacaactcacataaaataaattttttatttttagaattattaagtgtctgtggcattttacttttgaaaaaataattcatgtaaactaaaaatattctatattttaattttttctttgcctaaagctgtgtacttttcctttaaaaaatgtgtatatttcccaagatgtctcatactcattgtacattgttaatttctttcttgagcagattctactaattggatatcttttaaattttacaaagcacaaatgcatcagtattcattacattaatcacccttcatataaatcactattatactcttcagggtagtgtacggagagtgttagatttgacccagaagaacaacattcatatcctagcttgaacactcactgattctgtggccttgttttttcttaacatcgctgagccatagtttacccatctaaaagatggggactgtagtattttttaagtttgttgggaggattagaaatatttgtaaaggccttagtacaatataaggtctggcacagagcaggttctttatatgcggtagtctcatggagttctatacttcttatggtctttgctttactaagaatagtgataattgcttaaaatttaaaaaaatgtaaaatgcaaaagcagtcaccattggccaggcacagtggctcacgcctgtaatcccagcactttgggaggctgaggtgggcggattgcctgagctcaggagttcgagaccagcctggggcaacatggtgaaaccctgtctctactaaaaatgcgcacaaaaaaattagccgggcgtggtggcatgtgactgtagtcccagctacttgagaggctgaggcaggagaattgcttgaacccgggaggtggaggttgcagtgatccaggattgtgccactgcactccaggctggcaacagagcgagactctgtctcctccccagaaaaagagaaaaggcagtcaccattatagtatgtaacagcgatcctcaacctttttggtaccagggactggtttcatagaagacagttttttcacagacttgaagcaatggttttaggatgaaactgttacatctcagatcatcaggcattagattctcaaagggagcatccaacctaggtccctcacatgtgccattcacaatagggtttgcactcttatgagaatctaatgccactgctcactggacaggagctggagctcaggtagtagtgctcactcacctgccactcaccgagccccgctgtccagcccggttcctaacaggtcggtggcccgggggttcaggacccctggtatataagattcttaatgccttggtcttataaaatttaattaaatatattttatttagtaacataaaaattttaaataaatttttttatagctcaacttcctcgactgcttcactctcagggaactcacccaagactgggacctcagagtgggcagttcctcagcctacaagattaaaatatcggcaaaaatttaatactcttgacaaaagtatgagtggatatctctcaggtaagcagcatacagtgctgaagagcatgaaaaagggtcttttatgtggacttccactgaagaactgtcatttgaatttgtattgtgtagctcatctgacattttaacatccaaaaaatttagcaggcatttgataaatacaaatacctgaagttgtataa

SEQ ID NO: 23003 - DNA, 2300 bp, Homo sapien
agacctagatcccaactgattaaggccttgtgtccatgggatcccattcctcgttggtttttctgttgttagagccatctttataattcacatgctattatgcagagttagaaaatgcattatttgcaatagtgggttttctcccatgttttaaaatggtctcagccacagaaaactaatgaataagggcccttgctactgcatatctgttaagtagatagtttgtttttagccatgtagcttattttgggttaacattacttatgatttaaaattgaagaagtaaaaatgttatatttgtttgcagtatttctgtatttgaggaagttgcagtcataacttgattgatgggacttccttctgtgttcattttttaagctagctataaaatggtgagaaacgttgaccacgatgtatgtactacttaatgccttctttgtttaaaatggctgtgcaaatatttttcttaggcttctaaaaatattaatatttaaatgatttgggtaaatagatgagatacggcatgatcttttaatatagtagtgttttcctgcaatattatgatccatggttttaattactaagtgcattgctataaatttgctaggccttcacttcctaactggtcctactctcaaaattcatggaacgggcaggacacagtggcctgtaatcccagcactttgggtggctgagggaagcaaatcacttgagctcaggagttcaagactagcctggccaacatggtaaaacctcgtctctactaaaacaaacaaacaaacaaacaaaaattagccgggcatggtgatgtgcgcctgtagacccagctactcaggaggctgaggctggagaatcgcttgaacccgggaggtgaggttgcagtgagccaagactgcgccactgcactccagcctgggcgacagagcgagactccgtctcaagaaaacaaaacaaacaaaaaaaaaaacagacccacaaaaagattcatggaacaatttttgaatttattgacagctgaataatgaattcagggttcaaaatgatactgcactctccttttctggttgtttgcaaaatagcagccatttgttgaacaccctatgtggcaggcagtttactggattatgtttaacactttaaaaaatacttctgcaaagtattttttatagatgagtaatctgagtctcaaaaaaggttaaataacttttccatggtcacagctgggagaatagcagagctgggtttgaacccagagctgtgaatttccaaagtcccttctcttagagtgcttgcccagcacatttagttatgttatatatgtattttaataattttgtgtgttttaataattacttttagactattttataaaccccttgagctcatttaaacagctgcgctacatttattttgaatatttttcttgtttgggagtttttaaaaaatgatactatgggctgggtgcagtggctaacgcctgtaatctcagcactttgggaggctgacgtgggcaggtcacttgaggccaggaatttgagaccattctggtcaacatggcaaaaccctgtccctactaaaaacacaaaaattagccaggtgtggtggagcattcctgtagtcccagctactcaggtggccaaggtatgagaattgcttgaacccaggaggcagaggttgcagtgagctgagattgcaccactgcactccagcctgggtgacagagtgagactctatttaaaaaaaaaaaaaagtatggatttccatgttattcttatatacttaatttatacagttgatttatttttttctcttccaaattaatttctacaagaatgttggttcatgccaagggtttctttattcagtatctactattaaatatgtgactgtttttctgtattaaggcagcacgattacccaacaaaatctcttacccttcctcaaatgtaaattctgcctgttcagcagcagcagaagctctgcattgttttctgttggaagtgtgagctgaaggggacagacattcctactgcttagcgggtgcactaaactgtgatttgcccttgttgtattatcaacggcacaatatttttatgttgcagatggctgagagctagcaaggaaaactcaggaccatgatggctcagtttcccacagctatgaatggtaagcagctttgtgcttgtggcaagatgaggttatggattttttttttttttggtagaggtttaaaatattcatgtagataattttccttaagtgtataaatacaaaacttgaagtattcttggaaaatattt

SEQ ID NO: 23004 - DNA, 2300 bp, Homo sapien
tttctggaacttgttaatataaatgttttacaagtaaatacaatatgtaaaaatgctacttaatggactaatatgtactttcactcattcactaaacacatattttttactgaatgcccatataactttttttttcttttttttgtttgagacggagtctcactctgtcgcctaggctggagtgcagtggtgcgatctcggttcactgcaacctccgcctcccgggttcaacgattctcctgcctcagcctcctgagtacctgggactacaggcgcacgccaccatgccaggctaattttttgtattttttagtagagacaggatttcaccttattggtcagtctcaaactcctgacctggtgatccgccctcctcggcctcccaaagtgctgggattacaggcatgagccagggcacccggcacatagataactcttttttaaatgtatgaaccaagatgactctaccagataaggcacaggtgctgcagttaaaaggatcttggtttgaaacctggctattgtacttactagctcagagacctaaagtagtcaaacttcaggttaacatttcacttacctttttgatgggaagataataattactcctagggccttagtgagctttaaatgattatgtaaaacacttagcatagagtctaacatgcagttacgtgctcgataaatgacaaccatggtaaacatattttatactgaagaaagtatagttgaaggagacagccaatatgtgacccttttgtcttactaaagatggaaatttgtgaaactctacattaaaactaaaaatcctaaggttacatgattttctactttttaaaaaagatatactaactacataaggttaaaggattttttaaaataagaaagaaaaaaagaaaagcttcttgaaagctgctgagtttgggtgatgggtacatgctatttttgtgaaaatacaaattttttaacactattaatccaatccccaaaacatgcctaacacacctcctcatattcaggagagatcaagattttagccttgagatgtaccgaacaatggtaactccctgcttagtaattctgtacaggtcaagttttcttggacgagtttacctttcattacaaaggtgggcacagggaatagttatcaatgcatggaagggtgaaaaaatgcaagcttttcaactgcttattaatattacatcaaaatagcagcaatgcacattttttccacgttttcaaaaacataaaatacatccactttatttacttttgaaattacaagagagtcacaggcacagccaaaaaaagctaaaggaaaacacatcagagttgtcagtatctttaaatttggaaggacgtcattattaattcgcgtaaatgttttatgcgatgtttctaggtagcttttaggttttatcactgattaacaatatagcaaaccagcacagggagagaggcaatttttcgaaacgcttaagaagctttaaactacaagagctatgctacctaaactgagctcactaacaacgtaaaatttcaagtcacaccttgcctatttctgagtaagcaagcaaacactagtgagacaaactagaagcatggagcaaagcaagtcatttctatgctaaccttaattcctatcgtaaaggggttggctccatcaaaaaatattcctatttcagtattaacacaagtttcaaataaagcacacttgccattggtaattctagagcgacaaggcgcataattaataaatccaaacggagcatctttctatagaatacaaagccatctgcagtttcagcctcggtttacccactcactatgcatatgcagacgtctttaaaaataaataaataaatacacaaataaactttatctggcctgagagattacatctctcggtgcttcctgtatattctggaagtcaataacgctgaaggtaaatttaacatttccaactccggaggaacgcgagcggtagacgccaagcatccgcccactgtcctctcgtgactcgggctactttgacgcaccgggatgcggctcacctgacattcggcaccaacccttgccaggaaggaaaaccaactccgcgaaaataaaatgggtccccgaggaggcgtgcgggtgcccccagagctctcttctgctcacaccccgaaagcgagggggccacgccacccccgaccctcgccggcgtccgccacctgccagacgaggccgcggccagggacccgggctcggccgcaaggaaggggcagcccagcccaggccccctcggcgtctgtcccggc

SEQ ID NO: 23005 - DNA, 2300 bp, Homo sapien
tatgggctccaaaagagcatatcagttaactggtgaagggtgcaatgggaatgaggccacgtgctcaagattgctatccttggcctgggtggtttgtttgcagataaggacagattggctggtccccagcaagtgaggggcctcctagactgataaaagagtcaggcttctctgtgtcactgaagctcaggacctgtctgtcaggtcttggtcaggttctaatcgaagagttaggaaaaacactgagtgtgagagcgggaaaagcctgtttatcatcatcgatgtttggtaaattcctcctaagctggctggccagttcagataggcctgggtttggagccatctcaccttcacctgcctcaacaggtaaggaatgaaaggatgccaggggttatttgatctacacagatcaaatcaagggatatgagttttggaccccagaccagccctcaccctgcttctaaaagccaaaataaatcttgggtcttggccgggcgtggtggctcacgccaatcccagcactttgggaggatgaggcgggtggatcacctgaggtcaggagtttgagaccagcctggccaacatggtgaaaccagtgtctactaaaaatacaaaaattagccgggcgtggtggcaagtgcctgtaatcccaggtacttggaaggctgaggcaggagaattgcttgaacctgggaggcggaggttgcagtgagcacagatctcacagttgcgccactgcactccagcctgggcaacggagtgagagtctgtctcaggaaaaaaaaaaaaaaaaaaaaaaaaaaaaaaagaaatcttgggtcttatatccaaaaatcttgagtcttacatttggttacttttttttttttgagacagagtttcgctcttgtcgcccaggctggagtacagtggtgcaatctctgctcactgcaacctccgcctcccaggttcaagcgattctcctgcctcagccttccgagtagctgggactacaggcgcccgccaccacgcccagctaatttttgtattgttagaagaggcggggtttcaccatgttggccaggctggtctccaactcctgacctcagatgatccacctgcctcggcctcccaaagtgccggggttacaagcgtgagccactgtgccaggccgacatttggttacgttcattaggaaacactaactcctccctcaccccaatcaaaagaaagcctttccccttgaagaagcttcttgtcaagggcaaacctttggggttttgggatacggtggcggcttgagttgaagtctggtcttttgtgaggagaccaggaaccgggaggggagaaaagagacaaattctgagtaggagcttcgcctgtcccttggcgaggggtggggaggaaagtttagcttcgtcgtgctatgctctatggggacagagtcttcctactgctcggcggagtgtgactagcgtagagggtgctcctcgtgggcgctccgcgtgtgttatggaggagggcgaggaatggtgaatggatgaccgagggtatggttaagtcctccaggtccctgagaagggttcaagaggcctgtaacagacccatgggcaagggtgggatcaacctccttcccaccttccaccccccaattcccagagaattcgttcccccagatcagtggagaaaacttcggcgagtgagaaggttccagggagaaccccgtggtgggtgcaacagggatgtggcaggcactgcttgggactttccaaaaccccggcgtctgccgtggcaggaaaagcaccacccaagctcagcatgttacctcggggaggaggagccaggtgggtctgtgcaactccaggaagggctgccaggtctggggcttcggggcctccccgagggcagagaggagcgcttcggacccgaccgactcggagcagaccttcagggttcaatgccccggaactcctggggcgaggagccacgcccgggcagtttcgggctccggagggtggggagtcggtgcccggcagcgggcgggccgtcagctgcccggcccggcgcctacctccccgccccccggcttcctgcggaggccgcggccgccatgttgttgtggggctgaggcggcgccggcggagccctgagcggctgtgacaggctacgcaacaggttcgcgggcggcggcctgacgaccaagccagctgcagtggcggcgacggcggcagagcagggtctccccgcgcctgcccgcgcccaggctgccggtgctgagggacgcggagtcgcgctgtgacgagcgggaggcgcggcgaggg

SEQ ID NO: 23006 - DNA, 2300 bp, Homo sapien
taggaataaatttaaccaaggaggtgaaatatctctacaataaaaactacaaaacactgatgaaataaattgaagaggtcctacaaaaaatggaaacatatttcatgttcatggatcaacaaagagctaatattgtcaaaatgaccatactacccaaagcaatgtacagattcaacacaagccctatcaaaataccaatgacattcttcacaaagatagaaaaaaagatcctaaaatttgtatgaaaccacagacgaccccaaataggcaaagaattcctgaggggtgggagaggaccttggaggcatcacattatctgacttcaaaatatactgcaaagcagtagtaacccaaacagcatgcactggcataaaaacagacacatagaccaatggagcagaagagaacccagaaataaatctacatatttatagccaactgatttttaacagaggcaccaagaacatacattcgggaaaagacaagcctcttcaataaatggggctgggaaaactggatatgcagaagaatgaaactagaccctcatctctcatcgtatacaaaaatcaactccaaatggtttaagacttaaatgtaaaatctgaaatgcttcaggatatttatctgggcaaagatttcctggctaagacttcaaatgcacaggtgcaacaaaagcaacaatagacaaatggtattatatcaagctaaaaaacctcacagcagagaaaacaatcaacagggtaaagagacgacctgaagaatgggagaaaatatttgcaaactattcttctgataagagattaatatcaaaaataagtaagaaactcaacagcaaaaagccaataattcagttaataaataggctaatgatctgactagacatttctcaaaaggaatatgcaaaaggccaacaaatatatggaaaaaatattaaacttcagtaatcattagggaaatgaaaatcaaaaccataatgaggattatttcacctcagaatggctattatcaacaagacaaaaaataaatgctggcaaggatgtggaggaaagggcactcatacactatttgtaggaatataaattagaaccaccattatgcaaaccagtgtggatactcctcaaaactaaaaatataactgccatgtgtttcagcaatcccactactaggtatttacccaacataaaggataacagtatgtcgaagagatatctatattcccatatttattgcagcatatcacagtaaccaagatacggaatcaacctaaatatctatcaacagatgaatggataaagaaaatatgatatatatacagaatggaatactattcagccataaagaagaatgaaatcctgtcatttggagcaatgtggatgaacctggaggactgtatattaagttaaataagtcagacacagaaagacaaatatagcacattttcactcatattgtgggagctaaaaaaatttgagcacgtataagtagagagataattgtggttaataaaggcaggaaggataatcgggaggcaggtattgggagaggttggataacagatacaaaattataggttagataagaataagttctggtgttctgtagcaatgtagggtgactatcattaacaagaatttagtttgtatctttaaatatctagaagagaggattttgaatgttcctaacacaaagatgatgaatgtttaaggtgattgatatgccattaccctgatttgattattaaacattctatatatgtattgaaatatcaccgtaccccataaatatagttactaaatgtcaattttttaaaaagctattatttttcaaatgataaaaaagaagtattttgtagaatgttaattatctatattccattttattaaaatatatacaattttgtttttgtttgcttcaagagaaatgtcccagtgtagtttatatattaattatgcatatcttaatgaattcagaatagtactttaaatatattaagtttatttactgctccccccacccattttccaaagtagactgcattaatttcatgtgattgatccaagtagatccaattgattgacttactgttttcctaatttcaggttccagttacagctatatcagagaatgagttaatctcctcagaaatcactaaatactactctgaggggcttagaaattaacagggtaagttgaatatcatcttaaatactatctggatttttatagtgaattcctaatttgggcctatagtgtgtcaggcaacagttgggcactgggaagaaaattccttctcttatttt

SEQ ID NO: 23007 - DNA, 2300 bp, Homo sapien
gtttttgtagtactttttaactcttcatgggatgatccatatctcttaaaaaaagaaaaaagtattttactaggaaatgttgaacagtggggctttttattgttgtttagttggttggttaaactttcctgtagtaggcagagtattctaaatcaagctgttcatgattcttcactaagatagtcattatattacccatctggtaccattgctgataacttaatcactttctctcctgccagtccccaaactctaaactctcatgctctctggtggggccaaccctgacatgaacacacacatgcatatgcctcccttagtcactgcctgtgaggagcattattgtataggaagattatgtagcagtggaatccctgctataaccaactttttatctctgacataagaaacaagggttgaacaattaaaattcttaaaaatctaaaatcttttatagtttcagttacagtgttcaccaggctttccccaaactgttcttaaatgacaaaatttccttgagtttcagtttattttctttctactatttacatttatgccaagacttaggtgataacctgatcaagtaggactgggtacatcagattcaagacccgaagttaaaaaggtctaatgaatattttatttctaaacaaaatgagatatataaagaggggattagttcaatgaggaggcacaaactggatgatagatttgagttgattgtatgaagaaggggaagatggggaaaatatttaatcaggcattcatagaagaggaaacattagtggtgaactctaataattgggaaataaaaatttagaccacaatgagatagcatttttcacctactaatttgaaaacataaagaagcctgacaacacaagtgatgaaaggatgttagattagcactaactcttacacattgctggtggaagcatagagtggtacaagtttcaggaagacagtttaaaattaatattataaagttgaacattcacataacctacaatctaacaattctgttcctacatatatacactagagaagttctcacatgcatgtaccatgcaacacgtgaaagatgttcatagcagtgctgattgtaatggcaaaaaaccgataacagtctagatgcccattcacaggagaatttaaagatgggggtggtgacaagggaggagtgcacatgtgatggagcaatattggtaacgtcaagttctgaagttgagtggtgggttggcaggtttttatctcattaattcttaatttatatatatatattctatatatatcttgtattattttgtgtgactgtaagattctgtaaaacgtaataaaacaggtcttaatattcacaaactggattaattggccctctgttaactgaggaataacttacctgaattctctcatagccatttggaaatttgtttaaatatgataacaatggcgaatcaccactaaattttataaagcgtatgttccgtgtgcatactgcctagcaaatcttaatgttctcacttactgtttttctgatttaacttttgttgtcttcagtctttgtttagtcttaaatacagtattgcctacagcccaacaaaggttagaaaggaaaaggcttgcttcttttctcatattctcttcacttagtagttagaaattaatttaaaccaaaaaatatacttcatctttgcctctcctttccaatcggtcatcagtatacagagagcagaatccaaagaccaagccagaagagtttgaactgcattagtctcagtagtgtcaggtcattatggtatgactttaatcctagaccagaattgaattttagaatatgacatactaggacataacacattctaagaccaaaacaatttcttatgtcaataacatacttcataactataataaaaattaatagtgctttttgatgcttttgtttattgagtatttggaaagaatatttcttagatgcagttgttagttttgaaatacagatgatttatataaagaggctgttataaatataaactttcattctttgtacaggtaaaatcatctctattgatactagttccctgagagctgctggcagaactggttgggaagatttagtgaggaagtgcatttatgcttttttccaacctcagggcagagaaccatcttatgccagacagctgttccaagaaggtaaaattttctctctcaattattttcattaacccttatctttactgatatttgaatagttcgtatagaacttatggcttgataagtattttctccaaattatagttttt

SEQ ID NO: 23008 - DNA, 2300 bp, Homo sapien
ctctacctcactgaaacctagaggggttttccttctgctgggatggctcccacttgtttattaaagggagagtacaatattctctaacatccttctgaaattgtttctgggtcatccttactgccaattcacccatgctgaatcccattccaggaagtattaaaacgatcactcagaaaattattatttttgtgttattttgcataaagtttatctcttacctatgaaggcagaagccactaagctactcagaggcttgttttaataaattagagaatgccagtattgcgactcttaacctgctgagtccttctggcagagctctgctggaggactcatcagcttcttcagcctcgggcagcagcagagcatagtgagatacagtgaggctctggaatcagactactggactccaaactcttgctgactgtgtgatcgtggataagttaggtgacttcgctggcctcttcgtccctttataaaacaggaataatgcttcctaatggggatcaatgaaatcaggcttggacctgtgcctggcacacactaagcactcaataaatgtagttaatcctggtattttcttatattttattggcccttctgactacagcggcacctcaatgtaatcagtagcgactcctaagtccctttcttgagtcatgactaacaactaagaatcatgagaccctcttttaaactcaggggagtcacttaatccctgtaggcttcagagagtttcacctgcgacaagaggagtctaacctgatttcttgagacctcttactaggaagaaaatctaagtgaaaagccagcagcttctgttctgcctacacagattctcaaggcatttttcctacaggttaccgcttgatgtttcactatccagcagcaatttttctcttgaaagataatctatctttgtcagttacccatgaagggattactccacccctccacctgagttctggcttaaagccgtttttccttattataaaaagccgtttattattaaagccgtttttccttattataaaatatgtgcttaaggtagaaaattttaaaaatacagattaagcattaggaaataaccaaaatctcaccatgcactacttaatatgtagatgtatttctttagtttttcctttcaaagtctggatcattctgtatatatagttcagttagcttcgcatcatgagcactcttcccgaccactaaatatgcttcaaaaccataagggctcccatgaatatccttgtgcaaagctctttgggtgcatctgattattttcttaggctacatctctagcagcaggatagagagtcaaagggtaagggtgagatttgtttggtcatctgcaaacagaacctgactgctattttaaaaggtgtaccgatttacacacctggtgcctggtctagctgaagctaggttcaatttatactaacgtttttagtatttattttcaaataatttggcgtcctacccaggtaaatactcagtttgacttcactttgcactgtcccttcgggctcggttttgcaggaggacagcactttggggcatggctttaaaaagtcggccagtgcacaggcggaacagcggggacacaggagccaccactttaccgcgagcccagcagggggcggaggactgctgtccactcttcacacagtcaggcccttcccaagggcgcacctccagggaaacagctccagtctaaatgttaacgatcaccccaactcccgccgcacccactccccgcagccaggccttcggaccgaagaccacacccacttccgccctcgatgtctcagcacctccccctccgcccgagtgcctcacctcgaggaccactttgcgcatgcgccccagctcttggaggtaagcggctgtgtgcgggtggtcgcggtgagtgtgcaaggccgcggtggccgcgtgacaagcctgcgctaccagtgcgcccgccggccaggagaacggagcttgtgatagatcctttcgtaacaccaagtattgtaccaggacctgcggctccgccccagaggccgccatcttcctgaccacccgaaaggccggacctactccccggtgcatcttgggatcagggcggggccctgagcgccgccatgcttttgtacggcaggatcgcaaagcacgccgggaccggttggtttggttttgaagacgtggatggcgggaattctcgcttctggcctgggtgagctagaagggagaaggtaggggaaagacccattgtcggaccggaccgtggccagggtggcgggctgaacggcctt

SEQ ID NO: 23009 - DNA, 2300 bp, Homo sapien
tactacagaaaagagggagtgtatctgctgggcctgctttaccttggaagttatgattgcatctcatcctagccagtcagctttgtcccaaaaaaagtcaaaatccctgcctatttgaataaatcatctggttgcaactacaactccatgtccttccttctcaaatgagtggggagaattcaaataataagcaaaaaactgaaatcaaacaagcagagggataaaaccagtatgggtaacagctaagtgtttaaatattgttttgggtagagaataaggagactggtctaagtctcttgataatccaaaacttccacctcatcacttactttaacagaaatgaaataaggcctggactagagaacaggttactcctgagtgtagcatgtttccactacataaagtcaccaaacttatttttagtcttaaagtaacaataaatcttaccccatatacttttattatctaaagtctcagcttaagtcatcttaggctgaatatagttacttctctgttatcaatgataatgatgacccagagaaaaataggataaccaaattcactgacgcgctcagaaattctttttaaaactgtaatttaagttaggttttatggcaagctttcccaaagtactaacgtagaaccctttggatttaggcatcaggcttgagtaagtatttcaaagttctaaaaagtattagtagcaaagaacataaagtcacacaaaaccagaactgtccacaaatattactaggcactaaagaagaaagcaacttactcctggacagaaattcaaacgcaaatctcagtttccaaaggattgactaaggactaagtaaaagtaatagtttcgtaattctaagcaactctaacaagcattctttaaacaccttctacattttaagacacaaagtatgtaaagaattaagcctttcattgaatatttcctatatattagacatgtgctaaatgcttcacttgaaaagtctgagttcaatacttttccaccacaaaagaaatactttttccacaaccacaactacagtgctattttcacctccattttccagatgaagaaacagaggcagagaataaagtgacttgcctaaggtcacaatatttatcatggcagagccaacactcaaaaccagttctagccaacactaaagtcactgccctacactggccctccctcaagagtaatgcatacatggcccaaaaaatccggggagaggaaagggacctccctggctagaaccgcagttcagaatataaacactgagcatatgatggatgcaacttatccgtttcaaaaggggtgggagcctagaaacgaagccatttttcctcctcgaataatcttggctgcctgtccctttgtcttcaatgttagttcctttcactattctgctcccaaacaggccaggtcccacgtcagttccaggaggaaagggctctctcagcctgcgggtcatctttgggcagcagcaggaaggaggcggcgaccctctgaatacctcctttggactcgccatctggacgtaaagggttcgcctgctccatctcagattcccaagggccttcccatgaagttgtctaggcaaccggtgatagggactccaatgtccttgctaataaaagaaaaatggcaacagtcacatcacatctagtcccattcaaacccagacggcagggcacacaccactcaggcacaacccctgggccgcggatgacacaaatgtcacggctaggatcccctttcctgagccgcccgccctctcccatcgtccgagccagcagagtccatgcccacccccgcgcccatcccgcggccccggcgcgctcccgaggccacggctactctggtccagcgggcttcccggccacggaaggagttttaagaaggccgttcagcccgccaccctggccacggtccggtccgacaatgggtctttcccctaccttctcccttctagctcacccaggccagaagcgagaattcccgccatccacgtcttcaaaaccaaaccaaccggtcccggcgtgctttgcgatcctgccgtacaaaagcatggcggcgctcagggccccgccctgatcccaagatgcaccggggagtaggtccggcctttcgggtggtcaggaagatggcggcctctggggcggagccgcaggtcctggtacaatacttggtgttacgaaaggatctatcacaagctccgttctcctggccggcgggcgcactggtagcgcaggcttgtcacgcggccaccgcggccttgcacactcaccgcgaccac

SEQ ID NO: 23010 - DNA, 2300 bp, Homo sapien
cccagctacttgggaggctgaagcaggagaatcgcttgaacccaggaggcggaggttgcagtgagccgagattgagccgctgcactccagcctaggcgacagcaagactccgtctcaaaaaaaaaaaaaaaaggtaattcacttgctctaggtcacacagccaggaagtgacagagtccagaatggaggcagttctaagtcccagtcctgtgtattcttcctccctgagggggcagccaaatgctttcttggggaaaagggacaggagttgggagcccagatctattggtttagaaccactgggcacgtattgagcactacatgcctggagctgtcatcagtgttctcttgtcagttgtcacggcctcctctaattgtggtagtaccatatacactatcttccttttttttcaaatataatgttattgttgtactttaacaattggagcacacggtgccgggcgcagtggctcacgcctgtaatcccagcactttgggaggccaaggcgggcggatcacgaggtcaggagatcgaaatcatcctggctaacacagttgaaaccccgtctctactaaaaatacaaaaaaattagccgggcgtggtggcaggcgcctgtagtcccagctactcaggaggctgaggcaggagaatggcgtgaacccgggaggtggagcttgcagtgagccgagattgtgcactgcactccagcctggcaacagagtgagactttgtctcaaaaaaaaaaaaaaaaaaaaaaaaaaaattggagcacacaaatacaaccaacatggagacttattctgccagtggtataagtgaaaaagctccagggctgcagctaatcagaagtccagtggggggccgggcgcggtggctcacacttgtaattccagcactttgggaggctgaggcaggcagatcacttgaggtcaggagtttgagaccagcctggccaagatggtgaaaccccgtctctactaaaaatacaaaaattagccagccacaatggcacgagcctgtaattccagctacttgggcagctgaggcaggagaatcgcttgaacctgggaggtggaggttgcagtgagccaagaatgcaccactgcacgccagtctgggcgacagagcgagactccatctcaaaaaaaaaaaagaaaaaaaagaataagtctactgggaatgaggagttaggggctccagagcctaccttggccaggggttgctggtgcccactacccagggaagagaagccccaggccccctgcatgtcacaacatgcctggaacctggcacccaggtgtggaggtcaccactgcatggggtcctggacactgtacaggacacctggagatgctgtcactcatggaggggtaaaaagctagggaggtgtaacaactgctcatgctagaatgacatggcgggaatcgcgcaagcaagacaaggttgccctgtgggtgaaagttacaaaaagggggggttgattccggttctggatgcgctttctcccggccgcatctgcccagtagcagaaccagtaaagaatccagaaggcagtgaacatccccccaatggaaggatttgggcagagactagctgtcatcacggggaggctgtgagtggggctcatggtcccgtggcccctcctgaagcaacagtgtgatatggggaagaacatgttggatttgaagcctaaagacttggctcctacttttggcttttctgcttgctaattgtgtttgggcaaatctggcccgagttttctgtacaatagggacagtactaaaaatactcgagagagtttttgtgaatgtcaaatgaggcaacggcgaggctcttagctgcagttactaactttcatatgattagtccctggtaaatttccccatctttcccggtatttctgggggagccgcgggaggtggcagctgagcgtgcactaccatgcacagccctctgtgaccagcacctgctgttctcttgaacgtgtgtccctgcccgccgtcctggcctccagctcagctgtctccagtactacacgggacccagcaatgcaacggcagggatggaaacggagggcagctgcctggagaaccccaagtattacaactatgtggccgtgctgtccctcatcgccaccatcatgctggtgcaggtcagccacatggtgaagctcacgctcatgctgctcgtcgcaggcgccgtggccaccatcaacctctatgcctggcgtcccgtctttgatgaatacgaccacaagcgttttcgggagcacgagtaagatgaagcgtgactggggatc

SEQ ID NO: 23011 - DNA, 2300 bp, Homo sapien
ggccccacagcgcctcagaaccaaaccctgtctttgccctcatatctgccgctcttcctctgttccctgttccagagaccggcaccgcccaagccacagacctcttctgacaagagccacatagtaaatatctttggctctgtgggccatacggtctctgtcgcatctaccccactctgccattggagtgttaaaacagccagagacaatatatcaacaaatgagcatggctgggtgccaggaaaactttatgaaaacagaggatgatttgagcgcaggagtccaagaccagcttgggcaacatggcaagaccctgtttctacaaaaaatgtaaaaattagctgggtgtggtgatgcatgcctgtactcccagctactccagaggttgaggtgggaggatcacttgagtccaggacgttgaggctactgtgagccatgtttgcaccactgcactccagcctgggcaacagagcaagaccctgtataaaaagaagaaagacagcagcagtcagattgggcccacaggccacggtttgctgaccctgatctaaaccatgcccagctctcaagccatgtttctgtttttacctccacagaaatccctgaaggaccctggtgcgctttgcgtgtgtctgtgcgtttgtgtacacggctgcctccaacaggagtgccctcagcgtcgcgtcttgggctcgaccaaggctccttcaggaaggcctccttgatgcctcctccccggccgaccttggcccctgcttctctcttgcgccgtcctctgctctctcctttctgggcacagaacttgccatgctgcgctgtgctgggcatggttacctgtgtccccgtgagaccctccgctctctgaggtggacgttcttgctggttttgtgtcgctggcgcctcgtgtagtgcctggtctgctgtcagtctttgatcaggtcaaagcagaattttgtgagcgatggctctgtgcagccgtggcgggtggctgaggtgaccccgcagggctcctgccgggagggctcacggtgcagcagcccacgcaggactgctgcgcttcttgtggcacgaggatgctgagcacagagccacgttgggatgcttcactgcgtttctggctcccctcagttgctctgaaggggccattgccaccctcagccttgtcagggccagaagctgcctgtcccagacccctggctgctcccgaggcagatctgtgaggtctctctggagggcagcatggttccctgctcacgtttcttgccaggatcggggcatttcttcccagaagtatctgaacttgcctctagcagggcctacctttgcctctgaccctctcctgcccctcacaggagaacctcatgctttccatcctgcccaagcacgtggctgacgagatgctgaaagacatgaagaaagacgagagccagaaggaccagcagcagttcaacaccatgtacatgtaccgtcacgagaacgtcaggtacgccggcccggggcgcgggctctgatggcagagcaggctgtggagggctgcatctttgtgggacccgctaggtgctgtgggcttcaagaggttttccagggactagaagcaaggcctcccacagcattcatcagcctggcggaggaagctgccagcagatgttgaagctacagtgtgctctaggctgcttggtccaaccccatcatagaacagatatcacctggagcggggaagggactcctgtgaggtcacccagctgttgagggccagcactggggctagagccctgacctgtgattctaggaagaaggatgagttcagcctgggcaggagtgggcagtgtggggtggtccccaggcaccacagggagggaggcctgcaggggaagtctgctaggacaagtgcaaggtcagagccctgactttacctggaagggtcagggtctcactgtctgggggtcgtgagggaggaccttctcctgccctgatcctggctgccctgtgggttggagagggagctggcagtggggtcgggtacacctggctgcctggagcgtcacccccacggttccttcctcatgcagcatcctctttgccgacatcgtgggctttacccagctgtcttctgcctgcagtgcccaggagcttgtgaagctgctcaacgagctctttgcccgctttgacaagctggcagctgtaagtccctggccccgcctggctctccagcggggcctgccctcatggcctctgcctggcccccatccccggccccatgattttctcccactgtccttcctctgctttcttggccactc

SEQ ID NO: 23012 - DNA, 2300 bp, Homo sapien
cacttgcatggtgcccccctgcccaggccttgtcaggaggcaaggtccctggctcctgctcctgtggcctgggacccacagccatccagccaggccctaggtgctgaggaccaagccactagttcttggttttctggccacccaggacccagggtggtaatgcctgggacctgcaccctaggcacagagctcctgggggtcctgagttcccgcccatgcactcctcacctttcagcagccgaccccatggcgacacgggcctggccacccggaagcactccaccctgaaggtcagcgggcacctgtcctccagccacatctctgccttccggttccctggcctccccctgtgcctgctgcggtttcatttgtatcttggccccttgctggacacactttctttagttgtgtccctgccatgagctagttctcatgccccttggccttttacagtttccatcttgcaaaacctcaacttgggattctcccccaagtgccccccaccatccttcaccagacgccatcatcaccctcctcccctcagggatgggggcagtgctcccctcttgaccagctccctgctgagcctctggtccctggcttcgcctccgcagcaccacattctgtccctggttttctctctccgtactgcttatccaacccatggcttccaggcggatggttcagcccactgcctctcctgagcgctgcctgcaggtgcccgcacagaggccccacagcgcctcagaaccaaaccctgtctttgccctcatatctgccgctcttcctctgttccctgttccagagaccggcaccgcccaagccacagacctcttctgacaagagccacatagtaaatatctttggctctgtgggccatacggtctctgtcgcatctaccccactctgccattggagtgttaaaacagccagagacaatatatcaacaaatgagcatggctgggtgccaggaaaactttatgaaaacagaggatgatttgagcgcaggagtccaagaccagcttgggcaacatggcaagaccctgtttctacaaaaaatgtaaaaattagctgggtgtggtgatgcatgcctgtactcccagctactccagaggttgaggtgggaggatcacttgagtccaggacgttgaggctactgtgagccatgtttgcaccactgcactccagcctgggcaacagagcaagaccctgtataaaaagaagaaagacagcagcagtcagattgggcccacaggccacggtttgctgaccctgatctaaaccatgcccagctctcaagccatgtttctgtttttacctccacagaaatccctgaaggaccctggtgcgctttgcgtgtgtctgtgcgtttgtgtacacggctgcctccaacaggagtgccctcagcgtcgcgtcttgggctcgaccaaggctccttcaggaaggcctccttgatgcctcctccccggccgaccttggcccctgcttctctcttgcgccgtcctctgctctctcctttctgggcacagaacttgccatgctgcgctgtgctgggcatggttacctgtgtccccgtgagaccctccgctctctgaggtggacgttcttgctggttttgtgtcgctggcgcctcgtgtagtgcctggtctgctgtcagtctttgatcaggtcaaagcagaattttgtgagcgatggctctgtgcagccgtggcgggtggctgaggtgaccccgcagggctcctgccgggagggctcacggtgcagcagcccacgcaggactgctgcgcttcttgtggcacgaggatgctgagcacagagccacgttgggatgcttcactgcgtttctggctcccctcagttgctctgaaggggccattgccaccctcagccttgtcagggccagaagctgcctgtcccagacccctggctgctcccgaggcagatctgtgaggtctctctggagggcagcatggttccctgctcacgtttcttgccaggatcggggcatttcttcccagaagtatctgaacttgcctctagcagggcctacctttgcctctgaccctctcctgcccctcacaggagaacctcatgctttccatcctgcccaagcacgtggctgacgagatgctgaaagacatgaagaaagacgagagccagaaggaccagcagcagttcaacaccatgtacatgtaccgtcacgagaacgtcaggtacgccggcccggggcgcgggctctgatggcagagcaggctgtggagggctgcatctttgtgggacccgctaggtgctgtgggctt

SEQ ID NO: 23013 - DNA, 2300 bp, Homo sapien
gatccattccccgagggatgcaaggtgatgcctgaggttctggaaggggtgcccgcggataactctcaggggcatggggtggcagctccatccagggtctggatagccaagtttctctcccctctgttcattccttcagctctccccaggggagatgaccccctattgctgctggctgtcctcagcacttaccttcccacacatgcttttgtcccttttgtcccaaaacattctatctctttcctcttcctttatttaaattcccaaagcctgtagttgatcttagcacggtgttctgtcaaatgcaaggaaaataatttatactatggtgtaagagactgataggtttaactattcaaaggagcattcgcatctttaagggacagtttgtgaactcaaacacatctcaaacgggtagaatgtgcacgggaaatctcttcgaagcagggtctcaggaactcttccagttccacgtgtgtagtgcccaccgggccaccgccacccgcctcctgggagcaggacagggctccgctgccgagcccctctgcggaaagctcaggcccggcgctccggagtctgggctcccggggtgggcggggatacttaggccccacgtgccccgcggcggagcggtccccaaacctgagccctggcctctgccggcccggaaggaagccgcggcggaggagggggcggcggggtgccccgagcgcgcctcacctgcgggcgggcgcgtcccgggcttccatcctcctagaccgggcctcctcgctggaaggggtggattcgccccagccctgccgcccaccgcccaccgcccacgcccgcgcccgcgcccgcgcttccacgcagccatcgccccagcccgccgcccgcgccggatcgggggccgcccgggcccctccacctctcgcccgcgcgggtcctgggaccgccgcccggcgcctccctcgccgccccactccggaacgcgccgccgagagggcggagactggggcgagggaggggccgccccgcccgcctcccgcctcccgcctcccgcctcccggggcctggagcgcgcgtggccccggagccgccggcgccgcgcggggaatagctgtgcagcacgccgagcccggactcggctggctcggctcggcgcgggcgggcgagaggatgctggcgggcttccccgggctcggcccgcgctcccgccggggagggccccgcgcgcgcccctagcagccgccgccgccgcgggtgcaggggaggggtccggagagccgcgctcgccgccgcccgcgcctgccggcccccgcacggcccctgcccctgagcctcagccccagggcgggcgcgctgggccggcgcccacggatctcccagccctcgtcgccgcctcctccttccccctgcggccgggcgcccgcggatgctgaggggcagccctgcgcctctcccggtcggatcccgggcctgacggcgggagatcgcgctccggccgggccccgaggcgctgccggggcggcgcggctctgcggggagcagccctcgggcgcgccgagctctcccgccccagcccgcgcggggaccgtcccggagcacgcggtggccgagttcccgcacaggtaaacgcaggggcagggccaggcttccgggggggaagacagcgccccgagcgtgggaagggggccggatcggagcccgagcctccaagggtttggtggaaaaaggaagtaaacagaaggaaggctcaggaatcccccacgatggtcctgatttctttccggcacattttatttacagcttctaaggactgggcctggagggaatttaggtgaggaagtcggggactgagaaagaagagatgacagagagaaaccggttaccagggatggaaaggcggctaggcccttccacaagccagggacaggaaattgagtgtctggcgtggacaggactaagtgtgcctgcggtgggcggtggtgtgagccgggggtggcagggaaggccctgggttgggaggctcttgcagcagagatccttttatgagggttagggcgggtcatggggaaaccgcaaggtaggagggaagaggtgcttctactcagcaatgcccttttcagttctagctgatcagtgctacctgtgctctggaaacccgctctgcgttcctgctggaggtggcctcccctccgccccagacaagaagaggccctcagccctcccccggtctcagagagccctgagaggaggcccagtccagagctcttcctccgttcccagtccacttctctagggccagtagcagacaccag

SEQ ID NO: 23014 - DNA, 2300 bp, Homo sapien
aaaagtatatctttccatttgcctaagtaatttatctccctttgtagagtttgaaacttgtcttcatataggtgctgcctatttcatgttaagtttaaacctaggaactttatttttgttgtaactgtaaattaaaattgtttttcaattacacattccaactgaatataatttggacacaataaagttattaatttgtgggtaataattttgctttattgaatttttataatgtttctaatagtttttcagttatttctctttgggtttccaggtaaacaatcgtattattagcaaataatgttaattttaccttctcttttctaatatttttatattctcttactcttgtctaattgcactggctaataaaactagaaaaatgttaagtagatgtggtgacactgggcattctgagctgcttctaatgttgtatcattaggcacagtaaaattacttttttttttttttttttttttgagacggcgtctcactctgccgcccaggctggagtgcaatggcgtgatctcggctcactgcagcctctgcctccccggcttaagcgattctcccgcctcggcctcccaagtagctgggattaaaggcgtgcaccaccatgcctggctaattttgcatttttagtagagacaggatttcactatgctggtcttgaactcctgacctcaagtgatccgcccgcctcgtcctcccaaagtgctgatgtattacaggcctgagctagcgtgcccagtccctagaaaaaaaaaaacacctcgtacacagctgacgttcaaaaaaatgttgactttcagtgaatactatgctagcacatacacacaaaagtagtacgggatcatgctacacagaaataaaaaacactaagtaaacatttactgagcatctcctgggtgccaggcactggactaggcactgccttaacagctctttcggagttgattttgaacgcatacaacgacggaaagagcaccgcagtgggaatgtgaagacttaggttctaatctttcctcggtcactgatttgatgaccttgggaagttcttaaccaacagattccacttgcccaaaaggaaagaatttgagtgaagaggaggccgtcttggaattcataagggaaaaggcctcaggttacctctggccttccctccccacgtactaaaggagagtttatagctgatgaaccacagatggggcagagagaagggcggtggaactaacagatatggggacaccaccaaaaataaaacacaacgcaaaacaaaacagcgcggaccccggccatcccttgcacctcccctgtgaaacacgtcaacgtcagttacgctctctcgtgacgggaatgcagaatctgggctgccgggcaccatttcgcgaaccccaaattctcacacgcaccccataacgttccgccggctcccaggcccggctgggggaactaaactttcatcctccatctcccggtcccggacggccccctagaacgcgggcaaggtatctaggccgacggcccctcatggggacccaggccttcttactcttttgggggtacattcaaggcttagaggccaccccagacaccatctccggaagagtgacgtcggaggacgagggggcaacggaaaggtcaaaaaggtcggggagtttcgttcgcggagccgcacccctcggctgagacccgggcctgctcgggggcggagaggaggccgggccccaggctgttgagtggccgcccttccagccaatggacacgtcgccccgccacgctggggcccgcccctcccggctcgctgtactcactttccccacttcggcgttgcccatggagatgactttgatgcggagagacctgccgggctccttccgcttcggcatgttggcctccatggccctggctctctcggggccacccgcctcggtctcttcttgtgcaccgctggcccgtccctcaggcctcctcgtccaatggcggagccgctgctctcgtcaccgcctcgcctccgctgctcgccatccccgccgctgcctggcagcaggcgcgggcggttgggagcgtggggagccgggggagggagacgggagtctcgcgatgctagcgcggggctgctgacgtcatctgcaggccctggagacgcgactgcagttaccgagtttctaaggcctcgtcccctgacgggaaggcggcgttggggggcggctgggtttacccttcgaggtgagcgcgtccttgttttcagggacgcccggacgggaggcgtttgttgctttcgcagccgagtggtggaa

SEQ ID NO: 23015 - DNA, 2300 bp, Homo sapien
tcataatttactttctaaaaatacacattaaaaagatgtaggatttttcttaacacataaaaaagtatgagcaaatgagagcatgtggctgctgtttgctgggagactactacgtacttcctgtgcattatctcctacaatccttatcaccacctcatgcctacaacatatgccaagattaagtgtatcgggctggctccagaatccatgctcacactatacctcccaggtccatactatggaaaaagcagctaactcgtgctgatttttatttttttatattcaaagagtgggggaaaaaaaacaactttcttgctctttcgattccaaactaatttaatacacacagtagaaaatgtagctatatacaataaagtgtcaaaagcatcaatatgggccggacgctgtggctcatgcctgtaatcccaacactttgggaggcaaaggcaggagggtcacctgaggtcaggagttcgagaccagcctggccaatatggtgaaaccccgtctctactaaaaatacaaaaattatctgcgtataccggtgggtgcctgtaatcccagctactcgggtggctgaggcaggtgaattgcttgaacccgggacacaggggttgcagtgagcagagattgtgccactgcactctagcctgggcaacaagagggaaactctgtctcaaaaacaaaaacaaaaacaaaaaaaaccccatcaatatgaaaaaaatagtaatcaatttaaatctgtggcatgttttactgcttagtctcaacagcaccatacttaatcaatcataacagctgaagatttgacattttataattattcttccacaataccagttaccctattacagggccaaaggtgaactgtcgaagaaattacatgtttagtaatttgatttattaaatcatactgagaagttagcatgtggattcttttaagctttaaaactatccaaattctaaccaggacttatatttcatatttgtaaataattttagaagcttcagtgaattaagttatattatttgattatcaaaacaatccagaataaacttgtcttaaaaaaaacttaatgtttaaaaaacacattttaaaattaaaatgtggaaaatctgactttactgtgaaatgttgagcctttgctcattgccttcctgtaatgcacttcccttaagatgtttaaagttaggtgagaaaagaagcaatgctacttttgtctttgtaatatacagggaaattggcagccattttttttcagggcactataaataatcattgtcaagttctatttatcttctgtaactgaagatattcactgaaaaaaaattaccgttcctgtcagactgacttttattcaagcactgtcacattgtcagctaaagggaaggggagagcagacgtcgaggtcacgttcgaagcgaacagcggggagctgaggaaactgacgtccacagctccagcctggcttagcgttaacacctgcagtagaccaagcctttctcccacagaggagtcaacaaatccatcagagatctgtaataggagggccaagactaaacactcttgccttgactccaaatagacaactccatttaaaataaaaaacaataggaaccagattcagaatcgcttcacgccttgcccaaggccctcttccagaaccagggttccgacctccccactttcctggctttggggtctgcctctcggggatctcgagcaaggggaacaaaatattggagggggaagaggagcagcagcccggcccatggaaccgaaaaagaatccagaaaaaaaaaaaaacactcccaaacggacgagacactaccagacccgccctgaagagccaatacatttccaccactcggctgcgaaagcaacaaacgcctcccgtccgggcgtccctgaaaacaaggacgcgctcacctcgaagggtaaacccagccgccccccaacgccgccttcccgtcaggggacgaggccttagaaactcggtaactgcagtcgcgtctccagggcctgcagatgacgtcagcagccccgcgctagcatcgcgagactcccgtctccctcccccggctccccacgctcccaaccgcccgcgcctgctgccaggcagcggcggggatggcgagcagcggaggcgaggcggtgacgagagcagcggctccgccattggacgaggaggcctgagggacgggccagcggtgcacaagaagagaccgaggcgggtggccccgagagagccagggccatggaggccaacatgccgaagcggaaggagcccggcaggtct

SEQ ID NO: 23016 - DNA, 2300 bp, Homo sapien
agtgctgggattacaggtgtgagccaccacgtctggcctcaagtaatgtttttatcagtattcatctggaattccctgctagacctttcattctttgaagacagacactgcatttccttctgtactgtagacaccaatgtttcatgagtatattttgtgttgagcagaattgtgggaagggagtgtctctgggtgatcatatcaagctagagctgagattctccttcctgctccagttcaagtctgactctcagtcaatcttaaagccacctggcctggtcctggaactgaagaacagagacagaggttatttgtgagatgcagggagtgtgtgcccggggtaggggggtctagactaaatgtgtgttccaggaaccatcccagggtttcccttggggctggcatgctgctaagagagtcaaagaggtcaaggaagaagaagaaaacctggaaacagcaagagagtggggcgcgggcgggaggtggaggcccaggccagagaaaaataggaaacataagttttgagtgcaacagactgagcactgtttcaagagtctggcaacctggattctttctctggctctgttcctgccttgagccatgaaggaaggaaaaaatatacatgagtgcccactgtgtcatttcatgtagattttattccagtttcccaacagtcctgcaggaagctggggttgagagagtagatcattggcctacagacacacagcccagcctaacaacataaattaacctctcaacgttaaatgaagtaaaatgaagttcagttcttaagtatctttaagttcctttcctctctaacttctactagtagaatatttctaccagtagaaaaaaacaaaagaaaacccaaacaactctcaaccatgggccaagagaaactaagaaatcgatattgaaaggccaggaggggcaggagaagtggctcaggcctgtaatctcagcactttgggaggccgaggcgggcggatcacttgaggtcaggagttccagaccagcctggccaacatggtgaaatcccttctctaccaaaaaatacaaaaattagccgggcgtggtggcacgcacctgtagtcccagctactctggaggctgaggtggaagaatcgcttgaacccaggaggcggagtttgcagggagccgagatagtgccactgtactccaccctgggcgagagtgagactccatgtcaaaaaaaaaaaaaaaaaaaaaaaaaaaaaaaaaaaagacgggaacgtgtgcaatgtaaagaaggctggatgagaagcccagggaagtcctgagctagcttaggagagatcttcaggtgtgggcgtaggcatgagccgctgcctctctgtgcctgttcctcatagggtcacggcaggtgcagagctggaattcaagtcggcgctggggctcagctggagaggatcctggcggcaaagcttgcgaattacacatataaatcagggagaggaaaagcaagcggacttcctgcagcccttgggggttgggagtggggtgcgtttcctgcgtccctgacccgggaaggacgctgtttggtggtagcaagcacctagccagagagtggctgggcacctagccagagagtagctggtagggcgcagctgagggctggagggcttcatcagagaacggcgctcagctaaggtacctagccaggagagggtggaagtcattccccaattcccatccttgcgccccccggcttagcccacgcagcctggacagaactggaggaggggtgcacctgcagctctcagcgccccggctgacctcgaggaccccaggttagggagagcttccgagcgctccgacaggagcagggagttggggtgggtagctccgcaggtgcacgctgcggcccttagggcgacagcctcggaaaaggcgcatctccggctgtgggtttctcgggggcggggcgcaggggcggggcggggcgaggggctcgcagaggcctcgggttggccgagccgggagggaggagcattagtattagcatagcccccgccccctgcgcgcagcagtgcccagcaacccgagcggaggcggccgctgcagcccggcgctgaatgggctggcggcgcccggctccgtcctgcccgcggccggcccccgcgtctgctccctccccgcccgggcccctgtcggccgccgccagtccccgccccgactgtgaatgaaaggcgggcgccgccgagggctggctgggaacgccgcagcgacgccggcctctcgagaggcgcgcgccccgccgagatgtacggtaaggaggg

SEQ ID NO: 23017 - DNA, 2300 bp, Homo sapien
gcccggggtaggggggtctagactaaatgtgtgttccaggaaccatcccagggtttcccttggggctggcatgctgctaagagagtcaaagaggtcaaggaagaagaagaaaacctggaaacagcaagagagtggggcgcgggcgggaggtggaggcccaggccagagaaaaataggaaacataagttttgagtgcaacagactgagcactgtttcaagagtctggcaacctggattctttctctggctctgttcctgccttgagccatgaaggaaggaaaaaatatacatgagtgcccactgtgtcatttcatgtagattttattccagtttcccaacagtcctgcaggaagctggggttgagagagtagatcattggcctacagacacacagcccagcctaacaacataaattaacctctcaacgttaaatgaagtaaaatgaagttcagttcttaagtatctttaagttcctttcctctctaacttctactagtagaatatttctaccagtagaaaaaaacaaaagaaaacccaaacaactctcaaccatgggccaagagaaactaagaaatcgatattgaaaggccaggaggggcaggagaagtggctcaggcctgtaatctcagcactttgggaggccgaggcgggcggatcacttgaggtcaggagttccagaccagcctggccaacatggtgaaatcccttctctaccaaaaaatacaaaaattagccgggcgtggtggcacgcacctgtagtcccagctactctggaggctgaggtggaagaatcgcttgaacccaggaggcggagtttgcagggagccgagatagtgccactgtactccaccctgggcgagagtgagactccatgtcaaaaaaaaaaaaaaaaaaaaaaaaaaaaaaaaaaaagacgggaacgtgtgcaatgtaaagaaggctggatgagaagcccagggaagtcctgagctagcttaggagagatcttcaggtgtgggcgtaggcatgagccgctgcctctctgtgcctgttcctcatagggtcacggcaggtgcagagctggaattcaagtcggcgctggggctcagctggagaggatcctggcggcaaagcttgcgaattacacatataaatcagggagaggaaaagcaagcggacttcctgcagcccttgggggttgggagtggggtgcgtttcctgcgtccctgacccgggaaggacgctgtttggtggtagcaagcacctagccagagagtggctgggcacctagccagagagtagctggtagggcgcagctgagggctggagggcttcatcagagaacggcgctcagctaaggtacctagccaggagagggtggaagtcattccccaattcccatccttgcgccccccggcttagcccacgcagcctggacagaactggaggaggggtgcacctgcagctctcagcgccccggctgacctcgaggaccccaggttagggagagcttccgagcgctccgacaggagcagggagttggggtgggtagctccgcaggtgcacgctgcggcccttagggcgacagcctcggaaaaggcgcatctccggctgtgggtttctcgggggcggggcgcaggggcggggcggggcgaggggctcgcagaggcctcgggttggccgagccgggagggaggagcattagtattagcatagcccccgccccctgcgcgcagcagtgcccagcaacccgagcggaggcggccgctgcagcccggcgctgaatgggctggcggcgcccggctccgtcctgcccgcggccggcccccgcgtctgctccctccccgcccgggcccctgtcggccgccgccagtccccgccccgactgtgaatgaaaggcgggcgccgccgagggctggctgggaacgccgcagcgacgccggcctctcgagaggcgcgcgccccgccgagatgtacggtaaggagggctccgcgcccgggcccgggcccgcgggggcgactccgcaaacttccccggcgcggaccattgtccccctgcacggccctggcgcggggccaggccgctgacctggtgcccggcggggctgttgcggtcgctctgtgcgcgcgcgtctgcgctgcgaggacaaagatgcctcgggccggggaccctggggtcctctccaggcccggcgcgtgccggtgctgggcggtggtccttcggggggcggaggctcaggggaaagcgggtctcccggagccgagcagaccgggagtgctggaggaggtggtcgtgtggcagcatttgcggaattaacaaa

SEQ ID NO: 23018 - DNA, 2300 bp, Homo sapien
cagggaaactgaggcacaaggagctttaagtaagctgggacaagtaagcttgtcccagatcaccctactaataattaggattcaaatatgtggtctggctccaaaccccttcttgtaatcatagcactacactgcctctttaagagggaaaagggcttactcgctctaaaaccggagagtcccaacctcatctcagccagacattggcacatttcaaggtggacttccgcaataggtgtggtcctttgaccagggcccccgggaaaaaccccatcagaccctctgaatcactgtcaccaaaatttccagcttggccccctcatgtcaacccctggaagattcaggaaccacatagggtgggctctctaggagctgccccaacagggacccacggacagcgctccctgaccaggtgacctagctgggctgctgcgactgcgctttcatacttccagcctcagggaagggaagcatctccccacaagctgtcaaaccaagggatcctaaggaggctcgagatcctggtaccaaaaaggtgcttattttattagatagccctgttgcacacaccacttctccacgggagatcggggactggcattaagtgcagtcttactagaatatctaacagagcaagagtcctggcagcccgagggaatggaatggtcaacagcccgagcctcaagtctgcaacctcctaggcagtcctgggccccagagggcaaacagcatgctccagagatggagccatgctacccttggttcaagcccaaaccaccccagttctccccttcagaggaagtggctgtccatccatccagccttgacggacctccctgaccaagaacatgcttccctagctttttcccaaggttctgcgagagctttcttcccctgaccctgcctcagaacatttctatagctgtgggaccagtttaccctgggccaagtacatgcgacctgtagatcccctgccccagagtagggggagcgggcacttaaggatgcaggtacctggccgggcgcagtggctgacgcctgtaatcccagcactttgggaagccaagctgggtggatcacttgagcccaggaattcaagaccagcctggacaacactgaaaccccatctgtacaaaataaaaaattagccggacattgtggcacatacctgtggttccagctactcgggaggcagaggtgggagaatcggctgagtccaggaagtcaaggctgcagtgagccgtgatcacgcctctgcactccagcctgggcgacaggagtgagatactgtctcaagaaaaagaaaagaaaagaaaatgcagatacctaagcccaacccctagagagtttgttcagtaggatggcagtaggctggagtggctcagaaatctgtattttaaacaagctccctaggtagttctgatacacattaaaatgtaaagagctaagatcatgcgacccagtgtgagaattcccaagcctgaggctcagctccacctgtcgcaagcgggttgagctgaaataattcacttgctccctttaagcctcagttttttcatctctctaatgggagcaacacatgttctgctaaactcactagtttgctgaaaatcgtatcagataatggatgttgtgatcagctggaaaatgatgcgtcaataggtgtctccatcttaatccctggaacctctgcacgttaccttatatggaaacagggtcttggcggctgtgattaaattaaggactaacttaatttgagattgggagattatcttggattttccaggtgggtctaaatgcaatcacaagcattttattagagataagcagagggagatttgacacacagaggagaagatgatgtcaagactgaggcagagacaacacagagacagctaacactgacgtgttaagcagtgagtgccacagaaatatttactgctgttattacttagactgtaggtgttaactgggcctggcctcgccattcctgatgaaaactcctatgtctatgaatagcctcttctagaactcgggctttgtgatgtctttcggatattttgaaggcttccaacagaacaaggcatgcattaaacgaaagcaaataagctttactacaaccatatctgaaatgtgttttcctgatcaagtgggatgggaaagaacagtgagtggagtcccaggcatgttaagaatggcgtgctgttttttaagtggtgagtggaatgtatttgtacattgccccagcaaatactgctgttcaatgattgtgtggtgctgaatcctgtagggtcataaaa

SEQ ID NO: 23019 - DNA, 2300 bp, Homo sapien
gtgagccactgtgccccgcctacccagtgattctaaatgcagttcaatggcctttcagttcatggaggccaaagcaggttctgctgcattaaattaagaaactgggctgggtgtggtggctaacacctgtaatcccagcacttcaggatactgatgtggattacttgagcccaggagcttgagaccagcctaggcaacatagtgaaaccctgtctctaccaaaaacaaaaacaaaaacaaaacaaaaaaccaaaacccaaaattagctgggcatggtggcatgcatctgtggttccaggtactcaggaggctgaagcatgaggatcacttgagcccaggaggtggaggctgcagtgagcagtgttcacactgctgcattccagcctgggcaacagagtgagaccctaattcaaaaacaaacaaacagaatgagagagagagagaagaaaagaaagaaggaacccagttaaagaagttgggtccatttggatttttcctggtttgttttatctgctgccaccagcagcctcctgaagttacaaaaataacacaaagtaaaataaggcaaaaccaccatctgcttgaaagagtttacaaacctgatggtggtcgtggggtggatggaagattaaaaaaatggggacagaagtgaattagtgcaagccacttgcactgacaagatggggatggacttctgtggaaggcagaggaggtcatgcctcatgcccctggtaggaaaagtggccaaagagggcttcagagaacaggggctgatggatgggctacatcttgatgtgagtcaagctcctggatggctggagagaggaaggatgttctagttgggggaacagcttggacaatggagacccaagaaagccatgttctagcagtgtgaatgttgtggatgctgaagtgccaggatgcaaggtggagaactgggaaatggccctggaaaggggccaaagccgggtgatgaagcaccttgtctactgtgacggagcttggatctctcttgtggtccaaagggaaaggattgctgaatgtaaagccaatgtcaccagaaaagctgaatccacaagagagtcctggagtccaaaagagcatctcatggggaatcaggaaagttctggcatttggcagattaagcaagtgtcttgatttgaagtccagtttagtcccaatactccctcccacacccaccacatcgcacaatttggttttgtttatttactccaggttaaggtagagtctcttagcttggtttgagtgctgtactcttctctctggtctgatatttggaactaaagccaagccagaactccagggccaagggggatgttgaaaattgtctgagtccccagaccaccctgccagctcatggcaaagggagggatcagaggccacagggaaagcacttcagctgctcttcacagcatcaccctctccccatttaatggtttaggttaacaggactttttccttgaggcttgggacacggaagggagcctcccctaaaccaggcccttggagagcaggccccaggggagcagtgcaactcaccttcacacccacaagacggctcctgacttctgctccctcctcccctccccaaagtggaacagagagaatatgattccccacgacttccacatcacagtttccaaacaatggggaaatcggaggcctccccgtgtgcagacggtgatatttaccgccaaatgcgaaccaggcagatgccagccccagcacgcacgcaggtaacttcaccctcgcctcaacgacctcagaggctgcccggcctgccccacacgggggtgctaagcctcccgcccgttctaagcggagacccaacgccatccataattaagttcttcctgagggcgagcggccaggtgcgccttcggcaggacagtgctaattccagcccctttccagcgcgtctccccgcgctcgtcccccgtctggaagcccccctcccacgccccgcggccccccttcccctggcccggggagctgctccttgtgctgccgggaaggtcaaagtcccgcgcccaccaggagagctcggcaagtatataaggacagaggagcgcgggaccaagcggcggcgaaggaggggaagaagagccgcgaccgagagaggccgccgagcgtccccgccctcagagagcagcctcccgagacaggtaagggcgcagcgtgggggacccgtgctctttccccgggatcccctgtccccgtcctcgcgatgcagtcggccggctccggctccgaaggcggacctgggcgcctctggctct

SEQ ID NO: 23020 - DNA, 2300 bp, Homo sapien
ggaggtgggaacaagttggagaccaggccgcaccccactgtaaggagggtgggggaaggggctggagtttcctgtcagcctgtaactgaccttggcacctgctttcctcctccagaagagaagaatccctacaaagaagtgtacacggacatgtgggtggaacctgaggcagctgcctacgcaccacctccaccagccaaaaagccccggaagagcacagcggagaagcccaaggtcaaggagattattgatgagcgcacaagaggtagttggcctgcttctggagagggtggcaccaggaggcctgcatccgaggagcaggcgcggcctcctctgacgccagctctcctccccttgcagagcggctggtgtacgaggtgcggcagaagtgccggaacattgagggtaagtttgttgcctgggaactctggcactcctagtgtggcatggggcagagtagcagaggcacttaggaaggtttgaatgacatgggaccaggggccacgtcctgcgtgtcacaccaccttcaccgtgcttcgtgcactgtctgtctttctggtgccatgattctgctctcctgtcaatggcgtgggctggtcttcagggtgtgggactccccagtggccacagaagggcagcccctcttgggtgtgactgaactcacctacaggtcccctttcagcctttcacctttgctcacctctctcatcctggggctgtcgccctcagcctggtgctggtggatctggctcaggaccctcggcctgggaggattggggcaggggtcaggacttgaggattaccccgggaatccctcctgagtaacctggaaccagggctgcttctcatgagcaggtttctgtcctgctgtcactccatccctgtttgtggatggtggcattggtgctctgagatgatggcgttcgagactggggtcacagtgcctcccttttccgtggggcaccctggactcttttctggctgccgctctggcacaccccttttttgtggctggtctggtgctgggctccggcccggggagggagaggcccttcggtggtactcaccccatcccctccctctgctttccagacatctgcatctcctgtgggagcctcaatgttaccctggaacaccccctcttcgttggaggaatgtgccaaaactgcaaggtaggagcacacccacccaggagaggtgccgttgaggccggcccttcggccttctggctgactgtgtccaccgcttctgggcatgtacagggtgacacccggtgtgcgtgtgatgtagacttcagagcttcctctggaagcagagtcctgatgacacgggcccttgggtttcaagcttttgacttgctctcatttttctcctctgaaagattctttacctctctcaagccccattttagtccccagatgtggggatgggagcagagcagcggggacaagctcaggcagagtgtagcagggttgccgtgccctggggagcccaggagaaaaacccagggctgcaggaaggcccaaggtggtggtgcagccccctccctggccttgttctcaggctgctctttggttctgtccatggcggtgcacaggcagatgaggtttccccttcccagatctgcagctggggcctgaccctggctaaggtggtggcggggtcatgtcttcagggcttaggctctgtgaggccaggtgtggagcctcccttcgtcctggccgtcctgggacccgtcctggtggtttctgacccttcccgctgctgtctagaactgctttctggagtgtgcgtaccagtacgacgacgacggctaccagtcctactgcaccatctgctgtgggggccgtgaggtgctcatgtgcggaaacaacaactgctgcaggtgaggctgttgtggcctccagtggtctccttagctgggccccaggctcccgccgcccaccgcctcccctcctctcccttccccacagaccctccaccccctagccatgctccagacccggtctttccattccaggtagcacaccttggcctccccggaccagggctgagagtctcctctgctcactgggtctccttccaggtgcttttgcgtggagtgtgtggacctcttggtggggccgggggctgcccaggcagccattaaggaagacccctggaactgctacatgtgcgggcacaagggtacctacgggctgctgcggcggcgagaggactggccctcccggctccagatgttcttcgctaataaccacgaccaggaatttgtgagtgctgggcctggggcgcggtctcga

SEQ ID NO: 23021 - DNA, 2300 bp, Homo sapien
gtgactttttgttttttgtttccccaggctgagaagaaagccaaggtcattgcaggaatgaatgctgtggaagaaaaccaggggcccggggagtctcagaaggtggaggaggccagccctcctgctgtgcagcagcccactgaccccgcatcccccactgtggctaccacgcctgagcccgtggggtccgatgctggggacaagaatgccaccaaagcaggcgatgacgagccagagtacgaggtgagcggcttcttcaccagccgtggccagctctttccgggggccttccactgccagctcctcccgtcctgctctcctctctccatctcccacgggccgctcgctctctccacctgaccccgggcctcttcgtctccccgattttgctctgtcttgcctcattcagatggagctccctcctggctgtcctgccccccagatgcccagggctggggttgccatggggggatcagggtggcagggcctcgtgaccactgtgtaatgatttctgctccttggggctccaggacggccggggctttggcattggggagctggtgtgggggaaactgcggggcttctcctggtggccaggccgcattgtgtcttggtggatgacgggccggagccgagcagctgaaggcacccgctgggtcatgtggttcggagacggcaaattctcagtggtaagttgtggggtttggcagtagcctggggtgggggaaggttcttgatcccagggcctgtggttttggctgggggcagtctggaattggggtgatggaagtgggttctgctcacccctactctgcctgtggtgggtggaagaagctgtagggataattaggttgcacctgtggctcagagagctaggatgctggcccagttttagccttccaggaacctattcactagaattcctttccacctgcactcaggtacttccctactcttggtctggactcctctttgcatcgggtaattatttatcactgtatctggtcccctccagggctgagactgactctcgaggctcccagcccctgccagttgcaaggcatggggtgggtgcttgcaagtgtaagcctcggcaaacaaggcctggcttgtccccccaggtgtgtgttgagaagctgatgccgctgagctcgttttgcagtgcgttccaccaggccacgtacaacaagcagcccatgtaccgcaaagccatctacgaggtcctgcaggtgagtgtccctgctgggagctcggaggaggagcctagagcactaggaggcctggaagttggagtgcaggtcgggcttgagcagaacggaggcccaggaggcagcgactcctttctctccacctcgctcgcccgtatgcacatcccgctcctcctcagcggttcctccccatcttgcctgtgccaccctcactactcagagtctggccttgagcctgacccatctgccttccagcctgtcctgacaaccccaaccctggcgtgtcaccctccaggtggccagcagccgcgcggggaagctgttcccggtgtgccacgacagcgatgagagtgacactgccaaggccgtggaggtgcagaacaagcccatgattgaatgggccctggggggcttccagccttctggccctaagggcctggagccaccagaaggtaaatgagggcacccagctttctgggacccctgcccgccaggcagatccacaccagggctgggaaagccatgcttagggagggctgccaaggcctccacagaggggcccagtgggaacagccggggtctctcttgccctggggtcaggacttgaatgacctgctctctgttggttggctagaaccgtagagttgggaggtgggaacaagttggagaccaggccgcaccccactgtaaggagggtgggggaaggggctggagtttcctgtcagcctgtaactgaccttggcacctgctttcctcctccagaagagaagaatccctacaaagaagtgtacacggacatgtgggtggaacctgaggcagctgcctacgcaccacctccaccagccaaaaagccccggaagagcacagcggagaagcccaaggtcaaggagattattgatgagcgcacaagaggtagttggcctgcttctggagagggtggcaccaggaggcctgcatccgaggagcaggcgcggcctcctctgacgccagctctcctccccttgcagagcggctggtgtacgaggtgcggcagaagtgccggaacattgagggtaagtttgttgcctgggaactctggcactcctagtgtgg

SEQ ID NO: 23022 - DNA, 2300 bp, Homo sapien
caagtcttctaggtagaaggctctctggtttggggtccttgctcttcagggtttgcttgctctgatggccctcagggggagggggggctccctcactgcacatctcgtgacttcattataccagcacctgtatgtcccaggtgactgtggctgggagccaggcacctagagaattgtctcattgtcattaggagatggtggcgttccatggccaaagagggctgatgtcatcactcgttttgcagatgagacaacagatttcttgggggttaagtgacttgtttaaggtcatggtggtggaaacagaactgaagtccagatcttttttttttttttttttgagacggagtctcgctctgttgcccaggctggagtgcagtggcatgatctcggctcactgcaacatccgcctcctaagttgaagcgattctcttgcctcagcctcccaagtagctgggattactggcgcacgccaccacgcctggctaatttttgtatttttagtagagacaaggtttcaccatgttagtcaggccggtctcaaactcctgacctcatgatccgcctgcctcagccttccaaagtgctgggattataggcgtgagccaccgcgctcggccaagtccagatcttctaacaagtgccgctgcccaaatagccctctgctgtggggtgcattttcctccatttcctcagttcttccttctaattcatcttgccaacggcaactaggctgatttttccaaaatactcattcatcttgtcagaaaacctgcggttattcttccctgctacagaatatacccaaggacgcacctgaaggcttgccattaccttgccctgtcgtgtactgggagggtggaggtgggcgagggtctcctccctccccagcccggcagctcttgctcatcctacccatctcacctcattccaagtccgatccagcctccaggcccagtcggctcacctggaactgacctctgacctcttttgtcatccatgccgcccatttttttctacttggtatttgtggcatagttacctttacatatgtttgttttacagtgatcctttcatatttctccaagtctagtggaatcttcaacccctcgagggcagagccaacagggtctatttctttatctgatcctacagccaacgtaatggagggctgtgggtggggactgcgtctgccttgggggtaggtgcctttgttcaggaggaggaagcttgaaatggcggaggctgcacctggaggccgcacctggaggccccaggagaggagtcaggtcttctcgatctgcagatgtttgagcctgggaatgaaggaattgctgaactttctgaaggagcgccctcgccgcgaccaaccttgcaaacaggaaaatgagaaatccagggaaggcccagagtgacgcaggggccctgggactcgaagcctgacctcctcacgccgcgctttttgaggcccccccgcttctctattcacctgtagtgtggaggcgggagaccccccaaacaatccccgatctggagcgctcccaatgcctgcgcgcgcctgctgtcactctccgtctgtgtgctgagttttcctacagcttcctgggcctcctatctgtaagctttttctttttttttttttggttgtgcttcagagaaactcacttttcacaactttctcccggctctcccaggccgtccgaaagctccggcttgctttcgcccggacccccggctccctccgggcaggcggctcgggagcagccccttccctcccctcccggccccccggccccgcgctaatctcttccagagctgggggaggggccaggcggtcttcccgaaggcggggcgctccctgcagcccggcctgggcgggccctgggaacgggcggggaacggcctcgccccccggccccgcgcccctcggaccggagaagaggggctggcccagcgccagcgtcggagcgccggccccctccccgggccgctcgcagccaaccaggccctccagcggggcccacgtgacctggagtcctagacaaagaaaatgttccctccctcccccccgccgcccccctcccctcccagtggccccctccgcccccagccccatcgcccccttcccctcccccaagacgggcagctacttccagagcttcagggccgcggctcacacctgagcgcgactgcagaggggctgcacctggccttatgggtaggttcctggacggagccccggggagaccgggggcggggaggcggcagggccggtgggaggatctccgcagccctccggg

SEQ ID NO: 23023 - DNA, 2300 bp, Homo sapien
gtcctcacagaaaatgcagctgacctgggtcaaccctttcgtgttgctcaatggaccagccctgtcagtagcagtccctcaaaatcgtgtccatcacctaaaatcctccagtatgtgtctgggcgggccatgtactacacaaccctagggggccccagttggtggccaaggtcccagaccttgacatagcattgcccacctacccgtagacgcttcattcttccttcaggcagcccagccatggggagtgggctctcctgggcccacagtcccaacacagcagcgggtgtccaccacatcggtccttccaccgcacagccctggctgcttccgataccaaagcgttcttcccacctgggccaagggctgcacagccaccaccactgccaccaaaaaacccttgccaagaaccctaccaccatgaaaagcagcttttatttcctccttttagagtccacagtgaccatgaataatgtttgttaacagccacttaaaaaatttcaaggaatcccaccatgaaaacatcttcgtatcacagctgatatgatcaccatctccactgcgtcaactataaaactgttgtggaaaaagaactgaaagctttgaatatgcataccaaggctcactaccttctaaactcaatgcaatagaaacattttttgtttgtttgtttagagcaggttcttgctctgtcacccaggctggatgcagtggtagtatcatagctcaatgcagcctcaaactcctgggctcaagtgcaagtgatcctcccacctcatcctcctgagtaggtgggactacagccatgtaccaccacacctggctttttttttttttttttgtagaaacagggtctccctatgttgcccaggctggtcttgaacacatggcttcaaaggatcctcccacctcagcctcccaaagtgttgggattccaagcatgagccaccacacctggccaaaagattttttaagacataaaatcacaagattaggctgaacaagagaaggaataccaccaacaaaattgtggaatctggaaagcagacttgtgacagccaaatttcagacaggcgtgtgaacgctgatatataacacagtcttcaacagatgcttatatgacagcaccaggtactctggcactagggctgaagaggatgcttgtgtgagaaacgagaggctgagtgagagtagtgaattcctagaccctcttctacaagtttgaaggtttatctgtagtcactggagggcataaaatagggggtctttgcacagagtcacttggcacagctgaagacaaagatgatatatcaaaccaaggagaggaaggttatttatttatttattttctgagatggagtttcactcctgttgcccaggctggagtgcaatgccgcgatctcggctcaccgcaacctccgcctcgcgggttcaagcgattctcctgcctcagcctcccgagtagctgggattacaggcatgtaccaccaagcctggctaattttgtacttttagtagagatggggtttctccatgttggtcaggctggtctcgaactcccaatctcaggtgatctgcccacgtcagcctcccaaagtgctgggattacaggcatgagccaccgcgccggccgggaaggttattttaaatgctgatgtccagtctctcaggctattccccgattgggctctaagaatactggcagccagacaaccatttccttctctggagaatcgaatgagtctaagaggaaaggtttaaggatgccaataccaacatcagtaccaaaatggggtcaaaatgacttattcaggtcagcctatgtagacttgaaaaccaacaagtccactatcattctcagagcttccgatcagttgggtttttttgtttgtttttgttttctgagacggagtctttctctgttgcccaggctggagtgaagtggcatgatctccactcactgcaacctccgcctcctgggttcaagtgattctcatttctcagcctcccgagtagctgggaccacaggcgcccgtcaccactcccggctaattcttgtatttttagtagagacagctttcgccatgttggccaggctggtcttgaactcctgacctcaagtgatccacccaccttggcctcccaaagtgctggaattacaggtgtgagccaccgtgcccagccaaaattcttaaagaataaaccaaatcttaaacaatcttccaattagaattattttcagccaaattatcatttaagtgtgagagtaaaataaagacattttcttttttcttttcttt

SEQ ID NO: 23024 - DNA, 2300 bp, Homo sapien
ctaagactgagcctcagtttcttcatctgtagcgtgaggagagtacaagccatatcacagggctagtgaagactagagaaaataccatgtctggtgcctggcacatagtagacactcagtaaacagtcgctgctgtttggggccgtgttatatgtaagcccttgatgaaggcagaggtatctcagtcatccttctataaacggtcttctcctttgccaagctgggtgcgccatttagagtgttcacggatgcccctcctgatgtagaaagcgaacagcccaggagggtcacatgttaattccaccaaggtttactgagaatctcctagcaccaagtgctgggctacagggatgacagacgcggcccctgtcctcacagagcactgggagtctctgggccggtggggaccatggacagcagggcctatcatcagtagggcggggtggccacttgagtgagggtgacactgaaaacggccagaactatggcctagaagctggtctcagatatcgaggctcagggtgggggttggggagacggagggacctggaagcattggagaacctcccgaaggaaaaccttcccgtctgtatgaaaggtcagctcccggtcccagagaacttggcaactcggttctgtgacgctaaaagggtggcgttgggggggcgggtgctgggctgcatggggagaagggaaaagtaggatccgcttcactgtgaagtgagtcccaccaccaactccagcaatccctgcccacaagtaggatggcgggtccctgggaagggagcacgccatgtcctgtgccagtcagggagctcagggcactgtgatatagctgaagtgctgagtagaattcggggtgcagagctgcgggtggctggtggggtgctggggcgcgcaaggaggctggaggcgggggtgggggggtgcccagccccaagtcctacagcggctgctggaggagtgagatgagcacatagtgagtggctgtgctggtggaattagacagaggtgccccaagtcaggaacctagagccctgagcgctccatggggaaggagaacagcccccacggtgaaggggtgagggcggtgtgtaggcacacacagaatcttccagctggaagagaccttcaatgtcatttcattcaacctcccacctcatgaaatctttcagtcttccagtgcccaactgaggacacccaactctacttggacacctcaaggtacggggaactcactcccttcaaggcagctcatctcagagaggctttggagcctgcgggacggccaggaggagcctggcgctccgaccttggccctgtagagcagagtggcctctactccgcggcggcacctggctgggggttgcggcgcggttgggccagcgctgctgtccccagccccagtgctgaggcaggcagagcgcagtgggctctggcggaggtcgggagaactgcagggcgaaggccgccgggggctccgcgggctgcggggggaggcacttgacaccggcccggggagaggaggggccgctgtccctgcggccagtgctggatgcggggacccagcgcagaagcagcgccaggtagcggggcgcccagcgtggggagggctgcggcgaggcccggagctcggctacgactcgaggggctctgagtggccgggagcgcggccgaggcggggcgcccggggcccggcccccggtctgggcggtgcggggtccagacctccgccaagcggcgtgcggggaccccggcggggccgcagaggccgggaagtcgcgccgagggcgctaggaccggccgcgcgcccaggccgctcccgccgcggcgccccggggccccccagtcggcgctgcctcccgggccggctccgcagcgccggggccggggccagcgcggccgcggggggcgagcggcgggcggaggcctgggcccgcgggcggccggagggagggaaggaggaaggcggagagaaggggtgggagggggggacccggcggaggaggcggagagagggagcgcgacagcgagcggagggagggagcgagcgagcgaggcaggcaggcgggccgggagggagggagggcgcgcgggcggcggcggcggcgagagcagaggacgagccgggacgcggcgccgcggcaccagggcgcgcagccgggccggcccgaccccaccggccatacggtaatgagcgccgctgctggcggcccggaaggccggcccggaggcggcggggagccggggagccgggcggggggcgccgcggctggcagtgcccggctcggggcacgctc

SEQ ID NO: 23025 - DNA, 2300 bp, Homo sapien
gtagcacgatatcagctcactgcaacttccgccacccaggttcaagcgattctcctgcctcagcctcccgagtaactgggtttacaagcatgcgccatgacacccagctaattttgtattttaagtagagacggggtttcaccatgttagccaggctggtcttgaactcctgacctcaagtgatcctcccgcctcggcctcccaaagtgctggggttacaggcgtgagccactgcacccactgaatttcagcttcttaagagcaactatgtttcaaaagtgtggtgtgggctgggcacgatggctcatgcctgtcatcccaacaccttgggagcctgagataggagcatcacctgagcccaggagttcaagaccagcctgatcaacatagagaggcccctatctctacaaataataataataaattagccaggcatggtggtgtgcatctatagtcccagatactcagaaggctgaggcaggaggattggttgagcccagaatgtcgaggctacagtgagccatgatcactccactgcactccagtctgggcaacagagcgagactgtgtctcaataaaagaaaaaaaaaaaagatgtgatgtggggtgatttcagagccggatgaacctggctttgaatcctgactctgccacttcccaactgtatggctttgactaagactgagcctcagtttcttcatctgtagcgtgaggagagtacaagccatatcacagggctagtgaagactagagaaaataccatgtctggtgcctggcacatagtagacactcagtaaacagtcgctgctgtttggggccgtgttatatgtaagcccttgatgaaggcagaggtatctcagtcatccttctataaacggtcttctcctttgccaagctgggtgcgccatttagagtgttcacggatgcccctcctgatgtagaaagcgaacagcccaggagggtcacatgttaattccaccaaggtttactgagaatctcctagcaccaagtgctgggctacagggatgacagacgcggcccctgtcctcacagagcactgggagtctctgggccggtggggaccatggacagcagggcctatcatcagtagggcggggtggccacttgagtgagggtgacactgaaaacggccagaactatggcctagaagctggtctcagatatcgaggctcagggtgggggttggggagacggagggacctggaagcattggagaacctcccgaaggaaaaccttcccgtctgtatgaaaggtcagctcccggtcccagagaacttggcaactcggttctgtgacgctaaaagggtggcgttgggggggcgggtgctgggctgcatggggagaagggaaaagtaggatccgcttcactgtgaagtgagtcccaccaccaactccagcaatccctgcccacaagtaggatggcgggtccctgggaagggagcacgccatgtcctgtgccagtcagggagctcagggcactgtgatatagctgaagtgctgagtagaattcggggtgcagagctgcgggtggctggtggggtgctggggcgcgcaaggaggctggaggcgggggtgggggggtgcccagccccaagtcctacagcggctgctggaggagtgagatgagcacatagtgagtggctgtgctggtggaattagacagaggtgccccaagtcaggaacctagagccctgagcgctccatggggaaggagaacagcccccacggtgaaggggtgagggcggtgtgtaggcacacacagaatcttccagctggaagagaccttcaatgtcatttcattcaacctcccacctcatgaaatctttcagtcttccagtgcccaactgaggacacccaactctacttggacacctcaaggtacggggaactcactcccttcaaggcagctcatctcagagaggctttggagcctgcgggacggccaggaggagcctggcgctccgaccttggccctgtagagcagagtggcctctactccgcggcggcacctggctgggggttgcggcgcggttgggccagcgctgctgtccccagccccagtgctgaggcaggcagagcgcagtgggctctggcggaggtcgggagaactgcagggcgaaggccgccgggggctccgcgggctgcggggggaggcacttgacaccggcccggggagaggaggggccgctgtccctgcggccagtgctggatgcggggacccagcgcagaagcagcgccaggtagcggggcgcccagcgtggggagggctgcggcgaggc

SEQ ID NO: 23026 - DNA, 2300 bp, Homo sapien
gctgggacgcagtcccctcctccgtgggctcctcttttctcctgactgctggttggtgtttgtcctactttcctcattgcctaggcaaccatttcaggttcaccctttgccacccagcctacccccgggagcccagagcccagctcttcccactcccggaggaggagaacaaagaaacgaggcacaccgagaacagcagggtgacgccagggacacgtgggctgaagagccaggggcaaggagagggaaagagaacgaaggggatgagaagagaggcagagctggagctgacggggagccatggacactgggatacggtggccgcacggcaggcctgaggccagggaaggtggaggaaggaagccaggaagggccctgggggagaaaagctgacaaggaggccgatttgaggtggactctccgagccgcatcctgggcttgtgggaatcgttcctttgtcccattgttgccacagctcattagccctggattttaccctaattagatccccacttgctttccaccaggatatcccattagccagggctgcagatgaccttccgctgggatcctgcccctagcccggcccctgccccacgcgcaggccctgacctcactgcctgcctcctctaccccaggaggctcttatctccccagccccgcccttctccccacatcccacccttaccccagcccggtctacagtgctcaaggcgggtgatggaatttccctggggggtgtcggcttcaaggagtccagcttatcttcctgccttccgccatcactgttgagtcgagaggaatgagattggggtcactgggaggcctctggagccgaactgcaaaccatggggtttaaagccagggtggagctgggagaggcccttgttcaactctgtttactgaggcccctaccctgacggcccacgccccctcgcctaactgctctttacctgcccccattttatgatagagcctgggtctttattcttccgcatgctgtgttaaggggagactaggctccctggactaggtcactccctggctgtgttgtgcacgcacagttccccgcaaaaaaaaaaaaaaaaaaaaaaaaaaaaatgactttcgactcagcacactcaggcacacccaaggcaggaactcacttccagcaggggtctgggggatcttagaagctcagaaaccacagccagccccaaccactgctagagagcaccatccaggcatgtggagaggtaccgagaaaatggaactctgcttggggaaaccagagagcagagctgcttaaagacacctaggagggggtgaataaaggaaaacactagaaccgaaagaatagcgagatcatgacacacaggatcgcgtgtgaccgttctgtaagctgcacgcacgttgggcttctgagtcactggtgaccagatccaggtgggtttcttcaagagggcttggctctaaagggaagggaacaagtgcatgtgaagtgcctactgtgtgccgggtgtgctcacctatgtgatcttagtgtcatctgctcagcaaaactgtgatgtgatattatcgattcccaggggaacagggcctgaagaggtcgggcgtcctcatgtagttagaaaggagaaaccccatctgtctgttgggctctgatgctccatcacttcccactgtcgacgaaaagagttgaactctgtgaaatatttgaagagatttattctgagccaaatatgagagatcatgacccgtgacacagcccttaggaggtcctgagaacatgcgcccaaggtggtcagggcgcagcttggttttatacattttagagaggcacgagacatcaatgaaatacatttaagaaatacattggtttggtccagaaaggcgggacaactcaaaggtgggggagggggaaggggtggagggggtggttccaggctgtaggtgaatttaaacattttctggttgacaattggttgagtttgtctaaagacctgggattcatagaaagggaatgttcaggttaaggtaaagattgtggaaaaagttcttttgaagtctaatagtggctgcccttagagacaatagatgacaaaagtttcctattcagatcttagttcatctctttaggattgggagggtcaggaagaaaaagatctagctacgataatagacattctttacagatgcaaattttccccccacaaaaaacagctttgtgcagggccttttcaaaatatggcaaagaaacatgttttggggtaaaatatttttattttcttccttgtctcataacgttatgccagcca

SEQ ID NO: 23027 - DNA, 2300 bp, Homo sapien
tctgtctcttctcccccatagctcatcttcccattggttggcactgtgtccccacgagctttccacggagttgcgctcaccgtggcccctctctggctcttcaggcaagcagagctccctgtttccaagggcgtggggccctcttctctgcccaagcccctgctgactctctgtgttttcagctctgaggccagcactcaggtaccgggtgcactctggtgatacccgttcttgctgaggttgatttctcgtagagctagaaaacccgccattacctaagccccgagctccctcatgactgttggcgtctgctttaggacccacatgcctgtcagacctttggaactgggtccctttcctcaatcctggcgaggaacacaggtggtcatcacggaaggaagatgggcacttccatcttaattgctctgtgaccactgagcaggctaatttaacctaggtagacggttttttgagaaactgcagcatcactgactcctgggtgagccaggctgccgtgcagcaccacagcctgggctggcgctgttttgcagtgctggaggaccccgggagggctaccaaatgcatcgtgggtcttgaggaagcaacagctccaccgagttcttgtccataagtcccagccaccctgagcttcctcttcccttcgcagcccctctcatctgctggtgaggcttcaaccactggcagacgtgctcctcttcgggctgcttactgtgctcctgcagcccataagcgcttcggaggggtgcagttgctatggcaatgcctacagccatctgaattcctgctgcaccttctgggagaaaagagctcatgaagaggcattcggtggattcccagtctggcctctggcctctgcactgtcaggagtcagctgatgggttacatgccggacacgtgggaggtaggtagcctgccttccttgggaagacacactctgtacccgcaagcctcatgcgcccggacgggttctccttgtgtggatcagaaaactaaatgaagtgtcctactcagggctcctaggtaatatactgcaccagtggttctcagacttaagcatgcccgtgaatcccctggagtgcttgttaaaatacagatagcatggccatgcctccagagtctcggattcagcaggtcttgggtagaaccagagaatttgcagtcaacaagctcacaggtgacggtggtgccgttggtccaaagaccacactctgagattcacaggacaacacttggatgaagaagaaaacaaagcagtgcaggaagccatcgcccatcagtgaagaagggccagagtcagccgtctattttaaaggaagaaagggccctgggcatgggtgctggaactgggatccctagtctaagttggttttggtccccagcaatcaatgaagactctcccagacatgaaggtgggcagcactgaggcaaggcctgtaaggtacagaagaccgacatcatggaggcccagcgacagggagttacttctcagtctatagtctcagtggtagggagtgctgaaggcctgcctggctcaggagggatgacaggggagagggggtgttgcaggcacctaacccccacagccagagcctggacaccaagatgctttccccaggatgcaaataccatcttccacacgaaacaacatccaggcccagatgggctgcttcaggctaccggaagctccatctcctatgggcattgaattcttttcagagggaaaatgattactagagaacctagtaattcgatgttacttacaggtctccccagttaaagtagcagatcccagggactctggtgccttctctgcacttaaccttacttgagaagccaggactctgtaggtagtgggcttggagtctctcctgcctcctgcacaggcgcgtctgcaaacaggtggaggacactggctccgtcttccctctgcttcctacttccaaggggggacagctggggtaggaccatggcataaaagaaatgggcatcaaatcctttcaccagttccaaaaagcaatatgagtctactagttctgtgacagtttgaatgggttgtgactgctttcatgttgaaaatttaaaatctctaagggaggtcatgagaactagaacttgctgggaatggagttgggaggcaggtgttgaagacaaaaacaccaggtagccatccttgtatttctgaagtaaatggagcctgtcattgctaaaggtggagattcagaagggacttataggctagaggtgggactgttgtttattcaggcagatgcttcacgggc

SEQ ID NO: 23028 - DNA, 2300 bp, Homo sapien
aggtattatatctatatttattccctaccacctttgtgtgtctaattttcctctggaagcatttggaaccatggaggtggtagaagttgagctagaccatgaaaagtagataatgatttggatggagtgtaggacaaaacatttcagattggaagtgcacttggggttcagcatgattccccccaaataattatggcacatttcagaaaagggaaagagtcttggaactaagaatttcttttcaatcattcattacatcaatcttcagagtgccagtgataggagatataattagccaggcaattgagatcagattctagaaagtcttaattgttaggtcattggaaacccttggagagtttcaaatcatgattttggtaagttcagtagatgttaattaggtgatactggatgcatgatattttcttaatccttcaatacatgcaaggatgagtaaggcccatcccctgacctcaaggattttgcatcatggtaggaatggcagcagtaaagtaaattaagtaccactgaggagcactaattactgtagtgcttaatcaagcagtccctgctgaagtgatcaggagcagcttcccgacagtgatgttgggtcagacattacggaatgaataagatttggaagagaggtgagttataaaatgatggagcccacttaggaaaaatgaaccgtaagctggaggtccagacacaaagggcataagataggaggtgtggtactaaggacaggaatgtagatgggatctagagccgcactcgccgatagaaatgcaggccacgcacataatcaaaacatttctaacagcctcattgaaaaaccaaaaagtaataggcgtcattaattttaatagtatatcttacttaacctgatattttcaaaatattgtcctttcaacatgtaatcagtattaaaacatgatccagatactttgctgtttcctgcactaagtctttgaattccagtgtgtatgttacaattgccgtgcatctcagttcagcctagccctgtttcaggggctcggtagtcacgcgtggctagcggctgctgtgatagacagcgtaggtctcgattgcacaggcaagggtcagtgatgctagaaagtctgttgagatcattatgggatgatgaaatgaacatagctttgttttgagcggcagtttaaagttcgtagaacactctcatatttattaccttatatgatcctcagaatattgttgctgttactagtccccttttagaagagagaaaactgaggctaagtgacttgtctaaggttgcatatttggtaaatactggtgctgatactcaactttgaggccattgacttctatttcactgctttttcctcaccataaaagatgaaagagccaggtgcggtggctcacgactgtaatcccagcactttgggaggctgaggcaggtggatcacttgaggtcaggagttcgagaccagcctggccaacatggtgaaactccatctctactaaaaatacaaaaattaactgggcatggtggcgatgcctgtaatcccagctatttaggaggctgaggcaggagaatcacttgaactggggaagcggaggttgcagttgagacaagatggcaccactgcactccagcctgggcgacagagtgagactccgtcacaaaaaaaaaaaaaaagaaagcaggattaatcacataaggagactgtttcatgcttgaggtaaggagtgcttagataaagtgagagaaatgggaatagaaagataggcacatacattttccaagaaagaatgatctgaattgagttattgattgaatacaggatataaagaagaaagtaacaaagaggactgagtttttcaaccatgacacctggaaggaaaaatagcagagacagggaaaagagacagagacaaggaaaaaaaaagagacagagacaagaaaaccatttagggaataaagtcttaagtctggttttggacatattgagctggagtagatggcataaaatctatcctcaaggaaaagtgactgttcttgaacacagggagccgtcctgatctgtcatccttcttgaatctgtctagtgctgaaagtacttactactggaccctgttttctctgagcagtttaatatggtttctttactattaatctaaatttgggctaattttatatatttttcaaaaggcattgattttctaaagagttttttaatcattaattcactctggtaatataagtaatacctttatatagtcatctaaactttccaaagcacttttacctattattc

SEQ ID NO: 23029 - DNA, 2300 bp, Homo sapien
atgcagtgatgtggtgtggacagaaactacataggtttgaggagctgaggagctgctgaggaggtagagatgagggtagatgactttcaagatatttatgaaggaaaactcagagagggactagtaactgaagcagaatctagagggacagcgaaagggtttcttcctttttcttgaggacaggaaaagcttaaacatgaatagatgatgaaggaaagagacaagtaaagagaagttggtaattttggagtgagagggggagaatgattgaaaggtgtttgaaaagttttctgaggatgtgggaggtgaagaaatagagaacagagatggagagatgccaatacagtgtccttgaagtatttaattcccttatggtttaggattgtctagtccacatattgaaattaccttggtttcaatcaataaaccgaacatatcaagcgatatttacacatttattttatattatttacacatcttttctccaaagaacagaatcaatgttttacccctctcaatgccttccacatagggggtgctcaaaaagggcaaataaagaagctagaggtctcttacctgtattctgagtatcttaatatgtacaaaacatagccaagaccgtgcctacaagagataagtctcctcaagcatgaaaatattcacacacttcatatatgtaaggtaaaaggtaaaatgtccatctttatttatttattttgagacggagtctcactctcttgcccagacttggagtacagtggtgcgatctcgactcactgcaacctctgcctcctaggttcaggcgattctcctgcctcagcctcccaagtagctgggattacggcgtacaccaccacgcccggctaatttttgtatttttagtagagacagagtttcgccatgttggccaggctggtctcgaacccctgacctcaagtgatccgtctgcctcagcctcccaaagtgctgggattacaggcgtgagcctccgcggcaggccagaaaatgctcatcttttgaggaacctatttgttcccatttaacaaagttggttatcagcatttccttcaccataggagtttaaaaataaaaagaggagaggaggaggaagagggtgttctaaaggcaggcaggcaggcaggcaggcagcagcaggaggtggcacgatctgccttaccgtaaggtgccaaaaagcagtgaaaaccatactcccagcatgcaggcctggggtcgcttagctctggagcttacagccttcatcattgaccaatagcccccaaaggacgttgctgttttgagtcttaagtaacgttgagaatgaccatttgaaccattcaaaaagtccttgctatattctaatttggcaccatctcctgtatttcacagtttggaaagaattctataaaagatggataacagtaaaacacaaaaaagctggtgctgagatggtaaacctggctgccccggctcctttgcccaaactgttttcccagccctaatgtcctccctttttcctcctaggacttctttttcttccttcgaggttgaccataaatgccgcctctagccctctgcggcgtccaagcagaagtcgtctctagcttctgtgccagcatcgcaccgtggcttggctctgcacgggtcatcggacttggttgtgtacatggctgttttccccgctaagtttggggcgcctcgagcccaggcgccgtgaccgtgatcgtgcgcccacaggcacctggtgcagcgcggggcgcacgccgcggctgggctagcttgcggagttcacgggggtcactcgggcacaggcttgtgacccaggcgcggagaatgattcacggggtggctctttgcattctttgtcgggtagtcacgtcgggccgggcaccccgccgacggatacctgcggatggaaagacacccggcccgacgccagcgagcgggagaagcctggatggagccagcttcccgcctgcccggaacccgccggcgaccggtgggcggggcgcggccgcgggggcggggtggaggggggttgctcggccgctcccgccccctccccgcgcgcggaagccacgcccccggccgcgcgctcgcgctgggcgcgcgcccgcccatccgccctccgccctccgccctcgcgccctcgcgccgggggcgggcgctgcgcgtgccgggcggagaagcggcgcgagccgggcgctgcgaacgttcgccgcgggggtggctccggggcctgagtaggcgctgccgctgcctcagccgagggggctgggccggagcgtgcggaggagtgaggc

SEQ ID NO: 23030 - DNA, 2300 bp, Homo sapien
atcttccattatctctattaatgaatgctttcgcaacatgggctatttttcaactggaatatttcttttttcccctttttagttctggcctgagccttgaagattctaagaaattgacagcttctcccagtgatcccaaagtaaagaaaaccccagctgaacaaccaaaatccatgcctgtgtcagaggcctctcttatcagaatagttccagtagtctcccagtcagagtgtaaagaagaagcattgcaaatgtcatcaccaggcagaaaagaagagtgtgaaagccaaggtgaagtgcagccgaacttctccacatcttcagagcccctgctttcctcagctctcaatacacatgagcttagcagcattcttcccatcaagtgcccaaaggatgaggatctcttggagcagaagccagtcacctctgctgaacaggaatctgagaagaaccatctcaccacagcttctaattataacaaaagtgaaagccaagaatctttagttacatcgccaagcaaacccaagagtcctggggttgaaaaaccaatagtgaagcccacagcaggagcgggtccacaggagactaatatgaaagaacctctagcaactcttgttgatcagagcccagaaagcctcaagaggaagtcttccctcacccaagaagaggcccctgtgagctgggagaagaggccacgtgtcactgagaatcgccagcaccagcagccatttcaggtctcaccacagccctttctcaatagaggggacagaatccaggtgcgaaaagtaccacctctcaaggtaagagaatggagagaattagaaaagcagagatcgtctgaaccctatgtttttggtcatacctactaaatttcaagtaaattgtggtagttcttaatgcagaagcagttggatatatttgataaatatgtaactatggtcttacacaaataaaatgatagatgggcatttagaactgcagtcctacatacaggtctttactgatgtttgcataaggaaggtacctgggcatctaatgtaaaccacccctgtgctcactacttgagctcagaggcacctgatctcagactcttagaccaaatataatttaaatggacttccaaaaacttagttataattctcagcctctgtagaacattgacagccaactgtcctactgtctcctcaggacctcttagattttttgggccagggttcacgcagatattgcagagaagagttgatcacaatcccagggtggaagagtcttgggcttccttcggttcccctacaggtagtctgtaatgcatgcttccagaccatcatgaaaattattgacaaaataagaaatgtgagactaagcatgaggagactattggtgtaatcaaaggatcctatctttgtaccaagagccatggtatttgagtttacccttttcttgctaccataactgacttgatgttctgtgaatcaggaactacctttagctccctcctattaaaggaaatatgtgtagctgtcttctgtcactactggttacttgagggacactagtaacatggaatagtcttggtaagctctgctgcttagcatgtgattaacttccagttagccttgtattgctgcatgtcaaatctttcaaattcttctaggtagtatctttgactgtcttaatatacaatgccttttaaaacccaaacacatttttacttctgatcttaaaggtttattaatacttgggcttgtgcttaatatcagcttgcagttcattcatttaataaatagtgtttatttttcttaccaaggaatttaagaggcaacgcactgaatattactcattaggatataaatggaaaaataagactagtaaaagtactttttccccctttttatttaactgaggtgaaccaaaattagttctgtcaggaagtattccttggaaagattcacttaccagaacttgacccattctcattgtattttttttttttttaacggagtctcgttctgttgtccaggctggagtgcagtggcacaatcttggctcactgcagtctccacctcccaggttcaagcgattctcctgcctcagcctcctgagtagctgggattacaggcatgcaccaccatacctggctaatttttgtaattttattttttagtagagatggggtttcaccatgttggccaggctggtcccaaactcctgacctcaagtcatctgccctcctctgcctcccaaagtgctgggattacaggcgtgggccaccgtctgtacttcctattacttttttattcatt

SEQ ID NO: 23031 - DNA, 2300 bp, Homo sapien
cacgcccggctaattttctatatttttagtagagatggggcttcaccatgttggcctggctggtctgaaactcctgacctcagatgatccacccatctcagcctcccaaagtgctgggattacaggcatgagccaccgcgcctggcctagagttgtttatatcaacacaggtaagcaagagaaagcagtttgagtaaccggcgacaagaatcagaaaggattaggtaaaactactttgttttttcagatgatacgattttgcgtctgacaaacacaaaagaatcagtggagataaatattgattaaaaagaactgttggcccatgcttgtagtcccagcacttcgggagggtagggcaggaggatcacttgaggccaggagtttgagaccaacctggacaaacatagcgagactctgtctctacaaaaaaaaaaaaaaaaaaagaaaaaagcccgggcggtggctcacgcctgttatcctagcactttgggaggccaaagagggcagatcacgaggtcaggagttcaagaacagcctggccgatatggcaaaaccccgtctctactaaaaataaatagctgggcatggtggcacgcgcctgtagtcccagctgctcgggaggctgaagcagaagaatcgcttgaacccaggaggcggaggctgcgtgagccgagatagtgccactgcactccagcctaggcaacagagcaatgactctgtctcaaaaaaaaaaaaaaaagccaggtgtgtacctgtagtcccagctacttaggagacagggggataccttgagcccaggaattcaaggctgggtgacagagtgagaccctgtgtcttaaaaaaaaaaaaaaaagaatttgagattgtaaataaatagatgtaaataaaattaatatgtaataatcagccaccatgtacataaataataatgaaaaagaatatatttgcggtaacaacatcaacaacaaaaaaattctgagcatcactgttttttttcttttcttttctttttgagacagttttgctctcgttgcccaggctggagtgcagtagcaccatcacggctcactgcaacctctgcctctcgggttcaaacgattctcctcctgcgacctcccaaagtgttgggattacaggcgtgagccaccgtgcctggccaagcattacttttttaagatatgtgcaaaatgttgaaacaactcaatacccaaaaagataaaattgcattcatttctcacactccaggacaaattccaaagaaattaaagttataataaatgtaaaatatgaaaccaagtactacaggaaaacatgggtgaattaatttcttttctttttttttttttttttggagatggagtgcagtggcatgatctcggctcactgtaagctcctccttctgggttcacaccattctcctgcctcagcttcccaagtagctgggactacaggcgtccgccaccacctcaggctattttgtatttttagtagagacggggtttcaccgtgttagctaggatggtctcgatctcctgacctcgtgatccgcccacctcggcctcccaaagtgctgggactacaggcatgagccaccacgcccggccaaacatgggtgaatttcttttaaaacctgaaaataaagaattttttttctctgatgcttcttgaagtgtacatgtttatcttttagtctggcaaactcacttctaagaattaacctcagagataagctgtcaaaaatacaaaatggcagagattaagaacaatgattctcagactcgagcttgcgtcagaatcacctacaggacgtatggtgcagattcctgggcctcacttcagagtatctgattcagtagatctgggcttccacccaataattttcatttctaatagatttttaggtagtaatgatgttgttctgggtaccacatcttagaaccactggttaagatgtagtcatgagaacaaaagaccagaaacaacccaaaaaaatacccatcaacaaaatctggtggaagaaatcacgatcgatatacacaatggaattctatgcaactattaaaaggaatgcagaagagttccatgttctgttctaggatatcctccaggatgcattgagttttttcacttaaatcaaagtggctcccgcctgggcaacagagtaagaccttgtcttaaaaaaaaaaaaaaaatcaaagtgctagacagttggtggtatatgatcttttgtttaaagaaataagtaaaattattaaaatgggccaggcatgttggctcatgcctgtaatcccagcagtttg

SEQ ID NO: 23032 - DNA, 2300 bp, Homo sapien
gggaggatatcttagtagggtagtgggtggagttttaagaagatagatttggcattccctgtaggatgggcttgagtagggtgagaaaagaaacagactatctaaggaaatccagaaggagggtggggatgatgagagagatgcaaatacacataacaaattcaatcaatagacatggggacaaaatactttttggggaattatacttttataataataataaactatctgtatctgtggaagattaagaagtaggaaccacaacatcacaatccctacccttgaaattcaaacctggggatagagctccagaaatgcaaagtaaggaccctagtaaggtctgaaaaccagttggggctccaggaccaaacaacaggactggatgataagctgtactcagctcaacagccagggatggagaagacctttttttctcttctctctttctctttctttctctctgtctctctttcttttttgagacagagtcttgctctgttgcccaggctggagtgtaatggcgcgatctctgggctcactgcaacctctgcctcccaggttcaagcgattctcctgcctcagcctcccaagtagctgggattacaggcgcatgccaccaggcccagctaatttttgtatttttagtagagatggggtttctccatgttggccaggcttgtcttgaactcttggcctcaagtgatctgaccacctcagcctcccaaaatgctgggattacaggcgtgagccaccgcacctggcgagaaggccttcttagactacagacataagctttggagggaggtggtacatactacctgtgtaatgcataaggctatgaattaccaaagacatttgggaaaatatatccatatcaattgctgaaataggctgtttgatccatgactgaacggaaatataaggaagtatctagatacttctagatggcctctcaaactccctttaatatctttttctcttttttttttgcacaacagatcctttttgaaaaatggaggaaaagttatgaatcctcttaaaaaattcacatataacacacaaaatatagttcataattttagggagtccatgaatttctgaaacgcatccataaactttaagtattgctctcacctgtctttcctcccaagaggcaatccaatcctcagtcctatttcacactatagtaagtttactggattgtttggaagcagcttctggaagcaggtggatttgggagatcagcagttgttactacattcttcttactttgcaaggtatcaaggtgtagatgatgtaagagaagatgccacattctggatctttcagaaagctgttacggatactacaaataatggtctctgaccacagaaataggtgaatcattcagcaaatatttactgggcgcctgatatgtacaggcactatgctagggactgagctcaccgaaataaagaagacaccatttctgtcattgatgagtagcttcacatgtaaaagcatggatgcagttactggtggccttaaaaacaaagtcacctaagtttgaggcattctggggagatggaaagggctctgagctggcaatttgatttttggtttctctacatcccagacttatgagcttggcaagtcactcaatctcagttgcttcgcctatcgaatggggttaataggcagacgagaattgttgcctatcttcaaaaagataacctctgtaaaaatgcaaataaatgagaaaacacaaacgcagggctgatctaaagtgatagttggcagagccacccactgagggaagagttcagctccccaggtctacacagcctgtgcagcgcctcgcaagaggcgggatccgctcagtaagctttcccggatggcacaggttccgcttccgcaggcagatattcgctgtaggtgtgagcgccaggcgtcagactacagctactgccggggcctccttggcgcgcatgctcctgcggagaggcggagaccggaagggcgggggcgtggcgaggtaccgcagaccgccggctcgatagctcagcggccgggcttgggaggcgggggcgcgcccgcgctcgttcgcgcggccggctgcgtacagtagtgacggccgcgcgggagcggtcacatgaccgtagcggcagcctgtacagtaagaacccaatatggcagcggcggtagcagtggcaacggcagcaagaggaccggccgccccatagacccccccgcgcaccacccccgccgcttcctctgcttgggtgcccccccggtctgacttcccttttctcccacctttc

SEQ ID NO: 23033 - DNA, 2300 bp, Homo sapien
gctgccgctgctccgccccatccccttctgtttttctctctcattctccagtggcggcggcggggaaggcggaggcagaggcagcagcagccgcgctggctgcaatgaatgatcccccagcttggggggaggactccaggtgagcctctgccctcgggaggcccgggacccccggccgcccacgaccggcagcccacgctatggatccctagaggaaggaggagaagacagctcgccgcccacccccatcccattttcctcttcctttatctcattgttgccgaagctgtttacggcagcgctccctctgctcctgcatggggcgggctccgggcacggctgctcggcaggcgctgctcccgcggcgactgggggattctgcctaattcacctcccagccggtgcagagaggaccggagagcggtggaggcccggactgcagcagcgttggggccacctcccagcgtccccaccctaggaggctgcatgcggattgaagagctgcgcctgggggctgggccggccccgctgatcccgacctagcgagcaggatagcaggaccgcccaggctgcggaggggctcgggggcaggaaggtcagagcagcaagatggccagtaagaccaaggccagcgaggccctcaaggtggtggcccggtgccgccccctcagcaggaaggaggaggctgctggtcacgagcagatcctgaccatggacgtgaaactgggccaggtgaccctgcggaacccccgcgccgccccgggggagctgcccaagaccttcacctttgacgccgtgtatgatgccagctccaagcaggccgacctgtatgacgaaaccgtgaggcccctgatagactccgtgctccagggtttcaatggcacggtgtttgcctatggccagacgggcactggcaagacctataccatgcaggggacctgggtggagcccgagctgcgcggggtcatcccgaatgcctttgagcacatcttcacccacatctcccgctcccagaaccaacagtacctggtccgggcctcctatttggagatctaccaggaagagattcgagacctgctctccaaggagccgggcaagaggctagagctgaaagagaaccccgagactggcgtctacatcaaggacctctcctccttcgtcaccaagaatgtcaaggagattgagcatgtgatgaacctggggaaccagacccgggctgtgggcagcacccacatgaatgaggtcagctcccgctcccatgccatcttcatcatcactgtggagtgcagcgaacgtggctctgatggccaggaccacatccgagtgggcaagctcaacctcgtggacctggctggcagcgagaggcagaacaaggcaggccccaacacagcgggaggggcagccacaccatcctcgggtggcggtggtggcggtggaggcagtggtggtggtgctggtggagagaggcctaaggaagcctccaaaatcaacctctcattatctgccctgggcaacgtgattgctgccctggcgggcaacaggagcacccacattccctaccgggactccaagctgacccggctgctccaggactccctgggggggaatgccaagaccatcatggtagccacactggggccagcttctcacagctacgatgagagcctctccaccttgcgctttgccaaccgagccaagaacatcaagaacaagccccaggtgaacgaggaccccaaggacacactgctgcgggaattccaagaggagattgcccgcctgaaggcccagctggagaagagggggatgctggggaagcggccccggaggaagagcagccgcaggaagaaggccgtgtccgccccgcctgggtaccctgagggcccagtgattgaggcctgggtggcagaagaggaggatgacaacaacaacaaccaccgcccgccccagcccatcctggagtcagccttggagaagaacatggagaattacctgcaggaacagaaggagcggctggaggaggagaaggcagccatccaggatgaccgcagcctggtgagcgaggagaagcagaagctgctggaggagaaggagaagatgctggaggacctgcggcgggaacagcaggccacagagctgcttgcggccaagtacaaggtaagggccccagaggagctgggcactcgagatgtccccgcaggggatcccggcaaggaggctcttctttgagagtctgtgacctggcctgaagtggaggttctccctcagcaccgcacactgccctcctgccaaatgtgccccca

SEQ ID NO: 23034 - DNA, 2300 bp, Homo sapien
cacccgcctcggcctcccaaagtgctgggattataggcgtgagccaccgcgcctggcctaggatcacacatcttgtaagcaacgcgattccaatctccctctcacacaagaggatctgggtaagtcccctgccaggtggtgacatcaagtggggagaacagggtgagaatcccttttatccagcgctgtagtgtcagatacattagcctaagcagagaaagggtattcaaaacccaaagccgaatgcaaccagaaaatagttgaagaactaaaggctccatccagaaatcatgttgtgagagccaagaggggttagtctacggagccaaaaccccaccccgtaattggtccaaaagccatgttaatcataagcagtggagcttaatcaaggagagggtggagggaggccagggagcttcagaagcgggcaagctctcagctaagtctcaagcctctagtccagctcacgctaaagttctgggatggggaagagttaaggaggtaaattttgttgagttggaaaactaaacaattgggtcctctagaggataacatgcttggaaatgttttgtggaaagactcttctggtgcctctgtgaagaagggtctccaggtttcagataacagcacctctcaatctggttctcatatggagagtaaagacagacagcttgggctcagtccacagactcaactgccctctgcagagtggaccatggataggactctggcttggtccttggccttgtggaattacactttatttgtatcctacaggaaaaaaaaaaaagattaagactcccatagaggaacaccaagcacagacatggtctatccaggatactcaaggaagcaggagctgtcaggcaatccaagccagggcaggacttctcatggtacagtacttcatgattcattatttcatttgagcctcccaaccattccatgaagtagttgttaattatttctttcccgcctcgaatttttaaaaaaataaatgaggaaactaaggctggagcaaggggagtgactgctcaaagccactccattggatggccatcagaactggaacttcaatccaggttttgtcttaggtaaattctgtgcctctttcactatagaaaaaaaaaaattgctaagggaaggcttcgtggaggaggaggtgcttgaactgcccaagtggcagggcactaagtgccgaagggtgaccaggcctctgggcaaaagcacaaagatgctgcacagcaaagccagttaaagaaacaaaacacggttccgggaatgtgcactgcttgaggacaggaaggacccagatcctagaatggggcctggggctcagcaggcgctggataactgaagaaatggctgtctggaacacagatttttctatagaggagtagtggcggtgaggctgcgaaggcggaagatggagaggctttcacacaaggaaggcggtggaggaggagcgagggggctcccgggtgcttgtgcggacataaggtgcgagagaatcagctggaaggtgggctccagcagagagaagaggaaggccagaagtagaccgggacagggggaggaaaggacagagtcaaggaacatttaggagttcggttcccggaggcctggcgacaccctgacggggaggggtgacgcgcacccatttgcaggcagaaaggcaggagcaggggggtgtccgaggatggtggctcggagggaccaggcataggtggtgcaagctcagcagtcactcaaggggtggcatgcggatgagggaggcgcctcccggactgggggaccgggaaaggcattagcaacctgccagaacccggttaacaaaggcaggactacaattcccggcatgctcgggctcggtggggtgacggcgggcggtggctgcgctgcacccgactggtgggcgcaggacctgggtcggcaccggagcctgtcatcccggagcggtcggcgggggtgcagagacggcgatgcgcccctgtcccccgcacccgggccgctccgggctcgcgcctcccgccccgcggccccgccccctgccccaccccagtcgggaggcttagctggggccgcagcgcggcggcaacatcactctcgctgccgctgctccgccccatccccttctgtttttctctctcattctccagtggcggcggcggggaaggcggaggcagaggcagcagcagccgcgctggctgcaatgaatgatcccccagcttggggggaggactccaggtgagcctctgccctcgggaggcccgggacccccggccgcccacgaccggcag

SEQ ID NO: 23035 - DNA, 2300 bp, Homo sapien
ccagcactttgggaggctgaggcggatggatcatctgaggtcaggagttcaagaccagcctggccaacatggtgaaaccccgtctctactaaaaatataaaaattagccaggcttggtggcacacgcctgtaatcccagctactaaggaggctgaggcaggagaatcacttgaacccggaagggctgcagtaagccgagattgtgccactgcactccagcatgggtggtagagtgagagtctgtctcaaaaaaaaaaaatgtttaagtgacaagactaggagcaattggagaaaacaactgaagagaaagctgtattagtgaagacaagtatcttcggtaaggacgctttaggggtggttgagaagaaaggaaaaatgtaagacagaaatataagacagaaatgtaagacggaattgcctgaaagtctaactttaattacatatcaaatacacattttggtgatttggcgatcttggggtggtgtgtgtgaaaatgtagtttttacttctctatccctgtttcttgttttccacatacttcagcgttttccactttatcaggttgaaccagctcaccaggttcaactcctgtgccatcacacctaggtgtgctttgagggatggatgtccctgagaatggaaggtcagcagcatgcatactgcaactacagaagggtaggagagaaaaagggtggcgtaaacaggactgatggggagagagaacagaaggtaaagcaaatgcaaagaaaatgcgagggcccgggcgcgggggctaacgcctgtaatcccagcactttgggaggccggggcgggcgggtcacctgtcaggtgttcgacaccagcctgactaacagggtgaaaccccgtctctactaaatacaaaaaattagccgggcgtggtagcacatgcctgtaatcccagctacttgggaggccgaggcaggagaatcacttgaacccaggtggtggaggttgcagtgagcagagattgtgccattgcactctagcctgggcaacaagagcgaaactccatctcaaaaaaaaaaaaaaaaagaaagaaaagaaaaaaagaaaaagaaaatgcgaggaaacgagcgaaactccatctcaaaaaaaaaaaaaaaaaaaagaaagaaaagaaaaaaagaaaaagaaaatgcgaggaagcaggctgtgtcggactgggagtaggcttgaccacctttcaattttcaacccagtggtacgacgctggcggcaggcagaggccccacctcctctgcagagcgctctcgggttctcccggattcctgaaggacggcaaaggcctgaagcaggttctctgagcaccgcacagaaccctccacttcgcagggaggttcttcctgcgcccaggtgttcctcaaccttcctctcctcgcccaggaagaggttgtgaggattacctcatcccaacccgagcggcgtggccagcttttccatctcaaactcttgctcttgaagtcaatccggatggagcgctcatgtttccccgtcagggctggccctggagagggggcacgccgggaggcgtctcgttctagcaaagaggctattaaatgacccagggcgcggctttttctcgcgtttacgagctccacctacacgggaacacatggccacccaagcccgtcgctgcgccaagacctccagctcaacacacccgacaagcgctgtgcagagaaaccgcagcgcagtccagcgggagaccccgggaggggaaggaggtgctgggctctgtaagggtgtcccggggagcggggagcgggaggcgggaggcgggggtcggagggggggcgctgcgcctgcgcagtcgctaggtagcgtctcccccggggcgtgctcgtaacgccgcgcaccctatcaggcggccacagggagcgcgcccgcggcctcgccctttctcgcccctcccttctcccctctgggtccagcctcagactgaggcttggagacaggagcattccactcgccacttcggcgcgcccccatgccctcttgtgcgcgtgcgcagaggcggaccgcaaggctagggcgtgagggaagggcgggcgtacgcccttgcgtgcgtctcaggcagcgcgcacgccggcgtgagagggcacggggaaaaggtggctctggccggggtggctcggtttcctggggctatgtaactgagctcgtcgacttaggggtccttcttcgctgccctcgccgcgtgctagcagggagtttccgctcgggagagagactgtcctcacgcccgctgcgcctcctcgacggcagagcaggcttgctcg

SEQ ID NO: 23036 - DNA, 2300 bp, Homo sapien
gagcagctcctccctggccagggtgagcgggctgggtttgggccaggctggggaagggcctcggtcaagttggtaggtgggggtcctgccttctggtcgcagcgctgcctctttcttgccgtgtgaccttagagcaaagcatttctgctcttggagtctcagttttttcctctgcagcagttgaggattgaaccactgatctaaaacgtctcttctcgctgagaagtggtgttcatcttgtcggctgccatttctcatggggttcgagccataagatgccaggtgtcagtcacctcagaagagagggttttgtttgtatttggtggggttcttccgggggtaccgaggctgaggactgatggatcgaggcgggtggatcacttgagttcggagttcgagaccagcctggccaacatggcgaaaccctgtctctactaaaaatacaaaaattagccaggtgaaaaattagccgggcatggtggtgcttgtctgtaatcccagctacatatgtaattccagctactcaggaagctgaggcaggagaattgcttgaacctgcggggcggaggttgcagtgagccgagatcgtgccactacactcccgtgagggagcagcctagggactaaggcccgctggctccgcgagatcagccaggcccgcatcatcccccaattacctgcagagggcgccgcagacacagagagggcgaggccgaggccgaggccatctaagcttctgggaagggggtcccaaagggaggccccgagctggagtccagggggcttggaaggaagaggtgaggacagcagaaaaggaaacgcaaattaaaagaagggaacgaaggctgggcgcggtggcttacgcctgtaagtccagcactttgggaggccgagtcgggaggatcgcttgaggtcaggagttcaagaccagcctggccaacatggtgaaacgccgtctctactaaaaatacaaaaaaattagccaggagtggtggcaggtgcctgtcatcccagctactccgcaggctgaggtgggaggatcgcttgagcccgggaggtgggggttgcagtgagccgagatcgcgccactgcactccaggctgggtgatagagtgagacccagtctcaaaaaaagagaaggaaaagagagaagggatggtggcggtgggggaggaaggcggttcttgtaatgatccgagaggagaccgcagcaccggttacgccctcgaacctcggcctcctcatctgcagaatggacgcagtccacaccgcgtgctgtggaagggttggagcgccggtttacatgacacagggctatcggctaagggggcgctgggaacgtggaaggtgctctatggtggggcgctgtagggtgctcttgggcagtagggttggagtcaaatctgggttgaagtccaacctaggttgaagtcctggctgccacctgacctctgcccctcagtttgctcatcagtaaaatggggttaaggaggctgcctcgcccagctccacggagccggaggtgatgaaggtcctggaagagcagaattcagaacccgagctttgggcggcggagcaggacagggcgcgggtgggcgcggcctccgggaggccagcacgagggggagcggcggggcccggacacacccagccagaaggaggaggccgaccccgcgccgactccgcagatgccgctcgggacttcgttgtccctccaggcgcccgccctggggtcctccatcacccgccgtcacctgggcgcggggaagctggcgggaggggaggcggggcttggcggcagcggcgggtgggggccggggagcgggggcaggggcgggcggacggagcgcggggctggggacccggggtcccagaagggggcgcggggacggggtccgaggagagggggccggggcggggcagggcggacagggctgggggcggaggtccgggggtgggtccggcggcgagtccgggtcggggcggacagagcagggggcgggggtccgggaggagggggccggggtccgggaggagggggcggggcccgggggcggggccggggtcggcgccctgcggggaggccggccacgtgacgcccgcggcccggcggggctgccaggcggcgagcgccgcggcggccccgggaggtggcggcgggcgcgagagcctgggccgcgcgggactgaccgtcggggccccgggacggcggccccggggcgcccatgccatggagaagctggcggccgggctggccggcctgcgctggagcatgggcgccttcccgctcgacctcatcg

SEQ ID NO: 23037 - DNA, 2300 bp, Homo sapien
gagaaaaagaaaggttgggaaaatccctcactgaaaaaaacgtgactttagggacttcattttggttgtgtcattaaaactctgggaacccaaggcacagtctcccagggaaccgtgggtccgggggctcctagctcttcctcccatctctctggcgcccctgcgtgcctgtgtacggtggtggtcttggaggggtggtggtcttggggggcgcggccccagccccatcttttcgcggggctgcttctgtccgcccgcacgggggaggggaggaggaggcggaggcggaggcagaggcccctaggagggcgaaggccggcgggttaacgaggaggcgctgagtgcacggctgggctccacgctgatttctcctaatgaattaataatggcgctcgggcgggcgggggtggccggctgcggaccgcggagagagccgaggggaaggccgtggagggaggaggacggcgactcgcgccgggtggggctgaaggcactgcggggtgactcggtctccaggctgcggcgctctgctccgggagtcagggagacctggcctggccccgtactgtcccccgtcccagcccccgcccctggccctgcgggaggggccaggcgtcttccctgagcatggtgccacttccccagtgttggccttgtttcctgctcagcatttggcagatgcgcctctggcccaactaggatgtttccattttacagacgggaaatccgaagcccagagagattaaataatttgcccaaggtcacacagctggctagtggcagggtgggattcagccagatttgtcgcactccaaagcctgagcttttacccacgttctttactgagtgtgtgctgtggggcaggcatggagaagggtggtcagcaatcccctgccacagccctcaggtgcttggggctggaagggaggagcgaggcagccatgtgctctgagggcaaggacaaggaggaggggcaggtcaggatggagcaggtccttagagccgtgggggacctcaggttccatacagggggaggcaggagaggaagccgcccctgggctggcggggaggaaaaggcttccagggtccagagcatcactccctggagggctcccttccttcctcccgcagtaatgaccggcgctgggcttcaggctgccgcggagggggatggtgctggatgccatggttacatcgatctttcctgccacatcctcccccagctccagccctgacttggctccaagtcgccccacagggggcagtgggcattgctccctgcctggctacttgtggttggggcaggggcgggggtgggggttgtgtgtggacttgggggaggaggcgggagtgaggggaggaggctactcagtgcctgcagttcctgcttcccaagtcctagacccctgcttcttgcctgcccccctccacatttttcctctgttgccctctagggctgtggcacttcagaggcctcttcccaggagggtcccagggcggggagggcaggcctgggggctcccccgccagcgttctcctagtcatttccccttgttctgggctctcatttctctccctgctccgtgatgatgcttcaggccctgacctctgctcctctaaccctgcaccatgggtgtcttcatctgggtctctcgctgggtttaggggtctccaggaacccccagcactgaacacacaattgtgtgtgtgttcatgctaggagcacagtgtgggcatttttctgggatgaacatccccaaagggtcaagccccctgctcttcctcttccctgagccatctcacttgcctcacagccgaggctgccacctgtgggctggtgaccttcagtctatttcactggccagtctatttcactggtggcacccaccctaggagcaccacctgaaggcccctttcttggcctctccaggatctgccttggccccacaacatgtttcttctgggttcccagttttggttaacagctctgccatctccttttcttttcttttcttttttgagacagagtctcgctctgttgcccaggctggagagcagtggtgtgatctcagctcactgcaacctctgccttccaggttcaagcgattcccctgcctcagcctcccaagtagctgggactacaggtgtgtgccaccacacccagagagttttttgtatttttagtagagatggggtttcaccatgttggccaggctggtctcaaactgctgacctcaagtgatctgcccactttggcctcccaaagtgctgggttacaagcgtgagccaccgtgcctggc

SEQ ID NO: 23038 - DNA, 2300 bp, Homo sapien
ctgttcaggtatggtggtcacaaagaaaatggaagacagcaccatggcacgtgtatacctatgtaacaaacctgcacatgtatcccaggacttaaagtattaaaaaaaaaaaaaaatggaagaggggctgggaagctttgggctgtcagagaaagtcaatttccaggcattagccactcaaacggacttacacttcagacttaggaggcagcttcagactcgctaaaatactatccatgtcagaattcaaatccttcctcttcacaccctcctgatagatgtaaaagcccttcccagatttacgacctaaaacaggcaagaaaagggagtgttactatttgttctcagggagggagtgttactatttgttctcagaaccctggcctggccaggcgtggtggctcacgcctgtaatcccagcactttgggaggccgaggcggaggatcatttgaggtcaggagtttgagaccagcctggccaacatggtgaaaccccatctctactaaaaatacaaaaattagctgggcgaagcaggaggatcgcttgaacccgggaggtggagacgagattatgccactgcactccagcctgggcaacagtgtgagactctgtctcaaaaaaaaacaaaaaacaaacaaaaaagaccctgacctgagaattcttgtctctgttggtctattataaagctctggcctcttctgaattcctgaatttgtatgtctagctaaccctagcaaattagtctttgtcagaagagtgggcagagaaggaaagaagatcttgtgacccggagcttgggcatctgtgtacatggatgagaaaggccacctgggtgagttttaacatccccatatgcagcaccgggtcctagaacacccaggttgtaatgctgattttgctgttttgccaagacagaaagtcacttctctgtgggcctcaactgtatactgtgtatggtgagcttatacattctcctcacaggtggccagacagcatggtaaagcccggatgcagagcttgcttctgcactattgcagatttcatctctgggggataaaaatgcttgtccatctggcataacttggaccaggtgatgctagagccccagaagggtagaactctgccttttgtccataatctatagtcctagcccttagaaggttcacatgacatctttttttttttttttttttgagaaggggcctcgccatgttgcccaggctggcctcacacttctgggctcaagcgatcctcccacctcagcctcctaagcagctaagaccataagtggttgctaccgcacctgactcataaaatcatttttgaaatcgccagtgataagggctctgtgtttagaaaactttcttccacgagggcttctgtaactctttggtctcaggaactgcttagaactttgtaactaatggtgctagttatgtttccttgaggctactcacctaggaagcccttggacaccatctgtgtcagcagttctgggtttccacctccaaaccgctccccaaagactttgcccagatcttccgccacatgtttcgctacatccacaccaacttcatccaccagtgtggcggcacccacaggaaagccaaagcttgtggtcagggaatccagcttcttcgggtcaactccttcctgaacaggaagcgatgcagggacctcaggggaagggcagcccaaatccccccaaagggctccctgtactggctccaaacactgccttgtgtaaaacccacttctgagtgtcacctgaccaggcccaggactggtgctatttcattcagggaagcacaaagaagtttggggccacaagtggaaagtctgagccttctctaatctacagcactttaaggacgtttagagatgactaaattcttcattttcttcttgtttgcatttctgaatctcaataataaggagattgcatgacagacggctgagtgtgtcatgaccaacagaagaaacatcatcaaagaggagcactcagagccctgtgatccccaagtctgggtaagtgcccagcgaggaggatccctctcctttcctgccagaatgacctcgatggctactggagaggtctgtgtgctgtggaaacagatgcagcaccagttgaaccaagcgggccctgttctggatggtccctgcctcagagaggtgcagaaacagcatagaagacatgctggggggtggggtgcctttagcttgctggaacagtgaggaggctgtggggcagagggaaagctctgcccctttcagtgcagtataagcccaacttccgact

SEQ ID NO: 23039 - DNA, 2300 bp, Homo sapien
gtgctgtggcgcgatctcggctcactgcaagctccgcctcccgggctcacgccattctcctgcctcagcctcccgagtagctgggactacaggcgcccaccaacacgtccggctaatttcttgtatttttagtagagacggggtttcaccgtgttagccaggatggtctcgatctcccgacctcgtgatccgcccgcctgggcctcccaaagtgctgggattacaggcgtgagccaccgcacccggcccaaacaatgtttattaattgctctgtcatgctacttctcatgcaaaggaaatccatcatctcaatcattcattttgcagatgaggaaaataaagcccatttagtttaaggcatttgtccaaagtaacacagctagtgactagaaccacgtgccctggctaccacttccgagtgacatcagctgccgatccataagaaataccttcaaaccaatgcaggggtaagataaaaattacacgttacttttcaaaagtgttgtgaaaataggggaaaaaaaccaccaaacctgtaaggaaacataaccgaaggctaaccgtaggtaagcatatgagtagtaagacaatgggtgattcgtttttttttcatctctttcctcaatccttacagcatttcaatgttctataatgtgcttatgttataattggcaaatacatgctacagttttgtggagactaaaaacagctgttgaaaaaagggagcagaaaaatattcaatcattaaaaaaatccccttacagtaagggatttcagctacttgtctaaaaaaagcatactacttcagcggttccggaagagggaagagaggtaattcatattacaaattaaattaaaagttaaaatttctagttaagtaacttattaagcacaacatgcaataaaacgttgtccacttttgactttacagatttgggatggaaagaaaatgcaacgtttcctacaaccacccactttaaccctttcactgccagtttgaaaaggaaaaacactagctaatacaggctgactgggaatcatcagattacaaatcgttctcagaacgatctaacattttattgcttaaggtagaggtattagcgtatttttaaagtgtgtcttccagtaagttgcagaacttcccgctgaaattcaaaatactatacgttcacactgacattactgaaactgcaagagttgagctccctacttgattggggtagtaagcacaaaaatggttttgagggaacggagcagggaggggcagtgatctgcaaggctgattaatcccatacaagacagcgcttgttgcggggtaaggtgctgtttttaagacagctcttgttgcggggcaaggtgctgtggagccacaaagatgcgacagaatggatcccgattctcctggaactccggatcaagaaaatatgaggggcgtgagcccagaagtgcgacgcaagagacccgcggaaaggtgacagaacgagtggcaccagactcagaaagttggggagttaggaagcctgaaatcgccgcaggagtcgtgagaggggaagtgacagtctcttcagaaggtcacgggaaaccgggtcccagggcagtatccccacagagggctgcgtctccgggctggggcaggcggcagcgaaagggagacgcggctccggggccaccccagtcccggcaggagttctgcccggaggtctgggatgccctcggccaggcctcacctcgggagcggaggatcctgaaggcagaaaagcggctgaggatgccaatcgcccggcaggccaccatcttgagctgaagaggacagcagtggagagcgcctctaacgggtgcggccgagcggaggacttttctcccgtagcctggcagccaggcgcctggagcactgcctgactaaaacccagatgccgagtggccgccggccccttagccctgcccctcgctcctggctaacatggccgaaaggtcgtattctccgggggaggacgggggcccggagaggagggggtggagtgcctggttttccagtcaggcggccggagggcagccctcaagaacggccctgaccgcccgcggggtgaggggccctttctgggcaggacccgccccttggtcccgcagagccttggtacttggacctgaaccttgctccgagagggagtcctcgcggacgtcagccaaggtgagacggcgagccctcagctctccgcccgggctttcccaaaggcgagattccacttccttccccgcaactgtcgccggtgcccccggccccctcccctccctgggaaagt

SEQ ID NO: 23040 - DNA, 2300 bp, Homo sapien
gtgatctaaatcagggattggcaaactacaacacacgggcctctagctaaaaatagtttttcacatttttaaagagttgtaaggtcgggcgtggtggctcacacttgtaatcccagcactttggggggcagaggtgggcgaatcacctaaggtcaggagttcgggaccaggctggctaacatggtgaaaccccgtctctactaaaaatacaaaaaattagcccggcgtggtggtgtgcgcttgtaatcccagctactcgggagcctgaggcaggagaatcacttgaacccgggaggaggctgcagtgagccaagatcgcgccactgcactccagcctggacaacaagagcaaaactgtctcaaaaaaaaaaaaaagttgtaaacaaaacaaaacaaaagaaacaatatataacagagaccaaagtgatcctgcaaatcctgaactatttactgtctggacctttaacaacaacaacaaaatttaccacttctgacctaaataataagtgttacacgcagttaggtgttgaagaaagcattacatgggcaggaggcaggctctgaactgtaaaaaccttgtaagattatcaagaatcctttttgcaatttattcagaagtggtcaggtcatccagtttctgcttaaagtgctcacatgatgagcactcactatgcaacttgagctttaaacagaaacctctctactctgtctctatactcatttcagtcttaacttcgatgccccttgtttcctgtcctgcagagctgtcagtctggcgagtagtgagactcagacttatgtctgaatgctaggtctgtcacagactagaaaatgtatatattctgagcttcccaaacttcatctagaaaatgcaaatgataataatttggggaatgtgaggactaaacaaaaaggtatgaaggtgaccagagcacagcaggctctcaatgtgacttccttttgaaatcaatcactttattccaggactccagcccatcattccagcacaaaaacagctaccatgcaatgaagaactcttcactaggagttagtagacttaggctccagtcttatttctactacatatggccatgggtaaaatcactctctctgattcgtaggcagtttcttcaccgcttaagtgagctgaggtgtgaacgaccagatagataatcatccagatcggaaaacccccgagagcgcaggattatctggataacggagccggatggaggattgtctccgttcctcccacactcaagccccgaaaggtcacctgacctagtcttattctttacagcagaaatcgggcaaacccatggcgccgtccacaatctctatagccgccgacctgggtacaggggaagcaggcgaaacaacacacacttctacgcagaccagggttacattaaggccgacgcccacacacgcccacacacacccacacacacacacacacccccacacccccagacttcgttaacttgtgatgataaattagggcgcaggtgacactactgtcccgaacttcagctggaacgctagtccaagtcactgtcctaactgcagctagcactgccgaccttgtccgaggagtttccttccgctccctcaactcccactttcccagggaggggagggggccgggggcaccggcgacagttgcggggaaggaagtggaatctcgcctttgggaaagcccgggcggagagctgagggctcgccgtctcaccttggctgacgtccgcgaggactccctctcggagcaaggttcaggtccaagtaccaaggctctgcgggaccaaggggcgggtcctgcccagaaagggcccctcaccccgcgggcggtcagggccgttcttgagggctgccctccggccgcctgactggaaaaccaggcactccaccccctcctctccgggcccccgtcctcccccggagaatacgacctttcggccatgttagccaggagcgaggggcagggctaaggggccggcggccactcggcatctgggttttagtcaggcagtgctccaggcgcctggctgccaggctacgggagaaaagtcctccgctcggccgcacccgttagaggcgctctccactgctgtcctcttcagctcaagatggtggcctgccgggcgattggcatcctcagccgcttttctgccttcaggatcctccgctcccgaggtgaggcctggccgagggcatcccagacctccgggcagaactcctgccgggactggggtggccccggagccgcgtctccctttcgctgccgcctgccccagcccgga

SEQ ID NO: 23041 - DNA, 2300 bp, Homo sapien
gaacctgggcacttggccgcacagaaacaatggcgagcctctagcccaaacaggaatggcactgggtgcctcgctggatcagaaacgcagcggacaccctgccagatccgaggggtggaagtcaacagcgggtctgcgacagtggcgaacagcgggtctgtgacagtggcgaacagcagtggtggaaggtgagcaaaagctcagctcgagccagaacaaacatggaccagaagagtgtgcagttgcaagatttaataaagtgaaaacagagctgctatacaagggtaggggatccaaagggggttgcccctccttgctcaaatgcctggggtttatatcccaatcattgtcgctccccctgtgctctcagatgatagatgatttgagtatttctttacctcctgcttttaacctaattgatattttagtgagccttctttaccacctgattggtcgagtgtgagctgagttacaagccccgtgtttaaaggtgggtgcagtcaccttccccagctaggcttaggaattcttagtcggcctaggaaatccagctagtcctgcctctcaccatgatgaaaccctctcaccatgatgaaaccctagcttgaacatcatgtcccatgatgaaaccctagcttgaaaatcccctcgaacttggaaatcctgagtgggcaccaattacttactgcacggtcacttcactttcattttcaagggttctgtcgtgatccattgcagcatgtctcacacggggcaccacctgccgggtctgtcccacagaccctggctgactgacagatgaaatgagtactcagacacaggtatgcagtgtaagagcagctaggggtctgcctggctctagtggccaaagtgcagcagccctgagaagctggagctccttgcttttattcagtgtaggcacagtgatgaaagcctggagcaaacacaatctgtgggtaattaacgtttatttctccccttccaggaacgtcttgcatggatgatcaaagatcagctcctggtcaacataaataagctagtttaagatacgttcccctacactcccttgtacctactccttgccctctgcctcagggttatagaacagctgccttcagctattctcccccagggctctgcagaaccttctgaccttttagaaggcctgcatctttccctatagtttctcccaccactccgactgatctcctacatataataatgaatattttttaaatgtgccttgtagagttagtttaattactttataatatgctaaattatttggaatggccagtgtgccctagaggttgcccagaggtttagaggcaggaatcatcagtaactgtagttatcagggaaggctttactaggaggtagaatgtgaacgaggcccaagagacaggtaagaattcgatgggcaaaaaaggggccaggcagatgggaggtccataagtaaaggcaaggaggctgacctgagcaaagctgtaaaggactgggggctggctcatcttgttctattttgagaagtagtggaaaatacttaaggtggaaccgagtaaaacaagctatttgttagaagagttaagaatttgaattttatctgaaagtatataaaaggaatatatggtcagttttttctggttttttttttttttttttgaggcagagtcttgctctgtcacccaggctggagtgcagtggcatgatctcagcttacggcaacctccacctcctgtgttcaagccattctcctgcctcagcctccccagtagctgggattataggagcgtaccaccgtgcccagctaatttttgtatttttagtagagacggggtttcaccatgttggccaggctggtcttgaactcctgacctcaaatgatctgcctgcctcagcctcccaaagcggtgagattacagcgtgagccagcacgcctggcttggttagtttttaaaatgtggaatgacatgatggtgtaccattcgacctgtcacctgcaaggtcagtcatgaatagtgtgcaaatcttcaaatttagtgacctgttttctgtctgctcaaataaggattttccttgaggaccgatgcatttaaccatcttgttctccttgacactctcctgcctttgatcttgtgtactgttctctcttgattctcctactacctctcaagttactgtttgtctcacatattccctcagccttctcattgtagggacatcacaaagctaagggttttttggtgtagtaatggaccctcaagttaaggatgagaaggtttgtgtgtactacagctgga

SEQ ID NO: 23042 - DNA, 2300 bp, Homo sapien
ggtggaaatgcaatggggctatgtttctaccataggtacttcgtactttgtgtgtgtgtttaaatcaactttttttgattaaaaaaaaagtctatgattagaaaaactatatatgaaacagcacacagacccatccagatccttaatccctttctccagaagcaacaactattgtcaaatttctgatgtattcttccagaaatattctagggatataaaagtacaagcatcttaaatagattccttttgtttacatacatgggagcataatatatataacatatatttaaacttcactacatatattggggatcactccaaaataaagctacttcacttttcccccacaactttaagtaatgtgttgcttggaaatcccaagatttatataagctctccctttttaatagacattttgattgtttaatcaactcatttgctatcacaaacaattctgccttgaatattcttatgtacatgtttttacacacatgtacaactatacttttaatacttaatataattaaaattttctcttttgataattagcaggtgagaaatagtatcttcttgtttgatttgtatttctgatgcgtaaagttggaggtttgtatatgtttatcaaactacttcttttttatttttatttttttaagatggagtttcactcttgttgcccaggctggagtgcaatggtgcaatttcagctcactgcaacctccgcctcacaggttcaagcagttctcctgcctcagcctgctaagtagctgagattacagggatgcgccaccacgcctggctaattttgtatttttagttgagacagggtttcaccatgttgggcaggctggtctcgaactcctgacctcaggtgatccactcacctcggcctcccaaagggttgggattacaggtgtgagccaccgtgcacgcccattatcaaactatttctattccttcttcagtgaattgcctattcccatcttttgcctattttctatcttattgatatgaaaactagaagaaacttcctttgttgagaaaattattcttcttaggccaaacttaaaagtttttagacagtcaaatttatttcctttttggcttctcagttttatgtatttaaaaaacttaaatacataaaaaaccagtattatcaatttaaaaaaccttccgcagtttaaaattattttatgaaataacttgataattttttctagtattctctcagattcttttttacatttaagactctaggccagtgcagtggtgcacatgtgtaatctcagctacttgggaggctaagttgggaggatagcttgagcccaagagtttgaggctattgtgagctatgatcatgagctttgatcatgctactgcactctagcccgggcaacagagggagaccttgtttctaaaagaaagaaaaagaacgagagtgagagcaagcgagagagagagaaagaaggaaagagagagagaaaggaaggaaggaaagagtgaggaaagagaaagaaagaaacaaagaaagaaaggaaggaaggaaggaaggaaggaaggaaggaaggaaggaaggaaggaagggagggagggagggagggagagaaagaagggaaggaagggagggagggaggattctagtctatctggaaattattttagagtaaaaatcagctctcatatttttatcttttctttatttttcatttgtaaccttgactgtttgatcagtgattcagcctttgaggagttcagaacaatccagatttcccaggtccttgggaacatgactgaacctggcttatagacatgttgctggttgtgacttcgaacccctaagcctctcctgctctcggagctttgggtccagagcctaagaagagcctgggcaccattctcactggggcatgtgggctccaggtggcccccacagtgacctggattcccatttcactcagagtcacaggctgtagcgcttcctctgtaaattcagccctggctccctcccctcttccctcccatcccatctgcacactgccctgccagctcttccttgcggaaatttgcatcgtgggcttgtagggactgcttcactgagccatggtctgttcggctgccccactgctgctcctggccacaactcttcccctgctggggtcaccagttgcccaagcatcccaacctgtaagtgagactggggtgagacccagggaaggtctgcagaggcgacaatggggacccctgattgggagagacaaagcatggaatgaaaggataggtagtggggaaagggctgaggg

SEQ ID NO: 23043 - DNA, 2300 bp, Homo sapien
catgtcattttgagtttgcttatatctgaactgataaacaataagtgcagtttataaactattattagcttgcactgaagtcacattttatggctttccacaattaactaagttttacaagtatgaagggtttttttggttttgtttttgagacggagtcttgctctgtcgcccaggctggagcgcagtgacacaatctcggttcaccgtaaccccacctcccaggctcaagcgattctcctgcctcaataacctgagtagctgggactacaggcgcgtgccaccacacccggttagtttttgtatttttagttgagacgaggtttcaccatattgtccaggctggtctcaaactcctgatcgcaagtaatccctccacctcaggctcccaaagtgtagggattacaagcgtgagccaccgcgcctggccgagactctcatttctaatgttcttctcaaaactggtacttcacagcatatcaaagagatctttgctcattcattcaataaaatacgttgatcatgtattatttgcaagccccctgggttatggaacatggggaaaattaagatgtataagatgcaaatactgccctcgagggcaagtgtgataaaggacactgaagtttattggttggcgggcgcccattcttcaaaaaatgcaaaaaatttagccgggtgtggtggtgtgcgcctgtagttctagctacttgggagacggaagcaagatcacctgagccaggggaggtcgaggctgcagtgagccgtgatcacgtcactgcattccagcctgggtgagtcagtccctgtctcagggggcggggagaagcttattatctaccatataccaggtataagattatctattactttctaagaatcatgctttaggaggggagattagacatgtagtaataatactgtgtttggcatatctcgggtccccaataaatagttgttaaacgaatgaacataaaagtatctcaaaataatcgcccttatttcagagacccagagagactgaaaggctccctgaagtagtggtttcccataacacagaactcatttcatgttgggtcgatcatttccgagcttcgtaactaagtgactctgggcaggctgcctaatctgaaaaaggggataatgcctttcacttcagtgttgttatggggttgataatgtatgtgaagttctccccacagaaggcgctcaataaaaagcagcaactattataaaattttattagtagatactcactagccattgatctagtgttttttgtttgtttgtttgttttacaattaactgggctccagttatgtaaaacacctcttgcaaacgcatttaaggactcgtcgagactgagagatcactgcttttatctggtcgggagacaccagcaatcttaatttggaacggtttgatagagcggagtgcgatgaggcggtccaaggttcctaagcaacatagacctgaggggcttgtctccaatgtcctttcacctgtctttcaagtccctctgctgaccgcacaaagactcccgtggccccggcagcagctcggccttctctacatctaaccacgtttactaaatttctacggcacgcagcgcaccgcaccaggagctgggagcggctcgcggtacagacctccttcctcttttacttcgctgcagcgggagaactaagtcctcttacctgaggcactgctgaactggttcgcaagcagtcactctacccccaagactaaaacggtataccccagatcaccacgcaagtgcggataccacagaaatcccaccttcccccgggaccgggagcaaagcccgctgggaaattgacctttcaccccctctcttgccttacctcagctcaccaattttgacgctagcaaatgaagcgacgaagagagctggaaggcgggacttagtgttgcctgatccacgccgattggacaacagcagtgtcgggggacgggccgctcgagcgggctagcaaccccccctcgatgggcggggagaagcgtgggctgcgcttgcgcactgagaggcggccgaaggggccgaggcggctacgcgtgcgcggtgggcggagcgcggctctcctaccttctcgggcagcccagtctttgccatccttgcccagccggtgtggtgcttgtgtgtcacagccttgtagccgggagtcgctgccgagtgggcgctcagttttcgggtcgtcatggctggctacgaatacgtgagcccggagcagctggctggctttgataagtacaaggtaccgcgggccggcggatgcccc

SEQ ID NO: 23044 - DNA, 2300 bp, Homo sapien
ataataaaaaagggggaaagatcagaacagaaaattacacgaaacttctagtaaattaagacacttatttagttgaaaatataaatctagggaagattctttataagaaaaaggagatttcctattataaacactgctcccattgaaatagctattttattggcacttagaaagtcagaccctagtaaggaagaaaatgttttatatgtcaatatttaccctgcagaacagacaacaaaaggggagtagagcttaaggcaaaacaggaggtatctgggttaacagccttctaaaatgaaagttgaaaagcactggcccgagttaccaagaaggctctggaccctctttccacttaaaatgttaagacaagtcatcacctcggttcagaatggtatggcacaatacggcttgaaagcagagaaacatgctatgtgaccttctaaggacccttgctttttttttttttaactcgagttaaacaaaatccattatgactttttcagttattcattcattccacaaatgcttactgggtgcctagtatgcacatagcactgtgcttaagccatgatggtccacaagaaaactctaatgagttgggcattatattctaatggcgagacacgctaaagcagcaattccataaacgaacagagcgcacatttaagggggaaaggggcacgtagggagggcttctttgaggaagcaatatttaagctaagatgtgaagatgaacgggtaacaacaaggatgaagggttaaagcccatatttcaggcttggtcgactggatggttagagtcattcattggtaaaggaactgcggatgggaaccagatttggaggaaagttaaccacccgcatttatttactggggtcctagtatgttgccaagcgcttcacaaattcctctaatcattttgcacagcagaagctattactttcagtttcatacacaaaagagaggctgagcggggttaaaatgacgtgcccaagacgaaataaagaaatctgacttttgtaatcaggtttgtatgtgctcgaaagcccgcgctctttccactccacagctccttcctgtgcacctccctttcatctggtggccctagcgccacaagctgccgcttaggaagtccctgccgggagcagaagtggagacatcagcaggatggcatcggcaagtcgctcccctcccgggcctcatctgccaaacgatcatctcctcctccgaagttgtatgcatgacaggcgagtggaaacttcactaaaatgaaggcgattgacacaacagaaggaactccatcctttcgggggcttacgaaaataataagtttaaaaaaaataggaagggaattccctcgctccatgatcactgagcgctctcctaaggaaaaggaaatctcccggggggtgccgactacgggcggcgggcttaggatgctcccacgctccccgacccccaatccccaggacccgcaggacctccggaggaacgcccgccagcccgcccggagccacgcggcacaaggtgacacggaccgcgccgcgcgggcccctcagccgcctgggcgaggccgggagcagggagaggggcatccgccggcccgcggtaccttgtacttatcaaagccagccagctgctccgggctcacgtattcgtagccagccatgacgacccgaaaactgagcgcccactcggcagcgactcccggctacaaggctgtgacacacaagcaccacaccggctgggcaaggatggcaaagactgggctgcccgagaaggtaggagagccgcgctccgcccaccgcgcacgcgtagccgcctcggccccttcggccgcctctcagtgcgcaagcgcagcccacgcttctccccgcccatcgagggggggttgctagcccgctcgagcggcccgtcccccgacactgctgttgtccaatcggcgtggatcaggcaacactaagtcccgccttccagctctcttcgtcgcttcatttgctagcgtcaaaattggtgagctgaggtaaggcaagagagggggtgaaaggtcaatttcccagcgggctttgctcccggtcccgggggaaggtgggatttctgtggtatccgcacttgcgtggtgatctggggtataccgttttagtcttgggggtagagtgactgcttgcgaaccagttcagcagtgcctcaggtaagaggacttagttctcccgctgcagcgaagtaaaagaggaaggaggtctgtaccgcgagccgctcccagctcctggtgcggtgcgctgcgtgccgtagaaatttag

SEQ ID NO: 23045 - DNA, 2300 bp, Homo sapien
taataagcaacagagaacaatggcagttaaacctgatatcttcacatttaaaatacaaaagcaccctttcaatatccagacatagagctccttttttttttttaaccatacttccaaaatggttgattcttttacattctcattccttcaatatttgtttagcacttactctgttcatggtactgtgctagacctcagtcatgttattaaagaaaaaaaaaaaaaagtcagccatagggcctgccctcttaaagctcacgtcctaaaagagaaagtagacattcaactaatagtcaactaactgtttaatacaattgcgttaagtaacacaatagcgaatgcaagtgtcaatacataacacagaatccatcccacgctcttccataccaaaaatcaattgtcttatagtttcctgcttcagaaacctaatttccactccccgtgtgcacccctttcagcagttattctgtatatctgtcaggtttccaactgtagctctcagatatacctctagggaagataaattaaactacttcaaaagtaatttttccaccaactgcttttgtagtgtcagttcttctttacatccctcttataaagcatcacatgagggaatacaaaatatcttttgagtgttttcaatctttacccatttatggggaaaaaagactttttaaaataagcatttataaagcgcttactatctgaagacaacataaggggaacgcaacgataagaaaaaaagatctgtgagatttgtgttcaagcaaaactgatcccatggatttttcctttggataccactggattcataattttaatataaatgcagtattgagtaattgcaatagaagaatatttaggttataaatgtgtgcttttttttccccaaggaagcctcattataactaaaatgatatcaacaaactattttagtgaacattggacgcttgctaaatcgacctttgttttccaggatgataggaagtcatctgctgtcagatacaggaacttatataataaaaaagggggaaagatcagaacagaaaattacacgaaacttctagtaaattaagacacttatttagttgaaaatataaatctagggaagattctttataagaaaaaggagatttcctattataaacactgctcccattgaaatagctattttattggcacttagaaagtcagaccctagtaaggaagaaaatgttttatatgtcaatatttaccctgcagaacagacaacaaaaggggagtagagcttaaggcaaaacaggaggtatctgggttaacagccttctaaaatgaaagttgaaaagcactggcccgagttaccaagaaggctctggaccctctttccacttaaaatgttaagacaagtcatcacctcggttcagaatggtatggcacaatacggcttgaaagcagagaaacatgctatgtgaccttctaaggacccttgctttttttttttttaactcgagttaaacaaaatccattatgactttttcagttattcattcattccacaaatgcttactgggtgcctagtatgcacatagcactgtgcttaagccatgatggtccacaagaaaactctaatgagttgggcattatattctaatggcgagacacgctaaagcagcaattccataaacgaacagagcgcacatttaagggggaaaggggcacgtagggagggcttctttgaggaagcaatatttaagctaagatgtgaagatgaacgggtaacaacaaggatgaagggttaaagcccatatttcaggcttggtcgactggatggttagagtcattcattggtaaaggaactgcggatgggaaccagatttggaggaaagttaaccacccgcatttatttactggggtcctagtatgttgccaagcgcttcacaaattcctctaatcattttgcacagcagaagctattactttcagtttcatacacaaaagagaggctgagcggggttaaaatgacgtgcccaagacgaaataaagaaatctgacttttgtaatcaggtttgtatgtgctcgaaagcccgcgctctttccactccacagctccttcctgtgcacctccctttcatctggtggccctagcgccacaagctgccgcttaggaagtccctgccgggagcagaagtggagacatcagcaggatggcatcggcaagtcgctcccctcccgggcctcatctgccaaacgatcatctcctcctccgaagttgtatgcatgacaggcgagtggaaacttcactaaaatgaaggcgattgaca

SEQ ID NO: 23046 - DNA, 2300 bp, Homo sapien
tctttgtgttgggaatgctcaatatcctcgttgctatttgaaactatgttattgactatagtcaccctccagtggtgcagaacactagaacctgtcattttgtatcctttaacaaatctctccctattccaccctttaccctagtatgccaatttaaacagttaatagattttggcaaactgtcctcctaggaggtccctttccagcggtgagtgaaagtgtttcccacaccagtgaaaaaggtttattacataattgaggctgcctgtgggagcaaagagggcctcccagctggtcagaaaatggctagagagagccaggaaaggagacaagcttggggcttttattgtggttaaggggtgaggctgggaggagggtatcctgtgcacgcagatgaaatctgccagcaccaaaaagagcacctaggctttttttaacagcttgcccagatgtggagaagaaagagggagtgctgcgtaaaagctgccagcagccaaatgtcagcagcaaaaaatggagtcagatttcttatataaaaagatgttggaagtggtatcagaacagtgcagggccaagtatctcactggtcactcttcatgggtttgtatggtacctttgctctcacttacctcttgtgcaacagctgattccccctgactttctcatggtatcccactcccaggcatagacatgcgcatgcacacatgcttgtttctgtccttacggatagtggaaacatgaaccaggacctggacgagtttttggtcagagctgtatcatggctcctaggagagtttaatactttaggtttcaaccaaaggagacagagatctggcagaaggccctgaagcctagaagcaagtacccccgctcctaccaccaccacctaggcaggtgtgagacaaggatccaggcagctgctgttagactctatagctgttggatggttttggcattcctaaacctctctactgcttgcaaacgtggaagaactgattttaaaaacccactccatttgcctctgggcagttcttactcacaaaggacgggtcgtcttggccgcacagttgtctgtgggttgcatcatttaacagctgagaaaatgctcctcaagaagttgtgacttgcccaaggtggcagggcagggctaggactagtactcaccctttctcactgctcatccagtgcccttaattccccacgggctaatgggacagaaccctgttaaatggtatccagtttttgtttggttggttggttgggtttttttgagacagagtcttgctctattgctcaggatggagtgcagtggctcgatctcggctcactgcaacatccacctcccagattcaagcgattctcctgcctcagcttcccgagtagctgggattatgggtgcccaccaccatacccagctaatttttgtatttttagtagagacggggtttcatcatgttcaccaggctggtctcaaactcctgacctcaagtgatctgtccacctcggcctcccaaagtgttgggaggctgaggcatgagccagcgcgccaggttttaattctcaatgagaacactatttttgttgacaatgagacgcccagaagatagcgcctttctggggacagttgagaatttaatagtgcttccgcatttctaacttttatccctcccccctcccacggactgttttcctctattccacttttcctctttcataagtatttgattgcaggttggtatcctgtatccaagcacagcgcttggcatcgagtaggcgctcaattttatttggtgaatatgagttggaggaatatttgatgaatgaatggaagatgaattaatcatcagggtcagcaagtgatgaaccacaacttggtccagttctttagtcctctagtctcctggtgagactccacagctccgctaacacgaccgggccttcgtgggcctgacaacagacctgacatcccacgggcgggagaggcgtcagcccgaggctgggatgctcggccggaacggcggctggcggcaggctgggcccagggagctgcgcgcgcaaccactcgggctgtggctccggtgaccgctctccctggcaacggtttgttcctagcaaccagcctgaggtctggaggtggtgcggagggagccgcctagggaccagggactcctgccatgaatccgccggggtccctagaggccctggacccgaacgtggacgagcacttgtccacccagattctcgcgccctcggtccactccgacaactctcaggagcgcatccaggcccggcgcctccgc

SEQ ID NO: 23047 - DNA, 2300 bp, Homo sapien
ggaacccaggaggcagaggttgcagtgagccgagatcgcgccattgcactccagcctgggcaacaagagcgaaactccgtctcaaaaaacgaaatgaaaccaaacaaaaaaacaaacctgctgtgtcatgttgaggtttcatttttcctaaggcagtactggtagcccttatggacactgtgtgccagaggagagagcagggtcttgatgatgtaagtggcgtgggggttggtgaggtcactcccccatgcctcccctgaagaagtctataatctggaactttatctcgccaccgcccctttagtctcattttctgattcacacacacagacaagcacacacacatgcactatttagaaaattcatgcaatacaaaaatgtagaaaatagaacttctcagtaatttaattcctgttctttaagtaattgctgttattcgtttgtcatatatacttccagaaaatgtcctgtgcacatataagcctgttttttgtttttgtttttgtttttcagacagagtctcgctctcccgcccaggctggagtgcagtggcgctatctcggctcggctcactgcaagctccgcctcccgggttcacgccattctcctgcctcagcctcccaagtagctgggactacaggcgcccaccaccacgcccggctaattttttgtatttttagtagagacggggtttcaccgtgttagccagggtagtctcgatctcctgacctcgcgatccacccgcctcggcctcccaaagtgctgggattacaagcgtgagccatcgcgcccagccaagcctgttttaaaaagaaaatgtgtattatagtctacatatttttctaaaactggctccctttacttaactgctgtggacatctttccctgctgttaggtattacatcattctttttgtaggctacaaagtatttctgaaatattgttttctcttaattagtcagctactaatatgtatgtagaatgtttccatggtcttacgagtattgtcagtgctacaatcatctttctcgtgcatatttatttatgtacttgtaaaggctttctgtaaaaaattcctaaagaaaggattgttgggtcagagggaaggcacatttaagcttttgacaaatcttgccgaattgccttttagacacgttgttatactttacattcccacccatggaatgtggaaagctgggctcccacctgatactgtcaacccttaaaatcttttttagtctcataatagagtaatgacacctcacagggttttggtttctctgattatatgtgaagctgaccatattttcaaatgcctatttgccatttgtatttctttgggaaactgcctgttcatatcctctgccagtttttctctttggtattttgtcttttgtttattgatttgaaggagcccttcctattttatggatagtaaaattttgtcaaatatcttttatcagtttatcccttgactttcaaggataaaatttctaaattttagaaagtaaaatcttttaatctttttattttctgactttggtcttattcaaagatgggttttctatgctaagattatatagatattctcctgtatttacttctagtgtttttatgattgcagtttttttaatatttaagttttttaaatgatagagatagtgtctctctatgttgcccaggctggtctcaaactcctgatttaaagcagtccttctgccttggcctcccaaagcgctgggattaacaggtgtgagccactgcacctggccaatatttaaattttaatccatatggaatatatatttatatatgaagtacaatggaaccattattattattattattattattattattgttttacataaatagagatgggggtcttgctattttggccatgctgatcttgaactcctggccttaagcaatcctcctgtcttggtctcccaaactgttgggattacaggcatgagctactgtgccaggccaaaacctttaaatatagaatttacgtattagaaataacttcattttctctgcttttttccatcacagggaagcacttggagaatatttagatgggaagaaggagagtgaggaggatcaaagcaagagctacaaacagaaagaagaaagccgattggtatgaactggttggcagatgggctctggaagaccagtgagctgggtgtgacatcatggttttcacatttagactggaagaaatcatgtggtccatgttgctgtctctaggcagaactgaatagaatctttcccatttgagagctctctaggag

SEQ ID NO: 23048 - DNA, 2300 bp, Homo sapien
aggcctaggctgcaggtggtaagtgtgaggctctgcacctcagccctgtcctcactcttgtagggaacgttgacccctttcccctgagaggcctcaagcacccacaaaacacctttgtgtgtgcatggggtggaccacgccccataaaggggccaaccctcagctccacctacagggtgaggctgtgtttgggacctggggcagagggcagggagaagcccttcccggggctggagaggagagagtgggaactcaggccacagcctgggccagggctgggcctcgcactcaggcgtcatgaggactccctgactctcagcggagtggggacacgggctaatgctctctggctaatgatgtgtcacgtctgagccccattccctgactctccctctcccctttcccaaacccaaggcagcaccggattggacggtgggaggggcctggtggggaatgcactctaggccttctgggcccattctgctccaggcaactatgggaacgaagttgatggcctgtcccggccccagcggcctcggccccggaaggagccgggggatgaggaagaagtagacctgattcagaacgcaagtgatgacgaggccggtgatgccggggacctggcctcagtctcctccactccaccaatgcggccccaggtcaccgacaggtgggcccagcctcccatcctcctgtggcctggccctcccacctccctgggcccccaagacctcacctcccgcctctgcccaccccaggaactacttccatctgccctacctggagcgaaagccctgcatctacatcaagagctggtggccggaccagcgccgccgcctctacaatgccaacatcatggaccacattgccgacaagctggtcagggccaggccaggggccagcaggggtggggtcctgggggagacggcgctgtcagagggccttccctggaacacacaaagctggtctgcccagggggctgcaggaacggccccagcaggacctctgttcccattctcagccccaggtcccagggcacagacaaggacaggagccacctctagtcactcagcctccagtgaatcctggggcaggagtgttgggttccctgatttttccagaaatcttaaaagcaaggctagggagacaggtgtggtggctcacgcctgtaatcccaacactttgggaggccaaggcaggtggatcacctgaggtcaggagttcgagaccatcctggccaacatagtgaaatgccgtctctactaaaaatgcaaaaattagcggggcttggtggcgggcacctgtaatcccagctattcgggaggctgaagcaggagaatcgcttgaacccgtgaggcggagtttgcagtgagccaagatggcgccactgcactccagcctgggcaaccgagcaaaacttcatctcaaaaaataaaataaaataaaataaaacaaaataaaaaagcaaggctagggaagggaaatggggaaaagggagaagcgagcagtgtctgaagctcaggagctgccccctcctcctctgcccacccctctccccccatgagccatgggcactgactgggcgaggagtgcagctgttggcatgagacctccttctccccagcctggggaagcagggaccagcagataatcccgcccttccctgagctgttgctgttccctgttgaagttccctgaagctcagccagctcatattttataaaaatgaattaaaacctccaaaaaaatcaaggctaatatgaggtctgctcccagccccctgccaatgtcctccttgtcatccctgtcttgtgactataaccacaattaaagcccatagcctttgcagtgtgacctgggtctgcagttatctgcaaggcttccccctaaggagctggggtacaagctgacctgtgtttcctgtgggacctgggtctcacagccctcccagtgctctcagagccagagccactccctcttcccccaggcatctgttcccatcccctgccacaggctccagcattctggagtgacgtcaggatcttggcacatccagtcctagggtttccctctgtctctggccagccctgagccccgtagccgtgagttctgcccaggccctgtgagctcaccagagccacagactcacagcccagaggtggcttcttccttcaggaactgaagaacccccatgaacaccaacatctccaggttctgagaacagaacctgggaaattgatgacttcctcatgatgaccgatactcaggatggccctagcgagagctcccagatcatgagg

SEQ ID NO: 23049 - DNA, 2300 bp, Homo sapien
gaccagcctagccaacatggtgaaaccccatctctactaaaaatacaaacattagctgggcatggtagcacatgcttatagtctgacctatttgggaggctgaggcaggagaatcgcttgaacccgggaggcagaggttgcagtgagcctagatcactccactgccctccagcctgggtgacagagtgagactctctctcaaaaaaaaaaaaaaaaaaagagtgggatctgtctcttaggttttcagaaaggccagctgactccattgagagctgctgagtggaattgctaccattttatggatgtggaaagtgagattcagcatagatcaatgccttggctagggcaggatcatgggctttttcctaaagatgcacagggtctataagaggcctcatgaaattcactcctttcaggggaggacctccagagaaccaaggaagaagatattttctgttgttgttgttgtaccttgtagtcaccaagccttaaaaacacagatcacctgatgacctcatggatggaaaatgctagtgaatttaggtgtttttttttttaagacattaaacttatctagcttttgaaaatttagcattcatacttgtattcaataaacagaatactctaagacatttttaaattcaatatgattagataaatgtgagaaaggtaagcaagaattggttaggaaaaagtgcaaaggaaaaaaacgtaagtagaaaaagaaaaatagggcacagtagcaaggaaatatctagaaggaggaaagaaggctcttgggacatactgtaggttatttggaatgcagaattcaaaagaagtaacctcttgttaccatgctgtgaaaaattagtatttctctttttaacctttagactctgtttcaggtagatccctgagctcactcttttatcctttcaacagtaattgggcatcctacggtgcacaggataccatgtggggctctggggtagagggatgctgtgctccagggccctcctgaggtcaggaggggaaaaggcaagggaagcagccccaggactcagtaagatgagaggaggcaggagcagcacagaggaggaccccaacccagctggggtgcgggtacagaggcacctccaggagcaggcactcaagctgagtccagggtggggtggagggcattccaccaagaatgaatagcaagaacaaggctgcagatgaccctgcacagattccagcatcagggattctggcccccagcgtccctttccttggtgtatgctgctggaagacaggagggggcagttctcttttggtccttagaaatttccctatagacatcccttctcctgcccctagcagcttataacagcagaaggccattcaattctgctcctctggctggaaagcaaacatcagcctggcttaccttcgctagcctgcctgacccccagccttggggtggggctaggttagtgccctggatccttaaacatggcccctggtagcacataagcctctgctgcctccacaaccagccatctccatcatgcatggcctggtcctgagcctcccctcaggcagcagccccagcctctctgcttcctgagattcagaaacagggatcccagggcagggctcagggcccagcctcttgggggcacagtctccagcagggaagaggtgggcgtaggtggacaaatacattcccttcttcttgtagtgtgcccctgtgggtgggagtgccccccgccccacatccaccctacctatgctcatgcccactcctctgtgcccactactggtggcagggcttgcttagcagggaagcagcagagccctgcagaggggtgggcagagcctcccttccaggagctgggagaagacacctgaagctggacagagctttatctgggagccggcggctgctgaataatgaattccaactctgccgcactcccaggctgcacattgggtgcacacacacacacacacacacgcacacaccgatacacacacgctgggctgacaacttggaggggcgggggctgtgaggctctgtgagtcgctgcaggagcagcttagctcggcttggttgccttggtctctgtgggcagcatcggaggggggtcgggaggaggaggaggaggcagcggcagagaagagagaggcgtgtgagccgtgctccaccggctagctccttcccgctgctcctgcctggcagtgccaggcagcccacaccagcatggccttgctcatccacctcaagacagtctcggagctgcggggcaggggcgaccggatcgccaaagtgactt

SEQ ID NO: 23050 - DNA, 2300 bp, Homo sapien
ataatttatgtaatgaacatttactgaattctttccagagccaggtgctgagattcagggatgaatatgatatggatggcacaggatcccaatcagacgagacagatggactagaacacaggcaggtggaaggcagggtggtgggtttaccagcaggactggctgggcagccctgaatgggggaggaagtaggcggtcaacctcaccagggctgggggtctttgactcatgttttccttattgtagaacatgttccccaatgagaatttagaaaaatacagacatgactgcattctgaaggatggatggattttccttccacccagtttgtttgcagccgttcctttgcctacagctctctttccaaccaggcctcagtgtttctgcttcctgagcctctgggaagcctgtggctccccttcatttcattggcatttgccaggggaagtctttggagaatgctggtggcagccacattctgtgaacccagtagcgtctgcggtcttcatccactgccatttacagaaccgaagtgcgaggggagcactgctctccatccggcatctgaagggaagaagcaagacctggagacaaagtgggaactgccaggcttcttcatgacaccaggactgctgcagagggagctggggtggcagggcctccacccgagtcaccaagagcctggcaccgtggaagctgtccccataccctcaccccttatggaaaagccgaaggccctgtgcctgccctaggcaccaaggctggtgtaagggtccctggagaaactcaaatgtggaggctgaagcagtcacagggaggattacacagggggtgggccttcagcaggcctgctctctggggcaagcgctacccctgcggatgccatccccaaaatgaacggcagcattggggacaaatgtaaatcacacacccagacgttctatgattttctttttgcctcttgtggagtagtttacaggtatgatgaggtgagaaggaagccatcagctagagattaagaagaaaaatgaaaaatgctcctcttcgcaaggcgcgcacacacacacgcacacatgcacgcacgcacgcacacacacaattacacacagcgtcctaggcaacctcgcccagcgcggcccactacagagccccttcctggaactcccatggagctggggtgcaggggaagccttggagagacatagctcctggggaccctaaggccactcaggtttctgggcctgagccacggtggggcagctgcttcgtgcgtgacctccaaagtcaggacctggcctgtcctttgtggtagcgtcgcgttccaagccgggtcaccgcaagacggatcccgccaggcctctccagcgatgttctgcctccctcccgcatctgagcctctgcacatcccgcaggcagcaaggcagagagccccgacgcgccggggcaagtgacaggggtcacccagcagagctcgcggaaatgggaggcgccttctgggcgcgccctatggggctgctccgggaggtggccgccaggggggcgcagtgtctcggaacgcgaggaccgcggggccagctggcgttgccaggctcgccgccgtggccgttgccaggtgacccgccgctgtttaccgtggggcggagcggagcgccaggctcgctgtactcgcgcacccaccatggcctcccgcagcgcgggcaccctactgaccgagttcaatgccgcctacgtgccccctggactcatgcccgggtaaggccgagggagcgcctcctcccctcccccttccactagcgccctcctcggtgatcgaaattcagccccctgcccccggactttggggttgaaggaaccccgaggagccaattttccacccgacggggcgaggggccttcctagaggtttgtggtttcagagtaggaagtgggcaggcacgggcgggggcctccccagattccccttcacaggaaggcgctccctggcaagtggggcacagccagcagggcataagggacctcgcatggatgtagccggggaagggggaggagatggagccacgtggggtttagtgcttggagacgccccaggcgggcagcctccagcgcttagagaaaatgcgagaaaatcaggcccttccgtccggcgcacagggccagcacccagcattcgggcaaggtcagtacttgttggttgaaggagggaaggataccgggtgggtgcccgctcgaagaacctggcaaggccggaagagccgtagttaatgggtcatgtgtgcagtacccgcccgactttgcggtcgg

SEQ ID NO: 23051 - DNA, 2300 bp, Homo sapien
tcattttattttatgcctgcaatacttatgaagtagggatttatcattccccttttacagatgaggaaactgaggcttacagtattttatgacttgcttgaggtgatgcagtaagaagagatgctgccaggcctttcagatttcagagcccatgttcttaaccaccgcatgataacagcaacttaaatgccaccacctacatgaaagcttggtgcccagcaagcctttcctcttctaaacactcgtaactctgtactcttccccgtctgtgacatctgcctccatctgctttagtgtgtgtatatatgtgtgtgtgtgtatgtgtgtgtgtgtggtgagcacacatttcttttttttttttttttttcttactcccttaaaagagcatgaagagcatacgttccttgagggttgaagtcatgttcagtcctctctctcccagggtcaagccaagtccctggcacactgtggatattctacctgtgtctggtgagcagatgaaggaatgagggccccgggtttccttctgccaggctctatccccatggaggacagtcaaagaaaaagcaggcagttgcacttcagagatataaataagcgtcatcagagaatcactgggatgtttactcaggagagcatagggaagatgtgttctagaacaaggagaccagcctttcatgacaaaggtgggtgtgcagaccctcctggaggcaggggagggagtgatggcttctggaaggccctcctggcctgtgatgttgatgcctgtgctggacgttgtctctgtctgcccatcctgctccgccctgttctcttccctgtaggagatcacagaaagaggagagagtggggctggggtggtgcttccaggtgggtggtgctgggtcgggtagcagctctttgttgttgggctcaggagtctgtgttatccagttatccatgtgacttccctacaccctgaacacatctttgtggagagtcctttttttagacccttttcacatgatcctgatttgatggtgccctttgttcctgcagagaccctgactgatggggtggaacgcccttttctgtactttttgggccactccctgaggttggatctatgctgatatatttcggcatccccatgcctggcatagtcctggggttgtggttccttgtttattttttattttgatttgttagagacaaggtcttgctctgtcacccaggctgaagtgcagtggtatgatcatcgctcactgcagccatgaactcctgggctcaaacgatcctcctgcctcagcctcctgagtagctgggactacaggtgtgctggtgtgcacctctgcacccagcaggttgtagggtttttttgtttttttgagacagggtcctaggctggagtgcagtggtgcgatcttggctctctgcaacctctacctcccaggttcaagcgattctcccatcgtagcctctggagtcactgggactacaggtcatgccaccatgccagctaatttttgtattttttggtagagacagggtttctgcatgttggccaggctggtagcaaacgcctcacctcaagtgatccaccagacttggcctcccaaagtattgggattagaggcgtgagccaccatgcccagctaggttgtggttcaaatagctagcatttattgagcacttactatgtgcctgacattattccctgtattcgtcaatcctcacaacaatcccatgattatcatccccacttacagatgaggaaactaagacacacagatattgaagagcttgtcccaggttacaatggggtggatctgggattggagcccaggcactgtgactcctgagctgacagtgtgactctcagccccatctttggactgcctttctgcttgttgtatgggactgatgcctcttagctttgggattgaaaataatttgcttctttgctaactcagcaactcaggtggaatgggaatgaaaagaatttgtttctttgccaactcagtaactcaggtggaatgggcagaaggtggaatgtaggtcaccatggcaactggatcaacgaggtgcctcagctggcgagtccttgaggctgaggttctactgctggcagacagaaaggtgtggttggcatggggcaatgcttgaggtatcagatgcactgggaggacctggaagagtaccaggtgggtagatcgggctagggactctgggcagaggtgggagcttcctaaagcaggtggaatgaatgggaaaattccttcctgacgctctagcaggggtgtccaatttttggcttccct

SEQ ID NO: 23052 - DNA, 2300 bp, Homo sapien
ggaaaggcagtactttccttccagggagccagaagatgcaaaggggaaaagcctgcaataggctgagttgctggtcagagggcaagaccagaaattctgtgcctgcaaagaaacaaagatcttcccttgaagagggagggggaacatggtgctataaatgtaggaccctcccattgggctctgaagtcattagagagcctcatatcatctgatttgcacacatgtgttcttctttgatctctcaaaacaaatggttcaagacgcgggtagagctaatattattatctattccactttacaaattgaaaaaaaaaaaagagagactcaaggagtcatggcaaagagcatgggcttaagaggcagacagactgaagcctcttcccagctgagtgaaatttactgattctctacattgcctttagcctcagtttccccatctataaaataggcatgaccacacctacctttcaggattgtggtgaggaccagagatgatgaatccctgacacacaacagatgcttaataaatacttgttgaaggaatgaaggggttggtggcacttctggggtgtcattggaggagtgtagtgtccggcagtgacaggtcagcccagcctgtgggtagacagtgctccagcttctggctgactgcctcctgagtctgctctcagtcaggggccttggtgtctcttccctgtctctctgcctggcccatgccagggtcctgtgaaggactttttaacccttcttggcactgagatttgcattccaatcattctgctcactcagcccatccaagtctggagttgtttagagctgggcaaggcctgtgggatcatctgctacgacacctcgttgaaaagataaggaaacaaggctctgagagggtcagtaatgcctgagtttccactacccttcccacctcaccaccatagccaccatgtttgacaaatgaagaaactgaggcatagggaccccctctcctgccccagttcccgcagtctgccagtgagcctcctgctctgggccccacctgcccaattccagctagatcccggttctgctgggatgccctaaggtggtggcaggtgctatctctggcaactcagcctaagcccagcctggtgcacgggtgcaagacaggaaccatgggagtcgggacagcctagaagcccctgggagcgaagcaggaggcctagactcccagcctgtgccttctcagccagttccaagaactgtgctgacctgggaaggcacacattgcctgagaacagggctttcccttgggtgtcagctcatgtgtgcccaggtccacagctgggccctgcctgcttccaagacagccagagtctggcccaagggaggaaggagtgtggcctgggaggaaggaacgcttggctgagtcccagtgctgtcacgaaatcactgcgtgcccatgcgtgtcacttgacctctctgggcctccatttcctcatccataggataagggcaggacagcgaggccccaagtgcctcctggctgcaatatgctgtgatgagggtggagggtggggtggggaggggctcgctctgccttccttgccttcctgtctgtttctctgtcattagtttatctccagcaatccaggcctctctgtctcagtctgttgctctctctgtttccatcttttgctctgtatttttctgcccgcctctcttctttttctgtctgagtgcacctctgattttatctcctcctctgtcacacagcccccttccctcagtcctacactgcctttctcccattctccgtagttatcagcgtttcgctgtctagttttctctgtctctcgggctcgctctctctctctttctctctctctgtcctgcccgggctctctcgcggccgcccctcccgtcccctccgccagcccccctcctccctcctcggcgcgtctccccagtccttatttggctgggcgggagggctggcgggaggaggcggcctgcgggcggggggcggggggcgggcgcggggccgggcggaggagggcggtgggtggtgctgaagggacagctccgcggcggcggcggcggcggcggccccgggcgctgagcgggtgcccggcgcggagagcggcgagcgcagccatgccccaggccgcctccggggcagcagcagcggcggccggggccgaggcgcgggccgggggcgccggggggccggcggcggcccgggcgggacgatgaagcggcagaacgtgcgcacgctggcgctcatcgtgtgcaccttcacctacctgctggtgggcgccgcggtc

SEQ ID NO: 23053 - DNA, 2300 bp, Homo sapien
gattcttcccaaccctgagatgctttgatttatttatcttcaaaggggcagcctggagagtttgagcacccagagtgggactcaggagtgtccttggggccctgaggccctctgggtccccttccaaattgaattggcttcagccttcctttcagttcagttaaccaaagatcatttgagatgtcccgaaatctcctgtgtgccaggcactatgtgaggcatcaagagaatgaaaaactaagacctagagccttccccaaggagccttgggtcagtggaatctgaaaagcacaagttgcatggtgcacatgctaaatccaagtacagtgacccaaagaagggtctgagaaggtgtccaggggtaggtttgaacaatgcgtgaggacttcaggaggtgaagatcagcagccagagctttctgcggtgagcatgacacacgccagggcatgagcatgcccaaggaaatgtactcgtgagcagatcctggagggctctggactctggtgtgtggacttgagtggacaagcactggaagacagaggataggcccgatctgtgtgcccctgcctgagtcctgaccagtgaatgccccaatgaccccagttgaagcagtgggtgccctgtgattccagttgaacccaagggtaatggtgacctgaatcctgattgcctgacttcccgcccaccctgctcacccagcagccctctgtcagcccccagggagtttttgactcccctatcccatttccttttctgggccaaagttccactctggagctcacaccaagtacagttttattgacggcttgcaggagcaccgggacggtgctaagctgaagatgatgctgccatccaacactgaatgcacagcttctgcatggacaaccccaggcccctgctctcagaccccttttctctcccacacaccctcccacaaatccaaatttctggatcccaagcgtaccctccttgatttctgctccgggctccgaggcttggcatggactcagtgtccctcatcaggaatgcacaggcctctcctaaccacaactctgattcagaaataaccatcttggaaacatcctgagagtcacattccagccctccagccataggaccatccggggctttctccagggaactgaactgtcaggccccagtggggcagcctggagagatctacacaggcactgagacaggggcaggcccgctcctccaggatgaggtctagtccccctgcccgtgcagaggagattccctggggctttgggggcaggcacggtacagacagttccaggcagggcaagcctccgatcaacgcaacagatggatctgccctggactgttccacacagatcttacccccaacatggagcagccgctcctcagggagcctgcctctgttaccacagtcatgaactaaggttggcattcatcaggaggttactctggactgagccctttacaggcattacctcatccaatcctcatggctgccctaggagggaggcactattttctttctttcttttttttttggaggcagggtctcactgtgtctcccaggctggagggtagccatgatcatggctcactgcagcctcgacttccctggctcaaatgaccctcccacctcagcctcccaagtagctggaatcacaggcatgtgccactacacccagctaatttttaaattttaagtagagacagggtctttctatgttgcccaagctggtctcaaactcctgggtgatcctcccatctcggcctcccaaagttctggaattacaggtgtgagccactgcatgtggcctggagacagtattattatccccattttacagatgagaacactgaggctcaggggggtcaggggatgtgtccaaagtcatgcagctggcaaatggcagaacacggatatgttaagcactcggtcatcgagtgtctctgagcctcatatcaaccccaaggtgtaggcatcattattcctactttgccaacaaagaaattggacttgagagataaggtcacttcctgcaattgagggtcagtgaacgtgggagccagagtccagtccagacttcccaaccttaacacctagcttctccccgacccaccccaaccacaagtgcccttgcccccttgacagtggcagaaaataggtcattcccgtagtagggatattagagatgtcacagagggttgtgttggcctatgaggggcaaaaaggcagcattgggggcaggggcagttgtcacagaatggccttggttcccggcctttgtccacaccatcccact

SEQ ID NO: 23054 - DNA, 2300 bp, Homo sapien
cctccagggactcaagcgatcctcctacttagcctcctgagtagctgggattatgggtacttgtcatgacactcagctaatttttgcatttttagtagagactgagttttgccatgttgcccaggcttgtctggaaatcctgagctcaagcaatcagcccgcttcagcctcccaaagtgctaggattataggtgtgaaccaccacacccagccaagagtaggattttaaacaccagaaccccttgaggactaagctctgattttttttaccttgcccaaattcctacctaagaggtctggagagtcatgccctacaaaccataaattctcatcagatgggttttatttaaccctatatatcatgacttactttccaatctgactctggcataatattatgtgactaagaagaaagtcaaaagattttaccccaaaacatttttctttgccatatcttgaaatggccctgcaaatctgtcttttgtgggggaaaatttgcatctgtaaagaatctctattaccggccgggcgtggcggatcacgcctgtaatcccagcactttgggaggccgaggcaggtggatcaggagttcaagaccagcctggccaacatggtgagaccccccccatctctactagaaatacaaaatttagccaggcgtggtggcaggcacctgtagtcccagctacttgggaggctgaggcagagaactgattgaatccgggaggtggaggttgcagtgagccgagatcgcaccactgcactccagcctgggcgacagagcaagactccgtctcaaaaaaaaacaaaaatctctattaacatagatagatatttttcccgtttcctgccccaccctctcccctcctcccggctttgagttgtcctacctttctggaccaaaccaatgtatttcttaaatgtatttgattgatgtctcgtgtctttctaaaatgctgcgccccgaccactttgggcacatgttctcaggacctcctgagggctgtgtcacgggccatggtcacaaatatttggctcagaataaatcccttcaaatattttagagtgtgactcttcgtcaacaccctcttcaaacaaacctagggatggtctttctgcctggatgcctcagctgcgaccagaaagtccacaaaggagcagtgaagcagggcttggtgcagaggccatgcggaaggcacggatttttggagactggagaacccaagcgcaaatccctaccccactgctcaccagcaggttcttaagcaaatcactctgcttcgctgaatttactgtcctcagctataaaatggtgtcctcggcaactggagctagatgccttcgccactttgctgaaagatatgaactgtgcccaaggtgggcggtatcagataggagccccgaagtggaaacgtccagcgtgggaatctcctctctacagggtccccaaggaactcccggcaggcccacttcagggctcctttctgacaccgcccagctcaacctctcaaaacgattcacaaaatgctgtaatagccacgatgcaccctcactgcactgtcccatccgccccttttacaaataggaagacccaaagataaaaataagaaaccaaggccaggcgcggtggttcacgcctgtaatcccaatactttgggatgcggaggagggcggatcacctgaggtcgggagttcgagaccagcctggccaacatggtgaagccctgtctctactaaaaatacaaaaaattagccgggcgtggtgaagggcgcctgtaatccgagctactcgggaggctgaagcaggagaatcgcttgaacccaggaggcggatattgcagtgagccgagatcatgccattgcactccagcctgggcgacagagtgagactccttctcaaaaaaatagaaaaaagaaacccaaaaaggcgggggagagtgaggaagaaaagaaaaaaaaaactggaaggcctgggccgtgatttgccagggccacggcgtggccaccaaagcgctccaggacgactcggcagagcgcgggcaccgtggctcaggcgcgctccccgggggcggggcgagcaggaggggtcacgtgacgcccggcccggaagcgctcgcgcaggagaccccgggtgacggggcccggcgccgctaactggagcgaaccccagcgtccgccgacatggcctggaccaagtaccagctgttcctggccgggctcatgcttgttaccggctccatcaacacgctctcggcaaagtgagtctgggccctgccgggcgtgcgggccctggcgacccc

SEQ ID NO: 23055 - DNA, 2300 bp, Homo sapien
ccttttttttttttttttttggagacagagtcttgctctattgcccaggctggagtgcagtggcacaatctcagctcactgcaaccttcccctcctaggttcaagcaattctcctgcctcagcctcccgagtagctgggactacaggcccgtgccaccacgcccggctaattttttgtatttttagtagaagcgggttttcaccaggttagccgggatggtctcgatctcctgacctcatgatccactggcctcagcctcccaaagtgctgggattatacaggcatgagccaccacacccggccttgtcctttttttttttctttttttttgagagaggtgccactctgtcgcccaggctggagtgcagtgccacaatcatggctcagttcagcctcaacctcctggactcgagcgattctcccacctcagcctcctgagtagctggggcgacaggcatacatctgcacgcccgggctaatttgtgtgtgtgtgtatctttggtagaggtggggtttctttcttccttctcctccttctccttccccttctcttttttttttttttttttttttgagacagagtctcactcttgtcgcctaggctggagtgccgtggcatgatttcggctcactgcaacctccgcctttcaggttcaagcaactctgcctcagcctcctgagtagctgggattacaggcgtgagccacagcacctggcaaatttttatatttttagtagagacggggtatcgccatgttggccatgctggtcttgaactcctgacctcgggtgatctgcctgcctcggcctcccagagtgctgggtttacaggcgtgagccaccacgctcggcaagatggagtttcgccatgttggccaggttggactcgaactcgaactcagtggttccgaacaacttggcctcccaaagcgctgggattacaggcatgaaccaccgcaccccagcccagcatttgtcccttggtggactgctttatttcacttagcataacgtcctcaaggttcatctatgttgcagcaggtgtcagaattcccttccttttaaaggctgaataacattgtggtatacaccccattttgtttatccgttcatctgttggtgtgtattcaggctgtttctgccttcgggctgttgtgaagaatgccgctatcaacatgggtgtgagaatatctgttcaagtccctggctatatttaaattcttttggatatttagccagaagtggaattactggatcatctggtaattctatttttgattttttgaggaaccaccaatactatttttcacagcagccgcagcattttacactcccaccagcaatgcacaagggttccatgaaatcactaattttataacatttttcctgattacatgttcactgtagaacatttagaaaatgcaagaaataaaatttagaaaattaaaattccccttattctacataccgggacatgacttgaatttttattatccccaacaaagggaagagagcatttttttgggacgattgcgttgctatagtgccgaggcctgccctgcccggaccttattctcaaagccccgccgatcccgccgtccccgcgaccccaagcgtcagcaaagtttatgcagttgaactggattctgagtatatctgtggatagttcctgggagagtcgcagatacgacacggggttgtcacattctctatgggtctgtttcctcatctttaaaagccatctctgcgttgctaaggcaaagcataaaatgtttgaggaaagcgacttttctagaaagcacgttctacaaacacaccatccacgttccaaactgagcttcggtgttttgactggagggcacctgaggacgtcagtacggtcccgcaaagaccagcaaccagattggcaagcagggggcaggagaatttcccgccccatctctttagttgtctattggttgattttaccatcagtctcccctgtcctcctatcatcgccgctatatttgtgtctcggtgcatactctcattggccctacctgcagtcgctctacgtaaggggcgttccagagtcagccactgggagtcgctggattcgggttttaaaaaacgccggccgtgaagtgggcggagcgagcgatttgaacgcgagcggcgcggacttctgccaagcaccggctcatgtgaggctcgcggcacagcgttctctgggctccccagaagccagcctttcgctcccggacccggcagcccgagcaggagccgtgggaccgggcgccagcaccctctgcggcgtgtc

SEQ ID NO: 23056 - DNA, 2300 bp, Homo sapien
tttctgtgggataaataataatagctgcatttgttgcatgcacactatgccaggcaatgtgctatggcctttatctacctttcttcatttaatttccacgacaaggttaaaagaatgtatatgaccccagtattctgggtggagctaagggtcagatggagtaagtcactttctcaaggtcaagtcggcagaaactgaaggagcaaggattccaacccagcaatgcgggactcccagctctgtgctctttctacttcccaggaaacggagcctaagttagcaacaacaaaccgaagtcgaggactgaggacatatgcaacccccggtttgggtgcaacctttatcaatatcctaaactgacagatgacgtagaggcagccgtttcgctgactagggaaggtagcccaagaaagctaagatgctagaatccaaatttaaggtctacgagacgctgcagaaaacatttacagtcactagagggctctctctcccttaagcaaaaagcgcagcaccgcccgcgcgcggtagtctcggaaccccgccgccgggaggccgctggcagctccacgccacctccctgaagcccagtccattttgcctacatccctgtccgggcaagccctggagaatccatagggcagtgccccaagctggagcagttttcacagccacatcccgggctgcactgggttagggatgctttgaggttcctctgggggctccctgctctctgcttaccaagcaggcgggagttgggaaggggagaaggagtgcagactcaggggtggggtaatccagaaatgcatccctcaaaggccagcctggcctggtccaggccctaagctctctggggaaggacggcagggaaccccgccttggcgggctctgcgggtcctgcgcccgggtagattttgctgagatggggagaggggaccccctccacgcccccggagtagtgaacaccattttgtttgaaagtatcctgcaaagagaaccacctcacgaggccatggctgccaggggactcctctccccaccggatcgccggggagcccggggagggagggattctgcagctgcagcttggaggtccttgatgctgcattttaacgcgcatcgcaacgcctttggagtgacattaagtgcaaagaggcaaatgactaatccaaactattattacaactgcagaaaataacacagatcaatggcaaaggcttgaaccgggattagctagggaggtgggacaaaccggggatgatccttcctctccttttttagatttgtttattttggtaaattatgtatgtatttaaacatgaagaaacaggtgaagcgaatgtaaattgggttataaataatttccaaaggcttcgctgtcccttgacagaagccagaaataagacaggcactgggcctgagcgctctggacagggaagcacccgcgtggcgctgggcaaaatcttctcagtggagagaacgcactccgggttcgagacctccccgggtgcagatgcgaactgcggtggccccaagtggccgtccactttgttcatgagaacagttttcctataacgcccacccggccctttgcatcccgcaatcccgcgggcgtcggagcgggtcttggcgcgaaccaggcggcctcggcggggtcctgcggcggagggcagcgcggccgcagcccgggagaggcggccgcggcattgtttcagcccctggggtgggatccagctgggggaggggaggcggggtgtcctccggaaccgcccccggccctccctggggacccgtgcctcagcgcgtccaggctttgtggtgtcctgagtcgccatggaaacccgagggaacgcggagccgggtgctaggggggtcggtgagttctccggccgcgccctccgtccgctctcggaccccggccctgcagcagggcctgccgggagttgtagtccccaggcggcggcggcgcgcggcgccaaggatgcgggacgccgcctgtccccgcctccccttaacctgctagctgaggtggggagcggcgggaggagccggccgcgcggtgattggcggaggccgctcccagcccccgacacgcgcccctcccccgctccccactctggactcccgcgctgggcgcgctgaggcggcccccgagcgagcgcgcgtgcagccgccgccgccccgagcacccgcagctccggcgccgcggcgagacggagacggaccgagccacgggcccccgcggccgcagcatctcggaggagtgggtgatggcaggggggtcggtgggcttacccctcccg

SEQ ID NO: 23057 - DNA, 2300 bp, Homo sapien
ctgaaggagcaaggattccaacccagcaatgcgggactcccagctctgtgctctttctacttcccaggaaacggagcctaagttagcaacaacaaaccgaagtcgaggactgaggacatatgcaacccccggtttgggtgcaacctttatcaatatcctaaactgacagatgacgtagaggcagccgtttcgctgactagggaaggtagcccaagaaagctaagatgctagaatccaaatttaaggtctacgagacgctgcagaaaacatttacagtcactagagggctctctctcccttaagcaaaaagcgcagcaccgcccgcgcgcggtagtctcggaaccccgccgccgggaggccgctggcagctccacgccacctccctgaagcccagtccattttgcctacatccctgtccgggcaagccctggagaatccatagggcagtgccccaagctggagcagttttcacagccacatcccgggctgcactgggttagggatgctttgaggttcctctgggggctccctgctctctgcttaccaagcaggcgggagttgggaaggggagaaggagtgcagactcaggggtggggtaatccagaaatgcatccctcaaaggccagcctggcctggtccaggccctaagctctctggggaaggacggcagggaaccccgccttggcgggctctgcgggtcctgcgcccgggtagattttgctgagatggggagaggggaccccctccacgcccccggagtagtgaacaccattttgtttgaaagtatcctgcaaagagaaccacctcacgaggccatggctgccaggggactcctctccccaccggatcgccggggagcccggggagggagggattctgcagctgcagcttggaggtccttgatgctgcattttaacgcgcatcgcaacgcctttggagtgacattaagtgcaaagaggcaaatgactaatccaaactattattacaactgcagaaaataacacagatcaatggcaaaggcttgaaccgggattagctagggaggtgggacaaaccggggatgatccttcctctccttttttagatttgtttattttggtaaattatgtatgtatttaaacatgaagaaacaggtgaagcgaatgtaaattgggttataaataatttccaaaggcttcgctgtcccttgacagaagccagaaataagacaggcactgggcctgagcgctctggacagggaagcacccgcgtggcgctgggcaaaatcttctcagtggagagaacgcactccgggttcgagacctccccgggtgcagatgcgaactgcggtggccccaagtggccgtccactttgttcatgagaacagttttcctataacgcccacccggccctttgcatcccgcaatcccgcgggcgtcggagcgggtcttggcgcgaaccaggcggcctcggcggggtcctgcggcggagggcagcgcggccgcagcccgggagaggcggccgcggcattgtttcagcccctggggtgggatccagctgggggaggggaggcggggtgtcctccggaaccgcccccggccctccctggggacccgtgcctcagcgcgtccaggctttgtggtgtcctgagtcgccatggaaacccgagggaacgcggagccgggtgctaggggggtcggtgagttctccggccgcgccctccgtccgctctcggaccccggccctgcagcagggcctgccgggagttgtagtccccaggcggcggcggcgcgcggcgccaaggatgcgggacgccgcctgtccccgcctccccttaacctgctagctgaggtggggagcggcgggaggagccggccgcgcggtgattggcggaggccgctcccagcccccgacacgcgcccctcccccgctccccactctggactcccgcgctgggcgcgctgaggcggcccccgagcgagcgcgcgtgcagccgccgccgccccgagcacccgcagctccggcgccgcggcgagacggagacggaccgagccacgggcccccgcggccgcagcatctcggaggagtgggtgatggcaggggggtcggtgggcttacccctcccgggctaggacatcctcctctcccccttctgtttctgcgtgaggcgcacaaaagggcggggagccgggtgagcctggggcccggccgcaggggacgcggcgggaggtgtggtttggggttgggaggtggccatcggggctaagccggggcgctcttggggtcctctttgtacgcccgcgaagcgccgtgccgggcc

SEQ ID NO: 23058 - DNA, 2300 bp, Homo sapien
tgccaaccactggaaaactcccactcccatcccgttatgttcacaacctaaacagagttggggggtgcagggcttagccaatgcgagtggagtgccatcgataggggcgtgggcgaaggtggcctctgtggagggcagtacgcaccacggcatggggatggtcattgtattctgtcccatagccttggtgggtgccaggcggcagcagctcttacaatatttacatatttacattatgtaaataaatatggagggtaaagattaagagagaaatgctagatcagctcttactcttaaaaaatgcttgttttggctgggcatggtggctcgcacctgtaatcccagcactttgggaggcggagtcaggcagattacctgaggtcaggagttcagcctggccaacatggtaaaatcctgtctctactaaaaatacaaaaattagctgggcatggtggctcgtgcctgtaatcccagctactccagaggctgaggcaggagaatcgcttgaacccaggaggcggaggttgcagtgagctgagatcgcacaactgcactccagcgtgggcaacaagagcaagacttcatttaaaaaaaaaaaaaaaagcttgttttgagaagaatcaacctccttttcatcatcagcaatacaataaaagaaacaattaccaagactccactataataatgtgggcttggttccaaggtcaagaatcttttgaaacacccctgcttgctacaagcaaatttactgaaagaacaaaaaagataataagtgcttcaacccacccaaattacagcgcccaaacccacacaaattcaaatagactggaataagtatcattgaataatttaagtttttatatctagcttactttgtcaaatgtattttaattatttaaattaattctatttatttaagtagaaatgtactttttgtgttatgataatagtctgaatccctttttaatccctttttaatcagtgcatattgtaaatgggtgctactttataggatttggagcataattttaatattttaatatttatagaaatttatgatgactataattttgcttttgtaacacattattggttataatttatatgatgcaagatacttgatagaaaattcagacaccaattattattcctataagaaaatatgagctgtttcctaattatctactttagggtatgatttgtgatttgttaggccctgcaggaataaaaaagtacaatctatagatataactatttatgctttattctggcttgtttttttttttcagacagggtctggctctgtcactcaggctggaatgcagtggtacaacctcctgagtagctggggctacacgtgtgcaccaccatgcctggctagttttttgtttgtttgtttgtttgtttgtttgtttgtttgttgagccagggtctcactctgtctcccaggctggagtgcagcctcccaaagtgctggggttacaggcgtgagccaccctgcaccaccgtgcccagcctaatttttgtattttttgtattttttcatcatgttgcccatgctggcctcaaactcctgacctcaactgatccacccgcctcggcctcccaaaatgctgggattacagatgtgagccactgcacctggcctaaaatctggtttcttaaagggacaagaaattttttcatttgatcatataaaatgttacagtgcttagcaaagccagtcatgttttaaactttaaatggtttggatgggggcttcctacctcccagattcagggcagcactgagagagctcagagggcctcctagaatgtaactaccgtcattcacagctgcttagtgggtacctttgtgtaggagccttttcagaaagctgggtgctcaggaagacttgctggttaaagagcaggagttgagcctgttgctctcagggtccctgacctgcccttcatgactgcagtgggcatcttctgccctgagccctgctcaggtatccagagggcccctcaggagaaaggaaaccctaaagattccattcatctatcagggcttctgcaggtccagagagtgtggggagccttggggctctgcgggagaatctcttgcaaagagtctctgcaagggccagagcagcctctttggcccagagaaggcccagcctaccgcacaggaagagcgatgcatcttcaccacgggtttggccaaagacattagtcactgggcaggagctgagactgataagccctgccaggtcccccgtggagacagccctatggagctaactggccatcatctga

SEQ ID NO: 23059 - DNA, 2300 bp, Homo sapien
actcatgggctcaagctatccttccacctctgcctccttaagtgctgcgattataggtgtgagccaccacacccagctatacattattttaataactggcttcatatttttttcttttaccaactgctatactaaccaggattttttttcttcatataacactataccctgagtgtctccctatatcagtaaaaattctttaaaaacatcttttttcagagctgaatgatattttctccaatgaaagtaccatactttatttaatccttccctgatgtttgggactttcggctgtttctaatttttgcacttacaaataatgctgaggagaacctctttgttcaggagtgtgtgtcagcatttctgattattattattattattattatttatttttttttgtgtgtgatagaatctccctctgttgcccgggctggagtacaatggcgctgtctcggctcactgcaacctccgcctcccgggttcaagcggttctcctgcctcagcctcccgagtagctgggactacaggcgtgcgccactatgcccagctaatttttgtattttttatagaggcgggttttcaccatgttggttggtcagatggtctcgatctcttgacctcgtgatccgcccgtcttggcctcccaaagtgctgggattacaggcatgagccactgcacccggcctctgattattatttctgattatttccttaagacagcatcctagaagtggatttttaggccaagggatgtgaacatttttaaggctcttgatttgatatattttgtctaattgctttcagaaaagataagaactgggacttcatttgaataccacctgttccgcacatgaagaataagtatttttggtcttgatctatctcagattagatctaaaatagtatgagccccaaagagatttgaagttctcaagactaagctcatggaaggccaaggagatggctcaggaaatccccttgaagagagtccatagtactctcatgggtggggcaataagatgtttttctagagcatatataaccctttgaaaatatcacccttagtagatgaagggaggttcctgactcatccgtgtgggcacatgagcagagctggttttacaaacaggaggcagatttgcccccgggcaggaagcctgaatggaaccacggccactcaccatagttgctgggtgaagggagaaaggaataagtgagcaactgggacccagccaagcaggctggctcatctgagatggtgctcatggccttgtccctttgtgaccactgtcctgaccacctaagccctaagtccatgggccagcatcaaaggtgaccaagggtttgagacccacccccagagcctggttgacttgacactttctgcaacatttcaggttggaggaaagatggatgagaaccgttttgtggccgttaccagttccaacgcagctaagcttctgaacctgtatccccgcaagggccgcattattcccggagccgatgctgatgtggtggtgtgggacccagaagccacaaagtaaagtttgttgctcgtccccagggctagaggggcttgggattttgaagaagacttgcattacagatctccaaaagcatataattttgcactatttctagcacaaaatatggccctggcctaccgttggccatcttctccctccatcttcacacagtctttcttccgtgtcacacatgtctggtgtgtctgtctcctcttcttataaggacaccgataagactggattagggcccacctatatgacctcactttatcttaatgattacattaaaggccctaaatagtgccatgttctgaggttctgggtgttagaacttcagcagaagaattttgaagggagccaattcaacccataacaaccagcctttggggctcacccctcccatggagctgtgacattttgacctgtcctcagcgctttctctcccgccattgcctccccaccaggaccatctcagccagcacgcaggtccagggaggagacttcaacctgtatgagaacatgcgctgccacggcgtgccactggtcaccatcagccgggggcgcgtcgtgtatgagaacggcgtcttcatgtgcgccgagggcaccggcaagttctgtcccctgaggtccttcccagacactgtctacaagaagctggtccagagagagaaggtgaggtgggaggaggaagatgcaggggtgttggcgccccctgccggggaacatcctccatgactgttttaaatctcaaagagatgttcactccagttt

SEQ ID NO: 23060 - DNA, 2300 bp, Homo sapien
agagctctctcctttctgataattgctttaggtggaagaagagaggatatgctgtgtcccctctcttttcttacttactctatttgtaactttcttcttttttccccaagaaaatgggcttagttggggtgctttggcaccaatagtcctgcggcggaatctgtgggagctagacagggagatttggaagagaatgctaggttgtgagctcttgcttttgagttgtttgaagagaatgctgcatctctggcatgtcaacaagcccagcagaatccagtaacgttcaccaagaaggcttgattagagctggttaggggatgatcaggatggttaggtgtgaagagcttacgctgattatggagggtatgggagtcacggggttggtacccagtgaggaaatttaccttagtagaaacatttgggatagtgtagaagagagaagagctagaggcgaggattcaggaaatagagaatgccagagtctcaattaacaggatggaaagctaaggagatgaaagacttataatagtagcatagtactaaaagacaaactatgtgtaaaggtattagaaatggggactgggactctgaggcagttaggccagagaaaagaagaaggaaaagatttgtcttcatttgattcaattacataagcatttctcagaatctgctatgtgtcacatgctgtggtggatgctgagggagctgatgaaaaagacagaattcctgcccaccagggtcacatagtctggagacacagacacgtaaacaaatgacgatagtgtaaggtgtgtgtaagaaaggaggaatgtacagggttggtacaaaggtgacctcaaggcatccatgggaatcagggctgagggaggaagagccagaagacatcagcacaaagagaaccaagatgctgaagtcacagggggaaagaacatactggagccccgggcagagcagtgctggacaaggacagcaagtgtggagaggaaagggagatccagaagaaccgaggagatccataacagcatgcttggaggaggaaattcgggaaaacgaatggacatgtcagagggagctagttatgaggaagtggactgcaaaccagatagtgagcaagatgaagaaatgaggtgtttatccttgcaatgggagagagacaataaggctgacaaaaactcaagtggtctgtggatagacgatttcgttagctcgatttaagggtaaagggcacactctctggtaggagatgaaaggggatgtttaaaacaggtagaaaaaaattgggccgggcgcggtgtctcacgcctgtaatcccaccactttgggaagccgaggcaggtggatcacctgaggttaggagttcgagaccagcctggccgacatgatgaaacccctgtctctactaataatacaaaaactttgccaggcattgtggcgcacgcctgtaatcccagctactcgggaggctgaggcaggagaattgcttgaacccaggaggcagaggttgcagtgagccaagatcgcgccagtgcactctagcctgggcgacaagagtgaaactccgtcccaaaaaaaaagaaaaaaaaatgaatttgggaattagagaaaaagactgtgattggaacccacacaccaagagaggagataaaacccagccttagctcttccatgtcgctgaaagagaagaaaacgtctctttttccttttccgtagccataaaagatgaaaatccgtcatccagctactgaaatcaggtgcacacggttgttcctcctgtgatgagacagggcggagggattgttaccctgttgccagggaaaaaggaaggggctgttcccagttgctatggtgacgaggtaggcgcgttccctcggtaccgccgcacacgtctgaagcggtctcttctcctcgttgctacggcaacgcagtgggcctgttcctgtcgccccccgcctcccgccgcaatcgctaaggcaaggtggaggtaggggctgtcctcccgcggctcagttgccttggagacggcgggtgccctggccccgccccgctcggactgacagcggcggccgcatcgcgcctgcgcagtgccctcgtcccccgcagtctctgtgcgttgaagccggagaccgcggcggcctcagcgaggaccctccgccccggagccgccggccggagccgcagcctctgccgcagcgcccccgccacctgtcccctccccctccgcctccgccggagccgcctcgtgcactgtgagtccgggccgaggcgacggacgccgtggggctgagtcagcgggaggccag

SEQ ID NO: 23061 - DNA, 2300 bp, Homo sapien
ctgcctccaattacagcaaagacataacctgccaggcgcggtggctcacgcctgtaatcccagcactttgggaggccgaggtgggcggatcatgaggtcaggagatccagaccatcttggctaacacggtgaaaccccgtctctactaaaaatacaaaaaattagccgggcacagtggcgggcacttgtagtcccagctactcaggaggctgaggcaggagaatggcgtgaacccgggaggcggagcttgcagtgagccaagatagcgccactgcactccagcctgggcaaaagagcgacactccatcttaaaaaaaaaaaaaaaaaaaaagacataacctgacgaaactcttaataataacacacttgttcccaagagctccttcacctccccggagagaatggtaggtagccactcggagggggcaggctctgtcccaagagatgtagtagcagtgtcttccaaccccatccacatgtttctaccatgatctttggcacatgtgactgtcaggagaaacagaccctgattggattgtggcatgtcatcatccaggcggatccccattcgaggatcagaccgacaacgtggctttggggaaagcctgctctgaagggcctcgactcctgctatcaggaatggagccaagggaaagaaaagttgaggaggtttaatctggtgattttgctgagtcatttcctatactaggactgtaaggttcatggtgcattcacaggcaactgggaaaggcaattacagctctcattgcgggaggggaagctgctggtcattctgcagactgaggccttaaaaatggtcatcaagaccaaatcccactaacccatggtcagaagggtttctagagaccatctgcttccttcccaggcgattaggactgcacttagatctaggcacttatattcttaaatcataaagatggccaataagtctgcacaactgaaatttcacattctattatttaatgaccttatcaccagcctaaatctaattttggctttttgtttttaaatctgtcttccacaaatatgtcttaagggtaatttaggggccctcagtcttctctaattctctagagctctttttaccccaagtttagccctgttctggctggtccctggaagaaccccctgcagtttccaggcctccaccctctgcccagcgtggctatgaaagacacaccaggtctaccagtcctgaaggaggtggccagcatgcctccagcaagctccagaaaggtagtgcttaagaacactagatctccaggcacatcaggtgggttcaaatcctagttgtaccatgtcctagctgtctgacttgactttaggtctcagtgtcctcatctataaagtgaggacagtgacagctcccacctcacagaacagttatgaggattaagtgagccatgtgtacacagtgctgagcacagagcctgacattcagtatgtatttggcaagtgctgtcagcatcgcggggacagacagtgagaatctaagggcatttgttcgaggagtaggtgcctgacacacagccagcctctggtctcagaccatggaaatgccagtccagaaaggagacagactacagaacttttctctgctgctttgccttgagacagccacatgggcttcccaaagctgggctctgaccacaatccctccccagctccagatttcccatatagcctgctttgtagacgccatcctaccggccaagacaactggaacagatgctgtgggatcagaagagagagaactccacagagccagccaacacgtttcccgttcctgaagtgggactatgcccattgtcactgggctaccccttcctgcccaggcccgggggctgaagtcacctgtttggaaaatctgcaaaattgctacccctacccctgtgagtcacacatccaggttattctgggcttgcatggaggcagtatgtgcaggtggggctgaggggttctgaggggctggggagcaagccagcgggtcacaaagccctggcagacctggccaatcaccttcttcttatggctgagcaaggacctgattcattgagaggctcagcctctcaaagctggattaatcaatgcagagacggggcaagtggagtatttgcagggttggcctggagcccagcatgcgccccctcccacacatccaggacagggatctggacggctgtgggttcaggtagggactgaaactcctccaggattttgttctcacaacacttttaggtcacaactctaagaccctgagccctgctgaagttccagcc

SEQ ID NO: 23062 - DNA, 2300 bp, Homo sapien
ggacaaaaatccaaactatatcaaacctcatcacctccaaagtcccatcaagcactgtcccattgaactgcttccagtttaccaccctctaggcctttgttttacatcaacagatccacacaactggcattttctctccacccaccctaaccctcagccagtgaacattcaattttgttttttgttgttgttgttgttttgggttttttgagacggagtttagctcttgttgcccaggttggagtgcagtggcacaatctcggctcactgcaacctccgcctccaaggttcaagcgattctcctgcctcagcctcccaagtagctgagattataggcctgcgccatcatacctggctacttttttgtatttagtagagatggggtttcaccatgttggcctgactggtttcgaactcctgacctcaggtgatacccacctcggcctcccgaagtgctgggattacaggcgtgagccacggcgcccggggaaccaatgaaaatgctatttctcagaacctatctcagctgccgtctccttcgggaagctaaactccttcctaaggaatgcatcgctccctcagctgttcatcctgtaggaatttggactctcttagttcttatcataatacctcagtatggcaggtaggaatctcatcctcacacacagttgtacatgaaatagcacatttccttaattgtgataagtcactttgattttatcttccctcattctcctctgctggcatgcttcaaggttctgaaggctcccaggatactaacaccctccacgtggatgtctgagcaggaacctgtctgcagatgcctcaagtctggggctctccatcgcttccctgacacatctggaacttgggattgactcttatggtgggaggcagagcctgttctttctcattgcctggaaggggaaacccggccctggctgtcccagacccccagacttttctcagcctcccatgagaagaactcagaggccaggagcggtggctcactcctgtaatcccagcactttgggaggctgaagagggtggatcactgagcccaggagtttgagatcagcctgggcaacacagcaaaacccagtctctacaaaaaataccaaagattagccgggggtggtggtgggtcaggtgatccgtggtgggggatcacctgagccctagaagttgaggctgcagtgagtcgtgatcgcgccactgaactccagcctgggcgacaaagcaagatcctgtctcaaaaaaaaaaaaaaaaattattctccattctccacctcctaccccagctccccaacactctgccctttcctcaagcccccatcctcttccttgttctttggcaatagatttgtatagcccattaaacccgaggtttaatcactagcaacagtaaagccagcactttcctagaaggaaggaagcatttaatcttcaatctctccctagatatgaggagcactacttcccttccatccttccagctctacgagaaaggaaagaaaaacagtggccgggcgccgtggctcacgcctgtaatcccagcactttgggaggctgaggggtgggggtggggtgggtcactttaggtcaggagttcgagaccagcctagccaacatggcgaaaccccgtctctactaaaaatacaaaaattagctgggcttggcagcgggagcctgtagtccctgctactcgggacgctgaggcacgagagtcgcttgaacctgggtggcggaagttacagtgagctgagatcgcgctactgcactccagtctgggcgacagagcgcggccctggcaatcaatcaatcaattgatcaataaaggaaagaaaaacagaaacagttctaccaagtctctcaatgccgtggccttcacatcgacgctcaatgaacgttctcagaagggaatctcctctcctcccggcctcttcgcctgggcgggggccgcaggctgccgcggaagcctcttcccgatgctcttcgctcaggagagcccggcccaggagagggactacaagtcccaggctgccttgcggcgggcgccgggcgccgggcgcgcggtcctgcgaggagacgtggcagagtgcggcgcgctcgcgccggaccggaaagccggggaagtggccgaggagggagggctgcgagccatggcgaccaagacggcgggcgtggggcggtgggaggtagtgaagaagggtcggcggcctggggtcggcgccggcgccggcggccgaggaggcggcaggaaccgcagggcgctcggggaagcaaacggagtgtggaaa

SEQ ID NO: 23063 - DNA, 2300 bp, Homo sapien
agaatagaaaggaaatggaaaatttatagggaaacatggattggtaagaggaaagccttgaagacccaggaacaccagggaggagatggagaaactggttatgattctctgtcctatggaaatactgatctttcattttctgtcttgtcctctgttttcctctttttttttttttttttttgagttagagtctccctctgtcgcccaggctggtgtgcagtggtgtgatctcagctcactgcaacctctgtctcctgcctcagcctcccaagcagctgggattacaggcgtctgccaccacgcctggctaatttttgtatttttagtagagatggggtttcactacgttggccaggctggtcttgaactcctgacctcaggtgatccgcccaccttggcctcccaaagtgctgggattacaggcgtgagccaccgcgcctggccctctgttttcctcttgaacatgtggagggcctgagaggatagggcctgagatcagcattttcagctgtcctgttccattcttaaagatgtaggtacagcagaattgcagcattccatgttcttatgcttaaaaatggaatcccttcttcctactgccacctagttcaaccattttcccacccctaccccatttctttactccctcactcacaactcgccatggtggggggttgggggattgtccctggcagctggatgtggcagacctgcagaaggaactggacaagagccagagtgtgttctctggaaacccatccatatggttgaaggacctggccagctatctcaactacaagctacaagctcctctaagtgaacccacgctgagccagcatactcatggtaagtccttccagcttcctcaagctcagacaagttcaaataaattcaaaaagggtggtataacagatcccagtgccccacactgtcctgatttccatgggtgatttgggctggtctcaaatcatcgtgactgtgaatgtttctgggcctcattctgtgatcctccctctgggcctcctcagaggaaggatcccagcctcagtgcaggggcctttgcctccactcaccattcccagggagagcaccacagttctcagagctgatgggtgtctggtcctagcactcacattgaggcctatgggccttagattatccctacagcctggtgagccgggagctacgtgggatcatccgagggctgctggcgaaggcagcagggtctctggagctcttttttgaccactgtctgttcaccatgttgcaagagctggataagacaccaggtgaaaggggcacgggagggatgaccatcttgggagcctcctcctttttttcctgcttccagtaccactcagtggttctgtttccagcagagaaatgtgctaaccttaacactttttggaaagtgtggaggaagttaggagtcagtggacctggggcctgggctcaccgctgacaaatgggagatttcaggtttgggatgccaaataatgtgagtaggtgtgagaatgtgtatctctccaggggagtcactacatggttaccgcatctgtatccaggccatcctgcaagacaagcccaagattgccacggcaaacctaggcaaggtgagctctcagtgatggtggggatgctaggaagctaggactggggaggctgggcagaatctatgttgttggactcaggtttgggatagtggaagacctgtaagcctagtaataatgggtaacactattagcacctatcctgtgtgtgtgctctggaaacataggagcaaggtactgctattatttcccatttttatagatgaaaagattgagccacagaggagttcagtaactttcctaggctcagtcatccagtaaatggcagagtatgggcgaagcccacaaacagaacctgcaccacgtggccatagtgctccactcttgctcggcctgtcctccctcttccagttgacatctcccttccctcctggctttggggggtgctcctggtgttttgtcctatcccaatctgccttccccaccggtctcctcagttcctggaactgctgaggtcccaccagagccgaccagcaaagtgtctcaccatcatgtgggccctgggtcaagcaggttttgccaacctcaccgagggactgaaaggtaacagggaaatagggaagaaagagggagggtctcggagctggaaaactcctctttgatgcccccagtaggtgcaagcctgaggcctccctcgtgacttttacccctgcagtgtggctggggatcatgctgcctgtgctgggcatc

SEQ ID NO: 23064 - DNA, 2300 bp, Homo sapien
gctggcagatggggtagagtttataccctttttcctagatgttggcttagctggggtcatggccaaaacagctggcatgggtggtggtgtccagcgagcctgtttcttcatccccacaggatgcatcccaaccttaccaagggcttcggcatgattggccccaaggacttcttcccacttctggactttgcctatatgccgaacaactccctgacacccaggtaggactgctctggggcacacctgctgagaagggaccacagcaccagaaccacactacatattcccgtctctccttccccagccatcctagatctgagatttgcaacctggaagttcaagagtaggtttcaagggaacagtgaccccttgaaattatatggacccttgagtgtgattggcatatgggcattttcttagggatagggtccatggctttcaacagatttccaaggagtctctgagtaaaaagattcagagccattgcaaggtcctcagtggctattccccacaggcaggcatgggctctgaagcaagcaaaaggttcatatcatacagctccacttatagcttatgcctgtctttcctccccaccccacccagcctgcaggagcagctgtgtcagctctacccccgactgaaagtgctggcatttggagcaaagccggattccaccctgcatacctacttcccttctttcctgtccagagccacccctagctgtccccctgagatgaagaaagaggtgaggatatggtgggaggctttttctccttccccaggggtcagctgtagcggtccctatctgctgacaaaggccttgccttcacagagcccattctgaggcttttccttagctccctgttgacagctgcctgccccgctcactcgagcttcaccctcagaagatggatcccaagagacagcacattcaggtctgggtggtttctgatgcccgtctcttgcagatagtgatctttgagctcaaagctctagctcaggagccccagcctcctgctttacagcctctcagagagctttctggagtcttgacactgtttctccaccccttagggtggatgtgcggcctggatggccttgcttacgggaaggggatcacctcttagcactccccgcctctgccagccccatgcccccagcagcctctccctctgtcgtgctgtgcagctcctgagcagcctgactgagtgcctgacggtggaccccctcagtgccagcgtctggaggcagctgtaccctaagcacctgtcacagtccaggcaggtggggtgggaggccagcctgtccctgtgctagaagcagaaggggagcctgggtcactgtcccatggcctgacacctttcaggctgagtgggaacattgctggagcagcctctaggaagctgctgctctgtgggtggtaggtggagggtctttcagcctgaaggagccagggctaatggaggacaggaggatgggtgaggctgcgcgagccacctgactagggggttgtgctttccccacagccttctgctggagcacttgctcagctcctgggagcagattcccaagaaggtgaggagctgggaggacgtggcaggttgagccctgtctggattctaggttctgagtgggggctcctcagccactgtcccttccctgagaagggaccctgttggcatggaaaatgaagcaggatggaagctctggattccctcacaggccagacctttcttgtccataggtacagaagtctttgcaagaaaccattcagtccctcaagcttaccaaccaggagctgctgaggaagggtagcagtaacaaccaggatgtcgtcacctgtgacatggcctgcaaggtgctggcacccggtcctctccagcccacacgctatcttacatctctgtctcagcacacctgggttgggcctgtatcacattcctgccccacctgtctggagccccccgctgcctccaggataatgtgaaggcttgacgctctttcgggaaggcctggcttgaggtctgccctcagaggcaaagaccagcccctcgcttctgacaactgtctcctgctcccctcccaccagggcctgttgcagcaggttcagggtcctcggctgccctggacgcggctcctcctgttgctgctggtcttcgctgtaggcttcctgtgccatgacctccggtcacacagctccttccagggtaagcagcaatgggcaagcgaggaggatggtgtgggcggggcacagagctacacgtagcaccaccaccccgcccccagcagcacacatcttt

SEQ ID NO: 23065 - DNA, 2300 bp, Homo sapien
cgcgggcgatgttggctcaaggtagcacaggacgttggcccagagctggaaattgaggccaggtcttccggcacacccaccccacaggacgaccaagcagggcttcacagaggagttgggggttaggtttatttctgttgttaaaaacccggtgaacaaaaggttgtggaaaaaacacatgcaaaagacaggcgaaggtgtgagctggatagggacaaagatgggggaacccgtggggtcactccttgaccccacccgggacacctagacatccacagtgtcgggggaggggccccagaccaggcagaagacccttccccggccctggggaacccaagatttccgagagtaagcggacctgtgcaaagacccacaagggaggccagtggcctgtgctgggcactgtacagccgccccgaccccgacctcacgtgggcctcggaggctgcagggacctacccggccgcgcgccgcccaccatcccaggtctaccgcaggggaatcccccaggcttgcgagcgcttccgagggcaggaaagcctgtactgcagccccgccgccctctcctggcgcgtagccctctccccgagccctcgggccacgccgccaggcccgcgatcccagggcggcccggggggttcggcacagcccgataatgcgccgcgccgaagcctgcagcaccccgcggtcgccgtctctcttgcactggtcaggacgaatagagcctgacaaaacctgagttaattggccgagcgaatgtcgttcgcgtcaggagagcacgtccggagaagccaagggaaatgtggagcaggagcagccaaagtggcccatcggctctcgagcagggtttgcgcgtcgcggtcgcaaagcccctgtgagtgcaggtaccgcggcacaagcgctgccccggagctccaggaggcggcggcgggctcggcgttcgcggtccaggagaaaccaccgcggggtgttgggaacattttgttaaaaagccgggaagctcagggccggtgtggcctccgttctggcctgagaacccggactttgggcagcttcttttccttgcctttgggtctccggctttctcagctctgtgaggtcccatgggtctcctgccctggcaggttccttcagctggagaaagcgggggtcatggctggatgaggttgcggtaagcattagagggctatcagcagcatcttatcgcagcggagccttcgatagctcagttggtagagcggaggactgtagtggatagggcgtggcaatccttaggtcgctggttcgattccggctcgaaggacttcgtctgtaatttttaacctcaatttaattcaattatcccataaggggaaaggcttggaggcctcctgtgacttagcattcgtactgccgtcagtccatagggaacaccgtagtatgtagtatacggtaacgctctttctgcgttcaatgtacatgtggtaacgtgttttagaatgttttctgcttaagcacacgattatatgcttgatttttagaatcttgcacatggatgccactgtattgtactctgctaaataaatgtcctgaactgtggttgatccactggtcagtgaacagtgcagtgaacctgtaaggcaaagggaaagaactaagcagcaggcgggggattagctcaaatggtagagcgctcgcttagcatgcgagaggtagcgggatcgatgcccgcatcctccactcagcttttgcgtccgtcacactacagaacacaaaacgggagggattcccggcgcagtgggctacgtgtttcattttagagacacaagactgttaagcgataaggagtttcacacgatgtctttttatttcgcagttgagtcccagtttctgccgctttatctttcccgcctcccggcaggcaggccgttaaccgtcttccggaagacgctgctagaaccctccggccgctcctgcccgccatcgtccccgaacgacactcgctcaggtacccactaacgtgcgaggaaccctgagagctgaccaatggtagcgagctttactgggcgggtcgccagctgcagccacggccaataggcgagagacttcttgtttcctggcagagcggggtcccggcaccgcggcgctcgggtgtttttgggggcccgggtggagggcccgggtgccggggcccaaggtgcggcctcgctagcgggagagggagcgggatcaccggcccggagagaggtgaggggctctgcgcggactacgggccccgccagccccggccccgccagccccggccccgcccccttctctca

SEQ ID NO: 23066 - DNA, 2300 bp, Homo sapien
gctacgtgtttcattttagagacacaagactgttaagcgataaggagtttcacacgatgtctttttatttcgcagttgagtcccagtttctgccgctttatctttcccgcctcccggcaggcaggccgttaaccgtcttccggaagacgctgctagaaccctccggccgctcctgcccgccatcgtccccgaacgacactcgctcaggtacccactaacgtgcgaggaaccctgagagctgaccaatggtagcgagctttactgggcgggtcgccagctgcagccacggccaataggcgagagacttcttgtttcctggcagagcggggtcccggcaccgcggcgctcgggtgtttttgggggcccgggtggagggcccgggtgccggggcccaaggtgcggcctcgctagcgggagagggagcgggatcaccggcccggagagaggtgaggggctctgcgcggactacgggccccgccagccccggccccgccagccccggccccgcccccttctctcagccccttgagcccgagcccctcgaaggccaccccgcaccccgctcccgacctggcttacgcggtcccgaccccgcccagctccgtggcctcacctctgactcctaggccctccctgcctaatcccctgccgcgggagcccgtctcgaccccttccatgcctcccagtcccaccctgcccagggcaagcccgctcggtgtgacggttccccgcgagtcgagggtggagaagccagcctccttcccccgagtgggactctagcagcccacctcttttaggggtgctgagaacacccattactcatccacagctactagggtagctttctcagggtgcagtgcttacggggcggagggggatggaaacagacccatgccctggctggaagggagctccagtcgctaggtgagcccagtagcctttggcttggcagaggcaccactgttatagtttttctccatactaggcataaggtaggaacaaaaaaggaagaaccagcccttccagggctcaggggagcaacaccagaatgtccgctcagtacttgtgaggacagaggctggagagaggactacccatttacactcagaacctcgattcctctctctgctctgtgctggagagtgcagagccagagatccagaacggcccatctctaaaggtggccatgtatggtggtgagtgtatcttggctaggtttggaaaatctgacctctctgattatattctctaatctttgggctgcaaagcagctgagagtttagtgtttttcaacatagttaagccactgagttttatttgggaacagccaagctaaagtaaaatggggtccctttaggtcatttacaacccttagtgttggggtacagaatgctgctttctcttggcctttgctggaagaccacttctatgttttctaagagggagacagccttttgtttcatagggcactccctaagaatagctcttatttatcaagagatacccagaaaactcttcgatttgtcttccctttcctccttaacctaacccttgttttcccccagctctcagggccagagcggggcaggaggatgctttcccagccccaccatggagctgcgctgtgggggattgctgttcagttctcgctttgattcagggaatctagcccacgtggagaaggtggaatctttgtccagtgatggggaaggggtaggaggtggggcgtcagccctgaccagtggcattgcctcttcccctgactatgaattcaacgtgtggacccgaccagactgtgctgaaacggaatttgagaatgggaacaggtatatggaacgaaatggagggtggaaaaaggctccaaacccatgcttcagttagccctctgacttatctgttcatacccagcatactccctgtccatttctgacccatcgtccctcctttctccttgccaaatagccctttcccagtttggctggctccggctctcccacagaccatatctccaacccttccacacgtaatgacctctctcttactctggtcctcaggtcatggttctacttcagcgtccggggaggaatgccaggaaaactcatcaagatcaacattatgaacatgaacaagcagagcaagctgtattcccagggcatggccccctttgtgcgcacactgcccacccggccacgctgggaacgcattcgagaccggcccacctttgaggtaagttctccatgaggaggaaagaaagacttgggtgctaaaagtagagaggaaagtaaagcgtttttttttcc

SEQ ID NO: 23067 - DNA, 2300 bp, Homo sapien
ttattaaggaaagctaactgcattatagtctgctagagtctgggaatccagagaaggaaaattttgcattgttggagggaggaagctaaaagcttaaaaaaaaaagaattgcttcccaacacctagaagtaatgtcaaactgagaattcaggcagcactgattactgttaatggttgtgatggtatctgctgtgtattaagtcacatggtcacatacttgctatctcttccttgcaccttgtcccttctgtctctccttctgagttgacttttcttccccaaacaggtggaaaacatgctatatccaaagctcatctccttgaattcagcccacttcgacttccagggctgcaatttctcagagaagaatatgtatgcccgagaccgtagagatggccagtctaaagagggaagcggccgtgttgcaatctacaaagcctcagggataatccacaggttgggtggaagctgagatatagttgatgaaatagcttccctaaagaaaacaccgtagctgggtgtggtggtgcatgcttgtaatcccagctactgaggaggctgaggcaggagaatcgcttgaacctgggaggcagaggttgtggcgagccgagatcgtgccattgcactccagcctgggcaacaagagcgaaactccgtctcaaaaaaaaaacaaaaaacaacacccagttcagggtgtttgagagggagggaaccaccttagtcttcttaaaagagaacctcacaattagcattattgtctttagtctaggactctaccttggggggactctctgggtatatggtacagtaccaaggtcagctgctagttgctatggattattagcactttcatttgtgttcacttttttccaagtgattgcctcctttgaccacctaagttgtcctctatggttctgtcctggtatctgttcaggcgggacactgataaaggtctttatgtcttagctacacacttgaatgcaactacaacactggacgctcagtaaacagcatccctgctgcctgccatgacaatgggcgtgccagcccccctcccccgccggctttcccctccagatacactgtggaactatttgagcaggtatgaatacatggtgtaagtgggaaaagggagaaaccttacagtctggaaaggccttcactcttagtgcctgactctaaggtcctttgaagagatattcatcactatggccgtctcaccactatgattattttcctcagttaacaggagcataactacaactgtaatagtattgaaaggatgaacaggcactatatctgaccccacatcacagagaatcccctagcacctctgagtcagattctttgcctctgggcttgtctttctcattctattggatttattagtttctgggctcaaaagcaccctgactgtagtggtcttgatgattcccattatcctaatagaaagagctggccaggtgcggtggctcatgcctataatcccagcactttgggaggccaaggcaggcggatcacctgaggtcaggagttcaagaccagcctggccaatatggtgaaaccccatctctactaaaaatacaaaaattaactgggcatagtggcacatgcctatagtcccagctgctcaggaggctgaggcaggagaatcacttgaacccgggaggcagaggttgcagtcagccgagatcacacgccactgtactacagcctgggcaatagatcaagatgccgtctcaaaaaaaaaaaaaagtagatctgtaggttacagaagggattcaaacccctttcctgctaggagaattccttcatggcaccagccagaaagaaaggacacactttgcccctcataatggaagagggcccccaaattggcggtagtttagggaacagctccaaatccgtttgcaataaacagcctgggcacaaaggttagggcatccaatgagcaaattataggtctggcccctccttcccttccactgtgctgtgtacccaccccaaggtagcagcctggatgggaggaccagcatgctgagccaaactggactaccccacaggtgggacgagctatggccattgcagccctggacatggcggaatgtaatccgtggccccgaattgtactgtcagagcacagcagccttactaatctacgggcctggatgctgaaacatgtacgcaacagccgaggcctaagcagcactctgaatgtgggtgtcaacaagaagaggggccttcgaactccacccaaaagtcacaagtaaggccagcaaaataggagggagaaagggtag

SEQ ID NO: 23068 - DNA, 2300 bp, Homo sapien
tttctagaaacttggtgaaattttaccttctgggcctcagtttccttccttttttttttttttttttttttccctgagacagggtctctctctgttgcccaggctggagtgcaatggtacaatcttggctcactgcaacctccgcctcctgggttcatgcaagtctcctgcctcagcctcctgagtagctgggattacaggcatgcaccaccagctaagttttgtatttttagtagagatggggtttcactatattggccaggctggtctcgaactcctgacctcaggtgatcctcccgccttggcttcccaaaatgtcaggattacaggtatgagccaccatgcctggccagtttctttcttcataagatgattttgaaggcccctttcggctctgatagtctaggatactatgcacctgggtcaattggttttaagcactttcaaggcttgctttcctgtcattttcagtctagaaagtttaacttccagggctggcctaaaggtagagcttatttttaaaagggagggctagttctgattcaacagtagacctaagtgtttggttggacttggatctgcttcaaatttccaggagacatgaagcataatgacgtgtaatccttaagacctagacccttactctcccagagaggagctggaaacagaccgcttactgagggatgcataagggagtacctgtctggggtttcaccagtgttgtgtggaggggactcggctttctaaatatcaagcttctgggaaatattgagtgggggctggtggtgaggtgcggggaggccacgggaactacagactactaaaggcagggattatgtttagaagccacggggctgaagcccttgggtgacaagctgttgatggtcccaggcccgggaaggctactttgggatagtgcatccccagctcagtgcacacaggcgggaaactggtcccctgtcccaagcccatagcatctcctgtagagttttctttggctccgagaagcagaggcctcccctgagccctggcccccctctaccgcaaagcaactggcttccattacccctgacagctccagagcaacagcccagcccccggccccggcctggctcagtgccgttcccttttatggtgaagctgagagaaagcatggagtgaggggggagaaagctctggcttgggcagaggcttggagagttccagggtgcctctcccctcgccagagaccctcggctacccgcagccaccgctcttcgttctcttcggcgacctaatctgtcctgaacccaggacccctcttgcttgtcccagcccttcctcctcttctccattcctccccttctccctcccccacatccggggggtgatttcccacttggccgaagtcccacggtttgggttttgattccgggagggtccgccctatttccgacgcccacctccggggggtagggtggagggagggagcccggctaagacagaacctggtcagatcacaaaaggcaggatggttctacttggttgcatgtgggtcacaaaggatggcgccggagaaaggagcacccggcagcaccagccctgtccccattctacaacgcctcctacccctgtccccgccgtccgggccagggagagggcactgagggcaggacccaaaggaagcacctggttgggccgggccgggaagcgaagggtgggcagcagtactgagggccggggccggaagggggttggagtatcccgccggccccgccgctgcaccctcgccccagcccactcctcggctccggggaggcggccaccacggcttcgctagccgcgtcccgagccacgccagctgcagccagctgtgcggtgccgggcccaggcgcgcgtccgcagccccgccccaccccctacggctggacctcccaccgcagccgcgcccgaggccccgccccagccgcggccgtaacgcgccgcgcggagccgacgagacggcggggctagagaggccgtcccgaccgcgccccccgccggaagcggcttgttcgggcctgagctggcgctacgaagttccggtccaggtctctgacttcgggcttgttcgctggtggcgtcggagccgagccggactggtcaggtcagaggcacgcaggggccgtcccacgggccagccccgccgtggccgtggccgtggctggcccgtggggcgaggacgggttcttgcgagggcgaggagtgcgccagcccgcagctcagcccctctcttctccgcaggatgatcacggacgtgcagctcgccatcttcgccaaca

SEQ ID NO: 23069 - DNA, 2300 bp, Homo sapien
gatttgctgggtcatagtgacaggaggagctggggctacattgcctgtgttctgacaccgtattcagcgctctcacccacaataccttctttcgtgtatgtgtatatgcttctactcaaaaacttgcaatacaacctcataaccagtcatttgagcctctccctaatttgtccacaatctacctctctgaatttcggtcccattttttcctgacacaaaaaaaagagctaacattgattgagcatttaccatttgccagacactgttctagaatgctttacatgcactgacttacttaatcctcacaaagtgggatggagagtcctgttattcctgtgttacagctgaggagactgaggcagaccgctcttcctgagcctgaaatctctctccttgccttgtctctgttcttgactcctgccccccacccccgcccccaccccaatgctgttcagcttttgtcttttccagcctctcctctgactgtctccagcagccagctgtcttttccctcctcctagctggaacacacatcatccctctgtcctgccccttggcactttttctgtcctggcttgtgacggttctctgtttgggggcttgtgtcccattctccaacaacctcagttgctccttagtggacagcgtctgggtcttacctatgcctttgctacctgggcacctccgcagtgcctggcacacagcattctcctgtctcctttctgtctagtgcttctgtttctttctcccaagcatcccaccagctggagaccctggtcaagagctgcgggtcagatggtgacggggaccaagcttttagatcaaggtggcgcaggtggaactttcaggtcaggctgacggctctttgcctgtcactgagagctatcagacttgcctccaggccagggactgacttcctttggtgctctaaagataggtcccgatttacctcacccccaccctcatccagttatggcctgaccatcaccaaaacaagcccaggacccattttcatttatccctttaagaaaggttctttctcttcctgcccacgtgccctctaccgcttgacagaagcctgctccccattgccaggtgcttttcttcctcctcctcttcttcttttttttttttgagacagagtctcgctctgccgcccaggctggagtgcagtggtgtgatcttggctcactgcaacctcctcctcccgggttcaagcgattatcctgcctcagcctcctgagtagctgggattacaggcgtgtgccaacatgcctggctaatttttgtatttttagtagagatggggtttcaccatgttggtcaggctggtctcgaactcctgaccttgtgatctgcccacctcagcctcccaaagagctgggattacaggcgtgagccaccacacaaggccctttcttcctcttctgtcatctgtggatttcccatctgcctcagtggagtccttgaccttttcctccctggcccagcagcacattctcctctcctcctttctcccaagtcactgacctagtatttagtgtgtgttctcagcctcaccattgacttgctgtgttaccttggacaagtcactctcccactctgacctcaattttcacatctctaaaaggagactgctagactagacggtgagtgaagtcctgctgagccctccgagttcattctcccttgtccagtcagtccttccctcccaccctcccctctgggctccctctctggggccctctcccccaggggaggcctgctccagccccaggggagctgcggccctggctcctgttcccagtcggagtgaccagccctgggcctccttcccagcttcggccctggctccatgtggcccatctgagaggctggcctcaagcccggcggcaactccacatttctgtttttccttttttttccctctttcccggagttaacaagaagcagatgtggcgcacgatggttggagaggtggggggaggaagggggaggccggaccgccagccagacaggggggaagggaggggagccagcagggaggaggaggccagggcccgccccacagccactctcgcgcctccgaacagccacaggggcaaagccctgtcacccccaggatccggtcatcagggaaagaggacagggagaccagaagagggccagctgggacgagggggcggacgcccaggaggcaacttctgagacgcagctcctgagaggggcagggaccaggcgcgggaggccagagggggcacagagaacaaaccccctcagaagtgaagaggagagcggaa

SEQ ID NO: 23070 - DNA, 2300 bp, Homo sapien
gtgaccgacatggagtggaggtgctgtcagggttatgggggcgatgactgtgctgagagtcccgctccagcgctggggcctgcgtcttccacaccacggcccctggcccagcctgcccgccccaacctctctggctccagtgcaggcagccccctcagtggactggggggagaaggtgagtgtgggagctgctgcgagggtggcaagttccaaatggtgatccaatgcaatgggaaatgtggggccaggctgctgggggagtcccccgtgctctatgccagagagaagagaggggcagaagggttagtgagatcgcagagattccctgcccgtgtgtgtgtgtgtgtgtgtgtgtgtgtgtgtgtgtgtgtatttgtgtgtctgtgtgagagagagggagagagcacgcaaaagatggagagactgagaaaaagaaggccaaaaaagagaaggtgctcgcacacgccccatgtggccaagatccttcaaacagctgcaggagaaaggggcattcctttgagaagcttggtccgtggggacagacagttgagactacaaatcctagcatgcattgcacctgactacagatcccagacccctccgtggcctctggagaccgcaggtcccagcatgcagcagttcctgtggcttgccttccctcctgcgtgctgcacaccggatgtgctgtttccctgccccgagatagccttactataattatgcaaacaggaactcctggccaactctcaccgtccacagagcctcttctttgtccccgtggtgttgcagggaagtgtcacccagtggtagctactgttgtggcatccagagtgcctccctacactcccatttcgcccctcttgacagccccatgacagaagagtgtcattatcctttcgcagaagaggaaagagtttccaagaagttaagaggcactctgggcaggtggaaaggacatggacctgggggctggatagatggtctgggtttgaaacttagcactgccatttattaaacctgtgatccatggccaggcacctaatatctctggtccagtttcccagcctatatgatgggaagagttcatggtatctccccaggggagttattgaagaacagagccatggttcatatttggcctagaggcattcagtgaatggagtttctttttttttctcttgccaaaatcacccaaaggagaggcagagccagcctgggcatctgacccttgctggagctggggtgagcaggggccttgagctctggggtccagcccctctgccttctgccttcccctctcctcaggtcctggggagtcagagaaggtgcagcagctggaggaacaggtgcagagcctgaccaaggagctgcaaggcctgcggggcgtcctgcaaggactgagcgggcgcctggcagaggatgtgcagagggctgtggagacggccttcaacgggaggcagcagccagctgacgcggctgcccgccctggggtgcatgaaaccctcaatgagatccagcaccagctgcagctcctggacacccgcgtctccacccacgaccaggagctgggtcacctcaacaaccatcatggcggcagcagcagcagtgggggcagcagggccccagccccagcctcagcccctccgggccccagtgaggagctgctgcggcagctggagcagcggttgcaggagtcctgctccgtgtgcctggccgggctagatggcttccgccggcagcagcaggaggacagggagcggctgcgagcgatggagaagctgctggcctcggtggaggagcggcaacggcacctcgcagggctggcggtgggccgcaggccccctcaggaatgctgctctccagagctgggccggcgactggcagagctggagcgcaggctggatgtcgtggccggctcagtgacagtgctgagtgggcggcgaggcacagagctgggaggagccgcggggcagggaggccaccccccaggctacaccagcttggcctcccgcctgtctcgcctggaggaccgcttcaactccaccctgggcccttcggaggagcaggaggagagctggcctggggctcctggggggctgagccactggctgcctgctgcccggggccgactagagcagttgggggggctgctggccaatgtgagcggggagctgggggggcggttggatctgttggaggagcaggtggcaggggccatgcaggcatgcgggcagctctgctctggggcccctggggagcaggactctcaagtcagcgagatcctcagtgccttggagcgc

SEQ ID NO: 23071 - DNA, 2300 bp, Homo sapien
gtactacctgaccgataagggaaaatcagaggaaagtgaggaggaactgtgatagtcactgtgtttggttaatgggtattaggaggctaatggataatgttggccccactgcagtactggagactaaagctgagtctattatagctgtctggggtgtgaaaggctgggatggcccagcagttgaacagaatggaccctacctattcctgtttttcttgataccccaattcctgctttgaagtccacgtagcaccgagcacaacaggagagcctcagcagatgtttgctgagtgacttagtgagagctgctttatttctcactgctccctttcctcttctcacaggtcctcaaggtgaacagggtgagtgcctttcatttgattctggagggagaagtgactaggggttggaggatagaggtcctcgggcagccctgggctggggatccagcaggggaagggggctggcactctgccctgagcatcccctttaacatccacccttcccactcaggagtggagggggcaccagcagcccctgtgccccaagtggcattttcagctgctctgagtttgccccggtctgaaccaggcacggtccccttcgacagagtcctgctcaatgatggaggctattatgatccagagacaggtagtcctgggaggggctgggttgaacggttggagaaatgggtgaggtgtgcagtgatatcttcccattcttgccttttccgacagtgtgaatcttcattctctgatttggggagaccccggctctttcttcatttattcattctcaggcagtggggagaagaagtagtcattcattcattcagcagatctttactggggcctgctcctgcccaggcactgttttaagtgctgggaatgcatagtgaacaaagcccccagttccctgccgctcacattccagtgaggtgaaaagacccagagggtccctcctcagtccaggagttctggtgcgctccccggagcttccctggcccccctgactgctatccttgtccccaggcgtgttcacagcgccactggctggacgctacttgctgagcgcggtgctgactgggcaccggcacgagaaagtggaggccgtgctgtcccgctccaaccagggcgtggcccgcgtagactccggtggctacgagcctgagggcctggagaataagccggtggccgagagccagcccagcccgggcaccctgggcgtcttcagcctcatcctgccgctgcaggccggggacacggtctgcgtcgacctggtcatggggcagctggcgcactcggaggagccgctcaccatcttcagcggggccctgctctatggggacccagagcttgaacacgcgtagactggggtcccgcccgacgtgtctacgtcggctgaagagacagcgggggcggcgggctcctggggtctcgcctgagacggggcacctagccctgggcgagcgccgcacccgggcccgcagcggcaccgcgcccagagcggcctctccccacgcccggggcgcgccggctcagggaggctcggggccgcccatgcagacttttggcctggcgcgatcccccaagaacccctccagggccggcctgcggaggagccgatcctcgcaccctccgctccctccactggccctccaggtcgattccctgggctccaggctcccccgcgcgggcgccgcccaccgccatactaaacgatcgaggaataaagacacttggtttttctaaaaaaaactaaacgaaccgttctgctacggtacggggtcgggggctgccgggcgtgcacagggcacggggcgggagagacgacggcctccggagaggaccccgggttccgcactgcgttcgccgcctccgcccggctcggggcggctcggggttggctcaggcagcaagcggcgcccgcccggctcctgcgacgtctcccccgtgtcacgcccgtttcgccggcgtccgccagggggcgctctgcgttcccgccacgtgaggctgcggcccacccggcgggtcctgctcctccgcggcggaggcgtggcctcggctgggactaaccggggcggggcggggcggggcggggcggggccgccgcgaccgcgggcttcaggcagggctgcagatgcgaggcccagctgtacctcgcgtgtcccgggtcgggagtcggagacgcaggtgcaggagagtgcggggcaagtagcgcattttctctttgcattctcgagatcgcttagccgcgctttaaaaaggtttgcatcagctgtgagtccatctgacaagcga

SEQ ID NO: 23072 - DNA, 2300 bp, Homo sapien
ccactcaggagtggagggggcaccagcagcccctgtgccccaagtggcattttcagctgctctgagtttgccccggtctgaaccaggcacggtccccttcgacagagtcctgctcaatgatggaggctattatgatccagagacaggtagtcctgggaggggctgggttgaacggttggagaaatgggtgaggtgtgcagtgatatcttcccattcttgccttttccgacagtgtgaatcttcattctctgatttggggagaccccggctctttcttcatttattcattctcaggcagtggggagaagaagtagtcattcattcattcagcagatctttactggggcctgctcctgcccaggcactgttttaagtgctgggaatgcatagtgaacaaagcccccagttccctgccgctcacattccagtgaggtgaaaagacccagagggtccctcctcagtccaggagttctggtgcgctccccggagcttccctggcccccctgactgctatccttgtccccaggcgtgttcacagcgccactggctggacgctacttgctgagcgcggtgctgactgggcaccggcacgagaaagtggaggccgtgctgtcccgctccaaccagggcgtggcccgcgtagactccggtggctacgagcctgagggcctggagaataagccggtggccgagagccagcccagcccgggcaccctgggcgtcttcagcctcatcctgccgctgcaggccggggacacggtctgcgtcgacctggtcatggggcagctggcgcactcggaggagccgctcaccatcttcagcggggccctgctctatggggacccagagcttgaacacgcgtagactggggtcccgcccgacgtgtctacgtcggctgaagagacagcgggggcggcgggctcctggggtctcgcctgagacggggcacctagccctgggcgagcgccgcacccgggcccgcagcggcaccgcgcccagagcggcctctccccacgcccggggcgcgccggctcagggaggctcggggccgcccatgcagacttttggcctggcgcgatcccccaagaacccctccagggccggcctgcggaggagccgatcctcgcaccctccgctccctccactggccctccaggtcgattccctgggctccaggctcccccgcgcgggcgccgcccaccgccatactaaacgatcgaggaataaagacacttggtttttctaaaaaaaactaaacgaaccgttctgctacggtacggggtcgggggctgccgggcgtgcacagggcacggggcgggagagacgacggcctccggagaggaccccgggttccgcactgcgttcgccgcctccgcccggctcggggcggctcggggttggctcaggcagcaagcggcgcccgcccggctcctgcgacgtctcccccgtgtcacgcccgtttcgccggcgtccgccagggggcgctctgcgttcccgccacgtgaggctgcggcccacccggcgggtcctgctcctccgcggcggaggcgtggcctcggctgggactaaccggggcggggcggggcggggcggggcggggccgccgcgaccgcgggcttcaggcagggctgcagatgcgaggcccagctgtacctcgcgtgtcccgggtcgggagtcggagacgcaggtgcaggagagtgcggggcaagtagcgcattttctctttgcattctcgagatcgcttagccgcgctttaaaaaggtttgcatcagctgtgagtccatctgacaagcgaggaaactaaggctgagaagtgggaggcgttgccatctgcaggcccaggcaacctgctacgggaagaccggggaccaagacctctgggttggctttcctagacccgctcgggtcttcgggtgtcgcgaggaagggccctgctcctttcgttccctgcacccctggccgctgcaggtggctccctggaggaggagctcccacgcggaggaggagccagggcagctgggagcggggacaccatcctcctggataagaggcagaggccgggaggaaccccgtcagccgggcgggcaggaagctctgggagtagcctcatggaagagaagcagatcctgtgcgtggggctagtggtgctggacgtcatcagcctggtggacaagtaccctaaggaggactcggagataaggtaggggcgcccaggtcccctaggggaccccaggggctgctgcagtccagcatttgtgccagcgaccgaggctgcagagaccccgcagtgaggccctgag

SEQ ID NO: 23073 - DNA, 2300 bp, Homo sapien
tttgctggaaatctttggcactccctgactggtagaagcatcaccctgatctctgtcttcatcttcacaaacatcttagtgagtttgtgctgctataacaaaatcccacagactgagtaatttacaaacaacagaaatttattcctcacagttctggagactgggaagtccaagatccaggcactggcaggttcggtgtctgtgaaggtccattcctcagagatggtgcgtctgggtttcctcatgtgatggaagggacagaaaggcaagagagcaagaggggtgaactctctcagaaacctctttcataaggtcattaatcccttcatgaggggagagccctcatggtttcatcatgtcccaaaaggccctactcctttttggtttttttcagaggcaggatgtcgctctgtcaccaaggttggagtgcagtggcaggatcacagctcactgtaacctcaaattcctggactcaagggatctgcctgcctcagcctcccaaatagctgggactacaggcgtgcaccaccatgcctaatttttatttatttatttattgtagagacacggtctcactatgttgcccagactggtcgaaaactcctggcctcaagagatcctcacacttcggcctcccaaagtgctgggattacaggtgtgagccactgtgcctggcttcctcctcttaatatcaccacaatggggactaagtttcagcacatgaatttggtgggatattcaggccatagcaatgttcttcctatgtgtgtgtctgtgtccacatttcctcttttgatatgaacaccagtcatattgattaggggcccaccctactccagtatgacctcatcttaatggattacatctgcaatgaccctatttccaaataaggtcacagtctgaggtattggaggttaagacttcaacatataactttgtgaaggacacgagtcaatgcataacagtgatgggagctaggtgagcagatgagcacatgagcagatggaaagtgaggagagggccctgaggaactctgacggtgaagaaaatggagacctttttgaaatgaccagaggtaggagaggtattgccgaaaccagcagaatccgtgatctaaaaaggcagtgacaagcagtgttcatcactgggaggaggacaggatgagagtgggcttgtcgctgtgatgacagtgtcgctgtgatggagtgtcacaaacaactcaggaagagttcaccctgacaccccaatacatatgcctctaacactctgcaccgccacacccctgggcagtcagtcacacattggccataccctgaagcccacactatcatttattttttatttatttatttatttattgagacggagtctcagtcttgctttgtcacccaggctggagtgcagtggcgtgatctcggctcactgcaagctccaccacccaggttcatgccatcctcctgcctcagcctcccgagtagctgacactacaggcgcccgtcaccatgcccggctaatgtttttgtattttcagtagagacggggtttcactgtgttaaccaggatggtctccatctcctgacctcgtgatccacccgccttggcctcccaaagtggtgggattacaggtgtgagccaccacgcccggcccctgaagcccacactatcacacggatgcacagtcacacaaaataccccctaccgtgtcacaaattcctcatacacagagccacacatgccagtcacaaccgcacatgctaacagtaagttaggttccattttgtcacatacatctgggtccctcaggcagagaaagtggcaaccaaagcatgagcacagttaaacatacttctgatgcacactggcctcactgtctcttggtctctctgtactcacatgtgtgcatacaggcacacgcacacatccgcgcacacatgcacgctcacacacgtgcatccttacacatgctcacactcacgctcacaatgtcacacgcatgtgcacacccgcacaagcacacgagcgcactcacgagcacacgcggactcgcacacgcgcacatgcgcactcacgcacgcacacacgcgcacactcacacgggcgcgcgcagcccctccggccgcgggcgcagcgggggcgctggtggagctgcgaagggccaggtccggcgggcggggcggcggctggcactggctccggactctgcccggccagggcggcggctccagccgggagggcgacgtggagcggccacgtggagcggcccgggggaggctggcggcgggaggcgaggcgcgggcggc

SEQ ID NO: 23074 - DNA, 2300 bp, Homo sapien
atagggtttgcgctcctatgagaatctaattccactgctgatctcaggcagtaatgcttgctcatcctgctcaccttctgctatgccacctggttcctaccaggtcatggaccagtaccaatttgcagcccagggggttggggacccctggtttaagacacccagtttgtagtgctttcttacagcaaactgccaactaatacaccacctaaatgctgatgattgccaattctccacctccaatctctaagccccaggccacttcaggcattgaatatcctactaatttgtgcctgagttttaatttataaaggtggctgagtgaggacatgaagaggtcactgctattgaaagaaaagcttaatgttatttgcagttcccctagaaacaaaaggcacggtcacagggggaagtgccagtgtcactcaggaggcagaaagaagcgaagggaaggtacaggcctttattggggtttacttctcccagtaaggcaggagaagcagtttgggactggctagtttgaataattccagagtgctctggggcacagggacaggtcctggttacctggtcctgggttgatttagggcaggggagatactggcttggaatgtgaaagttagagaaaggaagtgctcagagtgtgagctctggattgtaggggagatgtaaacaaccttggccattaggttggccctgtgatttatggatgccaaatagacaaatacagaacctaaggaaacacagttaaaacacctaccagcaccccaacttctacatgtctgtgtctaaatgcatcatcttcctcttcaaaccttcctctcctctgtttccctgtcccagggatggacactttatatctgtgcagtcagaaacctggaggtcatccatgttcctccttcttcccctgcctccaatctactaccaggtcctatcaattctgccactgatcttgaagatcttcactcctctcctgggtatcctccagtccgggcatcttttgagcctggcgttctgttagcagcctcccagtggcctctctgcttctactttcctcctcctccaatctattctccaagcaactgaatgattctcctaaaacataactcatgtcacccttcccttcttaaaacccctggatggctttcctctgaccctaggataaactgcagcaattatgtggtccttgaccacccacatgctccagccacaccaactttctttgttcccttaagacatccttcacctccaggcttttgcctttgctgccccctctgctagaacaccctcgcgtgaagtccgggcacctccgcagtgctcccatggcagctggtacttctcttgtgtggaccatgttaagccctgatgacttgtggacctcctagaagctttacggtgtattgatacctaggctcctctccagactaactgtatcgggggtagggcctgggcactggtagttttaaaaatcctagatgattccgatctgcagtcaaggttgaaagccactactcttagtagacgacctcctatatttcaatgaagacacggacagtaacatggggggtctgtatcaagtgcctggtacagggcgggtggtgagcaaattatctactgtacgaggactgtgtggcagggactgtatgagacaatgcagagtgacactgcaggaaggtgcatgtgttgcaatgccaccactgagcagctgaaagctttgtgacagtgtggggtgtcacagtcggacagtgactggtgagggtcactgtgaatggctgtagtgtgtgacagagcagaatgtcactgcaggagtagctgtgtcctgtgcgtgactgactgcgagcgcctaagggactctggccaggctgctggactcggggcgtcgccggggaagagtttaagggagctggagatgccccgcaccaagatggcagctgggggaggccgcttgtctcgggctgcacagccaagaaccgcggaggggaagaaggcaggggagggcgggaggccattcgcaggtcactcgggttagatccgcgcgaggcactaggcgaccagccacccagccccgcgaccaactagcgccgcctctcgccgcccatcccggggcaccggcggtgggcggggccagcagcgcaaactgcctgcagcggggaccggacctgcacaggccgcctatggcgggcggcgggtgggaccgcgagttacagccggccaactggggccagccaggagcctgagggtcggaagcccccaacacaagatgctgagctccttcctgagcccccagaatggcacctggg

SEQ ID NO: 23075 - DNA, 2300 bp, Homo sapien
cgcgccccgcacaaaaatggcgaagtcggtgctgggcgactctgcctccgcgccaggggtggagaaccgaagccccgccccgggaaacgcggccccgcggccggctagtgctgacgcgtgtcggcgctcctgcgcctgcgcggagggagccgcgagacaggtgcgcatgcgcagtgcgcgtctgcgagaccgacttggacggagccgagctgaggctcggcttcctgctgatggtcagggttttggcaactccccggtgtgagaggggtagggagtgctcccggcggcgacggggccgagttcaccagccgccggggcagtagtcgaaggcccggcgcggcatgtcctgggtgccgcggtgcgggcagtgaacgcgcgccgggcgggatgggccggcgccgggcgccagagctgtaccgggctccgttcccgttgtacgcgcttcaggtcgaccccagcactgggctgctcatcgctgcgggcggaggaggcgccgccaagacaggcataaagaatggcgtggtgagagcgcagggccactggggctgggtcttgctgcgggctggcggcgattccagggtggccggggggtcgcggggcgggccacactccagcttcgggccctgcccacttctgttgggaagacccgcttgcctgacgcccaggggcgaatttcagtcgagaactcagcgggcggaggagaggcttttaaggtaaagtgaaaactgcacacagctgcagagtcgccaggaacgcttcagctccgcctcagagcagctccaggggtcttatactggccttttccgggaggtcttgcctgccctctagcagcggcgagagtggtgcatttgggtttaggctaagttccttccctctcctgagcttcaccctgttctgtaaaatagaggtaataatcccagtcctgctcactgtgtagatttgtgaggcccaaatgagagaaaaaagactcgagaaacccttgtgaactagaacgtgcagaaagcaaaggggtaagacatcagactcttccctaaacgtgctctctgggcacccctgaacttgctcatccgggttccccctcccacagcactttctgcagctagagctgattaatgggcgcttgagtgcctccttgctgcactcccatgacacagagacacgggccaccatgaacttggcactggctggtgacatccttgctgcagggcaggatgcccactgtcagctcctgcgcttccaggcacatcaacagcagggcaacaaggcagagaaggccggtgaggagctccctctctacccccttggggaaagggttgaacgagtaaggtcactcttggtgtctctaaagaagtgggtctggaagtagggttttggtagcaagctagaagttgtatgggcacctgccatggagagaggggccagtactccttactgtagaagcctggaacctggccaagtgtttgtgttacaggttccaaggagcaggggcctcgacaaaggaagggagcagccccagcagagaagaaatgtggagcggaaacccagcacgaggggctagaactcagggtagagaatttgcaggcggtgcagacagactttagctccgatccactgcagaaagttgtgtgcttcaaccacgataataccctgcttgccactggaggaacagatggctacgtccgtgtctggaaggtgtgggtttgcagggttagggagggtgaatgtcagtagcaacaggatcaaaattgtgagaagttgaacgtggcatctgggaaacttgtgaatgaagcttgcattgaggggccattagaaggggtggcgtgggcatcagtcacagtgtacttgctggacacctgagttaaccatggtggttgtttggctacaggtgcccagcctggagaaggttctggagttcaaagcccacgaaggggagattgaagacctggctttagggcctgatggcaaggtgaggggctgggggtgggaggaggatggagaaaggagagaggaggtgcttatgctgcttgcccagtaagtggatcccctaactgtccatccttggaatctttattcctaactagttggtaaccgtgggccgggaccttaaggcctctgtgtggcagaaggatcagctggtgacacagctgcactggcaagaaaatggacccaccttttccagcacaccttaccgctaccaggcctgcaggtgtgaagactttgggtggtggctgaaagaggcatagcccagctgtggtgggggagagggaaaagactggggatgggagagctggggaggaact

SEQ ID NO: 23076 - DNA, 2300 bp, Homo sapien
cttggtggcggggagggggtggttcatgcctataatcccaacacactggaaggctgaggtaggaggatcacttgaagccacgagtttgagaccagcctgggcaacatagcaagaccctgtctctccaaaaacaaaaatataaaaaaattagctgagtatggtggcgcgtgcctgtactaccagctactcaagaggctaaagtgggaggatcacttgagtccaggagttcaaggttgcaatgagctatatcatgccattgcactccagcctgggtgacagagaccctatctcaaaaaaaaaaaaaaaaaaaagagggcatggtgtggttgctcatgcctataatcccagcactttgggaggccaaggtgggcatatcatttaaggtcaggagttacgagaccagcctggccaacatggtgaaactccatctctactaaaaatacaaaaattagctgggtgtggtggcgggtgcctgtagttccagctactcaggaggctgaggcaggagaatcacttcaacctgggaggtggagggtgcagtgagctgagatcaggccactgcactccagactgggcaacagagcgagactccgtctcaaaaaataaaaaagaccctggagggtggtgtcaaaggaaacggagaggccagaaagagcaggtgccatgtatccaaggaggacaagggacccacaaggcctggggacttgagatatgcagagagcttggccaggcccttcacacatctaattcaactctgtgggacagatattggcatccccaaagatgaagccactgcgctattcctctgggtgcaccttaggttaatgagaatgcaggagagggcgtctctttgcagggaaggacatcccttgtgctcgctctcaggagtgcacaaaggtcctcatcagatcagaaacccgagggagaatggagtgtcaggcgcagaagatacctgcccgggagccaaactgccccctctgaggccagcaaagcagctggccacccaccaagccaccagcccaggagtgtgaagccttgagaaagggaatggcagacaccacccctgccaaaagtgggcgataggcgttaaggatgacagacgtgtcctcatacgaggaagcaatggattcagcatttgaagtcaggtttatttttaagttcatgctgcctccgttaagaagcaagagactccggtggtttctggtgtgtgccctcgggcaaatcacttcctctctgaggtaagatgcaaaggcctgtgctcctaggagttggcatatcactcctcagatgggaacagtccttatttgaggattttatgtgtgtgagagacagggtctagctctgttgcccaggggctggagtgcagtggtgacatcactggtggtccagcgcagcctcgacctcccagtctcaagtgatcctcccgcctgagcctcctgggcacctgggcccacaggtgccacgatgtttggctaatttttaaatatttcgtagggacggatccccatgttgcccaggctgtctcgaaagcctgggctcaagccatcctcctctctcggactttccgaaagtgttgggattacaggaggattacaggcatgaaccaccgtgcctggcagaggatttttttttttttgagacggagtttcactcttgttgcttgttgcccaggctgaagagcaatggcaatggcgcgatctcggctcactgcaacctctacttcccaggttcaagtgattctcctgcctcaggctcccgagtagctgggattacaggcgcacgccaccacgccctttgtatttttggtagagacggggtttctccatgttggtcaggctggtctcgaactcctgatccgcccgcctaggactcacaaagtgctgggattacaggcgcgagtcggatttctttattaaaggttgaccttcatcaacctccattggctccacctcctccgcccgcgccccgcgccccgcacaaaaatggcgaagtcggtgctgggcgactctgcctccgcgccaggggtggagaaccgaagccccgccccgggaaacgcggccccgcggccggctagtgctgacgcgtgtcggcgctcctgcgcctgcgcggagggagccgcgagacaggtgcgcatgcgcagtgcgcgtctgcgagaccgacttggacggagccgagctgaggctcggcttcctgctgatggtcagggttttggcaactccccggtgtgagaggggtagggagtgctcccggcggcgacggggccgagttcaccagccgccggggcagtagtcgaaggcccg

SEQ ID NO: 23077 - DNA, 2300 bp, Homo sapien
ttcaagaccagcctgggcagcatggcaagaccctgtctctacaaaaaaatacaaaaattagccaggcatggtggcgtgtgcctgtggtcccagctatctggtggggctgaggtgggaggacggcttgatcctaggaggtcaagactgcagtgagccttgattgtgccactgcactccagcctgggcaatagagtgagaccctgtctcaaaaaaaaaaaaaaaagaaaagaaaaagaatagaaaacccacagccggccgggcgtggtggttcatgcctgtaatcccagcactttgggaggctgaggcgggtggatcacaaggtcaggagtttgagaccagcctggccaatatggtgaaaccccatctctactaaaaatacaaaaaaattagctgggcatggtggtgcacgcctgtaatcccagctactcgggaggctgaggcaggagaattgcttgaacccaggaggcagaggttgcagtgagccgagatcgcgccactgcactccagcctgggcgacagagcgagattccatcagcccctcaaaaaaaaaggtcactaaagttggtatacaacaccccactgctaaatttgactggcttttaaaaagataggctaaggatttgaatatacaattcttcaaagaagataaacaaatatcccttagcacatgaaaagatgctcaacatcattagtcattaggaaaatgtaaataaaaaccacaatatcataccatttcacacccactagggttgctaaaataaaaaagacaggcaacaacatgtgttggtaaggataaagaaacattggaacccttatacctcgctgatgggattgaaaattggtacagccaacttggaagacagtttggtagttactcaaaatgttaaatatagattcaccgtgtaacccagcaagtctgcttctatgtatctaaagataaatgaaaccatatgttcacataaaacttgtacaagaatgttcatagcactattcataattgctaaaaagtaggaagaaccatgccaggcacggtggctcacgcctgtaatcccagcactttgggaggccgaggtgggtggatcacctgaggttgggagttcgagaccagcctggccaacatggcgaaaccctatctctactaaaaatacaaaaattagccaggcatagtggcccgcgcctgtagtcccagctactcaggaggctgaggcaggagaactgcttgaacccgggaggtggaggttgcagtaagccaagattgtgccactgcgccccagcttgagcaacagagtgagaattcatctcaaaaaaaaaaaaagtagaaagaaccaaaatgtccatcaattaatgaatggataaacaaaatatggcatatccacacaaaggaatattatctggcaataaaaaggaataaagcgatgacacatgctacaacatgaatgaaccttgcaaacatgcgaagtaaaagaagtcagatacaaaagaccatatattgtataattccacttatatgaaatgtctagaatatgcaaacctatagaaacagagtagactggtggtttccagaggctgggggaagagtggggaccaactgctaatgggtacaggatttttggggggacaaaaatgttctaaaactagattgtggagatggttctacaaccctgtgaataaactagaagacatcgaatggtacactttaaatgggtagattgtatggtatgtgaattatatcccaataaagcagttaagaaaatagttattaaaacatataataggtatatcccaagggggagaaagttgtggtgcatgaactcagcccagacaggctgtgttagtggggagagcaatggatgaaggaggtggttggagctgtaaagtgtataggccaagagtagaggtgggggctgggtcttgaaggagaaactgagtgcactgaagaattctgcctgcttcacagcgttatcaagggccagcctttggatggtctcttgaagaaggtcccagagcttcgaggaggagattctatgatgtcagcacctgacctttgtgacataggcacatgctgccaggggggaactgaactcagggaatggggcccccagctcccattggggtcggcgaacctggtgccaccccttagacaaagtcccagtctcccagaggcttttaccagctggccccattccttctgctgctgggtataataaggtatctctgtctgggccagggtgagctagaggacatcagcactaggggcaataaggggtcagaggaaccagagtggcaggacactgggatgc

SEQ ID NO: 23078 - DNA, 2300 bp, Homo sapien
gggtggtaagatttatgataggatttagcagtggggatggtatatgaaggtagaggatgggatgggaatgatgtcaacagggtcacagcaattacatgcctaatggcaggagagtcccctcactggtagtatgttcttagggtggatggtttcaggagtgtccaagggagagaatatagtcatgggttcttagtttctgtttctggttgggtcagtaaagccccttcgtcatccctcttttatacatatcaccagagacagaaactaaaaactggcttcaggctgcaaaaagcctaaaacaaaacaaaacaaaacaaaatggagcaacaacaaaataaggcaggttggacaagctgggtttagaaggcctctgtggcaggtttgctgtgctttccttgcagggtgggctgaaggccgtcatctggacagatgtgttccagacactggtcatgttcctcgggcagctggcagttatcattgtggggtcagccaaggtgggcggcttggggcgtgtgtgggccgtggcttcccagcacggccgcatctctgggtttgagtaagtatacccctactcctggctggggtctgcagtgcctgggcgctgagcccatcctagaggctggtcttggctatagtaagcagaaggtaaactgggaagcctgaggtgtaacagcagacagtgggaaactggtcctgcagagatggagggtgattacaggtgcccggctagtgtttatagagagtcaggacattacctgggatgagtacctggaatgagcctggggtggaagaatggagcctccctctaactggctgtgctgtctctcgagtgcacccagcttcttgctttcagtgtcccccttggccctagcagtggtgtctctcctttcctgtccactgactcctgttgccaagagggcaggaaggctgtgtctctcaggctttgcacaatgactgggtggtgtctgttacaggctggatccagacccctttgtgcggcacaccttctggaccttggccttcgggggtgtcttcatgatgctctccttatacggggtgaaccaggctcaggtgcagcggtacctcagttcccgcacggagaaggctgctgtgctgtgagtgcagggacaggaagggagtggagcaaggtctaggggaaggggttccccagagataattggggtggggcaggatgccagagtgcatacacatccactgtggtcaggatgtgggtctcctttctggaggtcaggggcacacacctgagggtgtctgttaacgccggctctcctcctggcactgacctcttttgcagctcctgttatgcagtgttccccttccagcaggtgtccctctgcgtgggctgcctcattggcctggtcatgttcgcgtattaccaggagtatcccatgagcattcagcaggctcaggcagccccagaccaggtgagaaggcgctgttctgttcccatgagggcaggcctggccccacaacaggagtgtctaggtaggaaaggactgactgcagaaaggactcccaccctgggtgggagacggttgtaaaatcctttcccactctgagatgctaggaatctagcatgtgaggatcgcggtccctagcatcacctaaccacagtgctcatcctactggggtgaggacctacccttactgactccccattgggctccatgtgctctgctgggagctatcacatacctggtctcacctaagcctctaacagcctcatttcacagaggagaaaacagactcaatgaggtagccagtaagcagaagtcacactagtagccagaaacagagctgcgggcgaattgtgtcattccctctgtagagctcattttctctccacttaatgtgtagacacttgggtcagcagaggtgccccaggccctggcttcccttgtaatgcacccagtctcggtagactcgctggggcacatgtaaagggagcttccctgcagagccggccctgggaagacccctctctgaggactgctgtgtacctccgctctgcttgcagttcgtcctgtactttgtgatggatctcctgaagggcctgccaggcctgccagggctcttcattgcctgcctcttcagcggctctctcaggtacccactttaacgatttccctcaggcctggtgcacctgacccctatttggtacaaggtgatgggtggagcggggtgatagtgggtggggaatccctctaagtttctcactgtgcctgccccatctgtgtgcatgacaagggatagctcatctttgtaggccacagcacaac

SEQ ID NO: 23079 - DNA, 2300 bp, Homo sapien
caggtttagtctgcatgaggccatatcttgccagccagccagtgtctgcccaagaacacactgtgggagagcggaaaggcagcctaatctttctcctagtgggcaaaagcagaagacatagtttatgttagtctgtctcttgattagttgaaatctaaactatgtcctgtgaatgactgactgcaacactctgctcctgtcctggttctgggaatagtgaggacagggcccttgctgaacacctgtcatagctgcagacagcactgtttctctctctcttgttttgtatcatgctgcataaccttgagcaagttatttaatctctcagttttcttgtgttaactggagagtattcgtgtcttaatctgagacatgctgttttgaaaatgttagcttcattatgtattattactaatgtttataaagcacctcacacactgctgggttacatagcaggtgttcagcaaatgttaactgtcgtcatgttaggctgtgtaactacatggcattctctggtgttttttcctcataccaataagtaccccagaggattgcctttgaagacaatatgatacgcttggagaacagacagggtggatggtgaatccctagacctgggttctaatttatgctctgacaatagtcggctctgtgcttttggaaaggtcacttgaaccatctgagccttagcgtgtttatctgtgaaatcgtcagtggtggggggttggttgtaatagtggtgtccaaagatttaagattttaaatattatgatcccttccctctttctctgaggattgtggtgtattcttgggggattaacatttcttgtgcaggagttagaaaatcaactttcaactttcccatgttttcagttccttctttccaactccctcccgcacagagtgccaagagtactttaggctgaaaggctaatccatctaggaatgctgttgaatatgagctccctcttccctgttctggagcctctagggctgagttggagtttgggggccatagggtgatagggccatttggaacacagccattggttccctgaaggggccagaacaaatgactgctgagcttcaccccacccccaattcctgatctctcacctcagctactcatagagccagatcctcagctctgcagctccaggcaactctgcctcagaacagggattgcttctccaggtaggtgtctgtccccagcaggatacgaccactctctttggctggtccctttgcctctcagctccgtgactgggttgcttctctccagaatggagaatcgtcattctgaaaccctgactccagcatggtgccctctcacctttcccctctcacttttgaatccagccgctcttcctgcgtctgctgttgactgtgatgttgcaggtagaggggctgagaggtgggtggcagcacttatctagtggtgttggggagaaccttaagaaaggggttggcctggggacgcctgaaatggagtctgtggctgccacagaggcagtctcactgatgatcagttagaagggtgacactggggatcacaggaggcgagggccgaggccaggggcagtaggggaagccctgctgccattagtctccatgctgtgtttcctgctgggctgtggcgccaggctgggctctgctggcttagtgtattgtagtgactgggtctgtgccttcaagtggggctgggaaattctgctaagaaacttaggctagagtttatttttcttttggtactcgggtggagacctaagaaggttgttgaatttcacagctgtgcatactcaaaggtcctggccaagttatattgtctcctggctgtcgcactctgatgcttctccctcacttatgtcccctaccaaacccataccagggcctctagaccttgaagggctaccactatgctggctggtccacttctgatggcatgcgatgtacaaggcccaagggtgaatggctaccaaggccagataggcctcactaagagctaattcctttgcagctcaccctggacagtatcactccgtggaggaagactgtgagactgtggctggaagccagattgtagccacacatccgcccctgccctaccccagagccctggagcagcaactggctgcagatcacagacacagtgaggatatgagtgtaggggtgagcacctcagcccctctttccccaacctcgggcacaagcgtgggcatgtctaccttctccatcatggactatgtggtgttcgtcctgctgctggttctctctcttgccattgggctctaccatgcttg

SEQ ID NO: 23080 - DNA, 2300 bp, Homo sapien
cctttgcacattgcaacaccctgagttttctcattcgtctttggcaagtttttactgctatgatagagatgatgggaactactggggagtaagaggaaagaagaggtctcctgtgtgcaaagaacacagaacaaagaactaactatagggttagtggtttagagaggtaggtggccagagacaggaaggaaagtcccagtatgggacacggaggtacagaaataaagacactctgctgatgggacttcctgataaaattctatttgcatgatgtatggagaattcccctggatggcctgagagagccccagggaagacaggaaaaacctgacctagcaacagaccagattctgagaacagatctgtagttttctaaacaccctacattgatccaaacgctatggtctcgcatctctccagaaagagggcggccaaaagcaagagctagctgttgtttcactacaactataacatgccaaggcacaaacagcagattgtgggacccccccccctttttttttggagacggagtctcgctctgtcgcccaggctggagtgcagtgacacgatctcggctcactgcaacctccacctcctgggttcaagtgattcttctgcctcagcctcctgagtagctgggactacaggcatgtgctaccgcgcccagctaattttttttttttttttttgtatttttagtagagacgagatttcaccatattggccaggctggtctcaaaactcctgacatgacgatccacctgccttggcggatcggtggcctggccaccgcgccaggccaagttcaggtttttaaaaggggtcccacatcactgcctgtaatcccagcactttgggaggccgaggcgggcagatcacgaggtcaggagatcgagaccatcctggctaacacggtgaaaccccgtctctactaaaaaatacaaaaaattagccaggcgtggtggcaggcgcctgtagtcccagctactcgggaggttgaggcaggagaatggcgtgaacccgcgaggcggagcttgcagtgagccgagatcgcgccactgcactccagcctgggcgacagagcgagactccgtctcaaaataaaaataaaaataaaaataaaaacctgaactcactttggtcacacactgcagtggatcgcattgactcctacaaaaggcaatgagaccactgcaggactaactgttccaaaaagattccctcaaaatctgtcctggggcctataattcctcaaggtgtgaaaggctttgggggccctccttaaaatgctaatagctactaacaccttagaaaatttgccagccagctaaacgtaaacctttcaggaacttccaggcagacaccatgggggtaatgtggaagggaagcctggctcggctactcgagatgatcacttgggtcggctttaaggagctttctggctggccctaaccaacactgtcgcgccgggagcagggatcccctggcgcccttcagtcagggcgctggcccaccctggggcagcaacgcactcccttacctccgtggttcagtcagagctaggaaggtccctttgtgcttcctgagatcaacatcgctcccttttcctgggaaggcaaagaaaatgagttagggaagcgtctatcccgctcctacctcctcgccaggctccgggacgctatgcgctatcagcattgaggtgaagaggactaggtgcccggggcgatccaggctcgtgtcctcccgctggagtttgaggtttgcccttccctcatcaccctcaccctcgttctttctcggtttcccgcttccctctacgcggcggagaccaccaccttaccgctcgcacttaagatctcagacccacgccggaggccggctcgctccgcccctccccgcccccttgtccccgccccggctcagacgccgctccccggtgcctctcggcaccggctcacgctctccaggcccacctgcccggtctccacacgtgggtagccagagcccggccgagagccctggccgggagcccgcgggggccccgccccctgcccgccccctgcccgccccgctcgccgtgccgccatgtttactgagggcggatggaggggcccgagtttctgcgaagccgcgacctcggcgtccggacgcggggaacaccgggctgagggagtctgcagtcggctccgggaagccgcgcggcgacgggggaggccttcactaaaggggaaaaggaagagggggtcggccagtatccccgaaagagggctagggcgcatgaagaccagcgcagagctcca

SEQ ID NO: 23081 - DNA, 2300 bp, Homo sapien
aatcgcttgaacccaggaggtggagggcgcggtgagccgagatcatgccattgcattccagcctgggcaacaagagtgaaactccgtctcaaaaaaataaataaataataatttaaaaaaggtattactctggaacttagtagtagtaaatattcacaaaagatgttggaattgaaggatggatatttcctaatttggtagaggaaggcaatttcaggtatggagagaggcctgaacaaaggtggaatgcctttgagggcaggcaaatctggctggtgcagaccattatggaggtttgagcggacaagtaattggaaataatgttggaaaagtgggttgggactagtatggtacttaatggtttgaattttgtcctgagacaaaatttaatactaaatatagtattaaagcaagagagtgataatggaaaatgttggttttctaaaagcttaatacagagaagtatttaggtagatgaaggaaagaagagaatggaagcaaaacataacattttgagtttgaagttagggtgcactcagtaggaaatgcttaataggaagctagaggtacccgtatgtacctggagtgtggaaaggttaaaaaagacactaaagagatctagttttggtagacatctgcgtgatgattacagctgaaaccataataggtggattctttaaataatataagggtataaaagcagccaggctaaggaatggcctgtatccagcatctagggatgtcttcccctcaccccaagatggtgcccttctgattcaggcagcaacgggcatgcagcattagctctcgtgtcgttttacaataaaaggccacttttgacaaattttgcacgctccctggacattgggtgcatatctgcagaagagaaagaaacattagaactccagaaagaaaagccaagaaaagaacaaacggcgatcaagaattaactgccagtacacgtttccagaattcctctaacacggggccgataaatggataaacggctcgtgtcccacccttgtaacaggctaggctaggagatgccatctcttcctccagagtcctgcgccgaatcagctcccgacactttcagtaccagatatcgcacagggaaggtcctcatctctgaagatcactattcgaacttatttattatgctttctgcagagacttctcaatctgacagccctagtttggcgcggtgtaaaacgaccgcaggtacgtaaagaactcatcaagcattacaaaagtacagccctaccaccgcacgatatatggcgttcgtgcgtagagagattacacaagaggcagaggacccgtctgtagaaagaacttaaagttattctaaaattaaggggcgaaatcaagtttcacaggtctttgaaagtcggcaggactggggcgccgaaggcctgcacgacgtgagtacttgggaacaggacctggctgggcagggtcgggaagcgtcagggacgaaatcagaaccgcaggcccgccgaggagaagggggagccgctggcgagcgcgacgcacggctggccagcgaccctgcttcagcccgacctcaaacttgcttctgtacctcgggtagcgccagagccctttccacgcccagagcgaggagcagggcggcagcccagggcaccagggtcgtaagactacccgggtcgtgaggcgccattttccgttcccttggtgctccgctgctcgcgcgacccggccccgcggccccgccccgcagcgcgtcaggccctcttccccgggcgtggcctaagcggcccggtccagtcgccctggggctgcttgggggcttttcctgctcgtggagctctgcgctggtcttcatgcgccctagccctctttcggggatactggccgaccccctcttccttttcccctttagtgaaggcctcccccgtcgccgcgcggcttcccggagccgactgcagactccctcagcccggtgttccccgcgtccggacgccgaggtcgcggcttcgcagaaactcgggcccctccatccgccctcagtaaacatggcggcacggcgagcggggcgggcagggggcgggcagggggcggggcccccgcgggctcccggccagggctctcggccgggctctggctacccacgtgtggagaccgggcaggtgggcctggagagcgtgagccggtgccgagaggcaccggggagcggcgtctgagccggggcggggacaagggggcggggaggggcggagcgagccggcctccggcgtgggtctgagatcttaagtgcgagcggtaaggtggtggtc

SEQ ID NO: 23082 - DNA, 2300 bp, Homo sapien
ctaccacagattggttgtaaactgctggacattaaggatcatgccacgttatttttttcttcaatatctactgctatccattcctttattctacaaatatttactgagtccctacaaactgcaaacactgggagaatgttaaaaatatgtaacacagtattttggcctttgagtggcttacaatgtagttagaggaacaagagcactgcccaaaaataaaagcactgtaaacattaaattacaatataaaagaaaccacaggacagtgtataaatatatttgagtggacactaaagattacaggaagtttttaaaaaaggtattactgaatcgcttgaacccaggaggtggagggcgcggtgagccgagatcatgccattgcattccagcctgggcaacaagagtgaaactccgtctcaaaaaaataaataaataataatttaaaaaaggtattactctggaacttagtagtagtaaatattcacaaaagatgttggaattgaaggatggatatttcctaatttggtagaggaaggcaatttcaggtatggagagaggcctgaacaaaggtggaatgcctttgagggcaggcaaatctggctggtgcagaccattatggaggtttgagcggacaagtaattggaaataatgttggaaaagtgggttgggactagtatggtacttaatggtttgaattttgtcctgagacaaaatttaatactaaatatagtattaaagcaagagagtgataatggaaaatgttggttttctaaaagcttaatacagagaagtatttaggtagatgaaggaaagaagagaatggaagcaaaacataacattttgagtttgaagttagggtgcactcagtaggaaatgcttaataggaagctagaggtacccgtatgtacctggagtgtggaaaggttaaaaaagacactaaagagatctagttttggtagacatctgcgtgatgattacagctgaaaccataataggtggattctttaaataatataagggtataaaagcagccaggctaaggaatggcctgtatccagcatctagggatgtcttcccctcaccccaagatggtgcccttctgattcaggcagcaacgggcatgcagcattagctctcgtgtcgttttacaataaaaggccacttttgacaaattttgcacgctccctggacattgggtgcatatctgcagaagagaaagaaacattagaactccagaaagaaaagccaagaaaagaacaaacggcgatcaagaattaactgccagtacacgtttccagaattcctctaacacggggccgataaatggataaacggctcgtgtcccacccttgtaacaggctaggctaggagatgccatctcttcctccagagtcctgcgccgaatcagctcccgacactttcagtaccagatatcgcacagggaaggtcctcatctctgaagatcactattcgaacttatttattatgctttctgcagagacttctcaatctgacagccctagtttggcgcggtgtaaaacgaccgcaggtacgtaaagaactcatcaagcattacaaaagtacagccctaccaccgcacgatatatggcgttcgtgcgtagagagattacacaagaggcagaggacccgtctgtagaaagaacttaaagttattctaaaattaaggggcgaaatcaagtttcacaggtctttgaaagtcggcaggactggggcgccgaaggcctgcacgacgtgagtacttgggaacaggacctggctgggcagggtcgggaagcgtcagggacgaaatcagaaccgcaggcccgccgaggagaagggggagccgctggcgagcgcgacgcacggctggccagcgaccctgcttcagcccgacctcaaacttgcttctgtacctcgggtagcgccagagccctttccacgcccagagcgaggagcagggcggcagcccagggcaccagggtcgtaagactacccgggtcgtgaggcgccattttccgttcccttggtgctccgctgctcgcgcgacccggccccgcggccccgccccgcagcgcgtcaggccctcttccccgggcgtggcctaagcggcccggtccagtcgccctggggctgcttgggggcttttcctgctcgtggagctctgcgctggtcttcatgcgccctagccctctttcggggatactggccgaccccctcttccttttcccctttagtgaaggcctcccccgtcgccgcgcggcttcccggagccgactgcagactccctcagcccggtgttc

SEQ ID NO: 23083 - DNA, 2300 bp, Homo sapien
cacagttatattgattactttatttcctcaggctggatctccagaactgttctctggaggaccctggtccaaactttcatcaggcacataccactgtcatcatgtaagtagttaggtacctcccacccaaaaggctaatataatgtaggttgatgcgaaagtgctaacattgtgtactttgcagagacctgcaagcaaaccccctcaaaggtgacttggccaacaccttccgtggctttactcagctccagactctgtgagtaagggtatgggaagagaatcaaagagggatgatgctgtgagtttagcaactttgcatgttatgaccacatttctctataggatactgccacaacatgtcaactgtcctggaggaattaatgcctggaatactatcacctcttatatagacaaccaaatctgtcaagggcaaaagaacctttgcaataacactggggacccaggtatgctgtcttacctccaaacttctgggaattgtcttttctcccttgtattttccactttagatcagaaagacaaagttgcttaagcgcctttcattcagagttctggggctataacccctttgaaagaaaagatcttaagatatactctattatttgtctcacgtgtgtccgtgtaaagagaccaccaaacaggctttgtgtgagcaacaaggctgtttatttcacctgggtgcaggtgggctgagtccaaaaagagagtcagcaaagggtggtgggattatcattagttcttacaggttttggggtaggcagtggagttaggagtgctgttttgcgggcaggggatggatcttacaaagtacattctcaagggtggggagaattacaaagaaccttcttaagcgtgggagagattacaaggaaacttcttaagggtaagggagattacaaagtatattgatcagttagggtggggcagaaacaaatcacaatggtggaatgtcatcagttaaggctattttcatttcttttgtggatcttcagttgcttcagaccatctggatgtatacgtgcaggtcacaggggatatgatagcttagcttgggctcagaggcctgacattattgttactgtttttatctgtaattttctttcttcttcctttatcctagcaatgattgagagaatctaagttgaaacagataattgagaaatatgcctaatgaaatggataaagtgatgttctctatttctctctggcctccagaaatgtgtcctgagaatggatcttgtgtacctgatggtccaggtcttttgcagtgtgtttgtgctgatggtttccatggatacaagtgtatgcgccaggtgaggaattaggccgtctaactagggatacaaggaatgcatagagcaagtcttctcagaaaggagagccacaagaccaggagctgatacaaatttcctataggtggaaaactatagaattgccctagacaaagtgataggtatattaggaaagaactaggtgttaggatgtggccctccgtgtaacgttgtatgggggtgttttttggtctgttgttcacagggctcgttctcactgcttatgttcttcgggattctgggagccaccactctatccgtctccattctgctttgggcgacccagcgccgaaaagccaagacttcatgaactacataggtcttaccattgacctaagatcaatctgaactatcttagcccagtcagggagctctgcttcctagaaaggcatctttcgccagtggattcgcctcaaggttgaggccgccattggaagatgaaaaattgcactcccttggtgtagacaaataccagttcccattggtgttgttgcctataataaacacttttttctttttttttcctctctttctttttaaggaaaggcgccctgcctttacgtgtttcttgcttggggtgggagggactgctttagggcagccggttttttcaggtttcccccggttttgcagtgcggagaccacgggggcccactccccgtggctccgcggaccccgccccttacgtgcccggccccgcccctcacgccgcctgtgtccgcgccgccgcagtctctgctgctgccgccaagcgcgcccgaggctcctacgctgccgcgcccggcttctctccagcgccccgcgccgttagccacgtggaccgactccggcgcgccgtcctcacgtggttccagtggagtttgcagtccttcccgcttctccgtactcgcccccgcctctgagctcccttcccatggcggccctagtgttggaggacgggtcggtcctgcg

SEQ ID NO: 23084 - DNA, 2300 bp, Homo sapien
taaggctaaaggaaagaactaaagggccacagctcttgcatgttctgtgctggccacagtgccatgaagccctgcactgtctcctgccttcatccaagtaggcagggaagctggagggaaagggctgtagctagagctcatggtgttggggcttatgacagtcagtgaccctgaaccctgctcagtctgatcccccagagctgaggacggagaggaagagtctaggcctatagatagtgtcagcaaggccaacctgcagaaggcctgaccagtcttctctgccccaggatgaccagctgaaagttattgaatgcaacgtacgtgtctctcgctccttccccttcgtttccaagacactgggtgtggacctagtagccttggccacgcgggtcatcatgggggaagaagtggaacctgtggggctaatgactggttctggagtcgtgggagtaaaggtaaggaatatcgaaacccttggggttagcagaaaaatagcgggagagagttcactcaccacacagagttgtcagtatgtaaaccaggcactgactgcaaggcattgccggatcgtgggggtaatgaggtggtcattgtcccttaagagcttactttatggtaatgggagggaagagaagttggatccccaaaaaagctttggtatagaacagtccgtggtaaaactacatattcgacctgtaaacagaatgctgcaggagttcaagagacaggaggtgctgcttccaaaaggggtgatctgggaaggcttgagcgaaggggtgctatttgaattgagttttgaaggatggttaaggttttttatttgcaagggcacatcctaagcagaagctgagggatgaccccaagtacgtttggaaagcaggagggcacacagagagggcaggctgaccctgccattcagatgggatcaagcacagggtactgtgtccgtctctgctggtgagggaggaggtcctctcacaccttggccctctctcttccctcccgcccctttaggtgcctcagttctccttctcccgcttggcgggtgctgacgtggtgttgggtgtggaaatgaccagtactggggaggtggccggctttggggagagccgctgtgaggcatacctcaaggccatgctaagcactggctttaagatccccaagaagaatatcctgctgaccattggcagctataaggtatcagaatccaggagggcttcccgagggccgtggctccctgggccagggctgaccttgaaatggaagacaggaagaaaacaatttcatccttctgtttggtttcagaacaaaagcgagctgctcccaactgtgcggctactggagagcctgggctacagcctctatgccagtctcggcacagctgacttctacactgagcatggcgtcaaggtgcaggaactctggcaacctaccccactgctgcccttccccaagggggtgaaaatactgcaccaaagaattatctgggctgggcacggtggcatatacctgtagtcccagatactcaggaggctaaggcaggagaatctcttgagcccaggaggtagaggctgcagtgagctgcgagtgtgcagtgagtgcaccactgcactccagcttgggaaacagtgagatgctgtctcaaaaaaaaaaaaaacaaagaattatctcctattcccctgcttttattattaccattatactagtaagctatattccatgcagaaagcagaatacacaggaagcaaagagaaaagtctcttaaaatctctgtaccactgttctgatatttttccttccaggattttctctgtgtacatgtgtgtgagctcatactgcacctagtccttggtaacccatcttacttagtgtagatatctttcctgccaagaaatacactttgccagtatcaaatagaggcagccctcagtgcccaccctatgggtcctcagtctcctcatcatgggctcctgggccagctcctctcccttaaggctagccttcctgaccgctgccagacagcttggccctgaccttgactccgggttggcaggtaacagctgtggactggcactttgaggaggctgtggatggtgagtgcccaccacagcggagcatcctggagcagctagctgagaaaaactttgagctggtgattaacctgtcaatgcgtggagctgggggccggcgtctctcttcctttgtcaccaagggctaccgcacccgacgcttggccgctgacttctccgtgcccctaatcatcgatatcaagtgcaccaaactctttgtggaggtaactg

SEQ ID NO: 23085 - DNA, 2300 bp, Homo sapien
gccctccatcctcagaaccctgatagcactctaactgccctaatgacagtggccaccttcgctctatatcattgtgtaggtacatgcttgccctgttcaccaaaagctctcagagatcagtaggaatcctgctcattttggggtgcctagcataagaaattggttggggtctagtctcagctctagcaactaactgggttggcctccatgtgtcccccaactctgtgagcctcatgcctctaatttatttaataaaatgttagatgagagccgggtgcggtggctcacacctataatcccagcaactcagtaggctgaggtaggaggatcgcttgaggccaggaactcaagtgtgcagtgagctctgatcacaccactgcactccagcctgggcaacagagcaagaccccatctcttttttttttttttgagacagtctctcactctgttgccaggctggagtgcagtggcacgatctcggctcactgcaacctccaactccctggttcaagtgattatcctgcctcagcctcccaagtagctgggattacaggcacgtgccaccacacccagctaatttttgcatttttagtagagatggggtttcaccatgttggccaggatggtctcgatctcctgaccttgtgatctgcctgccttggcctcccaaagtgctgggattacaggtgtgagccaccactcccggccaaccccatctcttaaaaaagttagactagaccgtctgtaaggtgctttccagctgtgaaattctatggctctgtgtatggaaggaaaagggaggctgggctctgacctgttcatttagccccggtctctcatgtggccctctgccgatgcagctcccagatacgaccaggcctggggaaggagatggtctgatgaggccagcactggggactaaggacgtggagtgagcaggccagcctgtgggccaggcccaggttgaaccatgttgcttgcctcagtctcttcacagagccctcagagcccctccctgaggagtccaaacctgtggagatgcccttccaccactgccacagggacccccttccgccgccgggccttacccctgagaggctgcatgcacggaggcagctatatgctgcctgtgccgtttgctttgtcttcatggctggggaggtggtcggtaagttggggagcagcccttaaaccccattctccaaatacctgcccaagccactctccacccagagtcccaggaatgttcctgggtgcagatgcagagatggggatggctgggataggggagctgggtgcccaggactcaggaagtaggagggataagggacagcaacaaagggaattccagccgaggtccggggccagtaggtcagggctgacttcttttaaaaaccctattttcttgttattaaaataaatcattgtagaaaataaaatacagatgaatgaaaaaaataacataacagtagttaattatacctgtagtcccatcacctgagaaaaccccaaatcacatttttggtgtatatcccccaatttattttccatgcctatacacactacatgatattttctaaatggaagcagactccatcatttcaccctggcaggcgggtatctggcacacagcctggccatcatgaccgatgcagcccacttgctggcggatgtgggcagcatgatgggcagcctcttctccctctggctctccacccgtccagccacccgcaccatgacctttggctggcaccgttcaggtaaggcccctgcatggcccagtgactctccaatcttgccagagggcacccgtcagggtcccaagcaggtctctgacagcttgtctccccccccacccgcagagactctgggggctttggcctctgtggtctccctctggatggtcactggcatcctcctgtacctggccttcgtccgcctgctgcacagcgactaccacatcgaggggggtgccatgctgctgaccgccagcatcgcagtctgtgccaacctgttgtacgtcccagtatggagcaggcaccttgtggggcccagggcgaggggtcttcctccaggatgggagagctggctctctcctccccaccagacacacagacacgcacacacagctctccatgggctgccctgcgtgtgcctgagaagggtctgggatagagacctaaaattcagtcagcagatctctgtcaagggcctgccatgggccagccactctgatgagggctttcatcaacatgattgcatttaaacctcacagccaccccatgaggtaggtagcatta

SEQ ID NO: 23086 - DNA, 2300 bp, Homo sapien
agaaggccccagacatcccgccccactttgctgctatgatcacatttctatctggagccatcgtttttacttgtgggtattcttgtcacacctccatgagtatttctagtactgtattttctattcaggtcctgaattctgtggaaaattctgtccttgctgggttcaggttgggtagtggtggggctgagaattggaccagaatggacttagcactcagcctgacctcactcagcctctggcatccccaggtgaggtcccaagccccattcatttgtcaagggagacttatggtaccatgcagttaaggtgggctctgctgggtgcttatagtcggactgaagtccaattaacatgctcctcccactgccatcctcagccatagcaggctgcaccccttcctcccatgacaaccccagctctggaatctagccatcagttctctgtgcccggaatcagactttttggccccaatgtcccgctcgtctcttaaagggccacacttcagcttcatgtctagggagggcgggggcaggatccaggagtggaggttctgggaggtgggcctggaaaggaggcacaccaaggccaggaacacatgctgagtcccactccacacttcactccaccttcccttcatactgccttggcgtgcctggcatagcattcacctgtctttatcaaaatccttcccatccttcaaggcccttctcatgttacctcttacagctgtttccctgatttcctcgttataattagtctggccctccatcctcagaaccctgatagcactctaactgccctaatgacagtggccaccttcgctctatatcattgtgtaggtacatgcttgccctgttcaccaaaagctctcagagatcagtaggaatcctgctcattttggggtgcctagcataagaaattggttggggtctagtctcagctctagcaactaactgggttggcctccatgtgtcccccaactctgtgagcctcatgcctctaatttatttaataaaatgttagatgagagccgggtgcggtggctcacacctataatcccagcaactcagtaggctgaggtaggaggatcgcttgaggccaggaactcaagtgtgcagtgagctctgatcacaccactgcactccagcctgggcaacagagcaagaccccatctcttttttttttttttgagacagtctctcactctgttgccaggctggagtgcagtggcacgatctcggctcactgcaacctccaactccctggttcaagtgattatcctgcctcagcctcccaagtagctgggattacaggcacgtgccaccacacccagctaatttttgcatttttagtagagatggggtttcaccatgttggccaggatggtctcgatctcctgaccttgtgatctgcctgccttggcctcccaaagtgctgggattacaggtgtgagccaccactcccggccaaccccatctcttaaaaaagttagactagaccgtctgtaaggtgctttccagctgtgaaattctatggctctgtgtatggaaggaaaagggaggctgggctctgacctgttcatttagccccggtctctcatgtggccctctgccgatgcagctcccagatacgaccaggcctggggaaggagatggtctgatgaggccagcactggggactaaggacgtggagtgagcaggccagcctgtgggccaggcccaggttgaaccatgttgcttgcctcagtctcttcacagagccctcagagcccctccctgaggagtccaaacctgtggagatgcccttccaccactgccacagggacccccttccgccgccgggccttacccctgagaggctgcatgcacggaggcagctatatgctgcctgtgccgtttgctttgtcttcatggctggggaggtggtcggtaagttggggagcagcccttaaaccccattctccaaatacctgcccaagccactctccacccagagtcccaggaatgttcctgggtgcagatgcagagatggggatggctgggataggggagctgggtgcccaggactcaggaagtaggagggataagggacagcaacaaagggaattccagccgaggtccggggccagtaggtcagggctgacttcttttaaaaaccctattttcttgttattaaaataaatcattgtagaaaataaaatacagatgaatgaaaaaaataacataacagtagttaattatacctgtagtcccatcacctgagaaaaccccaaatcacatttttggtgtatatccccc

SEQ ID NO: 23087 - DNA, 2300 bp, Homo sapien
ccttacataaattttcaagtgaaggttggtattcccaccgccggcgccctcggtttctggaggcggcacgtttggccacgcgctgcgaggcgcctctgccttccccgcctggtggctcccggcaggggcgggcagggcacgtgagggcgtctgcgccccctcctggcactcggtgctgctggccgcgcgggctgcccgggaagggaaatcccggaggaagccattgttgttatgtcccctgttgtcgtcatcggctgagccgtgccaagaatccctttccccgcataggaccccgcagtttctccccattctcgagctcacccgccagggtcactacgggccaggctgccgcatccgagccgcggagtgcgcggtggccgctgcgcatcccagctccagggttctcagaattggggagagccctaggatgggtgcgacgcttagaaaaccgacggcgccgggcccgacgtacccagagccctggcatagctaagcagggacttgggttccaccttggctctgataagtagcccgaaaaggtgaacttggccggtggtttcctgctctcgccgcctcaatttgcttccctgtgacccgaggagaaacagaggtccgtcaagtcccgcgccttaaagggaggttagagggagaacgaccccctcgctcccttaccccctcacccctcatgggctttggactggggaggctgggggctggcgcggaggagaggctggcgcagccgggggtggggacggcgcggagggcgcgcgcagcccctgtggctctcccgtgccgctctgcagcagcggcgcaggacagtcccttcgcacgcgccgcccgcacaccttggcacgggccaagccacactctcccccgccggaacagccagcccgccgcccagctttcctaatccgtttaagcctcacctcctccgcgaagctctcccgggttaaccccatcacttccaaccactgtatctggcacgtgctcccgtttttgttttgttttgttttgtttttttgcaagtgcactcttgggctcgttggaataacaatatcgagggtaggtgtctgtccccagaagcctaagttcaggacgcccagtgtgttctgaaggatgcggctgatgagtttcttgcctgggctcactaaccattcccaccctccacgcttccccatccctgctcactcgctcccctcctcctacggaccctcctcttcacagactgtcacagcttcgagtgcacaatcctcttcccaccccctcccattctacagtggcggcaggtgcgaggggagagaacattgagcatttgaagcttcgacttgaggctcggccaccgactttgctgtaagtcgctccctcccctgggttttagtttcccccaaatgaggcagaatgcggtaatgtccaggagggcgctgcaggtgtggaggatgggaatcactagctgacacgctgccccgctgcccctcagcccctctccataaacagtggccgtgacaccagataggcggctcgacttcactggacccccgcccgtaagagaactgtgagcgctctccagttgccagtgcggcgtccagagccggggagggaaagaggatgggggtccaggccgggccctttattcacagcctgcatgaccttggactcttcttcctctgggtctcagtttactcatttgaaaagcagggataacagtgggttgaaggagagcaggaagcttgtcacccaatgtttctgtataaaaataaatgatcattcgcggtacagtgattggcagcagactgggctcgtgaattccgaccccagattctccgtaaaggggtttctggagtccctggaatctccctgtgtcaccgctcacctcatgttctttctggttctctggagataggtaatgggtccgctcctgtttctgcctccgcgtgagggttgcggccacagggtgacggcgtggtgggcgacacccccgcgcaggcatgcacagagtggtggtcgttgggcgaaggttggtcgtgaggttcttgggcttcaggagcgaggcttggaaccggtgggcgggactgtgtgcagaggtggggctagctcgcctgggggacggggctgtggagatgaggagttctccagaactcgggtggcggggcgctcccgggctctggcgcggggaaatggggctttggcagtgggggcggggcttaagggtggggagaggccggggagcctggaggcggagcttggggagctcgccccacgcggggcggggctccggcggcagcgggatctgcagttcggac

SEQ ID NO: 23088 - DNA, 2300 bp, Homo sapien
agcagagcccagagcaagtaggacagtggttccagaaaagattggagagggaggggcaggaccacgctgggtcttacagactgaggcaaggaattcgttataagtgaacctctaatgccttctgctctctctacccagtgctggggaagaaatgagctggtttgttctgctagttctgtcctcccatgatagtcatgaaagcttgggggttaaagaaatctggcatgagacaaaccaccataaaaaaattatcagcttcagcttctttttaagtgagtgacctctaaactcatctgacccagagactatggaccaggtgggtaatgcaaaggtcttcatcccctctccctgcactgaccacaggcctacagaaataaattcattaattcagcagtcatcacgtctgctacagatggactccttagttcgtttgcttagatggttcttgaggtggaatactgatttacaagtgcacctctaatgccttctgctctctctacccagtgctggggaagaaatgagctggtttgttctgctagttctgtcctcccatgagtcatgaaagcttgggggttaaagaaatttggcatgagacaaaccaccaaaaaacattatcagcttcagcttcttttttggtgagtgaccttcgaaggagctggcgcaatgggggttggcgcaatggcttcaaggaggctggcacaatggctcacgccttcaagggggctggcgcaatggctcacgcctgtaatcccagcacttttggaggctgaggcgggtagatcactgaggtcaggagttcgaaaccagcctggccaacatggtgaaaccccgtctctactaaaaatacaaaaaaaattagccaggcgtggtggcaggcacctgtaatcccagctacttggaaggctgaagcaggagaatcacttgaacccggaaggcagaggttccagtgagcagacattgtgccactgcactccagcctgtgtgacagagtgagactccacctcaaaacacaacaaaacaaacaaaaaaaacctacaaggtgaggaaaatgtgcacaaataactgtaataaaaggaagagagtgataaaagctacaaaaaggttaacagataagcattttccaagtaacaaagctttttctactacatgttacaggagccattgagtgctcttgcaaagaaaaccagcactacaaagtagtaaattataagtgatgcaaacactacctcctgtagaaactcacaggaagggaagccaggtagaggcatgctcccatgccagcaggtggggatacaaatcctccttctgctacctttccagaagaaagttagcaatagagatcaagagcgtaaaaaaaaaagaaaagaaaaaagaaaaaaaaaatcatttcgacccaataattccacttctaagaatgtatccttaggaaaaaaaattagacatttgttcaaggatttctgttgaattttccttataaggttattatattatcaaatagaaacaactgaaacagccaagttgggttacattatgggacatgctcatgatggcatcatatttaagtgacgtttttgaagcacggtagtgacttttggaaaaggctcaatacatcattttaatgagacgtgcaaactcatcattacgatatactaggagaaatgctttgacagacgaagtgggaacaactgggagagtgaatgatggagtgtcaggaacaggggcatatgagttgggtcttccaggttgtggaggtgtttccgggtggaagagaaggagggaccaagcggagagccctaagtcctgaagacaactgggaaggtaacacacctcttaagaagggcatgcagcagccatacctctcatccgccacggtcagcaaacccattgtgtttcctggagtgagttgggccatcaagatgggtggtgccctcctgctggggaagaggggctcggtgggaatccctgccccaaggcctggcagcaacgctcctacgctgccttgggccgcaggcctgctaagccctccgctctcgcttccctgcgcgcgaaataagtcccagggccaatgtggcctccccacccagtgcttccgggggcgccaaaaaacgacctgcccagaccctcagcgtcgacgctgcgcacaagcgcagtcaactgctggacccggccggtgtgaagtttcacacccaaaaggatgaagggcacccacctggcttaagagaacgactcccaggtaaagggccagacccaggtgaggagtcggcacagggccagaggtgccctgcacactcagagctctc

SEQ ID NO: 23089 - DNA, 2300 bp, Homo sapien
cccagctactcttcctttcagttgcagtcccaattttactccgtcagaaagcagccctcccctccctccccttatgaggtctcaggcagtggtggcagatttttcctgaagagtctttttcctgtgtctgccttgttattggaaccaatgccagctggtaggatccctgagccccttgcgatatcaccaccaagagcctgataactgagcagggtggatcctgtccctggagctgctgcacccattaattctcccttgttgcaactctgtgtaccaagaacccctagcatcagcctcattcctaagccaataacgcctgtatggagttggtttcatcttctggtgcccacggccattggcattgccagcctcattccatgccactatgagtcaactcaggaaaactgcgagtgcatttgaggcttaggggtagtcattccatctttagattatccttggacttcagctaccagcacagcatgcattagccttggtcctgtaggttaactgaagttcaaacatcagtgccagcttgcctccatccttttcacatattatgcaggccaattgacatataatttgttcttaaaaataggggcatgaaatatgtgatctggaaaagattgtactttctggactcttttcccactcttgcctctttgtgctgctgtttcgtatcctcctcacaccgtgtatttcccacccactcagggtcacagcctactaattcctcaaacttctctccctggactaggagaaaggctaaagaatgtcagtaaataaaagagctttcatccaatcccaaggcatatattatgcccaaaaaagacaaattgtgtctggggtagagaaaaaaggcctaaagaaattgcttcttggccttttgcctaagatcaagtggagaagacttgtaggagaaaaagaagaccagtgctcacaagtggggcaagcctggcttggagagtaggagtcctggacaactgtggagctgggtcagaggcttcccggagccttgtgattatgactttgtcagtgctctaaaatttccctggagattgattccctgggtgcccaaaataggtccctggcattcaggtcctttctgcccagctcaccttctcccaatttcctaacaaatttgagtccttggagtggctccagggatgtgttcacggaccagaatcccacatttcctcgggggcatgctcataggtaggtccaggccttggcacaacagtcatttctagcctcttgagcttcttttcctagggtgatataagaaaaggccagggaagaacaaaaatgagccagaggtgttggacaagaggcttgatgtagtccctggagctgctgttctgaatcacacagtcttgaggaggaggaccagggtcactggctgagcctgtggaggaggcaaccgctactgactctaagtctggcaagatctttcctcccaccctgagctatgtatgggtgcctctcacacaggcagatttagattctgtgtcactgtcctggaagaagggcccaagccagaacaggggtcccgggctgagaggagccttcagagtgagagggcagcacctttgctgacccacctttcactgtaagcagtggcactcacccctgcccttgctcaagggagtcacccattcctgagtgagtcagggtcactcactccatgacagctgtggctcgccttacatgagctaaattgggaattggaatgtcatgcagatgccccttgtctcccaacccccacagtaaaattaatctgctctctggggagtaagggacaaacagtgctacccacagagtgaacaagagagagtcatttgggaaacaaaaggagaattttacagagagagagggatagctaaaactacgtgagcctggcgagggtgcagagcagaaagtagagactgtccgaagactgctatctgggacgagacaagttgttaaagggacaggagagaaagcagagctatttcaagagtgagccacagaagggaatccagaggccatctaagcgaggaagggtctacaggcagtgagtgaaggccaggagcagggcccaggccaggcacgaccaccgaggggatgaacttcacagtgggtttcaagccgctgctaggggatgcacacagcatggacaacctggagaagcagctcatctgccccatctgcctggagatgttctccaaaccagtggtgatcctgccctgccaacacaacctgtgccgcaaatgtgccaacgacgtcttccaggtgggtgccagggacggggcagggccaggtaa

SEQ ID NO: 23090 - DNA, 2300 bp, Homo sapien
gcactttgggaggccgaggtgggtggctcacttgaggtcaggagttcgagaccagcctggccaacatggtgaaaccctgtctctcctaaaaatacaaaaattagccaggtgtggtggagcacacctgtagtcccagctacttgggaggctgaggcacgagaattgattgaacccgggaggcagtgagccaagattgtgctactgcactccagcctgggcaacagaggagactccatctcaaaaaaaaggtgctgaaggaaagagacctaaacctgccaatcctttgtcatgatccctcctttgccatttcatgctcccatctccagcccttgctcactgcttagccttcctcctcttcattgtgttattcctgttccttaggttggccgttgtccaatgtgttgctgttatctggaactcctacctgtcctggaaggcacatcggctctaagcctgcctcactccatcgtttccaccttgcagtgatgcagcttgaccctggaacggtcagacaacctcctcaaagtgggcataccagtttccacggggttgggttgccggtcagagcttaagaggactagcaccctgcaatgcccctcttcactctaaaatgtacactgactgctttagagcccttgataatagtcttattcccaccacatactaggcactccataaatatctgttgaaccttcatgaccttatcaactttacacccatatcccagcaaatgccactcatccccactcttcatagacacatttgttactctaaccctgcctaggcttcttgtagctccagctctttagagactcccggaaccctttatatggtgcctcagtaaatatgttattaaatatgtaatccggaatctgcagtggtaatgagtaagtttttaagcagaaaactattggggagtcatttctagagctggaaagaagccaagagaccaccaagcccaatttttttttttttttttttttttttttttgagacagggtcttgctctgtctcccaggctggagtgcagtggcgcgatcttgcctcactgcagcttccgcctcctgggttcaagcagttctcctgcctcagcctcctgagtagctgggaccacaggcgcataccgccacgcccggctaatttttgtatttttagtagagatggggtttcgccatattggccaggctggtttcaaactactgacctcgtgatccgcctgcctcggcctcccaaagtgttgggattacaggcgtgagccaccgcgcctggccaagcccagtcttacaaatgaggaccctgaggttggtaggagggaggtgacctgtccacaccaggagttagcagaaacttgaacccatatttctttgctgctcatgggcagagttacactgctgctatgattcccaggagagaaactgaactttgctaaactactttggcaaactcaaaagcagatgggccagccatttgtggtctgaaagcactcggatgctagagaccctctgttacatggtgcctgtcagacagccctacaatttggatcctggggctggaaaaagataagaatgctgggagactttggttgtggcagactgcctctcagtgggtcccactgtgttggctgagtgccagcggtggactcctgatgcctgcatttgcagaactgatagctgcagggaggcagtgggttccagcggcacagcgttctcacatttctggccacttctagaggcagaggacggggtcagcaccatggacagcctcacggtcccgcctccctttcgtgtgtcagaacacgcgacccggactagtctggtctggggacggccctagtcattgctggctgttctaagcggggcgagggactcccgtgggtcccagagcagtctttacgccccagccggcttctcgctttcctgcgtccagtgctgcttccagcgctagccccaggggcacgaaggctggtgtagggaggtgcgcccctccgggggcccgccagccgtcagactcgaagctgtggctgtcattgcttctacaatcagtgcatgttcttcgctgacgtcagtcggagctgtcctggcactatataaggctggcgacagccccgggacagaccctgtgttccccaaggcgtcttcagcctgccccgagggacagagactggagctcaatcttggaccgtacagacgctcgccgacaacctgtgagtggctcagagcgtccgcccagcctccccctgcaccaggactccgctcagctcagccaccacgctcctccggggagggaggctgggtggaagg

SEQ ID NO: 23091 - DNA, 2300 bp, Homo sapien
tctcatattcctcccttcgccagagtgtctttttccaccatcttcacctgagttcaattcatccttcaaggtcccggctcaaattccaccttcaccaaagagcttcccagttttctccagtaaaaaatagtttccctcccttgtgttcccaagggggaagggaggaaaaaggataaacaagcattaagcacttgatccattttaggcacttcgcatgtgtcacttgtatgaggtaggtattgccattttacttaatgataaaagagttggagagggtaagctgtctgtaaaaggtcaaggtcatataactagtaagtggtggtgctggggatttgaactcagtctaacttcagaatataactttacagcctaccacatttggtctcctattacatttacttttgtcagttcactcctctagcatgctgttttgcaaatagcattttagttaaatgtttgtgacattgacttctcttgcttccttactctgtttctccaggatttgtggcaggagtctccctgccttaatcataaaggaattgagtaaattgggggtggagctgggcaggtggagagcctgaaagagtgtgcctcctgacgtgtgggctccctggagataagtaaagcctgccagcctgacaagtccattgccagggatattgtagacatttccaacgctctagaaaggatattgctctatattcacagactcttagaatgttagagctggaaggggattaagaaatcacctagcttactggttttcaaacatgcagttgtgggccccgttaaaaatgggtcttttgagaagtatatacttggaaaaaaaagttggagaagcagctgtagtaatgctgcccctctcatccccacacacaaacatctgaaaaatccctagaactgaggagccgagtttggaaagtcaatagtgtaacctccctcattttacagatgcagagccttaacatcaagtctagtcatgaccaaggctgcacagcccgttagtttgggagccaatacctaatgtcttctgaggttctaattccaatgctttctgtggaagaatcatacatacgcagtatttcttaagtggctgtttgcggcaaagcactgaaatagttgctatgaggacgacaaatatgaacgaccccagttttacccactcatgagctcacagttgaggccagtgaagaacctagagacaaaacacgcacttaactataacttatagttccctaactacgattgctgagacaaggatcgtagttatggccagttatgcggggagggtgggctgaacaatgagactaccggattgagagaggcccgggtctcgcgcggagagaaggggcaggaggaggcagagggtcgaacttaggtgagaaatatggctggcgggccccacaccagggtccggcacagtccagctggaaaaggggtctctcacagagtgggtggccgagttaggccgctctccacgggtattcatggctcggtccacccccattcctgtcctggctgcgtaatccgaaggacgctgggaggaaggggcgggacttgtggcggaagttcctaggccagcctgtcacgtgggagggaggctcggcgctcaggtgagtggcgggtgatctgcggtctctggcttaaagcgtcgcaagccatgagtgcccacaaggtgtgtggtcatcctatatccgggcagtgacgggccctattttcggtttggagctggactcaggaaggttacaaactggttccaaccaagtctgaatctggagacggaccaagctatcttttgaggcacccaagctctgggtagaagccagagcaaagctgtcctcatgagtgtctccgtcgggaacggaggcttccaggtggtctggcttcaggaatgaggttggggtggctggtggctgctaccaggagtccatagcttcccacagcctttctctcttccccaattgtctaaggcgactcctgcgacaggaagctgtctgggaagcatccttcatgtggcctctgcccctttaagtcacattggaagtgggaaggggaagggagtgggcacaagggaatgtcaggcggcttcttagtcgtggagagggacggtgggggtgaccccctctcctcttggcttgacaggaagcatggcactctggcgggcataccagcgggccctggccgctcacccgtggaaagtacaggtcctgacagctggtgagtgtccctctaggacttgagtgggaccagggcagactgatttggaagccagaggcttgccccactgcaccaccctcact

SEQ ID NO: 23092 - DNA, 2300 bp, Homo sapien
gggatgcagaggttgcagtgagccgagatcctgccactgcactccagcctgggtgacggagcgagactccgtctcaaaaagagttcagcccctatcctgtacagatgagaaaatagacctggaggaaacccaagtctatcaacagcagagaccacaacccatgtcagtgcaaagaagccaagtgttgcactaccctattgggatccagctcacattgagccagttttgttttttgagctgttacgcaagtgccttctgtcgaagagaagctttactcaattctacagggcagcccccttcctattttcagtggtagaaaagatgagacctggggatccacacttgaggctgtagattggtgctggcagccctgcttctgcaactgagtctcagccctagtcttgaccttgttctttttctctaacaagccttttctctttctaaccctccctcccaatatacccacttcatactatccattgttcatacacttctctacctttattcctcttctcatattcctcccttcgccagagtgtctttttccaccatcttcacctgagttcaattcatccttcaaggtcccggctcaaattccaccttcaccaaagagcttcccagttttctccagtaaaaaatagtttccctcccttgtgttcccaagggggaagggaggaaaaaggataaacaagcattaagcacttgatccattttaggcacttcgcatgtgtcacttgtatgaggtaggtattgccattttacttaatgataaaagagttggagagggtaagctgtctgtaaaaggtcaaggtcatataactagtaagtggtggtgctggggatttgaactcagtctaacttcagaatataactttacagcctaccacatttggtctcctattacatttacttttgtcagttcactcctctagcatgctgttttgcaaatagcattttagttaaatgtttgtgacattgacttctcttgcttccttactctgtttctccaggatttgtggcaggagtctccctgccttaatcataaaggaattgagtaaattgggggtggagctgggcaggtggagagcctgaaagagtgtgcctcctgacgtgtgggctccctggagataagtaaagcctgccagcctgacaagtccattgccagggatattgtagacatttccaacgctctagaaaggatattgctctatattcacagactcttagaatgttagagctggaaggggattaagaaatcacctagcttactggttttcaaacatgcagttgtgggccccgttaaaaatgggtcttttgagaagtatatacttggaaaaaaaagttggagaagcagctgtagtaatgctgcccctctcatccccacacacaaacatctgaaaaatccctagaactgaggagccgagtttggaaagtcaatagtgtaacctccctcattttacagatgcagagccttaacatcaagtctagtcatgaccaaggctgcacagcccgttagtttgggagccaatacctaatgtcttctgaggttctaattccaatgctttctgtggaagaatcatacatacgcagtatttcttaagtggctgtttgcggcaaagcactgaaatagttgctatgaggacgacaaatatgaacgaccccagttttacccactcatgagctcacagttgaggccagtgaagaacctagagacaaaacacgcacttaactataacttatagttccctaactacgattgctgagacaaggatcgtagttatggccagttatgcggggagggtgggctgaacaatgagactaccggattgagagaggcccgggtctcgcgcggagagaaggggcaggaggaggcagagggtcgaacttaggtgagaaatatggctggcgggccccacaccagggtccggcacagtccagctggaaaaggggtctctcacagagtgggtggccgagttaggccgctctccacgggtattcatggctcggtccacccccattcctgtcctggctgcgtaatccgaaggacgctgggaggaaggggcgggacttgtggcggaagttcctaggccagcctgtcacgtgggagggaggctcggcgctcaggtgagtggcgggtgatctgcggtctctggcttaaagcgtcgcaagccatgagtgcccacaaggtgtgtggtcatcctatatccgggcagtgacgggccctattttcggtttggagctggactcaggaaggttacaaactggttccaaccaagtctgaatctggagacggaccaagc

SEQ ID NO: 23093 - DNA, 2300 bp, Homo sapien
tggcgcgtgcctgtagtcccagctattcaggaggctgaggcaggagaatcacttgaacccaggaggtggagattgcagtgagccaaggtcacaccactgcactccagcctggcaacgcagcaagactccgtctcaaaaaaaaaaaaaaaaaaaaaagggccaggcgtagtggctcacacctgtaatcctagcactttgggaggctgaggtgggcggatcacctgaggtcaggagttcaagaccagcctgaccaacatggtgaaaccctgtctactaaaaatacaaaaaatctgccgggcgtgacggcgggcgcctgtaatcccagctactcaggaggctgaggcggagaatcacttgaacctgggaagcacaggttgtagtgagctgccaagatcgcgccactgcactccagcctgggtgacagagcgagactccgtcttaaaaaaaacaaacgagcgtctcactttctctctcctattccatttcccttccccagggttcattccatgatctgctccgtagagaaccaatgctgcgcatgcaggagggagaggggcattctcaactctgcctggacaggctgcagctggaggctattcataaggtagtctctcatcctctccaccctccactctcatttccccccagttctgggcctggggctgatgaaatggtagatgaaaaggttacacagatgacaacctcctcctcctccagagcatgacagacgtacctcattcactggcttttcattcttacctctgtcacccctcatggtcctgtcctttcagattgtggctcattttttttttttgttcatacagctaggagtcaccctaaagcaccacccatgagcatctctctcttgttttctgttctcttcacaggtacgtttcagcccaaacctggactcctatggatggctggtatctggggggcagtcagggctggttcgaatccattttgtccgtggactcgcctccccactgggccaccgtatgcagcttgaaagccgagcccacttcaatgctatgttccaaccatcctcccccactagacggcctggcttctctccaaccagccatcgccttctgcccactccctagccttggcccacaccagatccttggagtgaagtcggtcaagaacaaatggcccctatgcacagagccataggaactgggggccttccctggacagtgatcatgccaggcctggacctttaggcctgcctccccaggactccttagatcccactctttctacagacttctgtgatcacagccccctgcgggcaggggggctctccctccaccaactctcaaggctcctcagcctaagactatggctcatgagaaacactcaggcctgacctaggcttgggagtcaaactgctcatattgagcatattgttaagtgggtaaagccaagtaaaggtactgggtgtttttgtgaccacttgtgaatgggtgtatggagaactgaaaagggtatctgcatgaaggctcctgtctgactattccaggatccaatattactgccttctgaaacttcctctttagggtaaccatcatgtatgcccacgagggtgatagtaattcgtgagactgaagttgcttagagtacttctttgaccaaggaataccacagacaccctaccgatagaacagtggctcagatcttacttgctcctgcttacgaagtattcccaatcactggtcatctgaccctacttgaacactcctgaacagtcatgttttttaaaatcttcctttatatcaagtcagagagtatacttctataaatttcactcatggatgttaggaaatctagtcatcttccctgtgattgccctgttaagtatttaaccatagctatcatgtgtttcccaaatcttctctagattaaatatcttcagttacttcaaccattcttttacacgtcatgatttttgatccttcatgatactgtcacattgttgactcattagaatgtttacctacttcagttctatgtataggaggtgtttagaacccaagtactgtaatgtattgttatatctcatcttgttagagtcctcttgtgggatgctgcagactcacagtgactatgatactgcctcctaagcaaggacacaccccagtgatgagaaataggcaaaccatggtcttgaaatgcctaggagtataggctggggtttggagggaaatagttggatgacctcaggaaatagaaaaaaacaggcagctgctttttggagagagtggagatgagatcagtgcctacctggaacaaaaccc

SEQ ID NO: 23094 - DNA, 2300 bp, Homo sapien
accgcgcctggcccagcatctatgtactcttaatttttttctgagtagaaatagtctagtgacttatttctttctatttttttttttttacattgcttgaatatttctaactatatgtccagtattgaaccaccaaagaaagaaccaaaaaacaagcatatataaaaaatttaaagagcaatagttccttatgttttattttggtttttttaccattataatatccagcagctaggtgttggtggggcctggtaggcatccaggccaggctaaggcactgaccacactcagaggggtctgtagcttgcatagaccccacctgcagagttgccacacattgtacctgcagggaaagaagagatgggactagggttagggacacctacactgtttggaacgaaagctcaaatcagtgcttaatccagcaggatgagggtatttttcagaagtataaggagactcactgtggaatcagcaaggtgaggctctaagaagatggagcctcagctaaggtagcaggttcctcactcaccttatatatggcaggcttcactgcatctgtgaggaaaaagagcaggaactaactctatggatcccaaggactcagcaggtcttactctgtcacccaggcccgagtgcagtggcatgatcatggctcactgcagcctccaactcctgggctcaagcaatcctcctgcctcagcctcccaaaatgctgggattataagtgtgagccaccatgcctagccaggccttgcctttttttttttttcctttagacctcctctgtggacacaggccttctcttaaatcagcaaccaatcctttgaataatgacattcccttatcctttattgagaaagtccttatcttttcatcaccaaatttatgaacctacctctatctgttcccatcttctttccttctgttacacctgatagtatccttcctcctatcagaagagcaatcccttcactctactctcttctcatcctctagcaccttttccagaacactgctcattctgttatcctccttcctcctgtgtcatccacttgttccctccctagtctaggtcactcccatattgctatgtgaacatgccctaatgtctcctatccaaataaagggacaaaaccttcctttattgaccacacttaggcaatccaccaccctcaattactggttccccttcacagcgaaatttttttttttttttcagacagcatctcactaagccgcccaggctacagtgcagtggcacaatctcagttcactgcagcctcaacctcctgggcataagtgatcctcccacctcagcctcccaagtagctgggattacaggcatgcaccactatgttcggctacttttaaaaatttttttgtcgagacgacatctcattatattgccccagctggtctcaaactcctaggctcaagcaatcctcccacctaggcctcgcaaagtactggaattaaggcatggaccaccatgcccagccccacagccaaacttcttgaaagaatggtctatatttactatctttactttctgaccttctattacctcctcaacccactccaccagaccaccacatatgggacttcccagggctccagcctgggtgccctcttctttaaatactcagtactaatgaaaaataaattcaacatataggagctgccttttcctgactcctccctccttttgctcatcttcagctctctattccatccctctcttcagcagaacaagagattgtgtttgtgtggtggtgagggcaggagaggctaagaacaggattgggggaacaagagtatagcaggggagatgggccctatctatcagcccaagccctcagcagctctttacacagccagttacctgtggcagcaagagggggaaagtcttgagagcacagaagagggaagaagggggagataaaaggaaatgtgctgaaagagtacagctgtaagactgcaaaagagagagggctcaagaacaaacctgagtcacaatgcagggtgtgtgtgtggctgagtaaggctttgtgctaagagagactggcccagaggagtttccagggagacagacaggccctgctatgctgtgaccaccactacagcagccccattctccttgctgtgctactcacctgggggttgctgagccagcagggcctccggatggggtagactgaatagcagtactttcccgtctgagcaggccagagccaagagacccaaccggggcaggagaggagcctaaagggtaaaaggtatgctgaggcttgctgcct

SEQ ID NO: 23095 - DNA, 2300 bp, Homo sapien
ttgtcccatagtctacccaccacccccatccaggtgaaatattgatagcagggcaccagagaactctttgactcattcttttttttaaagacagagtctcactctgtcacccaggctggagtacggtggcatgatctcggctcgctgcaacctccaccccacgggttcaattgattctcttgcctccgcctcctgagtagctgggattacaggcgcctgccaccatgcccagctaatttttgtatttttagtggagatggggtttcaccatgttggccaggctggtctcgaactcctgacctcaggcaatacgcctgcctcagcctttcaaagtgctgggattacaggtgtgagccaccgtgcctggccaactcattctttttaaaaaataaattcatttatttatttacttgagacggtgttgctttgttgcccaggctggagtgcagtggtgtgattacagctcactgcagcctcgacctcctgggctcaaggagcctcccaagtcttcagcctcccaagtagctgagactacaggtgtgcaccaccatgtttttttgtagcaaaggagtctcactctgttgcccaggatggtcttgaattcctggactcaagccatccttctgccttgtcctctcaaagtgctggaattacaggcatgagctatcgtgcctggccagaaaattatttttaaatgtttttatttaaaataccatacccaggctggagtatggtaacaccatcatagctcactgtaacctcgaactcctaggctcaagcaatcctcctgtctcagccttccaagtagctgggactacaggtgcgcaccaccatgcccggctaacttttaaaattttttgtagagatgaggtctccctatgttgcccagactggtcttgaactcctggcctcaagcagtccttcttccttggcctctcaaagtgttggaattacaggcatgagccatcctgcctggccttttacttattcttaaataaacttattccttgactaatctttacagaaagagatgttaacattaagtatgcctcttcactttggtctaaattttgtagtatctggcagctcttttttgtagtatattttgaggaagttggtgtccctttcctagattcatgctagacaaatttttctctctcttcttttttggagtgtgtgtatgtctgtgtgtgtgtgttttatttcattgggtttcagagacagaggttaaataattgtgcattcactgcttcatccttacaagaaaatatatgagctttaaattagataatgtatgtatagcacttagtatagtgcttggcacatagttagcatttaataaatggaagctttatggccaggcgcagtgactcattatctgtaatcccagcactttgggaggttgaggcgggtggatcacctgaagtcaggagtttgagaccagcctggcccacatggtgaaacctcatctctattaaaaatacaaaaattagctgggcgtggtggtgcgcaccttgatcccagctactcaggaggctgaggcaggagaattgcttgaacccaggaggtggaggttgtagtgagctgagattgccccattacactccagcctgggcaacgagagtgaaactccgtctttaaaaaaaaaaaaaaatggaagctttatttgtttacttgtttattgtctgcttcaccaaaatgtaagttccatgagggcagggaccttgtctgtcttgtttattgtcatatcaccagtttccttttttgtttttaatttttttattttattttattttgctagagaaggggtcttgctgtgttgcccaggctagcctcaaactcctaagctcaagctgccttcctgcctcagcctccctaagtgctgggattacaggtgtgagccaccgcacctggctcatattaccagtttccagaacagtcctgacatatagaaggtgcttagtaaatattgttgaataagtgaataatcagggaacttggttatgagtgtgagaatgagggagaaaagatggggaaataaaaatctgagctagtacaaatagtttttgtcctctactcatttgtgtgtctctgtatgcaggggcagccattttggggggtgctgatggatacctgcggggtcggctatgttgccctgggggaggccggccccgtggggaacatgactgtggtagactctcctggacaagaggtgctaaatcagcttgatgtcaagacctcttcagaaatgaccagtgcagaggcttccgtagagatgtcattacctacccctttgcctg

SEQ ID NO: 23096 - DNA, 2300 bp, Homo sapien
ggtggcaaatacctgtagctctagctattcgagaggctgaggcaggaggatcgcctgagcccaggagttcaaggttacagtgagctgtgatcatgccactcgactccagcctgggtgacagagcaagatcttgtctcaaaaaaagtgggaaccaatacaatgactcttggcaagcattcaactcaactagtggaagcagactgaccacgtctacaggagaaaaaccttcaagcttcaagcatttagagaggaaataagagtatgtcagttaacataaggagctaaatggaaatcagttaagagagcttctatacaagtcttaaggattttctaggccaagtgctgtgactcacgcctgtaatcccagcactttgggaggccaaggcagatggatcacttgaggtcaggagactagcctggccaacatggtgaaaccccatctctactaaaaatataaaaattagcccggcgtggtggcaggcgcctgtaatcccatctactcgggaggctgagacaggagaatcacttgaacccaagaggcagagggagaggttgcagtgagccgatatcacgccactgcactccagcctgagtgacagaggaagattccggttttttttaaaggattttctacatcagtatacatatatttatctcattcttcctaattgctgcatggcattccatagaattagttatttagacaatcttcatttaatgaacaaatgagttaaaatactatttcaaaaaatactgcaataaatattctagtacaaatctcttcattaattcatcaataaattatttttctcgaataatcatctgaacatggaattactgtactacactgaagaacatgcacatttcaaaatttgatactaccaaacggctcaccaaaattaaaactatttatgtatattagtacccattttatcataccgttactgatctttttaattttcgccaatctgataggtgaaagaattcttccccactctatttatttgcactgataataattggtgtcagcaacttctttctatatattggacatccatatgacttttatgaattgcctgtacatataatttgcctggccgggcacggtggctcacgcctgtaatcccagcactttaggaggccgaggtgggcggataacgaggtcacaagttcgagaccagcctgaccaacatggtaaaaccccgtctctactaaaaatacaaaagtagccgggcatggtggcacgcgcctgtaattccagctactcaggaggctgaggcaggagaatcgcttgaacccgggaggcggaggttgcagtgagccgagatcacgccactgcactccagcctgggcaacaagaacaaaactccgtatcaaaaaaaaaaaaaatacacttctcatggaaggcagcagcaggatgtaatggtacaaattctggatacacagtaaaggaatagatgatcagtaaattcgtactgagtttctaaaaccttccattgcaccccaatctgtctggttcccatgctgctccaggatgccagcttgacctccccagccaagaaaaaataatgacacaacactgcaccttaagtatgaaattactttgaatacactgcttagcttaatatattgtttcctaaagtgttcctagggtacaactggcggtatgcaagatgattttaatggtacgaaaacgaacattttaatgactagtgcttttatttcaacttacataaacaattataagtagcccatgaaacccacggtttcatttatattgcttaggtcgagactaatgcatttaaactttttaagtaagtcaatttaaagagaactattcagaaaacaatagtacaattgataagagattgcaaaaatagtgatggcacgggattgacttaaaattgtatatgcctctggaacaaagaggtttgtccataccctatacatccctccaacaaagtgagttgcctccgacggagttgaagtcgccacctctgacttccccaacaggcagccaacttgccacgggacaaaaggactagacagggaaacacaactggcccttggttacgccaatggcgttgcagcgcgcggggcacaaccctcggggttaaagagcctcctcgaggaagaggctgggacacagctgaaagagattgacccacaaccactctaggggccatcacctgcccttcttcagtcctgggcgtgaaggtagatttctcccctagcctgtgcgggagaggagccctggtttttctaacaaggactactgtaggttcgccgagttcgaggga

SEQ ID NO: 23097 - DNA, 2300 bp, Homo sapien
ttaagcagaggatcaacagggttgctttatgctttagaaagataaccgggccaggcatggcaactcacacctgtaatcccagcactttgggaggcataggcaggaggatcgcttgcgctcagtagtgtgagacctgcctgggcaatatagcaagacctcatctctattaaacaacaacaacaaaaaaacctggaagtggtggtatacacctgccacacaccccaactattcaggaggctgaggtggcaggttgaggctgcagtgagccgtgattgcaccactgtcctccagcctgggtgacagagcaagaccctgtctcaaaacaaacaaacaaacaaacaaacacctagtagaaattagaggcagagaagtagatcagtgaaaagattggttataaatcaaaattacaaatgcacctaaaactttggttcacaattccacttctagaaattatcctacccatatagttacacatttgaagtaatttagatgcaaggttacttatagcagtgtgatttataatagcaagggaccattgtttataacagcaaaaccatgtaaatatgcatcaatatcaacaaggcactagttataccacatccacccaattaaatgctaactagttatagcacagaatgagaaaggtttttgtgtacagaaatggaataatggccaaactcagtgacttacacctgtgatcgcagcactatgggaggctgaggcaagaggatcacttcaggtcaggtgttcaagaccagcctggtcaacataacgagaccccatctctagaaaaaattaaaaaattaggccgggcgcggtggctcatgcctgtaatcccagcactttgggaggctgaggcaggcgtatcacaaggtcaggagttcgagaccagcctggccaacatagtgaaaccccttctctactaaaaagacaaaaattatccgggcttggtggcgggcgcctgtaatctcagctactcgggaggctgaggcaggacaattgcttgaacccgggaggcggagtttgcagtgagccgagatcgcgccactgcactccagcctggggacagagcaagactccatctcaggaaaaaataaaaataaaaataaaaacggggtctcactatgttgcccaggctggtatcgaattcctgggctcaagtgatcctcccccgccttggcctcccaaagtgctgggattacagacaggagctaccatacccagccaaagtcatgcttttctactcctactccttcccttccttgtcctctttccaagctctctcgggcccatccctgacttcactactggcagaatcctccagcggccggcggcgaggacttctttgtctcccagactccgccttgggctcggacgccgccagggttgcaggtacagactctctggtctagctggctcttccggccacaggcgcggcagtccggccggaaaggccggattcagggatccagagcgcgagcccggcctgggagtccgcctactcccggctcccgtcgaggccgcgtgggatcccgttggccgcgcaggcgtcgatctcccctttttgacactgcaactcccatgaggccctgcagcgtccctggcgccgctgaagacgccctggaactcggctggcttcggagggctcggtgactctggccgcgctgcattatggaatacagagtctaagagaaaactagcccggcaccgactccggaccaagcacacgtgtttaccttgtgcactggggtgggggcgtcagtgaagagcagctaacaagatttcgtcataagaccgcgaccagacaggcggcgccatcttcgaacttagacttccggaaggactttggcgagggtgagtgtatcgccgcagcgggtgtgtggggggccccacaattactcctcccccttcttttgccatagcactaagatattgggaacaaactcctggctccgctcttctcccagccacagcagcgcgcctttcagcgtctgcgctcctacagagcaccatcatgctccgcaccttccctactgtggccaccgtgcaccccccatctctgcaagcctcgggtcttgccctcctcccccacgcggtgtcggtaacgcggaagcctgtgtccgggcgtaggcgctgcatacgtagcgtccctcgaactcggcgaacctacagtagtccttgttagaaaaaccagggctcctctcccgcacaggctaggggagaaatctaccttcacgcccaggactgaagaagggcaggtgatggcccctagagtggttgtgggtcaatctctttcagct

SEQ ID NO: 23098 - DNA, 2300 bp, Homo sapien
caggagaatcaggcagggaggttgcagtgagccgagatggcagcagtacagtccagcttcggctccacatgagagggagaccatggaaagagagggagaccgtgggtagaggtagaggtagagaggtagagaggtagagaggtggaggtagaggtagagcagtttaatggtcactactttcaatggtgtaggatgagtagctgatattttggcttttactttttttaaaagatcattatcaatacatggatttctatattttgaacatactacttaatcatcaaaattaagcagaggatcaacagggttgctttatgctttagaaagataaccgggccaggcatggcaactcacacctgtaatcccagcactttgggaggcataggcaggaggatcgcttgcgctcagtagtgtgagacctgcctgggcaatatagcaagacctcatctctattaaacaacaacaacaaaaaaacctggaagtggtggtatacacctgccacacaccccaactattcaggaggctgaggtggcaggttgaggctgcagtgagccgtgattgcaccactgtcctccagcctgggtgacagagcaagaccctgtctcaaaacaaacaaacaaacaaacaaacacctagtagaaattagaggcagagaagtagatcagtgaaaagattggttataaatcaaaattacaaatgcacctaaaactttggttcacaattccacttctagaaattatcctacccatatagttacacatttgaagtaatttagatgcaaggttacttatagcagtgtgatttataatagcaagggaccattgtttataacagcaaaaccatgtaaatatgcatcaatatcaacaaggcactagttataccacatccacccaattaaatgctaactagttatagcacagaatgagaaaggtttttgtgtacagaaatggaataatggccaaactcagtgacttacacctgtgatcgcagcactatgggaggctgaggcaagaggatcacttcaggtcaggtgttcaagaccagcctggtcaacataacgagaccccatctctagaaaaaattaaaaaattaggccgggcgcggtggctcatgcctgtaatcccagcactttgggaggctgaggcaggcgtatcacaaggtcaggagttcgagaccagcctggccaacatagtgaaaccccttctctactaaaaagacaaaaattatccgggcttggtggcgggcgcctgtaatctcagctactcgggaggctgaggcaggacaattgcttgaacccgggaggcggagtttgcagtgagccgagatcgcgccactgcactccagcctggggacagagcaagactccatctcaggaaaaaataaaaataaaaataaaaacggggtctcactatgttgcccaggctggtatcgaattcctgggctcaagtgatcctcccccgccttggcctcccaaagtgctgggattacagacaggagctaccatacccagccaaagtcatgcttttctactcctactccttcccttccttgtcctctttccaagctctctcgggcccatccctgacttcactactggcagaatcctccagcggccggcggcgaggacttctttgtctcccagactccgccttgggctcggacgccgccagggttgcaggtacagactctctggtctagctggctcttccggccacaggcgcggcagtccggccggaaaggccggattcagggatccagagcgcgagcccggcctgggagtccgcctactcccggctcccgtcgaggccgcgtgggatcccgttggccgcgcaggcgtcgatctcccctttttgacactgcaactcccatgaggccctgcagcgtccctggcgccgctgaagacgccctggaactcggctggcttcggagggctcggtgactctggccgcgctgcattatggaatacagagtctaagagaaaactagcccggcaccgactccggaccaagcacacgtgtttaccttgtgcactggggtgggggcgtcagtgaagagcagctaacaagatttcgtcataagaccgcgaccagacaggcggcgccatcttcgaacttagacttccggaaggactttggcgagggtgagtgtatcgccgcagcgggtgtgtggggggccccacaattactcctcccccttcttttgccatagcactaagatattgggaacaaactcctggctccgctcttctcccagccacagcagcgcgcctttcagcgtctgcgctcctacagagcaccatc

SEQ ID NO: 23099 - DNA, 2300 bp, Homo sapien
gaagagactgactttggatccataatcctttcgtgtaggaaccttgacaaaacaagggaacaggaccaatggcccagagtttaaaaaggatgggataaagctggaaaggaagtgaacagtaagactactctgacccaagcacctatccttctcactttgcacccagcacctttcctccctccagtccatttccctaggctctttctagccaggcaccaaacccacttcctacctgttgacgctctggttttttaacaagccttctcagaagtaggtcatcaacctgagggtactcagggagacgcttcactcctgaaagataatcatcatgttttcaggacactgtaggtcttgaaatgtgtaatttgctcttagggtataaggggcatcaagaaaaacaggatgaggtggagaaaacgggagaatagggtagaaaaggaaatagggataggataatggggttgcaggaacaattcagaactctgggtcccaagaatgagaggggagagctgttttactattgggcagcctgagctggcgttataattaggagtaagggaggtcttaaaatgaagggaagatacctgagggggtttctccagctgtgctggggctggccttaggaggtggtcctccttgttccccttttcttgcctgtttcagggcccgctcggcctcctgcttggctcgacgctcagcccgaagttcggccttactccgaccagctggaactttctcccgaggagtgcccaactgaatgcccgattctggcagttctctggttgggcctactaaaagcattaaaaaaaaaaatgcccaagctgcaggcaggtgatatccgtgccccagctaaaactagcttctctccttgtaaacctctttgctttacacacttgctcaaatcaactttgtcctgtctctcccttatctctcccaccacatccctctaccagctccacaccccagccctttaaaagagacccctcactcaccttgacattgggctgcagatacagcagagccagtctctggttctgcccccttttcttccttccgtttcttcttctgctgtttcttttccttccgaagctgcagcttttcttctttggtcatttccctccccactgcctgagacacagacataggatactgctcttccccaacaattccaaaggggaacaaatactattggatgcttacaagatttccacatggttaaatccctagttcttcctaacttccacaagctacctgttgcaagcttacatccacagaggctgacgtttctcctccagggacagaatcatatatccctagggttgcaagacctctgtaaaatctcctggctttactgagaaataaaccgacacgggatgggagctggggcggaataaagctggcacagcctcctgcgtagcgcttggcaggcggcttgggagggaagcctcacttaccccaggcccagggggaagctccgccttcatcccggatcccgagtctgcatcagaaaacagggcacaaagtgagccagagagactccgggagggtttgggggcacgagtactcggcgcagccggctgctgggttggcatgaccacggatccgccggcaggcgcgaggcgagccagggatccgcgtggggacgcactgcgcggcggatcaaaggaatggaggggtcaccgaccctcctcacagcaaccagccggtgcgcggcgcgggactgcgctcgagactgtgtagaccggagcccagcgtggcgctggaacggagcggcggggcccaaaggcgctcaaggcccggcactagctgtccggagctcgtcggctccgcgtaccagtaggcaggcccggctcttcactcaccctcgcgaacagccacggccacagcagccatcgccctcagtcctaggctccgcccgccgtggtcacggagccgccccgctgcctcgctccgcggctgcagggtccacagcgccacctgggctggaggctgagccgcagaagcgaagcgcgcagccccaatcggactacaatttccgacgggccccgaggccccgccccgcactacgggttgcaatgagggccaactccactttgggctccctatccggacaggtggctcttgccctttagactacagttcccagcatgcccaggcgattgcgtcccagaaccgacgtcccaccgccttcccacatcggatcgcagggctcccaaaatggcgagtgaggctgcggggactcgctgagcagcggagggggagcgtgcagagccgctgcggccctcacagtccggagcccg

SEQ ID NO: 23100 - DNA, 2300 bp, Homo sapien
tgctcataatgttctcttgggtgcccctcccttccctcagtccctgttcccctgtctaccctggtcatctgagaaacaattcctttgacagcggtagcacctcaagggagctgtcctagatataagttgtgctctattttactgtgtacaagtcagcccctccacagtacggggaggatttgtactgggccaggacctatagggagccccttgaccacctagcaagactgttcactgaacccttaaaggaaggaaagggctttataaagtgcacagttaatagctaagtctgttcacaaaatatcttaggacttaaagggactttgcagatcaaagaatccatctttcagttgtagaaactgaggcccaaagaaatcagtttctacaggcctcatgcctgtaatctcagcattttgggaggcaaggtgggtggatcacctgaggtcaggagtttgagaccagcctggccaacatagtgaaacccctctctactaaaaatacaaaaattagctgggtgtggaggcagccgcctgtaatcccagctactcaggaggctgaggaaggagaatcgcttgaacccaggaggcagaggttgcagtgagccgagatcgtgccactgcactccagcctgggcaacaagagagaaactccgtcccaaaaaaagatatcaggtaacttgttcagggttgcacaactaattatcagtggagctctactgagttaaatagagtttaagatctggtaaggaaggaggagaaacattgcatcacagatacataacgataattggcacagctaaacacactgaaatgagccgaagaacacaaaaggaaatcggtgaatcgtttgtataagcagggaaaagaatttcaagttgccgctcagatgacagaaggaatgtgctttgacagcctgggtggaggtagtggggggaggggttggtttgtccatgcaggggtaaaggctactagagcagtaagactggacagaaaaccagaatataagaacaggaaggagcagttgttgcgcggacattaagcttcttagggagttcccggaaatgtcagacaagataaaccagggccctaccctgtggcagtgattaaaggggaactacagcctacgggaacaagaagagcgggtaaagggagacactgatgtccacgtgtagggaagggcttgaagctgtctcaaggcaggggtgctagtcccacctgctcgtgcagccccaggagctggctgtagcgcacccgacagtgcaggactccattcacgtgaatgttataggcctgaggacacaaaagtagtcaagcattttagggttgcggtctgcgcaacccccctgagaaccctggccggaagttgcctggcaactcgccggagtaacgcgctaatctcccgagggatagttcgcttgttttcgccagggccaagtcccaaagctgaagagccagtccgggggaaattcggacgcttgtgttgcagtctcactgcccaagaggccagtgacgcccaccagggcagctgcggcctagctcggggaagcgacccggcctaagggcctacaggagctcgggcgaccactgcacgaatcacacacatgagataagctcccagagaggccgtcgggagtcggcggcccaggaccaggcccgaagggtggcggtcaggcctcagaggccgctccgagatggctcgggcccgttatccccgcccctgcccggcccggctcggctccggccgctcctcaccacgtaggcggagccgccgctgtccccgctgcgggactcggtttcgggaatggaaaagtgcatgttccctacggcacggcacggccgggctccggactgtgagggccgcagcggctctgcacgctccccctccgctgctcagcgagtccccgcagcctcactcgccattttgggagccctgcgatccgatgtgggaaggcggtgggacgtcggttctgggacgcaatcgcctgggcatgctgggaactgtagtctaaagggcaagagccacctgtccggatagggagcccaaagtggagttggccctcattgcaacccgtagtgcggggcggggcctcggggcccgtcggaaattgtagtccgattggggctgcgcgcttcgcttctgcggctcagcctccagcccaggtggcgctgtggaccctgcagccgcggagcgaggcagcggggcggctccgtgaccacggcgggcggagcctaggactgagggcgatggctgctgtggccgtggctgttcgcgagggtgagtgaagagccgggcctgcctac

SEQ ID NO: 23101 - DNA, 2300 bp, Homo sapien
ttggcttgctccccgcctcgtcacaatcacttcccggtcacgccattgaggctcccgccgcggccgcttcccacggactacgcgtcccgtgcgtctctgcggcggcggaagcggaagcgagtacggaggtaccagctggtctccgtaggggggtagggggctccatgaatggaagcggcggcggcggcgggagcggcctgagctgggcgccggggccagggccgggggctgcccagggcccgcgccgctgcatgggggcggcccgcgggccctgagaggaagggcagacaggcgggccgagataggaggggcggggtcgggcggccgcaggccggaggcgcgtcgggctggagccggtcacgatgccccgaaggaagcaaagccacccgcagcccgtgaaatgcgagggggtcaaaggtcaggggtcaggggccttgaggggagaggagcgggggtggggtcagtggagtgggctcaggtcagggtggagggggactcctgagggatgaagtgggcgatccagactcctagcttcccaccgaggcactaagggaatcagagtgggtcagcgagtacgggaagtgtggtccacgagggctggttcctgagggagaatccacaagccccctcccctcttcagtggatactgaagactccctcgacgaaggacccggggccctggtattggagagtgatttgctactaggccaggatctggagtttgaggaggaagaggaagaggaggaaggcgacggcaacagtgaccagctcatgggcttcgagagagactcggaaggtgggttttcgggtcttggttaaggattagcggccgctggagaccccagcccttcaggaggcaggttaggtgaacagaacaccatttcctgccacaaccgagggctggtttagtttacatttgagctagatgacttcatttgtttaatggtccaatcacttccatcactttgttgaggtgaagttctgaggcctggtcaaaggtgataggaataggagggtgggtgaatcacatggagcaactgattaaaagtaaatgccctgtctctctccctagcccattccttatgtgtatttacttttaagagaggttcagggaagcaaactctctgtaaatcattcaacccagtatttaggtctaatctaactccctttcacctgcagcgtaagctccttttgtattgagaggttttagtttctgtctttatccttccatgtccctcttccctgtgatcttagcatcaccctaccctaatttgctgcactacccatccacttatgcaagatgttttttgaaagtcattgaggggatccatgtaaatatctgttctttaggcaggcaagtggtattacatgcattactttcattgtctccacttccctccaaattttgcctcagagataggttttattttatatcagctccttactaaaaggggccttagcaatagagcttagaaaaaggtcttgggggctctctccctttcgtatttttactttcttgtctcaagaattaatttcattatggattcatttcagtctgtgatccactgtgagcccttgatccttgaccattgagggaaactagatacaggtcaattctaccatcactagattagtccagtgtaagaggtagacaattcatgttgaattttctggaattactgcaggggagaccttgattcctaggagggaactaaagggatcatcaaagctaagggtggagccaagcaagtggggagaccataagtgaaaaggggagagtttggagcctgatcctaccctatgctgatgtctcttcttatgtctatttcaccaggagactctctgggggccaggcctgggcttccctatgggctgagcgacgatgagtctgggggcggccgggcactaagtgcggagagtgaagttgaggagccagccaggggtccaggggaggccaggggtgagaggccaggcccagcctgccagctgtgtggggggccgacaggtgaggggccgtgttgtggggcaggagggccgggtggggggcccctgctgcccccacggctactgtactcatgccgcctctgcaccttcgtgtcccactactcgagccacctgaagcggcacatgcagacacacagcggagagaagccgttccgctgtggccgctgcccctacgcctcagcccagctcgtcaacctgacacgacatacccgcacccacactggcgagaagccctaccgctgtccccactgcccctttgcctgcagcagcctgggcaacctgaggcggcatcagcg

SEQ ID NO: 23102 - DNA, 2300 bp, Homo sapien
aaaagacttaaaataaaaagaccagtgagtgactttcttaaggttcagcagtctggtggcagggttgaaactagaaaaactaggacttaggactcagttccccattccactagattatggaactttgtaaagaagggaaatgaatggcaaggtttgacctgccacaaacacaagtctgtgggaagtatccaaactgctcatcaaccattcctttactccaggggaccacttctataagagaaacaagaacctgccacctgaggaacagatgatttcagcccttcctgacatcaaggtgctgactctcactgacgaccatgaattcatggtcattgcctgtgatggcatctggtgagcactggcagaatgccctaaattcccctttctgcagcatgtcttctcttataggactcagggcacctctaggattagagcctaggcagacctaggcctcttggtgggtgaagagcacccagactaaggcagagctgagaatttctgtagttatttacactggcctgggccaccacctctgtccatactcctctacgctgccttagtgagactggaagattctgactgttgttcttgaccccaggaatgtgatgagcagccaggaagttgtagatttcattcaatcaaagatcagccagcgtgatgaaaatggggagcttcggttattgtcatccattgtggaagaggtgagtaccagggtggagaagagagggtgtctggtctgcacagccagggttcactcttttaatctgagctaagtcggcaatctgggagcattatcagtaattgctgacagacgctaaaccccgactccaaagttccaccttctgtcatttccctgacttagccttatgccttatggactagcaggtgggccgttgtgtgatacctcttgcccattcctctcctaccaccctgactcagcaagccagccctcttgtgggactgtagattcctggcaaggtgttcaaaccctgtggctgagctacccccatccctttcttagctgctggatcagtgcctggcaccagacacttctggggatggtacagggtgtgacaacatgacctgcatcatcatttgcttcaagccccgaaacacagcagagctccagccagagagtggcaagcgaaaactagaggaggtgctctctactgagggggctgaagaaaatggcaacagcgacaagaagaagaaggccaagcgagactagcagtcatccagacccctgcccacctagactgttttctgagccctccggacctgagactgagttttgtctttttcctttagccttagcagtgggtatgaggtgtgcagggggagctgggtggcttcactccgcccattccaaagagggctctccctccacactgcagccgggagcctctgctgtccttcccagccgcctctgctcctcgggctcatcaccggttctgtgcctgtgctctgttgtgttggagggaaggactggcggttctggtttttactctgtgaactttatttaaggacattcttttttattggcggctccatggccctcggccgcttgcacccgctctctgttgtacactttcaatcaacactttttcagactaaaggccaaaacctaatcgtacgcatcgtgtccttttttttctgctgccgtggcccccgacttggtcccatctgtagcatgtggcgagcccccatgtgagtgtgtgcgtgtgctcgtgtgtgtcctgcgcgtgtataggagagcccagagcgagctgctggtaggccggcctggcgggcgtcgcggctgcccctcgccccctcctgcagccagaaatgatctagttcccccagggacaggttgggaccggtctggctggcctgaagcctggagtcgggcaggacgcctcctgcgctgctccctggccggctccccgctgccgctgattggcttgctccccgcctcgtcacaatcacttcccggtcacgccattgaggctcccgccgcggccgcttcccacggactacgcgtcccgtgcgtctctgcggcggcggaagcggaagcgagtacggaggtaccagctggtctccgtaggggggtagggggctccatgaatggaagcggcggcggcggcgggagcggcctgagctgggcgccggggccagggccgggggctgcccagggcccgcgccgctgcatgggggcggcccgcgggccctgagaggaagggcagacaggcgggccgagataggaggggcggggtcgggcggccgcaggccggaggcgcgtcgggctggagccggtcacg

SEQ ID NO: 23103 - DNA, 2300 bp, Homo sapien
gctggcagcccttgccttgtcctgggctttttgctagtgactgctaagcccagttcaggatgtcagttgtactcatgctagccctttccatccccccaattttcatgaccatatacttgtatctttcagtgttttgaggacctgtgttcagtcaggacctcttgattctgagtatgagctgtggggagggaggggatcatcccagtctcagcagtctgggatcctccccctggcaggaatgcagcgaggaagaggatggctacagcagtgaggaggcagagaatgaggaagatgaggatgacaccgaggaggctgaagaggacgatgaagaagaagaagaagagatgatggtgccagggatggaaggcaaagaggaggtgtgtggggaaggggagcaatgagtcttgaaaagccacaaggcaggtgtgaatcccctaattttgattttgagacaggggatccccctgatactttaggatggaagtaatagtcatggggatttattctgcaaggggaatgagatggtaagcctttggggttgaattatctaaaaacaagggagagggagtgtgctgctgtctctagaaagatgaaatgtgtgcttctcctgtttgttaaagctcttttgggggtcccagtgaaagcaagcataggtgaacgatcaggagcacatcagtgaggaacgcatgttcagaagcccccatgatgctccttttcttcctcttaagcctggctctgacagtggtacaacagcggtggtggccctgatacgagggaagcagttgattgtagccaacgcaggagactctcgctgtgtggtatctgaggctggcaaagctttagacatgtcctatgatcacaaaccagaggatgaagtagaactagcacgcatcaagaatgctggtggcaaggtcaccatggatgggcgagtcaacgggggcctcaacctctccagagccattggtaagggccaagaaactgggaaagacttctagggtctttctctctgtcccagactacctagtagcaaactttaatcttcctagtgcttgtgcctttcaaagcactttaatatctactacctctgttcttatatttctgtgaaataactaagatgggtagaggtatcattatacataggtatcattatacccatcttatgtaacatttgaatgatgaaaaagacctgtgagtgccgggcgtggtggctcacgcctgtaatcccagcactttgggaggctgaggctggtggatcgcctgaggtcaggagttcgaggccagcctggccaacatggtgaaaccccatctctactaaaaaaaaaaaaaaatacaaaaattagctgggcatggtagtgcaagcctgtaatcccagctactcaggaggctgaggcaggagaaccgcttgaatccgggaggcggaggttgtagtgagccgagatcgtgccattacactccagcctgggctacaagagtgaaactccgtctcaaaaaaaaaaaaacaaaaaagacttaaaataaaaagaccagtgagtgactttcttaaggttcagcagtctggtggcagggttgaaactagaaaaactaggacttaggactcagttccccattccactagattatggaactttgtaaagaagggaaatgaatggcaaggtttgacctgccacaaacacaagtctgtgggaagtatccaaactgctcatcaaccattcctttactccaggggaccacttctataagagaaacaagaacctgccacctgaggaacagatgatttcagcccttcctgacatcaaggtgctgactctcactgacgaccatgaattcatggtcattgcctgtgatggcatctggtgagcactggcagaatgccctaaattcccctttctgcagcatgtcttctcttataggactcagggcacctctaggattagagcctaggcagacctaggcctcttggtgggtgaagagcacccagactaaggcagagctgagaatttctgtagttatttacactggcctgggccaccacctctgtccatactcctctacgctgccttagtgagactggaagattctgactgttgttcttgaccccaggaatgtgatgagcagccaggaagttgtagatttcattcaatcaaagatcagccagcgtgatgaaaatggggagcttcggttattgtcatccattgtggaagaggtgagtaccagggtggagaagagagggtgtctggtctgcacagccagggttcactcttttaatctgagctaagtcggcaatctgggagcattatcag

SEQ ID NO: 23104 - DNA, 2300 bp, Homo sapien
tttttctgtattctgtcattcttttttcccagtaggtactgtattggtttataatctcaccaggacttgttttaatccaaagagcctctatctttttttatttttattttttaaaatttttaggctgggcacgcggtaggtcacacctgtaatcccggcacagtggatcacgaggtcaggagttcgagaccagcctgaccaatatggtgaaaccccatctctactaaaaatacaaaaattagctgggcgtagtggtgggcgcctgtggtcccagctgctcggaaggctgaggcaggagaatcgcttgaacctgggaggtggaggttgcagtgagccaagaccatgccactgcactccagcctgggcaacagagcaagactcttgtcttaaaaaacaaaaaagtgtacccagttgagctgattctttatctttttttcactggagaactaagtatacaggtgagaaaagacgagatatttatacccgagagaattgatggtgaaatccatttttttggatcagaacttccccaaacagtgtccttcaaatagggttcaggggtgctaagatatttatcccctcaacccttggggttcactccagtatggcatataaatattgtatcactttctatgtgtggggagcagtgctccaggtgaccttccttcctttccttctaggggaggaagttgccttgtactgtgccaaatatcttcctgatatcatcaaagatcagaaggcctacaaggaaggcaagctacagaaggtctgtctgcttacaccgcccattcctcacttgtgtaggcttttcccttgttctctagcccttgggcttttcctttctttttgtcctctagctgctgctgcttatttactcttgaagaattctgttcctaaaacgagcttattggccgccttttagacttgccttattattcctaggcctctgagctgtttttatctgtgagtgtctcttagtgtggtggctcacactcttaatttgtattccatccttgtgctcaggattgtatatagggagttcattttgtactagtcttagactattttgcttatattcaggctttagaagatgccttcttggctattgacgccaaattgaccactgaagaagtcattaaagagctggcacagattgcagggcgacccactgaggatgaagatgaaaaagaaaaagtagctgatgaagatgatggtgagtgtggcatcccttgtttgaggggaaatcagcattttaagaaatattctttaatattacttatcaattctaagataggatggctttctagggacctggggagtccttatgttaaagaaacctatgatgttctcctgcattgtatgtggttatgaaaaggagggagagaattatcttcgttgagtggcatctgagctgtaagcattgtatatacattatcttttgtcattgtgatggggtcttcctggttcctgctagtatttatgtgcttttttttcccctcaagactggagcagttattagccccaatagccaatcattaagcctaaatcctaattcacagtagcattgtgggcttcctggatcctcagccagaatagggtttttacaacttaacaataaaaaatgagacgtcagaggggaagtatagtaactagtgttgttttgattaagaaggggatgaaacacaaaaaccaaaagaagtctgtggaggaggaggagctagggcatgttcttctgagacttgagcgagaggaaccttgggagtgggaggttgtggggaagttagaggctgcaagggctgttgaggtagtgagagggacggatcccatgaggagtctggcatgggggctctgatttagcctcttccctgcagtggacaatgaggaggctgcactgctgcatgaagaggctaccatgactattgaagagctgctgacacgctacgggcagaactgtcacaagggccctccccacagcaaatctggaggtgggacaggcgaggaaccagggtcccagggcctcaatggggaggcaggacctgaggactcaactagggaaactccttcacaagaaaatggccccacagccaaggcctacacaggcttttcctccaactcggaacgtgggactgaggcaggccaagttggtgagcctggcattcccactggtgaggctgggccttcctgctcttcagcctctgacaagctgcctcgagttgctaagtccaagttctttgaggacagtgaggatgagtcagatgaggcggaggaagaagaggaagacagtgaggtaagggcctgtg

SEQ ID NO: 23105 - DNA, 2300 bp, Homo sapien
aagcatggctttagatgcacccaaagacattgctgaagcagagttgtaggagaaatggagagttaaagagaggcatacgtgaatctggatgattagcatgaagggtcttgtaaactataaggaatttggactatcggaagagcatgaagaagccatgattagttttatctttttaaagaatcttttttttttttttgagacggagttgctctgtcacccagggtggagtgcagtggcgccatcttggttcactgcaacctccgcctctggggttcaagctattcgcctgccttagcctcccaagtagctgggattacaggagcgcaccactacgcctggctaatttttgtatttttagtagagacgggtttcacatgttggccaggctggtctcgaacttctggcctcaagtgatccaccacccccccttggcctcccaaagtgctgggattacaagtgtgagccactgtgcccggctgaaaagaatcaattttgtcatagtttggagaatttctccttttctctccatcccttgaatgcaatttattaccaaatctgtcttatttgttattgtctaatttgtcctttcatctggattcccattgccaccctgcgtggtaccaccttactcccagctcttctcatctcctgcttagagtaagagctctctaactagtagcagtgccccaggccaggcgcggtggctcacgcctgtaatcccagcactttgggaggctgaggcgggtagatcacgaggtcaggagttcgagaccagcctggccaacatggtgaaaccccgtctctactaaaaatacaaaaattagccaggcgtggaatcctagctactcgggaggctgaggcaggagaatcgcttgaacctgggaggcggaggttgcagtgagccaagatagcgccactgcactgcagcctgggcaacaagagcgaaactctgtcttaaaaaaaaaacaatagtaggcggggtgcggtggctcacgcctgtaatcccaacactttgggaggccgaggcgggcggatcacgaggtcaggagatggagaccatcctggctaacacggtgaaacctcgtctctactaaaaatacaaaaaattagccaggcgtggtggcgggcgcctgtagtcccagctactcgggaggctgaggcaggagaatggcgtgaacccgggaggcggagcttgtagcctgggcgacagagcgagactctgtctcaaaaacaaacaaaaaacaacaacacaacagtgccccagactctctccctccaatgtacactgcatacaaagactagacaaacgatgccaaaggttacaccaggacgacaatgaagtccaagtcactcatcttggcgcttctttttatcaagctagctagttaatattaccacttacaatcattctccgagtccagccagcttcctcagaaatcctccccaaatgcagttcacattcttccctcactcctccaaaccttataacattattcccttttcctgtggcataatgcaatccagaggcatcctctctgagagcctacatcctttcaatcctccaagaaacagctcctcctcccatccttgagcttttcccacccagaataggctgtaccaaacatttctacattgtattaactcgaattatatcacagatcgaggtcttcgctttcagaaaagactcacattcttctcatataggcctcgcatggcctggccaagtacttcctaagctcggaacaaatactggtcaactttaattgaaccaaatcgggcggggtttgcggagtctgagagtgcaacgttggggagagggggatgaaaacactggaggacgggctgaaagcgtcgagtccgacacaaaagaggcgtcagacaaaacgccaagaggctggggactgggaacgaaggaagaggttctgccagaggcgacctgccacctgcgcgaggaagcggagtaggacggcggccgttggtgggcgtggtcgcgctagtctcgcgggagcggccgttgggcgggccgttgtccctgcgggcggggcgagttgctaaggaaatgactgcccgcagcgcctggccccgccgcgcaggccgggcggggtctggagcggcgccgtttccgcttccgctccctcacagctcccgtcccgttaccgcctcctggccggcctcgcgcctttcaccggcaccttgcgtcggtcgcgccgcggggcctgctcctgccgcgcgcacccccggggcttcggctccggcacgggtcgcgcccagctttcctgcacctgaggccgccggccagc

SEQ ID NO: 23106 - DNA, 2300 bp, Homo sapien
tctgtatcagaatcacctggaaaaattcttagccatgcagaaactcaagtctccctgaccccaagaatcatattcagctgatccagggagggtcctggagatgtgtgttttaaaacacctcagctaattcacaattatcaagaaatctaggcttctcttatttagtttgaaatcatacagaaatgtaaatgcaatttttatttggccttcagtttgaaaaaaggctcttttggaagaaaggatccacaccacatccctagagaaatgattagattgaaggcatggcttgcaagcctcacattgagaaaaaaaaaaacaaaacttagagcagaaacccaataggttttccaattgccctgatctgtgggaactaagaccttcaaagattctagacagttttattggagtatgggtgcggcaactcaaacctgtaatcctagcacttttgggaggctgaggtggaaggattgcctgagcccaggagtttgaggctggaatgagctatgatcacaccactgcacttcagcctgggcaacagagcaagaccctgtctctaaagaaaaaaacaaacaaacctcactcattgtgaatttaatgactttcagtaaatttacagagttctgcaactggcatgtcacaatgcaagttatagtccacatgggaaattaggttagcaggtcaccagggaagctcagacttagaacaaatagaaatgagtagtctcaaaaatagacaagtgagattgcatcaaacaacaacaacaatggaaactatcgacagagcgaagagacagactatggaatgggagaatatatttgcaaactatgcatctgataagggctaatgttaatatccaaaatatataagaaactcaaacaactcaatagcaagaaaaacaggctgggcacggtggctcatgcctgtaatcccagcactttgagagaccaaggtgggtggatcacctgaggtcaggagttccagaccagcctggccaacatggtgaaactctgtctgtactaaaaatacaaaaaatatggctgggcgcagtggctcaggcctgtaatcacagcactttgggaggctgaggtgggaggatcacctgaggttgggagtttgagaccagcctgaccaacatggagaaaccctgtctctactaaaaatacaaaaattagcctggtgtgaccgggcgcagtggctcacgcctgtaatcccagcactttgggaggccaaggtgggcgggtcacctgaggtcaggagtttcagatcagcctgaccaacaaggtgaaaacctgtctctacaaaaaatacaaaattacccaggcgtggtggcaggtgcctgtaatcccagccacttgggaggctgaggcagcagaactgcttgaacccggtaggcggaggttgcagtgcagtgagccaagactgcaccattgcactctggcctgggcaacaggggtgaaactctgtctcaaaaaaaaaaaaaaaaaaaaaaaaaaaaaggccggggggcaaagtacctgaatagacatttctcaaaagaagatatacaaatggctaacgggtatatgaaaaaagtactctaataatcagggaaatgcaaatcaaaatcacagtaagatatcacctcacacctgttagaatggctgttataaaaaaagacaaaatataacaagtattggtgaggatgtggggaaaagagaaaagagaacccttctcgtacactattggtgggaatgtaaattggtactaccattagggacaacagtatggagaatcctcaaaaataaataaataaaaaatttaaaaggctaagaacatcttaaatttgaatagatattgccaagttgcttttcaaaaatataccacccagagtatgttagggttcctcttcccctgcatccttaccaacactgagtaataccaatatttgtttatttatttatttatttatttatttatttattttgagacagactcttgctctgtcacccaggctggagggcaatggtgcgatctcagctcactgcaacctccgcctcccaggttcactgggtttaagtgattctcctgcctcagcctcccgagtagctggtactacaggcgtgtgccaccacacccaggtaatttttgtatttttagtagagacagggtttcactgtgttagccaggatggtctcaatctcctgacctcgtgatctgcctgcctcggcctcccaaagtgctgggattacagtcatgagtcaccatgcctggcccaagtaacatcaatctttttaattttgatgatacattaattaaaaaaa

SEQ ID NO: 23107 - DNA, 2300 bp, Homo sapien
ggaggttgcagtgagccacgactgcgccactgcactccagcctggcgacagagcaagactccatctcaaaaacaaaacaaaacaaaacaaaaagacaacaacaaaaaaaaacccaagtaaagtaaaaaattaaagtagtggttaaaaaattaaagtagggccatgtgcattgccatagaaaaaagtgaaaaaggttatgtagtataaacttgttttcatttaaaattatatacacatatgtgaatatatacttagaaaaataaaaataaaaggtcaggcgcggtggctcatgtctgtaatcccagcactttgggaggccaaggtgggcagatcacgaggtcagaagatcgagaccatcctggctaacacggtgaaacctcgtctctactaaatatacaaaaaattagccaggcatggtggcacacgcctgtagtcccagctattcgggaggctgaggccaggagaatctcttgaacttgggaggtggaggttgcagtgagccaagatcgtgccactgcactccagcctgggcaatggagcgagactccacctcaaaaaaaaaaaaatacaccaaagtcttaattatcgggggaagtaggattataagagatttcactttctacagaaattgttaatattcatattactgttgtcagcattgttgtcataaagcaattaaaagtgcctaacacatagaagctactatataaatattacattatactaaaatagttttgggaatatttttgcgttgttttttggcaatgagcatgaattatttttataagcaggaaaaaataaatacatgaggtggtgaaaatgcaggtagtatttgatcattttaaatgtaatgaagggttaaaaatgagagctagaggatgccaaagggtcctccatgcatacttgaaaggacctagttgaaagcggaaggttgataatgataaagccccaggcagaagagaatgggaaactctaatgataacatgaactgatatttaatgaatgtttaccctgggccaggtgttccaattgcttttgagcccacaggaaggaaaggttaatcttttcctttgagattagaaccaagaaattattttatttatttatttatttattttttaggtggagtcttgctcttgtcgcccaggctggagtacagtggcctgatctcagctaacagcaacctctgcctcccgggttcaagtgattctcctgcctcagcctcctgagtagctgggattacaggcgcccacaagcacgcctgactaatttttgtatttttagtagagacgaggtttcaccatgctggccaggctggttttgaactcctgacctcaaatgatccgcccgcctcagtctcccaaagtgctggtattacaggcatgagccatcgcgcccagcccagagcaaagattcttaacctcagtttcctgaaattatatcctaaatttgttgggtaagtgcattttttaaagtacaagagaaggcccataagttacatcagattttaaaaagggtgtttgagcccccctcttccaaagatagaagaatcaaggaagaaagggtaaaacatacatacatatatatatatatatatatatatatatatatatatatatatatttttttttttttttttttttttttttttttgagacggattctcacactctgttgcccaggctggagcgtagtcgtgcagtcttggcctactgcaacctctgcctcctgggctcaagtgatcttcccgcctcagcctcccaagcagcttgagagaacagacatgtgctacctcgcccggctaatttttgtatttttagtagagacggagttttactacattgagcaggctggtctcgaactcctgacctcaagtgatccgcccacctcggcctcccaaagtgctgggcgtgagccaccgcgcccggccgaaagattggttttaaaaacgagtattttgagatgatgagaaaacgagagggtttctgccagttgtcctttctcccagtgaaacaggattagagattctctttaatgacagtaaaatttggtgattgtgacatttccaagttctgttgattgattcatcatcttccctccatcatacacgtctaagggcagagtgaacttccatcctgaaggctccgcgcttagttttcgcagattaatagctcaccaagaatttatcatcttttctttccactaactcgaaaccaatctaaattctttccaaacatcttctcaacgtagtctcctttgatgaaatttactgtttcggattctagacttggctcttacca

SEQ ID NO: 23108 - DNA, 2300 bp, Homo sapien
aaaatgcaggtagtatttgatcattttaaatgtaatgaagggttaaaaatgagagctagaggatgccaaagggtcctccatgcatacttgaaaggacctagttgaaagcggaaggttgataatgataaagccccaggcagaagagaatgggaaactctaatgataacatgaactgatatttaatgaatgtttaccctgggccaggtgttccaattgcttttgagcccacaggaaggaaaggttaatcttttcctttgagattagaaccaagaaattattttatttatttatttatttattttttaggtggagtcttgctcttgtcgcccaggctggagtacagtggcctgatctcagctaacagcaacctctgcctcccgggttcaagtgattctcctgcctcagcctcctgagtagctgggattacaggcgcccacaagcacgcctgactaatttttgtatttttagtagagacgaggtttcaccatgctggccaggctggttttgaactcctgacctcaaatgatccgcccgcctcagtctcccaaagtgctggtattacaggcatgagccatcgcgcccagcccagagcaaagattcttaacctcagtttcctgaaattatatcctaaatttgttgggtaagtgcattttttaaagtacaagagaaggcccataagttacatcagattttaaaaagggtgtttgagcccccctcttccaaagatagaagaatcaaggaagaaagggtaaaacatacatacatatatatatatatatatatatatatatatatatatatatatatttttttttttttttttttttttttttttttgagacggattctcacactctgttgcccaggctggagcgtagtcgtgcagtcttggcctactgcaacctctgcctcctgggctcaagtgatcttcccgcctcagcctcccaagcagcttgagagaacagacatgtgctacctcgcccggctaatttttgtatttttagtagagacggagttttactacattgagcaggctggtctcgaactcctgacctcaagtgatccgcccacctcggcctcccaaagtgctgggcgtgagccaccgcgcccggccgaaagattggttttaaaaacgagtattttgagatgatgagaaaacgagagggtttctgccagttgtcctttctcccagtgaaacaggattagagattctctttaatgacagtaaaatttggtgattgtgacatttccaagttctgttgattgattcatcatcttccctccatcatacacgtctaagggcagagtgaacttccatcctgaaggctccgcgcttagttttcgcagattaatagctcaccaagaatttatcatcttttctttccactaactcgaaaccaatctaaattctttccaaacatcttctcaacgtagtctcctttgatgaaatttactgtttcggattctagacttggctcttaccaacttaactttcggttaatagcttaatacctctgattcaggtttttgcatttgtcaactaccattgaatgataatttcaatgagttcgttcttatgaggatcaaatgaaataacatctgtgaaaacctcttacaaagtttaagcaaatagtgctaagcaatcaccaagcgttaactactaattttcagtgttaggtaaattttaaaagctttccggagaattggcgtcctgcacaccagtctcgttccaaaataatgcaggcgggggctggggtgggggcgctcctctcggactgaggctatgtctttcgctccttttgtcttttccaggcattagaactgtcatggcgccttcaagaagaggtaggaggccctctctgcgtccagcagaaccatctggggcacctggaccgggcggtggggtggacagagagacgagccccagctgggaccgaaaacatcgacccctccgagaggtctcggccggaccggcgcaaggggaggagagcgggtggaagcccaccccagcgaacgcccgagggccgggccccgcccacccagaacgtcacccaatggaaacctgccggcggtgcggcaccgcccatcgttggtccgggcgccgcgagggcggggcccgcagttcggttgcgctgcggagcgcagctgtgagggagtcgctgtgatccggggccccggaacccgagctggagctgaagcgcaggctgcggggcgcggagtcgggaggtgagcgcccagggaaaagagggcccgggagggaggggttcgcgagaggacggaaggatcggcctccgaggccc

SEQ ID NO: 23109 - DNA, 2300 bp, Homo sapien
aggtaaggttatggtacagttactcttgggtgagtgaattctggaaaggtgagaactggaagagcaaagtcttaaaagaggccaaccaaacttcaataggttgggggctaggaggagatgatcatatggagtgttaaaatggaggatttgtgagataagtttaattctctttcatatgaatttcttctcaggtgaatcaacggaatgtaccaggtattgacagtgcatacctggccatggatacagaggaaggtgtagaggttgtgtggaatgaggtacagttctctgaacgcaagaactacaagctgcaggaggtaggtgatgctgaaaaggtgaagcctggggaatgttggaacactgatgttagagaggaattggtgttgggaagctgcccgtgaggagagtatgttggggttagatcgtttctggggagggatagggaatggcttctcaggattattacagtgatttgtgactctgttattccactgtctcccttgctttcaggaaaaggttcgtgctgtgtttgataatctgattcaattggagcatcttaacattgttaagtttcacaaatattgggctgacattaaagagaacaaggccagggtaagaattttttccccatatttcctgaacttattgcaaagagactagctacatttattattgttccttttacactcagagattaaaacaaggtagttttgaaacagaactggaatcagctgcaatggcgataagagtagggcttcagttgtcacctatgccttttgtgtggctatagattgggcagaaaatgagtgaacttttgcttctttcttcccataactttcattgcttgttttcattgccctatttagtctaagtaagtaaagctaagaacaaaaggagagaaattttaacaaaccttcaaatttaaaatatgttaacaagggaagggatcatttctactataaggccttttagtaagtgctttgcctccccaggtcatttttatcacagaatacatgtcatctgggagtctgaagcaatttctgaagaagaccaaaaagaaccacaagacgatgaatgaaaaggtatagaaggagagcagacaaagtttgaggctggtttttgggggtggttttaaaaaggactctgttaataatgaagctgatcaggaagggacggaaggagctagtgggagagagttaagagagggaattactgctgacccttggatccaactttgttccaggcatggaagcgttggtgcacacaaatcctctctgccctaaggtaagtagtacctggttagtttcttacccatatttcctgatgtagttactccaaacagatttcagggcactactcttctgttctattctgcctctccccactttctttgaatcatatactgtcaagattagggcccctacgggtcttttaaagggtgcgtcctaatgccctaaccacgacacttatctcctacctctttctcctagtgcttatccagctatttaaatcatcaggcataatggagattcagagtgtggggattatctttatggtgaccagcaggagacctggcccttgctcctcttaacccttgggttccccctgcccttaatttcccagtggcccctctaacagcccagtgcccccacagctacctgcactcctgtgacccccccatcatccatgggaacctgacctgtgacaccatcttcatccagcacaacggactcatcaagattggctctggtgaggggagggagaggttctgggcaggggagcctcgggaatttgggaaccatgggggtaagatgaaaggaatgggggataacagagcaaaattctgaggtgtgggctggtgagaagagaaaggaccttgctaggagtaattaataggagaggccagttaattagtggagagggggtaggatatataatcttacacctttttgaagggaaaattggggttaatacagagatactgataagaggctgggaaagggcaagagataggtttgaggtttgatttgagtcctggggccagaccctgccagaggaggttccaggctgttcctgctgtgagtgctttcgtttgctgtgtattgtatgcagtgtacaacatttctgtgtgctgtgtctgtgtggtatttgtgtgtccatttgtctggggcttggctgctccatcgctcacaacttttctctgttttcctccctcccgcttacgggctgctctgttcccaacagtctttcataggatttttgctaatggtgagagctccctctgccccacttggggctctgtt

SEQ ID NO: 23110 - DNA, 2300 bp, Homo sapien
taagagagggaattactgctgacccttggatccaactttgttccaggcatggaagcgttggtgcacacaaatcctctctgccctaaggtaagtagtacctggttagtttcttacccatatttcctgatgtagttactccaaacagatttcagggcactactcttctgttctattctgcctctccccactttctttgaatcatatactgtcaagattagggcccctacgggtcttttaaagggtgcgtcctaatgccctaaccacgacacttatctcctacctctttctcctagtgcttatccagctatttaaatcatcaggcataatggagattcagagtgtggggattatctttatggtgaccagcaggagacctggcccttgctcctcttaacccttgggttccccctgcccttaatttcccagtggcccctctaacagcccagtgcccccacagctacctgcactcctgtgacccccccatcatccatgggaacctgacctgtgacaccatcttcatccagcacaacggactcatcaagattggctctggtgaggggagggagaggttctgggcaggggagcctcgggaatttgggaaccatgggggtaagatgaaaggaatgggggataacagagcaaaattctgaggtgtgggctggtgagaagagaaaggaccttgctaggagtaattaataggagaggccagttaattagtggagagggggtaggatatataatcttacacctttttgaagggaaaattggggttaatacagagatactgataagaggctgggaaagggcaagagataggtttgaggtttgatttgagtcctggggccagaccctgccagaggaggttccaggctgttcctgctgtgagtgctttcgtttgctgtgtattgtatgcagtgtacaacatttctgtgtgctgtgtctgtgtggtatttgtgtgtccatttgtctggggcttggctgctccatcgctcacaacttttctctgttttcctccctcccgcttacgggctgctctgttcccaacagtctttcataggatttttgctaatggtgagagctccctctgccccacttggggctctgtttgtgctccctctgctcccttggcggctgcccagtgcatgcagtcgtgggagcaaaccctcttcccctatcttccctgcctaattatgcctgcttagcttctgccctgccagccctccgcctgcttgccccttcataacctgcttgtttcctgtggattctgcctggctggccacttacctcctggattcatgttctccctcatcatcaggctagttcccagatcatactgtgctcccagattctctgtgacttgtagtcattgtttatgatctgagtgagtccaaattgggcctggtcctggttcctcgttcagctctgtggcagacagtgttgaggaataagggggtagaacaggagtctaaaatgttttggtggattaaaagtggaacagattcaagggtattagctcaattctgagctgttttgagtttcactcagcaaaggtgggtaagaaggaggctacctcctgagctgtatgttaatacttcttatccttatttatccaagttcctgaggtctccaattgtcccagattaggaagggctgcctgtgtttttatgttatttgcagggtggatgaaaaaactaaaaccaaatattttcatgtgagcagggattagaggtacctgggatttagggaaggtgaacgcagtacaagtgaaaatttttccttaaacttcattgcttctagaccagcctgaagcccctgtgtatctgttaatttagtctggtgcttttgttgctcctgatttagggacattagatgagaagcagtaggcctaagaaaggggaggtaggtggcatccatgtgtggtctgtagttcaggacaggaaagggaatatgtttgtgcctgttgagggtcatcagaaaggagacttcaggagagaatttggcttttggggcctctctctggagtgagactattcttcattgatgatggtcagattgtgggtgtctcccctactcccagtggctcctgacactatcaacaatcatgtgaagacttgtcgagaagagcagaagaatctacacttctttgcaccagagtatggaggtgagccttcctgctttctctgccctgtcctcatccccctgcttttgcaccttataacttgaggtacagaggcaatataactgaaacttctaggccttctctaccagcatacaaaatatttttcttttctttttttttt

SEQ ID NO: 23111 - DNA, 2300 bp, Homo sapien
actgtgccaggcctccaaagggattctttacccctttgcctgcatgccttctttgacatttaatctgactatcccttcataatatcccactccatcatgccctccagacatgatcccagagaacgctctagaggagatcaccaaaaacatggatactagtgccgtactggctgaaatccctgcaggaccaggaagagaaccagttcagactttgtgagtaactgagagggtctgaaaggggcagattggtcacgaccactcttgaggctctgtaaactgtccattctctgggaatgcttgaatttgctattttgcttgtttctttccttccatctcctttctcttttctcgtccaggtactctcagtcaccagctctggaattagataaattccttgaagatgtcaggtgagagcagagtgagaagcaggctttcttgaggaagcaggcggggttgggtatcctaaggcgttcacagagcccatgtgacctgtcttcatctccctccaggaatgggatctatcctctgacagcctttgggctgcctcggccccagcagccacagcaggaggaggtgacatcacctgtcgtgcccccctctgtcaagactccgacacctgaaccagctgaggtggagactcgcaaggtgggggctgtgtgggtgtggattgtctccatggttgtggtggaagggagagaggacatctcaaataaggctctatcctttagagaaaatgctccctagcagccatgccctatgggctcgaaagacgtctaggtattgggttttttatggacaggtctctagagtgaccctctcttccctccctaggtggtgctgatgcagtgcaacattgagtcggtggaggagggagtcaaacaccacgtaaggctcagggctagggttgcgcagggctagtagccagagggtagggaagaaaagtctcattttctgactgtcctattctccagctgacacttctgctgaagttggaggacaaactgaaccggcacctgagctgtgacctgatgccaagtgagtctctcctttccctcagaggatggagagtctatgagccttatcttttagggacatattcaggggtgggggaggtgacaaggcagtaacacattgactcacatagaatgactatcttagaccctaaagcagtgggtggatctgactgacagtttagccctagtggggctgtctgaagggccccaggtccctcagtcccgtactgtactcaccccctcctgtttctttgtcagatgagaatatccccgagttggcggctgagctggtgcagctgggcttcattagtgaggtgaggtttctgccttcatctgccctggctgcccccatgccttctcttctctcagcccccatcttactgagctcttctcccccaggctgaccagagccggttgacttctctgctagaagagaccttgaacaagttcaattttgccaggaacagtaccctcaactcagccgctgtcaccgtctcctcttagagctcactcgggccaggccctgatctgcgctgtggctgtccctggacgtgctgcagccctcctgtcccttccccccagtcagtattaccctgtgaagccccttccctcctttattattcaggagggctgggggggctccctggttctgagcatcatcctttcccctcccctctcttcctcccctctgcactttgtttacttgttttgcacagacgtgggcctgggccttctcagcagccgccttctagttgggggctagtcgctgatctgccggctcccgcccagcctgtgtggaaaggaggcccacgggcactaggggagccgaattctacaatcccgctggggcggccggggcgggagagaaaggtggtgctgcagtggtggccctggggggccattcgattcgcctcagttgctgctgtaataaaagtctactttttgctaaaagcgtcgtgtgttcgcgcctttcccgccagggggagcgggcccggggcggaggcggggcccaggtgggagggggacccgggacggaggcggggcccaggttggggcggggccgggcccaggtacagcggccctgcggctggcgcggcggacgggatgaggcgctgcagtctctgcgctttcggtaacttccgggccctggcgtctcgtctccttaccctggggctacccttgccccgtcctactgcccgcggttaacccgccgcgagccgcctctcccctccccgcccgactcaaccctgccctcccccgtgctttgcagacgccgcccgggggccc

SEQ ID NO: 23112 - DNA, 2300 bp, Homo sapien
ttaggttttgaggtttttttgtttgtttgtttattttgtttgtttgttttttgagacggagtcttgctctgtcgcccaggctggagtgcagtggtgcaatctcggctcactgcaagctccgcctcctgggtttaggccattctcctgccacagcctcctgagtagctgggactacaggtgcccaccatcatgccgggctaatttttttgtatttttttagtagagacggggtttcaccgtgttagccaggatggtctccatctcctgacctcatgatccacaagccttggcctcccaaagtgctgggattacaggcgtgagccaccgtgcctggccttttgaggtcttaaaactcaataacccctagaagttagagggagagaagtagaaagagaggggctgatgattggttttgaggttctagcagattttaatcagcagtattgaataagcatctgatatatgtaacttgggagcatggcatgactgtacctttttcagattagtcagaaaatggcttcctgatgcagacagggcagattaagctttgaagggcttggcagtaagaaagggaggcaagaacaggtgagggaaagaccagaggggattagcataaactacagtgaaattggattgtgtggaaattgaaatctggtaaggatgtcagcatcataatggaaacagagtgatctcattgaacacttgggtttgtagaatttctgagttttaagtgttgaaaggttatcatcaagaccatctataccagcactggcactagaaatataatgcaggccacaaatgtaagccatacatgtcatttaaattttctagtagccacatttaaaaagagtaaaaaaaaaaaaaaacaggtaaaaataattgtaatatattttatttaacacagtatatctaaaatacaccatttcatctgggcgcagtggtacatgcctgtaatcccagaactttgggaggccacggtgggcagatcacttgaggatcaggagtttgagaccagcctggccaacatggtgaaaccccatctctactaaaaatacaaaaattagctgggcatggtggtgggtgcctgtaatcccagctactcaggaggccaagacaagagaattgcttgaacctgggagggagaggttgcagtgagctgatattgtgccactgcactccagcctgggcgacatagcaagactctgtcttaaaaaaattaaataaaatactaccatttcaacatgtactcacacacattatttagatattttccattctttttttatactaaatcttcaaaatccagtgtgtgtgaatgaagaaacaagttcataaaagcccaacacaaatagttacagaatgccctggactccttattttaggagtcctttctctgtactctgctacgaagattttacttatgacaaagaccttgaaaatgattttgtcaaaggcggaagtttcaaatgcagtgacctcaggcagcgcaggaagtatctgaaagagttaatgaactgagaggaaagataggtccactgatggctaatcaaaggatctaatggaccatgagccaggttttgcccaggagggtgcaaggttgaaggggagagtaagagaaaaagttggcatctggaggagaaaaatgtatgaaatggatgaggctgaggactcagcggtatttgtctctcctacccatttccatcttctgttcaaccactcaggcagctgaactctccatcaagtttctgcctccccaacgtaatatggaagtcgttctggctgtaggaccccagctgattggaattggaaagcacagtgcagtaagtaggatgctgagatggaacagaaatagatttcacagagatgggtgcaagggtgacatctacacccaggaaggtgtgtgaggtgggcctcctggtgggcatggcttgcagtcctggggaaacagatgggagagctcacagtgggaagactgggagcgaggagaaagtctccacgctgatttcccactgtgcaggctgcagagctctatctgaatctggaccttgtcaaggaagcaatcgatgctttcatcgagggtgaggagtggaacaaggcgaagcgtgtagctaaggagttagatcccaggtaagcttgtaaccccttcttactgcgaaattctcttttacttccttttgtaaagactgggagaaagtcttaccgggagggttggtattctggaacatgaagatggagctctctgaacatcttcacaggtatgaagactatgtggaccagcattataaagagttcctcaagaa

SEQ ID NO: 23113 - DNA, 2300 bp, Homo sapien
tgattctgtcaaatgcagagtgaactgtttttttttttgagacagagtctcactccgtcgccaggctggagtgcagtggcacgatatcagctcactgcaacctccacctcctggttcaaatgattctcctgcctcagcctcccgagtagctgggactacaggcatgcaccaccacgcccatctaatttttgtatttttagtagggatggggtttcaccatgttggccaggatggtcttgatctcttgacctcgtgatctgcccaccttggcctcccaaagtgctgagattacaggcgtgagccactgcgcctggccgaacttttctttttttttggaagcaccagagtccgtgaagcattttatttgtaaatatgtattacatctctagaaaaagaatcccaggattttccctcctatatgttgctgtcttgcttcttcatggtccatgatgccaactgaggttgtcagtacaataaaaccaaactggcaggatgggagcagattattctgccatttttcttttttgttttttttctgagacagagtctcgctctgttgcccaggctggagtgcagtggtgcaaccttggctcactgcaagctccgcctcccaggttcaagccattctcctgcctcagcctcctgagtagctgggactacaggtgcccgccaccacgcccggctaatttttttgtacttttttagtagagacagggtttcaccctgttagccaggctggtctcaatcttctgaccttgtgatccacctgccttggcctcccaaagtgctgggattacaggcgtgagccaccgcgcccggcatattctgccatttttctagatctctgatttgcacatcaaatctggggctgatcactctacacttgtttagcctgcctgtgaggttcacagcaattttcctagctgtgatcatcaattatttcaaaatcgccaatttaccatacttcagcatcacaattagaaaccagacgatgactttggagcacagcctaataaggacctgccgtttgcctctctttctggcattgttgatgctcttgagcacatcagccaggacattcatgcgcactattgcggcggtgcagaaagatagccaaaagagcaaagtgttctcaagctactgttatcagtgccaatcatggagtccgatgctgagggtggtcttgctcattttttggagagactctgtttctgctaatgtagctggggctcaggaagagatggagagcaccaggagccctcctagccctgtcagtgtagggctgcgaggctcactcctcccttccccttcgcaggcccaaactaattcctcaggagcagctggcctcagggaaggcataggcttttccagacgtctcttgatccacgctgacagtgacatggtcttcacagggctgcctgcccgtcttcctttttatctctccacgcttttctgtcacttcatatttgttatccttaaatctgtcactttttctcccctcaactctgtcctttctctgttttgtcttgttccttttatgaagggaagcatgaagcaagaaaactttatctgcactttctgtttcagctcctttgaatttgcgtttgaactctctcggctggccctcaagcacaaaacccccgaggttcatctcaaatatgctatgttcctggaggatgaggtatgggtgtgatttggaccccgaccgcagagccctcttattccatcccctagtgcactgctgctgggtgtgcagacccccagtctcatgcctgcctgtgatgccagtctccttctcatcatgcacggctgcctttctctccctgtagggtaaattcgaagaggctgaagctgaattcatcagagctggtaaacccaaggaggcagtcctcatgtgagttaccccatacattccttaatactgtttccccagtcaccgtcccaggatctttcatgattatcttgaccttcattcaaacctagaacaaatcagtgttacacccctcagtgacatggctgtttgtctcccactattggggcctcagtcctatactcagtctctcctctgtccccacctggaggcaggtttgtccataaccaggattgggaggcagctcagcgtgtggctgaggctcacgaccctgacagtgtcgccgaggtgcttgtgggacaggcccggggggccttggaggagaaggactttcagaaagcagaagggctgctgctccgggcccagagaccaggcctggccctcaattattataaggtggggcactggatgcagggccatgaggggaggg

SEQ ID NO: 23114 - DNA, 2300 bp, Homo sapien
ccctctacacctcctctggggccacggctcacctttcagcctcacggtacttgccctgcttctccatttcctgggcctgagtgatgtatagcactgacacatcttctggtctcatgcatttcatcgccagctgtggaggcacagaggcaaggcagcctcagatccaattccccagggaagcagggcttcaaggaaacctgcttgttcagaaactctgaactctcccaacaatcacaggagtttgggtattgccactctactagtgaggttggggaattccaagtccataagaagcagaggaagaactatattctgctaaggtgggaaggtctgcgatgccttggctggggcatacactcccattaccacggtaaccactggactctgaagtgtaggcgcaagaacaaagtcatcaatgtgaccagaggcattaggagtggtagttcagattccccagctcccaagcccatctgctccttcagaatgatagataggtctggaaacaagggcctctcttcatcccttcctttccctatggctagggatcaaagtggctcagactgttttttggtactctttgtcagctttcagggagccaagcgaagaggagaaacaggtatcaaggaatgaggccacaatgccactaaggcagagttctcttatcatgaactccacccatccctaccttgtgggcttgttcccaacgaccagcctgggtgtacatgtctatggcatcttttgtccgatctcccttagtatagagctcctcagcaatctgtagttgatgggaggtagatacaaaaggtcagagcaacagacttaaagcagcttgaatgaggaaagaacaaaccttggctgggatggtggagagcctgcgatacaaccttgtaataatagagaagaaaagatgagtatgggtgtctcatacattctaccatttaaaaagaaagaccagccccaaacagtggaatccaaaagggcctcacatttctgcaatgcaaagcaattttatatcataactatgttagcattattcatgaagaatcacgctgactggaacacagctagagactcactttatatatctggggtgaagggcgatatctgtgtcacactggaatgaaaatgggaaagtaaactgttctcttccccttcaaggtgatgatgctgtttggagcccagaaagaaggatctggtgaacttgcctccacttcctgctttgggttctctcattgttatcctctactgcattgcctcgtgctgcggaaagggactcttcctcacctcatactcctgcagggatgcatagtgttgggccacgagaggatagtatttggatgcagtgttccggtcctgtagatctaatatataaattgccttcttccactggcgggcacccagggcggcctcaattgccttaatggagcacctggcaaagttgggaaagatataaatatgtaggatgaaagatgaagatgaatggaggtaaaaggaccctttaagcacacttcaacctacattttgagatctcttctttaaggccttggtgtccttacttgctccactgcccctcacttcacacctaaatctcctttacattcccatactcccatacctggcttcgatgtagtgattaatggctgcatcaagctgcttctgctgcaccaggtggtccccccatgcctcctctagtttcaccacctccactgggaaggccaatcgagccagctctaccgctgccagggagagaaaagatgctcagcccagatttccagggatgggcctcaggaaaaaggtaggacagggagatgaagcatggagaataggtaagaaggggaggaatggaggactggagccaggcatcctgaacacacgcaccaagaggtgtggggaaaagcaagagagatcagattgttactgtgtctgtgtagaaagaagtagacataggagactccattttgttatgtactaagaaaaattcttctgccttgagattctgttaatctataaccttacccccaaccccgtgctctctgaaacatgtgctgtgtccactcagagttgaatggattaagggcggtgcaagatgtgctttgttaaacagatgcttgaaggcagcatgctccttaagagtcatcaccactccctaatctcaagtacccagggacacaaaaactgcggaaggccgcaggtacctctgcctaggaaagccaggtattgtccaaggtttctccccatgtgatagtctgaaatatggcctcgtgggaagggaaagacctgaccgtcccccagcccgacac

SEQ ID NO: 23115 - DNA, 2300 bp, Homo sapien
agtgctgagattacaggcatgagccaccatgccctgccgattttactttttaattaaaggaagattgttttttaaattggtcttcacaattatggacaccagtggacatttggtctttagcttaagcatatataacaaagtggggcccattgttcattaataatggatatcactaaaacttataaataggctttgatcaagagaccccctgaaaccatcccagccaaccctaattggtctgctctaaatgtgatagtttctgataatgtctagaagattcaaaccaaactaaaatattcatcctctgcagtgaccagcctaactttagtcagaggtttgtctgttgccttccccaccatccacccttgcagtgctcttacacagtaggcattcaaatatacgggtgacttcttagagcatatgaccatcaaggtcattgattcatcagccttgtctcactgctgtattgtatcaggcttatctttaatgtgctcagtgctgccttcgaggggattctgtgagtaggagaagccacttgctcaatagttctagtctgctctgaggtaactccataagccccagagagtgatgacatttctgtgggtctggaccttttgagttaacaacatagttaaacaaaacctctacaattctaaaagagacctagcttcctaggcatcctagcaaaattatgtgtgttggccatactatgtatatgtgtggaatctctcttcttaaccctgtctcctttattctatagtggatctgattggtggctacaacattggcaccgtcagccatgagagccgtgtggattggctggaacttaatgagactggacacaagctcctcttcagggaccggaaacttcgtgtgagaagagctactaaggccttaggcattggctggcccacagagggtgtgagacaagctgccaccagggactgagggaggcaggatggagcacattgtctttgctgtgtcatcaacatggcagaaggcacagaagaatcaacattctctgtagctgataccaaaactgatagcaaaacccatcctttattacctctttttttttttttttggagacagtgtctcactctgtcacccaggctggagtgcagtggtacaatctgggctcactgcaacttctgcctcccgggttcaagtgattctcctgcctcagcctccccagtagctgggactacaggcacgtgccaccacacctagataatttttgtatttttagtagagatgggttttcaccatgttggccaggctggtctcgaactcctgacctcctggcctcaggtgatctgcctgcctctgcctctcaaagtgctgggattacaggtgttgagccatgcgcccagcaatcctgtatgacctcagaggtgattgtattatggcaacaaagtcaagaagggagtttggaagttggtgtctcttactattcacagtctgtgccctcaggaaacttccttaaccctgcattcctcctcctcatgcctagctgaccttcacctagacctgctgtccagtgcttttcagccacacttatctgatagcatgaactggctggaggacagcctcttcgtccctcattgattctcatcccaatatggtagcaccagagtcttcaacctcagatcaaagagacaacctgatgacttttcatttcagtgaaagccacatcacaaatttctggataatttaatttttctagtggcctgccatttgtaatccaagctggtaactctggcccagagttatttcaagaaggaaagtctgaccttcacctaacttaaaattcctgggatgtagatctttgttctatgggtcatctcttacttgaccagagttaggatataccagctcagcagaaagcaggtcagtaagctttgaaatgcagcatgaacctgagtggtgggttagctcaccacatctcaccattaggaaaatggtcaaaagcaggagacaaccccacatccccttgtaattgtgttacctgccttttctttcttcagttgcatctgtatgatattgaaagctgctctaagacaatgatcctcaacttctgctcctatatgcagtgggtcccaggaagtgacgtgctggtagctcagaaccgaaacagtctgtgtgtatggtacaacattgaggcacctgagagagtcaccatgttcactattagggtatgttggacactaggggccctcagatgtggtattgagctgattaattagagccatgaggagactctgaaggctacttggttttctgtgtccaccacccttaat

SEQ ID NO: 23116 - DNA, 2300 bp, Homo sapien
ctacttgacaggagcattgcaaggtgtgataataccccaccctaggatagggccaggaagaagaggtatagaaaactaaccccagattcttttgctttgttgggtgagaaggggaaaaagagaagagaaagatataagttcctgcaccactgaatactaatacatatcatatgagagggtagtagcctttttatcttcactgcttgcatcgacagcacagctcctcaccacttactcttctgactcctccatcaaccctgggctaatggtcagaaaaggactaagcagtgtcttggggactaatgaaaggacagctacactcatggattccttggtgccacatgctcctatcctatgtgttcctgtgtctgttcttccctcttttgcattccctttcatctctgtctctgtttagtcagtcaaagtcagtaataactgtaattcataaatgagtttatattcatgctctgccaccatatccagaggaggattctgaaaataaaactgaggggttgggactcccctgtcaaaataattctcatttgagctctgaggcctacttgtttcctgtgaaaataggggctgtcctctgctctttcctattttctaaggggtggttggtggccatgagacaaacacctgttgacacttgcaaaccactgtgggggaaggcttctggacccacagtctgtctggagagcatatgttacacttcctggagagttacagatcttcccaactttggatcatttcagagcaggcttatgaataactcctttctgcatttcaatctctctggtatgttagaagataggccaaaaattctgaacgggactccaaagatcaacaagtcagtctcttttctacttaaccaatctctaaccccaggtatcacaagacaacctatcgggtgagccaagtcaggtctgccctcaaaactgaaccacaggccgagaacggtggctcacgcctgtaatcccagcattttgggaggccaaggcgggcaaatcacctgaggtcgggagtttgagaccagcctgaccaacatggagaaaccctgtctctactaaaaatacaaaattggtcgggcgtggtggcacatgcctgtaatcccagctacttgggaggctgaggcaggagaatctcttgaacccgggaggcagaggttgcagtgagccaagatcgcgccattgcagtccagcctgggcaacaagagtgaaactctgtctcaaaacaacaacaacaacaaactgaaccataaaaacattccaatgtaaacagcagtctttaacccaccattacccaattaggaagtagggtaccttacgtttctttggcagctagttccaaaacactcatcttccagattctgagaataaatgtcatttattgggatgggaatgtgacaggttatagtatcgtggcatggagagagcgagctaggagttgagaaggaacataaaagctgtttaaagctactaactctgggttgaactccagttccaagtccttcgctggctgtgttagtttgagcaagtgccctgagtctcctgttatgtaaaatgagactaataataacgctatccccttcaaaaggtggttttgggattaaatgatataaatgcacgtacaatactttacacagtacctggcagacacatactgagtattcatcgttagctatcgttattagccttgcgatcccgtgcaaatcatgtaacctatttgggtacaattccgtcaactgcagaaggcctatcatggaaaccgccctgcttccctccagagttgtgaggattaagagagtgcactcagaaagtcaggtacatcgaagagcgagacggaccgctatgacgtaggacctggggctggctgaaggcttgtgggcggggcttggtcttgagtttgcatgcggcgacgggattggtcaaggagaacattcatgaagccctctcaagggcccgccctagatctcaccgcgcttgcgcacgttctgtttgcttcgccgcaaagttacgtgtgaccttgcgacgcgtgttgcgctccggtcgcataagcgtcagtgcctgtcgctgcggctgcgtggcgggttgtccaggtaaccacgggagttgtcgctgtctaggagcatctgaaagacaggtgtgcgtcatgcacttgaagcacctgaggaccctgctgagccctcaggtgaggaattgcgtgccagtccctcccccttatgctttatgttccaagaaaagtgggggaactgaagtttaatgatgttgacctcctactgtgtgcagaaggctgtaagg

SEQ ID NO: 23117 - DNA, 2300 bp, Homo sapien
gccccagtgatgattaacccaagcaccctgggctctcagagcaccaccctttcctggtcactaggcccccagccctctggtaaccccagggaaactcctgggcttcctctttgcaagcaccctgactcgccagcctctgctttggcccctgaagaggaagacctgaggctcgggactcttgccctaccgggacaatgccctcttctacagaggacctggagcctgggagtgcaggacaacacccacggcagtgagaatccctgggcaagtgtcctccgaggccagagatcagggtcaccaagtcagcacaagtcagaggacctggcccatggcttgatcacatgctcagcacacacagtcagtcccactggtcccattttatcctctcctctcagaaaggaaggcagtagaagcttctgagccccaagtgtgcacacactgtactggatattacagcgggaaaaatcccacagaaacagaaatactgcattgagaattagaaaccaaagaatctgccctaaatacaatgttagccaacatttatttacactgaacaacacacttttcacagacagtatctcattggatacaccaacactaagatgttggtcaatattgacaccctcatttttcagatgatgaaacaggctcagagtagtttagttggttgcttaagatcacacagctggacaaattgggactcacacccaggttctcaattcagatttcaagctcaaccaaagcatgatataatgtaagggcttacatgttattgaacaaagaagtaactaacagattggtgcaaattaatctccatcatccagtcacatagtgttgtgagatttataaagatctttcccgtctcatttgagcctcacaacaaccctgtgagatttcacacgctttgctttacaggtgggaaacctgaagcacagataaaccagtttctccaaaaccacaccgtaagtggtagagctttagaaaaacaaaaaaagaaaagaaaggaataataatttttttaaaaaagccataggtctttgcgctttgattctcccgagaagcccaacactcttaacaatcactgtatctccaggttttaatataatgccagacacataggagatgctcaataaatatttggtgaataaatgaaagaatgaatgagaaagcgaacggaattaaatgagattatgaatggaaaagagacttaaaagctgacgcagtctacaagtaagggattgttaaagcaattattatctccctcactctctcccctctcctgttagcccctcgggcactggaggtggaattcctcttcccaacttggctcttccacgcggggaggaaggggatctcccaggtgccggagaccctagcacccgcgtctcaccccccacgcccccgccgactcgtccgcttcagctgggagagagaagggataagggatgggggctccggaggcgccattgggagggtcgtgggaggagccccgagaggacgggagtgagggggcgggaggggaatgacggcggcgagaaccccggctgggcggggcgggcccgcgcgtcccggccgggctgcggcggagcgagcggggccagcgctgcagaaggcggcggctggctctccgggacggtcacatcccgctgcaggggcgggcggaggccgccgcactgcctcccgcaccggggacccaggccagcgtccgggcaacgccccctgctcccggacagactccgtggcccgctcgagccctgggggctccgcagacccgcgcccgctccgcccgcagctcggccccgcgctgcccgcgtcgccgggcccgcgccgggatggggtaggggcagcgccaccgagtcgggcgatgggccgccctctgggcaccgagcagccccccgaggcctgaccaaccgcgaggaccggcggaggtgggtgtgggcagggcggaccgcactctggggccgcccgggcaatgcgggggcgggagggcgtagagaaaatagggctgttgtgagctgtggggagcccaggagagctgctgccccccgacctccgtgcgttctgggcagtccttgaccccccacaactcctgccatctccaggagccccgcctggatgtcaagcggatgccaagcggatgccacagttccccccccagcggactccgtggggacatggcttcgctggtgcccctttccccatatctaagccccacggtcctcctgctggtcagctgtgacctgggcttcgtgcgagcaggtaagtaaaggggaacggggctgagggtcaaccacagctag

SEQ ID NO: 23118 - DNA, 2300 bp, Homo sapien
gcccagaacgcacggaggtcggggggcagcagctctcctgggctccccacagctcacaacagccctattttctctacgccctcccgcccccgcattgcccgggcggccccagagtgcggtccgccctgcccacacccacctccgccggtcctcgcggttggtcaggcctcggggggctgctcggtgcccagagggcggcccatcgcccgactcggtggcgctgcccctaccccatcccggcgcgggcccggcgacgcgggcagcgcggggccgagctgcgggcggagcgggcgcgggtctgcggagcccccagggctcgagcgggccacggagtctgtccgggagcagggggcgttgcccggacgctggcctgggtccccggtgcgggaggcagtgcggcggcctccgcccgcccctgcagcgggatgtgaccgtcccggagagccagccgccgccttctgcagcgctggccccgctcgctccgccgcagcccggccgggacgcgcgggcccgccccgcccagccggggttctcgccgccgtcattcccctcccgccccctcactcccgtcctctcggggctcctcccacgaccctcccaatggcgcctccggagcccccatcccttatcccttctctctcccagctgaagcggacgagtcggcgggggcgtggggggtgagacgcgggtgctagggtctccggcacctgggagatccccttcctccccgcgtggaagagccaagttgggaagaggaattccacctccagtgcccgaggggctaacaggagaggggagagagtgagggagataataattgctttaacaatcccttacttgtagactgcgtcagcttttaagtctcttttccattcataatctcatttaattccgttcgctttctcattcattctttcatttattcaccaaatatttattgagcatctcctatgtgtctggcattatattaaaacctggagatacagtgattgttaagagtgttgggcttctcgggagaatcaaagcgcaaagacctatggcttttttaaaaaaattattattcctttcttttctttttttgtttttctaaagctctaccacttacggtgtggttttggagaaactggtttatctgtgcttcaggtttcccacctgtaaagcaaagcgtgtgaaatctcacagggttgttgtgaggctcaaatgagacgggaaagatctttataaatctcacaacactatgtgactggatgatggagattaatttgcaccaatctgttagttacttctttgttcaataacatgtaagcccttacattatatcatgctttggttgagcttgaaatctgaattgagaacctgggtgtgagtcccaatttgtccagctgtgtgatcttaagcaaccaactaaactactctgagcctgtttcatcatctgaaaaatgagggtgtcaatattgaccaacatcttagtgttggtgtatccaatgagatactgtctgtgaaaagtgtgttgttcagtgtaaataaatgttggctaacattgtatttagggcagattctttggtttctaattctcaatgcagtatttctgtttctgtgggatttttcccgctgtaatatccagtacagtgtgtgcacacttggggctcagaagcttctactgccttcctttctgagaggagaggataaaatgggaccagtgggactgactgtgtgtgctgagcatgtgatcaagccatgggccaggtcctctgacttgtgctgacttggtgaccctgatctctggcctcggaggacacttgcccagggattctcactgccgtgggtgttgtcctgcactcccaggctccaggtcctctgtagaagagggcattgtcccggtagggcaagagtcccgagcctcaggtcttcctcttcaggggccaaagcagaggctggcgagtcagggtgcttgcaaagaggaagcccaggagtttccctggggttaccagagggctgggggcctagtgaccaggaaagggtggtgctctgagagcccagggtgcttgggttaatcatcactggggctcagataaggccctgccaactggaagcagagtcattgtgaccagaggggtttgtgtggctgaagaggcaggaggaacagtgtatccacagcgtgggaccatgccaggcacaaaacggtttcaacatgtcattgagaccccggagcctggcaagtgggaggtgagaccccttcttcatgttggctttctgtgctgattcctagaattatttttcatccagtcttccctccccgc

SEQ ID NO: 23119 - DNA, 2300 bp, Homo sapien
gaacaatgttctcagcatctgctttgtctagatcctgggtcagtgggtttgacttctccgtgattggcacagctgcctcgtacccagacaactagaaggaagaggggacaaggatggagcaggaagccaaagcctcattcatgcctgctgagctggaggtgggagtggcagcaggcacagagtttggacttacacacacgcacacacataccacaccagaaactcagcctgcacttggtgctctgggcatattagggaaagaacatcaggaaggaagaagaggtgagcagaaaccagcggggagggaagactggatgaaaaataattctaggaatcagcacagaaagccaacatgaagaaggggtctcacctcccacttgccaggctccggggtctcaatgacatgttgaaaccgttttgtgcctggcatggtcccacgctgtggatacactgttcctcctgcctcttcagccacacaaacccctctggtcacaatgactctgcttccagttggcagggccttatctgagccccagtgatgattaacccaagcaccctgggctctcagagcaccaccctttcctggtcactaggcccccagccctctggtaaccccagggaaactcctgggcttcctctttgcaagcaccctgactcgccagcctctgctttggcccctgaagaggaagacctgaggctcgggactcttgccctaccgggacaatgccctcttctacagaggacctggagcctgggagtgcaggacaacacccacggcagtgagaatccctgggcaagtgtcctccgaggccagagatcagggtcaccaagtcagcacaagtcagaggacctggcccatggcttgatcacatgctcagcacacacagtcagtcccactggtcccattttatcctctcctctcagaaaggaaggcagtagaagcttctgagccccaagtgtgcacacactgtactggatattacagcgggaaaaatcccacagaaacagaaatactgcattgagaattagaaaccaaagaatctgccctaaatacaatgttagccaacatttatttacactgaacaacacacttttcacagacagtatctcattggatacaccaacactaagatgttggtcaatattgacaccctcatttttcagatgatgaaacaggctcagagtagtttagttggttgcttaagatcacacagctggacaaattgggactcacacccaggttctcaattcagatttcaagctcaaccaaagcatgatataatgtaagggcttacatgttattgaacaaagaagtaactaacagattggtgcaaattaatctccatcatccagtcacatagtgttgtgagatttataaagatctttcccgtctcatttgagcctcacaacaaccctgtgagatttcacacgctttgctttacaggtgggaaacctgaagcacagataaaccagtttctccaaaaccacaccgtaagtggtagagctttagaaaaacaaaaaaagaaaagaaaggaataataatttttttaaaaaagccataggtctttgcgctttgattctcccgagaagcccaacactcttaacaatcactgtatctccaggttttaatataatgccagacacataggagatgctcaataaatatttggtgaataaatgaaagaatgaatgagaaagcgaacggaattaaatgagattatgaatggaaaagagacttaaaagctgacgcagtctacaagtaagggattgttaaagcaattattatctccctcactctctcccctctcctgttagcccctcgggcactggaggtggaattcctcttcccaacttggctcttccacgcggggaggaaggggatctcccaggtgccggagaccctagcacccgcgtctcaccccccacgcccccgccgactcgtccgcttcagctgggagagagaagggataagggatgggggctccggaggcgccattgggagggtcgtgggaggagccccgagaggacgggagtgagggggcgggaggggaatgacggcggcgagaaccccggctgggcggggcgggcccgcgcgtcccggccgggctgcggcggagcgagcggggccagcgctgcagaaggcggcggctggctctccgggacggtcacatcccgctgcaggggcgggcggaggccgccgcactgcctcccgcaccggggacccaggccagcgtccgggcaacgccccctgctcccggacagactccgtggcccgctcgagccctgggggctccgcagac

SEQ ID NO: 23120 - DNA, 2300 bp, Homo sapien
gtgaaatctgtagagctggaatcaggcccacagttacaagatataaaatcttctgatctgatcatgggtataaagcttcaagatgtaaaatctatgaagttcagttctggacaacactttcaaggtataaaatcttctgaggtaacctcagggacaaggcttcaaagtatgaaatcaatggatttcaattctggacaacagacacaaagcgaaaaatcttctgagttgattcagggaacaaaccatcaagatgttaaatctgtagaattccaccatggtctaaagttacaaggtgtgacatcttctgagttaacaccagagacaaagcttcaaggtggggaatctgtggagttcaactcgggcccacagtggcaagatacaaaatattctaactcaataatggggacagagcttcaagatgtaaaatctatggagttcagttctggatcacacttgcaaggtatgaaatcttctgaagtgatcccagcgacaaagcttcaaaaagtgaaatctgtgctcatgcctaggccaatgcggcaagatgtgaaatcttctgaattgactgtaggtacaaaggtacaggataggacatctttggagttaagctcaacttcacagttacaagatagaaaattatctatgttgacaccagggatacaccttcagggtgtgaaatctgtagaatataatcctggggcaaagttggaagatatgaaatctgggttgataaagcttcagacggtgaactctacagaaggcaaccatgacccagaattgcaggttgcaaaactctctaagttggccttggaatcaaagattcatagtgtggcaccttctgagttcaatgctgaaaagcagcagcaagatgagaaatctcataaattgaatccatggccagaccttcaaagtgtaaaatttatggtgttcaatcctgagccacatctgcaacatagaaaatcttcagaattatgcacagggacaaagcttcaagatgtaaaatctatgaaattcaatcttcagcaacagttgcaaggtgtgaaatcttctgagttgtgcctaggaacaaggcttcaaggtatacaatctttagatttcaaccctggaccacagttgcaaggaacaaaatctgccaagttgaatcctgggcctgagcttcaaggtataaaatctaaggtgttctgccttggaccacatttgcaagatgtgaattcttctgtatccattccagagccaccacatcagtgtgtaaattctactgggagcaactgtgggctacctttgcaaggtgtaaattctgcatccattccagcacctaaacttcagtgtataagttctaatgggtgcatccctgggccacatttgcaaggtgtgaattctgcattcattccacagccaaaagctcactgtgtaaattctattgggtgcaacccagggccgtatttacaaggtatgaaatcgcctgaattaactccagtttcaaaacttcaaggtatgaagtgttctgaattgaacccagggacagaaattcaaagtgagacacctatgatgttcaaccctataccacatttgcaaggtttaaaatctgaattgactccagggtcaaagcttctacgtgcagcacctatggaatgcaaccctgggccacaggtgcagtatgtgaattcttctgagttgaatccagggctaaaattgcaatgtatagattctatggagtgcaaacttgcgccacacttgcaaggtgtagaatcagggacaaaatttcaagttatgaaattttctgagttgcatccagggccagagcttcaaggtataaaatctgttgtgttcaactctgtgcaacatttacaagatgtaaaatgtgaactgactccagggacaaaatttcaagatataacaccaaaggagttcaactctggcccgcagctgcaaggtatgaattctgaggagttccattcacacctcaggcagcataatgtgagatctgtggtatttgtaccagagccatgttctcaagatgtgaaatctgtgaagtcaactctatggccacaacctcaaagtgtaaattcttcagggttgacatcatgctttgggtcacaatgcgttaaatctgtggcctttgcatcgaagccatgctttcaagatgtaaaacctatggagctgacaccaggggcccaacagcaaggtataaattatcaagagttgacttcaggatggcaagatgtgaaatcaatgatgttggtaccagagccaactaggaagttcccatcaggaccactgttgactagtgtcagattttcaaa

SEQ ID NO: 23121 - DNA, 2300 bp, Homo sapien
cttcgactgcccaagcccacagattcccaaagtggtattgctttccaaactgcctcagtggggcagcctctgagaactgttcaaaaggacagtagtagcagatcaaagaaaaacttctatagaaatgaaacctccagccaggagtctaagaacttgtccacaccaggaaccagagttcaggcccgaggaagaatcctacctggttcccctgtgaagagaacctggcaccgacatcttaaagacaaactcacacacaaggagcataaccaccccagcttctatagggagagaaccccacgcggtccttctgagagaacccgtcataacccctcttggagaaaccatcgcagtccctctgagagaagccaacgcagttccttggagagaagacatcacagtccctctcagaggagccactgcagtccctctaggaaaaaccattccagtccttctgagagaagctggcgcagtccgtctcagagaaatcactgcagtccccccgagaggagctgtcacagtctctctgaaaggggccttcacagtccctctcagaggagccatcgcggtccctctcagagaagacatcacagtccctcagagagaagccatcgcagtccctcagagagaagccatcgcagttcctctgagagaagacatcgcagtccctcccagaggagccatcgcggtccctcagagagaagccattgcagtccctctgagagaagacatcgcagtccctctcagaggagccatcgtggtccctctgagagaagacatcacagtccctctaagagaagccatcgcagtcccgctcggaggagccatcgcagtccctcagagagaagccatcacagtccctctgagagaagccatcacagtccctctgagagaagacatcacagtccctctgagagaagccattgcagtccctctgagagaagccattgcagtccctctgagagaagacatcgcagtccctctgagagaagacatcacagtccctcagagaaaagccatcacagtccctctgagagaagccatcacagtccctctgagagaagacgtcacagtcccttggagaggagccgtcacagtctcttggagaggagccatcgcagtccctctgagaggagatctcacaggtcctttgagaggagccatcgtaggatttctgagagaagtcacagtccctcagagaagagccacctcagtcccttggaaagaagccgttgcagtccctctgagaggagaggacacagttcctctgggaaaacctgtcacagtccctctgagagaagccatcgcagtccctccgggatgaggcaagggaggacctctgagaggagccatcgcagttcctgtgagagaacccgtcacagtccctctgagatgaggccagggaggccctctgggaggaaccattgcagtccctctgagaggagccgacgcagtccccttaaggagggactcaagtacagtttccctggagagaggcccagccatagtttgtctagagatttcaagaatcaaacaactctcctcgggaccacacataaaaatcccaaagcagggcaagtgtggaggcctgaagctactcgatgaggcgaggtccgcccctattattcattgtcctaagtcttcatcgtgctgccctttccaggcttctttcctgctcagccactgcctccaattcctgcgcccccagcgtggaaaggcttccatttctctctaccgggggggaggcgggtgagaatgggtctgtaatttctctaagatgaataaaggggcagtaaatgatcttcctgtgcatctggactgagaccactgggcgggtggatggggaaggcaggctggagggacacgaggagttgtgcaaagattcggaatgagagccaggggttttgaggcccagccgaggctccaagctccgccccttcactccagaccccacccataggttcccgggtcccgcgtcgcgatcccagtggggcggggtctcagaggaatcggagggtgactcatcacgtgactcgctccggccgcagccccctcggaagctgctaggcggaagtagaagttcagaagagggctaggcggagccgagcccacatccgggagaggagagcggaagtggcgttggtctggccggagcccttgggtgaaattgttaggcgtggagagggagtgatgtcttccagactcggtgctgtacccgccgtgagtttcttggtttgaccgttatgctttagaggtagcgctgtcgagcccggaacacgcggtccctcgcttttgtcccatgc

SEQ ID NO: 23122 - DNA, 2300 bp, Homo sapien
aatgcctccaaaagcaagacagaagttttggcctgaacctgaagcagggtggcctgctaaaacagaaacggcaacattccccagaagaattataataggacccaaaatctacacaaaaagtattcacaatgatgaggataaattccaaaattatgcaacacataaagaaccaggaaaatgtgagcaattttcaaaggaacaaatgaccaaaacatgccagccacaaggtgatccagattttgggactatcaaatactgtcaacaaaaaagaaatactttcttataaagaaaacacacaagaaatgaaggaaaaggtgggaatcatcagcagaaaaagaaaccataaaaaagaaccaaatgaaatcttagaactgaaaaatacaacatctgaaataaaaactcatcagataggttcagtaatagaatggagatgacagaggaaagagtctgtgaacttgaagaccgttcaatagaaatgacccagtctccaccgggcacagtggctcacgcctgtaatccagcactttgggaggccgaggcaggcggatcacaaggtcaggagttcgagaccagcctgatcagcatagtgaaaccccgtctctactaaaaatacaaaagaattagccaggcctggtggtgggtgcctgtaatctcagctactcggcaggctgaggcaggagaatcgcttgaacctgggaggcggaggctgcaatgagcagagatcgcgccgctgcagtgagcagagatcgcaccactgcactccagcctgggcgacagtgcgagactccatctcaaaaaaaaaaaaaaagaaaagaaaagaaaaaaaaccagtctgaagaacaaagagaaaaaaagattgaaaaacattcaacaaaaccctaataccaaacgttttaacttaagtgtagttgtaatcccagagggagaggcgaaagatactaatgcagctctcgctctccctctccccgctctcctccctctcccttcttcggtctccctctgttgccaaggctggaccatactgccgtgatctcacctagctacaacctccctacctcgggctcccctgattctcctgcctgggcctgcccaatgcctgggattgcaggcacgcgccgccacgcctgactggtttttgtatttttggtggagacggggtttcgccgtgttgaccaggctggtctccagctcctgacctcgagtgatctgctcgcctccgcctcccgaggtgctgggattgcagacggagtcttgctcactcaatgctcaatgttgcccaggctggagtgcagtggcgtgatctcggctcgctacaacctccacctcccagccgcctgccttggcctcccaaagtgctaagactacagcctctgcccggccgccaccccatctaggaagtgaggagcgtctctgcctggctgcccatcatctgggatgggaggagaccctctgcccggccgccccgtctgggaagtgaggagcgcctctgcccggccgccaccccgtctaggaagtgaggagcgtctctgcctggccgcccatcatctgggatgtgaccagcgcctctgcccggccgccctgtctgggaagtgaggagcgcctctgcccggccgccctgtctgggaggtgaggagcacctctgcccggccgccaccccgtctgggaggtgaggagcgtctctgcccagccgccaccccgtctgggaggtgaggagcgtctctgcccggccgccaccccttctgggaggtgaggagcgcctccgcccggccgccaccccgtttaggaggtgaggagcgcctctgcccggctgccaccccgtctgcgaactgaggagtgcctctgcccggccaccaccccgtctgggatgtgaggagcgcctctgcccggccgccctgtccgggaggtgaggagtgcctctgcctggccgccccatctgggatgtgaggagcgcctctgcccggccgccaccctgtctgggaagtgaggagcacctctgactggccgctgtgcaatcttccaagtgtgaagtgacagcctttctgcaggtgtacccaacagctccgaagagacagtgaccattgagaatgggccatgatgatgatggcggttttgtcgaaaagaaaagggggaaatgtggagaaaagaaagagagatcagattgttactgtgtctgtgtagaaagaagtagacataggagactccattttgttctgtactaagaaaaattcttctgccttgggatgctgttgatctataaccttacccccaaccctgtgctctctgaaacatgtgctgtgtca

SEQ ID NO: 23123 - DNA, 2300 bp, Homo sapien
tgtcctctgttaaaaatcaaacttttctaagacaaacaatagaccattacacttatcagtttcaggtactttatagggtcttatatcttacagtttttttgtgtacaagagtatagatttcagaattatataacctaaagagttgggtgtgaaacttttgggatattttggttgggagttgtatttatctaatgtttctggttgtcttgtcttgtagttaaaatatactcgtccagggctccctaccttcagccaggaagtactacataaatggaagacagatatcaagaaatatcatcgtattcagtgtcctaaccaggtggttctttctcattcatttattcagtaaatgtttatcaagcatctgctcttgcttctgttatttattccttcatgacaaagtacctgaacctcagtggcttaaaacaattattttatttgttcacaattccatagagcaataattctgtaaaggctcagcagggcagttctcctgcgatatgtagcatcagctggaatcgctcataaaagtgcgttcaactggaaactcagactggaatgttcaagatggtttctgtgcagctgcatttatctgggagcttggctgtccatatggcctctctctctagcagagtagctgggctaccagcagggtacacagtgactgacttctcagggaatattttgagatcatgaaagcagggttgcagatctcttaaaatctagcttcagaatttgcacagcatcacttccatggtgttttattgatcaaaggaatcatgggactaacccagattcacaggaagggtaaatagactccacttcttgatggcaagagtggaagagaatttgcagccatctttatttttacgattctaaaaatatttttattttctagagtcaagatgagggagagagccatctttaaactatcacagctatagtagattcagtactttgcagaggagtaaatataaaagaagtgggaacacatttgcactaaataaagcagattttaaaaaaaactatataattttctgtgtttctcttaagtgtcagagaaagtactgagggaaggaaatggcttaatctttcctaaacaacttgttcaccttctgtttcttttctttttacctttccttggctttccttcttttgcggcttgcatgtatattcttttttcgtttgttttgtggcacaaattattggttttcttccttcaaatgtggagttggtcagtgtaaatggccagattgttcagagaagggagctatttggcatagtcttcatactatttcttctcttttgcagggctgtgaggctgtctacagcagtgtatctggccttaaagctcacctgggctcttgtacattggtttgtaactttttaaacttactatcttaacatgtcctctaaaatagtctgacatggaagagaattcagtttaggtgaacagctagttgtcctgtttaccattatcttcagaggctgctttagatttttatgtctctaagattcttggtctggtattgggtgggatgccagggcatgtccaagacttagaaaagatcaccatagtcacaagtcattatcaatttaaaggaattggaagaaacatatatttgttctgagttcctatccctgaattctaagagattcagctccttgcatttgagcatctcctacactgggcctgccctgtttaggtgggcctaaaactttgtagaatcaccttacatgtgcttacctggattggtaaagatcctctatacccatctgaaccatactggcctctcgggatgggaggtgggatagggtgtcaggctaacagccattcacctcactgaatcttttccatgttgacccaggtgtcctacaacctaccagccatgggaattgctgccattttccaatctcctcacacaaaatgagcaccatggaaacctgaagcttcaggaggggagagaagtctcagttcaaggcaacaagggagttgtaggcatctaaaccagatctgtctaggaatgcttaggagtttgtcatcttgatcctagtttctgagtccttaaactaggtattacggatggtactcttctaattctggattttgaaggcactttttgcgacagtagatcatagtgggaagaattgtacattggtgcctctggtgaattttgggcatttgatcattttgggggaggaaccaagacaacctggaagtgaagtgaaaggaacataggaaggtagaaagatgtggcatattacctgagaaaaagtaggagactttcaggttgtgttga

SEQ ID NO: 23124 - DNA, 2300 bp, Homo sapien
cttatttaatcagtgttattttagaagttactttggattaatccttgatttggtgccttggggaagactgggtgtggtctttggaacatcctgtctatttaggcactgattatgacttccttgcagtctctgcctcgcctggattaaggactccagataccactgttcctgctgcagctgctgcttcctgttttctaagtggctttgagtagccgttagtttctgggcttgctcaattagctgcagtaattccttcttgaactgctggttctctctgttgatgccacaggagtattcaaaaataaaccgctttgctgccaacttcaaggcctgggccttcatattaagctctcttctttttctctttcccagtagcctcctgtctggctcgctcagttgtttctccagtaatcttttctcctggaggagctgggcctgtacttcccgtgtctttgaagctgtctcagcttggactttctttgtctcctcctgtaatgtctgtatttctttctcctgcttttcctttaatatagcaatgtccctcattgcctgcaacttccgcttcaaactggattggatattttccttttgcaagagcgctgttttaagcactgaaatttgttctgcatatctggaggctgattcttgtcttcttcgttcaatctctccacttttttgtaaatagctgttccataccttctcaggttgctctgtgtactcttcagttttgttagtcaggtattccagaaagaatctgttttcagcctggacaagtaacttttctcggtgtagctccctggattcctccagtagctgtttccgctgggtttgagcttgttttatatgcttgttcagatccgtcatttccgccactatcttttctttaagccttgtctctacctttgttagcttctctggcttgacaaaattatttattagactatgatacggtggaaggagccttctggggccctcagcaaacctgaaagaacaaacgagacattcctctgtcagttaatgaaactttaggaagtaagtgcacaactgtccttcattcatacaagagaatatttctgagcaccagaatgttccagacattatgcaaggtgtggggaatccagctagtggtaaaggatgaggaatgtagctcgtcatttacaacgtgcattcactacaaccctgggaggtattacctcagttttaaaaaaggagaaaacaggttcagagagtttaagtgacttgcccatgactcacaccactagcaagtggcagagcctgggtattaaagccagatcttatgacttactgaacactgtttgcagctacaaagggtcacagaaacagactgggtggtcaggagtagaaataattttctaggctctttcatcatctttcctgagtttctgagggaccttcagtgactggaggggaggaagctcccctccagtacctacttgcacctggaatccaagcattcatcctgaaggtcacggcaactgtgtagttcactgagggtgactgccaaggaatgagcgctagcatcaggaacctgcgtctgcaactcgcgggaacaatgtgcaagtgtggaaagctcccgtagtttattcgttcggtgctcaaagggtctcggtgctgcccagcaaccctggagactgcaccctgctccagtcccggctggtccagccctgaactgtttaaccgcctcggctaccgaataagcccgagcagccggtcctccagtggctccgctccccgttctctgtgggctcaaaatgacaggcatgctcctcgttttcttgctgtgtgagccctgccctcgggaccccatctcttctggccttcctccgggagacaaaagccctcccaggctgcagagatcagcgcccttttcctagctcccttcagccttcctctcgcttgctcagcgcccccacttcctcgccactgtcactagttgactcatcagccctgcccgacgctaagaagatgccctggcaaccgccgcgcccctcacccgctcctttctgacgctgtggtggttttcgttcgcagcccagaacattgcggaagtttctctacccatgcggtgtctctatggtcgggtgggtggggccaggaggaagatggcggcgtccgcagctgccgctgagctccaggcttctgggggtccgcggcacccagtgtgtctgttggtgttgggaatggcgggatccgggaaaaccacttttgtacaggtgacgtacacagcatgggtgtagtaggggagcgcaaaaggttgcctccggcaggcggaaggccag

SEQ ID NO: 23125 - DNA, 2300 bp, Homo sapien
aagaagccaggaatgagtcaagaccaaagtagatggaaaaggatactgtttcattacttctttatactttacagtatcacgaatatctgaggagaaaaaaaagaattaactggaatgtaatacatacacattccctaccaccaggaaagtaaaactggccttctagccttctcctgtcagcattctcttctaccacctccactttcacactggtttccttccttacaaagaataaatgccaagtaaatcatgaagaatgttagggctaggagctctaaagttgtggcaaagagttttgtctccacaaagtgcaaagtttcatgcaacttaaacatgcctagaaaaagggaggcaaaaatcaagggggaaaaaatgcttcttactaattgcctattactgacaaaggcaacacaatggcaatgcagacatgattttttaaaaggagttaggctgggcacagtggctcacacctataatcccagcactttgggaggccaaggcaggaggattacttgagcccaggagttcaagaccagcctgggcaacatagagaggccttgtctctccaaacaaaacaaaactagcccagcatagcggcaggaggctgaggtgggaggatcacttgagcctgggatgttgaggctgcagtgacctgtgaatcacgccactgcactctggcctgggtgacagagactctgtctaaaaaaaaaaaaaaaaaaaaaaaaacctaagctgtttaggaatgcaagcaaatccaaaggaaatgaaagtagatagtttagaaaacatgaaaaaagaaggcactgaagactggcaggctggaggctttacagagtctcactctattgaccaggctggagtgcagtggcacgatcttggctcactgcaacctctgccacccgggttcaagcaactctcctgcctcagcctcccgagtagctggaattacaggtgcctgccaccgtgcctggctaattttttgtatttttagtagagatggagtttcaccatcttggccaggctggtcttgaactcctgacctcgtgatctacctgcctcggcctcccaaagtgctgagattacagccgtgagccaccacgcctggccttttccattctctttaaagcactgcacacaagttatgttactggtttactcaccaatattggcaggaaagggaacttcatgtactgctggatccaggttgatcacatacggtggagtgccttgggcatgcaggtgtcctgtgagcctctgcagagatatggggagagggttggaaggagacaaagaggggacaagagagaacttccattcctttaacacccatgccttaagaatattgcacttagattttcttctacctgaaatatccaccatgtccacctccaagatacaactctcagttcaaatgctacctttcttcatcacccatctaacaaagcttcccctactcgtagtcacttgtttacttgttttgattcttcgtatgtgggttttctctatctcctccattaaatatttggccccacgaatgaatcttgtcaacctcattttcgctatatccccagtgaatggaacatgacaggcgtgcaagaaatatttggcaaatcttcaccaaaacctgtgtgctagcactgtattaatctttaaagttacttgtaacttgcctccgagaaacgcaattttatcagcaagacaattcctgtacaacgtggtaagctggaccgagtatgccctgaaggtgcgcagaagagagccttaattaacctggctagggcccgaggaggctttgccggggaaggaactaaagttgatgggaagcccccgaaagccatgcgccggtaccctccaaatcctcttccctccctttcttcctggccttccgcctgccggaggcaaccttttgcgctcccctactacacccatgctgtgtacgtcacctgtacaaaagtggttttcccggatcccgccattcccaacaccaacagacacactgggtgccgcggacccccagaagcctggagctcagcggcagctgcggacgccgccatcttcctcctggccccacccacccgaccatagagacaccgcatgggtagagaaacttccgcaatgttctgggctgcgaacgaaaaccaccacagcgtcagaaaggagcgggtgaggggcgcggcggttgccagggcatcttcttagcgtcgggcagggctgatgagtcaactagtgacagtggcgaggaagtgggggcgctgagcaagcgagaggaaggctgaagggagctaggaaaagggcgctga

SEQ ID NO: 23126 - DNA, 2300 bp, Homo sapien
ggtatctctccccagtatctcaacattttggaataagaagagaagaggtctcaggataaatgtagacaataacctaaaagtaatgtgtttaaatcctggcaactttagattataggcttctgtagtgaaaaatacgaggtctagccagttatttatgtaaaaagtaggctatttgtgaccacttagaaaaatgtcagtgtcagcaaaactgtaggaccaaaggtgttctccctaaataaattaagagaaatgtaactgttagatgctggttattgtcatactatgacaattcctactacactgaaccacagggtagaatttgggtcattagtggaccaatagctacaacagcatctggagctctagtatccctatttcccatctcactcactaactcattaccagaactaccatcacgctcaatcctgaacaataagcaaggcatgataaggtatcttgatacatctgtgctggatcaataggagaaaaactagtagggttaaagataataagaagtggttcttactctgtgtgtcttaggcatgatcctggtggaaaaatttatgaaccattaatctaaatggcattatgctttcaacttttgacatatagaacgtgagagatttctgctgccttctaactggtatcccttcctccaatctctctttgtatgtcatctattctctacactgctgctagacttactctttttaaaacttaaatcaaatggcttcccattgcctattggaaaaagtcagaattccttggcttaccattcaacaaaattcacaatctggtttcaactcacctttgcagattcattgtccatatgtctcttcaagttcaacaaacatttatcaaatgccaggcattctgtgtcggtcaaagactgataatgtgagatccttgccctgaagtgaggaagagaaacagaagcagaatatttcaatatgaaacatggtaagtactgttctagaggtatatggacctggggtactggaagcacaaaggaggagcttcctgggtgaaatgactacctttgttctaacaacattatactactcagtttcttgagaatgctgtacatttccacaattgacactttcagctgtgaactctgccagaaatgctctgccaaccttgcacatccctggcagactcatattcatttttaagtacagcataagtccccaccgtccgtcacttcaccagtgcatctccctttctctattctcacagtgctttgcaagtctatgtcacagcagttatccttggattttaattagtacttatcgcaatagattttttctgcccgtctatttcttatggctgtggtcttgttacagggccaggcacacagaaatatctggcatttgttgaatgtttactatatgccagacttcaccttttttgtttgtttcttttttgagacagggtttcactctgtagcccaggctggagtgcagtggtgcagtcatggttcactgcagcctcaacctcctgggaccaagcaatcctcccacctcagcctctggagtagctgggactacaggcgcgcaccatcaaacctggattttttcttttttttttttttttttggcgagacagggtctcgccatgttgcccagcctcctctggaactcctgggctcaagcaatcctcccgcctcagcctcccaaaatgttgggattacaggcatgagccaccggtctggctggcctttattgtttgattcaattcttccaacaaccctatgaggctaataatcttatccccatttttcagagtgagggctgaggcctagtgtcttgcccaatgtcacaaatggcgaggtcaaaaatcgacagtctccagagtctgctctcttaaccacttaactattctgccttaataatttcagaaaaaaaataaatgaatgaacgaaataacaaaaaagtcgccctcttcccttactttaccgaaaggagcacgaagaacaggcacggagcccaaggaatgcccaagtccctccaggggtttcctcggtcacggtccgccggcgcaggcgccaatcacagggtcctgaggtcgcctgacgttcagggcagccggaagacggggaggtctggacctgaaccgagacaaggaggtaccacactattcactgctgcgtcgcagagcgggctgggcggctgtctggacctcgagaggcctgaggcaaggatcgcgtcagaccccgaaagctggtttgttgattagtgatctaagaccgccggaagcgcttcttctcaatcaagctatgcaacaggaagtcattacga

SEQ ID NO: 23127 - DNA, 2300 bp, Homo sapien
atctgattagatattccacatttcaggatatcttcacaaagtacaaaaaattcaagagaatatcctatattgaataacatcccatttatttgattgaatagagttccatcccctccaatgataatcacatagcacaaggtcagtacttaataaatataaaattttagaattgtaaaaataataattttatgcttaggacaagttttgaacaagagagtgcattaaaaataaatttttaaaaaatccaaagtgcctataagtcaatttctttacaacagtaaagtcagtgaatctctctgggttttggttacctcatgtgcaaattgtgtttgccctatctatctcaaggagccatgaaaagctgtatgatttaaaaaaacatttaagggtaccacttgtaatgaacttaaaatattaacctccggcagcaattttaatttcttacccattccccaggtgcaacccatctcatcatcttggctaccagcatttatcttcctttcagaggtatccatttcctcttcttcatctgagtcttctcctagcatcttcttctccaacaatatttgctgctgcttgcgcaattccttcaactgtgttactgttaactcggattctgcctctcggtcttcctctggtccctgatgaaccaaggaaaaaaaggttatttatttatttagagacagggtcttgctctgtcgcctaggctggactggagtgcagtggctgtaatacacctcactgcagccttgacctcctgggctcaggtgatcctcccacctcagcctcctgagcagctgggaccatgatgcctggctaatttttttttttttttttaagagacagggtcttgccatgttgcccagcctcctctcaaactcctgggctaaagcgatcctcccgcctgggcctcccaaagtgttgggattacaggcgcgagccaccgcgcctggccaaacaagttattttagagttcgggattgtgaacatgactttcagaaatatagcaatgtgtacagccgtctgaagatgataggccagacttgattccttcactttcgtaatcgctgagtgggagattcttcttcctcatccaaagcttaagaagcacaagaacgcagtccaatgaacccgaaatttcaattctaggtttttctacctacctgcaggataaagagccgggtgctgcctccaaagcgaacaacatgcccaacgtggactcgacagtaggtgcgaggtgggatgcgagttttgttgagaaaagtgccatgggtgcttcccagatcgtagaggtagaagcccggcccgttgctgtcgcattctccgtcagggccggacgccctgtgctgcagcactgcgtggtaccgagacaccgaagggtgctccaggcacacgtcgcagccagacagcctcccgaaaaggcagtaactcgtccctttcaagctacgggtgccaaggatagtgccgcccttcagggtctctaagctgtagggggctgtggcagggccaccccatggaggctcttggtaggggggagcccgggctggaccgccaggggaagaaaccgctgtcggggggcgcgactgctcctcctgtagactcctaaaatcaccgcagtccggctgaggaggagggatgtcgggctccccagaattggagtcctgcaacgcagtgggcccttccttctgtacctcctcagggtttgaagaactgctggccggggccttactccgcgccgctggggacaccggcagagctggcttcttgaagtccccactgaggtcttgcgacgccagggtctctgactgagagagaatgtcagccatcctcaaccggtgcaacttcgaaatccgctccttcgaaacccacccttcggtctttacgttcctgtccacgtcccactctcccaagctcccagtggcgtctgtaggcggcgatggtgaagttgctccttcacgacctggagcgttgcgaagtggtgctaacatgagaaggtcataatatgagaaaaacaaaacggttatcgggatgctgtgcagaacggggacatatttagaggttacaacgggatcgtaatgacttcctgttgcatagcttgattgagaagaagcgcttccggcggtcttagatcactaatcaacaaaccagctttcggggtctgacgcgatccttgcctcaggcctctcgaggtccagacagccgcccagcccgctctgcgacgcagcagtgaatagtgtggtacctccttgtctcggttcaggtccagacctccccgtcttccggctgccctgaacgtcagg

SEQ ID NO: 23128 - DNA, 2300 bp, Homo sapien
aaggaacatggggcaaaatatggtggaaacctggcacaggcttccaaggatgtcttccagtagagtcacacaggacatgcttaattcccctaagaacaagttgtggcaacacttgcgaaatgttgctaactaaggaagctcattagagactcagtgcccagggtttttattggcgactgatcacataggcattccctgcctggcatctaccaaaattcagacttccagaaggaaagcaggtgttcagcatgaatcatattgtttgtacaaacagtttaggcacaatgagccattcttgtcagttagggtagcagaaaccttcccaaagtctggattcccagatgccagccaagggcaaaccttgcaaataggttttcaatggatagcagtcagccttgctctgttaacttttctaaaccttggccaaaaggtaaatgccaaatttccctctatgggggctgtaccatttagcactcacacctgcagtgtgttaactgccccttttaaagagtgtcatgtaactcactggctgaaaatcagcttgtgatgctttatggaaaaaaggttcagagagagaatattcccccaagtaggttacttatgtcaagatcattaatagaaactgttctctgttagtttttgtttgctaacaggcataaggacaatagttcttagagttaaaattatacctatatatataatttttaaaaaatagcttttgggttacaaatggttctttggttacatagatgaatcatatagtgatgaaatctgagattttagtgcacctgtcacccaagtagtgtacattgtacccaatatgcaattttttattcctcatccccttcccagcctcctccctctgagtctccaaagtccatcataccactctgtatgcctttgcatacccatagcttagctcccacttataagtgagaacatatggtatttggttttccactcctaagttactttgcttaaaataatggcctctagctccaagttgctgcaaaaaaattttattttttatttttatttttatttttgagaccgagtcttgctctgtcacccaggctggagtgcagtggtgtgatcatggctcactgcaagcttcaatctcttgggctcaagtgatcctcccacctcagactcctgagtagctgggactacagttgtgtaccacaatgcccagctaatttttgtgggtttttttgtagaaataagtcttgttttgttgcccgggctggtctcaaactcctagcttcaaatgatcctgggatgctgacttttattgaatgctttttctgcatctattgagatgatcatatggtttttgtttttaattctgttgctgtgatgtatcatatttattgacttgcatatgttaaaccatcccagcatccctgggatgaaacccacttgatcatggtgtattgaatagggtgtattatttttctgatatgctgttggattcagtttactagtctttcattgaggatttttgcgtctgtgttcaccagggatattgggctctagttttctttttttttgttatgtcctttcctagtttttgtatcagggcgatattagcttcatagaatgagttagggaggattccttctttctcattcttttggaatactttcagtaagattggtaccaattcttccttgaatgtctggtagaatctgactgtgaatccttctggtcctgggcttttttttgttggtggtaatattttttaattactgactcaatctcactgctttttattggtttggtcaggatttctgtttcttcctgattcagtctaggagggttgtgtgtttccaggaatttatccatttctactagatgttctagtttgtgtgcatagaggtgttcatagtagtctcaaaggatcttttgtatttctgtggtgttgcttgtaatgtctccattttcctttctaattgaactaatatagaatcttcttttcttgtctaatctagctaatgatctatgaatttagtttatcttttcaaaaaccaccttttttttcattgatcttttgcagtttcttttgtttcaatttcatttagttctgctctgatctttgttatttcttttatgctagctttgggtttaatctgttctttttttttttttttttgagacagagtctcattctgttgcccagggagtgcagtggtgcgatctcagctcactgcaacctctgcctcccgggttcaagcaattttcctgcctcagctctcctgaatagctgggattacaggcgtgtgtcaccacgcccagctaat

SEQ ID NO: 23129 - DNA, 2300 bp, Homo sapien
atgaagagggggcttatcagagaaagacttctatattttactatatatacttctgtgttgttttcatctttcacaatgaacacctattacttttatagtttgccaaatgacaaagatatttccattttggagacaaacacagaaaccagcacaccaattttcgtttgcagtgaacatgctggttaagtgcatcagaatctcagctctaaaccttacatgaccctgagttttctgtcaaatgctgatgatatcaatgtcatagggttattatgtcacttaagtgaaataattcctggaaaatacttagcacaaagccttgcatttagtaagtattcatgaatattagctatattattattttattctgacatttcttttagtctgtggaggcctctactcccctactcacaatctcagccactatttcctactgcttatcccaataacaagtggcctttccaagcctgcgtgatgccacatcagccacacacctctccttatgattctgtttggcaagtcataagctgttagccccagggcaacacagaggcaggaggcaggagggaaggagtgcagcacatatgtgcgtgggcagggccctggagcacgaaccaatgcgatgaggacgcacagcactgggaaccggcaaaaatgagcgagacggttttcaggagagcaacagctggcaggggaaacacccagagaagtaaaaatatcagatttttaaaaactgaaaatctccaagcacctgtaatgcttcatgcttactttcagaaaaaaacaaaaacaaacaaacaacaaagacgaaactcactttttagaaagaaaagccgggtggaagagcactaagctgagaggcactggctggttaggggtaagagccgggacgctgcagttcgggtctgggtctggattctggcttttccacacgctggctctgtgaacactgccaagctgattcatcttttgtgtctcagttttgtcatctataatatggggataataacagtgcctagcttacggagctgtgaggcttgaaggagctaatatgcacatatacacgctctgtaagggccgccccttatcatttaagtacatgcctgtttgcccttgacggggctgtgtagcagagcgcccagctggacgaatctcccagccagttggggagcccctctgagggtcattcctgcggatgtggccgtcgggaggaccagcccgtttgcagaccaagcttttgcttcctctcatccctcctgaggaagaccctgggaaaggaatgctcttcctgcgggcccttcctcagacaccaggcaaacgggtgaaggtgcagaggtcggcggtgaggaggggcccctgcggtctgccagggtgaggctgacctccagggctgcagctgctcggggggcctttggccgggttgcccaggaaggcaatgagggctcccaggcagcttactgtgcggggccgaccccagcagaggagcagggcctggtcaggggctggaatgggagaaaacagaggggcccttggggaggaaagggccccaggagggaggcagtagggtaagtagggggctgtgaggaggcgggggcaggaggctgtaggggaggtaggagactaaaggcggggggaggggggctgaggagaaagagggcctacaaggagggggaaaggagaggtgggatgtggggaagaggaggaaggaggactgagggcagggggtggggacacggaaggggtgtaggaggaaagggggtgaaggtgagataaaggggaggggaggaagggaagggggcagggagggagcagagaggggtggaaggggcaggagcccaggtatgtggggcgtgggcagggggagggaggggggaggtgagggagtgtgggagaggagtggatccgggaggaccagcccaggtgtcgggggagcgggtcggggtggggggaggtgggggccgtaggggagggaaagagaggaagagggaaggggtgtggggaggggggagggggcggagggagggtgccctgctctcgcctcctcccgccccgggccgccccggcctctgggcccctctggccgggcgccacccacgcgcctccgatgcagcgtcaggcagccgctggggaggacgcggcgggagcctcagatgccacctactccccggcctctctcccagttgatgcttctattttaggcagcacattatttcctgctgtgattttttcagccttctaatttgggctctgaggtaagccgtgacatccgccgcgcgcccgcagccccctcccggcccggcggc

SEQ ID NO: 23130 - DNA, 2300 bp, Homo sapien
ttagccaggatggtctcaatttcctgacctcgtgattcacctgcctcggcctcccaaagtgctgggattacaggtgtgagccaccgcgcccggccagttgtgttattttttagtagagatggggtttcgccatgttggccaggctggtctcaaactcctgacctcaggtgatctaccctcgtcggcctcccaaaatactgggattgcaggagtgacccactgcacctggctcttttcaaaagcaagcttatacattctcctggatcctgaaactattgacaatacttaaagttagtttttttttttttgctatttaaacataaatattgacatttgtatggtgcctctcacctcagattcattcattcaatagatatttaatagatgtagcaggcattgttgtaggaaccagggatacagcagtgagggaataagctgaagttcttttttttaattaaaaaaatttttttagagacagggttttgctgttgcccagcattctggtagccaaagacaatagggaaatcaacaagtacacaagtaatactattaatggcaataagtgctgtaggaaaacataaagaagagtaaggagaatagagttgggggcaggggcatggagtttaagaactgctatttggctgggctaaagttaaagtgactttctaagggacagaacaaggactagaaatcatgttccttggcttccagtcttgtgttttcttataaatcctctaaaggaaatataagaaaccttatcctcttgaacatctgaagctcttttttgccaatgcaaggtaaggaaggatttcggcacctggaaggtactcagtagctggagtccggttatgggaagataaatatcaagaatgattagaaggaaaaaaagtattataggtactaaggagaaggacggtcttaatttaaaaaattgaattgtattgtatggagagctgatttttttcctcctcatcttctttgtgatggcacagagagctgaattttctttaaaacagttttattacttttttttttttttttttttgagacggagtctcactttgtcgcccaggctggagtgcagtggcgctatctcggctcactgcaacctccgcctcccgggttcagctaatttttgtatttttagtacaggcgggattccgcgacgttggccaggctggtctcaaactcgtgacctcaagtgatctgcctgcctcagcctcccaaagggctgggattacaggcgtgagccatgcgattaaatcttatttcacatctgtaagacttcatatgtagatacaaatcacggattaggaaaaaaatccaaaagtcctgattattagttgcgaaatgaggttactgacgaggtccttggtgttagaggagcccaggttccttacagagccatgaaaaattaatgattgcaaactggtaggtcccaatgtctactgggaaaggcatgagtctttggagtcagataaaatctaggtttaaattcttactctgccacctggtagttctgtgatattaggcacgtgatgtgaatgctctcaatctgttatttggcttctatgtcaggaactgtgctaggtgtttggatacagaagtttgagatgcaaagggtcctgccctcctagagattgggataactaaggaaaggtggggttcttaatgccgaagggactcagaagagtgagagtaaggcttaaccaggcggagagggagttgggtcgggggaggcaacattttaagaaaatatgcgaggggctgatacgctggagcggccgaagtacaatacacagttgttcttgtgggtctaatgcaggtggttgcgattatttcgtgaaacaaatatggaaagcacctaacgctgaaagcacttgacccagaaataggagtcagggccggggcgcgaaccctgagctgtaaatccctttccagaatgatgaggattccaacctccagcacgacaaaagcaaaacacactcgctctgagaaaccgaggaacgagccagacgactggaggcaggttccaggcggggggcgtggcctcgggcgactgccggatgtcctcttccagaaccgggccgtgccccggaagcagttgttgttggttgggggccttttggccggtgacggagactgcccaggtgtggtcaccatgttcctctccgcggtcttctgtaagtggggctggagacgccggtaggggttacggcgagggttagggggccgtgacaggcagggccccggaatgatgcggggaaggatgtgcgaacaggacgggaagctgcagctgc

SEQ ID NO: 23131 - DNA, 2300 bp, Homo sapien
ttagatgaaggtttattcctttatgtaactcaactttatgaatttttgatgaaactttttctaaagtgaaatacatgctctatttttatacaaaatttagtaagtaccatataaccttttcttgaaaagagtcatcaccagtaaaatcaattgctatattgtgttgtaaacacagtaatgttctttctacacagatgtctgcaaactatggcctgcaggatgttcttgtaaggcttgggaggtaagaatggtttttacatttaaaaaatgttgttaaaaaaaaatgtgaccttgaccacatacggcttgcaaagcctaaaatatttactatctggccctttacagaaaagtttacttactcttgctctagaaaaagatgtacaggcctcttcaacaaatgtctccaactagattcaattttatgctctgtcaccaaaggaaagtatttttatcttggcacagtgtctgacagaatagttctaatatttgtggaaaaataaaggtcattggtatttaaaattcttttgttgcttcttctcgttacacagtctcctactcatcctcaagttttcgtcagtcactataactgcctctagcagtctcttctctaactcccacctttctaatctcagtggaaatttggtaacacagcttataaatattttaaggtaaggttaaattggttacatgaagaccctagacctattttctgagtagaatacaggtggtttggtgcagcaatttggtgacttattttgattgtcccaaagcctttttgtttagttccacgttctctattaccctttggaaaagcaacatttcaggacgaatgaggtgttactgtagcatacctgatcatttttataacacaaagtagcattacaactgaaaagatattcatcaaaagactgaactgcagtaattggagtggtaggattttcttggaatatctgaatttattactaattttacagtgaacatacattacttttgtaatcagaaaagctaccttaatttaaaaaaaagaaaaatcagaaggatctgtctactcaatcttactgacctaactcaacaattttcatttggcatattttctatcataatttgatcatcgttttcagaggttgtaaatactgtgtttatgtttttattttgattcatacttggcttgctgaaaaatacgctgtaaatataaaatactgcagtaatgccgacaatcaacatggtgaaaggtgacagtctttttgatttctgctcaactcattattttatacaataagctcagacgaataatacccaatttggataatgttacgcttgacaaaacactttacttcatttagtcctcacaacaaccctgtgaggtaggcacattctcggaggtaaaatgacgtgggcaaagttccctggctcgtttggggaaaggctcagcagccgggccaagaaaggtctttgggggcgcaagtctttggagggcaggtctttggggagcgctttgagtaatattagagctttcactaaaccctggcctattacgtcccctcccctgagatttacctttatatactcaagttctttcatgccaggaaggtaggctgaaggcttcgaaaacctgcagctcatacccaaagctagcactgtctatccctggagacccagcgcccaaaagctccactgggcgcatagcgcacggcacgcctcctcccccgagccgcagactgagtaactggccccggactaacctgaccaggtcggtcatgcaggagcccaccactaccaccgccgccacctcctcttgccactgcctctggggttccccagacgccgccatcgctcaaaggtgctgctgtccaacctggacggtgacctctgccctttgcccgaccccgtaaccagagacgccactcctgccctccctaacgacgcgggcctttcagacgcctacgcgggtcgcccacctgactgcccgaaatcaccccgcccaccaagtgtcccctcttcttcctggaatagtctcggtgcacagcctcacgtaacagggccctcctgatatggcgagactccgcgctcctcgtcactcacggggcaggcgctgaggaaggaactgtcaggcaccgcggggacgcctttccgagcgcccggctcggcgcggcgcgggggcgcgcacgccgcccagcttcggggccgcagagggggcggggcgggacgtccggggagtgcgcacgcatcctgcccgcggcgcgcgcgcaggtcggtgcgtctgtcgggggcgcgctcgggtacctgtaccccacgtagtc

SEQ ID NO: 23132 - DNA, 2300 bp, Homo sapien
tgctaagtacaaatatacctatcttataaaaaagcaaaagggtctcacctatattaccgaattgttcttctgtgtttttccccacagtacccattattactttatctcttgcttctacaaaagaaggaaacagaaccaacacattctagacacctatctacccattatcaggcattatattactcatctctatctgtaatttcatttacatttccccaactctgttccctgagaacaataattgttcccatttgacaagtggaagctaaagaaacttgacaaatagaaaattaaagctcagcaaaataaaataacttgttgaatgttggaagctggaggatcagaatccaaatccggattctccaagtccactatacccatctttctctcaaataaacattgataacttctatcaccaaagagaaaagcatcaaggtgattttgtaaagcgtatatcttataaaatgtgaacagacaaaaagtaaaaatttaaacaaatgattgctttaccactaaaaacaaactggactattgctgacctactgctgaacctggtctgagtgattcactagtcaaatgttaaagggaacagccttgctctagaagccaaaccatactaagtgacaacaatacattctaattcagcaacggtcgtgactttaggatgacacctgagggaatgaattctatttccagggcagccataatactatgttttaacagtgcaaggtttcacgcagtattaaaatctatttcaaccatgaggaggtgtgacttctctaaaaaaaaagggcggggggtggggagtggaacacaatgactccaaaatcagaagtcacttagccaaaaacactggtcctttggtgcagtgaaccgggtacatggacagggagtcaccaccggtagtaactcttacgcatggcagcactataatacaccccagatatacaaatatttacggtggtcagagtcccctgaatactactactgcaatttgtatttcctgattttgacgtattgcaaaaggaaaatgcaaaattacaatttttgcaagggtctgctaccccaaaataaagttacaaaaggtcctttgatgagaggcctggggattacaaagacgtctaaagcaccatccaggttcttgcaattaaaatgagatgacaaacacggaaacatgtgccctgctgacgtcatggaacggaaaggggtggcatcctgctgcgtcacgtcgacgtcatacagcgcacgagggaagttacactggggaagcaatttcccccaaggggcaacattcgagaaaaacaagttagctcagacccgaagaatgaccaccccactctaggggacgtcttaaaaagggacactctcccctcttccaaactgtatgattcccctcatcaggcaacaaggaactaatactcggggtttacaggaaccaggggatgggccagatatggagaaagagacgcctctggccttgggggctcgttcttgagggaatcagcgtgatggggatgagaagggcatctttggaacgggggccttctccataggaagaggaggcgagtcccctggccatatttaaaccacagttctccacgccacctgtgcgactcgggatccaacctccccgcaccagccccagtccaggtacctggaacttagtccgatcggtaaccggcgactacgtggggtacaggtacccgagcgcgcccccgacagacgcaccgacctgcgcgcgcgccgcgggcaggatgcgtgcgcactccccggacgtcccgccccgccccctctgcggccccgaagctgggcggcgtgcgcgcccccgcgccgcgccgagccgggcgctcggaaaggcgtccccgcggtgcctgacagttccttcctcagcgcctgccccgtgagtgacgaggagcgcggagtctcgccatatcaggagggccctgttacgtgaggctgtgcaccgagactattccaggaagaagaggggacacttggtgggcggggtgatttcgggcagtcaggtgggcgacccgcgtaggcgtctgaaaggcccgcgtcgttagggagggcaggagtggcgtctctggttacggggtcgggcaaagggcagaggtcaccgtccaggttggacagcagcacctttgagcgatggcggcgtctggggaaccccagaggcagtggcaagaggaggtggcggcggtggtagtggtgggctcctgcatgaccgacctggtcaggttagtccggggccagttactcagtctgcggctcgggggaggaggcgtgccgtgcgctat

SEQ ID NO: 23133 - DNA, 2300 bp, Homo sapien
caaatgatcgtttccttcctcaattttaaagaataatgccacatcaaaagaaaattaatttccagcaagttaccagtaaatgatgctctggttctagttttcatacattataccacatgaaaacttacaagtccttgctaaaataaatgttgaaaattaaaacctgtttcagtttattatttcagatagtaagtaataaatttatttgctaatttgatagctcaaaaaataagaacactttgaccctatatagtgatgacaaccagaagtatcttcgagattaacacctttatattcatacttcagttctaaaatcatcctttttgtaaatataaaacaagctcttcttctgaccgcttaacagatgaccgccccccgactagtctctcatttcaaagtaagactaaacatctaacactgtactaccaatcataaaaatcatgtacttttttaaacattttatcacttacaaggagcgtccatatatattactgcagttgatcttcacaagcctgaggtagtaaggaattttaattcccagtttgcagataatatgggtaattattataatttgattctgaacagtatactaatccacatcataattttgaagcctatttttttctattcgccaacatttccaccttcatgtctatgtcacaattcttgaagggatgcttatcaaagtcatatgctaagtacaaatatacctatcttataaaaaagcaaaagggtctcacctatattaccgaattgttcttctgtgtttttccccacagtacccattattactttatctcttgcttctacaaaagaaggaaacagaaccaacacattctagacacctatctacccattatcaggcattatattactcatctctatctgtaatttcatttacatttccccaactctgttccctgagaacaataattgttcccatttgacaagtggaagctaaagaaacttgacaaatagaaaattaaagctcagcaaaataaaataacttgttgaatgttggaagctggaggatcagaatccaaatccggattctccaagtccactatacccatctttctctcaaataaacattgataacttctatcaccaaagagaaaagcatcaaggtgattttgtaaagcgtatatcttataaaatgtgaacagacaaaaagtaaaaatttaaacaaatgattgctttaccactaaaaacaaactggactattgctgacctactgctgaacctggtctgagtgattcactagtcaaatgttaaagggaacagccttgctctagaagccaaaccatactaagtgacaacaatacattctaattcagcaacggtcgtgactttaggatgacacctgagggaatgaattctatttccagggcagccataatactatgttttaacagtgcaaggtttcacgcagtattaaaatctatttcaaccatgaggaggtgtgacttctctaaaaaaaaagggcggggggtggggagtggaacacaatgactccaaaatcagaagtcacttagccaaaaacactggtcctttggtgcagtgaaccgggtacatggacagggagtcaccaccggtagtaactcttacgcatggcagcactataatacaccccagatatacaaatatttacggtggtcagagtcccctgaatactactactgcaatttgtatttcctgattttgacgtattgcaaaaggaaaatgcaaaattacaatttttgcaagggtctgctaccccaaaataaagttacaaaaggtcctttgatgagaggcctggggattacaaagacgtctaaagcaccatccaggttcttgcaattaaaatgagatgacaaacacggaaacatgtgccctgctgacgtcatggaacggaaaggggtggcatcctgctgcgtcacgtcgacgtcatacagcgcacgagggaagttacactggggaagcaatttcccccaaggggcaacattcgagaaaaacaagttagctcagacccgaagaatgaccaccccactctaggggacgtcttaaaaagggacactctcccctcttccaaactgtatgattcccctcatcaggcaacaaggaactaatactcggggtttacaggaaccaggggatgggccagatatggagaaagagacgcctctggccttgggggctcgttcttgagggaatcagcgtgatggggatgagaagggcatctttggaacgggggccttctccataggaagaggaggcgagtcccctggccatatttaaaccacagttctccacgccacctg

SEQ ID NO: 23134 - DNA, 2300 bp, Homo sapien
attcggtaatataggtgagacccttttgcttttttataagataggtatatttgtacttagcatatgactttgataagcatcccttcaagaattgtgacatagacatgaaggtggaaatgttggcgaatagaaaaaaataggcttcaaaattatgatgtggattagtatactgttcagaatcaaattataataattacccatattatctgcaaactgggaattaaaattccttactacctcaggcttgtgaagatcaactgcagtaatatatatggacgctccttgtaagtgataaaatgtttaaaaaagtacatgatttttatgattggtagtacagtgttagatgtttagtcttactttgaaatgagagactagtcggggggcggtcatctgttaagcggtcagaagaagagcttgttttatatttacaaaaaggatgattttagaactgaagtatgaatataaaggtgttaatctcgaagatacttctggttgtcatcactatatagggtcaaagtgttcttattttttgagctatcaaattagcaaataaatttattacttactatctgaaataataaactgaaacaggttttaattttcaacatttattttagcaaggacttgtaagttttcatgtggtataatgtatgaaaactagaaccagagcatcatttactggtaacttgctggaaattaattttcttttgatgtggcattattctttaaaattgaggaaggaaacgatcatttgaatcgactttttcctctgaaggaagaggctttcatttagaaatctattaagaagaattcgtgtactccctcccccagccctatgagtttccagataatttagatatgatgtattggttctacttttgtggttttaagtgtaaggacttagtgccttaaagtcaaataccttaagatccatgttagtctgtgttgcttgatagctgcatagatgtatgttttcataatttaattgtcaagtagatttttgttatatctcttccttggatcttgttatatctattcccctaccaaattctggggagggggcacattatcttctctccatactgaaatatttctctaacttttgtccccttactcatttatttattaaaaaatgtttattgagtgtttagcatgtgccaggtatttctgttaaaccctggggattcaaaacatagaccctgcagggaagagatcacgtaagcaggtagttatactacactgtggacggaaaggtattaagaaaggtgtatcagcagtaggccgggtgcggtggctcacgcctgtaatcccagcactttgggaggccatggtgggtggatcatgacgtcaagagattgagaccatcctggccaacctgatgaaaccccgtctctactaaaaatacaaaaattagctgggcgtggtggcatgtgcctgtagtcccagctactcggaaggctgaggcaggagaatcacttgaacccgggaggtggagtttgcagtgagccgagattgcgccactgcactccagcctggcaacagagtgagactctgtcgcaaaaaaaaaagaaaaaaaaagaaagatatatcagcagtaaataatttctagtaagtaatagcttcaagcaggtcagcctgttgtagagttttatacggtattatccatcaagtttttactccttgtggggacacacagggagagattgctaactcagtgatgtgtgtgtttttgtgttgggatagaggattgttagcgagggctccttggactcagctaaggtagaacgagtgagatagagtgggaccactttgagtagagtgtggcagtgtagaaatcagctttgggaaggaaaagggaattgtatttcaggagttccttctgttcctgaaaagcagtgatgtagtcccagtcctgagtagctgagcagcagtgaggtggtttcttctggaggatcattggaagaggctgcgctagagatgggaaatgaattatttattcatgcaagaggaactgctgtatgctgtccagttttcaggcagagtgttgtatctagtccatttgtaagccctgatcattattctttccttctgctttcagtggtgatttacaagtcaagttaaaatgtccccagaagtggccttgaaccgaatatctccaatgctctcccctttcatatctagcgtggtccggaatggaaaagtgggactggatgctacaaactgtttgaggataactgacttaaaatctgggtatgtaccagaatgaattcagtcaatgtaccagaaccaattcaaccttt

SEQ ID NO: 23135 - DNA, 2300 bp, Homo sapien
tgttttatggttaaagatacacttcatcatatgacctagcaatccagtcttaaacatttatctagaaatgataaatgtacattcacgcaaaacatgtacatatatgtttgtagcagcatcattcataatcatcacaaactggaaatcacctacatgtctttcattgggtagatggatatacaaactatggtacatctgtacaatggaatatactagtaggctataaaaaaggagcaagctattgatacatgcagcaatttgagtctcaaatgccttatgctaagtgaaagaagaagctggtctcaaaaggttacatactgcatgattccatttatatggcattctggaaaaatgcaaaactgaaggggccaagagcaggtcagaggtttccaggaataaggaatggtcggaatatttaaatacacagggatagcatgaagacatattggagagtgatagaattgttctgtatcctaattttggtgatgtttacacaaatctctgcatgttatacaactcttataggtgtacagaaaaagatgaattttactgtgtataaagttaaaaaatagtttataatttttatgtcaccttttttctttttactgtttgaatgtggctactggtaagtttaaaattatgtatgtggcttgcattattatttctattacatagcactgcttcagatattagaagtgcaaagaaggattaggtgtggtccgaagtctaggagagggatatggcagaaggaagtcttctaagaagaggaggcaaatttaaatgacctaagtttagcctctgccccctacttccatcctttgttctacagattttgtttgagagcctaattcatgtaaatatgccaactctcagatgtagtaattccttagagtctttttccttgatattggaaattaaactctaccactcaagatgaaaagaatgctgtgcaatggaataattagtggcatccttgcatttgtaggcacaacagcctacattgctgaggcagttgacaagttccttgacaaacttgtgatgaatgtttaagttcatattattattggttagacattattgtttaaattattgcacccaagattgtttattgtttataaattgtcataaagggaggtttccagaaggatgcctagccagtatgtttataatttgaagttaggagtgccaacccaaaattggagtagaatctaagaatatcatgatggactttaaataggtaaatctagcgatactgaaatataatacagataaatttaaaatttcaaaatggattctaaaatttagttgtcccagttaagaagagggatatgtagcttagcagtggtaaatacataaaaatgttagggcttttagttaataagaagcataataggagtcactactgatgaggctgccaaaaaagctattttaacttacaatgccatttatcaatagaagtttaatacataaattaaggcatggatttttgtatttgtttctgtgctctttagaacacacctagaatcttatcttgagatctgggtgttatcctctaagagagctatagacaaactggtacatattcagagaggagagagccaaatgatgaaggaaattgaaacaagtcagatgaggaatagtgaaggagactgggatagtaagcctgtctaagaggtgactcctagtggggttgaaagataggtcacgagaactgccttcaaataattgaagggctgtgatattacagataaattaaacttgtcccataaagttctcagaaccagcaaatggaattttcagagagatattaaatttcagtgtaaggacacactaagggttagagctaactcttggaaatgagtcacctcttcaaagtttttcgtaaagctctgaaatggtttggatatgtgtcacctccaaatatcatgttgaaatgtgacctccagtgttggaggtgagcctagtgggaagtgtttgggtcatgggggtggatccctcatgaatggtgtggtgctgtccttgtgataatgaaagagttcttgctctgacttcatgtgagatctggttgtttaaaagagcgtggcacctcctcttgctctcactgccactctcatcttgtgatgtgcctgctctcccttcacctcctgccatgattgtaagcttgctgaggtctttgccagaagcagatgctggcaccatgcttcctgtacagcctgcagaactgtgagccaattaaacctctttttataaattatccagtcctcggttagttctttatagtgatgcaaaaatggacggac

SEQ ID NO: 23136 - DNA, 2300 bp, Homo sapien
cacagatttattgtgacgataaaaagagatggcatgcctagcagtgtccagcatatagtaagttctcaacatgtgataatggaagtattacttttgttttgaaacataagacaaatttacaaagtctcattagcaaatttagattgcaagttcttctacctgtttcttttctgaattcttctgtagctcccttttttcctctgctcatcccaagaatcagctcttatcattatgctaatactaacaagtagattagtttatcgacaatctaacacacatattgagttgtaatgtataaaaatatgtatacttgtgtacatgtataccacctctgtacacatacatacataacagctttatcaatccaatcatttttactgctcaaacagtatctataaaattttatccaaatgtaaacatttaaacttcagttctcatttgagtccttaaatatctatgtactaggcatttcaatgtcaaactcagcaagactaaaacatgatgatgactctcccttttctcactcctctcgttccctgattccatgctaaaacttcagtgtcatcttcaacctttcatacaccctgtatactcttagaaaataagtcatctcaatttttcctccaaaatgtcactcatatggatttttcctactgttaacagccccttccaggcccagatcacctagtccatacattcactcatccaccgaataaatatttgaactttgccatagccactatgataggcattaaagatcaaacaaaaaaaaaaccctgctattaaaagctgacagactaaagaaactcaatcattatcataccttttaaaatgatctcctaatactagctgccctccagtccataatacatattatcaccaagtaaatattcttaatgtgctattttgtcccaaaacttcctaactcaagaaacttaaatgagtctctaatatcaaatggagtaaaagcaaacttttcaaactgatatccacccttctctttatctacaagcctgtcttttcttccagtcaatatgatctgctcaatgccctccaaatactatgacatcaaatactatatctctctccttgctcagttcttaccatcctttatgagcccactaaattgtctcttgtatgaagcctaccctaataaatccagaacacacagatcattgttacttctgaaattaaaatcctgactaattacgccattcactttagtatttagttgtaagtagtcttatattgttttattgctctattaattttaaaaaatcataataaacacaagctacctgtgagatactgtgacacgctgtgtcaatacaaagatatttattctcaaggagctcatgtttagtgagggatataagacatagacccagagccacaaatacacagcggtacaaggtgagtacatataattgatcttcctaattaaattgtaagcatccacagaacagacatgtttttatacttatttaatgtttctgacaggggaaagtacagcacaaatagaatatattcaataaacactcaataaattaaagaaattctattctctgaactgaacgtctaagtgctgaaaaaaatcttcagtgaagaataaggcatagcaacaaacatatgaaaaaatgctcaacatcacccattatcagggaaatgcaaatcaaaaccacaatacgattaccaccttactcatgcaagaatggccataatcaaaaaaatattaataatagatgttggcgcagatgtggtgaaaggggacacttttacactgctggtgggaatgtaaacttgtacaaccactatggaaaacagtgtggagattccttaaagaactaaaagtagaaataccatttgatccacaatcccaccactgggtatctacctggaggaaaaggagtcattatacaaaaaagatacttgcacacgcatgcttatagcagcacaattcacaattgcaaaactatggaaccagcccaaatgcccatcagtcaacaagcggataaagaaatcgtagctacacacacacacacacacacacacacacacacacacacacatcatggaatactactaagccataaaaagaaacaaaataatggcatttgcagcaacctggatggaattggagacgattattctaagtgaagtaactcaggaatggaaaaccaaacattgtatgctctcacacataagtgggagctaagctttgaagatgcaaaggcgtaagaatgacttaatggactttggggactcgagggaaagggtgggaggaggtgagggataaaaga

SEQ ID NO: 23137 - DNA, 2300 bp, Homo sapien
tgagtagctgggattacaggcgtgcgccactatgccctgtctagtttttgtatttttagtagagacagggtttcaccatgttggccaggctggtctcaaacttctgacgtcaagtgatctgcccatcttggcctcccaaagtgctgggattacaggcatgagccaccatgcctggccgaggttttgtttctaataaatcagtaatgctttcggtagtttaatctgtcatctcaaccagaagtcttcatcacaatatcttgttaactgaaaatagtccactacaaaacagaatttgtaccataaatctctaaattttgtttatgtgaacacatagacacacacaggaaagaagtctggcttacatagatgtcatagattatggtgatattttccctctatttgtattttcttatttttttttaacaattctacagtaaaaagtgtttaagaatactcagaaaacaagtgtgtatctataattaatcactagtacttacaatattctctttttagtttgttttctttcagcttgttctcatccagatgtttagaatcctaaatgactgttttctcctgacatttgccattggggtacataaggtggtgactgccatagttctttacaactccagtgattctcttaaaacttgctcttaggatcccttgcctaaccctagggcttaaaggtgactgctctggagctacaggtgtggacgaagatggcccttgggcttctgcaattattctgttctcccaggtgaggagacttttgtaggacagggtggttatttaggaaattctgagctgctctaagccagtgttgcccaaccgtgaccatacctggggagctttaaaaactcccaatctaggctgcaccccagaccaattaaatcagaatctctgggagggggacaaaggcatctatagtttttaaagctctccagggtgatttcaatgtattgctgaggttgtgagctgctgctttaaaggaaacaagtatgtttattcctaatccatttggatcttgagggccaatctggaaaagcaatctctatacccactgtcatctcgatacatatcttgtggggattctgtagccactagcaggccatgttcatctgtgtgtgtgtacctgccttgatgtgacaaatcataagcactaagaggagaggcagcctcttttattcaccattgtatcctaagtctctaaatcagtgcctggcctagtaacttaccaaaagatattgtaaaagtagtgcatttagggttttttttttcctttttattgaaaagggacaaagacaagtggtcaaaacgtcatttcataatacttaatttttacgaactctcctggccccaagtgtctgtgattcagtgaggaaagagctctccttcattcctttgacatgaatatattgactacccattgtttacataaggctgggatggctgtgatcaaaccaacatccacagacatggtacctagagaaataaagcgcggaaagccaaacctatggaagaataacaaatattgcaattcaaaagtgaaaatcactgtagactagcttcatttttccatttaacaactatgtcttggccacctctttctctgctagcactagtctaaatgctggaggtcttgagggcagtttgctaagtgattttaaaatacaactttagcacctgattttctttcttttcttcacagtcagattttgggccagaacctaagtgatagatttctaggcattgtaatagataatgaaatgcattattacttttgaagttatgataacctgacaagaaaaaaatggatatttttattatctacatcttacagatgaggaaacactttgtgcactttaagtaacttgcccaggctcataaaccagtgttgttagctcagctacttcaataaaggtcctctgatttcaaatcttatgagtaagaagacttaatattccactagttacataatggcagaatggttctgattttgtattcagtgcagtaaagttaaatatgctgttaaaaaatttagtgtccacaaattaccttcaatgcgattaatgtttgttttgaaattacctaccagttatcattgttaaactctgtggtattttttttctttgtgtgtgttttatgagttagcattattttatagaaagatttagggatttattatttatattatttatattactattatttagattattctgacagtcttctgtgtcctcagacaagttagcagagcacagatataatacattagtcagaatttttccatttccgtgttc

SEQ ID NO: 23138 - DNA, 2300 bp, Homo sapien
ctcagacctaatttagcctcactgtacatttcaggcaactgaggcccagccacattcagacttgcctgagaacaccaagcctgaaggcagagttgggactagaacaacttgcccatgcttccaatttccaaggagaaagggcaccaaggaacaaagaagaaagacgggtgaatcctacaattgttcaccagggactggggcatttagatacatgtcataggttaccatttcatctccccacctggcaactccagagcccctgctcacctaggaagatttgtgaaatcctatgtatgtactcagaggccacaactgttagcaagctagaactgttcaggaacttacatgattatctgaaaaatatgagaaaagggcgagcactcatgcagatgtgcaagagaaaggaaagaaaagaaaggaaagaaagaaagaggaagggagggagggagggaaaggggaaatgaaggagaaaaggagggaaggaagaaaggaaaaaaacaaattgtaggaaaggtacaataaaggaagaatttgcctagaggcagtgcctcagggcaccccttctggaggtgggaaagactgggtcagcaggcagtcccatcaggctgggttctgattctaagttgtgcaaactagggttagaatctttctgcaaataaacaacaatacaaaatttaaaggtctcaaaaccactgtcctacagagcttacaaattaaactcaataatctagctttcttttttcttttatagcaatatccagttaggaaacatttcataaatataaacagcctgatacagacacaacatcttgagctgggatccctctgtcccactccaggtcactctgactgcagccaggctgtcctgcacctgcattaaccctagaaagcagtaccaggagctaacgacctgcctgaaagtatcttcctaacactgctcagtgaaatctgctgcaggtgatcaaccccattctcaaaagtgtgtgcgcatgtgtacacacacacacacacacacacacacacacacacacagcctttaacaccctcctccctcacaatttttgatgaaatgcttaggaaatatgtattctctctttgtatgtatgtattctctctcttttttctatttgtgaaggacagaaacaaaatgaaacaaaaataaaaacaacaaaaaaattgagggtcctaagttacagagaagcacaccagtaattaacagtgaactagacatacctgtattttaaaaaaagaagtgagattagatctgattaacaggctatccaatcaaacttaaaatcctttggaggtatccagaaataaccatcaaaatgttcacaaaaatatttattttaatcatattctctgatttagccttattttttttcccctcaagtaccaatgttcaaaatgtttatctgtgaaaatcaagttaaatattttttgagcacctgctatgacaaggtactggattgatgctattccttgctcaagttggatgctttatttttatttattttttgagacagggtcttgctgtcatccaggctggtgtgcagtggtgcaatcaagaatccctgggctcaggtgattttcccacctcagcctcccgagtagctgggactataggtgcacgccatcactcctagctaatgttgttgttgttgttgctgctgctgtttttcccagaagcatcatcctaggattttttttttttttttaaactagagacgaggtcttgctatgttgcccaggctggtcttgaactcctgagctcaagcaattctcccaccttggcctcccaaagtgctgggattacaggtgtgagccactgcacctggcctcaagtttgttgctttaaataatttttgtagttttatgtgacttctaatagagcagcagttttgttttctaagatatttcatccttaagtattcagggaagatactagtgtagtggttaagtcctcagacttggagtctgaacgactggcttcaattcctattctgtcacttggcaacatagtaacagtacctacctcacagggagactgtgatgattaaatgaaataatgcatgtaaataactgaatactgtgcttggcacacagccagcactcaaagaatgtcagatgctattctttccctctcctccttcataatagcagcagcaatagtagggggagtagttgttgtaatggtactaaacactggcaaggacttgtaagagtagtggcaaataatgttgtaagagtagtaaacactggcaaaatcacacagcgttcgtagttaggtaggactgggg

SEQ ID NO: 23139 - DNA, 2300 bp, Homo sapien
ctttgtaattctgagttgtactcagtcttctgagtagttaatgccatagatagcctcattgtcagaatggaatctcaaggagtgacagaccattccagaaatcaatcagtaggctttgagttggggctcttcaaaatacgtgtgtgtggtagtctccagtgctttgtacatactctgtatataatgagctggatggtacctgcttcccatttttgctcacctctgtaaatcctctactttaataaggcatgaatctagttcattttcacaggtggcccttgtgctgaatgatctgacaaaagacaagacagaatcttgtttctgcagaagcaaggcctctgcttgtcattatgatatgcacacaatggacaatcctgatggttctttgatgcttcccttttttctagaattcatgccttaatgagaagtgatagaaacaagcggcttggccctcctgccttggctggactccacatcactcatgacagccctgagcagccctggcggcacctgtcataaactaacacacacatctgaacagtcaagcctaattcctaagaagctgttttaacttgacatctgaaaatgtattgcatctagaattattttattgggtgtgtgttcagggcatatgtgtgcacgttctgcaactgaagtgttctataaatatcagatacgagctgtacaaaaaggcatcacgtacacggtgtacttaattccatttagtaatgttttcaatttgtgtctgacctccggcaacagagatggaagtttctcaacatgaataaaaaagtatgctcagctaccttaaacaattttcacttaaaattccagaaatatattagagcttagtgattaccaggtgggtactagcccagtactttcagaggaaggtactgaagtccagaaaggtgacgtgtcttttccatgatcacgaaggaaattaataatggtccctagatgagacccaggtcacttgactcccaggccactatcctttgctttttcttgacttactgtacgtttcttcccccagctgttcaaaaggaactctgattccattaatagcatatgttcctactatggtttatcataaaaatcccaaaccagctcctctaccctttcctttctaactctataggacacctgtctatttttccaggaaagagaatacgtgaccctaactcacaagcaaggaagttgctctccttggtgatcccaaacacttccccagtggctggcggggtaattggaacccaagcttgaacactcgattgttctttttttttttttttttttgagacagggtctcattctgtcgcctaggctggagtgcagtggcgcgatctcggctcactgcaagctccgcctcccgggttcacgccattctcctgcctcagcctcccaagtacctgggactacaggtgcccaccaccacactcggctaattttttgtatttttagtagaggcagggtttcaccatgttagccaggatggtcttgatctcctgaccttgtgatccgcctgcctcggcctcccaaagtgctgggattacaggcgtgagccaccgcgcccagcccactcaattgttcttgaaagggcacacctgagttaattttcctgacaaagatgtgctgaccttccagttactctttttttctttatttttatttttgagacggggtcttgctctgtcaccctggcaggagtgcagtggcacgatcttggctcactgcaacctctgcctccccggttcaagtgatcctcctgcctcagtctcctaagtagctgggattacagacgcccgccatcatgcctggctaatttttgtatttttagtagagacagggtttcaccatgtttcccaggttggtcttgaattcctgacctcaggtgatccacctgcctcggcctcccaaagtgctgggattacaggtgtgagccaccacgcccagcccagttactctttctgtgtgactatcctgataagctgagttcagtgcagcttcttctggcttgtgtgactgaggccagaacaaaagccctaactgttttccactgagaaagcaggataaacagggggtgcagtctttaaaactgctctcagagaagcttccagtggaaccaaaggaatacagatggagggcctggggagagatggcctgaggggacctgcagaagggatttacctgctgcccctcccccaggggagccaggagactgagctgggctgtaaacactccgtgcctggtgcagcctggtctgcacaggctgagaggatggtgagtggcttcctctg

SEQ ID NO: 23140 - DNA, 2300 bp, Homo sapien
tgccccagcacttccaagaaccacatgggcccgtgagagggaggtcaaggtcatcccttttgtctcttgttatcatagtcataattctgctgaaaagctacacgatgcagatcccaagatgagagtgaacagcaccagtcaatacctgtagacacacagagctaccagagggagggccatctagggggttttgtagaacaaatgtaggtgcaatgggggttggcagtaagtagccctcgaaattcattactgagctgttggcagctctaggaaaagtttaatggaggagactaaaatacagccacaatgaggtttgggatgggagagaacacgaaatcaaaaaattttagaaattatttatcttgctcccttactgcatagatgagaaaacagagcagtgattcaccacgatatagcagagccagggacagaacccaaggctcccgactcagtggacagtacacttgccactggaaatcatggtggcatggaaagaatgtgccctttggagtcaagcagctctggattcataactagcattgccacctattagctgtgtgatcttagaaaagttactttgggccaggcatggtggctcacacctataatttcagaactttgggaggctgaggcaggaggatcacttgagctcaggagtttgagaccagcctgggcaacatagtgagacccgtaacatagcaagaccccatctctacaaaaaaaaaaaaaattaattagctgggcgtggtagtgcactcctgtagtcctagctactcgggaggctgaggcaggaggatcacttgagccttggaggtcgaggctgcagtgagccaagattgcaccaccacactccagcctgggtgacagagtgcagacagagagagaccttgtctcaagaaagaaaagaaaagaaaacttactttccatctctgatcgtagatttatttttggcaaaaatagaatcacctgcctggtagtaagcctgttagaaggagtaaatataaaataatacacatgaaaataagtagcatgatatctggcatgtagtaggcacctccctttccttatactcatggcttccagacttttttttttaaccacaatctacaagatattttacatttgaatccagtatatataactaaaacaaaagtgccacatacagtgcactctgattttatttcactttattttaatgctgctcagaacccactaaatggattttgtgatccactgtttgaacaagccttctttacaccatgtgtggatatcattcatccacgttgcatatatgcccttcctttccttccctccctccctttctgtaacggaagcctggggccgcagggctacctgctgtcagcatgtgcagggcccgagctggtgcagtgtggagtgatccctgcagcccagcagagcagatgcatctcctcctcctgtgcttgcccccagcctctctactgcatgattacagaagacttgtaaggccccctcctgccagacgttctgtcatctgccagcctgcatggaacttccccacaccctaccccagcagagcccacctgaagttcctgttgtgagaattactcttgttaccaaaggccattgtctccagaaggccactgtaccccagcagggagagtggagcttggacaccctctcccattgagtagtttcttctttgggaattgctgcttttctgtctgaaagcccagagagccaggtgtctgcggtgtgatttcagctgtcagggggataagggtgaagagaggagggaccatggccatcttgctgcccctcccccacatcctcaaacacccagccaggggggtgaatgtcccagagtgttgggtgaccaaaagctgtgtccaaaagccagcatgcaggggcctgagcacctgtggaagccatgagctctggcctctggatgctgagatctggtggaagaaagtgaacttacaaccaggcaaataacacttcaaagccctagagagactcaggggaggggaaggttagaggcctcaaggagttgatctcctaagtgttcctgaggccctcctttgggagtcctgcactttgctgtggaggctgatgcctgaccatgctgcgcacaaacctcggagcactgttccagctggggtgtgacttggggcctggacccacattccaggttcagctctgctgggtccctgggcacttcctctttcagggtcaccctttggtttttcccctttcgatgactaaaaagtggagggtaatctgtgagcttggtggtgactcaccaccatccgacaggcggc

SEQ ID NO: 23141 - DNA, 2300 bp, Homo sapien
caggcagggcgctttggccgcgcctccctttgcagcccccaagacttggctagggcggcctgaggcccgcgtggcgcggggaggggctgagaaccgagtgggaaaatgtcacgatttcttctgtgcccctcccgtccctacccccacccccagttttctgagttttgctgctgccgctggggaaggactgattcgttttgcgtcaaaggactgcatttactcagtcctgctgggagaggcgcgtaaacacccaggcaagccaggacgcagggatggggagggggaagaaaaaagcaaagcacccacggccggcgcgcgcgtccgcctgccccacacccctctcctgggcctgcggagttggggactctgtccagcgggcagcagcggaggtgcgaggagtctggctggcctcgcctcgtcgcgcacgcgcgcgcgtccttggggatagcgttcaggacagaatgtgttttatagctgtaaacaatgaccccgagtattgtttgggattaccgtatcttggggcccttggggcggccagatgccgccagccgtcccggaaatgccagcgctttatatagagccccaggaaagcttcgcgttcccggctctatttttctctgctaccaacacccccactttgcagataaggaaactgaggacagaagttgtgtgacggtgcacagcgagttgtcagcaatggactctcaacacctcttaacattgggtcctcataaggaccctgtggggtacagatggctggcgctacttaagaattgggtaaactgaggctaacacagaccctggaccaaaacctaagttccctgacttccgctacagtacttctccattcacacacaccatcatctcagcggaaggattggagctccagagcagagaagggcctaaggtcatgtctccaaactccttcactttataggaggaaactgaggcccagagaggttaaggaattcgtccaagatctcacagctcgtaaatagcgtagccgggcgttcctgctctaaggtctgtgctctgtaccctgcgccgcgcccctcccagccccgcccagcgagggaggaggacccaaatgtccggcaacccgcgccctgaacttcgctccaaaacagctgaagacgacaacgttggggcacaccctctcgctggctttttttttttttttttaattcgtaacagtctggagtttgcttataaacgcccgattactcttattagatgcgtcctaattgcccggcgtatagggcggccggaatgtcttgactggttaatttcatcttcaaggctactcctaacgaattaactgtaggaccgaaaacatgaaaaacaaaaaacaaaaagggaaccggtaggcagaccgccacggagggaaaaataggcaggccagccccgcccggcgccgtgccccgccaacacccggccgcagggcggcgcgggcaccctgcgcgcccggggcgcccgctgcactcggcggcgccgcggagggcgcctacgaccgcgcgcagccgcgccctccctgcgagcggctctgcgcgcccggctcccggcctcccggtggcgccgcaccgaaccgcccgtctcgccgtcagggctgtgattattttctaaaatccggaggcgagacccgcgcggccgctctcggggccccgccccgagccccttcccagggcgggggagaggccgcagcgcactcgggagcgggcgagggaatccctctccctccacgtcacccgaaagcgaggaaacccgcactcgcgtcctctaacgcaaatgaccatctttggcaacgtgcgccaatggaacagaccaagggcgctgggcccggggggtgagcgggggactggggagggccggggctgcctcggcgcctccgaaccgtgcgtggcgcccgctcccgcccgtgccaccgcctggcttcctcgcgcggggtgcgcggttggcgtcagcgcggccgggagccggggctgggaggggagagctgcgcccgcctcctcccctcccgcgcctcttcctcctccgcggcctcctccccccgcctcctcgtgcgctcctccctgcaaggtggagtctggggttgacgtgagtgaatccacatggtacagggctggagaataaagagtgtgagttgaactcgtgccattgtagtgactcatctcgggcagagcgctagggctccgagcgaaccagcgagcgagcgaacgagcggcgctcggcggggacagaaagagggagagagagagagagagagagggagaggcgcggccgggcgaggcgggcccgtccgg

SEQ ID NO: 23142 - DNA, 2300 bp, Homo sapien
gttgtcagcaatggactctcaacacctcttaacattgggtcctcataaggaccctgtggggtacagatggctggcgctacttaagaattgggtaaactgaggctaacacagaccctggaccaaaacctaagttccctgacttccgctacagtacttctccattcacacacaccatcatctcagcggaaggattggagctccagagcagagaagggcctaaggtcatgtctccaaactccttcactttataggaggaaactgaggcccagagaggttaaggaattcgtccaagatctcacagctcgtaaatagcgtagccgggcgttcctgctctaaggtctgtgctctgtaccctgcgccgcgcccctcccagccccgcccagcgagggaggaggacccaaatgtccggcaacccgcgccctgaacttcgctccaaaacagctgaagacgacaacgttggggcacaccctctcgctggctttttttttttttttttaattcgtaacagtctggagtttgcttataaacgcccgattactcttattagatgcgtcctaattgcccggcgtatagggcggccggaatgtcttgactggttaatttcatcttcaaggctactcctaacgaattaactgtaggaccgaaaacatgaaaaacaaaaaacaaaaagggaaccggtaggcagaccgccacggagggaaaaataggcaggccagccccgcccggcgccgtgccccgccaacacccggccgcagggcggcgcgggcaccctgcgcgcccggggcgcccgctgcactcggcggcgccgcggagggcgcctacgaccgcgcgcagccgcgccctccctgcgagcggctctgcgcgcccggctcccggcctcccggtggcgccgcaccgaaccgcccgtctcgccgtcagggctgtgattattttctaaaatccggaggcgagacccgcgcggccgctctcggggccccgccccgagccccttcccagggcgggggagaggccgcagcgcactcgggagcgggcgagggaatccctctccctccacgtcacccgaaagcgaggaaacccgcactcgcgtcctctaacgcaaatgaccatctttggcaacgtgcgccaatggaacagaccaagggcgctgggcccggggggtgagcgggggactggggagggccggggctgcctcggcgcctccgaaccgtgcgtggcgcccgctcccgcccgtgccaccgcctggcttcctcgcgcggggtgcgcggttggcgtcagcgcggccgggagccggggctgggaggggagagctgcgcccgcctcctcccctcccgcgcctcttcctcctccgcggcctcctccccccgcctcctcgtgcgctcctccctgcaaggtggagtctggggttgacgtgagtgaatccacatggtacagggctggagaataaagagtgtgagttgaactcgtgccattgtagtgactcatctcgggcagagcgctagggctccgagcgaaccagcgagcgagcgaacgagcggcgctcggcggggacagaaagagggagagagagagagagagagagggagaggcgcggccgggcgaggcgggcccgtccgggagcgggctccggggaaggggtgcgggtctgggcgccggagcggggagcggggccgcgtccctctcagcgccagctctacttgagccccacgagccgctgtccccctggcgcgctcggggccgcgggacgggcgcacgccgccttctcctagtcaagtatccgagccgccccgaaactcgggcggcgagtcggccacgggaagtttattctccggctccttttctaaaaggaagaaacagaagtttctcccagcggacagcttttctttccgcctttttggccctgtctgaaatcgggggtccccagggctggcaggccaggctcgctgggctcctaatcttttttttaatttccaatttttgattgggccgtgggtccccgctgagctccggctgcgcgcgggggcgggagggcgcgcgcaggggagggaccgagagacgcgccgactttttagagggagggatcgggtggacaactggtcccgcggcgctcgcagagccggaaagaagtgctgtaagggacgctcgggggacgctgttcctgaggtgtcgccgcctccctgtcctcgccctccgcggtgggggagaaacccaggagcgaagcccagagcccgcggcgcggccggcggacgaacgagcgcgcagcagccggtgcgcggccgcggcgagggcgggggaagaaaaac

SEQ ID NO: 23143 - DNA, 2300 bp, Homo sapien
gaggaagaagagtgctagtctggtattccttaactccaaaaaggaaatactgcccttgatttattttcacaagttatctgagaaacaaatagcagccttggaaaagttctaggtcttgtttttgttttgttttttcattaaaagggggcccagctgatgaaaacaagttatgaaatgacctatgtttgtgtaactggctggattgcgtaatgctcaggccctgaaaccgtaatagtcaagcagccaggcagggcatatatctgggagatgttttcctaggaaagttaggagagaaaaaacaacagcaaaaagaaaaatccaagaaggggaggtgtgtgcaacggttactgacaaaacaaaatcaccaatgaccaacctttgagattaaaactataactggaacaggaaatatttttcatgcctcaagttcctgccatatataagaacagaggctgtaacaaagactagtctgctccccccacccccaaagtcactggagctcatggccatgtattaagatccagcttcatgaagctagagaggacgggaaagctctgggttgaagaactggcaacaaactaatcaggaatattggacccccaaaagagagagctgaaaaaaataaaattcacttccccagagaaaaaccagagaactgtctcatatggatcggtccactgagatgccataaaagagaaaggcccatccactaattgccaggaaagtcttccagtacaggaagcggagagaaataaagtgattacaggttttatctggtatgtagtaaagttaccttgagcccaagatcgggcaaggtcatagcatagacttgtgaaggaacaaaagcctctgaggtcagtccttaggaccacagaacaattttgttcacacttggagcaatgacagaaaaatccaccagttcctcctcgtcccccacccaaccaccaccacaccaaggagcggacaggccaagaaacttgtctcaagtggcattaccttgccaatccctccggtttgaaaggcgcctcacacactgccgggccgaatgggcaggcgtctatgcgaaaccccgtgcactggttattgctaattgcaaaatactcatgtgttacagcatgctaggaattagccaacagctgctttttgcttcggtaatgaggccctattacactctgctggactgagttctcttccttcttcctagcactggtttcctgtctgattttcttccaaaaccgggaattgcctccgctcacatcctgggctcaaagccctagtgacacagattattcagttggggcactgatgtccggtctgacttccctccaggccccagggtctatgctaaaccaggcagtgagattgtaatactccaatgatcactgctaaagacacattagggaaaagaacagagaagaaatcaaaagatcccttcctgatttcagggaggaggagacagacaggcgtttggggtttgtcgaacgggagacggagggagtgggtacagacttcaacctattccctcattatgtttacattcaacacaaaccactagcggggctgggaagcaaacataatcaacaacttttcggattttaaactcatcaccttggtgctcattacgaagggtgcattgactgcaccctcaatgaacagactaggctgtctctactgtgggtgcttataggagcaccatgggaggcagagggaagacagaaaagccattttggggactcaccaggtatagggaatcactttggaacaagggacccccccatcagatccaaaagagagccacgttccaaaattctttccagctgagtccacccctccctggaagcccaccctagccccttctagaggccaaggccaccgccttatggagcatgagcatcccttgctgcagccaactatgctagactccacagatgctgaccacggtgggcttcatgttgtattgggcctgcgttaacccagctctctctcgagacagagcgggtgggggagctgcagcagagggcagacacgccatcagcacccccccgccaacagcaccttcctggtatttataaacacagagatcacacgcacaatccctccagtgcaaaccagtccggctgctttagaaacaagttgttttctgcttccagaaccacccaggagcctgcgtgatgtctcttcccccacccgaccccctcttccctctgccggtctccttgctccaggtacccccagaccctcaaggtgctccttcgttcctggggggcagtgcagcctcctgtccgtgatccttacagaag

SEQ ID NO: 23144 - DNA, 2300 bp, Homo sapien
ggattctgctgctcggagaggatttttaaggtcattgccctcacccctcccacactgcagttcattcctcggtggcaggaagccgtgctggggagatgtgcagagtggggtggaagcccagaccagccccggttgtccctggagtaaatagcacatgtgcatttatgggacccacagtgtggcaggagaaagaggcacacatgaggaattatttgaagtaactgtgtcatttccatcctttctggggattggggatgcaggagaagaaagggtcagagccagtgtaaagggaatgaatggaagcaaggaggatggaggggactcctaaagggacatttaggacaaagttctcaacggaaatgggtttcttgggaaaatctatgaattttccttctttgaggccctttaaaaaaaaatagactctgctttatccactttgtcagagtcatttagatatggctctttcaaggtttctttccagattccattatggattaaattcttgaaaggttggggaaaggtgggcgtggtggctcatgcttgtaatcccagcactttgggagtccgaggcaggaggaatgcttaaggccaggaatttgagaacagcctgggcaacatggcaaaaaccctgcctctactacaatacaagaaattagctgggtatggtgtcacacacctatagtcccagctactcgggaagctgaggtgggagaatcaccggagctcaggaagtcaaggctgcaatgaactgtgatcgcaccactgcactccaatctgagcaatgagaatgagaccctgtctccaaaaaaaaaaaaaagaaaaaaaaaaaattggggaagagaaggtggcaagacagatcagcacctggccctcacccaggcctgctcaatacttcctttgacagccgccttgaatgttccaggtgggaccttgtttctaggagcggccaccatcagaataaaacagaaagaagcgtggagtccatttcctctcctaggccttgagctagagagttgccactccttttccaaatgttcagctaattatacctccttatctgattctctttcagtctggctgaagagccaattccactaagggtaaagttcttttcttgtttcttgcttattggggcacagatgctggggtaagataccgctgaggaatctgaaaatcctcatggaggttggtagaagctgtgactgagccagacaggctgccccatccagtagcttcccacgttccttggcagagtcattggaaggggaggtgagggccagaggtacgaccagagcccagcacctgtgggcagccagatgacagtaaaactggttctccaacagtaggaaatagcccgtgcagaagaaaatctgcaatccctccaagctattgcatttttctttgtaagtgtttatatatgtataatgaacatttaaaaataacaaaaacaacttttaaaaaaaatccctccttccctctaattctttaacggccttcacttccctatgtctaatgctttactaagttgataatctgctggtttctcctgctgttatactataaatgttttatctacgttattagatgtcatttgatggccttcgtggttgtcatttaagtagctgcctatttcacagcggataccacaccacccactcctggctcactagatactctagcggtttgtgagtgttggctgtgctgtgttccatgtcactgtatttgtgaccccgtgaaagacatgagacttgacccaggccccataacttgcttcactcaaagctgtgaaagcagttctcagggaacagagggtttccattctctattgtgcgcagatttacctacatttgggttgtggacacaggctgcggggaggacttgggaaagaatacatgctttatgtaaaaagcgatgcatttgcccttccttcccatactggctctcctgtctaagggaacttgaatcagtgagccagaaagtagctgggcagcaaggaggggacaagaagccaagctggataaccggcccccacgtgatcagaaagctgtgtgacccattgctagatgtttggttggatgcaggacaccaatgttggagtcccagctctgtcctggctggctgggccccacctcaacctctgctgtgcagcttttccttctaggagaggtagactaggaagtcccttctatatatatatatataaaaccgatgctgcttctcatgctgtggttctcaaactcgggtgtgcatcagaatcgcctggagagctgcttacaacacagactgctgccccagcccca

SEQ ID NO: 23145 - DNA, 2300 bp, Homo sapien
tctcatggaggccagccttcacccccaactgcctgggaggccagtctcagcatgcccttcaaaatgctcagaagcaaagtgctttaggcaagggacacgcacctggagagtgtccacattgtgctttcttcagctgatgacggctacgtgggatttcattttattactacattttaaactgcataggtgagatatattggtataaaaggataatgatgtatttccttttatgatatacttcacaactttaaaaaaatgagaaaaacaggaccctgaaatgtatccttttgaaaaggtacagtctaatttcaagagcacttttgctggacgagttttacttggtcttggcctaggcagggtttcttagaatgaagcagagctgggagtagcaccaggcattcccagtgggcactctcactcatctctgaaaaggcaggatacatatggagacatggtgccatctagaccctagatcccagagagtgcccaggtggtcctggccagcataagaacatagaccttttggcaggtaggcagaggtgggccactggggaaagcagagaaactcaccccctcattgttccctctcaggcaggcaatggggccgggtccacacctgggaacgtcttggacgtcttgactcagtaccgaggcctgtcctggaggtgagtgagggtgtggcaaggccccaaaggccccttcattgcagagcaagggaagccccctgagtgttctagaaaacaacgccttaagcagaagggtgggccattttgttcttttctatgaccaacttctaggtttaatttgaaaaaggtattcaccagcctcctcaaaccactacattgcccaaaacagtagctgagccttgagccaggaatccaggagagaaactacataaatgtttgggctggaaatgcttctctggcttccatttctccctctgtgatataatctcagaaggaggcagtggcctgagtgatgcacagatcattgcctttggaaccagagttgtagctgagccctagctgcccagttggatgtaaccttgggcaagttccctaacctctctgagcttctctcctcatctctgatgcagaaataatgctactacctgagcactgtctgagggctagaaagaatttaggtgtccagcacagtgcttgacactaagtatctggtagttggcattgttattatagggcctttattttgcagatgaggaaacaaggctcagagagggcaagtaacctgaccaagatcacagagccagaagataaaagatcaggaagcagagcagatgcttcctggcccccaccagtgcattcccttatcctgtatcactttgggcaggcttatttctgctctgtatgtgatcaaacctctgctgcaagcccgggcaggtttggtgtttcctcacctggaatctggcatctctatctgacacctgctttaacctgagtgccgagtctctggcatccttcctcacgttgcaacacagttaaacccaaacatttggggaaccttttagatgctcctagacacccttggcacagaatggggtgggggggtgtggaaaagcagggaatccaatccactctggaatgctgcatatttgcatgcctagaaacccttctaactttgatcaccttggaattttattattggcttggaagatggctgactctctagaagacaccttttaaaaacggcttttccaagccaagcaggaagagaagagagaaaaaaatagggccaataatattaatgcacgctgcagtggctagttggaaaggggctggcagacgagggactacttcccctttgaaagcaggggtgcaaggaaccaacctacctccccttccccaacatcagcgaaaatcagccgctggtttaaagctggcgttttgtttggatgtgctggcctatggggaggggagtcgtattctggtttgctttttccgtttttctactgaagtgatggggaaagtgcaagctccaggcccccgggctgtttctcgggagacgggcgtttctggctagtgtctgaagggtctcggcgtggctgggattttaacccttcattttctttcttggacccacgttacagcgtcggcggagatgagaacatcggcaccgttaccaccctggcgagtgagtacgcggcggcggccgggatgtttggtttggggcggcccctgcacgcttcccgctccccctgcaggtggcgcgggcctcgggaggagccccggctgcaggagcccgctaaattcaccagggggcgctgcctcccgagactgccg

SEQ ID NO: 23146 - DNA, 2300 bp, Homo sapien
tggccaggctggtctcaaactcctgacctcaagtgatccacccaccttgcctcccaaagtacttggattacaggcatgagccactgcacctggcctttttttgtttttaagatggggtttcactctgtcacctaggctgagtgctatggcatgatctcagttcactgcaaccttcacctcccaggtttaagcaatcatcccacctcagcctccctagtagttgggactacaggcatgtaccactatacctggctaatttttctgtaatttttgtagagatggggttttaccatgttgcccaggttggtctcaacctcctggactcaagcaatccacccacctcagcctcccaaagtgctgggattacaggcgtgagccaccaggcctgccaccttccataaattataaacccaagcatgtgtagagcacatatgattccctacctctttttgaaagaaccatttagataagtttacaaacaaaagaatatacgtaagagaaaaatcgcagccattggaggaaataaagaggaagcctgtgtgtcgatatgaacatttttacggttattatgtttgagcatcaaactcagcttcctggcagccagagtgaaaagaggaagcatgctagaagtttcataggtctaattttaggatctaaactagtcttccaaaggagatgaatggtctcttagcatggaatcctaaaggcccttttgcatgtggagtcccagaaaggtgaccatgagcaacaaatataattggcagtactttgactacagctgtaggacaaacacatcattggcttttcaaatgattatctgttgtaataactttccagaagaggcaagtcactcctggtttctgagcctcgggatctctgccagctcatgcagtggggatgatactgtagaagcctctggttcaggccctctaggaggaaaactatgggcactgttcctcaacagaaggatgggttttctctctttctcagggatcttatgagccaagtccaaactctgatgcagaagatgaaagatgatcatgtgagtcagatttactgttatttctaaacattaattttctaacccactaaagttgtctccaaacggagtggcctgctctgaaaagcagtgagccccatgttattagaggcattcaagcagtggtcggacagccccctgacagaggtcctgtggaggagggtatgtcaatggagagagctttgttgctgggtacagcgacactgaaaatccctcctgatgctaagagtctgtggtctataaataaacctctaaaattccttcagttcagagatgctgattccattatttcaagtgggcaaggatgttatagagggttgaatggatttcctagggcagggatattttcatttccttgttggaaattatcaagcattttcctccctccatatagagagtaaatttccatgaagactggaaggtcatcacagtgctgatcggaggcagcgatttatgtgactactgcacagattcggtaattggggccaggtccaggcctacttgttgttcctaactttgcccagtaggcgttggagatcttccctgagaacagttcctaaaaccaatcctaggattatccacctacacctatgtctgcacatatacacataccacacacacacacacacacacacacacacacttcttaccccaccaccctccaggtccttggcaccatctccatgtcctaggtggtgaggtagcaggtggcagatatatggtatttctactcctctctcttataactcctgagaattcagaaagaggaaactgtagcaagcaattggaaggaggagtctccactttctgctcctgaaccaaagctctggctgaaggttccagtcttcccactggcccatctttgacaacagcaagtagtcaactgttcatctcagattttgacatggtgagctggccacagctggaggctagagggggaacaagtcctcagggctggagccagaagggaagttgagaactgccccactgccctcccaccctaaccagttcctccttttcctccttcctgtctctttctagaatctgtattctgcagccaactttgttcaccatctccgcaatgccttggacgtcctgcatagagaggtgggtggggggcttccacaagctggtaacagctcaagcatggtgagggtgaaggtggatggggggaaagaatgagagaagaacccctttctctcaaggagacagccaggggcatggactccttcccttttcagaggttggggtctaaccccaa

SEQ ID NO: 23147 - DNA, 2300 bp, Homo sapien
tgggtggcacccatggagttgtgtgatgtacggcctgtaaggccctacgaggtagccctgtatagactcctccccagaactcaactccagaaagaccaagctggattgctaaaggaacccattcctaggggccctgagacagccccaggaagaagtgcctggagcccccctctcatctgcagcttttcccttaggtgcccagagtcctggtcaacctcgtggacttcctgaaccccactatcatgcggcaggtgttcctgggaaacccagacaagtgcccagtgcagcaggccaggtaggcaggtcctggctgtccccacactggagatgccctcacctcctggtctggcccacatgcagtggtgatgcctcagggtctttgtgacttggtctatccatgtgtccaagtctgtaaaggaggacttctgccagaacgtccccttccagaggctggagccatgactcccctgttacccaacttcaaggtgcctggcaggaacttctatgataccaggcagccacagaggggagggatcaaagttgggacagaggctggtgtttgagagacaggatagcctagactgtgaacatgggcagtggttagggaagtagacatatgtggtcaaactgtaacagaaagcaaggaaaaggtacaagcaactcagttacctttaggggaagaagagaattaggagggacacagggagcttcaaactgggagtgttttgtttcttaaactgggccataagtacatggatgtgtgttttattattctttatatcttacacatctatttactcagcaaatcttacagaacttcctgtgtaccaggcattgtttcaagtgctttagaaatctctctcttaagtagatgtgatgggtgtgaaataattcatgatgaaaccaaaggggacacagtagggcactcatgtgaaagaaggagaggtctaaggcatagcatcagaggccccaaaatatcagctccaacaccagaggatgcattttctttttaattaaacactaaattttcactgcccaaattcatttgctcagctgaataatcggttgcaggcccagcacctgcagtccaacacttgtgctctgttggtatgagagggtgctcattcccacactggctccctccctcgggccatctccagtgcccctgccaggcctgaagcctgcccctgagcatgtgcgccagagcctcaaggcttgagtgctcctaaaccagggcgggagggagcctctccacccctcccctgaacctgggcaatcagaaccagcccctgatggaagcctgagctctggggcctcctgcctccccctctttgtgcagcgttttgtgtaactgcgttctgaccctgcgggagaactcccaagagctagccaggctggaggccttcagccgagcctaccgggtaagaccaagaagggcaccatgctgtgtcctctcccctacgttcactctaacacacagcccagagcccctagaggaggcacacagggaaggaaaagctggtcagggattgtggggagacggggagcagcctgggtgccttcctctgtctcacgtgactgtggtgtctcaggtgccctggttggaatcatcccagtaggatccaggtggaaaagccctcatggcccagctaccgttgagggcttaaccccaactcctggcccgtagccctggatgcctcatgagaccacctttccctcccccactcccactccaaaggcaggtgccgagcctctggaggttcttcccaggtttttatcccttttgggacttcctgcctagcccttcagagagagtagtctacttacaatcaaaacaaaaaggtgacccaacctgtttccaaattctctggaaagggacttgccctcaggtgatttgtgttctcaagggaaaggctgagtcggcccctccatccagggagatggactgcccaccacccctactcttgcctcactgggtcctgggcccacccagggcctgggctgaagaccctgtgcatgtgtccccagagcagcatgcgcgagctggtggggtcaggccgctatgacacgcaggaggacttctctgtggtgctgcagcccttcttccagaacatccagctccctgtcctggcggtatgtcccctgccctcacccatggtactcttttagaggaagaaatgcaaggcagaattgccagttgcttccacgagcatgtgcataaaatgggaaagacacagctctccagacgctgtgctggcaggtgcaggctccctgaacgcctgagccacatccgtatgtgc

SEQ ID NO: 23148 - DNA, 2300 bp, Homo sapien
ttgggggccagttcatcagggaggttaccatgaatccaaatgtcaaagtcaagggtagagactgacatgagatcaaagcaaaaacatgcaaaagatttagcatctgaattagagagccatggccaatgctcatcagttccaagagaaaagggaaaacactgcctagcccgggccagagggtagcagcctggagccagcatccagtcctgagagtgggggtgatgtgtcacttgttcagcatcctatccccaacacccagcacactgataaatttaggtgctcaagccaggcaaggagaacacaggggtgtggtcagcagtcatccatgtaggctcccataaatcaggatttgggatccaatttgggatgagcatcaggaaacaaacagggaatggttttcagacacagagactgggaaaggcaactcaggatccagaacagatgagtagggacacctaacagcccgagttatgaatgctgatgccagggcattcctaggattaataatagaagtatgatggctcacgcctgtaatcctcaactttggaaggctgaggtaggaggatcacttgagcccaggagtctgagaccatcctgggcaacatagcaagaccccttctctacaaaaaatttttaaaaattagctgggcatgttggcatgtacctgtagtcccaaccactcaagaggctgaggtgggaggatcacttgagcccacgagtttgaggctgcagtgagctatgattgtaccactgcactccagcataggcaacacagcaagaccctgtctctaaaaagattttaaaataggaaataaataataaattccaggatgaatcattttaagcagcctttctgcttctgctagactgaggatcaaagccatgtctgtcttgcttattgggtgtcccctggcctagcacagggcctggtatgaaatgggtgctcagtaaatgtgtgtggaaagagcaactgctcccagagaacagtgggaatctgcaggggatggagcacaggcttaggactcagaagtcttcaaggccaatgctgaggtaaagattgttttttttcttccaggttataggaaatcaaggttggggggtgccagattacagatttcaaagagtgaccaatatgatgccaatgtattccacgttcctcactctgtcaccctcctgggcctccttcagagtaaagcataggatagaaatgacaacagccattcacttttctcaggacctaatccccagatcgtgaatatacgtaggcagaaaccaagctaacaacttcaacgtgggactgtagaatattctctctacccttaactaggcaggtggccttgagcagatcatttcacctgtctctatcatagccccaaactatgtcctcgtctgtaaaatgagagaattagactagaaagaaggctctggggttctctttcttttctgacattctgtaattcaattattctggtttgttttgaagataacatggattaggattgacccaccatgaaaatatgctgtggttcatcagcttctaatgagaactggagtggccctaaaagaaatgccatatacacactctctctctccgtttccatggagcttggttctcctagaagcctgtgtctgtggaggaaggtgaagcatatttcctgtaggcagtttctcctgtttcctaagccctctggggaagaggcagcatgatatggctgaaagctcattggacttgaaaatggggagacctggatgctcgtcccaaaccaggcatgtgagcttggcagtccacctgtcctctctgggtctccatttgttcgtatgtaatggacagaatacctgccctggcaccctcctagactgctgtaagcaaaaggcttctgtagaacattaagtgctaaacctatgtgtaatactgctggggaatccatcagaatggctgattggacatgagagaatgtgtggggcaaatggcccatacttcagaggcacaaaagactttttttttttttgagttggagtttcacttttgttgcccaggctggagtgcaatggtgcatctcagctcactgcaacctccgcctcccgggttcaagtgattttcctgcctcagcctcccgagtagctgggattacaggcacacaccaccacgcctggctaattttgtagtttagtagagacagggtttcaccatgttggtcaggctggtctcaactcctgacctcaagtgatccacccacctcggcttcccaaagtgctgggattacaggccagccactgggcctggccaggacttcttaaat

SEQ ID NO: 23149 - DNA, 2300 bp, Homo sapien
ctcactttctctctgtgcaatctttcctttgggtgtcccttgtctttaaacatgtctgcgtatacctgaactctaattgtggacagggttcaaagttctttttcatgggattcatgggccccatgaaaattagaggctaagtaggcatctaagtaggagcatttacgtgctcccaggcattctgttacacttaaagaggctcatggaagagatttgggcaagtggtataactctacaagctgctatattcaagtcctagttccagcttagccaaaacacctactccgattgcaactgatctttttcttggttgctagaaaactgagagtcatatgtgtggcctacctccagcaaaccaataggaccttacaccatgcattttgcatacaaaactgctggcttaatcttatctttcacactcacggttttcttttgtcctatttttctctgtacttatttttaatttaccctgatgtacacatttatgtaaactacgttaaatcctttcctctggaataaagtagggtgtaaataaatttaacaaaacaacaaagagtgatgatgagccaggtcttcactcctgaaggcctcaaaacgaactggcagtgatctgtgaaaactacagagaactgcccgttcatctccacagattactgaagtctgtgaaaactactccagccaggaccaccattatagcctgctgcctgttgtgttcacaatcgatgcacaaactcaaccctgaaatggagagaaaaataggggaaaaaagacattaggaaatcctagctctatgtcatctggacattagaaagcacttggttggacaaagctttttctcccccacagcacatgcctgtttcagcatctcagcccacattcacggagagggagaatatagcaattgttaagaatgcagactctagcactgcatgctctgctgtttatttgtgttatttgggctaggttttttaaccgtctgtgcctcggtgaatcccatctacaaagtagagataataatagtacctacctcacagggcagttgtaaggattaaatgaggtaacccgggtgtaacatttaaaacagtggcagagtacatacagggatctgaacaaatgttagctactattagtgatatgtgagtgggggaagcacactgccttggacttgaggcaatatcaagtctgagtttctggaaaaacacttgtggaataagtaagggctggccacctcctaaaaccggacaaaagatctggcttgcctagatccttagcgtgactgcttctcctcctgcctttctagaggcagtattacgtgatggaaatacttggtgggtgctgtgggcacaaagataagttaatgtgtttttattccctaggagctgagtcgagagtaggagaaaaatgcataaataattaccaggtaggatgattaagcaatatactggaggcagcaacagaaacacaccgtggaaaaaaaatacccacggcgtggatgaagatatgagatgtgtgaaagcgctagacacaggcagccacctgcacccatgtaaaattggattattgctgactcctacaaggcccactttaacgcttctttcaaccagaatccctgcagaactaattttgtagaaccgccggggataaagacctttatttgcaatgtcgaactccagcagagtaaccccttttgctttccacacgcgcaaacccgggtcccaaacgctgcagttcgcgtttcccggctaacggaagaaacacgaggaactgtttgcagatctaggggatgaagccaaaaaacggaaagcgaggccgaaagggcgcaaccaccacgtctggaggaggccagtgaagtagagaaaggggaaggtcagccctgccccagcgcgctctgcgtaaccgggacttcctccgcgcggcaaagccggggaacctccctggcgcctgcgccaccgtggcgagactcggcgccgtggacgtggagagagggcgacgcacctgcgcgaagacggcagcgggagaagccgctccagtgcggttgcgcggcggcccaggcgtcgaggggagcctcggcggggagcgcaccgcgcgcctgcgcggagagctgcgtgacgcggcggcgcgcaagggacgtgcggagtgagtggcgctgcgggtggggccgtcggcggcgctggtgagctttgcggagctgggcggtgccgaggaggaggaggtggcggcctgggtctgacgcggccctgttcgagggggcctctcttgtttatttatttattttccgtgggtgcctccgagtgtgcgcg

SEQ ID NO: 23150 - DNA, 2300 bp, Homo sapien
ttctgtatttgattttgtattgtatttttatttctgagatgtagtgtgtggtttgaattatttaaatcagactagcagagagaaagtgggttggagtacatcaaactacaacattcttcctaaagctacatcagaaatggaggtatatttttaaaggataaaagataggcaagaatgtctttggggatagaaatgacatcaaatgaaataatgtatgggagagcaacttgtaaacagtgctttgagttatgtacttactcattaaggggcaggttgtggcataaaagcacaggaagttagtacttgtgtctttcatcccttccctagcttagtagttgtaccttattaccaaattcaggaaaatcgagtaactctaaaaaggtgaacatacacttgaggttgtctttgtcgtagctttttatgctaggctacaggaaaattatagcctttgtgcctctatttatacttgctatagtgccaagttgtaattcacacaaaagaatactagttaaacacttggaaattttccttccttggcaataagtttatactgtgttaatcaatgcattagtgttaaaatggacagtttccagaggcaccttttcacttctgcttgcttatttggctaggtatttaactagtccacacactgaacggaaaaaaatgaactaagagcctattagactgtttaaaaattgctatattatactgatcttaaaagacaaaaattgtttgatgtatttcataaaacacctagcacaatctttgggattttttaagtgttaaatttgattaggtttattttatttgtcagaaattctatgtatttatgatgtacaacatgatgttttgaagtatatatacattgcagaatggttaaatcccgctgatttaacatatgcattacctcaaaaagttagcattttgggagaaaacaacacttaaaatttactcttagcattttacaaagatacaatatagtgttaactgtagtcactgttatacaatcgatcttctgtatttattcctactacccaactgatactttgtattctttgaccaacatcttcccatcccacccctacccccagcacaatctttgaagtcttggtaactttactgaaggtattgaatgtttattgtagttgttgcctttttgaaagtacgtaaataacatctttgcattgtagaaaaagttcttctttatagataaacatgaagaaatgaagaaaattgaaatcattcataatcctgcggctttgagataactgatgagaacagttttagattttttaatttattctatctgttctttttacaggcaaacgaagatttaatattaaattgtggaagaccttcactgattgttttaactgtctgcctatagcagccattgtggatgagaagatcttctgttgtcatggaggtagactagtaaatttgccttacagattttttttttcttctattattcggaaaatacctataataatcaagaggctgtgggaaaacaaagcagtgcttgtatgaaaactcaagtgattaaaactgttttaaacatggctaaacctcttttaaaaattagaaatttatttataaatgaaaacgtaatgcttctttaaatacagtttcacatataaggagtgtaactagagttgtttgagaaagtctcctttgcctcaagttttaacagaaagacacccctgctatttattagtaaaaatgagaggatatcttcctgcctatattgaaatctttcatcagaatccaaataaaattgagtttcatattcacatatatcaagaattctaggcttcatataatatatttgctttagtattaacaataaaataataaaataatctttggcagattggtaggttactctgtatggcttatgaaataagcttgaagttttttgaaagtttatttgaaaaattaatgtatatgtctaacacctagctagtagatagtgtatgatctgaccatcttgaagagttaaaaacctgttgctaagatacatttatgaaacagataattgagtaataaaaggtatttaatatgtcagaacttattaagacactatgagaagtcaggaggaggaaagactgggtacatgtgtgtatggaggcatgggttttagaggataaataggctttggagaagttaaaaggacttgagacactctttgttgtctagtttagggaatgtgtaagaactggcctgactagaaggtcaagtacatgctgggaaatgatggaatcagattatggagatttgactattgagcaacggagttt

SEQ ID NO: 23151 - DNA, 2300 bp, Homo sapien
ttttgagttctcatccaatcccaggtcaaatgaaaagaggcaagaaggaagctaacaacacctactgtggaccagtgcactgctagtttgctcgctatcaaattcgccccagacgcttttacagagtaggtggtatcaccctacttttacatttaatgagaggtgccagggttaaatgatttgaccacgttcatacagctagtaaaatggtagtacctgaattcaaaccaagtgtatatgattctaaagtatattcacttttctccacacaccaacatagtttaaaaaacaaaacaaactcaggaatgagaacactcaagaaggcttagttggtagtaaccctttacttgaagtcaaaacttaagcaataagctgcttccctgatagcttaatgaatatttatgtgtatttgctggcttttatatgcaaattttacatgtttcctttgtaaagattttgggatcctaaagaaccttctcataactgtactttgtgcgttatacagccacttgcatttccttcatggcacaactcactgtgccttgtattttagttgtgtccatatctgtctagcttggaagctctagaaaggtaaggccatgttgtcttcatcattgtggtacttgccatgcctctgtgtttttcatgtagcggacattaattgttcagtaaatattttatactcgaggctggaaattaatcatcacaacaccggtaccttgcaaaaacaaggggaagagcagagagaagtcaggaaggatccttagggaaaagctagaggaatgaagcttgaagcagccattttcctcaagattttcacaaccagttgatgcttcttggcccattctcccatttataggccagggagaaagagtcaagggcatgtgtaaggaaaaataagttcccagttggccccctcctcgtacttgtaggtgaatttgtcattattgtgctgtgtgtggaagcacaagaaggaaggaattaactcgttcttcagaactgctgattgaggagctatttgctggaagtaccacaagtaggcagagccaggttgccttttaagagtaatcattgtattagccaaaaaatctggaagcaatccaaatattgaaatgacttaaatggtccatccactctggaatattatgcagtcattgaaaacgtttcgaaagactagcaacatgaaaaaagccgtgatatggagaccaaaaaaaaaaaaaaaagatttacactgggtgtggtggcttaggattgtaatcccagtgggaggattgcctgagttcagttcaaggccagcctgggccacataggactctgctctacaaggcatgtttaaaaattaggcgggcgtggcggcacctgtggtcccagctacttaggaggctgaggcgggagaactgcttgaacccgggaggcagaggtatgcagtgagccgagatcgtgccactgctccagcctgggcgacagagcgggactcagtctcaaaaagaaagaaaaagccggttataccttaggagggacataaggaaaggatgggatcaaaaagctgtttagaattctttttatttgttcattcaacatgcatgtattaagcacccacgtagtcaaaggctaggacaaagccaaaaagattactgctgcagattcacagttacaatagaatggccccttctcacaagaagccaccgtattcacacgttgtgcttttctcagttcaagcggcctcttccttttgagtaaccagggtaaccacgctgtgcccgcgtgtgccgggcggggaggggaggccgcagccccagccccgggggcctggttgtctaatcgaagggaagtaaacggccccaacgcaagcctgactgcgagacgtgcccaagggaggtaggtcgaatgaagagggttgtgtgagttttgcgcgggcaggcgggataacggaggagggaggcccgcggccgaggctcgggcgggcggggggcagggaggggcggggttcgccggcgcgcactcccaggcaggccccgccccctcggccggctgtgcgcgctgattggcccctgccggcctcgcgctccctcgctccgggttggcgggagaccttagagcgggtaccgctgctggctagcgaccgacgagcaaccgtctgaggccaggagcgctgcgacggagccttgaccgccgttgcccggccctctcccgcgcagccccgggcttccgcaggtacctgtgctcgcccccgggaaggggcctcgcaggcgaatctccagtttcgagtgtgcccggtccctgggttcgctcgccggcga

SEQ ID NO: 23152 - DNA, 2300 bp, Homo sapien
agatgaggcctccagctgtctcccagatgaggtgggcaggaaagagcagaacgttcttactcaagtctcaaggctcaatttatcacctactcctctttctatggagtttataacccgcaccccaagtacataattgccttcaatttggcaggactttaggatctaggaagaaagatgggatgagaggagcaattagataagtatattcctctgcctagttcttcaaaatgtagccctgtgctatctaatatggtagccactggccacttgtgtctattaaacacttgaaactgaataatttaatttttactttaaaaactgaaggagcatatttttctcctacaaattacttcatttttaaaaataggactgcatttcacttttactgttgaaaaattagtatcagaacagatttgtatataagcatattcatctaaagtaacaaaaaaaagaaaaaaagattgagatatgctgtaagaggaaaatacgcagcagatttcaaagacttagaatgtgaactatctcactgatttttatattgattacatgttaaaatggccttttggacatattgggttacataaactttattattaaaagtaattttatctgttttgttttgtaaggtggctctaaaaatacaaaattacatatgtggcttacattatattggacagtgctgttctaacctcgctaaatccaatcttattttccagtccttccttcagaagggaaatttctgagggtcaggaaggggaatctgtacctcactccttgaacaccaaggaaggtatggctgcctgagtcactgtgaggttgcattcagaggttctcagtagggtcctagagtagtttcctgtgttgcctattcatacctcaatttcccattatcctagaaatatttgaccacaaaaataatactaagtgtagtaattatgtgaactaatcaccaccaaagaaggtgatgattatgtatattgttaaatattgatagattaactgtctcagattttattagattatgacaacatacattcatatacacttataatcagtcactcaaatagctttgtcatacacttacaactttaaaaattagaacaggccaggcatgatggctcaagcccataattcccacactttgggaagctgaggcgagaggatggcttaagctcagcagtttgagagcagcctgggcaacatagtgagacctcatctctacaaaaatttaaaaaataagccagatgtggtggcatacacctgtggtcccaactacaagggaagctaaggaaggaggatcacttgagtccaggaggtcgaggctgcagtgagccgtaatcatgccaacgtactccagtctgggtgacagagcaagaccctgtctgaaacacacacacacacacacacacacacacacacacacacacacacgagaaaaaaaggaaaacagaaaagtaagtaaaataaaaattagaccaatttatgaaaagccttcaaagcacatctacattttttgctagaattgctttcaacttttcaataaataccaataaatgcttattgaataagtgaattttataatatatcaaggaatttaccaataaagagatatggggttttgtgggagggggggtgctttgtaatttaatacttgataatacattctggaaatagttgtccttgtttataaaaaatttgaggtggcatataacaacaatataataaaattatgtcaattcaagcagaatagaaaaaattagaaaattagccggaaaaaagaagactacaaataaattatgaagtcagcatcatttctataattaactttcaaatttggtcgagttctgcagccaaagcaaaatggcatacagtatcttcttatttgggaagaggatgtccgtttgttacccaaaagaagcatagcttttcctagcgctgaatttcaaaagcaatttttaatgggagtcactgtcacaaataacattttaatggcaagtttagtaacattttatatgactgcatatggtagtatcatccagttagttgtttatatatgaaatgaatgtgtgtgatgaataattgtatgttttatttttacaggaatattgggaaaccaaaatgaggcacaatcagatgtgttgtgagacaccacctactgtcactgtttatgtaaaatcagggtcaaatagatcacatcagcctaaaaagcccattactctgaagcgtcctatttgtaaagataattggcaagcatttgaaaaaaatacacataataacaacaaatctaaacgccccaaagg

SEQ ID NO: 23153 - DNA, 2300 bp, Homo sapien
cgagatcatacaactgcactccagcctgggcgagagtgagactctgtctcacaaagaaaaaaaaaggaaaaaaagaagggagaaatcctgttgatggagtttatggtggctgatgtcctagaaagtactgattagaaagtattaatttatgtcttagaaagtaataacggccaggcgcggtggctcatgcctgtaatcccagcactttgggaggccgaggcgggtggatcatgaggtcaggagttcgagaccagcctggccaacatggtgaaaccgagtctctactaaaaatacaaaaattagcctggcatggtggcaggtgcctgtaaccccagctactcgggaggctgaggcaggagaatcgcttgaacccaggaggcagaggttgcagtgagccaagatcgtgtcattgcactccagcctgggcaacaagagcaagactctgtctcaaataaaaaaaaaaaaaaagaataacaagatttatttcatcaaatttaaacagaattcacattgacttcacagccctttgaatatacttggactttaagttcaactgtgctgttgaccagtctttccaaacggtgttacagtacaaagagcatgggctgctgaaccagactgactaaataggaaactctgcaatgccacttgtcagctatgcatcttgaccaacttattattattatgttgcacgtgggtcttgaaatcctgggctcaagcaatcctctggcctgggtctcccaaagtgttggggttacaggtgtgagccaccactcctggtttccccaaattatttaatctccctgggccagttcttttactcataaaatggatttgtttctaacacagaattgttggaaacttaaatgagtgtctaacgtgcctcgtattgccagactctcaataaacttttgcccagtcaactaatatccagcaaagaggctagcgatttttcttttttttttgagacagagttttgctgtgtcgcgcaggctggagtgcagtggtagctcgatcttggcccgctgcaacctccgcctcctgggttcaagctattctcatgcctcagcctcccttgtagctggtattacaggcgtgcaccatcgcgcccgactaatttttttcccccgagaggagttttgctcagtcgcccaggctggagtgcagtgccgagatctcagctcactgcaacgtctgcctcccgggttcaagcgcttctcctgcctcagcctcccgagtagctgggattacaggtgcgtgcctccacgcccagctaatttttgtatttttagtagagacggggtttcaccacatttgccaggctggtcccgaactcctgacctcaaatgagccgcttgcctcggtcggcttcccaaaatgctgggaggctagtgatatttaacgctaaataactctggcctccaaagatacctgtttccattttaagacacttctatttcgttttgggagggtaaactagttatattttaataatgaaaacatgtgttacataagcacatagtgagtactcgaatcaacctcggactctccgggcgtgaggggtgggtgaggggaccggcaggtggtcacagccccatcaaaagggagttggggctgggggatgtcgcggtcaactgggaaaggagagccaatcagcaagtggcgcgtcccacgccgtctgtcaaatgcatctgggggttagctgtactcatacatcttgtgggtgactaggtgacttccgtgttcaagacacaagcgagctaagcctgggatttcagtttgcacagcgctttgttaagttttgtctctcaatcttgctgtccaagagcgaacctggaggtcgtctgttagcggtaaattctttacccacattccgaaaaggaaaacggcggccgcgcgcgaggacatattccttggatggtcactcaaccaggactccgctgctcccgcgccctagcttgacctagcgcaccgccccctccccgacgcaggcgcagtcgcggagctgtagagccccacgcagctgcagagccatcgggctgctgcgccatgcgcgcgactgggaaagaaggggtcgcgctaggcttgcgtcactcgtctgcgacggcgccttcgcgaaacactatgctaatggcatggtgccgcggtcctgtcttgctgtgcctgcggcaggggctcggaaccaattcattcctgcacggcctggggcaggagcccttcgagggagctcggtcactgtgttgcaggtcctcgcctagagacctgcgagatggagaaagagagcacgaggcggcacaaag

SEQ ID NO: 23154 - DNA, 2300 bp, Homo sapien
atacattcattacactgtctccatgtaatctttctaaaatgcaaatattggtcaggcacagtggttcacgcctataatcccagaactttgggaagctgaggcgggcagattacttaaggtcaggagttccagacaagcctggccaacatggtgaaaccccatctctaataaaaatacaaaaactagccaggcgtggtggcacacgcctgtaatcccagctacttgggaggctgaggcaggagaatcacttgaaccggaaggtggaggttgcagtgagctgagattgtgccactgcactccagtctgggcagagtgagactctgtctcaaaacacaaaaacaaacaagaaaacaataaaatgcaaatcttaccatgctgctccgtagctgtaaaagcttgagccttcccatggccatgagagtggtttttatctttcctggcaggcaataggctctgtgtgggctgaacagtacctagcattccttgaattagaatgcattgatttggtgaatatttaggagaaatataaaaatctaccctttattttttggatacaggatctcactatgtcacccagggtagagtgcagtggagcagtcatagctcactgtagcctcgacctcgtgggctcaagccatcctcctccctcagcctccagactatgggcgtgtgcctaaaaatgtctatttgatgtagcaacatgagataaatctggagaaacaggagggaatagttgttccgatcattacttttacattattataactgaatacattgttattttgtaaatgattacagcctggaattgaatagggggaaacggaagcagttgttacaatcattatcaatttgaaagtgaagacttcttttctctctctttttttttgagacagtctcgctctgtcacctagactggagtgcagtggcgtggcgatttcggctcactgcaacctccacctcccgggttcaaggagtctcctgcctcagtctcccgagtagctgggactacaggcacacaccaccacacccggctaattttagtatttttagtagagacaaggtttcgccattttgcctagcttggtctcgaactctgacctcgggcgatctgcccgcctcggcctcccaaagtgggattataggtgtaagccaccgcgctcggctgaagatttccttcaaacctttcgttctaccttatcattttctttaaagttttaaaaaattgttatttatttattatttatttttttaagacggagtttcactcttgttgcccggagtataatggcgcgatctcggctcacagcaacctccatctcccgagttcaagcgattctcctgcctcagcctctcgagtagctgggattacaggcgtgcgccacacgcctggctattttttttttttttttttttttttttttttttttgagacgagtctcgctctgtcgcccaggctggagtgcaggggcgcgatctcggctcactgcaatctccgcctcccgggttcaaccaattctctgcctcagcctcccgagtggctgggattacatacaggtgccaaccaccaagcccggctaatttttttgtatttttagtagagacgaggtttcatcatcttggccaggctggtcttgaactcctgaccttatgatccacccgcctcggcctcccaaagtgctaggattacaggcgtgagccaccgcgcccagcccacggctaatttttttatttttagtagagacgggggtttctacatgttggtcaggctggtctcgaactccgacctcaggggatccgcccacttcggcctcccaaagtgctgtgattacaggcgtgagccaccgcgcccggccccccccctttttttttttttttaaaggaacaggacttgatcttaattctacaattactttctcccatactcccactcccgcccagaacaagatagcgacaggccctagcgggccaccgtccacagggcggatccgccagaagctctcctgcgacgcgaagatccactccctgagcccccggcgctccctccgcctcacttcctcctccaggctccgccccgcgccggtgcgcctgcgcacggacgaacacgtggctgcagcggggccagagcagcaatggcggcgggcggcggcggtagctgcgaccccctggcccctgctggggtcccttgcgccttctccccgcacagccaggcctacttcgctttggcctctaccgacggtcacttacgagtatgggagacggccaacaaccggctgcaccaggagtacgtgccttccgcgcac

SEQ ID NO: 23155 - DNA, 2300 bp, Homo sapien
ccttaaagttggtcataaatgctgtagatattccttccgcctgcccctgcttgcttctaccaaaaaatacagagatttgcagatgcagaaattaaggctttgactatgttatgcttgacataggctatgtaaatttctaaaatttctttgtgctttttaatggaaattcaaattggcaataaagcatacgcatatttggacctgtctttgtttcacacatcgagaaacttccatttagatagtttttatttgggaaaaccaagagtagaagaaagatttcatggaatctttttttcgttttgttttgtttgagatgagtctctgtcgcccaggctggagtgtagtggcaggatctcggctcactgcaacctctgcctcccgggttcaagcaattctctgccacctgagtagttgggattactagcgcccaccaccacgcccggctaattttttttgtatttttagtagagacggggtttcaccatgttggccaggctggtcttgaactcctgacctcgtgatccacctgcctcagcctcccaaagtgctgggattacaggcgtgagccaccacactcagccttcttggaatctttttaaaaagatgaatcttttcctgctgagatggtactaggttaatgtacttcccccaactctccttgcctgaaataggtgtttgtatttataaccttatacagaaattatttttgcccctggaatcattcaaaggtagctttagaaattcatgtaactgaaacggggacctagaacactcctaaaattgaggtttcaatgtttcaacaagttaaatgagaccatcagactttgtactttggcttttaattgtaacttctcttttgtgtttattagtacatttctaaggacttgcaagatatatttctaaggacttgcaagatgtgtattatttttttctgtaagtaggttacctttttttgttagactgcatttcatctgtgtccaatgaatcaaattctttaaatgtaaaatccccctaggataactaaaagaaaaaaatggaaagtgctttttaagtctactccctgacactctttatgcactggtaacgttgtggttgtcattggtttttcttgaattaagacagatttttaggtgtcttgggctgtgtgcatgcccatgcgtgctgtagagctaagatcctgcactattaagaagatattctcttttctatggtattggcttgttttacagtgaaagaatggatttctcagaactttatgctaaaaacatataggctggtgagccgtaatttaaaaaaacacggaagagaagttctgaaatcataataaatactcagcattataaactgatgtagtgcttttaagttagggtcattgtctttttgttgggaagacatgagctgttaacatcacttttgaaatgaaagaagtcttgtggcatttgccacttgagtgagacttttgtctctgaagtcactgaatcactgagccagcccttgaccagtcagtggggcaacttctctcttgtgtgctctgagctgctctactagttaaagctatttgttgactcaaattgaagttaatgcacgtttataaaggtaaaaacttttgaggctcttttcttgacaactaagctagaatttgtggaaaaattaggagagataaaggagagttggctgcttagatatggacttacggattcatagatttttgggtatgaatctctttggttggggagtgaaggcttcgcttaggttggacctgtcaggaggggcggcctgtttctgagaagtggaaacagcattgaggcttcttggacctgttaggagagtaccaagaacatactaggttttcctatttgctgccttttttccataggggtgggagacgggggacatagaattacgagtttctcttcccattggagggatttctttttgaagtagtgagaagtaaatcacccaatagcttctctcttccccccttttaaaatgtcttttgtgggctggtgggcatttgtatttgttcattaacgatgttttagtatttgcaatactaaataaaaacattgtttttctttttttccaggaaagtccccagaggaaaaaaaggaaatcagaagctgtaggaatgagtaaccagactgacttattggctcttggcacagcagttggtagcattttattatacagcacagtaaaaggagagttacacagtaaattaatagtaagtgtgtgtatattttatttaaaagtgatgtgacagggaagctgattattagagattattaaaaaaaaaacac

SEQ ID NO: 23156 - DNA, 2300 bp, Homo sapien
tagtgaaatcttttctggaatcaactcctgaggtataaccagagtagttgtggtgtaacattcaaggtcgtggcagaacagacgaaagaatggtatagggagggcccctcagcccgtagcagttatcaaggaaaccatggttttcctcgctcttttccttcatttcttccttcctttgctgatatttttaagtgccttctgtaagccaagggctatgccaggcatggggattcagcaatgtaccaaacactctggtccccatcttcttggagctcatagtctgaacagggacacaaaagggaggtgataaattggaatgcaatgaccttaaaccttgctttactaatttttgtgtctgtctgctgtttaaagttaacatttgaatgaaacacttttttactaaagtattagaaataggagtgcaggtaaaggctaatcagaggtaaggagtggagtctgggcacggtggctcacacctgtaatccctgcactttgggaggctgaggcgggtggatcatgagttcaggagatcaagaccatcctttctaacacggtgaaaccccgtctctactaaaaatacaaaaaattagccgagcgtgatggcaggtgcctgtagtcccagctactcgggaggctgagggaggcaggagaatggcgtgaacccgggggggcagaggttgcagtgagcatagttcatggcactgcactccagcctgggcgacagagcgagactccgtctcaaaaaaaaaaaaaaaaaagaatggagtccgtttttctgtagtgctacagggacagataaaagaatatcagaatatcacgggggtagggggtgaggtggggaagccagcgttgttctttttctttttttttttcttgagacggagttttgctcttgttgcctaggctggagtgcaatggcacgatcttggctcaccgcaacctccgccttatgagttcaaatgattctccttcctcagcctcccgagtagctgggattacaggcacatgccaccatgcctggctaatttttgtgtttttagtagagatggggtttctccatgttggtcaggctggtcttgaacccctgacctcaggtgatctgcccgcctcagcctcccaaagtgctgggattacaggcatgagccaccgcgcccagctgccagcgttgttcttagagcccagagatgggaggaaaattaaccagaggcaggtatttgaaggcagtgggacaggaagaggcttgttctggacttccaaatggcttcctttaaaaagaggcatttaaatttttccagttgctttttatagttgatctaggatagaaaaattatggccatcatggtttcctttcatattgttaaaaatgatcaaggggactttaagattttatgagaaaggcaaattaccattgttttattcctcagtgaacctggaggagccagacctttatcagtcgtgttgtgttccaaatataacagctatattctcaatacaaaagactctgatgagagcaacatgggagcaaaaaagagaatgtcctactttcattttttaaatatgtttcagaggactcattaacaggaagtatatttaaaatgcaaaaggtcaactttgtactttgttctactggtctctgggagctgggaaaaggcttctctgcctctttggggccttacagtaagggtagataatatgctagcatcagaggataagattcagaggaaagcctctttagcctggagatacgtggtagaggcatttttaatttcctgtctactttatatgggatattggccttatctgaaatagtttgatcaatacagaaaagtgccaccttgcagtttcactctcttgcccttatatcattttttttataagcctattattttttcctcctaggacattgagggtcttctgtgaaaattcgtgatgttgttaggctatgttgcaggtagccactgccactgggagtacttgtaagcagatgtgtgtggtgcagtggctaaatactgaggcatagctgagcatgatttgcgtgttcgtcatctctaatacgttaatagtgccaaatgatcatttttttctctagttgcctgacctggtaccccagctggggacactctaccagttaatggaaagcagagtcaaaacttttcagaaactttcacaccttcatggaaagcttattcttctaattacacaagtgagtaaatcatattgttctgggctaaaacttttggacatggtaggaatggagagaggaataaggatcattttgagacagggtcttgctctgtcgc

SEQ ID NO: 23157 - DNA, 2300 bp, Homo sapien
agacacaaagctggacctggcacaagaaacctctgcggcagctgcttctcccctgctcccgggccaggctgcagcagggtgagctcaggcagtctgtggcgaaatgcaccggcaccctgagtgaccttaagagctaacccggaggacgctggtgtgggggttgggccaggagaccccagtcagtaaccacttcctcccctggctctccagcttgctgcttgagaaccaggtcaccagggacctgtggcaggggcaggctgctcagacagggctttccagggcatccctttggggtggaggtgaagaagtgacataaaaaatagttaagtccttaaagggctctctgccctccagctggcaactgggctgacactgccctctgtgtgcaacatgcctagcacatggtaggggctcacagggtcttgtctgaagctgggggcttcctcacatctgtggcattcctgcagtccttgccctggccaggtggtgcctaccacatgtgccctctgctctgcctcttacctctgggcagatgaggcttcaaagcccctcttcccccttggcccttgatccttctccctgcaccaagcagaggaatcctttgcagaagacatggcctgggcagaggacctgggtgacctgggagctctgcacgggccccagaggtaagatgccttttccagcctcaggcagcctcagctggtggccccatctcagcagacccctgacttgcaggttcacccaaggacagtgagctccaaaccctgtgggtggcagaaaatgaatgaacctgtttgagccctgccttcataatgagaaatgtacctttaaaatccgctgatggggaagatatgaatgacaaagcaatactgtggatttgatgccatcaagtggaagtgaacgggtattttatccatcccaagagcattcgaaggttactggctgtattagtcagggttctccagagggacagaactagtaggatatatgtctgtatataaaggagtttattagggagaattggctcacacgattacaaggtgaagtcccacaggcggccatctgcaagctggggaagagagaggctggtagtggctcagtccaagttcgaaagcctcaaaccagggacgccaacagtgcagccttcagtctgtgaccaaaagtccgagagcccctggcaagccactggtgcaagtctcagagtccaaaggccaaagaacctggagtctgatgtttaagggcaggaggagtagaaggaagcgtccagcaggggagaaagcaggcagccagaagacccggcaagcaaggtgatcccaccttcttccacctgcttagttctagctgcgatggcagctagcagctgattggatggtgcccacccacactgaggatgggtcctcctctcccagtccactgactcaaaggtcgatctcctctggcagctccttcacagacacacccagaaacaatacttgaccagctatgtaagcatccaatccagatggcacctaacattaaccatcacactggctctcagcttttccgtctgtgaaatgagactggactagtgttagatctctggtcctggcaactctgccctttcctgctgcgtcatgctttcaggcaagcccatggtcatatgaaaggattggtgggcccattttgctttttcttttcctgccgtacgtacctcccaggacagatacacttacttatattctcaggaaatgtcttacatctcctggataacacatctggccctgtttcccgcccagcctccccaatcccacacctatcttggaataaagtgtgcagtgaatgaacgaatggagggtgatgctggtccacaggtagtctgtctcatgcctgccagtgctgccctgtacagtaaacctaactcaggtcttgctccattgaggaagaattgagggtgtggggcttagcagtagaattgagccagccacagggtcagtgagctcagcagtgacctgggtgtcttcagctccacccctgttctcaacccctcagagccaaaacctttggcctcacccatcagagacaggcctgccgctgccaagaagcctgccctgcctttttctcagtctgctcccacgctgacagccttctcctttgactgtgccagagaagcctgccctccgctgaaagaagaggaccagaaggagatcggcaccaaggtacctggggagcgggaggaggaggaagtggggctggagtggaccgcaggctgcaggaaggcaagcaagtgtctgaagtattcaagagtgggaccagccacagag

SEQ ID NO: 23158 - DNA, 2300 bp, Homo sapien
agtttatgatgtagttatactatctgcaccttcacaaacttagtcagtgttgctcagagtattattttctgaattaaattttccattgtaggaactacactatgagcctttctttgtaaatttttaaatttattttcagaagtgatttttggatgctctctggagaatcattgagtttaatctgtttaaagtttcttagaaatattacactattatttgcaattgaaatgaataattattgtatatgagaaaaggcatggcaacgtcagtggatatccattagatatcaatgaagcaaactctcactgtggaaggaatgaccaagtcccacattttttgcaaagcaatcactaagaactttacctgacctaaggaagaaaaataccgacaagcaatgctatcttctgtttctgagatagcacatagaaagattgccctcacacatggggcagtgtcattggaggctatggaaatcaccagtttttatttttctgattttccttagtggaaaataaagtaagggcaccttttacaattaatggagtcttaagtttgaatgaaatatgatttaagattttagatgcttcctgcttcacttcccaccagctaccaaatcctgtggtttccatcttctcagcagctcttggatctgactgtgcttccttatcctcactgtactgcctgatttcaggcctgcaccatctttttcctggactattatggtggcctcctaataagtctcctggcccctagccttgtctccaccaatccatcctccacactgctgctagagacattttgactgatgtacaaattgaatcattcttcagcttcctattgcatgcaaactgaagcctaactccttcatgtctccctaaacagggtcctgtgttctcctctggcctgtctgcttcctgtgtccaacctctgctcactattctccaatatatccccctgctgacatgtcacactgtgttatagacctaaataaccctgttcctccgacgtatcccaaatcccacccaacttgtgaactcctacttatctgttgagccccaacgcaagggtcacctcttctatgaagccctccttgattccctcacctgccaccactgttcatcaggtagattgactacaccctcctatattgtcccgctttaccctttctgggacttctaaatgttccatattagaacaaaattgagtacactttggtatagccattcaacggaatattttgtagccattaaaaaggatgtttatggagagttttaagggacttgggaagatgattaatgaatgataaagtgaaaaagctgaatacaacttgtatatacattctgatatcaactagaaagtaaatgccacagaaaaaagactataggaaaatatgtaaaaatttaatagggattttctcttggtaatgggattatagatgatgtttattttattaatctattttttaactgggtagggattgcttttgtaattagaaaaagtattaaaaactctctttaattaggaagattatgtaaagctgtaaagcaaatttattttgcatttcagaggctgtttctttatcttgctctctctcctgtggcagattttatggccggaagatggtgaatatcttgatggcgaacactaagtttgatgcatttctgaagcaatctctcccatcttacgacttgcagaaggtcatggcggccattaaacagcaggtgagctgtggggcataagtgggtcatggccttttgggggtgggggtgacagtgctgagcctggtagccttcatgtgggtcaggggagtggggagtggattccagagatgttgatttcatccactactcctgataggtgagatagatgtgatttctgtcctctgtgctcacacctggttctaacctcacactacccatgttccttgagcctccctgggcctccatgccttcatctgttaaccagggatcttgatctctgccccagctgctttcagggctctggaaggctcaactgtgacatctgaagctctcctaggtggaagggattattgccattgttatgtctccactggaatgtctggcatttccctggagggccactccttttggctcatgctctgtgtgtattttttcaagggaatagaagataatgatgaacttccctctgccaaaggccgcaaggtgttgaggagtctggtggtgtgtgagaacgggctgcccatcaaggaggggtatggctgctcctgtatctctgggcttcacatctaagacttctgacagaggcatcctgcttgtcca

SEQ ID NO: 23159 - DNA, 2300 bp, Homo sapien
tgtgattcctttgggattggggtctctgtggaaccacacctttccaaaacctccaggccgatggacgcttcatctcttagtgacagcgaggacagcagcccagaggaggaggaggaagacaaaatgagcagcatgagtctgtgtgcctggcaggaaaaaactccacattcaaggccacaatcttcacctgctgaccgggaaagcccatttcaggcccgcaccaggaggcttaggagcctccaggcccaggaaatgattctgaagatgaaggagtcaatcagcgaaaggatcaagtttgtccctgtgccctgtgggcaccaggactggtctgaggaggaggaggggaggacagtggtccccccaagacctagcacggtaagtggcagcaggagggcccctgagaggcagacgaggtcccagtcagagtcgtgtctccagagtcacgtggaggaccccacctttcaggagctgcgaagggtccagagggacctcagtcagaagctggaggcattttatgccctgggtgccaaagggcaggggcagagccaggagcaaattctgcagcccagagcagccgccgtgtggcccaatggcacctgcagggtcagtccaagcaacaccaccagcaggctcaaggcatccctcaccaagaacttcagtattttgcctagtcaggacaagagcatcttgcagaaatgcaatccccatcctgaggacgaacaaggcaaagctgggaagcttccaaatgccatcccatcaggagaggtcagtgaggctgccaaggccacagactggaatgtcagaggctgtcccaccagaacatccgtcaagaagcttattgaaactttcagtcccacggagagtctgaggatgctgggggactctaaggacgctggggcaagtccctgcctcaggaattgcatcatgccccccagatttcccaagtacacagggcttgcccctttgtatccgaagccccaaatttctccagcatcaggcagagaatctctcaaaatgggcataggctggaagcccttagcacctatctttccccctctgcctaaagcagaagcagccaagagtgaggagctcagctgtgaaatggaggggaacctcgagcacctccctccaccgcctatggaagttctgatggacaaatcattcgcttctctggagtccccagaaagcagcaagtccacagagaactcccccaaggaaacccaggagccagggccgggagaggctggccccaccaggagaacatgggcttccccaaagctgagggcctctgtgagccccctggacttgctgcccagcaagagcaccgccagcctgaccaagcctcacagcacagggccagggagtggcaggagcagctgccagcccaggaagccagccctggacctgagcagcccaccagccaccagccaaagccccgaggtgaagggtgggacttggagtcaggcagagaaggccaccagcctctacaggcagccccggaaggccatcgcctggcaccactccggccctccatctggacaaaacaggacctcagagtccagcctggccagaccaaggcagagccgagagagaagcccccctgtgggcagaaaggcctctcccacgaggacacactgggtgcctcaagcagacaagaggcgccggagccttccctcctcttacagacctgcccagccaagcccctctgctgtgcagacgccccccagcccacctgtgagccccagggtgctaagcccacccaccacaaagcggcgaacttccccaccgcaccagcccaagttgcccaaccctccccccgagagtgcacctgctcagtgcaaggtccccagccccccaacccagcacccagaagcaagcccccctttctcgattccctccccatcacccccaatgtccccttctcaggagcacaaggaaacaagagactctgaagacagccaagcagtcatagccaaagtgtctgggaacacacattccatattctgcccagctacctcctctctgtttgaagctaaaccgccactctcaacagcccacccactgaccccaccatcgctgccgccagaggctgggggccctctcgggaacccagcagaatgctggaagaacagctcagggccttggctgagagcagactcgcagcggagagcagctctgtgtgccctcaaccctctgcctttcctcaggaggacagcttctgaccgccagccaggtggccgaccgcagcctcccaccttggaccccaccagcacctcttatgaatcccagctcggccagaa

SEQ ID NO: 23160 - DNA, 2300 bp, Homo sapien
agtcaccctctctcggctccaaaaatcactctctctccttgctttcaggctagggtagtaacatacttttaatactgccccaaagtactgccctttttctgagggtttccctaaactttgcccacacccttgaaaatcatacttttattaaacactttactaataaactgctgcatctcctatagtgttcttggctgatgctttggagatggttatatgctgtatagcaaagctctatgccatctgcatgaacatagggagtgggccatgtgaacgtgtgtgctccaaacagcacgttttcttcacacagctgagtcaagagccctgagtgagcaagactagtgatttctcaggtgacatgcttgcttactgtagtacaggttccagagtcttttgtacatgattctggttgtacttcgagatctttcagctctttaggatcttcagtataaatagtaattattgcaatagatgtgaaaaaaaaatgatagcttatagaaaattctgggtactaaggggttggctattccttttaaagccaggagtgaacatttctaggttaaggatttctattaggaagacaatgactgagaattcacgttcatattgaaagagggcagggagaagtcactcatcataggcagcttctattctgtcagcagtggtatttcaatagagactgtgatctccccagctcctagccaatggtttcctgtttgaagaaagtcccagaggctccaaggctcccctcgcctggatgtgctccacagagtgatacctcctcaatttcttaaatgttctttatgccattaacacaatatttttatttttaaatagatatatgaccttgtcaggagttcaagaccagcgtggccaacatggtgaaaccccgtctctactaaaaatacaaaaaattagccaggcatggtggtgcatgcctgtagtcccagctactcgggaggctgaggcaggagaattgcttgaaccagggaggcggaggttgcagtgagctgagatcgtgccactgcattccagcctgggtaacagagcaagactccgtctcaaaaaaaagagagaaacaaaagacagatatatgaccctaataactggaattttctttctttctttctttttttttttttagcagaagcagcttcctcctagaaactacacagtagtggtttggtcaaaagggcttggaatttattaagagctagaaccatgcaccatgttttgtgtgtcatgctcacttttttagtagggagaccagaaaaatgccaccatggggtattttcagctaaaatgaatgaagttagacgttatctttccaaagacttgccacaaaccatgaagctctgggcctggcactggacagcagttctttccttgggtgtgaagcgatggctgatctgtttgcagaaaagaaaatcaacaaagaccagcaatttgtactgacctcctctgttctttagagcgtgtcagagagcacgatttcaaaacacactgggaccgcaggtctctcattagtcaaagacacccctgcaaccttgccctgggtgatgtggcaatttgggcaaagatgggaagtgttttgccctcctaagctgagcctctggtagtgaccactcccggcacccaaagatactttgtgacctccgatgggctgattgctccctccctctgttcctaccattccggattctaccatatgagataaagtttgtgtctcatagactccacgacatcagtgaagcttgtgttttagagatgcaatatccaattctggaaacagccttttcttggcccacttcaagaagttggactaagcttcaggaaaactgatatagaaggagccccagatggggatgcagggtgacccaggtccttgacgacttgacagtgactctgagtctcctcaaacttcctgggctactttgctgtgaagtgaaagtccaggccccatttatgtttcttcttcctctgctattgctgctggcagccgatgaggtaggtgaagggtcataattaatagtgttcggccttttaaatctggtctccatagcacctccacaatgccattattgtgttcgtgctgcctgtggggacgctggctggtgctctcaaaggaggactctaagggaggcctgctgaagcctgccaccaccaccaggttttctgtaattggatctgcacaggggcctcagggagtgcagtatgaaaacacccatttccatgcactcccaaccaacacgctgaacaatctgtactcttggtgagaaagacccatgagggactgaaaa

SEQ ID NO: 23161 - DNA, 2300 bp, Homo sapien
cagttgggtgtctctcatggtcctaagggcctaggccccctatacactcacaaattagaaactgatgatattccatcccatatccagtccatgtaaaagcagtgaccttgtcttcttttgctatttcctctaacccttttatcatggtcggggtcctgagagctgctgacagatcttcctgctgccgagtgtctgaattcctgaatgctgctctatgcagccattctgggtctttaatgcccccaaagacagcctgtgtaggttagcaaagtagtgaatcaacataggccttcagatcagacagacttaggtttgaatcttatttctgcccctggctacatggagcaagtcacgcagcctcccagagtctgcttcttcatttgtaaagtgaagacaagatttccataggtcaagtgccttacagtggtcagtgagtaatgccctttctccacactgtgatgttgaccagtaagttgatcacctcctgacgctgtggattattgctatacttttcaggaactttgtgtctccagatagaattgaatctcagcagctacagttggtccacatccccatgtgccttcccaccccaatgaatagttcaagttccaagttctggccacatatcattgtccagtctcactctggttaactgggcaatacctggttctaaagcttgtatgtcacgaggtattctaggaagcatgactccaacgagcacttgcattcttgatgatggtataaagaagtaacgtcagatttttgaacaaaggcaactaagtgagtgggagactctggtggcttggtatcctgggaatttgcctatgtatcatacagtgtttgggtgtagcagataaagccagtggcctggctggttctaacagagatctttattataactaagaacaactgagctagccatgccttgtcacctactaatagtggtatttcagatggataatttaaatcagcaataaaagtgaactgtatacgtttggaaacttcaccaatagctactctgttacacacagatctttatgactttctgtggttcaatgacaattggcctcatttataggtgcttgaagccaaccaagggcagattgccttccttcttttaaccagctaaagagatgggtgggtcagacaagaagagggtatgatgaaagcagggaaagggaggtggactcttcagagggaggaggaagtatccgtgtcacattatctctgagagcactcgcagatgctgagcctgcagagacagagaaactggcagctgaccagggtcagggatggtcatgtattcaaatattgtgggttttagtcaagtgtgctccacccgattcaacaatgtgatgtgactgctcctagcaactattttgatatggtgaatgttgttaagcataggacctaagaagaggtggcagtctctttcctctccgcacttggcaggccacccactcattcctgataatcacatttaagagagctctggacaagctggaatgcatccaagagaatccctcaacatgctggtgagtgggattgtgaccaggtcatatcaggagtagcctaagggacaggtaatgtgtgtcttggatgaattggagtcagacttaagagtccccagggcagaaacaaaatccagtgagggagagatgcagggagctggattttagctcctaaggtagaaaatttccaaaaggctgatcaaagattaaatggctgccttaaaaggtaatgagttccttgttagtggaggtgttcaaccactgcttggtgggaagacactgtaaggaggattcaggcaagtgggaagggggctttttccagtccctgaaatcaatgattctaacaggaaaagatgctccggggtgcggtgagcgcttacctctgctcttgcagagacactgacagacgttcattcaacatctgttcctgccaggcactgtgcgcgctgaacacagaagtacagcctctatgaagcagccgctgtaggcctcagagacagctgatagatgtaacactgttgtctccatgtttcaaacttcggtcatggtcttactaggtctcctcattaaggggactcactatgtgtccagtaacgctttcttgttaccagatgacagagagtcaggctgtcagagttcacgactttaggtgcacagtttcaccctgtctggtccttgggagacggagaaggggtcaggagaaaacgtgggtgaagaggcagcaaagccgcaggagatatgaactaattgctcaacgtgggtgtagcacggattaggccttttacagca

SEQ ID NO: 23162 - DNA, 2300 bp, Homo sapien
ccacatccccatgtgccttcccaccccaatgaatagttcaagttccaagttctggccacatatcattgtccagtctcactctggttaactgggcaatacctggttctaaagcttgtatgtcacgaggtattctaggaagcatgactccaacgagcacttgcattcttgatgatggtataaagaagtaacgtcagatttttgaacaaaggcaactaagtgagtgggagactctggtggcttggtatcctgggaatttgcctatgtatcatacagtgtttgggtgtagcagataaagccagtggcctggctggttctaacagagatctttattataactaagaacaactgagctagccatgccttgtcacctactaatagtggtatttcagatggataatttaaatcagcaataaaagtgaactgtatacgtttggaaacttcaccaatagctactctgttacacacagatctttatgactttctgtggttcaatgacaattggcctcatttataggtgcttgaagccaaccaagggcagattgccttccttcttttaaccagctaaagagatgggtgggtcagacaagaagagggtatgatgaaagcagggaaagggaggtggactcttcagagggaggaggaagtatccgtgtcacattatctctgagagcactcgcagatgctgagcctgcagagacagagaaactggcagctgaccagggtcagggatggtcatgtattcaaatattgtgggttttagtcaagtgtgctccacccgattcaacaatgtgatgtgactgctcctagcaactattttgatatggtgaatgttgttaagcataggacctaagaagaggtggcagtctctttcctctccgcacttggcaggccacccactcattcctgataatcacatttaagagagctctggacaagctggaatgcatccaagagaatccctcaacatgctggtgagtgggattgtgaccaggtcatatcaggagtagcctaagggacaggtaatgtgtgtcttggatgaattggagtcagacttaagagtccccagggcagaaacaaaatccagtgagggagagatgcagggagctggattttagctcctaaggtagaaaatttccaaaaggctgatcaaagattaaatggctgccttaaaaggtaatgagttccttgttagtggaggtgttcaaccactgcttggtgggaagacactgtaaggaggattcaggcaagtgggaagggggctttttccagtccctgaaatcaatgattctaacaggaaaagatgctccggggtgcggtgagcgcttacctctgctcttgcagagacactgacagacgttcattcaacatctgttcctgccaggcactgtgcgcgctgaacacagaagtacagcctctatgaagcagccgctgtaggcctcagagacagctgatagatgtaacactgttgtctccatgtttcaaacttcggtcatggtcttactaggtctcctcattaaggggactcactatgtgtccagtaacgctttcttgttaccagatgacagagagtcaggctgtcagagttcacgactttaggtgcacagtttcaccctgtctggtccttgggagacggagaaggggtcaggagaaaacgtgggtgaagaggcagcaaagccgcaggagatatgaactaattgctcaacgtgggtgtagcacggattaggccttttacagcaagcgctgccagcagggaactggtggatgtactcttgaccacgctcggctggactctggggagcccaagacgggtaagactaggtccccggccccagcagctggtgggggcgccgcaggttagagacgtgaggccgcgaggctgagggctgtgaaggcggtgggcacgcacggcgtgccggggccgcctggcttcgcggcgggggaggtaacactgcgacaccccgcagacgctgtcagccggggtcgcggccccgcgtgcgcccgatcatctgactgctggggagtgcgggggcgcgggagccaggcgagccagcgcaggcgcgcgctgcctcctccgtccccaccgagtccccagcgcgtgcgcggggccgtggccgaggcctgcgcgccgcccggccgcctgcactgcgcgcgcgcccaccccgcgtgggaggcagcgggaggggcccggagaggtgtggagcggcgcggcgggaggctccgtgggcggccacgggagacagcgccggcgggagcgcgcctctcggcctttcctccgcgcccccgcgtccccagccggccgc

SEQ ID NO: 23163 - DNA, 2300 bp, Homo sapien
aaaatccagtgagggagagatgcagggagctggattttagctcctaaggtagaaaatttccaaaaggctgatcaaagattaaatggctgccttaaaaggtaatgagttccttgttagtggaggtgttcaaccactgcttggtgggaagacactgtaaggaggattcaggcaagtgggaagggggctttttccagtccctgaaatcaatgattctaacaggaaaagatgctccggggtgcggtgagcgcttacctctgctcttgcagagacactgacagacgttcattcaacatctgttcctgccaggcactgtgcgcgctgaacacagaagtacagcctctatgaagcagccgctgtaggcctcagagacagctgatagatgtaacactgttgtctccatgtttcaaacttcggtcatggtcttactaggtctcctcattaaggggactcactatgtgtccagtaacgctttcttgttaccagatgacagagagtcaggctgtcagagttcacgactttaggtgcacagtttcaccctgtctggtccttgggagacggagaaggggtcaggagaaaacgtgggtgaagaggcagcaaagccgcaggagatatgaactaattgctcaacgtgggtgtagcacggattaggccttttacagcaagcgctgccagcagggaactggtggatgtactcttgaccacgctcggctggactctggggagcccaagacgggtaagactaggtccccggccccagcagctggtgggggcgccgcaggttagagacgtgaggccgcgaggctgagggctgtgaaggcggtgggcacgcacggcgtgccggggccgcctggcttcgcggcgggggaggtaacactgcgacaccccgcagacgctgtcagccggggtcgcggccccgcgtgcgcccgatcatctgactgctggggagtgcgggggcgcgggagccaggcgagccagcgcaggcgcgcgctgcctcctccgtccccaccgagtccccagcgcgtgcgcggggccgtggccgaggcctgcgcgccgcccggccgcctgcactgcgcgcgcgcccaccccgcgtgggaggcagcgggaggggcccggagaggtgtggagcggcgcggcgggaggctccgtgggcggccacgggagacagcgccggcgggagcgcgcctctcggcctttcctccgcgcccccgcgtccccagccggccgctccgagaggacccggaggaggcaggtgggccgggggcgcgcggggcccccccgggccgcgggctggccggcggcggggttggggccggggtgggcggccctgggggcccgcggggaggtcagtggccccgggagggtcgcgcagaggcgctgggggctgtggaagccccgcggccgcctcccgtgggcaccggtgtcgctggccgcggggaggccttctcggggcggagcggcccacccggcggggatggggactcctcgtggcggccgctgacggacggcccaactttaggttgaggggcgcggggtgtgcgggacccggcggcggagctgggctctgggccacgaccgccagccgcggctgccccgagagtccccgcacgcgcagtggctttccaacgcggcctcttcccatttctcacttgactccccttgcgcattaaattgtcgagaaacctttggccagtgggtcttcaaagctaaaccaaatggctgtccttgcagtccttggctacctgagatcccttaattctgaaccatccgcacctgggaggggaagttgaaaggagcgctggagctgagcccgcatccttaaggatcccattcactgcttatgatggtagagctttgaattagatgtcaggctgttcacgtcatccagactctggttttcagctctgtgctgagacagtgttttgatacgtatcagaggatgatgttcctatgggacaataacttgctgtatgttctgagatactagactgcgttcatattgtagcaccatcatcgtataaaacgggcgcctttgaaaggtttcagtaaacaccttcctcaggaacatccgccagcacttaaattgtacttcactttcactttgacgtttgttgtttgtgaatcttgtgcacaatttaaagtgagtcgtctaaacagcacaggatcacgtggtgcggggcattgagcaactggggaggaaagcagagacttgaacctgctggagtctagttggtctgcgtttttatgttggagaaccatcctggttccagcttattttgctttcgtaaatatgatgcattttt

SEQ ID NO: 23164 - DNA, 2300 bp, Homo sapien
ttgtaattcacttgtctaacatgagcttatttgactagtagacctacatagaatcaaagttgtacgtctgccttatgtctaatgctgacaactctgaaggcatattggttttttaaactaaaccaacaatgtttttgtttattgaaaattacccaagtcacatgaacttgaaaagcatttggattagttcctatttttctgagagttttcaggaatacttaatttatataagcacttgtttttacttatgtctattgaacatacatagctataagatctctgtgtctgtttgtgtatacagacagacacagagatcttatagctttcatttccaaattttagccatgtgtcaattaaaataatacaaagcttattggtttataaaagaagctggatccaaattgtacctgtgagagatggaacaagtcaaggttacctgctcagatggctacagctttttagtgaagattttttttttatttgagtgctgtagggatgcttttagagaagctatttttgagtcattttgtgttcagcagcttctgcatacaaatcaaagaatgcattccattgtctccaaaaggcttaggatactcctccttcaagggcactcccaaaggcagactatcttacctaaattaaaggttctccgaagtggtcactgaaattgcaaattattctttgtaaagttcacctattttttcttgtgaactttgtaaagttcacaagattctgatccacagtgtttttggaccccatctttgcattagattctctgaaaggtcttaactattaaggattcttttttcagcagctgctctggaacacagggaatcatgtgtttcacccttcccccttttgaacagaataggttgacttcctgagaagtttcagcaaaggttgttcagcataattggagagttctacacagaaggaggagagctcagattcaaaagagacttactctagaactccatggctgggtgagagagcagccagtgctgcggccctgggtaccagcacctagttactggccttggggcttcacaggggtcttcttctgatcctgcttctgacatcaaaaactgtcaaaagaaaattcagggtgcttttcttaatataaatattaagttagtaaaaaactgcaaatagggagacttccaaatcaaaagtggtaagaagcttgtctcacgaaggttatagtaaggtttataaagcctagaaaaggaaattcatacagcttaattctcactggttagaatgagtgggttagtttagtcattactgatttgctgcaatgtgctgagtcatgctgaccaagaaatgaagttcaagcttcatgtgcagtttaagtaggtgttttggagaataggtccttacaggttttcctgagctgggggtgggactttggctcagaggccaaggtttgtcttggcttctattttgatttttgcctaacaggaccattttgttgtctaagcttacgaatgttatcacatttcagttcaatctttctgattctcttctgatggactgctgctctgcttgtatatgtgtctttagtttggtgcctctcatcttttagttatgctgactctagaagtaagaactatgtgtacatagtataattttggaaaatatataaatgcaaagaagaaagcaaaaacaaaaaaacctcaatgagtcccactacttatgcatgctgttacaatctgagctcagtggtgagttacctcagcaagtagaataatagaggaaagaagatagactttggagacagacctggttttctaccccagatttgccacttactagctgtgcgatgttgagctggtattatttagtctgagctttgctttcctcatgtgcaaaatgagaataatacctgccaggtaaggtgttggtgaggatttttaaagtatttagtaagtgctcagcaaatgttcataatattttccttatttagatacttctgatttttttttagcatctaaaatatttgtatcatttgaaccttggttttattgtttattattttcaatatatttatttgaaacttttagtaaatttaatttgcatctttttttatttcagaattttctttctttgatcctaatgatgcatcatgccaggaaattctttttgatcccaaaacttcagtttcagaattatttgccattttgagacagtgggttcctcaggtccaacaaaacattgacattattggaaatgaggtaaggaattcttacattttaagttttgcattgttaggattgttaatggtatagatttttttcccc

SEQ ID NO: 23165 - DNA, 2300 bp, Homo sapien
agagttctacacagaaggaggagagctcagattcaaaagagacttactctagaactccatggctgggtgagagagcagccagtgctgcggccctgggtaccagcacctagttactggccttggggcttcacaggggtcttcttctgatcctgcttctgacatcaaaaactgtcaaaagaaaattcagggtgcttttcttaatataaatattaagttagtaaaaaactgcaaatagggagacttccaaatcaaaagtggtaagaagcttgtctcacgaaggttatagtaaggtttataaagcctagaaaaggaaattcatacagcttaattctcactggttagaatgagtgggttagtttagtcattactgatttgctgcaatgtgctgagtcatgctgaccaagaaatgaagttcaagcttcatgtgcagtttaagtaggtgttttggagaataggtccttacaggttttcctgagctgggggtgggactttggctcagaggccaaggtttgtcttggcttctattttgatttttgcctaacaggaccattttgttgtctaagcttacgaatgttatcacatttcagttcaatctttctgattctcttctgatggactgctgctctgcttgtatatgtgtctttagtttggtgcctctcatcttttagttatgctgactctagaagtaagaactatgtgtacatagtataattttggaaaatatataaatgcaaagaagaaagcaaaaacaaaaaaacctcaatgagtcccactacttatgcatgctgttacaatctgagctcagtggtgagttacctcagcaagtagaataatagaggaaagaagatagactttggagacagacctggttttctaccccagatttgccacttactagctgtgcgatgttgagctggtattatttagtctgagctttgctttcctcatgtgcaaaatgagaataatacctgccaggtaaggtgttggtgaggatttttaaagtatttagtaagtgctcagcaaatgttcataatattttccttatttagatacttctgatttttttttagcatctaaaatatttgtatcatttgaaccttggttttattgtttattattttcaatatatttatttgaaacttttagtaaatttaatttgcatctttttttatttcagaattttctttctttgatcctaatgatgcatcatgccaggaaattctttttgatcccaaaacttcagtttcagaattatttgccattttgagacagtgggttcctcaggtccaacaaaacattgacattattggaaatgaggtaaggaattcttacattttaagttttgcattgttaggattgttaatggtatagatttttttccccatctgaaaggaagatggtaataaaggagaaaccctttaaaagttctgatatttatttgtatttccaggattttcatggggcagtgagttaatactatatattcttctgattatttcttcatgctctgtacttctgacatttgtagactcctggcgggtgcagggaggggcatttttcatatttccttctttgtaaaattaattttgtaaacttttatgcatttcataaagggatttgattaccatcatgttctatttacacttttggttggtttggtaaatatataggcttgaatgtagtctttaagaatattagattttttgagggagggttccttgaccagtatgttgctgtgttgtaggaagagagtgcttatacttttttcaaatatcattacacgcatagaaataaaattttgctcatttttgagaggaacatatttggagtgccagattacctttggaataatctttaagaatttccttcagcctgctgacaagttcagttttcattattgttgttgagtacagatttaaaaatttacccttaagatatgctcatactgtctatacattttactgagaagtaattcagatacgatagactaacttggttcctcagcattggtttgaaagcaataggtacctcagtagttaggttgtaaccatattttccttgactgcttcagattcttaagagaggttgcaatgtgaatgatagagatggattgacagatatgactcttttacattatacctgcaaatctggagctcatggtattggtaagtgtgtggtaaatctatcagttgcttatgtcatctgcacttgtgcttagataatctatatttatgcccatatattgtctgggggaaggcacccagctgatgatgataatattgcctgaagagctgaggatt

SEQ ID NO: 23166 - DNA, 2300 bp, Homo sapien
tatctctgtaatagaaataataacatataccctttcccaaaaaaactgtgtgatgtgttagacacccacatgtctacagatgcatacattcgtgcctggtagactatcagtattaattcctgcctcctttaaaaaaaaattatctaaaaaagaagaaattttttgagatttagtgtcatttaatctacagggaaaggcacttatttttccttgggaaaagtttgagacaatgtataaatcatgagaattaattgagactcttgtgtctatgaggtgcaaaagcaatggacaggggtattattagagaacgttaaaccctggcagctcatttaaagtttcaagtctctgcagccccctagtggccattgggtgcagcagacgattcacagttaactgacaaattaactggagtcagtaatgcctttggtcaagaattgtatagagaaatagggaaaggctggagttttagtcttttttcatatttcaaataaaaattcctcttccagtaggtatgtcagaaaaatctgatgaaaatcaaacatatattgtaccaggaaagtattaactaccatagcattttcctccctcttttctttcttttccacccttcctccaccaagataggagcatattttcttctcgggtgagataattctttgccctgaaacttgtaaagtcagtgtatccagtgtgacttccagagagagggcagatgcctgtcaaattaagtgagttgccaaacatagagcaggaagaaagccattccgagaatcaatattcctttgttactgggtcttccacttgccaaggcattgccacaaagctggaaaggcccagctcctaggagaacagaggttccacctggccactatctcctgtggggtggtaggcaagttactgcggcccccaggagctcagtgagggaggttcaatgtgacactgtgctctgatcctgtgagaaaactcctgtgctacccgacaggccgtgagctccagagaggatcttgccttattcttagcttcaacagtcagcccaaggcctgacaaccagcctttaagaaggaatcaaggggatttgtgtgacccaaagatggtagttttgtctgaggatctagtgaaccacttgttataaaaacagctattatgagttctgtgttggcagctcaggagagacgaaaggaaagggagaggagaggtacagccattacaggtgagtaaaaaaggcctaaggttctgaaccctcattcccaagattgtgggcaaacaattaaatgctctgcaactcagtttctgcatctgtaaatctggaattaaaatgtttgccttacagagactaggggaggttacacatgttcagacaccattctgagaaaacagagcgactgacaggggtctgaaaggtatttgttgtagctgcagaacaactctgccagaccaagaccatccatccctctctgcccccctattcccaaattctcctgtgtggacggcaggactcctaagctcccaggaatgcattcaaataatagatgggtcagaaaatattctgtctcagggccttaatacaagctgttctcagatttgccagtgtcgcgctgccaccctctccccacttcctcctcccttcccactcccccctcccttcccctctcctccagttttattctggaacctgtttttccgaagtcggacccgtttaatctcttaaatgtataattagggagagtgcttgattgcaaaggcctcttccagttctcacatttgctccctttcacactgcagagaaatagggcagggaatctagaggaggggaagaacaagagactggagagggaacagagggagggtggggcgggctcactccttttctcaatgaatgccgaggcctctgcagatttgcataggagccgatcgagccacgccattggttggagggtgcgggtggggcggggcgaggccggactgcgtgggtcgggcagcagcgcggagttggcttgtgagccccgccccctccgggccccgccccctccctgcgcgcgctcgcgcggctcagccagctgcaagtggcgggcgcccaggcagatgcgatccagcggctctgggggcggcagcggtggtagcagctggtacctcccgccgcctctgttcggagggtcgcggggcaccgaggtgctttccggccgccctctggtcggccacccaaagccgcgggcgctgatgatgggtgaggagggggcggcaagatttcgggcgcccctgccctgaacgccctcagctgctgccgccggggccgctccagt

SEQ ID NO: 23167 - DNA, 2300 bp, Homo sapien
acattggctcacacccgtaatcccagcactttgggaggccagggtgggcagatcacctgaggtcaggagtttgagaccagcctggccaatatggtgaaaccctatctctactaaaaatacaaaaattagccgggcgtggtggtgggcacctgtagtcccagctactggggaggctgaggcaggagaattccttgaacctgggaggtggaggttgcagtgagccaagatcacaacactgcactccagcctggggcacagagcaagactccacctcaaaaaaaaaagatggtgaagtcatactacggaaaactatggagacaaaggtaaatttgtagataaaagacacatctgacatgaaaggatggctatagcacattgttgagtgaaaaaaaaaagcaggttgaaaaacaggaagtacaatatgcttctatgtataatacattcaatttgggaagaataggatacatatgaagctgttagaagacagaagtctcttatcaaatgaggcagtatgatcttcctacaataaacgtgtaacttttatattaaatattgttaattgaaaataaagaaatagaaaggaaaataaactaaaatactgtatgtttaaaacttctggccaggcacagtggctcatgcctgtaatcccagcacttcaggaggccgaggcgggcggatcacgaggtcaggagttcgagaccaacctggccaatatggtgaaaccccgtctctactaaaaatacaaaaattagccgggcgtggtggtgtgcgcctgtaattccagctactcaggaggcagaggcaggagaattgcttgaacccgggaggcggaggttgcagtgagccaagatcatgccactgcactcgagcctgggcgacagagcaagactccgtctgaaacaaacaaacaaaaaaacttatctcctggaaaactcacttattaaaagataactagtccttttgcctttgatgctcaggtaaacttcagacgaactaaatgaaaatacttgtggatttggggatgagcgggagtcaagtgctagaatttgcttagcagcttctcttccaccaataatgactttaaacatgttgcaaactagccccaaatgctaacctacatttttaatctgagaggtatgcgtcatcaaatattttggttttatcccgaaagtcagctaacagagatgtaagtacctgggcaactctaatggaatgagaagcaacatcttccatcttaagcattgataagggttaagggaacagctgctctttgcaatgaacaaatctcactctctgaggcagaaattcgccatatagaagactgaatttcttcatctttttgagaatcatttccactacccagaaaaaacattcaaatgagttgtaaataaagtcaagcgcagttgaaaaatcctgtatccacagatgtttcttaggagtgcctatgcgcttagactcgagggctaggggtttgaaagcaaaaggcagccctctaccaggggtggtcggggaaacggcctccaagaaacgaattacacggtgcactttagttacctaggcagctgtttgtctaggaaacagcttattgttttcatttgtcatcaccgcggctcactaggtatcaggaagctcggctccagccgctacctggtgacgctaatgacgtgcgatgtctcgcagctgccgcaattagacaggccaagccttcgcctttaagaagctgactcacgtggatgctgtgttgtgtgcgctcagctgaaagggggaggtgggtccccagactgactacattggccgcctcgagagaaggggcagagttagcctctttgattggctgtacgagtccgaggtgctgggtcaggggcggggcgagctgtcgcaagcctgccctgggtctgcggcttctgagaggggtgggccgcgaagcggaggggtgcgggagtgggggagggtgagccagagaaggggcggggccccgcgaaaaaggcaggaggccgaggacaggggcggggcctagaaataaagggcgttctgggccaaccgggagagctgactgcgggggggcggagccacgccgggtgactgacgttgaggcccaaccagggagaggcggggccaaggccagggcctgactaaacctggagactcgggtggccgaggggcttcataccagctgaagagcgacaagccgctggcagccgcggatctcaccgccgctcagggtgagtcccgcgggaggggctggactcggggccggtggggactgaggcgcccgttcgggtcgggcggcttcgaggcac

SEQ ID NO: 23168 - DNA, 2300 bp, Homo sapien
aaccccaggcttatttctattttaacttactgacagagatgaactttagctaaaatgggcattaataagtttcccaaagagtaggcctcaggtaattccctcaatgcactccaatgtagaggatttttccagaggccagataacagctggtggaggccttactccccaccctcttctccaaaatgaggccattttgacatttagatatttgggaaaatggggagggagggaaatagctttctgagttttgaaagcttcacatggcaataatcacaaacacataaagtgtgtctgttatgtgtaaaagtggcgcaacagtctttgatcccagcctcaccagagattgctactgggaagaagtggcagaaggcttcatcctgcccacccggggtctagcccagacattttcctctgagtgcctggaagtctcagcctggaaactagctctccaagcattggcgtctcctgtggctgcctagatgacaatgtgccacacctggctagtgacactgagaagcttccccaccctctgtgcaggacatcaacaataaccccatccctgcagcatctcccgtttagcccctccatcaggcaacacccccagaggaagagaatgcgtttagcttgggaggtgggggaatttctctggttggagggggcagccaggggcttgtcatgaagctgtgttttcataggaagcacactattttaactcaggttgtacatataagcatataagtgattgaaaatagcccagttatttttaaataaattattctcatcaattcttataatttttgtttgggctggttttgcggggactgatgaaaattatgagggtcttctctcacggcttccttcagggtcctacccctgtcgaaccttcgccattaattctgtcatccttttgcctgagataagctatgcgtttccactttcaagtacatatatacggattcaatacactcactgcctttcttttaaaaagctgattcacttcaaagccaatttaattttgcttagtttttgatctccccgcgccccctttcctcagcccctatacacaggtaggtgagggttctaaagccattttacaggcgtgattgaagcggaggccacagagcggcagcgctgggtcccgagtgagactcccatcatgtggctctggggggctgcgcagctttgactgcctggacagacgcccagagctgcaattcctgggcagtgtgggaggcgttcggctaaagctctttgtttctgctgtcatgagcgactcctcggagaagacgtgggagtcaaggatggggggcggcgtgcacaccgcccgcccacaccttctgcccccgctgcagaccgggcgtatgtgtgtctccaatggaaaaatcctacccaggacgacaccacatccttgctcccacaaataaaaccttccacggaactcagggctgcagaccagcccttcgcaagccaacgcgccccgtgggcactcggtcccccggctccgcgtctctgccaccttcccaccgcttcttctttaaccatgctcttgtttcccctcgctgatcgcaaggctgcgggcgaggattccagagagaggcctagtatggggaacaaacgcttcagaggggtccgaggtgggctggggacagccagtggatgggaaggagggcgctggcgccgggcggctggggtggaggagtggcgggtgccctaccccggcgcagagcagccgccgagctgtcatgtcccgagcggcccccgcgccctccttgcgcccacctccgccgcgctggagttcggggtgtgcgtggagggggctgtgagcgggaagcggcgcggacgcggagtccgggccggtgcgagtgagcgcgtgtgcgcgtgggagagcggcgggagggggccgggctcgcagccgcagcgaaccacggccccgggagcagagccgagcgcgcccccgagccgccgcccgccggagctgcgagcgctgaagccattcatgattttggtgacgttattccaggagtgggcgagggagggcggggcctctcggggccaagccccgcccccgcccctataaatacggcttcccgggctctttgtggggctgagtgctcagtggagagcggggagttgtgtccaccttgccgacgtcgctagccgtggggctgtcctgggaaggcggacggcgagcgcccggtgtccgcactcggccgcctgccgtgcccgtctgcgcccgtgtcatcctcactcgggacgcagggaccgtttttaaatcacaggggcgtgtgtcagcctgccct

SEQ ID NO: 23169 - DNA, 2300 bp, Homo sapien
gggaggtgggggaatttctctggttggagggggcagccaggggcttgtcatgaagctgtgttttcataggaagcacactattttaactcaggttgtacatataagcatataagtgattgaaaatagcccagttatttttaaataaattattctcatcaattcttataatttttgtttgggctggttttgcggggactgatgaaaattatgagggtcttctctcacggcttccttcagggtcctacccctgtcgaaccttcgccattaattctgtcatccttttgcctgagataagctatgcgtttccactttcaagtacatatatacggattcaatacactcactgcctttcttttaaaaagctgattcacttcaaagccaatttaattttgcttagtttttgatctccccgcgccccctttcctcagcccctatacacaggtaggtgagggttctaaagccattttacaggcgtgattgaagcggaggccacagagcggcagcgctgggtcccgagtgagactcccatcatgtggctctggggggctgcgcagctttgactgcctggacagacgcccagagctgcaattcctgggcagtgtgggaggcgttcggctaaagctctttgtttctgctgtcatgagcgactcctcggagaagacgtgggagtcaaggatggggggcggcgtgcacaccgcccgcccacaccttctgcccccgctgcagaccgggcgtatgtgtgtctccaatggaaaaatcctacccaggacgacaccacatccttgctcccacaaataaaaccttccacggaactcagggctgcagaccagcccttcgcaagccaacgcgccccgtgggcactcggtcccccggctccgcgtctctgccaccttcccaccgcttcttctttaaccatgctcttgtttcccctcgctgatcgcaaggctgcgggcgaggattccagagagaggcctagtatggggaacaaacgcttcagaggggtccgaggtgggctggggacagccagtggatgggaaggagggcgctggcgccgggcggctggggtggaggagtggcgggtgccctaccccggcgcagagcagccgccgagctgtcatgtcccgagcggcccccgcgccctccttgcgcccacctccgccgcgctggagttcggggtgtgcgtggagggggctgtgagcgggaagcggcgcggacgcggagtccgggccggtgcgagtgagcgcgtgtgcgcgtgggagagcggcgggagggggccgggctcgcagccgcagcgaaccacggccccgggagcagagccgagcgcgcccccgagccgccgcccgccggagctgcgagcgctgaagccattcatgattttggtgacgttattccaggagtgggcgagggagggcggggcctctcggggccaagccccgcccccgcccctataaatacggcttcccgggctctttgtggggctgagtgctcagtggagagcggggagttgtgtccaccttgccgacgtcgctagccgtggggctgtcctgggaaggcggacggcgagcgcccggtgtccgcactcggccgcctgccgtgcccgtctgcgcccgtgtcatcctcactcgggacgcagggaccgtttttaaatcacaggggcgtgtgtcagcctgccctaggacttcatgtctatatatttccccattcactggtgagtaccctgcgcctgcggcgggcgtctgtctcgcggcggtggctgcgggcccgggcgcctgcttcgtgccggctccgggtgcgagggcagccggcggcgcgggcgctcagcgctaacccgccgcccgagcccgtgcaggagtcaacgtcaaggttgcaaaggtgggggtggggggagggggtgctgagaacatccagacaaaggacgtgaactcggagccctcacctaagtgacggccggagggtttgtattggttggcgggggagccaggggtcacgtgtgaatcccccccaatgaaaccaccctatgcggagagctgcaggaggcgcgcgccccacttggcgcaggggggctcctgctcttcccgggcccctcctctttttctttttgtttgcatgcaagtctcaacgtcgaggccggcagcagcggggctgagctggtgcggccgcagggtttgcagagctccgggggggtggggggcgggaaacgctctccccacacgtaaccccactaaagccacaagcagcagggcacgcgctgcagcctctcaacccctgccctctccaccgcccctaaaaaccgacgcaca

SEQ ID NO: 23170 - DNA, 2300 bp, Homo sapien
agttggattttaaatgggaactcagtgtcctctaactgggatatgtatcaaattccagagggtaattaggcaaaaataataatcaggaaaccaatttccagatcctcaacttgcatcggccttcttccctaaaatggagttatctgagaataagactgaattaacacactaaggctttttccgttttacaaaagaaaggggacccaacgtggggaatgactccatgaataattccatagctcacagggcctctgcatccttgtactggtggtgagaataataacaatttttggccgggtgcggtggctcacgcctgtaatcccagcactttgggaagccgaggcgggtggatcacgaggtcaggagatcgagaccatcctggctaacacggtgaaaccccgtctctactaaaaatacaaaaaattagccgggtgtggtggtgggcgcctgtggtcccagctactcgggaggctgaggcaggagaatggcgtgaacccaggaggcagaggttgcagtgagccgagatcgtgccactgcactccagcctgggcgacacaacaagactccatctcaaaataaataaataaataaataaaataacaattttcatttaatgactttgttcttcattccccctgctcttgggggagaatcctacaagagcaaaaaaaaaaagtataaaatacgaaaaacggctttttccatgtatgtaaatgtgatcaataaaatactctgaagcataagaaaataatatgtcaggataaaaatctgtgaaggaagtaggaatagtaataagagttccaggagataaaaagaaagatgtaaaattcctgaatgccaatcagctttttcataaattttaaaatggatgataggggctaccaaattgtcgatgttacattccactggatccattttaaagtgtgaagtcacagtaggttttaaatatcaatatttacaataagccagaaaccacagtttttgcagctacttaacttttgaacttcattttttaaatgtgctgggggtagacagtggatagctttacaaaattctgttaggggtacatacataaacaagtaaggcatgggccctacctgtctgacgacactctctctgctttttccacttctctaagttggcctctaaacagcaccttctcagcacttgggtaataatgacatcaaaaagcaatgaaggccaggtgcggtggctcctgtctgtaatcccagcactttgggaagctgaggcaggtggatcatttgaggtcaggagttcgagaccagcctggccaacatggtgaaaccatgtctctactaaaattacaaaaaaaatgagctgggagtgacgctgcatgcctgtaatcccagctactcaggaagctgaggcatgagaatcacttgaacccccggggaggcggaggttgcagtgagccaagatcgcaccactgcactccagcctgggtgacagagcaagactctgtcttaaaaaaaaaaaaaaaaaaaaaaaagcaaagaagaagtaagcaactccccctcctcccatatcctaggaagtacagagaaaactattctatatgggttgagcccctattatggggcaggtcctatttggggcattgaattcatctgtctttattgctctaatagggacactatcactcccattttactgatgaggaaatggaggctcagaggaacacataagctgtttatggacttacagctgctacagcttacagctggtaagcaccagagccaggattcagcccagctctggcttaatccaaagccagtgcttctccatgatatcatccatgctgcctccagaaatcagagcagaattaggggccaccttggttttattttctttctctgataaaagtgaagtagggcacaagaccctgcccagttcttttcctacaggcctttgaacattccccagcaaagtgagaagggaaagctcagggctacctccagtgctagcgcagagggcgggagtatcagctggctggctggagctggccaagcccctcctctcctcctcctgcttccccctccatccaggctccaccgggaacctgtcccagacgcctaccccgcctgagccagaggaagggaggaaaacaatagcaaaaaccaggacccttcggacttgccgctgaatggggattttcgtcggatgttgagtttacctggaatgccccggtgttattttgggaaggcagacatcccacggaaacaatgaagtggaaaagaaaacagctaaagcaaaatctagagcccagtttttgccaaacc

SEQ ID NO: 23171 - DNA, 2300 bp, Homo sapien
gataaaccccacaaaaattcaggagcttgctacattggtgatattttaaaataattatttaaaaaactgggggggtagttttagacttaggagagatgtaaagagagtacagggatttttccatatattctttacctagcttccccttatgtcaacatcttgtgtaagcatagaacatgtatcaaaacaaagaatgatcctggtacaatagcattatgtaaactatacatcattttggatgctgaagtggtccaatgatcttgggcacgtcaagacattttccccagaatgaaaaacatgttactacaccttgcacctctgccaaaaagaaagaagcatgacacttagcagatctctgagtttagaaatcagcatattttgcccttgggaattctgttcctatccctttagcagttgacgtggaaggtggctactgatcagtagctcagatcaagaacgggctcagggccaggcgcggtggctcaagcctctaatcccagcactttgagaggccaaggtgggtggatagcttgagctcaggagttcgagaccagcctggcaacatgttgaaatcctgtctctacaaaaaacacaaaattagctgggcatggtggcagatgcctgtagttccagttagtctggaggctgaggtgggaggattgcttgagtccaggaggcaggggttgtagtgggccacaatcatgccactgcactccagcctaggtgacagagcgagaccctgtctcaaaaaaaaaaaaaaaaaaaaaaaaagcaaagaaaagaaaaaagaaagagcccagcactgtcctctgtggttagggcggtaagggcaaccttgcctcttgggctgtatcaccggacacacctcacaatgctagagctctctgcaatggagctgcaaaggctatgaggaacctccggcaagcccccaaagaaccacagtagagcccttgaaggttctggagcatagccaggccaactcttaacaacaacaaaaaagaattgggagatcttttattccagtaatcttattttaaaggtaaaaaggaggcctaaagtcataggcataattggcagaattgacttttgttctggtgtttctctctgtagtcattcttcactttctgatgcaattttagcacatcttaaatattaaaatgttttggaacaaacttagagaaattatgaagctaatttaggaaaagagcacaagaatctttgatttacaggcaatttggggatataatttagctatattgaagctatgcagccaacatgtagatggtcattattattacaccataaattttgtgaggtcaggaaccttgtaattttaaaaatattcactctgtgctttgttgaataaacggataaaacgtatagacatacatgaactactgatgagtggctgtgtgtgatgtgtagctatgtttattatttttaagattcttattgtatttgttgaaggccaagttgaggagggaattgcttaagggaaatgaaaaggggtttaaccacagtccccaccattcaggggcatgcaatctagtaggttaggggacaggacagacacaccatgataggtgatcgagaccttttaagagcagtgtgatgaaattgctatgggaactgggaggaaacattttctaggactggggaaacactgagtgtgctagaaaaactttgtgctcctgatcagggaacctgggttctataactgcttctactactgatttgtcctgtgacttcgcgcaccaaatttaggcttgtaaattaaactcccagatttctgttttccattttgcagctctaggggttgaatgaaccattaggttccctcggacaaatgacctccgctaatttcctatttcgttgttttctcacccctacaccccaccgttccgtgggtccctcctctccaggaggccagacgaggaaataagcgaggcctctttaaaggagctctcaaagaaaggtacccggggtatcccgggctgtggagcaagcgcggggcgccggggacccgggtttcccacgcagccggggacgccgttgcgtcacggcgcctgcagccaatcaggacgtagccttccgggacgcattactagggcgacggccggacgcctccgcgttacgggatgaattaacggcgggttccgcacggaggttgtgacccctacggagccccagcttgcccacgcaccccactcggcgtcgcgcggcgtgccctgcttgtcacaggtgggaggctggaactatcaggtggggttacggcgcgaggaaaatggcggcggccgggg

SEQ ID NO: 23172 - DNA, 2300 bp, Homo sapien
ttgattcagatttgaaggatgtatttttgcttttaatcaatactatgattcagaaactcaacacatttggaaactggtttaaacatccatttcaactttctcctgctaagtactccctccaccagcaaccaaaatacaacaacaaaaaaaccgttcacttaccattgcaattcaacagcaacattccctatcagctgtgcacatggtgtgacagcttgtgtcaaaatcacctttgagtagcttctaattacacatgcacagttcttatagatgaaactggcctgggtaaactgtgaagactaactcagtggagaccacaactctccctctgtctagtgccctctacccatttccaaggtagggaagggtctcatttcaatcccttacacaagctgatcaattcactgattatactccaatgtgaatagatgtcataagtcttgatcattcaatcagtctgaagacgtaaccggcaagtaatctgatttagtactcttgatgtgttttttgcagtatataatgtacctttcccagataaattccttaccacagactcaaagtgcataagccaaactagatttgaatgcccagttcctaaggctttatttcctttcactttacacatttacataagtcttatggagaaagactttttgatatgtggtgtctcttttctcccagaaacttatttgagcctattaggcacaagttttggtggaagtatttaagtttttcggcagggaatgaaggctagtgggagtccttggtaaattcctgatcactggccaaaagcagctccttagtactgctcaacatacatatttccttagtccattctgtgtcccagttgcttggatttgaggacttcatgactttgcttttctcaaaaacttccaataacttcctcactatccttcattctcatcctatttcactgagaaaatcaatcaaaagaaatttgcacaactcgtaccaccctatatactctcctactactgtgtgagttcatacactttgccttctttttttcataaggaggatctgtccacgcatgtatttagggccaatccctccacctatgtcttctatctcacctgctcttgcctactcaggaacagagccccagcaattcccctttaatcagtcattctatcttgaccatcaacatattataacttctcccatcattccctcttggctcacctctccttctagtgaccactcatctctgtgttcacttacacagctaaacttcctgagctgtctatactcactgtcttcaatcctctttcatttctctctcgaacccatgccaatgaagcttctgccctcatcattccaccagaactgtcctcggtgacctttatgtaccaaatccaatgcctccctccctcttggcttcctggtcaccttactctcttggcttttccccaacttcacaggccactctgaagtcttctttgtggatggcctggttctccgatccctaatattgtactgcctactattaactaggctgggatcttactcttctccatccacactcattccttaggtgatctctttcagtcttgcagctttaaatatcatatgtggtcatgcctaccaaatgtgtatctcctgcctctctcctttctagactcacatatttactaatttcataactccctatggatatctaataagtagctcaaacttaacatggcttaaatggaactgctttttggcctttcccccaaaacctgtacttaccacagtctttgttgcagttaaaaggcaaaactgcctttccttcagttgaggccaagaaccttgcagtcacactagttccctctcattttcttatactccacacccgacccatcaaaaaatcctattgcttccatgtggggaaaagcaagagagatcagattgttactgtgtctgtgtagaaagaagtagacataggagactccattttgttatgtactaagaaaaattcttctgccttgagattctgttaatctataaccttacccccaaccccgtgctctctgaaacgtgtgctgtgtcaactcagagttaaatggattaagggcggtgcaagatgtgctttgttaaacagatgcttgaaggcagcatgctccttaagagtcatcaccactccctaatctcaagtacccagggacacaaaaactgcggaaggccgcagggacctctgcctaggaaagccaggtattgtccaaggtttctccccatgtgatagtctgaaatatggcctcgtgggaagggaaagacctgaccgtcccccagcccgacac

SEQ ID NO: 23173 - DNA, 2300 bp, Homo sapien
ccttcactgtagtagtggtgacagctctataacccagggtctgcctgtgggaaaggaaggatccacttagactctgggatgagctaggtctatccaccaagtagccagcatttacccatcatccggacattacaagccccactctaagctttgggaatcccaaggaatagcttttgggcatcttgcattgtggtggttgaggcaaacatgcaattttttaggagactaagcaaccctcactctattcctaccctcatctcctcagactcttttggttggttatgaagtgcaggacccggggcaggctctgtcctcacatgggaatatggaggaaaaagacacggtccatgccccaaagctgctttatagtggacgattccatggaagttggaactcctcattagcatgctaactgctgttcaaagcgaggtgtcctgagtctctggaagagaaactcagttgatagtgggcactcaacactaactttcctgataaaacccagagtgaaatgttggtgaaatgacccgaggaccatcttcaggcattggcaggatgctttcctcaggggcatcctgaggggtcatccttctaggtgaggaccccatctggacaggctctggggctgtttttgcttccagttcaaggtggtaaggccaatcctgggagatggaaggtgctcattctcagaagacccccaggaggcaccctattctacatgaccagtgccactctacaggaccacctgctgataaatctttccagcgccagctccccatgaaaatgctttcccagggcgatagcagcatagcatcccctcttcccttcccaggctggacatgaggaacagccgcatatagaatagctccatgtctctgtgaaattgtcatcaaagacactgcctgtcaacctgctggatgcccccagtataaaatcaaatgtagttaactgccccagaagttgaggccaggaagagttcctccctccccaacctcaattgcttcctgctcttaatccgaagaaaaccatgatgtctccctttttgcttcagtggctgggaaaattaatgctacgtaatgtgctcaatgatagcagtttctcttagcccacatttctggtatttttaattcctattatcacacacgtgcacgcacacacacacacatacacacaacacacacacatgcacacagtagtcatagtttttcctagtctctttctggaagcagatggggaacacatctaaagggttgagttgattcattcaacagtacttaccctgaggggttccccagtgccagagatagtggcaaggactaaactgctttcagtccagtaatagataaagacaggaatgcaaggtcacccacaccaggggccaagcatcaggagtgaccaacacgacagatgtgcaggggagggagtcactactatggctggcagccatcaggtaagtcttcatgacgagggcaagatgggtacattgtggggactaagtgcttggaaatctgagtgcttttacacggcaggcagatgtgcctctcagatcctggcactgatataattcctgcattccttccttgtttggatcagaggctggacattgatgccacccagcttcagggccttctcaaccaggagcttctaacaggtatgagcagcccaagggcaagctggccccatcctcctccctgctggcaaccccaccccacaccccactgtcaacacttcagtccttcctgtccttctctcctcaggacctccaggggacatgttctccttagatgagtgccgcagcttggtggctctgatggaagtatcctttgcggtcatccctcccatgctctgagcacccctcagctctgtgggcttccccagagacctaattaggacagtagggaacccttttcccactcagtattttctcttcttccctgtccttgagtttctggggattctctactaactcactaacataccacagcaacaatgataatagttaccatctatcaagcacctactatgtgctgatcagtgtactggggtgtgtgtgtgtgtgtgtgtgtgtgtgtgtgtgtgtgtgtccttataattcttgaagcaatccctctgatacaaaaaagtatcatctcataatacagtagaagaaacaggagttcagagaggttaagtaatttgcccagatcacacagctagtcaggactcatgctcagatttgaagttggagctttcagcctccaaagtcgatgctctaaccttatcctaaaccgcccctttatagcaccgttgggaactattttccc

SEQ ID NO: 23174 - DNA, 2300 bp, Homo sapien
attcagtctcgctaagtcttacatcagacacaggcctagaatccccaaacaggttcacaaagcaggagaatagttaggtgtcctggtctgaagcttcgaccctttgagctgttctcttgctaacattcaagtgaaaccatcctcaggcccgtggcctctgatagagaagattgatggagatggttcctttttatttaagatgagagcagcactaaggggtaccttggaaagatctttagcctcctaaagtagtcagtccccaaatcctccataagcaggatgcatgctctccaaatgcagcttcaaggtacatccttgagcccgtcttgcaagaaactgccaccctcctaaacagatcatctggctcaggattggtgaaaggtgacttgcccatatgaggaaggatggagaaagacaggtggagtttggaatacctatcctcacaggcactcagacccacctctctgcccatggctgagagtgctgagccaccaagagggaggtgcatctgcctggggaccacagatgaaagagaggagcaagatgtggccacagacaacaaagagtgattacagcacctccaggccttccaggggagcctgcctgtgacagtggtggcccagccacagagcgggggtcaggatctgactctggtccctgacatcccagctatgaagtggagggttgggatgggcattgagagaagcactcaggtgcaaggagccatcagcgtctcaggtcccagagctggagaacaaagtggcacttaatccaggaaaagcacagaacccatccctagaactagagtcaggtctgtgcatgaccagtcctgggtgtgtggtttgttgatgctggatactctaagcaattgaccaagaacccccacgttgttcccccacactcacacttctcactgccactgagcaagtctgttctgaaggatcaggagcctggacagggctatgaggggtcaacagagggagcaggacaagataacgggtgagcagggagactgttgccttctaattataggaggcatgctgcccacacacctctgcatgcccactgcctccccatgcacccacacatgcatgcacactcgcccatacccagagccacgggacactgctgaccctctggagaagaactgattccatcattgcttttgccataagggcccaagcaagtcaggctcccaaacctgctgaggctattgttaatgtcagcagaatcgcgttggagatgccaccctcccatacccctggggcagtggcctatctcctgttttaccttggagcccagccctgtccctacccctgaaaagaaactttcccctttcccgttttccctgcaaggcatagctcataaataatcatttcctgctgcataaccattcgaaatggaatccctatgcttgactatagtggggaaaatttgtttagcaaggggttttcattatataatatgtatgtgacatctggtaataggaactgcattatatttattgttttatctctaagaaaacattgaaataaaaggaaaatgatcagggcccattattctccaatgagaaggaatctcggggcttcactggagagatgaaacagagaaagtgaaaagaattcaattctgtaatggtatagcagtccaaagtattctgctaaacattcaggagagaaggggctttaggggccccagaagaaaatcagtgtcaaaatgatgtcactagtttccatggaagttttctctctatataagcagggagagaaaactcagaaactcaggatgctgttagacccaatgagatgaaactgtgtgtggtatttccttgcatccattgtgtccagggtctagatgaaatgacaggctaaacactactgctttttgagacttcagctgagcactgtctccatttatagagcctgtaatgttatcttggtgaatggagacggtctagaaggtggtgggtctttcttggtgactggggtccatgcacagaggaggctttctcacaatcattgtgtttcctctaattccagcggttccgggagaaatttccacccgtgtttttttcctcgttcagaaacactgtccaaagctcaaataataaattccgccgcaacttcaccatgacttaccatctgagccctgggaactatgttgtggttgcacagacacggagaaaatcagcggagttcttgctccgaatcttcctgaaaatgccagacagtgacaggtacagaaccctctgggattgtaaatgttttattctacttaactttataaaaacacattgtgta

SEQ ID NO: 23175 - DNA, 2300 bp, Homo sapien
tttctttgcatttctttaggacactgagcactaaatgtcagcggcatgagtgcaggagccagtcacatcaggggcagtcatggcgtggcagaggaagtgcaggtatggccacagcacaatggcaatgacggcatttcctacacccacagttggcactcgaagaacagccctcacaggccaggcttggacagccatagcaggatcagtgtatttggtagacacaggtagtggcaggggaggccccagtggggctccgtgacacagaagccatcacatacagtgaaggagatcgagactcagagggagaggagggctgtggtgggtcccatgcatgccgcaaaggactgcatctcagggcagctatgcagtgctcagcagggaatgccagaaaggcattggaagcatttaaggggcatgccacacggccttcagagttggagcaagtccagctaagaacttactgttaggtgttgcccagtttatagccttcggctggaattctctggaaaaaacaaatcactgagaattggcttctaaagagcacctataaatgggaggaagaacaccaaagaatcaaagatgccagaaaagaaaacagcccctgggatttgtgcacaggtgttcttgacagggtccctcacctaagccattcttccggcacaattatcacccagagcggcttgtttcttggcacctagaacactccatcgggagctgtttccctttttaactcagtactcccaaagactgctctggggataacagctcccactcttagggggaaaaatatatttttagagatgggagatgacaaaaccatcatcaataagcaagaaaactcccaattaattttcttgagacactgtcttgtgatatatccttgtgggtagggctttctgaagcattttctcaccatttttttctgaaactatggctttccaacatttttcattgcatgctctattagtaaaatcattttgaacatgcaccacagatatctgcgtatttattcactgatgatgtttatgcaatagtgtgtgtgtgtgtattgtttactgtatttatagtgaaatttctaatagaaggtgtccgctgggatgcaggaatcccactaaacaaacacaaggcagacagggtaagcatcataatcctcagctcacggattaatagactaagatgggaagggacttgcccaggtcacacagccaaaagttgcaaaactggggttaaaactcatatccatactttccagcttctcagattcttcattcatgtgccaaatatccctttctactcatcagaatttgggaatggaccagtcataacagtttttggtgatttccacattgtttccctgttttacctattttatcattattgcctatagcatagggtgtgccatgcgatcagggttctggaactggcttctaaagagcacttatgaatggggatgaagaacatcaaggaattaaagatgccagaaaagcaaatagccccttggatttgagaacaggaaacatgcactttacacgcctcatctctttctgccccatccagcaagcagggatgatgcagagaccttccctgggtctcgccatgcccaggagttaatgtgttctacaatgtatttgtagaaagaagatactgcgtctagtagaaagagatgtgatatgattgacgtggagtggccactcttgatgcaggagacatggcaattgtactttcctgtatgagaatgaggcctgaaggaaggttgcttccctcagtcttttctcagcagaggggttttgtaaaacaaaccaaaacaaaacacaaattccctgaagcagaataaagataaagaaacttaaatatctggaaacaatgaaaactgcaagagccaagaaacgggcagcttaggggccccaggaagtgaggtgggataaggcagagataggcttggggcggagaatctggaagctgttgctgtttacattcaatgtcctctctctctccaagaggtggcaggccactgcccaatgctgaagtcactgtttaacgaaggtggagcctgcctttacctggtacacccatataaggaaaagcctgaggtcaggagtaagcagacaccagcactgctctttctccaagacggccggccatgctctcctcctctgccagtctcctccaccactctctaacctgagagcctgtggaacctgcccgtctcccctcctccatcagacacacctgcctaggaaacaggtaagttgtgcgtggtcatgtcccagagctgtggaccaaggcagtcctctaaacat

SEQ ID NO: 23176 - DNA, 2300 bp, Homo sapien
gttaacagaaatagggaacttaaggaagggagcatgtttggggagaagacagtgaagtcaacctttgaaaggtgagtgaaattcacatggaggtggccaatggcatattatatctgggtctggaagctaacagggaagtcggggcctggtacaaatttgtgactattcatctgcaggggacaattaaagttaggactctgggagatgctattcatcaacttatccatgaaccacaggcatagaatgaagcaccatgggtgtacggttttgcttcttggggctgcagtcttggggtcaccttcccagctgtatcagtccattctaacattgctataaagaaataccagagactgggtaatttatagaagaaatgaggtttcattggcttacggttccacaggctgtataggaagcatgatgctggcatctgttcagcttcgggggagacctcaggaaacttacaatcatggcagaaggtgaagggggagcaggctggtcacatggccagagcaggagcaacagagcaaatgagtggggaggtgccacacacttttaaacaaccagatctcacaagaagaacatactcgctatcaccagaacagcaccaaggggatagtgttaagccattcatgagaaatccacccttatgatccagtcacctcccaccaggccccacctccaacactggggactgcaatttgacatgagatttgattggggacacagatccaaaccgtatcaccagctaactatgtcctctgcctcctagagccccactcgtggtgaaggccttctggagccccttcttctcgattgcccctttctgggtgtgcaatactctccagccagcctccatcatgtccacctttcttagatggccactgcggcagggaggtcccagcagtcaaggaaaacctcttagcattttaggcatcagaactggagaggtcccattgcccagtacccccttttatagatggaaaaattaagatccagagatgaaagggctctatgaaggccacaaaactcatctctggccctaccctcacgaggccatcccaagctccctgactcccagctgggctcctctccataagctaagtgcgggtctgttgtcttacaggactacacgcgggtggtgtgccctgtgatcgatatcattaacctggacaccttcacctacatcgagtctgcctcggagctcagagggggtgagttgggctaacacctcctccccagtaaggattttcttttcctctcagtcactgcttttaagtggggagagtgaaggaaaagctcttagttgcttgtcgagaaagctcagcctgcaacctgcactataattaccttagcttggcccttaccaccaggactgtggatggaagggctagggggtgggcaggatgctcccagcacccagagctccagctctaagatagggctcaccccatttaatgtccaaaaatgtgatgggagcaaggatttcccagctacatgtggcctgcattgttctgatgccagcagtgggcaccaccctctcctagagacgtgattattctgttaacaggagtagggaccttagagaagggagcatgtttggggagacccaccccagctctccacatagggcccactgttgcccccacttcaagaatgacttttaggtgactcaggtagtttaagagcctctcacaaacctcctgctcacaccttcctgagactcagtgccaaggcccacattccatgactgtccatcctgtcatcctcggcccctacccctaggctttttatcctctgccctttatttctaaccctacacagcagagaaggctcagagaggtggtagtgggtagaggaagaacaggaagctgtgaacggcgctttggcagccatgctgctgatcagcctagggaaacctgcaatcccagggaccggcctctttgagacctacctctccaggacctgggtacattcatgaccttctggagagggtgcagaatgagcaagtgcttttgagagaccaaagcaggtgggttggtgctgtgttgtagggtttgactggagcctccacttccagtgggagcagctctccccagagcagaaggctcggcgcctggaccccacggagcccatcaggtaagtgggaagagtctgtgcaggggtgggcagaccatcaccactggatcctgtcaagtgtagggaggtgctcaatatcagatgtcaaagcatcaagcagacaaagggagccctttgccaggccatctccacttttgcctttattttaggaggtttctatcctc

SEQ ID NO: 23177 - DNA, 2300 bp, Homo sapien
gaagtaatgcattgaaaatgagcatttctttccatgtgggccaattggttttcagaggcaccttgttactgtcagaatgagtcacatgtgggaggctgagggccaaattaagtctgtgaacttaaaatcaggcactcagtgaatctagagtttaaaataagaagacaacctcatttgggggaaagaatgaaccaggaaattaaatggcttcaaggagaaacagaggttcctgcctgtgctggccaaagggtggttggtgcagaggattggaaaagcagtcctgcctggttcccagggacctgctggttttgatgggctgcctgattcccatttagctgtccaaaagtttcggtgttcacagctctttgacacctctctgggcaatgtggggagttttcctcactgcacatcaggtacagggctactcacccagaaatgagaaatttgaaaaatatatgtacagtggctcgatggctccaagaagctggtgacttaggcttgcatattttgaaaatgtttcctgcatgattttgatgccgtagatggggtggcctgagggacgtagcaagtaatgaggctggaaagctagagataggcctgttcttgatggtctgggatgctatgctaaggagtttgtactttgtcttagaggcagttaaagtttttagcagctgagtggcagagtcagatttgcaaatcagaaagacaactttggcagccatatgtagaataaaaggagaagagcaggagatagagtggggtcgggtttaggagtccattgtagtactccaggcttgaggggatggagaagaggcaggctgaactcaaagagcagttttggagttagaaccagcaggatttggtctggttgatgggctgggtgaagcttcttcatttagtgctgcggggagggaagacaggtgatgattctgttaacagaaatagggaacttaaggaagggagcatgtttggggagaagacagtgaagtcaacctttgaaaggtgagtgaaattcacatggaggtggccaatggcatattatatctgggtctggaagctaacagggaagtcggggcctggtacaaatttgtgactattcatctgcaggggacaattaaagttaggactctgggagatgctattcatcaacttatccatgaaccacaggcatagaatgaagcaccatgggtgtacggttttgcttcttggggctgcagtcttggggtcaccttcccagctgtatcagtccattctaacattgctataaagaaataccagagactgggtaatttatagaagaaatgaggtttcattggcttacggttccacaggctgtataggaagcatgatgctggcatctgttcagcttcgggggagacctcaggaaacttacaatcatggcagaaggtgaagggggagcaggctggtcacatggccagagcaggagcaacagagcaaatgagtggggaggtgccacacacttttaaacaaccagatctcacaagaagaacatactcgctatcaccagaacagcaccaaggggatagtgttaagccattcatgagaaatccacccttatgatccagtcacctcccaccaggccccacctccaacactggggactgcaatttgacatgagatttgattggggacacagatccaaaccgtatcaccagctaactatgtcctctgcctcctagagccccactcgtggtgaaggccttctggagccccttcttctcgattgcccctttctgggtgtgcaatactctccagccagcctccatcatgtccacctttcttagatggccactgcggcagggaggtcccagcagtcaaggaaaacctcttagcattttaggcatcagaactggagaggtcccattgcccagtacccccttttatagatggaaaaattaagatccagagatgaaagggctctatgaaggccacaaaactcatctctggccctaccctcacgaggccatcccaagctccctgactcccagctgggctcctctccataagctaagtgcgggtctgttgtcttacaggactacacgcgggtggtgtgccctgtgatcgatatcattaacctggacaccttcacctacatcgagtctgcctcggagctcagagggggtgagttgggctaacacctcctccccagtaaggattttcttttcctctcagtcactgcttttaagtggggagagtgaaggaaaagctcttagttgcttgtcgagaaagctcagcctgcaacctgcactataattaccttagcttggcccttaccacca

SEQ ID NO: 23178 - DNA, 2300 bp, Homo sapien
cctgcacagcttggttttcatgccatctgattttacctcctgtgcctacatcctacaccatgcctccccatcccagctttctgaagtggtcttattcattgtcagacacccaggaaccagtttttgaagaccttcattgcttgagcccttgtttcatttctaatgtttgcagttttgtcactcttctatagcatcccaaagtccccaatgcattttttggaaaataatctgaattagaaagcagggccagatccccagctcctctcctgggggagtctgtgaaccctgccatggcttttgaatattccaccccagagacctagaatcgtagactcaccatctgtttggggaagtgagtctggacatgcccgtgccctctaccactggctgcaggcccctgccacttgcctgtatttatcctgggctgggtgtgagcctttttcctcacagggtcctcagagactcatgctgcacacaagcggcaggagatagagagagtcccaccttctctagctcccatcatgtcaagatcaagtgtgttttactccccgagtttcctgatagacatggcagccagtgtggccactggcagtgccaggggtgactgagattcctctcttcctggctcagtctccttgactgtgaaatgggagcagctcactctagaactgtctgacccccacttgcttaccagcagtctgagtcttttcaggttagttatgaataactgtgaagtgagaccttatggctataaataattatactacagatactctgtgtctattacttttaattattttaccagaaatgctagattaaccaaaaaataaatcagtctcagtcctcagatgttgagctgattaagaaagaacccctttgggataccgaagaacatgaacacacacatatacacacacaggcacacacacaggtgcgcgcgcacacacacacacacacacacacacacacacacacacacacacacacacagaggtaccctggggaattctgcaggagctcctgcaatgtgctggctctggtattttggtttttcagaataaatggcctgatgtgaccttctgaggtgacagtctttgcatttggcagtggctgctgccatcccagggcctaatgagagctagaggctgacagagggatagaggaggggacatctctgtggtgtgggaggtgtgtgccacctagggcatcctctttcctcctgatgttctgtccatgctccatcctccccttcacattcttcttctgtcccctgaaaagccagcctggctatacagccccagggtcctgggaccagggctccagtggtggctggccctctgccctctgctctgtagaagcccaacacttccctgcaggccccaaggtcaggagcagccacctctgagagcaccgctctggacacaaagctagttctttcctgaaggaaggaggttgccactctggcctttctatcagcaggagcccttatcgctgggaatacagagccatctgatcccctgcatcctggacaatgctggtttcaagtacaaagccttttctgcgtgccatttcctggagacaagatgaggcacttaaaaaataattaaattctccttatgtcacttgtcttcttaactgtaagcactacagagatctttcaaggaaatgcaggagagcagggcacactcacatgtctctgccctgggatttgaatgcccagatgaagagaacaaccaccccggctgtcttcttcctaatgatcctgctcttgcaacccgatctgcatgcatgctaggcaaggagagagcctgaaacatctatagaactagtagggccactctctcttgacgagctctctccaaagaggttaactgtctcttttctctgtttgcactatggtttggaaataaggattttcttccttagttgtctgggctgaagatttatgtagcttctcttattcctcagagaacagtaatcattgatgtccctcccaccccccacctcccagccatagagactggtccaatcaatatttatgtgcccatctctcgcagctgcaacatgcaggcataatagatgccagattccttgatggccactgaaaaattagctggtgcctgtatttcaggcttattgtttcctaggatctcagggagatcaggccacgtggtctgtggattaattaaggcacccagataattggctattaatagatggccaattgatggctgccagctgggtgctgaattgactaatgtccttatggtgggcaggtggtctttatcagaagaggagct

SEQ ID NO: 23179 - DNA, 2300 bp, Homo sapien
acgctttgcaggcccgaaactgcaggtcccgggtgaggctcctgaaagaggtccaaggtgcttgggatgctgcagaggtgagttctcttgctgctccccctacccctcccatgatgatcatctacctgggcctttgctgggacaaagcattggctggggagcctactcccacctttcagtgttcagagttctgataaaggcaaatgctagatcaaccctggggttctgtgtgatggtctaagagcgcaggtagatcttgaaagggctggcaacagtgctcaccttttctgggctgtttaatttcaactgcggttcccaaccccaaacatcttatctacagtccagtcaagaactctctgaggttgaggcaggacttccctgtggctgaaagataaggtaccaaaaacaggaggctttgagtagacgcctccatttctcagtacatgtctttggggagacatcttattgaagaaggaattccagagccctgatttacagctgtctcacctgtgcggaggtatgggagcttgccctacactgagctttatggggagagaggggcagggagaatggtggctgccacagtgggtgcatcgttctcacctccccaagaaactcgatgaagcaagcaaccctccaacaaaaatggcatggttcccgctgcctctgctccccagacagagcaaggtttccccactttgagtggtcagataacaccagcaccttgcattcagctttcaccactactcatttgcttgtcagaggaggtattttccctccattttacagatgaggaatcgaagactgggagaaggtaaatgacttacccaagactcacacagtgagtgtgacagctaggtcagtactctctggtcagtgatctggccgtgattccagcctacttgagcctacatgggaattggagttagaatttgctttgcttctagatccaagcggttttaatctgcaagtgggagggggatacaattcccaaaggcccttgggaaaaggggcttttgaaagatcaccctctgcacccagtatcctcctgcccagggtcactttccaagaatcccaagtggttgttccaactttggacctcttttcttgcaagcacaaagccctgatgcttacagggagagaaaacctttatgggagataattgcgccttaattttttaaaggatatctttaaagttaaaattagaccagctcagctttccttccgttaagcagaaaaagttaccaggcacctgcaggcaggcatagaaacaccctggggagttggctgaccgcggccttggccctcagtagccaggcaagtgaaccgcgggtttggggcagcagccctgccggcgccctggaatcccagccttggctgtggtaggacgagcacattgggggtgggaccccggcttcagcgccacgtgcagcccccgcgatgagcgggaaagtcctcccaggcacagcgccgcctggcgagggccggcccttgggtcccagctggcagctgggggtggcgggcatcccgagtgcaccgctcccgccccgccccgccttgccccaacccacgatggtctgggagctgcgcccagggcttggcgctggcggccccgcaacagcaccgagcgtttcggtcggcgggcggcggtagcgccccctctcagagccccgctcactcccacctgggctcgctccgagtcggcctgtctgtcgggcccgccctccccgctcactccctccgccctcgtgctcctcccggggtgcttggcacagcctcggattcctccctctcgctgctcgagtcagtttccctatcggcggcagcgggcaaggcggcggcggcggcggcggcagccgcggtggcggcgtggggaacatctcggcagccaccgcgcttctcccgctggagcgggcgtccagcttggctgccctcggtccttccctgccacgtttcgggtcgccctgcaccccccacccaggctcgcttctcttcgaagcgggaagggcgccttgcaggatcctgccgcccctccaaccggatcctgggtctagagctccccagagcgaggcgctcgccaggactcctgccccgccaaccctgaccgccggggggtgcccccgggacgtagcgccgcggagaggaagcggcaaaggggaccatgcggcgcctgactcgtcggctggttctgccagtcttcggggtgctctggatcacggtgctgctgttcttctgggtaaccaagaggaagttggaggtgccgacgggacctgaagtgcagacccctaaggtaggcggct

SEQ ID NO: 23180 - DNA, 2300 bp, Homo sapien
gactgggttcctggagagacctacagaactaggccccgcatggacactcacttcacttccagatgtttgaagtcccacttgaaatctacttcagtcctaatgatatttactggtttgacaacccaaactgatatctgatatgatctctggatggatcagctaatgacacctagcaaaactggattcccttgacagcttccataggcccaggaaatcttcctcacttgagtagaggacaaaataatgatttgagaagaaaatcattcctggaaggaaattcccactctctgagacattgcagtccctgcacggagctgccttcaccccagggcctcagtttccccatatgccaaacagtcagaatgaggcacctcagcatctcagcagtgtggtgagcagcgtggtggtgctgcaccatctcaaaagcttggcggtgttcttgtgtaactgtctgccatctgttactcagaagcggcattacaaagcgctgagcaatggactcctgtgctgcagcttctgcctggagccaacagcagctcagcagcttgcctgggggtcccctgcagagcctgcagcagaacgctttgcaggcccgaaactgcaggtcccgggtgaggctcctgaaagaggtccaaggtgcttgggatgctgcagaggtgagttctcttgctgctccccctacccctcccatgatgatcatctacctgggcctttgctgggacaaagcattggctggggagcctactcccacctttcagtgttcagagttctgataaaggcaaatgctagatcaaccctggggttctgtgtgatggtctaagagcgcaggtagatcttgaaagggctggcaacagtgctcaccttttctgggctgtttaatttcaactgcggttcccaaccccaaacatcttatctacagtccagtcaagaactctctgaggttgaggcaggacttccctgtggctgaaagataaggtaccaaaaacaggaggctttgagtagacgcctccatttctcagtacatgtctttggggagacatcttattgaagaaggaattccagagccctgatttacagctgtctcacctgtgcggaggtatgggagcttgccctacactgagctttatggggagagaggggcagggagaatggtggctgccacagtgggtgcatcgttctcacctccccaagaaactcgatgaagcaagcaaccctccaacaaaaatggcatggttcccgctgcctctgctccccagacagagcaaggtttccccactttgagtggtcagataacaccagcaccttgcattcagctttcaccactactcatttgcttgtcagaggaggtattttccctccattttacagatgaggaatcgaagactgggagaaggtaaatgacttacccaagactcacacagtgagtgtgacagctaggtcagtactctctggtcagtgatctggccgtgattccagcctacttgagcctacatgggaattggagttagaatttgctttgcttctagatccaagcggttttaatctgcaagtgggagggggatacaattcccaaaggcccttgggaaaaggggcttttgaaagatcaccctctgcacccagtatcctcctgcccagggtcactttccaagaatcccaagtggttgttccaactttggacctcttttcttgcaagcacaaagccctgatgcttacagggagagaaaacctttatgggagataattgcgccttaattttttaaaggatatctttaaagttaaaattagaccagctcagctttccttccgttaagcagaaaaagttaccaggcacctgcaggcaggcatagaaacaccctggggagttggctgaccgcggccttggccctcagtagccaggcaagtgaaccgcgggtttggggcagcagccctgccggcgccctggaatcccagccttggctgtggtaggacgagcacattgggggtgggaccccggcttcagcgccacgtgcagcccccgcgatgagcgggaaagtcctcccaggcacagcgccgcctggcgagggccggcccttgggtcccagctggcagctgggggtggcgggcatcccgagtgcaccgctcccgccccgccccgccttgccccaacccacgatggtctgggagctgcgcccagggcttggcgctggcggccccgcaacagcaccgagcgtttcggtcggcgggcggcggtagcgccccctctcagagccccgctcactcccacctgggctcgctccgagtcggcctgtctgtcgggcccg

SEQ ID NO: 23181 - DNA, 2300 bp, Homo sapien
tgggcgcggtggctcacgcctgtaatcccagcactttgggaggctgaggtgggcggatcatgaggtcaggagtttgagaccagcctggtcaacatgatgaaaccctgtctctactaaaaatacaaaaattagccgggcgtggtggcacgcacctgtaatcccagctactcaggaggctgagggagaagaattgcttgaacctgggaggcagaggttgcagtgagctgagatcaccccactgcaccccagcctgggtgacagagcgagactccgtcttgaaaaaaaaatgctgatttgcaagcaattgaagatttgtctggctgataaagcaggaacagaatgttaaaaagattttggggtgctcacagagaaccagggctaagcttccagaggggatcctaacaccggactgcaaaactggtgtgacgagggaaccacagctactctcacagagaactgcatgccagtatctgcaccactgccacttctattcaggaactccactggactgcttctgctcttgctgccagcactgtgcttcttttgcaccaggaattagacctttactctgtcactagtctcacttctcttttgtctcaccagctctaaggtaaaaagtttggtgcggaggcttgattggcagagtgtaaatccgggctttagctgcaagggaggctaggaaacgaagtagctggtatttttcaactctgttggcaaaggctgtttcagtctctcatcaaagtgggggaattcccccaagatagaaagtggctcagatagaggcagccaaacaaaagtcacatgcccaccagagctgcagcagtgacatagtcagtgaggggtggggttggtactctatttccagagcccacttcatatttcctcttgcaggggtgccaaagtagaaggcgatgctcactttttaagaccttattgaaaaaccatagtgttgagcattttcaatatgcccaacattgtcactaagatgtgaggctataaaggtgcaaaagacatgatggttgccctgcaagtgatagcttcatcttcatcacatagtcctgagcaacagtaatggatgactagtatattgattaccttcggtaccaggtgctttgtatacattatctctaaaggctgacaacaaccctgcaaaaagatacttttaataccagatgatgaaactgagactagaaaggttacataatatgttcaagtcacacaattaataagtagcaaatcccagggtagaaaatgaggtctctctggccaactccaaactggggaaactggggccagaaagattcagtcgtttggcaaaagtctgctgtcagttgatagcagagttgggatcagaactctagcctctgactccagcccttatgagctgagctgactccacactgtgttcagcaccgcctttttgtctggcgttgcctggcgcctctttaccttcatcgttctgaatgccttttattcagtcctgaggtttttaaacgtgtcctttccagctccattgttttgagggacagtgaccatctcagctgatcctgcgtgggagtggggagatgtcactgaagccagaccaaccagagacctcctgagggcaggctggagaatcagggcatcagccaggtgatctgtaaggtcacaacctgatctgctctccatgatgagggttccttcctagggagtgtgactcctttgtggagagaaagctctggatcttaactcccctctgtcactgctgggctttgtctcaggtggtcaccttgactgctggcaaattctatccctaaaggacaaagacagtcagctggtgatggtgaacttcctaatgagaaaagaggacttttgaagaaagaacctgttcaatgagcaccattattttttcagagaacctgtggcaggggcgtgtcatgagtgaagttatgagggggttcgatgtctggtagggagagacgatattataaaagaggtcatgggaggccaggagaaaggagagatacatagagaaaggagagagagagataatatgaagtaggacagttggttctttacatctttctctcacaccttccactactggcccagtttctaccatgattttctaaccttagttttcatattgcctcttagtgtacccatgatctaaatctaagggcttaaacattattattgttgttgtattagcatcaatgggccatttccattcagtttctataaatgggatctcataccacctctctgccccgaattctctctctctgtctgcgtgtgtgtgtgtgtgtctctctgtcaca

SEQ ID NO: 23182 - DNA, 2300 bp, Homo sapien
atcttatcccctatggtagaaaattcaaaatcatcctagactgtgcctcacccttatgtcctcttttttttatcacataccaagatctgacaattctattccatgaaaaaaatcttttgagtctgacctcttctccaatcccattgcagctgtctcctaagttttggaatagtttcctaaatggtctcttggcctctgtattcgtctgttttcacactgctgtgaagaaatacctaagactgggtaatttataaaggaaaaaggtttaattaactcacagttctgcatgcctagagaggcctcaggaaacttacagtcatggcataaagggaagcaaacacgtccttcataaggcggcaggagagagaagtatgaggaaccaagtgggaagagccccttataaaaccatcagctctcacgagaactcactcactatcatgagaacagcatgaatgaaactgtccctatgatccaatctcctcccaccagctctctccctaaacgcatggggattatggggattacaattagagatgagatttatgcggggacacaaagcaaaaccatatcaacccccaacctcttttgcccctccaacactgctcttggcattccagttcctgcctggtccatagcctactccttcttcatctgtggaagggagggtagtgggagtcattagcctgggcagggaggagtgttttatcactacactgtttagaatggtgccaatacaaagcacatcaactttcagcaagtttattattgggtttaaattctctacacacgatgcactgcttttgcctacacctggacagtgttcccactcactctccttagtatgatgctggagataatatgatctgccatgaaggttaaataaagcaatgttcactgagaacttagcccaggcccctgcacatgctgagcattttgttaatgtaacaatgattagtaatagcattgctattggttccccatctctggcaaagcctttcatgcttggcctccctcactctctttcaccttcctaaaccctacactccagctatgccaaactgtttactctgccttggacacaccaagttcctcaagcctttgcaaatactccttacgctcctagaacaatggatgtcaattcatcatttaggatccagcttacagtcatgctttccatgaagccttcctcaaattagccacacaaaaggagtgactcctccctgtattcccatgaccctctgctcatgcctcctctttaaagcctgccttcactggagttcctggaagggagagtctgttcagcactcatctctgtatccacagtcaccaaaattgtaactgccccataataaattcccaatacttgcagggattttgcttcttggcttgttttgttttgctggaatgaatgaataagtaaatgggaacgattttgacttcaccctaagcctagctaaaagtttgggtagtgacagttttggttattttgtgtaacctgatagtggatcccctttctatgccaaaaaaaaaaaaaatcccccaatactagagtacctgttttcctagggaattgacctcagcaactgaaggagaggcgattcaaagcagggagtgtgatgaataggtcaactctgtcctcgcagccgtccctgagagggcgctgttcccaaatcgaagccccagaggcggagactgagacaccggcactctcccactggactgggtcagcatccctctccccgcgcggccgcaggtctagagctgagcgcctgcccacaaacatggcggcgccctgcgcggcttcccgtcgccgcaaccgtggggccggccctgccttgccagtactaggggacttcctctgcgcgccggcttcctgcccagctggcatttaaaccaccgcctggggctgcaggatgctgctgcggatgcagagctgtccgcgggctgggcagcgtcgccgtctcccctgagccgcctcggtccggcaggagcggagccgaagcatcccttgctgcacgcagggcagagcaggcgagggctgggggccgatcggggaccccggcttgggaccccggcatctggcagtttccttgcaggttcaactttaattgccaagatttcacccctcctcctcaagcccagattatttatcctccctccggcctgggctgctggatgcagcagcggctgggcttggtcccaggagcagggagagtgcgctcccggccctcctagccgcgtgcccgggccatggtgcggctgagccccgcgcttgggtgaggcggcggcgcggctcggag

SEQ ID NO: 23183 - DNA, 2300 bp, Homo sapien
gggccaccaaactccattctcaagctgtgggagcctgagtcttaagacagagggccacagcattctcaacaatttggaatggctataaaaggggccaagaaaatggctggccttgaagttgggaagattgaggactggagtgaagcctgttctctaaagataagaagggcctctggtggacttctctgaatgcagggtgaacaaattgacttcttgagcctccctccagcccaaggattctgtaattgaagggaatggatgactcattctcagagttacaggcgtttagccaagcatctcctcacatgcatctaggacttaacatcccaggtctgctgcccactctttagatggctctgcacaattcatttaacttctctgcgcctcggttatctcacctgcaaactcagcaactggatgagacaatgccaatatcccttccatctctaagcgtctttaatattattattaagccattaagatcaaataagagaaaggggaaaaaaaaagcattctgcttctggactcagcttctgttgagtctccaagatatatacacaggagctctgctttagagaaggaaatgataaaaggaggacaagtagcatccccaggccacctccgttcccaggcccgcacccatcagaactcagctgcaactgtgaggcccccatgtgagtgccaagccccttgaaaaacaagggaagaggttttgcccgtgaatgatgtgttgctaaaaagtgaagacgtaagacatccccaccaacataaggcgctccagagaccaggagctcttccattgtgcctcctgggcctcggtttcatcatccataagatggggagactgggaatggctttacacttgaatacttcaggttgaccaccacagccaagggccaagtagagtggacaggtattgggtaggatgggaagggggaccagcaaaaattgtggggtaagattttgacgcctgcacaaacacagatctcttcagagccctcaactgaaggcttcccattggtcccctgtctgggatggagcaccaggagtgaccggagggactaggcgctgggctccggggtgggctgccaggaccctgggccggctcacctgatgaaggtggtcttcccagtggagtactggcccaccagcagaaccatgggcttgttgtcgaagtcggcatcctccagggcgggcgagtggaactcgtggaagcggtaatgctcttccaagggcagcagcttgctcttgtagagtttcttgagcccctcactcaccgtctggaaaacctcggggtccttcctccggcggtcgtccgtacccagccagctgaacatcgcggccgccgctcgcccccggcacgcagccccaggggaagactcctcctcaggggaagatgtcccgtaggaccggtccgccgggctccgagccgcgccgccgcctcacccaagcgcggggctcagccgcaccatggcccgggcacgcggctaggagggccgggagcgcactctccctgctcctgggaccaagcccagccgctgctgcatccagcagcccaggccggagggaggataaataatctgggcttgaggaggaggggtgaaatcttggcaattaaagttgaacctgcaaggaaactgccagatgccggggtcccaagccggggtccccgatcggcccccagccctcgcctgctctgccctgcgtgcagcaagggatgcttcggctccgctcctgccggaccgaggcggctcaggggagacggcgacgctgcccagcccgcggacagctctgcatccgcagcagcatcctgcagccccaggcggtggtttaaatgccagctgggcaggaagccggcgcgcagaggaagtcccctagtactggcaaggcagggccggccccacggttgcggcgacgggaagccgcgcagggcgccgccatgtttgtgggcaggcgctcagctctagacctgcggccgcgcggggagagggatgctgacccagtccagtgggagagtgccggtgtctcagtctccgcctctggggcttcgatttgggaacagcgccctctcagggacggctgcgaggacagagttgacctattcatcacactccctgctttgaatcgcctctccttcagttgctgaggtcaattccctaggaaaacaggtactctagtattgggggattttttttttttttggcatagaaaggggatccactatcaggttacacaaaataaccaaaactgtcactacccaaacttttagctaggcttagggtgaagtcaaaatcgttccc

SEQ ID NO: 23184 - DNA, 2300 bp, Homo sapien
ggggaatgcctaggaggaaggggagggcttgttaaattgggtagattagtgcatggaggaaaagcctctcaatcaaagaggtgtgagggtttggaagaattgactaattacaaaacatgccctaggctcagtctctctctctccccagctccttccttctttctttcagggcagaatttctccagcttggctctattgacattcattgttgttcattttattggggtgggactgtcttgtggtttgtaggatgtttagtggcattactggcctccatccattaaatgccagtagcatccctccccagttgtgacaataaaatatatccccagacattgccaagtggcttctggggtagggaatctctcagatttaacaaccggttttggtttcggttttgtttttgagatggagtctcactctgtcgcccaggctggagtgcagtggcatgatttcagctcactgcaacctccgcctcctaggttcaagtgattctcctgcctcagtctccagagtagctgggattacaggtggcccactgctcccagataatttctgtatttttagtagagatgaggttttaccatgttggccaggctggtcatgaattcctgacctcaggtgatccacccaccttggcctccgaaagtgctgggattataggtgtgagcctccatgcccagccaacaaccagttttatagtgaccaaccatcccagtttgccctggactgaaggatttactaggatctctgaggcatttgtcagggattcaaggctaaaactaggatagtccagggcaaactgggatatttggtcaaccaacaagtaaagtttcatctcctggttaaattaaggctgtggtgagagggggcattgtgttgattgtgtggttgtcctgtcagtcttcagtttctctaagctgttgctatatcaagtacatctgcctaatactcctttcttccccctcaggtagcctgctagggttgtaggggaggtgtcttacttaaggaaggctggctgagccactgtatgggtcattacaggacagaagaagaccagagtgaatgctggtctctgtgtgtttttttttttttttttttttttttttttgcgtgtgtgtgtgtgttgaactaaagaactggtaggggcagttgggagggtgctggactgcagagagccctttagtgctgctccagtggacgtgcacatctgtgtttccactgagagttaatggatattggatggggaaaggttttcagctatgtgttactgtagcctatgactatgtggtatgagcattttaatttatttggtgttttgaaatacttttatgagttactctgacaacttgtcaaggatattttcctgagagaaacaaataaaagacaaatctcaaaaatagtttgctattaggattttatttgttgagatgttgaagatgtcttttcaacagtgatacatgttttggttctttgcaaatttacaaggcactcccaaaatgtcatttgtccctcattcttctattcttgatatcattctatgatcctgtacaggatgaaagcaactgagttctgaaggtagtaagtaacatgctgaggtcaaatgccaggatttgagtcaggttcatggggctccatgtcctgtgacctctctgctccaccaggctgtgaaagaatgactcttgcattcatgcagtcagtctgtgttgctgtaaacctgaatggtaaaatgacaaatgtagacacagagggtgtgaatcagctctattagcagtgactctgagaatagtcctttccctcctctgtcttccccttctctgtcttgcagcaagtgggaggacgaagcaggtttcataagagcagcgcccaagacccacagtcgcctagtgccaagtcaacaaccttactgatatctggatgtagtttcctgtgctctttgacacaggtgtggagattgtaatttgctgtgtgtgattgtttgcacttccttgattatgtaaaccagtggcttttgccaagaactcttcatgccctgaagctctgagctggttccctcccattggtggaccttatttcattttattgggaggcgtaactttcaggtcacagagcagtgataactacctgccagtgtctcttaggagtgaggtacctggagttcggggaccccaacctgtgacaatgacagcagacaaattggttttctttgtgaatggcagaaaggtaagtaggagctgacctttggttttgtgtcccttctccctgggaggggaaatgtgtcctctggcagagccatatct

SEQ ID NO: 23185 - DNA, 2300 bp, Homo sapien
acagatgcataagctgaagatgactggttttatcaagctaattgttataatagtggagaaaagatcatgaggacaaaaagtgggcagagtcggaagaaaagagaggaagaaattgagacagaagacatttcatttaaaaaaatattccattgagctgggtttgaaatagtgcactgcctgttctcctaatgctgtatggtatcatgaaatctattgtttactgagtctatgagccagcttcctagggaggctatggcaattgaggacagggaagaggtaacactcaggaacatagaaggagaatttgggtccaagtgggtggagggaaaaataactgggtttagttttgggtagggctggttttgaggtctctgaaggacatgtaagtggagttttccagcagggagaaaacgcagagctaaagctcatatctttgctggcaatctagatttgggcatcttcaacaagcaggttgtagctgaggaagctgggactggacttgtactctaaagccagtgcaaaaaaagcttgaaacggctatgatggctaagacctggcttttccatgaaaaatgcttcggtcagtatgagtgattccaaagtggtgatcaattaaaaactgaagtatgattagcattaattataacccaatgggaatatgataaacgactcttggtcagcaagcagagggtgccctgtagtgctaaagcatcaccatataccatgtgtgccaagaatcaggagacaccccaaacgggagcagatgaggggttgtgtctgtcattggaccagctggcctgatccagcagaagtggatggagatacactgaatggggctcctgggaggcgtgagttgaaggggaaggaagagaagagacctccaaagtaagggaagagtgaaaaatgagaaggactggggtggagccccaagtagggaccagaggagaaaacagggataaagtaatcaagggagatgggacaggaagatgaaagaatgaggtaaacagcaggtgggaagaggaggtcaacctaaaggagaaagccgggtcgaagaaagaaggaagagaagaaaagaagggttgggaaacagaggaggaggcagccaagaaagcctggaagctgaatcatagaacggaagaggtagaagacggaggggctggaggataacataaaggtgggaaacggaagagagaaagaaccgcgtctgcgtgtatgacggctagacaggagttcagagaacagcggggtcgccaggccaccacctgatgggccacggctcattggctctaggagctgggaaagggcatcccaggaaagaagccctagactttagcctgagtctgggccactctaggggaccgggagtggggtggcgggagaggacgcgcagaatctcgacttctggccccaatctgtgcatgatcacccgagctcagcggacgctcctctctgacccaggcaggcggctcagggacgcgtgcggggatgcagagagaaaccgctgaggaattagggccgggagagactggtacctgccgggggcgtgtggtggggcagagctggcactgatgctgagagtggctaaggagcgcggcgccccagagcagaagggctggcagacgctcagagagccaggatggttcagggtccaaggaaggtcctatgttgggtgggagctgtgagggagtgaaagtgcatgaggaaccggaggagatggaaagaccttggcttgggtgttcgagggtgggactgcgtggtgaccgacggcacagagggtgtgtgttggggcggaagaaccaccccagctgaatcgtccccgtggggttttcttcccgtgtcttagttccagaagtatgcgcatcagacgctaatagttgaggaacaagtcatggaaggacagcctaagcgggaggtgaatgtaaagccgtggagagggcgggcgaactaagaaggccttcgttctcctccggccaccgcggctgcatccttgagaaaggggtattgctgcgaaccgcgccagggctggacgcggcgaggtgggaggcaggatggaggggcgggagccaaggccgagggggcggacacgggtggcgtctggcgctccataaaggggttgcgggggccgcgctctcttctgggagggcagcggccaccggcgaggaacacggcgcgatgcaggttcagtgccagcagagcccagtgctggcaggcagcgccactttggtcgcccttggggcactggccttgtacgtcgcgaagcctccggctacgggaagcacacggagagcctgaagccggcgg

SEQ ID NO: 23186 - DNA, 2300 bp, Homo sapien
tatagttgcctcccagcattagtttctcccaccacattactttgacacagaactcaccattccctccctctcttcctccctccgtccctccttccctccttcccttcttcccttcccttctcttcccttccttccctcccttttttccctccctttcttcccttcctttcctttctttcttttttttgatggagtttcgcccttgttgcccaggctggagtgcaatggtgcgatcctggctcactataacctctgcctctccggttcaagcgattctcctgcctcatcctcccaagtagctgggattataggcatgcaccaccactcccgactaattttgtatttttagtagagacagggtttcattatgttggccagactcgtctcaaattcctgacttcaagtgatccacccgcctcaacctcccaatgtgttgggattacaggggtgagccgctgcacccagcctcaccatatcatttcatctgcagacattccagtatatagctctaaaagaaacttgaacacctgtgaaaagaagggaatacaaataaaaaaagaaactattttgtaaaaatttaaaacataaccacaatactattatcactgtaaaaacaacagttccttcctgtctactcagtgatttttatttaattttaattttaatttttattatttatttatttatttgtttttttgagatggagtttcgctcctgttgcccaagctggagtgcaatggcggaatctcggctcaccgcaacctccgcctcccaggtgcaagtgattctcttgcttcagcctctggagtagctgggattacagccatgcgccaccacacctggctaatttttttttgtgtttttagtagagacggggtttctccatgttggtcaggctgatctcgaactcctgacctcaggtgatccacccgcctcggcctcccaaagttctggaattacaggcgtgagccaccgcacccggcctactcggtgatttttataatttctttttaaactgcttgagattcatgtaagaccccatacattttaattagttggtatgtctgttaagtctttaatctacacatttcacctctatctcactttctcgttttcttgcattaaaaaaaaaactgtgtttgtgtgtgtgtttgtgtacgtgtatgtgtatgtataaagaaactgggttttgactttcagacatcctcataccgtggaggctgcgatggtgttcaacgtttttctgtctcatgtattttatacaatttggtaatttgatttagagtattcctgtctaatataacgtaagccataaatttaagccatatataatttgaatttttccatatatacttttttaaaaagtgaaaagaaacgggtaaaattggtttgaataatacttttatttgacccagtatatccacaatgttattatttcaacatataatcaatgaaattaatgaagtatattgcattctttttttggtatgaatcttagaaatttggtgtgtattttatacttatagcacatctcagtattagccacatttcaagtacccagtagcagtatgtggctagtgactcctgtattgaacagcacagatttagagaactgatcagtcaggctttttgtttttatgtcaggaaatagagaatgcctgactctcttggtgtggtgctattggcagccattcatgaacattgtttttatctattgatttattagggcttgcaaagtggtgatattttatccttctaccttcatttattatctataatacttatctaaaggaatacttcccaaccttgactatttggtcacacccccgtcacctgccaaaaaaccctacacagttcatatagaaaaaggataaataatgcttgacctttttcttttatttaccagttttccaaataatgaatttgtttcctaccattgtccaaaagtaactggggaatattttgttttcacctgtcatagatattttagctttccttgcttcttggagtattagtcagtgtccttcagagaaacagaaccagtagggtatgtgtgtctacacctttataactatatttgtatctatatctatctgtatccctatctgtagatctgtttatcttcaatatagaaagagatttatttggaattgactcatgccattatggagggctgacaagtgccaagatgtgcagtcagcaagctggagacccaggagagctgacggtgcggtttcactttgagtctgaagccctaagaaatgggagagctaatggtgtagttagagactgaggatggg

SEQ ID NO: 23187 - DNA, 2300 bp, Homo sapien
ttttcttgcaacttacaacaaaactttaccattttatcaatgatcactgagttttggtactgtcagaacagtaccatgtaatcagagctcaagccttcttttttctgttacctctaaagtagctttggcctgggtgcgatggctcatgcctgtaatcccagcactttgggaggccgaggccggtggatcacctgaggttaggagttcaagaccaccctggccaacatggtgaaaccctgtctctactaaaaatacaaaaattagctgggcatggtggatggtggtgggcacccatgatcccagctactctggaggctgaggcaagagaatcacttgaactcgggaggcggaggttgcagcgagcccagatcgagccactgcactccagcctgggtgacagagcaagactctgtctcaaaaaaaaaaaaaaaaaaaaaaaaaaaaagaaaaaagagagaggttttggatacatggtatgtccattttttttttgttgcatattatgttttgtgcaagttggtggagagggtaaaatttgagtaaacaaatatacagtggagattttagcctaattagaaaaaggtatgagagtcagaagtgttccagtaattgactaggctttaggacagggatactgcacaaaatccttgggccctgaagttggagaaggtgggaggaggagaggaaacagaatagcacttttaaaagtaaacttgaatactagacagccagtcatctactctggaatctgtcaggggcttgtttagtatgaaactcagatataattttttttcttttcttttttgagacagggtcttgctacgtacgttgcccaggttggaatgcagtggcgtgatcatggctcactgtagcctcgacctcctgggctcaagtgatcctcccgcctccgcctaccaagtagctaggaccacaggcgaagccaccacgcccggataattaaaaaataaaaaattcatagaaacagggtctcctatgttccccaggctggtctagaactcctggcctcaggcagtcctactgcctcaggcccccaaagtgctgggattataggcaggaggtaccatgcccatgcagttacaaacattttatagtgtttgccccaaaactttcattggatgtatgcaactttctcttcctctattcctacttttgcaatggtgtactttgtaacaataacacttcctcagaggtccaagatagcctcctttgctgtgattcttatacaattgtaaaaaaattatttgttcctgacatttatgtggaatactgggatttataagatgacaaaggtgaaaataatatttgttgtaggcttaccctgtcaggctgttcacattcaacagctcttataatcgtaggtacactccttgagtgtccccattttacagctgaggataacgaggctagttatatcaaacaccttagttagggagatatgacatacacctacataaatacaacatgaaacaagataaatggttacagtgtcaaagccaccattaggtggtaagagtgaccctgtgaagcaaaaactagtatttgcatgaccacaggcacactttaccacgcgcctgcttctacagatgaacttcccggcgtgccaccctaggaatgagaccttgggggtgcaaatcgatgagagatgcctgtatatgatggatacccgcgggactgtcctcgtggaaagccgcatccgcgagccctaggtgctctccatttgaggaagttggctgggggagggggcttgccttgcggctgcgtcctgctccccgcgccctgcccccacctcccagcctctgctgccgctaaaccccggagagcggagcgtgcacgttgagattcctcggcgggtaggcagcggtgctgggcatgctcagtgggcaggacccgttagagtggcgagtaaggaagcgttggctcttctccgggtctgccttccccggttcaggccccggccctgggcttttgtgtgcgcgtagctgcagccgccactgcctcctcgcggggctgcccgaccccagatgccgtcaggcctgtccggtttccgccgttaacctcgccgcgcggccgggaggaggagcggggcggggccggcggcgggcggccgggctggagggccctgccgggggtgggggtgggtgcggggagccccgcggggggtggggggcgggggcgggcgcggagtcacgggggtggggtcactcgcggtggctcggggaggccagctgggaggggagggggccgtgggggcggctcggcggaaccagccccggctgggc

SEQ ID NO: 23188 - DNA, 2300 bp, Homo sapien
attactcctgtttgcatttgacagataacactgaggctagaaaaggttaaattactagatgtccatggtcacacagctgatgagtgacagggccaggactcaaatctgactttctaatttgaagggcctgaaatactaagctttctttgtttaattgtatccaatcccctctccaccaccccacaacaccccacacctcttttccatagaaacaaaatcagcaataaataaccataagaaccatcatcatataaacacttagggcagtttccttttcttgcaacttacaacaaaactttaccattttatcaatgatcactgagttttggtactgtcagaacagtaccatgtaatcagagctcaagccttcttttttctgttacctctaaagtagctttggcctgggtgcgatggctcatgcctgtaatcccagcactttgggaggccgaggccggtggatcacctgaggttaggagttcaagaccaccctggccaacatggtgaaaccctgtctctactaaaaatacaaaaattagctgggcatggtggatggtggtgggcacccatgatcccagctactctggaggctgaggcaagagaatcacttgaactcgggaggcggaggttgcagcgagcccagatcgagccactgcactccagcctgggtgacagagcaagactctgtctcaaaaaaaaaaaaaaaaaaaaaaaaaaaaagaaaaaagagagaggttttggatacatggtatgtccattttttttttgttgcatattatgttttgtgcaagttggtggagagggtaaaatttgagtaaacaaatatacagtggagattttagcctaattagaaaaaggtatgagagtcagaagtgttccagtaattgactaggctttaggacagggatactgcacaaaatccttgggccctgaagttggagaaggtgggaggaggagaggaaacagaatagcacttttaaaagtaaacttgaatactagacagccagtcatctactctggaatctgtcaggggcttgtttagtatgaaactcagatataattttttttcttttcttttttgagacagggtcttgctacgtacgttgcccaggttggaatgcagtggcgtgatcatggctcactgtagcctcgacctcctgggctcaagtgatcctcccgcctccgcctaccaagtagctaggaccacaggcgaagccaccacgcccggataattaaaaaataaaaaattcatagaaacagggtctcctatgttccccaggctggtctagaactcctggcctcaggcagtcctactgcctcaggcccccaaagtgctgggattataggcaggaggtaccatgcccatgcagttacaaacattttatagtgtttgccccaaaactttcattggatgtatgcaactttctcttcctctattcctacttttgcaatggtgtactttgtaacaataacacttcctcagaggtccaagatagcctcctttgctgtgattcttatacaattgtaaaaaaattatttgttcctgacatttatgtggaatactgggatttataagatgacaaaggtgaaaataatatttgttgtaggcttaccctgtcaggctgttcacattcaacagctcttataatcgtaggtacactccttgagtgtccccattttacagctgaggataacgaggctagttatatcaaacaccttagttagggagatatgacatacacctacataaatacaacatgaaacaagataaatggttacagtgtcaaagccaccattaggtggtaagagtgaccctgtgaagcaaaaactagtatttgcatgaccacaggcacactttaccacgcgcctgcttctacagatgaacttcccggcgtgccaccctaggaatgagaccttgggggtgcaaatcgatgagagatgcctgtatatgatggatacccgcgggactgtcctcgtggaaagccgcatccgcgagccctaggtgctctccatttgaggaagttggctgggggagggggcttgccttgcggctgcgtcctgctccccgcgccctgcccccacctcccagcctctgctgccgctaaaccccggagagcggagcgtgcacgttgagattcctcggcgggtaggcagcggtgctgggcatgctcagtgggcaggacccgttagagtggcgagtaaggaagcgttggctcttctccgggtctgccttccccggttcaggccccggccctgggcttttgtgtgcgcgtagctgcagccgccactgcctcctcgcgggg

SEQ ID NO: 23189 - DNA, 2300 bp, Homo sapien
aggattataagcgtgagccaccgtgcccggcccaagtacggtgttgttttttttttccccccggcccaagtacggttttttttttttttctttccaagacggagtcttgttctgttgcggcaggctggagggcagtggctcgatcttggttcactgcaacctctgcctttggggttaaagtgattctcatgcctcatcctcctgagtagctgggactacaggcatgcactaccacgcccggctaattttttgtatttttagtggagacaggatttcaccatgttggccaggctggtctcaaactcctgaccttgtgatctgcccgccttggccctctaaagtgccaggattacaggcatgagccaccgtacccggtcaaatacaattttttttttgagacggaatcttgctctgtcgcccaggctggagtacagtggcatgatctcggctcactgcaacctccacctcccgggttcaagtgattcttctgcctcagctttctgagtagctgggattacaggtgcgcactgccatgaccggctaatttttgtatttttagtagagatggagtttcaccatgttggtcaggactgtcttgaactcctgacctcatgatccacccgcctcggcttcccaaatgctgggattacaggcatgagccactgcgcctggccccaaatacattttttaagtaaagagttctggtaaagtaattcatcatgtgaaccctaaatactaagtgaaaaatcttgtctatttgtagacagctcttagggctgtttaaagtgctctgggaatgttttgagatcattgtaaacatattttcaatatgccttttcatagcagagtttaaaatagatgtctccccaatttttcaactttggacttgtattctcagcaagaataatttatatagaagtgttaatatcaaatatctgctgttagttttataaatgtgtttatcttcttaggtgtactgtagttgtattaaatagaattattgacttaaattattcgaagaaagaaagaagtagcttttagaaaagaaacataacctacttatctgtattagtgttgcttctttgactaatcacttgagttcatctacatgtcttagtgatgctacatccactgtcctatattatttttgttcttttattgaaggatattacacagaatattacacatatcataggtatacagcttgatgaattttcacaaactaaacatacctgtgtagcttgcagtcagatcaagaaactgaatactgccagcatctcagaagccatccatgtgaccccttcaagtcattattctttctggggtaatgatcatcccattgtcaatacattttttaaacatgttttaaaattgagttcataaccagatttaagccatacaaaaatttcagtctcattaaactattttgttggctaattaatttgcttgcttatctcatttattttatttactacaaatgtcctttgactgtgaaatgaaaattaaacttaaaaagatgagttttcattatggaacaatatgtttaaattaacacacctaggaaatatatttctaaactttggatttcttttcccttacagaccaccaaatcccattgaatttctagcatcttatcttttaaaaaacaaggcacagtttgaagatcgaaactgacttaatgggaagaacagaaaaatttagttgctactgtagatttacatgattaagaggcagctttaattgccatgatcattccctctttttggatgtataagaaccttccggacaacagaacctatttctggaattgcagaagataacatatttcccttattttgatttaatcaccataaaccatacctatttaatgagtgtattctgtgcaatttttttctcagattgtctttaactttgtttttaaaatgaccttcaaaataaactgtcaaaacaccattattttaaagtagtttttgttctgtatgacaaatattttacatgattgaattgttttatgaatttctctttttcttctgtcttcaaatgctgcagagttttacaacagagagaaaatacagcagtcaagtataatttaaaaaattcagccaatttttctcagcattgtttctggacctttctgagggtgggatctgggcatcttcaatggcttaacaagtatcacaggtgattctaatgtacattaaagttggagtactaataaaagcattgcaaaggggatacaatatcttctaatgttatcaacatttatagtaatagctgtaatttattgcattcctactaag

SEQ ID NO: 23190 - DNA, 2300 bp, Homo sapien
acatcagtatctcttacctggatggatggaaacctggatgatagctgattattctgtgctgctgccttcagtaaacatttttatgtcttttctctttttgctttcgaagtatcagtgcatatattaatatcaaattttgactatgaaccagcccaacttaatatgtattctgcacctacaatgtatttagcatgttgtgaagtataaagatatctaagacatggtcccctgccctgaaggagctcttctagtttactactttaccaaaactgtcagtacttagaaaatgtaaattaagggctgggcgcagtggctcatgcctgttatctcagcactttgggaggctgaggtgggcggatcacgaggtcaggagtttgagaccagcctgaccaacatggtgaaaccctgtctctattaaaaacacaaaaatatgctgggagcggtggctcacgcctgtaatcctagcactttggaaggccggggcaggcggatcacgaggtcaagagatcgagaccatcctggccaacatggtgaaaccctgtctctactaaaaatacaaaaattagctgggtgtggtagcgcgcgtctatagtcccagctactcgggaggctgaggcaggagaatcgcttgaacctgggaggcggaagttgcagtgagccaaaaaaaaaaaaaaaaagagggtcactgcactctagcctggcgacagagtgagactccatctcaaaacaaaaacaaaaacaaaacaaaacacgcccacacacacaaaatagctaggcgtggtggtgcgtgcctgtaatcccagctactcaggagcaggctgaagcaggagaatcgcttgaaccagggaatcggaggttgtagtgagccgagatcatgcctctgcactccagcctggccacagagcgagactctgtctcaaaaaaaaaaaaaaaaaagtcccaatcattctctacttgtatgtatgccctttttatttcacactcttgaaaagcatttaatcttaatttaatatatctactaggcaatttatacatcctgcacataggcatacacgtttgaatcagcattacatgaaaaatcttcaaagttccacatgacagctgtcaccaatcacaatactatttaagtatacactgcgaaactttaaaaacttacttatatgtctagctcttaaccaaattttatttactttagatctgtatccacgattttttagagtagcaatattaagttgtagtctaacgccagctggaagtaaaactcaatggtacaccatatttctgtatatgtagtcacaatttttaattttaatcgcttatattccaccatattgttatgccatcatttactccaaatgttttcaagttttcatattacaaagtgcaattacaaatagaattgtgtcaaaggcaggaagtttgcgtgttatcacttttgtttacattaaaataaattgaatttattggaattttaaaaaatccaagtaaagagatgttgtttgctatttacacactgtgtaggaggcaaattatcctatgtacgttttacaactacattactatcagtaggaccacggtttggaaagccagttgcatactgctaatctaatacaaatgtaaggtggcattaacatcgcatattcacagatttaagggcttgaataaaagctgatcaggaaacccccaaaactgcttcttcccccatctttggctttacagtaaaacactgacattctttcagagactgtcagactgggcttataattttctagtaagaaccactcagtgaggaagttcagttggtcgaggaagagcttcagcagatgctttgaggcagcaccgaggtttgatccggccgagccccttctaactgggctggtcacttggtctgcagctggggtggcgctcttcgtgggtgggtaggatgaaggaagattgtagctcgtagcttccgaggccagaccttggccaggactcacgcggactgcagagagcctcggggactgacgatggttctgcgcgcctcccagcttcttgtccgccgggaggttctgcgcaggcgcggcagtcgtgcgacagccgtcacttacggccggagctgtttgtgctgggagctggtggcgcggtgcagggctcttaagaacgaacggcttgggcgcgggtaatcagctccctttcccccactttctcacttattctaggtacttgggactgtcgtagagtttccagaccccatgtaggcgcccagtcgtggactgtcccactctgctgctctactgctcgtggtgctcccgcgccca

SEQ ID NO: 23191 - DNA, 2300 bp, Homo sapien
acctgtctaacttttgtatttttagtatagagggagttttgccatgttagccaggctgctcttgaactcctgacctccggtgatctgctcgcctcggctcccaaagttctgggattacaggcgtgagccaccacacccggccgaaagagggcatttcagaatgagggtctagcataagcacagagaagggggagcaataagagggaaacagggagtaggtcatttttgcaatagcctgtgacatttgtagggcagtactggcggggaataattaagtaaaattggctggtgctgtggctcatgcctgtaatcccagcactttgggaggccgaggcgggcaggttgcttgagcccaggaattcaagaccaacctgggaaacatagcaagaccctgtctcaacaaaaaagtaaaaaaattagctgggggcgcgatggggtggctcatgcctgtaatcccaacactttggaaggctgaggcaggcggattgcttgagcccaggagttggagaccagcctgggcaacatggtgaaaccctggctctataaagaatacaaaaattagtcgggcccagtggcgtgtgcctgtgatcccagctactcgggaggctgaggtggaaggatcacctgagccagggaggtggaggttgcagtgagtcatgttgtttgcgccactgcactccagcctgggcaatggagtgaaaccctgtccaaaaaataaaaaaataaagctgtggcagaatgtggagattcttggaagctggaagctctcatggggcatttggaaacctcacattgtaaataacggagtctttttatcagtttggcttccttagttttaggaaacaagaaataattatggctaactcaagtaaaaagagaaagagaagagaaaaaagacgtggagatagagagagagggagagagaggaaaagacgaaaggaaggaagggggaaaggagagaggaagagagaaacagagaaacagactgattagtgtattggatagattacataaccaagtgaccagtcaggaacccagcagctctgggggagctcaatgtgatgcattgataaacccgctcttaagagcactcgtttccagttactttctattcggtgggtctccagccaagattccaggtcccaggagaatctgactgacctagtgtttgcttccgcctttgcggtctgggttctgtgcttgcagctcattagaatacagggagcagagacaagcaggtagtttcccaaaggaagggatgctgagtagattaaaaaaaaagtgtagattcttcagtaaactatgggatggtaactatgcaaaacctaagatttcccttattcaaataaattatctttcatattagacatctaaatatgcactaatttagttaaacccctgggttagttgatctcatcacactgagctaacatttttgttgctgttgtttgcagtgacctgaagtttcttatcttcacaattgctttcctctcaaataattcccagattttaaatttttattttattttttctggagacggagtctcgctctgtcgcccaggctggagtgcagtggcgcgatctcagctcacttgcagcctctgcctcccgagttcaagcgattctccggccttagccttccaaccagctgggactacaggcgcgcgcccccacgcccggctaatttaattcccagattgatatccattgcttctgagatgggccaattatccttcggagaagacttaggtcgcctggcagaaaaagatgaaagaaatctaagaaaacgacgacactgagagaggagcctagcgaaccagcagagcgaccccaagccgcaattcccccttccgtggatcgattacgaaggcttcctggcaggagctctccagggctgccgacgtgagccgaactgcacattgggaactgtagttgagtgggaaagccgagaggcgggggccgcacacgcgtacaggggccccggtcaacaaagacgcgccgtgcgcgcgcgcgccggagaaaaacacgggaagacgtgcgcgtgcgcggccgccgctgggagccaccaggcggcggagaggacagcgacaggaagggaggggcccgagccaccgactgcaggaggagaaggggttgtgctcctggccgaggaaggagaaaggggcggggccggcgggcagcgtgcggcagtgcggagctcctgagaccggcgggcacacgggggtctgtggcccccgccgtagcagtggctgccgccgtcgcttggttcccgtcggtctgcgggaggcgggttatggcgg

SEQ ID NO: 23192 - DNA, 2300 bp, Homo sapien
agatggaatctctctcacccaggcttcatctcagctcagtgcaacctccgcctcctgggttcaagcaattctcctgcctcagcctcccgagtagctgagattacaggtgcctgccaccacacccggctaagttttatatttttagtagagacggggttttgccatgttggccaggctgatctcaaactcttgacctcaagtgatctgcctgcctcagcctcccaaagtgctgggattacaggcatgaggcactgtgcctggcctcaaattcttagaatactgcctaccacatattgaatgttcattaaatcctaggtataggacaggggtgttggctcatgcctgtaatgctagcatcttgggaggctgaggcaggaggatcacttgagcccaggagttccagaccagcctgcgcaacatagcaagacctctcctctactaaaaaagattactgtggctgcagtgtggagaacagattgtcgatagatgataatacctacgattttatttattttttacttcttatttatttttttgagatgaagtgttgcactgttgcccaggctggagagcaggggcacgatctcgcctcactgcaacctctgcctcccgggttcaagcaattctcctgcctcagccttcttagcagctgggattacaggcacccgccactacgcccagctaattttttttatctttagtacagacagggtttcaccatgttggccaggctggtctcaaactcctgacctcgtgattcgcccgcctaggcctcccaaagtgctgggattacagacgtgagcaccacacctactcagttgttctgtataccattacatgttcagcaaccctaatccaaccatctgaaattaaaatgctccaaaatcaaaactttttgatcatcaacacgatgccacagtggaaaattccacacctgaccgcatgtaaaaagctgtagtcaaaattttgtttgatacacacacaatttttaaaattgcataaaattaccctgaggctatgtgcataaggtgtatacgaaacataaatgaatttcaagtttagcctctggccccatccccaagataaagagccacaatctgaaacagttctggtcttaagcatttgggatgaaggatactcaacctatacccagttttctacacgacactacttatgaatatcttttaaaaatttctttatccctacttgttttctgtcttccctaccagaatataattttcacgagaccagtatctgacaaacacacgtgctacatattcaatctttatcgaatgaatttaatattttccaagttttctataattaacattacttctatattattaattttatagagaatccaaatagcattttattaagtagaccattagtcggtccgagttcaaattctgctactacagcaaactatatgtaggactcaaggcaagtttcttttttttgagacggagtctcgcgctgtcgcccaggctggagtgtagtggcgcgatctcggctcactgcaacctccgcctcctaggttcaagcgattctcctgcctcagcctccagagtagctgggattacaggcgcgtgccactacgcccggctaatttttgcatttttagtagagccggggtttcaccatgttggccaggctggtctcgaactcctgacctcaagtgatccgcctgcctcgccgccgaaagtgctgggattacaggagtgaaccaccacgcctggcggaggcaagtttcttaatcttctttcctcacttgtaaaactggaatactgtccattttcataaggttaaatcatacaacacaggtaaaagcgcttcagcacgcaacgaaatttttctaacgtaacgaaaaactcctcgttgctccttgccttgcccttaacctcaacgcttcaggtcccgaccaatctctcggagagctcagagggagccgctctagccgccttccgccacggagtgcagggacagccgggaaggggacggaagccggaggccagagcacgcacttcctcccacgctttcctcacagccaatcgcccactggtgccccaccccttccgttctgggaaaactcgagcacccagaacggcttccggcgggagctgtgcagctccttatcatggtgagttggctgttggggtgagggtttcggctgtagctgattcggtttatcttatttggtcccgaagcgaccttgaaatccctcagccacccagaggaggggtcattggagttgaagtcgggccccttggcaggagcggctgtctcccaaaatgttcccc

SEQ ID NO: 23193 - DNA, 2300 bp, Homo sapien
agaaaagttatctagtttatatttttattatattatattatatttatttatttatttattttttaatagagacaaagtctacctgtgttacccaggctggtctcaaactcctgggctcaagcagtcctctcacatcagcctcccaaagtgctgggacgacaggcgtgagccactgctcccagcctactttatattttcattagctggaaatggaggttcccagaaacatcaagatttgtgacattagctgggcttggtagcatgtgcctctagtcccagctactcaggaggctgaggtggttgtattgcttgagttcaggagtttgagttcagcctgggaaacatagcaagactctggctttaaaaaaaaatgaaggctgggtctggtggctcacacctgtaatcccagcagtttgggagaccaagtcaggcggatcacaaggtcagcagtttgagaccggcctggccaacatggcaaaaccctgtctctactaaaaaattataaaaattagccgggcatggtggcaggcgcctgtgatcccagctacttgggaggctgaggcaggagaatcccttgaacccggtaggcggaggttgcagtgagccgagatcacgtcattgcactcctgcctgggtgacaaaagtgaaactccatctcaaaacaaaaaaaaaagaaaaaagatttgtgaaattacttgaaatttgagtgggaaataatattaagtactttctatatgccaagcactgctaaatactttacatagaataacctatttaattctagccaggtaggtacccaggttctcacctggcttttttgagagttgagggaattaatttgtatgtagtttgaatatcccttatctgaaatgcttggggccagaagtgtttcacattttagattgtcttagatttcggagtgtttgcattatatgtatgggttgagcatcccaaacctgaaaatttaaaattcgaaacgctcctatgagcatttcctttgagtatcatgttggtgctcaaagttgtggatttttggttttcagatttgggatcctcagcctgtacctatggcccgttctcagcacactagttaggaagctctgcttaaaagtataaagaactgctgggcatggtggctcacacctgtaatcccagcactttgggaggccgaggcaggtggatcacctgaggtcaggagttcaagaccagcctgaccaacatggtgaaaccccgtctctactaaaaataaaaaattagccaggtgtggtggcacgtgcctgtaatcccagccacatgggaggctgaggcaggagaattgcttgaacgcgggagacagaggttgcagtgagccgagatggcaccactgcactccagcctgggcagaaagagcaaaactccatctcaaaagaaaaagtgtaaagaacctttaaaaccttaaattaatagtaacaatgacataaattccttcaggtcaactgtatattgtataatagttgaaactgcttttgaattagtggcataagggcataaaagaggaaacatttatagatttgaggagtagcatgttcttttgtaatgttattcagtcactgccaaatttattttttaaaattaaagaactcaaatatttcaggtagtggtttttttttcttctatatagataatttaagtattttcttcttaaagctgctagtacgagctggcttcaagagcatgttgcagatcttagtcgaaggtaagatgttatggagtttcatgatatgcataatttaaaggaatacacaagaaatgcatctatcatgggaacttaaattattcgttgctgaggttactacgtgaatcacacaggtcagattgttattctccctttactttttaattgatacaaaagagaactttataaatgaaagggctttgttcacaaatcctctttgctttctttaagaagtacactatgtggtaccaaaatacaagttatcttttacaaggttgtcaccagttttatgtgagttctgctaatggatactctttctgtttgttttttcttagcttgtgtggaattattccgggacttagcagtatcttccttccccgaatgaatccatttgttttgattgatcttgctggagcatttgctctttgtattacatatatgctcattgaaattaagtgagtattttttattgttgtcaagtatgttttgatttctggggacttacttttaagggcatcagcaggatggatagtggtcaagcttctagcagtttcgcttatgtcctgtgtaacttagatcacatctt

SEQ ID NO: 23194 - DNA, 2300 bp, Homo sapien
ctgaccttgtgatctgcccatctcggcctcccaaagtgctgggattgcaggcgtgaaccactgtgcccagctctgattggatctttctaaactgtgccatgttgtgcttgatgaagtggatcaaatgttagagttaggttttgctgaacaagttgaagatattattcatgaattctacaaaactgattctgaagacagtcctcagactttacttttttctgcagctcgcccacagtgggtatgcaaagttgcaaaaaaatgagtgaaatccagatacgaacagattgatgtttttggaaaaatgactcaaaaggctgcagcttctgtggaacatttggccatccggtgtcattggtctcagaggccagcagttactggagatgtccttcaagtctacagtgggtctgaagggacggctattattttctgtgagacccagaggagtgtaactgaaatagccatgaatccacacataaaacagaatgcccagtgtttacatggggacattgcacagtcacaaagagaatttacactaaaagacttcagagaaggtagttttaaagttttggtggcaaccaacgtggctgcctgtggtttggacattcctgaagttgacctggtgattcatggttctcctcctcaggatgttgagtctatatccatcgttctggacgcacaggtagagctggacagacagggatttgtatatgtttttatcaaccaagagaaagaggtcaactaagatatgtggaacaaaaagtaggaattacttttaaatgtgtaggtattccttctacaatggatttagttaaatctaaaagcacggatgccataaggtctctggcttctgtttcttatgctgctgttgattttttccaaccatcagctcagatactgacagaagagaaaggggcagtggatgcattggctgcagctttagcccacatttctggtgcatcaggctttgaaccacgatctttgatcacctctgatagggatttgtgaccatgactctggaaagcctagaggaaatacaggatgtcagctgtgcttggaaagaacttaacagaaagctgagtagtaatgcagtgtctcagattaccagaatgtgcctcctgaaaggaaatgtgcgtgtttgctttgatgttcctacaactaagtcagaaaggttacaggcagagtggcatgattccgactggatattctcagtgccagccaaattacctgaaattgaagaatattatgatagaaacacatcttctaattccagacagaggagtggttggtcaagtggccagtcgggccgatcaggtggtcgatctggcagccggtcagttagacagagtccacaagggagtcgctcaggaagttgacaagatggtagaagatgaagagggaatagaaatcgatcaagaagtgggagccacaaacggagttttgactatttgatagttaatctaccagtatgaggttgcctatttctgcctaatcatgtatattatgcaccaaaaattaggtcatcatagttgaggtatgtgtctgctatttgcaaataaattggtcatatttttttaaaaagtatttcacaagaatgattgtaaacagatctacttaccagttatacctttgaattaaaaaacctctttttattgtctctttttaaaaaaaaattactagttgaagttttttgtctgtctcaagcaaataaacatatttcagctctttctagttgacagatagtttgacaaaaaaatgcctgacggggaaatgtccacattttttttcatcatacctcttcctactaattaacataattattagttatttttccactaaactttgaaaggaaagaattctaaaaactggagtatttttctttgaaatgtttctttgcaagtagtggccaattgtgataaaattgtgtcctgttgctcagtcctgttgctttagataattaatgttcaggagatttaattgtaatatgcccagtgagatataaatttaaaatttagaattgttttttccttttagtaattattttgccgtagacactgcctctgctatagctattgccttgatgacatttggcactatgtatcccatgagtgtgtacagtgggaaagtcttactccaggtaaggtgcttcttccaatgcacgtgcttaatattagccatgttcttctaccagattaaaaagttgtatgtgttgttctacaagattgtgaaatttttatttttattttttaattttaatttttttttttttttttttagagacaggtccttgctctgtcacctag

SEQ ID NO: 23195 - DNA, 2300 bp, Homo sapien
gagaatccatttatgcctcttccagctgcaggtggctgctggcatcttttggctcgtagccgtattactcgaatctctgcattcatggtcttactgacttctcctgtcagtttcaaatctccctctggctctctgtaataagggaccattattaagggcccacctggatcatccagaattctctccccatcttcagagccttaaatggaacatatctggaaagacacaatatttacagttcccagggattaggatttgggatatttgggtagccactattcagcctactacaaccatatttctacattttccctttttattctatattacatcatttattagtacaaaagtaataggtgtttgctatgaagaattagaatatacaggttgggcatggtggctcccgcctgtaatcccattactttaggaggacaacacaggtggatcactggagaccaagagctcaagaccagcttggccaacatagcaaaaccctgtctctactaaaaatacaaaaaattagccatggtggtggcccacacctgaaatcccagctacttgagaggctgaggcacaagaattgcttgagcctgggaggcagaggttgcagtgagccaagattgagccactgcactccactccagcctgggcaacagaacgagactctgtctcaaataaataaataaataaataaataaacaaataaaataaaaaataaataagttgataaataaaattagaatatacagataagccaaagacagaaatttaaaattgcttataattgtattccccagcaataagcatcattactattttggtggctgtctttgcagttttttctcttgaacatatgtttatatataggtttcattacaatttaaaaatctagctgatagtgtagccctcaatctcacttcagagaaacccacctcacaagttgggaaacactgacactgatgcccccttagaaaacccaggatgtagacatttatttgccgggaaactttggtatccctctatggcagataggctactgtcagaatgctctttttgaaataagaagttatgtaacacaaagacatgttcctggtagtttatgcaaagacagaggaaagagtatgcaagaatgtcatcctcaagggaagtgcagagagatttcttcagtcctcagctgagtataagctggcctcctggagtctgtgaacacaaacgtccaatgtgagtgtgcctgtgcaagcccctggctgtttatactccggagggtgtccccgtgcgtcatcggtggagtggaccaaaactggtgatctgtttgccctgtgtgaccttgcccagaaccctgctgactgagagaacacatctgctggaagtcctctgggattcaaggtacaggggtaagcatgaccttgaatgcagtagcaatgtgctttagccaactaagctggctcatttcatttaccgctctatctcccatggttaagcattaaaaatacatgttgtggctgggcatggtggctcacgcctgtaatcccagcactttgggaggctgaggctggcagattgcctgaggtcaggagttcgagaccagcctggccaacatggtgaaattctgtctctactaaaaatacaaaaattagccgggcatggtggtgcacgcctgtagtcttagctactgggaggactgaggcgggaggaacgcttgaacccgggaggcagaggttgcagtgagctgagattgtgccactgccctccagcttgggtgacagaacaagactctgtctcaaaaaaaagaaaaaagaaagaaaaagaaaaaaaatatatgttggatgttcagaagactttgtttcattttaaggtatagaataagtaactcaacagcaatgaattcatatgttgtgaacaaacaggaaacaaatgagtaattcctttcttgacggaatttctagctcttgcatcttttactctgaagttctacttcttccccggctactcctgcctacacccatcttccctttctgaactggtagtacttgtgtccaaaccactcttactgtgctttgaaaaaaaaaaaaggaactgctcagcagttcccctctctgtacactgtcctctcacagaacaagaaggtatctggtctacaagaactcgaggcctcactgaaacggaaagcaaatacaaagaaactttattttaaaaacatgtcttggtctcccaagaagagggcaattggattgctcagccaggtactgtgggtagagagaatgggatttttaaggtctggggcccaaatattaaaatct

SEQ ID NO: 23196 - DNA, 2300 bp, Homo sapien
agcccgtgcatagtggtgcgcacctgtaatcccagctacttgggagactgaggcaggagaatcgcttgaacccaggaggtggaggttgcagtgagctgagattgcagccactgctctccagcctgggtgacaaagtgagaatccgtctcaaaaaaaaaaaaaaaaaaaaattgacccctctttattaaggcatattaggaagctgcctgcctgatttggcccagtgacttccctgccactaaatatgtaagcagaagactaacagaattccagaataattatttttggagttatgagttacaggcctctaggaagaaaagtatcgtgactttttccttccctccgcattaaactgggagttaaaagcatgagtagctacatatgcttaaagtcacagaatagttagtgccatgtggtacttcacagatggcatctcagctgatattcacaacaaccctggggcaacttggggaaccatcattgcactgctaagaagctaaggtgacttgtattagtcacaggaaggaacccagacttgaactcaggtctacttggctccagagctctgggcatttccactttaccacactcctaggataataagcgttgggagagactgggaggaagaacataagggcaggggacgtaactgttggaacgtaggatgccgaagttactagttaattacctatttgaaatgccctgaaaacacctgactgcaaatccactcacaaaggaaactggtgaggcagcccagaagatgtacttgaatgaatatggatataattttgcttattttactatgaaatactactgtattagtctactgtggttgctgtaacaaaatatcataaactgggtggtttaaaacaacagaaatttattctttcacagttctgaggaccagtccaacatcagtatcatggggctgaaatcagggtgtcagcagggccacactcctgggagctttaggggagaatccatttatgcctcttccagctgcaggtggctgctggcatcttttggctcgtagccgtattactcgaatctctgcattcatggtcttactgacttctcctgtcagtttcaaatctccctctggctctctgtaataagggaccattattaagggcccacctggatcatccagaattctctccccatcttcagagccttaaatggaacatatctggaaagacacaatatttacagttcccagggattaggatttgggatatttgggtagccactattcagcctactacaaccatatttctacattttccctttttattctatattacatcatttattagtacaaaagtaataggtgtttgctatgaagaattagaatatacaggttgggcatggtggctcccgcctgtaatcccattactttaggaggacaacacaggtggatcactggagaccaagagctcaagaccagcttggccaacatagcaaaaccctgtctctactaaaaatacaaaaaattagccatggtggtggcccacacctgaaatcccagctacttgagaggctgaggcacaagaattgcttgagcctgggaggcagaggttgcagtgagccaagattgagccactgcactccactccagcctgggcaacagaacgagactctgtctcaaataaataaataaataaataaataaacaaataaaataaaaaataaataagttgataaataaaattagaatatacagataagccaaagacagaaatttaaaattgcttataattgtattccccagcaataagcatcattactattttggtggctgtctttgcagttttttctcttgaacatatgtttatatataggtttcattacaatttaaaaatctagctgatagtgtagccctcaatctcacttcagagaaacccacctcacaagttgggaaacactgacactgatgcccccttagaaaacccaggatgtagacatttatttgccgggaaactttggtatccctctatggcagataggctactgtcagaatgctctttttgaaataagaagttatgtaacacaaagacatgttcctggtagtttatgcaaagacagaggaaagagtatgcaagaatgtcatcctcaagggaagtgcagagagatttcttcagtcctcagctgagtataagctggcctcctggagtctgtgaacacaaacgtccaatgtgagtgtgcctgtgcaagcccctggctgtttatactccggagggtgtccccgtgcgtcatcggtggagtggaccaaaactggtgatctgtttgccctgtgtgac

SEQ ID NO: 23197 - DNA, 2300 bp, Homo sapien
atagtggagagaaggtcagcagataaacacgtgaacaaaggtctctgcatcatagacaaggtaaagaattaagtgctgtgctttagatatgcatacacataaatatctcaatgccttacagagcagtattgttgcccgcatggcccacctccagccctaaggcagttttcccctatctcagtagatggaacatacaatcgggttttataccaagacattccattgcccagggatgggcaggagacagatgccttcctcttgtctcaactgcaaagaggcatgccttcctcttatactaatcctcctcagcacagaccctttacgggtgtcgggttggaggacggtcaggtctttcccttcctacgaggccatatttcagactatcacatggggagaaaccttggacaacacctggctttcctaggcagaggtacctgcggccttccgcagtgtttgtgtccctgggtacttgagattagggagtggtgatgactcttaaggagcatgccgccttccagcatctgtttaacaaagcacatctagcacagcccttaatccatttaaccgtgagttgacacagcacatgtttcagagagttcgggtttggggctaaggttatagattaacagcatctcaaggcagaagaatttgtcttagtacagaacaaaatggagtctcctatgtctacttcttcctacacagacacagtaacaatctgatctctctttcttttccccacaatcacccatcaaattggcatgttttaaaaaatggttatattcgggctgggtgcagtggctcacgccggtaatctcagcattttgggaggccaaggcaggcagaccacaaggtcaggagatcgagaccatcctgactaacatggtgaaaccccgtctctgctaaaaatacaaaaaattacccaggcgtggtggcaggcacctgtagtcccagctactcgggaggctgaggcaggagaatcgcttgaaccctggaggcggaggttgcagtgagccgagatcgcgccactgcactccatcctgtcgacagaatgagactccgtctcaaaaataaataaataaataaataaatattagccaaacatggtggcagggggcttgtagtcccagctacttagatagctgagttgggaggactgcctgagcccaggagtgtgaggttacaaggagctattactgcaccactgcactccagcctgggtaacggagcgaccttgtctctaaaacaaacaaaaccactacatttactcatcctttaagtaccaacatgttacctcctgtgagaaaattttccagaaataccatttaacacactaatagacatgtctctcgattgctctattgctgatcaattgtgtatttctccaagttggcctcctaatataccccaacccctctttcttcaagttggaagccacatttatgtagcttgaatattaaagttacgtatgtaaacatttaaaagcaggtgagtttgttaacttcggcaagcttatcagtagacagggccttccagtgaaaagagcacttgactagaaattaggagatttaggtactgtcctaaatctgtttctaccttactttctctggcctcagttttctccctcataaaggaatgtatctacagccctagtctctgggtggcgatttacggcttctctgccttttatcttcattctccgatccatccctcttcatcttacaggtgaggaaactgccatccagacattacatataacttagtcaagatcctacactattaattaatggctaatggcaagggaatcttgagatcctgtacggcggctgacccataaaatctacctagttctaaaattctttaacccacccacttaacaaaaacggaggtaataggtaaacaaaacgccaggaaagatcgcacttaaaggaacaaaagcacccaaggaggaaaaagaggcctgagatttccacgaattacaagtgaacttcctgtcctgggtaaacttccggaatcaacaacaggaagacccaatcagaatcttcctccgggagccaatgggagagcacattacaaagagccaatcccagcgccgctgtcactgttatggtcctgtcagggtgccggcgtcgtggtgcttgggtggtcgccaccaagaagactttggtggggtagtctcggggcagctcagcggcccgctgtgcccgtttctggcctcgctcgcagcttgcacgtcgagactcgtaggccgcaccgtagggcgagcgtgcgggtcgccgccgcggccgcctcggggtctgggc

SEQ ID NO: 23198 - DNA, 2300 bp, Homo sapien
ttgccaactttgtccaccactgccagatcctttcccttctcactccagccccacagtcacttgcactttaggctccctaccctccactgggggctctgaagggactgagaggaccctccaaatcaatcacttgaggctgaaaagagagaaaaaaatgagactgttttgaaacagggcaaataaaaaaaaaagtaaaaagaattttccacaaatattggtaaaaagctttagcccttactaagtaggtaaactcaacttgtcccattttcttttttttttttttttctgaggcagattgtcgctctgtcgcccaggctggagtgcagtggcacgatctctgctcactgcaacctccgccttcagggttcaagtgattctcctgcctctgcctccctagtagctgggactacaggtgcccgccaccaggcccggctcatttttttctatttttagtagagatgggctttcactatgttggccaggctagtcaaagtgctaggattacaggtatgagtcaccgcacccggccaagtattcctatttttatggcaatatagttatttgcataatttctataaaaatgtgttctcctgtaacaagacataattggaggcactggttgtattaaccaggttttgactggaatgtcatattttcaaacatgaccagatggcattaaggagctatggttgactttatggagccaataaagtcttcgtttgaaaaactggcctgattgttcccagacttacaggtgagtggcctgagtggccgggcgcgggggctcacacctgtaatcccagcactttgggaggccgaggcaggtggatcacgagatcaggagttcaataccaacctggccaagatggtgaaaccccatctctactaaaaatacaaaaaaaaaaaaaaaaaaaaattagccaggcgtggtggcaggtgcctgtaatcccagctattcaggaggctgaggccgagaattgcttgaatccaagaggcagaagttgtagtgagctgagatcacgccactgcactccagcctgggcgacggagtgagactccgtctcaataaacaaacaaaaacaaacaaaaaagccaaaaaaaaaaaaaaaaaagaaccacagatgagtaaggaatgtcactctctggcaggcccaggaacttcagtgtattttagggacccccaagaagagaggaatacagtcaaatctctaagtgtttcagatgtagcctgatggctaatagtttaagatgtagttcaggtaatccatgaagatttcctgaaggaagttcgcatgaatgtgagagggcaattaacttttataatttttattgagcacgtagtatatacttgtcagatgctcttctacacattttacaaatgattcttaatcctcacaacagatctttgattaggtttttaaggaaaactagttctttccaaaataacctaatgatcacaaaacatatagaacatacaactctgcatcttgactatggtgcgtaggtctacatgtgataaaatgacattgaactatacacacatcatacaactatcaaatccctccttttgagattgtactagaattatgtaatatgcaaccattgggggaaactgggtaaagagtaaattggatctctctgtactatctttgagtagtgtttaggtattttataaaaataatgtcctacagtttgggtttgtcaaatggttttctcatagttagataggggttatggcttttggagagaaagaccacagaggtctgtagtatattttcaactgtaatctatttcaaaataaaaagttttaaaaaaattctccaaggggggatgattagtaaattgattagtcctttctagacctccaacacaccccaccacacactcacacagacccacactcctattaattccggtaactcgggttgtttggaatgtggatagagaaactaagcttaactatgcgcttccagcacctcgtatctggtacttctgttcaacagaaagccttgggaatggggagggcaggcgtggtaaaaggtacaggtttgggaaggtcgctcggttccttccaatccaaacgagaggcttctgattgtttattctcacaccagagccgtgaccgagacccagaggtccgcttccggccacggccgaacagctgcaccgtgcgtaccgggaacggtcaaggcgcagctggaaccgctgcaaaaggcctccgggcgtaccggacaggtcgcaagggcgggggtccccacctagcggaaatgcacggaggccaacccctccccctgcccccg

SEQ ID NO: 23199 - DNA, 2300 bp, Homo sapien
cctctgtggtagaaaagaaagtggcccattgcccataaacgggaaagagggattatgttaggaccatgatcgctactggcatcttctctctactctatttatagggctgtcaccctctattaatcattaaaagcaaacttactaaatacctgcagattctaagtaaaacataaaatgcagcattccctcctcaatcatctgaactggggcaaataggaccctatacaacctctgataattattattaataacaaacttctggccaggtgggacagctcatgcctgtaataccagcactttgggaggctgaggtgggaggatcatttgaggccggaagttcaagaccagcctgggcaacacagcaaaaccccatctctacaaatacgaataaattttacaaataataataaatttcacttctcatatatgaaaatgtttcagaatgcatccattgttaacttccaaattttttctgtaatccttcattccgttcactataaacccttctacatattttaattcacatactcaatcttcatgcatggggacctgcaattgtatccaatcccgaactcttctaatcaacagatgccccaacaaaacctgttatcccaaatcaatgctacattttacttatctacctacaccttcatgttatacatctaaaaccctcctctttagtaatctaccactaaagtgaatattgtctttccttccatgtacaggcacataaatatatgtccaatttccccaaccaacaaatcctgacacacattattattctcaaacatggcctccagacataaaaagcacaccataaaattcctctttctatccaaaacacttgaatacttttgttaatgactttctttagaaatcctagtacatataccacttattccaagttaaaaatcacaaaaatactacatcctcaagatagaaacatatactagaaagtgtagacatatatgaaaaggataaaatcaaattaaagataacgtttatgaagagggaggattggagaaatgcagtccaggagagattcagctgagattttaatcctatttgtaaagttttatttcttaacctgagttggggatgcatggtgttcactgtaattactcttcataccttttcatacttgaaatacttttaaatgacttttaaaaagaaagacatccaattaccaatgagcatctccctcttacacacagtgagaagccattatgtccaagttgcagtaactgttcactgctacatctgggccaccccatcatttacctaagccaagaaaagaaaaaattacaaacctacctcccaaaactttctcttagatatgttccaagtttatatcctgaaactatacataatccaattctttcacaactctcacatcaacaataattaacatgtctaatttcacgtttgcatccctaaattgccatttactcttacaaatgccttattactcacatagtaaacttttccttgttcgtctacgttaaaatacaagtgaattggttgaccacataactacttccacttggctaaacgcagacagttgtatacattacatctctatgcaggagtccgattcactcatacactaacttttcaatctaaacctacaacatccaaattaagccacccatcatttaaccacaaatgaaatgtcatctccgccaaatctaactcagccagggccattccaaaaccactccagtccgtccactgagcatacacctcacgcatctgaaagtcccgtccctggaccaaggtttacgccacccagaagtgctctcctccaatggtgagactcagacacaccttcaaatcctaattttcggctcgctgtgggaaaacaagtagagacagcctgaagttacaaacccaaaggaatctatttcatacaccacaggtcctgactttctcgtcactggggcgtagaagttggaagccccgagcaaggggaccaggtctagtcgtcttcggcgtccgcagagtcctacagtcgtcgaccaagcagttcaggcagctggcccgcctacttccctccccacccccaccacgacccaccccacccccaccccacccccacccccacgctgggcgcacagcccgcggtctgtcccccgcactgcgggacctgagaacagcagactgccggctcctctcccacaagggagggcttggttgccggctcagacgctccccgcccctcgcctccggccaccagcctctccgcccggggtcaacccttccagcctttcgctctcatctaaccggacgcaggaccgaca

SEQ ID NO: 23200 - DNA, 2300 bp, Homo sapien
acatttaatgtaattattgacatgctggattaaaattgatcattttgctatttttctatttatttcatctatttttgattccttttaagaaatctttttctgttgacttttgaattaagcaacttttaaaataatttcatttccatccttatttataactgaatttcttatttatttttgagacagtgtttgtttgctctgtcgcacaggttggagcgtagtggtgcgatcttggctctctgcaacctccgccttctgggttcacgtgattttcgtgccttaacttgccgaatagctgggattacaggcttctgctatgctactacacacggctaatttttgtatattttgtaggcgtagtttcaccaggttggccagggtagtctcgaactcctgagctcaagcaatccacccgtgtcactggcattacaggcatgagccactgtgcccggcctataaccgaaaatttttaatattagttgtcctagttttacaagatatacctttatttaatcacattccactttaaaatattattccgttcatgtataatgtcagaacttaacagtgtagtttcagttcctttcttccgtcttttgtgacatagttgtcatgtttttactgtttatatatgctataaacacaatactgtgcaaccttttttttattttttatttttttgctttagacagtctttgtttgttttttgaaatagactttcgctctgtcacccaggctagagtgcagttgtgtgatctcaactcactgcaacctcctcctcctgggttcatgcaattctcatgcttcagcctcctgagtagctgggattacaggcccatcaccatgcctggctaatttttgtattttcagtagagatggggtttcgccatgttggccaggttggtctcaaactcaaaagtattcttttgccttagtctcctgagtagctggaattaacagtcacatgccatcatgcctggctaatttttgtatttttagtaacaatgaggtttcaccatgttggccaggccggtcttgaacttcctggcgccacaagtgatctgcccacctggggctcccaaagtgatgggattacaggcatgagccactgcacctggcctaatttgcctttttcttgctgttagactgacttgctgttagacttttcagcattctatatcttaggcataaacagaatttgaagagcattcaattttgatacttgagaatgatttgattgaatcttaatttttatgtatcattatcagtaggaaatgtttacaatagcgttatttgagaatggaaaaaattagaactcatttcattataagaagtgccttgtgattttgaagtatttttgtctgtagcttcaaaatcacttccggatatacttgtcccttagttttgtatttggaagggaggttgtttttgagtttgtctaaaatggaggcaagaacaagaattccaaaagagatgaaaactattagctacctaatgaaatagtgaatatcaagaatttgtttaactttcttgtattgtgataagttactactttcagaactacttaaaatcgtttaatttttaatcctttctcttgttgtatctctctctctctctctttttctgtctctctctctctctctctgcaggggtgctttccagacaggccaaggacctctcgatgcccaagtgaagctcttagaattcactctggagcagaattttgaagtcgtttcagttagtactatttctgccgtgatagaatcggttacatttttagtgcaccactatatcacttgctcagacaaagtaatgtcaagaagtggatcagatagctccgtgggtgctcgagcatgctttgggggactctttgccaatcttattcgtccgggtgatgcaaaagcagtttgtggcgaaatgacaagagatcaactcatgtttgatttgttaaaacttgttaacattttagtgcagctgcctctttcaggcaatagggaatacagtgcaagagtgtctgtgaccacaaatacaacagatagtgtttcagatgaagaaaaagtctcaggaggcaaagatggcaatggaagcagtaccagtgttcaaggatcgcctgcatatgttgctgacttagtcttagccaaccaacaaattatgagccagattttgtctgctctgggcctgtgtaatagcagtgccatggcaatgataattggtatgtattgagaatattaatcttaccattgtctctgatactataactggtttttttttaagcaatatatggattcattttcttttta

SEQ ID NO: 23201 - DNA, 2300 bp, Homo sapien
gctctgtccttatgagtactctgttaggaattcactagatgtctaagagcacaaagcattttattccctgaaaccctggggttgcttgccctgctacttttcgatagtacctttcctggccttcagtggtttgctcacataggttcgtcagtacatgttgaagtcttgaagaccctgtatagatctctggagatccagggatctccagatctctagatgcaaatctgcatagatgcaaatattttcttcctggatttccggctcttacatcctcagtctagggtgacaactaggttgtgctgagctgtggcctaggaattcttttccagacagctcacacaatcctaggggtcacctcattggtttccacttacccaggcatcactgccctgccctgcctgatactcagtgtctgaaaagtattgttaatatatatttctagttaaggttatttcacgtgggagatgaacctgatccttataattccagaagtggaattctaaaacagagcagctttttgcatacgttcaagtacagagaaaaaaataaaacagaaatttgtattaaaaaataaaaaagtaaattaatattagaaaccagagcatttttaaaaggaagttgagaaatttttttttagtgtttgaatggcatttattctttatatttacttttgaaataagggtaataaatgaaaattggctaaacttctaattgcactaagtaaattattacctaatattctttgtgtgcttttcttacctgattatgctatgaattaattttgtgaatttcttattatttaaatgtttcactctgacctgtgtcagtatgtttgccatttttagttgcttggttgtttttgttagaaagtaaaatgtattgttgcaccatgcatttgttatgtgtataaaattttttacttcacaaaactgtctataggcaattagcaattagtattaagaagttgtataaattgaaatcactttcatatactaaaaactgtaaaatgagagttattacaaaagatgttgtttattgttttattgtctcaacctttttaacataaaagaccgggtcataattgtgctaaattagggaagtaaaaagagaattgagctagatgcagtggctcatgcctggaatcctagcactttagtaggctgaggcaggcagatggcttgagcccaggattttgacaacagtctgcacaacatggcgaaacctcgtctctcctaaaaatacagaaattcatggcatgtgcctgtggtctcagttacttgtgaggctgaggtgagatgatcacttgagcctgggatgttgaggctgcagtgaaccgcgattacaccactgcactccagcctgggcaacacagcgagaccttatcttaaaaaaaaaaaaaagagaattggagacttgataacagttatatagtgaaaaaaattaaaatttcaaatcaattcattcagcctttaaatttcttaataactaaatcacattatatgatcacccatttattttataatttttagtggtgtgctgtatgccacagtaatgaaaggaatattcagagtaataactatctatgagagcccttaatactcattttttaaagtaaaacacattaaattttaaaacatattactttgttgtctaagattcctgtttttgtcctaaataaaaattaacagaacaggaaatctgttacagaaatttgttcttttatactttcatttgtaatataagcagaagtctagtttaatgctatagactgaatcttgagcttgagtcccatatttgccatatacagattatatcagtagcctttctaaggctgtttcttcattttgaaaataacattcatttctatgttgcgaggactgaattagatgcagttgccaagcacattgaactatggctaaaataaagcaagttttcatgctactggtttttcattgtttctggaggtggtaccattaaaatactgtatataatactttacagagattagatcttaaatattctggcttaagtacagtggtgagtcttcctcatcaatgtcagtaaagattgggtatcaggcctttacctcatgccatttctcctaaattcctttatattgccttagtattaaggataatattatcttgcataatctccctctgaaacatatattacttctcttcttaatgatttggaaaagcagtgtattttagataatatcttcttacagatactccaagtatcacagctaaattaattagtgaacaaaaagatgacaaagaaaagaaaaaccatgaaga

SEQ ID NO: 23202 - DNA, 2300 bp, Homo sapien
tacttttttttttttttcttttttctttttttgagatggagtctagctctgttgcccaggctggaggacagtggcacgatcttggctcactgcaacctccacttcccaagctcaagtgattctcctgcctcagcgacctgagtagctgggtctacaggcgtgtcagcacgcctggttaatttttgtatttttagtagaggctgggtttcaccatgttaaccaggcaggtctgcaacttctgacctcaaatgatctgcccacctcggcctcccaaatatctgggattacaggcatgagccactgtgcccgctcatgagtgatatactttctaattagtattcattaattatgaaatttgaaatcgttcgatttcattttattttgatttttttttagttgtaaattatattcaaggttttttttgaacctaaagttttttttaaagtttctgggattatcttttatgtttatatgaagaaataatgctttaatcatgtatatatatatatatatttatttatttatttctagattttgctgggggcagtgctcacgcctataatcccagcgctttgggaggctgaggcgggcggatcacgaggtcaggagttcgagaccagcctggccaacatggtgaaaccccgtctttactaaaaatacaaaaactagccaggcgtggtggtgggcccctgtaatcgcagctactcgggaggctgaggcaggagaattggttgaacccgggaggtgaaggttgcagtgagccgagatcatgccattgcactccagcctgagtgacagagtgagactccaacttaaaaaaaaataaaattattattatttctagattttaacaattggaattatcagttatatttgtgcttgcaaatttgtgggatctctttttccccttctcttccttattgaactttagcatgctagactgtcttcattattcatgtatggagaagaagattctcattttgtggttttggttgttcttaataccttcataataatttaatttttaaaacataaacatatcttgtattacttgtattcttttataattttatctaaattgctgttgagtatttttaggttcacagaaaattgagcagatagtacagagttcccatatatgcagttcctactcacagtttacttattcatattttgcattagtgtagtacatataattgatgaactaatagtggtatgttatttttaactaaatttatagttgaaattcgagttcgctctttatgttctacagttgtgtgggttttgacaaatgcgcaattttatgtattccaccatgacaggatcacacagaagagtttactgccctaagaaattctattaatcctgcatcccttcctaatccccagacctctggtaaccactgttctttgtactgtctccatagttgtgcctttttcagaatgtcatatagttgtaatcataagatctagccttttagattggcttctttcatttaataatatacatttaagttttgtccatgtgttttcatggcttggtggctgcttccttttttatcgctgaaaaatattccattgtatgaacatgtaagtgtttattcattcaccttttgaagaacatcttgattgcttcctttttttggcatttatgaatagatctgctataaacattcacatacagatttttattcccagttttgtttcactgatctatttgtttattctttcgtgagtaccacattgtcttaattgtcgcagcattatagtcaggtggtcaagtcatatagtgtcagtcctctgactttgttcttcaatgttgtgctggctatgctacgtattttgcctttccatagaaacttaatcatttgattgatagccacaaaataacttgctggggttttggttggaacaatgtgtcctctgttctgtttctctttgtatgttacatgaagagggttgagaacggtgaaatactatgtgcactactttgctaaatgagtttataaagcagtgcaaatggtaatctttgggtacctggctatatttttatcagtataaattctgatttttcaaatatttcgatgtagacagggaaatcattcaaaactgtggattccattccagcagatgtagctaaaatgggggggcaggagaaaactgtggaatagggaaggttttttctaaggcttcattattgtgccagtctcaagttgaaaagaggctacatgattgtacattcaagtcttatgttttcctatatttgaaaaataaaaacatttataaaatatatgcaatgtt

SEQ ID NO: 23203 - DNA, 2300 bp, Homo sapien
cagcccaagaaaaaaagacttttagatagtgacatacaggatcccaatagactcgtcagccaaggcattctatactgaatcctacagtagatatttcattgcctgctcaatttccactcactatgtacatatttttaatcgagaccatattccccacctactttattactggaattcactttgcttgaagggagattaggcagacttcagtcaccatcatcatctagcataccacatttaaaacaaaccaaccttgaatttaactgaaagttgcaagtttactatgtggattaacggggtgctacatacaggtgaggaactttggcagagcggccagtgtgtttttacagacgttcatctttaacaattatcaaattagtttagacagtgctggcttttatacttaaggaaatgaacagacaacctggtcaagtatcattttctagaaaaatagtggggttttttttgtttgtttatttttttgagacggagtctcgctctgctgcccaggctggagtgcagtggcgcgatcttggctcactgcgacctccgcctcctgggttcaggccattctcctgcggcagcctcctgagcagctgggactacaggcgcccgccactacgcccggctaattttttaaaaaaatatttttagtagagatggggtttcaccttgttaggcaggatggtctccatctcctgacctcatgatccgcccgcctcggcctcccaaagtgctgagattacaggcgtgagccactgcgcccggcctgaaaaacagtttttaattacttctcagtgggaggacattttagggcatccgctcttctccaatcacagtcaggtccggcttcctttggtatctgatggcaatggctgaaatgagctgagctgagttcctctcccttcacattctggagtggctctttactgagtaagaaagtgaattaacatttatttagcttcttccttggagctgggtaccgggtcagcctcttttcagagagcttttgctcttgtggtcagagttaccctgcagttttctcctggctcttacatgacatatctcagtacaggtgtcaagccaatgggacaaagccatagtcctgttttccttccctccttccctccctccctcccttccttccttcttccctccctccctccctctttcctattgcccaggctggagtgcagtggcaccatctcagctcactgaaacctccgcctcccgggttcaagcaattcccccgcctcaccgtcccgagtagctgggtttacaggggtgccccactacgtccggctaatttttgtatttttagtagagacgggtttcaccatattggccaggctggtctcgaactcctgacctcaggtgatccatccgcttcatcctcccaaagtgctgagattacaggcgtgagctaccgcgcccgccctctaactgtttctttggagtgctgctaggaagattcaaagaagtgcaaataaggtaccagcggaggctggtttgtctccttgcaatttctttgtgatcacccctgggatcactcttctacagcgttccgacagtgttccaaaaacttccctgcaccagcggcaggggcagatttcccacccggccatgattcatgtagagcagtgtcaaaaccagatcctttccttacacgctcattcgccgaaagacccatgctatgctgacggggttccaacctgggcttcaccgactccacgtcagagggtctgtgattccctgagagggtacccttaggctgagagcaagggcccacctgcactctgcgcgaaggactgtggttttcatcgggttgtcgagagcgttctaacccaaaatgctttaagaatcacaactctagcccttctaatcaaactgctttggccaagacgtccgttttgagttgcatttgaaccctagccctcggtgggaggcacactcacttccacgttcacagttcttggaagcggtcccactgggggcggggctgagcgcgaccgcgccctcaactccccctattgcccgccccggggtggggcataaccacccaacaggctccttactcaagctcgggttcttctcctaggcggaagccagaccagagagcgtgcgtgtttttcccagggtgccccgcgctgctgttatggccgcctccttgaggtagtatccgcacatggaattctagggccgcaggtgtatttacggtaactgtcgccactagatttcagcgcctttggactctcctgttttcactttcttttgttgactcccgtgtggccctcgtggga

SEQ ID NO: 23204 - DNA, 2300 bp, Homo sapien
gtgggcgtggtcctcactttctttgcgcaaaacttcttaccgcccaggttcagtaataatgacaatggcaatgtcagttatttttctaagcccttaacatgtactcagtcatttaatgcttatagtagatacttaaggtagattcaatttttaatcccattttgcggtgaagatctgtaaatacagttgggttaagtaattttattttatctatttatttatttatttatttatttatttatttatttattgagacggagttttgctttttgcccaggctggagtgcaatggcgcgatctcggctcgctgcaacctccgcctcccgggttcaagtgattctcctgcctcagcctccagggtagctgggattacaggcatgcgccaccacgcccggctaattttgtatttttagtagagtcgaggtttcaccatgttggcctagctggtctggaactcctgacctcagatgattcgcctgcctcagcctcccaaagtgctgggattacaggcctgagccaccgcgcccgggtctggttaagtaatttatttaaggtcacactgttggtaagcagaggagctaaaatgaggcagcaaagttgtttttttggggggatggagtctccctcttgttgctctggctggagtgcactggtgccatctcggctcactgcaacctccgcttccccggttcaagcgattctcctgcttcagcctccaaagtagctgggactacaggcatgcaccaccatgcccggctaattttgtgtttttagtagagacggctttcatcatgttggtcaggctggtctggaactcctgacctcaggtgatccacccgcctcggcctcccaaagtgctgggattacagccatgagccaccatgcacggcctaggcggcaatgatttattttttttatttttttgagacagagtctcgctctgtcgcctaggctggagtgcagtggcgcgatctcggctcactgcaagctccacctcccgggttcacgccattctcctgcctcagcctcccgagtagctgggactaaaggcgcctgccaccacgaccagctaatttttttttttgtatttttagtagagacggggtttcaccgtgttagccaggatggtctcgatctcctgacgtcgtgatccacccacctcggcctcccaaagtgctgggattacaggcatgagccaccgcgcccagcctaggaggcaaagattaattcttgtgagcaatgaatatttaccagagagataaagagttaaaaggcacatgcactggcacatctggttgtgggatttaggctggacccaaaagagtaataatgaacagtgtagtgtgtaagtactctgtgtgtatgtgtgtgtgtgtgggcacttgtgtgacacagtaggtgcttccagtgacaggaagtttgaactttggtggcctggaaaactttcctagaagaagttagacttgagctgattttggattaaagggtaagactaacaagtggagaagagttcaacaggcgatatcacaagtgcaaagtgtggaggcaggaatacgcatgggacattagggaaacaatgagtaaaccagcgctcttggagtgacttttcaagaagagaaaataatggaggtagaaagaaccagattgtgaaaagttttagaaccttgactaaggaaacttttgtattgtcagtaggaatctttgtgaatttcccagcaaaagactaaatacctattaatgaggaatattatttctggggctgacttccactttggggctcatagtcagtatgagtgagctgctaattctaggagagagaatgtttgtagaatgatggaaatttactgagtgccttgtgactgacatacagtaatcattctaagtctatagattgtttttgcacactaaaatggtagatttacctaatagtgttatcctttacggtatgaaaaataattttttttggattaccgcactaattttttatattacagagagtggatctttcctacaattgctactggaagggaactatgaagccatattcttaaattcaatgactcaaaatatttttaattcaacaacaaccgctgaagaaaagattgatagctacctggagaagcaggtagtaacattcctggattactcaacagatttggacacaacggaaaggtagaattttatttgaaattttcatagaggaacagagcaaatacatttaatagcaccttgacagggtaaggccctgattttagcagttgagaaaccttgccttatattttactcaagactcatggtgt

SEQ ID NO: 23205 - DNA, 2300 bp, Homo sapien
ctttattcctctattacactcttgaatgatgatgaaaataggacagaggatgaactcacagttatttccttctttctcttttatttattgttttttatttttttctaaggcagtctcgctctgtcgccccggctggagtgcagtagcatgatcacggctcactgtaacctccgcctcccaggttcaagcgattctcctgcttcagcctcctgagtagctgggattacaggcatgtgccactatgcccggctaatttttgtatttttagtagagatggggtttcaccatgttggccaggctgttctcgaactcctgacctcaggtgatccacccgcgtggccttccagagtgctgggattacaggcatgagccactgtgcccggccctccttctttcttctattgaatactttaaacaatattcaaaatattcagtattcaaatatttagtattcaaaatactcagtattgagccagggagtggcattacttggattgtttagtttaatccttacaagaaccctctgaggtataggttcagttatttcattttttttttgatacggagtcttgctctgtcacccaggctggagtgcagtggcacaatctgggctcactgcaagctccacctcctgggttcacaacattctcctgcctcagcctcccaagtagctgggactacaggcacccaccaccacgcccggctaattttttgtagttttaatagagacagggtttcaccgtgttagccaggatggtcttgatctcctgacctcgtgatccgcccgccttggcctcccaaagtgctgggattacagatgtgagccaccgtgcccggcccagttatttcatttcataattgatgaaactgaggcttcatcaggaaaacaattgtgggaaaaatttacatgtgctcacaaactaatgagaagcagagaaaggacactgtcctgtgcatgtgacattggaacccatgttcctgatgggtgaagattcttgctcgctattgtatggagctgttaaaattctgccatccaaattttaacaaccttgtccattgtaaaaaaatctctgtacaacaggagagtgcatttttcaaaggcatccttttttttttcagccttctgctcactctggtgtgtggtcatatgcccattctgcatttgatgcatgagaccttgttgattgtttggcttgatagaaattatggagtagagacttacttcataatgacattttccaggtattgaagcttaagtgaaatgtaggtgtttaatataaatatcaaatacactatttactataaatactttaatatagggatgcttttcattgagataatattttgttgtaagtgaatttatgaagtgatgatatctcttcaatgctagcattttttttgagttccttgtttctctaaagtttgaacatgccaggcgcagaagctttcacctgtaatcccagcactttgggagaccaaggcaggggatcacttaaggtcaggaattcgagaccaacctggccaacatggtgaaaccccatctctacttaaaatacaaaaacttagctggatgtggtggtgcgtgcctggagtcccagctattcgcccaggcaggaggatcacttgagcccgggagatggaagttgcagtgagccaagatcacgccactgcactccagcctgggcaacagagtgagactcccatctcaaaacaaaaacaaaaacaaaaacaaaacaccaaaaacccaaaaaatcaagtttgatcagatgggtggccatccatcagggcaggctggatttatagatgtctaagggcatttgcagtgttataattctgtccagtgccaattgctgtgtaatatattaatgcttttgtttcaaagctgagttgactggaaaatctttgtattattacaagacatataaagattaatattttgttaaattatatcatcttagtttataatccttttttcaggttaaaggactggatgcatttgttctgagcctgctcactctagatggtgaatcaatctacagcctgacctcgaagcctatactactgttattagcacgcattatcctagtgaatgtaagacataaactgacagctattcaggtaaggaaaggatccatgagattcataccctggtatgacttttgtgcttattaacaccaggctgtagatgtgttgctgacaatgtcttggtctattttgttttctaagtcttctaggtatgtaatttaaaaatctgatgaaaataagcaaaaacttttcttccctcatgagattgatctagt

SEQ ID NO: 23206 - DNA, 2300 bp, Homo sapien
ggagtccctctttttctattgattggaatagtttcagaaggaatggtaccagctcctctttgtacctctggtagaattcggctgtgaatctgtctggtcctgggctttttttggttggtaggctataaattactgcctcaatttcagaacttgctattggtctattcagggatttgacttcttcctggtttagtcttgggagggtgtatgcatccaggaatgtatccatttcttctagattttctagtttatttgcatagaggtttttatagtattctctgatggtagtttgtatttctgtgggatcagtggtgatatcccctttatcattttttagtgcacctatttgattcttctctcttttcttctttattagtctggctagcggtctatctactttgttaaccttttcaaaaaaccagctcttggattcatttgtttatttttttttggaagggttttttgtgtctctatctccttcagttctgctgtgattttagatatttcttgccttctgctagcctttgaatttgtttgctcttgcttctctagttctttcaattgtgatgttagggtgtcgattttagacctttcctgctttctcctatgagcatttagtgttataaatttctctctgaacactgctttagctgtgtccagagattctttgtttacactgtgtggggaaaaccacctactgaagcctcactaatggtggacgcccctgtccccaccaagctcgagtgtcccaggttgaccagactgctgtgctggcagtgagaatttcaagccagtggatcatagcttgctgggcttcatgggggtgggatcagctgagctagaccacttggttccctggcttcaggcccctttccaggggagtgaatggttctatcttgctggtattccaggagccattggggtatgaaaaaacttctgcagctagctttgtgtctgcccaaacggctgcccagttttgtgcttgaaacccagggccctggtggtgtaggcacccgagggaatctcctggcctgcaggttgagaagacgggaaaagcttagtatctgggtcagaatgcaccatttctcatggcacagtccctcaggacttcccttggctaggagagagagttccacgaccccttgtgcttcccgggtgatcgcctcgccctgctttggcccgccctccatgggctgcacccactgtctaaccagtcccagtgagatgagcctggtacctcagttggaaatgcagaaatcacctgccttctgccttgatttcgctgggagctggagacgggagctgttcctattggccatcttgacagccaccccctatttatgtatgtatgtatgtatgtatgtatgtatgtatgtatgtatgtatttatttatttatttatttggagacgggttcttgctctgtcgctcaggctggagtgcagtggtgcgatctcagctcactacaatctctgcctcttgggttgaagcgattctcctgcctcagcctcctgagtagctgggactacaggcgcatgccactatgcccggctaatttttgtatctttagtagagatggggtttcaccatgttggtcaggctggtctcgaactcctgaccttgtgatccgcccacctcggcctcgcaaggtacagggattacaggcgtgagccactgcgcccgtccccccactattttttttttttggcattgttaagacaaacccgctgagaaagagcaaggttatgaatcatatctcccaggattgtgtggaataaaggagatagtgtacataatgtccttagctcatgtctggagcatataagtgctcagataatgctggctggtaactattagtgttactgtattcctcaggtcttatgtttaaaattatttaacaacagagactatgtactatatactttatgtattatagactctattttacacattaatatatttttcttctcatcataacttttaatgttttatcttttgtcttgcagtgatgaaactacagaatctgtttgtagatgattcaggtcgatatttggctattcaattccatctggaatgtgcatatgtgtttttatattattatgagtacagaaaagcaaaagatcagttggatattgctaaggacatcagccaattacaaattgatttgacaggtaagacttattttttgtggataattgattttatttttatgataaaactatatacattggcagtttgtattgtatgttggtattagattttctatatcctatttgctttacaaaagtagactttaaaggt

SEQ ID NO: 23207 - DNA, 2300 bp, Homo sapien
aagttctccaagagaaattctgtgaggtctctgttaataatagcctgtggtttgttaagattatttactcttggccgggcacggtggctcacgcctgtaatcccagcactttgggaggccgaggcgggtgaatcacctgaggtcaggagttcaagaccagtgtggccaacatggtgaaaccctgtctctaataaaaatacaaaaaaattagccgagcatggcggtgggtgcctgtaatcccagctactcaggaggctgaggcaggacaatcgcttgaacccgggaggcggaggtttcagtgagccgagattgcgccactacactccagtctgggcaacaagagcaaaactccatttcaaaaaaaaaaaaaaaaaaaaatatatatatatatatatatatatgtaatttactctttttgaataaaaagttttaataaattcctcaccagcttttccccagaggtagcataataagcatagtaaatggggcccctaactgcaaaagagagaagataggcttcagtggaatacctaaatgcaaactcaagaagcttgcagcgatggtattgagactggaaggcagagcagtggccgtgtgttgagaggtgggagcaggtgggactcagagctcagattcccagagtggacgttgaagtccccatttaggggtggaaggcttggacccacctaggatggagccttagcacagatgaggacacagccattgaaagcatcgacttatttgactgtgttatcaagactgttcttatgctgtacttgtttctcttgggcatgccattagtgtggtattcataagcagaaatgtaaaaaagaaatgacaagaagtatgtgtagtaaatccacctactttccagacttagttcaaagattatgacctaagcagaggtctggttagtttaggctttgtgaacgtttgtccaaattatagtaggtttactagctaaaaaccctgggtgagtctgatgaaaagtatttctttttttccattgctgtttttgtaacatccacatcaatctaaattgctgtttagataaggtaactctactttactggccaagagtgaggaataaaatctgttaagtggatgcaacacacttcctttctgcctattcattcaaaaggccctatagtgaaatggcaaagagcctttattcaaatggtgggtgccatgctgtggtaatacagatggatttttcacaacatgcagaagtgcttataaatagatacgtttcaatcaacaagtagcttattcaggcatgtgctcaaatatagtagctgcattcattagacagacatttccactaatcccaagactatactaataaaagagtaatcccttatgggctaaaggtggtgctggtttgcttttaactcttggagtccttcacacaccaaggcctaataataattgtagctgtatttggttttcaccaagtgaacttaacccatttatgccggaggttgcaatttttaaaatttttgcaatcagagcttggtgatgaccttgagcagtagaatataaataactctcacacgcttagcgttccgataatggaacactaagcataaatgggttaaaagccgagcttatcttggaatttttctattcttatttttttaaattgcaggagcttagtgaagaaagaggtgctttttactctagatatgtagctttcagcaaagccaattcaaaaatcagtttgtgtgtgtgtatgttttctcgatactttatcataaagcacttgtctctttcaccttggttcatagaagtgttcgcttgagcagattctgttttgttctttgatgttaggataaataacaatggtcagttttgagagcatttgcaagctctcactatagtggtttgcctttttacgtggactttttccccttcaatagctctttactcctcctatgttactcagagctagctgtaatccgtttgcttagcacaacaccaaaatctttcccttgccagtggtgtcaaatctgccttcctttttattattctgacttataaactgcagtgacctctgagtcaacttcgccatctcttggccctgtgccaacattgtgttctgtgaaaagagagtcctgccaagggctacgaggcagaaaactgatattattaaagtggtcttctgaacggtaagtatcagccattttctaatcttttgtgatgttattgccagaaagggggaggggggggtaaatcatgttaatgttgttaaggatctaacccatgcattgctaactttttccagatcgagggctcagatg

SEQ ID NO: 23208 - DNA, 2300 bp, Homo sapien
ttttaaatacgttgccctactctcgcaatgccccgtgaggtatccttgtccccattttaaagaaacattggctccaagaggtcacacggccaggaagggacagacctgacatgaaaggccaagcttgcctcctatcagccttgttcctgctatggcaggcccagcaggcagatttctggttctgagccagggtcctggtcacaggggctggagggactaggcctgaccccgttctcagatgtctgataacaggaagtttccccccaacactgggaggcttagcttaataaatgagtttcctgttctgcttatttgcgtacattgaggattctcatgctacgtttgggcctacataggcaggcttccaggggcctccaattcaggggcttgctgtttccagggggactggctgtgctagggaaatgtgcccttggctgccatggaaagaagggaatctagaactttttaaaacctgccccttcaaggtcttggccaaggccatgggaatttccaaatatttcacttgtcccaattgaggtagcaatgaggacgctttgctagaatgaggcttagagatttatgtccccatggaaaatccccagaagtgagggaaactcattctaaaatgtcgaaaatagcagcaaaccgaaccagccctcacagatatcacctgctgtagaaacagagtgtcctgaggaagaaggcaagaagaaattcctaattcccagggtctctctccccataatttaggttttgtcaggacctactggtatctgttgggacagacaactgagtgaaaagctagtcgtcatggaaaaatcagtgaaagacctttttaagacagaattttccttcatgttaggggtttggacagctggggctattccactcacatgatgcccactctgattaccgcactcagaattcttagtttgtctcatattcagtcgccactacctggagtttccacagagggtgtcaaaggtgacctcccttacattctgaaggatgtcctgtctgagggatgggctcccagaggtcactagatgggaatagtggtgtgtattgctgaggaccccagaggttttagaacggaaggacttgacgccatgggcttgctggtgggaggtggatgatcccttaccaagctgtggcctcacaccctcctatgctcccgaccacccccagcactggcttgactccagtgtgaatctttcttttcttttgaatcctaaacacatgtcccctgaagtgtttcagacagttgggatcagcagcaaccctagcagtgtttgtgcagaacccccagagctgacactgctgactgggacatgtgacctggcacccccaggtgggtgggccccaggtgagtccacccgggctccagcagaggaacctgcctccggagttcggaggctgtgatgcgtggtaccgatggactctgagttccagactcgggacacaaggggagatggaaggcaactgtgtaaaccaaagaggcagcagcaggaaggtcccagcgaaagcagatccactggccagaattccccaaagcctctctgcagtgtggttctcagaccagcagcatcaactcacttggggacttgttagaaatgaatctgcctgtcagtgagaggcccaggggttcctgtgcttgacggcactgcactaaacaaagctgagcctttgctaactcctctaggtctctacccactggctaagactcggccaagggcacatctagggctggagtattatacagtgagcagaagatgtatgcaacttaaagaataatgttaaggagtgggggaatgctgatttttttctctgcctctcttgtatattctatcataaaggatctggactcagaagagatttaagtttcaaatctggctttgtcagttaatgcttgtgggatctcaaccacgtcactgacttctctgagcatgcttccatatttctacaaaggaaacaataggtgactctgctgagttgagcacttgcgagtaccaagcagtaagtgttttacacctatttactcatttaatcctcctgaaaatccgtgtgacacctgtgttgttattacccccatttgacaggtgaggacctgaggcacagatgctaaccagcttgctggagatcacacactcatgagtggcagagtggggcttggaaccgggtagcctggctctggagccctcactccatccacacaccatgctgggacccagtcgagtgaccagcagaccggttgtgtgggttaggtggaatggtggatataaaccacacagcccagctcc

SEQ ID NO: 23209 - DNA, 2300 bp, Homo sapien
gcgaaaccctgtctctactaaaaatacaaaaattaaccgggcatggtggcgtgcacctgtagtcccagctacttgggagactgaggcagaagaatcatttgaacccaggaggcggaggctgcggtgagtggagattgcaccactacactccagcctgggcgacagagtgagactctgtctcattgaaaaaaaaaaaaaagtaaaagaaagaaatgctccttgcggcaatacatgggaattttgttgagcacctgctgtgtcctcagaattctttcatctgcttaggattcaaatacaattaattctcagtctctgttcttcagcagctcactgtccaaagggagtctctctccccggtccacatgctgaggcttgctccagagtgaatgtgtgcactggaaagaacccacacaggccccctgagagctgtcagccttgccaggcttctgtgagatccctgggtccgagtagccaagctgggaggagcaccatttgcccactgactcttgggcaacgctgcagcctgcatcccagccggcagaaggcaggtggtatcacagctgagtttacagccacggaaggaaccactgtaggcttttagtagataatatgttttctctgcttcaaatccttattttggttgcttaaaatttctgcagaaaacaaacagcttctgccaaaattggctcacaaaattagcttactagtataatcagttgtatagcaagtatttactgagtagctcttggaaggcagtcaacacaagagggatggatcattcttccagttcatcacacgtgggttggacatgctaacagtccccgatagctatcaggcgagtaaatggatgatcacacaaaggcagaggcatcgcagaaggatgctaactagatgtcatgcgtcaaggatactacagaaggatctctttgctgacaaggagggtacctctaaggttccttcagatgggatggttctctgttcaccgtgatcactactatgcaaaggcctgtgggccatttaggagaaaagcattcagtccaattccacagacacagtgaggatgtaatatgccctaggcatatatgagtggatccaaggaggaaatactcagtcactactgtcaagaactcatgacctgctgcagggtttgccaaactatggcttgtgggccaatctggctcaccacctattttagtaaataatgttttactggaatccagacacgcttgtttgattacatattgtctatggctgctgagcacccactataagggcaaagttaagtagatagagactttatcacccacaaaacctaaaatatttgactggatggccctctacagaaaaagcctgcgaacctgtggtcttgtgggaggacactgctgggcacagttaactctaattcttggctgtagcatcttgaatagggtggcagtccctggctgctgagggggacagctggacggctgcctcccaggggcatttccatgacttgcaggcccagaaactagacttgggcatgaccacagagttcttgatggactgaagatgcccaaaccacagactgacttgtaggctagaaatgaacatgtggggtggaatagtccttttggggactagaataatttctagagagccaccctttctacatgatacggcgcacattcaagtgtggctacttacactgagactttctgatgagcacgactagacagcagggggcccccaggatagtttgttcaggtcaaggtaagatgagaggagaaactagccctgtcccttgctggacaccaccactccagtgcctgaaatccaacctccccacccccatcagcattcctcccctggaaaagattggaaaatgcaagaatgtgcttctttgactctggccttcctctaacagccctgcttctgttaacacagcctttttgcagcttccttgacgtcattggctacaggctacagctgttgctagtcaaaggcattgttcctttgagctagcaggcactttgttctctcccatgacacattgttttatgagctcactctagaggagaaacattctatccctgtgctcaagttcttcaggagcacctcactgtctccctctgcccacccacctgcacctgacagctgtgggctgtgctctcagggaggcaccgtcagatgctaccagactacagaggagagcaccctcaatcctgactgaaggtttgggaaaaggctgctcagaagaggtgatacttgatatgggccctggaggaggagaagcagtttgagaagacagcagtgagagatgg

SEQ ID NO: 23210 - DNA, 2300 bp, Homo sapien
agcctcagtgcctccttcagagatgcggtggatattagcttctgttgtatccttcatacagaacctggtgctgagagacagcttcttctttttttttttttctttaaacttttcttaagactagtcaagtacagtatcaagaagacgggaaagagtagaacaaggaattggatccgtaactgactgtgaacaatcaattgaggtaactcattacctttgaaccaacctgggaggcagccttgtgactcacctcaatcctcaatcttctcagctagttcactttggcctggctcaggggctgacctagaatgatcctgtccagaaggaccctggatgttcttagagacacagactgctagggctggcagggacttttcatccaattcctctgtgacagaggaggaagtggaggtgcagaaggagaggtgagctgcctgtggtccttcagcttactaatggcagtgttaggactggacctgagggctcttccctccagtccggcgctatttattccatgacagtgcctctcaaactgtgttctcacaagcagctagtgctcaggcagctggactgaggccctgcctgccaaatcaaatattggaggtctttctccaatgtgcagaaaaaaaaagtaattaatgggttaagtttccttagggttaaattatttttccattaatgcttcttaaaccattgtcacctgctaccaattgtctactagccaatgcatgcaggcaacaaaacaaaaggataagccacaagtaaataagaacaagaacaaccaaagccttggaaacacaccatcattcttaagttaaaggcttaaaaaaaaaatagaggaagactgctatgactgtggactttctattgcattcacataataaaatcatgcgacattgttttgaattcaaatgctaaaagtaaatatgtcattatttcatggttttccccaaagagcactatgaccccccagactctatccctggtacattctgccatctctcttaatgggtcaggtcatctccaagttgggtgacccggtcggattacggtcccgtgaactgattcgcctttattaaaaacaataatggcttagggttttcagggatcctgaactctagtcctaccctaaaggcccagggacagggctgtctctgcggttgtccctgggcggttctccccgtcccacgcgggcgccctctgctgcccgccctgcactcccatccctgccaagcgagaagtagggtaccagaggctgcacaccgagaagcagccacggggactttacagccccacagggagccacctaaacggtttccgatggagacctcagcgcgccccgacagccctttctggggcccgatttggtatctgaattcaaccccgcagcaagtatcacagcaaacacggataagaaaatgccggggcttccaaacaatatcaaacgcatggggcttctgaaaggacaggatcgttcagtaactttgctgagcgctttgtcctctcccgggacacgggaccggggcgtggggacctccgcctcggcgacccacgggggcaaccccagtggatgtggagggtggcggcgcgccttcgggctcctcgcacgccttccccaattaggatctgccgcctgacgtcacgtctgccggagattggctgctcaggtctgacactcggggccacgggagagaaacttttaaaagacttcgccgccggggctgcctcggagtgtcccgcgcgctctcgctcgctctcggccaccctcgccgggccccgctgcggcgcgcgctgcaacccccggccggacgcgcggaccctcaccttgcgcggcccgctcccctcgcccctccccgctccccgggctccgcgctccccacccccacgccctcctcctgctcccagccacaatcggccggggtctggggccgctcagctgcccgcagagcctcctccctcgccaccgacttggtctcctcccgcctttcccgggctctcggcagctctcgggggagcccgaacgcgcggggaaaggcgagccgcacggccgggggagggggccggaccgcgcgcgaccggtcgcgcccgctggggcccgcgatggcgggggcctggctcaggtgggggctcctgctctgggcagggctcctcgcgtcctcggcgcacggccggctgcggaggatcacctacgtggtgcacccgggccccggcctggcagccggcgccttgcccctgagcgggcccccgcgttcgcggacattcaacgtcgcgctcaacgccaggtacagccgcagctcggc

SEQ ID NO: 23211 - DNA, 2300 bp, Homo sapien
tccttttcgcctacaatcctaatatagttacaatttggccctttgtagaaaaagtttgctagccctcgatttaaagtattgactgatagtagcatcctattggatgtcattttgcaaggtgccagaaggtctgcttggccactaggacatcttgccatttcagacaacatgtcttgatcctccagggttagaaccaccggtgaaggagaaactgtcctggaaaaccatttgaaaagaatggagggctttctcctccagaggaataatttttcttcttctaagtgagatgaccaacccagctgatgggttcaagtcctaattttagctttctttgattaagtggcatttatctcaaagataacttatttgaagggctgtcatgtggaagaggcattagattgtgaggccatggggaaccaaattaggattaatgtgtgcaagttactgtgaggccagatttcagctcaataaaaaatagtacttgctgggaactgccataactatcatgtgcttttgtgggtaatgagctgcccgtcactagagattttcaagtaaaggttacacgaccacttgatacgtggaatgcaaacagtggatgagagatggttgcgttagaaaacctctggggccccattccaaccctgaaattggaatggcttctttggttaaagttctttgtttccaagctcagcttatgaccacagttttaatttgttgagggtcttatagaggcatcttgggatgattttctgaaaatataatattagccaaaccaaagcagtataaagagagacaagcttttctggtgggcaaagatggtataaaaaaggctggcccagagcctctctcccctttggccactccagtcatggagtggcgtcagaagggcactgcttcttgacggccttaaagcctgacagatgactggctgtcttcagctactgctaccatctttgctttctgcctagtctcctggaaagaggaaggacctggctaggggcctatcgcagatgtagcaatcaaaacagtgtgtgtcttgcaatttgccagagagttcaggttgcgatccagcagtgaagggcaggtctgggtgaagcagaactgcacagagacagtgcagttctgccgtcatagcacaaaagcagccatagacagtacagaaatgaatgagggtggctgtgttccagtaaagctttatttacaaaagcaggcagcaagctggattgggtccctgaactgtagcttgctgacctctgatagagacgttgaaagttagaagtgtgtagaaaatgccagtttcaattctctcaagttttggaaaaactgaactgaactggactgaaatggcatgtccggagtcacaccgtggttgagctgggattgtaaaccaggatatacttttagtctagggcttattttgtgataccacatagcctcggctgtgtggtcaggtgatagcatttcgtttttaagagaaggccacgctaatgaaagaaagctccatccccagtggctactccaggtggtctatgaatagagacagtgagagcccaagggtgttatttttagggaggcaaccatttatccctgtgacctggcttacccctttaaagatgggccccgttcacaggaaaacaaaatatatgttgcctaaattcttatggagaaatagtgccctggagttgtgaaaaagaaatgggctcccgcagctgcgtcacagcatttgatcacttcagccgagagtgccaggagatttgagacagatgttttcagacatgccgcatgcctaaaacatttccaggggtcgggctgcaaatagtgacttaataagtggagaaacagggaaagtatgcaagttgaggacacaagagtttattcaccgctaggtgcacggccaacccctttgcattacatctgcctgtcagggttggctctttaatctgtcgtgccctcggtattgctctttgtctgcccgtgaataaagtgcagcattgtggttagtaatcccactccagtgactcgacttcaaatgtggttttggagtgcatcccagagttctgtttgctaagcttcctactcctgtttcagagacaccactgaatacagagcagcgagcactgaaggcttccctctttccttaaacctgtcgggttgtgggctctctcttttcccctcttgctcctttcttttctttttttctgtttttttaaaccttccaaggcaagttcatggatactaagctgatgtgtttgttgttctttttctccctgcctccgctcctagtgagtaaccacactggc

SEQ ID NO: 23212 - DNA, 2300 bp, Homo sapien
gtcttttttttctctctccctcgcattctgtttctctctttctctctgaagaaacattttcctcccaatctgtacttaggatgtggacacccttactttttccttatcagctctggcttgagctcattgttcaacctattgcttctattatacgggggcctagtatgaaacccaagcatggacaagaaatggctgggtttcaaaacaataatcaaatcactaaacaaaaataggggctgggggccgggcgcggtggctcacacctgtaatcccagcacttggggaggccgaggcgggtggatcacctgaggtcaggagttcaggaccagcctggccaacatggtgaaactccatatctactaaaaatacaaaaattagccgggcgtggtggcacatgcctgtaatcccagctacttgggaagctgaggcaggagaattgcttgaacctgggaggcggaggttgcagtgagccaacatcgcgccactgcactccagcctgggtgacagagcaagactctgtctcaaacaaacaaacaaaaaaagtgggggctgggacattgtatttccattagaagcttcatttcttcactgtttactttggttttgtttcagacaacttataatttttagatatagctgttagtaaaatttgcttagaatttatctatatgtaggatgactcttcaccatgtgtgagtgctgttgtctctctcttaaatactatccttttgttttttccactgcttttgcctcacattaggtagcttctccaagtaattaggaaattagtatgtcttcttaacattagatctaaaaactcttctagtcatctagatggaggttaccagcataaaaagcatatacattattttctgattcttacattaaaaaaatctactcttaaattcctttttgaagagatattaataaacatgcacacaaagtaattatgtagatccatgtttctcctatttagtgagcatcagaatcacctgaagttaatcatctgagccccagccccagaggttctgatccagggttgctgatgctactggtcctcggaccacttttttttgtcttttttttttttttaatttttaaaatttttttagacggagtctcgctctgttgccagactagagtgcagcggcacaatctcagcccactgcaacctccgcctcctgggttcacgccattctcctgcctcagcctcccaagtagctgggattgcaggtgcatgccaccatgcccagctaatttttgtatttttagtagagtcagggtttcaccatgttggccaggatggtctccatctcttgacctcgtgattcgtccacctcggcctcccaaaatgctgggattataggcgtgagccaccgcgcctggccggtccttggaccactctttaagtagcccctcctatggagaaattccttgtgcttcttctcaaagtgttactcacgtaaagagcagctaaaacaaacacttactgggtggctaaaacaaacactgttgacagacagtaagtgtagaatgacagagtaagggagggaggtgacagataaatagatgactgttagataacaaatcaatacatagacatctaatagaattatatgaaggaccttaagtaataacagttttaaaaattgtctttaaaattaatgttttgaaagcatggcatacacagtataatatttgaaagggaaaaaaatatgtatgtcacaaattaaactgtcccttcattccagacatacactcccaccttgaagaatcaaccatatttaagtgtctataggatatgacaacttatagtaaaactgagaccataggaaattaaagaaaatgttgactatggtgcacagaccaaagctgaattatttgaggccaaatttttagtttgtttgttggtattcatttgaaagaagcacacatgcactcatatacctaaggctgctttctgaaatcaaatacatttcctgccttcttctttcctcagtactcttaccaccagcctatttatagcccaggaaaggaaaaagctccactggaggcaggaaaactaagttcggaaagaataggaggaagtctgcctgccatttagccaaacaacctttaattcattgagctcaaagcttagcagcttcaatgttgttgttaggcataaacagcttgcaaatttcaattttttttctctcctcacttttgaactagatttgggcaatggaggtgatgacagcattttagaagacagaacaggaattctaggtgtttaggcacgttgaagagaaacttgctag

SEQ ID NO: 23213 - DNA, 2300 bp, Homo sapien
accctcctcagcctcccaaagtgctgggattataggcatgagccacaacacccagctgatagtgagttctggcaagcgctggtcatttagaagtgccccctgtctgtcttgctgctgctctggccatgtgactcatctgctcccactttgccttccaccatgattgtaagtttcacgaggcctccccagaagccgaacagatgccagtatcatgcttcctccatagcctgcagaaccatgaaccaattaaacctcttttctttataaattacccagtctcaagtatttatagcaatgcaagaatggactaatacaacttaactttcctgaggctgttgtcgctgttgggcattgaagagtttctagaagtccctgtttctttatgtggcatgcaatggatcatcagaataattaacccagtcaatggtaaacaaagtgatggatggatgccatcagatcacaaaagtttctattactgtaaatacaagggggtaagtaaatcaaaataatgtttcaaatcctcagtaggcctctttttctgtttctaattgaagattgtcacatcaacacataaacaaaaatgcctgtgagggaaatgtgtattttatgcattgcatttttatatctgaagtttatttctattactaacttgaaatgctgaggaagggatttgttttggtgcttacaaaattctcccatttgctcttcggactctcacaagttgacaacaaattactgccctgatagtatggtgagactgagggttttttgtctttttctcttattctagaaaacactgtatcctctatatggagggaaatttctggtttgattaacactgtaaataattatgagacaaagcctaaatataaaagattactcacacaggctcttacactgagtaagatattatgtgttaaaaatcagggttaatagtttaacaggcacattatggttcagaaatcccctgggggacttcaaccatcttttctggatgttcactttgccaaataggctgcctctatgtcatatctctacctgaagggcaggctcagacactgattcggggaagtgtcacccttactataccaagaagtcagacatccaaggtcagacactacgtaaagtcagatacttcaagggctttccttggaagggaggatgaaaagggaagggtgggaacatcagctcaggtgagacatatgaattcaacaaaacatcagggatggtttgccacgtttgcgagcagcacagaaaacggcagtttgctccaagttcccagcacaccaaagggggcagtagtgcgtctgtaaagcgcgttgtcaacttggtgataatttctgtttgcattcacactcgccggctgataatctcagctgctcgatgcaattcaacagataacaatgcggaagtttggtctaaagctacctgaaatcacttccaagagctcttcagataaagctgcctttgatagtcttcattaacccctcccatatttgcccctcagcgtcccttggcttagcagccccggcctttgaagtccaacctaagcattcttagatggtgagtgagggtctgccttccccagcaccagccacctagtcaggcttgtggctcgtctaacaaactggagcctgagattctgagaaaacgaaaccaaacagttgtactccggggttaacacagagcaacttccacctgctgtgcgagttggtgatcctctctcttgccgttcgagagccccagtgaaacttgagtgagatgagagagcatggagcctgccagtctccccctctgcgcacacacacacgcaaacacatttaactttccacttgcagtgacctgcccttcagtgtgacttatcagctgtttggcttttgtcactaaaggaaaacaaattgtggaatatcccgctctgcatgctcatgagatggctgagccaactcaggggttatgaggtggtttgcgagtgaggagaagaatgatcttcagtttctgacctcctggcacggtggcgggcggtatttatcaggaggtacatgtgactggttaagactcagagccccagcttgaaggaaacagctgctctcggcgtgctccggcacttggcagctggacaggcagagtgctgatgtgaaaaataccacgacaaaaccaccctagtaagtaactggagaactttcctctctctctctctctttcattccctctccgtgtgtgtgtgtgtgtgtgtgtgtgtgtgtgtgtgtgttgcaagccaccaacaacttttgattttgattttggtttccctctggcac

SEQ ID NO: 23214 - DNA, 2300 bp, Homo sapien
ttcccaatgatgctagctgcccttaaaattctttcagatttggaactgtatctgtatggaaacaacaggtaagtatttctttaaattgtcataaattatgtaagaattctaataaaaattaaatatgcctagagaaactaaaagaaacgtgctatgatgttaataggagttatctttgtatgatgagattagggataactttttccttaatgtcctgttttaaataataagtgtatattgcttttgtgataaagaagccttattctgaaaaaggtagttgtagacacaataatgtccacacataggaaatgagatctcaggtaaatgtgcaggtgacagaaggtggagcagagactcagacacatctactgattgcagaaacagattgtaacctgatagcccggcccacctggcccgtcgtgtgccagtttctttgcagatcagaaatataaccctaaacgtggtgatgagtctttggttccaggttatctctaaccccttatggggatgtgaacaccttccccagacagctcagctgagtaattttggttttgaattgagaaaccagtttagtctaggcctatttgttctaagtaatatgtctactcttccgtgagtaacaggctaaaaaaaaatgtctgtatacacatgaaggtaatcaaacttgttaattgttcaatcttgacttttaagggtactgatagagtttacattagaggaatcagagaagttctgccccagaatgtcttggaaaaggcaagttctaatgatgaatataggcagattctattaagtttagaaaactggcagaaatttttgtcccagtgatgtttacttaaagctgatttagtaaacaaacttcaaaaagtctcttaaaaatgtatggtatctatacacactcacataaatatactcatattcaatgacaaacctctgacaagtttcatgatattcatttcctcacccattaatccactcgtttattaatttagtgaataatttttgagtatcttttatgtgagaagcaaaaccttaggtgttaaggtgtataccagagaacaaacacaaaaatccctacaatcttggagcttatgtttatgacactatagagatttaaaaacaaataaacaagtaaaatatatagtttgtcagatggtgttaagtgtaatgaagaaaaataaatccaggaaaggcagtaggacatgccaagtgagaggtgggtgagagctgagaggtgcgttgttttaaataggtcaggaaaggccttacagataaggtaactttgttaaaagatataaaaaagttagttccagatgactttaataatctgctttcacaaatcatttcagcagcagaattgggaaagcgtttgatccagcgtttctgctgtttttattgaacacttgaaataaccctttattttatgttctaagagtggtaccttcagcacaagaatctggttctttcacagaattaatagagggcaaacattttttccccagagttatgtgcctggtgaacagactcattccaatgtcactccagtggtctcactgaactaatacaaccatacatatggacattaggtattttttcctattcattcacatgtttgttttctgaagttgactatgagcctgttgaaggtaagaatgggacaatgatttgttcatcttggcagcctcaatgcctaaccaagttcctggcataggtcaggtgctcaatgattgccagttgaataaataaagttcaagagtaaaatagacattgactttaaacagctcacgagatgaatcctcaatggctgcatttacctactaaaatgtctaaagtggataaatgtcttacaacatgacagcctccctcctgctccaagtcctatggggacctggcatcaaggacctgctctgtaaaataaagtgataatgtctatccagcagcgatgcttttgagtataagcaactataagaggctattgccaatcacgttttccccatgacagtgctggcaagtgggatagctctcatcctcacattttccttctgtctctgtaacagataatctgtcttacatcttctttctgagatgatgtggaggagtgataccctttacactagattagcaggcaaaactatgatggtttgtgatatccatgcttgtagaagtaataagaagaaagggaacacagaagctttattttatagtggagtcctgactctaggccttaataattgcatggttttgggtaagttgctaaatcactgtgaatcccatcacctcatctgtaaactgggaataat

SEQ ID NO: 23215 - DNA, 2300 bp, Homo sapien
gcactgtatttagtaactgcagtgttgggtagcatagtgtagtggcaaaatcctagatgtgagaccttgctttcagccttccctcagcagttgcttggttttgtctccttgctaacagccttgactttggctttttttaaacaagggttttatgctcatttgtgaggtcttttccagctctaaacttctaggattctagatgtaagaaccagtggagccttaagaataaggaaccaagagtcaacttgattctgtagtaccagcccaatagctcatcacgatagcacaatcctgtgtatgagtcaccaaacttccagtcaagatcctttctctgtccccacagccaagaagaaagtttagtgcatagcagtatacattccttcttcctgactcctgaggattaatctcctcaacatgaggactgaggaggcttccatcttgtggtcactagagcccagcggccattttaggaagcacacacatatctggattagacccatatggctgaccacagctgccccaatgcatgcgaaggcatccacatgccagcattggaaggggtgattcattttgcctcaggactctaaattttctcctgaagtgattgttttcatctaaacatggctccagctgaggtcgcctgtatatgatggacagccctggaggacagaaaaagagaacccttatgttcatcaacaattatgaaatgcctactccgtgtggtaggctgtagggcagtgctttaactttctgtaatagttaattacagttttcacagcacttttcacatacgtttcctcagtaaattctcacacataccctgcaatgcagcctgggcagggctgtgagtgtaacatcacccctgccccttccttttttttttttttttttttttttaaactaaagaagaaactgagatttacaaaggacagggagcaaacttctgcatcccagcctgggccgggttcccctcaaatggacatttgctctctcatgtgggcacactgctgacatctcatttatttcacatctgtaaaaattaattaatactgctctctcctcctcttcatgatgtgcagtaaaggaagtaattacaggacaaaatctgtgagggtgggggctatgtttgtcatttttgtcattgtatccttggccccttgaatacggcaccaggcctgttgagggaaggaggaccacgccaccaaactgttgggatttgtattgttccttcctttcagggaatatctggagaggacatttgccttacatcccaattcacgtaaccaggagttttaaaagctgatgtttctgttgcgtggggtatgaaatagtttgaatcttttcatggtatttttagccctatcagttacttttaccattttgagtacatgcaaataactggaaagcccctgtatttttaattttagtctcatttttaaaaaagaagaagaagaataagaagagtttcaaaaatggtgagtagaggcagtctgatgtccaggtgtgttttattttatgataaacagtcaagccaatgtagatcctaatgaagactgaatctgcaaccaactttgctgaaaggataggttggtaaatgcaacaacttgaaacagtggataagaacatttgtcagaaaaaaacagccaggctcaaaatatgtttgacaagagcaaatgttcttgaaattccattgatgagcagcccatattataaaaacgttgtgcagaaagtagaacagatcaccctttgggcaggtccgtaaagcccagaggagatctgagagaggaagtagaatcgtgactgggaaagaagagatgctaggagtaaccccgagggcagctttacattcacggataagcacagtggcatttgactcgtgcattgactggaagccaaaccctgcatttgtgaccttctaaacaaaccttagtcagacacccattagctcatttcatcttcaccatcgttcttggaggcagctattatttatgattcccatttcacagatcaggagactgagactcaggaaggttaactgcatgcccaggctcacactactaataagcagagagtgagtatttggagactaccaaaacatttccatcgctgagccagttatccatttgacacatggaaatacccaagggtgttctggttctcttgagagagcatctccttgccttactgtgtggcttatttggattcttggttggctgtggtagtgcttctgtcatctcatctccagcagatgctggtgccagtcatcacaggacttggaagctgagtcaggaggaagggaa

SEQ ID NO: 23216 - DNA, 2300 bp, Homo sapien
cactttttatattcttcatacatacatatatacacactgtttccctctttatctttgcttctgccgattctccctttctaaaatattctccccagtttgtaacctctctttcattctagcatttacctacatgtactcatttttgacttggtctatgtaaatatttctcatcttttgaagtatcagttgtcacatctggatgctataattttacttttccagcacccttacctcactaacttgaatcttttatcacattgtattttaggggggaaaacaaaccagcctcattagaattgttggaaaaatagaatagcctttgagtgagaggctgaaaagctctcatgtatcagattaaggactctgtttggctcttcattggccttttatggttctcagagtgttgcccttacgtaaattaagtaagatgtctgagttcctaatagatgaagaactattcatcttttatttttgcatatactctttattcctaactagattatcggaagaggtcatctttttgatgttttaaaaaatgttatcttcagtgcctttcccagtgctttgaacatactgattacgattaaagttttttcatgataattatattggtaacctaattttgtgaatacctgaactatgttatcccaaatttacagaaccaatatattaaatcatatagtatatgattttctagaacaagagttggcaaactttttctaaaagggccagatagtaaatatttttggctttgtggccctaagttctctgtcacaactacatacctttgctgttacagcatgaaagcagccatagacaatatataaatgagtgagtgtggcagtgtcctaatgaaaccttatgtacaaaaacagtggttgttgtcttaacagtggggttttactgttttgacgttttaactcataaatacagtttgctgtatggaacatgttaagattttacagtgtcaaatccatttagaatgacctttccagaaacttagctgtatttattgttttagaacaggagttggcagcctttcagaaatgatttgccaaaattatggcctctgtccttctagcattacattttgggtataggaaatttgatacacaagttgacttttttctacttctaataggacctgagggccttgaaaatatcttttcccaaaactggttttgttatattgtcagaagaatctcactttgtcacataaccagaaatcctaagattcaaatgattcttaatcatcttttataaaaattgaaatgtccttgggaatgttaaaggaatgagattgaatatttataccttcaactgaattacctgaaacagattgcagcccccattataccaggctgaaatcagcacacaaggggatgatactgacacaaagggaaccatgccaaaaagtgctttgaaggttttatggttgttttgaagggaatggggtgaggaaagtagggggaagggagtcctgagaagaatatagatgaaagagggctctctttgattagccagagggcaacataagatttggagaccatgggaaaggagctctggggtgccttcctgcttctcctgtgagttaagctttgacttcttataaatgttgtttcacacctcttctggacaggctcctaattaatgggagacaagagagcaaggtagttgtgtcattgatgctcacaagtagtgagaagttaaaaaaaaaaaattaattgtcattaaaaattggtcacctgccttcttttgcaaaatttttaacagatgccaacccctgttctggaggttccttaataccagaattcaagattccaaatttttagatgttacttacctcgatccttcggtttcaaagagaatcgcttattttaaaattaacatttaaacattatatatcgcttaaataactgaattacataaccagtttatttcttatttcatttgcaggtaaaagtagtttttctttcttgtttttatccattcttgcagctttaacagttacatatcaataggtctatatagttgtgactccagacttatgactataactatagctgtatctcattttgaaatcttattttgtttacttcagcatacctcatctcagaactagaagctgccagaatgctctgtgtgaatgctcctccaaaaaaagctcaagaaggaggcggtagtgaggtctttcaagagttgaaaggcatatgtattgctctaggaatgtccaaacctccagccaatataactatgttccaattcttcagcgggattgaaaaaaaagtaagacctttagt

SEQ ID NO: 23217 - DNA, 2300 bp, Homo sapien
ttcttaaatttccaatttaggagctgagggtagacgtgtgcactggtagcattattgtttttgtaactgatactctttcaatatttcagcctcagtggtactcaggccgttgtgcttctcctaatgtgatcactggtagttttggagtgttgctcaagtgtgtgatcattaaacttacattttagactagaagcacatttttaagtatattaggaagatagtatggaaataatggagattttgtttagaaattcatttctttgaggagagtaagcatttataatagtagatacagttaatggttaatgtaatttaaagtattttgtcttgttgctatttctttgtggttgggtaattggggattttggttttgtttgtaaatattctggaataatacttgcattgttctggtacttattctgagaaatgagtttttatgaaaagttctttccttccatgttttttacatacttactactgttttgtctcttcacactgaaaaacagtaagtagattcaaaaattttattgccttctataaactttccaataaatacaacctatagtcttaactcagaatttatgtagcattctgaagcacatttacattaagctttggttaactggctattatagttctcattatgacagacaattcagaggatttttaaaatctttgtttttacaactctattatggtttctgaaaaaattatacaacttcagtttttaaggttctgttaaaaaaaaaaaaagtgttcatagccattatacttaggcactaagttattccagaatcacttttgtaacttcccctttgtctgtcaaatgattgttattgtgggaatgtgcacgtaaggttaggtgttgctttagatactgatattgctgctggtagttcttacatattcatttaatattcttcatattgtacaatttctgtaactgattcaatagcagtatactcagctgattcttcctttatagcattgcttatcctttaccaatatttggcacttagaatatgttatctacataggaagataatagctgtgtggaatgcttactaatgaccctgaatagctaattcttccaaagagctcagagtttggcctttttagcactgatacttatacaaaccacttgaatgtaagtataaaatgcctttcacacttttctgtttcttaagcagacttcagtgaacattattttggactcagggtcataattctagactttattttaatctgctatcatcacctcaaatgcttttcaagaatataccactatttgctcttcaattaaatgactaaatcatctagaggtcactcactttttatattcttcatacatacatatatacacactgtttccctctttatctttgcttctgccgattctccctttctaaaatattctccccagtttgtaacctctctttcattctagcatttacctacatgtactcatttttgacttggtctatgtaaatatttctcatcttttgaagtatcagttgtcacatctggatgctataattttacttttccagcacccttacctcactaacttgaatcttttatcacattgtattttaggggggaaaacaaaccagcctcattagaattgttggaaaaatagaatagcctttgagtgagaggctgaaaagctctcatgtatcagattaaggactctgtttggctcttcattggccttttatggttctcagagtgttgcccttacgtaaattaagtaagatgtctgagttcctaatagatgaagaactattcatcttttatttttgcatatactctttattcctaactagattatcggaagaggtcatctttttgatgttttaaaaaatgttatcttcagtgcctttcccagtgctttgaacatactgattacgattaaagttttttcatgataattatattggtaacctaattttgtgaatacctgaactatgttatcccaaatttacagaaccaatatattaaatcatatagtatatgattttctagaacaagagttggcaaactttttctaaaagggccagatagtaaatatttttggctttgtggccctaagttctctgtcacaactacatacctttgctgttacagcatgaaagcagccatagacaatatataaatgagtgagtgtggcagtgtcctaatgaaaccttatgtacaaaaacagtggttgttgtcttaacagtggggttttactgttttgacgttttaactcataaatacagtttgctgtatggaacatgttaagattttacagtgtcaaa

SEQ ID NO: 23218 - DNA, 2300 bp, Homo sapien
gggaacacaattttgtttaagtagtatttaaaagctttttttaattgcagagaaagccattgtagaattcctttaaaccataatatataaaaatttcatatcagcaatccttcatttaagctaacgatgtgaattagaaagagaatactattcctgcaaaagctggattttttttaaagaaagaaagggaatactaatacttttagggaagtcatcactcgttcattcactaatattgaacacaatattatattcaatattagttcaatattgaacacagcttacatcaaaagtgagtcaagaatgaaaccctttttctttcaaaattgatttttgtattaggcatgactttttgtttagcaccttcaacaaccctatgaggaaaataattattcaattattataaggtaattatgtacaatatatacaagtttaaacaaattcaactagctaaattttcctcttttcacatcctgcgtataaatccttatttgactagtcaaaaaagaaggaatatggatttagatatacctcaatctcaaaatctagtttcatacttacaggcattaagatcgctgaagattattaagccactcagccttagtgtcctcatctgtagaatgtgactaatattcacacagccttatggtgactgcatcataatgggccatatcaagtgcccatggtaagtgcagaaaacctacccccacttcagatgatgcaaaataaggaaactgaaaaaggtactactggccgggcgcggtggctcacgcctgtaatcccagcactttgggaggccaaggtgggcggaccacaaggtcaggagatcgagaccatcctggctaacatggtgaaaccccgtctctactaaaaatacaaaaaattagctgggtgtggtggtgaacgcctgtggtcccagctacttgggaggctgaggcagaataatggcgtgaacccgggaggcggagcttgcagtgagccgagatcgcaccactgcactccagcctgagcgacagagcaagactccgtctcataaaaaaaaaaaaaaaaaaagaaagaaaagaaaaaggtactactaaggataggaacatctatccatcagacacaaaaatgcttgagaactatagaataaaatcaacaggtatcaatatgaaaactctttaattaaatgcctacacgatttaacagtacgccaacttatggttaaatatagttttctaaatatgccatcactttgaaaacatttctgatttttcagtaatttctaaacacaccctcagtaactgccaagatatcacaacacatccacatcgtgaactcaatgtttcacccgggcaaataatgtcaaaagtaatgacagtacagccaaaaagtttattcactgtctaaactacgtggatttaaaaatattctattctatttgctatggagtgaagctccccttctccttaaaataacatgcttagtgtctgggaagggctttagacatcaggtagagaatgcatgagggaaaacgacccaactttctgaacatccatagtctgcggaaagttggctcatccctaaccctgaaataaagctactgcagccacgaggaaatcaaatggcacgctatctgccgtctgcacttggcccgcacccgcgtcctgaagacgggagcgcaagaattctccctttctacatgacctgcaagctaaggctagcacatgccggcaccctacgaagagccacccgatctcctgtctgggatgcagagactcggtttaacagccgactccacccgcgtcccgagactcttccaagctccttcccggcccgccgcgccccctacattcgcacatgcgtacacccaataacgagagccgagagcgctccccttcgcgtggtccccacgcccagctgccacgcagccggtcctcctacccttctctgggcggctagcttcacgatccagtaacgcgcatgtgcaaaactgcgggccctgtaattctttagtgggcaggggtggggcggtcagtgggaccaagtttcttgcgcacgctccggacatgcgcagtgcgggagctgaggcgccagctgtggatttggaagttccggggaagtcgcgcatgcgcgagtgtacgcgttgccggcgaagaggggagcctgacgactcggaaatttgaataccacagtagcatggagtgtgacctcatggagactgacatcttggagtcgttggaagatctagggtaagattgtcagggcacgggtctcccaagccccacgctgccggccccctgggaacacctcctgcgccc

SEQ ID NO: 23219 - DNA, 2300 bp, Homo sapien
tcagtagtacaaaagcaacaaatacaagtttacaaacattcctcatccttttgctctatggaaataacattttctacttgggacttcaaacccaatgactcaactgaaattctcaccccatgtaagctggtcacaccttcaaacaaataatgtatactgaacatggctacctgcccaataatgtgatgaacacagatgctcgtttaatgtaaacatacagtgaagagaagtagcacgagcaagtgtctgccatgtgctgggcagagacttggctctggagtccgggtgctgctggtatctcctagtaccccaatgaggcaactgctcccacacatggtttggactgtgagggtttccatagcatttgtaaactatcatggcacgggtgggagtgtagcagtgaggacgaccaggacactctcatcaccatcttggttttggtgggttttagctggcttctttactgcttccacagcctctcacaatcaacatgcagttttctctgaggtcttttcttcttttaaaaacacgctttcactctcaaaacagcagagaatgaaactgtggttgtgtttatatgcttgaatacaattatttctgcctcaggaaacttttcagtatatttaatttctaagtatcgctttgaatgaggaagtacataaatgaatgaatttatgaatgaatgaacaaatacatgaatatgaagaactttgaaactggggtctataagagagccagggcacttattcatccaagggcagatggcctgagagagtagagctgcacaaagcagatgcaaagaaagggtgaaggtgagtgcatggcttctcagccccccacttccccagagcctgtggcccctagagactaggctttgggtgtggacctcaaagaatgacaagcaacagaatgaatgtatgactgcagattttcctggagcaagtcttggccatagatcaataataacaacaacagccaggcatggtgactcttgcctgtaatcccattgttaccagaaaggggtgccgatctggacctcaagagagagttcttagatcttgatcaagaaataattcaaggacagtccatacagtaaagtgaaagcaagttgattaggaaattaaaggagttaaaagaatggctactccaaagaaagcaagttgattaggaaagtaaaggaataaaagaatggctactccacagagcagcccagagggctgctggttgcccatttttatggttatttcctgattatatgagaaacaaggggtggattcttcatgtctcccctttttagaccatacagggtaacttactgaggtttccatggcgtttgtaaactgtcatggtgccggtgggagtttggcagtgaggatgaccaagacactctcatcaccatcttggttttggtgggtttcagccggcttctttactgcaaactgttttatcagcaaggtctttatgacctatatcttgtgctgacctcctgtctcatcctatgacttagaatgcctaacctcttggaatgcagcccagtaggtttcagccttattttacccagctcctattcaagatgaagttgctttggttccaacgcctctgaccccagcactttggaaagctgaggcaggtggatcacttgagcccaggagttcaagaccagcctgggcaacatggcaaaaccccgcttccactaaaaacacaaaaaattagccaggcaggtggtgcctggtgtcagtactcccagctacctgggaggctgaagtgggaggatcacctaagcccgggaggtcaaggctgcagtaagccctgatcatgccattgcactccagcctgggcaacagagtgagaccctatctcaaaaaaattaaaaaattaaaaatggttaggctgacttgaagcctttataaggagagagagtcgggccttgctgggccgctggcccctcagtgctgccccaggccctgccaccaccaccgcctgccccctggcccctgccagagcggggttaccatcacacacgtgcccacgcctgcccggggtgtgcacttccgctgggtttcctgggccgcagcccacacaggtagtggaactggtggaaggagaggggcgggacttctccgggtcaaggccaggtctcttccctgctcggtgctatgttcctgttccacggggtggcgggtcctgggagggagaagcccagacccagtggacactgacattgtctctcgctgttcccagccttttccaggcgtgtgacttaatccgtttccacagccagaccttttctccgtgagttc

SEQ ID NO: 23220 - DNA, 2300 bp, Homo sapien
ttttttggtagggcatgaagtttcgctcttgtcacccaggctggagtacaatgacacgatctcggctcactgcaacctctgcctcttgggttcaagcgattctctcagcctcctgagtagctaggattacaggcacccaccatcacgcccagctaatttttgtatttttagtagagatggggtctcaccatgttggccaggctggtctcaagctcctgacctcaggtgatccacccgccttggcctcccaaagtgctgggattacaggagtgagtcacagtgcccagccaacaaatgctattacatgaagttaaaacctttctgcacaacaaaggaaacaatcaacaaagtgaagagacaacccacggaataggggaacatatttgcaaactattcctctgacaagagattaatagccagaatatataaggaactcaaataattcaataggaaaaaaatctaataatctgatttttaagtgggtaaaaattgaaatagacatttctcaaaataagatatacaaatagcaaacaggtatctgaaaaagtgctcaacattactggtcatcatacaaatgtaactcaaaattacgagagatattatcttaccccaattaaaatggctcttattgaaaagacaggcaataaaaaatactggtgaggatgtggataaaagggtacatttctccagtgttggtgggaatgcaaattagtactaccactattgagaacacttttgaggttcctccaaaactaaaactagagctaccatatggttcaacaatcccactgctagttatataaccaaaagaaaggaaatcagttgatcaaagagatatctgcactcctgtgtttattgcagcactattcagaatagccaaaattggctattctagacattttaagtaacctaagtgtctgttaacagaagaatggataaagaaaatgtggtacatatacacaatggagtaaaactcagccataaaaaagaatgagatcctgtcatttgcagcaacatggatggtacctgaggtcattatgttaagtgagataagccgggcacagaaagacaaacattgcatattctcaatcatttgggggagttacagatgaaaaattgaactcatggagacagtagaatgatgtttctcagaggctaggaagggtagtagggattgaggtgggtgggcaagtggggatagttaatgggtacaaaaacatagaatgaacatgatctagtatttgatagcactacagggtgactacaggaaaaattaatcttttgcacatttttacataattgagggtataattagaaagtttgtaacacagataaatgataaatgtttgaagtgatgtatactccactttccctgatgtgattattactcgctgtatgcttgtatccttaatataactcatgtaccccataaatatatgcacccactatgtacccataaaaattagaaataattttttaaaaaagaaaaaatatataaagcaaattggataaaaatcataggataaaactcacaaatcccctgtcagactggaagtttttagcatgcgtgtttttgtaagtgataaatcaaatagacaaaaatgaaaaaaaaagagaacattagaacaacataacaaaagtctgctttaatgcacatatatgaaacctgtaccctgcaagtaaagagtacacattttaaaaaaaataccatagtgagagaagagagagatcctctcatattgtattatactcagtacctgttttaagaaaaaaacaaggaagtgaaatcaaagacaggcagcccagtgccaggcccaaaaccaggcctgggcctgcctggcctaaacccagtagttaaaaatcaactcataacctagaaaccaatgttattcgtagattccggacattgtatagaagaacactgtgaaactccctgccctgttctgtttctctctgaccactggtgcatgcagcccctgtcacgtattccttgcttgctgaaatcaatcacaaccctttcatgtgaaatccttagtgttgtgagctcttaaaagggacagaaattgtgcacttggggtgctcggattttaaggcagcagcttgccgatcctcccagctgaataaagcccttccttctacaacttggtgtctgagaggttttgtctgcggctcgtccttctacatttcttggtcccctgaccgggaatcgaggtaactgagggatggccgaggtagccccttaggcagcttaggcctgccctgtggagcatccctgcaggggactctggccagcctgagtg

SEQ ID NO: 23221 - DNA, 2300 bp, Homo sapien
gtttcaccatgttggccaggctggtctcgaattccttacctcaagtgatctgcccaccttggcctcccaaagtgctgggattataggcatgagccaccacgcccagtctcttcggtttttctaatagaaaacctagcatattttaaacgattttgccacttaacacttattatggacccacagggtatgagggcctttggagatcatctaatcggacttcccacccaactacaggaatcatttcattgcaacaactctttaaacccgtctagaaaatgcaatgctctctccccttttccacggttgaacatcttcctcatggccctataataatcaatgataattaatgagcctcttcctctccttggacaaagaaatatgataggagaaatgtttagtttgctgatgcccatcatgggggaatagtccactggtaactctggcttttgggttcaggattagacagagtggttaaactaaaatatttatcgtaagtatgaatttgttccacaaacataacatttcaaaggtagctttgtttcctctttccttgcactgccagctattaactttcggttcattagtcacgattttcagaatccacttggctgccaccttcctgcagccagaccatcttggatcagagggtgggccagccattcccacgtcacacctgccacgggatcgattttttcccccattgaccacagtcactttttgtcaattaattaatgttattcacctggtacccatcttgtgaatggtaggtcactacggagcggattactacttcatatcccatcaatgacagagccatcattacgaaaaccttttctgacaaccactgaagagaaaccatctccacaccgtgcattttgcatcacttccgttgcttctttacctgatttatcacaaagactatgtaccacacatcttctttattaatgcattgacaatcagtgaagacaatgaaaacccaccacttttgtccgtgaactgagaaagaaaatggcaatgtcatatggcattaatgatgcatgagatctatgggtgtagtgtcacgtctaggcgtgtagtaatccagtcttcggccttactccagggagaaagattcagctttgttactttccagtcactctctcccgtaacacagcaccttggcacagaaagcagagcgacaaaacccagaatgaggacagttaaaattcaactcaagctacagccatcccaacggtcctccccagctcccgcggaatatttaccaagaccgtttaaagcacttaattaattcacttcagcttcgctggagaggtctcagggttcccgagactccattacataatatctttcacaaagtctattcccagctcgaatggaagatggattctcatccagtgtgcggaggttccatgcctttgcttccctttcccggagttcgatccggcgataccctcccgaggctgcagccatcgccccggccccgagcttctggggtacccgccactcttcgaactccaatctggccccgaaggtgcagccgcctcgccctcctggctcccaggccggccgctgcggccacggtgccagcgagcgcccgggacaccgcgactctcgctgctcgctgggtgcgccccaagcccatccgcagcgcacccgcggcgccggggccagagccgcagctcggtggcacggccggctcggtgcgccgggctcggggaggaggagatcgggaagaggtggaggcgtgtgagggagggaggaagggcccggccgcccgagagggggagggggaggcggagggggccggccgggccggggagggggggcagccaatgagcggcgcgcggcgcgtgggggtggggggaaggtctgggggaggaggtaggatgggggagggcgcagcccgagcggctgaggctccagccataaacaagcgcccggaggagcggcgcaggagtgaggcgagcggggcgcgcggagcggacgccgcggatcttgtgctgcgccaccgcgcccactcggcagctcgggaggcggggaccggcccggaggctgcgccgctgcggggccggccgactcggaggaggagagggaggaggcgccgccggcccgggctggagccgagcgcagcagccaccgccgccgccgcgccagaagtttgggttgaaccggagctgccgggaggaaacttttttcttttttccccctccctcccgggaggaggaggaggaggaggaggggaagctgccgccggcgccaaggctcgtgggctcggggtcggcgcggcccgcagaaggggc

SEQ ID NO: 23222 - DNA, 2300 bp, Homo sapien
ccatgccaattcacaagtgcatctgtactatgcagttgtaagatagggcagttgttaaacccaaagagtttaagtgagctctgcacatgttggccttttgtttaggcgttgtgcagactagccccaattgagcatttctaaaaatgtccatttatctcctaaaaaggataggatgttctgcaaggtaagggggtggaaccatttttcagagccttcagttgggttctctttatagttttccatatacacacttgctgtgtatatggaaaaagcaagtcttaagtgctttaaatgagaataagaaaaaatatatggttttccactggaattattttatctagtgtatattcacctatgtttcacaaatttcataccagtttccccagtaatatgcttttaatgatataaatgatgaaacttgaccttatttatttcacgaagagtcatttaatgccttttatgtgccaagcactgttctaggcactggggacacagcagtgaaccaaatagcagtgcacacggagcttacgttgtagtagggagaagccaggcagctaacaggtaaacagtaactaggtagccaccaagatggggatccggctctggagaaaggcatagcaagacagagaggctggggagaagtggggcaggcaggttgttttgtattatgtagaatggtcagggagcaccttaccaacaagatgagatttaatgaagagacccagaattgcagttctcatggggaacaggcagaacctctgggtatagccagcgccaaggccctggagtgggaacgtgctgtgcgtgttcaaggtagagcagtgttcaaggtgcatgttcaggaggagctgtgtggaggtaactcagtgagcatggaggaggtaagaggtggggcagagaggcagccacggccagacacaaagggtctcgcagatgagtgcaagattgtattgagtgagatgaaaccttggaaggtttggagcagggagcgacaggatctgacttacctttgaatgggatttctctggtgctgggttgaacatagactgtggggcatggaggtcaatagtgaaagcagagagaccaacttggagacttttttaagaatccgggcgagagatgacagtgacttggacagggtggtagccgtggaggtggggagaagtgggcaggttctgactatgccatatgagtcgcatcagtaggatttcaatgtatgcggggagtgagtggaagaggagccaaggatgactacgacattttggtttggggcatttttagcttgaaatagtcattcagcatcaaagtggagctaatgaatagacaaatatctaatctgggcttcaggaaagaaactgaaagtagatctacaaatttgaaagtttagccataggtggtttctagtctcaaggtttttaagccttgagactagatgagagcaccgaagggtaagaataaatagaaaagaaaagagagcgcaggaccgagccctgagaccttctgacttttggagactgagcaggtgcagagggcctagcaaaagaaatagagaaggagcaccaggaataaaggaagaagccaagagggtcagtgacatggaaaccaggtggagaaagggtttctggtaggaaagagtaaactgctcaatcaagcgccactgttagccacgtaagatgcgatgtgggaacagacttgtgcacttagcactgctgtaatgaacttcacagaagtacagtggtggaggcaaagtctaatcagagtgatttcaagaaagaatgggagaggtgaattcaattcacctctcccattgcgagttatggttatgcaactctcatgcagaccataagtgccaagttcatgaataagacagactgtgaagttgagggtccttggagggtttcacagagaaaggacatgagctagattttaaaggacagatgtgctgtcttcattggagtgaagaggataacccaaccaagacctgagatgggaaaagtcaaggccggtgcctctaaggtcaaggccagtgcctctggagcagtgagttttagtagcagtaggtaaggacagaaacagtagctttggcaaggatttttcaggccttaattatcaaatgaagagtgtagattttgttctttatagggaatggggaggcttatttttgagcagctgaatgacatgttcacaaagatgttttggggtaacctttgtgtaacagggtggtgtgcaggaaggactaaagcagagagagaccagaggccaggacagctgtaacaggcactgcaaatgtcctcggtgtg

SEQ ID NO: 23223 - DNA, 2300 bp, Homo sapien
atggactatacagtcattcagtgtttgaaaatttcttatccaggaaggtatgagccagaaacccagcaagtttagtagtccacagaaacccagcaaatttagtagtccacagacattgcctctaattctacttcactggcattagaggagatattccaacagagaggagaataggaatggactgtgcatatgggagctttgctgggtagatgagttagttctctagagatttttgggttcacatttttattaaggctaattttattttttattttatttatatatttttagagacagggtcttgctctgtctcccaggctggagtacagtggtgccatcatagctcactacagccttgagctcctgggcttaagcagtcctcctgccttaccctccaaaagtagctgggactgcggcacatgccacaggcctggccaattttttttttttttttttttttgtagagatgtggggctcccttttgttgcccaggctggtcttgaactcctggcttcaagcaatcctcccactttggcttcccaaaatgctgggattacaggcatgagccaccaggcccatccctaacgtgcattttaaagccaaacatcatttgggatgttatgcttttagccgttgcagtcctattgcttctttttagcgcccaatccctatttgttaactatgttatgtctgtattttaaaattttcattcttgggcttaatacctaggtgatgggttgataggtgcagcaaatcaccatggcacatgtttgcctgtgtaacaaacctgcacatcctgcccatgtaccccggaacttaaaaaaaaaattcattcttatgtttatgccccagccaggattgtttttgtatcctagtgtcttacacacttggaaagaaagcctattgcttattcacaattagatacctaataaacattttagggtgtttttttctacatgacatctttgtgtatacctctagctagtaagtagcttgtatgtttagtgtttgattttacgtatcccaattagatttcaagtcacttgtatctctgaactttagtttttcataaaacatcatgttttattgtgctgattattactttggtattgaaacctgaattttggttgtgaaatttgagtttggtgttcttatctggtgtggtttgggactctcttcaatacacctcatttgaattaatgcttagagtaatggagctggaaggagtatctgcttcttgtccaggtctctcatttatagaagggcagaggatacctagggaggttaaggggcctggccaatgactcgttatttgaagaaggatggagatgagagtttgtttccctagtctcagtcaaatgcccttaccatttgaccctcttgcctccctgtaatgctgttgggtaataaggtcaggtaactgcattggatagagcctgggtgtgttttattgtgaactccctctctttctcctttttgttgtatctgccttagtgcttagcttctttattacaaattagatattaaatcctgttctcacattgagagcgaattctttctccagaaaggataacaaaccttttgtttgagagagatttttcactttttgaaatggtctgtttgtttgaagttacagaagaaaaataagtgtaatgcacagttgtatttattattcatgtgaccctggaaacatttcttccccgccctgtgtttcagtttcttcatctgtaaaatgaggttaataatggttcccccttctaatgttgtttttgaagattacatgagttaatacatgtaaattgcttagaacagtgcctagcacctaatataatggaagtgttgcctactgcctattggcagttttctgtacggcttcaccttcccttaggacttcttgtcagcccagttatgtgatttttcacctcgtttttgtttaggagactctactttgttgatgtttttctgagaaacaatgtgctgtctgtttttctctgtttcctttgacatttgctgttcatctttcactgaatatttgtttaagaaagacatacagaatgttaattttcattgattgtagctttcttctttttaaggatttggaatgccctgacagataattatgggaatgtgatgcctgtagactggaagtcatcgcatactaggaccttgcacttgcttactctgaacctctcagaaaaaggggtaagttaggaattgaaccaatagtgtttgaataactgatgctgataatagaactaaaacagtagcatttctgcttaacacagattcactgacctgcc

SEQ ID NO: 23224 - DNA, 2300 bp, Homo sapien
gtgaaatctggtctttacaaaaaaattaaaaaaaaattagtgaagtccggtggcgcatgcccgtggtcccacggacccagctgcccggaggctgagatggcaggattgcttgagtcctggaggcgaaggttgcagtgagccatcatcgcacaactgcactccagcctgggtgtcagagcgagactttgtctcaaaaatgaggacatgggaaggaatggattttcagagcattgatgggatggagagactcttagaggttagggaagaatttttgagagacaggacaggagtcacgggcacggaaaggagtttccagcctgattgtctcctttcctttgtgaaacaaacagatttatcaggaataaggtaggaagcttgtaaagacagccttgggagtggggcctgtaaacatggctgagcagtggtgcaggcccacctgtgtttggagaccatctccttttattggttcctcagtacagtgttctgcccaggtgtagagaagggaaacacttataattggattttatacacacatgcatgccgtcagtagcaaaagatgacatttttggaagcctgttcccaaagagaagataattttatgtatatgtagatttagatactctgaatcactaaacccaggacacattctggatttaaaaattagtgtagatgtattatgtatttgggtttttcaagagtagctgacttaaatcaattagaggattgtacgtagatcgttaagagtttttgtttcacttagaccgtcaggagagtaggttattttagcctttgcttaaaaatattttgtcgctcttgttaatggtatttagtagatgatatgttggtggtaatgcatgtctcttgacttgggaatgcatatgaaatctctttttttccgggagttgggagctggtcatcactggcattgtcccttttatattgcaaaaacatactcatcattgcttgatagtctgttccagttcccttttcactagatataattgataattgttttactcagatattgctgtgctttaggtcaaggggtccccaacccctggtccacagaccggtactggaactgggccacactacaggaggtgagtggctgagtgagtgagcaaagcctcatctgtatttacagctcctccccattgcttgcattaccacctgagccacctcctgtcagatcagccacggcattagattctcataggagcgtgaaccctattgtgaactgcacaagtgagggttctagtttgcagacaccttatgagaatctaatgcttgatgatctgtcactgtttcccctctcccccagataggaccatctagttgcaggaaaacaagctcagggctcccattgattctacgttatggtgagttgtaaaattatttcatgatatatgacagtgtaataatagaaataaagtacaccgtaaatgtaatgtgcttgaatcaccccaaagccctccccgacccttggcacttcatttaacttctctgagcctcagcttttgttttggttaaatatggattgtatttacgtactgaggttttacttataagagtattctgcaggattcgatgttggcaggactttgacctccttgcaaaagagctgtcctgaccgttgtttacgactggttgtaatacttggtgataaagatgaaggcagttcatatgtcttgactgcagaattctagaaatctttcactagagttgcctctgtgtccttccaactaccattgttttgaccttggtggagactgttagttggctttcattttcttggaagatcaaactcactgacaggcacttctaagtgaaatattccatcccatttgcctttttcttatagccttgtttaagaaggagcaaatcagcagacaaagcaaactcctcaaattctggactgtcttcacctgctagtgtatcctgcttaaattcctgccaggattaggtctatagtcagtgatacggtttggctgtgtccccacccaaatctcaacttgaattgtatctcccagaattcccacgtgttgtgggagggatccagggggaggtaattgaatcatgggggctggtctttcctatgctattctcatgatagtgaataagtcttacaagatctgatgggcttatcaggggtttccgcttttgctccttcctcattttcccttgctgccgccatgtaagaagtgccttttgcctcctgccatgattctgaggcctccccagccatgtggaactgtaagtccaattaaacctcgttttcttcccagtctcgggtatgtctt

SEQ ID NO: 23225 - DNA, 2300 bp, Homo sapien
ggaggtaaacccagagaaaagagagcgtagagacatggagggaaggggttcggggttgttaccctccagaaaagcgggaaggggggttggggcacggaaataagggattggggcacagagataagagattggggtgtggaaataagggattgggggttcttgccacctagaaaagcgggacttgccgctaagggtgaaggagaaggggttgaggggttcttgcccctgccccagaaaaatcacagaaggggtagagacaaggagagaaggggttggggtactcgccccttcctcagaaaagcgggacttgccgctaagggtgaaggaccaaggcaggcgtccctgcgtggtctgacacctttgaaacgtgggtgaataatcagaggcgtccctgcaatgattaaacaccaagggaaggctgccttcccagcccgtgaccggcgccggagttttgggtccacggataaaacgtgtctcccttgtctctaccagaaaatgaaaggaactgaaattaagagaagggagagattgaagtgcggcgccaagattgaaaggagaaagaggttgagggatagtgagggaagctggagaagacagtaaaaagaggccgcttactggatttgaaattggtgagatgttttttgggctggtcggtctgaggacctgaggtcgtaggtggatctttctcatggagcaaagagcaggaggacagggggattgatctcccaagggaggtcccccgatccgagtcacggcaccaaatttcatgtgcgtccgtgtgaagagaccaccaaacaggctttgtgtgagcaacacggctgtttatttcacctggatgcaggcgggctgagtccgaaaagagagtcagcgaagggagatggattatcattagttcttacaggttttgggtcaggcggtgaagttaagagcaatgttttgcgggcaggggtggatctcacaaagtacattctcaagggtggggagaattacaaagaaacttcttaagggtgggggagattacaaagtacattgatcagttagggtggggcaggaacaaatcacaatggtggaatgtcatccttaaggctatttttacttcttttgtggatcttcagttacttcaggccatctgggtgtatatgtgcaagtcacgggatgcgatggcttggcttgggctcagaggcctgacagctagattttgtatttttagtagagacggggttttaccatgttggccaggttggtcttgaactcctgacctcaagcgatccgtccacctgggcctgccaaagtgctgggattatagatgtgagccacctcgcctggcctactccaatttttttgtattgtagtaaaataaacataaaattactatcttaaccatctgtaagtgtatagatcagtggcattcagcacattaacactgtcgtggaaccatcaccaccatccatctccataactcttttcatcttgcaaaactgaaccgcccaatcacacttagtttttatgaggtctaaacaatttcttgttactcttatcactccgacattgtaagccctgtgtatggggcacccatgtattagttataacatacacatagggtatctactattaggcattgctctaagtgctttgcaaatgttaactggcataattatctttgtatgttctgcaggatctagccagtgctttgcacgtgagaggtaaaatatttgaggaatgaacttcggtaccacctaaacatttcccattgactctggctgttattctggttggcaagttaggaaaggagcaggttaccttggggaaaacgactttcggggcgtaatctgatattaggtcgtaagtttaaagaagtcctttattttagccacatttaggccaagttgctaataagggaagctaacagggaagttattcctaaatgatagagaatataggaagtgactcaaggcagttaaggtcttggctttctagtagcaccgcgttcaactccaggaagactcaggccaccggagacccagggttgggacagcctgggatctgtcagcacggtagcgggcgggggcggggcttcgggccggggcggggccgggctgggcgggctgggccggcctgggcggggcgcgcgactgctccgggcggcgatggcggcggacggggactggcaggatttctatgagttccaggagccggcccggagcctcctggaccaggagaactgtaacgcgagccccgagcctggggcggaggcgggggccgaggcgggtgggggcgccgacggtttcccggccccggcc

SEQ ID NO: 23226 - DNA, 2300 bp, Homo sapien
gcttaatctctttaggcctcagttctcttatctatagaatggagattatactactaatccttctacattcttctaaatattaaatgtaatgatatatgtacagggttgctgtccttagtaaaagtaagtatttgataaacagcaactagcattattattattattattattattttttgagaccaagtcttgctctgtcaaccaggctggagtgcagtggtgcgatctcggctcactgcaacctccacctcccaggttcaagtgattctcctgcctcagcctcccgagtagctgggattacaggcacccgccatcacacgcctggctaatttttgtatttttggtagagatggggtttcaccatgttggccaggctggtcttgaactcctgaccttaggtgatctgcctgcctcggcctcccaaagtgctgggattacaggcttgagccaccgagtccagcagcattagtagtagtagtattaggaataatgtgattatgaattatgcttaggctgccattctgaacctgccctaattcaagtggtaggacaggggatcctcagtgttacagcattatcatccttaccaccaaagaacctgggctcagaatttagtggaggaataaagaggattgagaaataatttcattgcagaaccaaaagaagtaagggtaaaaatgattaaataacattcaaatcattatctccctttttttagtcttcatgttcctttaatggaggaagattcctgatcagtgtacagtgatgtatttatttaacagtgacctgtgcagaaattacatactatccatctagatagcttgctacacttcgcctattgatggaatcattccatttatcaagttttatacatcaaaaagctttgaatttcatcaggctcttcattaattcacctctgaaaaagtggcatttaatttcagctaccatgttttatagcattaaaaagcttatgcatctctgcacaatggcattgagcagatgaatcccacccagattcacatagtcacatttgagagctttagaccagagagctgggccaaagttactcctaatcaacacagacttcttaccgtgagagcctatcttctcggccacattttatatagccaatgaagacgtgccagcaatcatcccatgtataacttggcattagagcacaagatctgtcaaacaattatcttaaataaggagcagttccagggccaacagatgaggacaggaggcttctcgaatggaagaaggttctcctccctagctgcgtgagtgcacactccccagcaggaggaggaatgactctttgctaccttctcctgtgcttgaaaacagatgctctgccacactgatggacactggaatctcaagatctgccagatgtacttttttttggtctgatttttttttaatgatgtgatacgttaatacacattttgaatctgaatctcttagatttcattgatgacactaatatataaataactaaaactggcagatttcatgtgagattattcatcagtattttttttgaaacatgagtcaggttttgcttcccactatgattatcttgtgtcctgtaactaccagcatataattgagtcatttcataaaacttgccaaaacgcagaaaggactgaagcaaaacaaaacaaaaaaatagcattaatatgtaggaaaaagtacatattttcaattcaaaagtgggagtccagtagaataagtttgagagtgtttgcacagttttccttctttgtgcagttcagtccagctgttcactagcttttgaaaaagaaagaaaaaattgaattgcccctgctgaagtaatttttaaaacatatcttttactttccatttttatctaagtggtcctcctctactttttagaatgtcaaattgtagaatttgcttactgaaagtttgtgctttgggctacaaaagaatatttagaaatccttacaaaaaaaaaaaaaaaaaaaagcagtgggagtggaaatttgaaagaggaccgcctaattcagcactaaaaccagtgtgagaagcagtatgtgtgagcatgtgtgtgtgtgtatgtgtgtgggggggggtgtaaaatgtgtttttcaaagtactgagaggttgatgggactgttcgattagctcctctgagaagaagagaaaaggttcttggacctctccctgtttcttccttagaataatttggatgggatttgtgatgcaggaaagcctaagggaaaaagaatattcattctgtgtggtgaaaattttttgaaaaaaaaattgccttc

SEQ ID NO: 23227 - DNA, 2300 bp, Homo sapien
cattgacatccacaaggagtgtggatagccaagggtgcttttcgtgaaatttataaactagcaagagccaagcattgctgatgtcacttgcccctttaccaaaccgtttaaacttttgatgacagtatcactaggcattactatcatctccttgttactagatgatctatgatggtcagagtcggaaaaattatttactccttcattttattcattcattcaatgtttacattgagtgagcatctcctacgtgcaagaccctgagctaaactaccagcattccaacataaaagggattcttggggatagaagagcctctctctgtaaagtcttagtccccaagtcctaagtccttagtcttacttaggagtaagttttcacgaattcaaataaaaaatttcaatgagtacaattaaaggagtggtccccttggtcttccttaaaccatagaattcctttagtcattggggaagcagaagagatgaaggctgagcagctgttcaggtctccgcatgaccctaaaaaatgtgtcccgtctctctgacaatatgaattaacaggctaatcaggctaggatgacccccaaaagcatgacaaccttctaccatgggaaattatccccctcaaaaaatagaaggcactttgatttgccctgtgcggctcacactgagaacaggcgttccctgaggtttaaatactgttcccccaccaccgcgccccaactgccctggcatttagcaaccattaggcaggcagctgctttttggctagagccttgagctaaataaaaacagggaagtgttgctttgtagaagtttttttaaaaaaaactaggaaggcacattcctagtatcacagcaagaaaagggaaagtaaatctttgttagaggctactgagctagcatgggaaaaacctcttctgccttccctggctgtctgctgagtcccccgctgtggttctcaaatgagaattccacggcccaccctgggtccagtgagtcagaatctccacgaccagggccctggaacctgcattttaacacctccagtgtggttctaacgatgagccaggtgtggggagtggtgtggcaccacctgctatgtttgagaaggtggctgcctggagctcttccgaccacacccaaatgaggaatatgtgtagagtttaagggaagttttgaaatgctttcccataaaaatctttgaaaaaagatcaaaactttatgtagctgagattgcaggaagaaactattttactagttttttttcaaatggctcaaaaagaacttggttccatgaagaattcaccttggatcaaatcaagggtattatgttcagtgaggaattgggagcaattgggataggaggagtaatttttctctatcttccctttttttttttttttttttttttgagatgaagttttgctcttgttgcccagactggagtgcaatggctcgatctcggctctccacaacctccgcctcccgggttcaagccattctcctgcctcagcctctggagtaactaggattacagggatgtgccaccacctctggctaattttgtatttttagtagagacagagtttctccatgttggtcaggctggtctcaaactcctgacctcaagtgatccacccatctcggcccccgcaagtgctaggattacaggcgtctatcttccctcttaaagacagttgtaatccatgaaggagagcaggcaaaaacaacagcccacggaagcccgtggaagcccatggctgttagttgaatttatgatacacttgaaagcatctgcattatgagcaagtgatacaaagactgccctcaggatcttcagcctttctttagcaaatcaattttagcaaaggcagactgggatggtcagcagccttgggattagccaatggtgtgacaaaaagataattccgattttcaatatataataagttttaggtggcaaaaagtgttcactatttgcaagtagaagttttatttttagtacattgcagtttcatgaatcatttacaagtaaaatagattgtcagtttatgtatgtttctttccaaattattaattacatcctatttcataaaatatacaagtggatttgttaaatggcttttccctagatgaagtaggtcaaacccgggcctgcatctccgtaaggaggcaataatgcctggtagcattaccagagggtaagacggagaagtactttggagaaattagaaacttccctagtacttgttatgaaagctcaaactctttaaaataatggaaatgtcataaatcagg

SEQ ID NO: 23228 - DNA, 2300 bp, Homo sapien
tttctaactaaaaaacctgaaaattgccttccaaaactcaagctttcttatctttaaaatgaggctaagtacctatctttgaggttgtaaggaataaaagagataatgtatgtgtttttaacacagtatgtagtaaatacttaatttctttctttttttttttgagacagagtcttgctctgtcacccacgctggagtgcagtggcatcatctcggctcactgcaacctccgcctctcaggttcaagcgattcttctgcctcagcctcctgagtagctgggaaacaggcatgtgccaccacgcctggctaaggttttgtatttttagtagagacaggatttcaccgcgttagccaggctggtgtctgtctcctgaccttgtgatccgcccaccttggcctcccaaagtgctgggattacaggtgtgagccactgtgcctgtcccgtaaatacttaatttcaaatgtcaccaaataaatttttccagtccctattgtatctccacttgaataagatcctataaagatcagcagttttttagagtttgatcaagggctgaggaaagtatgcactttttttgtactgttaatgtagaaccatagtatagcttggagattgtacagtccagacttaccatagggaaagctctttttattttatcaccttctaaaaaggattctggttttacctagtgatgaatttaagcgttaaaatgcttaggaggttttcattcaaagaatgtcattaaaagaatacttgagggtttttttttgttttttttgttttttgagatggagtcttgctctgtcgcccacgctggagtgcaatggcgcaatcatctcggctcactgcaacctccgcttcttgggttcaaggggttgtcctgcctcagcctcccgagtagttgggattataggcacccaccaccactaatttttgtatttttagtagatatggggttttttgccatgttggtcaggctggtctcaaactcctgacctcaagtgatccacccgcttcggcctcccaaggtgctgggattacaggtgtgagccaccacgcctggcctacctgaagtttttaaatgtaatagctaatgaaggaaacaggtttggattgaggttgttatatatctgctctttaccaaattggctcttctaccatcattcctcagtattttgttctagttctttttttaaaaaaattatttatttgttactcattcattcattcattcattcattcattgttttgagacagagcctccctctgttgcctaggctggagtacagtggcacgatcacagctcactgcagcctcgtcttcccaggctaaggtgattctcccacctaagcctccctagtagctgggaccacagctgcgtgccactatgcccagataattttttttgtagagacagggtttactccatgttgcccaggctggtctcaaactcctgggttctagagatccacctgccttggcctcccaaattgctgggattataggcgtgagccaccatgcccagttattatttatttttaatttttaatttctgtgggtacatggtgtatatatttatggggtacatgagatgttttgatagaggcatgcaatgtgtactagtcacatcatggaaaatggggtatccatcccctgaagcatttatcctttgtgttacaaataatccagttatacccttagttatttttaaatgttcaattattgttattattggcttgttctagttctgatgtgctactttataatacttttatttggctctcattgtgtgacttgatgggataagtctttgttctggagaaaaattcttagtctagttaaagacagggaaaatgtatttattttagttctgctactcttagggaaatccagtagcaataatttatattagagttttgttatagaaattacagttaaaaaacagaacttacattatcctaacacataccttacagttgcagttttacatattcttaatcttataaatgtttattggacgttattaatgaattaagatgccctctaatacgtaaaacaagtcagttttattatgacttaatgttttctagatgaaggtaatgaaacagaagtgcagccacaacaaaacagccagttaatgtggaaacaaggtcgacaactactcagacagtaagtgtctcatggtgaaacttataaatggctgaagacaagaaacagttttatgaagttatttttactgtgtattttcaagtcagatgaatattttatctcatacagatgctgtgaaaaagcttaatt

SEQ ID NO: 23229 - DNA, 2300 bp, Homo sapien
cgttccctgcctccagaccctattctcctgcctcctgcccacaactcccaggctccagtgatctacccgcctcggcctcccaaagtgctgggattacaggcgtgagccatggcgcctggccaaaatgtaaatgagtcctcgtaaagcaaaaaaagtattgtgagtaataaagttgaactacgaattaaaatagtttttgtatatgtgtggtagtccagattatctatacatttaattacattttgtgtctgctatgaattgacttaaaggaattgtcggatatgtcgtctcactcaaggcctcattgttgacaagtctcaatttttttggaatttagttccttgagctgtaaatgagaagactgggctgtatctcaaaggacactgacagccaaaataagttatggcacagggaatttggccaggcctggatcaatctttgatgataataaagaatgaattcataaagcagaaacattaattaagcgagagaagagagttctccatctttatttgcaaccagagcagacacaatgtgtttcctgtcctttctgcaagtagccatgggaaagggggggaggggagagaggacagggacaggatgtctttccctgacatgtcactcagcagcctagatctttacattttttcatggccatcaagtctgataacccacaagtacgtcctacaaaacgtaagaatttcagataacttgttagggtgacaaaataagtgcttaatttcatttgcatttgttaaattgttttcaggggccttcctttttgccactgttgtagtgtgaatttatagtgacatattgtcagacttcggagaaggcaaatatttacagagagtaacttgaaaggactttggtgtacctttggtaggcggatgctgttgccagttggcaggtgaatcgtgaaagaaactgggaacaggacaagtgaaaacggagaggggccaggatatctaagaccgcgctagggagcagaaagggaacttgctttttcaaggtggtgtagcttttaaattaagcctttgtgatatttgattatacgccaatctttgatgacagaaacgatgtcatttatcttaatattcccagcgcaagagaaaaccgataatcaaaatatttgttcaattaagtagagtaaaaatcagcgggaataagataggaaaaatgagaccgaaataacagaacatctattattggatgctaaaacttttacaggatttactgcaggaggactgcaaagggaaagaaacttcaacggagcagtttttcagatgggctgtcaacaaaccacaatttggaagcagcagcagaaagctgcggcgttgtcttagaaaggtgatcggcgttccttagaaatgaaaactggtcaggtaacaggtttgagcccctcgagtcaaaagagaaaggcaagagcgacagcgacccgcagattggcagaatggaggagcgtctagggtgagagaaactccgaacacgaagccgaagcgagagcacgcagggcagctggcgggagaaccccggtcccgcggccgcaccgggtagctcgctttgagcctgttccttcacagaacggccaggaagccttaaaagatgtgcagctcgggcaggtatcttggcgtgacaacttccgtgtgtgtgtgtgtgtgtgtgtgtgtgtgtttttgaatgcaacagggtgcgccgcccgcgaacttccgcgtgcgaggaagactggagacccgcccgcccgcgcccagccggccccagaggaaacccgctctccccgcccagccggccccctacgcggcgagccggggcggggcgggcccgaggccacgcccaagctgaggcacagccctacaggccgcccgggccgcgctagcccgcgccccgccccgcgactacatttcccggcaagccccgggccgccagcgcgccgcagttgacccatttcccggcccgtcacgggctcggccggcccccgcgcccaggaggctgctccctgctgactggggtgtgggcgggagcggcggagggaggaggaggcgctgcttgccgccgctgttgcctccgctgctgggcgccggggcagctccccgggtatctgcggccgccatggacgagcaggcgggtcccggcgtcttcttcagcaacaaccacccgggcgccggcggtgccaaggggctcgggcctctggcggaggctgccgcggccggcgacggggcggctgcggcgggggcggcccgagcccagtacagtctcccggggatcctgcacttcctgcagcacgagtgggcccgcttcga

SEQ ID NO: 23230 - DNA, 2300 bp, Homo sapien
ttattgttgttaaaggtgacactctgagaccaccccttccttcttgaaactcttcccttggctccattgtcactgcacttgcctggtttttcttttgtttttctggtattttcttttcaatttctttctttattcttattctacttgtcccttaattgtaactatgttccatctggtctggctttaaggctttattttttttgtttaaagctgtccttgaaaaaaatttaacaatactttagttatcacctttgtgtgggaattcctagggttatgtaattacccttgaacttgctcctgaaatccagacccaagtttttaattgcctgctgaatatctttccacaagtctcttagtggcactttgaatgcagcatgtaaaaatgttcaaaattaaaatcacgctgtctcacttctcatctccacttacttagtttcctttgtttcccctatcatccccgtaaagcagtagtatcaccttccttccattcaagtcagaagcttcaacaatcagcatttagaaatttttgattccttgctctttttgtatctcccttcacccgccccctaaaatagctaattagtttccatatcctgggatttctaactacaagtctgtctcagatgcttctccttttttattccattcccagtttgatccgtatcatctctgttctatggtattataaaagacacttaacatattacttactgtctatatacattttttcttatacagaagtactggaacagttttcctaaagcacaattctaataatatgatccccctgtccagaggccatggaaactcacaattgcttacagaatgaagtctaaattcattttccatggaatgtaaattttaccttaatctaatcccaattaactttcctaatcacatctcttcctcatgtaactctcctatgtctatacatacaaacctctttgacacctaaacattcccattcctcctgctagaattaatctttcccttgtctgtttttaagtgtcccatattacagtcataaaacattcccatgtgttcattcaatctgtgttttcttacttgagggtagggactagatttttttttcctattcctttttttttctttctttcttttgagacaaagtctcgccctgtcgtggctggagtgcagtggtgcgatctcggctcactgcaacctctggctccctagcgattctcctgcctcagcctcccgagcagctgggattacagacacacgccaccatgcccacgcccagctaatttttgtatttttagtagagatggggtttcaccatgttggtcaggatggtctcaatctcctgacctcgtgatccgcctgccttggcctcccaaagtgctaggattacaggtgtaagccactgcgcccagcctctttttttttttttttaaagtcccctttatagcagcaagcataacccttttcctgtggtaagcagaaattttgttgaagaattattcaagactgaactgctttgggtggaaaattatttctgttaacatttttgttaaagtacacggtggaaacatgttaagtaaatactattttgttttctacgtaggagtacaataaaatctatgcttaccattgatataaaaaataatactggctgggcacggtggctcacacctgtaataccagcactttgggaggctgaggcaggcagatcacgaggtcaggagatcgagaccatcctggctaacacagtgaaaccccgtctctactaaaaatacaaaaaaattagccaagtgtggtggcacgcgcctgtagtcccagctacttgggaggctgaggcaggagaattttttgaacccaggaggtggagcttgcagtgagccgagatcacgccactccgctgcagcctgggtgacagagcaaaactctgtctcaaaataataataataatatcaaagcatagcattgggtagtttattttgttttgttctttggttttgtgttttatcttctaggaaaaaagtcatttattccattttcttatacagcattaattttttttacacaaaagtttttgaattctctttgtctaggtatgtagtacatggataggaagtggagttgtcagtgatctcaatgatctccgtcgagtacacaatcttcttgtttcttctctggacaaagttcaggctggaaaaggatcttccagccagctgtaccgagagagtgccacgaccatggaaaaactggctgttctcaaagcttgggcagaggtaacgactaaaccacaatctattgtttttgacccatttcttcat

SEQ ID NO: 23231 - DNA, 2300 bp, Homo sapien
aaacctccccttattctgtatttggggtgacacaacaaaaatagttacctttcagttccattcgtctgtcttactcccttcagggttcagtgggctctagacttcagagggcgtaataatactcattcttaaagccaccagttatataccgctgctgtttacaagaatgaaaagattttctgatgaagcaagaaatttaaccactatttcatgacaacattgctttttggttgttgttactctttggattttcccaatttttatttatttatttatttatttatttatttatttattttttgagatagagtctctatcacccagctggagtgtagtggcacggtctcgggtcactgcaacctccgcctcccaggttcaagccattctcctgcctcagcctcccgagtggctcgaattacaggcacctgccactgcacccggctaatttttgtatttttagtagaggcaggatttcaccatcttggccaggctggtcttgaactcctgaccttgtgaacctcccacctcagccccccaatgtgctgggattacaggcatgagccactgtgcccagtggagtttcactcttgtggtccaggctggagtgcaatggcacaatcttggctcactgcaacatccgcctcttgggttcaggtgattctcctgcctcagccttctgagtagctgggattacagacacccgccaccatgcccagctaaattttgtatttttagtagagacggggtttcgccatgttggccaggctggtctcgaactcctgatctcaggtgatccacctgcctcagcctcccaaagtgctgggattacaggcgtgagccactgcgcccagccttggattttcccaatttttaaatgaactcttaggatgcaatccacttagagtttgtgttctggctttataaaaattttaaaatctgaactataagactgaataagtttcaatttattcttctaacaaatacaatagttttttagtttgttaaatatatttagcagtatatctctgtcccacactttttcttattagaatcaagtatttattgagagttccctgagatttgtttacaatatctcagaataatcagttttacagttcgaggtattactctaattgccagattaaattataatcccaaagatatgtaaactagaggccatagttaaattgtatatagctagctggttttgtggctgttgtgaatttatatgtaagacttggtctttatcataattgttacctatagcgtacaccaaaataccatacaaattcatttgtaaaaattacctttcagatgtcagtccttttgcccctggggttagttctcgaactgatatccattgccggcaccaaggtgttaatataacagaaactggtcttgagggacttctttttggaatgctagaccgggagacagatcgaaaattatgttctgatattcatgacactttgggacatatgctttcttcgctggcagtagaaaaactttctcattggctaatgctttgtaaagatgtcctggcagcttctagtggtaagtatttaatgtgcgttcttaaaataatggaaattgttttacttctgatatatacatatagatatatgtataaagatacatacatgtaaattataggttttatttaaaagtaataacttttgatctacaaatctctgtcaaaatgttgaaagttaaattatgttataaacaaatgagcttttttatattgttgggaaaatatatttcaaaattttttggaagttcaaactaaattttcatgtataaaaaccccaagttactctagagtatgacatagtatgtaaaactattgaaatatttaaatgtagtttacataaaagtaatttatgttatcttttccttggcttttgattgtttaaaaaaaattctgctagttttactgttttccagcaagtaagaatttagtctttttttaaattaaaaaaattttaatattaataactttttaaaggatcatttttgcttatgtgagattgttacaatattccttattcttgttatagatatgagtactgcaactctcttaagtagtggaaaagatgaagaagctgaaaagaaagatgagatggatgatgataccatgtttaccacgttaggtgaagaagataaatcaaagccctttgtggcccctcgctgggccactcgagtatttgctgccgattgcctgtgtcgaatcatcaatttgtgtgagaatgcagaccaggctcactttgatcttgccttggcacgttctgctaaacttc

SEQ ID NO: 23232 - DNA, 2300 bp, Homo sapien
aataaaaagtaagttgaatcaatgttgggaactggctccaaaactggccataaataaaatctctgcagcactgtgacatgttcatgatggccataacgaaacccgaatgagggcaaggaacacctggcctgaaaaccgcttaaaggcgctcttaaaccacaaacaataccatgagcgatctgcgccttaagggcatgttcctgctgcacagaactagccagacccacccctttgtttcagcataccccttcgtttcccataagggatacttttagctaatcgaatatctgtagaaacaatgttaatggctggcttgctgttaatagacacttgagtaaatctctgttccggggtctcagctctgaagcctgtgagacccctgatttcccactttacacctctatatttctgtgtgtgtctttaattcctctagcgccgctaggttagggtctccccaaacgagctggtctcggcaaatcaaggctatgcaggaagaaaaaacagattaaaaaaaaaaaagagcctattattgactcctcaaagagataagtgaagacactgggattgttaggcagcatagagagatcacttgcaacgggtgacgatgataaatttaaagtgacaccagtcatatagccatgtttttctccagttacaatgagctgcccaggtacaaacataaagaagataggcaatgagctggatttaaacgaggtttgagttttgccactaaatttcccattcgtgtaatactctcaagttccataagtgacccataaaccttccaaaacataacatgtgttttcttaagaatcatgaccacataatctcttcacgttaatgcaactgggaaaaaagagcaataccataccttgttggcagcaaccaagactttatcaagaaatcgcaaccattcaaagatgaaaactggtctttttgcttcggtgatttgagccaaagcttcttcatttagcaataaactgtgggctaactccattacggaagtttgaaattcacaccttaaatttaacagagtaaaaaatacttgtaagtattttttaatgttaaaagtcaagcttaatggaatatactcactaagaaaagtaggactactcatttcatttggggaaaaactcaacttctttgaggcaaaacctgagaacatacttttaaatgacaaaaatacaaacaaaaacagaagaaaactacttggtaaggaagagtgactcatggagtgaaaagaaaattaaaagaaattattgccaaaaaaggcattattccagaagaaatatgtccagcaacacatatgtcatttacccgttctataaatgaaaaaactgaagcactaagatcaaacaccccagccgggcttgacaaccatcctcctctttttctcgtccagggttcggtacatagcacctttaccctcccgcgctgcacctggccagagggactgaggtcaaaacacccagcacagacatcccgaactgcaggtctccaagactcttcctacgcggatgggtggggcggccaggcccggcggccgaagcgtcagtgacaacaccaggcggtccggaatgcacccgagaagcctcgcgcgctcggggtctggcttcacctggctactccaagaaccgcaagcggcggacccggggaaacaccaagaggccgccgcaagcctccgtggggttccgcaggctgtcaatagcacgaggcggcagctcggaactaagcacggagccagaaaagggaaaatgttcattacgaactcaaatgtcttccccacccgtctgaaaatgtacgtcggacaggagtccgtgcgtgtcaacatgcatgcttcggcgacctcacctcgtagtctggaagggaagatcagctgagctccgggggtagaagcagccaccaagagacccggatgccccacctcccgcactcctacctgcaggaaacaagggaagagcgcttgcgcggagggctggtcttgcgcaagcgcagtcaccacgtcctcctatccccacccgccgcgaatttccaatagagtctgcactaggaaactggtgggagccgaggtccggaagtccgacgctggtcggtgggcgcatgcgcagcgcgcgctctacggcgctgaaccggggcgagcagagagctgtcaggtaagagagctgtcaggtaagggtctggggacaaccggtagaatgataaaaggcagagtgcgctggccatgactaccgtatcacaccgtcagccacttttccatccgtgggtggttgcgtctgtgggacgcttgcagccaggaggaa

SEQ ID NO: 23233 - DNA, 2300 bp, Homo sapien
acaaagacaagtcccctatatcctccctacctaccactgcatcccaaacacaaatgcttaataattgtttagcaacaatgaggataaaaagggtctttaatatttgtaattttataactttttcctatgtcaacaagtcatttttaaacactttttaaatacgtacagaaaacacataaaacaaatgtacagcttaatacatttctgtgagtcaaacattcttgtaaccatgtggtaccctccaaaatgactcccagtcattcttgctgtgtggttttctacatccttagtgtagtctccttccacagtgaacaggattaacctgtgtaaccaacaggattttgtggagatgatggagttgattttttggtcataactgcagctcttaggtcattctaactttgaagttagatgactcacttgaaggaagtcagtggtcacataataaggatactcaagaagctctatggagaaggtcacacgattggaactgagtcctcctattaaaagccagcacaaactcatgagccacaggagtgagctaccttggaaatggattctcttgctccagtcaggccttcaaatgactcagcctgggctggcatcttcactgcaacttcttaagaaagtccatgctaaactaagctaagctgctaacaaattcctgacccatagaaactgtgagataacaaatgattacagttatcttaagctgctacatttggggataatttgttatgtagcaaaagttatcaggaagtagaaccttatcaggcacctgggagccctctttgtcccctatccagttgcaactctcttttggttctaagaatagtcactattctgttttttatggcaatcatttccttcattttctcgatagttttgtcatccacgtgtgcatctttaaacattacagtttagtttacctatttttattataagttaaaaacgtgcactattatatacagcatttatggtaattcacccgcttcctctaaacctcagattcttcattggtaataacagcatttttacacataatggtttaacacttacccagtatatcacacatttttatcacatttaaccaccactaacaactctacaaggtaggaagagtttttcctgttggagaaattaaggttcagtatggctaaatgactatttcaaaaccacaaagaatccgggtcatagtgccttgcaaataggattacattgtttttaagagacctacttaactttaaagtgccaggcacatctgaatggggttacaggttgcttttaaagctctctttctattggtaaaatatactttagcattatccatttccatcaaagataagcataaacttcacaaggcgataccctggcagagatgatggaggctcgtaccagagtgatagcaatgcaagtggtcgcatttggggtacacttgaaggtagagcttacaggatttgctgatgttgtaggtagtacgtaaagaacgatgtcaagataacgctaagtttttggcctgaatacatggaagaacggagttaacgttttttgagagtgggaagactgtaggagtaggtttgtttttgtttttttagggggcgtagtcgggaaacagacatattgagagtcccattacatatacaagtggagaaatggacctacagtataaatgtgacaagaaacgtcccactctcaatactacgctcaggaaccgctgatcccttccctcacgcgttcctcctggctgcaagcgtcccacagacgcaaccacccacggatggaaaagtggctgacggtgtgatacggtagtcatggccagcgcactctgccttttatcattctaccggttgtccccagacccttacctgacagctctcttacctgacagctctctgctcgccccggttcagcgccgtagagcgcgcgctgcgcatgcgcccaccgaccagcgtcggacttccggacctcggctcccaccagtttcctagtgcagactctattggaaattcgcggcgggtggggataggaggacgtggtgactgcgcttgcgcaagaccagccctccgcgcaagcgctcttcccttgtttcctgcaggtaggagtgcgggaggtggggcatccgggtctcttggtggctgcttctacccccggagctcagctgatcttcccttccagactacgaggtgaggtcgccgaagcatgcatgttgacacgcacggactcctgtccgacgtacattttcagacgggtggggaagacatttgagttcgtaatgaacattttcccttttctggctccgt

SEQ ID NO: 23234 - DNA, 2300 bp, Homo sapien
accaaatccaaagtcatgaagatctcccccatattttcttctaagagttttatagttttcgcttgtacatttatattttatatcctctaaattttgtttataatttaaatcattgctatagacttggtccagtgagacctataaacagaggtcttaatttactcagtggttaaattgtcctaaaattgatttctgcaaaattcagaggggagatttttgggatttcatagagaaatctatatccatacagttaaatccttcatgatttcatacacttcacttttttaaagtattaaaacttttttatttgaagaatacgtggggagaagagaaatatatttcagcacttagatatgtagattatttccaaaatagtttaccactcaactagtcacttctgtgtaaatcagttttccctgaagcaagcattgtgttgttcccggctacaagcggtcctcattttgcatggtactgtgggaccataaaaatggccatgcaaagcaatcttaataatcaatggggaaaatgatgattgttccatgacctttaaaattctgctaaaatattaaaactcttaaggtcagttataaatgtagaaaaaaatgcaaaaaaaatttaaaaatatttagtacactgtaatttaaaacattaaaaatagaattaaagtgttttatttcattgtgaaaactaagtagtttgaatagggattgccttttttttctgccaagtgacttatgatactgagtaagcatcttttctattcatggcaaactgtcatactccttttaagtttgggtgagcttccagccttttattgcttgtgctttcaatgttgtgaagtatttctgtattcacattaaatgctctttagtgtgaagtttgttttttttttttttttaccgtcacttcctctgggacatatttatctttattgcaatcacttttcttatttgtgttgataagtttgccttcactaagctcctatgaatgcacagcaggaagaacattcccatgatcagtgacttcttctacaaatccatttatgtttgattcaaatttcacttccagtgttatcatttttcgttgctttgttggactttcatctttgttggccagttctttcgattgttcacttctataaaatgtcaggtggaggacaaagagacagtgtaactacgtgctctgctgtgagtgaactgattaacagatgcacagggaccaaccactggaagaatttgaaacaagtaacacgactggtcactgatcatgaagcatatctgttatttacatcgtgatttgtagactgaagaactagcagagaagtttgtacttcctgtaattactcagagttatactgtgctacctaaaattttaacctaggtttaaacaacaccagtttccttaccagtttcctttccttcctggtaaggaaactggtatttaaactaaatctaggtcactgaaatttgtgccatgggaaccgtgcacattgaggacctgcctacaccctacatgtttatattggtccaggcaggcttaatgctgactactgagaaataggctatctgaatttatatcaaatagtgaatcttaaagcacccaagatgaaaaattcgtgcacattgaggtgcttttaaaatctttgtcatttgacaatcaagcttaaaatgtatcttagagtaaccgaattttagaaataaagacctttaaaggccccatagtttgataccacagattatccagcatgtttataatgaattatttctcctccttcaatttcagtttgctcatactttgtgacttgcggtcacagtggcattcagctccacacttggtagaaccacaggcacgacaagcatagaaacatcctaaacaatcttcatcgaggcatcgaggtccatcccaataaaaatcaggagaccctggctatcatagaccttagtcttcgctggtatcactcgtctgtctgaaccagcggttgcatttttttaagccttcttttttctcttttaccagtttctggagcaaattcagtttgccttcctggatttgtaaattgtaatgacctcaaaactttagcagttcttccatctgactcaggtttgcttctctggcggtcttcagaatcaacatccacacttccgtgattatctgcgtgcattttggacaaagcttccaaccaggtacaagcggtcttccgaattttgcactcagaaaagtggcatcatctaagtcaattacatgcaaattctggggggctagttttttgtgtatgttaaatgggtcacaacacgacttct

SEQ ID NO: 23235 - DNA, 2300 bp, Homo sapien
taggctgggcgcggtggatcacgcctgtaatctcagtactttggaaggccgaggtgggggaatcacttgaggttaggagttccaaaccaggctggccaatatggtgaaaccccttctctactaaaaatacaaaaattagctaggtgcggtggcacacgcctgtaatcccagttacttggcaggctgaggcagggaaattgcttgagcccgggagccagaggttgtagtgagccaagattgtgccactgcactccagcctcggcaacacagcaagactctgtctcaaaacaattatattgtaattctggtgcctgcagcaccaagctttgcagctgagagcccagacagtagggaattgggctcctcagggagtccaatatgctcacactttacccattccaagaggttcacccatatcatatcattcccctggacctcatcaccaaccctctgatatcattccttccaaatctttccccagcagagaaggcagatttttacatcacccctgaggctccctgaaataggagggttttctggtacagtcataaaagcgtgtgtcctctgatcatgcttaagcttgccatttttcattctttaagctctcttgggcagttcaggggctcaaaaagtcagaaaaacttgtccttgctactgccattgctgctgccacagccatcccacacccacaaagctgacaaatggacacacagcactgtcagagttttcttgtcacctggaaatgccacaaaaagatggctctgcctcatgtctaccttctaaacctcccgccagtgctttacatataggggacttaagctatgcccaggaccagagctacaaggaaagtgtagattttagttgttgataccctgcaatgtggggttgttgggggatggagaagggaggctggagaggatgcctgcctaggtgtaattttttttttttttttttgaattggagtcccactctgtcacccaggctggagtgtagtggcatgatctcagctcactacaatctctgcctcccaggttcaagcaattctccctgcctcagcctctggagtagctgggattacaggtgcctgccaccacgcccagctaatttttgtgttttttagtagagacggggttttgccatgttggccaggctggtcctgaactcctgacctcaggtgatccgcccgtctcagcctcccaaatttctgggattacaggcatgagccaccgcgccggcctaggcataatatttaatgtatatttgaggtctgtctttggaccaccttcctctcttatcccagctaagatactgagagtacaaactcctggttataattctaactccgctgcttactacctgtgttaatccaaattctctgtgcctcaatactcattagtcactgtgccaatgaactctggaactctgtgtgactctgggagtgtgtcgcagtccatcaggtgagtagaatttctataaatcgaggactactggtgttggactatggtaggaagctccctggggtactgtaggaagcaggtgtctctatttagcagcaggactggcccacaggtgcttttacagcggctggcaagtgtctgctcatgaatgaatggatgggtgggagcggagtgaaggagattacgcccccaggcctctgatccccaggcttgtaaaggtgagggggccgcggtgtggcaagagggaaagagtgctttggtgtttacaggccccgacttgaactgaatcctggctttgccacttacgagcggcaggacccctgggtgagttcatttactcagtttcctctattgtagaatggagctggtaagatccatcttcccaaccccaccccaaatatttgtgttgagagtaagtggaacccttgattcgagaacctagtgcggccagcggactaggccagcggagaaccctaggagccccgggggcgggggatgggggtgcagggtcctggccgtgcaggggcagcacgtgggtgccaagcccgcctgccggtgccaagcccgcccgccggtgccaagcccgcccgccagtgcctctcgcgcgcactctggatccagcgccaatttaccccaatcccgtagcagacgagggcttgtgcgagagggggccgggcggctgcagggaaggcggagtccaaggggaaaacgaaactgagaaccagctctcccgaagccgcgggtctccggccggcggcggcggcggcggcggcggcggcgcaggtgagcagggcagggggcagccgagggagcgcggggagcgggggccggggggccacgtac

SEQ ID NO: 23236 - DNA, 2300 bp, Homo sapien
cactcccacctagatccagtgcttgcggtgggatccacactcagcccgctgctgggccggccatgccacgacctgcttccaccttgggcaatggtgtctgcatgaggggaacatggtgacacccaaacagggatgccagcaaccccaatccccagagcgggtgttatagcatgctaacagctcttttagtcccattgctccactccctgctgctgctcctgggctggcctggccctgtcactccttccctcatgtggggcggctgccctacaccagtgaagggtgggggatacagtattacagtttttttcgtacccaccttcaggctaagggggctacctgccttagggtggcagaccacgctgtttgattcccatctctgctgatagctgttccattgttcaataaaactcttctctgcccttctcactctttggttttcagcataacctcattcttcttgaatgcaggacaagaacttgcgatctgccaaatgtgggtacaaaaaaggctgtaacactgtgatcctctgcctcctgctcgtgcctgcagccaacccacacaatggaaagcagcagccaggctgggccagccgtggagcctatgggcctgagtaggcaggggactgaatgagctataacataggcaggctggggcaccaggctgagccaggcccaggcggggatgtgccatcctgcatcactagaacccaggaaatttattgcccttgtggtcctaaaaatctctctcctcagaaaataagattttttttttttttttttttttttgcagtgaaaaatgccatggccttgtttctcatagcaggtaaagaagaaccaaagaattcactggtactaacaattaaacctatgccctctgagatctcattgtaagtgtctttctgcctggacttagctgtactgcctgcgttccaaccctagcccctccaaatcctgactctgcaattgtaaccaggaaccccagcttttaaaatatcttttaatcactcactttctttccctcccctcttaccccttcattccttccctctctagaccttctcccctggcaatgcatgtttatctaattgttttcttggttaaaaaattccagaagctaatcttgaaacaaaccaagtgcagagccccaactacagaatccttgtgcttagggggagtcgcaaacattttctccactaccattgggctgaaatcaagataatgccagccagacctccaaacaggcaattacccaagatatccgttgaaacaagacatacagaccctgcatcctgtaccactcccaaatgtctcccatacatttcccccttaaaaacgctatggtcaattttaaaatttaaggtggtactttagaacactagttcaccatcttctctgtttgctggctctccgattaaaacctgcttttcctcccgccaaccctcacctctcgtcttctagaagccacttagcccctgtggcctcaattaacctaactgcaaaaggtagcaaagcaacacccatttcataaggctgttaggaaattacatcagatcgttcctgtaatcttagcaatttggaaggggatgtggtacatgcaagtactcaataatgttagctacccttttaactgatacatgaatgacagtacagcttggtaactaagaataactagaagtcatcttcttcactggttaacattggttaagagaaaggtaaatacagtgaaaaaaattaccttcttagaaaaatggaagaagcataagaagaaagatgtggggaagagaatgggagagaaataagaagaaatatacagtctacatttatagatatttgacttatcaagaggccaaagagtaaattatgacccagaaaatgtaccagataggatataggctaaactgctataacttttgagtaattgcaattgtaattgttgagactccaataattcagtggctcaaacaagatgaacaattatgctctttcacatacaggtcagaacgaggcctgttacacagtgtgagtcatgggagggtggctctctttctcaaggccatccagtaagctggcttcctctgtcttgttagtctgccaccccctggagtgctgctttcctccgaattagcaaatctggtttgccaacacagtatctgccttccaggtatggggaaggcactaaagaaaattggagagccatcaacttactgttttagccacagggccacaccaagctgctgggagatgggaagtgtgggccaacttacccaaaggaaaaaggggagagtggctgctagagaa

SEQ ID NO: 23237 - DNA, 2300 bp, Homo sapien
atttttgaaagtggtaacaggtacataggtaatcaaagtacagagcttatttggtgaatcttcatcctcattacatcctctggacagctgcacgcggatacggtacgggacattccttattcctttggcaaagacaactttattgagcctggtatcaatgcacacatctggagttcccatctccttcattgcaaaatttccggatctctttgagtgcctgagggacatgcttcttgaagcccactctgtggatgtgcttgtgaatgttggtgtattcttgggtcatcacctcgttgatggcagaatggtccattttcttcttgccactgttctttgcaggagccattctgctaggcccaagttggtaaagcttgttatcatttctttaagctttttttctcctcttttctttttttcaatctgaaccattccaatgaccttttcttctttctccttccttcctccctccctccctccctccctccctcccttccttccttccttctttccttccttccttccttccttccttccttccttccttccttccttccttccttccttccttccatttttgagacacagtcttactctgtcgcccaggctggagtgcagtggcacgatcttggctcactttaacctctgcctcctgggttcaagcaactctcctgccttagatttccgaatagctgggattacaggcatgctccacctcacccagctaattttcatatttttagtagagatggggtttctccttgttggctaggctggtcttgaactcctgacctcaggttatctgcccaccttggcctcccaaagtgctgggattacaggtgtgagccaccgcaccaagccccaatagctttttcatcttgctttgtcatcctggtacttttaacactgatattctggtatttcaaaccaatgtagtggagccttgctatatggtctgaaagtttttgttctccctaaattcatatgtttttcacaatttatgatgctttagttacacagatgaaccacatgggctggactaggggtggggcgggtgttaggaaaattggggcaatcacagagcaccttgcagaggcacttcctttacttggcgtggacagagttagctccagctatcaccccttctctaaaacctttacagattcctcggattagaagcaaggcccttatcattgtgtactttccatcagttatttgtggtaaatacccctaactagactagaacttcgatgaaggtagatctgtgcctgttttgggtgttccaggctttgtcttgcacacggtacttcaatatacttttatattctttttctcttctctgtttccatgtccccttcgcgctttctcaagtgttactttgcaaacgaattctttagggatctggctaaaatgcagtttcagattcagtagttctgcatttttttttttttgagacaaagtctcactctgtcgcccaggctggagtgcagtggtgcgatctcagctcactgcaacctccgcctcccgggttcaagcgattctcctgcctcagcctccccggtagctgggactacaggcgcatgccactacgaccagctatttttttttaaacgtatttttagtagagacggggtctcaccgtgttagccaggatggtctcggtctcctgatgtcgtgatcctcccatctaggcctcccaaagtgctgggattataggcgtgagccaccgcgcccggcctagttcttcatttctaacaagttttcaggtgatgcttatgttggtagtcctctgagactatcacactttaagtttcagggtgttagaaaaacgacccagaacaggctacacgtagtcagtttcctgggtttaaatgtgaattctgattttactaactgcgattgtgggcagtgtaagcctcttgctttctccgtaaaatgagatacactcagcacctgttgcatgtgttattgcgaacattccgtaaaataatgtacatagagggcagtcaggttcgggtcgcggtcagagtacaattaatagtaattacgaatgtgggggcggagccgacaacggaaggggtggagcgtcgccaaccgttgcgcatgcgcagtcccccttgaacgcacctcaggtaagactctggcgagtggcttcccatgggcggtcggatttcggggtccctagtgcgacgagagtggggcggtcttctgcgtggggcctcgtcacagttctgggggcatgtggaggatagtcaggtgtcactgccttaattcactggaggcgagtgtttccgggtcgctag

SEQ ID NO: 23238 - DNA, 2300 bp, Homo sapien
gggttattttttttttattttatttttggagacacggtctcgctctgtcgcccaggctggagtgcagtggcgcgatcttggctcactgtaacctccgcctgccggattcaagcaattctcttgcctcagcctccccagtagctgggagctgggactcccgccaccaggcccagcaaattttttgtattttagtagagacggatttcaccctgttgcccagggtggtccccaactcctgagctcaggcaatccacaggcctcggcctcccaaagtgctaggattacaggcgtgggccaccgcgcctggcctatttttatttttttgagactgggtcttgctgtctcccaggcaggagtgcagtggtgcgatcctggctcactgcaacctccgtctcccgggttcaagtgattctcctgcctcagcctcccgagtagctgggattataggcgtgtgccaccacgtctggctaattttttgtatgtttagtagagatgaggtttcaccatgttggccaggctaacttccgacctcaagtgatcctcccgcctcggcctcccaaagtgctggtattacaggcgtgtgccgccacgcccggcctcttggggttatttttaatgttcaaggaatgaacaaagaccgcctgcagccagttccattattcaaggaatcgaagtaaaattttgttttaagagagggtggtgctaagaaataaagtccatctgtaggccagggttaaaagaaaagaaaataaagtgcgaataatactgtacggctgccttggtgtatagtggtgagcatagctgcctccaaataacaccgtacaacaaagtatttacctttttaaaaatacatatacgttttgcactgaggctctcggcttcaggaggctgataaaacttcaagttcctttgctacagaccaccagggatacacctgtccacccacaaagaagtgaggtttactagctgcggcaagggagacacggcagaccagcgcctgccttctcggcacagggaaaggcatcattccgggaagtttaggtgaagtttaacacgaagccgcctctgacagattcggcgcagggctgtgtgtcatgcagttaacatcacacggggctgagacgctgactcggggacacaagctcaagccaaatgtgcaatgctgggtcggaagccccttatcccgggatgcgctccagggaatcggggcggcctcccagcttagcgtctgcaggctacgcggtttcaagcagcaacgtctctcccagcctagctgtgcagaggacgacttttcaacagaggccgagagctggccgcctccgctcccccggctcccggctcctgccgcggtcccacccagctcccgcttcccccggttccctggtgccctcggctgccctcagctctcccctagcccgcggaacgctaggcccgggcctgcaggcgacacgcgcgggcacgcacggagcacggcccggccgccagaccacggccgcctagcgacccggaaacactcgcctccagtgaattaaggcagtgacacctgactatcctccacatgcccccagaactgtgacgaggccccacgcagaagaccgccccactctcgtcgcactagggaccccgaaatccgaccgcccatgggaagccactcgccagagtcttacctgaggtgcgttcaagggggactgcgcatgcgcaacggttggcgacgctccaccccttccgttgtcggctccgcccccacattcgtaattactattaattgtactctgaccgcgacccgaacctgactgccctctatgtacattattttacggaatgttcgcaataacacatgcaacaggtgctgagtgtatctcattttacggagaaagcaagaggcttacactgcccacaatcgcagttagtaaaatcagaattcacatttaaacccaggaaactgactacgtgtagcctgttctgggtcgtttttctaacaccctgaaacttaaagtgtgatagtctcagaggactaccaacataagcatcacctgaaaacttgttagaaatgaagaactaggccgggcgcggtggctcacgcctataatcccagcactttgggaggcctagatgggaggatcacgacatcaggagaccgagaccatcctggctaacacggtgagaccccgtctctactaaaaatacgtttaaaaaaaaatagctggtcgtagtggcatgcgcctgtagtcccagctaccggggaggctgaggcaggagaatcgcttgaacccgggaggcggaggttgcagtgagctgag

SEQ ID NO: 23239 - DNA, 2300 bp, Homo sapien
ctaagaaaatagaatataagacttactgaagacattaatgtaaacccaagtttttagtcagcctccttataacctcaaagtccagaagaggagaaccacttgtttttcagatttttctattgtcctgtgtgtgctcttttgttctcaatcccagctcgctgctgtcaggtgtttactccattcacttccgaccccttttcaatgcctgagggtgggtgtaatcaaataaccttccttttgtaggattattctgctgatatcttaccaggtggccctccccaccaccccccaaattccctcattttaataatgtgatcaccctggggaccaaaagattaaaactttattattcttatttaaaagaaatgaagcaaagaaatttacaaagtaattcatatataactaagaggcagttgagtggtgggaagggacagttgttttgctccattcactacaatgctgtacatgactgacagaaagtaagtcatgctcagtacagatgcctctcttggggttattttttttttattttatttttggagacacggtctcgctctgtcgcccaggctggagtgcagtggcgcgatcttggctcactgtaacctccgcctgccggattcaagcaattctcttgcctcagcctccccagtagctgggagctgggactcccgccaccaggcccagcaaattttttgtattttagtagagacggatttcaccctgttgcccagggtggtccccaactcctgagctcaggcaatccacaggcctcggcctcccaaagtgctaggattacaggcgtgggccaccgcgcctggcctatttttatttttttgagactgggtcttgctgtctcccaggcaggagtgcagtggtgcgatcctggctcactgcaacctccgtctcccgggttcaagtgattctcctgcctcagcctcccgagtagctgggattataggcgtgtgccaccacgtctggctaattttttgtatgtttagtagagatgaggtttcaccatgttggccaggctaacttccgacctcaagtgatcctcccgcctcggcctcccaaagtgctggtattacaggcgtgtgccgccacgcccggcctcttggggttatttttaatgttcaaggaatgaacaaagaccgcctgcagccagttccattattcaaggaatcgaagtaaaattttgttttaagagagggtggtgctaagaaataaagtccatctgtaggccagggttaaaagaaaagaaaataaagtgcgaataatactgtacggctgccttggtgtatagtggtgagcatagctgcctccaaataacaccgtacaacaaagtatttacctttttaaaaatacatatacgttttgcactgaggctctcggcttcaggaggctgataaaacttcaagttcctttgctacagaccaccagggatacacctgtccacccacaaagaagtgaggtttactagctgcggcaagggagacacggcagaccagcgcctgccttctcggcacagggaaaggcatcattccgggaagtttaggtgaagtttaacacgaagccgcctctgacagattcggcgcagggctgtgtgtcatgcagttaacatcacacggggctgagacgctgactcggggacacaagctcaagccaaatgtgcaatgctgggtcggaagccccttatcccgggatgcgctccagggaatcggggcggcctcccagcttagcgtctgcaggctacgcggtttcaagcagcaacgtctctcccagcctagctgtgcagaggacgacttttcaacagaggccgagagctggccgcctccgctcccccggctcccggctcctgccgcggtcccacccagctcccgcttcccccggttccctggtgccctcggctgccctcagctctcccctagcccgcggaacgctaggcccgggcctgcaggcgacacgcgcgggcacgcacggagcacggcccggccgccagaccacggccgcctagcgacccggaaacactcgcctccagtgaattaaggcagtgacacctgactatcctccacatgcccccagaactgtgacgaggccccacgcagaagaccgccccactctcgtcgcactagggaccccgaaatccgaccgcccatgggaagccactcgccagagtcttacctgaggtgcgttcaagggggactgcgcatgcgcaacggttggcgacgctccaccccttccgttgtcggctccgcccccacattcgtaattactattaattgtactctgaccgcgacccgaac

SEQ ID NO: 23240 - DNA, 2300 bp, Homo sapien
cgcggtcagagtacaattaatagtaattacgaatgtgggggcggagccgacaacggaaggggtggagcgtcgccaaccgttgcgcatgcgcagtcccccttgaacgcacctcaggtaagactctggcgagtggcttcccatgggcggtcggatttcggggtccctagtgcgacgagagtggggcggtcttctgcgtggggcctcgtcacagttctgggggcatgtggaggatagtcaggtgtcactgccttaattcactggaggcgagtgtttccgggtcgctaggcggccgtggtctggcggccgggccgtgctccgtgcgtgcccgcgcgtgtcgcctgcaggcccgggcctagcgttccgcgggctaggggagagctgagggcagccgagggcaccagggaaccgggggaagcgggagctgggtgggaccgcggcaggagccgggagccgggggagcggaggcggccagctctcggcctctgttgaaaagtcgtcctctgcacagctaggctgggagagacgttgctgcttgaaaccgcgtagcctgcagacgctaagctgggaggccgccccgattccctggagcgcatcccgggataaggggcttccgacccagcattgcacatttggcttgagcttgtgtccccgagtcagcgtctcagccccgtgtgatgttaactgcatgacacacagccctgcgccgaatctgtcagaggcggcttcgtgttaaacttcacctaaacttcccggaatgatgcctttccctgtgccgagaaggcaggcgctggtctgccgtgtctcccttgccgcagctagtaaacctcacttctttgtgggtggacaggtgtatccctggtggtctgtagcaaaggaacttgaagttttatcagcctcctgaagccgagagcctcagtgcaaaacgtatatgtatttttaaaaaggtaaatactttgttgtacggtgttatttggaggcagctatgctcaccactatacaccaaggcagccgtacagtattattcgcactttattttcttttcttttaaccctggcctacagatggactttatttcttagcaccaccctctcttaaaacaaaattttacttcgattccttgaataatggaactggctgcaggcggtctttgttcattccttgaacattaaaaataaccccaagaggccgggcgtggcggcacacgcctgtaataccagcactttgggaggccgaggcgggaggatcacttgaggtcggaagttagcctggccaacatggtgaaacctcatctctactaaacatacaaaaaattagccagacgtggtggcacacgcctataatcccagctactcgggaggctgaggcaggagaatcacttgaacccgggagacggaggttgcagtgagccaggatcgcaccactgcactcctgcctgggagacagcaagacccagtctcaaaaaaataaaaataggccaggcgcggtggcccacgcctgtaatcctagcactttgggaggccgaggcctgtggattgcctgagctcaggagttggggaccaccctgggcaacagggtgaaatccgtctctactaaaatacaaaaaatttgctgggcctggtggcgggagtcccagctcccagctactggggaggctgaggcaagagaattgcttgaatccggcaggcggaggttacagtgagccaagatcgcgccactgcactccagcctgggcgacagagcgagaccgtgtctccaaaaataaaataaaaaaaaaataaccccaagagaggcatctgtactgagcatgacttactttctgtcagtcatgtacagcattgtagtgaatggagcaaaacaactgtcccttcccaccactcaactgcctcttagttatatatgaattactttgtaaatttctttgcttcatttcttttaaataagaataataaagttttaatcttttggtccccagggtgatcacattattaaaatgagggaatttggggggtggtggggagggccacctggtaagatatcagcagaataatcctacaaaaggaaggttatttgattacacccaccctcaggcattgaaaaggggtcggaagtgaatggagtaaacacctgacagcagcgagctgggattgagaacaaaagagcacacacaggacaatagaaaaatctgaaaaacaagtggttctcctcttctggactttgaggttataaggaggctgactaaaaacttgggtttacattaatgtcttcagtaagtcttatattctattttcttagcttatctt

SEQ ID NO: 23241 - DNA, 2300 bp, Homo sapien
cggcacacgcctgtaataccagcactttgggaggccgaggcgggaggatcacttgaggtcggaagttagcctggccaacatggtgaaacctcatctctactaaacatacaaaaaattagccagacgtggtggcacacgcctataatcccagctactcgggaggctgaggcaggagaatcacttgaacccgggagacggaggttgcagtgagccaggatcgcaccactgcactcctgcctgggagacagcaagacccagtctcaaaaaaataaaaataggccaggcgcggtggcccacgcctgtaatcctagcactttgggaggccgaggcctgtggattgcctgagctcaggagttggggaccaccctgggcaacagggtgaaatccgtctctactaaaatacaaaaaatttgctgggcctggtggcgggagtcccagctcccagctactggggaggctgaggcaagagaattgcttgaatccggcaggcggaggttacagtgagccaagatcgcgccactgcactccagcctgggcgacagagcgagaccgtgtctccaaaaataaaataaaaaaaaaataaccccaagagaggcatctgtactgagcatgacttactttctgtcagtcatgtacagcattgtagtgaatggagcaaaacaactgtcccttcccaccactcaactgcctcttagttatatatgaattactttgtaaatttctttgcttcatttcttttaaataagaataataaagttttaatcttttggtccccagggtgatcacattattaaaatgagggaatttggggggtggtggggagggccacctggtaagatatcagcagaataatcctacaaaaggaaggttatttgattacacccaccctcaggcattgaaaaggggtcggaagtgaatggagtaaacacctgacagcagcgagctgggattgagaacaaaagagcacacacaggacaatagaaaaatctgaaaaacaagtggttctcctcttctggactttgaggttataaggaggctgactaaaaacttgggtttacattaatgtcttcagtaagtcttatattctattttcttagcttatctttaatttgaaaaagaataatgacacaaacgctttttcctgattagcttttaaaggaagacaatcaagatctaaccggtctgtagttttgccacttaactggttcatcacccaatcagtttccatcccctgcccccatttgtataaaaattactgcgtgtctgcgaaagggcagattactggctcatgcctgtaatcccagcactttgggaggctgaggtgggcggattgcttgagctcacgggttcgagaccaatctgggcaacatggtgagaccctgtgtctactaaaaatacaaaaaatacaaaaaaatagccaggcatgccagtggtcccagctgctcgggaggctgaggtgggaggattgtttgagcccagtgagctgagattgtgccactgcactccaaatgcctgaactatggcacagtttagtatatgttgtattaatagtttagtatatgttgtattattagtatgtatcagtatataggatatctatactatctataatatatagtatatgtaatagtgtatgttgtattaataaatgaagaactccagccctttagaaagtgtagaaccacttgagaaagatcttacttttgtacggcactttacaaagagctgtttatatattgtatccatttagattatttcttaactcccagtgcagctaaaaaattatcttccccattctgttttcctacacaattaaataattttagttccgtaaattgttctttttacaacgctttcttgcattttctctctttcctgtgctttatccaattttgtctttggttcatcatgcccctcaggcatggagtttgaaaactaggtagataggatgtctaaaccaaaaaagtataccatagtattggtcttactcccatacagagaagccattcaaactgtgggaatgaatttgagttattagagaaatgataatagtagtttaagtatgttcattcaggtttacacatatctgttgttaaatttaggatggcccgtactttggaaccactagcaaagaagatctttaaaggagttttggtagccgaacttgtaggcgtttttggagcatattttttgtttagcaagatgcacacaagccaaggtaatcataattcagaagttaatgctttctaaaggggtatagttttgctaatccattttatgtgttaaatggcaatggcatg

SEQ ID NO: 23242 - DNA, 2300 bp, Homo sapien
atctggaagataacgtgttataatttaaatatgtatcagttaaatcatagttattacaggactaagaaattgacagcagtatttgaaagagctgataaaattttgtaggcgtgaggctctgaaagactactaccaatatgtaaatgaaactttttgtcaggcctctgagcccaagctaagccatcatatcccctgtgacctgcacgcacacatccagatggtcggttcctgccttaactgatgacattccaccacaaaagaagtgaaaatggcctgttcctgccttaactgatgacattatcttgtgaaattccttctcctggctcatcctggctcaaaagctcccctactgagcaccttgtgacccccactcctgccaggcagagaacaaccccctttgactgcaattttccttttttctacccaaatcctataaaatggccccacccctatctcccttcactgactctcttttcggactcagcccgcctgcacccaggtgaaataagcagccttgttgctcatgcaaagcctgtttggtggtctcttcatacagacgcgcatgaaactttttaaaacattattattatttaactttgcagatctatttttagtcatcagtatttagcagtaagcagaagccagagaggcactggaggcaaagtatgtacagtgctttctacatttttatcaaaaatcttaagactgtcacctgatacagcacttttttcttttattagcaccttgtgttacactgtgaagcagaatcttgtaagataatacttttaaaaatgttaaaaaacaattagcagaaagaagagttcgtatcataataaaggagcatggattattgcaagggtcaaatggcaaataatggttgagaaaagaaaaagataacaggtgtctgaaaaatgcaaggcttttataattgaatggtttaaaaatgaatgagcagagattagcatgtgaatctctggactaggtaaggaagatctgcattcaaatgtgagtgggcaccatccaatctgctggggccctggagagaacaaaacaaagaggcaaacatgttgatctgctgtgctgaggaggaaaatggcggataaggggacaggactaacgtgcagctcccacatggatggacagaacagcgtgtggcaacgtgtttagtctccttaaaaggtatccaacaaaactaagcttcctaaatgaaggagagatatctatgctgagaattcaccactaccaagccagcactataagaaatgctgaaaggagttctaaatctttgttttttgtttctttttttgagatggaatcttgctctgtcgcccaggcgggaaggcagtggtgtgatcttggctcactgcgacctctgcctaatgggttcaagtgatttttgtacctcagcctcctcagtagctgggattataggggcttaccaacatgcccagctaatttttgtattttttgtagagatagggttttgccatgttggccaggctggtcttgaactcctgacttcaggtgatgcccgcctgggcctcccgaagtgctgggattacaggtgtgagccactacactcagcctaggaattctaaatcttgaaacaaaaccttgaagtacaccaaaatagagccttcttaaaacctaaatcttacagggcctatacaataacacaatgaaaaaacaacaaaatcaaagtattcaagcaacaactagcatgatgaatagaatagtacctcacatctcaaatactacgttggatgtaaatggcctaaatgctcctcttaaaagatacatttggaccaccaaccaagaatctgctgtgttcaggagactcacgtaacacataaggactcacataaacttaaggtaaaggggtgggaaaagatattccatgcaaatggaaaccaaaagcaagcaggactagctattcttatatcagacaaaacagactttaaagcaacaacagttaaaaaagacaaagagggacattacatactagtaaaatgattagtccaacaagaaatgtcataatccaaaatatatatgcacctaccaccagagcttccaaatttataaaaccattactactagacctaagaaattagacagatggcaacacaataatagtgggtgacttcaatactccactgacagccctagacgggtcatcaagacagaaagtcaacaaagaaacaatggacttaaactataccttagaacaaatggacttaacagatacctacggaacattctacccaaaaactgcagaatatacattattttcaccagcacac

SEQ ID NO: 23243 - DNA, 2300 bp, Homo sapien
gaaaaggatgatgatggcaccaggaaaaaccaacagcaacagacacaggaataggcatttttgagtgtgtggttttcttgtcttttccaagtgtttttctgttttctatatcaacagggcacagccctaacagtatttacagaaccccaccagaaaagctaatctaaaaccagatagtgaaaactgacccatgaaagcagaacattagaagatttgggtttttgtccttgtataactacctactagcagggggaccagaggccgcctcttcatgattttagtgaagaccatcgatgaacagcagaaaattaaattctaaggacttcagagaatctctagtccaatgtactagctgtgtaacattcctctcatacacgctattttcactgcccagagtgcttctctccaactctctgcatgtccacagtatccaaaattggttcttctattagtctctcagtcccatgtttgtgttcttcatagtttcacaaacttgattttcctgcctttccctcttctctaaaggtccaatgaaatagggattatgcctgttattcactgttgtaaccccagtgcctggcagttaatacctttacatgacagttttccaaatacttgaacctatttagctattatgtgcttgtctctccctaatgtctgtcttctgtaggctgctctactttgatctcatgatactttaaaaattctctatcctaggtgctgaatcctacacatgtccccaaccggtctagacctgcagatattaggacacccagaattaacacaatcctccagattagctctattaacacctggaatcattacttcctttgttttaagcatttccattaattttttcctactaacactagaaatgaaaaatacttaagcttgtgaagcactttcctattgctctgaatactctgggaaatatcacccttttggtaatattctgggatattctggattattcaattttctctctttacatttaaattttccctctttacatttaaattttccaacatttccatccattttgcaatttattattaggcataaattacatctcacatcaacagaaacatctgagaagaatttagagacatgtctctatcatttcatgaaatattttcctaatgttttgataaatatttttgtaaaccaaatcatgtcatttcttttatccctcaattaactaggggttttcttaatgtgaaggattcctaataaaaccaagagcaaacaaacactttaagaaggcctaaaggcctgttaagaaactccatctgtgagcgcttttggcaaatagtaatttcaaaaacttaaaaatccacccttcctcagagatgttagactatgatgttaaatagagacagaaaaatgttttctaatagatttcaaacactttctaaaaatcaaaaattcctatgaccatcaaaagttcaaaataatgaaaccaccccccttcaaaacaaacaaacaaacaaacaaacaaacaaactaacaaaaacaaaactcaagatcccgaaacctctacattttcagccttggaactcttttcaaattaacagtgttaagttatctattacttcaaagagttgtggaaaggcttctgagtctttttagtggaccagagcaatcagtgctatgaaatgtcatgaaatctacagcaagtggacctggacttgccacctaacttggtctcttaatatctgtgtgaccttgcccaaattattgtatctcacagtgtggggaaaaggaagagagatcagattgttactgtgtctgtgtagaaagaagtagacataggagactccattttgttatgtactaagaaaaattcttctgccttgagattctgttaatctataaccttacccccaaccccgtgctctctgaaacatgtgctgtgtccactcagagttgaatggattaagggcggtgcaagatgtgctttgttaaacagatgcttgaaggcagcatgctccttaagagtcatcaccactccctaatctcaagtacccagggacacaaaaactgcggaaggccgcagggacctctgcctaggaaagccaggtattgtccaaggtttctccccatgtgatagtctgaaatatggcctcgtgggaagggaaagacctgaccgtcccccagcccgacacccgtaaagggtctgtgctgaggaggattagtaaaagaggaaggaatgcctcttgcagttgagacaagaggaaggcatctgtctcctgcctgtccctgggcaatggaatgtctcggtataaaacccgattgtatgc

SEQ ID NO: 23244 - DNA, 2300 bp, Homo sapien
atgacaggtgatgctggggaaggggtggcggaaacggcactttcatacatggttgatgtgagtgtaaactgacacaacctccatggaggacaatttgtcaactccaatcacaactatttaatacaaggcacacatctgttggcccagcagcttcatttctaaaaattaactaactgattgagacatggtctcgctctgttgtccaggcttgagtacagtggcatgaccatggctgaactgcagcctcaacctcccaggctgaagtgatcctccaacctcagcctgtagctggcactacacgcccagctatttaaaaaaaaaatttttttttgagatgaggtctccttatgttgcccaggctggtctcaaactcctggactcaaggtatcctcccacctctgactcccaaagtgctgggattatgggtgtgagccactgtgcctggctcatttctacaaatttatactacatatacacttacaaaagtgggggaaaaacacgattaaggttattaactgtagtattatttaaaatagtgaaagactggcaataatttaaatattcacaataaatggctggttagataaattaagacagacaaaatgatttatgcagccatagcaatgacacagaacgttatgcactgatatagaaggatttctaagacagaaaagaaagcaaaatgtagagataggtgtatatatatggtaccatttatgtaaaaaagatacacccgtatttcatacacataaatgagtatgtatatgcttgaaaaggtatatagtatccctgaaagatataaaatgcagttgtaaaaataattgcttcctatcagggcaatggttatggctgagataaaagtggaaacaatttgacttcactatgtatcttttaaagtttgcaccacgtgtttcatgtgtatatattacctattcaaaacttaaatatacacaagcacagagcaaactgtgaatctgcctatctctaactaactcctccaccttgaaagtccagtctccaaacaaaataatattaaaaacaaagttaatttctgttccttatctgcttaaaatcttccagtggttttgcatcaaactcagagcaaaagcctgccctctgacccctcggccctcctttcttactattctccccttaactcactctgcctctgctacactggcattttggctgctcatggaataggttaggcactcttctgcctgtctttgcatttgctgttccaactgactggaatggcagctcactccttcctgtcctttaggattctgctcaaacatttccgtgatgtgtttgtcgatcatctcatttaatactaacgcgctcccactccttatcgtccttccttgttttattttcttttatagcactaccccgcgtctgctgtactatgtgtttaaaagtttgtttactgtttctctcccttaattaggatgctccaaaaaagagggcttctggggcatacagtgacacgtgcatgtactctatgagaacagaaatgaaaattccaataccactggtgttcaaaacactcataccacaaggtcaggaccaagaaaagccactctccgacctgatggtgtgatggttataccacgtcaataaaatcagaagatcgcctacatcctaagaatagccagagaatacaacgttcaattcgaaacttttcttttgtaaacagcagtggaaaccggcgtgggaagcgcaccgaacacatgcttcagaggctgggatctcggtcctggacgcccgcgctctacgcagcgcggaagcggcggggcagtcagcctagccaccttcggaactctccacgcctgatcccgttccccggagcccgcggccgttaccttggtgcctccgagccgtaacacttcctccagggagaacccattctcggcttcactagtattatcctcatcctcctcgtccggatcttctactgcctcctcggggcgccaaggccgcttggcatggaactccaaaggctccttgactgcggccatggcgggcaaagcatacgcgcgtgaaactcagcctatttccgctctgccagtggcgtaattcctgtcggggcgtgtcttctcccggaaatggtctaagccccagctcctggcggagcgagctagcctgcgaatttcagcatgagtgtactgctgaggtcaggtttggggccgttgtgtgccgtggcgcgcgcaggtaagcgtcagtcccctcgaagcccggttgccgtggaagccgcgtggggcgccttcctcagctcttcagttgagggtaccggggga

SEQ ID NO: 23245 - DNA, 2300 bp, Homo sapien
tgctgatgacgagcaaatgtatatatgcctgcccagtctttcttctgaacaccaggctcactttttttttttttttttttgagacagagtctcgctctgttgcccaggctggagtgcaatggcgaaatctaggctcactgcaacctctgcgtcccgggttcaagcgattctcctgcctcctgactagctgggattacaggcacaagccaccacgcccggctaatttttgtatttttaatagagacggggtttcaccaagttggtcaggctggtctcaaactcctgacctcgtgatccacccgccttggcctcccaaagtgctgggattacaggcgtgagccgccacgtccggccctgaacgccagactcttacagcgaattgcctactttctatctccacctgcatgtcactgctaacaaaatatgtataaaatgcagctcctggtgtaggccctctccctagtactcctccaaacctggtcctgtctgtcttaatctcaataaaaggtaccatcatcacccaactgctcaagctaaaagtacgaatcagccttgattcctccgttccatcactcaatccatcggcaaatcctgtcagtccctttctaaatcaccctcttctatttctagtaccaccacactagtctaagccacctatcttgcagccctgcctaaccggcatcgaaagaaagataccggccttgggtaaacctcgacactagagtcacactaccatatccaacaacaatggccaatctaaccccagaattccacagaggtcatatttcaacccagcaaaagatgaaatattctaaaataaaggactataggctttcaccaaatggctctgtagaacagacaaggaaacgtgggtcagaaagctgtgactgtgcctaatcctagaacagtgaagacgacccagactgcattctcaactgcacatgtgagaaaacccagcacatgtctccaatgccagctgaagccattccaacacagacgactttccaggcagtaattcctatttccagctgcctgttggagatttctacctaagagtcccacacacttcaaattcatataccagcctgaactctccatccttcctcccgtattccttctcccaaagcaatgaatccacaccacccaccatcagccaagtaggaaagtcatccttcccgcatcataaatccaatcagctacattctgtctcctaaacacccttggaccgtgtcctctcctctttactggcactgcctctgacgtgagccagccctgaccaactgacaaattatctgtccccaggtcctcagaaatggctcttcccctggcaggcacccccactgcctgggctgagaaccttcgggcttctccctcctggcttgcacctcgcaaatcggctagagagggcctagtcctcgggctacccgacccataccttggctggattagtcaacacctccttcatgtactcggccacagtgatgggaccagtagactttattttgtacataagatgccgcagcatcggcgtcaccgggttttctgcaggctcattcccggagctgaagtatttccctctccaaataaaaggaatggctgcgaaaaacacaaattaaacagaccccatgataaatctgaccattcacgagcgcaagccgcctgagcgttttcaaaacagcttcgtgaacccttaacctcgccccaccgcagaccgcgggctactgtgcttagcacgcccacggggcgcagagacagcacccacttgcccacgactacgcagccctattgcgtttgtaccggacccgtttccagcccagggtaccttcaaggtggaagtgagcccccgagcccttgatcccccggtaccctcaactgaagagctgaggaaggcgccccacgcggcttccacggcaaccgggcttcgaggggactgacgcttacctgcgcgcgccacggcacacaacggccccaaacctgacctcagcagtacactcatgctgaaattcgcaggctagctcgctccgccaggagctggggcttagaccatttccgggagaagacacgccccgacaggaattacgccactggcagagcggaaataggctgagtttcacgcgcgtatgctttgcccgccatggccgcagtcaaggagcctttggagttccatgccaagcggccttggcgccccgaggaggcagtagaagatccggacgaggaggatgaggataatactagtgaagccgagaatgggttctccctggaggaagtgttacggctcggaggcaccaaggtaacggccg

SEQ ID NO: 23246 - DNA, 2300 bp, Homo sapien
gtgtatatgtgtaccaggagacacatacaagaagatagcagcattgtataaaatagcggaaaataacagcacaaatgcccatcggggggtaaatgaatcagttaattgtggtatagtcatacagtggaatacgaagtactgcaagaatgcgtgaaatcacagtggaatataacagtgttcaacatgaaacaagatgtgtgaaagtagcagtttgcaagagttcgtatcatatgattgtatttatataaaatccaaaaaatagtcaacattaaacaatatgtatttggtgataaaaatatatttagtaacatttataaagaaaagtcagggtgttattaactcaagattcagaatggtggtgacttccaagggtagagggagtccacaggggctttggagataaggtcatgtcccatttatggtagatattctctcttgtatcattgtttctatcagtctacgtactattttatgaaaacattaaaaaggaggacagttgtttatagtacctgataagtaatagtatttattaaacttttgtagtttttagtattttggaactcattagtgtttttgagtttattttatatgtacttgacaattcaatgtaaaaaacaaacatggctgggcgcagtggcccatgcctgtaatcgcagcactttgggagttcgaggctcccaaagttcaagatcagcttgggcaatacggtgaaactccatctctacaaaaaatacaaaaattacccagtcgtggtagcatgcgtctgtggtcgaagctagttgaggggctgagatgggaggattgcttgagcccaggaggttgaggctgcagtgagctgtgattatgcctctgagtaacaaagtgagaccctgtctcaaaaaaaaaaccaaaaaacaccaacacatactcaatataaatttaaatttcttgatgctttatggtttttgctttaaattagaaattaaaggatttaaaaaatatataaaatatataaacatatgacaaataagaatcttgattatttgggtgaagaaagaaaacaaaatcacgaatttaaatttccagggctctattttatgtttttcagcaaggtcatttgaatataaaatatttaataaggacctcaaatcatattctcttgttcaagtactttaaaagttgattccagagcccttaaaatgtatgaaggatgcttttccagactgagtcataagaagtcctaaaagccaaagaatttaaagggttgtaaagcaaatagccagagaagtgtcagacctgttttatttttgatgttaccttctgaaggaatttctcctgggaagtttttccatttgtatttcgatctcaaaactaaatttggaaaaatcatcttgttcatattatcagtctggatgtgcatattcatatctcaaaagtattaattggaggcagatcaccagtagaaattaaattcaaatgaaaaataatgttgatacactttatgcttttgctattgattttttagccttaaaagattggtaaaatattagtattttcctttttcccttgcatgtttacaacagtgaaaaaatgtgtagctaaatatagattgaaaatgtggcagacccccgagttaagcagtcaggttttcagtaccattcagatttggttctttgaggttagagttctcatcatctcaaagatgagattacttcctagacctagagatgttatcaaatcaaggctgtgtacattttatttccttggtctttttttagactccataatctgaatcattgtttttatcagatgccaaatcttttattttcatttgttaatcataatttatcattaggaaaccaaattgtgcattgttcatttcttatttagattatgcttaataactagtaggttaggattcttatagactgctggagagtggcttgggtaaggaacacatctctctgaaatattacctctattgtgacatgactaaatcattgatgtaaatgattaggaaacttaaaacctacttaacacattgtatttttttttcttcttttggtatttaggtgttcactcaacttggatctgtgctgaaaaattgtgacatttcagtacatctggtagaggtaagccaaaaattaagtgagattcaagcattgacactgactaaagagaaggtcccgttagagcgaaatgctggatccccagtgtatatgaaaggtgtcactaagtctgggattccaatttcctggtaccgagatctgcacgatgttccaaaaggtaattacctttatgtggattaatgaaagaatttt

SEQ ID NO: 23247 - DNA, 2300 bp, Homo sapien
ccatcccaaagataccaccttccaaagacccaccactacctaatacccttgccttgggagttaagatttttaaggggaacaaacattcataccatagcactgattaacaccttgacagagcatgattggttttctctttcggttaatctgaattagtatagtttgtctatgactaaagtcttttataaatttatacttcatgtatttgtgttttcgtgtttttctaccttataacaaatggatacgaaacaccatttatatttatcttaatgtgcatttgattactagtgagatgttcaaactcactagtaatcaaagaaatgcaccattttacattagcagtttatgaggattctgatttctctacatccctaccaccacttgttattgtatatctttttgattacaaccatcctaggtagtgcgaagtggtatctcattgtagttttcatttgcagttccctggtggctaataatattgagcatcttttcatgtgttcattcgccatttttatatattgtttgaaaaaagcacctattcagatcctttgcccatttaggttacttatctgtttatttttcattgagctgtaagaatttttaaataccctggatactagtcccttatctggcatatgatttgcttatattttctcccattctatgggctttcatttcacttcgtaaggtgttgtttgtagcacagaagttttgtattttgatgaaatccaatttatttatttatttatgttgtcacttatctttttggtgtattaagaaagctttgcctaaccaaggtcacaaaaatctactctcatgctttctcctatgagttttatagttttagctcttagatttttatgtgatccactttgagttaatttttatatatgatttatatgttcattcttttgcatgtagatatacagttatcctagcaccatttacttaaaagactattttttgcccgttgaattttcttgacactcttgtcaaaaatcagttgaccataatggtggtggcttatccgcatttatagtatcttttgtcatgtggaaatttaaaattctgatgtaatcaaattaattaactttgtgccttatgatttgtgtattttttatcttctttaagaaatactttatcttaggccaggcgtggtggctcacgcctgtaatcccagcactttgggaggccgaagtgggtggatcccctgaggtcaggagttcgagaccagcctggccaacatggcgaaaccccatctctactaaagatacaaaaattagctgggcatggtggtgggcgcctgtaatcccagctactgaggaggctgaggctagagaatcgcttgaacccaggaggtagaggttgcagtgagccgagatcacactccagcctgggtgacaagagtgaaactctatctcaaaaaaaaaaaaaaagagaaatactttacttaactcataaagatattttcttacattttaagactcttaagacttttttcacatttaatggacttcctctattaatataaaactctgaaattcatttaaaattttcccagaaccttccagtctgggaacagatacagatataccaatggatattgacaataatgacataaatagtgatagtagtcggggtttggatgacacagaagagccatcacccccagaagataagatgttcttcttggatccatctgatctcgatgtggaaagagatgaagaagccgttaaaacaatcaggtaatatatatacatattacaagctacttccagatgcaaggtcagttcaggatctcattaagaaaaagccacgtctctttaagtgggaccttaaaagtaatttaaaatctaaataaattgtggctaattcttttacatgcaatgtagtatttctgaaataaattatatcacccttgccatccactcaagatggggaggtatgagaatccttgttttttttttttcgttttttgttttttgttcttaaagaaaaatgctttaagtgtggtctagatgtaaaacctagttgtggaacagccactgcaaggtgtcagtattgaactttcagttaaagcaacctgtttttcacacaggcagctttaactggtagtagaaatggcaataaagaatatactcatgaagatgttgcacaaggataatggtgatgaagtttagggcagttttcatattgccacagttaatccgactattagcattttgtaaaaatactattagactgtaaaaccattctaaatatgccactatgttcatagaaattcaatttttgtagcctaa

SEQ ID NO: 23248 - DNA, 2300 bp, Homo sapien
acttgcaggttgaggtgagaggaagttccttgggtctactgtcccgacgttcactaaggggaaaggagtttctttctcatatccactaggactgtggagaacaaacagacaagtatatcctgggatcctaaattaggactcagtatctttttccacagaaacgtttccataaattgaagttaagttccatagtagtttttactttagtgttctatttcccactgtgtaagttaagcagtttttaattggttaaagtaacctaatgtctgtttgtaatcttgtcattatgagaaaatgctgttggagttccaaataactaacctatgacctacttctggagctcaaatgatgagaagtaaatggacttgctaaactagagtttgaaatcacaatattaaataatttacttttatggtccagtgcaactttcagagaaaaaatgattctgtgtactttgacataagtgaatgtgtgagcattcttaatctcatcgcagtacaaatacaacgtgtattgtaatacttttcttttttaaagctttagccacagtagaagacttccagattcgtccacatactctctatgtacattcttacaaagctcctactttctgtgattactgtggtgagatgctctggggattggtacgtcaaggactgaaatgtgaaggtgtgtgttctaaaatttttgtggtcatttgaaataagattccacatttgcattttttattatcagtgaaaaagcaagatgacgagctgttgactagggtggtaacgaggatttagaattggagagatcaggactctcattttatctctgccacctacttcatattcttgggcaaattactaaacctcttaagattaatttctcgtaaaatacattctgccccactggtttcataaagagtaaacggttaaatcaggtaatagggttaaatatttagtacaaaataatggctccataaatattcatgttgttttttgtttttaaaagttttcttggccaggcacggtggctcacacctgtaatcctagcactttgggatgccgaggctggtggatcacctgaggtcaggagtttgagaccagcctggccaacatggcgaaaccctgtctctactaaagatacaaaaacttagccgggcgtggtggcggatgcctgtaatcccagctactcgggaggctggggcaggagaatcgcttgaacctgcctgggtgacggaggttgcagggagccgagattgcaccattgcactccagcctgggtgaaagagcgaaactctgtctcaaaaaaaaaaagttgtctcttacatacaactaaattgtcaaatttgttctgaattagaattgctaggagtaggacacaggtgcacatttctgatgaagaaacagtcttctaaggtggagggtcaatcaactttttctgtaaagggacagagagtaaatgttttagactttgttggccatatggtctctgtcatgatttaactctgctattacagtatgaaaccaatcatagacaatatgtaaacgaatagatatggttgtgttccaataaaactttatttagggacattgaaatttgagtttcataaaattttcatgtcacaggaggaatttggtacagaggccatagtttgctaactagtgctttaaggcagtggttctcaaactgtattgtgcatcgtaaaacacactttgctgggcctcatccccgtagtttctaattcagtagatctggggtggagccttgtaatttacatttctaacaaatttccaggtggttgccttagggaccacacttcaagaaccactgccctagctgacttatcctttttacacatttccttttcttcttgaattcattagcttccacttagcctgctgtctgggttcttaattaggataggtatggctaacagaaaatatgttaaataaaagaagcagtggtttttatgtatcacacttaaatagtaaatttttttttaaatcttatattttaccttgtaaaatatgtttaggctgtggattaaattaccataaacgatgtgccttcaagattccaaataactgtagtggagtaagaaagagacgtctgtcaaatgtatctttaccaggacccggcctctcagttccaagacccctacagcctgaatatgtagcccttcccagtgaagaggtacgtattctaaggtaatagacattttagtagtagttattctctgtgtttctacagggtgtatgacatcactctagaacataatttatatgctaaagaatggtaatgttcctacactt

SEQ ID NO: 23249 - DNA, 2300 bp, Homo sapien
ttgtggtcttgggcaagtactttaatctctaaacctttgttttctcaaccatataatgagttgctgtgaggattaatgaggtaatatgtataaagtgcttagaacagtatctgacagatagtaagagcttaataaatgtaagctattgttatttttttccagctaagaagcctaataatcattattttccaagatgtaaatgtggttgacttctagtgatcattatattcttctctagttattcacaaaccatttgcttcattattttttatgtttgtaatttctgaaatttgctttcctgcttctccagccgccagaacttgaaaccgctctacaaatctccaggccatgattatatctgtctttttgagctctttctccaagattgcaggagtcagctttgtgattacatttgtgaattgctttagtagtatggaatggactgcatctggacccagagactcaaactcatgtaaagttgttatagtcttagtcatttgtctcaggtttcagttctcaatgcctttctgcagttttagtttaaaactgtggagaagataagcaaaatacaagttgagcagtctgtctttctgtgcgatttctcaaccttagcaacatcctctgagcagtgattcttagttccttgttctcttcgagaaatagtgtgttcttgtggagacagcactggtaagaaagtacaaaacctggcttctaattcccgctccacctattaataaccatgtgctgctgggcaagttgcgttatcgccttgtgcttcaattttcttgtctacaaaaatgatttctaccctgtcaactttcaaagagttatgaggtaaagtatgtgaaacatttgtaaactatcaagtgttgtacattatataagatggaataatgatcatttacttgaaagtagctatgaaagctttcatcttcagttttttttaaagtctcagttttttcctgagctttcccattcctaatactatagttgtgtgcttttgcccttctgtcacgttcttcctaatttaacccattaactactctgcagagagttactctgcagccacattggatgatttactctttctcttcattggaattatttatgggtatatagatggaacttagaaagaaccatcaattatgagctgtttcacgcctaagccatgtggaggggttgggtcatacctttttttttttttaactttttgacctgtgctttcctagaaattatgatacatatttaactatacctactgttctctttcttactgttagaaatgctttgtggtctacagccacaccaccccaaatgtgcctgatcttgtctgatcttggaagctaagcattgttgggcctagttaggacctggataggagaaatcccttatggtgagatccctttctcttatgttcctgtgataagtatgtcagctttcacacttattgatcatttaactgttcagtatatcccctcctgcttccttagccttctgaaaggaatgtttcaacaaagcaagtcaagagtcatgtttcggcagaattagtattgtaatattaaaaaaagaatactcttgtattaggaaagtattgtacatcttttgtgtggtggggtggcatgtattgtatgtctatgaaaatgtcagttttactgttttttgtcccttctgtttttgatataactcagtcatgtaattgtaacatagaagtgtttggtcttcattgattaaaaatgaggtaaattttaaaaaatgtttaatgtttaagttttaggtatcagtgtagagtgccaaggatatttttcgagcctctccctgaaattatacttatagtaaaaaaagtctttgctaactagccaaaaattgctacccattaggatttattagtgaattataagcatatgaccaaaaattgtcatttaaaaaagttatgttcttatttttaaattaatgtcgaatgaatataaagtattaaaaacctttaaaaaatttccttccaggctaactatatgtcagaaagcatcagcttttctcgatggacccattcatctaatgaaatatgcctgtactattttaaaaagctttgtatttcgtcatagaaaagttcatccccccagaatgaaaatgaggacatttgagaaggtgatttaaggtgtggacatttgagaaggtgtcctatcaaattagtaaaccaaaggaaaagtactgaatagattaatccaaaacacttactgttttttaaacgaagaggatttcaccttgacagaaaaacaacttttattcaatatgtatttcctgaa

SEQ ID NO: 23250 - DNA, 2300 bp, Homo sapien
aaaggaaaagggtatttagtgtgtaagacactagaaaagatatgcataaggaatgaagtgatacatacatagtggtgttggatttgtagattcttggaaagttggcagaaaagcttacatgtaaaaaaaaaaccaatgtattgaaatcagtctcactagctatgtggaatgttttagatttgtaccagatacaatacgtttgtggtggatacaggagatgcgctgcccagatctgcccccagggaaggaccctgctccagctgttggaggccggctggcccacagcctctagcagtcaagctcttttggctggaaagccgcttgcaggaaatcactccatggaggtgcagagataaggccccagacattttggcccagtatgggacaactttgaccgtctttttcagcttcaggactcccatggagttgggtgaggttgttgggcccgctttgctgctaacttctccctctgttctctcctgttccccttcttcctcccacaggggtttgtcccaagggcactccctaatacacatcctgcatgttaaactcttgtctcagagtctgcttcctgtagataccaaactgtaagaacatcttattgacttaaatataaccaaaattggagaaacttaggaaacaaaatcatcattacgttatgtgctgacattttagcttatttctatatttcttgttttgaattgctcatacttagcatgatagtacctctcacattttgtttcatttaggtttgctatttccacgttctctttcttataggaaccatattgtgaaaagacataaaggtaatagggtaaaaaaaagcaaataggctctttattacccagccactcaggaaatgcactatttcaaggttgacccaggcagcaagagaggagctgtattggggaatgtgacagtggtttagttctgaaactggagccagtagaaagttctgaagggggtccgatgatcagaactgtctgtgggtttaataaaggtgtatttaattttatttaagcctggagatttaaattgtcactcaaaactctcagacatgaatagggttagcaaatctgtacaccaggaaaggagttatttacatcctgtcttctcctacagctccagaggagggcagaacagtgtatttccaggcaagccctctctttaaaaactcatagccaaggctgggaagacagagtgagtgggtgggccttctggcagcttccttaccttcaaatctttgctctctgtgaaatggttctgcttcagtatccttgttctgatttttctgggaactagatgttactgggagatgactcagagcaggccaagccctgatcctcactgtggaagcaaaagaggctggtgaaagtcactgtcctgacaacttggaccagaaacctacagacaaaactgaaatgttttcctgccctaggattatctggataacaatgacctttgatgttacaaagtaaatagaattgtgtttggcttttccttttggggccatgccttggagaagatgactccttcagagccgctgtgaatattgtagatctcattatttcagataattactttgaccatccttttcaatttgagagtatgatgtgaggcaaggcaactatttgtgagaaaaaagagaaaaggcaaagatccactgtcatacttttgcttgtgggttccagtccaggctttctatggggggtgggggggtgtctcagtctccccgtctgtaaaatgggattagtggattaaatccgggaaggttggacaagcacctaggacggtgcctggtgccgtgttcagcagacgtcgattccctgtccaccccttctttaggagctgtgggaaacacttcataactccccagggtctggtgaacccttcctcccttttctgttccctgttttggcattggagatcataaaaaggctcttccatgtctcttgcttccttcctttcatcttctccaagagaaggaagtggccgcctttgttagcttgggttcagaagcttgtgtctgtcacccagggccgcccagccccggggtttgcgaaggtccggggtaggagggctgcagcctgcgcgacgcggcgggaggctacccgggggcgatgggaaggcgggcgcagtcgacccaagggtggagaagagggaaggcgaaggacgcgcgttcccgggctcgtgaccgccagcggcccggggaacccgctcccagacagactcggagagatggcaggcggaagacaccggcgcgtcgtgggcaccctccacctgctgctgctggtggccgc

SEQ ID NO: 23251 - DNA, 2300 bp, Homo sapien
accaggcccttgaatgagcaggtcctggataactgtttagagtccagcagtgaagtctcatttaaaaacggcagagggagagaaagcctctaaaaggcaagggataatgtagaaaagtaaaaataggttttagaataaaaatgccgtttcagacaaactgccactctatatttgcaaaaactgtaaaagaagttatttatttggccatgtagaaataaagtgcttttaacagcagctaacaatagatcacgtgaaaaaaattacatacaagacatgtgtgtcgggaatgtctttatgtgttcaaaaggaattttgcatgtggtattttatatatatacacatattatttggacttataaaataccctatgtaatgaaaactatgcataaatatttataaaaatacctttttctaagtaggccaggaacatttaatatttttcaataaattaatatataaaatatatacattagtgccaaatggaacatatattttgaaatatgaaacccaagtaaaatgctcaggaatctggagtagaatccaggtatctgccaaaggaaactttggacgagttgtcttttgaagaagggaaacaatgctgggtctcttatcttcacggactgtttttgcttgtcaaacttctaacatcacttcagccgagtttcgtatttgacttccaacctcatggccatttgacctgccaactactatttttctttgaggcttttaacaccccacccaagtattttgctttccagattgtgtgcgtttccttttcacttcaccttaaagtcagcctgggtttacaacatcggcttaaggcgcaccctctaaggtttcagacagacccagggcaccgcggtgatgacctgaagctgatatctctcggcaaagccaaggtatccgggaggttctccgcgttgtgccaggatttccatccaacccgagagtctcagggcagaggccaggcccccagcgtccgactcccaggggtcccagccccctcccctggctgaccatgcgggctgggacctcccagccggaaaacaccgccctttcctgtcgcctactccttccccaggccgacgactcgcggaggaggaagagacggaggccgattaagaaaattagcattcattaacccggttcacgctccggccccggcggaggggaggggcgcgccgggcggcggcgctggcggtggccgggtgaccggcgggcgcaggtgccaccgcggcctgaattttactctctcgggccggcagctgcgccacttgcgcctcgtcgcgcgtctggggcagccgccaccggcttgccccagctttaggcaaatccttttgaaagaccctgagggagaagaaacgcctccctctgggtaggagaacctgtagcgtctgctgttcgtcgcgtgtccagttgctcagccgggagctccggcatcttcagggcgcttattccactctccgggttttggctgcagctctgaggggagcgagctagaaactgacagaacgcgaccctccccctccgcgcccaccggagcccgggctgagagggacctggggagctgcggcctggccggggcggcgcactcaggtggcctcgcttccctgcgggtcaccgcccgccactcgcacagctaggtcggcctgttgggatcgggagaggtgggcgcacgagttttagtgcgggagtccggggtgcgggcggagtcctattgtccccgtgcacccgggcggcagcacctccgggtccctctttaaaccgagcgtccggcgacctttctttgtgcttagggagtcgaaagcggcatcttctccgagagaagtcgcctactggggggtggcgctggggaggtaacaatgggcgcccattgtcctccgagggtccaacggtgacccccccccgcgcgcgcgcccggccaccggttggccccgggccagggcacaggtaccgcggctgggagggtcggccccgctgcccgcgccctccgccccgccccagtgagtccccgcgccgccggccccgccccgcgccgccccgccctccgcaggttcagtcctcgcgtccggccgccccgcgctcagtcgcgcgcaccttctctcgcggccgggggaccgcagcgcggggctagcccggagacccggccaccggcctggggcgccttcacgccgtctcggagcggataatgcggtgagcaggcaccacgccggcagactcggctggatctgcgcacagcggcagggattgcgtgcgcccgcgggaggcccggggcagcggctgggatcctcagcggcggc

SEQ ID NO: 23252 - DNA, 2300 bp, Homo sapien
atactacttggcttttctcccaagtagggactaatagaaaaacagcccactgttgggcctgacaggtggtctacagataccaggcttctaaggttaccaccaaatgtttttaaggctaaacctttccaaaattcacagcagaatctcaaaactcctaaaatcttcctgaagcaaagctttttcctctcttccggtagtagactcccataacatgttgaaacctaaatccatcaactctacaagctatcatagttagcacaggaaatgcactcatttggaagaataattcactatatgagggatcagttactcactgaagatgttcagtacaaagaaataacgtgaggcacagggcatggtggctcatgcctgtaatcccagcactttcggaggctgaggcagaaggatcacttgaggccaggagtttgagaccctgggggaaaaaaaaaaaaaaggaaaggaagggaaggggaggggagggaagcggaggggtggggaggggagggcaggggaggggtggggaggcgaggccaaaggagccaagataaatcaaaccaccaggcccttgaatgagcaggtcctggataactgtttagagtccagcagtgaagtctcatttaaaaacggcagagggagagaaagcctctaaaaggcaagggataatgtagaaaagtaaaaataggttttagaataaaaatgccgtttcagacaaactgccactctatatttgcaaaaactgtaaaagaagttatttatttggccatgtagaaataaagtgcttttaacagcagctaacaatagatcacgtgaaaaaaattacatacaagacatgtgtgtcgggaatgtctttatgtgttcaaaaggaattttgcatgtggtattttatatatatacacatattatttggacttataaaataccctatgtaatgaaaactatgcataaatatttataaaaatacctttttctaagtaggccaggaacatttaatatttttcaataaattaatatataaaatatatacattagtgccaaatggaacatatattttgaaatatgaaacccaagtaaaatgctcaggaatctggagtagaatccaggtatctgccaaaggaaactttggacgagttgtcttttgaagaagggaaacaatgctgggtctcttatcttcacggactgtttttgcttgtcaaacttctaacatcacttcagccgagtttcgtatttgacttccaacctcatggccatttgacctgccaactactatttttctttgaggcttttaacaccccacccaagtattttgctttccagattgtgtgcgtttccttttcacttcaccttaaagtcagcctgggtttacaacatcggcttaaggcgcaccctctaaggtttcagacagacccagggcaccgcggtgatgacctgaagctgatatctctcggcaaagccaaggtatccgggaggttctccgcgttgtgccaggatttccatccaacccgagagtctcagggcagaggccaggcccccagcgtccgactcccaggggtcccagccccctcccctggctgaccatgcgggctgggacctcccagccggaaaacaccgccctttcctgtcgcctactccttccccaggccgacgactcgcggaggaggaagagacggaggccgattaagaaaattagcattcattaacccggttcacgctccggccccggcggaggggaggggcgcgccgggcggcggcgctggcggtggccgggtgaccggcgggcgcaggtgccaccgcggcctgaattttactctctcgggccggcagctgcgccacttgcgcctcgtcgcgcgtctggggcagccgccaccggcttgccccagctttaggcaaatccttttgaaagaccctgagggagaagaaacgcctccctctgggtaggagaacctgtagcgtctgctgttcgtcgcgtgtccagttgctcagccgggagctccggcatcttcagggcgcttattccactctccgggttttggctgcagctctgaggggagcgagctagaaactgacagaacgcgaccctccccctccgcgcccaccggagcccgggctgagagggacctggggagctgcggcctggccggggcggcgcactcaggtggcctcgcttccctgcgggtcaccgcccgccactcgcacagctaggtcggcctgttgggatcgggagaggtgggcgcacgagttttagtgcgggagtccggggtgcgggcggagtcctattgtccccgtgcacccgggcggcagca

SEQ ID NO: 23253 - DNA, 2300 bp, Homo sapien
tggcttaggattgacttggcaatgtgcactcttttttggttccatatgaactttaaagtagttttttccaattctgtgaagaaagtcattggtagcttgacagggatggcactgaatctataaattaccttgggcagtattctgctatttattagacatgtaattggccaagtcacttaatcctctgagcctcagttttctaaagagtaaggcagtagtcataataataatgccaccactatcctccctatcaaatttcaagatttttcagtaaggcattgacatcaagacaaatgggggtgggagtgggtgtgaagttgcagggacaggcagggactggagtaacaacagaaattcagacaagcaggtgggacatagcaaccaagacaattgagcaatgtccagataaaatgcaggcaaacaccaggttagaaggcagaagtagcagaatggttcgttcatggtcagagctgggtgaacaaaattgagtgggtgccatctgaaatcccagtacttcatggagatctatgccaaagccaggctccattccctggggagagaacccagcaattagaattgcagggaaatatactaggtacccagaatgagaactcaagtgaagcccagttctataaaatgaggtggacataggacacttggaaacaagtgacaaactgtagagcatctaatgatggtttagagcatgtagtgaaggattctgatgatcattccgagaccacatgtcccagcagcaaaaccttggaccatgacattgaaggtcacacattactagggcaagatacaggttataggaatgtacattgattcagcagagggtggtttgatgaaaaatattttagagcagaattaaggttgacttatcagttagctcagttggctgggctctgtgtgagtggcggggtgctgactcccagagcaggtgactccatctcactgcctcatggccacaggcctcttcttttctcctgccagttaccctataaatgctggatgccagccatgggcatgacgtgaatctgtgctatagcaggtgctcagcaagtgtcagatgaatgcagggacagaggattgaataaatgaatgcagcagcttttactacaaagaaaagttatggaacaataagaatagaatcacatcctttgtaattaagcctgcagacatccttagtgctctgttctctgcactttggaagatagaattcagtcctctgaaagcattttaagagctgtgtaggaaaagacaaacaagcttagaagaattcagtgaaagatgagaagccaattgtcaacaacaaatttgaaattcctattcaaggccagtagaaaccagtaaacaaaaaaatgttttagtcagagagagttaatcacttcattaatactttaatacctatttgaaattgactgacttatcagtcctggcatatctcctttgcaatgcatttaaagaggagtgtaacataggatggaatccaaggtgtcacattctcagcttactggtgattatacaaggaatgtggactagaccagtaaagtctgtccttgagccctgcaggatccaaacctgtgtctgaaacccggtgaatccctgtgtcgggaaggcatgtggacctctgctgccccagcactcatccctagcaaagggcccttcgcatttcctaattaggttatattcagtgttcacagggctggtaatggatgagatactgaagtgtaatcacaaccgatattattcacgtcccaggaatgtgcagccgaggctgctctgctagctccaacggaaaacaatggcgtggttgacaagtagcctttttacatttcagattctgatccagatttagtccttctgtttggtcatgattgcagaatacatatctagagagaagaaataaacatgctgtaaattcaatttcttgggtgtttgaggctctctaagtcctatacagactggcatagcctgcctgttagaatgttcagaaatgaggctaactggggcagtctctgtgtctggtttgcgatgtctggttgattagagaggcccaagaaaccacagaaaaggtaattaatttaatcaacaggtgttatgccaggcattgtcctaaaacaaaagatgaaggtaagtgcctattctaaaattctttgtgatcaggtgaaaacgccagacaaagcatgctagcaactatcccaagtcagatgcaactcagtactataatggaggaataaacaaagtattaattattggccagagcagaggataattaactctgactaaggaaagggggt

SEQ ID NO: 23254 - DNA, 2300 bp, Homo sapien
atttccaagcagtaggaacctcctgtcctgttcagttgttggacaaactcttgttctgcccattccaccctagtttcctgaaatcctggctgtagggctcccatgactggagcctgtgagagcctcctttgtcaggagagttttcacagctaaagccatcaaggctggcagtgaaggacactgggcttcaagcccactacagtgatgacaggtattgccttggctgcccaagctgagtggtcgcccctctgcaggtctgtctgactccatcccagggaagaaggcggtggaaggtacccatgggctgcagttggctctgcctggccgtgggggaggatggcagaggactgacctcttgctgcctcaaaagggtggaagttgttttgccctttaaactgataaagaaacaagctggaacagtaaaactaatcctccgaagcaatccaagcatggaaaccagaaatgtctactcaaatcttttctccattttctttcttcataaattcggaacatttgtggcagaaagagaaatcagaaaaaaaatggatttagaaaagagagagaagtagtttagagggttgtatagggaggcaacatgataaagttggaagaaaaatggacttggagagagaacagtcaaatctgggcctgcctctgagtgcctgtgtggccctcggcaagtttcccttcaacttgaagacctgggtctctatgatccctttcagttgcaagattaagacctaagagttcttgcttatataaacagaattcttccaaggccataattatttccataatcaagaactatttattaactaagcaccagtgtgtgattttctcaagataagagcaagaagaaatggtccttacaggctagatagctgtgacatggaccaacaactaagcatatctaaaaattcgactaattcataatatgaattcaaaatatgaattgaataagcaaaaatatatataccatgggagttgaatgttttgacggggaaaatccagacgctgactttaggatggtactttctgttttgattgatcctgagccacactggactctctggcatgggcataacccgagcatctgcatggcagagttctggctcattgccatttgcaacagacacgaagggtggcatcaaacaaaaggaaacttctccgttgaccatcataaatgatgaagaccaaggcttcaactcacttactggagtggatttccttttacggatggccttggtcaccctggggagactaagaatgtttaagtaacttaacaaacactcagtaaggaatgggatcaggattcttctccagggctaacagttttaactgccattctacatttcctgcctgagacagctgccaacctgggcttctgtgactgccactccatgcttctcaagccagggtgcacgttagactcatctggagagcttggtaaagccatccatgtccaggctcacccacagagtcctcagttttctcagtttgaggaggggcctgggtaccaatactttttaaaagctccctctgggtgattctaagtacaatcagggtgtcaatcactgatgtccataatgaaaagtgtcagactccaaagcaaactcaggaggactgccttcatggtatggatccctggcagatttgaaccttagaggattaggctagcagcttgtggaagcggatgcaaatcttccaatcctctaagggcagatgagcctctggactcatgagaacgctggtcttggtaaaaatcccctgcataccacaggcctcccttggagaaatcacctaaagaaacaccaggaagaattcattctggcctcaaatagttacatggatgtttgttacaagaagacacatttaaccattgaagttcctactcattgagtgaaccgtgtctccctcctctctggtttccagaaacaaggatttttttctaaactcctcttacttcttgcctcatggctaatgcccacggaggtggggtgagtgacctgctggtaaccaagggaaatgaatctgcacaggaagcccaggccctccctccctcccttctcattagaagccagcttcccctggaaaacaaccacattctgctctactttctcatgtctatgtggccctccctgagtgggaaggcttaagttttgtaagattcatcataagtgtggtgatatttcctaattccagggaatggagctagtcatgccacacatctttgctgttttcacgaactgaggtaatttttatttttatttttatttttttgaggaacagtcttactctgt

SEQ ID NO: 23255 - DNA, 2300 bp, Homo sapien
ctgtccctgagtttctacctttcagataatttttactcatcaaggaatagaaacaaatgtattggaaaggagcaagtgtgacatagtctatgtcctgaacctgaagatcaagtcagtatcagctgccatcttcctcttggaatagactggtaaggccttgttcacagcccatacgtcacatttttattgaaagcctcttctgtgcaatgtgctggggatgcagcagtgaacaactcagtgggctcctggaaaagcttaaattttgttttaaatactgaaaagctccttttaagtattagcgaagagacagtcatgtttctttggtatctaaatcttgttaaaagagaaaattgttttgcatgatcggtttatatcatattgtattctagttaaataaagctagcattatattgcaagattgctgcaaaccataataaataggagtgaagtgggtttgtagaaggtaatattttactagttccaaatctgagaggttaaagattaatctgctctttttccaaatacaacttaggtttttgctcttgttttttgagacagagtctcattctgtcccagactggtgagcagtggcccgatctcggctcactgcaacttctgcctctgaggtttaagcaattctcatgccttaacctcccgagcagctgggactacagaagtgcgccaccacactcggctaatttttgtatttttagtagagatggtgtttcatcatattggccaggctggtcacgaactcctggcctcaagtgatccgtccgcctcagcctctcaaagtgctgggcttacagtcgtgagccactgcgccctgctacaaattacttttaataaaatgaccatggccaggcttacttattcttcaatgcggcttgcctgaagctcaaaaaatcatcttaaagagcctatagaatccctgaatccctatccgtaaacagtagtatatggattgcaaaacaagccttctggattcttcatggctttatgggtgttgtctgctgttgctgttttgagaaagagtgtacccatttttaattctgctcaatatattggtgggaagtttagagattaatgttatgcaaacctaagcttgaggcagtaatactcaaggtgcggacaatacagaagcagtgtatgtactgttttgtttttgtttttgagacgctctatcacccaggctggagtgcggtggcgcgatctcgcctcactgcaacctctgcctccgggttcaaacgattctcctgcctcatcctcccaagtagctgggattacaggcgtccaccaccacgcccggctaattttttgtatttttagtagagacaggggtttcgccacgttggccatactggtctcgaattcctgacctcaggtgatccgcctgcctcagcctcccaaagtgctgggattacaggcgtgacccaccgcgcccggcccagtttttaagagcgtatttagcagaattagtttcattatacaaaccacagaaagctgggtaaaaccttaaatgtcaggcatctgaaaaaacagcggctttcatctaaaggcaactcggaatggcggggagaaggaagaggctgtcaaaattgctcattaaaagaaaacgtgagataaagctatgaacacggggctgcagatatcagtaattagtgcaaggcgtctgcctttaattcagtcgtgaggagtaaagtgcaaggttgtgcctagaaagggcacagaaaaaggtttaactaggggagagggagtgggtttgagagccggaacgaagcgagctggcggtgggcgtgcggagtggcagcaacgcgagagggaacgcgctggggctagcgcggaggcccagagcccaggcgggggaaaaggtgccgaccggcttcgaagggaggcgacggccgagacacacggtccggcgcgagccaggcgccccgcgacgtgcaattttattttgcaaaaggtgcacccaacgccagtcccggtagagttgaacccaccacgagagggagagggggcgggagcggggggccgagcggccgcgggctcctcccccggcgcctccgctatctgggtcaggacgcgacggccgcggcgcgggaccttaggacccgcgggctccagggctactgtccgtccgccactgcgcgccagcaggtcctggtctccgctctccaacagctgaaaggccggcgcagtgaacacaggtgcgtgcgcagtctgggagggggctgctcagccgctgggggccggaccgcgccggggacttgcggagggaagcggaaatacttgcggtgggg

SEQ ID NO: 23256 - DNA, 2300 bp, Homo sapien
gctggaggcagtggcccatgctgcttatcccagcactttgagaggtggaggcaggattgcttgggcccaggagttcgggaccagcctagcaacatagggagactcactctctacaagtaatgtaaaaattagccgggcgtggttgcccacgcttgtggtcctagctactagggaggctgaggcaggaggatgacttgagcccaagtggtcgaggctacagtgagcagtgattgtaccactgcactccagcctaggtgacagagcgagactctaaaaaaaaaaagctatgtaaatgacttcatacaacctttgaaattattctgaaggcaagcaagtactctgatgtattttgtacattatttttaatgtgtcatttttcaaattatcagtgttgaagcacatttgttttatgctgttataaaactcaaacatagcttgaactgttagtctttaattgtgtttgtttaaaacatcagctccgttgattctatttttttctagttaatttttgtggttctgaaataatatttcagctttgagcatctctgttcagtcagtactctccttcacctccttgttgatgctttccaaatctcccacatgttgtgggtgcatccaagagttaggaacaggttgtcaaaggtgacagttttcacttcccagttgggtgatcactgggtaagtgacttgacacctgtgtgcctcagttcacttatctgcaaaataataataggacctgcatggaagagatgatttggaattggtgcagttcctaaagaaagggccaagcaaaataagactttcccacctgctgaaacctggtcctgtctcaagaataagttctccttcctaggtagatttttacttctacttatttgcttattaaatgaaaatattttcaaactaggctatatttcttaatgtaaaagtccaaggtatgggcaaaagaaagcaatcagaataggaagatttcctttaatagacctctatatcagcgaatggacatcctgcctgaataattttattgacaaaaataaagatgattaaacttgatgtgtgaatattagctggaatgcagttgtaattaatgggcatagagtgacttatttttttgcaataagctttcaagataatttagttttgtgatacaatttttttgtagaatacatttacacatctagcaataattagctacaatttcagctgaagttacaaattgattggaatctgttgctggcatgtctcctggatgagctgggagtgggcagatggttatagttcccagttataccaattaggtgaaaaaaaatttttttaagttaattccaggcaaatttctgtgaggtaaagcaggccagattaagtaccaaggctttctctggaatctttggtttaaaagaaggaattcttaaatctcttggatataatattcactaacacctgaggtaatttctggaagattattttaaagtcagtccttctctttgacacttaggcctgtaatgaagtgtagaacatccaaacaggatactttctgtgttccaggcatatactctagtgaaataggaatccaaagacgttcttattttaagcaggcttttcagaaatagattatggctgcttgttctctcagaccctcttccatagggcatttgcgagcccagaaatcctaaccagtagaccaccaaggaagcatttgaaacattacatttagttggccatttgaagtgtaagaaacaatgcttggtagaatatgtggaatcacaggatataaagcagaggatggtgaatttcgggtatacaacctaattcagaattttcatcttactgatattttttccccaattcacactcccagctatttactttgcttcctatcttcacttcctatcttagaacagtgaagcaatcaaagagagcttgcataacctcccaccactgcatctacccacctatttaaatctctgctcacataatctgccttttatgactatgaatgaatggtttatgttcccatcaaaggtcaactcctgtgcttgtgcgatagagcccacctcctttgccttctcaagtttattgctatgcagttttctatatgtctacttcatcaatttttcttttctttttatggactcttttctgttggcaaaaaaaacctgttatttcttgatcttttggcaccattttcgcacttaataatggcgtaatttctcttctatttgttttctatttgcccatctgttcttttttctccttttcctgccttcttttggaccaagtgagtatctttagtgttccat

SEQ ID NO: 23257 - DNA, 2300 bp, Homo sapien
aaaggttcattgggcacagtgagtataatgatggaatactgacctaggtgagaatagagtggctgttgcagaaaaggaggagggttgggtggccatagggcatgataaaagcagaaggtacctggggtcatggaattgataataaagagaattgggaatgaattgaaggacgaacatgttttagatgcttgtcattataaggggttactatttgcttttgggctaagtctaattttggttctcttaaaaagccaaaaggaggcaatttgcagacatttagagggttaggtaagttcttcacctagaacgatattaatcagcttctagatatttcctgtactggtatgagatttcttttctgatgtctgagcagatctggatcttcttcctcatcccccaaatgcgcacacacctaaacaccgttttttgtgtctgcataatcatagatttgcttgaataaggtcgggggagtgatctgacctctttattacctcgactgagcagcagtgattgacagtgttgagatttagttacaaataattatttcctttggggtagctcagtgagcagatgcttcttttagaggccattggtgggagtgttaaacaacaagctggcccaatttttcaaagaaaaattttttatagaaactttataagcattacgtattatgttcttgcaatgtgcaaaagagatccttttggaaaatgacaatcagaccttagtgcggcttaggaacaaaagacagtagtctcacaagagagggaaaatgtaatagattgctacagagacagacagtcctccttgggcttcttgtgctcccagacatcttgctacatgagccatacatgtaaggccctgatcattctttatgtgggccatttttcagggttctggtgagcaaccttgaagaatgagttactgtttcccttcaggaccaagagcaggtttagcagatttgcttactacttgctatagaagtggtagatcatctaagctcagcgttctttcctgtaacacaatccactgtgaaggcaagtgtccttgggccctctgcattgcccctgtggcaatgtgggacaaaggagaactgatgtaaatgtcctggtgattatgctgctttgctatgctgtaagtaacataagtcttctgtctctaacccacgaatctcatgtcttctgccagcatccatgatacagtaagagattactttattagtttgtatgtaaactaaaatcaaattacaaatccgaccattgtatggtgaacgttagagagctttgggtctcttaaaaggaatttgttcaagggtttcctgcagtagggtgttaggaagggagcaaaggctagaggcggtagtagtatttaggatcaggaaattgcacagtaaataaaagtatttgagggggtgtttcatgtcataggtaagtatacacatacacgtatacctgttatggggacaatagcccaaattggtttagataagaaaggacagtgtttcttttctaataactctattaaccttgcatttaggtgagtatcagttgttctgaggagtgataaatagtgccacagcatatccccgtaatctgtgcaaatggcccaagcagtcagatggcatactttactgccaaggtgaacgatgcttgtttcctttgtggtggcaatgacatttgctacttattaaactttttttcccttctcaatgtatctttaggccaaagtctctaacatttgcttttccgtatcactgaaggatgcaaaaatctggggtaaagaatgttcaagtgaaagaagaaggagttagtagtacaggggtgtggaaggcagctggtgagagagatggtccaaggtgagagagatggtccaaggtaaaggattgtacagctgtcatatatgttattgtccttatccagctgttttcccacccctggatttgttggatgactcctccaacagtgaaggtagaaacacattccacagccatgtgaattccaacttcggagaaaggtgagctacagaacagttctaatataaactgatgtcatgagattctagagtctgctgtcatcacattctgtgttattgccatgttaactccacatgcagcttgagcattcagtcttctgacctgttccacctctacagggcattttatggcttaaggatgacggcctagaagggaagggagagacttactttggattaaatttacaatgggaaagtgcttaaggtaagccttagaaaaaaacttcaacatgtgctaaaagaacattgaaaatattcataaacgaagcttt

SEQ ID NO: 23258 - DNA, 2300 bp, Homo sapien
aggcacactcccctggcctccctcataagcaatttaattgcaaagggttagcatactatttcttctctgctattctcagaattctcaattatgaaaacaaaaacaataattaaaaagttcttccagctgattttttttttttttttttttttgagacagagtctcacttaaactctgctgcccaggctgtagtgcagtggtgcaatctctgctcactgcaacctctgcctcccacgttcaaccaattctgctgccttcccccctgatccccgagtagctgggattacaggtgtgcaccaccacgtccggctaacttttgtatttttagtagatggggtttcgccatgttggccaggctggtctcgaactcctgacctcaagtgatccgcccgcttaagcctcccaaagtgctgggattacaggcgtgagccactgcgcctagccccacgtgcatttttttttttaagggaggcaggaaagaaggcatttgggcctcttatctgcaattttcttccgtgtaaacttatgtgaaggatctggagtgggacttggtggcttcaagccctggctccacttcttgatggctgcgcgacctgggttaagtcacgcaacctctctgaaccctagtttattcatctgtaaacaggtcaataatagcacgagattcgcagcgcgagtggagctcaaagtgcagggttgtccctggtgaacctatcacttttatatttatcctttgatgaagccagtacaattcctacctggttaaccagatacatcccacctcttccctcgagttcgcccttccccccgcctcgtgaagtccttgttctcttagctgtcttgaaaatcctatgcatcagcatgtaggaaagggcgcgccaggcgggggaagccacccccgcccaagcgcctccggcttcccttataaagggagggcccccttcgcgaccgcaagcgcgcccaggaagaccacagagccgccggtgcgcagcgaggtggcgatacgcgcccgggctcggcctgcgggtggtggcccaagcgtccgcctcgctggcctggcaggcgcgactgtgcgtgcgcagccgagggtggtggcggccggcaccccacgccaagggtggtggtggccggcaccccaccctcggccgccgcctccgcgtgtcaggtgccgtgagaagcgcgggaggagcggccgcaggcagcgcccagggatatgactggagccgactttccagaagcggcgcacgcaaagcccagctccgcacgcaaaggggaggcgacagcagaaacttcaacccgataaagttcgccggagcgcggagattcgcctcctcctgccactctccgccccgctcgggtcccgccccgctagctcccccaggcccccccagtcgccccagcttggctccccgccctgcgccaacggcttccatcgcagcctgggcggccccgcgcccaccagcgggcggcgccacctggagtggcctctacgcgggaaatctcagggccagctgcgccccaggagcctttgtgtgcccaagcactgtcggggccccggggcgggggagcggctacttttagggattcctgatctcgccgcaagaactggaaaaaatttagcatgccaaagagcctccactgaggtggcaatttgtttgcgagaacctaagataaaatttaaacaaccaaccaggggcgctgtgaggcaaaccgctgccactacactggctttccgggaagcaagctcaagtcgcggagagggaagggaggtcgtgcgctcggggcggggcgcgctcccaagtcgagcgcagcggccggggcaggttgtaccgagcgtggttctggggacaccgtgcggcctcgattggaggtggctgtgatgaagcgcggttaccgcacaatggaaacgtgggcacctccgctcccatgaaagcctgctggtagagctccgaggccggccggtgcgcctggacgggagtccgggtcaaagcggcctggtgtgcggcgcgccccgccccccgcaggccccgccctgccaggtcgcgctgccctccttctacccagtccttaaaacccggaggagcgggatggcgcgctttgactctggagtgggagtgggagcgagcgcttctgcgactccagttgtgagagccgcaagggcatgggaattgacgccactcaccgacccccagtctcaatctcaacgctgtgaggaaacctcgactttgccaggtccccaagggcagcggggctcggcgagcgaggcacccttctccgtccccatcccaatccaagcgctc

SEQ ID NO: 23259 - DNA, 2300 bp, Homo sapien
ctccagctgtcacttagatcccaagctgccccttcacttttaattttgctgatggtggcttttgtcaaaggcaatttaaaatttagggctaggtagtctaatctgtcaatcttttcttttctttgtggtttccaggtttgtgtcttacttaggagggccttcccaatgctaaaattatatatataaacagatataccacaattgcctaaacagaaatttgggcaagctggcacatttgaaacagggctgtctcctaaaatttggaacgtgtggatagcgtgcatatgcttggactctaggacttactttctctggaaaaatccgtctagcttcctcactcactgcctctgcctcccagctccagcctagccatttcatcttatggtgggggagcactcagttgctagggccagaaacccactcagagtaacttaagtaaatggggattacttgcacagtgataacggaatactgtgaaacccagtttgaagaattgcacctggatcactgaagggctagagtctggagctgcccttcctcctccctttctctcagttatctttgtctctgctccatcctcccccttcgtcaagcatactctgttaccacatgaccttaaatgactgtctaactcagtccttgagcccacagaatcttgtgagtctagcactcacagataaaaaaacaccctcaggctttctgtgtcccaactccaagttctagataaagatgtctgattggttaaagtgggtcatgtttaaagtgggtctactcccaattcagttattggtggccagggccatgagccacatggttgccccttggggcagtgggcaaggtaaagttcacaagatgtggtggggaggaaatgaccactgtaactctgtggtccagttcccacacccatattgtgatttttgctccccttcaagtttgcccttgatgttgtctgtaactgaattctgttttctcccatggttagatttataccagatccaggaccttttagggagggctgtggtcctgtccccttggggaggctctgatctaagactgctccctcatggaaattaaggagaaggggaaagcctaggctacagatggagaaggatgagtcattccagcagccatggccaagggaactcctggagacgtagggactgtttatgtggccactcaccatcatgcaggcccccaatgggggtgaggcaaggaaggacatagaaagactgctcaagtgcatttctggttttgcttcctaccgcaaacgactcttgtcatatgactgggggagtgtggtggtggcaataagcagaaaaatttgagtctaagagttgctttctgaattctattagggtcaatgtagtctaaagaagttgacttttgaggaaataaatcttttctgttttctgcagccagactaaggatttagtggtgaatggtaggtgggaacatagtgggactctgactgctcatacggcctctgtgaggctcaattcttttatctctaaaagagagaactgtctacctggtaagagaagatcttttgggagcccactaaactctaacataatgttattatacagtaagttctcacttaatgtcatcgacagtttcttggaaactatagctttaagcaaaatgacatgtaacaaaagcgtttttttctcatcaacgttataacaaaacgttaaaggaagtgacattatttatgaacctgctgcatgttgttttgcttaaagttacagattccaagaacctatcgatgacattaagtgaggacttactgtactagtatcatttataacttataaaaatgacttaattaatataccacaaaatatgcagctttcatgttagagaccagataaatatgaatattttgttaaaatgtctctcttctctactttaccagtcttcaccaacctcctccctccagaatattcctcaagaatataaaatgcctcatcaacatgagacaacagcaggaagcacccattcgtagtaatcctctgtatggaggaggctgttacataaccacaaaggcacaaagctgcagttttgagaacatcttcccacgccagttctaagcattgacttcaactatggttgctaacacaagaatcggcactggtgacttttgagccatcaatcatcctttcctaacacatgaatcttttggaaaagtatgtgagattggagattacctgtgatggtttggatttagattttgcctccaggtttaggcaatggtaaataggcaggagtttaataggaactaaggttatttgataattcct

SEQ ID NO: 23260 - DNA, 2300 bp, Homo sapien
tttgaaaatgtcttgtataatactgattatgagagagagaaccatatgggtaattctcgattcctaacacctggagatccacatattttagggttatatctatttatctttatccatttcctgagcatatgtggtgttttctgcagacacactttaacatcaacctaagcaaaacaaaatcaggcaggcagtcctattagaaccacttaccattatatcctttataccaacgttcccttgcataggaaagaaaaactggaagttactttctctggttcattttcagacttgtttattgtacataacttattgtgttaatcagaatttttagagtcatagagtattttttgcataataatggcatattttattttttaggcaacagctgaagctaataatcttgctgcagtagcaggagcaagagatacctattgtaaaagtatggaacaggtttgtacctaaaatttaaatttgatgctggagtgagaagatttttaaattaaaaaaaaaaaaattaaaaaaattttttaaataattgagcgaatttgtgcagcttatggtacattattccctaattcccctttatggtctttgctggaaataaactataagaaaataattcacattatttgagagcagaatttgagttagtaaattattatataaactctactgaaatatcttctgacaaatgtgtgattcagagtgctgttattggtgacttctgatgttggtagcattagtttaaggccagtagcagtttctgtacttgcttgctcaaacattaaaatatctttttggggcattatcatcttttacccgttctcttgccagcaattttgtgtgctattatggtatatgatggtcaagtgaaggcagatacagagcacagtgtaaaatttttttgtcttcagtttccgttagtcatatttggaaaatgattttgcttgagtaggttcaacatataaacaataactagattatgataacctgtgaggtattgtaagtgagtttaaaactgactcaatcatgtaagtggtttgactttctgagactaaaaactatgaacaggaacttctttcaagtgttaattatttctagcatgtaatactgtaattctgtctgtccaggtatgtggaggggacaagccttacattgcaccttcagatctggagcgaaaacacttggatctcaaggaagtggcgataaaacaatttcgttcagtaaaaaagatgggtggagatgagttctgccgtcgttatcaggaccagcttgaagctgaaattgaagaaacctatgcaaattttataaagcacaatgatggcaaaaatatcttctatgctgctcgtaccccagccacactgtttgcggtcatgtttgctatgtatataatctcaggactgactggcttcattggcctaaactctatagctgtcttgtgtaaccttgtcatggggttagcactgatatttctttgtacttgggcatatgttaaatactctggggagttcagagaaattggaacagtgattgatcagattgctgaaacactatgggaacaggttggtatctatcttttggttttttagtgactaatcttattttcctgtgactttccatcctttgcagtatttgtactccgactttgccttcatgtgaggaatgtcaaaaggatgtcttctgttttgttcagatgtagaatctttatgaattgaagattttttctttaaagttataattttaatgtactttggttagcctaaatctgtactatcctctggatagattcttagttgtaggcctgattgtatcagacggtgggcagggtcagagtctgtaatgatttttttctttgaggaaagaaaatataaacaatgaatgattttcaaggtaaggaaaagaagtttggaagtggtgctttcggaaagcaaaagaagtttcttcctaatattggcaagcagcaatgcaggagaaatgctggatggtagacaggtcttcattgccttccatgaagatggtagtgatttcctgatgtactatgaggaacaatcccgtagggatttcttaccaaggaaactttgacctttgtgttttggaaatattaattagtaaagcaaagcgccatgaacagagaaccatgctccgtcgtaatcttttacctcgaaccagaattcaaagccccaggctgtgaactcttgcctgcaagtatctgctaaggaaagccattttgtgtatctgcctccggtgtgctggaattacctgtggaccgcttatggatgtcattaagatgatcttcgtga

SEQ ID NO: 23261 - DNA, 2300 bp, Homo sapien
ttagcagagacggggtttcaccatgttggccaggctggtcttgaactcctgaccttgtgatcggcctacctcggcctcccaaagtgctgggattacaggcgtgagccaccgcacccagccagcaagcaccttcttcacaagatggcaggagagagagagtgaagggggaagtgccacatactttttaacaaccagatctcgtgataactcactcactgttaaaagaacagcaagggggatttctgctcccatgaatcacctccaaccaggcccctcccccgacacatgggcattacaatttgagatgagatttgggtggggacatagagccaaaccatatcaatttgggaaacctgcaggtcagatacttacaggctacccatctactcacacacacaaaggatacataaagacccctttattcattaggagggtgctgtctttcattgataagattttatttgtctatgggaatgatgcatttggtttctcaactgcattaaagacttggggtatgatataattttcttttagttttaaaatgagattaaaaccaattcaacattcttagattatttgaaaggcatttccagaccccacttttggaaataatttcagtcatcagcattttctgtttctggtttgttcagaagaaattaacacaaagcacaatagacatactaactaaactcagaattatgtaactcaaagacaagaaagtttttaaactttttattgaaatgttatacatatattcagaaaattgctcaaatcataagtgtgtagcttgatgaatttataaaaaatgaacatagccatttagccagcacctagaagcactcacctccatacagcaaccttcccccaaaaccctctaccagtatcctgacttctcacaggctttgtttttgtactttatgtggatggaatcacatacagaatgtatttgagtctagctttttttacccaatattatgtttctgaggttaatccatgttgcatatagtttaatttatttattctcattgctgtatagtatctattgaatgaatagacaacagtttttccattctgctgttgatgggagatttaggtagtttccaggttttaattataaatagcgcatattttgttaaaattgttttccagaagagtgtttaggagactgtgtgagttatattgggataaatgagtaattatctaaaatgtttctaagtttaagatttttttccccctaatacatggcagtttcccttctcaaaattctggtaactagcataaatcataaataatcatgtagagagggacctgaaattctaacacatttctaaggtctttgtactgcactgtaattttttttatcttagcttttactttgttcaggggctaaactttttatttgtaggcaaatttatacttttttttttgttttgttctgttttgttgctgttgtaagtactttaaaggtaaattcttaatttatttactggtgtataagtcacagccataatttgttatttggttattagatactgtgattaactaccttatttgtagtttttgctgttccaggcagcttacttgggaaaaacatcttttgtggtttaagaaaatgtggggttggctgggtgcggtggctcatgcctgtaatcccagcactttgggaggccgaggcgggtggattacctgaggttggaagttcaagatcagcctgaccaaccctgtctctactaaaaatacaaaattagccgggcatggtggtgcacgcctgtaatcccagctactcgggaggctgaggcaggagaatcacttgaacctgggaggcggaggttgcggtgagccgagattgcaccattgcactccagcctgggcaacaagagcgaaactctgtctttaaaaaaaaaaaaaaaaaaaaaaaagtggggtcttaacaaagtggtcagaaatgggccttcataattttttgtattgtcaaaaaagactccttaggagtaccatctgagttaagtgtgcatagtgtgcatgcgagtctgtgtgcattttctttaaaaaaattttctttcttctgtttacaatttcacctgtctctctccgccctcaggtaaaacaaaatcaacatgaagagcttcagaatgtaaggaagcacatacacaattgtttctcaaatcttggttgcttccttttgccacatcctggtcttaaagttgcaactaatcctagttttgatgggagattgaaaggtgggaattcccattcttgctaaaatctgaacttatttattagaggtggaaagtttttta

SEQ ID NO: 23262 - DNA, 2300 bp, Homo sapien
aggcatagtaaccacagatgggggagagagtgggtttgggagccaagataggcagaacaccaaaaagagaagaacataggcaaggaaaaaaaaaagaaaagaaaagagaaaagcaaagcaaaacacgaaacacatggggtagcagcctagattagtagatagaattgaagtccttaaaatcgaaggcacagtgagggaaaccataaggtcttttattacatgtaagatattcaatatcttccaaaggactgcctatactaagcatagagggtgatttggcttaggtgaacactgcactttggtaaggattcaggtagctttttgttgtcactgactgtatcaaccttaatttagcaaatggcctatgctgtgctgtttgtaaatggtttcttttttctatgtgcctaagcaaatgttttttagtgagtaaatgacagtaaataaatctttgtagaacaatcctcgtgaagatttttttgcccttcttctcctcctcctcctccttcttctgcttctgcttcttctttttcttccttttcaatactacgtttttcaggccaatgataaaacagaaaatgtcttgacaaagtgagctctccaaatcatatatcacaaggacgtaagaggaatatcacttaacaagttgataaagatcctgccatcaatatgaacgagggggaagggtaactgtactttagattgtggaggtggttcaagtcccagaactagaatcttagtaactcaaagaatattgccaagaacacgtatatagttattctcctagatttatgtgacaatgatgacaaactccatattctgttgaaatatatttggatgggccgggcgcagtggctcacgcctgtaatcccagcactttgggaggctgaggcgggtggatcacgaggtcagtagctcaagaccagcctggccaagatggtgaaatcccgtgtctataaaaatacaaaaattagcagggtgtggtggcgggggactgtaatcccagctactccggaggctgaggcagagaattgcttgaacccgggaggcgtgagccaccatgccctacctagaatggtattttgaaagctttaataacaccagtgcttttctagagattgtgcatgctgtgaattttagacttatgaaaagacctggacaaaacagctgtttgtacacccggacatctgtttttactggagaagaggaatttctaatgcagctggcagtatggtaaaaatccaaagggatcatgtttcacagacgcctccacgggctgacttgtaatttaaaaagtgacctgaactttctactggatgtcactggatccccagaagaaggttcatcacaattaggtaagaacctgccacgattcattttccgattagagtgctttctggcatgcctctgcaaggtgctaggagcacagggccagggtatacacagttgagaagatgggggaaggtctcataagtagatggggagcgaatgcaaacaaaccttaggatggtgggggggaggggaagcaacagtagggacttgggtgaggaaagaaaagatcaagaggaaaagcagggcactggcaacaacttggggggtggatggggagagaggaggggaatggctgtgatgaggagggggcgatgaaaaggagagaaggggtgcgaaagccacctcacgtgcaggacgcacgaatcaacgattagagatgtaaagcgaattgggagggagggacttagttctctggagctcccttctgcgtttgcagagcctggcccagcgctaagggggtgtggtgctgagctcagggaggtgggggtgtgagacggcggcggcagggacacccccgccccagtccaaccagaaacttggagccggggagacggatctgcaggcgggcagggcgagggcggagcgagcgagcgatgggcggggcgggggcggagggagggcgaggagatacaggcggagggcgaggagatacaggcggagggcgaggagatacaggcggagagcggcgctaggacccgccggccaccccgccggctcccgggaggttgataaagcggcggcggcgtttgacgtcagtggggagttaattttaaatcggtacaagatggcggagggggacgaggcagcgcgagggcagcaaccgcaccaggggctgtggcgccggcgacggaccagcgacccaagcgccgcggttaaccacgtctcgtccacgacctccctaggtacgggccagcgaggcagaggccgcggggccctgatggggagagacgctcgctgctcgggctcgcggg

SEQ ID NO: 23263 - DNA, 2300 bp, Homo sapien
aacaaaattaacaggtagttgctcatacttaacaaaaagatatttagtgcttctcatcacactcaattatttcacataatattctattgttttctttctcctaaaaaataattgttttaagctctcagctcttctcttttaatttgagcaaactaaaaatatcttgagaatggcccatctcacctcatcaaagaagtttcctttgtatcaagtttattaattcactcatcctttcctgatctttgatactgagactgctataaaaaggacaatggatgctaaagataacacgtgaagtaggtttgttagaccttttttttgacccttggtatcttcagctttctgaaggccaggtaatgtctgcattctgaatatgttaggggacatatgaatccataggacatattttaagcagaattgtatcattgtttcccttgttgctattttactttcccaaaccattgcagagctttttgccaatgacattttctcatccgcagccagctctgccactcttttgctatttcttctgtcgacttccattttaatttaaaaaataaatttataatttttttagttctgttttgtcaatgtatacctgcagccgcacacacatttgattatagctgcatagtgtggaaaatcttgcaattagattccaaaatgacagccggtgtaatttacaaagtacaaaagtgttatgttaaagcactctcagcaataaataaaaatagcttttttggaggaggaaataactttggagagaactaggctggaggaggaagcaatctacactcttaggaaaggaagagccacatctaggaaagcatccgagggacaaggacaacagaaacacaagaggctcttgatctcaggcagtcctccaagaggcacctgacagagggcagttaggttgccttgatttgccagtttctgtcctgaaagatacactggacctttatttcccaaggactactcattcagcattgttgagcacctaaattgtgctggagatcgcacaggaactgggcttgcgaaaatgaaaattgcacacagttcctgtcttcaggcgctcacagagtttttaaaacagaacatcttaagagggagttataaggggccctgttgcaaaaagagagcagcaactaaaatcttggaaaagccctcaggacaccacagaggaagcaagctgtgatcacagaactttgaaaggcttttgtatctttcgacaataaatgatcaagtgaagtaaatacattgtccagaagagaaagaattgggatggaggatgagattttatatggaaggattaaaacatatttaactggagcagggacttacagggacaggcaagtcagtaaagggcccaggttacaaacgagttataaccgatcagaccgacgagcgcccgcgtgcagcgcctcctgccgacgcgcgcctcgcagccttcagtcaatgctgacagctgttctccaacacccagctaggggcgggagggtccgcccacttctaccagattttgcacacaaaacagtggaaagaccattctcatggctccaagccgttttctcccttcatcgcctgcaattttagggcttttcggggggtatgactgcagggattttagaggtttttttcctcattctctttttaagaggtgataaaaagcatttaaattagcggcagggcggttaacacccgcagccctagcctctccgcacttctcgtcgctcgtccgtgttcactccacgcctggcctcgggtaggagccgcatagcgccaacggttgcgggtcgcaactactcccaggcggcgcgccttgcgcgccgggcctcccaggaccgcggcgagttcagaaggcgcggggagagaagtgaggtcgagcagcgggcggcttttgacgaacggccctcacagccaatgggaagcccggtcgactttcccgcccctgccaatagggagcagaacccgggccggggggggcgcttcccgcaggctgcggctggattcgatcctgcgcgacggccgcgaaggcgggggcggaggctcggcctgcgcggctgggagcggcttaggggaggagggaagaccggaagccacggttgcgtccccatccttagattcgctcctccgggcagggagcggagacggaggaggaggagggagaggctgaatgttggctcggtaattgagaggagcggccgctccagagcttcctcccggggcgcccccctcagtccgtccgcgcttctcagccgccagtctcctggccgcgcagtccccgcggacggccgggccgc

SEQ ID NO: 23264 - DNA, 2300 bp, Homo sapien
aagggcttgcgtgtgaatcaccacaaagttaagtggctgatgaaactgagagtttatgagaatttctgatgaagcagcacataggagtgcctgtcggttattgtatgagtgtgatgcagtctataatttgacttgtttgggtctttttattattatacgttgagcttcactgaagcctgttgcaagcttttttatttttcctttgctatcagaattcttctgcttcatgatggagaattgaggctttatggcaagaatgctaaatataccttaaattacagacagaagaagctgagagatagttattatgttttattagcatctgattccaggcacataatcccaattctcataatttcctaatcaaagatgcatttcatttctgcactcaccccagtctagttggataccctctgaagtacccaggaaccaagccaagagcagtatcaagaaaagatagatgattatgcagatggcttgagtaaaacttgtctttaggctcccagcatcctcccacttcctaggctcagtactcctctaaagttgccagacttagcaaggaagtacataggtgcctgtatgttatctcattaaggcccttaatagctttatcttaatccttctgccatcagagcctatttttttggggaaaaaaattcagattactcatcaagccttagagcaatatttctctaaatctggtcccagataatctgcagaagaataacttgggaacatgaaaaatgcagattcctgagtttcaccctagacttccagaattagaaattccagaggtggggactgggaatatgcattttaaatgtcctcagcaaattctgagacacaatcaagcaagacaattatttaataaccttagtgtctttcctctccaactgtacatacctgaagactccatcctacttgtagaaaaggagataacaaaggttcagtacctggcatttacaaggacctcaatcaatacttgttccctgaatcccttcttaaaggaactgtggacttcaggagccagaagacaccagaggtccctttccagtcccttgaagtaaaataagtctgaggctgtctctaatcacctccgcacaccgagggcctaatccatctacctgaccctgtctggtccaagctcctcgaggctggcacagctttggccgtcaggagagccttctgggcagtggctctaacagaaccatgtccaggacttcatccgtgggacaaaaagagtgaatcttcagtaagtctgtgtgcagagaagcctgagatgatttacctcatttctaagctactactgtactttgttgttgttgttgttgttgttttgagacggagtctcgctctgtcactcaggctggagtgcagtggcgtgatctcggctcactgcaagctccgcctcacgggttcacgccattctcctgcctcagcctcccgagtagctgggactacaggcccccaccaccactcccagctaatttttttttttttttttttttttttttttttttgtatttttagtagaggcggggtttcaccgtgttagccaggaaggtctcaatctcctgacctcgtgatccgcctgcctcggtctcccaaagtgctgggattacaggcgtgagccaccgagccggccaactactgctgtacttcttaccccctgtatcaaagagttaaaatctaattttttcccaagatcggtctcactgtaagtctgctatctgtattttcccattcttcgtctgatagccaccgacattaatgaccagctcattacatgttgaggtgtggggagatgggggtagaaccccgtcaacccaggattcgagtttagaaagactacaagccccaaaatgcaatttcacctcccaaaaactaccattcccaacatgcaatgcaaccaggacgagccaaggaaaaaaagtacaagtgtggctgcaaagtttgcccctcttgttaccctcaggcaaatgattgatttagaaaggccccaggggctattttttgcaggaacggtcactccctaaatccaggcagggaaagggaggagtctgagccgagtcacgccccttctcctgtaaacttgggtcgcctctagcttagcgagcgctggagtttgaagagcgggcagtggctgcacacgccaaactttccctatggcttcggtgaccagggccgtgtttggagagctgccctcgggaggagggacagtggagaagttccagctgcagtcagacctcttgagagtggacatcatctcctggggctgcacgatcacagccctagaggtc

SEQ ID NO: 23265 - DNA, 2300 bp, Homo sapien
ttcaagtttatagaaaaacactagtttctgccttgctaataaaagaattacttgattaactagaataccaaccattcctttattaaaataaatacctgcttcttcttcgccggctgtaacgatgacaatcataagcataatgtcccttttcgccacactcatagcatctatcatttggatcaaagggacgtcgggcaggtggtctatcaaaacgtgatctccgaggcatgcctgtcgatagttcaaccctcactcgggagccacaaatcaccctaataaaagcaaattaacaaaattctaaagttaaaaatatattcaggacttatagatttaaaaagaactctttccaaccactcactctttccaaccactccttcccccccaacaaactttggcggtctttaccaagccctaactccatctccgctatcttctttaaccttcgtgtgcctttagcatttaacactatgaccagctatttaaggtctcttccagacttcagaatccaaatttagcactaagttcattatctagccacagtatattttaatgaacagaagattcataacatcttacttactttccatccagtcctcgtactgcatcttctgcatctctaggatcttcgaattccacaaaggcaaatcctggaggatttctcgcaatccatacagttcttaaaggaccataataactgaaagccctttctaactctcctttgccagcgccagttcccaggttaccaacatacaccttggtttctgtttaaaaacgcaaatagaagaatgcacgttacgcaaaatctggcccaagtttcaattacttatttgccttaaaacgggccatcctcaagattgggtaaagcacatttaatgccctctatccaagacaaaacttagtcgtaaaactggtgaaagtccgcaaatccctgagaaactagacttttgacaaaattcttaacgttctaaataatgcggggtgaccctcccgaacacaagcagaaacgcgtggtaggatacaccgaggcgtggggcggaacctggcccggccccacccatgagtcccggcagccccgggcgcaccgggagcgcgcgggcccgcagcggcagcggcgtcggcggcgggagggcctcggtaggggccgggccaggagagcagggctgcgccggctctcgtcctccgcggcaaacgtcccaggcacaggctcgcccaagactccagctccccgccccagagccataaaccgcgctggaaataactaaaaaaaacccagccgccagtcgcagattacgtccccattcccattccgcaatttaaccgattgtttgacgagaacatgcagctcacagctgccaatttcgttctatctcaaacacaaccacgatcttacagctgcggccagatctgtccgctgaagtggcgggaaagcgctgaggaaatgcgccaccacggtcctcaatgtgcgcaaaatggcagccgccgccgagggcggggggggaggggggccggcgggcagctccgagaaaggcaacgcgaaaaccgtcatctcaaccctgctttaggctggattgggccacaaaaatgcccaagagtacggaactcggcagagatgtacacccgccatcccgtctcccttcagcaccccgcctccgctgcctccggcttcgtctggcgtgctcctaagccgccattacgcacgcggaataaccgtctcccaacctccgcgacaaccctacggcctcgcagtgctcactacacccacaccaacgtccctcaccggactccagcttcttacctcctccgtaccgcccgtaacgcgacatgatgacagacccgcgtgctcggctctttagcaagcagcgcccagggctcgagtgacgcaaaagctgacacacaccttcacccgccaagagtcccggcggcactacgaggaagagcccgggttcgcgtttatatatgcggccgctgcgctttgcgcatgcgtcatctcgttgttctgcgcggcacaaaggagctgggcggaaacagccaagaaacgacgcggaaggaactgaagagactaacacgcgggtcatgggcggagggatacgtttctatgggaacgccacgatctctccagtaaacctgaggccttccccatgctgtcccgccccctcctctccccgttttctacaccctccttgtcttctttcccgtctccctaccctctgcctcctttcgtttttccccaggctagggaccctcagccttaacaatcttagtacggatgcattagaccggcctatgaaaggctgtacaat

SEQ ID NO: 23266 - DNA, 2300 bp, Homo sapien
ctgggattacagatgtgagtcacagcgcccggcctaggagttttgctcttgttgctcaggctgtagtgcaatggcaagatctcagctcaccacaacctccacctctcaggttcaagcgattctcctgcctcagcctcccgagtagctgggattacaggcatgcgccaccacgcccagctaattttgtatttttagtagagacggggttcctccatgttggtcaggctggtctcgaactcctgacctcaggtgatccgccagcttcagcctcccaaagtgctgggattacaggcatgagccactgcgcgcggcctcaacagtaattttcatagcttcttaacagaagaaagtcaacttagtgaggctttacagaatttatattttatctttcagataccatataatctttttttttgagatggagtcttgctctgtcgcccaggctggagtgcagtggcacgatctcagctcactgcaacctccgcctcctgggttcaagcagttctcctgcctcagcctccggagtagctgggactacaggcacacgccaccacgccaggctaattttttgtattttagtagggacagggttttactgtgttgcccaggctggtctcaaactcctgagctcaggcaatccgcccgcctcggcctcccaaagtgctggcattacaggcgtgagccactgcgcctggcccctatatagtctttataattattgtttaattcttttgagaagaacctatagatctttataattattgtttcttttgagaagaaccttgttaagaaaaaaatcaccaagactaagggagaacacatatactctacagagcttctattttcttcttagagatcttcctgagagagattaattctctccataacttaatcaacgtaaaaaatatgcataaaatcatagcatgacctggaaagaatccatgctttattcaccaactaggcctgctttccctgtactctccattccacacctatactcaccaaatgaagttgcaaaagacgaaaaagataaaaatgcaaatacctaaatgtctttttttatgtacatttccaacttttgtgtattccaagaatttacgatgtaatgtctatgtttctagcaaaaaagaactttttctctatttgtagttggtgtctagagcaattctaatgtaaagaagttttgcatttatttggtactgttgagtggctgagcagcaaggctgctatttccactgagtggagatacacaaagatgacttaggagtcccagtcctcaggatcggagtattggtggatcacacgtgttacaaagcagaaagcattaggaaaagcaaatcagttactttgagcttcagatgcaaataatttccaaattgtcactggccaaaatgctttaaacattcagggttttgtcacaatttcaatataaaggggggaggggggagcgggaccccacagctctattcctttgtctttcagactccaagaactcagaccgtggtggtgcaaactggtgactggttcaaaagaagttggagggggcgtgtaggacaggaggctttaccaccagtcccagggtgcgtcaaggtctatggtgtaaaaaccactactcagaatggcggggttcatggacttttcaccatggccaaaccttcgattacctctgatgagccccaaagatcagagtagctgactaggccaggtcccccagcagaagggcgcgacggctgcaacatcagcggttaaattgtacagcctttcataggccggtctaatgcatccgtactaagattgttaaggctgagggtccctagcctggggaaaaacgaaaggaggcagagggtagggagacgggaaagaagacaaggagggtgtagaaaacggggagaggagggggcgggacagcatggggaaggcctcaggtttactggagagatcgtggcgttcccatagaaacgtatccctccgcccatgacccgcgtgttagtctcttcagttccttccgcgtcgtttcttggctgtttccgcccagctcctttgtgccgcgcagaacaacgagatgacgcatgcgcaaagcgcagcggccgcatatataaacgcgaacccgggctcttcctcgtagtgccgccgggactcttggcgggtgaaggtgtgtgtcagcttttgcgtcactcgagccctgggcgctgcttgctaaagagccgagcacgcgggtctgtcatcatgtcgcgttacgggcggtacggaggaggtaagaagctggagtccggtgagggacgttggtgtgggtgtagtga

SEQ ID NO: 23267 - DNA, 2300 bp, Homo sapien
tccttcacactgtgataacaattggcacttatatgagctcttagtagatttacagagggctttaaccagcaaaatctaagaatccactaaaactacattaatataatcagccaatcatgcaacgaataaaggctatgggaaagattcaaatgatgacaataagaaaatatactttgaagattatatggaacctaaatctcaaggagtaaggaaaaagctgatacatttttgatgttttctacacctttgtttaatagtgttttcatttggtttttgtaaatctcccttggtttttacatttccaggaattcagcgtttaccaccttgtaccgtttttcagtcctaaaaaagattctggatcatgccagaagccagttaagtgcgtgaccagaaatccgtagcagaagcaagtcttttgcacttttccactggaggggtttatagagagtgatctgctagacaaaattcaacccggtttggttcatttctttccagcttctgcacctttctcaagattgtactgagggcacatcccaaaggagcaggcattttaattgcctatacaagccaagcaaacaagaaataccttggccgtgtcagaggcgttggaaccagagtgactccgttttgagtgagggctaggaaaatgaggctgggacttgctggtctgcattctcagaaagttaggcattcccagcctctagatgtttacggttaagggaagacattaataacgtttaccgccgggcgcggtggctcacacctgtaatcccagcattttgggaagccgaggcgggcggatcacttgaggtcaggagtttgagaccagtctggccaacattgcaaaaacccgtctctactaaaaatacaaaaattagccagatgtggtggtgcatgcctgtaatcctagccactagggaggctgaggcacgagaatcgcttgaagccggcaggtggaggttccagtgagcctcgatcgcacctttgcactccacctgggtgacagtgtgagactctgtctcaaaaaaaaaaaaaaaaaaaaaaaagtttactaaacagacccagacttgggagtgtccagatatcgcaatacctggagaacaaaggcattcctaattttgctttaaagataatagtattgatgcttgaaaaatatagtaattaagaaaattaatcctttatcataaacccttgtagcagagcgcatctcctcatacataggactattgtatctagggtggacactttcctcttactttcgggaacatcctactctgtctatggagcagctgttctttcaccactttactttcttactaaacttgcttttgctttgcactgcggactcgctctgaattctttcttgcgcgagatccaacaactctctcctggggtctggatcaggacccctttcctgtagcaaccctatcgctcttctccacggcacgttcacctcacattcctagagctttaggatttactctgagggttcatgtgctttgattctaaggcgaaagtgcatttccaagtctactatcattgaggacctggcacgagctttttcctctttatttatttttatttttaatttttttgagacggagtttcgctcttgttgcctaggctggagtgcaatggtgcgatctcagcacactgcaacctccgcctcccgggttcaagcgattctcctgtctcagcctcctgagtagctgggattacaggcgcccgccactaggcccggctaatttttggtatttttagtagagacggggtttcaccatgttggccaggctggtctcgaactcctgaccggtttcgaactcctgatccacccgcctcggtatcccaaagtgctgggattacaggcgtgagccaccgcgcccggccgctttttcctctttaaagaaaaaaagattatttgaactgtccgtcgtggcaatggagagggatagccttagaggacatggcggttcattattattattattattacagaacaatcttagactctgtccgcaccctgcactctaggtcccgcgactctcagacctccaagtaggactacaaaacagaggtttctgggggaaggaagtgacgatcggcgcaaagcatgctggtctcaggcggtctccgctcaacgatccttcctcaaagcatggttgctgagtacccagagttgcgaggagttttttaactggtatttttctcgtttgtcagggttaaacgttaagtaccatttggtttttagtacagtgttaggtatcgtgtggctgcaggacaggaccagaaatctaagctct

SEQ ID NO: 23268 - DNA, 2300 bp, Homo sapien
tctgtataatgtagacagggcttctgtctcctgttgcaacagtgttttaggtgcccttccaaagtgatgaggccagggactatggctcacacctgtaatcccagcactttggaaggccgagggaggcagatcacttgaggccaggagttcaagaccagcctggccaacatagcaaaactccatctctattaaaaatacaaaaaattagctgggcatggtggctcatacctgtaatcccagctactcgggaggctgaggcatgagaatcgcttgaacccaggagatgaaggtttcagtgagttgagattgtgccattgcactccagcctgggcaacagagggagactttgtctcaaaaaataaataaataaataaataaattccaaagtggtatgagaagccaaaataatgatggcacgcatctttgcaaagcatgttttactcaaagattttgggaccctgcgcagtggctcatgcctataatcccagcactttgggaagccaaggcaggcagaacctttgagcccaggagttcgagaccagcccgggcaacatggcgaaaccccatctctacaaaaaaatataaaaattagccaggcgtgatggtgcacgcctgtggtcccagctactttggaggctgagaatcactaatcaaaagtgggtggggggctgtgtttatatgtacagggcaataagaaatattttctcaagtcattaagatgcttaaatataagatgaggatatttcttttaaattacatttcctactaaatttttttttcattaggatatgtgtagattttgctgtgacttatgaggtccatcaaacaagagttgcatcttttcactaaacttcaacttagattgtaggattgtttttattaagatttcaattaaaactttgtcatgaaatagaaactgcggtatatttaactcctaattatattctagttatccatgtatacttgagacattccaagaaaatacttaaaccatcattgagagacagggtagtgttgcttagctttcagttccttgaatgattattatttccttctctttgtctgatgtgcagcctatgtgagaacagtagccacaagaaaaagaagtttgtgctttctttctcacatttgtgctcagccactaaaaggagcatctcaatcttaaaccatggccgggcgtggtggctcatgcctgtaatctcagcgctttgggaggccaaggtgggcggatcacctgagatcaggagttcgagagcagcctggccaacatggtgaaacctccgtctctactaaaaatacaaaaattggctgggcgtggtggcacacacctgtagccccagctactcgggaggttaaggcaagagaatcacttgaacccaggaggcagaggttgcagaaagccaagattgcgccactgcactccagcctggatgacagagcaagactctgtctcaaaaaaaaaaaaaatattgaatcacttaatgatgtccctattcctaggaaaagagatgagccagcaagaccataatgaaggagaaagaggaaacattctgctgagttccactgagagcacgaaccactctaggcctgagtaaggaactgagaggacaggagcaaaaatgcaagtaggaaaagctaggtagtagacagtgccgcagcacttggagttggaattccagtcaaaacaaacagcattttttgctgtcctaagaatttcgtggaaaatcaggcctacccaaaatccaatgagagtgtttaaaattgtaatctagagttaaataaatgatccttggatttattgaatttttgcatttctgcataaccgtttcagtttgcctgccagtttgcgtaagtgaaagctgcttcttggaaatgaccagacaagatcctcttcatacctgaggaatgaatccacttgagcctcattgctaccccctgaaataatgcatttttataatcactcatttttgtaagacttaacactttgttatgctgatgcccttgcttaaaggtttttccacttctttcaggaaatggccagcctcaaacgacaattcacggaactgttatcggatatagggtttgcaagggaagggctcagagcaagggaaattgagaaaagggcccaaggaggagatggtgtcttagatgccacaggagaagaggtaaagaatgtggagttggttctcatttctctttaattagcacctaaatacaatcttaacctgggaacacttgtagacattcttcttcacttaagcctttgagcagtgggttaatggcattcttgattttctgct

SEQ ID NO: 23269 - DNA, 2300 bp, Homo sapien
cctgagtggtcaaagtttctacaggccacagcaaacttaagtgcatatgctagatggttttggaaaatcctatagctggtacatagcaaacacacacatatatgccaaatagtctcagagtcatgtgcctttggtactgtgacagacaatctggtatgtaaaaggaatatcaatactgtggtttactggccgggcacggtggctcacacctgtaatcccagcactttgggatgccaaggtaggcagatcacctgaggtcaggagttcaagaccaccctagccaacatggcaaaaccctgtctctactaaaaatacaaaaattagccgggcgtggtggcaggtgcctgtaatcccagccacttgggaggctgaggcacaagaattgcttgaactttggtggtgcaggttccagtgagccatgattgcaccactgtactccagcctgggcaacagagcaagactctgtctcaaaaacaaaacaaaacaaaataaaaacaaatactgtggtttagagccaggcgggcgtggtaacacatgcctgtagtctcagctacttggaaggctgaggcaggaggatcacttgagacaatgccagcctggaaaacataatgagtccctgtctctaaaaacaaaacaaaacaaatactgcgatttaccttagaaaaaattaatatataaaaggagaaggataaggaaggacttttaccctgtttcaaagactcaaaggataaataatgtgcccaagatcgcatagctagtaagtggtttagccaattctgtttctaaagtccattttgtttttaccccattcacatgaagattattttaaaagaattcataagtgaatcctgagggcaaagttagagataggacagaggcaagttgcttaaccaatatgggaattggattaaatgctctctaggccctccagttctaaagttctgtgagtctgatttttgacaccatgtaacaccatcacatatgtagtacaatacccaaagaacatcacaatgtatataaattgcactgtaggtaagatgatagaaacaaaaaattagatattcaatttgatcagtgtgataagtttatgataaaattatatgtaggaaatagcaagttcctgtaaatttattacagtattcaaaagtatagccagagttttaacaaacaaggcaatttttatagcattggccattaaatatgaaattgatttatatagttgtagtgactgcccaaaaataaccctttagtgagtgcttttctattattgatttaggtaaaaatctgatattgcttagagctacgctgtctgatatggtagcccctacccatgtttggctgtttatattaattaattaaaattaaaaattcagttcctcagtaacactattcttcacatttcaggtgctcaatagccacatgtagccaggtgttgctgtattggacagcacaggtatagaacatttccatcaacacggaaagttctattggacagtactggtatagagactcttgttgggaagaactggatatgtgctaagcaagagggctttatttcacccagaaaatctttcggtttattcagatgttggaaaactaatgtacagattccacaactcattctggctgattctctgagcagcattctgaataaagtcttctacatccaatcccaacaaatccaacaaaggatcactcaaggccaggagtgcaagaccatccagggcaacataacaagactctgtctctataattaaaaaaaaaaaaaagctgtaatcccagcactttgggagaccaaggcaggtggattcttgagcacaggagtttgaggccagcctgggcaacatggtgaagtcctgtctctacaaaaaaatacaaaaagccgggtatagtggcacacacctgtagtcccagctacttgggagcttgaggcgggaggatcgctagagcctgggaagtgcagattggagtgagccgtgatcgcaccactgcactccagcctggcaacagagtgagaccctgtctcaaaaaaaaaaaaaaaaaaagaaaaagtaacccaactgatatcttatctttgattttattaggcttccagacagttccagtccattctgcaagagaggcaatcactccctgcttgggaagaaagagaaaccattcttaacttattgcgtaagcaccaggtggttgtcataagtggtatgactgggtaagaatgcagtttattcatctgtagctttcatctataaatattatatgcaccctggttaccataaccagttgaacttgttaaaaactgt

SEQ ID NO: 23270 - DNA, 2300 bp, Homo sapien
agcctttaaggctggtctaggatggcttagtgatcttgaacaagctgaacaagccattaagtcccaagggcaaaagggaatgagaattccctgaactgtaattgtatctgactttaattgtaaggctcaattgtgttgctgtggttgggctccctgagttgaaagtttgtagtgacgtatgtttaactatataaaatccgaggcttggaaggaccttaaggtacgttctcagaaaatctgttttatttaattcatttggttttcttttgtttacttcttatactgtatactgaattactttcaaatgaatttttagagatattttgctttctataccactatccataccctcctgcttttggtgtactagacccccagaattctttagggatagctctatgaatccctaaatcctcaaatacttgtgcaggcttctagctttgtctagatctaggtttactgtgcaaattctttttatttttatttttttaagatggagtttcactcttgtcccccaagctggagtgcagtggtatgatctcagctcactgcaacctctgactcccaggttcaagcgattctcctgcctcagcctcctgagtagctgggattacaggcacccgccaccacgcctggctaatttttctatttttagtaagacagggtttcaccatgttggccaggctggtcttgaactcctgacctcaggtgatccgcctgccttggcctcccaaagtgctgggattacaggcgtgagccatcgcacatgggctgctatgcagattcttacaccacaagtaagcccctttcaaagaattctctgctgggtgtggtggctcatgcctgtaatcccagcactttgggaggctgaagtgagagcactgcttgaccccaggagtttgagaccagcctgggcagcataatgagaccccatctctagaaaatatatatattttcttagctagtcagccatggttgtgcactcctctgagtcccaggtactcaagaggctgatgtgggggaatcacttcagcctcagaggtagaagctgcagtgagtcattgcatttcggccttggagacagagtgagactctatttcttaattaaaaaaaaaaaaaaaaggatcctcttttattggttgccatctatctttcttccagagaaacaaaagtttgtattatttcatgagagtccttgggtaaacttcaatgagtagagaacagtgacactgttctgagatgtggctgctggtcatttagccagattcactcactaaccacccgacccactcccagatggcagcttctagcgcatgggattcaaatgtgttccttgggaaatgaaaattatgtgtcatgcactttttttctaaaataatagttttattgagacataatttatataccataaaattcactcttttaaaatacacaattcaatggtttttagtatttttatagaattatgcaacaataaccaccttttaatccctggacgttatcatcaaccccaaaagaaaccctgtacccatgtacccatagcagtctctcctcattttccccttcccccagcccctcataaccacaaatctgctgtctatctctatggatttgcctactctggacatttcatagaaatggaattacacaatatgcagctttttgagatgggcttctttcacttagctaatgtgttcaaggttcatccgtgttctagcacatatcactacatcattcctttttattagtgaataatattctattatgtggacataccacattttgttcattgattcatcatttgatagatatttgtgttgttttacgttgtgggatttggggacacttgcgtacagttgaaacattcactgctaattcttttaatgctaattactttgtttgtgcttgataaaagtttatttgaggatgcattttaagttctttagaaatagaaatactagaaatgaatgaacttactttattcaagttttcactttttctccattttgactttttgttgttgatactctgttagacagcgactttccccttttgttaaagaaagggctccatactgaaatgttttcttttatttccttcaagttgaaaaagcatcagaatctgaggagtcagatgaggatgacggtcctgcacctgttatagtagagaatgaaagctatgtgaaccttaagaaaaagatttccaaaagatatgactggcaggcaaagtcagtacatgctgaaaatggtaaaatctgcaagcagttccgaatgaaacaggtagggtatgctgagagaatg

SEQ ID NO: 23271 - DNA, 2300 bp, Homo sapien
cactattcttgaaagcacctttaggtttgaacttctccacactccattgtaaatggagtcagtcctttggaaaaagattaggagctatctgtcttacggcctacttcccttttgcccttggcagaatctctgagcccaagctgtgttcctgatagagcatatataaatttaaattttgtcaaaacatatattaaatacatgaaaacttctcaactggatttttaaaatcctatgctaggctgggtgcagtggctcacacctgtaatccaagcactttgggatgctgaggtgcgcagatcacttgaggtcatgagttcgagaccagcctggccaacatggtgaaatcccatctctactaaaaatacaaatattagctgggcgtggtggcaggcgcctgtagtcccagctactccagaggctgaggtaggagaattgcttgaacccaggaggcagaggttgcagtgagctgagatcatccggcctgggcgacagagcaagactccatctctaaataaataaataaataaataaataaaactctaaattagacctaaccaaatgagaatctaggattaaagcctagacatgtgtattttgacacttctccatgtgtttatgatgtacatctttagtttagaaatctgtatcagagacattcactaaatattagtcctgaggtagaagtgcttataaatcttttgtgaagatttatccatactatccctaaactggctggctctttttattttgtagttttaaaattttttcactggaacagattcagaatcctgccccaagaccagctctttttacatatgcattttcctttgtttctttaaagtagcctatattcataagtttggcaaacaaaggattatcatacatgtctggttttatgatgtctacattaatttttttctcttgcaggtgaaaatgagttcttcagtaagaagaaaaggcaagccaggcaaaggaggtggaaaagggtcttctagaggaggaagaggaggcaggagtcacgccagtaaatctcatgggagtggtggcggtggcggtggtggtggtggtggaggtggcggcaacagaaaggcctccagtagaatatgggatgatggagatgacttttgtatcttcagtgaatcaaggcgcccttccaggtcattataactctttgaatgtttaaatatggaaatggtatcaacccctaatgtatgggacaacagatggctgagaatggaaaaaaagtcgagtaattctggtcaaattgtcttcctctttgtaacccttttctgaagacatgatgggaaataacagcttttgtgtgtatgtaggttgcatgacactgtgaattgagtgtaatactgctattatacccagtgttactaggaaagtaaatacagaaatagtgtgatgaaaattattttaagtattccttatgcatcatagactgatgttaaaatgatgatgttaacattgaacatggacaggtacggtggctcacacctgtaatcccatcactttgggaggcccaggtgtgtggatcgcttgaggtcaggagttcgagaccagcctggccaatagggtgaaatcctgtctctactaaaatacaaaaattagccaggcatggtggcagtcacctgtaatcccaggtactagggaggctgaggcaggagaattgcttgaacccaggaggcagaagttgcagtgagctgagatcacaccactgcactccagcctgggtgacagagtgagactccatctcaaaaaacaaacattgaacagcctaaagtgcaacatgactgtactgtgtctttctagttgatgagctgtgtattttccagccaaatcagccatcatctgatggtgttacatgtggtgaccagtaacagatgccttatctaggtttctctcctgttcaacttttaactaatgaataaattatgggaattctagtaattctaatgagtatttaataaaagtaaatgttttgctattgcatgttatacagtataactacaattaggcatcacttagtgacagagatgtgttctgaaaaatgcattgttaggcaatttcattgttgtgcaaacatcatagaatgtacttacacaaccccagatggtacaacctacaacacacctaggctgtatgatgtagccaattgctcctagactacaaatctatacagcatgttgctgtactgaatactctaagcaattataacacaatggtaagtatttgtgtatctaaacatgtctagttgtagaaaaggtatagtaaaaatagagtataagagatta

SEQ ID NO: 23272 - DNA, 2300 bp, Homo sapien
agaggttattgatttttaatgaatcagagaagttttctaccattatttctttgaatattttttctgctcttttctttctttcctttccttctggtattctcattatatgtatatggtacccttgatggtgtcccacatttttccaaggctctgttcacttttcttcatttatcgttctctctgttttcagcttgcataatcaatgtcagtctgtcttcaagttcatcagttctttctcttgctagttcatgtttatggttgagcttctctagtgaatttttaatttcaattagtatacttttcaactccagaattcccatttggttctttttatatatataattttttatctctttattgatgttctcaatttgatatgacattgtcatcataccttcctttactgctttaattgtgcattcctttatttctgtgaacatacttataatgactattttgaactccttttctgttaaatctgacatctgttctcactcataggcagtttgtgctttttctctccagtgtatgggttatacttaagtgtttctttgcatgccttgtgacttttttgttgttaactgaacattttggataacatactgtaacaactctgggtactgattctcccctttcaggggcttcttattgttatttgctggtttaatttttagtgactggctagaatattttagtgaagtctatttccctcctacgattttaagcctctgttgttgctcctctgggaggtacagctttaggtatgcccatggttgattgctgaattgttttcaacaatgctctggagagtaaattcctttacaaactaatccaaccaaagtatggcttctttgaagcaatagtttctgagatcccagtttaatactcattctaatcccaaaaaggaacttcctagtgatcttattccttggtttgcttcctgcaaactagttggccaacagtctaaactacatcttcatttaatcctgtaatctccctttccccacaacctcactattcttgaaagcacctttaggtttgaacttctccacactccattgtaaatggagtcagtcctttggaaaaagattaggagctatctgtcttacggcctacttcccttttgcccttggcagaatctctgagcccaagctgtgttcctgatagagcatatataaatttaaattttgtcaaaacatatattaaatacatgaaaacttctcaactggatttttaaaatcctatgctaggctgggtgcagtggctcacacctgtaatccaagcactttgggatgctgaggtgcgcagatcacttgaggtcatgagttcgagaccagcctggccaacatggtgaaatcccatctctactaaaaatacaaatattagctgggcgtggtggcaggcgcctgtagtcccagctactccagaggctgaggtaggagaattgcttgaacccaggaggcagaggttgcagtgagctgagatcatccggcctgggcgacagagcaagactccatctctaaataaataaataaataaataaataaaactctaaattagacctaaccaaatgagaatctaggattaaagcctagacatgtgtattttgacacttctccatgtgtttatgatgtacatctttagtttagaaatctgtatcagagacattcactaaatattagtcctgaggtagaagtgcttataaatcttttgtgaagatttatccatactatccctaaactggctggctctttttattttgtagttttaaaattttttcactggaacagattcagaatcctgccccaagaccagctctttttacatatgcattttcctttgtttctttaaagtagcctatattcataagtttggcaaacaaaggattatcatacatgtctggttttatgatgtctacattaatttttttctcttgcaggtgaaaatgagttcttcagtaagaagaaaaggcaagccaggcaaaggaggtggaaaagggtcttctagaggaggaagaggaggcaggagtcacgccagtaaatctcatgggagtggtggcggtggcggtggtggtggtggtggaggtggcggcaacagaaaggcctccagtagaatatgggatgatggagatgacttttgtatcttcagtgaatcaaggcgcccttccaggtcattataactctttgaatgtttaaatatggaaatggtatcaacccctaatgtatgggacaacagatggctgagaatggaaaaaaagtcgagtaattctggtcaaattgtcttcctctttgtaacccttt

SEQ ID NO: 23273 - DNA, 2300 bp, Homo sapien
gttgggtaaggcctctttgagattttaaaggacatccggaagaaattgacagaatgagccatgaaatagtcatccctcggtatacacaggggattggttccagaacccccatgtataccaaaatccacggatactcaagttctccagtcagccctgtagaacctgcatagaggaaaagttggccctctgtatgtgggttttgcattccaggaatactgtcttttcttttttctttctttctttttttttgagactggatcttgctctatcacccaggctgcagtgcagtggtacgatcatagcttactgcagcctcgatctcctaggctcaagcaatcctcctgcctcagcctcctgaatagctgggaccacaggtgcaccaccacacccagctactttaaacattttttagtagaaatgaggtttcgctttgctgcccaagctggtctcgtactcctgagctcaagcaatcgtctcaccttggcctcccaaagtgctgagattaccggcatgagccactgtgcctagttgaaatactgtattttttttttttttttttttttttttgagacagagtctcactctgtcgcccaggctggagtgcactggcgcagtctcagctcactgcaacctccacctcccgggttcacgccattctcctgcctcagcctcctgagtagctgggactacaggcacccgccaccatgcccggctaattttttgtatttttagtagagacagggtttcaccgtgttagccaggatggtctcgatctcctgacctcgtgatccgcccgcctcggcctcccacagtgctgggattacaggcgtgagccaccgcgcccgacctgaaatactgtattttcaatctgtgttgggttgggaaaaatccacctgtaagtggagccgggtagttcatacccatgttgttcaaacgtcaactttactcacaaaaatgtagagtcattaaaatcttaacaggcaagaaaaataacaggtcaaactgaattctgtaaggttgtgcaccaataattacctattatttctaaaatttagggaaatgaaataacaaatcagttagattagaacttcatctcaaaaaccatgcagcccaggtaaatttgtgtactgagaaacattaggaaaaagcaagaggatacttacgctgaatcaaaacaagttgtctcacaccaacccagaaaatgttacttttacaactagatctgagatatgcgcttaacattttaaacgaagatttactgactgtaatggtgtccaataccactctcccagagttttcaagggaataggaattaggttgtataatccacgtggttagattccactatctattccatctagcccgggaagactccaactatctttcttcaccatggatacagggacctaagtttggctgtaagagtattctttgtttgatagccaaggcactgaaaagtgactacacactactctcctcccaggcagatctctgactgatcacaatatatccagctccatccagatatccagatctcgtatcctttttcgaactcacatcgtccccacccttctccccaaaaaagccacacagacggagtcagagaacggagcctgatcccttcaatcaaccccttagcctgctccaagactgaatttcacgccccgccccccccggccccaacctgcagtttgagcgtggacaacctcagcggcagagcccgccttggttcggtatcagggcctgggatcctgctggtccagattcaccggccccaggcagactggatgaaacacactgggccgcgatgctcgtcagatcccgaccactcctggagcaggaggcggcagacacactgacaaacagggtgacgcgcacaccgtgcgcacaacgcgcatcacttgtccgcagaagtggaagacgtacctggctcgcagagttgggtcccgagccggctgtcgggaggtgctgcccaagggtcagaggtccaaactggacttggccaccctcacgattctcacttggagcagcctgcggtggcccagctgcagcggcacagtcccggcgccttctgattggctcagctacagcccctcgcgtattcgcttccgggtgagaggtgcccggtcgccccagcaaccaagtcgcacctggagctgtcctagcgcctagttctctcccggccgcagagctggccgcccagggggagtcgcagagtttggaagatctctctaacacctctcggccaagtgagtgtccctcctcctaacgacccgggcagagaagagctcctttaagtc

SEQ ID NO: 23274 - DNA, 2300 bp, Homo sapien
ccacaaaaaatacaagaattagctgggtgtggtgttgcatgcttgttgtccatgctacttgggggctgaggtgggaggatcgcttgagcccaggaagtgaaggctgcagtgagtccgatcacaccctgccctccagcctgggtgagacagcaagactctgtcttaaaaaaataataaaataaaaaaaattaagttttaaaaatagaatctggtggctcatgcctgtaatcccaacgctttgggtgggtgaggtgggaggactgcttgagcccaggagtttgagaccagcctgggcaacatagtgagattccatctacaccaaaattaaaaactcaaaaagaaaaaaaaagaatctgtaactaaaactcaggtaatatcaatatggaaatggtgtggaggatagagagcaatcttgctagaattctgatctcgtttaggggttaaatatagacactaattaacactaaatcttagaaaaatctgaatttagttatgtttgcttattttttccccataatttctaagatttggttgtggataaagggtgaagtatggtggtatacagaaattgccatgtgtgctcattaattagttatttacatgtctgcaagatgtgaaattccaagagagcagggacacagagctactttctttcttttttattttttaatttaatttaatttaatttaatttatttatttatttatttatttttgagacggagtctcgctctgtcgcccaggctggagtgcagtggcttgatctcgtctcactgcaacctccgcctcccgggttcacgccattctcctgcctcagcctcccaagtagctggaactacaggcgtcagagctactttctaagtgtttaactaatgataactaactagattaccagatctgcttgtagtttcccacagatgccatgccgtactctgggtggaacacccttctcttctttacctggttaactgctattcatcctcaagagttggcaaaatagagtgtagtagttaggggttcatgctctggcatcggactacctacctttgcatccagactccaccattttctctgaccttggacaaataattatcttatgcctcagtttcctcatccttagatggggcaaatcaagtaaatgagctaatctagttaaagcacttagcccagtgtctaaactctgtaaatattagctattgtattcttgtagccccagctcaggtatgagctctcccacaaagcctttcttctcattacttgtcaacctcagactccttcaggaacccccacggcactctgggcctattcctactgtagtacttaaggttctattaaaaccatgcttttgtatcgggatcccctatcccacccagttcctccaggacacggatggcagattagtcaaatctcttctcaccccactgtccgactccgtgtttagtactaatagtaacagaacgtctagtgaatgaagggcacttcggaaggaatcgttaagtgcctatgaagcagagcattaaacgtaatcatatcagaaactggactgttttcaattgccgctaaaatgttctacattcgaaacttgggaacgtcagagctagagggaacctcacagagaccacccggcaccatagcggaaactgaggcccagggaggttggcacgcgcctcgggtgtctcaacagcgaattaacaacagaatcagagctagattcccagaccaggggttcccccgtgcccctcggctagacggtcaggaaatatatcacacccccacaggagttaccgggagccaagcaggttctgactccacgctagttcgacttaaaggagctcttctctgcccgggtcgttaggaggagggacactcacttggccgagaggtgttagagagatcttccaaactctgcgactccccctgggcggccagctctgcggccgggagagaactaggcgctaggacagctccaggtgcgacttggttgctggggcgaccgggcacctctcacccggaagcgaatacgcgaggggctgtagctgagccaatcagaaggcgccgggactgtgccgctgcagctgggccaccgcaggctgctccaagtgagaatcgtgagggtggccaagtccagtttggacctctgacccttgggcagcacctcccgacagccggctcgggacccaactctgcgagccaggtacgtcttccacttctgcggacaagtgatgcgcgttgtgcgcacggtgtgcgcgtcaccctgtttgtcagtgtgtctgccgcctcctgctccaggagtggtcggga

SEQ ID NO: 23275 - DNA, 2300 bp, Homo sapien
gattttagattgatagtttcgttggatgtagaatattaggttgaaaataattttgtctcggaattttaaagacatagtgccatttttttttagaatccactgttgctaatgtcagtcctttgtagtttattgtaggtaatctggtttttgtttgcttgtttttaactagcctagctggcctttggtctttatgtcatgaaattgtactgtaacctgtctaggtgtgggattttgcttagttcccatttgtagtccaagcagtcattttcttcagttctgagaaaaatttggctatttattcaaatatcccttattctttccctctggaattcttattagactgacagtagccttttggatccactttccatcattttaaaattctttgtgctactttctttttttttaattaaaaaattttttttccagccatctcactcacactttgtgctactttctaagcacatttttcaacctaatgttccagttcactaatttgttttcaattgtatctattctgcttttcatcccttctaagaagttttatttcaccaattatattattcatttcctggattgctaattgttttttgttttttgtaatcacctgttcctatttcaaggatactaatactctccctttctctctgaggatgttacagtttaagtcctctacctattgtgttaactctgtttcctcagtgatgagcctccaagcctttctcaagtggtacctaaattaatttttaaattcccttgccccacccgtaaagactgattcagtagatgtggggtagagagaagaaacttagaagcatctcaggtgattctgaaggatgggcctgcataccgtctctacataagttttcttcagtatcggaaaatacagtttctagttttagtccagtaagtgtccagggatctgaggcccagagtccccctcagtcttgcggtcctctttcttcctttttcacttggtctccattccagtctcattctgtgtggacctaccagcccttccccacttgctatctttattttccatttcttcctattgccaatttaaagattcctcactccaccttacctctgtgggacaatcagtaaatcatatgggctaccaaagagaaataaaaacatatccacacaaaaatctgtacaccaattttttttttactcctaggaagctgtatgttttgaaaatgtacatcagtgtttatagcagtattattcataatggcctcaaactggaaacaacctacatgtccatgaactgatgaatgaataaacaaaatatgctgtttctgtacaacatatttatacaatatacttggctataaaaaggaatgaagtactgatacacgatgcaacatggatgagccttggaaacattaagtgaaacgagccagacataaaggaccacatattatatgatttcatttataagaaatgtccagaataggcaaatccctgaggcagaaagtagattagtggttgccaggggtttggggttgtggggtgaggggtgtttgaggggaatcataatgggtaactgctaatgtgtacagagtttctttctgggatgattaaaatattctaaaattagattgtgatgatagttgcacaactctgaatatactaaaaaaatcaaattgtatttttttaaagggtagattttgtggtgtgtgaattatatattaataaagctatcataataaataaattttaaaagagatcatctaggcaaaattgtttatttccccgggaccctacattagacaatggaaataccaagtaatcatgatatgatgtgatcttgagaagtaagtccatttggatagtgctgaaagcacattgggtataggtcttatgacataagaatgtttacacttggttgggtgtggtggctcacatttgcatccccagcactttgggaggctgaggcgggaggatcgcttgagcccaggagtttgagactggcctgggcaatgtagtgaaaccttgcctctatcgaaaaaaaagtaaacttatgtcactgtttttaaatcttttaaaacagcttcagaagtgtataagatcagctttatctttccaaatggagacaagtatggtaagtatacgcttcaattactttttctgtatagaaaattaaatagcttaggaataaaaaactgagactgttaaattttataaaactactattaggatattaactttattaactaaaataacagaaatcctaatagataaagagcttttaaaatcaaaattccaatgccttggaaacctatgggatctgt

SEQ ID NO: 23276 - DNA, 2300 bp, Homo sapien
agcagttacaaaacttcatcttctttgaaatgcaacaaatagagccaaaatatgaaacccctagagattatacccagactcaacaatatggctgccactgcactctgcgtatggaaaataaaacccccaatctttcttccaagttaaaagagaattcaaatgaggtcaatattttgtttcactctttcacatgttaacgtgagacctaattttcattttcagaccaccagagtaagatattggttttagcatttatatttgcattgtttttatttttttttgagaccgaggtacaatggcatgatctcagctcactgcaacctccgcctcccaggttcaagggattctcctgcctcagcctcccgactagctgggattacaggcacctgccaccatgcccggctaatttttgtacttagtagagacagggttttaccatgttggccaggctgccaccatgcccggctaatttttgtacttttagtagagacggggttttaccatgttggccaggctggtctcaaactcctgacctcaggcgatccgtctgcctcggcctcccgaagtctttatgcatttttgtggtagaattaaaatatgaatacataaactagcagaataaccacttctggtcagtgtccacttacatctgtcaatttaagtccagaacaactggacatcccatctgatggtaccctatcctagtttgtaaactgtgtaaattatccattacccatgactccaaaaccaaaaaccctccatgaaattgggcatatcgagtgacagcttttacatgttggtaattctttgtgggtggaagtttgagattaattatatagcatgctttacagtgacaaggaatattttaaaatttttattatgaaaatttcaaatttacatagaagagttcagtgaactccacatgccctcatccagattcaacagttatcaagatcatgccacgtttactttatctaggaacgtaatttgtttctgagtgtgaagatccacaagtcgaacagaagttgagttttccattattccgtatgactctgctagggcaagcaagggagagaagagagttgaaggtgtgccttggagcaccgcaggtggtgaggagggtcagggcttccacgcggggtgatgacagtccctggcccgcaggccatttcccagaagctcagacaataccttcgggcctccgctcgacggactgccttgtccactctccgcctgggaacgggggttcgtgggagcgccttagtggaagtttgtggagctcgggaggtggcatgcacaggcgcctcggagcgcggccccgaggggcgccggcaggcgagaggcctgcactaaccggccgtaagcacagctcttttgtactctgttttccccctaaagacatctgatgcccccagtgaagaaaagccaacagcagcaaagcctgatggagagcatgcagcccgggaagcccagtgactgggagctggagggcaggaagcacgagcggcccgagagccttctggcaccgacgcagttctgcgcggccgagcaggacgtgaaggcgctggccgggcccctgcaggccatcccggagatggacttcgagtcctctccggcggagccgctgggcaacgtggagcgctccctgcgcgccccggccgagctcctgcccgatgcccgcggcttcgtgcccgcggcctacgaagagttcgagtacggcggcgagatcttcgcgctgcccgcgccctacgacgaggagccgttccaggctccggccctcttcgagaactgctcgcctgcctcctccgagtccagcctggacatctgcttcctgcggcccgtcagcttcgccatggaggccgagcggccggagcacccgctgcagccgctgcccaagagcgctacgtcgccggcgggcagcagcagcgcctacaaactggaggcggcggcgcaggcgcacggcaaggccaagccgctgagccgctctctcaaagagttcccgcgtgcgccgccagccgacggcgtggccccacgcctctacagcacgcgcagcagcagcggcggccgcgcgcccatcaaggccgagcgcgccgcgcaggcgcacggcccggccgccgccgccgtcgccgcccgcggcgcatccaggaccttcttcccccaacagaggtcccaaagcgaaaaacagacctatttggaagtaaggagggtaaagtaaaaccgaaccgaaacccacagcgtcgacggccccaggcctagatctgcaggaagcatcccgagttctcctagcgtggagaggagcg

SEQ ID NO: 23277 - DNA, 2300 bp, Homo sapien
cctcggcctcccaaactgctggtattacatacgtgagccaccgtaccaggcctgttttttaaatcatgaaagaacactaagatccacttcaaaatgttttagaactgtaatgaaataacctttaaaatatgtaaaagagtagcatcaatgtcctaagttaaaaaacattaaaaaatgaatagtcaaaagtgtatttcaacaaatgacttgcggcatagaccaggtgttgtgaatgctgtggtttcaatgtgtccccatattttatgtattggaagtttaatctgtatatattgattggaggtggggcctgtggaggtaattaggattagataaggtcatcagggtggggtggggcccccatgatgtcaggcctgtttttataaaaagagaaagagacctgagctgacatgctgtagttcccttgccatgtgatgccctgcaccgcgtcaggactctgcagagtccctaccagcaagaaagccctcaccagatgcacctgcctgtcttgaccttctagcctccaaagctgtggtaaataaatttctttatgaattacccagtctcaggtatttagttatagcaacagaaaacagcatgtgacaatgagttttgccaatcttcaggaaacagttactcttttgcaaattgttacaatgaatagagacatgaagggtaacaagtttatcaggattgtatgaatacattatcaaaactacataacgacagtaaagaaaaaactatgagacattctcagatatcaatgaaatggcaatgaaaaatcagtttatgatacaataaaacatatgtctatatatcttatgatgtttactcttatgtggtttgacattttaaagttttaatgtagtattctactttagtaggttaaaatctcaagaaaaaggctttcttaaaattaaacattcactcatgaatttctttaaaatgttgggcaaacaagcaatagaagggaactttcttaacctaataaaggacatttactaaaagtctgtaagagatataataatagttaaactatagcaaaactaagaaactagaaaagaataccactatcaccacttctattcactctaatagcgagtactacccaatacaaaaagacagaaaaggaatagacaagacaaagttgtcctatttgtagtcaatataattatctatatagcaaacccaagaaaatttgtataatattaaactagttggcaagttcattatagctattggataaaagatcagcctgtaaaaattggtagcattactgtgctcagttacagtccattgaatatataatatttttaaagactgcattcactatagaaataagaccataaagtacctggaaataaacctgactaaagatacacaggacctttgtttttaaaaaaaaaaaaaaaaaaaatcataaaattagctgggcacagtggcttactcctgtaatcccagcacttttggaggctgaggcgggcggatcacaaggtcaggagtttgagaccagtctggccaacatgatgaaaccccatctctactaaaagtacaaaaaattagctgggcgtagtggcgggcatctgtgatctcagctattcaggaggttgaggcaggagaatcacttgaacccaggaggcggaggttgcagtgagccgagattgtgccactgcactccagcccgggtgacagagtgagactccatctcaaaaaataaataaataaataaatacataaaattagattcacaaggaagatctgaataaatggaaatatatactatgttcagggatggaaagactcagtactgtaatgataccagttgtcccccagataatctacaaatttaatgcatagcaagctgatcctaaaattcacatggtaagaatgaggagcaaaaataacaattttgaggaagaacaagttgaggggacttgttcttgtccccttaagtacttgttaggtaaagtacctgttagataaagtcttgccacatattaagacttactatgaagccagagtaaacaagagtgtagtactggtgcaggtaacaattaggtagcagaacagaataaagagccctgaaaaaaatatatacatagatacttctcctgaaatgtgacagatattacattaatcagtagagaaagagtgaactcattaataaatgacactgggtcatacctggttaaatggaaaaaaattcattccataacacataattcacagaaagtactcaacagattaaaaatctaaaaatgaagagtagaacttcaaaagaaaatataggagaacatatttat

SEQ ID NO: 23278 - DNA, 2300 bp, Homo sapien
gtaccaccacacccagctatttttctttaaattttttgtagagacagggtctcactgtgttgcctaggctggtcttgaactcttagtctcaaggaatcctcctgccttggcttcccaaactgcttggatcacaggtatgagtcaccacgcctggcctgctcttttgtttctatatgttagactttttgcagatttccatatataagcgatgtcatcagtattttctttcagtgtctggcttattttactgagtgtaatgtcctctgggtttattatccgtgtagttgcaaatggcagtatctcattttttaaggctgaatgatattccattgtgtgtatctgtgtgtatcacaatttcttttttcattcatctgtcagttgacacattgtttccataacttggctattgtgactaatactgcaatgaacacagtagcacagatatctctaccaggtgctgatttcatttcctttgagtacatacccagctaggtcatatggtagttctatttttaagtttttgaggaacctccattactgttttccataatggctgtgccaatttatattcccatccacagtctacaagggtttccttttctccacaccctcaccaacacttgttatctcttaccaaaagagtcattctaacaggtgtgagatgatatctcattgtggttttgatttgcatttctctgatgattaatgatgttgagtaccttttcatatacctgtttgtcattagtatgtcttcttcagaaaaaaacagtcttggccgggcacagtggctcatgcctgtaatcccagcactttgggagggcgaggcaggtggatcacttgaggtcaggagtttgagaccagcctggccaaaatggggaaaccccatctctactaaaaattagcagggcccgtaatcccggctactccagaggctgaggcaggagcatcacttgaactggggaggtggaggttgcagtgagtcgagatcgtgccacttcactccagcctgggcacagagtgagactctgtctccaaaacaataaaaaaagatatatggtttgtaaacattttctcccagtctgtagggtgccttttgattgtgttgattgtttcctttgctgtgcagaagctttttagtttgatgtagtccaagttgtttatttttgcttttgttgcctgggcttttggtatgccatccaaaaaaatatcaaggaactagtattaacctatacaattcagtagtttttagtatatttacagagctgtgcaactattgcacaatcaattataaatcattttcatcacctcagaaagaactccataccctttagccatcatcctccaaacctccagccccaggtaaccattaatctattttctgtctttatggatttgtctgttctggacatttcatataaatggactcataatatgtagtctttcatgactgccttttttcacttagcaaaatgttttcaaggttcatccatattttagcatgtatcagtacttcatttctacgactaaatagtattgtgttgcattgatgtatactacattttgcttatacattcatcaatagatgaacatttgggttgtttctacctattggctattaagaatagctgcatattttcattcccactagcagtgtggaaggctttcagtttctatattttcaccaacacttgtcttttttattctagccatcttagtggatatgaggtgatatctcattgtggttttcatttgtattaccctaataactgatgatgaacattttttcatgtgcatattgaacatttgtagatcttgtttgaagaaatatctgttcagatcctttgcccattttaaaattgggttgtctttttactgttgagttgtaagaatattttttttttgaggtgtggtctcgctttgttgccctggctggagtgcagtggcacaatcttggctcactgcaacctccaccttccgggttcaggcaattctcctgcctcagcctcctgagtagctgggaccacaggcgcctgccaccacacctgggtaattttttgtatttttagtagagatggggtttcaccgtattagacaggatggccttgatctcctaacttcgtgatctgcctgcctcggcctcccaaagtgctgggattacaggcgtgagccaccgcacccggccaaattttttatatattctgaatgtaagttccttatcaaatatatgaatcgcaagtattttttcccattatgtgaagtgaagtcttcttatagatatagtattgtgattaataacaaat

SEQ ID NO: 23279 - DNA, 2300 bp, Homo sapien
tgctgggattacaggcgtgagccactgcgcccggccggtctgtgtgtatgtgtgtgtgtgtgtgtgtgtgtgtgtatatttttttttgaattgaaacggagttttggttttgttgcccaggctggagtgcagtggcatgatcccggctcactgcaacctctgcctcctgggttcaagcgattctcctgcctcagcctcccaagtagctgggattacaggcgcccaccaccatgctcggctaatttttgtatttcttatggagacaggttttcacagtgttggccaggctagtctggaactcctgacctcaggtgatccatccgcctcggcctcctaaagtgctgggattacaggcatgagccacctcgcctggccggcctgtgtatttttaaaggaaataacctaagagttgtttttccagattttcaaagaggtcctgtaaagattaagaaccactgaacctttctcgtttatgtgatcctggttactgttctcaggaatagcaggacacaatgtcagctttaacccaggctagttcctctaaactgccttcttatcggtgaaatgaaaataatagggttgctatggggattaaatgagatgatactcaaaaaaatgataattaatgataaatcataaggtgtctgccacaaagtgcccctattataaacaaacagtggcctggagggacagtttataaatactgctcctttagcattccactaacattgactgagtgcctgttctacactgtgtagaggccctggtgaaaaagatctgccttccagtttattatctagtcgaaagaaccgcaaaagataacaaaacacaatagactgaacgccctgagaggggcataagtgcagtgctctaggagctgtaaaagaggtctcgatatccactggaggaaagtgcttactggagttcatttctggagtgggtttaaaagatgaacagagggaatctaaaacattcacacaaaatcaatactacacgtacacattttattattttgtggaaagaccacttagaaacaccgcaatcacttctactactcagcagatactgagcagtaggtttcgtgacagagcacctgtcttttgtccagtctgtttactatacattgcgtgctctgggcagtccttatcttcgtgttcaggaacaaagtacacacacccctttccgaaacgaagggcccagggactccgagaagggtgggagccctcacggccaggccacacaatggggagcctctttaccctagtcatcacccacccttgcaggccccactttgccagggtgcgacttctcgggccccttcgcccctcccctgcagcccccaggagcgcagccacagcccggccgggcgccctccctgtctctctctctctttctctctcgagctttcctcctccttcaccgggagccggaaaacccggagcgaaccagcccagcacggcagcgcatgctcagtagcgagcaggttcagttcgctagtaggaagctccagcgctacaccggcggcggcggtggcggcggcggccgcggcggcacctcagggcagccagattccccaacaacgacctccggtccttccccttccccgcgagacctccgccccagctccgccccgcccggggctcttgcgtttcggagtcccaactacgcggagcgggcgccgcggccggagcgtccctccacacgtcctcccccagccgccagctccgccgcggggccagaccgggcccgggagtgcagccccggcgggcgggcggcggccgcggcagagggcagcccggggcggcgccggcgggccggggaggggcggggggcctggccccggggcggtggtgcgggatgccgccgcctccgggccgcgtccgttctccacggctggtacctgtgtcgggtgggtggccaggcgcgggcctcgccccccagccccctcgccagggctagcccggctgcgcggcgcccggagggggccgggccgtccggtggggccgcggccctgttccgcgctgcgagctcgccctctcgcggctccctggcccggccgccgccgcccctctccccgcccagaggcgccccgggggcaccatgcaggcgcagcagctgccctacgagtttttcagcgaagagaacgcgcccaagtggcggggactactggtgcctgcgctgaaaaaggtgaggagcacgcgggaccccgcttcccggccgcagccccccagcgcgggcgctggggaagggctggggaggcggggcgcgcgcagggccgtctttcttcccggtctcgccgc

SEQ ID NO: 23280 - DNA, 2300 bp, Homo sapien
taatagggctttcagaacataatctgtgatggattttccatgtgttacttgagtgtgtatgcttgaattttctttctttaataagagaggaaatcgaattcattccccctcaaaaaagcagcactgtaaaaaatagtatgtcagtagtcattatatccaggtaaacatttttctccattgtatatttttatggtggcaagtggaagtagattatttctttcaccattgagataatctgtagttggaaaagacaatattattagagaagttttaaaaaatgtgtactcatttgaaacaagagaaatttacaagtagtcaactttttcacttgacattttgttaataccaagacctggataaagtggttcttcgaattatacattctttttgtttgtttgtttgtttgtttgtttttgtttttgagatggagccttgctctgtctcccaggctggagtgcagtggtgcgatctcagctcactgcaacctccacctccagggttcaagagattctcctgcctcagcctcctaagtagctgggattacaggcctgtgccaccacacccgggtaattttttggtgtttttagtagagacagggtttcaccatgttggccaggctggtctcgaactcctgacctcaggtgatccacctgcctcgacctcccagagttctgggattacaagtgtgagccactatgcctggctgaattatgcattcttttgcacttaactgagaggctgtgtaatgtagtgattaaaattgtgttctttgaaatctcactccgtgggttctaattctgtattaccttcactgtgtcttttctcatctgtataattggataaaaataacacctacttcatagaatatttgtgcacattctatgtaatttgtatagaacaatgttaagtgccattattattgtaattgttattaggttatattaacaagattctgctggataaagtggggtggggtttttgagactaattagaatttttctatttttaattcttagactgatttatttaaatatgttggccttagtcatcatgtaatatttaattcggtcaccaaaacattcattcaagaatggatgacacaaaacagaaaaacccagtatttccatagaaatcactagagatgtgaaagaattcataagaatgaatgctttctttgtgtttattattttcttttggggctaagaacttaagaatctgttcttccatgaaaataaaagctaggagcaataaataccctaaaaggattctgttattgttttgtgtttttcagacagagtttcactcttgttgcccaagctggagtgcaatggcacaatctcagctgggttcaagggcctcctgagtagctgggattacaggcatgtgccaccacacctggctaattttgtatttttagtagagatgggatttctccatattggttaggctggtcttgaactcccaacctcaggtgatccacccaccttggccttccaaagttctgggattacaggcttgagccactgtgcctggcctgttattgtttttaaagactgctttgttcaatggcccacgctctttcttctctccaccaggtggaagtatagcactttttgtaccatgtcttcttacacaactcctcctagtcattgtgtatgcacttgggttagaagagaaaagataaacagcatattccagagtatgaaatgttccttcagctggattttacagcatcatatttcagttgtttgcttgagcataatgaaaacaatagatgggataagtttcctttccacaaattcttttagttcaactgaggtcaacatagaaccattgtcagaaatagcatatgaaatcttttgatagctggaagagctgcagaggactaaactaaactaacaaaataatatccaaatatttttaagtggatttccaattaattgatgaatataaacctttggcatgtggacaaattggttgtatataacctgtgagaacattgtcttttatagcttgattaaggcaagtctaccttattttccaggtgcagcattgtactgcaagtcaatcgatacaataatttaagtcacttcagctataatggaaaagtatgaaaaattagctaagactggagaagggtcttatggggttgtattcaaatgcagaaacaaaacctctggacaagtagtagctgttaaaaaatttgtggaatctgaagatgatcctgttgttaagaaaatagcactaagagaaatacgtatgttgaaggtaagttaactttatatatatgtaaaatatca

SEQ ID NO: 23281 - DNA, 2300 bp, Homo sapien
ttgagccaccgcacccagcctggactgcattttcattataaataaaagttaaaaattaaagatctctccagcaaacatgatgtacctattgcaggcaaggcaccgtgttatttactagagagacaaaaatacattagatacaattgctgccctcgaggacaatagcaactggatttaaaactattagacatgaatccccttctgttaatgacttatacaaattgcttagttattattggaagcaatgtagaagtaatcaaaatctgttgtgtttttttttaaagcgttgtttctgtgtttaaactgtaaaagtttaaagatgcgtctttaatcagaagcattggttttttttctgcttcgttgctctttatttcaaagagaattatttaagttgctgtaccttattaaaaatgacagattttatcaaaagcatgtgccccaaggtaatgggaaagctcctagagaagaggtttggagaatattgatgaagtgtctgtgcccgtggaatggaggcactttagcagccacagggaaagaaggactgtaggaacagcaggtgaacacagagcttcacattccagccatgagtaccattttgtgtcttccaacactttaaaactacctgttaggatatcccccgttgcaccttttacttttctttagaatttatgagttgccagattaaaaagaaaacaaatcaaatccagtagcttcataaaatgctagcaataaccatttggaaaatacagtgaaaacacagccagtttataaaagcaacaaaaatataaaatatataagaatgaactaaataaaatatgcatgagagtggtattttttttaatttgtgaagaaaaattttagaattccctttgtcatcctcccttttagtcagctccctgcttcttttttacaaaggaaacctagaaagttcttccttttttctctttttttactatctaagctcatatccctaaacattagaactaattttatttaatttttcaacagtatttaagtggaattataaagtatatgttcatttgtgtctggctttttgtgcaacattatatttgtatagttgctggacatagctatagtttattcatttttcagttgtctatatataattttttattttgtgaatgtgccgtaattttatctgttttgcatttgtctcttgtatatgtgtactcatgttctttagaatgtatacctaggagtattattgcaaggtcctaaggaatgcctacttccagcattaataaataatgcagttaactagtctggctatgccactctatgtcccaccaccagtgttgtatgagcatttgcttactcctctgggatgcttattcactgtcattctttttaattttagccattcggtgggtatgtatagtatttatctcattgtggttttatttcttgattactaatgaagttagtgttttccatctattttttttgtccttcagaatgtgaatttattctttgtagcaatataaattttaaacatataaaattaaaatgggttgtattataactgagttgatttgataaaaatcacttgagatatgaagctaattttttttgatttatgactttttctgttcacatcttacaagaggagtgtctcttgctaattagcatttcacttctctcatccatgtttgctcagttgattaagaaggcagaggagtataactgaagaagcatcacattgggagacaggagactctgccacaaaggccgggggaccatgggctggtcacccagttcctgggccccaggttccaactctgaaaagagagggttggacacgtgacttataaattcccttccagccttaatgtcctaaaatcatgtaattataactttaaaatattttgcggtggtaaacctaaaatgtttataaaagagagtccataatttagatttttctgcattacctgaatttctgtgacaagatgcagtctttattgtagaaagctgttttatagtattctcatagaattattcggtttttattttccttggtttaatgtatttttgtttctttctctagcacatagattttcctataccatgtccacttagaatgtttgaaatgctggtagttcctgaacaggagtaccctttagtttgtgttggtgtcagtagaggtagagacttcaaccaagtggttcgatttgagacggtcaatccaaattctacctcttcatggtttacagaatcaggtttgtaatttttatggaattattaagggtaatacatatactggttttataagtagtaagttt

SEQ ID NO: 23282 - DNA, 2300 bp, Homo sapien
ctacactgactcagagtgtggctacaactcaaatgctaaactaaatgtgtgcctcagtttctccactggaaatgtaatacattatctgcccatctcctatctttagagaggcagcactgccaattggttaagaatacagtccctaattggttcaaattttggctttgccacctaccaactttggcaagttaatctccttgtgcctcagtttattcaactgcaaaatggagttaacaatagcacctatctcacagggttgctgttaggattaattagaaaaatcttatagtgcctggcaagtaacaagcattccataaacatcagctagtattatcattattttaaacgaatgacaagattaaccaacttagtatacctctattacacttaggaaattacaggccctaatttttttttgctttttaatcatgtggcttaactactaactgttctttttaatatagcaagtacacagccaattagtcctgtaaaaaaattcactgtataccctgccacctaaaacgtatacattcatcgagttttagttaacttttcatcgcaatataagcgaactcccccaaccagtcataagtgacttgcatccatccacttctactttcacagtcatcaccatattccttaacaccattattcttacctagactatcacagtggcctcccaactgctccattccactcttcatgctgtagtagggagctcttttaaaaacctaaatctaatgtcactcctctgcttaaaagcctgcaatagttccccattgtcctaaacaagtccgatctcctaatgagaactaagaggcctgcaagatctagggccaccctcccgctctggctgctcaggctatacaggccttctttcacatcgggcctcagagccttcacatatcatgctcccctatctggcgtaatcccctctccccagtaccctaagcaacgcctaatcatctctgagatctcagctgaaaggcgatgagcgtctgataccctaaacaggatcaggtcctcctattacatgctctcataaccctgatcctaatactcttttctgcatcacaaaattaaacggcaataattatttaaatggctatttaatactgtccttgtccaaaaaaatagaaacacttaggaagatttggaaccaagtctatcgtttactgctacaacccaaagtgcttacttgccaagtatctcatacattgtaggtgggctcaatatatctatattgcatagtaggaaaagtgatgagatccacgatggtgaaaagtagatcatccagaaaatcagactaaagcagaacactggctgcactgtattaaatatgtaagttaccacaggcattacactgaagagtaaaaacctgcttaaacatgggcaaaataaagttaagactgaactttccaatgcaaaattaagtttctttgtgcatcctcaggtgttatgtgaaactggaggagttcaacttcagttaccagtaagaagatacacaactaaatcaagactgctgccacatttggcaacaacctcctctcttcttggcagtaactgtgaggccaagagttgagttggccagggaagagtgatttatcttcccacatttagaagtggtccctctacaacaggaatgctgtaccgctactggactttgaattctaaccttgtcaaaccagtaccttccctaagtattcaagtcactttttaaaaaacaagtttaaatggcatcgcagtccaattcgacttagagaaaacaaagttgctctttccaaaaaaaaaaaaaagtcattactctggaaaattaaaagaaactgacagggggatgaataaggcgctaaaggctgagagctgtcgatggaagatggaggtcgctcagcatagtataataactaccaccgaggcctggtgggcagcagctcccaacctagagcggacgaccccaggttggcgtgaagcaggcaggtttgacaacaccagacccctgctgtccggttcgtcgcgctgaccctgccaacgcaacaaacgcccagaccttctctgcactatggatgagcagtgtggcctgctctcgttctgcccttccctggaaatgcgcgcaagaagggaggtggcaaaaatcatgtccaccgggggggctcaggtaagggctggggaggtctcggggttaaacattcggccctttgttcaccaaggcagcagagcccttggcgtccgcagctcctcctccccgactgctccctggcgccagcgtctcccgaggacaggcggcaagggctcggacgcccagg

SEQ ID NO: 23283 - DNA, 2300 bp, Homo sapien
ttgtcctaaacaagtccgatctcctaatgagaactaagaggcctgcaagatctagggccaccctcccgctctggctgctcaggctatacaggccttctttcacatcgggcctcagagccttcacatatcatgctcccctatctggcgtaatcccctctccccagtaccctaagcaacgcctaatcatctctgagatctcagctgaaaggcgatgagcgtctgataccctaaacaggatcaggtcctcctattacatgctctcataaccctgatcctaatactcttttctgcatcacaaaattaaacggcaataattatttaaatggctatttaatactgtccttgtccaaaaaaatagaaacacttaggaagatttggaaccaagtctatcgtttactgctacaacccaaagtgcttacttgccaagtatctcatacattgtaggtgggctcaatatatctatattgcatagtaggaaaagtgatgagatccacgatggtgaaaagtagatcatccagaaaatcagactaaagcagaacactggctgcactgtattaaatatgtaagttaccacaggcattacactgaagagtaaaaacctgcttaaacatgggcaaaataaagttaagactgaactttccaatgcaaaattaagtttctttgtgcatcctcaggtgttatgtgaaactggaggagttcaacttcagttaccagtaagaagatacacaactaaatcaagactgctgccacatttggcaacaacctcctctcttcttggcagtaactgtgaggccaagagttgagttggccagggaagagtgatttatcttcccacatttagaagtggtccctctacaacaggaatgctgtaccgctactggactttgaattctaaccttgtcaaaccagtaccttccctaagtattcaagtcactttttaaaaaacaagtttaaatggcatcgcagtccaattcgacttagagaaaacaaagttgctctttccaaaaaaaaaaaaaagtcattactctggaaaattaaaagaaactgacagggggatgaataaggcgctaaaggctgagagctgtcgatggaagatggaggtcgctcagcatagtataataactaccaccgaggcctggtgggcagcagctcccaacctagagcggacgaccccaggttggcgtgaagcaggcaggtttgacaacaccagacccctgctgtccggttcgtcgcgctgaccctgccaacgcaacaaacgcccagaccttctctgcactatggatgagcagtgtggcctgctctcgttctgcccttccctggaaatgcgcgcaagaagggaggtggcaaaaatcatgtccaccgggggggctcaggtaagggctggggaggtctcggggttaaacattcggccctttgttcaccaaggcagcagagcccttggcgtccgcagctcctcctccccgactgctccctggcgccagcgtctcccgaggacaggcggcaagggctcggacgcccaggcttggctgcgggtcgggatcccacggcctcggcggcgcgcggcccctgcctttaccttgtagacgtcgccgtaggtgccgctgccgatgcgctgaatcagctcgaagtcctcctgcgggttccggcgggacaaatcgaagccggggttcatggcgggccccaggtgccccccgcctccctcccgggcaggggaggggggccgctcagggggccacacggagagagggcgccgcggccggctcccggctcccccggcggtcacaatcacccggctccacgctgcggccgccgccgccgccgccgctcccctcacgccgctgcggacgacgacaagcggccaatcgtccccgccccccgcggcccgccgccgcgccgaacctggtcacacccacaaggagaggagaaccctcgcagcccctcgctcggggtgaaactccaacatggcttccgctttcgccgctcctccccctccccttactccggctcctccaacctcctccccttttcccgactcccgcccgactgcgcagccgcgatcccggagggagcgcgccaggcctggcgcgcacccgaccccttgcgcgttccggctccgcgcgcctgccaggccggggccggcggcggaacagcttgggacccgaaacgcctcggcttttctgcggacccgcgcccggccgctgccgccggacgcttgaaaaggtttgcctggcccagggaccggggttaggactagcagaaagtggcttcttttcgtttctgattcccctaacgacaaagtt

SEQ ID NO: 23284 - DNA, 2300 bp, Homo sapien
gaactttcttgtgcagctttcagtcctgagaatttggctttctggcactaaaaaggcagaggccgggtgcagtggctcatgcctgtaatcccaccacttcaggaggccgaggcaggcggatcatctgaggtcgggagttcaagagcagcctgaccaacaaggagaaatcccatctctactaaaaatacaaaaattagctgggtgtggtgttgcatgcctgtgatcccagctacttgggaggctgaggcaggagaatcgctaagaacccgggaggcagaggtttcagtgagctgagattgcacccttgcactcaagcctggacaactagagcgaaactccttctcaaaaaaaaaaaaaaaaaaaaggcagaggaaaagagcagacctggcttccatttgggataatttgtcaggtctgcttatctgaatccttggctaattattcttgcgcttggcctaaacatgccaaacaattctccaaatgtggacaaactgaaggaaggcctgtaatctgggtcctgggcaagtaccttaaacaagcaaaagcaagacctttggctatggaataacatttatagtcaggagtttctcaagataccagagcctgaaggtagatccatcgagaagatattcaatgatatgcactcctaaggcaataatttaagtgatactttcatattactgatgctttaaaatttaataattaaaaattacacaactgaaaggctacttatataggtgaagagataaccattttcaaacatcaatttagtcaacagatactcaaagtaaacaatttgagaatttagtacatatgcaattttcctatgagcaaaaggattcaaaagattttttgaaaaagtatgaagcagttaactctaagtagtttgctctactattaatttattatacttatccttaacaggtttgatgagacctagtttctcaggagccacgaggtattagggaatattagtggttagaaggtgtggtgcctaaggggattaggaaagcatttctgaagcaaaactccaacgtggtattgccaaagtggccatcacctaattgattaaagctcctgcaaatgtctattgggaagttcaatgagaacagaaaaataaccttccattaccctcaagctttcttgggcaagtattaacaatcggagctggagtccacatagctcagatgtaagacgcgcaatctgggtcttaagcagggtggggtttttgggtaggtaaggtcacagctaaagagcttccggatcgtcacgtgtttatatttcaggtgcggtaatagatctagtccactctccaccccttctttacagggttgcttgacagcctgcgcagtccccgcccgtctttgataatccaaccctcttcgaagagggaggtcaatcactgctttagttctgcgctctgcctgcctcccacgcgggatggtgggcagctgttccgcgtgttttcctcccggagctttcacgctctgcccactgcacacacctccctcgcggccctcctggcctgccctcctttgcaccctggcaggccaactccaagggtccgagtgtcggtgacaggggcaagcaagcacagctcacttttcctgggggttttcctcacggtgtgtttagtgacccctccccgcaatcccagaaaggctgcagcactccatggtatcctacatgtagctgcttctaaaataataaaggctgggacattggctgtcttggatattaccactatgctacctgcttggaactgggaccagatagaccaaggtccaactttgtcgttaggggaatcagaaacgaaaagaagccactttctgctagtcctaaccccggtccctgggccaggcaaaccttttcaagcgtccggcggcagcggccgggcgcgggtccgcagaaaagccgaggcgtttcgggtcccaagctgttccgccgccggccccggcctggcaggcgcgcggagccggaacgcgcaaggggtcgggtgcgcgccaggcctggcgcgctccctccgggatcgcggctgcgcagtcgggcgggagtcgggaaaaggggaggaggttggaggagccggagtaaggggagggggaggagcggcgaaagcggaagccatgttggagtttcaccccgagcgaggggctgcgagggttctcctctccttgtgggtgtgaccaggttcggcgcggcggcgggccgcggggggcggggacgattggccgcttgtcgtcgtccgcagcggcgtgaggggagcggcggcggcggcggcggccgcagcgtggagccgggtg

SEQ ID NO: 23285 - DNA, 2300 bp, Homo sapien
aaagcagccactagttaggtttattcttcttaattctcattttctctccatatgttttcttctctgagcccataaacacatcaccactcttctttacaaaggcagggccccttacatgatttagaacattctacatactgacagagccctccaggtggctcagctaactcaccacagcttttatgtctttccaggttagggaaggcattagggccagaggtcagcatgcccttcctgccaacagacagccttgctccaccccactgagtgttctgtttggagtgaaggccaaaggtctctggactaaaaaaaaatgcctttaattcaagcccaagttataaaagaaagaattccagcttctgctgtcaggcctgcgaggctggccaagctggagcatccttgacctttcttttttccttcagccgtccaatgaatttgtgtccaattcgtcctccaaccctccacagacagttgcattctatgatgcctctggtgatttggaaggcggccgagctaggcacaaaaataggagcgcctgaggcgagagattcttccaaggttcttggttgtcagaaagatgaacatcaccacatggttctaaaagaagagatgaaagggattaacattgtaagcagttgtgagattagactctccaagtcactaggctccagatgaagcaggaggcatagcagagaaaatcctgtgctggtatcggtaaaattatgagcaaggttttagaggattcatcagaggaaggctaagttgaatgggcactaatgagctgatgactcaaatctaggaaggaataagatcataacaaccaaagctctgcatgaaggtgggtgctgtataattgtcacatctactagagacaggcactggtccccaagatgagactggctggccccttacccagtgaacaagttatcaaatacttaactaaaataagaactgtgaatatgcccagaaggattctttgcgcatgcacttaaatatgttactctccctatcttttattaaggcccttgtttggagaagggactgaactagatgtgcgcatgtcttaaaaatgcttacgaatcttgagcctggtataacgtaaacactcagaaaacactttattgtttacagtatagtaggactcatcccgtcgtggggagctatggcagtggccttgaaaagagtgggtattagtacacaaatgttcagaatgtcccacagtactacatagtgcccagttcatggatgagctgccactctgctgggacaggcttcatctgtttatttcaaatgtataaatgttgggtgttctcttggtcttaaaaggggttagatgtagcacagggcatttatattgtcatgaaatcagtctgagagtgttggatgggggcattaatatatgaaatcagggaaatagcttttccctcatcctcttcatctccaagaatatctttctgagatattctctattgttctgcccagtgcagttaggtcttacttagtttgccttgtaaggtcatttcagattttaatcgctctccccataggaagtttttcctgctgttctgcctgagttgccttctgcttagttttagtccattatgtctgtaaagagagggagggttttatggggcaaaaggcccaatcatcgtgggaagaatgaatcattccaagaacagtgagatgggctggaaagagaaggcagcgaaggggcaggaagttgtgggtggaatgggttactgagaacagcaccaaaacagtctgtcttctctctccattactcccactagggggtgcccagcatcccagaataatcactattgttaggaagttgaagtttgatgtgtcatctcctaatagaagggcactggtttctccctgagggttttctatatctctgccctgagttgagaagagatctctgtgtgtgtatgtgtatgtgtattgtgtgtgcatatttgtttgtgtgtatgtgcttgtgtatgtgtgggttagaatcagtaagtgcacaaatgcctcttaagcattcatttagagattctcaattcatggaaatccttagggatacactgagttttccaggacccagctgacttgatcttgaagtcagtggctggagtagttgtgggccagaaacatcctcctcagcccaggagaagtggcagctgatgtattttaattactgggagtcaagaagttgtagggataagaaatgagttcagctgagcgatcagctggaggtcagggatggaggaaagacccagggtgtgtgagattctgaagtagagtggtgaacaggt

SEQ ID NO: 23286 - DNA, 2300 bp, Homo sapien
aaggttttgataactttatctcaagatgcatttctaaaaataaaagaacacatgatgacttgagtgaatttcagatgtcaactgtggactcacagttaaaggtattctctctgtgcatctattaagatctaggattttatacatattgtagagtataaattaaagaaagcttctaagtcttatcatttttgtgtaaatccagctaagactcctttgatgagctcagtgtttgctgtgaaggaaaagcttataggtgagaggaacactaaaattataattctttgtcttccttaattagactagagctcaccatagaccttgctgaaactgtgagaaaatccaagcaataattcacactgtcaggtcagcagaaatgggaatgcgggtctgatataactgaaagatttgcttaagtgatctatctatgaactgaaccgctcagaataggcacacgatcttcactggaaatgtaccctctgaagatgctaaacacaaacagcaatgaaaataaatcccagcaagagccttataccacctttacagatgtcatcctagaggaaggatataaagcatattaataccaattgatgtagggcactaattaataagtcccattaaatcatggagtaatgacatttagcatgtaatgaatgcctcataatttcttcatcattaatatttcatagcataagaacacaagcattttcatccctgggccagtgcagcatggttttctgtctctgacatgaccacaagggcattgagtggcacgagtgtattgcacctctgtggtatagactgactataccgcacaagtgattaactcttagcaccccgggtcctagcgtttcctcattttagaaaatgtgaatctgcctgccattcttggaagtaacctctgtgactggaagatggaagaactgccccaggctcaggtgttgactttggtgtgtagcattgctttgctgttgacccccaccccccagcccaagaaggaaacctgcacaggagaaaatcattactttgatttattactgggggcttgctgtatgcaaaggcaataatcacctcatggagcaggtgccactgccagggttcattgattccaggctcttctagaaattccaggaggccagtcagtctggcgggagatggacgtagtcaacgaaaaaagaagtccatctcatagcaggttgaaatgaagtgggagaaaaatctctggtcatcgttctatcgctccactgacactcggtgtctttttctttcagaagaggggcttgagcagagagaatgcttagaggctaagcgatgggcaagtgagagggaaagagccgcgacagatagagctggctgcctaggggtctcagaggcttcatcctgcaggcggcaggcggcaggacaaagggaccttcggactccagatcaagattccaaggagttaaacgctaccacgcagcccgacctggatgggatttgctcctgggtacaaaacgggacactgatcaaaatcaacttggacaagtgacaagagtgagtcttatgtcggtggatgtcttttaaggtcgttggagggaagaggacgggaggggtgtgccgaggggtaggtggagagaggcaccgagtccagagccgggatataaatgcaccaggagccggggagcagaggagcaaatgagtgggggaaagtgtgagaggaagagttggagaaaagtcgggggaaagtagggacagggttaaggggagagaggaggatgagggcggcgaggagagattaaaaggggaaggggggtcgctggagaggagggcggactgtggatcggaggtagggagaggggcgagaggagtgcgcggggtggggggcgccggggcgaggagagggggctggggaagaggaggggggcaagaaagcgagagcggcgcgggggagggctaggagcccgggggccgggccgggggcgggcgggcggtgggaggcgagatcaggccaggggagagggagcgagccgggccgggctcgcagggcgaggaggccgtaggagggaggtggggggcaggtggggggaagagggagggagcgggcggagagctggggccaagtgcattgtgtctggcggcggcgcgcgagcccaccggcggctgcggcggggcgggaagccatggagccgcgggcgctcgtcacggcgctcagcctcggcctcagcctgtgctccctggggctgctcgtcacggccatcttcaccgaccactggtacgagaccgacccccggcgccacaaggagagctgcgagcgcagccgcgcg

SEQ ID NO: 23287 - DNA, 2300 bp, Homo sapien
tgggctagacacctaatttgtccaatacattatacctttcttttgtctacttttggtggtgatcgaatctaccttagagggtggttataaggataaggaggaaaatacttattcagtgttcctagtacagagcctgacaaatagtagatacttcagaaatggttatttttatttttaatttagatgctatatcttgagggaaaaaatatggttttttcactgacactggactacattaaaagctgtttttctatttctaggttgaatatatttcaggaaaggtttttttcaccacctgttctgatttgaatatgttgaagaaattaaaatctgcagaaagattatttttgctgattaaaaagcagtttccacttattatttcttctgtaagtaaaggtatggcatattcatatgcatgttgcttttacccacatgatacattgtactccaacattttctgcttgataatatgtagccattttacactttaatattcattgacatgtgtgggatcattaattatgtatttttctgtatttcctgaatattatcacctgattgtagtagaatatttcttctctttgcaacctgcgtgctgcctttttaatgagattttaatgtcctaagccacatttcttctttgagaattatgatcaggtaccttctctagagatatatatggtcagttgcatttatttggatttagaaacatgaactaatccaaaatgcattcttttaatagtaaatcagtgaaaatcatcaccttgtaaattttaactgtgtgatataattggaaaaatactgcatagtaaaaatttatatttctaggaccttaaatgttttcgataaacttatgcccacttaccaagcattagaggtaaagggggcataagagattccttgtccactctctaaattttataaatatgctgctaaaacaacatatggatcttgataaaagcagcaaaacatggtcagacactgcaggattaaatgctgccgtaaacttcaatttgaattacgtaagagatcatgtatttatagcctataataaactattttaagaaagatgcaaatggcaagaaatcaagaccaagcagagaaaattgttttaaagcaaatcccaaagtattatactgtgggatcaatataattcctcctagtactctacacacattcatcttaaagaaatacagtaattttggatcatcttgatgactgtggttcatcaagaagagattaaactttgctgagcatactggcagtatgctaagctataaatgggttgtgagttactttatggaaacacattataatatacttattaatatggtgtgggctaaaatgtaacaggcccaagattcagctcctctgtttctgagctgagtttttcagtttatttttttcttataaaaacttaatttttatagggaagatcaccattatttcaaagattgataaacactctaggtctatgtatatattgaagagatacatatattaccatagcacaaataatctttctagggtattatatggtaattctataggaattttaacacaatacggatgctatatatgcaatgtaagaatgaactttattctgcacaatattcttatggtaaatggaatatgaactccaaatgaaagtgaagttattcgtgtagcaatttaataaaacttaattcaaggaaataaaggtaattgagtttgagggtgatgattgtaatagatggtctttaaagcttcaatagaggatcaacaagatttttcttatttaggaaaaatatttaatgaaatgcaaagacttataaatgaagatccaggaagttggttgaatgccatttcaatttggaaaaatcttcttgaacttgatgcaaaaaaggaaaaactttctcagagagatgataaccaactaaaaagaaaagtgggagaaaatgaaatcattgcaaagaaattaaaaatagaacaaatgcaaaagatagaagagaatagggactgccagctggaaaaacaaataaaagaagaaactctggagcaaagagattttaccactaaaagcgaaaagtttcaagaagaagaatttcagaatgacatagagaaagcaattgatactcataatcagaatgacttgactttcagagtatcttgtcgctgcagtggaactattggaaaggccttcactgcacaggtatgcttgcatcctaaagtggagtctgtcgcccaggctggaatgcagttgcacaatctggctcactgcaacctccacctcccaggttcaggtgattcttttgcctcag

SEQ ID NO: 23288 - DNA, 2300 bp, Homo sapien
tagccccgaccttgctgaccaaaggctcctggaggggaaaagacatcagaagaaagaggagaaagtaaggggaagatcgattggctctgcaaaactgcagcctcagctcagctgtggtttcacccaggccagcacactgctggtcggtgctggactgaataggtcatttcattttttcagctgcctttggttgtactgacataactgggcccctacccaccgctctaccgcatctctatctactccactcatatactttatgctctaataacacttaaccgctatcgtggctttcctgttccccaccccccacacgccgtctcattttcatctgctgcttctccctcttacacatccttcatgctggactcaagagcgattttgtccaggaagccctccctgcctcctttttgtcggtgctgtcatagcttcccgggtatgtcctcagtgagtcattcaacttcaccatcctctaagcccttgaagtccaaacccttgcttacccatctttgaatcctcaagacagggtggtgactggcggagaataggtgttcagtatttgttgaactgaatggaatgcatcctatctgcatacttaacatcttgggcacagaatgtagagagaactaaagagggttcctgtcctccccagacagacttgacagtcagaaccccaaagtatagagaagttaaaatgaactacggcagtagcccagaaaaggaaaacatgtgtctgagggcaagaaaagaattcatcaaaacggtagtgtgtgagggctgggtgcctgtaatcccagcactttgggaggccgaggcaggcggatcgcttgatctcaggagttcgagaccagcctggccaacatggtgaaaccccttctctacaaaaaatacaaaaattagcccggtgtggtggggcttgcctgtggtcccagctactggacaggctgaggtgggaggattactggagctcaggaggtggaggctgcagtgagccaagatcacgtcactgcgctccagcctgggcgacagagggagaccctgtcgcaaaaaataaaaaataaaaagcagcatcagaagagtcttaggactgaaccttggaaaagctcatgttatgtgactccatgaagaatttttactgtacggcccagtagagcatgagctgggtgggggcgggggtgtgtgtgggagtgtcgggggaggtgagggagtatcagttcttcaccttaacatcccattctgaagcacaggacagccccttgtcagagacacacatgcatttatcatttctgtataactgactcaatatacagctacagagctaatttcacgctgtttatcttgtaacatggattctgtctatgcttcccaagtaatattttcatttccattttaaaattcagagtttagaaaaatgccttcaaataccgttaggagaaccattcaaatcaggtgcccaaaactagatggcacattgattcatctatggctggatggttaactaagtagtgcaagaaatatgagctgtttcagaacgcagacgtttgttagagaacaggaacttctgctctccgtcctggagattccaacgtttggcccgattctttgtgaaaacagaccagggctccttctatgagaagagtagaggagaggaatgaaggacaggaagaggacggagttgggaggaatggaggaaaaggcattatgttagatagggagaaatctaggctccagcctcagctgtgctgctaactcgctgtctcttgacctctctgggcattaatttcctcaatctacaaaataaggcaactggactgaattatcaattctaacccttccacctgtgattctaacccattctggtgcctaatcaaggaggggacagatggtcaaccaggaagacccataggggccacagagggctgatgcgaccctcccaggctctccgtctctctcaccctctccttccccctccctctccccctccccctctccctctccctctccctctcccctttggcatcacacgcccctgcgcgccgcctccaggagcgagccgctcgcgcccgaggccacgtgacccgaaggcgcgagggcgcgcctgagccgccatgtcggaggcgcgtggagagccagggtccgggcctgaggctggcgcccgattcttctgcactgcgggtcgcggcctggagccgttcgtaatgcgagaggtgcgggcgcggctggcggccacgcaggtgagttggcctcgctgcgcgcctggggaggtgggcggccctgtccctgccctgttgcccacccca

SEQ ID NO: 23289 - DNA, 2300 bp, Homo sapien
tctcaaaatagtattctgcttaagctccttaggtctggggcaggtgtgggatccagcctcagctttgtttctggagaaaaactttgtgctgtctccttggagctccctaagttaatctcagggcctggaaggtcaagggctctcctgtcactgagatcgcaggagtctgtggtgggaatgtggaccttttggggatctttcacttacctttccctgcactgggcagcctctctgggctcctctctccttccttattttaggtgtttgctgtcacttctctattaaattccagtgccctctcttagatgatccatttaaagtgtgaatatctactcattttggttttttatggaggaggtgagatgtctctagtaatccatcttgaagcccctccctttacattgtatttcctaacgtccaagggtctctgtttcctttttgtttagagaacttccttttgctattattttagagtatatctgctggtataaacaacaaaactcctttacttgttttcatctgagagtatgttgattttttccccttcattcttaaagaatcttttttctgggtatggaattctgggttaaattcttttctttcatcacttacttttagcctccatggtttctgatgaaaaatctgctgtcattgacatttcctttttcctagaattaaggtgttatttttctcttgctgctttcaagatttttttgtctctaacttcagaaatttaagtgtgatgtgtcttggtattggactcttggatttaagttgcaatttacttagttttttgaattggtaaattttaatcttttcttaaattggtggagttatgggctattgcttcaacttcacaagtatttgttgggcactccttatgtttgacactgtactagactacggatgatgatgaaaatttaaaatcatgggttgagatattaagaactgacatgcactttccacaagaagaaaaggtgaaataatgcagggaacattgggctgtcagtgggagagcagagatctacttctcttggctcttctcctacctctgtgacattgggtaaacaaatgaatctctcaggattacgctctgtaatatgagggagttggattaagtactcagtttagctctacatgacttcagaggaagaaagaggtaagtttggtttggtctggtctgggaaggctttatagaagaggctgaattgaagacaggcctcacatgactgttaattgatactctcttcttccaccttcaggacactttaagatagacaaatctgaatgaaaacaccccagaagggagaattattggctcaggactaggctggcactgctggtagccaatcttttttgcatgtttgccgggcctgctgcttgtccactcattgcacccccacataccctgccccctcatgctcttctcctgtctttttccagaatggcttcttccatctttcctacttcttcacattctgaaaattctgcaatacttatcttagggccttcttctattaccctgttctgttttaactttctaattatatttcaagcttctggagggcacagaccatatcttctacttactgaagtcctagaagggacttaaaagatccctgagagaagtgctcccctagctgattattggtatcacctgggagctttttaaggctccatcttaacataatcaaattttgcttgtgtttgggggtaggggaagagtgggtcaagggtgtgtgagaataagctatattttagttttttttttgttctttaacacttactgtgcaaaactaatatggtacccccttatatgtttggattggcatctattgtatacatcttccttgttcttcattcaacataggactctatggtttctaccacttcccacgaacctgaattaaattctgaaaagagggataatgtattctgagaacggacagcaagcccagctcagtgtcatgacattcttctgtagaactttcctgcttacattttcgaaattgtgctctgatggctctctagtatcctgctgtgtacactatgggctggagaacaaggatcctaaattttactgtattctttctccacagaagtttacgaagacaaaagaggaatgacgactcagcatattgtaatgtatattcaatatgtgctttgctaaatatatttgaaaagtatataggtatattgaaaaagaccatgtccaactgaaaatgcccagctaatgaaaataacatttttcttcctactgaaaactaaggtataacttcagcatttggtgtcagaagtta

SEQ ID NO: 23290 - DNA, 2300 bp, Homo sapien
aattgaacttttcctttccagtaagtcaattgtgtatcttgctcagtgaatgggtactacatgtagtaaattcacagaaagattgagttgtaaactttacaaaggattgcttagtcactgatggagtcttagaacaatcattcaccatagattttgtgatggtcaaatataaacaaatttcggttttgtgatggtcaaatataaacaaattttggtaagagtaataaaaataagtaattagtaatgctttggctgcagctctaatgacatgactttttttctgccctctcccccatcttatttttaccagtaggttgtgacagttggaagtgtcatgtacaacatgcggcgattaagtctttcacccaccttttcaatgggatttcatctgttagttactgtgagtctcttattttcccatgtggaccatgtaattgctgagacagaaatggaaggagaaggaaatgaaactggtgaatgtactggatcatattactgtaagaaaggggtgattttgcccatttgggaaccccaagacccttcttttggggacaaaattgctagagctactgtgtattttgtggccatggtctacatgtttcttggagtctctatcatagctgatcggttcatgtcctctatagaagtcatcacatctcaagaaaaagaaataaccataaagaaacccaatggagagaccaccaagacaactgtgaggatctggaatgaaacagtttctaacctgaccttgatggccctgggatcttctgctcctgagattctcctttcagtaattgaagtgtgtggccataacttcactgcaggagacctcggtcctagcaccatcgtgggaagtgctgcattcaatatgttcatcattattgcactctgtgtttatgtggtgcctgacggagagacaaggaagattaagcatttgcgtgtcttctttgtgacagcagcctggagcatctttgcctacacctggctttacattattttgtctgtcatatctcctggtgttgtggaggtctgggaaggtttgcttactttcttcttctttcccatctgtgttgtgttcgcttgggtagcggataggagacttctgttttacaagtatgtctacaagaggtatcgagctggcaagcagagggggatgattattgaacatgaaggagacaggccatcttctaagactgaaattgaaatggacgggaaagtggtcaattctcatgttgaaaatttcttagatggtgctctggttctggaggtggatgagagggaccaagatgatgaagaagctaggcgagaaatggctaggattctgaaggaacttaagcagaagcatccagataaagaaatagagcaattaatagaattagctaactaccaagtcctaagtcagcagcaaaaaagtagagcattttatcgcattcaagctactcgcctcatgactggagctggcaacattttaaagaggcatgcagctgaccaagcaaggaaggctgtcagcatgcacgaggtcaacactgaagtgactgaaaatgaccctgttagtaagatcttctttgaacaagggacatatcagtgtctggagaactgtggtactgtggcccttaccattatccgcagaggtggtgatttgactaacactgtgtttgttgacttcagaacagaggatggcacagcaaatgctgggtctgattatgaatttactgaaggaactgtggtgtttaagcctggtgatacccagaaggaaatcagagtgggtatcatagatgatgatatctttgaggaggatgaaaatttccttgtgcatctcagcaatgtcaaagtatcttctgaagcttcagaagatggcatactggaagccaatcatgtttctacacttgcttgcctcggatctccctccactgccactgtaactatttttgatgatgaccacgcaggcatttttacttttgaggaacctgtgactcatgtgagtgagagcattggcatcatggaggtgaaagtattgagaacatctggagctcgaggaaatgttatcgttccatataaaaccatcgaagggactgccagaggtggaggggaggattttgaggacacttgtggagagctcgaattccagaatgatgaaattgtgtaagttctatattatatatgtgtgtgtgtgtgtgtgtgtgtgtgtgtggttcagtgtgtttatgaatgtgagtctgtgcatcattttttaaattaaatagcatgcaaggaatggaatagcttttatacaagatccctttcaagatatcagtctttgc

SEQ ID NO: 23291 - DNA, 2300 bp, Homo sapien
acaatctcacactctccttgtcctctatagattgttctgcacacacatgtaccataggagtttttaaccttctgatatttatatttgtttgtttcctccaccattagaatataagctctgtgaggacagagactttgttttatcactggtgaattctcaggatctagaagacagactagtaagtctttctaaaatacatattaagcatgcataaatattgtggatgaaatggatacacaagggagttggaactagatcttccaacattcttgcaggatggttaaatttcaccttgtttcaagcagaaatctcaaagcctttcaaagactgaacaagcagacatactgaccagaacttttgcatattttgaaaatatgctacctctatttttcagccttttacttagttttgaattctactgctataaccctcctctgattttctttagtatgggaaaaatgtcaaagaagcttatctccctgtagtgatgagctataaagggctttagtctatggtgggatctctcagggtctgccagaatgtcctaggcagcggtgttctcctgggcactggtgcagtttgcagtataagccatcagcagcaaacatgagccagagagtgtaggcgaatgtggggtggctctcagccagcccgaagctatgaaagcctgtaatccagttcctcttttaactttttccaggacataagggtatgttctgactcagggcttcttcctattgctgctttatctgatgtcataactagtccatcctgcaaggcctgggagacagtcaccttgacttggagcagaccttcctctacttcagtttcccctcacctccatcccaggttctggaagcagaagggatgtaaggtctgagtagagttttgcttgagctggtgggtggacttaaggccatggtggttgagtccactgctatgcctaccaagctttgtgtgctgctcactgactctgttgccatggccctccttgcctacagtccttcatcatgtgtatattttgtggtcactcttgtcatgccacatgagctaatttaaatggaattattggtcctgcattttttggtcacttgaaccctcgacagaactaatatgtattttagaatgaccatggaaaatatgaccgacaccgagaaggaacattttaaggttggtgacgctgattccacagcctgccaggcgcttacccacaactaggccttggcctgtttatctccctttccagcctgcagaaaaacaggctctgtacacagatgtgaagagctgtgcttgaagaaccagatgcccagctgctaatgtatcagcagacctgggctggctgaaaattagaaagaaatgtgctctcatcaaaacatgcttttaaaaactgtacttaatgtgtggaaatattgcattatagcagaatttttttctcctcaagaacaaatgccattgagctttgatttcaggcaagcttgaagttttgtttccaagtaagtgtggagcaataggacatgatttcatgaaatacagtgtaagatgctctctggcgtttaagataatcaccaggccttgtgttggtgggattttttcggagtctgattttcaaagcatcaattgtaataaggtgcttttggcattgaaaccgtttttggaagatgatgtactaacacaaatttagaagaaaatctgctttagtaaaaaggaggaaattgtttaatgcttcaaaagtcctgtgattttggctattagcatgcataaatgtgtgtttaataaggcaaggctatataaattgaacttttcctttccagtaagtcaattgtgtatcttgctcagtgaatgggtactacatgtagtaaattcacagaaagattgagttgtaaactttacaaaggattgcttagtcactgatggagtcttagaacaatcattcaccatagattttgtgatggtcaaatataaacaaatttcggttttgtgatggtcaaatataaacaaattttggtaagagtaataaaaataagtaattagtaatgctttggctgcagctctaatgacatgactttttttctgccctctcccccatcttatttttaccagtaggttgtgacagttggaagtgtcatgtacaacatgcggcgattaagtctttcacccaccttttcaatgggatttcatctgttagttactgtgagtctcttattttcccatgtggaccatgtaattgctgagacagaaatggaaggagaaggaaatgaaactggtgaatgtactggatcatattactgtaagaaaggggt

SEQ ID NO: 23292 - DNA, 2300 bp, Homo sapien
tttcattgagtgtgagccaaatatctgctactcacactgccttaaattcagggactctaagtaatttttggtagaggacatattctaaaagagacagtgaccttctgtctctccccacaggtcattctgtttatatccactagtaagtgtagtctaaccaagttggtgtggaaagtagcttccaagaaaatttaacttatagcaaggaaagaaaaatgttcttaggcaagaacgattcctgcaaattttataagacgtgaagcagcttagagtgtcctctacaaagccagtatccaagactgctggcaacagacccgactaattaaagtgaggtcctcattcagacggcctcagcatcacttcaacacttgcctaccccaggcctgctccaggtctattgaaaaagaatctgcaatccccatgtgattcatactcacattcatgtttgaggagtattggcctagagcagtggttctcaaccttcattgcacataggaatcaaccaggcatcttaaaaacaaattaaggctgtctggggcccacctgcagagagtcaaagttaatcagtttgggggtgtggcctaagcactgggatttttaaaaacggcccaggagattctgaggtgcaaggagggttgagagccactggcacaggggcagaagaggctatttcttccattccgccccctctttgttgcggaggcaaactgaggttcctggagtcagaatctatcagtcgtggtgactgccctggttgcactgtaagtatggggggacgtctccacgaaaaaaaactaactttctgccttgtgctctgcaggtccctccttctcccaccttccccaagtagctgctcctgacccccccacacaccttggcaaacgacaccagtggccgatagcaactggtgttttaaaaatactaatttggagccccatttgagacctacaacgggagagtctgcatcagattcggcctcagattctacagcatctgactacattcccaggtgtgtgtgatgcgcagccaggtttggaagctagtgaactccacagtaggtctagcctttcaccacgtgaagtcattaagggtttgtaagaatgaatgagctgtcaagagaggaaaggcctggtgcagtgttcctttattaattatgaggaaagtgatttattggcaatgataatgcttctcttggaaagggcaaagaatggttcgtcgattgctgcattaggttttttcccactcaaccttaatgctcggcttttactcctcactgtagtttaaaaccagcacgcctttcacacgaaacagactctgggtctttattcccaggtgaaacgcatctttgagggaaataccaacacagagactctgtcccagttcttggccgggggacaccctcccccgaatatctctgtttgcttgtgtcagcatctagtagccaacgtatagttgtgcatatctgatacgtagaaaaacacagggtgaggattaaaaaaaaaatcattgatatatgcccagatccttttgctaaaagaaagcttcctttagcagaagggcaggaagtgagggaagaaagatagttggattaacaaagtcagaggtgagaaacgggtaggcgaattgggggtcagggttctgtctgcggaagagaagaagagggttcaaaagaaaagttgcagcgcctgtgtgcgcgtgtcatcgatgggctgggtgcgagagacagcgctagcgcgcggccacaacgcactgcggggccgagagccggcaggaaatcgaaaaagctgctcgccggcagaggctgggaggctggaagggctccccacccgctcggtgctccagaaacgcgccggctttgccccgacgcgatcgcctggggagcccaaggggcgcgcagggggccccggggcgcccggcagccgcggggccgagcgcgcgtgtgagcgagtgcgaggctgcgggcggcgggcgggcgagtgtgcgcgggagggagggggagcgcgcgcgcgcccgggccccggccctcccagcctcccggcctccgcgcctgcctcccgcccgcgcgcaccgctgcccgctgccgcggctcccgctcgcgccggcgctgcacggtagtcagcccgccgccgccgcctgctttgtgcttcccacagaagatgggagcgacctcttcctgatcgggagctgtttaaaaggagggagtgcgccgtattttctactagcgtggaggaacggaggaagaatccattcacactccccaaaccaggtaggatcttatgatggacaggcagaaggcattt

SEQ ID NO: 23293 - DNA, 2300 bp, Homo sapien
taatgtagaatctactttttgtattaattatcgttttatttttctcacatgacacaaagtttagagggacaatttactgttgctgtagtgactcaataatactggcaagaactgcagttctttccatctgctccatttaccttaccttgtaggcctttgtccttctgtttgcccactcctggtcaccaaatgagtgctgcaatttcaggcttcaagtttactctctgggaaggaaaaaggtggaaggggtgcaggaacaagaggggcaaaagctgagcctgtccttttttttttttttaacaaatatgagctttcctgaagtcccacccagggaactcctattgacatctgtttggacaatattatgttgccttgtcatctccaggtgtgagggacaataggaaaaaaggttttgcttttgaacttctaaagtagaaaaagtaagggaagagagggtattgaatggctcctgggtaagcacccatctaccatgtctagcactgagctgcattaggttggctttttaaatatcatatcttaattttcattagatacaaattattattacatagaataattggaggttccaaggaggaggttggaatatcagaatattttgaattaaaaaacacagtctcatcccttcttgttctgacctaaatgctttggcaggaaaattactcaaatctaggaatactcacatttgccattaatacatccgttttgtacttcgtgtctttttttcacacatctgtttgttgttctcttttctctcttttccttcaatttttaatacaaattttaaacacacaccgataaataggataatataatgaacccctatgtacctatcaaccacctgcaacaatgaacattttaccagcctggttttgactattccctccttttatccctcctgaatattttaacaaaactcatttcatttctgccacaccaaaatgagttatgtctgtatctatgcctctaatttatttttgcttcttcaaacagaataacttacaagggttttaacatgatttcgaaaaaaaatcaatggaaaattattattttgaaatcctctcttctctttctctctatattttgacctcttgttgcacaagattaacaagttggaaaaaatgagagaaataaatgttaaaaatgagaagtgaagtttctaaagaactggggtgttaagcagagcttcagcaaccccctaagggagtacttctccaccacgcagagcagaatttatcccccatctaacatttaggtcacagatatctgtcatttaaactatccttgacaattaacaaatgtaaaaattagtattctattcatatttacattctttaatttttttaaaaaaattacaaatcttaaactatgttctagaaagtagtttaatgggaactgccacaatacgctatatgagaagctgtttaaaataacagcttcttctctcttagagatattgataacttttaccctctgctatcttttccttgaagacaaataatccaaaatgttaaccactattcccagttaagtaaatatgtaaagtacgtagtttttcattcacatacagtgttattcatctgttcagccattcgtttataaattcattcattcattaaacatttcacaggtcccatatacatgctgtcactagaatctttaaggatgaagactctagtaaggaaccataattgtctctctgttttcataaagctaggcgaacccacaccctaaaagctttatgtgggaatcaggtaaaaattggttatgatctaaatatttggagagtagaaatgccaatctcaaaagtgttttggaaaaaaaaaaaaaaaaaaaagcatagtgacaggatcatgtggtgggaaatgggcctggctggaagaatcgctatatgtgtatttttatcatccatgtgttggatgaagcagagagctgccagatagcttcttttcgacagcttggagttactgttgggaacagatccatgtatggaagcgaaagccgaaaggcacagataagctgagatccagctatgcaaaccatgtttagagacacttaaaggacaagcatcccaggtcctttctttctggtaaatttagagaaggcatcatactgggatcttttttcacatccagcccatgcggactgagcagccaaagcttgacagaggtaggtgccgggcttttgtgatggaacttctataaaggatcatttgcaaatatttcctccagagcccttgatgtcctttaagggaaggtgccagataatattttgaaaagaaa

SEQ ID NO: 23294 - DNA, 2300 bp, Homo sapien
accaatgaaaactagggagttaccttgataggaggaacaggttggaaatcagcagtttggttttgaacttgttaaattttagataagtacttgagattcaagtcaaaatgtcaagaatttgagaatttggacctcagcgaagtaatctgggccaaagacaaaactttgggagttaacagttaatggatggtgttttcatattggaggggatccaagggactgtatgaagagagagaggattgccaatgcccacactctgaataattctacaggtagagtgtaggaacccaaggaggatgcagggtagggaacaaaagtaagaggctggaaaattttgagatatgaagaaagagtggtatcccaaaggaagaaaattaagggtgtttaaagacgaatgaggcaatcaagagtttcagatgcagctgtcagatcaactaataggagagctaagtaataacccctgaagtgacctctaaagggcatagtcactgtgagaagggttttggtagattggcaaggtggatgtctgattggagtgtgtttaagatagagtgaggctagagaaaacggggaaagaaaatatagcctaaaatttgagaagcttttctgaaaatggggggttggacagattgggcattacctggtgggaaatgtgcttttatcagaagggtttgttcaaagacaggcaatatgattttatgtttgcatgataatataattataaaggagagagagcgctactcatggtgaaaagggagaagccaaggcaagtatgagtttctggaataaagagcaggtatatgatcttgtgtgtagcattggggttggctctacatgagaatgtggaaagtttaattcattataattgaaaaaatgctcaaggtacatgtgttatgctaaagtttatataaaaagcaccaggaaatttcttgttattctatttacccaataaaataagatataagctcatcaactgcatttgacagaaaaaaaaagaaaatttggaggtatgaggaaaagtagattatgtgaaataatcatctaggagagtgagagagtaaataatagcagtaatgtcaggcagcactaagagattaattttttttcttcaacttttattttaagttctggggtgcatgcacaggatgtgcaggtttgttacgctggtaaacatatgccatgattgtttgctgcacaccatcacctaggtattaagcccagcatccattagctattcttcttgatgctctccctccccttcctccaacaggctccagtatgtgtttttcccccagtgtgtccatgcgttctcatcattcagctaccccttttttttttttttttttttttttagatggagtctcgctctatcgctcaggctggagtgcagtggcgtgatctcagctcactgcaaactccgcctcccaggttcacgccattctcctgcctcagcctcccgagtagctggaactacaggcaccccccacaacatccggctaatttttttgtctttttagtagagatggggtttcaccgtgttagccaggatggtctcgatctcctgacctcatgatccacccgcctcggcctcccaaagtgctgggattacaggcgtgagccaccgcgcccggcctcagctaccacttttcagtgagaacatgctagctcttggttttctgttcctgtgttagtttgctaaggacaacggcttccagctccatccatgtccctgcaaaggatataatcttgttctttttacagctgcatagtattccatggtatatgagtaccacattttccttatccagtctatcattgatgggcatttgggttggttccatgtctctgctattgtgaatagtgctgccaatgaacatatgtgtgcatgtatctttataacagaataatttatatttctttaggtatatacccagtaatgggattgctgggtcaaatggtatttctgcttctcgatccttgaggaatctccacactgtcttccacaatggttgaactaatttacattcccaccaacagtataaaagcattcctttttctccacatcatcgccagcaactgttgtttcttgactttttagtaatagacactctgaactgcatgagatggtatctcattatggttttgatttgtatttctctaataatcagtgatgatgagctttttttcatatgcttgttggccacatgaatgtcttcttttgaaaattgtctgttcgtgtcctttgctcactttttaatggagttgtttgcttttttcttgtaaatttgtttaagttcctt

SEQ ID NO: 23295 - DNA, 2300 bp, Homo sapien
tttgagttattgtcccatgtaatttctaagccagccaggtatcccggccttgtgagacaccaatcttgctctaatgttttgaatgtgaaccatcatgaaaaagtaagaatgattaaaaaggagattttgtaactatttatcaatgtcagagggagcaaagtctttcacattctatcactctagctggatatccctaaagggtaggtgtttaagctcttgaatctggcttttcttttttttttttttttcttttgagacaagatcttgctgtcacccaagctggagggggtcaaggacatgatcacggcttactgcagccccaaaatcctgggctcaagttatcctcccacctcagtctcccaagtagatgggattacagatatgcaccaccatgcctgcttttttttttttaaatatataaaaacagagtctcattatgttgcccaggctggtctcgaactcctggcctcaagtaatcctcctgccttggcctcccaaagtgctgggattacaggcatgagccaccatgcccggcctgaacctggccttttagattaccttccagctcttttgcttctaactggtaaacctaggcaagttatttaaccccattaagccttgatttttctcatcggtaaaatacttcctcccttaaaggactgtaataaagaaaagaggtcagcgatctgtggttatggggccaaatctggctcaccgaccgtttttgtgaaggcctatgaactaagaatggtttttacattataaatggttgaaaaaaatcaagaaaatattttgtgacacctgaaaaggatatgacattcaaatgtcagggtcataaagtttaattggaatatagccacacacatttgtttacatcttacctgtgactgcttttctgctactacagcaaagttgaattgctaaaaccaagatgttatagcccacaaagcctaaaatatttactgtctggctctttacagaaaatgtttgccaacctctggtaaagagaaaatgaaggaatgcctagatgtgcctataatagggcaaaaacctttaaaatgtcagctccgattttcttttattcatgtctagctcctgtccagccatggtatttatgccactctgtatttgcattaggataatttttcagatcattgcaaaatatgcattctcctacagaacatatagggatatctatttcttaaatggcattgctaacacacaatgcactgacctgacctcacagaaagaaaatggaacaacagaggtcccatccttccaaatgtcatccactggtcttatccttatggaaatagacagtacacggatctggaatggaagcaaataataaccgggtctccagattccatcgtatcacagaacatagaaccaagaaagtaccttagaagtcatctgatccagtcacccctgttttaccaatgaggaatctagacccagaagaagttaaaggacttacccaagagtacccaacaactctctcaccaccccaggctcccatctttgtgtctctcctgtgtgagctgttccctgaagttcttcctgaacttgcacattgcctttccctttgattttaaatccttggctcaaatgacatgcccggactatatcgtgtgatatgagcttgaaaagtaatttacgtacaagtcttgaaagcaaatcaagttttaaaacaaagtagcatctactctgccccagccttgacatcttattacatagcaaatgctggctttttaatttccctaatcaagactggtcctatttagcccacctcctcaaggggtcccagcactagccccactccgacgcctgatgaagttccagaacaggtgagaaaaatgagagggccctgcccagggctctgggagtcggccctcactgcctgcccttcagacagcaagacagaaaaggcattcattttcttcctccacgtcatgataccaaccgaaattacctttaaatgaggaagaaggtcattatttaatcaataggattgcgtcaattgaggaaaatttgtctccagtgtaaacaagcggaacgtctttgcgctctataaaaacaaggttaaattacttgcagatccgggcaacgtggagagatgtaggaagtgaacctgaagcctgacacactcaaggtctcggaaccgaaaataataggaattgttcttatttttccagtggaatcaagcacagagatgggcacgcctctttacagaaccaaagattcagaactgtgccttaccctttgcttatgaggcggaggaggaggaagagaaagaacca

SEQ ID NO: 23296 - DNA, 2300 bp, Homo sapien
gctagtgcacagttttctttgtggacaatctttttggcattacgatgttttagtcaaattgtgccctgcttggaagtcctacaggttgaaggcaagggaagtcagaatttctacaacaaaaaaacaaagggcccaggatagctcctagataaacgtcatccttcaaggacatcttggtagggcagactaccagcgtttgcatcaactcatgccattaaaaaaaaaaaaaaagacaaaaaaagcagcccacctagaacttgatttttccggggatagaagaaacacactagacaaaacaactctctccttttccctgggttacttggcagcagcagaaaacacttgacaaaaagttccagaagggcttgatattgagtttgaaaagtacaattcccacaacaatcactgactaaagtagcaatattttagcccttcacaggaatctggttattattaccatttatgccaagtatcttgtttctattctctttgatttaaggtcattttctctgtaaaaggcctgctttgttgagccctacacactgacgttggtttcaggagaaagaggactgggcaagttgggaaagtatcgtatcgtgccgaaacattagatgccctggttgtaaagaaaccctttgtttttgctctgaacctgatgcatttctctggtcttcatttcctagttcggtgcactaatttcagcattgtccaccctgacaatgataatacctctgcttgagcgtggcaggttccaaggagagaatccaagaggttttacctacctggacaggccggggtacaacctggccaaaggagatccaagtcaatacccatgtctagaaagtcaccctgtgactcagggtccattgtgtagacatcttgtgagaaaggataccaagagagtgaaatatcttgctcagtgatgtactaccagggacaatttttcaccttgggagatacttgacaatacctggagacatttttggttgtcacgactcagagcaagaatactattgcacctactgggtagaggccagggttgttgctcaacatcctacactgcacagggtggtccccacaacgaagactaactcagccccaaatgccaattgtggtaagggtgagaaaccctgagaaacacagaggcaccgaaagccctgcatgggcaggcccctgcccacctgcccagccttattttgccccacgccccctattctctaaaccccaagtgcgtagataccttccagttcctgacttcactgtgttccctcagcatatccaacccctctgcctgccaggctcttccttggcatgcctagttaacaccttcttattccctagagctcacctcaatacatactttcttgagatgccttcccatcaagactaagtcgaatcccccattctatgctgtctcccctttattctttctttttttccagggcttttaaagtatcttcatggggccaggtgtggcgtctcacacctgtaatcctagcactttgggaggcccacatgagcagattgcctgagtcaggagtttgagaccagcctgggcaacatggtgaagtcccgtccctgctaaaatacaaaaaattagctagttatggtggcgtgtgacagagtgagactccgtctcaaaaacaaacaaagaaaaaagtatcttcatggcttttctgaatttccccaagctccctacctctcagctcttaacatctgtgggctaacagcactaaatctagagtcccatgacttgtgtttcaatcccagttctggcatactctagttgtgtgaccttggacaagttacttttctgtgtctttgttttcttacctccagcatgaagatagtagcagtacctagctcatgcggatattgtgaggattaaacgagacaggctgataaagtgcttaggacagtgtcaggcccactgtgagcactgtagaaaattctgctattattattacttcgagaatttaaaactgccattctgagacatgtagctacaagataagcaagatatgcggctgggggcggtggttcatacctgtaatcccagcactttgggaggccgaggcaggtagatcatctgaggtcaggtgttcgagaccagactggttaacatggtaaaactctgtctctactaaaaatacaaaaattagccaggcgtggtggcaggtgcctataatcccagctactcaggaggctgaggcaggagaattgcttgaacccgggaggcgaaggttgcagtgagccaagatcacgccactgcactccagcctgggcgacagagcaagcct

SEQ ID NO: 23297 - DNA, 2300 bp, Homo sapien
atatgtgtgcacgtgtgtgcatgtgtgtgtagagagtggcatgtgaagaagcactggtgaaacagagaataaaaaagcagaagtgcctgagtacctgctctgtgccaagtgctttcttgcatttagcccttgtaacaaaccaaggagacagatattattagcattgcatatgaggaaactgaggttaaggaaggcaaaatagtttgttgaagctccagtaccaagtaagaggaagaactgtggctccaaatcagtctgtctgactcagaaggttgagctcttttcattttgaggagggaggtgggagagagagaggaagagagccagaggaggtaggaatatggagagaaaaagaataccccagggacagggtctaaaaaatcaatacataatgaagcctgagccatggtgctaactctgcccctgactgtacatctgacttgcagacactttataagttggctctctcctcctccccacaccccgtccttcccatcctccctttctcattttgcctggtggaggcctgacctgtcatgatgctgctggagtccgggtctcctccatctgtaactgggctctcacggtgatggtggggaggccaggaccctgcttaggggccactgcccgggcaggaggaaactccctcagcctctgtcctgagctgggtcacctgtggaagggtgcccagggcccaaaggtgaaggagggctggcgcggcttctttgcccagggctgaccactcccagcatctcaggccagcagccacccagcaccatctgcctcatttcctgtgcttcctcctagtgagtggcagcttggactcttggctgcaggcagttctcctgaaccggtcaccagggctcaggatgagctatccagatgcatctgtgacaatgtggctttcatcttcatcacagttgaccccgtgggaggaaagccccctttctcccacttcagcccacatctctcttcccagaacagcaaactgccacccaggagggactgccgcttccctggtcgtgggaaactctgcagaacctcctctcctgagcactcctgagcgaagagccaagccagggtaagcctgtgcatataaggcctcaattttagattagattcccaaatttaatttcctattccttaatttaattctgcattttagttttgtttttattatttacatgggttccctttaatgattccaaattgctgctgccctctagcagaattttgtcttatgttaacttcttgaaaactgatcagcattggagtttattccacgctgggtttagttattttctgaaacgaagcacaattaaattagaataatgaacatgctctttagaggattaattcataattagcaggccatgtgctacagctcacagaagaaagggcacaaggatcgaaagctgtttttttctgcctaaatatgaaaagtacattctgcagagcagaacaaatcagctaatgacatccagagcgctggccagccccagagcagcatggagctggcaccttgagttagcgcaatccccaccgatgctgctgcctacctttcctccccgagaaggctggcagcgggcaatttgcctggctcttctctcctcagcacagctgatagaagccactgtggacctcctaaattctacccccaggaagccccaaactccacagcctgtggcttcacaagcttcatcctcagagcttcctacagcccattcactcattcattctttcatccaaggaatgttttactagctcctgctatacaccaggcatccatgggatggcccaccctcgggatacatcagggaagaaaacatacaaagacccctacccttttggaagttatacttgagcaggcagagacagacaataaatggtaaaaataataagtaaattatgtattatgttagaaggtgatgagtgctaaagaggaaggggggttgagagtggtgtgtgtgtgtgtgtgtgtgtgtgtgtgtgcgcgcgtgcctgtgtgctttgcagttttaaataggatgggtcatggtaggcttatggggaaggtttcaattgagcgaagacttgaaggaagtgagaaagtgagtcactttcaagcaagtcacccaggtcaagcctgttctagaagaaacaactatagcaaaagccctaaggttggagtgtggctggtgagttcgggaaggatggggccagtgggggctgaatggagggagtgagtgggagatgagggggaccccatcaagtggggccttgggtttttctccgagagaactgaaagtcagggcagggtt

SEQ ID NO: 23298 - DNA, 2300 bp, Homo sapien
ggaaggcccacctcagtgggatcataggctggagatcagggactcagctctctcctcggtccttccatgtccaaaggaacagggcagaaattcctgtccctttctcatcacagacactgcattctgtaggaacgccagacctcttcagggaaaatctcccctccctggatacccccccacccacccccacccccagaaaaaaggctgtggacccttctcctccctgacccctccccagccaatccctgacactgtgaggaggacagagattaacctggcccagagggaggcaggaagctgcccaggaaggtgagaggatctaggtgggcagtttcagagtggcggggaagaggagagctgcgagggggaggggcagcggcttatctctcccaggaggggggagctcactccaaacagctagtgcactggcgtgtgaaagcccctcaattagcactaatgatgcaatcagggagggaggaggagggaccgaagttctggtggcgtcagcaccaacttacacacaaggtacacattcccttcatcggacacaatggccccttcagacacgccgaggcacacactccacagacagccgtccgtgggcacaaacgcactctttgcccaagctactagcatgcacatggtttcttatacgcggctgaccccgtcagaccccaggcatcttgaggggtagggagcgacccccagctgcatttggggctttagaggcaaggaaaatcagaaacactttggtaaaaggagttgaacagggcatcctcggcgagctcacgagcattcctctatgcctagagctcctgtcccacgcgcgctcgcaggtgctggcccggctgtgcccgcttccccctcaccatcgccccaatccggaatccggggctgagcgaggagccgccacccccggccccacccgcgagagacggggtccacgcgccttccctgcgcccaaaccgccccgaggcccccagtcccaggagggagcgctgagatcactcggatctccgcaccccggacttagctgctcgtcccctccggagcccgctacccgccggcctcgcccctttatctttcccccactccgcccggccggctccgttatccacctcccaatcccgttatccggccgccccggccccgttatccgccctcgcgttgggcgcggagcccccgcgcgcctcctggccgccgccgccccctcccccgctcccagacggagctcgggggaccgcgggctgggcgggaccgcgggctgggcaggaccggagccgcctccgcgccgcttcccaggcccggacggccgcgggaggaggtcccgctgtcagtcagcggggaaggccgggccgggcggccggagggggcggcgccgaggacgggctcgggccgggagctgggaggtggaggcggaggggcgggggagggggcgggggagggggcgggggcgggggcggggggcggctctgggccttataagcggcgggggcagggcggcagggaggcaagtgtcaggccgatgtgtcgcccgcgaggggccggggtcggggccgccggggccatgcgcgcgggctgggcagggggccggcggggcgcagagcggagccgcctcggagcctgagccgcccggggccggggccggggagccgcgcggggccggccggccggggggaggggagcgatgcggcgccggcgggcggcagtggccgcgggtttctgcgcctccttcctgctgggctccgtcctcaacgtgctcttcgctccgggctcggagcctccgaggccaggccagtcccctgagccttcgccggccccgggtccgggccgtcgcgggggccgcggggagctggcccggcagatccgggcgcgctacgaggaggtgcagcgctattcccgcgggggccccgggcccggggcgggccggccggagcggcggcgcctgatggacctggctccgggcgggcccggcctgccgcgcccccggcccccttgggcccggcccctgtccgacggcgccccaggctggcccccggctcccggcccaggctcccccggcccgggcccgcgcctgggctgcgccgcgcttcgcaacgtgtccggcgcgcagtacatgggctcaggctacaccaaggccgtgtaccgggtccgcctgcccggcggtgccgcggtggcgctcaaggcggtggactttagcggccacgatctgggcagctgcgtgcgcgagttcggggtacggaggggctgctatcggctggcggcccacaagctgcttaaggagatggtgctgctggagc

SEQ ID NO: 23299 - DNA, 2300 bp, Homo sapien
agggggatgcctgtgggtgctgttaaggtggtagtgacactcaggctttgcttcccagaagtccctgggcagtgcggagcttctccccagatgacatagagtgggcagttccctgtgaccgtaaccccaaaagaactgatcttccaggaggaatcatcactcactaccacccccactgatacacatcactcatatgcaaaacacacctggggatgtgccctcaggtaccttgttcttatcaacacttgttaccagtctaagggaacttgcttttcctccctcaagacccacgcagagaaaattgaagctgccagaaggtagaaatgatgagggatagatacagattcaaggaggggaggaaggataatgtccaaccgtatgctcgcttgtgtattaccaaacagcattcttagaaaaaacagattgtggccgggcgcagtggctcacgcctgtaatcccaacattttgggaggccaaggtaggcagatcacttgaggtcggcagtttgagaccagcctggccaacatggtgaaaccctgtttctactaaaaagacaaaaattagctgggcatagtggcaagcgcctgtaatcccagctactcgggaggctgaggcaggagaatcgcccgcacccaggaagcagagtgagctgagatcatgccactgcactccagcctgggcaacagagcgaggctgtctcaaaaaaaaaaaaagaaaagaaaagaaaaataaataaaaataggttgtggaatccgagtggcacaaattcacatcttaggctcctacattgatcagctgtgcgaccttatgcaagcaacttaacctctctgagtcagcctcctcacctgaagttggagataataatagcacctactgtgcccattagggttattacaataattgagttatgcacgtagagcaatttagcatggtacctggcacgtggttaactcacagtggccagacctgcctatttacctgagtcggaaggggtgaggggctgacatggtcagtaggaagtctgactgcagggaagagagggcatgcttcccaggcaacgctgccattctcttctggcctgagctgaagcaaaggcctggggatggtgggaggagagagagggggaacctgacagtccagcccttccctgtccccacccccaccctgtgacctaatgacctgccctcggctttccccagctctatggctactgctaccaggacagcgaggacatcccagacaccctgaccaccatcacggagctgggcgcccctgtagaaatgatccagctgctgcaaacttcctgggaggatcgattccgagtgagctcagaggagggctcgggccctgggctccttgctaggatggttctgccttagaaggccagccctccaaagcagctcccactcctcctccacccagggagagggaggggaggaaggcgcacaggctgactcagccaccggccaaagggttcaaaaaagaagcaagacttaaaggatcccgacatgctgtgctcttgccctcctcacccctccttgtgcgcgtgtacacaccagcttgtgggggctggcaccttaaagaggggagcactcacacactcacactcagcctgactgcaggagggccagtgtcctagaactaggaaagaccttaataccatcctgaccctcccgatatttccatacactgaactaaaacaacattcaggatgcaacttcagggaagagatgcattatccccagaccctcgctgctgcagtttcccacccactccatatcatttccagggtcaggccagccgagagttaatagaaaatcactggcctcctctctaaggctgctgaccttggcctttgtggagccctggggcctatagaagagaagtgccaacccccacaagcaaagttcagattccaagaggagggtgccctcgagtcccacagacccccaacccaggagaaaagcagtgagcagtcttttcttgtgcccctcagatctgcctgagcctgggccgcctcctccaccacctggcccactccccactgggctccgtcactctgctggacttccgccctcggcagtttgtgctggtggatggggagctcaaagtgacggacctggatgacgcacgtgtggaggagacgccgtgtgcaggcagcaccgactgcatactcgagtttccggccaggaacttcaccctgccctgctcagcccagggctggtgcgagggcatgaacgagaagcggaacctctataatgcctacaggtgacctccacccctgactcgggaactccatc

SEQ ID NO: 23300 - DNA, 2300 bp, Homo sapien
ataacatattgtgccctgttttaagtgctttacatatattacctcatagcatcctctcaaaaactctaagaagtagaagtgttatcatctccattttgcagtcaataaaatggaggcacagagaggttaggtaatttgtccagtgtttcatagctagtacatgatgagttgggatgtgaatctgggcagcatgattccagagtctgcactcttaactgctgggatgtactaactctcctacattttaacagctttccttgtagtatacagtataatgaatgagatgcttattgaataaatcattcaagcaaatgaaaaattttaactctgatgaatgccacgaaggggagtgtggcagaaaccagagagctgttaccaaaatatgtctcttttccttctggatacacagactacattcctagcctcccttgcagtcatgtgaccaagttctggccagtggaatgtggacaaaagggaggtacacacttccaggtctggaccataaaacatatgtataccaatatgccaagttcttattcttttaatcgacctaaggcagagagtgtggcctgaagacacaaaggaacagctgtcagaattgagaacttctcaaacatttacttaggcttaatagaaacttatgcatatgaaaatgcccatagcagaaggaacattgggtaaatcatttaagtttgaagagaaggaaattttagacaccgtttagtctgtaacctgaatttatcttggctgcgttatggccagtctccatatagtatggtattcagaaacaggtcttatatccaaataagaaatgcaaagtaatttacatttttagggaagatttttaaagaggcaacaaagggagacgtataccccaagaaggtttaacaatcctttcaatcatttaattcctctaagtctctctcatcattacatatttcttgtctcccttcttgtttgtccctctctcctgcaactctgtgtagtaggactctgttttcccctaactcagctttttattatgtatttatcaatttattatgtatagatcaattcagttcttcagtaccttacagctcttctctctcttactctaatctgcacaactgagccccaggagggacttgacaaaccatgagaaagtctttagaagtatgggaaatcgtgttggggaagggaggaagaatatgaacgctatgtatatttacatgttttggttacatgtccagacaaccaatttgcaaatgaataaagtgacgcctaaataaattaggtgatttgacactcttgagtcatacggagttgggcctagaactcagtgttacttcatttgaaataacccttattatggttccctagcaggccatcctatagcctgccatatatggtcgttttgcacccctagacgacagaacgctagggagagtaaggaaggctgagtttttgcttctactaggttcgatgaccttgggcaggttgtcctctctaaggctctgtgtttttcttcataagaagggttagacaagatgaacttttgggtcatgtccagcactaaaattccttgcttctgatctgtcccgggccctgcggctgtggcagtggtggtatcgagctagtcaagaagcttcgcccctatttgtcccccaccctattgggggagagggagaacctctccctcttggttgcttctttagtgtccttgtaggacccacgtggtggtcatctcccgtcacgggggtccagtcttggctctgcgggcttcccaggggccacatagggagaggatccttcatgcatcagagtatcgcaggccagagtctatgccttatccccacctgtttggaaccagcttccaaaccgtggtccccagccttcagcaggcctaccgcgcaggcgcaaccaccagcctggcgcgaggcggacaaacgccgaggccgaggcaaggtgagagggcggggctggcaagaccccgcctccgtggcgtcacgtgggaggcggagtcggaagtgtgacggcgtgcgcggggcggggctactgctgcgcgcgggcgcgggggcggggcggggcgcggcgcggcgcggcgctcgcggctgctgcctgggagggaggccgggcaggcggctgagcggcgcggctctcaacgtgacggggaagtggttcgggcggccgcggcttactaccccagggcgaacggacggacgacggaggcgggagccggtagccgagccgggcgacctagagaacgagcgggtcaggctcagcgtcggccactctgtcggtccgctgaatgaagtgcccgc

SEQ ID NO: 23301 - DNA, 2300 bp, Homo sapien
gaaaatacgtatgacttaacttttgtcttgtgtttcaacagaaggagaatatattaaaatgtttatgcgcggtcggccaattaccatgttcattccttccgatgttgacaactatgatgacatcagaacggaactgcctcctgagaagctcaaactggagtgggcgtatccttctctaccatgacagcaaattcatttgctttgtctctagttaacaaatcagttaacgtattctctgtcaaaattgtctttatacaaaaaaaaaaagtaacagctacttaaaaaattaaaaaggaaacatcaggccaggcgcggtggttcacgctggtaatcctagcactttgggaggccgaggcaggcggatcacaaagtcagtagttcaagaccagcctagtcaacattgtgaaaccccatctctactaaagatacaaaaaattagccaggtgtggtggtgcatgcctgtaatcccagctactcgggaggctgaggcaggagaatcacttgaacccgggaggcggaggttgcagtgagccaagatcacgccattggactccagcctgggcgaccggggaaaactctgtctcaaaagaaaaaaaaaaaaaaaggagacattatctctaattctttgctgttagcaatttaaagccatcaaagtttatatctttggaaaggataaacaatattttttgaacatcatggcaagtacttgctagaaaaggcactagactggaactggaagactagtgtttgagttttggccctgccacttactctccgtgaaccttaactttctttacttataaaaggggttaattaataacccatacctcacaggggctgttgtaggaattaaataagaaaacatcagttaagcattttgtaacctcaaattaacaaggctgattctaattcagaattaacttttcagccagacttttttttaaatgactgttaaaggagagctttcctaatttcacctagaaattttcacttcttttagaacctccaagaaactcagtgaaacagaaggagttggtagtttgaactctgttgtctgcctccattctcctgcacttcctcccacgtcccttgaattattcccttcttaggcagatatcagcttggacacactcaccaatcctttcattctgtacaacatatttttaacaaacattctgcctaccaaactgttccttgctattacttatttatcatttaggtccagcataaatatcccttttccagataggccttcttttggtccctcccttctctctctttttctctccatctaaattaggtcctccatttgggctttctcctagcagtcttttttttacccccccacgatttgtaattttatatttggtgatttttttttttctttgccagaggataagctctagagacatagggcctacattttttttgttcagaactgaatgttcaccattatgcctgatacacattaggatttcaatacatatttgtctggtaaatgaggaaactaagatcttaacatactgaaagagtcaggttacgctagggataatggcaggatatgagttttccttttttttggtggaggggtgggggtgggcggcaacagggtctctgtggcccaggctggagtgcagtggcacgatcactgctcactgtagccttgacctgacctcctgggctcaagtgattctcccacctcagactcccaagtagctggaactacaggcacaggccaccatgcctggctaattttttttattttctgtcgagatggggtctcactattgcccgcactactctcaaactcctggactgaagtgatcctcccaccttggcctcctgaagggctaggattacacgtgtgagcactctgcccgtccaggacatgagttttctagttctagttcagtcttcttcattgtaccttcctaattccttaagtatccatgaaaaatctgttaacaacttgaaaactgtgtttatttaaaaccttgactctttttctgttaagatatggttatcgaggaaaggactgtagagctaatgtttaccttcttccgaccgggaaaatagtttatttcattgcatcagtagtagtactatttaattatgaggagagaactcagcgacactacctgggccatacagactgtgtgaaatggttggtatcatttaacattggttcatttttgttctttcaggccctcattttgtattttttaaatttgggttttattgaaagtgatttcttgtggaaagctcagaatgtaaaaatattatgggtcatctgttgaata

SEQ ID NO: 23302 - DNA, 2300 bp, Homo sapien
tatgtatatagttctatactactgcatcactgtggaaaattacgtaacaagcaagatgtgctgtactttatcttcaacttttttttttttctttttttggtcagggtctcacgcgtcacccaggctggagtgcagtggcttaatcacagctcactgcaacctcaaactcctgggctcaaatgaatcctccagcctcagcctcccaagtagctaaaactacagcgcgcaccgccacgccggctaatttactttttgtagagacaggtctcactatgttgcacagttgatctctaactcctggcctcagcagtcctcccaccttggccacccaaagcattgagattacaggcataagccacaacacctggcctagattagattttattagttgaattttatttatgtgcttatgcaaaggcccttaagcccaaatgttaagtaacagaaatgtaaaactcatggaaatattggaactgtgagggaaaaaaaagaatttacaacaaccgtttcaagtgtcatttaattagtataacataaaatttattatttttaactcggttcataagactatcatctttatcttggttttgtttcgttttgagacagagtttcactctgtcacccaggctggagcgcagtggtgcaatctcagctcactgcagtctctgcctcccgggttcaagcaattctctgcctcagcctcccaagtagctgggataaaggcgcccaccaccacgcccagctacttttttgtatttttagtagagacggggtttcaccatcttggccaggctgatcttgaactcctgacgtcgtgatccacccgcctcagcctcccaaaatgttgggattacaggcgtgagccaccacgcccggcccatgttgttttgccaaaaggaaatgcttccgtacacgtaaagttctttgctaagttaaaaagtagacattaatgatcaccctgtaaataaacactagctaataataaggagctttacaggcatgtagttaagtttcacctcagtgttaagtttgagtagatgattttactataaaatatcaatttagtgagaattatgatttactgaaattatagaaatacactgttttagaatgatatcctcaattgaaatcattttaatgaaaaaactagtaatttcttcttgagtctcatgcttgtattcttcctagtccaccataaatcttttaaacttaatgcctgtctttgctagattttttgagggaaaagagcataaaagccctctgggaatgtttttgttttaatttctgtaggaatcagtagtgaccattctaaatctactttttaagggttcagcctgaaggacatatctctaaattagtcctaatctctaaacattttgttgaggctgggcgcaatggctcatgcctgtaatcccagccctttgggaggctgaggtgggcggatgacttgaggtcaggagttcgagcccagcctagccaacatggtgaaaccatgtctctattgaaaatacaaaacttagctgggcatggtggtgggcgcctgtggtcccagctactggggaggctaaggcaggagaaccacttgaactccggaggcagaggttgccgtgagccaagatcactccatttgcactctagcctgggtgacagagcaagactgtgtcttaaaaaaaaaaaaaattgttgcgtgaatgaatgctccataataatagtacaaagaaagataagactttcttttctttctttcaatacaaatagcagtgtctttaagaaagaatgtacattgctcttaaattcgacagttttaagtgtacttttctggcatgtgcaagaagttaaaggtattcatataagtgtctttctaatgcagcgtttttataaatagcataaaaggtgatacgataatacaaggacatcaaatttaaatcatcccaaaaaatacattatcaaaatttttcaggaaaattgtcttagaagaagaggcattttctcaaaatcttgccctatcgttaattgtaagtagcagtaattgaattgatacttgaaggagataaggatatacattcatctaaagctttatttcccttttcatagacaacaaatgaagttgttttggctgtggagtttcacccaacagatgcaaataccataattacatgcggtaaatctcatattttcttctggacctggagcggcaattcactaacaagaaaacagggaatttttggggtaagaatcagattgttttaatgtcattaggtgtataagactttaatttttttaattgtttaataagcatc

SEQ ID NO: 23303 - DNA, 2300 bp, Homo sapien
ctaaaaatagaaaaaattagctgggatggtggtgcacacctgtattcccagctactcaggaggctgaggcatgagaatcatttgaacctgagaggtggagattgcagtgagctgagattgtgccactgcactccagactgggcaacagagactctgtctcaaaataaaaagaataaaatcatgtgaccagaaagctagtaattgaccggatacagtggctcatgccagtagtcccagcactttgggaggctgaggctggaggatcgcttgagcctgggagttcaagaccagcctcggcgatgtggtgaaaccttgtctctgcagaaaatacaaaaattagctgggagtgatggcatgtgcctgtagtcccagctatccaggaggctgagaagtggaaggatcacctgagcccagtggggtcaaggctgcagtgagccatgatagcaccattgtactccagccttggcaacagagtgagaccctgtctcaaaaaaaaagttagtaattgaaaaagcacagtagaaattaaatgtgtttgaccacagactgtaggaggtaaaagcaaattcaagtctctgtcagctttggtgaaccataagatctgtgtaatttatctgaaatagtttattggaaatgcttaagtgcttatacgtgaagccaacaaaaattagtgtttcgtagtttttttgttttaattcccacagtgtgaaaacctaagcagaaaaagatcgttgtttcctgcttaaggaatgttttaaggaatcatgattttattgagacctactgttctgatggagtacagcgttgggtgaattttccccaaaacattctttagagatagtctttctaggatacctccatagaccatatacgggtgctgtattcctcagcttctgagttgtaccatggataattcagaagtagcccaggaaaactgtattcctgatgccttatgcacaacttataaccaacacttcattctcaaaaatggagtcactctcatggggacaccagtgacgtgaaataaggccagagggtgtggtatgtgttgcaatgtcctgtaagatacaagtttaagagactgtctttcttggaagtgtctaatacaggtagtaggtgctagtttctggtatctagataggccagaaagtttctcccaggtttcaagtgctgaggatttgctgtgagcctgctcagttttagagggtgtgacactgcttcctctcctttagaaattccaacaaatgtgtattcagaaacagtattggctagctgttgaactgtttatcattcagaactctaaatgctttctaacaatttatctgttattttctagggacattccagctacatcacacaccttgactggtccccagacaacaagtatataatgtctaactcgggagactatgaaatattgtactgtaagtatgaatgattttatatatatatatatatgctatgattatatttatatatatatatatatatatatatatatatatatatgctaagatgtgtctgtcaggggcgctaatgaacaggctgcatggaatctgaattgtgcagagaatgcttgccaacctctttaacctgacaaagcatatgttatgctgagctaaggtaatgagaatctcaaatgtgattcacttctccaagagtaatgaattaatgttaatagtgtagaacagaaggcacatatagtaataagaaattactctgtcaaattgatgctgctctgaatggtttttcatttaattacttctcctggaggcagggaggaatatgatagatgggcatttatgctttttagaggaaaaaaaaaacttccatgggaaacagtttgtagttttataaaccctgttaaagtgaacactttcttttcctttttaaatgtgtcttaatgtttttcagtgtatggattataaatacaagtaaacgtggctagtttgaatcaagatgcactttcaaatacatttgtacacaagcactatgattatacttcctgtttctaaatttaaaggggacattccaaatggctgcaaactaatcaggaatcgatcggattgtaaggacattgattggacgacatatacctgtgtgctaggatttcaagtatttggtaaggaaatgacacctgatgtaaagaagtggtttgtgggttttttatatataatatttacttgcttaaatttataaatgaaaaatagtctgtgtattctttagctttatcactattaatgtcagcctcagagaaattaaatgtattaggattgaaccaacatgggatttgtattttg

SEQ ID NO: 23304 - DNA, 2300 bp, Homo sapien
ggcaggagaactgcttgaacctgggaggcagaggctgcagtgagctgagattgtgccactgcactccagcctgggtgacagagtgagactccagctcataaataaataaagtgtaaaattcagtggtttttgtatacttagttgtgtgaccatcaaggtctaattttagaacattttcattaccccacaaagaaactctgtacccattaacagttaccccatctctcttatcctctaccccaccccccagcaaccactaatctgttattgatttgccttttctgtatagtttatataaggggaatcatacaatatttgatccactgagactagcttctgtgatttagcataacgttttcaaggtttatccacgttgtagcatacatcagtactttactctttttatggctgagtaatatcccattgtatggatagatgacattttgttaattcattcatcagctgatggacacttgggctgtttctacttttcagctattatgaataccactgctgtgaacagtcatgtgcaggtttttgtgtagacatgttttcatttctcttgggtatttacctaggagtagaattgctgagtcaaatggtaactgtatgtttactcttttgagcaactgccagactgttttccacagtgactacatttacatttccaccagcagtgtacgagggttctggttcctccatgtccttgtcagtgtattttattattattttgcgtgtggatgtctagttgccttacaccacttgttgaaatacaaaggcatttttaggagaattatataaagataactatgtggggcttcttcctaatctgacgttttgtaactttctggaaatccgacctctatgactgttttctaagccttcctcagtatttaggtatccttctgaaagggttagaagatagatggaaaagttaaaataataaagcgttatttgcaaagaattaaaaagaagtgttatgctcaggtaattaaaatactggatatggatgtggcaccaatacctaaagcaatacacaaaaattaatattttctctttaacaatttatctctgccttctgaaaattgggttctccagcctgatcatagatctgaacatttctttatgctatgtgcattaggaaaataatccattataggtggttgttctaaacacaagtgctatcaagacagagaagcctaataggccaggaaggaattaaaaacaaaataattctgtccataaacaatttcattattctacgtgaaaatgaagcagtgacccatagctggtagcttctgtggttattttaatgaagacattatttatttaaattattaagagagaccaattttaaagtattttgacttgtttttagcaaatttaccaaaaacatatttgttctctagagtagcattcaaccacaagtggccaacatctcaacccttaaatcttccatagtttcaatctagcctaatagaggtttgtgaaaattatgttcgacatgatcattagtgctgcataatgattcagaataattaaatttgacgtgtcttatcttgggacataatctttccaggaaaattacatgggatagcatgctaaactagtggatggcctatgctttctaaaagaaataatctctctgaggttttcttggaggtgcttgcctgaaagaaaacctagactccacttcgaagacttggtgttatggctttgtttttgaaccttgtctatacaagtaactgattccctccatccagaaactttaaaaaggaagagcttattgctgaggtgtaagtcaagctgaaagtaaaataaattattagcaccacctgctggttaccattgagtaccattgagtctttaagttttccattttggggctattttggttttttattagttagattttggacaggacttgatttgaatgaagaacagtgtgagccactgagaaatttgtaaaggaaatgttaacagctaagagtttgaacatagataaaagctaaacagattctaaaataaaataaacatatatagcatcacagttatatttcttcagctaatttttctgcatccctgtgtttccatatcaaaggtgtctggccagaaggatctgatgggacagatatcaatgcactggtgcgatcccacaatagaaaggtgatagctgttgccgatgacttttgtaaagtccatctgtttcagtatccctgctccaaagcaaaggtaaactcactttaatagaaactaatgttataaggccttctgtccagggatgattttgcatccatagc

SEQ ID NO: 23305 - DNA, 2300 bp, Homo sapien
gagttaatacatgttaaacacatgaagtgttaactgttttcattgagtagcatctagtcatggggctgggccatattttaatcattgaacacctcggttttatttcagcctattttttcatgtttttgtcctttgagacatagaagtggtgccctttaggttttctaccagatttctgaattgttatttattttcaagttaaggatgctttttaaaaaactgcattctattatcacattttaaatttttcttatttttttttttgagacacagtcttgctatgttgcccaggctgaggtgcagtggcgtgatctcggctcactgcaacctccgcctcccaggttcaagtgattctcatgcctcagcctcccaagtagctgggactataggtgtgcgccacgagatctagctaatttttgtatttttagtagagacaaggtttcaccattttggccagcctggtctagaactcccgatgtgaagtgatctgcctgcctcggcctcccaaagtgctggaattacaggcatgagccacggcacctggcctattgtcacacttaaaataattgcttatgaaatatccactgttcacaattccccaattgtctcaatgttttctaccatttgtttgaatcagaatccaacaaggctcatggtggatgtttaaatactgatgctttgtgatacacaggggagaggatgtgggaacaattgtttggcctttaagagcatacatcaggcctgtaattcaccactttgggaggccgaggcaggcggatcacctgaggttgggagttcaagactagcttggccaataaagtgaaaccctgtctctactaaaaatacaaaaaatattatctgggcacggtggtgcatgcctgtaatcccagctagctacttgggaggctgaggcaggagaattgcttgaacccaggaggtggaggttgcagtgagctaagatcacgccattgcactccagcctgggtgacagagcgagactctgtctctaaatttaaataaatataaaaataaataaaagcatacatcagcatctagtaatgaatgtggtcctgtttggattggcagattctttaaaagtggtcagttcagtaagccatggtctcttgacatcacccatgaagagatagtggataaagaaatgaaacagtctgacgttcccaggagacaaacttttctatttgttcttcttccttttcctttgtctaggaaatgtttatttttgagatagggtctcctctgttgcccaggctggagtgcagtggtgcaatctcagctcactgcaatctcacctgggttcaagcgattctcccacctcagccttcctagtagctgggactacaggtgcgcgccaccacacctggatttttttttttctgtatttttggtagagatggggtttcaccatgttgcccaggctggtcttgaactcctgggctccagtgatcacctgcctcagcctcccaaagtgctgggattacaggtgtcagctaccgtgcccagcggaaatgtcttctttacatcaaagcttttaaggctactatcaggatctattaatgaagggaaggtagagcagaaattcaagtttcttttggaaaaggtgaaccaatcagcacaaaatgactaacattacatgagtccctgtgaggagagcaggagctgccccttcacaaggagatgcacctgtttatttttaggaaacatacctacagaccattctgtttctgtggctgctggagactccagtcgtgggcatcttggacaaagggacttttccagcagggcttcagtgatggtgatacagatgtgcggcactgctgtgtcgtggactcacctcgtcccagactgaggaccaagactgacacagactctcttctgtttcccttatctcctttccaaagtaagtctgtgaatctaccctggtcctttccttctatgtctaatgaatgtctttctcctagtgtagtggaggaagtacaaattttgaagttctagaacataaagtctcagcatggccatgatctaaatgaacataggctggttactaaatctcccaaactcatttcttcatctacagtcacctccctgtatccctgaacacctgggtattgggagatgttgggcccacagtaggtactcctccaggggcagctcttcttggtccatatcctgcccatctgctcttcagccttcgtggtcctaaaaacatgtacttatcctttatttccagctttaagctggaaaactagttccttctagaagttacactaatacaacacctc

SEQ ID NO: 23306 - DNA, 2300 bp, Homo sapien
tgtttctgatcaccctccccctacctcatttatcgcaaagagcagaggccaggaaaaggatgaataatcaatgaccttaaaactcaggtgagaataaaaaccagttctgagaaaccgtgtgacatttacatcctggtacctgagctttagatcactctgcatgtgtatttcctctgcacaaagcccaggaggctacttttatattattggggcaaatctcccaacagccctgggtactaaacagccttcagcaggtgcttccaaattttcttatttgcttcaactcccaggttgccaggggaagcttggccgacaagtctatactcctgggcagactgagcaacagcaggtggtggcttctggataagaggtgctctaggtcggaaggaaataaatgagactacgatcagttaaagttcggtaaagcaagagacgccttcaacccgacgaccagacggtggctccgcagcacagactctctcggatggtggaattcccaaccggcttcgatgtagccccgcccctacccagaccacgcccaccaatcaccgccctctcccccccaggccccgcctggagcccgcccctcctaaagcatgctccacctgactccgacactgccgggcttagtccgccgggcttagtccgtggagcgcttgcgcatttcttgagttgtcgtggcactgcccaaatctgaatgggggaaagagggaacttcatatttcctacagactccgccacagcgactttgcgtgctctcttagagctggttttgcctttcgtggtcctgagaaccctggcttttggttccccaatgcggcttaagtgtgcaggttttaagttaggcgatcttcgggcagccctagtcccagcaccgggtccttgcgctgagtctcgggaccacagccggggaggcggggtccttctctggggcggtcgcgttggcagcggatgcgggaagccggactctgggcgtcatgtactacaagtttagtggcttcacgcagaagttggcaggagcatgggcttcggaggcctatagcccgcaggtacgagtggcgcctggccagctcggacatgagaagtggcggccctagcctcggcgacaggcagtcgcggcgttggagccaggggaggcttctgcccgcggtcgagttcgtctctgttctccttgcacctcccggggcctctccacaccagcgtacggtggtcactgaggcttctttttgtgtacctgctcacctggcgggggctggcctggcgtggaagtttggtctggctcactgcaggggtcaaggtgacccccggggtcacttgtctaaaagggatggtttgtgggggtccccagtgtgacccgagtcagaggtccggccttctccctcaattcgaagacatctggctttcggcctccttgtcgtttgtcatctgccagagccccataggcagcctcacttgagctcgagattagagagcgcggggctataaaggcgtttagagaaaccatggtgcagggggttggggggctatgatctgggttgggaaatttaacaggttacttaacacgtccagggagggaagttgcatgcagcgaggttacactttcccgattgtaaaatatttgacagatgctcgttgtttgggttgtctgaaaagtattccatttcacgcagattctaccaattggagtttgactctccagcatgtgttgggggtaaacatgagggattttagagccccagacgtgccttttcaaatcatggcgttttccgctttaattgtgtgaccttggccaagttatttaatttattgtgagctcagtttcatccagggcggcgttagtacacattaaatgaagtgtgtcaagtgactagcagtttgggcaggtggttggttctggataagtgttaactgttcaccagaagctgtctgagatagtatattccctcctaatcctctagagaagtgtgggaagtgtcggtgagatacgcagttagactgcagtagtgaggggcccagatgaggtgtaaaggatactccattactgttgcttcatttcctttttctgtgggacactgcagcttgcccaagaggcagatgtttaagaaagatttcaggtctggtaccgtggctcacgcctgtaaatcacagcactttggaaggccgaggccgagggtcgcttgagcccaggagtttgagatcagcctggggcaacatagtgagaccctgtctctaaaaacaaaaacagatgattctaatctcagataagaagggcaagttttttttttttttttcgggggtta

SEQ ID NO: 23307 - DNA, 2300 bp, Homo sapien
ggctttttctttcactcaatatttgctagcgcctgggactcaagaaggctaatgtcaatggatcattttcttttgaggtagtcgaactttttgtcgtagaaaaatcttcctgaatctattcagtatcaaaacatggggtgggcctggcacggtggctcatgcctgtaatcccagcattttgggagtcttgagtttggcagatcacttgagcccaggagtttgagactagcctgggaaacatggtgaaaccccatctctactaaaaatacaaaaaattagccaggcgtggtggcgcgcatctgtggttccagctacccgggagactgaggtaggagaatcacctcagcctgggaagtcaaggctgcaatgagccgagatcacaccactgtactccagcctgggacagagtgagaccctgtttcaaaaagaatttaaaaaaaaaaaaaaaaaaaaggaaatcactagtcccaaaccacttatccttggagaaatatggacataaacccaaattgcatgttctttccattatatcacagtgtctctttgtaaaagtggcaactttgggctggcttacatgaattcgctgaaacctttacaacatattggcggtgctgaatacttggggctcttgaacgtaagcctgcaaccaggatgctggtgtacaccctcaccctggaatgctcagccttgatcctcctcttttcagaatggcttcatatctatttatttgtaacatagtgcttaacagtaggaagtcttgagccaaatgcctagctctgccacttatccctgacctgagcaagttacttagcttctccaggcgtcattttcctgtattctaaaatggagatgataatagcatttaccttataggattgttgtgaagattaaatgagtttagggcaatgctatatataggttagtatcatccatcaatttgcaacatgatttcataagtgcatctagaatatgcttgtgtaaacctatggttagatgatgaagctaagaaaagcctgagtccatccctggagagtaagaaactagtatactccttttacacagtaccttgcacacagcacaggcttaacagacatatttaaattgaactgaagcgaatactaccagaactgaaagtggtagttccagatctttcaggctcaaggtccagattttacaagtgtttctgatcaccctccccctacctcatttatcgcaaagagcagaggccaggaaaaggatgaataatcaatgaccttaaaactcaggtgagaataaaaaccagttctgagaaaccgtgtgacatttacatcctggtacctgagctttagatcactctgcatgtgtatttcctctgcacaaagcccaggaggctacttttatattattggggcaaatctcccaacagccctgggtactaaacagccttcagcaggtgcttccaaattttcttatttgcttcaactcccaggttgccaggggaagcttggccgacaagtctatactcctgggcagactgagcaacagcaggtggtggcttctggataagaggtgctctaggtcggaaggaaataaatgagactacgatcagttaaagttcggtaaagcaagagacgccttcaacccgacgaccagacggtggctccgcagcacagactctctcggatggtggaattcccaaccggcttcgatgtagccccgcccctacccagaccacgcccaccaatcaccgccctctcccccccaggccccgcctggagcccgcccctcctaaagcatgctccacctgactccgacactgccgggcttagtccgccgggcttagtccgtggagcgcttgcgcatttcttgagttgtcgtggcactgcccaaatctgaatgggggaaagagggaacttcatatttcctacagactccgccacagcgactttgcgtgctctcttagagctggttttgcctttcgtggtcctgagaaccctggcttttggttccccaatgcggcttaagtgtgcaggttttaagttaggcgatcttcgggcagccctagtcccagcaccgggtccttgcgctgagtctcgggaccacagccggggaggcggggtccttctctggggcggtcgcgttggcagcggatgcgggaagccggactctgggcgtcatgtactacaagtttagtggcttcacgcagaagttggcaggagcatgggcttcggaggcctatagcccgcaggtacgagtggcgcctggccagctcggacatgagaagtggcggccctagcctcggcgacaggcagtcgcggcgt

SEQ ID NO: 23308 - DNA, 2300 bp, Homo sapien
gcgtgagtcactgcacccagcctggatctccttctttcgggacttggacaaataggaaggctgctcttacactggctttctccttcacaccttaatctccttacacctgtgttatccaatatagccactagctgtatgtggctatgttaaaattaaattaaaaattcagttcttcagttgcactagacacattccaaaggctcagtagccacatgtggatggtggccaccataccggccagcacaggcacagaacatgaccatcatcagagaacattctattggacagcactgctcatctacttttattgttgaatttaactgtgcatttttggtaaaacttattgaacagcatttttgcatcctgtaaggaatttaacaccaatgctccttctacagggttacatgatgttgtttctttatttcatggcctttcttagaaatgaaaagttccccatgattttcttttttttctttttctttttttttgagatggcgtctcgctctgttgcccagactggagcgcagtggcgcgatctcggctcacttcaacctctgcctcctgggttcaaatgattctcctgcctcagcctgctgagtagctgggactacaggtgcccgccaccacacccagctaattttttgtacttttagtagagacggggtttcaccgtgttagccaggatggtttctatctcctgacctcatgatccacccgcctcagcctcccaaagtgctgggattacaggcgtgagccaccgtacccggccaccccatgattttctgaatcagagttctgcaaggccaggagatggtataaatgtctgatggcagcagaccagcctccggcctccttccaccaactgcctcactgttccagggccactgctgctgtcccctcctaactgccccagttccatccaccccattaccttttcagctgactctatccattttccctggggaccatccccttacgggcacgacagtgtcaaaactgagcagcctgcagaggcccagccccataagggcatggtagcaaagttccatttgtgcccatgatgggtgctgaacagttgcaggcctccagtggctgtcaactcaggtgacatgtgatgtcatcaagggaatttaatggaaatagattggaaagaaattccttcccacaatatttgcaatcaatataggtttggtcttttttgctttgtttttaattctgaggtgcaaaatcctcaccaagagttattcttctcgcatcatttaacttagaatcctaccgggctactcaccctgaagcttgcaggatacatggcacttttacaacccaccggaaattaagtgctagttgattgacagcattacagctctcttagaagagtctataccacccctcccccagctctctaatttgatcagctcctagagtgtgcttagctggagatggacagcccctggcagtcccagagcctgaagaaagtaggcctggtaacctggtttggattgctgtggttaagaccttgtcctggacactaagtgctggctgggcaggctttcagaacaaaaggcaaagtgcctcttgtggagacttgtaagaccctcctggggaaagcatgatttgaaggcccatggcacccactgagtctcctaggtcttctctaggaccagccctgtccttgctggggaagtttccttggtgccttttcgtgttgggggtaaagcctgaaaaacactgtgtacaggcagtctcattagcctactgaaaagcaataatactccactgtttgtggaagaatcctttgcaattaaagcaagcagaggaaaaattattagggagctaagttattagatctgttccatggaacacttttttttttttttttaaaccaagctcattttcctgagaaaaaatttaatgcaatctctccctcttttaaagccacctgatgccaccatgttctgcctgtagcagcaagcagatgcccaaaacaggaggacatcacggtgataggccacagagaacatggctggggcgtgtgccaggcaggacaatgcagggaagccaaaaacagtgggagaaaacacaataaagtgagacccgcccagaatggtaaacacagcagcagagctaccacacacttcccttctgggagcggtggggaaagcagccagggaggtcgggagatggacggaaactgctggggatgtgagaagcctggggcactaactggagttgttattgacttggtaagtctaagagctaccatttactgggtgcttgctatgtgccaaggttggggtcta

SEQ ID NO: 23309 - DNA, 2300 bp, Homo sapien
aatataattgaaataaatggcatggatttattttttcttaactatttggattaaagctttgtggttcatgcaaacaatgtgcagatgatagcacctccatattactaataaaaatatgataaccatcaattttactggtactgggaccgctttatgtgaatatgtcctatcttcccaagtaaattataactgtcttgagagctgggatcctctctcatgcatacacctttgtatccccgacagtgtctgttacagacttgggcacaaacagttgactgatttgaggggagaaacttctgtgtgaagagacgaggagaagcatatacctataggtatatatatacacacacacctatatatatatattttatacatacatataggtatatatatgtgtatatattttatatatagggatatgtgtgtgtgtatatatatatataatgtacatgtgcaaatatacacacagacttcatgctacccttaggtaacaagtgtgaaatctcttgttggtgattccagactttccataggaccgattttcataaagaagcatgttgggtaaatactagtggcagttaagctacccatttataaggagacgatgagacgtgatagagtagttcattcataaatgaaaaaatatgtattagggttttgtcttcatggatgttgtgtttttttaggaacagcattttattgtaacgttccctgagcgttgctacttttatcattatttatctatttatttttttctagagatagagttttgcttggttgcctaggctggagtgcagtggtgtgatcatagctcactgcagttttgaactcctgggctcaagcagtcctcccaccccagcctcccaagttgctaggactataggtgtgcatcaccatgctggttaattttttaatttttatttttttgtagagataggggtctcactgtgttgcccaggcttgcctcaaactcctggcctcaagcagtcctcccacctcagcctctcaaagctctgggattatgggcatgagacactgtgcctggcctgttgctgcttttttaaaaaaccattaagtatcacttctttcttagctatacttacagacatctcttataactcagtcttttcatggcagaaatgttttcattaatatctgtattggtaccagtaagtcagacattatcctaaattaaaatacccaaagaggaaaaaagccctaatctcctaatctttaatctgattttaccacacctgaatttacatgacttgatctaatatgtaacttgttttgtattctctaaaatgggagttttaggattacaaacacaaaattagggaatatatttgaaagtgaacaaactaacaattcaaggctttcattactgtattgtccttgttgctaattgaaacagttgcatttgttcttgggtttggtcattacctataagtacccatttgtaagttcatactttctgaaaagttatttccacaatggctgtcaataagtcaaaattatttgtctttttaaacctttgtccagatgtcctgtgatctggaagaggtggagatggggttaatttggatgttggtgttgggagaattttccctgttggcttggtatttgctaatagcagtttattttccttttttttttttttttttaaagaaaacagacaaaaagatgcaaaacaatatttgaaatattaaagcctcaggatagaatttcagacatcccttctgtccacttcacctcttttccatagaaatgaaaaataaaacattgaaagctcctagctctgtattactattcagctgtgtaactccaaacttaatgcatagtgtcatagaatatttcgagtcctctgacccttcataaatgtgcattcccttatggtgtgtaatatacaattcaatcagacatagtctaatcattttatagggtcataggaagttggaactaggggttgtggaaaccttctggtctattttggcccaattgtatgccttttgtccgatccaaatattagcaaccagggaactctgctcccagtgggttgtaatttagccatggtcactctagtgtcaggttaggtcccagaagcttgatttccagacttttggcttagtactctggatatacttcctttaagaatcttgtaacttcggaagccatgaaggatttcttttaaaaatattttcttggccaggcatggtgactcacgcctgtaatccgagcactttgggaggccgaggcgggtggatcacctgaaatcaggagttcgagaccagcctggccaa

SEQ ID NO: 23310 - DNA, 2300 bp, Homo sapien
gttcaaggcttaattgttgaaccctaacaataaaagttcagaaaaatgtaattagcaggttgctctctgcgcaaaagtaaactacaaagaggggacatttgtctatctctacacgcccctccccatgcctgaggatttcgccctcaagaggtgcgtctagtgtaagggccagaccccgctggtgccccggacaacggggtaggagtggggaccgaccggtcccgtagttggccgcgcctgggcctcgctgggcgcgcaccccgctggctcggtcgcccggaggcggacaggacggagacgggacgtatggacgggacggacagacgcgacaggacggacgggacgggtagagaagcagtgcgtcctacccggagggctccctcccagggccggcggagtacctgctccggtcatccaggctgcggttgtcggcggctgcgttgcgccagtcgggcaacgtgctggcgcacagcaccaccatggacacgatcacgaacaccaccgacacgctagccaggatctgcgcggccagcgacgacgtgggctcctcgaaggtccgccgcatgcgctccagccagcgcctggagggagccgcctcggccccgccggggcgcgcctcgtcgcggcccagcacgcccggctcgtcggccgagtagaaggtgtaggtgtcggacatgcggtcgtcgaggcggcgctggcagcagtactcgaggtgcgcgccctccaggccccagtagatcatctcgttgtagaaggagagctcgcacatccgcggcgcgaagcgcagcttgccgtggccgcgcacgtagagcaggatgaagccgaaggcctccgagtgccggtcgaagaagtactcgttgcgctcgcggtcgtagtcgtcgcacacctcgagcacgtcgcgctcggagcggcagccgtgcagccggctcacgcggcgcagcgggaagtccttcagcagctcccgggacagcgaataccgggcgccgcccacgttcagcaccaccgaggccgccccgctgcgcccgaaggtcatggctggccgcccgggggactttcggcccgagggccccgctgcagccccccaccccaagccgccacgcggggcctgcctgcccgtggctgacgggggagcgcgccgtcggggcccgcgctccctcggggctccgctcctgccctccgctggcccgggggtccctgggctcgagtatctccggcgctgctagtagcgcgccctccgcccggcggtacctgcgggtggccggggagtcctcgccggcgccagcgctgagccccaccggctgggaacgcggctgtgtccgcgccgccgaccctcgcgcccgagggctgcgcacaccgaggccgcggtgccctctcccaagccgcggggccgaccccctgagggctgcgggcgccgaatggagccgccggggcggaatagctccccgtctccggcgctccctgcggccgcgaatccggcggccgccccgccgccgtccagaggcgagaggcaaagtgagcgggttcggaggcggcgaagagccggctcgcggcggcgggggcggggcctctgtgcagtcctcctcctcgcccgccggctccgcgcgcgccgctcacctccctccgcgccgccctccgcttcccgcccgcgcccgcacctccccggcttgctcgggctgggattcccgggcgccccgccctggacctcgggctccccgcctcgtgacgccgtcctccccctccgctccggcccgtagtggcggggaggggtccgcagggcgggggagcggggagcccagcgccgggatgcctgctcccgcgtcctgccctgggccatcgggatgaattgggcagtccccagggccccttttaacagccctggttcaaagcccagtgtggactcgggtgcggggacagacggcgtttggagagctttttccagaaactgtccggagcccagctcgggttctgacatcgcccctaaggatttctcagggaaggcatcccagccacggcttttcctgccgactttgctcttcctaccgccgcgcggggcgacccacgtaccgcgtgctcagagggcggctacacgccccatcccccagcctcggtgccgcctgccagcccgcggagggaagcggtccccgacccggccccggcccccacgttctggggcgcgagtcctgagaaggcgcctaacgtgtagcgcgcctggaccctctcgagatgctgcccttagagtgggatgaaagtctggggaggaacgccttgtcaccggcaaaaacagcctttctcttggtctt

SEQ ID NO: 23311 - DNA, 2300 bp, Homo sapien
taatttgttttctaagctcaaatgtaatttaaaatgagatatttcttcaactggttcaatcaacagacagtagaaggattctacggagagaacacaggaaataaaccctacaataatgttagagcaaacaatcggcactatagttctgtcttctattgcttgtgatgcttctagaaagtattttttaacggcttcctgatgaattggctcttggtatcaagccaggctcatctctggctcacatctgcaaacttttccccatcctcacgtcctacaacaaatccatcttcaagacctgcaaagttcttggtctcagcgtttctcagaacagacccttcttcatcttcacagacacggggttggggatcccattcctgggttgcgaaatgaccttctccttagaatgacccaaagtgcaaaggcatcttcctgaaataaagctttcatcaagccatttctgctatggaaacctccagggattccattgcttatgggatccaatttaaatgctgcagttgagatccccattgtttcagtgggcaagtgcattatacttcttcacagactttaaacctccacattcgagattttgctactaggaatgttttgccctttctctgtgccaactcatggccatcagcacctccaattctgtcttgaaactcactttcttacagatatttttcttgtttaatatctacttagtagatactaaacagcaaagtagcagtatctacccagtagacactaaatagcaaaatagatactgaatagcaaactatttagtagatactaaagtagcaaataactcctgtttttgagcttttaatcacatttagtgctcttaagataaattatccaagtctggggataaacaactcacagagattttcattctttaagaagccaccgagagtgattttacttaaaagacagcactcacattttcagttgtctgccttttcactaggaatccacttaagaaccagcgcaaaaggactccgtttggcgacctctagcgggcaccggacaatcctacaaaattacgaaaagtagagggcaatgaaaaactcttccctttaaccagccaggttaccctgtggtcagatgaccgcatctcaccctaccccacccttatttttttcttctagtatttgttttgcatctaacacggttcgccttacaactcacctgtctcgcctccggcgggctgggctgccggtgtcgggtgtcaggtgaatgaattgctggtagcagtttaaaataatccctgccaagtggaacccgctttctgggcacggacaagagcgcggggtagatcgctctgcggagccttcacggggctcttcccgctcggagggccggtgctgcagccgggtcaggggtgcgcgggggaaatcaagatattttgaaaaggaggatgcagacgaagaccaagagaaaggctgtttttgccggtgacaaggcgttcctccccagactttcatcccactctaagggcagcatctcgagagggtccaggcgcgctacacgttaggcgccttctcaggactcgcgccccagaacgtgggggccggggccgggtcggggaccgcttccctccgcgggctggcaggcggcaccgaggctgggggatggggcgtgtagccgccctctgagcacgcggtacgtgggtcgccccgcgcggcggtaggaagagcaaagtcggcaggaaaagccgtggctgggatgccttccctgagaaatccttaggggcgatgtcagaacccgagctgggctccggacagtttctggaaaaagctctccaaacgccgtctgtccccgcacccgagtccacactgggctttgaaccagggctgttaaaaggggccctggggactgcccaattcatcccgatggcccagggcaggacgcgggagcaggcatcccggcgctgggctccccgctcccccgccctgcggacccctccccgccactacgggccggagcggagggggaggacggcgtcacgaggcggggagcccgaggtccagggcggggcgcccgggaatcccagcccgagcaagccggggaggtgcgggcgcgggcgggaagcggagggcggcgcggagggaggtgagcggcgcgcgcggagccggcgggcgaggaggaggactgcacagaggccccgcccccgccgccgcgagccggctcttcgccgcctccgaacccgctcactttgcctctcgcctctggacggcggcggggcggccgccggattcgcggccgcagggagcgccggagacggggagctattccgc

SEQ ID NO: 23312 - DNA, 2300 bp, Homo sapien
agtgagccgaatccgaatcgtgccattgcactccagcctgggcagcgagagcgaaactccgtctcaaaaaaaatttttttttctaccataagcctttgaggtaggtatcaaccagtagtcatattttgtaacccctcttgaggctcagaggggttaagtaacttgctcaaggtctttatagttaaactgccaaactaggagtgaagttagggctggttgatgacaagtttgtggtctaaaccatgtagctaagaagggagaggcgcctttgcttttttaaaggtgcaggctttccacccgtctttggttgaaaggtttctttcaatctacaaacatttgctgaactcctttatgtgtgaacctctctggaattaggacatataaaagtttcacaaagtccttgtattcagctcttctgattctttgagtccacgatttgttggtatttattcttcagatactgagcatctactgtgtcagctcagaaatgtagaggacattggcctaggagctggacatggaagagactaatatatagaatctagagcaaaaaacggttctaaggcctgccaccatcattacctcctgctagtccccttcaagtctttgaggcctttcatggggggcttctggatgaggctgttcctaaggggacatagggaggagttttctcggcatctttcaccatttattgtggttagcacagtcatcataaacacctggcaagagcactaagcttgggaaatgagacaggcacacaatgaattaacaaaaacagggaaagatttcgaaggaggagaaattgcttatgaaaaattaatgggaaaacatcctaaagcttgtgatccacttctttgcactttatggtttctaggtggcttttgtacttggagaaacactgtggttcagaacattctaggccagaggaaagggctgattcataatcccaaaattgctgccagtttactgtgtgattccaggtgaattattcaaccctatttatgtgtcagctcagaaatggagtgatgtcagttttgtcagaatgtttttggtgggatctctggtaaatgttgaatgacagctatgcaatgtgtggaacagaacacttttgctttcttctttgggtcagaatttgacacatggctcagaatttgacacacagcagagaacccttgggaatctgtggttttctggggttaaaaagaaagcaagagacacctgttatttgcatggtgctctgtgttccctggtttacaaagcattttcagatatcatcgcaactgatccttaccacacctgtgaagggggaactcacgtccccattttatagacgaggaaacaggtcatagagtcaatgtaattcaatagtgctttattttttatttttatattttgcctcagctatgcacagttttttcatctcaatactttgtgataagtgaccatcacaaatgtcatcaccaaaccaccaaaacacaaccttcttttctgggggcacctcttagccccgcacagaccttaaacccagagtcgacagcacacagctgtgtatcaccacacattccaaacaagccaccacaccaagaaatcttcttcgtgtttattatgcagcaatgtctgggagtactttggaatggactggcttctctaaagaaagttatttgtgttcatttgggggatcgccagctaagattcaacgttgtttttttttttttgtatctgtgagagtaggaaggccgtgaaaacagaggttgtttagagaattggcctgggacaataaccatttagaagctttaggcacgtaaccagttaagtgtccatcgacatgaaactgattgaatacaatctcctctgtttgggggtggtggtgattgtgaactgtagggccctgttcccccatggacaaaggaagcccctcactcctaaaggtcccttttcccagcagaacaggccctgcatatacagtgcccgtctagagccagggcctccatctgggtgttggacagttggttctgctcagcccagttttggggtaaacgatgacgcagttagggtggcctaggaagggagtttttctacctctgtccccagctgggtctctggcgaggcgggaagcacccggaatcttcctggccctagagcctgcaggctccaggccggccccttgaatctcaccgcgaggaaggcaccctgctgcctgcacttatttgcatccaagagtttgcattgagactggcgcttgcctactagggcagccacaggggggttccccagggacagaggtagggaaggaggacctg

SEQ ID NO: 23313 - DNA, 2300 bp, Homo sapien
aatgtagaggacattggcctaggagctggacatggaagagactaatatatagaatctagagcaaaaaacggttctaaggcctgccaccatcattacctcctgctagtccccttcaagtctttgaggcctttcatggggggcttctggatgaggctgttcctaaggggacatagggaggagttttctcggcatctttcaccatttattgtggttagcacagtcatcataaacacctggcaagagcactaagcttgggaaatgagacaggcacacaatgaattaacaaaaacagggaaagatttcgaaggaggagaaattgcttatgaaaaattaatgggaaaacatcctaaagcttgtgatccacttctttgcactttatggtttctaggtggcttttgtacttggagaaacactgtggttcagaacattctaggccagaggaaagggctgattcataatcccaaaattgctgccagtttactgtgtgattccaggtgaattattcaaccctatttatgtgtcagctcagaaatggagtgatgtcagttttgtcagaatgtttttggtgggatctctggtaaatgttgaatgacagctatgcaatgtgtggaacagaacacttttgctttcttctttgggtcagaatttgacacatggctcagaatttgacacacagcagagaacccttgggaatctgtggttttctggggttaaaaagaaagcaagagacacctgttatttgcatggtgctctgtgttccctggtttacaaagcattttcagatatcatcgcaactgatccttaccacacctgtgaagggggaactcacgtccccattttatagacgaggaaacaggtcatagagtcaatgtaattcaatagtgctttattttttatttttatattttgcctcagctatgcacagttttttcatctcaatactttgtgataagtgaccatcacaaatgtcatcaccaaaccaccaaaacacaaccttcttttctgggggcacctcttagccccgcacagaccttaaacccagagtcgacagcacacagctgtgtatcaccacacattccaaacaagccaccacaccaagaaatcttcttcgtgtttattatgcagcaatgtctgggagtactttggaatggactggcttctctaaagaaagttatttgtgttcatttgggggatcgccagctaagattcaacgttgtttttttttttttgtatctgtgagagtaggaaggccgtgaaaacagaggttgtttagagaattggcctgggacaataaccatttagaagctttaggcacgtaaccagttaagtgtccatcgacatgaaactgattgaatacaatctcctctgtttgggggtggtggtgattgtgaactgtagggccctgttcccccatggacaaaggaagcccctcactcctaaaggtcccttttcccagcagaacaggccctgcatatacagtgcccgtctagagccagggcctccatctgggtgttggacagttggttctgctcagcccagttttggggtaaacgatgacgcagttagggtggcctaggaagggagtttttctacctctgtccccagctgggtctctggcgaggcgggaagcacccggaatcttcctggccctagagcctgcaggctccaggccggccccttgaatctcaccgcgaggaaggcaccctgctgcctgcacttatttgcatccaagagtttgcattgagactggcgcttgcctactagggcagccacaggggggttccccagggacagaggtagggaaggaggacctgtcttggggtggacaggtgacggggtaccctgggtgggggaagaggtgctggggagaggctaagccccagcccccactctaattctctaacagcccctggtccgcatttgagtgcaggcctctgcctcagccaggaccctgaccccagggccctccacttccagcaaggccccccaccctccctcccactcccactccctttcccctccccctcccccccaattcccgctggccccgcagcgctccagcctccccgggcctcccccggcccggcccactcggccttgctagcctggcgctgggggcgggcaccagcccccacccctcggcgtaccatcccctttacttcccccaccccctgtcccctcccttccctcccttcccccccgtggcgaggcagcagcgacggcggcggcggcagcggcggtcgcggctgaggctgaggaggaggcggcggcggcgggcggggctcggctcgggctccgcg

SEQ ID NO: 23314 - DNA, 2300 bp, Homo sapien
ctattcataaagaactacttcaacaagagcattatatttgataaaatcccttctgtgaggttgggtgtggtggctcatgcctgtaatcccagcactttgggaggccaaagcaggcagatcacttgagcccaggagttcgagaccagcctgggcaacatggtgtaacgctgtctctactaaaaatacataaagttagccaggtgtggtgatgtacgcctgtaatcacagctactctggaggctaaggcacaagaattgcttgaacctaggtggtggtgtttgcagtgagctgagattacaccactgcactccagcctgggcgacagagcaaactctatctccgaaaaaaaagtgaattaatttttaaattgatatgtaatatttgtgtatatttttggggtaccatctgccatttttaagttggaatttttcttcttttgaggccctgataattttatggttatagttgaactgacaagataaatgtttaatttttttttttttttttgagacagattcttgctctttcactcaggctggtgtgaagtgtacgatcttggctgactgcaaactccaccccctggattcaagcagttctcctgcctcagcctcccgagtagctgggattacaggcgcccaccaccatgccaggctactttttgtatttttagtagagatggggtttcgccatgttggccaggctggtctcaaacacctgacctcaggtgatccacctgcctcagcttcccaaaatgcttaggattacaagcatgagccactgcacctggcaaatgtttaaatttaaaattgattagtttgaagaaaatattgaataaaatgttgatttgatctgtttcaatatccaaacagataatgtgctttgtactaataaattctttgaattttatttgtgtagaagaaattgaggaagaatctgaaacaacagttgaggctgacttgaccgataagcagaaacatcagttgaaacatagggaactctttttgtcacgccagtatgaatctctgcccgcaacacatatcaggtaagaactttttaggaactaaggtactcagtactacggtgaccaaaaaacaaaagacttctttgaagcgttttccagactcttctcaggatcttgcttaaactactttgctaaaggcttcataatggaattttaggttggaaatttataatgtgtattaccatattaaagccccacaaaagttctccagtaaagtaaccattttaactttgttttaataacagactttcctggccaggcgcagtggctcacgcctgtaattccagcactttgggaggctgaggcgggcgtatcatttgaggtcaggaattcgagaccagcctggccaacacggtgaaaccccatctctactaaaaatacaaaaaattagctgggcgtggtggtatgcacctgtaatcctagccactcaggaggctgaggcaggagaattgcttgaatctaggaagcagaggttgcagtgtgctgacatcgtgccactgcactccagcctggatgacagagtgacactctgtctttaaaaacaaacgaaaaaaaacaataagacaataaaaatcgggcctttcccgattgatttgaatatcttttcagaatggtacagaagagggtctagcagacatcattttgggaaatgctggtcttccaggttctaagaaaattatatagccattagaagccaaaggttagaacctaaaatctgcttcccaggcaggtgactcttgaccttataggatatatggctttttgttttcttttgaggatcactgggatgaaaactttatattctttactattccttaataacacctgatgtatgcattgatagcatacaaatgtgcagaaaaaaggtgactgatttgggcgatatctctggttctctaacatggaccacccttccattaattaaattctttttctactgcagaaaaaacaaaaagtgaaaaaacctagccccttgtttgtcgttttggcagttgttgaggaaaaacggtggttttctatgatctactggtggtgatcaaatttaagatattgttgagctttttttcattgtagtgtataatcagtgcatcttagaggtattacaaaatgtttgagctcaaaagattcttaccctcggtcaggaaagcttcaagaggaattgctacttactcagccttccagagagtatgaggcacaaatagagggcacaggtgagcatagggtgtatgaaagcagcagcttgtgaccagggtaaggatgtgtgagcaagtgcagtgtt

SEQ ID NO: 23315 - DNA, 2300 bp, Homo sapien
ctggaatctggagcactgatgaggagagtgagggaaggtttgagcgttagataaaaggaagggcaatttcatataatgtgtcttttaaaacattaaaaatgtttgcttacagtcacagattgtcacaatgacatcaatcatttgtcccctgggaattaatctataggtacctggttttgcagaacatattttatgtgattcacatgtctatatgcagtcttggcacacttgttttccttttgtgattattatcattaagacaagtgatgtattcaatcaaataacgttctagattcagttgagcaatgaactttgctctcattcttttttaaggcagctcaactgtacatttgtattagctctttttcaacacacatatttagccctgggttaaatatcagaaattttcatatttctggtaaacctctggccagtcatttgaccccaaggggaaatcagttctatctatatatagtagatttttaaaaaaaggaatattgtatattattgaaaatgctggtcattctaaatcgccacttttcacttagtatagtgtcagctgaaaaccgtaagaagagaaacaccttccatctgatttaaaatatgttttagggccaggtgcagtggctcatgcctgtaatcccagcaacttgggaagctgaggcaggaagactgcttgaagccacgagtttgagatcagtctgcacaaaatggacctcgcctctacaaaaaaatttaaaaattatccagacatggaggcaaatgcctgtaggcccagttacttgggaggctgaggtaggaggattgcttgaacctgggggtttgatgctgcagtgagttgtgatcatgccaccgcactctagtctgggcaacagagtgagaccctgtctctaaaaaaattaagtagatagataataaataatacatttttataattatctattttataaccaggcatggtggcgtgtgactgtagtcccagctactcaggaggctgaggtgggaggatcacctgagcctgagaggttgaggctgcaatgggccatggtcatgccactgcactccagcctgggtgaccctgcctcaaaaaaaaaaaaaaaaaaaaattaaaggccaggcatggtggctcacacctgttgagaagttgaggtggaatgatcccttgagcccaggaactcaagaccagcctgggtaacatagagtccctgtatctatcaaaaaaaaaaaaaaaaagtaaataaagagccaggcatggtggcacacacctgcagtcccagctacttgagaggctgaggtgggagtatcacctgagcccaggaggtcaagactgcagtgagtggtgatcacaccactacacaccagcctgggtgacagagtgagaccctctctcaaaaaaaagaaaaatgtcttttaaaaaccaatttgttggctgggcacagtgacttacgcctgtaatcccagcactttgggaggccgaggtgggtggatcacctgaggtcaggaatttgagacaagcctggccaacatggtgaaaccccgtctctactaaaaatacaaaaattagctgggtatggtggcgggagcctgtaccagctacttgggaggctgaggcaggagaatcgcttgaacctgccgggggcagaggttgcagtgagccgagatcacgccactgcactccagcctgggcgaaagagtgaaactccatctcaaaaaaaataaataggctgggcatggtggctcacgcctgtaatcccagcactttgggaggctgaggtgggcagatcacctgaggccaggagtttgagaccagcctggccaacatggtgaaactccgtctctactaaaaatgtaaaaattaggcaggcgtggtggcaggcacctgtaatcccagctcctcaggaggctgaggcaggagaatcgcttgaacctgggaggtggaggttgcagtgagccaagatcgtgccattgcactccagcctgggtcacaagagcgagactttgtctcaaaaagtaaataaataaataaaataaaaataaaaaccaatttgtccttaacatacattgctgacacaggttagaagtgtaaataatagtcctattttatagagtagagatctcagtgcacacagtggttaaatgatttcttctggtagcagtggtgggagtgtcacctgatagttgtaataacaataccaaaaggaaatcttaagtagggtctttgctgtcaggccagaccaactttacaaaccaggctttaacaggtgaatggaattgtggaaagtggaagaccttgagtcaac

SEQ ID NO: 23316 - DNA, 2300 bp, Homo sapien
agagggacccctgagcctgctatgggtgtctagggatgctggaggcctcagaggcaccagtgggaagagacaagaatgtggaacctgcagcgggcgcagctcagtttcctgggacttccgtgagaagtcaatgagggcatgcacatgagagtgacagatctggacagaacaggtccctgcgtggactcaaagcttcctctagaaaagaacacttgacccctgtctccctcatccccagcccagtggctcactgccttcctacactccactgggagcagagaaagacctgcctttgctgaaaaggctactggccctaagagacatcgggaccttcaacctcctcgtcacccctaagggctttcctctcctgcaagcaaagaaaaaacaccatcaggctccttcaaacacaaatggtccaggataggcacaggcagaggctccacgcggctcgttcctggcctgtagcaatgcactgctccgtgcaggacctgagaagaagacatagaatgttccagggaggacccaggtcagaataccgatggccgtgaagagaagagtttactctcatatgcagggcaagcttaatccagagagaaagtcatgaaaattagatctgtttttgtgaacactcgctctgtcccaaggaatcccctagaagtttgtttttttttttttttttttttttgagacggagtctcactctgttgcccaggctggagtgcagtggcgcgatctcagctcactgcaagctccgcctcccaggttcacgccattctcctgcctcagcctcccgagtagctgggactacaggcacctgccaccacgcccggctactttttttgtatttttagtagagacggggtttcaccgtgttagccaggatggtctcgatctcctgacctcgtgatctgcccgcctcggcctcccaaagtgctgggattacaggcttaagccactgtgcctggcctataagtttttacataaattatctcattttatcctcacaactctccaagaaggtggtagtgcctgattttacagatcaggctcagagaggtttggaaatagggcagctctgtttccaacccaggcctgtctgcatatggagcttaggctgggcctcaccaccctgcttctcccagggatgtttgccctcagccttgaccaaatgggagcccagggcagccaagagaggccaggggccactgtgcctgggacacagaggccaggccacacatggcagactgctgaccccagccagttggcagtgatggggtcaggccctggagcctggaaccagcacctcccttggccctgctgtcccgggttatcaggagcctgaagccctcatctccacccacaggaccagcccatgggctcatgagaatacctcaccatgggacagctggacttgtaccttgtctggagctagccccagcctcccactccctattccgcagtgaatgctaatgggggcaaggagtggagtggacaaggagccatggggagacacagacagggaaaaatcaggattgttctatttgcgggagaagcccccagctccccgtgccatggcagtagaaatttggcaggggcgtccccgtccatggggcctacttcaccgtgtacccggacttgggaccatcacagacttcggaaccatcaggaacctgggagcaactgaaagctgaactacagtgggctttcagacacacagcaggctggcggagcacaaataggactggttccctccaggccaccagcagggcggtggaggtcttcactgactccctgcctacctctcaggacaatgtccttttggctccacagtccctgaagccagagctggtgggggcagggaggcagccaccagcctctatatgtagtggaggagggggtgtccagggagggctgcatgatcctgagagcccccacctcacccggctggactatcctcccacttcagggtttctctgggcttccatcttgcccctgctgagccctgcttcctcctctaccagcagcacaacccccaggctgggctcagagacctcatgtggtgggatcactcagtaccccgaggcggagggaaggagggagggctgcagggttccccttggcctgcaaacaggaacacagggtgtttctcagtggctgcgagaatgctgatgaaaaccccaggatgttgtgtcaccgtggtggccagctgatagtgccaatcatcccactttgccctgagcactcctgcaggggtagaagactccagaaccttctctcaggcccatggcccaagcagccca

SEQ ID NO: 23317 - DNA, 2300 bp, Homo sapien
gtgacctgggcaggcaaacaccacccagcggaggccaggggaagacaccagcaagcaggccagatcctttgagcttggatcgtggggtagattctatttgcttctaatcctttagtgcagatgagctcctgtgtgcagaggagagaggtggctcctagaagcgggtaaattccagaaactacaaggggcccaacagtcagtatccagaaggattccagatggttccaactcaacaatgccagaatactcacaacatagcaactgtccgttttctgaacattggagtccagtggtgcctgagccaggaggcttgccaattcagtagaccagacgtggtatttgctctacacagcacaaatcagagggcatatttgatagtgataacatagcagtcatttagcttgtgtagagggttactcgggatatttcagacccccaaaattctacttgtggccttaattattcacattatttgatcacatcagttaaaatacagagtacctatcattctttcctttgcactatggtaacggaacatctgttgggctgaaatcaattttttctcctttttgtgtgaattcattgatgccttcatccacccactcacccatccctccatttaactaacactcaaagcaaacttaacacatctcagatcctcagtgcttcatgtgtcattgtttacgtctcctctgattacttgtagatgagaaaaataaagaaggtggtgtgagttacttgggtgcaaaacgatattctagttttgcactagaagtgctcagctaaaactgtgctagataaataactaaaaaaaaggagagagaaaaatgaaaaaaaaaaaaagagcgtcagagaggaaacgggagggtctcagtggggaattcggcttcctgtcgtctgggttttgattttgagttgtactagaggagtctttatgtctggaatgctgagaaaaccagcccaggccaggcgggctgtgagggcaggatttagaggcgtttagtttcttaaactctatagtctggattccggtgtcaggggcctgagccattttcctcctcccctacccgtcagctcccactccctccaaacttcctaagaaagttctgagtcctgcagaaagacaggcttctccatcttccacacccgcgcagatttctctttcctcacacatgcacgcccaggcccagcgccccagcccctcacccccaggataactgttagagtctctcacacggggctgtcatcattaacaccccgagattcccgagggctaggacactgaggccggtgtccacatctgccaaattcctcccatagctgcgtgcgaactgagtatgttcctaagacgcctaaggagttcagcacggggctcggggtccactgcgacactgcgcggacagcggccgctcggctgggcctcaggtggggagggctcgcggtcctgccctgagcccgggctccgcagctcggcgcctgcaccgctcccctcgccgagcccgcggcggagtctgccggccgcacgcagcaggtctggggctcaccttgaatcgggacctgcggggaccgccgtgcggcttcccgctgggtgagcgccgcagccctgagtggcggggcagtcattccccttttccagatgggaaagccaaatcttgagcccagcgccagcaccgtgttctcaggtgctgggacttccaacccgcgatctcctcactgtagtatttctgggaaccttccctgggattcccctcggggcgtagagggaaggaacgtctggggacaagcgtccaggaagggtctggattctttgtcctccgccgggagcaggccccaccgcaggcgccagtgtgtggggcgccccggagacggtggcggggaccgagcccctgccccgcggagaagcagagggcgcgggacgccgttccccagcgctgccgccgccgcgctcgccagggcctggagtggcgcggagggcggcgggctcagaccaaagtccaccagggggcaaagtccgcgggccccaagcccccaccacggggtcgcgggggtttgctccgcctcgtgagcttgggattctggttaaaaaggcggctgggcggagctgcgggcctccgacggcgggaggacagcgctgcgaggaggcgcccgggacagtcatggagcgccgcctgggagtgagggcctgggtgaaggagaaccggggctccttccagcccccggtctgcaacaagctcatgtgagtccagcacccccatggccgccccctgccctcgcctcctccccctcctccatctgcgccc

SEQ ID NO: 23318 - DNA, 2300 bp, Homo sapien
caggcctggcctgggctgaaaagcagatctgggttctaatctcccttctgcatggacctgcgggtgacacaagcttggtgccttctcctctctgaacttcaagtccttacttggacaagatggcctggctcctcccagccctggatttggggatgctccgatgctgcctgggagcccagtctgatcatggtggcctggaaatcaaggctaagcgaaaggaaagcctgaaagagctgcactctaagcaccacagcaggacttgcccctgaatggagatggggctggggcaggaaggtggcagggaggggctgggccctgtgactgtcacctccaggttggaggagtggggagggaaaggcagggcagggtgcgttatcacacacacactcacccacatacactcaagcacacaccacagagtccaaggaaaacctgtttctgtcctagcactgagccagggatcccacacaaagatgggtcctggccaagcgcagtggttcacgcctgtaatcccagcactttgggaggccaaggtgggaggacaacttgaagtcaggagtttgagaccagcctggccgacatggtgaaaccttgtctctactaaaaatacaaaaattagccaggcatggcagtgcatgcctgtaatcccagctactcaggaggctgagtcaaaagaatcgcttgaacccaggaggcggacgttgcagtaagccaagattgagccactgcactccagcctgggtgacagagtgagactccgtctcacaaaaaaaaaaaaaaaaaaagaaaagaaaaagagaaagaatgggtcctgatgaagttcctaggaggctccctcctgctgacagagcacagcaggagtgtccccctgggcgatggggcccagctttcccatgtcattcatgggcatctgttgcatcatgatatctgttgcagaatcatcccatagtggcttccaagcagggcgttgcagctgagactggccctggtctcagcatcttcggagaggccccagattgataagtgtcttgttctgagtcatggctcaaagtccccatgacagacaggaatccctatcagcatggtagatttcataaaccccaaattagggcatgagatctgaaaaagaatctgggggatttgtgataacatgtgagggcatacaaataaggactcttacttgctcaagactaacaaactgcatgtcttgacaagagtagccaagatgaaatcaaatgtagacaggagggttctgaacacacgtggggtcactggtgtggcttggcccgggactacccctctccccctcatcacccaaatccaccagagccttctagaggaagcattctccccactggtggcgtggtggggccagggcctcgacagggactgttgtaatcatccaggtgggaaatgacagagaggtggtgagaggcgggtgggctctggaagaagttggaatcctgctgacaagatgctccagtggtttggacatgggtctgaaaaactccaggacggctatccaaggtttcggcctcagtgaatgaagggatggggttgccactgactgaggaagagaatgtattctattgcatatttaattaattactttgatgtgaaaagtccaaataacaactatgtctggaactgagcagggcatccgtgggaccaccgcccacaggcacccagggcttatggcaccacccacccccgtcgtgggaggccccagagaccccggcagagaaagagggaggctcaccctcttgctgtggtgtgtgtgggaggggcagtgtgaaaaggtctggcccacctgagtcccctgggctggtaggagaactggggccgggcagggggtggtgttggaacaggaggggtggtgtgtgagcctctgtgggcaaagacccaccgtggcccacagaggctctttctcctcagacccggtgtgctgttaccagagccttctagaggaagtgttctccgagctgagggcggctctttgattctccaggccacaaacccccgcagcccggcctggccagaggcgtgcctgtgcatcccggcaagtgagcgcccagggactctcggccagagaggctgtgagggtggctttgtgaggatggctttgtgtggctgcacattgcccttggccaagccccgctgccaggagaggcagctcggctgccaaacctcctgaacccaagttacctgagcaagcagccctatcccctcgcctgcttctcactgcctcgcctgccttgggcctgcccgacccagggggtcacatgccttgttccccatca

SEQ ID NO: 23319 - DNA, 2300 bp, Homo sapien
tatctccagaatcctaatctgcaaagtgggtgttctcacagctgttgactgggactcaccccagatttggacgttgtttcaaacagatgtttccactggttctgtatctgaaatcttgttactaacctaataggagtgcctagggaagtggctgtttcacagtttggtgagatgtttggggtcatctcaccaaagaacaaaccagaccacagttgcccaggtatgtcaaggggtcagtgtagggtaggtgctaaaagtgaaactggtccctctgaggtcacctgctcttggctgtgagtcctagggtccaggacttgggtgcccccacagctctgcactcatgattctgtggctctctgtccatctggccacagttcagaagccaggctttctccacccttacgcttttgtcaatttggtttaatacataaagatggtttagttcttgcttgtcttttaaacaccttcacagatatcatttgcaccttgccaaaggtgagagatgaataaagcaagaatattatcttcgtttaacaaggaaacccaagtaccaaagagatgatgtgatttgcctaagaccacatgatttctctggggcaggacctgaactccagcccagcattcctgatccttaccctggactctggctccctgggccatgaggggagtacagtagtgggaaatgcaggatacactccagggactcgaatccctgagtggcaggcctagttctttccccagcgggtccggggccttcgagcttcaggcccaagctttttgtggcaacctgtatgaacgcggagggagaagtgccctagaccagactccagatcgttcctagtggggctgtcagcggctttagcctcactgggcgctagatgggagtgtcccctccgtacccggacgaaggcggggcgcccgctggcaaagcgcattttccagcgcaagctgttggggtgcggggctggcgagtgagggaaaacagagggtggcgcgcccaccatcagcgtctgtgcagccccacctgcgccgcgggttggtctcagccggatcctgcagccctcatcgagcaaaggctgggcgcggcgcccccactgccggggagggaagaggctgggaggacgcaacaggcccaggctgtgccgggcggggagcctcggcaggcagctgcacccccagccccagagggctggggaaggccggcccgaccagcagacggaaaggtggcgctaagtcgccttcaagcccgcacggctctcccggcctttcctcctgtcctcagagtcagctcccccgcccgggacgtcccgcgccactccgcgcctttggccctggctcaaggtcttgtgatgtgattagcaaagccagcgccttgtcctcagacactcagccctgcccggcaggccccggcgctcaagccctgtttactgagcctgggcggggagggggcggagaaacgagcccgggctccaccggcaagactgccgcggcggccgcccgcgtggccacccccacccccaccgcgactccacgtgcagtcgggctggagccgccaccgactggacgcaggccccgagcccccgcctcctggccggggcaccctttgcaaacccgccgggccgcggggatggttgcgatattctggcattttgcaattcccgcgcccagtacaaaaccgaaggtgggagcttaaagctccacaggtccgcctcggagaacagggcagggaaagacacgtccagggctgcagaatcccggccacgctaaacgtaccggggctctccgaccgcgcagccccggaggagaacagccgtgccttcccgccgccacccggcggcatccactggggccgagagctacacgccacaccggccgcccgggccgccggccccgcccggaggcctccagcaccctcccccggaggaaaaaaattggcggcggccaatgggaggccgggaaggcgcctgacgtccgcgagcgggcgggcggcgttgcctggagaccccggcgggggccgagttctgtcccctcccccggcgcgcccgccccgccgcagccgcactcccgggctctatatagggcgcgcgctcggaggccgccgagttccagcagtccgcgagctgccgtcggctccgcggggggggcgggccgggcaccccggggcgcggaggagcgctcctcgcttctctccttcccccctgccgcactccgccggaccctcccgccggcccgcgccgctgcactcgccctctcctctcgccccccggcaaactttcggcccctccccgcccctcgcccgt

SEQ ID NO: 23320 - DNA, 2300 bp, Homo sapien
tctatgaggttagttgtgtattcaaatatttttattttcttaaagaaaaatatctcaaaaacactaacctgtttcatacaattgcttataaaactttctttcctttctctttcccctgtcttctcttctccctctccttccctgccccatttttttccatgacttctctgaccctggccctttgacatgcttatttccgccacagttcttttcagcgtacctggctctccatttgtctcgtgtaaatagatcgctctccattcctggtgaataaccagggtcacaattgtctggtttgtacccaatgtgacagaattgtaggctgattttcataaaccagagctaccaagcgtttcaaaaacagtcttgtttttgccaagtaaggtgagcaaatataggactaagtttaaacatccatcaggagttatttttgaagtgattgcttctaaatgagaagcatttgaaaatctcacaggtttctttacaagtaaattccgaagtcatgcattttgctggtgtctgctgattaattgcgatcctgtgacaccatgaaaagccctggtggttggttttgtgcagctgtagagaaaagtaaagcaaagcccagtgactttgccagctctttcaggacagtggggattcaggctgaggaaggtattttttccctctggcagtcaccacataagaacagaagctccagccagacccattgctccagactccacgtcgggtggtttgggtccctgcgggggtgtggtgaaggcatgacatttgatctgttgcttctgaaataacagatccattattagacaaagcattttcagtctccacattgggacttgtgtgcactctcctgtacagttacttctgtttagaagaaatttattttgattctctaaacagaaggtgcttggcatgtatttgttgttggtgattgcagacgtctgacccagtaaaacctgccagtctacccatttagggtctgatgactctggattgattttatctggccttttctgtttctcattacccccttccgtatctaactctcaattatttcactattgtcagcccattgttgataggagagaaagagaggaaaacgttgaatctggttacacagaaagaatcattcacagctctagagaaggatataatagggaaagaaaacagatgttattaaaatagactttcagagttcttagtgtgtttatctatgcttactttgccacacccacctcttcctcttgatttagataaggaggctggagactgaaggatttctcttgacttgcatttctctccttggcactagccaaggtcaaaagatctcatttatgcccttgtccttattctttgtctgctatagatttgtactcctcacagaggctttgcggatgtcattgctgaatccagtacatacatacgtgcatacatgcatatacacgagtatccttgtataagtggggcacgtctgcattgctgcattcactcctgacatcgaagggaagatctgctaaaaaaaaaaaacaaaaaaaaccctaaatagttacaaacatcactgcccagtatttgctaaggcaagaattagtttgacctacttctttagccacgactgttctaatgaactcagacatgtaaaccagtttagactctcaaacaatgtatttttctttaaatttaagactttgactttaaaaggcacattttattttcatgtgcgacagctaacataaagatgtttgcatttctttgctgaaatcagtgtataggttgtttgtaactaataaactcttgtggcagatgattgttgggccacagtcatcagttttggggattgtgtgagaaacccatagcaaagtatggattaaggacttgggtttctcggcactgctacatcctccaaaaccaacatgcctttctgcaaagagaccagagctacattctgcaggtgtctgttttctttgaggggaacattttaaggaaacttaaaagggaggaactgagcatttaggaaaaatatattttcacagcaggatttttttttcttttttggtttaggtttttcatttgttgcaagcctactcagactccaaacacggaacgaattcagacttccagcacgagctgactgacatcactgtttgtaccaaagccaaactctggctggccaagaggtatgttaaaatcccacatgagcaaggagttatcaggggttaggaatacatttgagaattgctgtttctagttgtggggagttttaaaagtcattggcatgagttttctaaacttattggagt

SEQ ID NO: 23321 - DNA, 2300 bp, Homo sapien
gcattcatccagggctcaaacctataattaaattttctgaacaaagactctattaacccagaccatccagattgatgactaacagctcttccttccaggtacataaggaaatctgtaatgcttaaagcaaaataaagaccctagtcaggtttgggggagggcaaagtcagggagtggatgtagttaggactgggtttacctttcaaaaatcattttttagtacttaaaatggacctttcaatggttcctgcacttactcaagtgtatgtgatttactgaatgatctaaaacttagtcacagggattttaatttagatatctatgaaaatgtgttggtttttaaacttttggcacattgtttaaaaattctctctttaatattttgtgtgggcagtgtagacttaggtgaaacttttcagcacagacccagacacagttcattatgttactcctatgccaaaacttcaagtagctttccagtgtttgagaaataaggttcaaattcattagcttggcatttgaggccttccacagtccagcctactttctacgagaggtttttgctctagccttggctgttgtccccagcaaaccttatacacctctgcctcaacagtgtccttgtgccatccccttctccactgacttttctcctcctcctacagcctccccacactcctgggacaggtgaatcctaactgttctgcaatgccaagcttcacctagaatactttaggacctctgcttttccaaatctgtcaacatcctggttaatcccacctcttgtgaaactggctttcctggagcattcctctgtgggctctcccccaccagtttggcctccagagcaatgttataccacgtctatggctcttaccacgccaacccttcatttgtggttggtttttgtgtttttgttttcccattcatttctgtcttgttttgtaaacttgataaagttccttgaggcttagaattgtatcttttatgtacgagtgtcctccagagcacttaacataatgtttaatatatatctgtcagttgtttgattgattggtgcatgtctcaggcccagggcttgatgtctttgcagtctctaaagacagcgagctattttcagaaccactgagtacctttgtaccaggtttattttttggcttttcaacttggtagtggagatgttaggcccagttctgtccagaaaatgtattttccaaatctttgcatggacagaatagtgttacagtcacagtctggagcagtttcacctgggtactgccaactctttcttatgctgactggctgacccatgtggaagtgttcctcagatctcatttcagctttctggcttactttttttttttttttttttttttttttttattaagagaaagcttgtttctaagatccttttgggagcaaaggcaagtaagtattcattaaatgtttactttcttgactttaattcacttcagcagatgataactcaggtgggattatgccttgacagtgatctgacaaggtccttgttcagggtagttactgacttttccagtatcaaccttctagatacagcatgaagccaacatccttgtgtctgaactatataaggaactggctttcttttaattttatgtgttttgagtttgaggaagatgcatattttgccaagatgtggcttttgagacttccgtgctgaactcatttggtctgaaaactactgataaaatttctacttttgcaaacttgtttttttgtttttgtttttaaaaagtaggcaaactcagttttttaaaaaacaagtctacagtagtgaatgccctaactgacacagcatgctttggcttctggaagcttgggccagactctgagagattttaatagccagtatggacctatgtacacagtagtcagtccctcacattcacacagcactgtttaacatgtgtgtatttattcattcaacaaatattttttgagaaccagccaggacccaggcattgtactaggttcatgagatacagggatgagtaatcactggatattttacttccttattattattttgacttttagtttctagtctgttttctcttactagaatatcagctctttggagggtgggtatttgcctcattcagtgttttatcttcaacacctagagcagtgcctgacatagcagaagctcagtaagtattaatcaaatgtatgaaagaaggtctacaacaagggatgtaaacacttataaaagcacatgggaaatgcatataatctgggattgggggagtcaaggaagacat

SEQ ID NO: 23322 - DNA, 2300 bp, Homo sapien
cactcctgttttaattttactgcatctggcagcctttgtcagaaagtatggcttagggcaagatggagtctgtgtttctgttttccttttctttttgtgtttttgtgtgatttctgagaggagagaaggtcccagatatctttaccaagtcatcttagacctaaaagtctttgggaactacctcactagatcaggtagaagataatccagacctgaatgagggcagagattatattgataaagtaacagcatggattgatttgttatttggggattaaattaggcagggcacatagtagggcctccttggatgtttgatggctgttgaatgaacgtaagtgaatctgttcagttttagggttttattgcatttttgatatggattgtgccagtatatctgtaaagttcacttctatggctaccatgcatgacttgagtcagttctgggcttctagaggagaggttacaaactggtggccagtaggacaaactagcctaccactgttttatttggctttcatggtgtttggttctttttttcctttaatttcctgccagcatttcaaaatagatttcacataaaaaccagggttcctggcttctcttgaaaaagcagatgatctggcaaaactggacttatatttcctcatggcagcaactcagctgacactgactgcattagaccaagtccactgctgcctgtgtcactcacttttcctgtgagcatttgagcttgtgactctaagggcattgctttcaggaagctgttttctaaatcttaacgttacttttagtgatctttctacttatattgctatttaacacaccatgtggttatgtcacttacttaattagagtataaggtctgtaataccagtaagtatgtgttttctgtttctggatcttatccatggtgctggtatagggccttacacactgtagcaaggtgagtacatatatatctctacaccgatttttacagagtaattgaggaagcctatagtgccaaaacagtcaagacccttttatgctcttccaaagcatcttgacacattggtttggaaaagatagggaaaagattattatcatcttggagaaataatttgtgtttattcatggtaattcctgcctcttatctttactaatgttatcagttaatttcagtattgaaattacttggtaagttacttgcattgtgaagctgataagcaacattttggatttaactattttcttagccatattaattacctggattctttgaagttaggatttttggattttctttttgtttttttaaagacaggttctcactcttttgcccaggctggagcacagtggcacaatcatagcttactgcagcctcaaactcctggccttatgcaatcctcctgcctgagccttctgactacctgggactataggcatgtgccatggctgtaaaaataacaacaacaacaaaaagtcaaaagcaaaacaaacaaaaaaatctctaaaaaaatacttttttttttttttgagatgggggtcttactgtattgcccaggctggtctcaaactcctggcctcaagcagtccttccactttagcctcccaagtagctgggattacaggtgtaagccactgggcctggttctttgaagttaggttttataagtattttctcgtaggtaaaatgatttcagaaaataaatggaaagagctgaggttttactgcaatcttcattgtcaggaagcatatagaaaaatgaatttttagaaaagtgttatttgatgctctaagtgcagagattagtgaaaactgttgatggtaatattaggaatataggaaaaggctgtgttgtgtgcatgtgattgggttgtagagctcaattgaagtcattgaatcgatgactgtcaagttttttttttaaattattttatgaacacaaatctgtctttttagcctcacactagccagttaggtaatgattttgaattatctagtttgaacattgtaaacgttggtttcatgccaagaatatttaagccttattgtgttttcgtttgtacattaggtgcgaaattcatccacacttctctttagtgccttgatcacaagaatttttggagttaaaagggcaaaggatgaacattccaaaacaaataggtaagctccatttaaggctaactttactttttttaaaaaatacaatattgtcctggccaaaaacaaattttgaaattgtgcctactgttatagattcatctagagcataaaactataaaaatactgtaatgaattaacctatgctgccaag

SEQ ID NO: 23323 - DNA, 2300 bp, Homo sapien
aaacttacataaaacaactggaaactcttagaactgacaatacagatacaagcatgccatcatgtgcccttaaatacataaggactcgcttggaaggctcagaagagactgatcagagcaggtggtgcttgattaggaaagtgatagatatgattagaaaagaggaagccttggagcagcatacaaaatggagggacccaaatgagcaaggtctggaggatgattaagaacattgcttatcaggggtggagtgttttggacattttttggaaaggcctaatgctaggctaaagacttagttggttcccaggcaccagctggttttactaagctaaaccaaagctactctgttttcagcaaggagttacattagtggaaacgtgagtttccagagtgggagcagaaagaaaccaggaaaccagttagaagtgtctggcagtaatttaagagtgaggtgatggggtaaaaggggtcactggaaaaaaagaaaaaggaatgaagctgagcattaccacggaataaaaatctttaagattgttgcattttataaatccccaatttacatgtttaataaaagaattgtataggaaataaccctaggatctttgagattaggaaacctttctgaggtacctattggtgaactgaagtttacttttttccttttgtagcctatgtaagtaagcaattcaagtgatttaggctttgcttatttcttggaaaattaacattttattgcttgatgttttttaggtaaggatagatacattaggcttgctttgtgaaagtaatcggagcacagaaattgtttccatggaagaaatgcagtggattcagttctttattacatacaatcttaacagccagtctccaggagtgcggcaacagatctgttctcttcttaaaaaggtagaatttcccatcagaaggcatagggaagtggtgaactttgtttgggaaatcgtttttaaaaagagcccagattttgggagcgtgtgggaatggtcatggaattgggctaccacatctgttcatgacggccgttctgtgacctgttctctcattccataaagcttacatttgggattaaaatccagagtgaaaagcacgcacccctccccccaccattttttttcaggagttcagaatcagcctgggcaacacagtcaaaccccatctctactaaaatacaaaaaaattagccggttgtggcagtgtgtgcctgtagtcctagctatttgggaggctgaagcaggagaattgcttgaacctaggagcggaggttgcagtgagccgagattgtaccactgcactccagcctgggcaacagagtgagactcggtctccaaaaaaaaaaaaaaaaaaatagtcttgctctgtcagccaggctggagtgcagtggtgtgatcatagctcactgtaccctcaacctcccaggctcaagcgattcttcctccccagcctctgaagtagctgggatgacaggggcacaccaccatgcctgactaatatttaatttttttttagagatagtgtcttgctctgttacccaggctggtcttaaactcctggactctagtggtcctgccacctcagcctcccaaagtgttgtggttacaggcatgagccaccacacatggccaaaaggcctttcattttggtgtagtaaatcaaccttgggctcttttttgtaaagaaaaagtctaatgctggagttaaggtagttttaagaaaacttggtaacagcatttttatagtttaagcacctcaaaagatcattatcaaataatctaacttgaattaattgcacacacatttatggggtgaagaattggtaaagtagggaaatgactaaatcatcttcaggtttgtgccaacttaaaggaaacagaattgtggtttaatgacagtattctgctttgcagtaatagtttgtttttggtataaaaattattttctgtcaaaaagaaacattataaaatattaagagcttaaaaatctgtactcttcttgcctgaagttttattctaaataatttgcctctcaggctgacatttaaatttaatgtgtggctcacctgtgcttcatttcctttgtttcaaaagttgttttgtaggatacaggaaagttctcaggtactttataaattggagcagagtaaatccaaacgtgaaccagagaatgagttaaccaaacagcacccttctgtttctttacagcagtataaggtaggtgatatatttctaaacatgagagtttttttttaaattaaaaagtattatgaataagcattaaaggga

SEQ ID NO: 23324 - DNA, 2300 bp, Homo sapien
gtaggctgaggcaagaggatcacttgaggccaggagttcaaaaccagccttggtgacatagtgagactgtgtctgtacaaaacttttaaaacttagctgggtgtggtggcatgcgcctgtagtctcagctacgtgggaggctgaggtgagaacattgcttgagcccaggaggccgaggatgcagtgagatatgattgtgccactgcactcaagcctgggcgacagagtgagatcctgtcttaaaaaaataaataaataaaattattgctgcaggttagcctgtaaagaacatttctaaaattaatttttaacattttcaatgttatcgtttttaaaaactataaaaatttttatatgtatagtgttttagaatttataaagaacttcaacataggtaatctaatgtgatcctcaaatggctactatataggataagaaatctaatttgttgaatgggcaaagggaggcttagaaaagtaaatgcttacctgagaccatattgctaataagaacctgaaacagcaatcttagaaggtcttctgacttcatggggctgtattttgtatttttgtggtgtttttgccataatggctgaaagtgatcatgtatatgaaatgtcgaaacatatatacagcttgataatactgaacatatgaataaaggaggaaaactaaaataattttttacatatttgagctatattatgcaattcataaatttgaagtgtacaattcagtttattagtttattcacagagttgtacaaccaccagcatttctaaaattaatttttaatattctctttgctatattttttctttaaaaatttttttcctgaaatttgtttttagcatcattttttaaaactataaaagtttctacatgtgtagtgctttagaatttatgaagcactttaacataggtaatctaaagtgatccttatcaacatttctgaaatgaagttttaacatcttaaaagttaattcaaacaactttagaatatttttatcacagagaagccccattcccccaaccatctccaacacttggctttccttatcttttaaattacatgtgtaggccgggcatggtggctcaagcctgtaatcccaggcttgcagatctcaggcaggtggatcacttgaggtcaggagttcaagaccagcctggtcaacatggtgaaaccctgtctctactaaaaatacaaaaaattatctaggcatgggggcatgcgcctgtaatcccagctactgaggcggctgaggcaggagaatcgcttgaacctgggaggcaggggttgcagtgagccgagatcgcaccactgcactccagcctgggtgacagcaagaccctgtctcaaataaataaataaataaataacttgtgtaatcatcacagtcaaggtagtgaatatttccatcatcccccaaatttccctatgtcccttcctggactattattatttttgagacaaagtctcgctttgtcacccaggctggagtgtagtggcatgagcacagctcattgcagtctcactcctgagctcaagcaatcctcccacctcagcttcccaagtagctgggactgtaggtgtgtgtcaccacacccagctaaatttttaaattttttatagagatggggtttcactatattgcctaggctgatcttgaactgctttctggattattttttacaaggtaaaaagaatcatatacaaatttgagatctgttttggctttacttgtagttttttgttcttgtaaatttaataattgaaatttgtggtcattctgtgtatttaatatttttaaagtctaaattgttataaaatgaaatttcttttactaatcagtttacaataatggctcatggctcatttttcttcaggattaaagagccaacgctggaaatgtttctgtctagaatcttagcatcctggactaattcagccatacaagtccttgaatcaagttccccgagcctaacggacagcctgaatgggaattcaagtatagttgggagacttttggaatatgtctatacccattgggaacatccattggatgctctgagacaccaaaccaaaatcatgttcaaaaaccttctccaaatgcaccggctcactgtggaaggtgcagatttcgtccctgatcctttctttgtggaattgactgagagtcttttacgattggaatggcatattaaaggaaagtacacgtgccttggttgtttggtagagtgcataggagttgaacatattttggctatagataaaactattccatctcaaatcttagaggt

SEQ ID NO: 23325 - DNA, 2300 bp, Homo sapien
gttttaacagtagcttcacctttcaacatatgtttattatgtttgctccctagcccacctctcgctgtgcagggtgaagagttgcagtgtctgccaacaaaaaaggggttcggacccactgagttatataattagtaggtctgaaacaatatacatattttaaaaaacataaaacttaaaaatggttaaaatggtaaattttgctgtgtattttaccataatttagaaaaaaaggaaataaaatctcacagctcctgtaaagtagcatttcaagaaatttttacttcagttatgtgtgagtacttctacgtccacagtttcaaagtctgcaatgtatttcttactatgtcagggtcaaaaataccagaaaaaattatggtggagaaccgtctgcacacactcaccagctgacatgcacaacatagttcacagcagcaatgtttagaacaaaaactggaaataatgcacatgttaagaggcagcaggatggatacataatgaagtatattaaacaatggaaaattacggtccgggcgccatggctcacgcctgtaatcccagcacttttggagaccgaggcgggcgaatcacgaggtcaggagttcaagaccagcatgagcaacatggtgaaaccccgtctccactaaaaaatacaaaaattagctgagcgtggtggcgcgcgcctgtaatcccggttacttaggaggctgaggcaggagaatcacttgaacccgggaggcagagtttgcagtgagccgagatcgcgccactgcactccagcctgggcgaagagcactacagccacctgtaggtgaatatgaaaagcaatgctgaaagaagcaaattgctggagaatacatacgcaattccaaaagcttcaaaattgaacgaaacaagatagtgatacatacattatgtggtaaagctataaagaaaaccaaggcaagctgatataaaaaattcagaaaataattattaaaaacttaagtcattaacgtttagagaactgaaatgtctctattttccaaattaatactcctgataatagcatcaggtctttcctgatcttgcccactgtcgcagctcccagtgacaccccgttattgtatttatttttcaaggactgaaccatctgacaatttgtatgtgctgcgtaatacatgtatcctcagtaggggatagctttcaaggctagcgcttggcgacgctctgacagtagagttcattatctattgaatgaatatatgcgctttggcacacgttggttcagcactactcattttagtccgaatccttctcgtggcttccgttcagtcgccgcccaaacccctgccccatctcgcaggctctaaactccctggactcgttcccgagtcccagacgtagttttctcctagactctgcactgggccaacagagtgggagaaaggtggaaggtctggattgggagaaaagcgcttcccaggcgtccaagcatgtgaagagaatgaggtcttttcattcaacaagagaccgttgaatgaaggcccctcagcaacaaggcccgtcagccctaacgccatgaggaacgcgcggcgctgacggtacagtggctggttaactaaaccggattgctaccggccaccccggtgacgtcacgacctcctcgaactcctgattggaggagctgcgtttggtcaattctcgcgatgactcctccaggttacccctctctccctccctttgccctgacccggtagtcgaccgtggaccgcgctgcgagcctcggagacgccgtagaaggagacctgcttccgggactggaccaggcgcctgcgactcttctcagacgccgacgtgcacgaggtttggctcccaggtgtcctgcctgccagacccgcggtagctcggctcggccagttttgctagggctgcctggcgagccacaccaattcccatcctttggtatcgccaggattcggcggctgtgaaactgatttccggtcgctaaggtctccatggagacagcactttaaccactttctcccactgtcattcctcgactccacgtggttcagaaatcgcccagagaatgtttgtgggagtcagccaggaaggtgtagagtgaagcagcgttctaaagggaagcagtaagtgggacctaggaggagtgtaatttactgggcaccttctggccttgcggtagacacgggatttacccccttggggaccctggttcttcaggacacacgtttaggcatcatttgagcaggcataattaccgagtctgcttttgtgtagccctcagaattgcaagagca

SEQ ID NO: 23326 - DNA, 2300 bp, Homo sapien
tccttgtggatgaaccataacctaacttagtaggtagacaagactgaaagcctaatttaggagtgtgcttctgtaacaatagctgagtttcagccaatcccagcagccatacttcaactattcatacaatgcttactgttcaaactgtgttcaggtaaggcaaatgccaagctgtaacccatccagctgcttccgtacctcacttgctttttgtacatcactttcctttctttgtctgtaaatgtgctctgaccacgaggcatccctggagtctctctgaatctgctatgattctggagactgcccgatttgagaatcatttttccccttgctcaattaaaccctgttaagtttaatttgtctgaagttttaacagtagcttcacctttcaacatatgtttattatgtttgctccctagcccacctctcgctgtgcagggtgaagagttgcagtgtctgccaacaaaaaaggggttcggacccactgagttatataattagtaggtctgaaacaatatacatattttaaaaaacataaaacttaaaaatggttaaaatggtaaattttgctgtgtattttaccataatttagaaaaaaaggaaataaaatctcacagctcctgtaaagtagcatttcaagaaatttttacttcagttatgtgtgagtacttctacgtccacagtttcaaagtctgcaatgtatttcttactatgtcagggtcaaaaataccagaaaaaattatggtggagaaccgtctgcacacactcaccagctgacatgcacaacatagttcacagcagcaatgtttagaacaaaaactggaaataatgcacatgttaagaggcagcaggatggatacataatgaagtatattaaacaatggaaaattacggtccgggcgccatggctcacgcctgtaatcccagcacttttggagaccgaggcgggcgaatcacgaggtcaggagttcaagaccagcatgagcaacatggtgaaaccccgtctccactaaaaaatacaaaaattagctgagcgtggtggcgcgcgcctgtaatcccggttacttaggaggctgaggcaggagaatcacttgaacccgggaggcagagtttgcagtgagccgagatcgcgccactgcactccagcctgggcgaagagcactacagccacctgtaggtgaatatgaaaagcaatgctgaaagaagcaaattgctggagaatacatacgcaattccaaaagcttcaaaattgaacgaaacaagatagtgatacatacattatgtggtaaagctataaagaaaaccaaggcaagctgatataaaaaattcagaaaataattattaaaaacttaagtcattaacgtttagagaactgaaatgtctctattttccaaattaatactcctgataatagcatcaggtctttcctgatcttgcccactgtcgcagctcccagtgacaccccgttattgtatttatttttcaaggactgaaccatctgacaatttgtatgtgctgcgtaatacatgtatcctcagtaggggatagctttcaaggctagcgcttggcgacgctctgacagtagagttcattatctattgaatgaatatatgcgctttggcacacgttggttcagcactactcattttagtccgaatccttctcgtggcttccgttcagtcgccgcccaaacccctgccccatctcgcaggctctaaactccctggactcgttcccgagtcccagacgtagttttctcctagactctgcactgggccaacagagtgggagaaaggtggaaggtctggattgggagaaaagcgcttcccaggcgtccaagcatgtgaagagaatgaggtcttttcattcaacaagagaccgttgaatgaaggcccctcagcaacaaggcccgtcagccctaacgccatgaggaacgcgcggcgctgacggtacagtggctggttaactaaaccggattgctaccggccaccccggtgacgtcacgacctcctcgaactcctgattggaggagctgcgtttggtcaattctcgcgatgactcctccaggttacccctctctccctccctttgccctgacccggtagtcgaccgtggaccgcgctgcgagcctcggagacgccgtagaaggagacctgcttccgggactggaccaggcgcctgcgactcttctcagacgccgacgtgcacgaggtttggctcccaggtgtcctgcctgccagacccgcggtagctcggctcggccagttttgctagggctgcctggcgagccacaccaattc

SEQ ID NO: 23327 - DNA, 2300 bp, Homo sapien
acttattgcttttcctctgagaaactttgaaaatctttatctcttttgtggttttttctttccttttttttgagacagagtcttgctctgtcacccaatctggagtgcagtggtgcgatctcagctcactgcaactgctgccttcctggctcaagcgattctcctgtctcagcctcctgaatagctgggattacaggcgtatgccaccatgttcagctaatttttgtatttttagtagagatggggtttcgatatgttggccaggatggtctcaaactcctgacctcaagtcatctgcccgccttggtctcccaaaatgctgggattacaggcatgagccactgtgcccatcctctgtgtgtgtgtgtgtgtgtgtgtgtgtgtgtgtgtgtgtgtgtgtgtgttttatataagatgagataaagttaaaaaaaaaaagattgtagtagaaaaagtttttctgatactctctattggccaactgtgaaccaaagagaataatctgtctgacctagctttgtgacctggggaacgattatccataacattcagaattctctttattttaccctgagattgacctctccagaccctaagttgggatgtaaaattcacctggatttaaattatcactaatttacttatgcaatatgctctgtgctgaggagaatgcaaaaaaaaaaaaaaaaccacaaatccttgttttcaaagtgctcacagtctaaaagagatgtgaggagctgtgcataaggcagagggagctaagccccaagagaggcaaaaatctagatgttcagggagcagaaaccagagaagacctttttttttttttttgtctcagatggagtcttgctctgtaggcaggctagagtgcagtggtgctatcttggctcactgcaacctccgcttcccaggttcaagcgattctcctgcctcagcctcccgagtagctgggactacagtcgtgcaccaccacgcccagctaatttttgtatttttagtacagaccaggtttcaccatgttggccaggatggtctcgatctcttgacctcgtgatctgccctcctcggcctcccaaagtgctggaattacaggcatgagccactgcgcccggcccagagacgacatttctgccaggtggagcgacagacatagttacatggagaagatgatgatgatgatgatgatgataatgatgatgatttgagacaggatctcgcccagtcgcccaggatccagtgcagtggcatgatcgcggctcactgcagcctccatctcctgtgtttaagcaatcctccagccttagcctcctgagtagctgggactacaagtgagcgccaccaagcccagctaattttttttttttgtgtgtatatatatatatatatatatatattttttttttttttttggtagagacagggtttcaccatgttgcccaggctcgtctcgaactcctggcctcaagtgatccacctgcctcggtcccccaaagtactgggattacaggcgtgagccactgcgcccggtgagaagattattctgagctttttgaagtggagacaggaaatagcatgtaaacgctcctagtgccacttccttcgggtggcgaggtgcacagcagtagtctcaggtgtgtgaagggcagctgtgagaaataaacctgaaaagacgggatggagaccttgaacactagactagggaatctgttcttgataatttaagcaaacggaagccaatgaaagtctttggcacactgttcatcaaaactgctcttaaggaaattaacctggcaggaagatgaagggtggattggcaagaggagagacttcagactgggagaccaagggagggtgctgcaacagtccaggcagacggagtggaatgaaggtgaccggccgctgcagcaagctctggagtctcgcagttgggacgttaggggtaccactccaggacagagctccctcctggggcagggactgggaggagccaaagttatagccacacccccggtgacgcccggtggtcggctgtggtctcccattggctacaccggctgccagtccctggaggaggcggtgcccttccccgccctctccgagctcggcttgaggcgggcgcgggctgagagtccggggatcccgggggccagtcgcggccgggacatcgggcgctgcggccggggacccgctgctgagatagacaggtgagaaagcccggggacgaggggccactccagagttcctgccaccctgggatccccgcccccttgagggcgccccgtccaggggggctcgcg

SEQ ID NO: 23328 - DNA, 2300 bp, Homo sapien
cacttttgttgactttccccaaatattttagagaggcctgagttttcatcctctctactttcagctccaacttccttcccccagaagagaaaaagtataacagtaaaagttgtctctatgcttggttatgaaattctgaaaatgatacattttccaatccgaaggctcctttgctccttgctttcatgccattactcgctttgctcttctcttctctctctcttttttttttttttgagacaggatctcactctgtctcccaggccggagtgcagtggcacgatcacagctcactgcggccttgacctcccagactcaagtgatcctcccacctcagcatccctagtagccaggactatagacacatgccaccatgcctagttaatttttgtattttttgtagagatggggtttcaccatgttgctcaggctggccttgagctcctgggctcaagcaatctgccagccttggcctcccaaaagtgctggatttaccggtgtgagccactgcacccggcctacttgcatcttttttttgccttttgagaagccattttcatttccttccctttttctaatagtggagtacagctgagattgcttgtactgatgctcttgctcatttgcaaatttaacaaacttcctaataccgaattttagagtttatttgttcagcctctagttccttaattatgaaggtcctgtctatgttttcatgttttcaaagtttcttttctacacttcagtctaaaagtttaattccttgtttatgaagccaatggttcattctgttaattatgttatacataaaaataaaccatatctaaagatatttttaaagagtgttattcttattataaaaacacattttgtagttatgattaaaccaaaagtagagcaaggaaagcttttctgtgtttatattttcttcatgattttgcatatctcaatgtatcgaagtttggtgcaaggtctgtttattaaactatagctttgtatttattatgcttaaatttacttcattataatctaaatatttagttgaaaggaggtgtcattttctttccttctaaaatagaattcatgctgttcatttttttggtgactgctttctttgatagtgaaagttgccctgtttcacattttgcttcttttattatctctctttagactctcagttttttttttcccaacatgtttttttgtaaaaaccaatttggaaactattatattgacatgttagggctctgagttttatataaagcttatagttttcaaaaacttgtgtttaaaaaagacataagactaacacaggataatgtaaattatttgtatgaaatttttggtttattcctttaaaaaaaatagaggcagggtcttgctctgtcacccaggctggagtgcagtggctgatcatagctcactgcagacttcagctcctgggctcaagcaatcatcctgcctcagcctcccaagtagctgggactacaggtacacaccactgcacccagcaaatttctacagtgtcaatttctacagtgtagctacataaagctaaatgtacagaaagattatattcttaaaggcagcatgctgatatgatgtatccttttctagaaatggaaattccagaaaagtctgttgataaccaagttctagaaaacaacagaggccagagaacattgcatcaaaccccttgtggctcagaacagaatcggaaaacaagaacaagctttgccacagatggtggcatctcccagaattctggggctcctgtgagtgactggagctctgatgaggaagacgggagcaaaggaagatccaagtccagatgcacatccaccctctccagtcacacatctgaggaaggggtccagtgtagcaggatgggaagtgaaatgtatctgacagcatctgatgacagcagctctatatttgaggaagagacttttggcataaagagaccagaacacaagaagctatattcttggcagcaggaggcacagtggaaagctctaaatagtcctcttggaaagggaaattctgaattaagtaaaaaggaacaagatagttcctcggatgaactgaataaaaaatttcaatcccagagactcgattattcatcttcatcgagtgaagccaacaccccaagccctattttgaccccagctttaatgccaaagcatcctaactcactctctggaaaaggaacacaattagtgccttcatcacacctgccacccccaaagttaaggattcctaatgttttcagtataagtgtagcactagccaaaaggcac

SEQ ID NO: 23329 - DNA, 2300 bp, Homo sapien
gtttatattttcttcatgattttgcatatctcaatgtatcgaagtttggtgcaaggtctgtttattaaactatagctttgtatttattatgcttaaatttacttcattataatctaaatatttagttgaaaggaggtgtcattttctttccttctaaaatagaattcatgctgttcatttttttggtgactgctttctttgatagtgaaagttgccctgtttcacattttgcttcttttattatctctctttagactctcagttttttttttcccaacatgtttttttgtaaaaaccaatttggaaactattatattgacatgttagggctctgagttttatataaagcttatagttttcaaaaacttgtgtttaaaaaagacataagactaacacaggataatgtaaattatttgtatgaaatttttggtttattcctttaaaaaaaatagaggcagggtcttgctctgtcacccaggctggagtgcagtggctgatcatagctcactgcagacttcagctcctgggctcaagcaatcatcctgcctcagcctcccaagtagctgggactacaggtacacaccactgcacccagcaaatttctacagtgtcaatttctacagtgtagctacataaagctaaatgtacagaaagattatattcttaaaggcagcatgctgatatgatgtatccttttctagaaatggaaattccagaaaagtctgttgataaccaagttctagaaaacaacagaggccagagaacattgcatcaaaccccttgtggctcagaacagaatcggaaaacaagaacaagctttgccacagatggtggcatctcccagaattctggggctcctgtgagtgactggagctctgatgaggaagacgggagcaaaggaagatccaagtccagatgcacatccaccctctccagtcacacatctgaggaaggggtccagtgtagcaggatgggaagtgaaatgtatctgacagcatctgatgacagcagctctatatttgaggaagagacttttggcataaagagaccagaacacaagaagctatattcttggcagcaggaggcacagtggaaagctctaaatagtcctcttggaaagggaaattctgaattaagtaaaaaggaacaagatagttcctcggatgaactgaataaaaaatttcaatcccagagactcgattattcatcttcatcgagtgaagccaacaccccaagccctattttgaccccagctttaatgccaaagcatcctaactcactctctggaaaaggaacacaattagtgccttcatcacacctgccacccccaaagttaaggattcctaatgttttcagtataagtgtagcactagccaaaaggcacttaagccagccacagttaagctctgacaggatgtttggtacaaatagaaacgctataagcatgatacgaccactgagacctcaggaaactgatcttgatctagttgatggagacagtacagaagttttagagaatatggacacgagttgtgatgatggattattttcctatgactccttggactctccaaattcagatgaccaggaacactgtgactcagcaaagaaggtggcatacagcaaacctccaactcctcccctgcaccgttttccttcttgggtaattatatcaccgcatgtaacacatacgcagtagtttttttctcaacactttttttttctgggagggagtctcgctctgtcgcccaagctggagtgcagtggcgcgatcttggctcactgcaacctccatctcccgggttcaagtgattctcctgcctcagcctcctgagtagctgatacaggcatgcactaccatgcctggctaatttttgtatttttggtagagacggggtttcgccatgttggccaggctggtcttgaactcctgacctcaagtgatccacctgcctttgcctcccaaagtgtccacactcattttcaagttttactttttcttttcttctttcctttcaaatccagctttgttctgacgttttccagtttttaggataaaatttcttcttctcttccctcactgagttctgaatcaattgagaaataagataatgacaagacagatgggagatcaaggtattaccttatttactgataaaactaattttagagaattagtgggcaaatgagctttctaatactgaactttgagattagctggattgagtcacctgttcccaggaagccctggaccaccacaggattctgctactgaagccatgcccctctaaaacttacta

SEQ ID NO: 23330 - DNA, 2300 bp, Homo sapien
ttaaaccctatttggtttctcataaccaacacagtaaagtctagactacagcatccttcacagtagccccatctacctgcccagtttgctcttccactgtagctccaccaggcactttatatgatcgcaacccaaactattcagtttcccaaatacatcctgcacacgcctttacccttctgcactgttgctcattccatccagaaagcagcataaaattgtctccttctccttccattcttaccttaagaacaatcttcatctacccaggaaagtcactttctttgcccaagtatgaaggcctcaagaggaatgagggaagaaaggggaactcacctgctcagtcagatcaactgaatcaaccctgaatcaatgctgctgatcagggcccagccggatcaccttcactttcctggttaccaagctccctccttcaaacacctctccccgttattcaaacaagtgtacttttgaagtactcgtactgagtattgtgcccagtacatagcaagcacttggcaaaaatgttagctgtcgttattgctatcaatatcaacaggccttcctaactagcatgcaaaagtattctgaagttctagaacccaaatcattacaattcattacaatctgtcccatatcagtttgtgagcttaaagtctggcttagcaccaggctatagctgttgattcaatgacagatgtataagcctcctttgaaaaatcatcctttcttcggtgagctctactcccattaattcccttcctatgtgcagcttagtgttctttacgtctccaaaatatacctaggtgttgggaggattttgttcccaatgactttatttgaaataaacacccttttatcaaccatcagccttgtttccaggaatgtgttccttgtgtttctttgttcgaagttgctgaccagcagcttatcacacaataataacaagcattaagcagttataatgtgtcagacacccacgtaagttatgttttacctacatttatctcatttaagattcacaatctttcccgctttacaggatcagaaattcagtgatttacccgatgtggcaatgtgacaacttagccagcgtggccaagtcagaacttgaacctaggtccatctcacgccaaagcccatgtacttgaacatcgcaccatagaaatcaagccgaatagtagaggactggagggagggtatctccttcaaatattcagggcatcttaggctagaaagcctgagtctactcagcattcaatacagaccaaatactatcagtgccatggtttcaccatctccttcaggcataattggtcacttgccctcatgcaatttttgtacctctatacaatagtttagatcactcacttccttaggtgcttataattagctgagtgtgtgtctttcttaagggcagcgatcttttcttactcatctctttattccttattctgtgtagcatagggccttgcatattcaatgattgttatttatttcaatgctcgttatttatttggacactcctgcagatctataaagagaccacaaagttccaaaagaaaataatctacattcacaaagtaaatgaagtatgtaggagatgcacttgcttcattaatttattaataaatacacaatgtgctattgaataaaacttgaaacaactaaacatctagaaagttggaaaatattaaaattacgtgccttattttaaattttaaagtccgaatattccttgcttctagtaaattagcagaaaacagctcaagagattgttacaccctctattcctaaatcatggcgattgggaagaaaaaagtgaaagatgagagagagagagagcagagacccttggcatatagttgacacccagtaaaaaaattttaaaataaaagaaaattgcttttagatcccaggtttgtaaccccttatcatctcgttctaggaggtaacaaggagttactaacttgggatctaaaagcaatcctaaggcttgaggccgagaatgagatgtaaaaggactcctgaaaactacatttcccatgatgcccgtctccccacgcaaccgcggccgcgacgtcgctcccatggcaacccagaaggcctcactcccagactccttgcggagctcgccgcctgattctaggctggtcactactccgagcctgtgacgtttgcggcagccaggccgtcgacgatgcccaggtattccctgaacccggcttgcgtgggaaaggctactgagagtattcctggagagaggaagcccaggcgggaccagctgttggaagattgtg

SEQ ID NO: 23331 - DNA, 2300 bp, Homo sapien
tacaaaaaaagataaaaataaaaataaattagccggacatggtggtgtgcacctgtagtcccagctgaggtgggaggatcacttgagctcaggaggttaaggatgcagtgagccaagatcgcaccactgcactccagcctaagtgacagagtgagactctgtctcaaaaaagaaaaaaaaagaaaagaaaaacgaccagataagatctgataaggcccgatgttaatacatgaacttttaaatattattctccagtctttttttttttttttttgagacagggtcttgctctgttgcccaggctagagtgcagtggcactatctcagctcactgaagtcttaatctcctgggctcaagcaatcctcccacctcagcctcccaagtagctgggaccgcagacatgcaccaccatgcctggctaacttttgtatgtttttgtagagatggggtcccactatgttgcttaggttgctctcgaactcctgggctcaagcaatcctctcacctcagcctctcaagctgctgggattacagtcataagccactgtgaccagcctattctctattcttgattgtatgtccaaaatataccatcataaaaaagcaccactggaatcaaagataggggcttaatgggcatttttgtgcttatttaatccttttcctgtctctaggcagtgtacagataggggaaattgtgtttcctgagtacttttatatgccatggaactgtgggggctttttatattttgaaatatgaattcacgtacatgttaggcagaattttatactctttcaaggatctttctaaagatttcacattggtagcagttccattcacagtcagatatcaatagaattcattctaatatcaaacctgtggctttcttgttacaacttaatctgtttcttcaatgtggagtttaactcaagccaaatcctttttagaatcctccttcccaagcttacctgagcttcctaggatgcacatgatctgcccgctctccacgtacaaggagacatctttgaggatctgcctggtccactgctgccggcaagatgtgatgtcccaccagggcctcacgcggtggctttaaaggaaaccccaggaaggcaaaggcagcttggggccctggaaggggccacacccaggtccccagcattgatcctacctgtgccccaccccagtagtctccggacaggctcctaacgtgtttcagtctctgcgccctcctctgtagaacctggcagatagcgactgaggctgtctgccacgtagggagggggcctgtgctggagttgctctgaatgtcctgtccgtttggctgcgaggtggctgtccctgcattctttcaccaggtttcaagactccttgcattcgcagtacccccattcccatccacagagggcaggccgtagacactgggttggcagggcactgctgccactttgtttatgcccaggcccttccctgggcagggggaggggccattcactgtcgctccatgtttcccagcacagcccttctccctctcctctctccacccgatccactaaagagggagcccgaagtgcccagactggcacttaaagagtgaagaaaggcagcagaggggtgagcgccgggccccgcactcctgggggagcagcagcagcaagggctctgccttacctgacgctgtaggaggcatggaggatgcccaggctgtgaggctccggggcggtggcaggagccccctccagggagctctgggagcctctgtttacttggagacccatggaccctccgggggtcaaagatgagaggtcacccatggccaacaggcagcaaagctgggcaaattttctggtggccggaccctccccagagtggcttcagttggggagcccgtggcagactgccctgcctgctccacctgaccccggagtcccttgggacagcaggactgggacttggccacggagaccattatctgatgtacctttagccagcgcgtccttatcttgacagtgggcagaacacacacgtttgtaggtgggcttgccagcaaggaatgctgggagagacgggcccagggcaggaggccgaggtgtccctgctccaggaaacagagtgaagacactggccctggcaggcagcagctgggtctaagagagctgcagcccagggtcacagacctgtgggccccatggccgggaaggcggcagaggagagagggctgccgaaaggggccactccccaggatacctcggtgagtgagcaatgggaagtcggcccaggcctggtgggcgggtagga

SEQ ID NO: 23332 - DNA, 2300 bp, Homo sapien
gatattctctgtgcaaatggccccaagtccatccccagggtctgtacacctcttcccaggcccaacctcctgaggacttttaggccagagaagtatatgtctgtgcagggcagggctgcaatgcaggtaggcaggagggtgaccatccagggtgttgagggccccatggagtgggatggagctgagggggccagaaaagggggacaggttgtggctcgggctggaagtggctcccccgtaccagcgcattctagccaagttgccttagaatttctcaatttacacatggcctttcaggttgtgaggaagatatgtcaagataagaggatagaaactattttatttaactgttcttatagcttgactgatgacttttatatatctagacataggaaatgtgaccctcatcctcttgttccaagacccacaggtgttacgggcagaccgtcactcagcacctggagtgacaggatcggacagaagggaagcagaaatggcagggcctgcgtgcatttctggtgtggtcctagcatttctttgcctctcaagctgtggtggctgaatcgtcagccctcccaggcaggaagtgttcccaaagtcccgctgactttctattctattcaggctttaaacatttcccgaagtggtgggccccacagggtattcagagagcagagctggtcagatgtggtggttgcagaactgactagaaatggtgggctccttgggtctggccgagtcaagtcctggaaactcaaggccagtccaggttgttttccccattgggtgtggaatcctcgatcatgcttgtctttctctcctccctcctacccacaacaggcaaagatggaaaggtaggatggggtgaggtggtgggagtggggatctgcttctcgcttgtcttccagtttagcctcctgcttcaaatcctgccacatcccgaattcagtcaaaggctatttcttgagtaaacacttctcaggtaaaatgaggaaggaaacatacctccacctcctgccacctggctgcttctactccttccagctttctcgcagaacttacgattgcctgttagagccacacatgctgatgttcccacaaaagccgtctgtcaccctgtctcacccatcacttcattactgagaccaacctgacagccacatggatggaggagacaccagtggagtccctggcatgtgtgagcacatttctatgatggagtctcattcggaaaaagcgaaactggccaggcacggtggctcatgcctgtaatcccagcactttgggaggccgaggagggtgggtaacctgaggtcaggagtttgagcctgaccaacatggtgaaacactgtctctactaaaaaatacaaaatttgccaggtgtggtggcaggtgcctgtaatctcagctacttgggaggctgaggcaggagaatcacttgaacctaggaggcagagcttgcagtgagccgagatcacgccactgcactccagcctgggcaacagagcgagactccgtctcaaaaaaaaaaaaaaaaaaaaaaaaaaaaaaaaaaaaaaaaagagaagaaaagaaaaaagaaaaagtgaaattgtcccacatcacacaaaagaacatcatttccctaaaagagcatttcttagggcaggaagtgacctcagaggcctctgggaccctgaatctgttcccctccgccctttgacatgcaggaaacagtcctgcggccatgtcctcacactgcttgatgtccgggtggtgctaggacagaaggctcctgagggaagagagaaaggtttgatttctcctacccgcccaccaggcctgggccgacttcccattgctcactcaccgaggtatcctggggagtggcccctttcggcagccctctctcctctgccgccttcccggccatggggcccacaggtctgtgaccctgggctgcagctctcttagacccagctgctgcctgccagggccagtgtcttcactctgtttcctggagcagggacacctcggcctcctgccctgggcccgtctctcccagcattccttgctggcaagcccacctacaaacgtgtgtgttctgcccactgtcaagataaggacgcgctggctaaaggtacatcagataatggtctccgtggccaagtcccagtcctgctgtcccaagggactccggggtcaggtggagcaggcagggcagtctgccacgggctccccaactgaagccactctggggagggtccggccaccagaaaatttgcccagctttgctgcctgttggccatgggtgacctctc

SEQ ID NO: 23333 - DNA, 2300 bp, Homo sapien
ttaaaaaaaatcttgtactttgtttcttttgttgctcatttccaactttgtcatctgtcagaatgcaaaaaaaaattatccttctataaccattgacaggataacacaaaagctgtctccaggtcgatattttgcagcaatatttttaacatacgaacagtagtttttataatttcaccttggtgctcaaccatttattatcgtatcagaagcatgtcagtaattcctttctaaatgtctgcttcttttagcgcggagacccacatcaagggcttcacactgaacgatgctgccaacagccgcctcatcataacgcaagttaggcgggattatttgaaaggtatgtcacaatgcttgacctttacgtcacattaatgcctctgcagatttttcttgtaacgcccttcgaatacttggataaaggagtccatttagcaaattacctgcttatcaagagccttttgtggtagctgagagacataaattactgtacatgcatttataatacagcttgaatatgaatgtacttgtcatttgaccacttagtccagtttccattccatttaacacaagatgggttttcttaagatgaatcacagctcttcagacatgcaaaatttgtgttccagaacgagagaaagtacaggctttcaagtgcgttaaaattcacagcacaagtcattttgctttggaaattaacatactttagagcatctgaaacaattcccagcagttgtttcttgcatattgtgttggttgtgtgtgagataccaaatcagttaaattgagtgttaaatgtgtgggattgtgcaccaaatgattataatattgatttttaaaacttaatctaatacttttttaatagttcataataccaacagcaataaaatacagtgtttgtttgaagtttggagttttcaaattaatgttaagagaatgacacctgaaagatgtggacatgactttggggaggattgggattggggtgggggccactggtttgatagaggctgtttatgagttttgaaggggatgaattgggatgtggaggtcttatgaatgatctcccaaggggcactatgacgaatctcttaaatttagctaagtagctttccactttaagatttacatttgaatttgagtgaatacagtgatactgcagttttgccagtacaacaaaacccacttaggagatcttcaagaaaggttgaaaaagctctggaaatgtaaccttattgcttcctatctctgtaataatggtattattcctcactgcatgttctggttttgttttgggtttttttttgttttgttttttttttttgtttttgttttttttgagatagggtctcattctgttgcccaggctagagtacagtggtgggatcgcggctcactgcaacctccgcctcctgggttcaagcgattctcccacctcagcctcctgagtagctgggattacaggcgcccgccaccacgcccagctaatttttgtattttcagtagagacagggtttcaccatgttggccaggctggtctcgaactcctggcctcaaataattctcccacctcggcctcccaaagtgctgggattacaggcgtgagccaccacgcccggcctgcatgtttataacataagttcacatccttgagaggaagttgttgtttaattgtgcagctttaatgttgcttataatacctaaatgtactggtctttagctgtcttcctaattgattagtactgaatatgtaagtgaatagaaaacacttcttgtgcccagacttttgtggctaggcgcaatggctcacacctgtaatcccagcactttgggaggctgtggcaggaggattgcttgagtccaggagttcaagaccagcctgggcagtgtagcgagaccttgtctctacaaaaaatttttaaatagccaggcatggtaatgtgcacctgtagttctagctactcaggaggcagaggtgggagaattgcttaagcccaggaggttgaggctgccatgagccatgatggtgccactgcactcagcctgggcaagaacaaaacccttctcccggcccccccaaaaaagactttatgtcctattagtattttatgtaataaaatgataaacaattttaaaacaatgaaaagttaaacttgctcgccatataaataagctcattgtcataaatagcttttgtttctgtagacatggagataagaacaaaacacttttctaatttcagggggttcatttttcagctgaacctgacccagatttcttcagctggattggtacccttt

SEQ ID NO: 23334 - DNA, 2300 bp, Homo sapien
gctgcttttaagtacaaccagaccacttctcaatgacatgcaagagttggagacttaaattatgtctgagataatttctgttagacaaatttcagtttggttgtctaaaactcaggttttttcccccctcccttcccttctcacagaatgtaaaaattcctgaaaatatctacagaggcattcgtaatctcctggaaagctaccatgttcctgaattgattaaggtgtgtgtgaaatagcaatcaactggataaaatgcttaacttacatataacagcatgttaaaattttatttaaatatgatgcttttggtcagaaaaaaaatttgtttcaatgacagccattaaaacgaagcttttcattgattgttcataaatactatttatatattcataaatatatttataacgttaattacattgattaataaagtatgaagagaatgtctaaaattttggaaagatgaaaagtagtaatatgaggtgagacttacaaatttgcttttgatgtttgctgatgtatttttacgtgtgttttctaattctgggctaatttaaatttcaattttaggatgctcacttgttggttgagagtaagaatttagactttcaaaaagtaagtaggattttgactagattctacatgctataatacccatatttaatgagtattctggattgtgtacttataaaaccagtgattcctcacatttttatcatcttgtatacctctaagaagttggtaaaacctgttccccacctcagaaaaatcaacatatctaagaaatttgcatataatctcagaaggtttgtaaatccctggagtccatccatggattccccaattaatatccctgatagcatttatgacatttaggaaggtagaaaggaaagtcagtttaaagggaagagtgacaaaaggcatactatatttcctttttcaggaaatttttcttttcttttttcttttctgtagactgtgcaacttacatcatctgaattggagtccacacttgaaacactaaaagctgaaaatcaacctataagagatgtcctaaagcaactcatattagtgctttgttcagaagaggtaacatttgttttaatatttaaatattattaaggcaaaaaattcttggtaacaataagaaaaaccaaatataatatttatgatttttacaattgatcgttatatgtcaggcttgtaaagaatgcaattaaatgaaaggttaactaatttcagctacaccttgaatggcatgttttctggttgctgtagtttgtttacgataatctgcaaagtgaatgatagtaacagctgtgataggtttatcatacatgccaaatgtcctttcaagccatggctccggtctcttatatctagattgtcaagcaactgatacacgcagtagtcatttgcaagtcaaatattactaggttgttaatgcagggattgaaattccattttcctgctggaaaaaagctctttctgagataaagggtcccttgccttttttcagcgggcatccagctgtactttgtgttcattttagtgtatgtctgcaatttgtgggatatcactagactatttttcactttctagttcaatataattgagccataaacttgtagttttagggaaaaaatatcatgactaactttatgattataatctgctactgttaaattctaaaatatttcttcatattacttggatactaaactagactgagaaacttttcaatgatacatatttctgcatcctgaaattagactgtgattaggatttgatttgggaattacttaatctggaagtcttttttaaataataccatacacaaagcctaaaacatcaaatttggcataaataatggcctattttatattacagataacacatcttttaacccctacacgtgtaagacttgcccacttcttagaggtgaataaaaatatcaaggggcagagtcaggttgttaacatgaaaccatttatttttaaagtactattaactttttctaaactctgaacagtaaagctaaaaatgtgacatttttaccttcacactgatttcttctttttcacatctatgctgtattttagaatatgcaaaaagcccttgaattgaaagcaaaatatgaatccgacatggttactggtggctatgcagctttaataaatttatgctgtcgacatgataaagtagaagatgccttgaacttgaaagaagaattgtgagtaccctggcactgaaacaagttgtcaacatttattctgctctacagaccttgatagattatc

SEQ ID NO: 23335 - DNA, 2300 bp, Homo sapien
ctccttccagaaaattctcctggcttcctcctttccttccttcaggtttctgttcaacgtttttcctatttaaaatatcaactctccgggcgtcgtggctcatgtctgtaatcccagcactttgggagacgaggcaggcagattgcttgaggccatgagtttgagaccagcctgggcaacacggcaaaaacccgtatctactaaaaatacaaaaattagccagggcttgggcctgtaatcccggctactcaggaggctgaggtgggaggatcgcttgagcccagacgtcgaggctgcagtgagccaagatcgtgccattgctctccagcctgggtgacagagcaagaccctgtcttgagaaaaaaaaaaaaaaagcaactccccccatgacaccctcaatccctttaccctggcgtattttgcatcacagttctttttgtcttcccaaattaaactttaaagagcttaattagaatctagggttggtttgttttgttctctgctgtattcctaggatttcaaatagtgtatggcactggatatgtattcaataaatacgtgttgaataggtgaataacttgtattcccagtgctcagtaatataacccagagtcaatcaattcaccttgtttcttttgggggcttggagcgggtgtcttcgttccctcatctctcaaaggagaggtgagctaggtcatctcaaaatagacattaatttaacacatatttaatgagacctactgtgtgtctggcactgggtaggtgtatggcctacaataagagatcacagtccctactgataaggagttcgtgggattaactgataaggagtccagtgggataaacagtcacttcggaaatgaccgtgggagggcttccagaggaaatacccgccgcgtttgcctcgtgataggtaggggacaggcaggtgtagagggagtggaaggctgttctcagcttcccacgtgtgcacagggaaccgatccagtctgtaagccctgtgaaggcagcgacgtggtttttttgttttgttttagacagagtctcgctgtgtcacccaggctggagtgcaatggcgccatcttggctcactgcaacctccacctctcgggttcaagcaattctcctgcctcagcctcccgagtagctgagattacaggcgcccgccaccacgcccggctaattttttgtatttttagtacagatggggtttcaccatgttggccaggctggtctccaactcctgacctcaggtgatccacccgcctcggccttccaaagtgatgggattacaggcgtgagccacttcgccagcgatgggtttaacttgccagttttctccccatatttggctggagactcttaattacattgttcttttacttctcacatgtatatgtgcatttactgaagggagaggcgcggtaggggtggagggttggggaagagagtcagttcaattccagctttaaaactataggatttttggtagaattcatttattttctaaagcgaggccccgcgtacgcgcttagggtggggacctgcgcgttcctttacactgttcccaggccctgataatccacatcctatcatgttgaacctgggaggcaaacggcaaggtgcaaaagacctccacggtttctccggcccgcgtttctgagagtgaagggccgttcctattggacatggcgtcagggctgaacgttagcagcaacatctgcactcgggggcgggggaaaccttcccacgtcctgggatcttcatagtcggctctcctcgagagttctcggtatttttactagttggcctcccacaagcctctgcgccaacctgggaggagttgacctcttgcggctctaccaacagaggagtgcaggggtgcagcgaatgaacacgatgcccagatcggagacggaagacggaaaagaaaagcttcgataatgaatcaagcaacatcgtttatgtaaatattacattgggtcttctgtcctcggagaagtgcggttttccatcttccaacctaaaacaatccgtcgctccccccacatttggcacgcccggcagttggtctctgccgcgccaggctaccctgcggtcacatgctcctcctgtccttctggcggagcgtgcttcccgctgcggggacgttcgagcaatggcagccctgctgagatccgcgcgttggttgctgcgtgccggggcggccccgcgcctcccgctctccctgcgcctcctccctggcggcccgggccggctgcatgccgcctcctatctgcccgccgctcgcgccgggcccg

SEQ ID NO: 23336 - DNA, 2300 bp, Homo sapien
gaacttatcctcagattcaccctccactcaaagtgtattccatcttccttctgaaacaaactctccgggaaattccatgtgttaacaaatatccacttgacgctcaccattgagaagcatgagccctcaggtactgtgctccgagctgtagacacaaggataagactcagttgctgtctattcaattcagtgtatttcattttgaatttaattccaaaaatagccattgatatctagtctacaatgctgccaataatgtcctaggctttgactacaccaaaaaaaagtttttaaaaaaggaagacaggctgagcatggtggctcatgcctgtaatccccaaactttgggaggccaaggcaggcggatcacctgaggtcaggagttcgagaccagcctggccaacatggtgaaatcctgtctctaaaaaaaaaaaaaaaaaatacaaaaattagccaggcatggtggagcgctcctgtaatcccagctactcaggaggctaaggcacaagaatcacttgaacccaggaggtggaggttgcagtgagccgagattgtgctactgcactccagcctgggcaatagagcaagactcagtctcaaaaaaaaaaaaaaaaaaaagtaagtgaattcttgctcacactggggagttctcagccttgctgaggggcagacagacagaagtaaatgatggctataatacaatgtcatggttgtttgtgctgtgtcaagttggctacactggtgttcccagggtctccttctctgtatggttctgagttaaagttgggcaaaagaacttgcatgagatttggaagaggagtcatttctctgagagtcatttgatggtaagatgagatgaccaacagacacagagttgcccagcagtttccagcttgttctcactctccctctctgtgaccagtctggccccactgaccaacagtggcccctccccaacaccaaattattggttgtgaattgacacagagggtagctacctagaggcaacagcttcccatggatgcctctgcctcagtgactagatagagttggctctttggatggacaggtgggtgactctttctctgattctctaacttcctgttctggatcttcagttccccagctcttttgtaaattctaactctttaatctatggaattaaatctcttatcccatcgcagttacagtgactctgttgctcccctgcctaagtgtgccaaggttaggacaaggtacgtaagaacagcagagtcattcaggagacaaacaacaaagctataaaaaggaggtgaggatttgaaggatgcgtaggattcataatctaagggtgagtacagatacaggcatcttcacagcaaatgatattacagtgtgtcaggatttgtaacagatctttacaaagtgttatagaatcatggtagagggagcagtgaatcctataggcactttggggaagttaaaaaaaagagggaggttaaaaaaaaaaacaaaactgctctccctctccctctccctctccctctccccacggtctccctctccctctctttacacggtctccctctgatgccgagccaaagctggactgtactgctgccatctcggctcactgcaacctccctgcctgattctcctgcctcagcctgccaagtgcctgcgattgcaggcgcgcgccgccacgcctgactggttttcgtatttttttggtggagacgggatttcgctgtgttggccaggctggtctccagctcctaaccgcgagtgatctgccagcctcggcctcccgaggtgcagggattgcaaacggagcctcgttcactcagtgctcaatggtgcccaggctggagtgcagtggcgtgatcttggctcgctacaacctccacctcccagccgcctgccttggcctcccaaagtgctgagtgcagcctctgcccggccgccaccccgtctgggaagtgaggagcgtctctgcctggctgcccatcgtctgggacgtgaggagcccctctgcctggctgcccagtctggaaagtgaggagcgtctctgcccggccgccatcccatctaggaagtgaggagcgcctcctccctgccgccatcccatctaggaagtgaggagcgtctctgcccggcctcccatcctctgagatgtggggagcgcctctgccccgccgcccggtctgcaatgtgaggagcgcctctgcctggccgcgaccccgtctgggaggtgaggagcgtctctgcccggccgccccgtctgagaagtgaggagaccctccgcctggcaaccgccccgt

SEQ ID NO: 23337 - DNA, 2300 bp, Homo sapien
tttgacatgtgcaagccagccaccgcgccatagccttaattgcagaaatgatccacactgctagtctggttcacgatgacgttattgacgatacaagttctcgaagaggaaaacacacagttaataagatctggggtgaaaagaagatacggttttttggttttttaaaatctctcttaccgaatcacatgctttttggaccgcgtttgctttttcagatttgtcttattaaaaagtaaaatatgcttgctcaaaaaacaaaaaaacccgaattgcaattaagtctttgtttctgccgtccttatgacggcctggacaattgtcctattactaaatttgcccttttctataaaacattgacagcccctaacctgaatagcactctgttgggtctaagcttaaattgtctgcccaaaccattttacaccaaagtaggaaataggtttaagttcttttaggacattcggattaaaaaaaaaatatatatatatatatatatcctaaggtaagtattagaatacctctattacacttttgtttctcgtttggagaattaacatggcagcatcgtctaatttgatagctggaggagtcatgtccactttccccatcggcctgttaaacccctatcattcattcttgactcatcctgtgtctttgtgaagcctttcttggtaaacctatgcacaaggaagaccctttatgtcgtcaccagcccttgtgcatgtttcaattgtagtacctatcatcttgtactgcgattgcctaatttatttttgtatctccagttctacatacagtacctggcaaacagtaggcgctcaataactgcgaaatgaacaagtccatgtcaagagactaggctgggagttttaatatcaatgccgactgagaaacaaaatacggaaatgtcaagggctggtataaaaataatctctaatagcacaaaatcctcctgaagggaacacctgtcccactttctcacgttgctttccaggttcttccgacaccccaatttcccgcccactcttctccctccggggtacaggtcaggcaggtatcccagctcggcggctctgataggtcggcgatgatttcattgttagggaacatccgggcctttcccctccccgcaacacctccccagagcccggccttcccagtttcccactctcgcctgcgccccacccgcggctgaagcaaaacaaccgcctctcccctgcccacttcttgtcctcgtctgagtcgtcccttcccgtctccacgccgaagagaggcgtttagatcctccaatgagggcctaggaggactttcttagccaatcagtagccaagcccctgcaattccgggtgggaccaggcgtccacacctatagctggactgctcgttggtcccttatggcgcttcttttacgcgaggcttagaggtcaaatacaagggggcacggtcctcacagaacggaaaggatccgtacagactctccgggtttgaccgttttctaggacgaaccaatcgctttccagatacttccccgccttttgcgcgttcatttgaaaaaagccggtgtgacggacttggaaattggctcagtgactgacccgcaagaaagccagtgactgggggttcggatcacgagttggaccaataagaaaagacaatcgctggggccggggctttgctaggaggagcgcaggtgggcgttatttgattgacggagggctctacttatggctggtagcgggggctggtccctgacgttcgggaggtaggacctagcggaggcggggccgaataaagtaaatggtaataaagggttgggtctcacttagtgggcggtgtttgatggacagctgaccttgcctattgaaagtagccactgatgcccaatgggaaattagaaacccagaggcggggccgggtgggcggggtaaacgaagtacggaggtgccgagggagcagcacggggagggggagcggtgattgacaagactcccagcaaaccgggggccgtgagagggcgcgcggcatcccagtgggtggcagctggaggcggggcaccctgaggggcggggaaggactagggtgcggggagggggttgcaaaaggagccgagcggcttctgctcaatggcggaaaagccgccggtgctctgacggcctcgttcccctagcagttgcgggggagtttcctgccggcgcggctggagtctctgattctcagggttcggtggttggaagatgctccagagagacgaggctgcggcggaggaggtggcggcggccgaatcggcaacggcgcta

SEQ ID NO: 23338 - DNA, 2300 bp, Homo sapien
agtgcagtggcgtgatctcagctcactgcaacctctgtctcctcggctcatctcagctcactgcaacctctgcctcctgggctcaagtgatcctcccacatcagcctgcctcctgagtaattgggactacatgggtgcaccaccatgttcagctaattttaaatttcttttgtagagatgaggtgttactatattgtccaggctggtctccaactcctgggcttaagctatcttcccactttctctatttaaccatgtataagaaaaataatttccccccaaagtcatttttcttatacctggctaaatagagaaagctttaagctttaaaaaaagttgtggtaaaacatctgtaacatttcagtggcattacgtatgtttatactgttatgcaaccatcaccactatcatctcaggaatacttttcatcatcccaaactgaaattctctgcccaatgaacaataactccccattattcccttcctccaacctccagtaaccacgtttctattttctgttcctatgaatcctactactcaagatacctcatctaagtgaaatcacacttgcccttttgggtctggcttattgcacttagcataatgtcctccaggttcatctatgttgcagcatgtgtcagaatttcagtcctttatttatgtattggagacagtctcactccatcacccaagctggagtgcagtggtgctatctcagctcattgcaacttctgcctcctgggttcaagcgattctcctgcctcagcctcccaagtagctggaattacagcatatgtccccatgcccagctattttttttttttttttttttgagatggagtttcactcttgttgcccaggctggaccgcaatggcgtgatctccattcaccgcaacctccgccttccaggttcaaccgattctcctgcctcagcctcccaagtagctgggactacaggcatgcgccaccacacctggctaattttgtatttttagtagagacggggtttctccatgttggtcaggctggtcttgaactcccaacctcaggtgattcactggcctcggcctcctaaagtattgagattacaggcgtgagccaccgcgcctggcctaatttttgtatttttaatagagatgggttttgccatgttggccaggctggtctccaattcctgacctcaagtgatccacccgccttgtcctcccaaagtgttgggattacaggcgtgatccaccatgcccagccttcattccttttcaaagctgaataatatttcactatatgtataaccacattgtttatctatccatctgatgatagctacctgggttgtttccaatttttaattttttaatttatttttagtttcattttatttttattttctttcttatttatttattttattttttgagacagagtctccctctgtcacccagggtggagtgccatggctcgatgtcagctcactgcaacctctgcctcctgggttcaagtgattctcctgcctcagcctcctgagtagctgggattacaggcatgcaccaccacgcccggctaatttttgtatttttagtagagacggggtttcaccatgttggccaggctggtcttaaactcttgacctcgggtgacctgcctgcctcagcctcccaaactgctgggattacaggtgtgagccaagatgcccagtggagattttttttttttttgtgggatggattctcgctcttgtcgcccaggctggagtgcagtggtacgatctcggctcactgcaacgtctgtcttccggggtcaaacgattctcctgcctcagcctcccgagcagctgggattacaggtgcacaccaccacgcctggctaatttttatacctttagtagagacggggtttggccatgttggccaggctagtctcaaactcctgcccttggtgatctgcccgcctcggcctcccaaagtgctgggattacaggcatgaaccaccgcgccagtcccgagattttttttttaaacctctgtacttttaccctttcttccttggctggactttgtccagctaggtttatttataaaccacacaaagttcattaacaagaccaagcattcagcaagccactcttccacctcccttactgcaggaaggcactccgaagacataagtcggtgagacatggctgaagataaaagcaagagagactccatcgagatgagtatgaagggatgccagacaaacaacgggtttgtccataatgaagacattctggagcagaccccggatccaggaagctcaacag

SEQ ID NO: 23339 - DNA, 2300 bp, Homo sapien
atatgcgtgttgatctgaattcagatgtaactgggcatcctgcacttcatctggcagttctgcttctgtctcaggccagagcttccccttgcccgggtttgtgttctctcctgcctttattctggatcatccctccctcctccagtccctccttctctcttctggaccttctccataaatatttaaacatcaacttttaggtgatccaaggacactcagaattgatatatttgcaggtcaactttgtgatgtgtgattttctccctataaccttccgtctcccaggttcagtgaatggtactaccatgcagcctgaggaacaggctgtcagcaagtcctggcagtttcacctctttttttcctccagttcactgacttgttaaaattgcaatgacattagcaaacatttacaaaatacttactctgtgccaggctctgtgctaagtgttttatattcattaatttagttaatccactctataatcctatgagtctggtgtaattcctgttttgcagataggcagactgaggttactcagctaataaatgacagggctaaagatgggatctagtcatttcagctccatagtctgcttttaaaaattgctgccatactcaaactatatcatttcttgcttatagaatgatcacagctgccttgtgatccagtttttccattgcttttttagttctccactatagtcaaggttgcattttctaatgtaatagttaatatgttcaaaaatatgtatatgtatatgatggataaacaccttgtagtatatcatatatataaccatatattgcaagacttcgactctaaaaaaattattttttagtttcctctattttgaactttatgaaaagtgtcatgctaggtatagtcttcttaactaactttttcatgatttattcatgtaacttcaggtagctatggttcatacattttcattgttgtatatttcacagtgtgaacaatccatggtttacttatccactcttcagttgatgggaagttgggctacttccgttttttttattatgaacaatgttactataaacactgtcattaatctatcttggggtacatgtgcaagggcttcttttttttatttttgagatggtcttgctctgtcgcccaggctggactgcagtggcgtgatcttggctcactgcaacctctgcctcctcagttcaagcgattctcctgcctcagcctctcaagtagctggaactacaggcacccatcaccatgcccacctaatttttgtatctttagtagagacagggtttcaccatattggccaggctggtcttgaactcctgaccttgtgatctgcccacgtcggcttcccagagtgctaggattacaggcgtgagccaccacgcccaaccaagggcttcttttaggtaaataactaggagtaaaattgctgtgcaggatatcgcatgctcagctctacaggatagtgtcaaattcattatcaaaatggttgtaccaatttatatcccccacagaagtataaaaaatacacattctcattaattcctgatattgcccaactttgtaatttttatttaaaaattattattattttgtgtcagggtctcattctgtcacccaggctgaagcatagtggctcaatcatagcttactgcagtctcgagctcctaggctcaagcaatcctcgccacctcagcctccttagtagctgggaccacaggcacacaccatcatgtgtggctgagtttttttatttttttgtaaatatgggctctcactatgttgcccaagctggtcttgaacttctggcctcaagcagtcctcccgcttcagctctcaaagtgctgtgattactggcatgagctaccatgcccagcccagacttaaaacaatattgccttgagatcttaattttatatttatttaattactaatgatgatgtgtctaattcctaatacagtaattatctaattcctaatgatgttgaacatcttttcttacatttattcatttaagtgtccatttctgtgaaacacctctttatggtttctttcccctactttcttttgaattatttatccctttgaaattgctttcttcagttccttttgtattctggatactgattttttattgtttatgtacactaaaaatctcttgccctggttgtgtccaggtgggctgtgtgttgaattggaaagggtgcatgtccttgaaaggcagcagctactactcagcatctgcctgtgttgccatggacatgtggactcagtgtaactacgtcttccaactcaa

SEQ ID NO: 23340 - DNA, 2300 bp, Homo sapien
aaaaatattagccaggcatggtggcatatgcttgtagtccctgcttcttgggaacctgatgtgggaggattgcttgagcccaggaggttgaggctgcagtgagttgtgattgcgccattgcattccagcctgtgtgacagagtaagatcctgtctcagaaaaagaacaaatataaaggaggccattatggccaaaatcaagtaaaagagggaagattggcagggtgaggagtagagagagatgagacacagaaaaggaaataacaaatatccatattccaggtatactcaatatacagaatatacaaatttatgcaagtagggaacaaattaatatgtaaactatagccttgaatttaaggaaacctcagactttagcatatcatatatcagataatttcacatgtgctgacacaatgaattacaacacaagccttttattcttaggaatttttttctttaattcatttatttttctctgacaatctttaagtaaatattaatatttttatattacaaaagcaatacatgcttgttgaacagatgcaaaaatacagaacaaatcttaaatgactacttctcagtaccatttgcttgctgcacctcttagaaataatcattgttacccacttagtgtattatcttttagataggttttatttggttttacaaacatggaattagactagtctatcaaaatgttgcaattattggacccgagatggaaagaacagttaagcaccatgttcttggagagccaagaggggagaagggaagcagctgctgaatggaagcgctatacctttccacaggcattttagtactgctggcaaacccagatccagcccatcacaggagtagctactgttttacctcttcctttcaaaacttttcaacaagcaactttttctgattgtataattgaagttggggaagagttgggaagtgaaaagaccaagagtgttttatagaaattaatctacatcaagttttataaaagtgaatcttactaaaagtgaaagttaacaatgtcataacaacttgggtattttaaagaagaatgagaggagaatttcctccttatttgattacattttgctgtctccagttattgccccaaagtgaagttttcaaaatgagaatgaaaatatgaagagtgacttggatgtattatttattttctttatgtaaacggtgctatttcattagtttaagcagggtgaaaaccaatttctttatcttttttgtgtgaaaggtagatcagaattagttcttttgtctgttcagagactgcctagtttcaatcaactggaactgatgagtttgagctacattgggggatggttacataacctacaagtaacttagtaaccttacaaataatttaacttactttaaccctacaaagaattttaccgaaaaattttaagaccactttaaattttttttaataaagttaaatgggcctttgaagaggattgtggtagttatcagtaacatcagtaagatttcaggtcttaatggttgagaattccgactacagaggatatagaaaattgagctggtaagactttagtcagcatatttgtagatactcaaaagtgaaaaatgccaatatctagctcttaggcataggaagagtgctatactaggacttctaaccttggtaagtattttggtttcatctgaaaatttaaaattatagtaggtagtgaagaactctttaaaattacattattgtcatgaaaagctgcatttaataaaatgttttcaggccagtcttgctgctcttttctggttaatactgtaggacagcaaggtagctgaaaccaaaagccatgatttatttttagagaccataattctttttcttaaacaaatttgtgctcaacatcagtaggtagcacacaagtggggacagtgcacctcaatgtattttaaattgggataaaacagttattataaaagactcttctttacatacatagtaattcttcatttctaggatggaaaattagtgccaatgactgttttccacaaaactgactctgaggacttgcagaagaaacctctcttggtacatgtatatggagcttatggaatggatttgaaaatgaatttcaggcctgagaggcgggtcctggtggatgatggatggatattagcatactgccatgttcggtgagtcagtatattttacctggcatgtaagtgctagaccattgtgagagatgtcaagaataacaatatatatcagggaacaaaagcttatttttttcattcttattattcaatttttgt

SEQ ID NO: 23341 - DNA, 2300 bp, Homo sapien
ccacttaggttatgaataacttcagacagctgataacttaggctaactaaatctaaaaacctgtgtaagttaaagtttcattcaaatcataattcttggcagatgtgacttaaatgtctcatttgtaaagttaatcctatcaggctcaaactatgcagcactgactctggcacacataggggttaaactaaaacaaaaaacaaaacaagaaacaaaatataaatttgcaaataagtacacagacttaatggggtatctcaggaactcagggctgtaaaaggtaaaaagccctttggtcttacataattatgaacgtatctttggtatatatgtggaagataaactggaaaagcctaattatttaataaaggtgggggagggaagattaattattgttgagtgttaactaactgccaggtgcttttatcttgtttgtctaatttaaattttatatggacttaataaagtagatattaccatgcacattttacaggttgccaaactgtggctgtgggaggttctaagcaactgttccaggtcacttgtacagtaagctgtatagcaaaaaatccaatttggttcggttccaaatactggacatactcaacttcggatttttaatgttaaaaaggtatttagcgctttaattaaaaacaacaaaaaacccctgcaagatgcacaaataaaatgtaaggccatctctggtttgtcaggaggtagcttttattaaccttgattgctaataagtagttaagagtcagagagacctgggttgaggtcttagctcctacacttaactgtgtctccgggcctcagtttcttcatctgcaaaaatgaaatgacaccatttaccttctagggttgttgttgtaaagacaaaatgagacagcttaacattaagaccatacagtgcctggcacatagtgaccactcaataaatggcagttgctattatttacgacaggaataatctaggtatgttgcacaccgctgaatgtcattatggaagtcttccacaaaatgccccctggtatcaaaggtagaatgctgcgtcaaatttaccatagatcagatgcgctacgacgcccccgccccccttaatccctttccatgtcgcagcaaaataatgggcgattgggggtaggggagcaacactagtttactagccgacactagtaaaaaaaggggaaaaaagacccgaataacaaggacctgcaaaggtcctacatcaccacgttcccacagcctttatccatccatctttcatccccaagaagacagtatgcaaggctaggatgggggtggggtagataaatgggtgttctcaggagaacctattcgtttaccccgtgcaactctccaccccagggatgaggcgatctgaatgcaacagggagagggaccaggtgacacgcacgcagtgccgggacattagtcaaaaagcgaggacctggggactgaggggtgggtggctgggcggggggagaaaggggagaaggaaagagaccagcacaccccccatacatacgcaaattgagagaatcagtccggctctggacacaaaccagtgaaggcaggccggagaacctgaagctctcagaggggagcaggtgtcaccgcaggcaagtccagccgaagtctgcgttccgcagcccacagaacgacaacttacccagagccgcctagagctggtttgcagcacgccaatctacgtaacctcaatctagcacgagcaacaggcagatttcgccatctttgttgtggtcaaggagtcttcttgggttcctgggttctttagtctcgaaatatataagacttttcgttcttcgctagtcttctgagctcgagatgaagcacagaaggctaaaacaatgagggacagcgttccagtagccctgccacagctctctcatcctctggtccgccctcactcaagatggctaccagcaagaatggtgcaatggcgtgacagctcggccctggttgccaaggagatgcgagtaccggaaatgcggaattcggggagagcgcgcatgcctggtccggtggagggagggtgccgggcgtcacaggtcctgacagggaagaagttggcaggtcctggcaggggacgagctgcggcggtggcacctccgggtgtggaaggctccagtgagatggagtcgcgagtcgcggacgctgggaccggcgagaccgcgcgagcagcgggcgggagtccggcagttggctgcaccactcgggggcccgtagtctcggcgcccctgggagccgcccggtggaagctcctgcggcaggtaagg

SEQ ID NO: 23342 - DNA, 2300 bp, Homo sapien
aacatggagaaaccccgtctctacttaaaaaaaaaaaaaattagccaggcgtggtggtgcatgcctgtaatcccagctactggggagactgaggaaggagaatcatttgaaccctagaggcggaggttgtggtgagcggagatggcagccattgcagtccagcctgggcaacaagagggaaactccatttcaaaaaaaaaggaggggggaaggggggttgagtccactctccccagctcacgccagatctcatttcagtggtcactattaaaaaaaattagatatttactttattatagatacttcctatgatgatctgtgaggacatgcattttcttatcctgtaataccatttgtaacaatagcaaaaccagatcattactggtctggaaagactgtcaatgtatcagcaaataaatcttaattaactctgatgatctacttaactcataactctaaaagcactaaaagaccactgtatgaaaaggtgactcaaggcaactgcaaacaaagtgatccccaaaatactaaaagcacaatctcaagtaaagtggcaatagctgggaaactcttttccaaacacaactgtcagaaatggaaaaatgtcctcctgagtaaagttttcggcagaaaacttcaggcagaggcataacactgctatgcaaaaacaataaccagacttcacttcaagaagtgagcgaagaatgtgagtgatcataaatcagaacttccgtcaagcttgcacgagtggagttgtaagtaacagcagaaactttgaagtaccagaagataccatcattcaaaaacgaacacactttgactagcccaccttggacacggagaatctcgctgatcactacaaactacaagataatcatttaactttgagacctcagtgagagagggtatcagcttttcctactccttgcacgctccgctgtacggaagatgccgagggaacgcatgccgtgtctcagtcccggcatagtcaaccacgctgggcaaaagacggggccagagggtgcagacgaatatcggtaactcgaaccaggctgggagttaagctagaagaaactggggaaggaggcaaaacagaagcaggaaaagagcagtggggagcggcgggcgcaccagagactggcgagaaggggaaaagtcccccagacgcacaaaaatgtctagaaggggttcttctacttcgatctgagtttcccaggagctcagccttggctgtcccgctccccacccaaccccacatgattcctcctcttggatgggacgcttaggtgaagcgagggggagcttcgcaggtggctcccggcaaactgagaagggtctcccagagctgccaagaggaaagaactgcgaacagtcgctcccccggtacgtgagagaggagtgaccagaggcaaaggtgaggcgagcaggttctcccttacctgccgcaggagcttccaccgggcggctcccaggggcgccgagactacgggcccccgagtggtgcagccaactgccggactcccgcccgctgctcgcgcggtctcgccggtcccagcgtccgcgactcgcgactccatctcactggagccttccacacccggaggtgccaccgccgcagctcgtcccctgccaggacctgccaacttcttccctgtcaggacctgtgacgcccggcaccctccctccaccggaccaggcatgcgcgctctccccgaattccgcatttccggtactcgcatctccttggcaaccagggccgagctgtcacgccattgcaccattcttgctggtagccatcttgagtgagggcggaccagaggatgagagagctgtggcagggctactggaacgctgtccctcattgttttagccttctgtgcttcatctcgagctcagaagactagcgaagaacgaaaagtcttatatatttcgagactaaagaacccaggaacccaagaagactccttgaccacaacaaagatggcgaaatctgcctgttgctcgtgctagattgaggttacgtagattggcgtgctgcaaaccagctctaggcggctctgggtaagttgtcgttctgtgggctgcggaacgcagacttcggctggacttgcctgcggtgacacctgctcccctctgagagcttcaggttctccggcctgccttcactggtttgtgtccagagccggactgattctctcaatttgcgtatgtatggggggtgtgctggtctctttccttctcccctttctccccccgcccagccacccacccctcagtccccaggtcctcgctttttgact

SEQ ID NO: 23343 - DNA, 2300 bp, Homo sapien
cagcctggccaacatggcgaaactccgtctctactaaaaacacaaaaattagctgggcgtaatggcgagcacctgtaatcccagctattcggaaggctgagtacgggagaattgcttgaaccagggaggcggaggctgcagtgagccgagattgcgccattgcactcacgtctgggcaacacagtaaggctctgtatcgaaaaaaaaaaaaaaaaaagaagggggttgccgggcacggtggctcatgcctgtaatcccagtactttgggaagccgaggtgggtggatcacctgaggtggggagttcgagaccagcttgacaaacatggagaaaccccgtctctacttaaaaaaaaaaaaaattagccaggcgtggtggtgcatgcctgtaatcccagctactggggagactgaggaaggagaatcatttgaaccctagaggcggaggttgtggtgagcggagatggcagccattgcagtccagcctgggcaacaagagggaaactccatttcaaaaaaaaaggaggggggaaggggggttgagtccactctccccagctcacgccagatctcatttcagtggtcactattaaaaaaaattagatatttactttattatagatacttcctatgatgatctgtgaggacatgcattttcttatcctgtaataccatttgtaacaatagcaaaaccagatcattactggtctggaaagactgtcaatgtatcagcaaataaatcttaattaactctgatgatctacttaactcataactctaaaagcactaaaagaccactgtatgaaaaggtgactcaaggcaactgcaaacaaagtgatccccaaaatactaaaagcacaatctcaagtaaagtggcaatagctgggaaactcttttccaaacacaactgtcagaaatggaaaaatgtcctcctgagtaaagttttcggcagaaaacttcaggcagaggcataacactgctatgcaaaaacaataaccagacttcacttcaagaagtgagcgaagaatgtgagtgatcataaatcagaacttccgtcaagcttgcacgagtggagttgtaagtaacagcagaaactttgaagtaccagaagataccatcattcaaaaacgaacacactttgactagcccaccttggacacggagaatctcgctgatcactacaaactacaagataatcatttaactttgagacctcagtgagagagggtatcagcttttcctactccttgcacgctccgctgtacggaagatgccgagggaacgcatgccgtgtctcagtcccggcatagtcaaccacgctgggcaaaagacggggccagagggtgcagacgaatatcggtaactcgaaccaggctgggagttaagctagaagaaactggggaaggaggcaaaacagaagcaggaaaagagcagtggggagcggcgggcgcaccagagactggcgagaaggggaaaagtcccccagacgcacaaaaatgtctagaaggggttcttctacttcgatctgagtttcccaggagctcagccttggctgtcccgctccccacccaaccccacatgattcctcctcttggatgggacgcttaggtgaagcgagggggagcttcgcaggtggctcccggcaaactgagaagggtctcccagagctgccaagaggaaagaactgcgaacagtcgctcccccggtacgtgagagaggagtgaccagaggcaaaggtgaggcgagcaggttctcccttacctgccgcaggagcttccaccgggcggctcccaggggcgccgagactacgggcccccgagtggtgcagccaactgccggactcccgcccgctgctcgcgcggtctcgccggtcccagcgtccgcgactcgcgactccatctcactggagccttccacacccggaggtgccaccgccgcagctcgtcccctgccaggacctgccaacttcttccctgtcaggacctgtgacgcccggcaccctccctccaccggaccaggcatgcgcgctctccccgaattccgcatttccggtactcgcatctccttggcaaccagggccgagctgtcacgccattgcaccattcttgctggtagccatcttgagtgagggcggaccagaggatgagagagctgtggcagggctactggaacgctgtccctcattgttttagccttctgtgcttcatctcgagctcagaagactagcgaagaacgaaaagtcttatatatttcgagactaaagaacccaggaacccaagaagactccttgaccacaacaaa

SEQ ID NO: 23344 - DNA, 2300 bp, Homo sapien
agctttcagctgcgtggagaaggactcatggccaggaggagaggaaatatatatggagtggagagagcactgaaatggggcttggcaggtcttccctttggaggaatatttttctgccccagtcgtcgtgttgaagacctgctaccccacggctgtctctggctaagtgagccagtattggcccctcgccggacccagggcctccctgccgcccggaatcctccaaggaggcttgcacttgtcggcttgctcttctccccggccctcagaggcctggcactgcgggagtcaaggcctaagcagggctccagctcggggtttaggggctgggacactcacagccccagtcacgttaggtttcccatttaaattctctctcaacctctctttctctcttccctcattgagatcaccaaagtggtgtggacacggcgccttgcccccagatctgcatcggaatgcagaaaagatctttaaaaaaaaaaaaaaaaagttttgaattcctcaatgatttttcttctggaaaggcagcttaggataattatttcagctttattgagggcagattagttgaagtctgggcgctgcgtttcaatacgcgttgtacacgggccgacaatgtggtcattgttggctactgtgtgtgaatccattcaacatatacactttttaacaccaaaccgagtcctgtctaaatatacacagtgctcagggaaagacgtctctgaccccgacaaatctgcgtaaatcacacttccatagttacagaagcctcacaaagggaggcccggctcaagatgctgattacagcttcttaaaagcaacatacctaagaataaatacccatgcctggcctaggggctgtggtggccagaggcagagagggccctctgtgttctatgggccttttggcgtctgttttaggctttcgatgttactttccctagagaaattagacagtttaaaaataataatggtaattattattattttacaatacgagcaaacaagcaattttcaggccttattcacttcatccgggtggctggcctccaaagtttgagtgccctctggggctggcaggcaggaccagagctccttctgttgtgtggtgaggagtgggcatctgtaggacttttctgggtccagagggctcttgggcttctcggctcccgcagctcctccaccactcctcagagaggcagctgaattctgggaagaaacaaagagttgagttgcttcttaagatggaaagaagtgtactgtttggactgttattttaaaatacagggtggtgggggaaatcgaggctccttggccggggagggagtaaagagaagcctaattgatgaagagggagttgaggtgaatgcggtccatgggcaccgatgggggaggcaagagcggcctccagcaccctgggaattgggctcaggctccctggcgccagataccctcggaatccgggatccccggctggcgccacggcccgctgggccaaggtcggtgcttggtgggccccatgatctcatctctcctttcttccttgccactattagtgctcacataggcagaaagaggcggcccgacgtgcaaaccatgtgcaaaccgcgcccgctgggctggtcagccgtctttccttgcctgccgacctggactatgtggagcctgggggaccctcttgcctcccaacaaaatcccctctctaattgcacatcccattcaacaactctgcccagggcttttcgaatttctggatcaacttctttaggaaaaagggaagaagaagtctcagagacagcggtagagaaaagaggagagagagggagaagagagaagagaggagggggaggtagcgagattaagagttgcaaagataaaaaaaattctctttatccccccacttctccctccttccctgctctccccctccccccgccctctggctaagtggtaaaaccgtccttacgttctcggtattgattggcagggctgacagtgattggcagtggttgccgtggcaacgccacaacgacacgccacagaccaatagaaaagcgaaacaaaatgtttcaatgctgcactcactgtggatttaggggagatattatgaggctgttgtcattagggcgattgcggtggaatcgctgaatcttgactcggcggtggttggctctccctctcctctctccctctccctctccctctctgtctcgggttctctctctgcgcgcgcgcaccgggccgctctcctacctccctctctatgtggctgcgcgggtgtgtgtgtgtgtggatgt

SEQ ID NO: 23345 - DNA, 2300 bp, Homo sapien
tgaacctcatcacagtctgcggtaaattcttctccatgtctcccagggtccttagatccaactctggggcagcccctgtgcagcagtgcataggactctggatagggtggcctggacacagcagacctcctcccagcccacagatacagactctaaagatgccacctggatttctgcagaaagcttcccctttctgcacccgcactggcttgggacctactttgtcagccctgtggcctcattcaacatgccagggtaggcccctggaagctaaagtcttaagaggagtcccagggttccattctctcatgcctacaacactcccaaaggacttccggaatgctgcagcacagggaaaatttttgaaatcttgcagagaaggaaataaacacaaaggcataaatatatgccttaccatagacaccaagcaaaaccaaaagttgaacccagggctctagactcccattccgcgctcctagcacaaactccatagaaagcataaaagggtgggaaagaaggaactggcctagactcgggttccatagccctagactggctgagggcagagcccaggatttgtgctggcttgggtcaggcactgagtatggccctaggagctcctggcctgcagcagctgaggggggaagaggaggaaactgaaggaagtggaaaggacatgtccgggaaggagctaagccccgggcttttcaaaacgtagagcaagaacacacccatcctcagttctcccacctttgtgcgagcccttctcccacaggaccagcaccacatgtttccattggcaccctgacaaagaagcaaaaaacaggacccccttttaaagcacctcatcccggagctcagcgagccggttcccaggctggagtggccaggagccgagccgatccccagcggcgaagcgggaggactgggaatcttgcctccgttctcctccccgaccacccaccggggaagccccaccaccgtcctagagtccctgccgtcgcccctctcccccgccccggtgggcagactgcgggtctgcgccgtccggggttctgcgtcgcagctgccggccggagtcagcttccatagaggccacacggaactgcctggcgctcctcgggctgtgggacccgtggggttaagtctgagtccccgcccggcgaggagcagagagcgcagagttggggcggtacaggccgccaggcagccggcggggctaggagagggaggaaaggcgggatcctccgggaagtcgattctccggcgtccgcctgcggccactgccaaatcttccccatttctttcgtctactccctccccttttccctcgaggaccgctgagtccagagtttctaggatgggggtggggcgctgtcagcagaaaaagccaagtctttgggcggcacccgagcacgtccaaactctcccatcccactggcctgcgccggggtagaatgtgcccggtgaacagagagcctgggagggacgcggtgacctggggagaaggggaaccctgtagggtctgggcgaggctgcagagccctctcctagccaaagctgcccaaactttcttcccctggagtctccttccacccctctccctccccttcctcctggacacccccttaaacggtctccgccttcccttctctcctcttctctccccacctcgatccaccccttttcgtcttcgcccgctccccccgctctcctgtcctcctcctccctccctctttgggcatccgccccgtcaatctccgccgccgccggccccaacccggcccctctccgcctcccaggctctcagagcgccccaggctccagtagagccgccctcagttctgcgcggagcggggcgatctgtcagcggagccggccggggggagccgcccggcccgccgaggctcgggttaccagtgactgacagcgtctccatggcgaataatttgactccgactattgtctggcgctggcaggccccgggtcagataaccggaccaatcagggcgcgggccgccgcgcctcatgcccgcttagaataatattattaagaaagctgagagccagctagacgggagggagaacgagtgagaagcgagcgagggaacggcgggcgggcgcggagcatgcggagcggcgccccgggcggcccccgggcttgggcgagggcttgggccaggcgcgcgggccgttggggttcggagcttcgtgggacccgcggccggcgcggggacgtacggcagtgactcggggctcaccgggggccagtgccgggccagggggccagccccgcccgc

SEQ ID NO: 23346 - DNA, 2300 bp, Homo sapien
accctattcgaagcaggtggccctagttgccacatgatcttgctatgggttttgtagctccttagggagaaggagtagctttgcctgtgaaaatgatgctttgggtatgacatccagctctcctgtttcccaggcacactctgttatgcacaattcaggattccacactctctagaaggccccttggatgcaagctcattctcccttcccctcttcttgcttctaagccatgggatcattttgaagaacttgcatgctccatctacaacccaactcctaggagaggaaaccaattctgtttcctgggagtttacttcttactcttgaagacaagaataagagaaaggaagtcattcttgaatcattgagttgctttctttaaaaaaccattgttatttgtaaaactggaatacatttttttgagctctcctgtctgaagcccaggctgagaaatgtaattagaaaatgcacacttaccaagagttggaagcctgggagagtgccttcatccatccatccagtgcactggatagggagagatataaacagagcacgtggtgttggcgtgcacttttattgagtgagatgtgatgttcagaaagtctacagcacatacgtacccaagtggaaattccttcagtaacagtgcattaaacaatccagccctctcttcccacacacccccaccctaccacctccctcccatcccccgcccccagaccctttgctctttcatatacatggttttagaagagcatctctccagggctgggtcagggtagggtatcacttttttgaacccctcagggaatgtttgcagtattttgctattttctctgctggatgcacttatggtaacaccacggaggcccactctaccctggtgcctccttggtttgcagggctcaagttagatgccaagtctcttagaatattaaaatatgacccactcctccctcctgcttccttctgccttcctttctcttctccaagcaagtgcttatctacaatctattggtaaagggttactccctggaatggtgaatttctctttctgaatgtgttctccctgcctcgggttccctgggtctttggcatgaagagtacgtgtcaagggcagatcaaggcagctgggtcagaggcagctgtgcccgtccagccaatttccaagctgcctggctttgtgcctggtgggtctcagagcagtttagatgacaatgtgggtagctccagaaagcattggccgtggtcttgcaaggggcaacagagctctggaggcccttctgaaacaggccaggaagccctccctaggtctcacactggacagtagtgacagaggcagaaccatcactgaataaatgtcacaaaggtctgctactgcacatcagtgtagttacaagacctacaaatgaacttgcaggagaagagccccctccatgcctatctgcctcccactccccacctcccaccaggcaaatgatccaatgatgctgatatggtttggctctgtgtcccctctcaaatcccatcttgtcgctcccataattcccatgtgttgtgggagggacccaatgggagataaatgaatcatgggggcgggtctttcctgtgctgttctcgtgatagtgaataagtctcacaagatctgatggttttaaaaaggaagtttccctacacaagctctcttctcttgtctgccaccatgtgaggcatgactttctttcaccttctgccatgattgtgagacctgccccagccacatggaactgtaagttcattaaacctcttaaattgcccagccttgggtagtctttatcagcagcataagaacgaactaatacagacgcctctctgaaattttagaggtttgtattattgctaggaaaattagaaaaaataaccaatcttccctttccagattcctcctgcgagtggactgcatgaggagatgtctgtaagaaattgtgggtagatacctcagacagaaaaaaaaaaagtgcactttaaattgacaaatcagtccaaaccacgaaggttataacttttttttttttcctttccagaagaacagtaaaacagacttgttattggcagcccattagtgctcaggagaggcggtctccagcatgacatcagccggcggctcgacccaaatctagtatttcaccagagagcctaacgctgctggctttccaactgtgtggaagacgtaagtgggggagagggaagaaggcataaataagatacagactggagactttttgatgtgtttagcacatttttgtgatttcctttaatac

SEQ ID NO: 23347 - DNA, 2300 bp, Homo sapien
tgtccccatttcccagcctaggcctgagctgcagttggggatgctgagggtctccagacttggtctcctgagctgcctgtcccactcttcaggtaactgagcacagtgctagcctggttcctgagctgcagctcctgttcctgctgcgtcctgcccccactggccagcctagggcctcagccccacaatggccaagactccagcttgctccattcagacgtctggctgcttgaagccagcctctggcttggcatccttgctgagattccacaacttctgggcaaccctctcttcccccaccacctccccccacatccctatcccactgctcagagtccacttggccgaggactagaagaagccatgcccagtgaactgaatatctgttgcatcagactgctcctgaggccccgtcctggctcctgcgctgctgcatttgtagacctggggctacatcatgtcccttccttagcatctggaattgctgtgtatagaatgctcagtgctattccttactgctcctgagatgtgagagccgccctgaacatctaaccatgttgggtgattctttttttttttttttttccatctgcctctctatttctgtttgcaggagccttatttagagttaaagggcccaggcccagggggaaaagatcagtgactcaggccacagctgttccttctgccctggacaaaggcaacagagtccctgctccctgacaaccccatagcaccaaagacagtcttggttctatcacagtttagcttattcgcacttggatagaccagaaagaaaacttctatatgaaataaaattatgttgtaactttgcagaccattcattcagtaacgtttattgagagtctactacatatcagacactattctaggcctgtagggtacatcaatgaattaaaaaatccctgccatcatagaacttgcattccaataggtatgaacagataataaatagcaatcataaaaaataaaaaccgcatacagaaagcaaaaaaatgccatagaaaaaacagagcggcctaagagtgaaggaaaatactgaagtcgggggtgggttacatgttcaaggagggtgtttggagcaggccttatacagaaggtaaggtttgaacataaacttgagggaaaagaggaaattagccatgagggtatccaggaaacgtcattccagggagagggaacagccagtgcaaagaccccaaggcacgagtatgtctggcatgtttaaggaacaacaagatagccggagtggctagagggaagtgagcaatgagggaagtagaggggggtgaggtcagagagatcacaggggccagattcatatatggcactgcaggcactgtaagggttttaacttttttatgttcctacttcagcaaattaataaagatcagcctctctccttagtcaagctagagttcaagaaattcaacaagaatttcttgaatttgtatgccaagccctgagctcacattaatgagcagaatattctctgcctttacgaagtgcaagtttggatccaagtgttggcagcagcatgtgcagaggaaaggggtacaggaccaggggttaggagacctgaattcaaggcctgcctttccactttaccttgaccattcaccaaaccctggctttctgtcactggagataattacttatgccctggttacctcctaggtctcctctgtcccttcccttgggtcaggtagatggagtccttgttgtcatctttgcatgctcactgctctccctgtgacctcattggcactcactttgcctggtgagaaccagcgtctgccatttattcatatctctagcatgaaaaacacatccaggggtgtctgctttgcaaaggaaatttacccattccttctatttcatgccttcctgatcagataaagctgcatttggtgctaacttttaagtcaagtatgcaagactccaaccaacaataacaaagacaggcccacaggttgctgaaccgggtgagcttttaaaatgcattcagagagtgtgaggttattaataaggagacaaatatctcatttcaggctacaaagcagaccccacagtggggcatggaaatgctgggcccttcgaggttagcttaaactgaagagaggaacttggttagaatacagacatctctgatgctgtgtcccggatgttgagcttccagctctgatggcacgttctgtcaactcagctctgttttgagtggaactgaacactcagtgatggctaaaaacagcagttgactaaactaattaagctacatg

SEQ ID NO: 23348 - DNA, 2300 bp, Homo sapien
tctttaatttttcaaatggccaacttttcttgtatttgatttccatataacactctcacgagatgaatggaaaatttagtatcgtaggcctcctgtgcttctttttgtggtcttatgtcatctgttaagaaaggttaaaaacctggtttcacttccaagtgtttgggcattattggtgttatatggagccattaaccctgaacagctgtatgtgatacctggtttcacctgccttaagagagagggctgtgacatacaatgactatagacccagatcacccttatgaagccctgatcacccttatgaagcactggtcttcgccttctcagctcatacacctgaagttgaattgaagtagttgactcaagatgactctagttcgtgttaactgtagctcgcttatttctgcggctttactcttagatagctaatttccacagcatatccataagagcacaagctagtgctacacagtatgccctctgagaatgttggtgtaaaaatacagtgttttaatttgtatagctctgaaaaaaacttcggggttgaagtggttgaaatattggccaaaattatagtcctaatattattcctggattttagtatcacacccttgttatcatacagcttagatacttgaaataaaaccatacatatccaggatttcagaggatcggtaaaactttacaatgcactgttagtaaaagtaatataactttgaagtcatatggcgatttcagaatcaaaattacttttaaataagtgtttaaaatcacttattttatgaagcgattttagaatcttaatatgacatttattaggaatatccgtggactcacagtcggtaaacaggtagccaaaagggcattcctctgtccttctgagggagtgtaaactgatttaactgtttcagtgtgcagactgacagtgtgtatcaaggtcctcaaaatgtcctgctttgttttgactagttctcttttgagcattatgtcttaagcaagtaaattgttatgcataaacatgtttttatagtgttacctataatcattgaaaactggaaaagtaaagaaaatgttcaataaaaaagacattaaaatttgttcatataattgaataatctgcaatcgtttaaaattaaacttccaaagaatttttaataaaatgtgaaaataaaatgttcaaatagttaaaagctgggttcacatttgtattacagaagaaaaatatgcctaggaaaacctgaaggaaatatccgtaaaagttaagatgagttgccccaggtgataaaattgtattagtttcttcttctctttgtgcatttgtgcactgctctaatttgctgtaattaaaacatgtaactttttttcccctaaggagaaaaaagtatttattaaatgagaaatccagagaaaaataatgacacattggaatgtaggaatcctgttttctaatttctttcagggtagcttcagttcttgaataatggccctagttcaagaggtgaaaaatagttatctgcaggtctattccactagcagagtatttttgcttgtctagcactaaaatttttaaataatgtaaatttgaaggtcgttagggcacaagcctttccagtttaccctaagccttgacatctttctcttgtgcctgtgtgatttcgacatttgtgtaacctcccaggcctctgagatgcaaatgttgcatttttccagctctgtgcctaatgctgaatacctttgtcataatagtagaatggtccactccaagtttgggattttgggtttttttccttactcagcatatggtaatggtcatggtgatcataatgtttttttgttgagcctttttgtagtacccagtttataataaaatatattattctatctagttctaataattctgtatggctaggtgctgttattttccccatttcgtagataaaacaacttgaagcacaaagagattaagaatctgttaatagtagaggcaagatttgaaactaagtctacctggattcaaaatctgtgctcttaatattgataactaagttatatgcagaatgattatattttagcatctctggaagtctttaaccagtaataatcttatcttattgaagagaggactcagtaacaattgcttttcctgtttctgtatgtcataaacgacatggtattatttaatactctcattaaacaacaaattattaaaaatgcatcctttaatactcttattaaacaataagccatgttattttaaatgtatagtagttgtatgttgtatgttaagatatggagag

SEQ ID NO: 23349 - DNA, 2300 bp, Homo sapien
tggtaaaacctgaatgagctctgcattagatggtagtaatatattagtgttaattacctgataatgatggttattttgtggttatgtagaagatttgtatttgtaggaaatcacactaaagtgttggagtgcagggatgttaacttattctcaaacagttcagagacaataaagttccttttactttacctgcaacttttctgtaagtttgaggtagctttgaaaagaaagttttgacatacagttttggtatattacaaaagtttctcttttcagggctgttgcaaagaaagttcatagtacaatccagaaaattaagaaggaagggaagatgtctgagtgcttgttaaaagccatgctgaattgtaaaacttttgaagaactagaacacgtggtaaggaatcctttttatcttttaatgtaatacctgaatatattgcaatttgggtcttcttatgattaaagaacaccaagaaataaaaagctaacgtcattagccaccattatttaatgcaacaaaatatttattctttattcaataaatatttatagagtgttttttttgtgctaggcacttgggtttacaaagatgaataaatacatagtctttgtctcaaggaatttccagtcaagtagggaaggacagtagattatacaaacgtgaagcttatcagagagggctgaactagagatccagatgtggatgtcttcagcctgtagttggtacgtgaaaccatgagaatggaagaactcaagaagtgtttgttagcaggtcaggattgaccactggaggttaccaccttttgaagtgtggatggaggatgtgagagcataaggaggtaggaaaaaaatagagaagtatgaggagaatcaggagatgatggtgccctggaacagcagggaagagagttttagatggaggtcatgatcagcagttatgtgtagcagagaagtttggcagaatgaagactgaaaaaaatatatatatttggtaattaggagatcatcatggatttttgtgatatcatttcctgcaaggtatgtgagaagagaagccagatgatggtgggttggagagtgagtggattaagaagtagaagaattggctgggcgcggtggctcaagcctgtaatcccagcactttgggaggccgaggtgggctgatcacgatgtcaggagttcaagaccagcctggccaagatggtgaaaccccgtctctactaaaaatacaaaaattagctgggcgtggtggcgggtgcctgtaatcccagctactcaggtggctgaggcggagaattgcttgaacccgggagtaggaggttgcagtgagctgagatcgtgccactgcactccagcctgggctacagggcaagactccatctcaaaaaaaaaaaaaaaaaaaaaaaaaaagaagtagaagaattgaccggccaggtgcggtggctcacgcctgtaatcccagcactttgggaggccgaggcgggcagatcacgagaccaagagatcaagatcaccctggccaacatggtgaaaccctgtctctactaaaaatgcaaaaaaaaaaaaaaaaaaaaatagctggacgtagtggtgcgctcctgtagtcccagctacctgggagactgaggcaagagaatcacttaaacctgggaggcagagcttgcagtgagccgagatcgcgccactgcactcaggcctgggcgaaagagcgagagtccatctcaaaaaaaagaaaaaaacaaaaaaaacgaagaagtagaattatgtgtagaacacttttaaaggagcttgcttgagttgaggactttgcagtccaagcaatgagtttttaagatgagtgaaaccaagcaactaatttagcatatagaaaaatataaagaataagataaagcacataccatcttcatacagtaaagcattttcaaattagttttaattcatctctgaaggaagaggaaaagattgagaaaaggatttctttagcattctcagcatgtcctctaattttgtaacctagttttaacttttgtttttttaaaacataatcatatgttttctgtctttattttctagtctgctccatataaaactggaagcaaagggactaaagcccagagagcaagacagttgggcttagaaggagcagccagggcactgcttgagaaaccaggggagctcagtctgctatcgtacattaggcctgacgttaaaggtactggctttatttacagagatcaactttgtttctttttttttttttttaatttaaaaacgtatgttaaaaaactgttttgttaagt

SEQ ID NO: 23350 - DNA, 2300 bp, Homo sapien
atggtttaatagcaatattgcattggggtaatatgtgaattatatacataaatacatctaaaagcattaacttagtgcctggcacaggtaagtaatcaataaaggtaagttattactattattattacatttgccctggggagctagaacccataggggaaggacttgaaaacagataataacatacaaatgataatgtatcagtgaatatcatgggaagagctatatactttggagggataaaacaacctccatcaaatccaaaacatgttttcattactcccaaaccctattgcatagtctcaggtgggtgtccggattattccaggctttcagtctaaacccatgaatttcttggaattcagcacttgagatccaaaagtaaacaatagattgggcaatgtcctagacagaaaaggcagtttttgtgggagggcctgttttatacttaagtgattacaaattttccttgacagcgtgtagtgggagtgactctcttatagaattccaagggaaatattctctggacagtccttattggcctttagagtaggccactacctacatactttaattttagagaacctgcttcagattttattttccccagatgtctgatgtctaaaatcttaacaggctatttatttttgtgattttttttttcttccccagctgtaaggcaaaaatcccttgtggggagaggaaagtcaagcttcaatgctttgctggcccactcttactctcctcctcactgtagtgtggctactacctgcatacccaacccttgaagctagactgttttgcttgggtgtctgtttcctctggctgtatctggttcctactcttggtcgtaaattcctccagggcaggacttatgtcaaaagactttgcagtatattagttcacctttacccttactacctctgcaatgattggaatgtccccttcaaaaattcaagttgaaacttgtcattgtaatagtatgaagaggtgggacctttaggaaatgattaggtcatgaatgagttaattccattatcacaggagggttagttatttcgggagtcaattgggttcacatgcctcccccacccctaccccagtatgatgccctccatcatattttgacacaacaataatgccctctgtcttggacttcccagccttcagaactacaagccaaacaaatctctttctttataaatctaccagtctatggtatttggttacagcagcagaaaattgaccaagacaaccccttaccataaacctgagtagcaaatgcaacatcaaaagtaggtgaatagtaagtagtacattattgttgttgatttctatgatctggtttctcttcccacaatcctgaacggtaaggtgttctctagtatttcttcaggaccataaattgtgaaggagactgtgattgtagtagacaattctaggccttctggaaccatcactaaaggcaacatacgactgtgctaattaaaaggaaaaaaaaatccctaaacaatctcggaaactgatctttcctggccaacaatctcagatatagaagattagatttactaaatttagaaagaatccttttttttttcccccaatcacaaaaattatccagtaaaatctatgctcacttccggtagatctgcaacaaggcacggtcacaggtcatttcaataacttgctaggctcttcagtactcagagtccctggaaataagtcattagcagtggaaagctgctttttagaattttctaaaacaaatccatggggttttgatctgctaaattcgaatgtagacaacagcagccttatttccctacttttataatctaatttatttggctgtatctgtgggcttaagagtttagtgttcttggtaaataacacgtaaaaaaaaagtcatttttcatttctacgaaccagccccaccccggcgctccctcgggatcctcgctctagccccgcctccgtccagcctggctccgccccgttcggtagcgccgcgccttggaggtctgtggctaacttggtccggaagaagcgaggcggaccttctggcgtttgaaaaacttccggcgggaaccggaaggtgcggtggcactcacggaatctcgggtcttctgacgtgccgggcgggaaggtgagctgtgcgtgcgccttggcggtcgtcttgcgggttctcaagagcccggcgtccgggctccgggatctttggggccattaaaaaagttctgagcgctcatttgggcaataacaccccttttttaaaagtgagaagttcattacattttact

SEQ ID NO: 23351 - DNA, 2300 bp, Homo sapien
aattactgtattaggaagctccagagcggttgcaggcaaaggctttgcctgttcttaggagatggccctagaacttttcggatcatttttgggacgtgtttgctgcacttgatatcctgtttttccaggggactgcctccttcctcgcctttaagcctttttaggcttttaagccgcaggcaatgataacctttacccactgaggaaaaagtgatcgggaggcgcgttttaaattttggtttacactaaccagacccgccagatgaacactcagcttaccacaatacctacaaattcccagacttgacttggcagaagggcgagggcggaggttttctttccccatttgcataatccccagctccccggcagcggagccgacctcttcaccgccgccgtcttcgcgggtgtcccagctgggccgcgccccggggcccagcgctccggccctgccctcccaggttcccagtctcgggcgcggggcagtccctcgccggccgccggcccggtcccggctcccagccgaggaaatttttccccagcagcccagggctctcctcacgtgaccagccgcggcggtagcttccagcgagagtttaaaggttacggaggaaattagcaaggacacagccactcgccccccggagggcgcgccccattttcccgcagcccggacggcggctgtcagcgcgctgatcagtgccgaagtcccccaaaggggcaccgataaggaccagcgcaaacaggaacagtcactttgcaaaaaataagcagaccacaaaccaagccggggctctaccgagctttcacttgtcaacaagttctcgcagcctgcgaagtccaggacagatcccaaaggggagaatgtccccaaagaaaggcaagagagaagaacagagtttaaaacttcacccgagccatgcttgtccctcccccttccccctcccccaccgccgtggatcacagcgtcccgggacagagtgacagatgggccagaactccgcagactgctcctgcccgccgcggcccgagtgggggtgggcaagggaagggtcccgaggcctctagggcaacagggccccctccactcccccatccccggctctaaaagacagtgttggccgcagggtccccgagagatacgcggcccggcggggcccatccatggccatccacggcccccggcacgcgcatccagcccagcgccgccgcaccccggggtcccgcgcggggtccccgccccccggctgacccgcccgccgctgcgaccccgggcagcctcgccagctctccaccgttgtctcctcggctcactttttccgtattgctcccccaaccggcaaaactttctatttccccaaacactgccgtgcgcgcgcgcgcgtgcacacacacacactcacacacacacactcacacacactgacgtcttttgcgcatttcctgcattagagggagggagactcgctcgcacaccgacagagggagaggagaccgcgggggagcgcgggctggcgggcggcgagcgagcggcagccgagagcggggacgcggggagcgcggagggcgggcgccggcgcccaggaggtggggccgcgctgagtcgcagtccctgccccgccgccgcgctgcgcaccgcccggtgctggcctgcgcccccgagccggatcggcggccgcccggactccgagcccgcgcggatgtgagattccgggctcctggcgcctcccgatcgccggctccggcgcggcgctgcttcgcccaggaggcggcggccccggctggccgtggggcttgtggatttttaaaaatttggctccgaggaggaccatttcctctcgacatgcatccctccggatagactgaacatccctccgttcacccccccgccccgcgcggtcagaggcaggcgctgagtgtgcgaagaggatccgggttgaaatctgcgcccccggttctcgtccccgccccgtcccaccgccccatccccctcccggagtcgaaatttcccgggattatgtttcggaaaggtaggtaagcgccgggcgcggcgcccgctttcccgcagtccggagccggagagccagcgaggcggcgaggcagcccccgcggcttgcagcggagccgacagctcgtcttctcttctggaggtgcagctggtggtcggggggagagacttgctccaaacacggacatcccccagctctcccccctccctgttttccgttaggaacccggcgaggaaatacatgcactggctgagaatcgcccgcgccagggcgcaacgccacaaggtgtag

SEQ ID NO: 23352 - DNA, 2300 bp, Homo sapien
acaggtcataaattactgaggaattttatggcacagcccaaagcacagattggaggccaaggaaaaataaaactccagcttctttatgaaagtcaaatggaaaagagaagatgcttcctgaaaagaggtgggcactgcttgagggagaggagggaaaggactctgagtgagtctacaggaactccttttggtgtccttgaggagtttatgagaattctcggcctcatcttgataaacttgaaggcaaagtgaagcaggcagttgaactgtttgtctgggaaatggatgagagacatgattatttttggtagcaagattttctgtgtttggattatgcatgttataaatccagtatcttaatttccatttgccttgggtgatccatatgcctaattttaattcaatgctgattaaatgtcagagaaggaaaggaagggatgaggtgagagtttccaagcctggctgaccaggaagacagcaggcagatcttggagactggacctcatcaattataaagagaaaaatcccctgtaagttacaaaacaaaatagcacaagaaaacactctgtagatgtacattaagccgtctcctttccagaaaacgtttccccagaccaggaagacccagcgtgccccttagcaccttagcccaggccttcagctcttctcagctcacctttttctccagtgaataaacatgatgctgtttttaagtctttgcttccttgtttctagcccatgttttactccagagcagtgagggcacttgtgaccagctttggggagatgaatacactgtcatttatacataaatgcactgtcatttatcatttcagaattggagtgaattctaaatgaatcataacagttgcatttaatgaattattctcctgggtattggctaattttaaaccggtctgacgagttttaaggtccatgtggtttgaggaaattcagtggtgcatttcccggtttggtcctcctcatttccctccagccctgctccttttcaacatgccaggctgcttggctgggttatctttaatcactgtaggtgggaggaggggaggcggggaggtactgggcccaaggtcatgccagaagagttcaggcctctgcttgtcatctggcactgctcagaattcccaggggtctccggggagctggccctcagctcacagatgggcctgactttggtgagaggtggccttccaccaggaagcctccagctggcaggataggtgggtggggaggggtgaactttggctgtggaagcgtctcagcattttactcccctttttcaatagttgctgcctccactccacgcttttattcaagcagcaccggtacctggcagtagctcctacaatgttttctacattggctctaaaatcatggcctagtagacaccaatgcttgacttgtttttttgtttgtttgttttgagaagttgtttaccattggcgtgacgggattttcttggccttgtgaagtacagggagcctcaggatagcttcactgggggtgtcattacatggtcattatcagtggtaagtttcccagtctcaagatggaaccctctgttgcttctctgccgcgtgtttggctctgttgaccttccattgctcacctgtgcttgttcccccagcagcctgtttcttgtaactatttgcctcataatgcaagtattctagtgattgaagtgttgctgtgcaaaagagatcttttaaactgaaaccagtgcaacaaaacaatttaaaacattttaataatttcttaaaggatacagagccttttcctctcttaatacatgcaggtcagaatgacgtcaataaggattatatttttgcattaacaggaaaactaagtttataagactagagtatggatagagaggaagatggttctattgggatataaactctgatccatacatggaagtagcccagtccgtacaaacaccattgcctgtttcattcttgactggacatacatattgccccattgtgatgaaaggttgtgataatgaagagagtaatagaaggctcagctcaggttctaaggagggagcgagtaaaggccatgcaggcccatccttctgtggtcagtcactgctggttggggaaggaaggaggtatcaagtgtctccattctttcctcttttcttcatagtttctagatcattcatttaataaatcattagggagcccctgccatcaagctaggtcttgggatataaccaggaacatgcctagataggtaccctaatctcagagggctcatgctccaattgggggaca

SEQ ID NO: 23353 - DNA, 2300 bp, Homo sapien
gaacaaatgcttaaaatttcatagtgaaacacaaatataaggcagcatttttaatttaccgcataggtgtctgggaaccagaaggtggcagtaaagaaacaaagataatccataactccatggtagagtctgactcgagtattattaactaatttgttacctgtttttagtaaagaaacagcaatgttcttcatgaagctctaattttgttatcctttttgaggggttgggaggagttaaagtcttttaggatcattatggatgtttgtagtattttgcttcttgagaaggcaaagacagacatcacctgaaactcctagctgtggcttatgtggaacccagaccctgagggtgacatcatggagaggtgataccttgcttctgggtgtattctcatctccatgtcattttgaatgccagtttttccacttaaaattcaatagttattcattgagtcatttggcaaacttttcttttattatatttcattatatccttcccgtgtatctgatgccatgccaggtgctggagatacagtggtgaactagactagtccctgacctcatggagtttacattatctttggtacaccgtttcccagagaggatttctcagaaccccaatcacttgagcagctgtaagaagaaaggactctgtgacccatagttggagtcactgcaaacgtaacctctcttagtctcaacacacgtatgtttattagcatccttgaggagacctgcaatgaaaacaaaattacctttgtttaatctacttttccgaacttatttgatcccagggtcccccatctctctcttacacacacatacacatgcacccacacacacacaatgcccattccatactgaggaaccctgatccagtggaatttttcctatccttctgatctctcaggagaataagaaatatcgtctgaaaatctggaaatcattctgcttatctttcaagatggacacatatttctttgtctacgaaactttcctcagagaccactatttaataggaatctatccctttttctgcacaagtataagaattactaactcttctcatttttcatgtgtgttgtgtaatgcctaatatttatgggtttgtgtgtgtacagaatcctgaataatagagactcagtgatggagttaactttcttcttttttccactagagcataattttagattcatgagaaatgtatcatattttgtattttccatggtgcctatcacagggcctcacacttgacaggtacccacggacagaatcaaagacttggaagattttttcaaagtcaccttatctttctttatctctctctcttttcctttcttttcttttcctttttttttttcttttctttccttttggtaccagtgagaaaattgggtttcagagaagtaaaactattttgctcataggcactccatcttggcagagtcagacctggcatctcatctagtctcagggactcccaaggtagtggggccttgctctgattcacattgctagtttcttgtgcctgatccagcacagggtcccttctgttggaggaaccctcccacttccccctgtccccagcaggtagccctccctctcactatctgaggtggctttccaggcagggagccactctggcaagttttctttacaccattatcaagaagcccaacatcctaggaggggtccagtttagttgtgagggctctatggagcccctgtacgtggtggatcatgggaagccacgttgaaggtcagcttggtgaatgagtgagggagtgggaatggatgtcttcaatgtcagcagtgttctcctttgtgcgttgtagaataacaaggctaaggattcctcatcatatggcagcttttggagcacaaaatggtgttgaataacaccagggatttcttttatggcagaacagtgatcaagctaacatggatgttgtcatggatggctgtagggtgaggatgggcagagaaggagcttcctctgtagttcagatatttactatcttttctcaggccactgtcaggcagccacagtcacaggagcagctttgcaccaactctctcatgccacctcagtttcatagaatacttagctttatgtaacagatgcatattcactgaatttttctaaactgaatcatattttaacctcatagaaggatcttaacttacttatgaaaggaacctgatgaagaatcagcttataaaccttcaacttaactttttaaaaatgtgactttccctatgacaaaccaacagtttatcatagttttaaagagtagc

SEQ ID NO: 23354 - DNA, 2300 bp, Homo sapien
cctttcctctttaaaaacaagatctaaaaggctatgttctctatgggttggaggtgttgcctcgatctgtcaagcacagtccaggactcagaggctgttgtggtgaactactgtaggcacctggaagccaccaaggtgcccttttcccgcactctagtcccaagtgagggaaataagcctatggttaagggagaactatctaccaatttgaactcattaaaatacataaatgtgtccactagaaatggctggctggagaagcccagtaccaaatcaccccgttcctgaaacccaccagccccatgaaatagttcgctagagagagatttgcaatctttgaattcgttgactatcaacctgtataggtgctccgtgccccgagatctgagaaaatgacaaaatacgtctacttcccggccgggcacagtgactcacgcctgtaatcccaatactttgagaggccaagttgggcagatcacttgaggtcaggagtttgagaccagcctggccaacatggtaaaactcccgtctctactaaaaatacaaaaattagctgagggtggtggtgggcgcctttaattccagttactccggaggctgagccacaagaatcgcgggaagcggaggttgcagtgagtcgagatggggccacagcactccagcctgggcgacagagtgggactcagtctcaaaaaaaaaaaaaaagtatttcccaattcttcgtcagtttttgccctctccccacttcgccttctccaggctcctgaaaagtatctcccccaaccctttctgtgtacacggggaaaacacgtgttcatttttattatggcgctgaaacctacccttctcttcaaatcgcttctgtagatcgttctagtataaaatgtggcaagaggctaaagggagagatatagaccagttctttggccctcgctttccaacttcaagttacacctgtgaaactcatgggtccttccacagccttcaaaaactaagggcgtcccctgtcctctccccagatgtcccttccccatcgccggtagcgagtgggagacagctcagcgcggggcaggggagcactgggcccggagatggaaggcagcgtcaaaagcgccgctggaaaatccctgagcgctaaccgttgcctgtgtgagcccttaaatctacaaatttccaacacctgtagcctttgggtttcccaggacttccatcgaccctggcggcagagagggcaggcctgagatgcagtgacttgagggcacatggccaactcttgtcactccaagatcacactggggaaccagactgacttctccaattctgaactcgccccggcctcgggcggctcaaagggcctcctctgccgcatccccgccaaaaccaaaccgcctggcacaagccggtaagcaaccaccctgctgggagagggaaggaagagtaggcgcagccctagatcaatttccttgcactgcttctcccagacggtcaagtcagctgcgtcccaccgaaaagggcgcatcgcccacgcccgaaacgcagccgctgggggccgagaaattatccccacctggcccgagggccagggacgcaggagcgcagcagcgtggaggggctccgcgctggcccggcgctgcccgcggtcctgccctcgttccaagggcacggcgccggtacgaggacaccgacgctgtggcgcaactgccgtcccccgcagcaatcccggagcccggctcccggccgcccctcggccctgcgcaggctgcctctccccgacgcggagtcccaccccgctacccgccgcccagacgacctcataaacaagtcctcgaagtgcggaggcaggaggcggggcgcagcgcgggggcaggaggcgggccagggtcagggcagaggctgcggccgcgcgtccccattggccgggacgcagtgagccgcccggagctcggcgcgggcggggcctgccggcgcgtgcccgcccacacacccgcgccggtgcccgccccccgccctccgcgcccgccccgtgcccgccccaagccggccgacggagtttttaaagtgggctgccggccgcgggagctttacactcgcgagcggaccgccacacgggtccggtgcccgctgcgcttccgccccagcgctcctgaggcggccgtacaatcctcggcagtgtcctgagactgtatggtcagctcagcccggcctccgactccttccgactcccagcattcgagccacttttttttttctttgaaaactcagaaaagtgactccttttccagggaaaaaggaacttgggt

SEQ ID NO: 23355 - DNA, 2300 bp, Homo sapien
cttgtctacccttccggatctgttcctcagggaagagtggctcctaatatatttagtctctgaaaattaaatgtcccaggagactgttccgtttaaagggagtctctacgttgactcatagccagagtcaaagacccatgtgttccagctgagccccagggtgttgggggggcctagccccaggcatgccttccagaccctcttagggccttctctgcggtttttgggcctcctctgccttggggtgagcccgatggttgtgggtgttcacctcccaggcccttgtctccacagggaatcagaacttcgaggagtcctcagcctatggcaaggccatcctgcccccgagccagccatgggccacggagttgaggagccacagcacccagagcgaggctgggagcctgcctgccttcaccgtgccccaggcagctgccccgggcagcaccacccccagtgccaccagcagcagcagcagctgctccacggtgagcagccctcttatggcgaggacacagagagggctccgtatgtatgactgctgccagatggctgaagggacatttgggacaggtactgtccttctcaggttatcacagagccccctagagtggccgtgacacttacctaccaggtatcagagctgttttcttccttttagtgttcatcccccaactccattgaaataagctccttgaagggctttgagcccccagctcagtccccatacagggcagtaacatcccgtatgtggcacagagctgcacagtttgcacagccctgctggccacagcctgtatcctgtttggtcctcaagacaggacaacctgtgaagcgacagtagcctcattttatgatgaggagactggaatttagagaggttgatgaattgacctaattcatacagcttgttaattagcagcccctctacaaatagttgtgtggtggaatggaattgaacctttgggtccaggaaggtatttcttcttccatgctggacttctggggagaccagtgccatatctttgactctgtccccctccttcctggcccctagcccaatagccctgaagactattacacatctttggataacgacctgaagattgaagtgattgagaagctcttcgccatggacacagaggccaaggaccaatgcagtacccaggtagatggctgtggagatcaggctagggtgtgtgcctgctgtctggtggacagcaaaggctcacatccattcttgtagcctcatccctttgttgtaaagagcagtggagacgtttggccaaggcccaggtcccctaaagaggtaggggtacagggtaatggagcctgtggtcaccccctcctcccactgtcaaatccagctcttccagcatatgtgtctcctacttagatagctttcttagcacacatgaaaaccgaaatgataccactgcacctttctttaaacaggccctacatttaacaagcatagccagatgtataaaacatgtataaacataggggacaattaatccctttataaacacattcatcttgtgattttaaaaaaataatcatttttatatgaaatgcactttaaaataaataacatctgtttgacaatttttcatttacataaaacttttcaggaacacatttattacataaggccaatgttcttgcaaaaactatgtaaacaaggataaggtagagggaggggtacgtgttttacaaaaccccagggaaaaccattaatcccccatttgtcttagtcttgagttcaaccagatttctgccttgccacttagtttgtttcttgatcctacttggcacaaatcccagctactctgcaaaacatgcccaattttagcttttctatcaccctccctcctcagcactcctgtagtatatatcatgtggcacttaatcacagctatctgcttctgctccttaaagattgcttagtattgcagtcattagtcagctgacacccactgagggtgtcagtctctgaagttagaaactgttttccgcatctgcttgtattcccctgcttgtatcatgcgtccgtcatgatactgccaccctaagggatgatctgagtatctgctgattggaaccaaagtctctgtccctggggtctggctgttaggctgttactctgcgagagtccacagatggacctgggcacttactgcttgcttaggcccgtgccagcttacaggagggagaagaggacaaaaaaaagccacagtgtgcaccacaggcctaagcattgtaggacaaggataaccaccacaggctggagtaggcag

SEQ ID NO: 23356 - DNA, 2300 bp, Homo sapien
attccataaacagaatagacagatattcccaataaaaataaaattcagttatctccgatgtttcatcagctttagccatatataaaaccacagcttttaaatatctttcaattttgtagttatatagctttgtcatggtaggataaagtcaacagtttcttaatttatggctttaaatatatttatatatttaatatataatttatataatatataatatatattatataaatataatataaatatatattatatataatatatataatatataatatatataatatattatatatatttatattatataaatataatataaatacatatattatatataatatatttatattatatataatataaatatatgtattatatataaatatataatatatataatataaatatatatttttatatatatatttatttatatatatattttttgagacaagtcttgctctgtcacccaggctggagtgcagtggcaccatctcagctcactgcaagctccacctcccgggttaatgccattctcctgcctcagcctccccagtagctgggactacaggcgcccaccaccacacccagctaattttttttttttttggtatttttagtagagacagggtttcaccgtgttagccaggatggtctcgatctcctgacctcgtgatccacccgcctcggcctcccaaagtgctgggattacaggcataagccaccgcacctggctgaatatatatttttttatatatagtatgatatatatgtactccatcaatactcttgccctagactccacatattttagggcaagcctttatactagagaagataaatacagtcaaaagacagttgtttaaaaagactaataaaattgataaatcttgatgagagtgttcaaataaaaaagaaagctcaaatatccatattatgaataaaaacaggggcatcactatagacccaacagacattgatatctcatgatatgtcataattatatctcataagagatattccgaataacttaaaacaaataaattttaaaatttggatgaaatagacaaatttcttgaaaaataaaattcaccaaaactgccaaaagaaatagcaaatctaaacagtattataattttaaaaaatttaatatataaaccttcccacaaagaaattcttggcccagatgcttataagtaaactttacccaagatttcatgaagatattttgtcagtcttccataaacttaggtttaattaaggtattttgtcagtcttacataaactttccataaaaccaaaagagacggcaagcttcaaaactgattttataagactggtattatcttgatatcaaaacctgactagtatattttaaggaagtaaaattacagaccaatcttactcaagaacataaatgagaatttcctatacaaaggaacgaatgaatgtgtacattaatgaatgcatgggtttatttcctggtttttcatagacctacaacagaaatccactcagcctgacaaagtaaggattttaataccagtcttggcacataccctcaagaacccctggatgctaaaatggctcaaagagctaacaaagtctggacaaaccaacatgcctggtttaattagtctgtaggaagtccagatatcggtatttcttaaaagccttccagagttccgacagagatcacggtgagactctgagctccgcggctagctcccctggggccctccaaaccctgggccaacgggtgagttgggggagccccaggacagactggggcctccgccctgcagatatcccagagcccttgctatggctcccaccggccacacccaggccttgaaggagcatcgaccatattcctcaacccacctcggtgacctgatggtggcggcagcctctcccagccgaccccgccgaccgctggatctccagaggacacccctgccaagccacccggatgcagagcctttgagtggcagctgccgtggccggccggaagcatggcggcggcagggaggcccctagggtgtggcagggcgggtctacggaggcctctttaggccacagagcaacgtaaagcctaggcctgcagagactgctcagtcacagttgaaggagacctactgagtcctgaggacaaccaacaaaggccttaacggcacagaaggtgagcaaagtcctggaggagggtgagcagaaggatcagtggccatcgcgggttggtgttagttctaccagacctctatgtcgcaagagaaatggtaggatgacaggccacagtt

SEQ ID NO: 23357 - DNA, 2300 bp, Homo sapien
tcatggtgctgtggatttggtacttccccaagatactcacaagctcatgtgggcaagggcccaagaagagatttcccagctcacacttcctctaaagatccttcccaggccaggcatggtagcccatggccataatcccagcactttgggaggccaaggtgggaggattgcttgagcccaagaatttgatatcggcctcagcaaaatggtgagacccatttctaaaaatgaaataaagacctttcccacgcccacagatatacaatcaccagtttggaaatgtctgcttcccaaaggtcatatggagaggcttctgggatgctggtaatgttctcttgatctggatggtggttacaggatatttgcctcgtaatattcattaagccagacattgccgtttcatgtacttgtctgactgcattttgtatttcataattttgaaaaaggcaaaaaagaaaaaaaaaagcctcccttccatccccaagcccttaatccaatcaatccacgttaaatgaacacctatctgcacccagcccctgctagggaaggagagtctcattttcaaagaagtttcctagaggaagcaaaaataactggaaaaacaaacaccgaatccagctctgaattgtatctggaaaacagaccatgctgtcatttggaggaggagtccagagatcaaggagtggtggggcttaaactgggcctgaatatatgggcaggatttattaagtggagggaagcattatagccaagacaacagcatgagccaaagctgttaagtgggaatgaggctgttttagcggggaggccccagtcgtgaagggttcacgagagccgagtctggcttggagggccccttctgctgtccccagcacaggcggagtgggtgccacttagagcatccacctgcttcagcagggtagaagtgtctgagccctcgtataaggacaggcatgtgcgtttcacatttcttggtttgttttgttgttttgctcaagtcacaggcccatgtgggctcataatctccatcccagacagacgagaagttacatctgctagacacattacatgggcacacgctttcctgcagagggacttgctcaatccctgccttttaaccctgccctgccctgcagctgccttcatgtcccagcactaatgagctatttagaagtgggagtgcagggaggggacacaagaactcaggatgcagattcaggcacaaggatgtgtgacaggctgtgagatgacttccacctcatccccagttcagaatcctgggattcaggagcttccaccaccatcacaaaggatatgactggtcacctgagactgtgggcaaaggtaccatgaagtgttgtggagaggagggtcaccaactccaggcagggctgctaagtttattacaaacaggcaagactagaatatgtttccactttagtgagtggaaacctaatcattcataggtatcctgtacacacagaacaactatgatgaagagtgaggcctaaatcagaggagacgaggacaataatagtagtagtggtcatgatgataataataactaccagacatgaagattaaccatgcctaacattgtgttaaacgtctcacttctttcatttaatccttacaataatccaatgatgtagctgctattatttttattatacagatgaagaaactgagggcttgaggggtatactgctttgccaaagtcgtacaaatggtaagtgcagaaccaggatctgaattccgtcagtctgactgcagagtccacgccgacaccgtggaagctggtgatgcccattaggccctgtctgggcatgaagaggatgccctccctcatgagctggaacacagcatcccctgttgtgggtgtggctctcttaaagaccatctggtgaattttgcttgtgctggtttcttattaaacaaccttcagatttggcttcacgtgcaactcacatagagggaaaggagaccatgatccgccaacatgacagctgtatttttcattagtaaattagcaaactggctgcctgggtcaccatgcatacctgttaaggtgagcccgccccagagctaaaggctaccatgtgccaacttaactgagattctgagtgtgcaaggataacccccgtcatggccccgggtgccaaggaaatcccttttagcctcctcttggcagacttggccagccttccccagtgacagcctggctctttggattcaagctgcctggtcagactgcaagggtcatctgtacaaagaaggaagcaacagtgccaggttccagc

SEQ ID NO: 23358 - DNA, 2300 bp, Homo sapien
ctcccaaaatgttgggattacaggcataagccacctcacccagccaaaaaatactttttgaaagacagggcctggcgcagtggctcacacctgtaatcccagcactttgggaggctgaggcgggtggatcacgaggtcaggagatcgagaccatcctggctaacacagtgaaactccgcctctactaaaaatacaaaaaattagccgggtgtggtggcatgcacctgtagtcccaactactcgggaggctgaggcaggagaatcgcttgaacccaggaggcagaggttgcagtgagccaagatcgcaccactgcactccagtctgggcgacagagtgagactctgtctcaaagaaaaagaaaaagagaagaaagaaagacagaagaggggatgccccacttccacatactcaatatttaaaatcccccaaaggagtcattacttctctacattttctcacccacttcctgggccctgtaagttgccctgtgctccaagctctggaaagccccttctcctccttcctcagtctgcaatctctaagtgtctggaggcccacgtttggtcctgcttcccttttggctaggggtaggaagcacacacccagacacatctgacctcatatttgcttacaaatcccagctggaatgaagaacagttgcttcagggtctgggcagggctccaggttgacagacatattttgcccaccaagaactccctgcggctgcctcctccctctcatggtgctgtggatttggtacttccccaagatactcacaagctcatgtgggcaagggcccaagaagagatttcccagctcacacttcctctaaagatccttcccaggccaggcatggtagcccatggccataatcccagcactttgggaggccaaggtgggaggattgcttgagcccaagaatttgatatcggcctcagcaaaatggtgagacccatttctaaaaatgaaataaagacctttcccacgcccacagatatacaatcaccagtttggaaatgtctgcttcccaaaggtcatatggagaggcttctgggatgctggtaatgttctcttgatctggatggtggttacaggatatttgcctcgtaatattcattaagccagacattgccgtttcatgtacttgtctgactgcattttgtatttcataattttgaaaaaggcaaaaaagaaaaaaaaaagcctcccttccatccccaagcccttaatccaatcaatccacgttaaatgaacacctatctgcacccagcccctgctagggaaggagagtctcattttcaaagaagtttcctagaggaagcaaaaataactggaaaaacaaacaccgaatccagctctgaattgtatctggaaaacagaccatgctgtcatttggaggaggagtccagagatcaaggagtggtggggcttaaactgggcctgaatatatgggcaggatttattaagtggagggaagcattatagccaagacaacagcatgagccaaagctgttaagtgggaatgaggctgttttagcggggaggccccagtcgtgaagggttcacgagagccgagtctggcttggagggccccttctgctgtccccagcacaggcggagtgggtgccacttagagcatccacctgcttcagcagggtagaagtgtctgagccctcgtataaggacaggcatgtgcgtttcacatttcttggtttgttttgttgttttgctcaagtcacaggcccatgtgggctcataatctccatcccagacagacgagaagttacatctgctagacacattacatgggcacacgctttcctgcagagggacttgctcaatccctgccttttaaccctgccctgccctgcagctgccttcatgtcccagcactaatgagctatttagaagtgggagtgcagggaggggacacaagaactcaggatgcagattcaggcacaaggatgtgtgacaggctgtgagatgacttccacctcatccccagttcagaatcctgggattcaggagcttccaccaccatcacaaaggatatgactggtcacctgagactgtgggcaaaggtaccatgaagtgttgtggagaggagggtcaccaactccaggcagggctgctaagtttattacaaacaggcaagactagaatatgtttccactttagtgagtggaaacctaatcattcataggtatcctgtacacacagaacaactatgatgaagagtgaggcctaaatcagaggagacgaggacaataatagtagtagtggtcatgatgataataa

SEQ ID NO: 23359 - DNA, 2300 bp, Homo sapien
tttttttttttttaccacttggacattatcttctttgctcatgggaaagtgaggtttctgttgcggtctgattggtgcttccagctaaggcattcatgggctgacaggggggcattctggatagcccccctccccatcccacatatacaccaagtgggatcagctccagagctctaagtattcctggcagtcagttttggcaactctgtgggccaaaagaatgaggtcactgtcaccaatgaagtcaccactgcatgattcatcggacatcagttccccactgggaatgctatgacattcccagagcttctcctactcttagctcacatttatagatgagaaaacggaggcccagagaagggaagtgacatgctcaaggtaacactgctaaccagggtcagagctaggaccaaactcagctctcctggctgagtgctctccttttcaagctcctggatagaccctcctttcaggacacgagtccctgcaaatgctgcctgaacaaatggtcctgcaagccaagaatggggcaggccctgctctctttctctctaagagcaagtagcagaggccggtcttgaaccaggaactgaccttaaggcacttttctgccttcctcaacctgttattcagtccatacaaaatatcttccagattcattgcatctaaagcagctagcaatgcgcatacctagtcgcagacacgcagggccaaagggtgggtcctggggagaggctcaatgagaatctgcaaggaacttacagtgatttccgaagacttcctgggagagtggaaatcagattcggagtttgagagttcaggcctcctggatagtgaggaacgggaatacaacagtgagcatttccccaagtgtgctccaagtccttgagtactgggagcagctggaagcctttgggacaaccgcttcacctttctaggtctcagttttcttccctacaacctaagggtgatggtccagttgacctccgcgctgcctctcaatgctgcatttttctaacgctgtgaatcgatgaaaggaagcgattacctctagtcagcaagttgaggggaggggtgcggtgtcagcgcagagtgcacccccgccccaatgcccagtgttcaatgctgcattcttggccagtgaacaggacctggccagatgggtgtgttccggcatcgccaggcagaggggcaggggttgccgcctcgagcacaggccaagtttcagagcactagtgtgtatcagttctccgggattacaacggaatacctttgaggaacattggggaccgaaaggcgacctcggagaatgtggcctccagggggagcccaggtacatttgccgggtccggagccgacggggtatcctttttctggctggtgtgtgtgtggaggggcgtgcttcagtggttcaacacgctgtatctcccttagttaccggtttcatagtaaatgattaaagctcgtgctacggaaggcgtggggtggtggtggtgggggggaccacgcaataagccagggttcctgctttccagctcaaggaccgccaccaccccacgcgccttaaatttttttttttttttttttacccttttggtctctcctccttgatttctagttccgttgtgcacttagaggccgagaggatggctctggccttccgggtggaggtgaaatatgcatgtataatttggcatgactattgcgtcatcgtggaggtcgtcgtggttccccgagaggcctccacgtcttctcccagcatcggggcctttggacgcttccgggcgctgcgggcacttgcgcgaggagccctcggctccccaggcgactcccctcctcccctccgcggtcctcggctcctcctcctcctgcgcgcccctccgcgcggccctcgcagggagtggggctcgggtgcgccggcagggccgcgcggcggcagcaggcgggggcgcgtggcgcgggccgcgctcggggaggcgcctgggcccgccctcctccggggcgccgcgggaggggcccgggttggcgcggggcggggagagccgcctggcccctcccctccgccgccctccccaaagttgccgtctcccccggggccggccggtcttatgatccggcggatcctcctggggaggccgggccggggagagggcgcgggcgccgagtggcgggggcagcgggcgggcgcggcgaccggggccggggcggggatccgggcggcgaccgcggcggcggcagcgccccgggcccgccgccccctcccctcctgcgaggggagccgctgcatggggccggggggg

SEQ ID NO: 23360 - DNA, 2300 bp, Homo sapien
cactttgcaacaggagttgggacccacacaccaggcgccacacagaacgacccacacaggcaaaaactttcacagcccaggggttcacatggggggggcttatccggctctgtttgttttgtttgttttcctaatttgctgacttgttacaagaaataaagacctaatccaggggaagcccgtcgcagacacaccctcccacctagacacctcggtttccaaaggcccttcgcagccacaaagaactggggaacaggaggggggcgtcggccagaggccaagacactcacctgtccggccgtgtcatagagtcctaggaggtactgcttgccccccacggtgacgctgactgcaaggacagaagtgggggcggggagagaagctcacagtgacctgggctctggggcaatttcgctccccacccggaccctcctctcccaacccagctagaggcgtgggggcgctccccgcgagatgtcacccccttttcccgtgcggccagctcactgtgaaccggcaaagggccggggtgtgatgtggtccccagccgtccacccccttctcccaagtcccgtagccacgtctcgctcggtcccctcgaatatttcccccggggccttggggcagtaggaaaggggatgtgggaaggtcaaggaggacggcccagggcgccgaggggtaggaagtgcggggagcaggagccgcgtagggggcgggtgggagagggggtggatcagcgggcgaggggttgccaggagcgaagcttcgggggtggggccggccgcctggcagagggcgcggcgggggaggggagaggagtgcgctctggggaggcggcgagggggctccgccaaagttgctccaaagttcccggcccggggagcggccccttagtcagcagttccgaggcttacctgcgtagtggtcgaagacggtgggcacgtactcctccgggaaggcgtcgttggcatagctcatgagtaggcacgtcttgcccaccgccccgtcgccgaccaccacgcacttgagcatcagcgcgccgggcccgtgagccatgctgctgccggccggcctccgggcatggtccccccggagcccccgccccggccccgggctcagccccagcccgcctggggggtccgccgccgtcgccgccgctccgcgccgcagggccgcccccccggccccatgcagcggctcccctcgcaggaggggagggggcggcgggcccggggcgctgccgccgccgcggtcgccgcccggatccccgccccggccccggtcgccgcgcccgcccgctgcccccgccactcggcgcccgcgccctctccccggcccggcctccccaggaggatccgccggatcataagaccggccggccccgggggagacggcaactttggggagggcggcggaggggaggggccaggcggctctccccgccccgcgccaacccgggcccctcccgcggcgccccggaggagggcgggcccaggcgcctccccgagcgcggcccgcgccacgcgcccccgcctgctgccgccgcgcggccctgccggcgcacccgagccccactccctgcgagggccgcgcggaggggcgcgcaggaggaggaggagccgaggaccgcggaggggaggaggggagtcgcctggggagccgagggctcctcgcgcaagtgcccgcagcgcccggaagcgtccaaaggccccgatgctgggagaagacgtggaggcctctcggggaaccacgacgacctccacgatgacgcaatagtcatgccaaattatacatgcatatttcacctccacccggaaggccagagccatcctctcggcctctaagtgcacaacggaactagaaatcaaggaggagagaccaaaagggtaaaaaaaaaaaaaaaaaaatttaaggcgcgtggggtggtggcggtccttgagctggaaagcaggaaccctggcttattgcgtggtcccccccaccaccaccaccccacgccttccgtagcacgagctttaatcatttactatgaaaccggtaactaagggagatacagcgtgttgaaccactgaagcacgcccctccacacacacaccagccagaaaaaggataccccgtcggctccggacccggcaaatgtacctgggctccccctggaggccacattctccgaggtcgcctttcggtccccaatgttcctcaaaggtattccgttgtaatcccggagaactgatacacactagtgctctgaaacttggcctgtgctcgaggcggcaacccctgcccctctgcctggcgat

SEQ ID NO: 23361 - DNA, 2300 bp, Homo sapien
ccccagagcaaaagtgggtttgggaagaggctgaagctgggacagggagacagagagaagaccttggccctttagaagcacagcctggccacctctgatgtgcaaaccctggccagaggctgcagggcaaagtgtgcatcttctttctgcacaattaatctctcccaaagaaaacccagacaaagtcacctggcccttctgaagtagggccggggggaacccctcctcctccaagattcactctaaactcctaacccttcctccccaccccagggagtggctacatggttgttgtttcttttcttttttccctgtggtcctttggtaacaccacaaattacgttttcagggactggagtcccagagtgcaatgatgttgtaataaacataaccaggaccaaatgccttcccatcatattagatgatgccatttcccaccaatcaggctccttgggcaggcagaccactcaccaatgagggaccagacagaggctgtgggggggagacctggtcatctgcaactaaaaataagggcgcttcatgattggctgctgccactttgcaacaggagttgggacccacacaccaggcgccacacagaacgacccacacaggcaaaaactttcacagcccaggggttcacatggggggggcttatccggctctgtttgttttgtttgttttcctaatttgctgacttgttacaagaaataaagacctaatccaggggaagcccgtcgcagacacaccctcccacctagacacctcggtttccaaaggcccttcgcagccacaaagaactggggaacaggaggggggcgtcggccagaggccaagacactcacctgtccggccgtgtcatagagtcctaggaggtactgcttgccccccacggtgacgctgactgcaaggacagaagtgggggcggggagagaagctcacagtgacctgggctctggggcaatttcgctccccacccggaccctcctctcccaacccagctagaggcgtgggggcgctccccgcgagatgtcacccccttttcccgtgcggccagctcactgtgaaccggcaaagggccggggtgtgatgtggtccccagccgtccacccccttctcccaagtcccgtagccacgtctcgctcggtcccctcgaatatttcccccggggccttggggcagtaggaaaggggatgtgggaaggtcaaggaggacggcccagggcgccgaggggtaggaagtgcggggagcaggagccgcgtagggggcgggtgggagagggggtggatcagcgggcgaggggttgccaggagcgaagcttcgggggtggggccggccgcctggcagagggcgcggcgggggaggggagaggagtgcgctctggggaggcggcgagggggctccgccaaagttgctccaaagttcccggcccggggagcggccccttagtcagcagttccgaggcttacctgcgtagtggtcgaagacggtgggcacgtactcctccgggaaggcgtcgttggcatagctcatgagtaggcacgtcttgcccaccgccccgtcgccgaccaccacgcacttgagcatcagcgcgccgggcccgtgagccatgctgctgccggccggcctccgggcatggtccccccggagcccccgccccggccccgggctcagccccagcccgcctggggggtccgccgccgtcgccgccgctccgcgccgcagggccgcccccccggccccatgcagcggctcccctcgcaggaggggagggggcggcgggcccggggcgctgccgccgccgcggtcgccgcccggatccccgccccggccccggtcgccgcgcccgcccgctgcccccgccactcggcgcccgcgccctctccccggcccggcctccccaggaggatccgccggatcataagaccggccggccccgggggagacggcaactttggggagggcggcggaggggaggggccaggcggctctccccgccccgcgccaacccgggcccctcccgcggcgccccggaggagggcgggcccaggcgcctccccgagcgcggcccgcgccacgcgcccccgcctgctgccgccgcgcggccctgccggcgcacccgagccccactccctgcgagggccgcgcggaggggcgcgcaggaggaggaggagccgaggaccgcggaggggaggaggggagtcgcctggggagccgagggctcctcgcgcaagtgcccgcagcgcccggaagcgtccaaaggccccgatgctgggagaagacgtggaggcctctcgggg

SEQ ID NO: 23362 - DNA, 2300 bp, Homo sapien
agcttcacagaagaacatgaaaattttcctccaacttttttttcttttttttttcaagcagagcctttcacttagggaccaactgcttgtagatgaaataaatcaacattaattacttctagcctgatgtaatatggctggagaaaaggggtctctggaagccggtattttgtttaacttacattctaggtgtgtatataagttgtcgctctataacttctgctgtggttccaacatctatatctgaaaggtggaagcagctgctctgttacaattttcatgtaacacgcttggattctaggtctttcctctttaacacaacttaaagaaagtttcttgtggtttggtcagcatacacacttctcatttcatttgatgtacacagccaaagtgggaattaaaaaaaaaaaattaccaactagttcagagagctaaattgagtctatcattatggcaaagtctgacccaaaattttaatttgtaattttagcatgtgtctcatgcactttggggagcgtcaaactaaatctacaattgccagaagccttgttacagtttaatgcacattaactaaaatgtgtacatttttagtgttcatgataaatgcagttatgaccttattacacttttggcattctttaagaaagcacattaagctttaatatagaaatatttaggttacacttgtgctcaagtaataataaaacatttgttcttttttgatctcatacattctctcctcaggtatggcccatctcctgtacgcttggagcgacctttggctacgtggctggccttgttatttcaccactctggatatactggaatagaaagcaacttacatacaagaacaattaactggagcaaagggagatatttctttgtgcagattctgtaagggctgggcagaaatgtgtatggtcaaagccaagcagttccatttacagctctgttttttacgtagttacaacatgatgtgattgtagctttttaaactatgaaacccctgagagattgtaccttctagttgaaataaagtatttataatagattgtggcttcagatgctgcttactgcttcttaaacctttaaggaacattcttaatacactttatagaattctgaggacaggttttgttttctttcaagttttgaactgcttcattacctataaaaggtctgggtatagctgtagcatttcatttgctttctgagagaaatggacagtttccttggccactgaagatgtttctcacgtaattaaacaacagtttatacatcttgatcctattcttttttttacagtgtgtttctttggagttaaaatggctatgatagcctcatcaaaaacagtcttcaatcccttctgggttaaagctgaacattccacatagcagcatgctcctatctgggagggagaaaaaaaatcacaaatatataagatcatgtttatacaattggcatgacataaacacatcattataaagaaaattataaaatacagctatgcaaaaagaatacattcatcatccatgttcataaccccagaggggattttaaaatactagtatatgtccttccagactttctatgaaaaattatttcactcaccacatatttactgggtatctactatatgtcaagcactgtttaggtcctggggatatgtcagtgaactgaacgaaagagcagagtccctgctgtgtggcgtccacatgtgctgacatctgctgggtaagaggcacaggggagggaatacagagcagatggttgcaaatgctgtggggaaaaagcagagtgagggaggcggggagtgctgaggacaatggtagtgggggtccggggaggcttctcaatggggaagtttgagcagtgagggatacctaggggaagagctccaggcagatagatcctgatgcaggagcatgcctggagcagtcaaggaacaagatcacactgaggatgtggtatttgagcagagacctgaaaagagtgaaagaatgaatcatgtccatagggaagaacattccaggcagagggaacaacaaaagtacaaaggttctcaggtagaactttgagggaacaacaaaggagaccaggaggcctggggaacaatgagtaaggcagagagggaacagaggcttgtaggccactgtgcggactttggcgtttagtctgagctggggacccactggaggattctgagcagagcagtgacatgattgcgcttacatttttaagacttactctggctgctgtgttgagaacagatgaccatggggcatagacagaagcagaaa

SEQ ID NO: 23363 - DNA, 2300 bp, Homo sapien
ctccaagaagagtgatggaatgaagacacttaggataattgaaaatatgcataaaagatgggtatacagtagtctcttgatatcgttatctttcatggtgttttcttggatggctagctaacaaaaaacaagaaaagaagagcatatgcaataacgactttttccattgtcttaaatgttttgacccctaaaaataggtcataaagtcaattttctatgagcaatgtatttgtttcaaaacacaaaagatgcagacgtgtagatgcacatacagacttagctttctattctacctttgattttcttaatatggtacaaacatctctcagagcctaaaaagaacaaatttactaatttcttaaatattgtgactggtttctgcaaaagggtcatgtcctaggaccaataaagcaattcatttaaacttttttggccaatatcaaagagatgaaatcaactgtgtggattaaattatctactgcctgttgcaattataaccaaagtttatttatgcggtttctagaatgcataggttataattccaacaactccacaaatatacttaggctgaattgttggtatttttttttactcttgtctaacattacagtagttcacatcttctagcaaatgccaaatgacaccaagtgcacattccaatactcaaatggtggccagtggaatcaagagttcaaagagcaccacactaaaccaagggatcccaatgcttcagaaataccaagatgacaacgtctgttacaggtgttaaattccaaccaaaagtagagcacgaacggaaggaggaaaaaaaaattaccgtctctaaaatacacgtatttaaattacctgagagctgactaattgtactgctaaacaaggactttattaatttaaagtaacagtcaatatgttacattatggagaatattccagaaaatagaaatatctcagaaaaaaaaatactatacacacacacgcacacgcgcgcgcgcgcgtgggcggaggggcgcccactagtgagaaaagcagaaaggcgaacctgggccttatcctaatagctctcatttaattcacccaatgcttttcaaaggcagatattttactgataaggaaacacggcaaacaggtgaggtggtccaaggtcccatgcgctacagccatctctctggtataaggaaatacactaggcatgaaaagcaaacggatggcaagaagggacaaagggaaagtttcccatagattctatcttaagctgattgagggagggcaaggggatcaggaatccattctctcaacagatagcccttcagcgatttttctgagccaccctcggaatcgcagctgccagcagcagatgtggatgtaatacagtgagcaggacccaaactcaaatgtttgctgaatgaatgaaggaaccagagtaagcaaagagggaaccagcaccggttaggccctggcgtgcccccaggacgcctgcagaagtgccacgggcatgacccggcccacctcgctacgcaccgcagcggagagaaggctcttccgagcggcacccagaggagccttcgcgggcatcgccgcaccttcaccggcagccccaccccaacccgggtccctcgggattctgcccgagcctacgccggcgcaagcgtgggcagcgaggaaccagctgagaggcaggatcaaagagcatgggagttgaagacaagggaaaactgggggacagaggcgaaaactcggatccgaaagggggtctgtccatcagggcacgccggaagagtggcgctgagctgacggcgagcgccggcgggtcggggcgccaaggctcagggctgcttcggcaattcgcgggggtagcttgcacctcgtgaggcgagacgccgagggcgtccagcggggcttacctaactctccctcccgcggaagggaagcggggaactactgcctcctaccatcaggtacgacgggcggcccaggcccacgcgcaggcgcagggctgtggggcggagacccacgcctaacagccagtcgcagaaagggaggggcgggcaaaaggggcagcggctttccaggtttggggtaggcgggagtatgggcttagaagccggaagtgggttgacgtagcccggaaggggaatacttccaagttgtagtgttgttgttttcagcctgctgctgctgctgctgttgcggctaggggaaccgtcgtggggaaggatggtgtgcgaaaaatgtgagttaaggggccgcttctgcgggaggaggaggctgggagaacctaactgagctctcccgggaacttt

SEQ ID NO: 23364 - DNA, 2300 bp, Homo sapien
aaatttctcctcagaagagtgcagaaattaaatacagactctaaataagctgaatcaaatcaaatactctgataatcaaatactgtgatattgccatcacttgacaatcatttaataattttgctatctcctgatattaggaacccgtacaagtaactgagaactaaatagaagatattaaatcacttgaggacccagtattctttaatgtttaatagataaaatactttgaacacataacatttcattgtacaaataatgtaaaaactaaggtattattcacagtaagtattcggttaaattcctattttctaaaagaagaaatacctgtggtattcctagcaccatctttccatgtatctggagtgataacagtaccaagtttcttttcacctgttagaacaagatagtaaaaggaaaattaaactttattatttaataagtgcattacattgtgcctaaggttcacaatggtatcgactatcaatggtattaccgtaggagcctgttaatgctgggagagcagccaatcaactgagactcatattaactgtggccaatgaatgactgaccctcagtaaaatgcgtaggataataagatgacttataataagctttcactgttggtttatattttaaacaaatctggtaagtctatttgttccataaatatatactaagcatctatcatgtataaactatacaaagtgctgagaaaaatgaagtgatgaatcagacacaattttaaagggattacagtacactaatttctttaacagcaatctgtaacctgggttccacaggtggatcttaagagatatgcgaacaaggtggagttgtacacaaaccttttatatattcatttttttttcctggcaagagtctatagttttcatcagattatcagagggatcagagaccttccccccaaaaagaaccattcaaccaaaatgtaagcttaaaaaataaaaagtataataatcgacagctaaagtactagaagaaattccatgcaggaagaaataaccctagctaaggaaatccaagaaaagaaagtttggggagaaggcaagacagaggatttggatatgtggcaataggactgtgaacaaaaaggagtaaagaggatgaaggcaaactagataaaggacacattctgaggaaaggcatagaaagcttagagtacacatgggcacaaagagtattttgtttggtcaaaatgtgaagaggataagcctcagtgaagatgaagctggaaaaataagttggggccttagtgtggagggtcctgaacgccaggttccaaatatagaatccccaaattattctctgcacactgagaatttattaaaggttttaagttagggaaataataatttgcacttacgttgattttcaattcaagcatcttctgggcttactctaagccatatcctggcataatgactaatgagaatgaataaggcaaagtccttagtctttggttctagtgtctagcatttggcaggagaacaatacttcttacatgaatagaaaggaaagatcaagaattgccaagacagaaaggtgtcgttggggtttaactgcacatttttatatgggaggagagctgatgagatctggggctgggggaaggcaacagaaatagacaaggaggtgcagaactgagaccattctgagtacaaaatatataggactgtatggtcgttgggaggtgcaaaaatggtcaaagggtagggtagaaagacagcggatagaatctgagacctgtgggcgaagaaaaaacaacgagaaagcaaagttcccgggagagctcagttaggttctcccagcctcctcctcccgcagaagcggccccttaactcacatttttcgcacaccatccttccccacgacggttcccctagccgcaacagcagcagcagcagcaggctgaaaacaacaacactacaacttggaagtattccccttccgggctacgtcaacccacttccggcttctaagcccatactcccgcctaccccaaacctggaaagccgctgccccttttgcccgcccctccctttctgcgactggctgttaggcgtgggtctccgccccacagccctgcgcctgcgcgtgggcctgggccgcccgtcgtacctgatggtaggaggcagtagttccccgcttcccttccgcgggagggagagttaggtaagccccgctggacgccctcggcgtctcgcctcacgaggtgcaagctacccccgcgaattgccgaagcagccctgagccttggcgccccgacccgccggcgc

SEQ ID NO: 23365 - DNA, 2300 bp, Homo sapien
gcactttgggaggctgagatgggtggatcacctgaggtcaggaattcgagaccaggctggccaacatggtgaaaccctgtctctactaaaagtaccaaaattagccacgcttggtggcaggcacctgtaatcccagcaactcaggaggctggggcaggagaatcgcttgaacccgggaggtggaggttgcagtgagctgagatggtgccattgcactctagcctgggtgacaacagtgaaactccatctcaaaacaaaaacaaaaacaaaaatacacacacacaaacaaaaacccattaaaaaaatgccaaaagacttgaacagacacttctcaaaagacaacatacaagcggttaacaaacatgaaaaaatgctcaacattactaatcagataaatgcaaatcaaaaccacaatgagttacaatctcacaccagtcagaatggctattatcaaaaagtcaaaaaaataacagatgctggtgaggctgtgggaaaaacggaatgcttcaacactgtagaagccagtgcagtgtagaatgcgcctacactgatggaaatgcaaattagttcagccactgtgaaagcagtttggagatttctcaaagaagttaaaacagaactaccatttgaaccagcaatcccatgactggatataaatccaaatgaaaataaattgttctaccaaaaagacacatacactcacatattcatcacagcactattcacaacagcaaagacacagaatcaacctagatgctcattaatagtggactggataaagaaaattggtacatatacaccacagaatactatgcagccataaaaaagaatgaaaatcatgtcttttgcagcaacatggatgcagctggaggtcattatagtgaatatacacaggaacagaaaaccaaagaccgcatgttctcacttatcagtgggaactaagcaatgggtacacatggacataaaaatgagaacagacataggggactactggagggaagaggggagggaaggggtgaaaaaccacctgttggactctatgctcactacctgggtgacaggatcatttgtaccccaaacctcagcatcacaaaatatacccatataactcacctgcacatgtacccctacatctaaaataaaagttgaaattataaaaacaacaacaacaacaaaaaaaatgaaatgtgagttaggcaagtccagattctagctgatccctgagaaatgtacttttctccaagtcaatgaatccaatctttaatggatctgggatgctctctgaccaggtcctgttatgagtttcctgtgttataattaaaaaccccaaactgattaagcatgagaggatacttcctgctctcagataaattatttattatattctgtattatccttgtaatttttctggatatgaataaataacaatgtatctcagaaaaacacattttgaaaagccttataaagttaaaactttaaatgcttttcatcaaaatgttatgaccaataaaaatgccattcatgtatctcatcacactttctatacattttgtagtgatatgtatttatacatactgcagttggaaatagggaatgcttttttggtttcccacggtaggctgcaggttttaaaagcagaagtcctgaacctctgaaggcaacataagaaaagtattcatttgaaacctgtagtgttaaaaaaaaaaaaaaaaaaaaaaaaaaaagagagaggccaagttctgtggctcacacctgtatcccagcacttcggaaggctgaggccagaggattgcttgagatcagaagttcgagaacagcttgggcaacatagtgagtcctcatctctactaaaaataaaaactagctgagcacagtggcacacgcctgtagtccccagctacttaggaggctgagggggaagaattgcttgagcccagcagatggaggctgcagagagcctgatgatacctctgcactccaccctgggcaacagagtgagctcttgtatccaaaaaaaaaaaaaaaaaacaaacaaattttaaaaagggagagtcaagatgtttgctctatttatttcttttagggggcaagacaggaggtaaaaaaaaaaaaaaaaaagtttggtttttgcttcaaagagcttttctcagagcagggatttattttcattacatgcaacatggacaaacactgttctggttttcatgacaatttgaattcaaagtaatatgtttttctaaaattcagtgtatttatttggccatatggatgctccttgtgttcttggtcacatattaaag

SEQ ID NO: 23366 - DNA, 2300 bp, Homo sapien
tgtttcaggtgtcagggggctcaccaattcattcaacactcgttttgtgagcacctattctgagctaaggcactgtgggggcacaaagatgtgtaagatataatccttgacctcaaatagcttatcatctagttgagggatttgtattcaggtagctgtaatataaaaatataaagatagaggaaagtcctggctgatgaaagggcatggaatcaacacactaagtgaaaggatcaaggcaatttcttcttggagagtaagaagaaagcagaaggaagggggaatggacatcagtgaagagctgagcaacaacttgggaagttcttatcggtttccctgctttattgtcttcataatacttatcattccctgaattatctcatttatttactaatgtacttttaccatttgtcttgtcccactcaggaactttgtctgttttgttcaccactacatcctgagcatctcaaacaatgcctggtgcatagtaaggtgctcagttaagtactggcctaataaataaatgatgcaggtgaggcagtggcagtggcagtagaagtgaacagaagaaagcatttagtaaatattaccaacacgataaagttagaagaggtagggagatgttagagcagtgaggaagtggcatgaaaggttacttcaaggttcctggcttgggcaaataagtggatggtggttatcatcaaaaaaagataaggaacagatgagaaggaggagcaggttttgtgaacctcagagggtatatgaggtcccatgtggagacatcatggcttgcaagtgcagatgcccaagaggcacttatacctgcagatctggacgtcattaaacatacattcagctgttgagccatcagaatggtcagatcacccagtgggcagagagagaaacgactgcatgcccactaaatagaggactgagggtcagatccttgggcgtagagtcaacagagaacagatttagaaaggctaactgaacagaaagacaatctgagggtttagggtgttagaaaagtgggctgaggggtacatcagggaagagaaaaaggcttcatgtagtccacaaaatccaccgcaggagaccaagcaggatgactacaaatcgacctttgaacccggtcatacgggtgtcactgcgagccttaacagaagcactttttagtggattagttgggagaataacttagccagtacttgagggatgaattgaaataaaggatgagagctagacagtctcacaggagagctttttggtttattaagttgaggcgctggaacatgatcaaggttatgtctaacacttaagaagtgaccggtacgtttgtgaacgacgacaaggtttctaaaacactagtggggccgggcatggtggttcacgcctgtaaccccagcactttgggaggggaggccggggtaggaggatccctggaacccaggagttcgagattagcttgggcaacacaggaagacactgtctaccaaaaaaaaaaaaaaaaaaaaagccagcgggaagagcccttgcaggcgtgaactatgcttctcttcctccaccctttcagccatttccagggagggggcccttccatataaaatgcagacaaaacgacggagaccgacacccctccctccgatttgtgagtcatttttgtggcagctgggggcggggataggaatacttgaattgcaggaggtgcccggtttcccgtggatcttggaacttgctaactgggtggctccatgctgaagggcgctggagagactcattcacattttcctactcggcactcacgccctccattcagcactttcctctccttctccctaagacttgaaaccagggacaaagctttccccccactcctacttcaggttcaccttccacccacaagcccatcgcttgcccttctccgaccacgtgacattccccctcaatccccgagactccccgccgtcgacccctcccttcgggccgcagcccgctttaccccgcctctcaggcccacgtgaccgcctctctcccacctgactggctcctccctttccccggccggacacggcgcccgtcgcagctgccagactccaaaatggcagccgcgcagagcgcgcacccaagcggccggacctccccgactcccgggccgcccccgtctcgcgccctgcctccctccttcggccttcacctacccgcctccggattggccgctaggaatcccgcccctctaaagccctgcctgctattggtcacggtaggctgcccttcagagaggcgtgcccctgcccgccccc

SEQ ID NO: 23367 - DNA, 2300 bp, Homo sapien
aaggcaatttcttcttggagagtaagaagaaagcagaaggaagggggaatggacatcagtgaagagctgagcaacaacttgggaagttcttatcggtttccctgctttattgtcttcataatacttatcattccctgaattatctcatttatttactaatgtacttttaccatttgtcttgtcccactcaggaactttgtctgttttgttcaccactacatcctgagcatctcaaacaatgcctggtgcatagtaaggtgctcagttaagtactggcctaataaataaatgatgcaggtgaggcagtggcagtggcagtagaagtgaacagaagaaagcatttagtaaatattaccaacacgataaagttagaagaggtagggagatgttagagcagtgaggaagtggcatgaaaggttacttcaaggttcctggcttgggcaaataagtggatggtggttatcatcaaaaaaagataaggaacagatgagaaggaggagcaggttttgtgaacctcagagggtatatgaggtcccatgtggagacatcatggcttgcaagtgcagatgcccaagaggcacttatacctgcagatctggacgtcattaaacatacattcagctgttgagccatcagaatggtcagatcacccagtgggcagagagagaaacgactgcatgcccactaaatagaggactgagggtcagatccttgggcgtagagtcaacagagaacagatttagaaaggctaactgaacagaaagacaatctgagggtttagggtgttagaaaagtgggctgaggggtacatcagggaagagaaaaaggcttcatgtagtccacaaaatccaccgcaggagaccaagcaggatgactacaaatcgacctttgaacccggtcatacgggtgtcactgcgagccttaacagaagcactttttagtggattagttgggagaataacttagccagtacttgagggatgaattgaaataaaggatgagagctagacagtctcacaggagagctttttggtttattaagttgaggcgctggaacatgatcaaggttatgtctaacacttaagaagtgaccggtacgtttgtgaacgacgacaaggtttctaaaacactagtggggccgggcatggtggttcacgcctgtaaccccagcactttgggaggggaggccggggtaggaggatccctggaacccaggagttcgagattagcttgggcaacacaggaagacactgtctaccaaaaaaaaaaaaaaaaaaaaagccagcgggaagagcccttgcaggcgtgaactatgcttctcttcctccaccctttcagccatttccagggagggggcccttccatataaaatgcagacaaaacgacggagaccgacacccctccctccgatttgtgagtcatttttgtggcagctgggggcggggataggaatacttgaattgcaggaggtgcccggtttcccgtggatcttggaacttgctaactgggtggctccatgctgaagggcgctggagagactcattcacattttcctactcggcactcacgccctccattcagcactttcctctccttctccctaagacttgaaaccagggacaaagctttccccccactcctacttcaggttcaccttccacccacaagcccatcgcttgcccttctccgaccacgtgacattccccctcaatccccgagactccccgccgtcgacccctcccttcgggccgcagcccgctttaccccgcctctcaggcccacgtgaccgcctctctcccacctgactggctcctccctttccccggccggacacggcgcccgtcgcagctgccagactccaaaatggcagccgcgcagagcgcgcacccaagcggccggacctccccgactcccgggccgcccccgtctcgcgccctgcctccctccttcggccttcacctacccgcctccggattggccgctaggaatcccgcccctctaaagccctgcctgctattggtcacggtaggctgcccttcagagaggcgtgcccctgcccgccccccgccccccgccccgggaggtattttccattctggtgggggttggggggaggggggaggggaaacgggtgaagaaggggaggcggcagggaagggggtgggggcctggcgggggcatccggcggagctggggtccccgggctccgtccggaggaagcgacgctgcgctcgctgggcagtcggaggggacgggacgcaccggagggcaggcggactcgccctgtcggtgactgcgcc

SEQ ID NO: 23368 - DNA, 2300 bp, Homo sapien
atttggctacctgtggcagatacgataagcagggcccatggccagtgtggtgatggaagtcatagacactcagagtggcaagggactgtcactgtcctctgatcccagcccctacctggcttagattcagattcagccagtatttatcagatgccaaccctgggccaagccaggagtgcttttgcatctgttatttcatatttcagaatccacacaacgttctttttggaaaggccttactttcccatctttacaaatgtggaaactgtggctcagagaggtcaagtagttggctcaagatcatgacgtgagtaggtcagtggtagcgctaggatatggtcttccagctctgagaccaagccctgtctgtcccaggcacaggaggagtctcttctacaacactccaggtagaagattcatccagactttgaattccttgggtattccttatttctaaggaaagtctcatctaaaatgtttttaggggttgaactaaaacctacctctctctcactttcatctatgggtcctataagtcctaaatctaactccaggcaaagggaagaaagccagagctctgcccttggccatgtctgttcttcagagatgagaagatggccccagatgacccttggctgccccacccctgtcctagaaccagccctgccacttcctaaatgtggactcatttcttaacatctctgagttgccatcagatgggggcgatggtgtctacgttgccagatggctgagggactcaatgagaggatgtctcaaatgcacttcccccagagcctgcacacaattagctctcagccaatggcagctattgttgttttatcgtcaatagtatttaacctctccaaaccttggttccttttctatggagtgggaattataatacctactttcgtttcccccatcaacgcaagtaggcattccaataataccaacttcacatgtctgggaggaacgcacaacgatgcaggcagagagcgctcagaaactatgaaaagcaggtcacgtgctctggcaccctggctgcctttttggggagcctgtttcctgagccttctgtccttcaccagaattttcagggttgtgatgtttttctcttcaaaagcatctcctctgtagcccactccccacccccaacaaacttttttgagctaaagagaaaaaaaaaaaccatacaaatagacaagtgtttagttggccaggtgcagtggctcacgcctgtaatcccagcactttgggaggctgaggcaggtggatctcttgaggtcaggagtttgagaccagcctggccaacatggtgaaaccctgtctctactaaaaatacaaaaaaagtagccgagtgtggtggtggatgcctgtaatcccagctacttgggaggctgaggtgggagaattgcttgaacctgggaggtggaggttgcagtgagccgagatcatgccactgcactccagcctgggtgacagagtgagactccgtctccaaaaaccaaaaaccaaaacaaaaccaaaagaaaagtgttttgtctcttttttgcctctgcatgcaccctggggtcagctggagtcttcccaccctttacaatataacaagggtgattcaaatcccctatcctggaggtggtaaaactcaaaagacagttgagggtagaagacgaaatggcacgcatctcaaagacagagagcagagaaggtgtgcaggtgcggaaaggactgctagtgtccacagggaacccaaggccactgacctggagggtgggagagaaatgggcgggaatcggaggatgttgggagagggaggaaggtggcccacacctcagctgggaggccctattggagtgcacaggcccctttgcttgaaatccaggagaagggggctcctgaggctagaatttgtgtagttcttaaaagttttcagaagcacattttcccctgtagattctttcctggaacaatcccaccaagcctgcaaggtgaggaaggaaattgaacacgcccctcctgagctcctcaggtgcacctcgtgctgctgtcctggggccatctcccaactcctcccaacccctcatagccctgctctggagcaggtaaatattcctcacgccagcaggtgaggaggctggggccagatgacagctagtgagggagcagagacaagacaaggcgagcctgtgacagagcgagaccctgtctcaaaaaacaaaaacaagacatgtgagcttggactccagtgtggaatcccatgtccgctcagtgcacctttctgccgctgaaagtacaagagg

SEQ ID NO: 23369 - DNA, 2300 bp, Homo sapien
tgggccgcccttccttctcgagtgttctccgtgtgagggccctggcccagctggccccaaacgggatttgggcacccaacccagaccggcaggtttgcaggtggttgatgaactcagggccctgccgttctgtttccaggatcccctggcctggggtctaggggatgaggtaatgggactgcccctgcctcccacacatctcctagcggagcgaggggctcacctggtgcacaggcccactttggtggggtggaacagaccacacagagggattgcgggtaaatagaaacgtgttactggtgcttcagaaatgtgctgggagcggggggtcctgagagggcaagagtgggcttccagagcctaggagggactgaccttgcgcatcagagggcagtgacctgctaaggccagcccttaggatgtctcgagttctgccaggttgtgcttgccctcaccctgccatcttctccgccctttcaacactcttctccctttcctttcccctcttcaggaaccagtgccctctggcctctggcagccacatgttccagtcttggaaggataactcagatctaaaatattctcattgcacattagcccgtgcgtcaccatgctgtggctcccccaaagcctcctgccacggaaggctggtggctgacacactcacccacactgaggtgccaggaacagggtggcttggggcagacagtgaggaagcaggggcagatttaagagtggctcatggaaaggaagacttctgccaaaggaatgagtctctcagatgaggaagaactggtccagtgagagagagagtgggggctccactcagagttgaccaccttctctgccacaacagggaggttctgcccggggctaaggggtggggagggaagcctggggatatgagcttagtgagggccacccgccgtgaagatgggccgcctcatcacagccgaggtggagagagcgctgagctgggagcccagacccctgtcagtgctagcccagctctgcctcagatggcccgagtttttgcagatcacctattgggccccagttttcctactggtaaaatgggaacaaacctatccacatctcagggctgttgtgagagccattgagataagacaggaaagacatgggcaagtcagacgagagacaccatgaggcagtggaagggtagccaacagggcatcaagagatggacctgggcaagtgcctgcccctctctgtacactgcaagggtcagagcagccgatctcggaggacctgtcagccccagcctctcttatcttcccctgctccagggaagcttcctgaggaggtgccagagcagctccggtcactcgccatgatggctcagagccagtgccaagggcctcgctccgacactcacctgaggacacgtggggaagcaggcagagggaggaggtggccccacccactcctgcaggtggacttgcttctcctcagtcctcaccctctggcttctggtgggttttcctgtcctatttgctgtgatcccctgacagccagcacccctacaaacaccacacacacacaaacacacacagtgtatgtgtgcacagtgctggtgctagactgagtcacacacacacacacatacacacgctcatgcatactctttcacatgcaaaaacatatactctgacacacacacacacatacacacacacatacactcacacatgcaaacacacatacatgcacacacacacacacacacacacacatgcacacacactagtcctctgccctgcctggtggcttctggtcaagtccagtcctgggtccagaaccaagctcctgcagtctggggctccccagcagaacttgtgtcctaggaaagccacctccctgcccccgccaggtctggaccctgggcactgcagggactgctctcagggaacggcctggccactgatctgcttcagggtgagcatgtttcacagccacctgggtcaggaagcccacattctcccaagggaaggcgactcatagctaatgtctgagggtgatctgagcactcttcaccaccccgtcagcccttagctttcgtctcatctccttgccaacagcacataagtgtgagtgactccttactgccgtccaggcagcctgggggctacgaggggcttcagaggtcctcatccccagcctgtaggcctggccatactggacccatgagatcagccaccctgtcagctggtacctcggggtcctacagtcctcctcgctcaagccctggtcctctaactcggaggtgatgaggtgttggg

SEQ ID NO: 23370 - DNA, 2300 bp, Homo sapien
ttattacattattattattattttgagacagagtcttgctctgtcactcaggctggagtgcagtggcacagtctcagctcactgcaacctctgcctcccgggttcaagattgtcatgtctcagcttcccgagtggctgggattacaggcacgtgccaccatgcctggctaatttttgtatttttagtagagacagggttttgctatgttggccaagatggtctcgaactcctggcttcaagtgatttacccgcctcagcctcctcccaaattgctgggattacagatgtgaaccaccgcgcctggccaccattattttttttttatcatccccaacataaattctagccattaaacaatactctcccttctgtcttctccctgtctcctggtaaactttattctgttctgtgtctctatgaatttgactactctagctacctcatgtaagtggaatcatacaatatttgttcttctgtgtctggtttatttcactaagcataatgttttcaagatcaatccatgttgtggcatatatcaaaattccattctttttaattggtcaatagaattccactgtatatatataccacatttgggttatccattcatctggtgatgagcacttgtattgtttctaccttttggctactgtgaataatgctgctataaacattggtttacagatatctgtttgagtcccaactctcagttcttttgcttatatacctaggagtggaattgctggaccttatggtaattgtatgtttaacattttgaagaaccgccaaactgttttccaagcagcagcaccattttgcattcccaccagcaatgtgcaagggatccagtttctgcacattcttgctgacacctgttatttctcagttttttgctttgcattgtttttgtttttatggccatcctaggaggtagaaggtggtatctcattgtgcctctgattttcatttccctgatgactgatgatattgagcctattttcatgtgcttattggccatttatatatcttccttggagaaatgtctattcaagttcctttgcccatttttgaattaggttgtttgttttcttggttgttaacttctgttgctttaagccaacaagtttgtggtaatctgtgacaccagccctagaaaacaaatgcgttgcccaaaatccagcctcctgggcagcaggaccccacggtcaggcaatttcttccagaaggctgattagtcatacaggtggcatcagcaccgactttattcacctgccagtggatgaattcttcagctcttcccttccaaggcctgagacctgcaagccaagagggcttgaacaccagtctcctcttcagtgtgcgcatgcacaactctttcgagaggtttggaagtaaaaagaaggagtgggatggagcagcagttgaagagagggttataagatcccctctgtcttataaggaggtgttgctttgtttgattgtttgtcttgaaaggatgcgaagacctgagtacttgtagaggctgagagaagaagccaggggagagggagaggggacatgaaacatcacatctggatgccaagcacgtcttctttctgtctcactaatcggagtcataggagcttagccctgaaagggaccttagagtttagctccttcattttgcagatagagagagagcaggcacagaagaggacctgcccggggtacttccgcagccagctgcttgctcctgacatcccctatgtctaggacttcatagtgtgccctctggaaagacaactattttttaactgcctttttccatgtctccacaagttgtaaaatagctcttctatttcttctctgttcctatgcccttacccgtcttcccaggacacaatggcatatgaaccctttgttcctgccaaatgcagccgaggaagtgggaagggcctttgggttgagcggaccaggagactataccctgccgatggggatgctgccaggctcggcaggcctccacttcccctctgcctgttcctctgtctcccggggtagggaaatcctgggatctttactccccagcattcctttccatcatggttctaagttagattttggcagtaagatgcacttgcacaagcatcagaagctgaaggcgagagaaagcccttctctgaattggcctgggcagatgcgtggtagacggtggctttcaaacaagctcctgcacgctgtctgctttctgctctggtgctgcaggcaattgaaatgatctccatgccttctctgcaatcctggcacttcctgattctgt

SEQ ID NO: 23371 - DNA, 2300 bp, Homo sapien
ctatttaactccagagcctagacgaaagaagttacatggcaaacacacaataaatatccaatgaatgaatcaacaaataaacaaacacacaactgaataaaatggtagatatatatagtgctggtgtatacagcactaatgtgaccagaaatttaaaagcactaatatctcgttgctctatgtttagggaaacacttgttggtatatgctatgagtctagctaaaggaaatagcctctttatatacaatgtgaatgaagttttaattagagtaactctttgggacagcaatttagcaatattgaccaaggtttaaaattgctcaaacctcagtaactcaatttcctcaaaaaataatggtaaaaatagaaaaggttttatgcatgagcatgcctttgataaaacaaacaaacatacaattgtataaatatcacgattacaagtatgtaagaaacaaacaaaatagaaacaggaaaaaaacatcaaaaggagatagaccgtaatacaatggctatattggacaattggattgtattttcatccctcctctattccgtattttcaaatgatctttaatgaaagttttttttataataaaacaccagcattttattcctgtagcaccaagagtgacagagtgaattacagttgtgtagtcaagcacagagtgggaaaagatgtcacatttatacattttaaagagcattactgtaaaaatcaattacatttgacatagaaactcccctcccttgagttcccctgctaaatgttcatcctcacacaatatcctgtagactttcccagtcctgttcccatctgcaattcagcactctggtgccatcgaatcctgggcacagaccagaacatggctgaccttcccgtttgcctcccatctcatctctcatgcgccttcttggcatatttctattctctcttcctggctataggacttgggtgggtgacttaatttttgtaggcagaccttcccacttgctcaggaagcatccccctgaagggatctggcagtctcctggctgcaaagcaggcactcctccctactaaggaatgcctggggtgaggggaagcaaccccagtgcagatgctttgggttaagaagtagagaggtgtagatcggctcaaatggcccttgcatagctgaataatttttgttttcctaaaatggttttagatgggatcgtgtctgaaaaccagtctttgttcctgggaggtaagtttgagtgattcccggcagtcagggggcaaaactggatgatgatgtgctgtcagaaagaatagggaacacagcttccccacttgttgatggtgggggcacaggcgagaatacggtgcccacggccctctggactgttctgctgaaggcccgagccttccaatacagtataataatggcctcagcagagccatggagccagaataccagatagcggcgaggaaggagatttctctgaaagaagcaaatagtccattgccaatcatgctatggcatcccgtgcagcagctccccacccgcctcttccggtaattgtacctggatttccttctctgaaatgcctcctccccactgtcaatcattttattaccagtggggctccagcccctcacccaggatgcagcacataaccaaggcctgagccaactggcccatgtggcatggccctggcctcagtgatttgtccaggggtggactgggaataataatgctggctgtcactgaaaaagtgcttcctctatcccggcttcgttgttaggattttaccatgttaactcaattaaccctcacagtgaccagatgaggtgataccatcattattatccctattgtcatatgaggaaactgaggcacaaaggcactaagtagcatgcccaagcgacagagctcataagtggcaaaaccaggactgataccaagacagtctgacgccagagttcattctcttagcactatgccatagagccttctaggtcagccgtggcacaggtgtgtggcataggtgtgccgtgataggctttttcctgaagctgaggcgcatgctctggagcgggcgccgccatcttgcccctacgcggagccggagaatgcagatctgaagatggggaggagagcagagcgtggtggcacggtgagctctagacttggtctggtctgaagccagttcattatttggcaaaaaaattattacgttcccaccttctggacccgtttgtttctcattccaggttgagttggttttggttactctcctccccgtatcgcattttgtcttttcttcctaataactc

SEQ ID NO: 23372 - DNA, 2300 bp, Homo sapien
gctctcatttaccttactgatctctgctgagctgacctggctcatcgctgaatcagggaagtgagtcttggcacctaggtgtattgttccctatcccacagcggatctagcctaagctggaacttcctttggaggcttccagtggtttgacctggcccaaccctttcttcctggtgtgtcatcagtcctatcagcactaagtttggggccagccttcctgccagcagctagtagcagcttctccctcaaggggcccttggttaagaattcaaacccaaagcagccaaactcaccaacatccagacatcctgtacccacagccaatgccaaagaaaaactgaccagtactttgtcacttacccctgtcatggtcctggaatgaaggcaagaaaataaccaacttcctaagctaaagaaacctctacacggactgagggttgagaattggttctgaaaaagcaggcatttaatattaataacttgatctatttgttcatctagggagcccaaggagcacccatgctgcatttatacatttaatgaccgtactaacagcacaaggtactgaagatagtactatgacctcgacaaactcctctcacacagattacaacctggtagaaaagagagaccggcaggcagacacccatggggtaccacgaaatccccaactgacacctgaaataacacataaaggataagaaggattatttcaaccaaaggacagtgcctcagacatagcgaacatactgaaggaacatgtaagcccagaaggaacttgttctgatctaagaaccaaaaaagattcagtatggttgaagacacagtacagtcgagacaaatgaatctaaagttaaaggaagacaggtcatgaagggctttgcaagccccgttcaagagcttggaagagcaatgagaatccaccaaagggtgataagggaatggggggacgcttctggtcacatgatcagatttctgttttaagaccatggctgtagcctctctgtatagaacaaactacagaggatgaagaagagatgcagggatcatcaggaagacaccgaggtagtccagagaagaaaaggtggcctgaactaggtagggcagggggatgggactggagaatgaacgtatccaagacaactttgcaagggattcgatgtgggtgggtaaaggagtgaagcaagtgagaatgatgcccaattctggcttgggcacccgggtggatggccatgcccagagagggaatacaacaggagatcagcttcccccgccgggcccgacaggacctgtggtctccccgagagagggaacaaggagcagagggagagtaaggcttccggcccgctgcttttgggccgggccaggagcagtgtccacccgacacagctggtcccacaggccgatcctcgggcccctagggaccagggaagggggcggagatctgcccagtcggccccgtctggctccagagcccccggtggggcacaggcttccgccccgggagacaggccgtgctcctagccggttaagcgtcccgagacggcctgggggcccagcccgcgcccccagactactcctgcctctcatcttgagcccaagcctccagcccacaggagaggcgccgggatcccgcccgctgcggagagtgcgctagttcactcacccttacggtctccgaagcagacgcgaagccctccaacgtgagcctcaccagcccccgtccccaaaacgctcttcctcggcttcgccccgccccccccccccccccgacctgccctgcgcacgcgcgctccctgccgcccgcccattggcgccgccgggcccctcccgctggcggcggcgggctgtgaggacggctcgcgtgagtccacgtgtaatcggcccgggcccagcactggcgggactgacgcagttcttctacctgctttcccaagggcgacactcggctccactccagttgggccgctggacgccctaggggcccggcagttgctaggcaacgccggaagccctcaggaacgtagttccacgggcgacgtaggatggcggatccggatggggcggaccccaaagctggctcccaactccgctcaccccctcctatacagggctcttggttcaggtctcttggttcgtcctgctgcaagttgggaagaaagataataggaatgctaattccttcttgatgaaacgaccacaacacgctggagccggccttggaccctacgtttcaagattggcctgcttccagcgtctgccagctccactgcacaagctgcggcagccgctgtccccgt

SEQ ID NO: 23373 - DNA, 2300 bp, Homo sapien
agaagcccaagaaaggataatgagtgaggtagcagaaggacccagagtgtgtggtgtcagaaaacaagagaagaaagtgtttctaagtgagagtggttggctttgataaaacagtgttgagagggcaagtaaaataaaaacaagagatcaaagagaccactagatttgcatggagattgcagtttcagtggtatggtgggggagaaaatacagcaagtttatatgttgatgggaattatctggtagagagggagtgactgtagattcaagagagacataacacaggataacatccataggaaaaaaatgaaagcactggctagaatgaggacactttatccatctaccagacaccagcttcttgacacttcatttgtcttatttgtatctctagtagctcctagtagagcgcctagtacatagaagatattcaagaaatgttattgaatgaataaatgaacaaagggaggggtggatgaatggatgaagagatggatgaatggcagatgcagggtagaaggaggaactagatcaaactaatccaaagttcagagtaaggaaagaagaatgggtcttgaattaatagggtttcctcaaaacttagggattctttgtcccggcgcggtggctcacccctgtaatcccagcactttgggaggcggaggtggtgggaggattgcttgaacccaggagttcgagacgagctgggcaccatggagactcttttctttaaaaaaagaaaaaaaaattagggattatgggatttttctctgggatggggtggcagatttcaatctcagatgaaggtgggaaaaggaatgagaccgtcaatggcagtggcgttaggcaactttcaaggcatctaactacttagccactttctttgtctttcctgtccggacccaggctcatttgaaaaacgattatgtacctttatggacagaaatgggagaagggctttaaaaaaaacgaccgtcctgccgggagtggtggctcacgcctgtaatcccagcactttgggaggctgaggcgggaggatcaagaggtcagcagttagagaccagcctggccaacacggtgaaaccccgtctctactaaaaatacaaaaattagccgggcaaggtggcacgcgcctgtaatcccagctactcgggaggctgaggtaggagaagagcttgaacctgggaggcggaggttgcagtgagccgagatcccaccactgcactccagcctgggacagagcgagactccgtctcaaaacaaaacaaaacaaaacaaaaaaacaaaacgaccgtcctacactcatttatccatcaggtcaatggatacttactgaatgttaatcttgtataggagcacaggtgtaagggcaggattatacagggatgaattcgatacagggatgatgtattcgtttccctatttgttcatgagtctgtttttaagtaatctgtcctctcttgaatgtcaaaagctgctgatttcacgaacggtacatggaagatggtatttgaactgggtcgcatagtcttgctgggactcccgtggaagcgaacggggacagcggctgccgcagcttgtgcagtggagctggcagacgctggaagcaggccaatcttgaaacgtagggtccaaggccggctccagcgtgttgtggtcgtttcatcaagaaggaattagcattcctattatctttcttcccaacttgcagcaggacgaaccaagagacctgaaccaagagccctgtataggagggggtgagcggagttgggagccagctttggggtccgccccatccggatccgccatcctacgtcgcccgtggaactacgttcctgagggcttccggcgttgcctagcaactgccgggcccctagggcgtccagcggcccaactggagtggagccgagtgtcgcccttgggaaagcaggtagaagaactgcgtcagtcccgccagtgctgggcccgggccgattacacgtggactcacgcgagccgtcctcacagcccgccgccgccagcgggaggggcccggcggcgccaatgggcgggcggcagggagcgcgcgtgcgcagggcaggtcggggggggggggggggcggggcgaagccgaggaagagcgttttggggacgggggctggtgaggctcacgttggagggcttcgcgtctgcttcggagaccgtaagggtgagtgaactagcgcactctccgcagcgggcgggatcccggcgcctctcctgtgggctggaggcttgggctcaagatgagaggcaggagtagtctgggggcgcgggctggg

SEQ ID NO: 23374 - DNA, 2300 bp, Homo sapien
aagaccagcctgggcaacacagcaagatcccgtctctacaaacaaaataataaattaaaaataatagtaaaataaagtaaaaattttactgatactctacaggagctaaacccatcaaggttcagactgacccatctaaacctctacccaaaattgtacaatagcctctaaaacaagtcactaaggaaggaataaaattggccaggcgcagtggctcaagcctgtaatcctagcactttgggaggccaaggtgggttcttgttcctagtttttttacacccctgagaaatgttggtcatcagagggctggggttttgtccctactggaaaatagctgtgaaggggtccggcgtatgttgaggaagagctcattaaaaatgtgagccatgaagactgttcctccccacactcctttatgcccacacatacatgagtattggtgacccccttaaagcaacaagcagtgattccctctacagttagttcactaggtgctctacaacctgggggcagggctggcaaaggactaggaaaaaagaggcaggaaaggaggtcttatttctgccaaggtcgcctccctcttatcaaccctgctgttcactccctgccccagggctgactcccaggaatgccaggcgtggggcaaatcacagtgtgttctcgggtcaccctaatccaaccgctctctccaagtgaaatccggttctggtgaccatcaaaggcagccaaagggtaacaaaaagccagcttgaggagttgactggagtaagccaggagtttacagactgcttgactaaactgtctctaaattccaactgccagagcagcttcagcttcccttcatctacctcctggcctctgggggttcagaacagtccccaggtgctcagagcagcacccaccgttaggaaatcctgcccaccaaacaaggactggagctgcatttagaacccggagaggagggcctccacatgggagtcgggggtcagtgggaacaggaagactgtcttcaactaatcaccctgtgtggcttcatgtgaaaggccacacgggactatgcactaggagcctgggttctgcttgacataaaaaccttccctcggttacagttgtccaaaaacacttagggcagtggtgaagactccagagggaggacgtggagcaccttctaactcttaggagtctgctcaaaagtttgccctgaccctgctgtcttttgagtcttcagtctggaccatacaatgtgtcacttaaatgccggtggtttttggtttcgggtcttgctgtggcttctccagcactggtctgtgagctgcggcggcagcggggccgggcccctgtaagaggtctccccccaagggtggacctcggctgcccccgctaggccccgccccgtagtcctgtgaacttctgggcaccccacagccctgggctaaaccctgctaagcactccatagagctttgatcacagtcttagaccagcatgaagaaataaataaataccaaggtggtgaaacagcctaaagcctttaagaaatccagggcaacagagattccacagaggacaggtcaacgggttagggaagtcaagttggaaagaggaactccgctaaaataagaaaatacaaatgctcccagcagaggggcgtccagagagtcgcgggcctgggaacgggcctgggtcctcgcgagcatgcctggcccgcatcgcaacagggcggggcggacagcggcaggccagctcccgggaggctcgccgtcggggttggggcctgtcggccggcctctccccatttttgtgacgtgtcaggggcagcagcggtgacggggccaccacacaaagccaggtcgtcgggcagtggtctcccaggctaagagccccgatgggatggggagggggcgggaagcgaggcgcccccgggcgccggggctccgcgcgggattaaagtgagctccgactccgcggcgggggcggcggcggggggcgggtacccgggcggccgcgagcgcccttcgcgcgcctggctgctgtggccgcgctggcagccagcgagcccggctcgccgaggcctccccacgcccccgcgggggtggagccgcggccaggggcgggtccgcagctggcggcgccggggcccggggcggaggctgtggcagcagctgcagcggcggcggcggcggcagcgccaggagctgctacagcagaggcggaggttgctcctgtacgcgtacgggccgctcggccggagccgcagcccggaggcgccgggcggtgcgctgggagctgctggtgctgctgc

SEQ ID NO: 23375 - DNA, 2300 bp, Homo sapien
atttggggctggagaattctttgttgttggtgagggcggggggctgccgtgtatattataggatgttcagcagcatgcctagactctccccactatgccagtagcactatcccccttgttgtgacaaccaaaaatgtcttcagttactggcaactgtcccctgagggcaaagtcacccccctgctgacagccactgctctagaagatgtctgcttgattggactttaggaggaaaggagaaatgaccgatgggctcagcaaatataggacttgagtgcccattctttggcagaggccacttaaaggctcagcatggttgagttgacctccaccaagggggaatgggtcactgctagacagtagtagtgttttaggagcttttcatatttgcattgcatgtggttgggaggaaactttcatggaaaagataaagtctgctgctcagctggaagcctaggctttggactttcaaaaggggattaaggcgatgagctataatgccaggcactgtactgtccctgtcaaaggtctgatgatgatgtccagggctggaatcagtgcctggtagcagtgggcagacaaatgggaccctatagttgttatctaagttgagggagggcaggccacagaatcttgtgcatcctcagaaatactgtgtgtccctcctgagacccagtcctgacctctgaggaactaagaccttctcttaaatctcctctggattctgaaagaggaggtggatgcctcattgattttttttcccctcagattagacaaaggaaatggtatacagaaggcaagcctgtctggttgggcaggaggaccctgttagagctgaggcttttaagcaacagctcagttaatgaggtaattgttcctcagcttttcctggaaccagagggctctcaattctctggatgttctgacgttccatgcttgtttgagagggacagtacggtgcctggcatatagcaggcacttagatgtttgtggaatgaattaactgatacatagtagaaatagcttggaatccatacctggctaggcttgagtttgaggtccggactgacaccagctttgtgatcttaggcattaaattattattgatggattgattgggacagagcctcactcttttgcccaggctggtctggaactcctggcctcaagcgattctcttgcctcggcctcccaaagtgctaggattataaacgtgagccaccacatctgtaattgacacttttgaccttagacattttctgagcctcagtttcctcatctataaaatgcaaacaaaaccagccctgtaggaccgttgtgaggcataagtaagatttgggcttgggtggcaattttctaagagtttcatttccccttctctttccttaactggaggtggggcatggacagtagtgagactcaggagacacagctcctgtcctgtgggagtgaagtctggtgggagctgaggtttgcatacacagaacagggaagcagtgctgcgtgaagcggtctctctaccatgtgctcaggcagtgagtgctgtctggttgaagagtgagtgctcagcatggttctggacagacagagaagtcctcctgcagtagagggtaagagtggagaggggaacctgactgcctggctccgccaccacctgccacgttagtggccttggggcaggaagagaccctctctgttctcaccggtgaaatagaaatgatgacagttcctacctaatagagctgctctaaggactaaatgagctaatgaatttaaagctctgtgattgttgaatgaatgttaggggcttagtgcagtggttcatgcctgtaatcccaccactttgggaggctgaggtgggaggattgcttaagcccaggagtttgagatcagcctgggcaacatagtaagaccctgtttcttaaaaaaaaaaaaagacagagggcttgtgggcatctaacggttggatggggagagaatgctttagacatattttgagttaaagcgagttagatcaagcctggtctgagaatgcaacaatgtgcccctgaacaactgggactgggatggtgatgaggccacctcctcttgctgagtgaccctctgcctcagaactttgagacaatggctctctctctgtttcccttcccagaccacaaataacagcacgtcgaggcatctgaaaggctgtcacccgcttgactatgagctcacctacttcctggaagctgccctccagagcgcctatgtgaaaaacctgaagaaggggtaggtcactggtagttgagtgagtgggagaa

SEQ ID NO: 23376 - DNA, 2300 bp, Homo sapien
ctctgctttcccttgtgtggtgtgatccggggaaccccctgagtggatgagcagggcagcccttacactttcctgagcatgtgctacgtggcaggagctgctgggtggagctttagaaacacgggagcgatgcgcctggccctcaggtggccacagtgtgcgagggtcagacctgcaggtagaaaatgaccttgagtggttttacttgcttcagaagaggaattaacaggcagggcagcatggggaggggtctggggaggcttcatggaggaggtgacattggaacttgcttttgaaggatgaagtggggaaaggccacgtaaggcagtggaagaagccagtgccgagacttgatataggggactgcggtcattcagaaaggacttgcttgagtgctgggggctgaggtgggagaaaggtgaggggcaggccccacagcctcaggaagctacgctgagggcttattctgtgagccctggggccactgtagggctggacttgagaggatccaggtgaccttcctgcatccactagacccccaaggcgcagtgggagcagtttttcacattgtgggccacagcctgttagtgggaatgcaagatctatttagtgggctgcagccagcatgttacaaaatgggggtagaggtagaaggaaaatggaaaacctcagtgttgattgcacataggagagatgggtattttgtcgagaaacttcggttttatgtcagggaagtgtatgtgggtaatgggttgccatgtaagatgtatttgtcactatggctcacacttttaaaagcttgaaaactatttcaaggcacagaggctgactgaaagtggcgagactggctggtgtggtcatcaaggcccaaggtgaggcaggccagcctggggccatggtactggggacagagaggggaggatggaatccagcatcaatcggatacagcaagtgaagctggagaatttgagactgactgaggtcagaaagtctgacaccagcccaaggctcttagtccaaggtcacaccttgtttgagatactcaatcttggtacccctttggtggtaaaccggaagcccaagttgctggggggaaagagggaaagggactaggggaaaagggatcctccctcctttttgttgatgtcctgggcctctaaagtcctggtgttacaactctaacttttcactccagttatcgaatgtgttcaaataaaactccagcagtcagctcctcctggggtctgctggtgtgctgagagcatccttctttgcgagctaggctggtaacaaatctacttctgccgtcctcccaccaggaacatcgtgaagggcatgagagagctccgggaggtgctgcggactgtggagaccaaagcaactcagaacttcaaagtggtaatgtggggtgctggcagtgctggcttatttaggagtcagctttggtgggagacaacagaagtccttgcagggagcctgtgaagcaggggtggcagtaggtctcctgcctgcttgtggcagaggttggtaatcaatctcagcatcctttcccacgcagccagggaggtgcggcctctttccccccgcggcattgcagatagtccctcatgttaaatcagatttcagatctactgccagcgcttccctgggcaaactgtgttgacaaacttgctaccaccactagcaaggtgctatgcgaacttttagggatttgtttatgatcctaataaacagcattgaccctgcttgcctgccccaacacaggcctgccctcctagtccttagtttgtccaaaccagagagccacagctgcttcttatgctataattctccatcgaatatcagaaaggcacctgagagagagagagctgcccatgcctgtggcattatgctcttcccaatactgcaaggtcctgctgaatactcagagtggggctgggctccaaggggtcaggagagggaggaaatgctcctcttgtctaggagaggagagaagagaaaagatgaggtaggagccgtctgaggccagcagaggggtgggagcgccagtgttggagggactgaaggagcaagggggctccttgggagtggggttggggagtttacccaaagggccgcacattgcaagcggggcagatttagctgggatgggcagagggcgttctaggtcatgctggggtagagctgacaactgtgcctgggtccgagtgcttccctctctgccagatggcggccaagcacctggcgggggtcctgctgcactccctgagtgaggagtgctactggagccccctgtccca

SEQ ID NO: 23377 - DNA, 2300 bp, Homo sapien
tgaggtcctgtgtatggaagcagaggagggcaagtactattgtacagaaggaggctcagacagagggagggagatgcaggagagagccccatttggcagaggggaatgagcaggagaagggaggatgctgggggcggcccccagcagcatctgcccagaacacagctctgcccagctcccgcacagcccttggagtgggggtggatatgttaccatttctggccccagagtgtcctctgcctaagtccctgccctgtggctgcttggaggcccccatgactcctgcagctgaggagcttctccctttccaccttttgcccccagcctgcgtgttgcccccagggtatagaggtgggcagaggggtgggactatctgcacataccaaagaacacaagagtcccacatccttgatggggagcttctggcttggtgatgaggagctcccctcttggaattagacagaatttcccgctcatacagcacctttccctctcctaccgccacccccagcagccatctggcaactctgtgagctactgaaatcctcggcgctggacgccaagagcagagttcttgagtgtggggaagctctccctggggagggacggaggagagtttccatggttggaaggagccaggagagggtccgggctggacacagagaggaagggaggggggggctctgggaatgtcgttgtcaaagctacttgagaggctgaagaggaagagaagagggcactgggggccacagcccaacctccccaccaagagtcaagcagcagagccacctacccaatccaggcactttcacatcttagccaaaactcttgctgtaattgtgagaattgcaaacacaccagggactgttccataaaacgactggcctgtgctcctcaaaaatgccagtgtcatgagagagaaaggtggagggccgcttccagatacagggagattaaagagacatggcacctgaatacaaggtatgatcctggactggatcctggacaataatagttatatagagagaggaacattgaggaagggttttcggttatgagactattcttgcaacttttctgtaggcttgaaattttgtagaataacaaattgaataccagaagcttgacccctcagaactgctccctcacctaaactgggctaagggtgaaggattttctctcttggagagggcctttgtggagataggaaaaggccatttctgggagtgtggccatctttctggcttggggcagtggcaaaaaggtgatagcggctgggccagcaaggtgggggccctgcgaagacagacacctgcttatctactctcctcactctttcccaaacaatgtcccacccacaggcaactcgagatgtggtgctgagccgggtgccggagcaggaggaggaccggacagtgagcttgcagaatgccgcagccatctatgacctcctgagcatcacgttgggcagaaggggacagtacgtcatgctctcggaggtacggccggccatgcagcccaccccactctccggagtcaggtggtctgtaaaggaaatcagacagagccatttgtcccttctccacctgtcattcccctgccaggctgctctgccgctttgacctcggcaagttgtacaagtctcagcttcctcattggtgaaatatgggtagttagagaacccacctgacaaggttgttggggagagtgcatgtgaaaggctgagaacagtgccatgcacagtaataataaatgttcgctgctatttttattacatgtctacgttttgaaagcactttcacaaatcttattccatttgctctttgccatcaccctgtgagatcattcacatgttaaggaggtgaactgagggcctgagagggtgagagacttgagtagggtcacacagcaagccaggggcaggaactgggtttcggcagggtgtctcccaggagccaagtgcgggcctcctgcagcctcccaaaagcggtgacttgggcagtaactaccctggaagggtgcggatggctggggtgggaggacccctggtgggtaaatgctgactatctcccctccccagtgcctggagcgagccatgaagtttgcgtttggagaatttcacctttggtaccaggtggccctctccatggtggcttgtgggaaggtaaggcccagggggcgctaggggttgcacactcacccgcagggggctctgctgagatggacagaggggcttttctggccaggggagtgggtgggtattatcctgccgctggtttgaacctccgggagagtgaggg

SEQ ID NO: 23378 - DNA, 2300 bp, Homo sapien
agggagtgtgggagagtttccaggtctcagcctgtgtggtatgcgacccacgttgatccctcctgcctctctagtgatgttggtgacttcagctctgtctttgggcctgaacccacagccccagagcctgcctggagtgaggctgtcccattctccctgccagtccttgtgatgctggccctctacctcactgggccctgtgatgctagccctctaccttaccggaccctggccctcttttgccttccagaggcctagaaaaggatggcagcttcggtgagggcctcaccatgaagaagcagagtggcatgcacctgactttgcctgatgcccatgatgcagactctggtaagaacgagctccttgggccactgtgtgcatggacccacagctcacactcccagcttgagagcaccaacacagagaggggccgggccctctcccagccgggccaagcccaccactggctccttgccagctcgggcaacttctggggctgatcttggctctgggtaggggctggctgctggtcccacagtgggcagtgggcaggggaggaaccctgcctcctgcatgggggtgaagaaagaggagcctggctgaaaaggtggctgtggagcacagaaaccgtttccccttaggctcaagccagaggccacagtccacgtaatgtccttggcagatcaagtcaaatagaaaggaatggactgagctctttacaattctaagctgaaagcagactcttttctggaaaaactcatcctgaaacccatggcttgtgaaattcaaatgagttcaggaactgcagacttaacattttttaactgaggacctgcttaaagcagaacaccttcatcaaaaacacaagaattagtcatgggaaagaaggtgtgagtggagttgtatttagtggaattgctcagttttttcacttctgtagacatgagcctttctgtggacaaagccttgcacctttgttgtcaaatgacagagttgatttcagaagccaaacctagcacccaactttagaggcacatctcaggggtgtatggctgtatgcagagcttctgtctcccaggagggaatggttaagggaggggagaatggtagctcccttgcaattaaagaaggaagaatcatgaacaaagttattaggactccaggtacacttgtctcataaactgaagtcatccgtggtttgccgtgaggtctcctgagtttattggagcctttattgcgtctatgacagagagagagaaagtgctcacatttcacctgcatgggaattataaatgtcaacagcttatatgtcctgaaccggagcccatgtcacccagaactgccactgagagaggttttccagagggcagtgttctgacttgagctgctatccagtccttcacagcacagccttgaatgggtacctttctacaaacaaatgagaatatgcacttgtgaaaacagaaggtgaaaatagccaagggaagaaaagaaaaatcattcctaatttcaccacttagaccttaataaatggcctttcagacttttttccatgcccatatttcttttttataaaaatgtggtcctattcttttgtaacttgcttgttttcacctaactatatagtgcgaacatctttctacattgatatctgtatttgtattttgttattttaatgatcgcagagtctgggatgattatacccccacttatttttaatcaatccctattgttggacactgaggttatttctgttgtgttcacgtaaagagcatctttgctgacattattgttttcccaggaatagatcctagtgggatctctgcctgattttcctccaaagagctcccctccccagctgtgggtgagaggacatagtgggccctccctagtgggtctgtgagctgctttctggctgcccagccgcaccaccctaccctgattcagggtgccctgtctccccatggtgctgggcaatgactgctcctggggcctgcaacgtgtggacctctgaccactgctcggctcgtgccctcttgctctgcaggctcccggcgggcttcgtccatcgccgcctcccggctggaggaggccatgtcagagctgactatgccctcttcggtcctgaagcagggccccatgcagctgtggaccacgctggaacagatctggctgcaggctggtgagtgccctggtcccagtgacacacacagcctgtctgcaggccacccatgctctcagagccctgtcctggagaagggagtgtggggaggtggggacaccttgctaggcccacgcgg

SEQ ID NO: 23379 - DNA, 2300 bp, Homo sapien
gaatttagaatcccagtattttaagaaactagatgaagtcctctagtctcttgctcctcaaaaagtcacctacagaatcacccaggagcttgttggaaatgcagaatcttaggtcctgccccagaattggaatcaatctgtttttttaacaagatcatcagatattttgtatgcatatcaatttttgaaaagcactgctgtaatctagtcttggatttacttagaggggaaaactagtcagtggtttattcaacaaatattttagtccttgtgttcaaaggggtcaattaaaaaccgtgttttgggtgtttaaaattagaggagaaacgatttgtcataaaatgaatcttccaacaatgataggcacagggtcctttgggacttagtggattaggcttagaggtctactcagaggagctgacccttgagattttccaggtggtcaaagaaaagaatagcatttcatgcagaagagctagcatatgtggagacaaatagaaatgtgaagatggcatgtttggggtttttgcaagcatgatacagcagagcatgccatcctaataagagaagtggccgggtgtggtggctcaacctgtaatcccaacactttgggggaccgaggtgggtggatcatgaggtcaggagttcgagaccagcctgacaaatatggtgaaaccccgtctctactaaaaatacaaaaattagctggcatggtggcgggcggccgaggttgtagtgagatcgcgccactgcactccagcctgggcaacagagtgagacttcgtttcaaaaaaaaagagagaagcgagagactggattgtaaatgttgcttttgtcctaaaggtaatgacagctcacatttactgactgcactgtgccagacatggttgtgaacagttcgagttaatcttttttataacctatgtggataggtaccaattttattatccccttctctatagacaaggaaataagcacagaataagtcattatatgcaaccagcgtccaagtcctggtagtcaagggaggagagtgattcaagaatgagggaataatcaatgcagcaatgaaaattgaaggccaagtttcataagagctgaaaatccccactggatttggcacttggatccctggtgagttcaggtgcaattttaattaaaagctgtgtgcaggccagattaagatgttttaaggaaagtatgggaagtgagaaaagagtccatattactcttgaaagtttgtaaagggaagcagaaacttcatggtatagggcagtggagctctagagtcaggtctggattttaattctggttctgccatttgtgtgtgatgctgagtgaactgtgctaaacgtccaaggaaacctttgtttcctcatccagaaaatgaaactaatacctactttgtagggttggtatgaagattaaatgagactaatgtgtgtgaagtccctggaatacagtaggtactgtataaaatgaaattaaggttgtggagggtttgtttttaaaggtgagaatgttcctaggttaagaagaagctacagcctagagaggctgacaataaaaagggtctatactgagaagaatggggtggtctgtggtttcacagctagtgaaaccggctgtgtctggtgctcactccactctgcaagtcagaagcaagagaagtcagccccagagtttctatttggaggagcttagaaacaatcttagaaagtgggtgctaaggcagatttctcttaagtatgcctaccaagcacactgcctccctgtctggggtgtgcgattggtggtggattggaagggaactaatggagattgtgggtacgctcaagcccttaacaagcctcccttttcgcagatccttacccgagggctctctagcaactccagagccctctagattttcttctcacaagctttcataaccgtctcttttcgagggttttcctctgcgcagttcttcgcgcgggacctcaaagtgcgtgcccgcttcccttccctgcagcactaaagacaaacctggcgggtcccccggagcggtcccaggcgcgcgcgctcgggagcccacgggccacacccgcctcctagcaaccggagctcaggttcagcctagagagagaggaggccaccatggaccagccagccgtcgccaccgcttccacctcaataagggaagacctggtgggtggagaatcattcatcacagcttcggtaagatggcctgccccttgccggcctggctcctgctcccctcaccaggcccactacccttttcccaccgctctctaatccca

SEQ ID NO: 23380 - DNA, 2300 bp, Homo sapien
ggagtaagcttttttttttaaataaacgaagggtaaagttttctttaatcagttttgataattgaatcagtaattcgaatagattttttcttggtagagttggtatctacgcatttgtggtcccttgcccagtgttaagcttttgtagttactgtttgcatcactggtgctttgggggttttctgttaaattgacagctcttactataagagacaaagtcgaaaaaaaaaatcttaataaaaattgacagatatcattatttgtgacagatacagtaaatttgaaaattgccttcacataactttataattagaggactgagattttacattaggaatccaattaaaaaaaattagccggacataatggcctgtgcgtgtagtcctggctagtcaatgggctgaggcaggaggatcatcttgggcccgggagttggagactgtagtgagctatgatcacaccactgcactccctgggcaacagagtgagaccctgtctctcaaaaaataaaaaaaattaggaccccaagttaaagtataaaaaattttatacggaagtaaagtaagattgctcatgtaactcttgagtttacatgtaatcaacatatgctcattgaaaacgggattgcttcaagaggactttgagtgcagggtgattaggtaagtaaaagatgtaaaaaggtagaaaatttttgtcacttgagtctaaataattgttcttataagtgccaacgcctgtttctgttaggctcagaagatcaaaggatttggctcttttaaaatatagaaagctctagcttcagctagaatttaggcctttagtaatagccctaatttttatgaagccattttgttccagtgatcttttggtgagagatgctatgtaagtactattcttcagaattaggtgtctttttaccctaatgaaataatttagattgcttttgatacaggtaaaacaaatatcctggcttccataattgtagaaaaaacttcatataggaatccttgttgtatcaaagtagcacctgatgggaatgaacagacaggaatggatgaaggatagcagtttgcgttccatttcaagcctatgggctcacacatttattcagataagaacaccacctttcactagataaactccaacagtattcatgcatacttttgaatggcatgtaggaaatgtttgataggtacataatgtattcacttcaggtcactaatgtaatacggggtcgtgctccttagtgttgacagatcacctatggttctccaaaatgaacattctagtacaggaggtctagggaggaacctgagagtatactaatgcctaggaactttctctggagtggcaagagcagtgggaagaattatgtcaatagctacagaaataagggagtaagaacaagtcatctctctagtgaattcttcttcactttactgagataaacatacatgttaatgagcttgagttttcccaaaagtataattcttctggttcttctaagaaaatggcactccctggaaacaaggaagaaccaaatttattcgcctttgtagcagttgggaaagttagtgctaggaagtcttcttgatttatagtaggctttaatctggatattgctggtaaaagtttattctaaaacctgaactctggataagtaatacaaaaagcttctcaaccttccaagcaaaattgagagctttcaggttatgtgagtaatttggtctcttgggtgcttaattcattccttgaagctcatttttgtgatctcttccaagattgcatttgcttggaggtagggagttagacaagatggtatgaggtccctaaattttgactttccaagcaaaattggacagtggttcctaaattgctaacatcctcgtttcttcctaaggcttctcatgtttcatatatagtagccttcccaaagtcccatttcccaccccccccccccccccaacccatgtagagagaacgaacctgtctcccttcctgtacagagtacgggatccttcaactttcacacaggctgcagtgtctgccacacatttagctcaacttttttttagccttaaagtgatgtccgctgcatctgtcgctgggttgcaccttgtggatttagtttgcataaattttctcagcttaaacaaagttaacattgaatagagtaagcttaccataaagggcttaataaatgccatgcatgtctacattcggtgtggaaattgagctagtcaggttgatatttaacattgtaggttctttgttaatttatatgaaataatggttatcat

SEQ ID NO: 23381 - DNA, 2300 bp, Homo sapien
gccagggatgccggcgacggttgtgtcgcaggtgctcccccacccccattctcttcaggggggcttcctctagtgagttgagggccggacgcacagttcccgaggtggtgaagctcctcgggggcttggctggaggaggatgggtccgggatgagggacagcccagtgcacgggaaggagagaaagtgaaggaagggagagagggagcgtagagagccttctgtcgggcgtctggaaaggtcaagcagggggcgaattcaatccacccgaccgacggttagtgcgggcgccaggaagcgcctttgtccgcttgcggccgccatgcgcccagggggcgggaggagcgcgcggggccctggggcgagcgtcggcgtcgcagttagcccgcgtcctccgcgtgccgggatccagggggcgcgcgggcgggcgggcggcgcgctgtgtgggccgagcccgcgcggcgcagggagcggccggtgggggcggggcgggcgagcgcctcgcgggacccggagccgccgccccgctcggccccgctcgagctccagctgctctgctggcacctgcaggactgcggagatctccttggcgctgcggggccattggcggggatgggcgggggaggggggcctcgacggtttcccatccccctctggcaaccctaatcttccttctccatctgggccctggggcgtcttccaccacccaggccggatgctttaaaaaaaattgctttttaaagtgtctgtcgttgaaagaaattagtcttacccttgaagtcaggggcgcgtcctcgcaatacacatcttgttagggaaagtgttcggctccagctagggttctacaaggcgtttcttgttcaccgccggagggaagcaggctccggagtgactgccttctgaaagtcggtcttgtaacaattggatggatgcctttgaagagcccctgtccctattctatgcttgaaaacagcgtgcagtcctaatgttcaagaaccacgaccacataaaaacattgctccccttctgctgctttgaaaacgacccctaaattccgtgtagaagttgccaggtcgtcttgacgtacacttcgtttgtatgatgtttgtctgtcaaatactgtgatggaagagtgtatgcgggggaggagcagggaatttttaaaagcattttccggtcacctcagactgggagatcatgttctttcctgaaaaaaaaaaaaaaaaacacctaatgagggcggtgatctgtgatacttactttgtggttcctcctgccaagtggttacagcgatgggtgtgtccaggaggcaaggtgacatcttaaacaggagttagggatccttgccaactgaaacctccagcctgtatgggtgtggggagacgatttcaccttaaataaaactagcgttcattgacgtttgatggatttgcttcatcttgatgcttcaaatgttattctgaatttgaatgtgctggttacatttgctttcttaaagatgtagttacaggcatatgtaataaacattacaagttgtggagtaagcttttttttttaaataaacgaagggtaaagttttctttaatcagttttgataattgaatcagtaattcgaatagattttttcttggtagagttggtatctacgcatttgtggtcccttgcccagtgttaagcttttgtagttactgtttgcatcactggtgctttgggggttttctgttaaattgacagctcttactataagagacaaagtcgaaaaaaaaaatcttaataaaaattgacagatatcattatttgtgacagatacagtaaatttgaaaattgccttcacataactttataattagaggactgagattttacattaggaatccaattaaaaaaaattagccggacataatggcctgtgcgtgtagtcctggctagtcaatgggctgaggcaggaggatcatcttgggcccgggagttggagactgtagtgagctatgatcacaccactgcactccctgggcaacagagtgagaccctgtctctcaaaaaataaaaaaaattaggaccccaagttaaagtataaaaaattttatacggaagtaaagtaagattgctcatgtaactcttgagtttacatgtaatcaacatatgctcattgaaaacgggattgcttcaagaggactttgagtgcagggtgattaggtaagtaaaagatgtaaaaaggtagaaaatttttgtcacttgagtctaaataattgttcttataagtgccaacgcctgtttctgttaggctcagaagatcaaagg

SEQ ID NO: 23382 - DNA, 2300 bp, Homo sapien
attaaatctcctttccccccaccatcattacgtcaccacattagcgaggacaatagaagcacagggtcctgagtttgcactgactggtcattcatctgaaaagaaggtcacagggttgccaatgctaattggaagagcatttaatgcctggtttgcatgactgaaagaaagaggacccacctctggcctggcaaagaaaagatttttgatggtgtgagaaaatgtctaacttggctaaaggaggttaaattccactgaagccttccaagtggatgcaggtagctgttagcatcagaaatggtcttgctgggcagggcaatgttctctagggagctgtcttcagtaggcaagatttcaccttggcttgcaaaaaatgctgttcactgggttttaagggtctacatgcttgtgctttttactggaaaattctcagaccttgatatggcctgtgatgatttctttttttttttttttctgagctggattctaccaacaatcttcttaaggaactgccttttgagatttaaaccttattcctctttaatttcccagcgtcctctctgcctaacgaggctggctgtctactttgggctttagtaatgcctatccccttgcaactcctccatcataccacgcaattacacacctccgggcctttgctgttacttacttcacccagaacttgctcccttctttcctccctgctttttcctagcccattttataacattagacaatttaggagttaccttctctaggaaccctttttggaacctcttatagaggactaaggtcctcacctctgcatctcgtaagcccttctatagttacaattataatcaaaccgagtttacacagtaggtgttcactatccacctgttaaatatttcaggtatgtacgcctttgtttattttggatgggaccaagcagttagtttttatgtggtttttaaaatattcatttaaatctgtggagttagaaatccaaaagggcaaatttcctatgaaggggaaggcatattatagtgaccaattgttggagtcctaccctgtgccaggtactttaacactttgttaattctaatctttgcataattctaatttcctcaatattctttcgagataggtcttattgcctgtattttacaagtgaggctaaaaattaaatgactcacccaaggtcttgcacctgagagagggacccaactaactcatgcccagctctgtccaatccagaaccctttaaccccacgataacaaggggccatttcgagatactaatcccactgaagctcggatactgtgacttttgagttacttttcttttctggtaaattacccttggcaaagaacgcgaagaggaagtataaacgaaataccctttgagattagcctgtcagctgaacagctacatttgcccgtgtccagatttacatgggttttgtgagggcgtgaaatgaagaacgtgcggcttccatgaggccaaaacactaggttaaaaagctgagttcagggtacgcgtttatcggaatctttcagcttcattctttatcggcttaaggtgttttcgtctacccctcaataaggggcgggaaagtgggtgagtgtggcagggaaggatacgtggaagaggaaggttctccagccaagcgcaaagcaggcgactctgccgcctggcgcagttgccaggacagcgcggcccgagcagcaacggcagaagccgcaccgcgtcccggcggcggctgcgagtcccagtgacgcattgcaggtacaaaccagccaatcagaggcaggctcaacgaccaacgggggacgcatcgccgccacgatgctcctccgcgccgcaaagtagcgcccctcaggggccgctccaccggccttttaacggctcgctggaaatgaaacccacttacgtcatccgttcgcccactttccttgatctcttgcctcatcgaccaaataactgtgaagaaaggggtcccgagaagagtttgaggggagggggttggccgggactcgtttgcgatgttccgttatctggatgcggcggagggatctggcggagggaggtgtttatgaggcgctgggggcggaggaggcgaattagtccgagtggagagagcgagctgagtggttgtgtggtcgcgtctcggaaaccggtagcgcttgcagcatggtgagtgcatcgctgagctgccggcgctgggcctgtggggggaagagactggagcgaactgactaaacaaaggaaactcgcctcccttacaccttcaaggagtggtttctgccagagggatggc

SEQ ID NO: 23383 - DNA, 2300 bp, Homo sapien
tctcctttcttctaagagattatttgtataaattatagatcatagcatagaatggtactttggtaaccatctggtgttcatgttttgaacttgccagatgattagaatccaccaggatgctaggtttaaagatacagattccagctccctgtccccacccctgatttagggaaggggcctgtgactttgtatatttaacaaacactcaaggttattctgttacaggaaagtctgggagacacagataggtttcaaaatgaggaaatagaggcccagatagagggaatgtcttgctcaaggtggaactggtcagtcaggcagaactgggaataacatctagatttcccaactctgttaggccaatgaaagttttttgcacagcacaaagatcacttatgaaatttaagttcaagatacaacaagacacaaaacataaaagcagatgccaggccagacatctattaggagcaccagatgtacctgggacgaactggttactgtgactgatcactaaactcagcaaccaagggctctggcagccaagtctgcagcagaaatgggttgggttattccattccattcatggggtccaataaagtgatgcataataatttcatttgataagaaaagttttttcctttaacaaattttaaaatcttccaaaccctcagcttcctattatgataattacaagagaatacgaaaaataaggatggaaaaaaaatggtaaaaggagagatctatcctgtcccagtgagaatgatttcttcagtataatttatctcctgtgggtagtctggagtctccaccctctcataggccctcaatgactatgtgtttgaagggccttcaggatagacttcttgaaaacagatctttctctgatagtgcctaacattcttcacagtgtgggccatgaggcctgaaaaggacaagcacggtgagacccatggcgagttgtaggaccctctgggcctttgtggcccacctgggaaggggaatgtattagtctgttctcatgctgctaataaagacatgcccatactgggtaatttataaaaaaaagaagtttaatagactcatagttccacatggctggaggcctcacaatcatggaggaaggcgaggagcaaaggcacgtcttacatggcagcaggcaagagggaatgagagccaagcgaaaacggtttccccttataaaaccatcagatctcatgagacttattcactaccatgagagcaatatgggggaaactgcccccatgattcaattatctcccaccgggtccctcccacaacacgtgggaattatggaagctacaattcaagatgagatttgggtagggacacagccaaaccatatcagggaataataaagccataacctcctgaagggggtgggtgtgatgccctcctgagcccctgcagctagagcatctgtgacgcactgcccagctagtctgggcaggagcaatgtgttggagtttgtgcacatgtgtgtgtgctgggcgtgcgatgagcaccctgccacacatgtgggagctcagatgccacactcttccagagctgtgccacagtttgactgatctgtgactgcaaccgctccagcaaagctggactcttggggaaagaattttctcttcccaagcttgctgtgtgggcccgtggggagacacacaattgcctttgtcatttgttcttcctgtgtggggacaaaagccctttcacttgctgtggaatgtacaagaagttctgtgccgaagggctgccaggcgctggcctggaatccgacaaacaaggaggagttggggagatggccgtttcagcctgaggccccccacctcctggtcctgccatgcatctgtgtggtcggggactgccaagagggtccccaccgtctgcttcttcaccactgtgtgcacctgcatcactgccacaaccctgtcttaatcatggcctgagacactgcagcctgccacaggcgggcactgtgccaggcatgggttttgtcaactcattcaaccctcccaacgaatgctgttattcccactttgcagcagagggaactgaccttcagaagggagggtctgggaggacagtgctgagactgaaacagaggggctgggacatggtaggaggaacaggacaccacaacccctcaccctgcactcacagctctagggcagaatggagcctcaaccctgggtgtttatgctgtgagctgaagtttaagcaaaacaaaaatagagaacttaggtggggttggggtgggggtagaacccgccaacacgaaacgtcat

SEQ ID NO: 23384 - DNA, 2300 bp, Homo sapien
gcttccagtagctcctatcagagctgagctgaggccttagactggggttaaaagagaggtgaagtttcccgctgcagcactaaacacatcactgaaggcctacggagtaatccttgagcatcccctgactcagagcactgccaccgcatcagcttcttccagatgccaagaagcacctctgggtcttggggttccggcttgtttgtgtcacaagtaataacttgtattttatttgcttttaaaaactggatatgctcccacttctcagcctctacaatgagacctgtgtttcgtgtttttcagtgtgcctttgagaaaggcccataaacctataaacaccctttttctccccaaggtgaggtttgaccctagtacttactaccactgtttactggagagtcatgttgagaacatctcctttaggctctatttctcatcctaagggatatatccagccttcattatggaaggttttgaaggcctcaaataaaatcaaagtagaatttgaataaaacatcttggctgggcacggtggctcgcatctgtaatcccagcactttgggaggctgaggtgggcgggtcacaaggtcaggagatcaagaacatcctggctaacacggtgaaacccccatctctgctaaaaatacaaaaatcagctgggcgtggtggcgcgtgcctgtagtcccagctactcgggaggctgaggcaggagaatcgcttgaaccagggagtcggaggttgcagtgaaccgagatcacaccactgcactccagcctggcgacagagagactctgtctcaaataaataaataaaacatcttaaagaaatagaaaatactagtagagtattcactctgatttcagaatcaatttgtggaaattcagtttcacaagaatgaaaaaagccccctaagcaaggtagcttttttttttttttttaaagatggggtctcactatgttttccagactgatctcaaactcctgggctcaagcaatcctcctccctcagcctcctgagtggctgggactacaggtacacatcaccaccaccctgctaggatatggtagctttttaaccaaaacacaccaccatgcaatggagagcatgtaacttgttatttggtcatacaaatacatcagaataaattccacctctcttgtggagccctttttcctacatctgcacagaaactggcactagcaggactgcaaccgaggcagactcgagaattagcagactctggctcaggcaggacaatagagcagcgggaaatttctttcaagggcttttgttgctgttgttgagatggaatcttgctgtgtcacccaggctggagtgcagtggtgctgtctcggctcactgcaatctccgcctcccaggtttaaacgattctcctgcctcagcctctcaagtagctgcgattacaggcatgtgccaccatgcccagctaatttttgcatttttggtagagatggggtttcactatgttgctcagggaggtctcgaaactcctgacctcaggtgatccgcccacctcggcctcccaaagtgttgagattacaggcatgagccactgcgcccggcttgagaccttgaggggctttttaaccaagagatggtgtagggacagaagccagcaagaagaacatggtggactctctgtgaggccccaaaccccaaatcatgagcctccgccccctgaaagtattccaggatctctgagggaggttttgggagggggccaaggtcctgcaattgggtgggtggggctccaagccattgttctttgcacattcatgccaatgtgacctaattggctaagcacaggctggagaagctagataaacctatttaaattcagagccaaaagacactcaaggatgttttctgagggggtgtgagggttggaaaatcatcctatatttgatttatctcccacctcatgtcctgagtcaattccttagtcttagatgagggagacgacttgggagtcatccttgtttttgatgagctatataaccctatggccagcagagggaagtactgcatttcagagcgacaatttgagatctatgaaagaatttcaatcgagaataagaggccgggcgcggtggctcacgcctgtaatcccagctctcagggaggctaagaggcgggaggatagcttgagcccaggagttcgagacctgcctgggcaatatagcgagaccccgttctccagaaaaaggaaaaaaaaaaacaaaagacaaaaaaaaaataagcgtaacttccctcaaagcaacaaccccccccccccttt

SEQ ID NO: 23385 - DNA, 2300 bp, Homo sapien
aggctggtctcaaactcccaacctcaggtgatcaacctgcctcagcctcccacagtactgggattacagaaatgagccattgcacctggcccagtgtctacttttctttatcaggctaaacagctcaggacacagatagaatttggacttaggtccgtgtgaatccaaagggccatgctcaactgagcagccggcactgcctcgctgaacagccaggattctgggagtgctactttgtacaacattttatgaaatgtttctggcctccttctagaccagagcagaaaggggtggttaggatgttctaaataccaaccccctctactccatccccaggttcatgacaactttttaagctgagcatactgcaatcacttaattcttctagacctaagataagccagtagccacgtccactctgagcctgtgagcaggcaggatcaagtctaagagcatctcttctttggaatcttaaggcctaggatcccagcagttttggggtctaaagacttttcaggctcccgaaactccctctatttttaataattttaaatgtttccccaatacttagctaagcaaagaaggaaaaagtgtacttttattacacagtcagttctggataattctaggggaaattcttccattttagaaatctctgctttcttcttttctcccagattcttctcattaattccctcagtaaatatttgtctgtggcagggtgcagtgctcgtgcctgtaatcccagcacttttggaggctgaggtggacgaatcacctgaggtcaggagtttgaaaccagcctggccatcatggtgaaacctcgtctctactaacagcacaaaaattagctgggcatggtggtgcgtgcctgtaatcccagctacttgggaggctgaggcaggagaattgcttgaaccaggaggcggaggttgcagtgagccaagatcacgccactgcatgccagcctgggtgacagagcaagactctgtctcgggaaaaaaaaaaaaaaaaaactatatatacatacatacatatatatatatatatatataaaatgtacatatatatttatctggcacctactagatgccccaggtaccatggtaggcacaggtgtacagtgatgaagagcattttcctataaaatattacccaggctgactccaagttttaatacctcaggtaggaaaaggaggagagtgttagtaaaatgtttgccgttgaatttcaccagcgtaaaaacaacattctgggaaataattatctgcacttcagttctttggggtggtaccggagggaatctttacaaaggtggtattaatggagaagaggaagggaaggatccttagtgatgggttgtttttccaagcacctcgatctagtggatttcctttttttttttttgagatggagtttcgtttttgtcgcccaggctggagtgcaatggcgcgatctcggcccactgcaacctccgcctcccaggttcaggcgattctccagcctcagcctccggagtagctgggattacaggcactcaccaccacgcccagctaatttttgtatttttagtagagacggggttttgccatgttggccaggctggtctcaaactgatccgcccacattggcctcccaaagtgctgggattataggtatgagccaccacgcccagccagtatttcctataaataaatgctcctataaataaatagtacaaatacctttccaaatctgagaactactagtgagcatcagttttagagataaatagaacaaagctccttttctgcagtaagaatatattagcttaatgttgctttttaaaaaagtttccactgaccttaaaaacactgaaatccaagaaattggattctggaatctgagggcgagggaatcccagggttgtggacacgcggtcacatcaacaacaaaaacaaaaaggaaatgaaaaaaaaaaagggacagcagcctgaaatactaagaatccaggtccctgcaggaagcccaggggactgccaggaacacagccccatcccggccacgtgatcattctctagccttcccctggggcctggagacaaaggagaggggaggagacttggggacaaagagcaagagctgtagagtctagccctggggtgaggatgccacggctacccggctgtgagtttctgcctttgttttttgatctttcccaaaggaagttaaacattaatccgagctgtaaaaggactaagtaagcaaaggtgcctgtgagaacctctaaggcacctggtcatccagtctgcccgccacac

SEQ ID NO: 23386 - DNA, 2300 bp, Homo sapien
ttctccccactttgaacctacatgctaggagtgctgatgaagttctgatggggctaggggagccgcggtccagatacagcctcatgccggtgaactaagcgtcactggaacaatgcatgggagctgcctcagtgcctgctgcctgcgctttaccttcagagcagtaaaaaagaaaaaaggctgctgtttcctacaccttccaaacactgcaaatttctctggtagccaacgctaacccagaatatacagggacaggaattctgggaaatgttccagctcagctaagttgacacagaagaaagccactgcacttcttcaacaccaagcacagtgcctacgaacagatcctatacatagggcacttaataaattgtgggggttttccatcaaaggtacctttgttttgaaggtcagaaggaactacggatatctgcaacaacacggagaaacctcagagcattatgctaagtaataaaagccatatataaaagagtacacactgtattagtccattgatacagaattctaaaacaagcaaagctaatctatggtgacagaaatcagaacaaagttgcctgggacagggagggagttgggagtcccctcccttgggaaaaggcatgaggaaatccttaggaggtgatggaaatgttctatattttgatagaggtgtgggctacacacgtgtatgcatttgtcaacactctctgtacctctaagagctgtgcgttttattatatgtaaattattatttttatttttatttgagacttgggtttcactatgtttcccaggctggacccaaattcctggcttcaaactattctccagcctggcctcccaaagtgataggattacaggtgtgactcactgtgttcagcctattgtaggtaagtatctccattacaaaaacaaacaaagaaacaaacaaaaacaaaattaaagaaaagtggtgccctcagagctaattacagattaattaaacaaccatgaaaaaccttatatctgcctagctggccatttttaaaactggcctcataatgagtattttcgctctataattgggaaagcatcgccaggagtctcagaagaacatgcaataccaaaattcctctccatcagccacaagagaaatcagagaggaacagaagcaggtaggagacaaaggcaaaactcctaataacaagacaaggaaaataaactcaacactgaactacagaactagaatttttattcctttttccttgttttcaaaaatttaaattaacagtctgttcaacagagatttggtttctaaactgcatctagctctcactgtacccatgtgtgtgacagaaagagagagaaagagtaacaaacgttccaaataatggaaatcatcataaatggaagctaggggaagcagtttcactgtacccagaggaaatggattccacagccatgcaaggacctgaatctctgtccggctttcaccttgtcttcttgactggcctcgttgtcatgacatttgcaatttttttaaacaacatcaaagaacaaaaactatctcccttctcaccattggtcgttacctgatacccatttatcagggagcatacttttctgtaatgaatttatttcagcatagggacagcaacttaaggcataaatgctaagatggaggcagaaaggaaagaggttcgcccagagatccaaaggagaagtgggaggggagactctgaaaggcagggaagaaccccgaaaggaggggctgggggctcgagctggttgtgaaagcctttcccctttacgctttgctctcagtgtggcgggcagactggatgaccaggtgccttagaggttctcacaggcacctttgcttacttagtccttttacagctcggattaatgtttaacttcctttgggaaagatcaaaaaacaaaggcagaaactcacagccgggtagccgtggcatcctcaccccagggctagactctacagctcttgctctttgtccccaagtctcctcccctctcctttgtctccaggccccaggggaaggctagagaatgatcacgtggccgggatggggctgtgttcctggcagtcccctgggcttcctgcagggacctggattcttagtatttcaggctgctgtccctttttttttttcatttcctttttgtttttgttgttgatgtgaccgcgtgtccacaaccctgggattccctcgccctcagattccagaatccaatttcttggatttcagtgtttttaaggtcagtggaaacttttttaaaaagcaacattaagctaatat

SEQ ID NO: 23387 - DNA, 2300 bp, Homo sapien
gatttgttagtactattcttttttttttgtttgtttgttttttttttttgagacggagtttcgctcttgttgcccaggctggagtgcaatggcgaaatgttggttcactgcaacctctgcctcccaggttcaagtgattctcctgcctcagtctcctgagtagctgggattacaggcgcccgccaccacgcctggctaacttcttgtatttttagtagagacggggtttcaccatgttggccaggctggtctcgaactcctgaccttaggtgatccgcccgcctcggcctcccaaagtgctgagattacaggcatgagccaccgtacctggcctaaataccttatttcatataccacgtgaaatttaaattatacaaaacaaattatagaggtacttagaacagcatgactatttacattaatcaacttgccggcacttcaacagaatacaacatagaaatgattgttttaatataaacataagctttgatttgacatatacttgtagaaattaatcaaacttagctgaatcttaaaattgcttttttacctttcctcttttttttttatttttttattttttgagatggagtcttgctctgttgccagactggagtgcagcggtttggtctcggctcaccgcaacctccgactctctggttcaagcgattctcctgcctcagcctcctgagtagctgggattacaggtgcctgccaccacacctggctactttttgtatttttagttgagatgggtttcaccatgttggccaggatggtctcgaactcctgacctcggatctgcccacctgtgcccccagcaaggtgctgggattacaagcatgagccaccgtgcccagcctcctttcctctttttaactcttacttttatgatttctttagtggataaaaagcttttaaaaaataggttacaatgatattacagctaacaaaaaataacatttaaaaacactaaatagtatatatatgaagtatttataattattttaatattgtaataatatagtgtgttgtgatttgaattcatctgcacggaaatcgattactgtcctttctttctatttccctatattttctttccgaaggcgtcatcaacattttggttctttaatagtaaccaaaacccgaaatcatctcggttctcagtatttggctctatgggaacaccttttcttttctctctttttttttttttttgagacggagtcttgctcctgtcgcccaggctggagtgtaatggcacgatctctgctcactgcaacctcagcctccccagtagctgggattacaggcatgcgccaccacgcccggctaattttgtatcttttagtagagacggcgttcctccatgttggtcaggctggtctcgaacttcaaacctcaggtgatccgcccgcctcggcctcccaaagtgctaggattacaggcgtgagccaccgcgctcagcctgggaacaccttttcttacatcttcaagtgctagaaatgcttatgaaaacgaaaaaagaattattaagagtaattataaagaaacactcattttcttcccaagagagccaagatttcttctttcctcttctttcttttttttttctttctaatttcaaaggagtataattaaattgccaggtaaaagctcaaaggtcttttttatagtgttctggaaggttctctgcctgtgtttgtatttcctttagcctccacgttcctctatccagttcccgcacccttccccccaggccccattcttcaaggcttcagagcagcgctcctccggttaaaaggaagtctcagcacagaatcttcaaacctcctcggaggccaccaaagatccctaacgccgccatggagacgaagcacctggggcggggcggagcggggcgcgcgggcccacacctgtggagagggccgcgccccaactgcagcgccggggctgggggaggggagcctactcactcccccaactcccgggcggtgactcatcaacgagcaccagcggccagaggtgagcagtcccgggaaggggccgagaggcggggccgccaggtcgggcaggtgtgcgctccgccccgccgcgcgcacagagcgctagtccttcggcgagcgagcaccttcgacgcggtccggggaccccctcgtcgctgtcctcccgacgcggacccgcgtgccccaggcctcgcgctgcccggccggctcctcgtgtcccactcccggcgcacgccctcccgcgagtcccgggcccctcccgcgcccctcttctcggcgcgcgcgcagcatggc

SEQ ID NO: 23388 - DNA, 2300 bp, Homo sapien
cgccactgcactccagtgtggtgacagagccagacttcctctcaaaaaaacaaacaaaggttccaaggctctactccagaaattaagacccattatgtgtgggctgggcacaggaatatgtttaaatccccccccacctccccagggtgattctgctgctgaattaggttttggaaccacttccatggggaaagggtaaactaaactggagaatgcaaaaaccttttttttttttttttttttttttgagacagagtctcaccctgttgcccaggctggagtgcaatggcgcgacctcggctcactgcaacctccacctcccaggttcaagggattctcctgcctcagcctcccaagtagctgggattacaggtgcccaccactacacccggctaattttgtgtgtgtttttagtagagacggaggttcaccatgttagtcaggctggtctcgaactcctgacctcaggtgatctgcccgcctcggcctcccaaagtgctgggattacaggcgtgagccaccgcgcccggccagcaaaaaccttttctaagagttaattttgcaggatggatcctgagctccttcaggtgtttgataacattttatttattttttgagacagagtctcgctctgtcaccgaggctggagtgtagtggcgcgatcttcgctcactgccccctccacctcccaggttcaagagattctcctgcctcagcctctcgagtagctgtgattacaggcgcccaccactatgcccggtaatttttgtatttttagtagagacggggtttcgccatgttggccaggctggtctcaaactccggacctcaggtgatccacccgcgttggcctcccaatacgctgggattacaggcgtgagccactgcgcctggctgtttgctaacattttaaaatttcaaccttcctcttccttaactggtcttcccctaccccccctcaagacggggtctctcgctctgtcgccccagctgcggtgcagtggcgtgaacatagctgacggcagaagacctcctgggctcaaacgatcctcctggctcgtgctcccaaagtactgggattatggcgtgtgacaccacgcctggcgtcaaacgtttgtctttttatttattttattttgtattttttgagacagggttttcaatctgtcgcccacgctggagtgcagtggcacaatttacggctcaccgcagcctcgacctcccgggctcaggtgatcctttcgcctcagccctgctaatatctgggatcacagacgtgggttttaccatgttgcccaggatggtgtcaatctcctgggctcaagtgatccgcccacctcggcctcccaaattgctgggattacaggcgtgagctaccgcgccctgccacaaacgcatatcttctaacgtaccatttcatttacttgctatattcattatctgaattttctcatattagaatgtaagcagaataaaggcagtgatttttctttttactggcgatcctcagagccaagaagagtctgggacatagcaggccatataaatgttttcgaatgagtgaatcatcaacgagtggatgaaacgataatgtggctaacaggcagcagtaaggaggctgtgtagaataaacccgtaatcccgatgttggcagtttgcttagaaagaaaaagggaggcagtcggagaggggcacacgttttaacaaaatactgggaggaggaggaaggctagttttttttttgttttcaagtttccttctgatgttactcccatgcttccgggcacattacgagctcagtgcctgccggaaatctcccacctggtggcaacctacccttgcatacaccccacccaggggcttcaagccttgcagctgagtaaacacagaaaggagctctactaaggatgcgcgtctgcgggtttccgcgcgacctaggcgcaggcatgcgcagtagctaaagtcaccagcgtgcgcgggaagctgggccgcgtctgcttatgattggttgccgcggcagactcccacccaccgaaacgcagccctggaagctgattgggtgtggtcgccgtggccggacgccgctcgggggacgtgggaggggaggcgggaaacagcttagtgggtgtggggtcgcgcattttcttcaaccaggaggtgaggaggtttcgacatggcggtgcagccgaaggagacgctgcagttggagagcgcggccgaggtcggcttcgtgcgcttctttcagggcatgccggagaagccgaccaccacagtgcgccttttcgaccggggcgacttct

SEQ ID NO: 23389 - DNA, 2300 bp, Homo sapien
tccagagcaccctggtttgggacaatcaacaccccaagtcaaatgcctttcagctttcagcagctctcctgtctgcgaccggccctagtttcgaaggcgggaaatgctcagtgagtagtggagggaacacttttagtactatgacccgtaattgactgacgctgctgccaccactttgggttgaccttagcccgggattggaaatgggcggtagggcagggggcaggggtctgctttttgccaccgctcacccacctgggatatctaagtacagtcaccattattatttttattttctgccatcatatcatcaccagggtcttgcttcccgcagtccatagtaagcgggaggacagggaaggagctggctgcccgaagaggatgattttccgcctgtactgagggtgttccacgccagaacttttgtggccccggcaaagccggcttgtgtccagcagaggagcacccgcagccgcgcggggcatccgtcgtcttttcctgccgcggtggggcgtaggggggcgaccatttcccaggggcgttccatagcacaccgttccccgcgccggcctcaggggagctgccagtgagcttcccctacacctcctctattcctctactctctaccgcacccagggtgttattccccgccccgggctagaggggtcggtgagctggggtggcgcgaggagcccggcagtccgccgggcctgggctctttctccctgtggcaccttggccccctacccgcgcttgactcctcccccgtctctattccgcagcgtccccgccctgtcagcagcctgcttcagcgaccgcacctgcctcgggtggcgggtaggggggtgcacacgggaggtagaaaggaaaacagggaaggtttggggtgcacagcacagcggggtgagcagccttgcccgcgcctcggacccctggcagccctagcggcgcccgcccgcggctgcggcaccgatgcgctgtccgcggtgctgacgccggccgcccgctcggtcgggagggggagcaaacgccctcgttcccaggtcgcccggagcccagcgaccgcctctccccgattccccgtttccagtggaacccgctgcgtcctggggctgcggttcgatccagggcaaaggagtgaacgaagggaacttaaacttcggactaacgcccgagaatccagtgtcggcgattcgcgtcgcgcggcctccagccctggagacctcagagcaccaccaacttgagcaaagtttcaccgcggcatgagataagggagagattccagaggcgaagcgcagggaggagcaagacgaggttccccggcggagtggtagcccgcaccgcagtcggacacctgctccggtgccccgcattggtgccgccagagccaccgggaggcgtcgcagcagcccaactctccaccccctccctcctgtccctactcacccctccccaacaccccgccccgggcgccagtgactccgcctctccctgccgggcggctcttcggctggagctgagaaaggagcgcttccccggactcggctcggctccgaggctctgaagccgacgccgccagctcagccccgggggcgggagcaggactgcccgcacagcccgcacctaggaggcgccgatcccgaacgcctcatgggacgcccccgggggctctctccacgccttgctgccgcgtcccggtcctaggcgcccgggatccacggcccaccccgcccgcagcccgcggcctgtctggagaggagtatgaggcccggggccccgcggacgccggccaccgggcggcaggggcctagctgcggagccccgcgcccgagagcggcgggtaaggagccgcgggagccggcgaggcgtcggggcgcgcagaggagcgcccctgcccgggcacccgctgggccacgggactcgcgtgtggcctgagcgccggggaggaggcggaggcgcccctctgtccgggctctgggaaggcgacgaggggctctgcgaaggcggcgaggggctccgcggcggccccggacccctggccaccatcctcacgctcctgctcccgccggggggatgtcgtggcccgggccccgagcgccgccccggccccggggctgagctccggaccatgtcctcccgcagcccccggcccccgccccgccgtagccgccgccgcctgccgcgcccctcctgctgctgctgctgctgccgccgttcgcacctcaacgaggacaccggccgcttcgtgctgctggcggcgctcatcggcctctacctggtggcgggtgccacagtcttct

SEQ ID NO: 23390 - DNA, 2300 bp, Homo sapien
tttctttctacttttaaaaatgtgtgtactggaaatgttaaaatgacacaagtggctggcattaccttcctgttggacagtgctggaccactatcatctgctggcttcccacagctcttaaggtgcagcaactcccaagcctgtcattcctcccacctgccttgacagcctcatctggcactcatttgtaggatggatgtctgttgtcccaggtagtggttactccattcatctccatccatgctctgtgcaatcagtgatacgggaacacactgtggaactggggaatcagggacttggaatttaatcccaacattgccactaacttgctatgggaccaggcaagtcccttaaccaacccccacccaaccctgctgttttaccttccccactttaattatatagcctgagtgagaccaactccaatatcccttcctgctctagaggttctgtttttcccttttttttttttttttttttttgacaaagtcttgctctgttatccaggttggagagcagtggtgccatctcagctgactgcaacctctgcctcctgggctcaagcaattttcctgcctcagcctcccaagtagctgggaccacaggcatgtgccaccacacctagctaatttttgtatttgttgtaaagatggggtttcaccatgttgcccaggctagtcttgaactcctgagctcaagcaatgtgcctacctccatgagccaccacacccggcctagaggttctgtttctttacaggagcctcgggccatgtacgttctgcttggggataaaaggagaaaaaggaactcttaaaattattgttggggctgggctcagtagctcacacctgtaatcccaaccctttggaggctgaggcgggcatatcatctgaggtcaggagttcaagaccagcctggccaacatggtgaaatccgcctctactaaaaatacaaaaataagccaggcatggtggcgggcacctgcaattccagctacttgggaggctgaagcacaagaaccacttcaacttgggagccaggagttgcagtgtgctgagattgctctgttacagtgagccaagatcatgtcactgcaccccagcctgggtgacagagcaagagactctgtctcaaaaaaaaaaaaaaagttattcttggctggccacggtggctcgtgcttataatcccagcactttgaggagccaaggtgggaggatcactttagcccaggagtttgagacaagcctggacgatatagcaagaccccgtctctactttgtattatataatttttaaaaataaaaataataaaattatgattgttatttggcgacctgtatcctttgtctagataagcaactggaggaggtacaccaggcctgtctttttgaccctgggcccgaatggtgacttttaagcttgctgcatttcacccaggcaaagtaggttctgctgccaggcttttgcccccatcagtccctctctatcaacattcattcagccaacttatattgagtgcctaatatgtgtgaggcactgggatacactgatgaatacaccacgatctgcttgagcactcagacctgaggggcaaagacagtccatccacagacaaccgtaatgcaaggtgtaccttgtgctcaggaagctgttcctgctaagggggctgggggtcagggaaggtttcctgggggagggccacctgtgctgtgtttcgtggggtaggtgggagttagccagctgaagagaagtgggagagggaaggcattccaggcagtgggaacagcttgagcaaagacacagaagcaaggcacagcttggtgtgggccggaattctaagtcctctagtgttgttggagcttaaaattcagtggtaggagaggaagctggagaggtgggcaggaggctctgcttcagggcagcacttagaattcctgaggacatccaggcccactgcctggttcattttccctacctcttgccttcttttttcctggtttaggaaagatacaaaattcttgtgtgcagcctcttttggactccagctcttgttctctcgctgaatcccaccgccaccccttcaagtcatcggctgtgattcacctgtgggtttctgaaggctagaagcttccacaatgagccaggaaacaagttctgattggctgggaacagacctctgctccaagattcagggctggcagtattccttctgttctggtggctcgatcttcattgctttcctctggacttgtaagttattccaacaaaccccagctgctctgcagtgaaatgttccaaat

SEQ ID NO: 23391 - DNA, 2300 bp, Homo sapien
aacaacatagggctccagaaccagcttccttgagtttaaatccaggctccaccacttcctagctatgcagtcatgggcaagttacttgacccaactgtgcctcagcttcatccatgatatggagatacaggataaccagcctcttacgtgcaattctgaaatccaaaaagctctgtaaaccaaaagtttgggggtaaactcatttggtagcaaattttgacctgaggctatttatagtctatattctgtattctttctacttagtatgaataagcatgtaagttttactgcatgtttgatttcagcatgttcccccagactctctgggggtgtttacgtatgccggtgggggaaagagaccaactctcaaatattatctcaaacagttggtttcactgtgcttgcttgggtagcacatataccaaaattggaatgacccctgcacagggatgaaatgcaaattcgtgaagcatactgtatttttcttagcacataccacctttggcaatattctttttttttttttgagagggagtcttgctctgtcgcccaggctggagtgcagaggcgcgatctcggctcactgcaagctccgcctcccgggttcacaccattctcctacctcagcctccccagtagctgggactacaggcgtgtgctaccacgccaggctaattttttgtatttttagtagaggcggggtttcactgtgttagccaggatggtctcgatctcctgacctcgtgatccgcccacctccgccccccccccgaagtgccgagtgctgggactacaggcgtgagccactgcgcccggcccccgccttttttttttagattgattttattacttgcctagcaaaggagaaccttctggcagaacagtctccaagaacaaggcaaacaactaattttacataggtttttaccaatgtacagctgttgattgtgactggtttccggcaatctggatttcacaatctggataaggggacaaacaattgtctgtcttccactatctttcttgaatttgaatagaacctttttattctcatagcctcttagctttctttcttttttttttgagacggagtttcgctcttgtcgcccaggctggagtgcagtggcgcgaccttggctcactgcaaacgctgcctcccaggttcaagttattctcctgcctcagcctcccaagtagctgggattacaggcgcatgccaccacgcccggctaatttttggatttttagtagagacgggggtttcaccatgttgactaggctggtcttcaacgcctgacctcaggtgatccgcccgcctcggcatcccaaagtgctgggattacaggcgtgagccactgcgcccggcctctcatagtctcttagctttctaaaatttgaaaaatcctgtaaagacacacctgggtcaaagggctcagataacggactgtggcccttaagtacttacgtcacaggttattgagaggatcgatttagttaccagatgtaaaatgctgggatcagtgcctggcaaaggaaaactttgtacagctgcaggctttcaccatacacaacagcatcgctaacgaatgctattacaatattcatttagcgtttaccaagtgcctactctatacaaatcttgagaatacaacgtgaaggtgaactgctgactaaagtttggtccctttcgctccgtctccttgcgaaaatgctctaacggcaggaggtcacgcgagcgctggacgcgtttctccccgcgagcccctttccgaggcctttcgggtccccccggttatccccgcccgggcggtgcgcgcccccgctgttcccgcttccgctccagagaggcagggctttccgagcctgctagccccgcggccgcaactaaccccgggtcggagtgttccggcccggccagccccgcggcgtgagggaaggggagctcagcagttccccgcgcggggcccaggcgtcggcggcagggcgggcccctcaccgccagcgtgccagccccgcccctacccaccagtgtgccagccccgcccttccccacgtcgccgcgcgcccgggggcggggcctggcgcgcaccgcccgcgcacggcgaggcgcctgttgattggccactggggcccgggttcctccggcggagcgcgcctccccccagatttcccgccagcaggagccgcgcggtagatgcggtgcttttaggagctccgtccgacagaacggttgggccttgccggctgtcggtatgtcgcgacagagcaccctgtacagcttcttccccaagtctccggcg

SEQ ID NO: 23392 - DNA, 2300 bp, Homo sapien
cagggaagctgaaagatcattatcctctgatctatcatattaatgagctgcatcctaaaagacattcatctataactaagctcagtttcatgttttgttcctttttcaatagataagatagggaatgagcaagttaataaagtgggtattttaattttaaggttgaaactaaggatcataacattatcagaggtctagaactggatggcagctacagagatcatttagcctaatactggtttaacaaataatccgggagatccgtgatatgtgaatgtgctaggcctgagatgagacagccaattgtggaagagcaaacactagaaccagtataagttgcttactgctttcttatgctattaatgagcatatcgcctcctgatatttatgatatatggtcatgccaacagctttgtcataaatagaactcccatggcagcaatcacttaatcttgtagttagaggtggggtctcaccatgttgccgagctggccttgaacttctgggctcagcgattttctccacaggcacctgctactgtgctcggtgcagcactttgtgtttttgaacataacctcaagatgttattgtcttcatagtaaaacaaaagatgaggcttagaactggatcactttgcctgtctcttcttacctcctcccagttcaaaatgcttgcatctcttaatagctagcattcccttggattttgcacatgagctcaaactcaagcctcagcacaatcttttttatagttttagtcttttagccagagtcgacttaccccccatacccactctgcttccttcataatgctgctttccctgggcagagaatccttgcccttcttgtattatgtcactttgtggggttggtgtctgctacacttacagcaagtccagagattttttttccaccacgtttgcaggagaactattggcatggaaaatgacaattgttttaatgtcaagtgaaactgaagttgatgttcattgagaggtttctaatttctagaggtgggttctttttttggcatatgaagttgcagcatattaagagaatttacagtagtacagatggggttatcccatccacaacttatgatggggttacataaactaaaaacgtgtttaatacacctaccccaccgaatattgtagcttgggcgtagcctaacctatctcagacgtgctcagaacacttaaatgttagcctaaagttgggcaagatcatctaacacaaagcctattttataataaggaattgcctatctcatgtaattcatcgaatactgtactaaaaatgaaaaacagtggctgcacgggtaccattataaagtcaaaaaatcataagttgaactgtcttacattatggttttccaaattttgatttgtttttaaatactctttccttgcctggcaggtaggcacaacttacgtaacagataagagtgaagaagataatgaaattgagagtgaagaggaagtacagcctaagacacaaggatctaggcgaagtagccgccaaataaaaaaacgaagggtcatatcagattctgagagtgacattggtggctctgatgtggaatttaagccagacactaaggaggaaggaagcagtgatgaaataagcagtggagtgggggatagtgagagtgaaggcctgaacagccctgtcaaagttgctcgaaagcggaagagaatggtgactggaaatggctctcttaaaaggaaaagctctaggaaggaaacgccctcagccaccaaacaagcaactagcatttcatcagaaaccaagaatactttgagagctttctctgcccctcaaaattctgaatcccaagcccacgttagtggaggtggtgatgacagtagtcgccctactgtttggtatcatgaaactttagaatggcttaaggaggaaaagagaagagatgagcacaggaggaggcctgatcaccccgattttgatgcatctacactctatgtgcctgaggatttcctcaattcttgtactcctgggatgaggaagtggtggcagattaagtctcagaactttgatcttgtcatctgttacaaggtggggaaattttatgagctgtaccacatggatgctcttattggagtcagtgaactggggctggtattcatgaaaggcaactgggcccattctggctttcctgaaattgcatttggccgttattcagattccctggtgcagaagggctataaagtagcacgagtggaacagactgagactccagaaatgatggaggcacgatgtagaaagatggcacatatatcc

SEQ ID NO: 23393 - DNA, 2300 bp, Homo sapien
atataaataagaccttagtcccaaggaatatctgcagtttccatagtttcactctgttttttaatagttaattgtttctgtggtagtttaatatactttgtgctaattagagaaagaaaatatttattcctcattaaagttttaggaacattaaatcagcaaacaatcagtagatatctgtgtgccagacaccaatatgtgcctgggctttcgcttctggtaactctaacctggttaatacttacataaagctttactaagtataggcactctgcggagcatcttaacctgagttaagtcatataatactcacatcaacactgtgaggtagataccattaaatattgataaggatacagaggcacaaagatacttactgatcagtatacagaggcacaaagaggttaaattacttactcagggtcacacaggaagtggaattcctgggattcaaaatgtggcagctcggctccacaactatagcatagctatactatactgcctgcagctctctgcatctatttacacttctagttctcttaattttgtcttgtaatggtcactaaaattctagtgtaagaattttaaccactacctaatgtaaaatccttactgtattctctaggctcacaaatgttgaccttgtaacttttatttttaaataggcaatgcattagcaggaattcaaattaggacaaacagttgtccaattgttcggcataacaaaattcatgatggccagcatggtgggatttatgtggtaagttaatgtatatagttccctataaactcatgcatcaaaaccagggggataaagggtttctcctcaagcttttaggtaggccatattcaacttttgaggtatgaatttgtgactgtctttaatagttagacaaaaataacgttcttcttctccctgccagtatcttaatgatttctgattttaagtttgtgtttaattatgtaaaatttactcagcagctgactaaatttagccataagagaaacacctttttattaaagtctttattattggcaatatgggctagcctcagcagcagttcatttgcagtctattatatttgttacaccagaattttacgagtatgactactgtatgagtcactgaagttctgccactttttcatttgaatttatgttaaaatataataactttcaaaattttgaaacctgtgtattaatcgtcttcactcatggtatctaaaattttgcaactgattcaagtaagaaaatgtaggaaatttcaaaaaggtccttatgcaaggcattacttttaattttcatttatggttctagagatgcacatgtcctcagttacctgctaaaagtaaaaattttgggaacatgaagccatatcattttgaattgatttctcgagaaataggtttgaagtaactgttaatttattactaaatgagaggtcgtcagtttgttacacatcctagggtgaattaatttcttttgctaaagaaaattgaatgctactactactattactgtgatattaaaagtataaaaccacttaaagaacagtataaaatttttgaaagcttaaaactcaggtagaggctacataaaaagaatgttggccgggcgcggtggctcacacctgtaatcccagcactttgggaggccaacgcgggtggatcacgaggtcaggagttcaagaccaccctggccaagatggtgaaacgccatctctactaaaaatacaaaaattagccaggcgtggtggcagacgcctgtaatcctagctacttgggaagctgaggcagagaattgcttgaacatgggaggcgaaggttgtggtgagccaagatcgcgccactgtactccagcctgggcgacagagcgagactccatttcaaaacaaaacaaaacaaaagaatattgccattacctccttactcggatgaaaaaacaaaaatggaaaattttttaactgtctataaagggggtaacagactataaacgccttgcttatagaagataaatattataaccagtgtaactttcatttagcatgaaaagggacaaggagtaatagaagagaatgaagtttatagtaacactctagctggagtctgggtgacaactggcagcactccagtactgagaagaaaccggatacacagtggcaagcaggtaggattagcctggactcttggatgggaaatacattgttttgtaaatacttgtcccttgaaaaagctttttttttttttttaaattttaggttggtgtttatttttatgacaatggacatggagtgctagaag

SEQ ID NO: 23394 - DNA, 2300 bp, Homo sapien
ttttaatattttactcatttatgtgataggattttaaaaatgctagtgacttaaaatccagttttataatatcctgctggtaaagtaggaatgaagatatcacacatattttaagtgaaggaagtgaaaacataagagttcagaaattatagctgtatataaattctttctccccgccccccccaaccttttttgtttttttgatgcagagtctagctatgtcactcaggctagagtgcagtggcacaatttcagttcactgtaacctctgcctcctgggttcaagcaattctcatgcctcaacctctcaagtagctgggattataggcatgcaccaccatgcgtggctaatttttgtatttttagcagagatagggtttcgccatgttggccaggctggtctcaaactcctggcctcaagtgatttgcccatctcggccttccaaagtgcggggattacagacatgagccactgtgcctggctgtatatgtttcctaatgttagtactttctccatttgccttgagttattcattaaacgaagaaaaatagctttttcatcttttatttgaaaataaagatgcagccaggtgtggtggctcacacctgtaaacccagtagtttgggaggctgaggtgggtggatcgcttcaggtcaggagttaaagactggcctggccaacatggtgaaaccccatctttactaaaaatacaaaaaaaattagccaggtgtggtggtgtgcacctgtaatcccagcgactctggaggctgaggcaggagaattgcaaagaaagatgctaatatttctattgctatgtttttaaaggaactgaaatagaatttttaaatacttttgtactatttcaaagctatttatggtcaggtttctaagaataaatgtaatatctgtcaaacactgagtcatttgaagatttgtggtttttttattttgaggatacagtacatagaacattttaagatagctagtaattattatttgctagtgaaatttgcatttacagcctcttttgctttcttcctctatctcctcatgaagatggggagaatagattagagcaaatgtttgtctggtgattttattactttctaaatcgaggccactgttggaaataaatttaaatagaggtctcttctcttcttgagcttctgtttccagtgctgctgctggaaacagaatggtttccacaagaaaccattttttgtttttgtttccacaagaaaccattttttaatatgccgttgcattttatattcatagtatttatagttaaatgttattagaagtaatactgtgcatggatttgaatatagcaaaggctgatgatgaaacatagttaactgatagtgaatattagtcccactactcagtactaatgtttttagtaagttccccctccataaagatacccatctgttgaaatcgaataaaggtaatattctttaaaatatcttctccacagcacctgggaaagtggcagacaaagttataattgaaaacactagagattcaaccttcgtttttatggaaggctctgaagatgcttatgttggatatatgacaataagggtaagacatgttaagatttaaaatacacattgaaatcataaaggcagtaattgtttatttcaaacaaaatttttacttttcagtttaaccctgatgacaaatctgcacaacaccacaatgcacaccactgcttagagattacagtaaattgtagccctattattgatcactgtatcatccgaagtacatgtacaggttagtgttttctttatattttacaataaaattttgagtcactgtatgttgcccagtaggtttttacataaataaataatttttctacagttggttctgcagtatgtgttagtggtcaaggagcatgtcccaccatcaagcactgtaacatcagtgactgtgaaaatgttggactatatataacagatcatgcacaggtattttttaattttgtgtggtttttttctttttagaaaatgtttaaaagctctactgatgtttgtttctgataacttgttgtagggaatatatgaggataatgaaatttccaataatgcgttagctgggatttgggttaaaaatcatggaaacccaattattagacggaatcatattcatcatggacgtgatgttggtgtgttcacatttgatcatggcatggtaagaacacttatttttaatagaaaaacggacttctgtatcagttaaattccaagtatgtttcagcattattttctcatcaccaaattatctgaat

SEQ ID NO: 23395 - DNA, 2300 bp, Homo sapien
tgagacaaagggtctcactctgttactcagtctgatcttgaactcctggggtcaagtgatccttctacctcggccgcccaaagtgctgggattataggcatgagccattgcacccagcccaggtttttaataagatgaaaaaaatgctgttataaaaagtgaaaagaggccaggtgtggtggctcctgcctgtggtcccagctactccggaggctgaggcaggaggatcatttgagcccaggaagtcaaggctgcagaaagccgtgatcgtgccactgcactgcagcctgggcggcagacggagaccctgttttttaaagaaaagaacagagtacaaaattgtatatgctatataatcacaactataataaatgatctgtagataaaatgagtggaagcaaatatggcagactgttaatagttaatatattgaaactatagttctttacacttctttgttttacaacggttatatgtattacttttatgatgcacaaaaggtgcaccatatatatatatgtttttgttgttgtttttgacggagtttcgttcttgttgcccaggctagagtgcagtggcacaatcttgactcactgcaacctctgcctcccgggttcaagcaattctcctgcctcagcctcctgagtagctgggattacaggcacctcccaccatgcccagctattttttgtatttttagtagagacagggtttcaccatgttggctaggctggtcttgaactcctgacctcaggtgatcctcctgcctgggcctcccaaagtgctgggattacaggcatgggccactgtgcccggcccacaccttacatttaagagaaaaattacaaaggagaaatgagaatgaagagcagcagaacaaaacagcattgctcactgtaccagaaatgataatagttagccattactccagtttgaagatttcattgtgcttgataggatataaatggactgaagatataggacaaattaagttcaaagtatttttactgaaaattatctttttaggctaggcgaagtggctcacgcctataatcccagcactttgggaggctgaagtgggcagattacttgagcccaggagtttgagaccagcctgggcaacatactgggacctcatttctacaaaaaaaaatcaaaaaataagacaagaggatcacttgaacctgggaggttaaggctgcaatgagccatgatcacgcctctgcactccagtgtgggcaacgggagtgagactctgtctcaaaaagaaaaagaaagaaaattatctttttaagtgataatcatgatgtttttacagtaaggataactttttttccccttcctgagtaaacagtttgtaaggaaattgaaactttttgttgttctgtgtggacaaattttcatacgcagttacattgtgaaaatttttgcaggaaaactaattttcggccaggcatggtggctcacgcctgtaatcccagcacttagggaggctgaggtgggtaaatcacttgagctccagagttcgagaccagcctgggtaacatgtgcctgtagttccagctacttgggaggctgaggtgggaggatcatttgagcccaggaggcagaggttgcagtgaactgagatcgtggcactgcactccagcctgggtgatagaaatagactatgtctcaaagaaaaaaaaggaaaaaaacataatttccatatgcaactacactgaaaattttaaatgtgaaaaatacgttttcacgttttaaatcctgtttttagctgtgcgtggtgacacatgcccataatctcagctactcaggaggctgaggcttgaacctgggagagggaggttgcagtgagccaagatcatgccacttgcattctagcctggatgacagtgagactgtgtctcaaaaaaaaaatcctgtgatttaatattcatttttgtctattcttactttcttactcaagtttttgaggcctcaaataattgttatagttgttcaaaactgtattaatctaaaggacattttatcaagaaaattttaattcctttctctgttcaggaaacgattatatatggaagtatttgaatatactcgccctatgatgcatcctgaacctggaaaattctaccagattaatccagaagagtatgaacatccaaatccctggaaagagagtttccagcagttggtatgaaatataaatagaatatattggtttatattatacatttgtaaataactttcttttaagaaataagtttaggctgggcgtggtggctcacacctgtaatcccagc

SEQ ID NO: 23396 - DNA, 2300 bp, Homo sapien
tctcaaaatcacagaactcttaaaaattgaaaacaggatcatgtagtctaaaataagttcttatttaaacttgggaggtgaggggggcggggctgacatctagaaaggtgaagtactttgcctgtagtcacacaccaagtctgggactcaacacacaggctcgcctctttgcgtctctccctccttccaaaatacattttcctccctctcaaaagctttatcacgctttgtagttgcttaattatctatgtcaaacctagagagcaactgatgacactcagagacatcgcccaaagttctgaaaaccagataatcagataaactgccagttttaccacatccaaaaaatgcacaacaaaagagagaagggggagaatcgagaatacattttcagccgcaaggcaataaaaacacgtttcccttggagagagattatgttgggggcatcaggtataaaggtaattcctgttgagggtttttcttttccttgcagtttgtgggacctaaaaaaaaaaaattaaaaattaaatcacataaacaatcacaacatcaacacatttacttctctcctctcacatattattttcccacacattgtatacacttcttcaaagaacaaatcaaattggccaaaggtcaaagccttttcaaggtttagatgatatacgattaggcaccgactccaaacttcgcttaccaagcccaaagctcggagacggaaatcttcagggtttgcaaataccctcagcttggctaaagggcacgaaatctctagcgctccctacagctcagattttgaacccacctaccacagaaaacccgagttaccaaagattggctccctcgttccacttttttttcagctcaaaaaaatcgggtgaaggttggggtaggggggaagctgaaacggcgaaccgaaggattaatcacttctccccattacatcagcaacccccgccctttcctccgagcacctcctctcccagaatcgtcgctacgcactggcgctctcttcgcccaccccctgctctattatttgccctgatacctccccattatcacccgccccgccacactccccctttcctctttccccctcctaggcgggggagggaggaaacccgagagaggaaacagggcgttgaagggacttcgcgataagagcggaggccccattggccggaaggttgtacgggcgccttagattggccgcctggacggaatccccgcccctcctttccccgcccacccacccctccccccgccgccccgcggccctcccccgcgcccccggccagccccgcggcggggagggaccgactgggcgagtggaggctccggcggtgtcaatggctcctcctgccacggagcagcagcagaagcagcggcgacagggctgacgaggaggaggaggaaaggttcctttaaggaggaggaaggacgacgcctctttttccccctatctcctcccttcacactcatttccccttcgccgaggagagaagggggggaggagagagaagagaccgaagaaagagagaaaaattcctcacagaaatctctttcagggggtgtgggggggaggaagagggaaaaaaaagagccgggcgccccctgctccctccctcccttctctccctctctttttctcccttcctcacccgcccgcccactccccccgctgccggagacgccgctcgcgagtcggcgggaccgggatctgtctcttcagccgccgccgccgccgccgccgcgcttcgcctcgggatccccaagcggcggacgccctttctttctttctctcggtctgcccgtctttctgccttcgtccctcgcggccgccccgcccggcggcttcggccttccccgtgcgtcaggccctcccggccggcctcgctcggtctccgtctgtctacccgggcctttctccggactcggggtcccgctcgccccctccgccctcagcgtctccccttcccctcgccccctctccttcctcccccctctcccactctccccacccctttctcctgccccgaagctcgctgtgcgtgtgcgtgtgtgtgtccctccgccaacgccgccacctcagcccggcaaatgaactccgtccgagccgccaaccggagacccaggcgagtgtcgcggccgcgcccggtgcagcaacagcagcagcagcccccgcagcagccgccgccgcagccgccccagcagcagccgccccagcagcagcctccgccgccgccgcagcagcagcagcagcagcagcctccgccgccgccaccgccgcctccgccgct

SEQ ID NO: 23397 - DNA, 2300 bp, Homo sapien
ctctgttatttcgatgttggatctcctgactgggctccacttttcttctaatttctcttctattttctttcttttttttttttttttttttttgctctattttctggagaattttctcgaatttatattccacatttctagtgacttttttcattgctgttatcacgttttcaatgtttaagagctctttttttgttgttttttgaattttttcacagcactctatgtgcaagatcttctcttgtctttctgaggatattaatatacttttaaaaatatatagtttatttttcctaaaaggctctttgttctaagttgtcttttttctatttgtttgttgtgatgttcattttccatgttagggtctttcctcagatgtctggtaatccttggttttctgttcatgatttaaagtgaggaactaattttctcgggtgttggaaatgttccatatcctggtagggatgtgagttacatgggtgtacacatttgtcaaaactgcttaaactgtatacttacaatctgtgcattgcactactgtataaattataccttaaaaaacccacccaatttaaaaaaaataaaactaaaaacaagtgaggaatgaaaacactagaagctctgagcaagtgagtgggccttaccaatctagaaatttacctttggcccatctgggtgaaccatttgttggtacagaacccagccctcagtggggcctgacattcccctgtcctaatactctctttttccttcaaaatgagtaaacatccaggctatactaggatacaggaggacagttccccagcagtatcgagtgggggaagcagctttaagggcttcactacttctcaatcatctttcacccaatcctccttatatcagcatgatgccccttcaccacaattccattgttacctggtataaatagttgttgaaacttttgagacttttgcaatgtaaattgatttgtttctttgctttcttcactgccactatccagcttctgaaatattgttgttcttgtctctactcttgttcacccagttccagagggattacatcttttttagaaaataaatctctttattgtaccttgtgtaggatttcaagaggaagagaaataagatgtgtatccaatctactaccttagaattcaggaaatcagaaatgtggttttaagctctccagcttctgcaatacaggaagatcctctataaggagtttggaatcaatgctaaaaatgacccaccaacactaacatattccactcctttggccagttaacatctctacatatccttctgtccatactttaatttctaaacaacagtagcaatccaaacatgctctcacctaacaaaatgccatgatcctttgtgcaaatgaaaacatgctcagtatctctattattggttattatctataattatgtgtgtgttgagtggtttctgcaactgatcatgaggccacaatttgtattcataacttccttcctttgtaccagcaatactgctgtttggggttcattttgtctgttaattcaattagtggttggactagacattttgaactgccaagaagaaaatttcaaataagtcttccctatccttcattattttcaaatgcagatctccagccttctggcattgcagggatagttttgatattactgaaaagagaaaagcaaaaaagggtcatgtgttgcacttttctgtgaagatgagggtcccaggtgaaaatcacagctagacacctgagcacttttaaaaagttaagcaaatatggattcatttactgatataaggaagatggacatgccttggattcaaggccagcaagtggtaaggttgctatgtttgttatccaagttaagaagcctgactgatatggttaggctttgtgtccccacctaaatctcatcttgagttgtaatccccataatccccacgtgtcaaggaagaaaccaggtggaggtaattgaatcatggggccgtttccctcatgctgttctcgtgatactgagtgagttctcaggagatccgatggttttataaggggctcttcccgcttcactcggcatttcttcctgatggcttgtgaagaaggtgtcttgcttacccttcgcccttctccgtgattgtaaatttcctgaggcctccccagtcacgctgaactgtgagtcaattaaacctctttccttcataaattacccagtcttgggcagtcctttatagcagtgtgaaaacgaactaatacactgactttctgttcaagaaagccatcaaccgtgatccagagat

SEQ ID NO: 23398 - DNA, 2300 bp, Homo sapien
tgggaggctgagacagggagatcacctgagcacaggagtttgagaccagccttgccaatacagtgaaatcctatctctactaaaattacaaaaattagctgggcatgttggcgcacgctgtaatcccagctactccggacgctggggcatgagaatcacttgaacccgggtggcggaggttgcagtgagccgagattgcgccaccgcactccagcctgggcgacagagcgagactctgtctcaaaaaaataaaaaataaaaataataaataaatacatagatggagtaagagcaatgaggagaaagataattaaagttcaatatatcaagtaagatattagtaaaataatttgtaagaagattaacatatattatgttagtagccaccacaacaatggctggcagagataaaacaagactgaggtgtgaggaggctatggctcctttgtggctccatcttctttcaatcttcccttcgttctttcccctgctccctctctactacaccctcgttccaagaatttccttcagtatgtccatatgagtgggcaacagtgattgctccgaagggagaagtcacagcaactcctgttccaattgaagcacactgtacatttgccttgtggcctccgaatgtagctgtgaggccctccaggacagtgcaagaaagacaaatgaaactggtagatgactaaacaagttatataaatgcagcgttccatctgtggaatgacgggatcaaatgtttatattttaaaaatatattctgatgcccataattcttctgcagctatcagccccacagcctgacttgttttattgtcagcaggtagcttgtttcacacacagctcaccttctactcagagcctggacacacagtgaacatgctcagtcagtatccgggcttcgtataccttttcttttagtctactcaacacctttgtgagataggtatcactactctagtttttgaagatattgatagagaaactcagagatttaattatcaggatcatattcgtagcaaactagagccttagtgctgccacttctcatacctttgacgggtcatttttctaagtctcagtttccatatctgtaaagtttccacttctaagcctccgtttccgtatctgtaaagtttccatgagttagatagggttctcagatttagtaaaacgaaccaaaacaaacaggaagtataacccaaacgggatattcttatatttttaaaaaaaatctccatttttctgaaattcaggtttaaatgagctctcctgtatttcgtgtggcaaagctatgttattattatggatatgacaatggatgtgaagtccttagcttctgtaaatcctatgcacattaaattttggatttgatccgtaagtctttttttccctactgcaaacacagtgacttgtttccacagaacatttcagtcaagccagagtaacactactttaagttacagcaatgctttaccgttcctaaagcgctttcaaagcccaggcaatggcggaaggtcttgcggaaacccacataacgtggggtgtcgaggaaggtctcctcagcccgggcacaggcaccgagggccgtactgccctgcggcagcctagccccgcccccgcgcctcctcgaccactcagcggccgcgccgcgcctccgccgcactcctataggtccttcctcggacatgcgaggcctttgcattttcccgctttcccctgccctgctcagccctaaacccgcaccggcctacagcgcctccaccctgctttccgtgtgagccccgcccttccggaccctgcatttcacccccaccccagccgccgtgccaggcagccagccggaacccaggcccctcccttcggtaggaggtgggcgggaaccgggaggggccggccgagcccccttcctcggggtcgcgggaggcgggactggagggaggggtggggctaatcgccttggcgccgcgttgccatggcagcggggaaggggagggagggggaggaagcgagcgggagggggatgtggtgctgccggggccgccactgcagctgctgctgcctgctggttgccgcgtcttcccggaggcgactgctggaagctgcagggaacagctgcggtgctctgccatattgtgtcttccccggccggtccctcgcctcccggccgagctgacggtgagtcccgggcggagcggtcccctccagggtcggcgctccccgccccagcccgcggcgcagctcccgggcgcggaggcagcgcgagcgacccgcgccaggcgtggggcgcggag

SEQ ID NO: 23399 - DNA, 2300 bp, Homo sapien
aagttatgggtgcacaggagagagataagaactggatatggaaagaatgctgttaagatttaaaatgaataggatttgagtcattggtgctcatgggtgttgtgtacatactgttgccagcacatattgtggttagagttttgtttctggagtcagtctgcctggatttaaattctgacagttccacttacgcttaacctctctgattaattttcctcatcaataaagttgaattaataatagtgcctaccttatagggtttaattgacagttaattgagatatcatatgtaaattgtttagcacaatgcctgggcactaaagtattatctaaggctgttgctaatggagtgctctgaggctaactacttctggtggtagctcccagaatccagataaactgttctacatctaaaattaactagttttctcttttacataactgacataaaaagtagaaataaaattagccggttttcagaattcttgaagtaacctgccatctatgtcttaagcaaaacaaactctggaggtaccccccccccccaattatttcagttacacaagcataagtgggttgaataggataatagtcggtttttcactgaatttagaaatgagttatctttatgagccattgaaaattaattaaatagcacattagcctgttgctttcttctctggtctgttattgtctcatgataaagtttttgaatagaagggtgtttaaagtgcaaaacaaaaataatttgagaaaatagaaatgaaaaaagaatagtaacagctatttttcgctctccttgaaagtacagggacagttcataccttactaagagaatgccagccttgaaatgtcagtacttgagatgatatagaatgcagagtttaaaagtactgggattttaaaaagaaatgataacttatagtgaatttaatttagctaatgataaatttagtgaataagaagtgttatcttgttagacttacggaagtatagagtagaatggttggtaaccagatatgggtggtgggggtaggaggagggtgtagggaagggggagatgttagtcaaagagtacaaagttctggttacacaagaggagtaagttctagtgacctattgcatagcatgatgactgtagttaataataatgtatatttcaaaattcctaaaagaccatttaaaatgttctcaccacaaagagagataggtatatgaggtgatggatatattaattagcctgatctaatcatttcacaatatatacatgtatcataatatcacattgtaccccataaatatatataatcattatttgtcgattcaaaataaataatgaaataaaaatgttatctctttttagtatgacgtgctgtaaaaatagtatacatagtttctttttatagtaaatatttgagatttgaggaaagggtttattttaaaatattgcttaaatatttcaaatttattattttcaagattcaactatttgtatatagtaaaatcatagattcttaagatacgtataaagtcttatagttcaaagaaatagcctgtccactttaagtaataatagccacttcctattaggtgattagtgtgggctaggtactttactaagtatttaaaatacactatttaattgtgttaatatcacccatacacctggtcctataaagctgcactttatttacagccatttcaactaatataagttattttccttgtattataaccattagtatcttcattatacaaatgttgtgcttaaatattatgtgggacaattgattgcaaaatttctctgatttggggatatttacatatgtattttctttttcccagagtttaagaatctaaagtattacattgataattgtttcctttgttgcagaactgtaagagtaaatgggtccagtaattggaatgactccagataagagagctgaaaccccaggagctgaaaagattgcaggattaagccagatttacaaaatgggaagcttgcctgaagctgttgatgctgccaggccgaaggccactctagtggacagtgagtcagcagatgatgaactcacaaacttgaactggcttcatgaaagcactaatcttctaacaaacttcagcctcggaagtgagggtcttccaattgttagtccattgtatgacatagagggagatgatgtgccatcctttggaccagcttgctaccagaacccagaaaaaaaatcagcgacttcaaagcccccatactcctttagtcttctcatttatatggccattgagcactctccaaataa

SEQ ID NO: 23400 - DNA, 2300 bp, Homo sapien
ttcaccctgtggcttgtcttttcactcgcttaggggtgtcttttcagtcagagattcttaattttaatgtattcagatttatcaattgggagtttaaaacaatgcatctgatacagcaactggattcactagtgcaaaataaaattctaaattcagtaaaatgaacttatacaggctctctggctaacactgcacattctttcctcggaatgtcatttctgggatggcaatttttttttttttttgagacagagtcttgctgtgtcatccaggctggagtgcagtggcaccatccacctcctgggttcaagcaacctccacctcctgggttcaaacaattctcctgccacagcctcccaagtagctgggattacaggcacccgccaccacgccaggctcattttttgtatttttagtagagatgggatttcaccatgttggccaggctggtctttaactctcgacctcaggtgatccgcctgcctcagcctcccaaagttctgggattacaggcgtgagccacagcgcccggccggcaattttttaaataataaaaaattccattattttacatagcattgagatacacttacaatatttaattctgcctctcggtggtgccatagaaaactaagagtaataattttaaaaattattgttctgaaagtttgctggacagtgggatctatgagcaaactgaaaactatgaatattcaaaaaaagtttgtaattctcttacacactacagtggctgaaaatgcacatagactcagcccttcactataaaattcctggctaatagtcaaataaaaatagcactaatacttttttaatcatggaaatttgcaagcattctaaagtgccaatataacattcctgtacctattacctaataaatgttaaaatcttgttatacttactgtaaaaaattaaagaaataaggagaaagtttatgcccctttgtcctctccagtttcatctcctttccctttttctcactaaaggcaactactatccagaatttgatgtattcccttctagttcttgtttctgtatttttagtacatgtgtccatgaacaataaaaatgttactttatattttaaaaatgtatcatttcatactgtagcatactgcaatttgctttttacattcaacatgtttttgccatgtttatatatacatatatagatctaggttattaattttaactgccatattgtaatttatggcaaacatatgccctgtatttattcatttctctattaatgaacattttaatgttgcaatgcatacaatacctagaagaatatctttagaaaatttaaatgaatgaggcaggcttttaattcaagcagtatccacataaaatctctcaggcagactatttctgcttcaatttttttattttttatttttgctgttcatatctactctgcatgcatagaaggaatcgatacctgaaatttcctaaaggtcttttactcagtccccacaaaaaagctctgatgtggtgtgtgtaaaggggtaggagtgggagaatgaagtgggtagagacggacacaaagaaatgtcaaaatacaggacactgaaggtttggagccggggccagtggcagcagccaaagttacaaatatcgggaaggtctgagagtttacagtgcagagcatgtcctgtgctatcatatgcggatgacaaaatagccgaatacacaaatctttccacgcttgtgctgaaagatgtaaccatcaagcgccaggcggttgccatgggaacccggggctgtggggagtcggccagaattcttgatgcgcttagaatgtttcttcttccggccctctggtcttcgcaattatcgtccctctcctaggtcccccgcccattctataggctctcatgagtctcttcccgtcttgattctctcgctcagcgttccaggtcgccatcttggaccatgagtcaagatggcgccccctggtcccaggggcacagcccaggcacgctagcgaggctacgcacgcacgtattcgggcgcgaagggtggggcactgacgccagacgtcgccccgccctctgtggtcgctccgcccccggccccactccaccttcctcccaccccgggaacccggaagtggaggaggaggcgcggcggcggcggcggcggcggctgcggtggccaagcaggcagatactgcctgacccgttcccgggagcgtgtctgggtttgggggcgggagacaggctgagccgcctgggcggcctggcctgtacggggcgggggaggccatggcctcggctgag

SEQ ID NO: 23401 - DNA, 2300 bp, Homo sapien
taatttcttagcatttattcttacgaggccagtttggtgttcttgtcttgagatttagagatgagtttttttgccttatggttttatatggtgaggtgggattcttattgctctaaggtggataatctggtacttttgaacattgtgattaagagattgctgctctttttttttttttttaagggtagaagtagtgattgagtctttaagtcttgtatgtatatagactaacactccacaaatgtatgtattgaggcagtaacagtagaatgggtagaagggaaggagaaggcacacagtgactctgaaggagtgcagtatggccagaagagcacaggcttcagatttaagcccaggcttgaattctttggttgcctttaataaatctgtgactttcggcacaatttttaaccttgtaatcttagtttctccatcagcaaagtgacaatgagcctttcaggtttgttgtgaggattgtatggtatcatgtaaaagtgcctagggccatatttcccatgtaatgggtagttgccataattatatgttaatagttttcccatatgcatttccccacatagaagcattcccgagagtgttagtgttcaaataaaggaggcaacagagagggtataacacttatgtattagaatcacttgggaaactttttcaagatatacataccaggccaggcacagtggctcacgcctgtaatcccagcactttgggaggccgaggcgggcagatcaggaggtcaggagttggagaccagcctggccagcatggtgaaaccctgtctctactaaaaatacaaaaaattagcccagcatggtggtatgtgcctgtaatcccagctacttgggaggctgaggcaggagaattgcttgaatccaggaagccgaggttgcagtgagccgagatcacaccattgcactccagcctgggcgacagagtgagactccctctcaaaaaaaaaaagatacatgccctggaaattctgaaagacccttggggagagaatagtcatctgaacttcaaacatgttcttcaggttcttaatatccctgcctaggactgttgagcagaggtttgggtgtaatattgagaattaattttaattaaagctcatcaaatttggaagcactaaggaccctgaatacatcgttctgcagtgttccatatgcacctcttgttttccaaacatgatggatatttaatttctttttatatggctactccattttcaaagggcttttaaatcactgattcaaattggattagtaggtgagttcattttaagtgagaagtgagactacaaaaaaagcagagaaagggtggtgactgatgtttgaacacagtttcattgttaggctgttccttgaatagtctcagttctatgtattacatgaaaacaaatactcattattagatgttttaaatagtgctattcttctatgtagaacgagttcatattagtaaaaatttaaaggaagggattttaaaataatctttgagaattttcctatttatttataatagctttattttatatattttttaacttagaaatttatatgaacttttgtataaacttacctttgtggatgctgttacagaatttattacaatttcttatggagtttaacaactccgactcatgaaattgctataactctcatttcccaaaccaaaagatcaaattgaaatgatatttatgagcttattttatattgctggagctttctaggtctgctccgtcctccagcagaactactcctgaattcatctgcaaagaatagtaagccttatctgttcttttctctctctttttaaagctttcctgctccttacaatatttgcagtttcaacttgtgtcacataggaaaagttaaatgatgaactgtatagcttttgcaggattgtttgagaatggtgaacacatagaagagacaagcttctaagatgatagagaatctgtgtaccttaggatgtttctctaaaggatgaaagttatgtggacataacttattctttccatcagaaaagtggagaatcttcttctcagttgagtcaagagcagaagagtgtctttgatgaagatctgcaaaagaagatagaagagaatgaacggttgcatatacaagtgagaaaatctgtttttctatgtgaattaaaaaatgggtctgtgatctgttaatgtggaaaagctaatgcacatagagtgttttgtgtctgcgtgggtattttaatgtcttctatggtcttcaagtatatatgtcactgtcacttattcatttcttaaa

SEQ ID NO: 23402 - DNA, 2300 bp, Homo sapien
aggttatttctgcatgttaaatgattacctcaggatgtattctcagagttggaattactacttcagaaggcatgaatattttcaaattccttgatctttattaccaaattattttttaaaaggactgtatcagtttatactattgttagtatcatatgagaaaatgttaaagtaatctgtgttaaaggctttccttgcattgtcgggcgcggtggctcacgcctgtaatcccagcactttgggaggccgaggcgggtggatcatgaggtcaagagttcgaaaccagcctggccaacatggtgaaaccccatctctactaaagattaaaaaaaaaaaaattagctgggcgtggtggtgggcacctgtaatcccatctactcgggaggctgaggcaagagaattgcttgaacccaggaggcggaggttgcagtgagtcaggatcgcaccattgcactccagcctgggcaaaagggcgagactatgtctcaaaaaaaaaaaaaaaagttttccttgcatttatacagtaccattcctttgaaggacttggtgctgtacccattttcaaatcataacccgggagtaagggggtgaggatgagcaggtggaatagatgtttcctcgcagtttattttataaactgcagtcatatttgaatatgtaaaattaaatgattggagtattattccaagcaatttttcactaaaagagagtaattgctacttctacttcataaagtagaaaaattatggctcttctattttaaaagttcttatcaaagactcttttacagccaggtgggcataacattcattagtacacattcagttgatatactctcagtgttcagaacaatactccagaggaaattatttagaatacattaaaactgtctattgactgggtgcggtggctcttgcctgtaatcccagcactttgggagggtgaggcaggcagatcacgaggtcaggagttcaagaccagcctggccaacatggtgaaacctgcctctactaaagatacaaaaaattagctgggcgtggtggcgtgcacctgtaatccccactactcgggaggctgaggcgggagaattgcttgaacccgggaggtggaggttgcagtgagcctcggtcgcaccattgcactccagcctgggcaacagggtgagactctgtctcagaaacaaacaaacaaaaaaaaactgttcattgagtgtaatatcttattgacagaatccattgacactgagtttccagtagtttccttgtcattgtgcccaagcacatgccccaccaccttgaacaataaccagaattcagaaatcatgaccatctgtttttgaaatcttaaactgtagaaacaaacttttaaaaaatctagcagcagccaggcatggtgactcatgcctgtaatctcagctactcaggaggctggagacggaggatctcttgagcccaggaatttgacgctgcagtaagctatgattgcaccaatgtaatgcagcctgggtgacagagggagaccttgtgtctaaaaaaaaaattagaaagaaaaaaatctagtagcattttaatgtgtttaaaattacatttttgttttcattaatttaaatctgaaatttatgcttactcatgtcataataactatatcaaaagtatattctccttttgagctttcaactagagtgtttattatttgcattttctgtttggaatgtttaattattatggtcaccgtaaaaacgtctttaccccttcttggctactgctttgggaataggtgtagaaatggcaagttgtggttaaaagctgatcttctcttctctcctagatgatttgttgggtttcagtgagaatggctaatcagcattttgatagaagatttggtgatgatcattattggttactgcctcatggcagaaatagtaaatgcagctacctatcttcatgtccttgtagtaaaagacagtccaaggatgatcttctagttctgtaccctcaatgctctgtgaacggagaggagaaaatattaaaagcgtttgatctattgtgcttgaaatgtacacattctgttctaaaagatttttccccttatgttctagattgggactttaaccaggacatctgacagtgaggtaacatgtgcttgtcatcatgttgtttgttagtaaatatctggcagcatgtttgttgacaaagtcctgcaaaagccatctttgtctaattgttgttgttgttttttcctgacacttctagcaaatgtggagccagtgttttccaccttcgtgtatggatccatgtagc

SEQ ID NO: 23403 - DNA, 2300 bp, Homo sapien
ccagccaaaaagctgtagtttgaatgagtgttataatgtaaacagagatttgctgttgccaagtttttagagaggaatgttcctacgaagcatttagttctcagtgtgtccctccccttggatgtatattaaatgatcctgacagcttcagctgacatgagttttgaggaattccaagctaatctattaggtcatatctacagatactttggggatctcttgttaaacagttgggaagttctaaatatttccatgaaaaaactgccaggaaagagaaatctgctaataaaaaggagaatgacatagtttgagggtctacttattgtaaagcaagagaaagaacagtaactggagtaaaatgagctcacagctgtgatgaacggctgtggtggcttagctattgaggccaggctaagctgtttaccaccagattttgatacaaagggacactaccagaaaggatcctttggaaatacatggtggagttgcaagaaataaatcttcattcatgaaactggcaacctttggggcaatgctgaatcacacagagggggaaggcctgtcctttgcaaaagacaaaatggttttcaaccaactgtattagtctttagaaagttatgggcatccttgctttgcagaagtgtcagagtttccaaaagagatttctttcaccaggtggctacccactaataaaggccatactgcttctttcaaagatgacaaagtttaaaaggtgcatacagaactctgtaaatgcaatgatgattactgtttgtcaaatgtgtcgttgcttcctgcatgagtcctgtctccagttagctgtggcagtttctgagatgagctggcctctgtggaagacccactggtgaaaggtgggctggatacaggaccaaaaaggttcaatttgggggttcaatttggggaccccaaaatgcctgcggtcaaagcatgaggacaacaaagagttgccccttctctttttcttccgttcctcctcctcctgcttcctgtgtccttcttgctccacttctctcagctccttaccagaagcctgacttaggggtccagtacctgtctgtttccatggaacaatctctgacaagttaaccagccagtcagttgacttcctattccctaggctctcctcttccctaggcaagttgcccttcctcaactcttaaccattactggaaggtagctggaggaaatgagaagctgaggagaaaccagtgcctttttctgtgtttaggatatattaagcataagcacaattagtagttttatctgagaataaaagtatcctaaatagatcctggctgtgtgatttcaggcgctcgaggagtgccctcctggaacgtcagtttccttcctcaaagccccgagggcaggttcttaacactggctggaggtcaaatagggtactgactatatttccatttcaccagcgaactccaaggtcaaaaacaaggctacacctgacagaacatttaaaaaagaattacactgctgtgcaaatacaaagaagtgtccactgattttcaccaaccctgggtgcactgcctatgagttagcccagctcctcaaggaaatttacgattaaaaaataattcattgcctttccaccttccagcatagtacttcaagttgagatgctcaccggggcctcctaacccctctctttggatgcaacccctttcttcctaggtggtccatcctacaggactgttaaaccaatatttcttatttgccattttgaatcctcaaggattcactgagtgcctactctacaccttcgcttgaaaactttcagagatttcctgtattctgcttcatgcccagctccaccttcccatctaaacattgcccacttaccctaagccttccagtcttgccaacctccaaagcaccatgccatggggcctaaaatgccctcttctctcccctctgagcctgttcaaactcagctcagtctctcgtcctgggttttggtgtctctccagggtaaaggggtggggagggtgccttcattctgactggctcccagtgaggcagccccccttgaggaagaggctgagatgccaagtgacttgcctggagtcatttgccagcaggcgatggaatagggactacgagacaccctgcagcctctcctgggaggacaacgccccttctccctctccatgcactcttgaggcagcaaagaggaggcatctggacgcgtttacctcctccccacccccacagcttggccctcactaaactatcttgtgtccttcctcctgctatgattgattcgccca

SEQ ID NO: 23404 - DNA, 2300 bp, Homo sapien
aagcagactctgagcctggctagaatttggtcaaagagagaatctatgtcactattctctaaatttaggaaatgaacagattattagaacaaggtaaaaaaaaaaagttggcacccaagtttatgctggaaaaatgaaggttaaatgccgtaggggaggggcagtgttagggaattgagctggaaccagcactgacaatatttgaaagcatggttaggttttgctgtggtttaatattttacaaatgttattccctgtcacatagctgaactaaataccccacatgtttgcgattaagcattatgagctgcagaacatatgtgctaataatatggttcatgcagcctgtgggcacttctcccatgacctaagatgaaggtgaggctttttgattttccttaaggtattgtgttttctgatgattcctttttgttccaaactttcgctttcccctttagaacgaagccttttacaggaatgatattttatttttatatatttattttttttgagatgcagtcttgccctgtcatccaggctggagtgcaatggcgcgatcttagctcactgcagtctccgcctcctgtgttcaagcgattctcctgcctcagcctcctgagtagctgggattacaggcgcccaccaccgtgcccggctaatttttgtatttttagtagagacggggttttgccatgttggtttcggactcctgacctcaggtgatctgcccgcctcggcctcccaaagtgctgcgattacaggcgtgagccactgcacctggccaggaatggtattttaaatactgtcatagcaagcccttaagaaaattcttcacagctgcatgttaacacactggcctgtccctgactttggctttgtttccaggatatacagttgtttctggaatgtacagtagctagattgcagccctccaatcatacaaaaacagactgagggtttggaaatgctgctaaagtctagttacagtgttgctcttgaggagtctggcgctatagggagtctgagaattccttatttgaaaaacagccaatggaaccgcacagacacactgaaattaagacattctttctgtagattatgcagcattgttagagagcaaagaaaagccacaggaataaaggactcaattcagccctctgctgaaggagagggtgttcctgaggcttgagtaggaattgacccaacagggacagtttggttgggctgataccaggaggctactgagaggtgtcgatgatgccttcctgagctctgctgaatacctccttggcatcagtcctcccccaacatctagcagaaacagaggagccagacattagggaccacattggggcgtgcttttccccacagatgcatactgaagtggggacaaagtcttcagctgccatatgacctggattgctgtttcacctatcacatgcatctaatctgacttcaacaatctacaggagaaggtagaacttcatatttacattttatttgagtggtttatgaagaaaagtagaggaaaactgcaaagaacggcagaagtagactcttgaggttggaggggagtaggggatgatggtgtgggagggatgaactttgcagggagttacacaaaatttggaaaattacagagaatactggaatcgccactaaaagagaggcagggcacctaaatctatttattagacaacaattctgagaaattattcatcactaagggcaggacagtcagttgatgcagtcaagaaggggcaggaaatagggcgagctgagttatgaaagccattctcagaaatgacccaaatttgtactgagctgttgttcttgagcaaccttggggaaaattatcagtctgcttttcccacagcctgatgtccaaggggcagatacgtgtggtgggcttgctggagaaataggctcttctcacgtgagaacagcatccttccaatctagagctcctggctccaggaagtggtggtggctctaccctggtgctatttcattagtgaagggtggggtggtggaaagtgcagaaaaggcaggacccctgacaccagcaaggcattggatctctctggacctccgggtggtggactttgggactggacagacctggtcacagtctaggttctacatcttactggtcgagcaactttaggcaagtagcttaactcctccgaacttattttccttttctaccaaataatgataatattacttcatgagtttgtgagtattaaatgagatcatgcatatacagcctacagcccttagcacaccatgaacacata

SEQ ID NO: 23405 - DNA, 2300 bp, Homo sapien
tcctctttctcctccttctcctccttctcctccttctcctcctcctcctcctccttcctttttttttttttttttttttttttgatatagagtttctctctgtcgtccaggctggagtgcaatggtgcaatctcagctcactgcaacctcctcctctcaggttcaagcaattctcctgcccaccaccatgcctggctaatttttgggcaggtacccaccaccatgcttggttaacttttgtatttttagtagagactgggttttgccatgttggccaggctggtctctaactcctgacctcaagtgatctacccaccttggcctcccaaagtgctgggattataggcgtgagccactgtgcctggccttaattcttcctccagtgtggctgagggaagccaaaagattagacatctctggtataagattacagtttagtttcactcttttgcatgtggatatcaagttttttcaacaccacttttttttttttgtttgagacaaagtttcgttctccttgcccaggctggagagtaatgacacagtctctgttcactgcaacctctgcctcccgggctcaagcgattttcctgcctcagcctcctgagtagctgggattacaagtgtgtgccaccatgcccagctaattttttgtatttttagtagagatggggtttctccatgttggccaggctggtctcgaactcctgacctcaggtgatctgctctcctcagcctcccaaagtgctgggattatagatgtgagccactgcacccagccctctttcttcctttttttttttgagacggagtctcactgtgttgcccaggctggagtgcagtggcgcatttgtggctataaagttccctgtgagtactgttttggtgtgctgtgttttcattttcatttgtctcaagatattttctaatttccttttttatttctcctttgatccattggttgttcaagagtatgttaattttcaaatatttgtgaattttttagttttccttctattattaatttctagttttattccattgtggttagaaaaaatgtttgtgtgatttcaatcttctcacatttgttaagatttgttttgtaacctaacgtgatctgctttggcaaatgttctgtgtgtgcttgagaagaatatgtgttctgctgctgttaggtggaatgttctgtatatgtatggcagtttagttgagtttatagtgttcaagtctattgtttctttagtggtcttctgtctggatgttctgtgtattgttgaaagtatggtgttgaaatctccaattattagtgggtggctatctatttctctcttcagttctgttaatgtttgcttcatatatttgggtgctctgatgttggatatataaatatatatatattttcagatggagtttcactctgtcacccaggctggagtgcaatggcactatctcagctcactgcaacctctgcctcccaggttcaagagattctcctgactcagctacctgagtagctgggattacaggtgcccaccaccatgcttggctaatttttgtatttttttgtagagacagggttttgctatgttggccagactgctctcgaactgctgacctcaggtgacctgcttgcctcggcctcccaaagtgctgggattacagttgtgacccaccattcccagctgggttaatatatatttataattgttgcgtcttcctagtgaattgactcttttatcattatattatgtccttctttgtctcctatgatagtttttgacttaaagtttattttgcttaagcatggctactcctgctctctcttggataacatttgcatggaatatgttttttcatcctttcactttcagcatatgtctgtctttaaatctaaagtgagtaccttatagacagcatacagttggatcatgttttttttttaatccacttagccaccaacagaattataatttttaagcatttatcagaagtaaagacatttagtaatgattccccccttcattttatatacctattttctctttattttatttttttaacagagtcaacctatttgatttcttgacaagaccacaatctgatcccaaagatgtgctccacaaatccaggcaaatgggtcacctttgatgatgatcctgctgttcaatcttctcaaaagtcaaagaattttcctctggagaatcaaggtgtctgtagaccaaatggactgaagctgaaccttcctggcctcagggaatttcccagtggatcttcctccaccagcagcactcctctctcct

SEQ ID NO: 23406 - DNA, 2300 bp, Homo sapien
cttggatttacctagaacttgtgttaaagcatacctcctctagtagtcattgcctgttattgggaagaaatgactagtgaccattcagacaaactgcaaggggcaaatgaaatttgctgacatttctctgctaacattacatagcctctccataacttgagtatactgactgtactaagaaataacaattcaacttttagttacactttttatgggtaccaagatccaagaataatttaaaaaatatacatgatctacgtatagttctgagaagggcagaatgtgtaataaagtaaaacagtatgctgtcacagaaagttaggtgattaccaatcctaagcatttagaaataaagctttaaaaccttcctatgaaaaagatggaaaacaagagacacttttagctttcttatttcccagcttgaataatttaattggattttataatatcagtaggaatcaatgactgcttttagctttcctactttgggtgaaagataagtcactttgaacactcctggtagtaaattgccaggtggagagatatgaccattaaaatgaccatatatagttcttggctttttgtaaaagaaatttctaatagttttcaatgtaggaaagttttctaaagggtatcatataaatcagctacttgaaactcacaaaccataaggtacctgacccaggcaaatcacatacacagtggtaggggataaacagctctactgcacttacttgcacaaataaataaataaacagccaattttaaatataatagagtttttaatcatcaaataacgtatccatctggttaggtcaagacctatttgcaggatagaaaggctgtttagaagagttgtggccaagtgcggcgagtcatgcctatagttccagcactttgggaggctgcggctggtggatcacttgagaccaagagtttgagaccagcctgggcaacatggcgaaaacctgtctctacaaaacacacacacacactcacacacacaaaatagctgggcgtggtggcacacacacctgtagtctcagctccttgggaggctgaagtcagtgggttgcttgagcccaggaggtagacgctgcagcgagctgtgatcatgccactgcactgcagcctgggcaacagtgtgagaccctgccaaaaaggcagagttgtggcaacagatggtgacttcttcccttttctaatcctccaggttatctgtgcttacatcttccctcagtcttagctaggtaacgtatgccccaagatgctctgcccttcaggagagagaattattgtaggtagacagctggtgatttctgcctaactaagaaaaggagataggaacgtattagctgctgactttcttttagcagtggttttccaccttggctgcatattagaatcagattttgccgagtgggatccaggcactaaacttttttttaaagctccccgcgtgattttaatgtgcacccaaaattgagactctttgtcttaggtcagggggtctcatgtcagcgcccattggaatcacctggagagcatgttaaagttacagaatgctaggctccatcctccagtctgattcaggagggctggggtgggacccatcatttgcatatttaacaagttcccagatgctgctgatgctgctgtaccacgctgacaagtcttagaaaaatttggctcttgttatatttttatacaacaaaaaatggagttcagctgtgagtggggtgtagggggaggaatgaaaattggtaaatgcagaggacagatatcactagtctcccctcttttctttccccatcttcttcaaagctgaagttagactgagatctacccctgcatttcccctcctcgattttcatctttcacggattgaggaaacaacctgtgaacggcccaaagccggctagacccaacctaaccatccgttttagcgggtctcttttctcacacaggccgaccgcctctccgccttgacccccacctccactcaaacccgctccatctattaacgttctcttctgcccagccacgcccccggcgttctccgtggttgcgcacctgacgtacatcgttcaaaacgtgcccagtgtttccctccgagggcactgcgtgccgcgcaggcgcaaagggccaggtgctggaggtgctgtcatggcctgcctcaacccggtggtaaggaagacctcaggctctgtgtagagggagcgccctgggactccgggttcacggcagccgaaccctgcaccttttgtttccccctgacactttacagattgtcataaacc

SEQ ID NO: 23407 - DNA, 2300 bp, Homo sapien
gaagggcaaatctcatgattgacagcagaaacagaaggaaaatcctagtgttctgattgcctagtcctcctactggagtacagaattaaatgattcttctggaatatccattgttttcaaagattcaggggtgggtgggagcaaactttttttatatataacaggtacactacagggttaaaaaaagaaaaaagtcacataaaacatgagacttgaaagaaaagccattcaggcaccttgagttattcattctttctctccttccattcaagatacatggtgaaaacttttaaaaatcccagtgcctaccccaacttccctaccaaaatctgacaaaactaaaagagaacagagaacatgacacccaaagtcgtcatgtataattactttttacatatccagatagatccagcgtggttgagaataaagcaagtgagggtatcaagctcttctcagatagtttactgagcatctactacaaatctgggcctcacttattcactctattattcaacagacacatatggaacacctactaggagctagaagctatgacatgctctgttgatattgagatgaatagagaggggaaagcaaaattaaacccacaattacagtgtgttagattacctgctgtagaaccaggtgttatggccacaactactcaactaggatgactcagagaagaatcaaagtggaaatgacattgggctgagtcttgaaggacaactgggagtttatctaatggaataatggaaaaagaagagaaaatagtggggacagcccatgcagaggtattaaagggtgaggagtcatctataagcagttgaagagaggatccagagaagacaatattatagacatgagcattgtttttgtgccatctagcacaatgtggccaaagccaaacaagtttttaaaataataataatctaccctccttgagcaacagactgtagaatggtgaatgaaggagcccatccttgagaactggcttcagagtgaaagaaatctattcttatatttcctctcttcaaagccttaaatgccttcccagctttcaaagtccacctcttccagcaaaactgctaggatttccagaatccaaacagaatccttggaaggaagaaatgatcaaatcaaagaggggatattatggatccccatgattaccgtaaaattttgtctcctaagttctttggtatgtagatcatagcagctttttgcattggtgagaggtggtaggtgatagacatgagttccaggtttcactactttaaaaccgtgtgacttcagggaagccacatacctcttgggacatttttctcatcgcaaacaccctgctagttcaatgtggagcttaaacatgatgtgaggcagagcacctgttacaaggtctagcctatcctgggccttctatggggcagctgctaccagtattaggcagtttcattcattcattcaacaaatctttactgaggacttaccatgtagaagccagaaggaatacaaaaataaatctgaattggattttgctctcaaggacctcccaatctatagaagagatacaggaccaagccaaatagctataccataaataagaaagcatttaccaccaagagaaattactggggtagttgggaggatgggcaaagattacttgtagagtggagggatttggtgaaagagaaggggaaaggattaggggttgaggataaaagagaggaaaaatgtctgagccaggcactcttacgccttctgatgtgggtatagcgagtatccatcggaccctttcacaaatgaaataaaaggggttccgggaagcgtcacaactcactcaattcagaactccccacctctaatccaaaacatttgccattaaatctctttacctcctatagctagggccatttgcagatggtaggggacaagacaggggaaagtagcaggaaggaggttattgggtcactgggcactgtcgcaggtcaaggcagagcagactcagcggggtgcgcggtaagagggggagggcaggggcgggccggcagggaagggtgtgtggaagggcagccaaggggcggggagaggggtgcgggccgcactcagaggccgtccaagacactggcaagccgcagaagcccagttcgccggccatgaagcagcggttctcggcgctgcagctgctgaagctgctgctgctgctgcagccgccgctgccacgagcgctgcgcgaggcgctctgccctgagccctgcaactgcgtgcccgacggcgccctgcgctgccccggccccacggcc

SEQ ID NO: 23408 - DNA, 2300 bp, Homo sapien
aattgagtcctttactcacacccataaatctcaatgccaaatagatcaaaggccaaaatgtacagagcaaaactaaaaaattttagagaagatataaaataatattttcacaacctcaggattttaaaaattacaggagaatgaaaacataaattatggtatatttatgcaatggaatatcatacagtagtataatattaataaactacaggtatacctaacaggtacaaaattaataaactgcaggtacacataacaacatggttatttctttaaaatgtctagttagtgtaaaatagtaagcagcaaaatactactaaaagactgatagactttgtaaaaatgtaaaaacacgcaagaaattaaataatatattccttggagatacattttgtgacaagattaattttacaaaacaaatgaaataataaccacaaaattcagattaatggtcaccttgggcataggaacacaagaaggtaataaaggaaaatcaactaagtagatgcaacaggactggctatgtcctttattctccagcccgcaattgtttgttgcattattatgcttaataaattacatttatgttacctataagttgtgaatacgacatagcatttaaaataaaaatctcaattttaaaaagatttctgcttattatactaagactaattacagagctctccaaaagctagaaggggacttatggggcagaggaattgggtaaaaggtttaattggtagtgagtttcttgtcactggagttattcaagtacagatgagaaaatccgtttaaattaatatgaatacttaaacttaagcattagttggttgattgaattaacttccttctacatctgaaagactataattccttggatcagttgttgaacaaactaatttaaccattcatgttagccaatttgttaaaaatatgaagtccatatagatactgcctttgtctgccaattccagaattagaataaaccagttgctcccagaaaaaatctagggatcaactttgccccccaaatcacttgcttctgtttttttcttaataatttaatcattctttacatggttttccttggtaaggcaggggagagggaaggaggggtgggataagtaggtatttttaacattttcatgaagctcaattttatgcaactaattatctaaagatagtattgaaactaattttagcaggtaataagttgtgggcaggatcttagagaatattctgccttttaatcttcatagattctacaattgaaagtagaaagccacttttctaaaagtgttgccaaacgttcctcagatccctcaccatcgaggaggggaatgccaacaaaagtgctgggctgtcacctcagggaacttttaaaagtaagttaaaagcgtagattaaataaattcatttatgccaattgccaaaaggcaagggcaatcttcagagcctggaaatgcgagaaggcaggcaggatatgcacgagggggtggatgtgctggcatttactaaatccccactggaaacatagcacatttcttagatcactcagttcagtcaattatcgctacagataaccctatcagaagtacctcccacctacggaaatctgcctaaggtttgctaacccacctgcctgtttctgaatagtgccatttttggcataattacagcaaaaaaagaggatcattgaatgcaacccagaagggctggttttctctcaggtgggctggttgaagaaattgatgctgaagactgaaggtcccagcccttcacttattagtacccctcttagtgatgtgtcatattgtgggttgtgtcttttttggagaaagtcaatcatgtcactctgttgagaagagaatggtgaacagcaaggagacttttgcaatgaaataatgcaaactattccagacatgcctaatggttctatttgctgtgtgccttaggtcagggtgtaagaaacccaatcttgaaggaaaacagagtagcttatcttgcctggaagtaacaaaaaaaaaaaaaaaaagcatcccttggtgggtcacatgaccctaccagttctcaagtcagatctcttctcataagggcactgtgtggagcttctgagatctgtggaggtttttctctgcaaatgcaggaagaaatcaggtggatggatgcataattatggccctgctcctggtctctttgctggcattcctgagcttgggctcaggatgtcatcatcggatctgtcactgctctaacagggtttttctctgccaagagagcaaggtgacagagattccttc

SEQ ID NO: 23409 - DNA, 2300 bp, Homo sapien
gagatcaggagtttgagacccaccaggccaacatggtgtaaccccatctctactaaaaatacaaaaaaaaaaaaaaattagctgggcgtggtggcactctcctgtaatcccatctactcaggaggctgaggcagaagaatcacttgaacctgagaggcagaggttgcagtgagtctagatcccaccactgcactccagcctgggtgacagagcaagactccatctcaaaaaaaaaaaaaaaaaaaaaaattcttccgcatatgcaatcatttgtgtgtgtatacatgcatgtattatgtaagtaagtatagcctatacacaatttaaattttatggctttttcattcaaatgtatctgagaaatctcttcatataaggacatatgatttaccacattgtattttacagatgaagagtatttcacctgtaaggctgtatcatagtttatctactcagtttactatcagtgattaaggtggtttctagtttggggctattacagtgctctaatgaataggtttagtgttgatgttttattattattttgtttttaatgacaggtgctctgagtcataatattttttaagaataaagtttgttgagaattacgttattattgaatagtctgaataaatagaaaaaaacacatgacaacatctattttaaaaaacttgaaaaatgctttattatttcctgatagtcaatattgaatgaaagaaagaatttgcaaaaaaacttgacagggttcaatctttcaggaatgtgtttagtttaaaaaaatagttgccaagacaaattgagctttggaatttcagcattctacaactcataagctttacttatgaggcacacctatcaatgtttattccaatacactttttttctaaatagtgttgccagactctaaaagatgttagaattaattctttcaaatgtatgaatagtatgaaaactgggcaatgaaaagcaataaaagtgccagggtggctagggtaatttttcttctagaaattttattcctgaagattgttttatgctacttttgagctttaaaaaaaaaatctccgtgatactgtcatttgaaacacacaccggtctcatcacttatagcctaccctgtcagactgtatataatcatatatataatatataattgtatgtatatgtatatataactatatataatcatctcacattgaagaagtgtgtaaacatatctgttattacagtatgatcactggaaacagatgtatttggggatatagttccatatggtattccagatgtgtagtctttgcttaccaaataattattgtaaatttcagagaaaaggcagcaaataagtacatattttcatcattgaataatacatttgttcttcaggctttgggaaacaggatgtgcatcttttggtgcttgtttttatttttaatgattgataaaatggcatatttattgggacttaaattgtctttaaagagcaacagttgtaattggccaaaaaaaaaaaagcctaagaatgtatttcttaatgttgcataattgtctttacaaactcatcccataaaaatactcattataaacttggcattcaaaaaatgtcattcattaacttacaaataaaattgtaattacaattacaaggcttcgaggagattctactaggagggttccatgctaattgcacagttttaagtcttctaatttaatattaggtaaaaagataattatctcaagaaaaacacataacagtttaagggctggggaaaaaaaagtttcccctctgtgtttagcaatcacactggatttgaatgtaatatacagaaaatgttcgtgcatgaaaataagcctttttttcggtcgggggttagagggaggtctgtttacctatgcggtctcgttaggggagcaaattgaaaagcaacgactgctgagactttttgagtggtgccgggctgggctgtgtaccaacagcctcgtcaactgcagacggaactgcagcatcccttcctgccgtagtgcgtcagccattggctcctcagtgacacgtgactgacagagcgttttctgtgtcttttctcgcccatctgtgtgcagggcactgataggccgggctgatgcgcaggcaatttatcatcttgatctcccactgagtcagggagctctcctgtcaccagtattgatttcagaggatggactaaatttcctaggatttccattaagaattaagaaaaaagctctaagcacgcagggtagccagacagacatggatatgagatggcactgtgaaaacttgcagg

SEQ ID NO: 23410 - DNA, 2300 bp, Homo sapien
ggaaaacaatgcaatgttctacgtatcttttagatggaaggcaactgaatgtattgtgcatggtgatcagcttgaatatgttagacctgtatgagagaagagacataacgccttcatgtcagggagcagttgacatattttaaagaacaccaacattaaatattgcatgatatcctttctaccctgtgggattgttaggaaagatagaaacatgagtattttataaaggaagccacagtgcctcagggaaagactcagtaactaatgtgatgtaaccagtaaatggtggcatcaaaaatgcagtacggatttcctaactcctaatccagtgctctttccatgctaacactatgaaatgtcaaattcagaatatggacctgcagtcctgaaaacatactgtgtggatgattttccttttctttttgaagctctacttgatatttttaaaacgaataatcacgactcttgttagtgaattaaaatacatatgttgcaaaataacaaaatgagtaagaaatgactgggggcaagggcagaaacagttcacagtggaaaatgatagattttgcgtctgctggccttcgagcagctgtggaaggttgggagacacggcatatttaaatagataaaagcatcatgtttagcaaggctgaactgtttcaatcaatatactactgaagaattatcttttagtatcataaaataaacttttgacaggaatgtgacatgtgtgattgctacaggtgtgatttgggggccactggacactatttatatagtgggcatcagagtcccatggttgaatctttggactaggaagcaatatacaagtctaaatggccacttgggttagtagctgatttgaatcaaatcttcccagaattacattttttaaaaaatactggactttatatttgttgataacaattatgtagatggtgagaagctagtgagaaatcattcctgttcaatgttgctttcttttggctttaaatagaaataaagacaaaaaaaaaaaagtccagccactggacatgtcatagttttttatcatcttttggaaatcagggaaatgtttaaatcatagtcccaagtcttaatcaccagcatccagtgcctgtggtcctcctagccaagttcacttgcattgctagatttctactcttaaatttatgctggctttgctggtctttcatctaggacacacagctttcagttaaagatgctgtatttcatcaaaagcatataaatgtcctatttcccttgggggcactagatttaggaattttcatttcctgatgctattttctttataagacaggatgagagaaaggaggagttccactgttagcaaagatcatcacagcggggcttctatagagatcttggaagatcttaaatattcctaaaatattgactgaaatacaagcaattttattcatgccatttctttcttttctgctttcttcctgtttctctcctgacccttctcttcctctcttcccattcttccactttctgcctcttctgcagctgccaaattaatgcatccttttccctccttgtgagttttggtcccctgaacttccactgccttatatgagatataatatggtaatgggaagaagaatccttgttatgagtaacatatgtgattaacagatcatcgcgactgatgcttgagtacaaggtatcaagccatatttagcagattgagtttaaacacctggtagaacaagtttggtccaataaaaagacccgaattctctcccttttaagatctctaaagacactggttacatctaaaccattgggtaggggaagggtgccatttgccattgtagttcagatggagggatcacctggtggagggagagttgctttttaggtgttcccgtttcgccttacacgtgtccctttgatgcgtggagaatgcaagggagaggcaaagcagggcgattttcgtgggaagctagaccagcctccctcgttacataggctcgtcctctgcattgcatccgagcttcagtgatttgctgtttggagactgcagatttgcatagagccccttgcttcaccagcgtgtgtggtttttcttttctttttttctttttctttttctttttctgtttctctcccttactccttcgtctgcatcttcttctcagctgcctttccgccgttcgattcccacttccttcagaagggcgcactcttccctctgaacccctcgccgggcgtaagtgtcaggaggcggcggacgcggagattgcctcgggagcaggcgatgcgcgccgctg

SEQ ID NO: 23411 - DNA, 2300 bp, Homo sapien
tatttctagaagacatgtgaaataagaataatttagataatttcttcctattatgtaattgctcccctgcctcaaacacacacacacacacacacacacacaccagtgaatgcatttcctgtaaattaaaaacattgagtttacactaaagagatcaatttttttttgccctgtttctgaggctcaccactgatgtcgcattgggcaggtcaaggatccttctgaggtaaagatacacccacctgcttttacctcagctagcgttgttttgagggtgtatcagatggacaaagtgtgaatgctttctggaccctgggatagcctatgcaaatgtaggggttttatattttgataaaactaagtgaaatgaagattaaagccaagcactttcacattgaactaaacaaaggaaataaataatggaaagtctaagatctgctgagagcacatcaatgaaatagttattcttgtatctttattgaaaagctaattgtaaaggctaaaaacctcttttgagggtggaaagaaagacttctgtctacttgctaatttattgttctgggagatgtggctgcagttcattgtgactatatagaagcagaaacctaataacatggtttactagtcctggttctgccatttaggacctcagtaaataccacagcctcttcctttctttctcagttgtggataataacagctcagagctgttgtaagggtcaacagattatccttgtgatttaaaggaaggtgagaatttcaagcataaaagaattgaaaagatgtatacttcttttttgtctttttgatggcagaacacagaactcttatctcatgtctactcttcaatccaggctgtgccttagttaatgagaagcaagaacacccaccacttctctagaaaaaggacttgacaacttcactcctgacattctgtcacagggaataacgctctttacggaactgcttatcatgagtatggcatcattctgggccctgggtataccaaacaaacaaaaaatgaagatccctgtcctctgtcactcatattctactgtaggagatggacgaaaaaatatttaaacatgagtgattaactatggtatactcagtagttaagttttatggagaaaaataaagcaaggcatgtaaaggcaaggtgtaggtggtagtggaccaaagacttagaagaggtgagagagcacacagtgaataacatgttggagaggaatttagcaggcagaggaaggagccactgaaatgccaaaatccagggaactgtctggcttattaaagagtcaatggggagatggatgtggctaaagcaaaactggaggctttagggtagtattgaagatgagcccacagatgaaatggtggaccagattgtatagagttacgggctatcctcaggattttggcttttactctgagagagacgagaaaccacacaagttgttgttattgttttctatgtttctttagagtttttattgagttaagaaaatgcttatgtcatatatcaaggaaggtggaaaacttacataaaatattaatagtgtttatttctgagttattattgttaatttctcttccatttaattttattttccaaggcatcaaaactgcagatattcttggatagccttccttttataaccagtgaattaatttcaatgatagcatctctaataatgaagttattttgtctctagtgtgaatgacataacattattgctaagagtttgttttgtctttttttttttctttgtaagctgctactatgcttcagtagcccttgagcttgaatggagtggtggggacatgagggctgtgaagtagctagtccatcatgaaattaatggtggtgatgagggtggtacaaacggaattcctgtcattcaggaatgaatagccaagaagagcaggttagactactgaatacatttaaccattcttttgtatacaaaataaatattatttaggggataaattaacttcccctttcacccccagacctcagttggtgtgaatgtttaaacagagcaaaaactgaaaagaatctagaaacttgatacttctagaactttataaactcctatttgtgacttcttcagaccactttcatgacttctggaagcaaatgtcctagtacagactcaggtactctttagagtatagaattataagtgttacttttaaaattgatacgtaactttaaaagcctatttaatttctcatgggtgggttttgagccaagaaggggcatgattagactttaagtttaaaaaagatcactt

SEQ ID NO: 23412 - DNA, 2300 bp, Homo sapien
gtgtgtgtgtgtgtgtgtgtgtgtgtgtgttgaaagagagagaaccagtcatcaatttcatctgggaggaacttgaagtgggataccctagcttggtggctctcagctgacacctgtggggattgctctgtactgaagagaaatgctctcagctccccccatggagaagcagcagcacaatgcggtgccataaattactgctagtttcagcttgtaagggaaaaaaagtgttaattgggtagtgagcttctacatccagacaataaatttggggtgtgtgtgtgcatgtgtgtatggtgtatatatattgcagtgtgtgtgtttgcaagaggtggggaatataagaaatagtgagaaaaataatgcacttccttgacatgaacagattatacatttgtaatttttttcaaaaggtaagagtaattttttggttaaaaaatgacttaggaaaaaaatcagtgattatgatttctgtaccatttcaagaacctgtcagattagagttgaataaagagaagtgatttaatagtatagtgagtgattcaaaggtacggttttaaattctagcatcctggagccactgcagctgagatgacatacatgccaacagctcttctgaccacacaaattgtgagggctgacagcaagatacagacttcaggaggagttagatctacacttttaggcaaaatattaaatactttatgcacctttagagaagttaatattagggcaattgagacaatgccaaaaacataaatctggctccaattagtggttttcttttacaacagattattcattaatataaaggagaactatacttgtgtgaaattttgcaagagactatcaagaaaccatcaatattccttctaagaaaaataaaatggcaggaatgctatacaagtctaagctggcagcttcctgccaacagtttaatctaatttgccaattgtaaaatctcttaactgagatttgaataggttgtatttttactgtccacagaacaagcacacaacataggtagaaatccttaaaagcatttgttctcccctcacatattttaaaaattaaactatcttgcgaaaagaaaaagataaccataatcaaatttctctttaaaacttcgggttaccaactaacagttataataaactacaagggtgtcatggctgactgtaaaagtgtcatattaactattagaaaatgttaggacttacttgtagtgaggataacaaaagctccatacaagaaggttaactctttgccttactaataggaccaggtctacacttgtgttatgagctgaataatgatttatataatactatattgactttagaccttaattttgactttaattctctgcagatgtctgagtccttaaaaaagacaagataaaaccaaaatgcatcaccaacacacaaccaattgatgtgctggcatcttagcttggccctgcagaggcagagagaaaagaagaggagctgttgcgatttccacatctaacagcttctggctatttcgcaactgctgggtttgagtcctactgttgccgtggctgaaaagagaagtaaaatccaacttgtgagaccacgcacaaggaattaggctttggctgcagcggtgctgaagcccatgctatgacagaagaagcaggcctttgaagctatcctcgggttaagaaatggtgccctaaagaggcaagcatccctttctccgttctgctgtaagacaccacatctgaaggagacagacttgaggcattcacaagcatccaaggatactggctcactgctggcttcctgtactttcttgagaaaagtgttttctttttactgactctcactgcttccttttggcctggtaccactggtggaacctggcagataatgggatttgaggagttaagtatctgttgacactgcagatactcttaaattagttaatcagactcaaatgggtcagtgctttcccttgatcttttgttgaagccttttccagaacgttgtctccaaagtgcatcctccctttggtctggaagttctgtggctaccctgtaccactggggtcaacgttttccagttggaagaggactacagggagagagggcggggttattggaagaagaagaagaaaaaaagaactagataaaggagggcacatccctctcactcccgcctttccccttacctttctgtctctcgggacccttatttcttcgtcacggtgtccaggaccattttgaccctgtcggccccggcacccccccgccgcaccccagccccgagcatggggac

SEQ ID NO: 23413 - DNA, 2300 bp, Homo sapien
ccagatgaaattgatgactggttctctctctttcaacacacacacacacacacacacacacacacacacacagtgtgggtgtgcgcacatacacactgcccactagcaaaaggaaataaaaatctcagttgcttatttattatggctgatacattccacaccatcagcaatcaccagtcatatcttgtcttctcctatatcaaacccgaggaaagaggctcgtcaaatcatctgaaatagcatattattcagtatactttcatattttaagtggactcaggaatctgctaaattttcagtcatttgcaaaataaatctggaatatcatgatcaagagtagtgctttgaaccctttctcaagctcatgtgttagaaaacctttttttttttcttgtgtgtgtaactctgttggagccaattattgtattaattaatgttacattgatcacataaccttttttctcccgtccctcctgccctcctccactaatgcacaccttgacaattttaagggatggtggaagagagaaaaaccgtagagcaatatatatgtacatatagatatatatacattcttatcacagggaggttaactggttttcccagttcttggaggaagctcattgtatgtgagcgagtatctgtatttatatggagaaaagaggattctctctaggtgccagaaagacctggccagttcacaaattagaggatgaaataaagggatctgaaaaacatccttactgcagccaaaagaagaagcgctctaattcaaaagcagactaacagcatcattaatcttttctttcatttctagaatcaaattcatcccaagtcactaggaggatcaatacagtacgctcatcggctgcagttgcatattttaatgtttctgatatcacacacacatacacacctacacctttccatgcacccttcaatatatatatatatcttcataaagaacatgaaatctctgagagaaattttagaagtgcttattatttcacccctggcttttgcaaagtctctcaataccaatgcacagccaaaattctctctggctttcccgcccagtctctaagctccatctctaataccagtgcagtttcttggagctcggggtctactgcacaaattaacgatgggcacagtgtggggctgatgaggtagggaaggaaatatatggagagatattttattgctttgatatctagcctgtctcttattttctttcttttgctaatacatcactgcattcagcctttaagttactaccccagttccaccatctcttcttgccatctatttaaaaggcttcatgcaaaacaaccaagatctacactcctccaccctcccaccacccatctttccctgtgtatttgtggcagatcctggctcagttacaatggggaaagatatccttcttcagcttgcctcgccccatcccctccccccaacccaaattgagcttctttacctgcccggttattcccctcagctcgagccagagcctgaagcatgcatcggtcaaagcgaatttcctgaggtctatggataaggcgactgctgctgccttttcagaggcgtcaggcttgagcgtctatctccaggagtgcgggaggggagaacaggcaacggaggggagcaggaggaggaggaggaggagaaggaggaggagggggaggagagggaaagagctgggaaggaaaaggcggtggtggagcctgagaaggctgggttacgtgacgccgggtgctgtccttctgaaagagaagggcggagctgagctctccgcagtaccatggagagcggcgggcccgtcctttggctggggaatgggtgggctcggcccgtggtcgcagcccctccaggtctggatgctgcggagcgaggtgcttttacctttgcatcgtccccttgcagggggagcctgatcctgggggcggggaccttccgcaagcgcttctaacttgtcaccaccctctcttccccatcggaaagaaagaaagagagagagagagagagagagagagagagagagagagagagaacgaacgaacacgaaccagagaaccacgtagcctactgagcatgcccaggcccctgctagacccatggaaagctgtatggagattccacttctccggggtttggtagtgattgggcggggatacctgagagggtgccaggaaagggtccagcagtcaaagagaaggggccaaggagtcgataattatgatgagctctggctttacttgtgcaccttggtctcctgctcggaacccttgaaaagaagc

SEQ ID NO: 23414 - DNA, 2300 bp, Homo sapien
gaagagatgtgggaacactggtctttttaatctgaaaattcacacatgcagcataagaatgtcaacattttttttaaatcaaaacaccacagaagacatctcaaggaaaaccttgattcagtggaaacactgtgtagcccaattaaagataaaataaaaattcacaaagacgaaatgaaataaagtaggaaattgttcagatcacatgcactggtggtaaataatgagtttttatgaatccaggtaaaaggcagtgctttgactcttaagagtgcctctagcactaccataatgttcactgatgcatgttcacaccagatcttaagagcatcatggaaccaagttagacttgatttttgaaagtgggctgtccattccacttacttttgcaataagctttagctctatactaaacacatcgcggtgtaccttctgtactatttgtcctataacctaatggtaggaaaaattgaaaaaggccctgaattaactagactgtttttttgtttcaagttcactgaatgaataatttagataagtaattttctgagtcttagttttacatcatttaaaattaaatttttgttttaagaatcatgttaacagctattatttcattacattcccaaagcaatcttatggaataagctgacaatgactaatacctctattttatagtcaaagaattcgagtttcagagaaattccttccattgagtcaaacagaacacagagtgggttgtagttgataaatatagccaaaattccacaatttggaatccacaattccaaatatgttatgtttatttattcatttcatcttcacaacatcaaacacatgaagagggagctattattatatccattttacagatgaggtgactgaggcagcataagattaagtatcttgctgaggttacaactaataaatggcagagattgaattgaagctcagacaatctatttcccaaacatgtaaccacttgacaaaactgcctctctaagggcgataaacatattaaaacctgtgatacccgccttcaggttatttagacccttttacaaaagtagtgaaagtataaatcggcttatcataggaatgagttctagttttttggaagaatatacatattgtaattgtaatatatattattttgatgttcccaaatttatctagttcttaaattcttgctctatagggcctggaggccaaaaatagtcttgccttacagtatttgaggttcagactattaggtctgtggcgttgcaataaaaatgtctgtatctgctccaaaactaacccaggctaggaatatacaggaataggaatttaaatgtccatagggtgcaaaccataatttaaagccacagaccccgaactcctctaccacctaatctgtaagctcccttagatttaacccctttctcaccaaacccagcaatgcctattgggcatgcccagttgcatggttagagcctcacacccagttttactttcaccaggttttaccagctgcaaaagggaggaggagacggagggaagagttaaacaggtagaaaacttggttcaagacagagcacagaaggctggagaatgacgacaggctgcagtaaaaagcaccttgtcagacacagttgatcgtcgtctgcaagttggcatcttaccctggtgggttccttttacatctttttggcacagcctaggcaagtcatgaagatttgttgtgattacccaaggcagagccacagtaaggggtggggcaagggacatcggatctagaagaatgccagtgcctgtgtgagtcttgcttgcccctgcattcctcgaaaagctgcagcttcttttcaagggttccgagcaggagaccaaggtgcacaagtaaagccagagctcatcataattatcgactccttggccccttctctttgactgctggaccctttcctggcaccctctcaggtatccccgcccaatcactaccaaaccccggagaagtggaatctccatacagctttccatgggtctagcaggggcctgggcatgctcagtaggctacgtggttctctggttcgtgttcgttcgttctctctctctctctctctctctctctctctctctctctctctttctttctttccgatggggaagagagggtggtgacaagttagaagcgcttgcggaaggtccccgcccccaggatcaggctccccctgcaaggggacgatgcaaaggtaaaagcacctcgctccgcagcatccagacctggaggggctgcgaccacgggccgagcccacccattc

SEQ ID NO: 23415 - DNA, 2300 bp, Homo sapien
gaaattcgcttggactatcatggctgtgtctctgtgtgtgaaaacagaaaccttaccaagtgattgttctttcttgaagatttttataccatgatcttgaatgctaaaacactcagattcaaggggtattatttgttttcttataaagaaatcagcaggaagctgctaccagacaaacaaacaaaaaaaaaagcaagtcttttcctattttctctaagttgtggtttcaaattgcctgatatggttgctaacccttcttttttgaaaaattttgaatacacagaaaactcagataaaaagagtgtaatgaccaatacctttcatctagatccagtaattaccattttgcacagttgctgtacttcctttttactttatttatacttttaaatggagaacatttgaagttgcttgtgttatgacattttactgccacatactctacatgtgtctcataagaataaggacattcatcctagaacaagttccctaaaaaaaaagaataagggcattctcctaataactgtgatgccattatcacatctgagaaaattaacaatagttatgtaatcaaataagtattccatatccaaactgcttcatagagtcactaacaagaaattgtgtcttcgagagagtcacatgagagctatactggactctgactggaggggaacttgaagtgagcattggagggaggtgatgatgtgggcaagaactctgttaagaactttctgggctatgtaggaaaaccgggctcatctcttcatggtgttctctgttggtttcagtatgctcagtcagtgggtctatttggtcaagcatagagaatctgagtgtttaacctcttctggaaaggacaagcaggtgcaggaagactagaatgacacctatctttcactgcttttctggcctctttgggtttagttgtttcctatagagggctgtatattgaggctgagcattgctggtagttgaatggccatctctgcataatgtagtgtacactggggattaagcagaggtgctcttatcaatggagcaccaaagagggtgctcttatcaatggagcaccaaagaatgcgttgtggtggggtatgaacaggagcagaagcctactcctcaaacatttccagaggaggaaagatagaacacttaaaagtcccttcatgtttttagtgggaaccttccaaggaattccaatctgccaaacagagaaacttcctgctttaggcaccagcagagactgtggcatggcagtcactttctgtattgtgggcccttcttcgtcagtcatgtgagagatactagacaggcccaccgtgatttgctgacctctaggagtgaagtgttgttttattgactatagtattatccttctaccttgttttgtagactggtcaaacaaatggattttacagaggcttacgcggacacgtgctctacagttggacttgctgccagggaaggcaatgttaaagtcttaaggaaactgctcaaaaagggccgaagtgtcgatgttgctgataacaggggatggatgccaattcatgaagcagcttatcacaactctgtagaatgtttgcaaatgttaattaatgcaggtaaagtaaattcaaggtatggaggctttgcctacaagctggattaataaaacataaaaaagtataatacataacttattaacagtagtatttgtttccctttctatagtcataaaataactgcctgaatttatttattaaggatagtaagattgcctgccttggattcaattagtatgatactctagttggacatcttatacggaagtgcctctgtctggcctctttttattgactgagctaggtgatatgggagaagtagtctgctgtttgaatttaagcatttggtagttactggtcatgtttattctttcttcctttaccaaacagaaagagcaattgtactgaaattgaggatgtgttttgattgaattagtctttttctttttaaacactttttaatacttttgggaatttttacaactacttagcatgaaacaagatgcctgccttcctgatgctttttcttgtcagaggaaacagatgacaaatatctaaataattaaacaagataatttaaaaaggtaaaagtgttatgaagaaaataaaacaaagtagagataataaaacagatgggatagacaaaaatggtgtgctactgcacatctctttacatctctgcattcagtgacttcatgcttgggatcggccatggtaggagtatttacaccacagaaacaagccagtgctacaaac

SEQ ID NO: 23416 - DNA, 2300 bp, Homo sapien
tagggtgtcaagaggcattgaccttcggtgtagtaagcaatggattcttttgcagcatccgtaaatcaccctaacctacctttagtgcccgtgtgcagaaaactacaatacccacaatgctttttggagctatttggctctgaaattggaactgggcttatttctaacggggccgaggaaggagaaaagagcaggagtcgtcactcgtgtccagatacggaggcggtgtaccagcaccgcaggtagcaaagcacctagaaacacgttttgttctgctttggaaattagatttttgcctatataacagcagccagaggaatgtaattcatatttgattttatgtcctgaaaaaaaagtcttttgcctttcaaataaaagcagaaagtttacaatagaagtttacgcttgtgaaagagtagctgtcatttcaatgggaattgtttatatatttaaattttacacaaatttattcatctttagtattatcattggcttgttcacaaaagagcaggcaaatgttcttaacttggggcccctgtaaaggctttggaaacgagctggggaacctgaatttgtatacaaaatttggggtgtacacttttctagggggaaactacagctttcatgagtttctccaaggggtcaaggatcctaaaattttttgaagatctgctcattagagctcttgctgcaaaatattgtttaggaaattcgcttggactatcatggctgtgtctctgtgtgtgaaaacagaaaccttaccaagtgattgttctttcttgaagatttttataccatgatcttgaatgctaaaacactcagattcaaggggtattatttgttttcttataaagaaatcagcaggaagctgctaccagacaaacaaacaaaaaaaaaagcaagtcttttcctattttctctaagttgtggtttcaaattgcctgatatggttgctaacccttcttttttgaaaaattttgaatacacagaaaactcagataaaaagagtgtaatgaccaatacctttcatctagatccagtaattaccattttgcacagttgctgtacttcctttttactttatttatacttttaaatggagaacatttgaagttgcttgtgttatgacattttactgccacatactctacatgtgtctcataagaataaggacattcatcctagaacaagttccctaaaaaaaaagaataagggcattctcctaataactgtgatgccattatcacatctgagaaaattaacaatagttatgtaatcaaataagtattccatatccaaactgcttcatagagtcactaacaagaaattgtgtcttcgagagagtcacatgagagctatactggactctgactggaggggaacttgaagtgagcattggagggaggtgatgatgtgggcaagaactctgttaagaactttctgggctatgtaggaaaaccgggctcatctcttcatggtgttctctgttggtttcagtatgctcagtcagtgggtctatttggtcaagcatagagaatctgagtgtttaacctcttctggaaaggacaagcaggtgcaggaagactagaatgacacctatctttcactgcttttctggcctctttgggtttagttgtttcctatagagggctgtatattgaggctgagcattgctggtagttgaatggccatctctgcataatgtagtgtacactggggattaagcagaggtgctcttatcaatggagcaccaaagagggtgctcttatcaatggagcaccaaagaatgcgttgtggtggggtatgaacaggagcagaagcctactcctcaaacatttccagaggaggaaagatagaacacttaaaagtcccttcatgtttttagtgggaaccttccaaggaattccaatctgccaaacagagaaacttcctgctttaggcaccagcagagactgtggcatggcagtcactttctgtattgtgggcccttcttcgtcagtcatgtgagagatactagacaggcccaccgtgatttgctgacctctaggagtgaagtgttgttttattgactatagtattatccttctaccttgttttgtagactggtcaaacaaatggattttacagaggcttacgcggacacgtgctctacagttggacttgctgccagggaaggcaatgttaaagtcttaaggaaactgctcaaaaagggccgaagtgtcgatgttgctgataacaggggatggatgccaattcatgaagcagcttatcacaactctgtagaatgtttgcaaatgtta

SEQ ID NO: 23417 - DNA, 2300 bp, Homo sapien
cgaagaagggcccacaatacagaaagtgactgccatgccacagtctctgctggtgcctaaagcaggaagtttctctgtttggcagattggaattccttggaaggttcccactaaaaacatgaagggacttttaagtgttctatctttcctcctctggaaatgtttgaggagtaggcttctgctcctgttcataccccaccacaacgcattctttggtgctccattgataagagcaccctctttggtgctccattgataagagcacctctgcttaatccccagtgtacactacattatgcagagatggccattcaactaccagcaatgctcagcctcaatatacagccctctataggaaacaactaaacccaaagaggccagaaaagcagtgaaagataggtgtcattctagtcttcctgcacctgcttgtcctttccagaagaggttaaacactcagattctctatgcttgaccaaatagacccactgactgagcatactgaaaccaacagagaacaccatgaagagatgagcccggttttcctacatagcccagaaagttcttaacagagttcttgcccacatcatcacctccctccaatgctcacttcaagttcccctccagtcagagtccagtatagctctcatgtgactctctcgaagacacaatttcttgttagtgactctatgaagcagtttggatatggaatacttatttgattacataactattgttaattttctcagatgtgataatggcatcacagttattaggagaatgcccttattctttttttttagggaacttgttctaggatgaatgtccttattcttatgagacacatgtagagtatgtggcagtaaaatgtcataacacaagcaacttcaaatgttctccatttaaaagtataaataaagtaaaaaggaagtacagcaactgtgcaaaatggtaattactggatctagatgaaaggtattggtcattacactctttttatctgagttttctgtgtattcaaaatttttcaaaaaagaagggttagcaaccatatcaggcaatttgaaaccacaacttagagaaaataggaaaagacttgcttttttttttgtttgtttgtctggtagcagcttcctgctgatttctttataagaaaacaaataataccccttgaatctgagtgttttagcattcaagatcatggtataaaaatcttcaagaaagaacaatcacttggtaaggtttctgttttcacacacagagacacagccatgatagtccaagcgaatttcctaaacaatattttgcagcaagagctctaatgagcagatcttcaaaaaattttaggatccttgaccccttggagaaactcatgaaagctgtagtttccccctagaaaagtgtacaccccaaattttgtatacaaattcaggttccccagctcgtttccaaagcctttacaggggccccaagttaagaacatttgcctgctcttttgtgaacaagccaatgataatactaaagatgaataaatttgtgtaaaatttaaatatataaacaattcccattgaaatgacagctactctttcacaagcgtaaacttctattgtaaactttctgcttttatttgaaaggcaaaagacttttttttcaggacataaaatcaaatatgaattacattcctctggctgctgttatataggcaaaaatctaatttccaaagcagaacaaaacgtgtttctaggtgctttgctacctgcggtgctggtacaccgcctccgtatctggacacgagtgacgactcctgctcttttctccttcctcggccccgttagaaataagcccagttccaatttcagagccaaatagctccaaaaagcattgtgggtattgtagttttctgcacacgggcactaaaggtaggttagggtgatttacggatgctgcaaaagaatccattgcttactacaccgaaggtcaatgcctcttgacaccctaatcaaggaaataaaataaagctgactgagatccgctcggaaaatctttctggatctaaactcccagtgcgctttgcgccccaagtggccatcgcgcctgcgccccgcgcggccggttactcgcttaccggaggcttcagtccccggcggcgcggcgacagctagggttcacggccactggggcagaggagccgcgagaagatgtgggtttttggttacgggtccctgatctggaaggtggatttcccctatcaggacaagctggtcggatacatcaccaactacagcaggcgcttctggcagggc

SEQ ID NO: 23418 - DNA, 2300 bp, Homo sapien
gtccactctcctgcctacagagctgtctccctggcctctttctgcttctcaaacttcttctaccactttcctcttacactccagccacactggccttctttctatcactccaacacatcaagctcattcctgcctcagggcctctgcctagaaatttgtctggctcccttcttttcatcattcaagtcacaattcaaatgtcacttcctcacagaagtctcctctgacttacgtactaaaagcaacacatcctacaggtattgtctttcacataaccttagtttctttgcagcacttaccaatactagaaattattttacttatttaagttcccctcttacttgaacatcagctctattgaacacagattcaatcactatagccctaaatgctaaaacaggacctcacagacagttttcatttttattccgtcaaatacatctcttttccttcatgacttaagactagtgcttagcacagaataaatgctaaaaaaaaaaaaaattgactattactactataatagtttgcaattatttgtttgtacaatctccctgcctagactgtgtgaccaaagacagaaacccatttatttggcattttaccaagcccaggggggccaggcacagtggctcaggcctgtaatcccagcactttggaaggccgaggagggcggatcacccgaggtcaggagttcgagaccagcctggccaacgtggtgaaaccctgcctctactaaaaatacaaaaattagggtgtagcggcgcgcgcctgtaatcccaactactcggaaggctgagaaaaaggagaatcccttgaactccagaggcggaggttgcagtgagccaagattatgcctctgcactccagcctgggtgacagagcgagactttgtctcaaaacaaacaacaacaacaaaaatcccaggagtctggatcacattaagcattaataagaagtgctgaatataattagcgaataacaattctgaagaaagttatcttctttgatactatggattcctgatgttaaaaaaaaatttttaagatagaatatgggactgtccttcctgctttttgatttggttcaaatctgaggaagtgggggcgaccagtctttaacagatctagcaagactgtcgagctttagggaatggtaatttctctaaagccaacactctatgtccattatattggagatcaaaacagacaatggcattttttctaaagagggggagggaaaaacaaaactttttgtctaatttggggatgcagtcagacgtgacttagttcataaacacacacattcatctggcgctaaacctcacataaggaaccttaccagcttccttgataaaacaacaccccaacacttcaatctagagatggagggtaaaaatgtagggttgtgatgtctagctgcccattccacgagagtcgcccaccacgccaaattcggaggcttgcggtattcacctacggggagatggcgggctacctcaccccaggtttcccctaacacagagttgcagtcgctgaacaaactgccctgcgttagtcagaagctgttaagtaacgagatggccacggtccacagcagaagagatggagataagcctcaagcgggaaaaatgaagtgtacaaatgccaaatgcggagaaaaagaagaaaagctgcaagaaggcaggtcagtcaggaacaccgccatttctcacatctcatcgctacttcgaattttctcatctaaggacccgcacccgcacggttcacactgtcttcttcccgctatcactccgtgtgggtcaaacctctgcctgcccactggagagcagcgggaatggcttcaggaagcggctgccgcctccgagactcaccgacctgccgtgctgccacttctacaccgaaatggctggtccgaggccgcgtctccagagctgcgtcccagaagcccccgctttcgatccccaccgcgatgctgcagccgtccgaaaacgagagacgcgcaggcgacgtcccggcccccgtaggcggacggctccgcgacccccggatgttgatatgtcgtctgccccggaaacggtgacaggaggctcaagggggcggaggcggcgttgccgggctctccggaaggagacgtggcggcggttgggccggtgatacccgggcgctttatagtcccgccgcctcctcctccacctcctcctcctcctcctctcctcctggagcagaggaggttgtggcggtggctggagaaagcggcggcggaggatggaggaaggaggcggcggcgtacggagtctg

SEQ ID NO: 23419 - DNA, 2300 bp, Homo sapien
gaaaatggaatgacaatttggtagtgacctctaaaaatgctagttttagtcgctcgcttatagtaagttttcagggctgcatatcagcaagtttttttaaattaaaaaaaacacaggtgccaagagtaaaaaattttaatgacataattcttcaaacatctgccatattcactccaagtgtgctctttggatacaacaacaggtattaaagtattctcttccaagcctgctaaagttatatctgattcataacaaaattttacataggtatttcaatgtatcaatattttgtggcattaatacaaagagaaatttgacgtcccagaaaaatatttacctagataaattcagaacatttggttcacacatgtaatcccagtattctgggaggctcaggcacgaggattgcttgagcccaggagttcgagaccagcctaggcaacatagtgagaccctgcctctagaaaaaaaaaaaaaaattagccaggagtggtgggatttccctatagtcccagctactgggaagctgaggagatctcttgagcccaggaggtcgaggctgcagccagtggtgaccgtaccactgcacttcagaatgggcaacagactgagaccctgtctcaaaaaacaaacaaaaacagaaaaacccaaaccaaaccaaaccaaaccaaaaaacccctaacacttgcaaatagaaagctatgtggtaataacatccattaacttgacacatcttgttttgacatcatagtgtcacttactgtttcaatgaaatggtaatgaaagaatataataaagtattgcaagttgaatgcttgaaggtaattggaataaaaagtttaaaaaaattttgctttttccgggacttcaatttgaagtaaatgagttaattactacatggtaagtgtcataagagtacaatatttattagcctgcagtaggtacacgtggacaggaagacttttcagcggtccactcccccaagagggaattttcatttccgcgaggttacaaatgttcttcactacaggaaaactcaacatagaagctcatgttctggggactcaaataacagtcgtaatacatgaaaactgtaaaggatattctgcataaagggtcgttaacatctcacaggccaaatagccctctcagaaacaactaggaaaggaaaaagttcccttggagctgtgcgtttgcgtatgtccgtgtgtgtatacaactgagggagaacgaatacgagagagggaactcgagtctgaagtactgtggtgtgggcagggtgacatgtaatactgaaggaaagaagtctgctggtgaagtaagagccacagttaattttccgaaaggaagatgagtaagtgcacctgacgttattctacgaaagctgcttctgcagggtgggaatgttgggaagcaaggtctagtgcgacagaattgaaaaggtggagagcaggtgattgctggatccctaatgctcagcaagggggacgcatccacataacgtgagaacgaacgaatgaatgaacgctgcataaaagcagctttggcttggggaaggtaagagtctgcagagaaggtcttggggagaaaaagcaaagaaaaccgagggaagaggccgaacccttagtgtcaggaggaggggtggctgcggggttagtgagggcactgaccagagagaactcggtgccgggccagttgactcggaaagggatgtcatcgctgagttgaggaagggctcggccgccgccggacgcctccaggaggccgcagaggaccagtaacaccggcccgcccgggaccagactccgtacgccgccgcctccttcctccatcctccgccgccgctttctccagccaccgccacaacctcctctgctccaggaggagaggaggaggaggaggaggtggaggaggaggcggcgggactataaagcgcccgggtatcaccggcccaaccgccgccacgtctccttccggagagcccggcaacgccgcctccgcccccttgagcctcctgtcaccgtttccggggcagacgacatatcaacatccgggggtcgcggagccgtccgcctacgggggccgggacgtcgcctgcgcgtctctcgttttcggacggctgcagcatcgcggtggggatcgaaagcgggggcttctgggacgcagctctggagacgcggcctcggaccagccatttcggtgtagaagtggcagcacggcaggtcggtgagtctcggaggcggcagccgcttcctgaagccattcccgctgctctccagtgggcaggcagaggtttgacc

SEQ ID NO: 23420 - DNA, 2300 bp, Homo sapien
cttttgaacatcaaggttgttttcagtttcctgtactacagattacactgcagtgcacattttcatacctttatgctttaaaactcttcttttgttggagcagttccaaggagtgagagatgcctagatgaggagctttttttgttttaaagaacattttaacagctctcatatttgctgttttcctcaaagtgcacatgtatccatttgcattgcaataataagagtgtattagaagaatgccagtgtcagggcagattgatagccaattcatgatctataattagccctgcttatttatttgcagattttccatttttttactactaccaatgttttttccaatttcgctcacttgtggattttgtagatatactagttttagccttgttgaatggttctagctagttctggaactttgatgagtcctgatttcctcttctagatctctagaatcctttatgatttgtggttttttgtttgttttcagtttcagaccatttctccggtaggtataactctgatggtctcaatgcagcccaaacctattgtaatctccattcatatagccaaatgcctggaaatgaactagcatttatttatgcagtagctaatttattatagagaggtatataattttgatcagaattcccactccaaatgctaatgagtatttttctgtggattgtttctgggactcatggttaccattattgataacatatactggaactgctttattgcaagtggttgggaagtggaatatgtgggaactggaaaactttcttgaagttatttctaaacagaattctgatggcatactcaactcctggactgaataataagttatctagccttcttgctttttgttttttcgtttgtttttgttttgttttgtttttatgaaagcacagggaactgaagaaattgcattaattaaattacttgatacttgctagttctgttttaaaaagataaaccattagctaaaatgaagaatccagtataagtatttcatccgaacggaatcaactttgcttttctggtaaccagagtgaatgaaggaaagggcattcaaataacattctctgtttctaaatagcatccctgaggttagaaaagtagtaagatcctagttagccaggttgggatactgaagggagaagagtttaactggttttattttgtacccatcatagcagacatacttaggaatgttacttgattgttcagactaaaacctatcttaggagttcattattttggacatgtatgaattctagaagaatgagagaggatggtaattttagttttgtgtttgtgcttaataaaattagcttgtacattgcactatgatttatcaagattttttacattcaacatagtattaagtaatacatcaatatccatgattcctgggcttggtcgttttatttgcatgggtagtttctttatgctttgcatgtttcctgccaattagtccccttgctgagttccctcagtgaattcactaataccttaagagagcttaggtaagttcaaataggtttaatttaaattctattacaatgacttgatttgtaaattctaggtctcaaagttccaaactggaagccgccgccaatttaattcatgaggaaaaatattagccgcagcctaagtgaggagctagttaggacgtcttaaaagcgcggggaacgaggaggaggtgggctgcgggcagggtaagcagcctagggaggcccgcaaagacctccctgggtccctgcgtgccatcagtacccctatctttcccttccttccttaccactccaccttgctctgcgtttcaggttttggctatttcagggagcttgagttccccaaacagcaaaactgcgagcctgaaaaacctggctcaagcgcccctcgtgaggcgggcagcgggagtggccgggctctgggccccaggaggcaggcgacggaggcgcggagggtgcggggcgcaggcgggacgccaggcccgggtgtccggcggagggggcggtgccctcggcgtctccgtgactgcgcctctgcgcccgcgtcttgccgcggctcccgggatgcgcggaggcggtggcgatggcgatgatgcctctagtcctgcatcatccagagcggcaggcggagctggggtccggactgcgagatggaggaggggcggcgctgcggccacccggcaggtgagaggccgcgggcccctggaggaggacaaccccacgatgccggagacggctcccggaggctggcgggatagcgaggagcgcggctgcgctggg

SEQ ID NO: 23421 - DNA, 2300 bp, Homo sapien
caccatgttagccaggatggtctcgatctcctgacctcgtgatctgcctgtctcagcttcccaaagtgctgggattacagtcgtgagccaccacgcctggcctggttataacaactcttaacagacttcaattaaaatatttacagctgtgattttttttttttaatttcttattattctttaaaaactaacctaaaggagtggaaacaatgaccttgtcattgtttcctaactttaattattataccgcttgcatttaggagcttcttttagaacatttttatggtttctctttttttttttttttttttttttttttgagaccaagtcttgctttgttgtccaggctgtagtgcagtggcacaattatggctcactgcagcctctgcctcctgagctcaagtgatcctcccacctcagcctcctgagtagctgggactatgggtatttgccaccacacggaattactttttttgtgattttgtagaggcaaggttttgccatactgcccaggctggtctcaaactcctgggcccaagcaatctacccgccttggccttataaattatttttatattttcttccatatagaggtttaaacatagctgttatataaacataaccatgatcattaaaactatcatatttttaaagcaacatgtaaaaccaaaaagcagtaataattcgctaaattctgttcgttgatagtatggggaaaaacaatgttatctaaatgagaactgtttaaagaaaccttactgtatttaaaggaaacttcttagaaatagaggaaaatagtatgtttttagctgagaaggctaaatatattctttcctcactttttaaagttagttaattatagacatgtaccctggagtaaaatatctcagaagtagaccctgtcactggaaaagagcataaatcagttggaggtgttggggatcatttgttagcaatttgaagtaagagaaaaataaattaaaacatctcatattacagtatatttttgataaagagatttaccatccccgccccccctttttttggagagggagtttcactctttttgcccaggcgggagtgcagtggtgcgatctcggctcactgcaacctctgccccctgggttgaagcgattctcctgcttcagcctcctgagtagctgggattacagacacctaccaccatgcccagctaatttttatatttttagtagagacggggttttaccatgttggccaggctggtctcaaactcctgacctcaggtgatccacccgcctgggcctcccaaagtactaggatacaggcgtgagccaccatgccctgccaatcaccacctccggctttaaaaaataaattaggagaaagtggatttggatattatttataggaacgtaataggagcagagatgactttctaagcctttgagttaatagacgtcacatcaaaacatgcacagatctgactactcagagtggtggtggtattgtaataatgtatgcagatagccgggcgtggtggctcatgcctgtaatcccagcactttgggaggccgaggtgggcggatcacgaggtcaggagatcgagaccatcctggctaacatggtgaaaccccatctctactaaaaatacaaaaaaattagccaggcgtggcagcgggttgtagctgtagtcccagctacttgggaggctgaggcaagagaatggcatcaacccaggatgtggagcttgcagtgagccaagatcgtgccactgcactccatcctggtgacagagcgagactccatctcaaaaaaaaaaagtatacagataaagacattacttgctataagcagtgaaaagtcacacctcccaatgaccaggaaaatgcaaacttgaaacagtgaggcatttttagctactcctaatttagtgttttcctcccttcacaaaacaaaaatgtgtagtgatgaaaagcagtgtaaggtataactggtagttcacatttaagttttgtgtcattatatgttagcactagcttttttgaaaagcaactaatagccataaaattagctgtaaaattgtttatatctttaaacttactaatcccaatttttgtaatctattctaagaaaatatactgcaggccgggcacagaggcttacgcctgtaatcccagcactttgggaggccaaggcaggaggattgcttgagcccacgagttggagatcagcctgggcaacaaaaaaaaaagtgagacctgtgtctacaaaaaataaaaaaataaaaatggagtatattgaaaatatatactgtaata

SEQ ID NO: 23422 - DNA, 2300 bp, Homo sapien
aacacaacaaatagagatgattcagttagcatatgcctcgtaacttactttatatgaactaaattagaaccatttaagaggactagattattttcaactgtccaaagtttaaaacccacattacctttctttattgtggatggtcaacaacattcatatcagaggagagaccagcgaatggcagcttatcacatggaccccgcacccccccaccgcttttttctgagacagtctcactgcagtggtgcagtcatggctcactgcagcgtcaatctcctgggcacaagcagtcctcctgcctcagccccctgagtagctgggactacgggcatgcatcaccatgcctggctaattttctcaaaaatttttgtagagatggggtctcatgttgtctagattggtctccaatggtcctcccaccgtagccttccaaagtgctaggattacaggtgtgagctactatttttggtctcccattcctaatttaataaaaaatagttaataaaaaaaactttgaagtttgtggaaaatttcagtaacagtgtaagtttaatttctctcctttttaaaagaaataaatgccttttgagagaaaactgagaaagttggaaggaaatattcataaactaccattaccattaacctttcttatatgtatctttttttcttaaaattattgtgagtttataaaagcagcacatattcataaaagtataagatagactgacaagactaattgtgtatgataacagccactgttcatagttttatttatatttatcttatttatttatttttttttgtatttcctcaaatgttattttcctacacagttgtttgtcagtagagtcaggccagtagctctgcagcttcccttttatgaacccaatcaatatattgtatgtacgtttccatgtcagtaagtagatacttgttattccttatgtggcttttagaatttaatatcctgtgctctctagtagtagatgtttggttttatgacagttgttcaccagatagacaacaagaggcagtgagtggagtcattaacagcgtgaagttttgagccaggctgcctggatcaaattcatctccatggcccatgaactaattaggtaatcatgggcatctaattcaacccctctgaactttatccctctcatcagtaaaatggggataatgataccacccatctcctaaggatgttacgaggattatacgagttaatacgtgtccctcattgtccaaattgaggagtgggtggctgagtctgataacaaggaattatgtgcattttccatttcctgagttgccattagcaaatagcaagagtttaaattaaaagatattgcatcctaaattgagagaataaggggtattttcatatgggaagtgcttaaagcagcatcaggcacatggtaaacactgtagacatgttcctcttcattaatgatacagtgaacatcttatacatatcttttgcactttgcacatattttttatagaataaatcaccagaagtgaaaatgctggatctacttcagctaacacattgttgtaagaaacatatggtacattggctgttctgttaaaaatcttatttatcctatcccataaaaagcagttttatatccataaaaaatcctgaaatatatatgtattaaaattatatttatatatatctatatataaacttgcctattctggtctaagagtcttcatattcttaagattaaaggaagaggttttccaaccaagaatagcttacaaagtcctggctttcgggtaaatagagtcctagtttaaaatcctgcctttaggttgggcacagtggctcacgcctgtaatcccagcactttgggagaccgaggcgggcagatcacttgagatcgggagtttgagaccagcctgaaccacatggtgaaaccccatctctactaaaaatacaaaaattagccaggtgtggtggcagatactgtagtcccagctacccaggggtctgagacaggagaatcacttgaaccctggaggcggaggctgcagtaagccagatctcgccactgtgctccagctgggagacagttcaaaaaaaaaaaaaaattctgcctgtgacaggtgctttctttgtgaccttgcacaagcttctgaacttgtctcctatataaagagtgtgagtttaatatcagtgtccctcacagaactgttagaaggatgaaatgacatacctgtaaagcagaaagcacagtggtaaagtacatacttattattttactaatctttaactgtattttaatttggaa

SEQ ID NO: 23423 - DNA, 2300 bp, Homo sapien
ctaaacaatacagtataacagctatttacatagcatttacattgtattaggtattacaaatactctagagaagatttaaagtgtacaggaggatgtgcataggttatatgtaaatactacaccattttcataacagacttgaacatctgtggattttggtatcctaagggagttctggaaccaatccaccacagataccaagggacgactatacttatatatgttttcagtatttctaaaataattgaatatggctgggtgcactagctctcaactttaatcgcagaactttgggaggccgaggcaggaagatagcttggggccaggagttggagaccagcctgggcaacgtagggagactctgtctctacaaaaaataaaaaattagccaggcatagtggcgcatgcctgtggtcccagctacttgagagaccgaggcgggtggattacttgagcctgggaggcaatcataccacttcactccagcctgggcaacagagttagacctagcctcaaaaataaaattaaattaaataactgagtatgatttgtttacagaattgtaggttctctgttgaactgttacatcatattttaaacacaggaaagcagagatccccggaaacttcactggctttttgaactgctgttggaatcaccattgagtggtgaaggaggatcctttgtagatgcatggtaaatttttttaaaaaacctatgaggttaacacgaaaggttttgtgttaacttatgtataaatggaaatgaatggtctatacttgtaaagtctagatgaagtaattactttcttctggaaggtgatgtgatctggttccatataacatgtgatacttaataagagttatttattagttggacaagtaagtgagatgtaggcaacctgagcaatttaaacacaaattagagtcagcattctttgctgtcaaatattttatcagaattgtcttttgtacttttgtgtcttcatcacatcttatttttcactttttcctgttaaaaagatacaaagaaagagtaatcatttcaaggaaaaactgccttgtttggggcatatggtgctgtagaaagttagacaatagtaatatggataatttcattaaaaagaagaagcacttaattaatgagaaaacttgaattgtgatgtttaaatattagtcagtgagtattcttaagtcagtatttctttcagttttctagtagtgtggatgaaatgcaaatacagagaaaatgatataggaaaaataaaatcttcataaagaggctattttgagttgtggatattgtagtatttattaagtgaaaaaacgaaaaagctttaagtgaaatacagatattgtctgtccatactgtcaatatgtaaaggcagaaagggcctccaatataacactacgatgctttaattttagtcgactttatgtactacaaggtggccttgcccagcaagaatggagagtgcctgaactattgcacagactactgaagtacttggaacccaaactcacccaggtttacaaaaatgtcagagaaagaataggaaggtaggtactgttttctctgtggtgtacctctcgagttctttgtttgtttttttttaaattgtaataggtaataatacatgctggttatgttgtcagtgggtttcatggtgtctttctcaaattgtttgctattgtgtcgtgggaaacaagatgaaacactctgaatgtaaactaggacagcagtgtgctcagaagccagagatgagcagtcacaacacctaagtgttaataccccttaattataaggcttcttttacacacaggcataatctaagacccactccaggaattgtcttgggacagtttactttgattgggtcataacttttgaacctcatttttatttataatgtggcacctcttcctattattaagtattttattttgcagtgtgctgacctacatattcatgatagatgtatctttgccaaataccacaccaaccatatcgcctcatgtccctgagtttactgctcgaattctggagaaattgaaacctctcatggatgtggatgaagaaattcagaaccatgttatggaagaaaatggaattggtgaagaagatgagcgaactcagggcattaaactcttgaaaaccagtgagtggataaaattagtagaaactcagttgaaaacatctatttgattatcctgtagagttttttgcaccactttttttattgtggtaaaatagacataatgaaaaatttactgttttaaccatttttaagtgtacagttc

SEQ ID NO: 23424 - DNA, 2300 bp, Homo sapien
atctattcaaactgtttgatactgtctctcaaagtgtgtgaaatctcataacacttcttaaatctttttgggttttgttttttaattgtttttattttttatttccatgggattagagactattattctaagtgaggtaactcacttcttgaatcttgaaagtttgttcatacttttgtcatcttatgtaattggagatggctctattcagcctttcaaataagtcttgagaagtaactcttaagtgattattatatcttctctgctgtggtaatgcattttaaaattaagtgacagtcatgtatttggaaatgtcacttacatatagtaaaagccacataatacaaagttataggtattattttttataccagatatgtccatagctcgtgtactttgattgaagataatccatttagctaacaacagctttctcactgttaacttgaactgcgatagtcacatttgagtttgagtcacctatcagttttagtttgattttcttctcctgtacagtcagccctccatatccatgagttccacatctgtggtttcagccaacctgaggagatggagaatatttcagaagggggtggggggatggttgtgtctatagtgaacctgttcagattttttttttcttgtcattattccctaaacaatacagtataacagctatttacatagcatttacattgtattaggtattacaaatactctagagaagatttaaagtgtacaggaggatgtgcataggttatatgtaaatactacaccattttcataacagacttgaacatctgtggattttggtatcctaagggagttctggaaccaatccaccacagataccaagggacgactatacttatatatgttttcagtatttctaaaataattgaatatggctgggtgcactagctctcaactttaatcgcagaactttgggaggccgaggcaggaagatagcttggggccaggagttggagaccagcctgggcaacgtagggagactctgtctctacaaaaaataaaaaattagccaggcatagtggcgcatgcctgtggtcccagctacttgagagaccgaggcgggtggattacttgagcctgggaggcaatcataccacttcactccagcctgggcaacagagttagacctagcctcaaaaataaaattaaattaaataactgagtatgatttgtttacagaattgtaggttctctgttgaactgttacatcatattttaaacacaggaaagcagagatccccggaaacttcactggctttttgaactgctgttggaatcaccattgagtggtgaaggaggatcctttgtagatgcatggtaaatttttttaaaaaacctatgaggttaacacgaaaggttttgtgttaacttatgtataaatggaaatgaatggtctatacttgtaaagtctagatgaagtaattactttcttctggaaggtgatgtgatctggttccatataacatgtgatacttaataagagttatttattagttggacaagtaagtgagatgtaggcaacctgagcaatttaaacacaaattagagtcagcattctttgctgtcaaatattttatcagaattgtcttttgtacttttgtgtcttcatcacatcttatttttcactttttcctgttaaaaagatacaaagaaagagtaatcatttcaaggaaaaactgccttgtttggggcatatggtgctgtagaaagttagacaatagtaatatggataatttcattaaaaagaagaagcacttaattaatgagaaaacttgaattgtgatgtttaaatattagtcagtgagtattcttaagtcagtatttctttcagttttctagtagtgtggatgaaatgcaaatacagagaaaatgatataggaaaaataaaatcttcataaagaggctattttgagttgtggatattgtagtatttattaagtgaaaaaacgaaaaagctttaagtgaaatacagatattgtctgtccatactgtcaatatgtaaaggcagaaagggcctccaatataacactacgatgctttaattttagtcgactttatgtactacaaggtggccttgcccagcaagaatggagagtgcctgaactattgcacagactactgaagtacttggaacccaaactcacccaggtttacaaaaatgtcagagaaagaataggaaggtaggtactgttttctctgtggtgtacctctcgagttctttgtttgtttttttttaaattgtaataggtaataatacatgctggtta

SEQ ID NO: 23425 - DNA, 2300 bp, Homo sapien
tcaacctcacttcagttcttcttcttcttttttttcttaatacaatttgtgtttttctgtatagcactgcataaatattggtgactatgtaatccattctcctcaaccccttcatactagtgccagttgacatagatgttgatgtatctaagactgagttactaccccattcagccctccgttggctactgctttatgtaatttgctgctcatttcttgtatcagttctgatacaagcgttttgaaggaaaagttaatgactgatttttagttttctattgcatataaattatgggatctccgtaaatgcatgttggtagatttcagttaaaactccttaaacttcatttaatttacttcactttgaaagttgacttggctgggagccatggcacatgcctgtaatcccaacactttggaagtctgaggcaggtagatcacttgagcccaggagtttgagaccatcctgagcaacatggcaaaaccttgtctctacaaaaaatacaaaaatcagctgggcgtagtggtgcacacctgtagtcccagctacttgggaggctaaggtgggaaaattacccgacccgaggaaggcaagactgcaatgagccatgatcgcaccactgcactccagcctggatgacagagtgagaccctgtcccaaaaaaagaaaagaaaaaaaagaaagttgagaaagggtttttaagtttatgtacttggtccttgagttaatggtattgtaactttttctgattctgaacagtttgccttttaacttctggtgttaggtaaatatggaagtgatttgttggggcttgacttatagttttggggattttaacaaattgcacaccaggtgttacagtggctttcagtcttcatttcccaagcagaacatttgttgatttttaattcacagtgtgagaaataggattcaaacttgagaatctgaaggaaaacttcctgttttagcatttttagagggaggtacttggttttagaaatcactgtagtctatgagaactaagaattcatggaaacaaaaatacagcctgcttttgactatcaaaatcttgtaattttaactttttcagaatcatgtatttaagtggattttaaacgctgaatattgttctttttttaactttataggcagaacagattatatttgatcatttttctgatcctaaatttgttgagcagttaattacttttctatcattagaagacagaaaaggaaaagataagtttaatccacgacgtttttgcctctttaaggtaactatattgtttacatatcctctttgtaatgcttagtaactattcagttcgtaggttcataacttataaatatttgatcaaagctagccatctgccttgatctaaaatggcactggaatttacactgaacatgtacagacttttgttgtcgttattccctaaacaagacattacaaccagtattgacatagcattaatatataatacaattagtaagcattgtattaggtcctaaaagtactcttaagatgatttaaaatatacaggaggatgtatataggttatatgcaaatacaataccattttatgtcatggacttgaacattttggtattttggggtggggatcttgaaaccatttccccacatacacctagggatgactgtatttatctttaatgtttgttgtaattggcattagaaggaaaaaaaatacccaaaactgcatgcgttttttatgtttagttgctttttttgaggtgtgatacttagagagattattaatgtttgtttcattggttacattttaatgtgatatttaaaatgacagtattcttactattttaacttaccgcaattgttaaagcagttctaaaggggagtgtgcttggagcttttaagcacgttagtaatgtacagaataattacaagcataattataatcgagatgatagtcatttgagtactgaagaacagtctttgtttttatagggtatattcaggaattttgatgatgccttcctgccagttctgaagccccatttagaacatttggttgcagattcacatgaaagcacccagcgatgtgttgcagaaattatagctggtttaatcagaggttctaagcactggacatttgaaaaggtgatgtattaatatttgtacagaacatttcctgttaaagctatgttacccattttggtggcaattcccaacacattagatactgataattaaaatatgaaatcttcagtgatatgaaatatgccgatatgtagacattgcttttgattacagattaca

SEQ ID NO: 23426 - DNA, 2300 bp, Homo sapien
aaactacataactggtacacatcagtcattaattcctaaattcaagtttagcagatgtatcatttaatagttcttataatagtaataacttattggtcaaatttggtatcaggattttaataaactgtttttggattcttgataccaaagcacttaaatgcttcactgataacactcaagcaagagtcttcctaacttgattttgtctttgccttataattagtatatgaatatacctctttgttgttttctaaaatgtctataaataataaactcttatagcctacctaatatatttcagaaacctggtgtatcgtgtgtgtgtgtgtgtgtgtgtgtgtgtgtgtgtgtgtgccactcccaattaattgattactacttacagagttacttgtgcatgtccattcaggaaaagttgagttcactcttcctagcctttcatgagcttttcccagcatctctgttcacctgtctactttcattctggcttgcttctcatcaggccgtttacagtcaggtggtgggaagtaagtggggaaggagggtgaaattggctagaatttgaatttctattatatttttgatgttcattttagtattatagtaaaataatacctcaccttttttttaaaggaactatgaaaatttggtagacaccttgctagatggtgtggagcaaagaaacctgtaagtgcaaaagatttttgtaattctcacagcatttttcataaatactataggagttttctacatggaaggctatgaatgactatgtcacaaaaagttatattccggtttgtgtatttggaagcagattaagaggaaaagagatggagggaaagtttgggattaatgataggagcagtattcttcactagacctattttaattcttgagaaatttaaaattataaggtgtttcacatacagttttttttttccaagtggttttatgtgtgatatgctttgttatttttcctccttttaaggccctggaaatttgaacatataggcattgggcttctgtctctactgctgagagatgaccgagtgttgcctcttcgtgccatacggttttttgttgagaatctcaaccatgatgcaattgtagttcgaaaggtacataccttgttttagctacagtcttgggtttgagaatatgtacgtgacctgaagtctttaaattcttcacaagcaatacacacttggttaataaatatcttgaagtgtattgatttgaaatctccccctgttgattcagagatgataatgattcatctaacaaatgaacatgtttaggcactctgtttaaaagactggggatatagcaggaaataagtttataggctaatgggaaagatttaacaattagaaaattaggtgtgcagtgtgtttcaggaggggcaagaaactcgagggtatagctttttactctccaagtgttagaggtgaggtgggggttggggagatggcctaagctgaagcattggagaaagacctttaaaaataccctgaggctgggcagggcttggtggctcatgcctgtaatcccagcactttgggaggctgaggcaggtggatcacctgaggtcaggagttcaagaccagcctgaccaacatggagaaaccctgtctctactagaagtacaaaattagctgggcatggtggcacacgcctgtaatcccacctacttgggaggctgaggcagtagaatcgcttgaacccgggagggggaggttgcagtgagctgagattgtgccattgcactacagcctgggcaacaagagtgaaaactctgtcaaaaaaaaaaaaaaaaaaaaccctgaggctaagatttgaagaatgagcaggtattggtttaacaaagaaggggtcaaagttttctaggcagagagactagcatgtgtcaagactgtagagtaagaactgcctatgattcattctaagtcagatttagcactcacatggatgtactgccagatgtcgataggcgaggtgtttttttaaagaaacagaatcctatttctgctttgagtaaagcagacaaccagttaagtgatttaaacttttttttatgaatgtgtacctttttccttttctagatggctatctcagctgttgctggtatccttaaacagctaaaaagaacccacaaaaagctgaccattaacccctgtgaaatcagtgagtactaccagaagtaattaatagtgctttccaataaaactcagaaaattttcttgacatgtataaattctagttcttgacctcaaatattgttctatggatattaacacaaa

SEQ ID NO: 23427 - DNA, 2300 bp, Homo sapien
acttcaatcacattttgaagcccagtctacgaaggccacataattcctcctagacattaagcttgggttttaggaagctgctaccacatgaattgtgaggtctgtcctttagtgtaggaacaagagattatctgcaagcacagaaaagtggaaaaagagattcatgtgcaactaattattctatctttatgaaataatgtaaattaactacaggttaagcattggaaacccaaaatactccagaatccaaaactttttgagcaccaacatgatgctcaaaggaaatgtttattggagcgttacagatttcagatttttggatttgggatgatcacccaggaagtttataatccacatgtttcaaaatgtgaaaaaaatctcaaatccaaaacatttctggtcctgagcattttattttactttatttttattttttgagacaaggtctctctctgttacccaggctgcagtgcagtggtgtgatcacagcccactgtagccttgaactcaagccttgagcttgagctcaagcgattgtctcacctcagctttctaaatagctgggattataggcgtacatcaccatgaactcaggtcttgaactcaagccttgtagccttgggcttgagctcaagcgatcgtcttatctcagcctcccaaatagctgggattacaggcatgcgccaccatgctggactaatttttttcatttttaatagagataaggtctcgttgtattgcccaggctggcctcgaactcctgggctcaagcgatctgcctgcctgggcctcccatggtattgggattacaggtgtgagccaccatgcccggctacctgaacattttagataaaggatactcaacctgtaactaatctctagctcagagattccctctaaagtaatgtttaaaatgagtttgaggccgggtgtggtggcttatgcctgtaatcccaacactgtgggtgggaggccaaggcaggtggatcacttgagatcagttcaagaccagcctggcaacatggtgaaaccccctccctactaaaaatacaaaaattagccaggcgtggtggcatgcgcctatagtcccagctacacggaggctaaggcaggagagttgcttgaaccctgggaggcggaggttgcagtgagccgagatggtgccactgcactccagcctgggtgacagagcaggaaaaaaaaaaaaactggttatagtaaaagcaacacattgtacatatttcaaactctttttttgtttgtttgagacggagtctcgctctgtcacccaggctggagtgcagtggcacgatcttggttcactgcaacctccgccgcctgagttccagcaattctcctgcctcagcctccccggtagctgggactacaggcacgcaccaccatgcctggctaattttgtatttttagtagagacggggtttcaccatgttggccaggctggtctctaactcctgacctcaggtgatccacccacctcagcctcccaaagtgctgggattacagacgtgagccactgcgcccatcctactataaccagttattatccattactatttaactagttcataagttgtaaatttatactgaatattttgtttgggtcaaaaatatgtgagattgtacttaaggtttgccttaaaagggttaagttgttatgtgtctgttttggtttattttagttcctcctggaaattctttaattttcctcatgtggacataagagaaaatctggctctttatatctagaataattcagaataaaaagtttagtagtatgctgattacttttagctatgttactgagcaaatgcatataggttccattcagtctcccctttatcaaacatatttcagtcagtgtaacctaaaccatggatatggtcggtggtattgtgctttccttttgatataagtaaagataatcatttacttcttttttagggtacgtgctttgaaatttattttgttaatgagaaaaacatgtaaattatcattactgtttttgataatttgttttaaactgctttgtactttactatttaataaaagtcctttgttaataatacttcctccaggtgagaaataaggctcagcaaacattttttgctgccttgggagcatataacttctgttgcagagatatcattcccttggttttggagttcttaaggcctgatagacaaggtgttacacagcaacaattcaaggtatagggtttttttcctattttactgtaaacattttcaaacatactgaaaagctgaaaaaattctacggta

SEQ ID NO: 23428 - DNA, 2300 bp, Homo sapien
tctacccagcgtcgtcttgtctctttcctttttaatttttcactttcagtcaactactaagcccaagccattctgctgaagtagctctcaatttcaactgacatccaggccatgattatgtcacaccttaaagggtcctccagttcccaatcttgtcagttccaacccattttccagacgaagccagagtgactcttttttttttttgagacggagtctcgctctgccacccaggctggagtgctgtggcacgatctcggctcactgcaagctccatctcccggattcacgccattctcctgcctcagcctcccgagtagctgggactacaggcgcccgccaccatgcccggctaatttttttgtatttttagtagagacggggtttcaccatgttagccaggatggtctccatctcctgaccccgtgatccacccgcctcggcctcccaaagtgctgggattacaggcgtgagccaccacgcgcctggcccttttattttttgagacggagtttcgctcttgttgcccaggctggagtgccctggcgcgatcttggctcactgcaacctccgccttccggtttcaagcgattctcctgcctcagcctcccgagtagctgggattacaggcgtccgccaccacgcccggctaacttttttgtatttttagtagagacggggtttcaccatgttggccagactggtctcgaactcctgacctcgtgatccgcccgcctcggcctcccaaagtgctgggattacaggcgtgagccactgcgcccggccgccagagtaattcttaaaaaatgtaaattatatcatcccactgctatgcttaaaatcttttggaagtttgtctctaggataaagctctgaattccttaggattgccttctcagtctcatttctccgtcccctctcttacgctattttgaactttgaatttttagaatacatgcttgcagcgtcaaagctgttctctcagctgaaatacgtgtcctcctccctcctttttctaaccaactttgcactcaaccttcatagcttaaattaagtatcacttctaggaaaatgacaccctctcaaaccccctagtttcaacttctttgtagagttcctaaggattcttgtacttatctagcaattaagagcattatcttgtaattcacgtctttatctctgctagactaagtccttgggagggcggaaaccaggttaaactttctatctcaatagcctaaactgagcgccttacacacaaaacagctgttcaaatagcatttgttcagcgagtaactattttcttctttggaatgatggcggccagaataccagaaagatggggacttaaaggggacagaaaaattaaatctataaggaacaagcgggatggagtaaataaatctataaggagcaagtgggtacgtaggcttttccataaacccctctaacccagaagccggggctgctcggctagggggaccaggccgacctggctgccgcctgtcgtggcgactgggactccagtgggctgccgcttggagtgcgcgacccccggcgaagcaggacaatagcttggaattcggcctcgtgtttccggtgaggcagcctcgcgctgggccggtgaggcctggggtgggggctccgagccgggcccacggcgaagaaggcgcagcccgttgggctccagctgccgccaccaccgcctcccccgacgccgtcgctccgccccgccccgccccggaagtgacttgaggccggtccggaacctctgggcccggcggctgcagcgtcaccagcagagccggtgcggggcgggcagagcggccgctgccgccgccaacgaactgagagccgcgtggggcccagcagcacgccggccagggaagggggcctagcgatcggtccgagggcgacgggccgccagcggccgcagggcgacgaagacgcggaggaggcggagcccggagaggggtgggggccggggagggttcgggtgggagggggtggggggggtgtccctgggctcatggagccggccgagcgggcgggagtcggagagcccccggagccgggcgggcgtcccgagccgggcccgcggggcttcgtcccgcagaaggagatcgtctacaacaagctgctgccctacgcggagcggctagacgccgagtccgacttgcagctggcccagatcaaatgcaacctgggccgggccgtgcagctccaagagctgtggcccgggggcctcttctggaccaggaaactctccacgtaagtgtgcccgggcctgcgggccgggc

SEQ ID NO: 23429 - DNA, 2300 bp, Homo sapien
tattatactgtattgttcagggaatgatgacaagaaacaagagtctgcatgagttcagtagagatgacttttttttttttttttggagacagggtctcgctctgtcacccaggctggagtgcagtggccccatctcggttcactgcaacctctgcctcctgggcaaaagtgatcctactcccacctcagcctcccaagtagctgggactacaggcacaggccaccacagccaggtaatttttgtattttttatagaggcggggcttcactgtattgtccaggctggtcatctctaactcctgggctcaagctgttcgccagccttggcctcccaacatgttgggattacaggtgtgagccaccgtgcaggccaagatacttaaaaaaaaaaattctgtttgaggttggttgaatctatggatgcagaacctgctaatatggatggctgactgtactagtggggaaggcacactaaataactaggataaaatctggtaaccactcgcagagatgactgagcgggatagaggaagattttggagaagggggaggcattccagatagagtagacccaagagaagaggttctttgttttaaacctctgtactgagagagcagaataaccgagagtgtcttgactatagtttaaatgcaggatttgcataagcaggtagtggaggctgaagaccttaggttctattttgaacgtattaagaagaatgatttaaaatttatgttgattctagagtctgcatggaatgaactgggagatggaagagttaagttacgaggtctctgcaataaactaagaccttcactacataaattaactgcactagcatttccagaatatattttactttaaaaatgatttaaccatattctaaccaagttttggatgatttttggtgttctctaatagaattggcacagtatattgaatcagattgcagtggattattttaactgtgtggccagatgcagagaaatatgccaaggtattgaggccaacaaatagagaaatgcaaattctcacaagtaaacagatttggaattctagaaggtggcagattatcaatagctgtatccagatcctttggagtggtggatggttttatattaaaacttggtaatagctcaccaggaaataaaattcagccttaaccttctaggcaattgggatgttgctgagaataatcaagacaatcaaaaaaaaaaaaaaaaaaaaaggtcgggtgtggtggctcacacctgtaatcccagcactttgggaggccgaggcaggtggatcacctgaggtcaggagtttgagactagcctggacaacatggtgaaaccccgtctccactaaaaatacaaaaattagctgggtgaggtggcgcatgcctgtaatcccagctacttggaaggctgaggcaggacaatttcttgaacctgggaggtggaggctgctgtgagctgagattgcactactgcactccagtctgggagacaagagcgaaactccgtctcaaaacaacagcaacaaacccacaccaaaaaaactgtatgaacagcagacaagatgactacagtgtttttcttttgtctgtttccactagcataaaagacttcatatttttaaaaagtttcttatcccagaaaatatcacaatccgtttagaatacgagttcaggctcaattccttcctgactgtacagaagagctcaagatgttgcagaccttatcttaaaagctggcttggtagtcacctaaacatttcataaataatttactaactctcaaaacactaaacacgcaggcccttgatttcaaaagccaatcttgctgggatggagtggggtgggggacctgggatgggggatgaaaggggttggaaatggggagatattggtcaaagggtacaaagtttcagttagtgtgaataataagttctgaagatctgttgtctaacatggtgactgcgataaatgtattgtgtccttaaaaattgatgagagtagatcttaaatgttctcttcattaaaaaatggtgcaatggatacgttaatttcattgatgtaatcatttcacaatgcatacatatgtcaaaacatcaccttgtacaccacaaatatacccaacttttatttgtcaattacactttaataaagctgggggaagccactctttttttgggcacagcatccggcttttatttactaactttgagaacagagtaccttgatcaattaaatggtagggagcgctgtggagacagcatcctccccagtccgggaagagaggcctaggatgcctgg

SEQ ID NO: 23430 - DNA, 2300 bp, Homo sapien
aaaaggaaaaaaaataaccttcatcggagaataaaaggaatttttttaaagagatggggtctcactctgttgcccaggctggagtgcagtggtgtgatcatagctcactatggtctcaaactcttggccttaaccaattctctcacctcaacattccaagtagctagaactacaggtgcacaccaccacgtctggatagttttaaaatttttgtagagatggagtctgactatgctgctcaggctagtctcaaacttctggcttcactcaatccaactgcctcagcctcccaaagcactgggattacaagcatgagccactacctccagccaaaaaaaaaatggaatttgaaaagctcagtgaacttctgaatgaaaggcacttgctgatacagaggttcctccagtgatacaaaacacgttaaatgatgaactattcttgatcagggatctgtccatcaaagaagatagacttctatttattaaaccacccaatctaacaaagaaaaaccagtgcatgcttcagtttggctaatgtgtggcactttcaaaaccatccccaccattttttgccaattgcatatgattcatccccctgttggatctcaaaattctagaacttatccactcatttatgtatgaatgactggacaaaagggaagcactttataaaacacttatttgaagatttggtggatgttgcaaaagaaaatggattcaactgaatccccaaatcataatgacagattaggtgcaacaaagcttctgaaagtgaatttcaagatgtcactaacaaagtttattttttccattcagtctgatgcatttagtggaaaacttagatgagtcgattggccatgagatatggcaatgatgaaaacttcaatttaaaaatgtgtcatttgtctgcattggctttccttccaggtgatgaaattccagaagctttttttttttttttttttttgagacagtctcgctctgttgcccaggctgcagtggagtggcatggtgtgatctcggctcattgcaacctccgcctcccaggttcaagcgattctccggcctcagcctctagagtaactgggactacaggtgcatgccaccacaccgggctaattttttgtatttttgtaatttttgtgtttttagtagagatggggtttcactatgttagccaggatggtctcaatctcctgacctcatgatccacccactttggcctcccaaagtgctgggattacaggtgtgagtcactgcgcccagcccagcttttaatggattgaatctgcatttgcctgaagaaaccagcaaagttactgactggtttaaaaataattatgtgcatggtaggattacaagacatataacggtgttgttgtttgatcacaagtatagtctgcactaaatttgtagtctgtatatgagtgcatgcagaatgaatttccatgtatgcaaaacatagaagcatagcactgaagatggaaaaccttaataggggatgattatgtcagtgtatatcaaatcatagaagaatttcaaaaagagcagtgccatgtagaatacggatgtaaatgtattttccaaaaagagccatgtccaaaaaaaaaaaaaaaaagcagctattcatcatgaaggaagacttcaaaatatagataatgattgtgaaaagttggccaattcttatggactacctccatgcaactgcctataatctttcactgtaatatacttttttgcatgtcaattttttttttttttttgagacggagtttcgctcttgtcacccaggctggagtgcagttgcacaatctcggctcactgcaacctccacctcccgggtccaacttattctcctgcctcaccctcccgggtagctgggattacaggcacatgcacaccaccacacctggctaattttttgcattttttagtagagacagggttttaccatgttgggcaggctggtctcaaactcctgacctcaggtgatccgcccgcctaggcctcccaaagttctgggattacaggcgtgagccactgcacccggccagaagcataaactttgtaaagagttttagagttctaatttgttttatgctttttttttttttttttttgcaaatttgactctatgagtgtgtcaccacaacgctgacttagtattgtgtatgtatgtaaaaaatgttgaaacttccttaatgaatgaagagatgtcctttttgtatacgtacatttgtgaaagataaaatttcttgacatcctggctttttgagtgactgcatatacagtggtgatccg

SEQ ID NO: 23431 - DNA, 2300 bp, Homo sapien
ctgactccctcaacttctttgactctttgccaaaatctcatattttcaatgaggcttcctctgaccaccctatttcatactacaatctcctccccactccctacccccaggactttcaatctccttgctctattgttttttccatagcacttataactttctaatgtgcaatattggtttcttgttattatctttctcccctgctaaaatgtaaaccccaagagggaagaaatctttggtctgttcaccgttatatccagagggcctataagagtaccaggcacacagtaggtacccaataaacatttgttgaatgtttaataaatatttgttgaatgtttaataaatataaaaatggattatgtgttccttgaaggtttggtagcagtcgcctcaaaatcatttgaacctcatgctatttttgtggaaacatttttttaagctactgattccatttgtttattgtctctaggtctatttagattttctattgcatttcagtccgtgttgataagttatacatttctatgaagccatatatttcatctaagtttgaaaatgtattggcataaagctgtctaacatcctgtcttatatttatttaaaccatcaatgtgactataattttctctccaaatattgcttattttctctctccttttattattaatctttggttaatgctctgtattgtcttacataaatttctcctgtttattattaccttttctctatgtcctttggcctaattctattggtcttttatatatttctcaaattatttttcatgatgagtgatacagcacttgccaatatttccagtttcctccttccaggctcaagagaagattacacctccctgtcctattaaagttagacaaggccaactgactagctgtagccaatgatttatgtcacttctgacagaaacatttaaaaacctatgcatggggaaagaattgtcttttcaataaacagtgctgggtcaattagatattcatatggaaaaaaagaaattgtgaccccactcataaaaatcaattccagatggatggcatatataaatttgaacaatcttggtgagataagattcctctttttttcttctttttaaaaatagagatggggtcttgctgtgttgcccaggctggtctccaactcctaggctcaactgatcctcccgtctccgcctctcaaagtgctaggattacaggtgtgaggcactgtgcccaggtgagaggtaagatttcttaaacagagcagaaaaacactaaggtaaaggggaaaatgacaaattggcacatattaagatgaaaaacttttgttcttcaaaaggtaccattaagatggtgaaaaagtaggccaggtacggttgctcatgcctgtaatcccagcactttgggaggccaagatgggcggatcacctgaggccaggagttcagaccagcctggccaacatggcaaaaccatgtcttgactaaaaatacaaaacaaaacaaaacaaaacaaacaaacaaaaaaaccgggcatggtggtgggcgcctgtaatcccggctacttgggaggctgaagcaggagaatcgcttgaacttgggaggcggcagcttcagtgagctgagatcatgccattgtactccagcctcggcgacagcgaaactacgagtccaaaagaaaagtaaccccacagagtgggaggaaatatttgtaatacctatactggaagagaaatatttgtaatacctatactggaagaatgactgactagtatctagcatgtacaaaggcttcctacaaatccatatgaaaaataacgtcagcccagtagagaaatagggagaagcctcggatactgcacaagagagaatatcctagtggccaacaaacacatgagaaggttctcagctcattagactttggctaaatgcaaattaaaaccaccatgtaatatcattactcatccagcacgatggctaaaataacaaagacgtaaagacaccaccacagactcgcgagactgaggagtgagtgtcgcgagactgaggggtgggtgtcgcgagactgaagagtgggcggcgcaaatgggcgaggtgtttactcgccattttgtgtgaggaacgttgacgctacctacctctggcctggcctctacccactgctgccctggccgctaccaacatgagcctcccggagagtcctcacagccccgctactctcgactatgctctggaagacccgcaccagggccagaggtcccgagaaaagagcaaggcgacagaggtaatggcagatatgtttgatgg

SEQ ID NO: 23432 - DNA, 2300 bp, Homo sapien
gattctcctgcctcagcctcccgagtagctaggactacaggtgcgtgccaccacgcccggctaatttttgtatttttagtagagacggggtttcactgtgttagccaggatggtctcgatctcctgacctcacgatctgcccgccttggcctcccaaagtgctgggattataggcgtgagccactgcacctagcccacaatttcttttttaaatgtttctcatagcttttaataagtcctagacatatgcaagctacttaacagagattgacataaatatatttaaaactaataccataccgctcaaaagagaggcaaatgactctaatcctgtacggatgcaggtgaacttgtcagtctgaaaggatcaagttgagaaaatgccctcatttctttaagccctgagattgttcctgagggtaagtggttttaggacttgaagagattggtgaaggttgaagcagaaattagggggaatgatgagggagttgactaaccctcaaggacatgtggcagcataagcagatcaagttgatcaataaaaataatggcaaagcacttactaagcatcgggccctgttctcagtactctgcctgtattaaatcatctacacctcacaacaaccctaggtattttccccattttgtggatgaaaaaaattgaggctcagagaggttagatcatttgcccaagtgaactagctagttaagtggtaaagccaggtttcaaacactgactgctcccagaccctaagctcctaatcacagtgtgatggttaggataagaccagataagcaggtggtgtttaatacaatgcctaacaaatgcctggtcccctagtggaagctcaattgctattagttccccctgctttctggttttcaacccacttgccccatatttatttactcatccactccttactcaccaaacacacacacacacaatgacacattcacacacactccagtctttaacaacgaagtccacactcaggtatttaggtcactaggtgtcaaatctacacatatattcttcttcctgataggatttcaggtcacatacataaaatgagtcctaggaccaacctctgctctcccatcactctccaaggtgaatgtaaacacacacacgaacactgactctggattccaaacatatacgtatgcatagcctgatataaggcagaattcaactctggacttttctttttccgttatccagggaaatgcgtgagttactatgacagatgccaaagacttttggctctggtagtggaaattgggaggcaatggtgaaatgaagtaagaaattccagggccagaaggtggatgcaagtcagcaacggcttttcccaggagcttgctctttttgggtaagtgctacacatacaagccccaacccgctgcctaagctaccctattctgaaccccgctcaggctgcaacagatgacacacagcagggagcctcatttgcaggagatgagtgttcccttgctctattttaatcctggcagcccagccggggaaggttttgtcagaaatggtggaaaacagtgacaaccaagctttctggagtaaaggctaggcagctcaggagcaaccaatcacgactcgcacagtattgttaacaatacaagggaaaacaagtatccttcccgccggcccgcacttttgcagccagcttgggcgacccgtggcagcgctttgacgacgacctgccgggctccggagggcgggcacggcggagacggcagcagcgctgccccgcagctccggaaacagcccttcccctatcctcaaggaccaaatcagtcctgataaacacccctcctggccctacaatgggaagggcaagttcaaacgcagggcgtcgagcccacacgcctagagacgcggccaggcacccccgccctcctcgccgcgcagtcgcgcacagtgagcaacagtccagcaccaacccggcttaactgcgcctgcgcactccaggagtttccccccacgcccctttccgaggactagcgcccgtcgcttagcaacgcgcgagtcacagtcgccgcgctttgcgcacccttttcctggcagggctgcgtccctgttcttcccaggaggctcctcgctgcctggtgccgtagaggcccatggaggaaaaggaagataagcatcagtaagtgctggggtttggtgtcttatttccctttccaaaaactattttcctccttcagggggaggccgggatccagcatggacagtccaggccaagctcagacagcccccttgcttctctaatttccagttg

SEQ ID NO: 23433 - DNA, 2300 bp, Homo sapien
gctaaggtgtgtgtggccttttttttttttttaattaaaaaacaacgtaagtgggagtggaatggggtaagggaggtgaatcattcatcaaatgaaaatttatttaaataccgttgtctgtgataaaggaataaccatttcagaataacactggaagaattaatttaaatggatgcacttcccaatattgttactgttttctttggtatttcattaacattgtgagtggggaggtgctggggtccatggtaaaaaaataagtaagtgaaaggcaaacaactttgctttctagtggatttcccttattacctaatgagggcagcagcttacaagttgattgtgttcaattcaacaaatttgttttagtacctaagtgcctgctatatgtacagagtgaagaaagaaataaccctacctttaagagagtttacggtctggttgtgttgattcaccttctgagaaaaaatgttatttgctttcctcaatttttttcctatcaaaagtaaacataggttcaaacattcaaacctatgaaggcctaaaaggaagaatcatcttcagtttgctgtgacgatttcactgagttttattttaaaatattcatttaaaaatacatacaaacatataaacccatcaggccaggttctagtgatctgagatataagcatgatacaaactacttggctgccgtgtatttttgttttattttaatccaggtgatcaggtctgtatggggaaaaagccctggggctttttcaaacaggaagggccctcctccctctgaatgcccgcagtgccgccctgtgcactttacagaacaaggagaaagtcagtttcttcaaactgcttttctaaagagcgtttccattcgtggtcctggtgattccaccatcttttcttcacaacagtgacggttctggaatttctacacagcctgaggggctgacggggtagaccaggtgactgggaaggggcagtggcacatgacaaaaatttgaggaaacgtccagtttccgtttcagggaatgcgcataggggaaaacgcaagtccccacgccatcacggggccctccaccgcggccggacgacccctctctcgggagtgactggggcagggcacctggcctcaggttcgagcggagcctgcactgagaggcaggagttggatgaaccacttgtagggtctgctcccagctacccaaagcgaaagggtgggcgaaaaagcatttgcaaaagaatacattaacctcacaaggaacgacccccaccacccatcctccagcgcccaaggtttcccacgaagaggtcgccgtcgcccttctccaagttgggtagaacctataaggcatcaccaactgcatctcaaaccaaccaagcaagtgacgctccaaaacctccctaaataccctctctccccagcattccgaacgcaacatcaagggcgaaaagaggctgcacaaatcacgtagaaaattagaccgcctctttccatggcgataatcgaattagcctcaaattaaacgtgaaattggccctctccggctgtggagacaaagcccctattgtcctgctcgggtagcggcagcagcagtgcccaccccgccccggccagcctggtcggtccccgccgctgggaggatgaggtccgggctggacccgggaagagcctcagctggagaggacgtggacgcgcccgaggctcggctccctgggcggctgcggggctccgggcaggaggagagggcgggcgaagcagagggagcgggcgggagtggggagggaggagtgcggagggcggagggcgtgcgggagggatcccgggagtgcgcttgtgtgtgtgtgcgcgcgcgcccgccccgcgcgctcctctccccgcccctcgccccctccctgcgagcgccctcctctcctcctccccccgccccccgcgctcccgcccagcccccggaatcagtgccgctgttgccgtgcaggctgcggattcctccagtccctccctcggccgcctctcctcccggagcgagcgcgcagccctgcgcagcagcgcccactggtcccgtcctgtgagccccggccccagccgcggacagacccgcggagtcgcctcccggcccacccgcccggccgccgaggagcgggaggaggacgggaccccggcgcccccaccccatccccgggaggtaggtagggggcccgaggcagggagatgccaactcactggggctgcctcccgggtgggctccgcggcggcggacgggcgggaggaggggcgcgggcccagggccggaggacgccgctgc

SEQ ID NO: 23434 - DNA, 2300 bp, Homo sapien
gagaaagtcagtttcttcaaactgcttttctaaagagcgtttccattcgtggtcctggtgattccaccatcttttcttcacaacagtgacggttctggaatttctacacagcctgaggggctgacggggtagaccaggtgactgggaaggggcagtggcacatgacaaaaatttgaggaaacgtccagtttccgtttcagggaatgcgcataggggaaaacgcaagtccccacgccatcacggggccctccaccgcggccggacgacccctctctcgggagtgactggggcagggcacctggcctcaggttcgagcggagcctgcactgagaggcaggagttggatgaaccacttgtagggtctgctcccagctacccaaagcgaaagggtgggcgaaaaagcatttgcaaaagaatacattaacctcacaaggaacgacccccaccacccatcctccagcgcccaaggtttcccacgaagaggtcgccgtcgcccttctccaagttgggtagaacctataaggcatcaccaactgcatctcaaaccaaccaagcaagtgacgctccaaaacctccctaaataccctctctccccagcattccgaacgcaacatcaagggcgaaaagaggctgcacaaatcacgtagaaaattagaccgcctctttccatggcgataatcgaattagcctcaaattaaacgtgaaattggccctctccggctgtggagacaaagcccctattgtcctgctcgggtagcggcagcagcagtgcccaccccgccccggccagcctggtcggtccccgccgctgggaggatgaggtccgggctggacccgggaagagcctcagctggagaggacgtggacgcgcccgaggctcggctccctgggcggctgcggggctccgggcaggaggagagggcgggcgaagcagagggagcgggcgggagtggggagggaggagtgcggagggcggagggcgtgcgggagggatcccgggagtgcgcttgtgtgtgtgtgcgcgcgcgcccgccccgcgcgctcctctccccgcccctcgccccctccctgcgagcgccctcctctcctcctccccccgccccccgcgctcccgcccagcccccggaatcagtgccgctgttgccgtgcaggctgcggattcctccagtccctccctcggccgcctctcctcccggagcgagcgcgcagccctgcgcagcagcgcccactggtcccgtcctgtgagccccggccccagccgcggacagacccgcggagtcgcctcccggcccacccgcccggccgccgaggagcgggaggaggacgggaccccggcgcccccaccccatccccgggaggtaggtagggggcccgaggcagggagatgccaactcactggggctgcctcccgggtgggctccgcggcggcggacgggcgggaggaggggcgcgggcccagggccggaggacgccgctgcccgcctgccctgcgcccggggagccgcgtgggggcagggaggctgcaaagcccgggcgggggcggcgcggggagcccgggtcgcgggtgctcattggtactcggatgatgcgggacgaggggcggcaggctctgcggtgaggcggcagcagacccgccgtgcgcaccgctgccgtccggccccagccccggcgcggcgcggcgattcctcctccctgcctccgccggcgcctccctgcagccgggcgcggcggcccctgacgcggaggcccctggcgcggaggtgggtgcggagcggacagcggacagccggagggtctattttcaggtgccctctctgtggccccgcgggtggggagcgggggcggcggtgacagggccgggctctgcgcgtagcggtgcaggggatgcggccaggcgtggtcccggctgcgccgcgctgcagctgagccggaggcggcggccccgcgcccccacctccgccccatccctgcgcttgctaccctcgtgcgcccgccccccccccgccctttctgccgtccccactctcccagggctgggcgtgagccgcctccgggcgccgagccgccgctgcgcccgcccttcagctcctgccaccctctcttcaacaggtttgtctcagcgcagggaccctccgggcctgctttgggtaggtgggctggctcgtcatcaccccccacaccacgcccacggccctcttttagggggcgccttctctttgtttttgtgataggaaaggtgccaactgctgccatcagatgaggagggggtggggatcagaacgcaaacctctgtccattat

SEQ ID NO: 23435 - DNA, 2300 bp, Homo sapien
ttttcactcctttcttcctacatttgcagattaacaacttacttagatagcttcatatgcctgactgagcctgtttccccccagtgaaatttaaaatatgcgggaatttaaccacatttaaccacacccataggcatcaggcatagcactagctcagtttctcaatgtctcgggtctagtcagtccttcaccaggccctgtcagttctccctccaaagcacatccacctctaagcacatccacctcttaaccatccccgcttctccacccagagctgcaccgccatcatttctggagtagcctcccaagtggcccctgcttccattattgccgcctagaatctgttttccacacagccctgggaagaatattttacaaatacactcaagggtggtgtcggttattagcttaaaatcctgcagttgcttcccgccacacttgggctcgcccacctccctccctaaccttgtctccgagtctctcccgctgcccactagactcagccacattgaacttgccgttcctcctgcatgctatgctgcttcctttgcctgaaacactattattcttgatctgtgcgtgactcattcctcttgacattgagttctcagtttcaggacccactcgagaggccttccctgatcaccagatctaaaaatagtcacatgactctgctgtcatttttttttatttaaactatcttgccttttcttgtgtgctttttgtccagctcctaccactaggatataagcttccctagagccaggtccttattgcgttcatttttatccctagcatctggtccagcacagagtacgtagtaagtcttcattgtattttggttcaatgagtgaataatagctatattgaagggagaagctgtgtttaaagcttatcagttcaggataaagaatagcaagcgtgtattgagcatctaccatgcactggtactgtccttggttgccatacacttacatcttaattttttttttttattggagttttgctcctgttgcccaggttagagtgcaatggtatgatgtcggctcaaccaaaacctccggctcctcggttcaagcaattttccagccttggcctcccaagtagctgggattataggcatgcgccaccacgcccagctaattttttatttttagtagtgatgggttggtcaggctgaactggaactcccgacctcaggtgatccgcccgcctcagcctcccaaagtgctgggattagaggcgtgagtcactgtgcctggccttacatcttaatcttaagcatcagttttctaatatgtaagtgagatgtttagataaaatgatctgctagttctcttatataacattttatgaatttccaggagaagcttaaagattataatttatggtgatacacaatgggaataaatgagttcattcagaagccccacgtaggtgttgatctacctccgataacatttctttttttttctttttgagacggagtctcgctctgttgcccaggcaagagtgcaatggcacgatatcggctcactacaacctccgcctcccagattcgagcaattctccctgcctcagccacccaagtagctgggattacaggcatgtgccaccacgcccagctaatttttgtatctttggtagagacgggttttcaccatgttggccaggctggcctcgaactcctgacctcaggtgatctgcccacctcggcctcctaaagtgctggaattacaggcgtgagccactgcacctggccctctgataacatttttaaattgcagagtttaaactttagaaagaaggaataaacccaccattttgggggtatccatcatctcattcagtcctgtcaacaacctctgaagtatcttccctctttaatggttggggaaactgaggcttagagatactaagtaacttggctaaggtcacacatctattatgagacagtgctaaaacctaaaaccagcattgctccagaagacctattcttggcaagcactgtttttattttctgctcactcttatcccagttggttccgtggggactgtatacacttcagacgtctaaatgtttttccttttctttctcatagaactctaagaaggagctgatgtggaggagcagctgagacagttcaagatgacgaccacagtagccacagactatgacaacattgagatccagcagcagtacagtgatgtcaacaaccgctgggatgtcgacgactgggacaatgagaacagctctgcgcggctttttgagcggtcccgcatcaaggctctggcaggtg

SEQ ID NO: 23436 - DNA, 2300 bp, Homo sapien
ttctaatacttgcatgtgttcactctgcctggttcattcagtgttggcttcacaggattgagtgtggctacgttcgtcccagctctactgccatcatattatgtgcaacctggttaattaaaaattatttcatgtactaacccatactagagggagctgaaagggagatactgagtggtgactccctttcttcattaagtggcccaatgattaaaacgttataagttggcaaagcactttgtaatctcattttcagtgccatagctggacacttagagacttatcatttcaccagtatacttagttgtgaaaaagggcttgttaaaaagatcttcattgagacggttcccaattcaacttctcttgtagtcttgatgtggtgtgtgtgtgtgtgtttgtgtgtgtgggcggggggtgatgaaaggaggggtgcattttgaagaatatactcttaattttgaaagtatgataatttttagaacatttccacatcatctcctcagtgaccctgtggaggtgggcattaattattactcagtctgacagctgaggtttagaaagaatccagggtttcttctaaggtcatagggtaattaagaggcttggccaggactagcaactcaggtcttgggaatcctagtcaagtgctttttccaagaccaagtgttttgtaatgctctgcctagcctcccatcagcattgtgaattggcagcacttaggggctttaaaaaatgttctacatcttagatgataagaaatgttgtcttcttcaggttgggcctggctttcaaaagccaaaggttgacatgtggaagtattaaaaacctagttatgtggctggaaggagttgggggttgttcagcgttgagcagttagctaggctctgggtttaattctaagcctggacaggatgcagttacttcaattacaagtgccctggggactgaggtgaacctggggtgggggaccacgtctttactacatattgggatccctgaggaatgaaattaccttcttcagtgagtattgctgtagggctccaaactggaaatgccaaaagtgtaatttgttgtctgcctgtttaggtagtgaggaaaaaggggggacaggagggtggagagagaggggggagatctagagtcaatttcccaagaatacattttgatcattctcttttctatgtggaagatttcatttttggttgagattggtgggagaagaagctgggaaggagagatttaaaattttggagaaccacaagtttagaggccttgttttacaaatcagagtaggaatttgagggtagtttcggttccctcatctcccctccggatcataaacaactccaggtcagggatctcggcggtgtttacctgtgtacctttttcccacaatgccttgcaaatcggtgctcccataaatcttccttgcgtcgaattcctatcataggcccgtgttattccaggaaaccaccgccttcatatcccctgatggcagcgtaagtcagccgagattcttcactgagcccgaacttacacctcccctggctgtggcgctgcacagcgccctgagagtgactttgtctgacttcttcccggtggctcgccgggccgccgccgcgtggttggcgccagcgcactggggcagtcgcgcgcgcccaggtgcgggccgcgttacctcagcagacgctagagagtgaatgagccgcgcgggcccgggacccttggggctcttcactctccaggccgtcccgtgggcgcgctagccttttcaagtgatagtaatcggagacttttccgttacatgaggctcaacaaaagattgtaattccagcagctctgtttgggaaggcactaccgcggcgagtccagggcccggccgggggtcggcggctgccgggcggctggggcgaccgcggaccgtgcgggaccggtagggggtcgcgggccggctaggctcccccgcgcccctcctcgtggtatagcctgcatttctaatacaatgctgttatgctaatcaggtgacatcaccgcccagcacacggcgagtggctcctgataaaattacaaaccggcggccgccgcgggcagctgggaggaggtgtgcgcgctgcgcccgcgagctcccgggctcggcaaccgtggcatgcttaggattggccatatttaaaagttctgaagtagaacctgcgcctcctctctgcttctccctcctcctcagtaatttatttcgagcttccaggcaagggccacggaagaagggaaagcaagaaattagatgcctgtgtggtaactcctcg

SEQ ID NO: 23437 - DNA, 2300 bp, Homo sapien
tgactggcactaagactttgtttaaaagatgtttgacaaagtagtaacaatataacagaatctagtgtaatcactctctagtttcctttctgatctctgcacagtttcttgtttagtcttatgccttttagttgaaaaacaaattgtattttttttcttctaagtttcatggccctagagaagaagccaattttattaaagatgttatccctgattatgtcaagggttcttgttgttaagagtatattgagtatctaagttatctcagctttttctgttaaaggccaaatagtgtttttcgctttatgagatacatactctgttgcagctctgccctctgtcattgtagaataaagcagccatagacagtgagaagatgaatgagcgtagctgtgttccaataaatctttatttacagaaacaggccacccagatatggccttgggctgacccagtctagtgcctcagcctctaaatagctttggtatactttgggatttgttctatgaagggaccaccttgatagttgttctctctcacttccccttaattcttaattcctgtcactatgatggcaagtttaatttacctctctaagctttggttccctaatagtttaaggattgaggtgcaaaacatatgacatagtgagatctctagaaatgttttctaattattattatataacaaaagtttagggaaacatgggatatctagagatagaattagaaaacaccttgacaacataggtctttcctctgcacctctaaaatcatttacttttagaactgcaagacacttgagagacagtggagttgctctctcattttttcattaaatcccttcacctcattagacttagagatgaggaagccaaagaagggtctcggaacatccagggtgggaatctcgtccctcgagtctgatagtctgcacctcaccatacccactgggctatgatgttatagcagtgaaaaggatgtgtgtcctactgcaggtattgacctgatctgggtttcttttcacagaataacagagcaaaagggaaggctcatggtgcaggctcccaggagtacatggtgcttcttctttggttgtttccttttgtgccaacttgaagtgccactgtctccattctgcacgggagctgtgggaatgacacatagcactgatggaggtcttgagtggttatgcaaagcaatagttcatatttgtggaaattttcacttttgctgtcctcttgtaccttacattttattgcgagcaaattgaaaacagccagagacacagaaacaggtgttttgaaaaatatggttcattgtgtaggaaaattagcttttcagataatttcctaggaatttgctcattgtaatttgagttaaacctgagccataatcaaagaatatttccaaaaatcctttaggatatggaaatcaaatcacactggaaaccaaagcctgttggttcttctttgtatcttttgcagaaactgctttttttcttttttaacctgttatcacctaaagtgcttctgtgcaatcaggggtcagtaatccacctccccacaagccctactgctgtccgtacccccccgccttttaccccacttagcatttctccatattctactctcatagacatctaaaagctctcataatccaggacagttgtctgcggacttctttgatcacgcagctttatcagtacgtgatgattgtgtgtccattcccctatatgtgtatgcctttaattagacattgtacacaagtatggcactactgatgttacatactttatataaggcatgtaagaggagaaaatttaactataaaattagctgcagttattagcttcagttttaaagacatataccgttccccaaaaaaaaggtaagaatgtaatcttatttttgtttttacagaagaaaaatattatgcacgttgtcttccacttcattgtcatcttggtgtgcttttcatgtgactacacagaggcccttcctcattctttttcatggctgcacaggagtctcctgctggatgcaccatcattaatttaaccagtccttcactgatagtcactttattttcagtcttttgcttttacagacactgctgcagtaaataatctatgcatatttcgtatcctaaatatgcaagaatgtatatgtaggatcaattccccaaagtaggatcataaaatcagaaggtaccacatttataattttcatgggtactgcccatttaccttctgtaggagctgtagtctgttacactcctgtctacagagaatgagctcac

SEQ ID NO: 23438 - DNA, 2300 bp, Homo sapien
ttcctctcccaagacttttgcattcctggtagaaagctgatcctttgcagtgtacaaaaatggtgtttctggtttccagttctgggtgtttaaaatgtacctgcatacatttgtgttaaaacagagtacttctggtacatccatatgactcatgaaatggctttgtttcagttagactattctgtggctttttaatgtgttgtttgggttttggctgaacacagatccccaccacagcacaagcggcttccttgagaattattgcagctctgtccctggtgtttgtctgagctctcctggggagtccagcatgaaccctcaggctcaggtacttttctcctcagcagagttgagagttgcatagttactttagaaattaaacccaagctcccaggggtcctacaaacaactcacaggaattttgccagcccatggaatagactatttcctgtagttttaggttgtagctgcagttcctgtgaacctaattccatttggctcaggatgttagagcttcttgtccagtgtggtccagtttagcaaactagacaggaggacttcctgggttcctagaacctttttctgaaaagaggcagagtttgggactctaccaaacatcactctattttctcttagttggagttactggaagtgcgcagacagcaagaggaagaggagaggaagaggcggccgccttctcccgagccgagcacgaaggtttcagaggaagccgagtcccagcagcagtggtgagtcccagcagctccagaggctggacccttagcctcggtggccaatgaggtttatggggcatctttctgaagccttgcattgctaggcctaaccacatgccctgcctactgattgcttccatagactgtttaaaggctgtacagttatccctaaataaccttggagggcactgatttgtccacagtcacataggtatgtaggtggcagaagtagaatgtagacagtgccctttctcatcctgtgtgcacacacacaggatgctcagaacttccatatgattaaatgcatggagtgaactgcccagattttaggccagtgattttgtggtgatgcgttttttgagagttctaagtaacttcacacagagggcagcaattattctctacttccaaagggctaattattttgctatggtaagagttccatggcaacctctaatgctgcctttatgtggtggagcggggcatagggcattcctgtagtcgtatttttctgtctagagtctatttaaaacacttggaagtttcagatttaaaaagaattaaattatgtgaaaaggttgcacgtaataaaattgagtgatgatgttctcccaccctttcttactgtttcctctttctcctcttcttcctttcccttcctccttttcccctcttccctaacagggatacttcaaaaggagaacaagtttcccaaaacggtttgccagctgaacagggatctccacgggttagttaccgctctcaaacctaccaaaactacaaaaactttaatagcagacggacagccagtgaccagccatggtctggactgtgaagttcactaccatttgtcaagaatcaccctttccaaatcctctgggttttgactttttggcttccacttcacccaaaatgttaaaatttttacttaattcatagccttccttggtttcatatttgtttgcatttaattcatgtttgagtctcttaactgatggatgcccacttgccttaaagcagcatacttattttttgtttatttattgtgagctttttactttattaagattttacagcgaaacccttacatgagtaattgaaatgaaattaaatgagattacagcataatgaagaagaaaactagaatctaacaggtatgacacattcagttattctaacagggcacagtactgtgctatatgtagccgcctttacagatgttattaacctatagtagtttactattaactaggaagactggtgtatgaggagggagacattctgtaataagattaaaacctaaagtcagctgtgtaacattccatgaaagatgcattcatttattgaagatgacaaaaaagggagtcagatatattctggaagctattttaattttaggcacacaatctcatacattttgagacccttgggtcatttattactttttacaaactagttcctctctttttttctgccaagtcctgaattgaaaactgtaggcttccttgcacagatgttgcagccagcctcaggagtaaagtgcccgctgactgctgccgccacctc

SEQ ID NO: 23439 - DNA, 2300 bp, Homo sapien
actgctgccgccacctctgtctcgctccctgtcagtgctgctggcacgtgggacgcggcaggtgacagccgttctcagcatgttttagaagcttgcctcacagacttccatgcctctccattcagccgatgacttcagggtgtcaaactgttttaatttttcaaacaaatggaacagaagccattgtggttcatcctgattacttgaacgttgcacttggtggaccgtgcctgggagcgctcgcatgccccctggcttcagaagtcatgtcagtgtctctgtagacaaactccactgtacatcttggattaatcttctgattcattgttcattttctcaagactttttgtggaattctctgataaaggaagcttttaggatggtatctatcaggccaccagcaggaattgaaaatgttttcacaaaaatccttttccttagaaataaaagctggtgacagagatggtttccttgtaccgataaaaacaaaaccaaatccatattatacatcaaaaccttgtgagacattcacttgctcttttgccatatttagatgtgtcagtggaatcagaaacctgttttgatatgtgttctctatgagttaagtctgatttgtctttttatttcatgatgcatgtcttttttttcttttgtcaggataacgtcatatagcatcttgtttgtttttccttatctctatgtacatatctatctacttctgactgtagatgggtatatagatagatgccaagcttcttatgttctgggggtagtatgcatcattattgggtctctgccttaaaacacatcaaaattcattttagacaaaaaaacttctgctttgtctttggtcattagggagctctaatgtgtgtttgtggctccaagttacattttgtgtttcattgatctatatgtatatatgtgatgttttcatatatatatgtgtgtgtgtttaaattttgtatcatcaggactgacacccaatttgacactttttgtatctagaagaccctccaaaaaaggaaccacataagcacacaagaaaagagtgctatgatgttcttagcatttgctatcatgcctatttttatctagatttttaaatgtagcttgtcataacaaaattttaattacaattggcttgtatgagaagaaaaagtatttttattgttttgagtgatgacgcagagactcagtgaacttgaaaatagcattgcttcgtgcactttgaataccaatcaggtgttttctgtgctactagttgtcacgttgcattcatgttcacctcctgatttaagtatctcgggtgtgcccagccactaaagcactctggactaatcgctaaagagaagcaacgtggggggtggggttgcgagggatgtgttcacatgtacccatcatttgatcatagcactgtgattgcttttgatgtgtgtctctagtggtgtgctgtctgttggcatgcttaaagcacatgtccattaaaattcattttgttccttttattttccttgttttcttggttagtgattcatttgcataaacattaatgatctctgcatactggtttggggttttctctttccttctaactctaaagaaaaaatttttgctgcagaattatcctcagaagaggcttccctggccttcatctaccttgcagtctgaccaagtatgataaattttagccgttttcaaggaaacatctctctacccaggtcattgctgtcactagcagctttcaagtcaaacctgcagcactaaatttttttttatcctggtttctctacatactaaccccatgtctctctggactcacacctggctcaggccttccagaccaaactcatacttcctcctcaccagaagtttccgaatctcacactagagaagatttgtcacctttaaagtccactcacattattttgactcagggttttgttttttgtctatttcccctcctgcaactctcctttaaaagtgaaaagagagagaatggtttaagtagtctgttgctcataagcacgtgtctgcagtctgtcacttgcaaggccttggtgatcaccatgcagcacttgtgcgcacacacacccccacaagtcttttttcctaataatccattttccacattgccatgagggtaaagggttccaatcaaaaccaccattaaactgcatagtttctagtcttccctcagccctgatgctaattatgatagtttgcatagacataacttaaacttgtgattctccctccttccagagctttttgtagccctttttccccccaaaattagt

SEQ ID NO: 23440 - DNA, 2300 bp, Homo sapien
attcaagaagtgttcgttaaatgctgtcctacgggatggagataggccagtgatgaaaacaagcacaaatccctgccctcgtggagcttttgttctactgaaggtccacagttaatatacaagaaaatataaacatctgattgtgagaagtgctgtgaagaaaaataaagcaaacagtgggagcagagaatgctggaattgggcagtgcagtgttctaaatgagttggtcaaagaggggcttgctgttgtggtttcatttgacttagaacctgaaggagaatgaaggatccagctgttcagatatctagggagagagcacttcagacagaggaaacagcaaaggcctagaagcagagaaaatgcctagcatgtttagggaatagcaaagagaccaatgtacccagagcagagtgagtgagcggggagagagggcagaaagaaaagatgagagagataaggcctaagtattaatgacattaatgcttttgcaggttctagttccagcttacaaaggctatattaattatctattgctgcataacaaattattctccaaacttaaaagtgtaaatgcacaaacatttattatatcatggtttctgggagtcaaggagtcccaagaagcttagctgggtgattctagttcagggtctctcatgaggttgcagtcatgtgaaggctagactgaggccagaggattcgcttcttccaagatggctcactcatgtggctcttggcaggaggcctcagttcctgctgtgtgagcctctccatagattgctccagtgtgcttatgacgtggcatatagagatccaagaaagacagcaaggcagaatctgcagtaccttttataacctcctcttagatgtcagcttcacttttgccatattctgttcattttgtatcagagaatttgtggacatatttttaaacctctgcaaagagataggctaattgatctgtgaggaaggtataaaggtcaaggaagcaaagaagaggccaacactttaagatctaaagagagttgggaagagcataccctgctccccaattactcaatcatgagccagcatttccagctgaccttagttggagccagtttgactttattacgaaactgatttaggtaactctttgaagtaggcaagtttgcttttgagacccaatgcttcctttcccttctgcagcagaattcccctaatttttctcagagcccctgatataatgaggcttatctggtcagagcatgctctcaaaaaatgtatgagcatgacatgtagcagtaattttcaccttcttacaaatcattgcctctccagtggacatttgaaatttaaacatgtgatagttgaacagatggcctcccccaaccctaataaaagggatttcatttagagaaactgtgagaaatagaaatgtttttgaagagaggttggggtatttgacctcctgaaatctaccatggactttggggttctaggcctccatgtaagatggaccctgcttattactcgagtgccttgatgccgctgtgtactgagcatatgctgatatgctgaaggctttactactgtagttcaaccacaaatatcacttcaagtagctttttctattgcactcactacctggggttagtgttcactgagtaaagcaaccagtttaaggaggaaaaaatgattctccaaactctatgtctacgtgactccaaacaataattttatttccatagaattattttctgtttccctgttaaacaggattgcctgtcttatctttcatttaaataagaatgtgtaagatgttcattctctgtcatttattttcagaatcagtgaagcagtaggcattatttggaacaggttcagatgtgtctttagccacagggcttaaattttacgacctatttttagcttactgcatattggaataattgagatatattttgaagcatttggttatttgttacaatatgtaagacggaacatcgttttcagatatatttaaagattttactcttcaacatgaacagaaggggggttgttttaaactaatgaactcttcttttttcataactaatcctctcaaaaaatattctttcaggagccaaatttagaaagtatgtgggccattctgcacatgtcacaaatgtccgctggtcccatgactttcagtgggtgttgagcacaggaggggctgatcactcagttttccagtggaggtttattccagaaggtgtcagcaacggcatgctggaaactgcaccccaaggtaaacccagcaataatttcttaacatcat

SEQ ID NO: 23441 - DNA, 2300 bp, Homo sapien
catgaaccagtgcacctggccatattccaggtttttctggtgctatcatccattatttcatcacttgatggatagagttgtggtgaagcagcaagttctgatgggtgtaacaagtgcagtttggcttgaagacccagaaaggtcattcatcccaatggctgtgccaggtcttgaggacgtttcctccgtaggccctgccgggaaccactatacatccctgccagtgtctttctcttgagacagcagctggtttcgcagaaccttctagcaactgtcaattccctttattgttgcatggagcagtgattttctttcctattctgagaatcttgaatcacccactgctgcaggaatctctgccttgttatatctcttcagtggccctgaattttttcctctctctttcttcctctatgtcccttttttcccctctgcaacctgaatctcatcccttagagtctgtttccttgaacctttctttttgcattttttcttgccatctagaaaccctgtgtccctcttataagttgagggtgtagagaggcatttctcatgctcttttacttctgtaaagaaacagcttgcatttgtagtgtataaactggatgtgctcctgcttccagctagaagaccagcaggacacatggctgcagctgctgtgactgtcctctgtttccatgctttctggaactcacatgttcaaatgggtttttcttggaaattcttttgttctgcctatttgctagcaaactaatgactctggagggcctcctggaaatcctacctgcctgtttgcttcaggaatctttctaggctcagtactctgctgaggagtgggcagttccgctctgccatcagctagtagttggccaaatacagggcgatcttgactaggagtattacaaagtcacgaaccctcctgcacctgtttcctgctgtatgtctgtgctgttttcagattctctagcatgccagtccaaaaccctctgggagccacttgtaaattacttaataaaattttcatctgggatactggtgactctgtcacaacctcagagagtgcatgtggccttccatattctgtaaggtattccctcggagtcgctgagaggatggaaaaactccatgtctttaaatggctcccgctgcagctgtttttgccaggctgtggctcatgagctgaatatggaagctttttctggtgccagctttgattttgcaccacttgtcaggactgccctggcatgagcagctgactcacattccaccctccacccggggataaaggtggggtggcctgggcacaccactccaaaaagcttttagtcgttactgataaattgggttgtatgtatttggctatgtttgttgaaaaggagctttgctttaaatcaatgtttgcgtgtttgtattaaaaattctttctagcgtctgtggcagaaaccgttgtgttcattttacatcttacttgaggtcccaggtttataagatatcctttgctcttctgccactgcctggactgtagtacaaaagtcactgtaggagatggctgtgaagacacttttgatctcagatgtcagccagactcacagtcaggagtttacactagagacctgtggaggcagcacatttgacatttgagagaaccagaacaagctttttatatgtctatagattcccagaaaataggttctgtagtctaacatttcattcattccctcaaaaatatattgaggacctattgtgagctgggtactgtttgaagaaaaaagagacctagtgcctgcccacatggagcttacattctagttgaaatgtaggaaattgctgttgaactgtttcctttgtatccagtagaaactaacatggataaacgagcccagagaaaggaataacagtggctggggtaataaccaatttcgggctttacagggacagcacgcaagattcaagaagtatgtggggcacagtgcacatgtcactaacgtgaggtggctgcacaatgactctgtgctgctcacggtgggcggcgccgacacagccctgatgatctggaccagggagtttgtggggacccaggagagcaagctggtggacagcgaggagtcagacaccgacgtggaagaggatggaggtgagccccccacctgccacatgcctcctgcgccgaatgcacctcccaacacctcccttcctgggccactgcaaaccaactggctccccaatctctttctgttgtttgaggctatgacagcgatgttgctagagaaaaggccattgactacaccaccaagatttat

SEQ ID NO: 23442 - DNA, 2300 bp, Homo sapien
gttcttgagcatttgggtgggtttaaagtggctattatggaagtcagcaaacccatttgctttgatagatggtaaagtgctctttcttccacttcctgtgacatatgtcgagttagggctttccagggtaaagccatcacctgtgctgtccaggcccccaagtggattggcatttggtgagcaaaggtgattagtccctgagaatttcatattccacatgaagaagtggtaccattttgctcagtaaagcatcatctccaggcctccacccctacttctgcccagatgtggacactgagaagcaccagtcctgtgccatggagtggaggagactttgaccttcatcattgtggactctggaaacccctgtacttgaactgtgctctggacccacacagagttgtgggaagtatcgaagagcagcttgagtgtatcagataacagacagtagctccccttctcccagacccaaaacagaatatgaacattccaaaaaaacgacccttcatctccccaagtgtgattctggaagtgagaatttgagggctgtaagctctcacttttataagaagtatccaatggctccacgcgatgttttgaagttgccctaaaaggtctttaggttccactgttcaccctcccatgatctctctcccccagggagccagagcttctatctggagcacacagatgacatcctctgtctcacagtgaaccagcaccccaagtacagaaacgtggtggccaccagccagataggtaggaggtcctgtggcagctgaggctctcccagcttgcagggacgctgacctgtcagcaattattgggagagggagtgggtgggttgcttacatccatcccttcttgttgatgttgctgttgattttttgagtcctgagtgtatctgtgtcacctgcgttgacacatccagtgactgtgattctgagggaccataaagtctgaccagcgcctgagagtccaaataaacgttggcccccatccctgtggacttgtaagaatagtttttcagaccccaagtgtcaagaactccgtgtcttttgaagctggttattgtgcttggccagggtaggtttcagtaagtgtgcctggaccccctgtgccctgggaaactgccggtgacaaatgtgaactgattcacatttatgagaagtttgttttcacttagtcatctcgagcaatttttacaacttcctgcttgttttcattgaatcatgtccatttttaagtttaatttggaactttctgatgctggtgttgagtgcttcactgttggaaacgtgacttattttagctattgttttcccttgacgcttcctcattgccattgctcacccaatgcaggtgatattacggaaaccccaggtaaggctgttccatccgtgagtagtttgaatctgcagagcaaaatcatgtcattctatcatgtttgctgattgtatcttgccgaattgcagatacaaatcattgacctcaccagtttccttcgtataaaatcctctgcaagtgtgtgtgtgttgaacataaatgtccgtagggctctgcctttaaaagcaaatttcctctagtctttctcctctggccaggtcaggctataggtctcttatgcccaatgactgtaacagccctaaacatttgtcttaaaaaaggcttttgcaggccgggcggcagtggctcacatttgtaatcccagcactttgggaggcgggcggatcacctgaggtcaggagtttgagaccagcctggccaacatggtgaaatgctgtctctgctgaaaatacaaaaattagctgggtgtggtggtgcgtgcctgtaatcccagctactcgggaggctgaggcacgaggatcgtgtgaacccaggacgtggaggttgcggtgagctgagctggtgccactgcactctggcctgggcaacagagcaagactctgtctaaaaaaaaaaaaaaaaaggcttttacatgaacataagcatcgccttggctctgccatttgtcagccttacttctttgtcatgcctctccacactcagggacaacaccttccatccacatatgggacgccatgaccaaacacaccctctccatgctgcggtgcttccactccaagggggtgaattacatcaacttcagtgcaactggaaagctcctggtgtcggtgggagtggaccctgagcacaccatcactgtctggcgatggcaggaaggtaaaccagcactgggctttctgtccctccagggtgtctgcctgtgggtgtcgagcctgtgggctcgaacccagatc

SEQ ID NO: 23443 - DNA, 2300 bp, Homo sapien
taatatcacataaatgtcagttgaattagtgtaaatatctacaggatgtcattgatggggagtactgtctttatggcttctgcttaggcatcttgtcttcagcaagaacaagtaacagtggtacaaagaagcagaataccaaccagggttatatcagccactttcctatatttctcaaatttgggtaaacaaataattgctggtttaaatatcagtgcgagtatttgagtatttttaacttgatattaataattcagttttttgttaataattgtctaacagtgtgttagaccatgtattagtaaagatacattcctggtccataacagcttatactctagtaggaaaaatatacaagtatacatgtgtctatatttcagagctgaatctagtaaatactataagactaacacaaaagaaagcattgttagaattatacaggagtgagagagaacatcagggttttatgaaagagattggcagataaggctctatgtatgggtgagatttgagatggggctaactggctaaataaggtatcaccagaggtaagagagcattgcagattgggaaaaccatatgattaataagggctacattaaggttaaaaaatacttagtgaatgactcatttctggctgcaacataaagagtagttggaagtaaggttggaaagatttaggaggatgtccctggttgaaaagttggagtcatagaatcacagaatgtttgagcctgaaggaactgaggaaagtctgtttctcaaatttacagagttggagcacttacccagagaagttaaatgccttttgcaatgttgtatagctaggtagtggcaggtcttctaactcttgcttgagttcagcctagacagcactatctaagatagctcacataaggttattctggcattggctgacggaatggatttggatgcaggcagatcagagattggtttggagagtgatagaatattccagctcgtaaatagtaagtgcttaaaatagagtgatggcactgtgaataaaaaccaggagacatatttggggcatgttgcagaggtaaaactatgggacaaggagttgtctaagatgttatttccactgtaagaaactggcatcctgagacatagggaggttatgaggactacttccaacagatacgagggaacactcagcacttctgagttggttgtaccctgccaagataaaatggcttctttgaaacagtaatgaaactgtttcttacattcctgtggacttgactttttccccagtatagtatttttatttatttatttatttatttatttatttattaccaatacaatacttttaaatttaacaattttagccatctcggtatggattaaaacatctagatgatgtaactcttatgttttgctaggattgctactgtgcttttggcagccactttacaatctggtgcttgacatattgaacaatttcccctaaaggttagtctgagagagtttaggatttggaaatgaaaaagatctttgttaggaaaacgtgatgagacaacatagtgtcaactttaagaaaaaaaaaaaaacaaccatagtcataactaccatttactgagtgcatccttgtgctcagttgcattaggcacttttctcactgaattctcatgataatctccactttataaatgaggaaactaagtttagagggaagaataaataactttgcaaaattacctagccaggtaagtggcagagcatcagattcaagcccagatcagtctggcttcaaagtgtatgctttttctgtgctagtcagcagacagtgcatatcaaggaaataccccttactgctgagtttttatattgcccctaatttggaaacagttggcttttatagtagaatattttcttaatttcttacagatatataatttctgattgacatttaggggaaaatcactccaattagtgacaattatgatgtgttttgttttctagggcatatctggaatctgaagttgctatatctgaggagttggttcagaagtacagtaattctgctcttggtcatgtgaactgcacgataaaggaactcaggcgcctcttcttagttgatgatttagttgattctctgaaggtaagtttattttgcctttcatttttgatatacccagaatttagtatcaagagagttgagtgtaaaattctgttcttctatattcaagtaaatgataaatattaattaaatcacatggctgtaaacttgtgttttaaaattcagaatccaatcaaataaggatgaagaagtgcta

SEQ ID NO: 23444 - DNA, 2300 bp, Homo sapien
aagaactgggcaaaatgtcagttgatttccacaagctagttttccttgtacacttacaaagaccataaaaattaaagaagtagatgtcactatgtaggctgaaatgtttactaaacttcagggctcctattttgactttttaatctgtcaggggtgctattaagtatgtttaatgtttagatgagtgggtatgtcttattacacattcttgcccctctcagacttttttctttaattgttaagccaaatcaagtaccacggaagatacaagtagtcttaagtgccgagtaacttgatcacagtaaaacttttttcttctactagtgaagtaatctctgacttgaaaatagtgtttgagtactatagttgagtgttttattctaatgctcgttatttattggctttcagttttaagggacttgttattagaaagtcagtattttgtatttactaaatagtttgagattctgaatgttgcgtggagaggccagacattttcaggccatgatatggcttgctgaccgggttctcaaatatcacattatgcaggggttcagtgaataaagtttaaagttaaatattaactcgagctgagaatactgggctcttttaaaaattacttttctttatttatgtttggagttagagaggcagatagggaaataaatgtgtcattgatattcaagccacttcctttttcccctctcattttcctaattttagttctttctatgtttaagtcttacatgttttgtttttagtttttttgggtacataataggagtatatattaatatcaagccacttctgatattaaggattttgcagcccacagatagcaggttccagaaaatattatctctatttcattttagctatacagtcttaagtatgtatttttgtacataggctacgtatcttatagtattttcgcaaattgcattttaaaatattttagctgatttgttagtgccttttctgcttaggcagatataagtatcaggtgaattgattgtggaacataagtagagacactgcattggaatgaaaatcagttttataaagttgaacacagattttaaaaatgctgtacatagatttgtttttatatttttcagtaaaattttaggccaggtgtggtggctcatacctgtaatccccgcactttaggaggctgaggtgggagaattgcttgagcccaggagtttgtgaccagcttggacaacacagggagacctcatctctaaaaaaagtgtaaaaataaaaaattaactgggcatggtggcacatgcctgtggtgactgagatgggaggatctcttgagcctgggaggttgaggttgccatgtgaccaatgattgcaccactgcactccagccttggtgacagagcgagaccctgtgtcagaaaaaaataaaaaataaaataaaattatagtttgcttttatgtcattttcccatggcagattatatcattagcccatgaatatatctccccaagctaagaatctattaatactgtctgtagaggtgtctaataaatattcaaagattgagttggagcagatgatgattaagagtaagtgtatgtttgtaagtctctggatttccataattgtaaaagaggaaaaaagatattaggaagattaagttgctaaagttttctgttcaaataatatgttcaataaacattagtaatttgacttttattttctgtttatctcttcataaggtgcaaaatgctgaatgttttacgtcttaatgaacttaggagcaattaaggagactcatcatttcacaagcttgaaatttaggctattaatatttgatcagtccatttttatcttattaggtaaccattaattttagagttttaaatgaaactgaaaaccagtagcataattcgaccatctgttaaaaaaagaaagaaaaaaaaactgcatatggctttaattgcatttcagatacattcagtggttagttctaagaacaacccttatttcctttcttttggtagcctgccctctccctgcaaatgcagctccatttggtatgagcaacaaggcaaatgcctaaaacaatcaacagatagaaggaaagcattaatgctggagtattagtagcctagttacagattgcactgcgtcagactgttccacacccagaagacgtcaggtgacttcagtcctgctgcagttgtgcagcagaggagactgcagacttcggttgaggaaacgggtatttcatgtctcagggagtaggtttgtgcagttacagcttttctgttggtatgcataatta

SEQ ID NO: 23445 - DNA, 2300 bp, Homo sapien
tgttcgagggggcgtagttctgccggggtttcagctgcagggtcggaggaattgctgttagtgtggacttggcccagcctcttagtgcatcataattgaatcttacagaaaaaaataaaaggcaaaatggttgacattcctaaagaagggaaaacctgtggattccttgccaggaattggctaattgaactcgtggcagatttaccatgagacacagagaaatgttttgagacagacattttcatatatattggttagaaatactgtttttcagaaggatatgttttaggttacagaatcaaaatacggtcacgtgcctcataacgacgtttaggtcaaggacagaccgcatttgcaacggtggctccataaggttgtaatggagctgaaaaattcctgccgcctagcgacgtcttgatcttgaccctgtgtaggcctagggtaatgcgtttgtatcttagtttttaacaaaagttaaaaaaaaaatagaaaaaagcttatagaataagaatataaaatttcttttctatagctttaaaatgtgtttgtgttttaagttaaacgttattacaaaagagccaaaaagtttataaaatagaaaagatacagtaagctaaggttgatttattattgaaaaaatatatctaaagataaatttagtgtagcctaaccgtagagtgtctgtaagttgtacagtagtacatggtaatgtcctaggccttcacattcactcactactcacgtccacagcagcttccaggctggcaagctctgttcatggccagtgccctgcacacgtgtgccatcttttaatcctttgtacagtgttattttaggtatgtttagataaacactacacaaataccattgtgttacagttgcctacagtaacatcctgtataggttagtagcctaggagcaattgattataccatatagcctacatataggtatgtagtaggctctaccatctaggtttctgtaagtatactgtgaggtttgcacaacgacagaattgcctaacaatacatttctcagatcctgttccccctgttcagcgaggcatgactatgtatggtctgtaaaatagttttcaagttctttcattcacctaagttcctgattgtatgttattattagtcacgttgttttattgccgttttcatcttgggaaattattttggaagcgaaaaaaatcacgtttgttagagattgagaatgcataatattagatacattcataagtacttgctacttcggggacagaaagtgtcccactagcagtaggacctttatgtataaaaggtcaagaatcaagtagtgtaactgcctgcttggaaatcttcatagccttgtaggatgttagaggtgattcatttcttaaaagaaaatcagtctgatttttttttttctcaattcacttctccataatgggggaaaataagccaattgcgatgctttttagtaatattttgatgttgacggactcctcacccccatactactcaaaacactaattgccatattaaaggtcttagaagatgaggagtaactcaatcttttcctttttctttatgaaaaagacatacttgagggaaactgaggtaagagaaaaatatgaaatatatttttaaacaggaattttttttttttttttttgagatagtctcccccttgtcaccaggctggagtgcaatgacgcaatcttggctcactgcaacctccgcctcccaggttcaagtgattctcctgcctcagcctcccgagtagctgggattacaggcgcctgccaccacgcctggctaatttttgtatttttagtagagacgggattttaccatgttggccaggctggtggtcttgaactcctgacctccagtgatccacccaccttggcctcccaaagtgttgggattacaggcatgagccactgcgcctggccacaggaagtttaatgattgacaaaagcatactaatcttgtattggtatgggaacaaagaaaatagttctgtctttgaacattagggattcagggggtgacagcactctcttggaatcttgtgtgttggaatgctgaggttggaaggcaatggggaaagaatattgcctgttctacagagttccctaattccatattgatgatacctattgggaaactttagtttttttagtaagtgtaagaacattgtgattatggttgtggatagttaaccattttcaatgtgtctggatttcttaatgcattcaagagtttgttcattaattcaacccattattgattacctaccaagagacagga

SEQ ID NO: 23446 - DNA, 2300 bp, Homo sapien
atcccagccggtaagagagaggaagtgccgtagtccccacccactttcatctccttccctttctgttggcccggctggtcgcctatcttctcgatcctgtagccgattggctctctccctcccgcgccagtccctgccctcccctggggagggtgagtcacgccaaactgggcggagagtccgctggcctcactcctagctcatctgggcggcggcggcaagtggggacagggcgggtggcgcatcaccggcgcggaggcaggaggagcagtctcattgttccgggagccgtcaccacagtaggtccctcggctcagtcggcccagcccctctcagtcctccccaacccccacaaccgcccgcggctctgagacgcggccccggcggcggcggcagcagctgcagcatcatctccaccctccagccatggaagacctggaccagtctcctctggtctcgtcctcggacagcccaccccggccgcagcccgcgttcaagtaccagttcgtgagggagcccgaggacgaggaggaagaagaggaggaggaagaggaggacgaggacgaagacctggaggagctggaggtgctggagaggaagcccgccgccgggctgtccgcggccccagtgcccaccgcccctgccgccggcgcgcccctgatggacttcggaaatgacttcgtgccgccggcgccccggggacccctgccggccgctccccccgtcgccccggagcggcagccgtcttgggacccgagcccggtgtcgtcgaccgtgcccgcgccatccccgctgtctgctgccgcagtctcgccctccaagctccctgaggacgacgagcctccggcccggcctccccctcctcccccggccagcgtgagcccccaggcagagcccgtgtggaccccgccagccccggctcccgccgcgcccccctccaccccggccgcgcccaagcgcaggggctcctcgggctcagtgggtgagtgccgcgacctctcgcttcgcgccgcccctcgcgcccctccctcttttgtgtgcagccccagatgctttgggctggtccctcctctccgccccgagggcgctttgtctgcggacttcggggcgatggcgccccgtctggttggaagcgcggggagaagggtggggcggcccttggagcccgggtttgttcttattgtccgtcttggtttcggggaacacgtgcaccgctcccggctcccactttcaccctgtgtgatgcccagcgtacggattctcggaagttaggcacccacccgtagtaggagccgggtatatacccgagagccagggttgtggatttatcgggttggttgggcttcgaggtgaggaaggaaaggccttggcacccagatatttttaggaggtgcttttgtctacccgtctgggttgctcctttggaaaaggtgcagttttgctgcgggtctgttggcctgcattctgccccgggctccctcctcacctcctggctggcgtgggtggcccctttgcgcttcccctccccctcctcctgtgctcgtggggagctggccgagtggaaaacgtccacattgacccaaccgcagtgaagggagagcgcctccagtggtgtggtgcgtggagaaatgggaaggagagagttctggtaaagtcctgccaccgcccagctccccggggtgtgatgtggactgctccccaccagctaaaccgagccagggaaaggggatctaggcattgtgttcgagggggcgtagttctgccggggtttcagctgcagggtcggaggaattgctgttagtgtggacttggcccagcctcttagtgcatcataattgaatcttacagaaaaaaataaaaggcaaaatggttgacattcctaaagaagggaaaacctgtggattccttgccaggaattggctaattgaactcgtggcagatttaccatgagacacagagaaatgttttgagacagacattttcatatatattggttagaaatactgtttttcagaaggatatgttttaggttacagaatcaaaatacggtcacgtgcctcataacgacgtttaggtcaaggacagaccgcatttgcaacggtggctccataaggttgtaatggagctgaaaaattcctgccgcctagcgacgtcttgatcttgaccctgtgtaggcctagggtaatgcgtttgtatcttagtttttaacaaaagttaaaaaaaaaatagaaaaaagcttatagaataagaatataaaatttcttttctatagctttaaaatgtgtttgtgttttaagtta

SEQ ID NO: 23447 - DNA, 2300 bp, Homo sapien
tctccccgctgcctctctctttgggtgactcactctcttaccatgtaagagtccagcaggcaaggccccaaactctctttggaagaagagcagactttcaaatggtcggccccagatccctagttaattcagcacagctgttttcctcccaatttcgggggctgcggtttagactgagtgagcctaactgtcaaaaaacaatttttttcttattttagggtggtagtagtagtgatgtagtttggaactttgagtgaacaaataatcttttatttcaaaaatctttaaaaatccttagggcccacttcccagtcccgctaatacctttctccagtcgggtttcttcctttcccgggaggaaagtttccactctcagttcccccaggataacgcccttccggtggcgcgccagaaaccgcgccgacccctcccagccagcagcccgccccctttcccagtgctctaacgacatacggacgccagctgcgggcaaggccaagaccccaccccaactcacggttacccaaagtgggggtggagctcccagctctcagccccgcccattgaacgcaatcccagccggtaagagagaggaagtgccgtagtccccacccactttcatctccttccctttctgttggcccggctggtcgcctatcttctcgatcctgtagccgattggctctctccctcccgcgccagtccctgccctcccctggggagggtgagtcacgccaaactgggcggagagtccgctggcctcactcctagctcatctgggcggcggcggcaagtggggacagggcgggtggcgcatcaccggcgcggaggcaggaggagcagtctcattgttccgggagccgtcaccacagtaggtccctcggctcagtcggcccagcccctctcagtcctccccaacccccacaaccgcccgcggctctgagacgcggccccggcggcggcggcagcagctgcagcatcatctccaccctccagccatggaagacctggaccagtctcctctggtctcgtcctcggacagcccaccccggccgcagcccgcgttcaagtaccagttcgtgagggagcccgaggacgaggaggaagaagaggaggaggaagaggaggacgaggacgaagacctggaggagctggaggtgctggagaggaagcccgccgccgggctgtccgcggccccagtgcccaccgcccctgccgccggcgcgcccctgatggacttcggaaatgacttcgtgccgccggcgccccggggacccctgccggccgctccccccgtcgccccggagcggcagccgtcttgggacccgagcccggtgtcgtcgaccgtgcccgcgccatccccgctgtctgctgccgcagtctcgccctccaagctccctgaggacgacgagcctccggcccggcctccccctcctcccccggccagcgtgagcccccaggcagagcccgtgtggaccccgccagccccggctcccgccgcgcccccctccaccccggccgcgcccaagcgcaggggctcctcgggctcagtgggtgagtgccgcgacctctcgcttcgcgccgcccctcgcgcccctccctcttttgtgtgcagccccagatgctttgggctggtccctcctctccgccccgagggcgctttgtctgcggacttcggggcgatggcgccccgtctggttggaagcgcggggagaagggtggggcggcccttggagcccgggtttgttcttattgtccgtcttggtttcggggaacacgtgcaccgctcccggctcccactttcaccctgtgtgatgcccagcgtacggattctcggaagttaggcacccacccgtagtaggagccgggtatatacccgagagccagggttgtggatttatcgggttggttgggcttcgaggtgaggaaggaaaggccttggcacccagatatttttaggaggtgcttttgtctacccgtctgggttgctcctttggaaaaggtgcagttttgctgcgggtctgttggcctgcattctgccccgggctccctcctcacctcctggctggcgtgggtggcccctttgcgcttcccctccccctcctcctgtgctcgtggggagctggccgagtggaaaacgtccacattgacccaaccgcagtgaagggagagcgcctccagtggtgtggtgcgtggagaaatgggaaggagagagttctggtaaagtcctgccaccgcccagctccccggggtgtgatgtggactgctccccaccagctaaaccgagccagggaaagggg

SEQ ID NO: 23448 - DNA, 2300 bp, Homo sapien
ggaaagctgagatattttacatttcggaggtactaattcttgaaatccagtgcgcattttacacttacagcacatctaatttcagcctagctacatacattccgagtgttcaatcagtagccacaagtagccagtacctgtcaggtacagcacagatttagactttgagcaacttgaaagcaggttatcctcttctctccagggcctccagagtaggcatgcagtgaatatttttgaaaggtaaatcagaaagataaaaggatcctgattcttacaaagatgttctgcaactactctctttaaactctccagcctcataaaaagtggaatggggatcatgcttattcctgcatatcaaaccaatgactatggggcttcctgactcccagaaagcctgaatcatccgaaatgttgactcatgaacctaaggtgactgaaatgtaacgtgaaccaaattagctttccaaggcatctttgtatttccactttcctgtctccccgctgcctctctctttgggtgactcactctcttaccatgtaagagtccagcaggcaaggccccaaactctctttggaagaagagcagactttcaaatggtcggccccagatccctagttaattcagcacagctgttttcctcccaatttcgggggctgcggtttagactgagtgagcctaactgtcaaaaaacaatttttttcttattttagggtggtagtagtagtgatgtagtttggaactttgagtgaacaaataatcttttatttcaaaaatctttaaaaatccttagggcccacttcccagtcccgctaatacctttctccagtcgggtttcttcctttcccgggaggaaagtttccactctcagttcccccaggataacgcccttccggtggcgcgccagaaaccgcgccgacccctcccagccagcagcccgccccctttcccagtgctctaacgacatacggacgccagctgcgggcaaggccaagaccccaccccaactcacggttacccaaagtgggggtggagctcccagctctcagccccgcccattgaacgcaatcccagccggtaagagagaggaagtgccgtagtccccacccactttcatctccttccctttctgttggcccggctggtcgcctatcttctcgatcctgtagccgattggctctctccctcccgcgccagtccctgccctcccctggggagggtgagtcacgccaaactgggcggagagtccgctggcctcactcctagctcatctgggcggcggcggcaagtggggacagggcgggtggcgcatcaccggcgcggaggcaggaggagcagtctcattgttccgggagccgtcaccacagtaggtccctcggctcagtcggcccagcccctctcagtcctccccaacccccacaaccgcccgcggctctgagacgcggccccggcggcggcggcagcagctgcagcatcatctccaccctccagccatggaagacctggaccagtctcctctggtctcgtcctcggacagcccaccccggccgcagcccgcgttcaagtaccagttcgtgagggagcccgaggacgaggaggaagaagaggaggaggaagaggaggacgaggacgaagacctggaggagctggaggtgctggagaggaagcccgccgccgggctgtccgcggccccagtgcccaccgcccctgccgccggcgcgcccctgatggacttcggaaatgacttcgtgccgccggcgccccggggacccctgccggccgctccccccgtcgccccggagcggcagccgtcttgggacccgagcccggtgtcgtcgaccgtgcccgcgccatccccgctgtctgctgccgcagtctcgccctccaagctccctgaggacgacgagcctccggcccggcctccccctcctcccccggccagcgtgagcccccaggcagagcccgtgtggaccccgccagccccggctcccgccgcgcccccctccaccccggccgcgcccaagcgcaggggctcctcgggctcagtgggtgagtgccgcgacctctcgcttcgcgccgcccctcgcgcccctccctcttttgtgtgcagccccagatgctttgggctggtccctcctctccgccccgagggcgctttgtctgcggacttcggggcgatggcgccccgtctggttggaagcgcggggagaagggtggggcggcccttggagcccgggtttgttcttattgtccgtcttggtttcggggaacacgtgcaccgctcccggctcccactttcacc

SEQ ID NO: 23449 - DNA, 2300 bp, Homo sapien
gataaatatttgacaaagacttcaaatatgtctcttgtagtcaccattgtagaaatttgttttgtttaaattcatttggcattaacttcccgccccaaaattctacatcaatacatctctcttcctactcttcccaacccctccaaaaaataacaccaaactcaaagcaagtcacaaacgttttgcacaaataaagccagttctccgtggaattaatgtgataggtcttgaatatattgttgataattaacccaatcaagtaacattgccaggaaatctttattcttttccttttttaaaggttcataaactttatttcttagagcagttttaggtttacagaaaagttgaacaggaagtacagagttcccatacactctcactcctgccccctaaccacagtttcctctattattattaacataacgcattgaggtggtacatttgttacaactgatgaactgatattgatatatcattaactaaagtcaatagtctacattagggttcactctttctgttgtatagtcctgtgggttttgtcaaatgcataatgttatgtatccaccattacaggataatacagaacagtttcactgcccccaaaatcttctgtgttccacctatttatccctccctccaactcttacttttcttttttaatacccaaattaagccacagtaatataaattagttggagctaagaatttgccagtgattccccatggcaatcaaactttcttaattattaatctagactagcactgtccaaaagaaatataatgtgagccattatgtatttaaaaaactctagaagctgctttaaaaggaacaagtaaaattaatttaataatattatacttatcccaatatatccaaaatatcaatttcaacattcagtcaacaggaaagctgagatattttacatttcggaggtactaattcttgaaatccagtgcgcattttacacttacagcacatctaatttcagcctagctacatacattccgagtgttcaatcagtagccacaagtagccagtacctgtcaggtacagcacagatttagactttgagcaacttgaaagcaggttatcctcttctctccagggcctccagagtaggcatgcagtgaatatttttgaaaggtaaatcagaaagataaaaggatcctgattcttacaaagatgttctgcaactactctctttaaactctccagcctcataaaaagtggaatggggatcatgcttattcctgcatatcaaaccaatgactatggggcttcctgactcccagaaagcctgaatcatccgaaatgttgactcatgaacctaaggtgactgaaatgtaacgtgaaccaaattagctttccaaggcatctttgtatttccactttcctgtctccccgctgcctctctctttgggtgactcactctcttaccatgtaagagtccagcaggcaaggccccaaactctctttggaagaagagcagactttcaaatggtcggccccagatccctagttaattcagcacagctgttttcctcccaatttcgggggctgcggtttagactgagtgagcctaactgtcaaaaaacaatttttttcttattttagggtggtagtagtagtgatgtagtttggaactttgagtgaacaaataatcttttatttcaaaaatctttaaaaatccttagggcccacttcccagtcccgctaatacctttctccagtcgggtttcttcctttcccgggaggaaagtttccactctcagttcccccaggataacgcccttccggtggcgcgccagaaaccgcgccgacccctcccagccagcagcccgccccctttcccagtgctctaacgacatacggacgccagctgcgggcaaggccaagaccccaccccaactcacggttacccaaagtgggggtggagctcccagctctcagccccgcccattgaacgcaatcccagccggtaagagagaggaagtgccgtagtccccacccactttcatctccttccctttctgttggcccggctggtcgcctatcttctcgatcctgtagccgattggctctctccctcccgcgccagtccctgccctcccctggggagggtgagtcacgccaaactgggcggagagtccgctggcctcactcctagctcatctgggcggcggcggcaagtggggacagggcgggtggcgcatcaccggcgcggaggcaggaggagcagtctcattgttccgggagccgtcaccacagtaggtccctcggctcagtcggcccagcc

SEQ ID NO: 23450 - DNA, 2300 bp, Homo sapien
ataaacaacttgcaaataacgtaagtcctgtttatattagacatacataaaggccctgtgaaacttatcattaaggaatttcagaacagtcatagtgggaaaagcatgcggggaagactgctgatagctaaactgtgacaatagaaaaggtcgtatcataaaatactgttagtatatttttgtatgtttatgcaattggttgaaaatcaggcaaattttttataatttttgataaatatttgacaaagacttcaaatatgtctcttgtagtcaccattgtagaaatttgttttgtttaaattcatttggcattaacttcccgccccaaaattctacatcaatacatctctcttcctactcttcccaacccctccaaaaaataacaccaaactcaaagcaagtcacaaacgttttgcacaaataaagccagttctccgtggaattaatgtgataggtcttgaatatattgttgataattaacccaatcaagtaacattgccaggaaatctttattcttttccttttttaaaggttcataaactttatttcttagagcagttttaggtttacagaaaagttgaacaggaagtacagagttcccatacactctcactcctgccccctaaccacagtttcctctattattattaacataacgcattgaggtggtacatttgttacaactgatgaactgatattgatatatcattaactaaagtcaatagtctacattagggttcactctttctgttgtatagtcctgtgggttttgtcaaatgcataatgttatgtatccaccattacaggataatacagaacagtttcactgcccccaaaatcttctgtgttccacctatttatccctccctccaactcttacttttcttttttaatacccaaattaagccacagtaatataaattagttggagctaagaatttgccagtgattccccatggcaatcaaactttcttaattattaatctagactagcactgtccaaaagaaatataatgtgagccattatgtatttaaaaaactctagaagctgctttaaaaggaacaagtaaaattaatttaataatattatacttatcccaatatatccaaaatatcaatttcaacattcagtcaacaggaaagctgagatattttacatttcggaggtactaattcttgaaatccagtgcgcattttacacttacagcacatctaatttcagcctagctacatacattccgagtgttcaatcagtagccacaagtagccagtacctgtcaggtacagcacagatttagactttgagcaacttgaaagcaggttatcctcttctctccagggcctccagagtaggcatgcagtgaatatttttgaaaggtaaatcagaaagataaaaggatcctgattcttacaaagatgttctgcaactactctctttaaactctccagcctcataaaaagtggaatggggatcatgcttattcctgcatatcaaaccaatgactatggggcttcctgactcccagaaagcctgaatcatccgaaatgttgactcatgaacctaaggtgactgaaatgtaacgtgaaccaaattagctttccaaggcatctttgtatttccactttcctgtctccccgctgcctctctctttgggtgactcactctcttaccatgtaagagtccagcaggcaaggccccaaactctctttggaagaagagcagactttcaaatggtcggccccagatccctagttaattcagcacagctgttttcctcccaatttcgggggctgcggtttagactgagtgagcctaactgtcaaaaaacaatttttttcttattttagggtggtagtagtagtgatgtagtttggaactttgagtgaacaaataatcttttatttcaaaaatctttaaaaatccttagggcccacttcccagtcccgctaatacctttctccagtcgggtttcttcctttcccgggaggaaagtttccactctcagttcccccaggataacgcccttccggtggcgcgccagaaaccgcgccgacccctcccagccagcagcccgccccctttcccagtgctctaacgacatacggacgccagctgcgggcaaggccaagaccccaccccaactcacggttacccaaagtgggggtggagctcccagctctcagccccgcccattgaacgcaatcccagccggtaagagagaggaagtgccgtagtccccacccactttcatctccttccctttctgttggcccggctggtcgcctatcttctcgatcct

SEQ ID NO: 23451 - DNA, 2300 bp, Homo sapien
ggactgggccttggggatactccatggttagaggtcttgcagatcaagaggaagcagcaaatgagcctggaaaagagcctccagggtggcagaaaaactgagaggtgaagtctttgaaaggttttcaaagagagatggaatgagcaactgtgtcaaatactgctgacagatcaaataagatgaaatgaccattgaatttagcaacatggaggtcattagtgaccattacaagagctatccgatcagaatggtggggacaaaagcctgacaggagtgggttcagacaacggaagggaaagattagagacaatatgtacaagcaactctaggaaattttgttgtagagactagttggcggactaggggatgaaaaatgttccaggaggcagggcgtggtggctcacgcctgtaatctcaccactttgggaggccaaggaggatggatcatttgaggtcaggagctagagaacagcctggccaacatggtgaaaccccatctctactaaaaatacaaaaattagccgggtgtggtggtgggcgcctgtaatcccagctactcgggaggctgaggcagaagaattgcttgaacctgggaggcggagtttacagtgagccgagaccgcgccactgcactccagcctgggcaacagagcgaaattccgtctcacgaaaaaaaaaaaaaaaagttccaggaagaataaacgactggattcttcagaaatgccaaaacacgggagggcataggtcaggaaattaaattagcttcatttactaaaatgtagagtaatgggtttagcagattaggttgtaaggaaggcagaggctgaatgtcattctaagaaatttgaattgtatcctgaaggtgaggtataaaataataacacacatttacctttcagaatgaatattttggaggcaatagtgaaggtgggttagaaaggaggaaagactggagagagataaggagttagattcggaacccctacaagagaaaattaaggtctgaatttggggatggggtcgcagagggcagaggatgaagaaataaatacagaagacattagaaaggactctggtttgtggagtggagaaaggacagggagaacttgcttctaattggcctccttgccggaagaagcaccccatacatactccaaaaacttcctctcagatccaagactcccaatgcccaaatttggaaattctacaactaaataaccattctgcaggtttcttttccgtacggcttcactttaaaatttgaaaactcctgagatttttcaacatattaaagcgtgtcacactaaggagtgacacacaagacccagactcttccctaggctgggagagactcggcggttgaaagcagggaggcgctacaggagagaaagggctgaacccccgcttccgcagatttcacctatttttcagtttgcctggagcaggccacgcaaattcccttcccttgaaggcccaaggagcgtctggtagattgctgattctctgcccatcaccgcttctggaagtgagtgaaggacacctttcgtgccccgcaccctttgccccccgcttaacatttgctctagtcacttccggcccgttcccacgctccggaaaccattattccgcttcatcctacctccagtcctcacctgagtccttttctccaaacaccgacttcagtgcttagagatagtaactagggaatctgggaggtggaactgcatcttgggacaagtagtccaaggtagaagaaagcagtggagaactacagttcccagaatgcacttccatttcctacctcttccccaagaggcccccctcgacctccttttaaaaattctcttagccacgttgattgtacgggaaaagcctttttaaaacatcttttacgttgcttaaacctacagtttcgaaagcattccgaaggctaaagtgagaaataagcccaggctagggagaggagaaacgaagttcacgtcctagtctggcaccgggttggattgtcgctgggacggcagtcaggcatttggtgtggtcgcctaaggggtgggtccttcggcgggagctccgggaaaccccgtgggcctgcgcggcgttcttccttttcgatccgccatctgcggtgggtgtctgcacttcggctgctctcgggttagcaccctatggtgccttctcttgtgatccctgacctaacctgtctcttccttttcctcaacctcaggtggagccgccaccaaaatgcagattttcgtgaaaacccttacggggaagaccatcaccctcgaggtacgggccgg

SEQ ID NO: 23452 - DNA, 2300 bp, Homo sapien
cctgggcatggtggcgggtgcctatagttccaactacaggaggctgaggtgggaggaccacctgagtctgagaggtggaggttgcagtgactgcgccactcactccaccctaggtgacagagtcagagcctgtctcaaaaaaagtaaaataaaaaatttccaaaataacattttttttttaaaagaggctgctcttcccctagacagaccttttgaatattgtagtcagacaaagtacgtccatcttccagctgcttgccagcaaagatcagtctctgctgatcaggaggaattcctaatgacaaaaaacaaaaattaagtcacagcacaccaagcctgtgatgtgctccagacttataaggtaacaccccttaatcaaatacatgatactaaaggctgacaataagcccttactagaggttaggcatggttctaaatctttacatgtcacattttaccgcatttaatattagggacaatacttggttgtctgcagtggctgacacctgtaataccaatactttgggaggtcgaggtgggcagatcacttgatgtgaaaagttcaaaaccagcctggccaacaaggtaaaacccagtctctactaaaaatacaataaattagccaggcatggtggtgcacgcctgtaatccccactaatagggaggctgaagcacaaaaatcacttgaacccgggaggcggaggctgcagtaagccgggacaagcgaatgcactccagcctgggcgacagaggagactccatctcacacaaaataaataaataagtgtccaaattcacgcaagtgaaatacacctcaaggattccaatctaggtactgtgctccccgatcaccaatgtctattgtgttattccacaagtatttcgctttgtcaatctgaccccttcccccatcaccaagagcaggtatgtctagcacctacaggtaggccgaagtctccgcaggttaagttttcttaactacaaaatactacttgccttccttatcctggatcttggcctttacattttctatcgtatccgagggttcaacctatgagtgttaaagtgaaagcatgttggttacacattaaggaactacagcagaactcatttagtttgacaattaccactgaaccgaaccagcgacagggctgagacctactcgagagacctattacccacccagtgggcaacctcccaagtcggctaccggaaagcaccttcatctccccagcccagagcgggcggcggccgcagggccacacgtgctcgcacccggcgggcagagcgtctccttccccaccgcagctcctccgttttaactaactagctggaacccctcgagaggagacaggtccagcctttggccaccgaaaatcacctctaggtcgttgctcagcaaaaggtactcatttcaaagcttaagttttagaacccaaattcggaatcatggtctaagacatggaaagcagcgccggtcctaaaatccacctcaggaccttattcggaccttggcttcctcatgaccacccggcccgtacctcgagggtgatggtcttccccgtaagggttttcacgaaaatctgcattttggtggcggctccacctgaggttgaggaaaaggaagagacaggttaggtcagggatcacaagagaaggcaccatagggtgctaacccgagagcagccgaagtgcagacacccaccgcagatggcggatcgaaaaggaagaacgccgcgcaggcccacggggtttcccggagctcccgccgaaggacccaccccttaggcgaccacaccaaatgcctgactgccgtcccagcgacaatccaacccggtgccagactaggacgtgaacttcgtttctcctctccctagcctgggcttatttctcactttagccttcggaatgctttcgaaactgtaggtttaagcaacgtaaaagatgttttaaaaaggcttttcccgtacaatcaacgtggctaagagaatttttaaaaggaggtcgaggggggcctcttggggaagaggtaggaaatggaagtgcattctgggaactgtagttctccactgctttcttctaccttggactacttgtcccaagatgcagttccacctcccagattccctagttactatctctaagcactgaagtcggtgtttggagaaaaggactcaggtgaggactggaggtaggatgaagcggaataatggtttccggagcgtgggaacgggccggaagtgactagagcaaatgttaagcggggggcaaagggtgcggggcacgaaaggtgtccttca

SEQ ID NO: 23453 - DNA, 2300 bp, Homo sapien
ggacattaaagaatgcattacattacaccatgggatacaacttgcaaaattcataatgggagaactatagcagtgcttctcaagtatcagtataggagttacctaaaaatctactgctattcgaatgccattttccctttttgtgtgtcaaaatgtccagaatacaccacatggagtggctcacgtctgtaatcccagcgctgggaggccacggtgggaagatcacttatgcccaggagtttgagaccagcctgggcatggtggcgggtgcctatagttccaactacaggaggctgaggtgggaggaccacctgagtctgagaggtggaggttgcagtgactgcgccactcactccaccctaggtgacagagtcagagcctgtctcaaaaaaagtaaaataaaaaatttccaaaataacattttttttttaaaagaggctgctcttcccctagacagaccttttgaatattgtagtcagacaaagtacgtccatcttccagctgcttgccagcaaagatcagtctctgctgatcaggaggaattcctaatgacaaaaaacaaaaattaagtcacagcacaccaagcctgtgatgtgctccagacttataaggtaacaccccttaatcaaatacatgatactaaaggctgacaataagcccttactagaggttaggcatggttctaaatctttacatgtcacattttaccgcatttaatattagggacaatacttggttgtctgcagtggctgacacctgtaataccaatactttgggaggtcgaggtgggcagatcacttgatgtgaaaagttcaaaaccagcctggccaacaaggtaaaacccagtctctactaaaaatacaataaattagccaggcatggtggtgcacgcctgtaatccccactaatagggaggctgaagcacaaaaatcacttgaacccgggaggcggaggctgcagtaagccgggacaagcgaatgcactccagcctgggcgacagaggagactccatctcacacaaaataaataaataagtgtccaaattcacgcaagtgaaatacacctcaaggattccaatctaggtactgtgctccccgatcaccaatgtctattgtgttattccacaagtatttcgctttgtcaatctgaccccttcccccatcaccaagagcaggtatgtctagcacctacaggtaggccgaagtctccgcaggttaagttttcttaactacaaaatactacttgccttccttatcctggatcttggcctttacattttctatcgtatccgagggttcaacctatgagtgttaaagtgaaagcatgttggttacacattaaggaactacagcagaactcatttagtttgacaattaccactgaaccgaaccagcgacagggctgagacctactcgagagacctattacccacccagtgggcaacctcccaagtcggctaccggaaagcaccttcatctccccagcccagagcgggcggcggccgcagggccacacgtgctcgcacccggcgggcagagcgtctccttccccaccgcagctcctccgttttaactaactagctggaacccctcgagaggagacaggtccagcctttggccaccgaaaatcacctctaggtcgttgctcagcaaaaggtactcatttcaaagcttaagttttagaacccaaattcggaatcatggtctaagacatggaaagcagcgccggtcctaaaatccacctcaggaccttattcggaccttggcttcctcatgaccacccggcccgtacctcgagggtgatggtcttccccgtaagggttttcacgaaaatctgcattttggtggcggctccacctgaggttgaggaaaaggaagagacaggttaggtcagggatcacaagagaaggcaccatagggtgctaacccgagagcagccgaagtgcagacacccaccgcagatggcggatcgaaaaggaagaacgccgcgcaggcccacggggtttcccggagctcccgccgaaggacccaccccttaggcgaccacaccaaatgcctgactgccgtcccagcgacaatccaacccggtgccagactaggacgtgaacttcgtttctcctctccctagcctgggcttatttctcactttagccttcggaatgctttcgaaactgtaggtttaagcaacgtaaaagatgttttaaaaaggcttttcccgtacaatcaacgtggctaagagaatttttaaaaggaggtcgaggggggcctcttggggaagaggtaggaaatggaagtgcattc

SEQ ID NO: 23454 - DNA, 2300 bp, Homo sapien
ctgggactacaggcacccgccaccacacccggctaattttttttaatatatatttagtagagacggggtttcaccgtgttagccagggtggtctcgatctcctgacttcgtgatccacccgcctcggcctcccaaagcgctgggattacaggcgtgagccactgcgcccagcctgagttgatttttaactactgggtttaggccaggcagagccaggcctggttttgggcctggcgccggactgcctgtctttgatttcacttcttttttctctcttaaaacaggtactgagtataaaacaatataaaacaatatgagagggtctctctcttccctcaatggcaagtatgcttttgagtaatgaacttctgtaccataccaattacccaggggagtggtagatcttaaagacaaagattaattgattgattttgttttcttctcaaattccttttaccaaaagacagagataataaaacaatatttatatttgagaggtggtgatggttgtggtcaaaacgaccagctgaaagtcataatgtccaagcaagatgagggaaagctctgggggcaggcagtaataaccataacagcaaacacatactatgaaccaggcactacttatcaacagtttatcaacccattaaaagcttattgcagccgggcgtggtggctcatgcctgtaatcccagcactttgggaggcttaggtgggcagtcacctgaggtcaggagttcgagaccagcttggccaacatggtgaattagtgaggcatggtgatgtgcccctgtaatctcagctacgcgggaggctgaggcgggagaatcacttgaacccaggaagcggagtttggttgcaatgagccgagatcgcgccattgtgctccagcttgggcgacagagtgacactgtctcaaaaaaaacaaaaaacagtctgggagaggtggctaacgcctgtcatcccagcactttgggaggccgatgtgggcggatcatctgaaatagggaattcgagaccagcctgaccaacatggaaaaaccctgtctctacaagaaacacaaaattagccaggagtggtggcacatgcctgtaatcccagctactcgggaggctgaggcaggagaatcgcttgaacccgggaggcagaggttgcggtgagctgagatcgtgccattgcactccggcctgggcaacaagagcgaaactccatctcaaaaacaaatagaaacaaaaacacaacaaaaaccttattacaatcctgtgaactagctactgtcattactataatgtagatgaacaaactgggacatggacagttgacaaaacattcccaaccacacactaggaatgagctgggataggaaaccaggcactctggctctattactcctaatgccatacacacgagctgacttaggagaaaacagaaagtactgttcgcacaatactaactggttctaccgccactgttcgcttgcatttgttttttccttcttgttaggaacacgtatctttgaaggaggtatcatttctcccacaattctccatttaacgtttcctacagtgttaagcaccaccgaggcctctcatagccccagagaagaagtaatttgcttcctagaaatcctcactgtatccagattccctcccagaggagccatcagttctcatgggtggcactttttctccagctgattacactttttttctgtaccagttaatttttccaacttctaattgaataaaggcagttttcttaaaaaaaaaaaaaagagaaagaaaaacggaaaggaaggaagaggaaaggaaggaagaaatgaagaaaggaaggaaggaaagaaaggagagggacagaaagaaaaaaaggaaagagagaaagaaaggaaaggaaagtaagaaatggaagggacctgcagaaacgattcaccacgcgcggctgaccctgggaggagccacaggttgaaccagcgcctcccaggctggacgcccgccgcggacaccgcagacagtcccacccccagcggcgacagcaactctctgaattccggaaagaaccttttccagcgggaccggaagcccggcggggaccgtagcggggacggactgacctaccgaccattcttccgggtccagaaggtgatctccgcccgtgctcagaatccaggggcccggggctgtaggtaggagttaagtgggtaggatcccttaaccagggttgtccggtgcaggtggtgtgtgttgtttcgcctaacgtgtcagtggcacaaatcacgcgaacttcataaacattgtgcgttcgg

SEQ ID NO: 23455 - DNA, 2300 bp, Homo sapien
acattaaccatgctgattcatttgctttcatttgcatcccagccatgaatgacctggtgcagtccatggtcctagcaggacagtggacaggtagtactgagaatttggaggttcctgatgatatttcaacgggtaaaaggagaaaagaattgggagctatggccttctctactacagccatcaacttttcaactgtcaactcttctgcaggcttcagatccaagcagttggttaataataaaggtataggctgtctgctatttgcactgtggtgtaattgttggcaacaagaattttaatttgacttttccctgtgtactttttaaaaagcagcaacctgaaataattatcaaaacatgatctgtattggatttggaggaactttcaaatcattttaaaaatataaaacgttatacaaataactaaaatcttttccaggcctcctttcataataaacagctaatgaattaacaagaaaacgagaagtaaaccaggtaaagagtgataaaagaaggcaatgctagttttctaaaaactaaaagcactacaacttccaacagaactacctagaacaacccaggctcttgttttgctttgcagggtcagaggggagattgtttcattgcttttggtgttttccctaagcaagtcaactctaatgagagttgtcatttttcttattcctagttccagtttctagttgagtctatgaaatatgttaagtcaatctgtattatacatgattgaaaaacaatttccatattctatgtaaataaaattttataatggttttttattacaaaaatatctttatatccattttgctattttatgtagatactacatcctttgaagacataagtccacaaggtgttagtgatgattctagtacgggatcaagagttcatggtaagataatgaaccttatttagagagtacacattaaatacagaatgggaatgctaggactcttgcctttaataggtgaatgcgtcattgccagcaagcatgttttctctatcctgcatctcatagttacctctaccatttcttcaaacctaatactcccttctgcctcttttaagataattgcttcatctaaatgttctctgttttagccaaggtcatttataaagtatgcctgcacagtcttcaaaggtaattttcttaccatttttgtataagattaaagttataagagttgcattttaccattggtttaaaatgccaatttaaaatacatattagtttaaaatattaaaaatatctgttttaaaggatgaactttaagaaaccaatttttgggccagggacagtggctcacgcctgtaatcctagcactttgggaggccacggcatgcggatcacctgaggtcaggagttcgagaccagcctggccaacatggagaaaccccatctctactaaaaatacaaaagttagctgggtgtggtggcaggcacctgtaatcccagctacttgggaggctgaggcaggagaatcgcttgaacccaggaggcggaggttgcagtgagccaagattgtgtcattgcactccagcctgggcgacagagtgagactctgactcaaaaagaaaccagtttttgggcaatgttgagtatttcagatattttccatttctgtctggaaaatcatatctcaccaaactattggcaataagtggataacatgttaaaggaattttaatgtaaacagggttttaagagttagcatagggcagtgttaattatacagttgttacccttgttacagataggaatacaggacattaactgtatagatgcttgtattcctcctcttcttgacatctctgcaatgtgcagagttccttgtctgatctgttgtaggtgacccaatcaatagcattttgggggatctggggggatatgtcattctatttaactaaaacactcctggcatatccatctagaactcattttcaaatctaaatatgcactttatcctcctctttgaatctcaactattgtttcagaagtgtcctattctaaagtgtctcaatgaactatctggaaatttgctttctaatctgggcatgctcatcttgtgaaagtatgcatgattgcttcctcaaagcattctgtaatcagaatgtaaaagctcatcagcatcatcagctagaagttttatcacactgtctcctggttttttcatttagcttcaagaccagccagccttgatagtggcagaacatccactagcaatagcaataataatgcttcactacatgaagtcaaaggtatgctgtaggtaaatttattaa

SEQ ID NO: 23456 - DNA, 2300 bp, Homo sapien
agtaaatgtaaaacctcaaagaaatttcacatttgtggctggacaacttgggctccacctttagtccttttagtcctttctggggtatgtattcctttacttgctttcaaaagaaggcttgttttaggttaagaagctttgcgtatatataaaacttttggcatttgagtctcctgtcccttaagcagaggcattatccaaagctttgttgtcttactattctgacccttggtgactaatacatttccaggtgaaagtgcttgtatctagatagttgacttccaaagattatgatctattctgacttaatgaatttaaattacaaatatccatcttgcatgttagatatttctagctaaatgcctttgttacgtggtcctagcaggatggcagtggacaggtagtattgagattttggaggttcttaatgatatttcaacaagtaaaaggaaaaacgaactgggaactccagccttgttaacaacttttcaaatgtcaactcttctgcaggcctcagatccaagcagttgggtgaataataaatgtaggctgtatgctgtttgtactgtggtataactgttggcaacatctgttcacaaggcatcttctacagaatctctcaagttagttcttcctagtctccaccactgtaattcagccttccctctcaaatagactaccccattagcttcctgaatgttttcttatctccaatcttttttttttttcttttcagtcttgctctgtcagccaggctggagtgcagtagcacaatctcagctcactgcaaactccactcctgagttcaggctattctcctgcctcagccttccaagtagctgggactacaggcaaatgctgcggcatgctgctaatttttgtattttttgtaaaaacagagttttgccacattggccaggctggtctcaaactcctgagctcaagtgatccacctgcctccacctcccaaagcactagaattacaggcctgagccaccacgccctgccttatctccactctttccgatatatcctattccatcattgggttaaagtaccttaaaccaagatttcttaccactttgtaatgaaactttcaatacttctgatttcctactgagcagaatgtaaaacaaaaactctccctcactacttcctctcagcctataacattcaagctaaacataacttagcattttttaacttcctacaactacaccaacatgtaatttagcattcttatctttccttttcagcctatctaataatggcctttttcttcatggggctttatttcgtgatctaagatggatatatttaccttcctgttgtacttgcacagtattttattttggtactgctactaccttggattatatagtcattttatatatatacacacacacaatattatatgttattatattaatttatggatatatcttctctcctatattgtaaacaaagctatttattattcatcttcatatatacctcatgccttcctcattgtaaatgatcactaatgtttctgaagtaaatagtattctttggcattgtggggttttcttagagacaatactttgatgatctttgatgtttctctgtatagtaaatactactgagaatataacaatgagactaggatgcgatgactcatgcattgctggagtcaggaaatggttctctacaagtaaatcaaacctaagtaattctgccgaaaagaaaaatatttgcatgaacatgtgtttgcaggattatttattatatctataattgtaagcaaactaaacaatgttttaattttttgctgatataaattgtaataggtcacctttcttccaaaaaggaaaaaaaaatgtaaatttttaaaaaaggagaaacatggaaaaattcccattgttaactacctgatgaaatcttagttgccaaccatggtatctgtatttttttatgttttggggagacattagatcacagtcaccaaataatttaatattcatagctgtacaaaatatgatgcctgtcctaaaaggtaatttttattttatagtgataagttaaatgaattaagacgtcagaaggagaaactagaagagaaaattatggatcaatacaaattttatgacccatctcctcctagaaggtaccattaaccaaattttatgaattcttattctgaaaaaaaacactaggttatttctaatattgtgatgacttctacttttgtgaaggatttgtatgttgaattttaaactgataacaatttttaaaattctgttaggagaggcaactggatt

SEQ ID NO: 23457 - DNA, 2300 bp, Homo sapien
aaatgatgcccctaattcctattaatctaagtttcccgtctttcttttttttgagtcggagttttgctcttgtcacccaggttggagtgcagtggcacaatctcggctcactgcaacctccgcctccgaggttcaagtgattctcctgcctgagcctcccaagtagctgggattacaggcacgcaccaccatgcctggctaattttgtatttttactggccaggctggtctcgaactcctgaccccaggatccacccaccttgtcctctgaaagtgctggtattacagacatgagccaccgtgcccggcctaactgtcccatctttctaattcatgttattctctctgaatttatttgaaggtacaattattattaagatacttattcttgccatcaaggaatatatagttttggaatcgaatgtataagtaaataaatttaaaagcaacgaaataaatttagtaggccgggcacggtggctcatgcctgtaatcccggcactttgggaggctgaggcaggcggatcacttgaggtcaggagttcaagaccagcctggccatcatggtgaaaccctgtctctactacaaatacaaaaaattagccaggcgtggtggtgcacacctgtaatcccagctactcaggaggccgagaaacaagaatcacttgagcctgagaggcagagattgcagtgagctgagattgcgccactgcactccagcctgggcaacagagtgagactctgtctctaaataaataaagtggtagagttgtaaacagaggtgatcactcttgtcttttctcttttaatacctgtttgatgtcttctgtcttctctttcaatatggttgtttacaggattatgttttcaggcctcttatccattcattctgtatgctgagcattcccatacatcatctcacctgagatccttttttttctctgtttactgtatgtttctatcaggatagaccagaagcaactcagacgtcaccaattcaacatacccaaaatcagacgcagtaaatgatttttaaatgtttgttgactccagccgataccaaagtgaatgagatttgttctctgtattcaatgacattaaaatctgattgagaagaaaatatttacataaaaattaattccagtaaaagaatgtggtgaaactctcatatacatactttaggtttttatttagtgttgtcttcagggtcttcaggtttaagaaatggatcataaatagtggtttatgatacactgaattgtgttcatataccatcctttttgtgaaaaaagtatttattaataattattcatttatctaccattcagaaagataattgcaatactgacagtcacatccatcaccctcttgccactctgtcacgagtatcctgtgccataagtatgtcattttttttactgtaactactctgtaccctgagataaggagtcttcattgccgggcgcggtggctcatgtctgtaatcccagcactttgggaggccgaggtgggtggatcacctgaggtcgggagttcgagaccagcctgatcaacatggtgaaaccccatctctactaaaaatacaaaattagctgggcgtggtggcacatgcctgtaatcccagctactagggaggctgaggcaggagaatcgcttgaacacgggaagcggaggttgcggtgagccgagattatgccattgcactccagcctgggctacaagagcaaaactccatctcaaaacaaaacaaaacaaaacaaaacaaaacaaaacaaaacaaaggagtcttcattaataaaaaggatattttgggactttggtcttccgggttccttgagaattaattattgcttttgataatctaagccataatccggagctctgttcactcaatgattttgttgcttcattaccaggattagttttaaagggagaatggggcagtaagaagaggataatttcatttgcctctttaacaaaaatgcttttataagacccatttatggcatgaatatttgtggtcataaattatctttaaaaataattttctgacctccaataatgaactacattactttgtacttggatagtaggtataaacttttggaatcaaaattagaatccactcttaagaagtctcttgaaataaaagaagaaaaaattgctgctttagaagctcgattagaagaatccacgaattataaccagcaattgcgccaagaacttaaaacagtaagtgattttcttggaaagaattttaaggatcatttattatataaatatttggacagaaaaatata

SEQ ID NO: 23458 - DNA, 2300 bp, Homo sapien
cattggatagctttaaaaatctgacctttcagttagaatccctagaaaaagagaattcccaacttgatgaggaaaacttagaactgcgaaggaatgtagaatctttgaagtgtgcaagcatgaaaatggctcagctacagctagaaaacaaagaactggaaagtgaaaaagagcaacttaagaagggtttggagctcctgaaagcatctttcaagaaaacagaacgcttagaagttagctaccagggtttagatatagaaaatcaaagactgcaaaaaactttagagaacagcaataaaaaaatccagcaattagagagtgaactacaagacttagagatggaaaatcaaacattgcagaaaaacctagaagaactaaaaatatctagcaaaagactagaacagctggaaaaagaaaataaatcattagagcaagagacttctcaactggaaaaggataagaaacaattggagaaggaaaataagagactccgacaacaagcagaaattaaagataccacattagaagaaaataatgtgaagattggaaatttggaaaaagaaaacaaaaccctatccaaagaaattggtatatataaagaatcttgtgtccgtctgaaagaactagaaaaagaaaataaggagcttgtgaaaagagcaactattgatataaaaacgttggttacactacgtgaggtaaatatgtttacctaaattaaggcaaatttttttttatatttttaactcaaggtttctttaagttttattggaatctatcagtaatttgcatcatttattttatggttcagtagaattttggaattagaactagaaatagcttccaagtttcctactttgttaaactaagaaatacctataaattgtatttttaaaagaatttgtagtaataaagtttcctagtggtatctgacttattacattataattttaaacctttatttcaatataataatgtttgatcaagacactaaattctaagtataataaagaagcatgatagctactatttattgagtgctgtgtgccaagtactgggctaaaaacttcatataagttgtatatacataaataatatatacacacacacccaaatatatatacacacatatatacatgcacataatctttacaactaatcctttataagtattatatccattttttagatgagaaaactgaggttcagaaacattaaataaattaggatcacacagctaataaatagcagagttggattactggattcaaatccagatttttcagactccaaagccccatgaattttgacctcaaagccagagaatgcaaatcaggttcaaccattcaacactgagcaactagtatttgcttgaatctatgtatcaagaagaattctgaaacttacaggagtaaattggcagtatgtcctgtgaaacatggttgatgcaagtcagaaggtatatgtttggctctttttttcccatctctaagcattataatatgtgataaccctttaagttcaatttaaaagtatattagcattctggcagaaggtcacattgggcagtctgcatttctgctaaagaagcattgagagggaccttttatttttttcttctgtagacttataaacatgaacaacaagttccttgtgcctaaacttctaagaacatcctctagttcttcagatcagtatcatagggcctctttcactgggagaagggatcttgtgggagagaagtattatagtcaacatatatttataagaagaaatgtgcactaaagttcaggctcattattaaaaagtaaatggatatgattttccccagttttcaaacctaaatgtgtattcacaagtaaagagttactactcccttttaaggttttgtttaaagtattagcaaaaaaaaggaaaaaagttatttcaactaggttataactttaactacattttaataatgaaggaatggtttaatgacatttcctggttcaaattacatgtattcctagatggtggtaattagaatcttagctgactttcttagatgtttatacccttgacacttaggtgagttttgcatttcttttaaaataaggatttggtgagtgaaaagttgaagacccaacagatgaacaatgatctcgaaaaattaactcatgagcttgagaagatagggttaaataaggagcgactcttacatgatgaacaaagtactgatgacaggtgagtactaagtctacttggcaaacagttgaaaatttttttttttttttgctcatacatgaattctttctgtacta

SEQ ID NO: 23459 - DNA, 2300 bp, Homo sapien
gctgtcctctgacctaccaaagagggagaaatgtggtggcaaccacactgtcttggatattaccaaatttgttttcagctctttaatgttcattctcattttatgtttgaggaaactgagaactgcatagattaattgacttatttttgaaatatttatttatttgagacagggtccagctctgtcactcatgctggagtgcagtggcacaatcatagcttactgcaacctcgaacacctaggctcaagcaatcctttcaccttagctgggactacaggcatgcaccaccatgcccagataattttttaatttttttttttattttttggtagagacaaagtatcactatgctccccaggctggtctcaaacccctgagctgaagtgatattcctgcctcagcctcccgaagtgctaggattataggtgccagccaccatgcttgagcattaatttttttagaagttaaattatttgtttatatcatccaggtacagtcctcagaccagccataaaaatgaaggtttctttagagatacagaaccaaaattctagactaagcttcaatcttcatttttccaagcttgttgagattatttaacacactaaattttgagaatcattgtattagatcacgctataaattggatgaattagttcccaaatgtacccagtgatttttgtgattttgatgcttcctacttagaattctttttgggaatgaatacacacacatacaaacccatatatacacatgtaatacagcacatatttactgaggacccactgtaggcattgcaaaggttacttagtaaaagtagaaccttatgttctcaaggaggtatgtgtgtgtgttacctgtattcctatttgaatttgaagcatgtaactgtaaataatctgaagaccattatgattaatagaaaatacatttctcaaccgttcctttaaactgtgaacttcctaaaaacatgaactttaatgacctcacagtaagtgtacacagtggtcttcagtaaatgacctcacagtaagtgtacacagtggtcttcagtaaatacttgtcagaattaaaagtaagacatgttctagcaccctttttttgttccccttttcttggtagtttttggaagagataaaccatagttagtttttcctcaattacagcttttaattattttcttttcaaattagattaagatactggaacaggaaaatgaacatctgaatcaaacagtgtcttccttaaggcagcggtcccagataagtgcagaagcaagagtgaaagacattgaaaaagaaaacaaaattcttcatgaatctatcaaagaaacaagtagcaagctaagcaagattgaatttgaaaaaagacaaattaaaaaagaattggaacattataaagaaaaaggagaacgagctgaagaacttgaaaatgaattgcatcatcttgaaaaagaaaatgaattattacagaaaaaaataactaatttaaaaattacttgtgaaaaaattgaggccttagaacaagaaaattcagagctagaaagagaaaatagaaaattaaaaaaaacattggatagctttaaaaatctgacctttcagttagaatccctagaaaaagagaattcccaacttgatgaggaaaacttagaactgcgaaggaatgtagaatctttgaagtgtgcaagcatgaaaatggctcagctacagctagaaaacaaagaactggaaagtgaaaaagagcaacttaagaagggtttggagctcctgaaagcatctttcaagaaaacagaacgcttagaagttagctaccagggtttagatatagaaaatcaaagactgcaaaaaactttagagaacagcaataaaaaaatccagcaattagagagtgaactacaagacttagagatggaaaatcaaacattgcagaaaaacctagaagaactaaaaatatctagcaaaagactagaacagctggaaaaagaaaataaatcattagagcaagagacttctcaactggaaaaggataagaaacaattggagaaggaaaataagagactccgacaacaagcagaaattaaagataccacattagaagaaaataatgtgaagattggaaatttggaaaaagaaaacaaaaccctatccaaagaaattggtatatataaagaatcttgtgtccgtctgaaagaactagaaaaagaaaataaggagcttgtgaaaagagcaactattgatataaaaacgttggttacactacgtgaggtaaatatgtttacctaaattaaggcaaatttttt

SEQ ID NO: 23460 - DNA, 2300 bp, Homo sapien
gagattgcaccattgcactccagcctgggcaacaagagtgaaactccatctcaaataaataaataaataaataaataaaatttcaaattgtgcaacaaagaataacaagttgataacagaaaataattaaaatataattttaaatttttgtttagaacatgaatttgctttcggatgctcgctctgccagaatgtaccgagatgaattagatgcacttcgagagaaagcagtcagagtcgataagcttgaaagtgaagtcagcagatataaagagagactacatgatattgaattttataaggcaagagttgaggtatgttgcataattaaccattcatgatttttttttctgtgttagaattttaacacatttaaaatgcagttaataaacatgagaaactcttgaaatggtgaacaaacagtaaatacatttgggtatgtttattttatgatagattagcatattgcttttagttagacttttacaaaagggatctatggatattactaattttattgaactctggggttcttcttttattccttttcttagcatcatatatagagcagacctttgaagtccttcccttgtagtcaaaatatttacttctatttcagacttttttccaaaagtgaaagcaaaacatatttcagattgcttcttaactgagatcactaaattaagattaatgaagtctatatatatgcaaacaaatgaaaaaaatattctaacttgatagttacagttcagtgttacatgaagttgagtttgacaggaatttgacaggtcaggctgggcacagtggctcacttctgtaatcccagcactttgggaggccaaggtgggtagatcacctgaggtcaggggttcgagactagcctggccagtgtggcaaaaccccgtctctattaaaaatacaaaaattagctgggcatggtggcgcatgcctgtaagcccagctactcaggaggctgaggcaggagaatcgcttgaaccgaggaggtggaggttgcagtgagtcgagatcgcgccactacagcctgggcgacagagtgagactctgtctcaaacaaaacaaaaaaaaagaatttggcaggtcttgtatcttctttctcagttaatttcctcatctgtaaacaggagattttggtcagtttcagtattaggataagaaggagggagtatacaaaatcaagaaacgaaaacataagagaaagtagttagaacattttagcttaaaggttaccagtaagtagacccaataggactgtagagataaagtacatattaattatttgccagttatttaaagacttgtgtatgcatgacactgttaagggattctcatgaataccactgtcttagtatactttttctagactttagtttagaaaccataggtatataacttagcaagatagaattgtgaacacttgtcttcaaaacatatgcagggacttttaaggatttcctcaaggtgtatttatataaaatatttattaatagagccttggtttatgatttatgtgagttctggtttaagtcttggtattttactgcaaaaacctcaagcccttcacttccaagttatagctccaagtacagagaaatatttaaatctatttcagtcaatacattaagccttgattccatggagaattgtatcttaaatatctggaagactccttgtacttagttaattccttatccttgtgactaaggaagttaaatataccccgacaatttaatgtgaagttatagtagtattatatatcttaagaactgagtgttttgtttgcattctggggtaaaaaggaagccaagaaaacattaattgtatttctattactcagtaggtttcctcatgcatagaactgttgataaagatggcttaatgttttatgataatctgtatgttccataactttaaaaaattaacagatattaacacatttgtgataaacatttataggaattaaaagaagacaatcaagttttattagaaacaaaaaccatgttggaagaccaactagagggaactcgtgctcgttctgataaattacatgaattagaaaaagagaacttacaactgaaagctaaacttcatgatatggaaatggtaagttttaagaggtagatcagttacatggcctttaaggaaaacttctaagattcagctgatttccctgtattggcaaggatggctagtgtccttgaggctttaacagagaagagagagctaaataaattagatgcctccaactttatataaatataaaagtagtagaaatttctgct

SEQ ID NO: 23461 - DNA, 2300 bp, Homo sapien
agccaggcatggtggtgggcgcctgtaatcccagctactcgggacgctgaggcagagaattgcttgcaccagggaggcggaggttgcagtaagccaagatcgcgccactgcactccagcctgggtgacagagcgagactccgtctcaaaaaaaaaattgaatgaagcagaaatttattcttttaagcccatttagctgttacacacatagttatagcatattctctcttgagataacttgcttttaattggaaaactaattcattaaatatccaaactctatatcatttctggaataagtgattttagcaattttcgatgcttattctaacatgatgcatatattgagtatgtacttttctttaaatgcaggcatattttggcaatagttttttaaagagctaatataatactgaggaaaacttttttgaaactttcttgtatatatctataaagaattatagataagagatgaattctaattaacatctggtgtcatgccacccactgaccatgggtaagtgctctagtggatctaaaattagaaatttttaaaaagtggcacaagttaactttttatagttatttttcatggttatttgctttctcatcatagtattaagttaaataaaggattcagaaagagttgaataccttcaaaaacgtattcctcagcaactagttatatctgaacatgtagtcaatttatgaagaatctgtcatagttattccttaatattgcaaagattcagtaattatcacatggcacccatccatcctgtagtctaattcatcccagaccctttgcatatcatcagtgtcagtggttgtaatggcagatacaatgtatttcttcatttcttcaaagaagaggtggtataaacagaaggtgcatacttgatgtattaactaaattgaagaattagaaagaattcagttctttctgaatcaccttgtacgttcagaatctacatgtattcttgtaactaaagttttatagaagttaaacatctgttgtagaggagagaaataatgtttcactgaggaggaactgactttcatgaaatgatcattagacagcatttttaataaagcagttaggtttcttaattttaatatcagttgacattttaaaaatatagctctcttatttattatattaaaaatatggcctggtgtggtggcttatgcctgtaatctcaacactttgggaggccaaggcgggtggatcacttgaggtcaggagttcatgaccagcctggccaacatggtgacaccccatctctactaaaaatacaaaaattagccaggcatcgtggtaggcgcctctagtcccagttacctgggaggctgaggcgggaggattgcttgaacccaggaggcggaggttgcagtgagtcaagatcacaccactgcactacagccaggctgacagagcgagactccatctcaaaaaaaaacccaacatatttatacatacatacatatatatatatatatatatatatatatatatatatatatatagtacagtgacagtacttataaatttgatgtatttttagtttcctcagtgagaactaacaagaagaaaaagagcacacatgctcgaacttttattgaggaatgtttcttaattttgctcgatcttttactgaggaatgtttcttaattttctagcacctaaaacttcagatttccaaataataattagaccattttgacttgaatgctttaatttggggacatctgatatttttaaagcttttttattattatttgtttgtgtgtagagatgaaggtctcactatgttgcccaggctcatcttgagtgatcctcccaccctggctttccaaagtgctaggattacaggcatgagccatcgcacccagcctcatatattattaactgaagtctatctggtattataattttagttatttaattcattgaagttacaaaagatttaagaccttatataactttttccatatttgtttaattgcaatatagcacacctacagaagaatgtacaaatcataagttatagcttgatgaataattatctagttagcattacccatataacaagtgttggatatttttttacaggagactttgcagcaattgatcatgatgtcgttgccaaatgtcttaatcattggcaaaaatcccttttctggtaagtattaaaattaagctgtgaaagtaatgtctaacctttgtgtaatactatgatgtttattttttactaagagcttatatacattaactcactagatttttcacaactgtagacg

SEQ ID NO: 23462 - DNA, 2300 bp, Homo sapien
gctgccatttcatttaaccctattattagccctgctttacacgtgacggaatcgaagcacaaagagactcaataacgtgcgtaggctcacacagctggtgcatattggaaccaggcaggaagacttcagagtccaggttctcaactacccaattaagaaattctgctctttcttaactgtgttatgacaaaaacatttttactgctaatttaaaatatatactccgtgtaaatatttatgtaatgtaaacatagcacacattataaaactataatattatcttttatcaaaaaaagattgcgttctatatgcccattttaccccgggaaaaaggtctttattttcctttgaaatgaggagtagcatttgattttgccagggaacttaaaattatttcaaggtcccagtcgtacgtggcatggagatttatgacaaatatgtaatctgtttatttgtcacccaacttggatgacttctaaatgtttcttctttgtagctcttgattttgcttgggtttcccccgacccatgcccaaatagtaaaaaacaaaacaaaaccaaaaaacaatgtctgagtcatgtttgctccagtcagggaataccaacgtgctgacagacagctctggtttttaaaaaatcttactgtatgtcacttgcaactttgaagaacattcatgcgttagtggactgcatttggaagaaaacaaaaaggagaaaaaaacccccaccaagttgtggctcaagtccctctgccatttgctgcagtgagttttcctattccattttgctggggagaaggcatgctttacagaacacatcaaactgtccgaaaaaggctgtctgcatccctcatgtttataagagaaggatttctttccccttccttcacgtatcaaagaagtcactcggggaggaaataaaccataattaggcatgagcgagcgagcagacagaccccttgctctgccttccctgtccccgcccaccaggcaaccgtcctgggcgcaaccgaggagcgggttgtctccgcagcagctgcagcgagcgcgcgcccacgcccgagcccgcgcccgccgccaggatctgggcggcggcgaggctagcccgggggcgcgctcgctcgggagcgcgctcatgcagcggttttcttctcccacaatccagaggcagctgcacgggaggggcggggagtcggcggaaggatatcggcgcggagggagcagcgcgctccctttgacggcggcccccggcattggcgggcggcgctggcgggcggcgaggggtggggtgtgatgcggcactgcggttctgaggccgttactccggcttctccatagagggcggagaaggctggagcgcggcggtgattttgtgccagggattcccagagacgcgctgaaaggctggcagggcttaggaagctggggggttagggacacacattcaagcccccacccccgggaggggaagggggctggaggcgaggcttgagggcggcggaggaatggtgtctgctcggggggaaggggcgagccctgcctgttggtactgaggggctgcgggcagtggaggctccgcgggtcgaaagcggctccatgcccatcggtgggtggaacgtgtagaggtcggaacgccgaggtcgagtctggtggcgcctcggtatccttaacgtggtctctgtttaacgtatttcatttagcccccgttgggattgattcattgggagcagtttcgctggtctggatcctccaggagctggacaaccttgacgggctttttgtcttgggttccagccccctttcccttcctcctcctccagatgccttttctctgcccctcctcgcccggtacagacatttccagcgcaggctgctgctcgtggtgtccgtcgtcgaagccacttcttgggatttcggctcgtttcactctggggtgttttttgaggagggagagtgcccccctcctccacgatgggatttttctcccttgccgaaatggactttcattgatttctacttacttccacgtttagtgaccaattccctaggcgtatttttgtggtagttccttttttcaaatacatactctgtaaaatggagaacgaaatttttactccccttctggagcagttcatgaccagccctttggtcacttgggtaagtggggtgtcctttattgtatattttgctgagttatttgtggctgcagagatggaggtgggcgttcatgtcgtggtgatccttctgtttgttctaggttaaaacgtttggacctctggccgcaggaaatgggaccaacctt

SEQ ID NO: 23463 - DNA, 2300 bp, Homo sapien
tttgccaaataaagaactgctattaagaaagagttatcaggccaagcgcggtggctctcacctgtaattccagcccttagggaggccgaggcggtggatcacttgaggtcaggagttcgagaccagcctggccaacgtggtgaaaccccgtccctactaaaaatagaaaaattagccagtgggtggtggcgggtgcctgtaatcccagttacttgggaggctgaggcaggataatcgcttggaccctggaggtagaggttgcagtgagctgagatcgtgccactgcactccagcctgggtaatagagactctgtctcagaaaacaaaacaaacaaaaaaagaaggagtcaccaagccaggcgtggtggctcacacgtctcgtctcaactgctagggaggctgaggtgagagggtcacttgaggccaggagtttgaggccaggctgggcaacacagtgagactcccatctctaaaaggctttttaaaaagtcatcaagagcagatggaaaagattgctagcaacaaggatgtctgaaggcttgtgtactggctagggaaatgcaaggttctacttgtacatcacctagcaaagtgccacatgaatgcatcctaattttaattaagatgattttcaaagggcatttagttccctcctcaaagcaagatcctttctcctgtaactgaagcagagaggttatatttcaagtttttcataaaggttctttattttgaaggaataatgttaaaaacaacattaatgacatttatagaacacttaactataagctgccatttcatttaaccctattattagccctgctttacacgtgacggaatcgaagcacaaagagactcaataacgtgcgtaggctcacacagctggtgcatattggaaccaggcaggaagacttcagagtccaggttctcaactacccaattaagaaattctgctctttcttaactgtgttatgacaaaaacatttttactgctaatttaaaatatatactccgtgtaaatatttatgtaatgtaaacatagcacacattataaaactataatattatcttttatcaaaaaaagattgcgttctatatgcccattttaccccgggaaaaaggtctttattttcctttgaaatgaggagtagcatttgattttgccagggaacttaaaattatttcaaggtcccagtcgtacgtggcatggagatttatgacaaatatgtaatctgtttatttgtcacccaacttggatgacttctaaatgtttcttctttgtagctcttgattttgcttgggtttcccccgacccatgcccaaatagtaaaaaacaaaacaaaaccaaaaaacaatgtctgagtcatgtttgctccagtcagggaataccaacgtgctgacagacagctctggtttttaaaaaatcttactgtatgtcacttgcaactttgaagaacattcatgcgttagtggactgcatttggaagaaaacaaaaaggagaaaaaaacccccaccaagttgtggctcaagtccctctgccatttgctgcagtgagttttcctattccattttgctggggagaaggcatgctttacagaacacatcaaactgtccgaaaaaggctgtctgcatccctcatgtttataagagaaggatttctttccccttccttcacgtatcaaagaagtcactcggggaggaaataaaccataattaggcatgagcgagcgagcagacagaccccttgctctgccttccctgtccccgcccaccaggcaaccgtcctgggcgcaaccgaggagcgggttgtctccgcagcagctgcagcgagcgcgcgcccacgcccgagcccgcgcccgccgccaggatctgggcggcggcgaggctagcccgggggcgcgctcgctcgggagcgcgctcatgcagcggttttcttctcccacaatccagaggcagctgcacgggaggggcggggagtcggcggaaggatatcggcgcggagggagcagcgcgctccctttgacggcggcccccggcattggcgggcggcgctggcgggcggcgaggggtggggtgtgatgcggcactgcggttctgaggccgttactccggcttctccatagagggcggagaaggctggagcgcggcggtgattttgtgccagggattcccagagacgcgctgaaaggctggcagggcttaggaagctggggggttagggacacacattcaagcccccacccccgggaggggaagggggctggaggcgaggcttgagggcggcggaggaatggtgtctgct

SEQ ID NO: 23464 - DNA, 2300 bp, Homo sapien
gagaaaaaaaaagggctgtggggggggctatcattttaacctagtagattggcaaagactattttttaaaaatatttaaaatagggagcccgaggcgggcagatcacgagctcaggagatcgagaccatcctggctactaacatggtgaaaccccgtctgtaccgaaaatacaaaaaattacccgggcgtggtggcgggcgcctgtggtcccgcctactcgggaggctgaggcaggagaatggtgcgaacccgggaggcggagcttgcagtgacccgagattgcgccactgcactccagcctgggcgacagagcgagactccgtctcaaaaaaaaaaataataataataattaaaataattagttcagtaattttcccatgagaatttgttcgagggaaataatgagactagggttcaaaaacatatgtgcaagtatattcattacacaattgtttacgggtttaaaaaattcaagtaatttaatgtagcagttgaggtttggtcaaattaaccaagatatatattctttcatttagcaattctgctggaatctatcccttggaatagtaaataaaaccaacagttctcaggatgcaacatttataacagcagtttgtggaagcaaaaaatggcaaatccacagcacggaggaggaaaaagaaaaaaattgcacatggccaggcacggtgcctcacgcctgtaatcctaactctttgggaggccgaggcaggcggaacacctgaggtcaggagttcgaggccagcctggccaacatggcgaaaccctgtccctactaaaactacaaaaattagctgggtgtggtggcacatgcctgtaatcccagctactctggaggctgaggcacaggagaatctcttgaacccagaaggctaaggttgcagtgagctgaggtcacgccactgcactccagcctgggcgacagagcgagactctgtctaaaaaaaaaaaaaaaaaaaaggcacataatgatcatcttcatgcattcaggtaagatactgtgtgcacattcacaaaataaaaatagactaaaggatggtttatggaatactatgcagttgcaaagaaagcacaaatttatatttttaaaagataaagatataagaaaaaaattcataactgtacatataatcctatttatgtaaaaaatatatatatatatatggttgtctgaagatattttgggactccaaacaccttcacaatgaccactgaagaccccattccacaatggactccacctaaatgctgagttggagttataataagatttggttaccaaggcatttatttaagtgagtattaactttgctcttgcccttgaaaagctcctaattctagttatctttatccaagcgtaagagattaaagacccgcctgaagatacagatgcaaactgaccgtaagacaatcagcgagtctcacacagctcggctttgtattttcagacaaccctttaattacaaacgcctctgggccaatggtctgaaaatggttgggactgaggtgctggggatacaatgatgaactgcagccgctgaagccctgtcaggtggagacccggttacctcagaccctcactgagccttttcttttttcttttctttcttcctgtttttcttttgagacgcagtctcccaggctgcagtgcagtggctcactgcaacctcggcttcccgggttcaagcgattctcctgcctcagcctcccgagtacctgggattacaggcggcgccaccacgccaggctaatttttgtatttttggtagagacgaggtttcaccatgttggccaagctggtctcgacctcctgacctcaggtgatccgcaagcctcggcctcccaaagtgctggaattacaggcgtgagccaccgcgcccgtctactgcgcgttttctaaaccttggctcctacgcatttatcagaagagagagcgcaatctgtctatgacttccagccaatagctacacttcttttctcagccctcgtccactgttcttttttaaccaatcagaaacgtttttcaaacgtttgccctccccgctaagtgcgcaggctcctggaaagttgtcttcacttccgggccgcggtctagggcggctacgtgtgttgccatagcgaccattttgcattaactggttggtagcttctatcctgggggctgagcgactgcgggccagctcttcccctactccctctcggctccttgtggcccaaaggcctaaccggggtccggcggtctggcctagggatcttccccgttgcccctttggggcgggat

SEQ ID NO: 23465 - DNA, 2300 bp, Homo sapien
aatctcaaataaaatagttgtactagatgatgtcatttttttaaaaattccgtaagcctgtgattttataatttccttacagcttaatatttccttgtctagccaagcgtggtggctcacacctgtaatctcagcactttgggaggccgaggcaggaggattggttgagcccaggagttagagaccagcctgggcaacatagtgagacctcgtctctacaaaaaatatactgggcatggtggtatatccctgtggtcccagctactagggaggctgaggtggcaggatcacttgagtctgggaggttgaggctgcattgagccgaaattgcaccagtgccctccagcctgggtgacatagtgataccctgtctcaaacaacaagaaaatatttctttgtctaaagcacttataatatgggtggtgcatgattgtccatgtgagcccttgacataaattaaaatttgatgttcaggatgcagttcaaaatcatttcatgaatgtatcaaccaaagcctcagggaaagaaaaaatgcaagtttattcagtaggtccctctctatggacatcgtgagttgatattttaaaagttgtaaataggccgggcgtggtggctcacgcctgtaatcccagcactttgggaggccgaggtgggcggatcatgaggtcaggagatcgagaccatcctggctaacacggtgaaaccccatctctactgaaaacacaaaaaaaaattagccgggcgttgtggcgggcgcctgtagtcccagctacttgggaggctgaggcaggagaatggcgtgaacccgggaggcggagcttgcagtgagccgagatcgcaccactgcactccagtctgggctacagagtgagactccgtctcaaaaaaaaaaaaaaaaaaaagaagttgtatatgaaattatattaaatcatgtttaagaatcaggctgggcgcagtggcttacgcctgtaatgccagcactttgggtggctgaagcgggtggatcacgaggtcaggagatcgagaccatcctggctaacacggtgaaacctcatctctactaaaaatacaaaaaaattagctgggcatggtggcgggtgcctgtagtcccatctactcgggaggctaaggcaggagaatgtcgtgaacccaggagatggagcttactgtgagccaagatcgcgccactgcactccagcctgggcgacagagcaagactctgtatcaaaaaaaaaaaaaagaatcttgatgtaatattttttacttgatattcaaacagccaaaaatatccttttcttaaaatgtcttttctaaaagcgtataatttttcttgagaaatttgcactgagccactttaggcaaaaagttttaagtattttttaacaatgggcccttttatagatttattaatattaataatatagcatttattacagaaacattaccaagaactcctcagtgccatcaaggtattattatcatgttcatatatttttattgcctttctttctgtatttcatattttatgcaaatataagtcttagttatctagtaggtaaaactgataatatgcttctggagagtctgcctaatgaaaaagtaaaaatctacagccttttaaatggatatgaaaatggaggaaataggccaggtgcaggggcttacacttgtaatcccagcactttgggaggctcaggtgagagcatcgcttgagtccaggagtttgagaccagtccagacaacatagtgaggccccatctctacaaaaacttgaaaaaaaaaattagctagcatggtggcgtacatctgtagttccagctactctggcagctgaggtgggaggatcagttgagcctgggaggtggaagctgcaatgtgccatgatcacaccaccacactccaaactgggtgacagagtgagactttgtctcaaaaaaaaaaaaaaaaaaaaggaggaaatacagtttagattttgttataacatataggatgtaagctttatttattctttatttagatatattcaatatttattttcatgagattactttcttttgtagataattatcaaacagcacagctacttgccttaattttagagttactcacattttgtgtggaacatcacacatatcacataaaaaactatattatgaacaaggacttgctaagaagagtcttggtcttgatgaattcaaagcacacttttctggccttgtgtaagtataaaatgttttaaggagcaacatttttaatagagataaaactgaagttacccatttgaagttatttattagcag

SEQ ID NO: 23466 - DNA, 2300 bp, Homo sapien
gagtgggtaccctggtgttttaaccagcactgaccagagtagctctatttatttcttttttttatatatggaggttcttactgaatttttgtttgtagaagggtttctggtttttttaaaaaaaggtttgaaaacttttgtggatgatgagagaaactgaaggatttcttttttttttttttttttttgagacggagtctcgcactgttgccaggctggagtgcaatggcttgatctcggctcactgcagcctctgcctccccggttcaagcgattcttttgcctcagcctactgagtagctgggactataggcacgcgccaccacgcccagctaatttttgtatttttagtagagacggggtttcaccatgttggccaggatggtcttcatctcttgaccttgtgatctgcctaccttggcctcccaaagtgttgggattacaggtgtgagccttcgcacctggccagaactgaaggattttagacaaaggagtgacttgagagaattttagactaactctggtagcaaatttctcccaaaaagcatagccaggaagaaggtagaacacagatttctagctatttttacctgattacacagaaaataagaagtattaatctgaggcctggattaattaaataatatttttcatttactgtttaaagccaaaaagtactgaaatgttcccattttcaacactttgtcttggatctggggatgatttttagttttgtattcatgtcaggtcatgatatttataagtactacttaaatgaacaagttattacatataaggtgttttgtagattatatttttggtagcgtataaacttagtttgtatttttttgaaaatcaaagttttagccacgttaaactttcattattatatatccttaaaagattgttcattttagtattgcatagtgtttttagtgtttaaaaatgtgtgtgtaggctgggtgcagtggctcacacctgtaatcccagcactttgggaggtcgaggcaggcggatcgcttgagcccaggagttggagttccagaccaacctgggcaaaatggtgaaaccctgtctctacgaaaaattagtgtggcgtggtgtgtgcacctgtagtcccagctacttgggaggctgaggtgggaggattgctggggcctaggaggtcgaggctgcagtgagtcgtgattgtacccctacactctagtctggtcacagagcaagaccctgtctcaaggaggaaacaacaaaatatatatatgtatatttgtgtgtatgtgtgtgtgtgtgtgtgtgtctatgttttattttaaatccaaaccttggtttctaatacaaggggtgacaaccttttcctaaaaatgtaactaaccctttggtaggcatataattgaagacattctaggagactgcttacctaaaccttgggctaatttttctacaccctaagctaaggtactgaactgggtgctgttggtagcacttgtaaataagagcaaatagctttgtttcaccatggtgttacatttcttaagatcctgaagtcttttccagatatataaaaaaaaaaggcaaaaatagagttaagccttaacctattttcaggtattagcttattttaaccagctcaaagggaaggataaatacataggtggttagtgaatgggacagctgattttctggaagcaacagaaagtagatggttggaatgtctttgttatagttttggccaagaatggctagcctttttataaatattatttgagtaacatgagtcagagcctactagcctgttttaatattttttgttttaaaaaattgctcagtcatttttagtatcaaagctactattgtattgccaatatattactaataatgccaatcagatatacattgattactcatatcggggcatttgtcattgctgtgttgtttccagtcctcttgatttctatttgtactttgtagatacctcttttctagtgtgatgatatggaaatatttatttttaaacaggatacattaattgtttggtcagaagcagagaactatgatttggctctgagttttcaggagaaagctggctgtgatgagatctgggaaaaaatttgtcaggtaagtttctttttataatatttaacttaatgtttgcttcttttctggaatttttgtttcctttttacttcaaacatattaggatgtggcgagatagtgtcttaatgtgagacttgataatctaacttgaaattttttatattctacggcaaattattttactttaagttttttaaaaacaactt

SEQ ID NO: 23467 - DNA, 2300 bp, Homo sapien
ctgggcgtggtggcggacacctataatcccagctactcaggaggatgaggcaggagaatcgttagaatccgggagacggaggttgcagtgagccgagatgacacctctgcactccagcctggactgtgtatggaaaaaaagaaagaaaaaaaaagtgggggacaggggttcagatatggtggctcacacttgtaatcccagcactttgggaggtcaaagcaggcagatcccttaagctcaggagtgtgagaccagcctgggcaccaacatgtagagaccctgtctccacaaaaaataaaaaggaaggaaaagaatagtattccattacagtcatgtgtcccttaacaatggggatgctttctgaaaaatgcatcatcaggtgattttttgttgtgtgaacatcatagagtgtacctaaacaaacctagatggtagcctactacagaggtccccaacctttttgacaccagggactggttttgtggaagacaatttttccatggaaagggggagttggattctcataaggagtgcacaggttagatcccttgcatgtgcagtttacaatagggttctcactcctaccagaatgtaatgcccctgctcatctgacagggggcagagctcaggccgaaatgctggctcccctgccactcaccttctgctgtgccgcccagttcctaacaggccctggaccactactggaccactacatacatatctacatataattacctgtatatgcatagaatatctctggaataggactagatacatactttgtgggcccagtgcaaaataaaaccgcagggcccttgtccagaaactttcctgaatttcaagttagtgacagcaaaacattaaaccaagtgcctatctgtacaggtcaccaccatgaagccagccctgctctggcaacatacacaggaaaatggaatagaggtgattccaagaggaaaattctatgagtggcaggagacaaagactaaaagaagacttagttttcactatatatctttgcctttttttttttttttttttttgagacagtctgtcacactgtcccccaggctggagtgcagtggtgcaatcttggctcactgcaacctctgcctcccaggttgaagcgattctcctacctcggcctcccaagtagctgggattacaggcccccaccaccacgcccagctgatttttgtatttttagcagagacagggtttcaccacgttggcctggctggtctggatctcctgacctcgggcaatctgcccacctcgccctcccaaagtgctgggattacaggcgtgagccaccatgcccggcctctctttttaatttcatatgtgtaaaggcattacttattcaaaacaacaaaaaaggaagattgtgggcttatttggttagcaactctttgaagtggaactttgatgactgcctgaagcaaagaacatctgctggggaagatgtggttatggggggccctcagacttggataagcactgagccctgtgctttggaggggtctgaaatccatggaatcatgggactgtagccacctgcagcccactttcccttttccagaccatgctgtgggcactctagtattccctatcccaaacgccaagcctgactccagggtctgcacaatcctcttcccaagttcagtcttcctggggagtaaccaaagggtgaggcttggacagaaggctggagagtctaacatcaggctcaaaaattgtgtgaagcattctctgactcttccaagacagaaatgttattttctctgaggtcaaaatacattttgtccactttcatcacatcaattaattggctctattgttatgtattatattatgatgattttcttcaagtacattttctgaggtctctagattaaaaaaaaaaactatgaatccagattttgaaattatttctatcagcatgtgttctgtacactgacccacgttgtagtgtactgctgaagggtgtccacacttaagcgatctggtcaaaacataagcacgttttaacaagaccattgattagttatgactacaactcccaagatgcactgcagggtcagtgtgcgcgtctcgcctagttttcaccgatcaggctaatgagctgcacagaagtggcagctgaacaagctgagagactgtattaaagaacgaatatagcggggatggggagcaggcgtctacggtcccagctactcgggaggctgaggtgagaggatcgcttgagccctcaaggcggaggctacagtgagtcgagatagcgccattgcactctagcc

SEQ ID NO: 23468 - DNA, 2300 bp, Homo sapien
ctcaggttgatttgagtgacttaacagtatcagcaggaacttgatttccttctacctctcaattttctttctgatgtcagattcatcctaaggcttactccttttgtatcataaaatggtggccaggatctcccaaggttatgtagttctttgtccatatcaaaagagagtttctttcacatatttcacagtttcaatgtgattaaattaatttaggtcacatgtccgcccctaaacctagagttttgtggtctagagaatgtcaagcactgattggccagggcaaatcaaggcctatccttggaactggaagttacgttaatcccacctaaatcccatgaatgttactctatgaggtatcggtaaaatcgatgctaggaatacaatcagaatccattatatcctattacacgcttatagcaccatgcacccctccattgtagcacctgtcatacttgtagctttatatttatttgtatgatttctgattaataactgtcttctcatccagatgaaaaacctctattagtccagggaactgcattttttctcaccattgtatctctagtctagcacagggtgtcaaacatagcaggttctcaataactattgaaagaatgaaacttcccttagaagtttactactcaatttgacattccctttagcaggcaatttaatagctaccatatcagacttatattacatatttgaaagtcccagactgagatctctaatttctatctccaggcagtcagttcttgacacaccactgagtaagattcatggaataaatctgaccatattatattcccttgacatctttcaagttcctgatttcttttaggataaagttctttatgatgccattcaaagctcttcatggtttggcccctatctggctttctattctcaagagcaaaactatagacttctggccttcttcagggtgatctttctctttcaatcatagtccctccccaaccactcaccaaatatcagtttttagaagtcttgtctcttgcagggagtagagagggggcagtaatagtttattcagggattcccccatatctttcctgggtaaaggtattctagaaggaggcagaggaaggaggctagaggtcccactgtttggcattcaggctttcacttaatgctcactttagccctgcttcacagtcccctactacctactgtgactaatattctcaagtcaagagtctctcccattctagaaaataaatcaggctcctgggatgtggtgatggtgttataggggcatgtgtgggtatgagtgtgtgtgtatgtgtgtatgtgtgtggggtggcagtcctttggttatatgggattggggaatagacccaggaatgtaggtgttctttatataggctttcacccttccctaaaattttctgccctgatcctttctaatttttttgtggaaagaattagctcttttaatttatttattttattttattttatttcattttattttatttttttgagatggaatcttgctctgttgcccaggctggagtgcagtggtgtgatcttggctcactgtaacctctgcctcccaggttcaagcgattctcctgtctcagcctactgactagctgggactacaggcatgtaccaccatgccaggttaattttttgtatttttagtagagacgggctttcaccatgttagccaggatggtctccatctcctgacctcgtgatctgcctgcctcagcctcccaaagtgctgggattacagacgtgagcgactgcgcccggcatctttttatatttttaaaaggtcacatgtatgtcctttcctgtgaactgtttatattctttgccaaagtgctgggattacagacatgagccactgcacctggccttacctcttctttttttctttaatcacctgtggaggcttttagattgtgccttttgctgtcaagtctactactactcttccatcggcttgtcatacaaccatttgttgaaatttcttttgtattttgtttgccttttgggctctacactttttaaaaatttatttagctgtcaaagagatgacatactgtgtatggttaattttccatgtattctggagttctaatatattttcatggtttttaaatgtttagttctttaatcaagttggaatttttaaaatatatatgaagtaggatgctaatttaaaacttttcctccaaatggatatccatccagttgtctcaacatcatgtatagaaaaaacaaattgaaaatgctatcttatcatattatttactaaatttaca

SEQ ID NO: 23469 - DNA, 2300 bp, Homo sapien
ttacaataggtattttaatatttagggtaaaggacagctttctaaaaaaataaacagatctttgtgacttgatgggatataggaaatgaggaaagaaatgttgattctggcatgagtgtcttagttgctttcaaccaaagaatgcaggaggaaaaggattttttgacagtgattcaattttgaacatatatgtatttctttcatcatcatcattattattatttatagagatgaggtctcaatatattgcccaggctggtctcaaattcctgagttcaagtgatcctcccatcttggcctgccaaagcgttgggattacaagcatgagccactgggcctggctcaattttgaatatatatttaaggtgctttggggacatttagctggagatgtctgacagggagtttactaatacaggtccagggtttggcacagatagctggacaggagggatagatttttaagtcatcaacattatagatggtggttaaaatcgtaagtatagatgaggttgcttagagaaaatgaaatgagatccacactcctttataccaaagtaaattccaagtgatcaaaacttaaacatttttaaacaaatgaaagatggtaggttttatcaaaatcttggagaagaaaagctctgctaagcaaaacccagaaaccatgattacgtaaactaaaaatcctacacagaaaactaatgaccataagcaaagtcaacgaactaggaaataaaatattttatttatatgttattaaacataatattttatctttacattttaataaagctctgtccatattgaaagaaaatcagtaataaaaagactgccaaccaagtagaaaagtgttgaaggccatgaacagggagttctcaaaataagacatataaataggtttatgaacatgaaatagttttcaacctcagtcataaaaaacaagtcagatttaaaataaccattttttacactttaaattgagaaaaatcaaaagatttgacaagaattaataagaatatagagtagcatataccttcttacaccactggtaaaagtttaaaatgctatgtctttagaaggcagtttgacagtctaacaaacgtaaatgcacataccttttgactcagcaatcgcacttctgtgtgtgacttgtaaaacatacagggagtactaaaactattcaaaggaataaagtagagctttgtgtggtggtatgtgtcaatatccaagacatgttattaagtgaaaaaggcaaggtgcagaacagtaaatgcatacagtctgccgccacgagtaaagaaaacaaaagattatatttacatttatacttgtgcacagaaattttctaggaggatacactaatgttagctgccatggggaggtaaactgaggagttcaggctggaagaatttaccaaatagatgcttactttccaacaaaaagaaaataagacacctgaagcaaaaaagcaaaccaacggataatttaaaagttataaagtttgctattgttagagaagtttttgctggatatagtacttgtttacattgttttagggaactttattatatgttcaaaaacaaacgaagtagtcagatgacctcttaagacttccaactcagcttcggtgattgtcaatttaggcaacaatatccacttacattaaaagtaaatgtctgctgggcgcggtggctcacgcttgtaatcccagcgctttgggaggctgaggctggcagatcacctgaggtcaggagttcaagaccaacagggccaacatggttgaaaccccatctccactaaaaatacaagcaaattagctaggcgtgttggcgggtgcctataatcccagctataggggaggctgaggtgggaggattgcttgaacccaggaagcagaggctacagtgagccaagatcatgccactgcactccagtctgggcaacagaccgagactccctctcaaaaaaaaaaaaaaattgatagataaatatttgttttaggctcatgtacacattacccacagttgttctttttcccaattataggggttccaatttcatctgctgttgcaggcgtagcaataggattggtcaccaaaaccgatcctgagaagggtgaaatagaagattatcgtttgctgacagatattttggcaagtatattctcggtttcaaatatttaataatgaagactaaaaataaataaataaaaattaaaagataaaaacaaataatggtgaagactatatgtactttgcacctagcgtatgcttagaagaatgctagtatttgaagaacag

SEQ ID NO: 23470 - DNA, 2300 bp, Homo sapien
tcaggaaatttaacattgccagccacctcaaaagcccctccatgttcttcatcccaatctcaatacccgtcgtctcttaaaagtaggtaactactctcctaagttttacagtaatcatcttggatttcctggctccatttttagatactatagtttagttttgtttttttctttaaaacatttggtatttccttttttgttttagtttatttgagacagagtctcactctgtcactcaggctggagtgcagtggcaccatcttggctcactgcaacctccatctcccaggcttaagtgatcctcctgcctcagtcccccaagtagctgggactacaggcaccaccacaccccgctaatttttagattttttacaaaatggggttttgccatgttgtccaggctggtctcaaactcctgggctcaagcagtctgcctgcctcagcctcccaaagtgctgggattacagacataagccactatgcccggcctgatatttctttaagtctttttaaatctatacatttctcctccattacattctttttttttttttttttttttttttttttttttttttttttttttttgcagtctatctattgaagccccatagccatttgacttatagtctcccacagtctgggtgttgctgattgtacactcatggtgcaattcaacatgttcctcccccctctctatttcctgcaaattgaccgctagatccagaggtttaatcagattcctgctccatccactgcatttaagagcggtggctcatgcctgtaatcccagcactttgggaggccgaggcgggcggatcacctgaggtcaggagttcaagaccagcctgaccaacatggtgaaactctgtcctactaaaagtacaaaattagctgggcatggtggtgcatgcctgtaatcccagctacttgggaggctgaggcaggagaatcgcttgaacccagaagcagaggttgcagtgagccgagattgcaccattgcacgccagcctgggcaacaagagcagaactctgtcttaaaaaaaaagaaaaaacaaaaaaaaaattcttgttaatctggaattacagatatttgggggaattttttttttctgttttaaaaaaagggtctctgttccacaggctgaagtgcagtggtgcagtctcggcttactgcaacctccacctcctgggttcaagcaattcttgtgcctcagcctcatgagtagctgggattacaggcatgcgccaccacgccctgctgatttttctatttttagtagatacagggtctcaccatgttggccaggctagtttcaaactcctgagctcaagtgagctgcctgccttggcctcccaaagtgctgggattacaggcatgagccactgcgcccggcctgaaattacagatttttatgggaagtcttcctattgtcaaatgatcacaactaattcatattccttcaaggtaacatatccaccaaataaaacagtttgcaaccactggctaaaataaaacccttatggaaaagagctgtttcctccatacatttttgtcattgtgttttgcttgagaaatacttcaaaatatgcaactttcccattcatgtattttgtttcatatctgaaaaagttagtggagagagataactctaaaaagtatcagtgtaaattaaatttcaatttagtgaaataaatgtgggctttgctatggaaaaaaatctgtgattcttcaatgtgtactttttaaatatgtacatatttttacttattacaaaaatataacgttattgttaataatttaaatgtaatggaaatttatggtgtaaatccccatacccatccagttcccacatcctaatccatgtacacacttgaaatagctacttttaaccatttggtatgtatgttaaatttatatcatacgttttctgtatatttatgaatgtacttttttaaaaaacaaaaatgagattctactgttctataagttgttttattattttggtaatataacttggacatctttctatgtcaattgtatatgtgtgtttgtgtttttttttttttaagtttcctccttatgcaactaatgaaattggcaaagtcactggtttaaatagaagagaacttgggcatggtaagtacaggtctgtaaacttaatacggtattcttacagagacttaatacattttttacttattgttttctattctaatttaggtgctcttgctgagaaagctttgtatcctgttattccccgagattttcctttcaccataagagttacatctgaagt

SEQ ID NO: 23471 - DNA, 2300 bp, Homo sapien
aatctcctgacctcatgatccacccgcctcggcctcccaaagtgctaggattacaggcgtgagccaccgcgcccggccgacacttttaatccttacaaaaaccctattagattcatattactatctgtttttatggggaaactgaggctcagagagctagagtcacacaactggtaattaacagagacaagattggaaccagctgggactaactccaagtctatgctctaaactattaggcaatactgcccaaatgaaaatgattacatagtaattaagtatattaacaaaaagatgattttgtattcttactctataaatcaaaagtcatgttcaattgtggcaagtaggttttctgagagatttatcttcatgagagatttcaatagattggtctggaaaactctgtggcaactcaaggtaaagtaaaagggaggagacgcaaaaactgctttaacactaaaaatctgtaaacaaagttaatggtaatccctctattggaatggaaatcccaaatcagtaataatagctcatgaaagcaaggtgtcagaaaactgctttgccagcaaatcatttgtctgtttagagctcatcattcttttttcttttttaaatcatcacggatcaacatttttaattttttttttttttttttttttttttagatggagtctcggtctggagtgcagtggcgcgatctcggctcactgcaacctccgcctcctggattcaagcgattctcatgcctcagcctctggagtagctgggattacaggcacgcgccaccacaccgagctaatttttgtatttttagtagagacgcggtttcagcatgttggccaggatgccctgggtctcttgacctcgtgatccacccgcctctgcctcccagcgtgctgggattacaggcatgagccactgcgcccggactttttttttttttttttttttttttttttttgagaccgagtttcactcttgttgcaatgacgcgatctcggctcactgcaacctccgcctcccgggttcaagcgattcccctgcctcagcctcccgagtagctgggattacaggcataagccaccatgcccggctagttttgtatttttagtagagacggggtttctctgtgttggtcaggctggtctcgaactcaggtgatccgcccgcctcggcctcccaaagtgctgggattacaggcgtgagccacagcgtccagccaacgtttttaattcttaaaactgtgtttgaatgagtgttgggtttttgttgtttggttttctttggggtaaggcggttatcaccttacacaaaaaatttacatcataatatgaaaatgcccattggttcattcaaggaaaaacataaagaatttctaacagaatggattaatggggtggaagaaatttatccattctctaaaaatttttcaaatcccaaaaacttttttttttcattttacaaaatatttacttcaaacagtagctggcattttgcatttaagagttcgaccaaaagggacagaaatataaattgctaattattagcaatggaaatgaaaatgaatcagaagtgacaataaagatttctaaaattacaagtcgatgaaaaatgaatttactgtaaattggttaacacaaatcgctgtagtaacatatctgctatgtgaaatttttaaaataaaaaccagggcggagaaggggagaaggagatctctttccaaggcccaccacccaaattctaattcttagttcacagatccaaataataataatgtgttgttctatgacttctagtattaaaagtaaatataaatttactctgcatattaaacatttacattattctaggacttctcctttaaattacgatagtacacacacaaaaaccttatttatctaattgcctttcgttggcacataaagacaaagatcgtttgcaacataatcgcgttctgataggtttgaccctctctagtcttcgtagaaggtggccaaggtttccgttaccccggcgtccctcgggcaccgcggaaacgaaactccatcaggctccgccccacggtctgcggagtgagccaatcagggcacagcctgcgttgaccgcgtgccgggtgtcatggcggcctgcaggtactgctgctcgtgcctccggctccggcccctgagcgatggtcctttccttctgccacggcgggatcgggcactcacccagttgcaagtgcgagcactatggagtagcgcagggtctcgagctgtggccgtggacttaggcaacaggtaaggagtgacgtgcgttca

SEQ ID NO: 23472 - DNA, 2300 bp, Homo sapien
gcagtttctagaaccctctggtctctgagggagatgctgtgttcccctcctcagagaagaagaaaacgcactagagagtgggagcatccccaaggctgaagcgcatccaggacatcacatgtcaacgtgtcctctctggcgtggggtccccgcgagtctgggaaacgaggagctggcaagggagggcaagcgggggcggcaaagagggcccctggagcagggggcgcggacctcgctgcgctgcgcgctctaccgccgggctcgcaacgctgggctcagcgctcgcgcctccctcagctctctcctccgccccccttcgccctccccctttccctccctttctcctcctcctcctgccgccgcggccgctgccggacttcgccagatcagacccacggggctgccctcccctgcgcactcccctcgctgcccgggcccggagcgcagcgcggccgcacaggtaggagcccccaacggggggtcgccccgagcgagcccagtactcactgggccgcgcgcgggagagtgaggtggggtgagctgaggggtgttgagtacccgagaactgccctggactgtgcagggtgtctcgggcagagagggaggtggaggtgtgcagcctcggaatgcgatctgtcagcaagtgcgagtactcgggtgacatctgttgggatgggcatgtgtgtgcgcgccgacaaccagccggcagggctttgcccataaacgtggttttgaaagtttaggggaccagtgtgcgagatttaagccgcacctggattccataggagctggttagaagctgggacgctgagcagctccaggggaccgccgcgttagcttgctgttaagaaaggggacctcatctccctgccgggccaggccgcccgcccgaaactggtaccttgggctgcggtgcgatccctggttccggtcctaggcagcctgaaaccgaaggtagcgtgtcggggacccagactgataagacaaaagagaatcagtcgctttgggctgcccctccacacaacctgggacttttaaacaaagctgtgcgcagagaaaggcgtggaaatgccactttgagagtttgtgctgggggatgtgagaagctctgagacatgtgagaaggtctagtattctactagaactggaagattgctctccgagttttgttttgttattttgtttaaaaaataaaaagcttgaggccaaggcaattcatattggctcacaggtatttttgctgtgctgtgcaaggaactctgctagctcaaggtgagtatactgggaaagccttaacgttctagagaacagagttttgcagccccacctccatcccccggggtgtgggactggggggcaggaaatgcaccgtcccctttgaaatggattactgttttttcctttcgaccccctctttctgcagcctgctttgtaggtgcagtataaaatgcacgctgaatgtcttttgtatgtaaacagcgtagcaggatggagtaacgtgaaatgcaattctacagcagtttttacgtctttgctgcctcgttcgttggctaccgagaaggttcaggagggggaggggagatgagaaagcagattggaagttgagtatggtggagcctcagcctctcccaccctcctttcctcgcttgtgctcactgctaaagttttgttactttccccgcagcagatactaaacattagtttgtcctgtattttctttgagattcacaatgttgaaagcccttttcctaactatgctgactctggcgctggtcaagtcacaggacaccgaagaaaccatcacgtacacggtaaggggtgatggaatttgaaataagtacggttcagcgggattctgtgacaaaaaaagactttacacacccctgccagtgtatttgggctatactctgctgagggtgataaattaaacaacacttcattcatgcttcatatctaagattcgttgtaaattgcccccttgatcctttcaaaagttcattgggctcaccacctaagataggaaccaacatgtaatcatttgtgcagggctaaaaatgggatccgttcaaaaactaaaaccaaagaaagttacatgtttccaaaacattcaacaaattaatgggtgtaaggaactggaaaacctggactcctaccacatgcagataaaaccaatacgtgcagaataagactcaagtcaagtaagaacgttaaacaccataaagacacatggccttctttgtgtacatgacatgcattctcaagtaagtggcctttattgaatttataaaggctatatattc

SEQ ID NO: 23473 - DNA, 2300 bp, Homo sapien
gtgtaaggtaagtggcatcatcttccttctattaatggtagaactgaagatcaaagagagtgtctaacttgcttagggctacatagccaagtggtgaagctaaactcagtctaggcttacttgatagtacactaacattaaatgtctaggagtaaatatctaaaacaaactgtaagtcttctctatttaccatacaaattattcaagtgaactgccatttttgcctggcttgaaagatacttttcagaagaatgggctcatatacacatgcacgcgcgcacacacacacacacaatggaatactatttagccttaaaaacgcatatatatctaaaatatatgtgtgtacatattttatatatatatgtgtttatatatataatatatattatatttgtatacacacacacatatatgccacattttctttatccatttatcccttgatggacacttaggttgattccatatcttggcaattgtgaatagtgctgcaataaacatgaaagtacagacgtctcttcaacacactgatttcaaatcttcccagtaaatacccagaaatgagattgctggatcatatgataattctactttcagttttttgagaaacctccatacaattttccatcatgtttgtactaatttacattccaccaacagcatacaagcattcccttttctccattcttgccaacacttgttatcataaagggaggtttgagagaccataaaacaaaccccacctcacaattttgttagtgcaagttctatttggcctattcccaacactaagcacacagtaggtggcaaatatttgttgaatggatgaattctcatttttctccatttgtggaagcagacacctcctcaaaaaaaaaaaaaaatccgaaagaaaaggtaaaggaaacagttctatgaatgggggttaatttactctcctagcattcacttattgggaaaaaaagtaacagcagtttctagaaccctctggtctctgagggagatgctgtgttcccctcctcagagaagaagaaaacgcactagagagtgggagcatccccaaggctgaagcgcatccaggacatcacatgtcaacgtgtcctctctggcgtggggtccccgcgagtctgggaaacgaggagctggcaagggagggcaagcgggggcggcaaagagggcccctggagcagggggcgcggacctcgctgcgctgcgcgctctaccgccgggctcgcaacgctgggctcagcgctcgcgcctccctcagctctctcctccgccccccttcgccctccccctttccctccctttctcctcctcctcctgccgccgcggccgctgccggacttcgccagatcagacccacggggctgccctcccctgcgcactcccctcgctgcccgggcccggagcgcagcgcggccgcacaggtaggagcccccaacggggggtcgccccgagcgagcccagtactcactgggccgcgcgcgggagagtgaggtggggtgagctgaggggtgttgagtacccgagaactgccctggactgtgcagggtgtctcgggcagagagggaggtggaggtgtgcagcctcggaatgcgatctgtcagcaagtgcgagtactcgggtgacatctgttgggatgggcatgtgtgtgcgcgccgacaaccagccggcagggctttgcccataaacgtggttttgaaagtttaggggaccagtgtgcgagatttaagccgcacctggattccataggagctggttagaagctgggacgctgagcagctccaggggaccgccgcgttagcttgctgttaagaaaggggacctcatctccctgccgggccaggccgcccgcccgaaactggtaccttgggctgcggtgcgatccctggttccggtcctaggcagcctgaaaccgaaggtagcgtgtcggggacccagactgataagacaaaagagaatcagtcgctttgggctgcccctccacacaacctgggacttttaaacaaagctgtgcgcagagaaaggcgtggaaatgccactttgagagtttgtgctgggggatgtgagaagctctgagacatgtgagaaggtctagtattctactagaactggaagattgctctccgagttttgttttgttattttgtttaaaaaataaaaagcttgaggccaaggcaattcatattggctcacaggtatttttgctgtgctgtgcaaggaactctgctagctcaaggtgagtatactgggaaagccttaacgttctagagaacagagttttgcagccccac

SEQ ID NO: 23474 - DNA, 2300 bp, Homo sapien
atatacagtactcaattatcagctttattcacgacaccgtgcaattgaactttaaaaaaatcaaacttttcctctcttttttttttagatggagtctcactctgtcactcagagggatgatctcagctcactgcaacctctgccttccggggttcaagcgatcatcctgcctcagcctcccgagtagctgggattacaggcacgtgtctaatttttgtatttttagtagagatggggtttctccatgttggccaggctggtcttgaactcctgacctcaggtgatctgcccaccttggctgcccaaagtgctgggattacaggcatgagccactgcacccaacccttattcatcctatctaattgaggcttacactctttgactgttatctctccattccctgcaaccctagcctctggtaaccaccattctactctctgcttctatgagttcaattgttttaagttactttcagatacttgagaacatgtggtatttgtgtttctacatttggcttatttcactgtgcataatgttttccacttccatccatggtgtcacaaatgacagaatttcttttttaaggctaaatagtattccacacatacacacagacacataaaatggaatactattctcttttaaattttgtatgcctaataattcatggttaaaggacaagataataactatttttgagtatcccgctgtggagacacgatctcctttgatccttgcagcaatgtgtaaggtaagtggcatcatcttccttctattaatggtagaactgaagatcaaagagagtgtctaacttgcttagggctacatagccaagtggtgaagctaaactcagtctaggcttacttgatagtacactaacattaaatgtctaggagtaaatatctaaaacaaactgtaagtcttctctatttaccatacaaattattcaagtgaactgccatttttgcctggcttgaaagatacttttcagaagaatgggctcatatacacatgcacgcgcgcacacacacacacacaatggaatactatttagccttaaaaacgcatatatatctaaaatatatgtgtgtacatattttatatatatatgtgtttatatatataatatatattatatttgtatacacacacacatatatgccacattttctttatccatttatcccttgatggacacttaggttgattccatatcttggcaattgtgaatagtgctgcaataaacatgaaagtacagacgtctcttcaacacactgatttcaaatcttcccagtaaatacccagaaatgagattgctggatcatatgataattctactttcagttttttgagaaacctccatacaattttccatcatgtttgtactaatttacattccaccaacagcatacaagcattcccttttctccattcttgccaacacttgttatcataaagggaggtttgagagaccataaaacaaaccccacctcacaattttgttagtgcaagttctatttggcctattcccaacactaagcacacagtaggtggcaaatatttgttgaatggatgaattctcatttttctccatttgtggaagcagacacctcctcaaaaaaaaaaaaaaatccgaaagaaaaggtaaaggaaacagttctatgaatgggggttaatttactctcctagcattcacttattgggaaaaaaagtaacagcagtttctagaaccctctggtctctgagggagatgctgtgttcccctcctcagagaagaagaaaacgcactagagagtgggagcatccccaaggctgaagcgcatccaggacatcacatgtcaacgtgtcctctctggcgtggggtccccgcgagtctgggaaacgaggagctggcaagggagggcaagcgggggcggcaaagagggcccctggagcagggggcgcggacctcgctgcgctgcgcgctctaccgccgggctcgcaacgctgggctcagcgctcgcgcctccctcagctctctcctccgccccccttcgccctccccctttccctccctttctcctcctcctcctgccgccgcggccgctgccggacttcgccagatcagacccacggggctgccctcccctgcgcactcccctcgctgcccgggcccggagcgcagcgcggccgcacaggtaggagcccccaacggggggtcgccccgagcgagcccagtactcactgggccgcgcgcgggagagtgaggtggggtgagctgaggggtgttgagtacccgagaactgccctggactgtgcag

SEQ ID NO: 23475 - DNA, 2300 bp, Homo sapien
tttggctgtatttaagattcatgtagcatacttaaatcagcatattatttttccatgcttattttaaaaataagaccaaggctgtcctaattaggacctttgtattctcctctataattttcctatgtttttcttcccctccttttagtttcatgggagaaaatatactctacctattctatagccaaaactaccacctgtcctggaactcactctttctcattttctttaggactccaccccctcatccccaaactgaataaccaattagcagatatttacagagcatctactatggtgcaaattattggactaagtttggaaaagaaactttgaagtgcatcaaaagggaagactgggacattcaattgcacaaagtaccatgttataagcaccaagctggtgatacagagagtcagtactgtggtcatttcagagaagggagacactcatagcctggagtgagtggctgagaaagtccagggaaggggctcgggactgagccaggcctggaaccttgggtaggattaagacaaagagagcagggtgcattcataattccattcattcagactgagatacatgagtgctgcctggtactggtcctctgtgagctcctggtctagcgatggagacagacagtgaaaaagataaatttcaacaatgtggcaaatgtgattatacagggatttgaacaaagtcttgtaggggcacagagtgtggaggaaccctgttggattctgataagaggtaagaaaggacaggtcatttgggcggcactttaaaggtaggtaggagcttcccagggcacagaagggagaaaagcctctttggataaaagaaaacactgctcccaggaataaatctggaacgaatgagaagcccaccatggcagagatgaagtgctggatgtgaagggtgcggcacagggggaagcagactgtgaaacatcttccatgactacgggaggatttgcatttcaccttctaggaaaaagagagtgaaaagagaattggaagccacaacatgccattataagatttgttttctgacaagaaaatgcatttaagcctagtggcagggagaccagataagaggttgagggctacacaagggcaagattgtgttgaattcctcttggtatgcccagcacctagcacataggtgtgctatattttactgaattgagcctttgtgttgcctatatagtctaaggaagggctgagagcaaactaaggccttagcaatggaagtagaaagaagaggtcaaatttgagtgaggtttgtgagatagattccacagggactatttttttgatcagatgtggtgggaggggattaggaagaagagaaagttgaagataatgctaatgcttcttaacttgggaggccagatagatttgttatgaaataaaatagaaaacacaggagccatgatgggatttggactctcttttggaagtggctgttttgtttaaagggcctgtggatttgtccagcgggcagtgggaagcatagctctaaagagtggcattgagcttaaggccagggatacagatttcacagtaacaagcagagaatagatggactgggagcagatgagaccacagtggaatggccactctctgggactggatgaggactgtactgagttgaagagtcccctcccttcaccgccccgggatttcatgtctacccagaacctaagattcttaccttatttgggattgtttggaggttctagcaggggagtgcagctacttgtatatccttgaccaaagactggtcctcctctatccagatggtcaccttcttcccccgagtgcgcagcttctggagggatgcacatggagcagtgagggaggaagaggacacctgcctagccagccagatcagccgaatcaaccctggtgatcaatggagtgacagatgttgcagccatatcgccctcatatcctgtcaccttatttggaattgggtctctgcagttgtaattagttaagttaaaatcaggtcatattggattagggtgggccctaatccaatgcctagtgtccttgtgagaagagaaaacagagacacagacacacagtggagaaagccatgtgaagacagaagcagagatttgagtaacgcatgtataaactaaggaacacaaaggatttccaggacctccaaaaaggtaagagaagacaaggaaggaccctccttatggccttccgagacagcatggttctgccaacccttgattttagacttttagcctccagaattgtgagagaatatgtcaatatgtctgt

SEQ ID NO: 23476 - DNA, 2300 bp, Homo sapien
taattctcttgtctcagcctccctagtagctgggactacaggcacataccaccacatctggctaatttttgtatttttagtaaagacggggtttcaccatattggtcaggctggtcttgaactcctaacctaaggtgatccacccacctcggcctcccaaagtggtggaattacaggcatgaggcaccacgcccagcccctattccttttcacagatttaggtggggaggtttggaggaaacagtacgtggagcaagacagtacattctatgagttcattagaaagcaaaaaaaaaaaaagggatttggggagggacaagggcgcagagcagtggtaggacagacagctcttcaggaaaatatttgcatagcttagtactttacatctttaccttcttggccctcgtagcaatccttgaagttaatgggaagaagtatacatatggatatggtctccactttgcagatggcagtggctcggccccgtaaggggtttcttcagggtccttatgctaataaggagtgagagtgagtatgccaagccagtctgctcaccctaaggtagtactctttcttataccccagcctttcaaatataaagccatcacagccctaaatgtatttggcaaaaaaaaaaaaaaaaaaaaaaatcaaaaaacaaaaaagcagagaacctgaagaaacacagtaaaagattttaaacaagtatttccaatttcccagtccaatgcagtgaaacctctatctcctgacttgggacctgtacctccttcaccataggcagcatgctgtccaaatgcctcagggttctccgcaggcagcacagagggctctactagagcccttacagatgacccgaaatagtgcatgggttgggagagtgtctcacataacctgctcatgagtccttcattcccaatcctttcatgttcatatgtatacatctttattgtccttgcagctttgtgggactaactgttaggtgtcatgctattgcgtttatatctaaagaaaagaataatgtgttttgaaaatattgatatgctatagatatctcgcctcctatggagactgcagttctgtcagtctttccaagtattccttttacacaggactccattggctaatttcctcatttaccttcattgatgtcatctgtggaagtgttaagccggcatgtaattgtaataatggcagctcacactccttgagcatgtacaggtgctgtgcttagtgttttgtcagcaatatctcatttaacagaattatgatcctaatattttagataatggaactgaggataagaagggttaaggaacctactcctaatcagacagaatttgtatgaggggaatcagatttaagccctggtccagtggattctcaacctttatactagcaccctacatactttctctggttttcatcacaactgaagagcacaaacacctgctgaatgcctgaatagccccatagagaatagctatggaaaagctttatggcaaggtgtcattgtggctaaaagtttggagttaggaagcctcaaggtcaaatcacagctctgatacctaaaacctgttaatatattggagcctctgcttccctggtgaaacaaaggtaatgatagtaccaatattatagttctgataactaaatgagaaaatatctaaaacacacttagcttgatggctgtggtgctgcagagacttggtaatgttcatttttgtttctattaagccaaaataaaatagactactcctttctggtcacccccattagcaacttatggagacagaaactaataagagtttacacattttaaaactattggctgaaatagagtcatcacttttcagagctcccacctttctctagcacatttaaatgtctacactaaaatgacactgcgaagactgcccagtaggtaaaatgaggagctgatatttatgaagcacctaatatttgcaaagctctttgtgacatacaaacaagtataaatctaagacatttcccccatagaatttttgggcctcgttatgtaataataggatgttatgcaacaataataacaactgcaatgcaaaaagacaattcaatacaggagaccttgcaaagcagtgtttgatagatcccatttggtggggtagaaatatcactcttagctaaggtaagatcttgcaagccagaaaatatgtaaagattaagagggaagaaatgaatttaagaaaagggtaaagactgtgaaaaataaacacagggtacccggtgatgcaaaatcaaggaagcgaggggatagaggc

SEQ ID NO: 23477 - DNA, 2300 bp, Homo sapien
tgatggaggaataaacagaagtcctggttcctatttctagacaagaggctgcccaatgtaatatgtaatatcagtaatagtaaggttgcatttctgtagggtggctcgatcaagcgcttcttgtataccatatcattagctgcccgagggccagtaaggtcggatggtttgttcaaggacaagaactaacaagtaacagagataggacttatctttttctgaccttcactttccctttctgtgacaaaactggtcttaggaactgtgttgagcagagccttctgtgggcgtgagagcggcttggaggtgtcaaagaaaaattgcatccgatatagttaaacagacaagggggaattattcaaggctattgcaatagggaagagagagagggagggagaggggaactagtagaagactagtggaggagattaggatgggaagttggtcagtgtaatgaggccatttgtgtttcctaattggaacttattaaagttaggctcctcctctccacaaacactaggagatagggacccttttttccttgatgattacatttcaaagggatgcctcacagatccctgagaaagatccccaggctgtaaaacccagcaagaggcggagagatttacatgtcaaagggtcagaggaaacattcaccaatggaagttggctaaagtaaatgctctgagaaaaggaaggtctggggcctacagttaggaagaaacctgtctaaagtttagttaagctgaggggaatgttaaggccatttggtcaccgtaagcagtaccacatttccttgcctctcccgggagccaggtctcagtgtccccaataggggacacgcactgaccggcgggtgaagggactgattttgattatcatcctaccagatagagattattccctctgcacccgggttaactgaaacccggtgggggtagatccttgccattttccggccctgtaccccactggaaataacatgcggtggtcaagggcatccacctctttaggcaaaagcatgttttcagcccagagacgattccacccaactttacaagaggatagcccaaagatagaagccagggactcagacttcctccttccagaaataaccatcataaaaaagccgacccagtaaacgcctggcagcctgcggcatagaagaaaatggaaatctccttggctggcatttcagcttgcctgagggggcttgctttgctccgaggggaggtgactgtgctgaccttaaaatccaggtttcaggaagcaggagatgaaggtattttattttcgcctaaaggctttgatatttttcaaataaaaatttaaaagatccagtaccttctcccgaagcttcttcatagagtagtggatttttagaaaacacaaaggcctaggggtggggcgagagtggggggtggggatgggtagccccataagagcagtgccctgacgcctcttttcgcccttttcagaccatttggattttcttaagctgcccctttccccaacccccgtttttgccatttgcctctcctcccattctccaaagtgcaaataactggttatccctcaggtcctgctaccccatctttcctgatccccgatccctccaaatacgaagcacctcgcatttgggtcagcagctgtttcccctgcctggtgacaaggccggtgtgcagagggcagaggagggagcttcttccgccacacggtggcgcgcgcgagcctcccaaagaccgggcggccacagctcctcaccttctccccattccagccccacccgcccgggcgcagaaagagccgcgcccccagccctcccgggcaggacagccgggagcgcacctcgagggcccgggcagcggtcgagtggcagctgcgtccagcccatgcgggagctgctgcgggttacgggtggccccagctccaggctcctcctccagccggtcccccaccctccaccccttctcgactccgctctgcaaatcgaaggctttccggagcagcctaggagcggccgcgggcgcagcgaaggcggcaggaggagcgcagcagccttcgggcagccgcggcggcgtcgctagagcagccggggaggcgccgcggtgcccggcgcgccctccaagctaggagaggggagaagccgggggctgcagctgggcaagggggaggaaagtgcgtgtgcgtgcacgcctgtgtgcagggcagagagtgcggggggcgacagtctcggcttagggcggaggagagggcaggggaacggcggtgcagctcccccgctgtccccgaggatttcc

SEQ ID NO: 23478 - DNA, 2300 bp, Homo sapien
gagtccgctccttgcagcagcccagggatgacatgagaagagtagaagctgcatcagaaagcaacctgcccccatcatttctgaacttgataaggaagtagactggcaagtcttttaatgccaggtcatgaatctagatcacaaggagactttcttacttgggtgtacgggcctttagctgacctaatagctacttctctacatgaagctactggaatgaagcccaggcactctaccaacccactctaccattcccctcccctacccacacacagacatcacacacagtcaatccacataacctaaaggaactttcaagtgtttctgagctattattttgatgctccatactattaaaacatttaataataactcttccaactcttctaaatcacactattgttcagaccatggaagaaactcaaattagaggatgacaaactaatgcccccttgtccagctctgcctaagaaaccaaaatcttggggacacacagccatagatttgtaagtcctttcctgatgacagtaactaccattttatagtcaagtattaaaccttcccctacataatcataacttattgccataacaccctcagaaagttattatcattgcattgtattggtgaataaaaggaggatctgagaaagtaattacccaagctcaccctcctggcaaatgaggtttctagaattcaaacccacctctgagatcatcttcctactacactagcctgcctctattccccaaagagactggcacttaataaacactctgttagtaatgaattcaaccacaggagagagtaagccttggcatttttctgactggaggaatcttcctacctgcacccactctagggactatatgacaatgactttcggcctcgggagacggccatctccacctgaactgggcccagcacataggtgagccttgagcattccactcttcccactctttcttgccccagaatcccagagctggagcactgaggcaattccggaacagcatctactgtctgatatgtggggataggagtggaaaggggaaaagaacagcttgtgccttcgggaatttgctccctgaagtccctgcagtgatttcgtttgtgtctggcttcctacaaacaaagcagaacaatgagaggaaggaataccaggaggcaccagcgctagctggaaggagaggaagtttgtggtgctcgccagcagggcggttcccggccactagtgtactgcagctgggcaggcacactcctcgcagacccggcgctctccaaggagaaaagaaagttagtgggcttggggtacgtttcccttcttttcctagaagagggtggcaggggggctggctcagaaagaaaccatcactgaccaacacttggggtactctgtcaaaatgctgctccttccatactgagtctctttgctcctcctctttcccccagtcaacctggggttaagtgggaaggggagtaaggcaactccaggggatgccttccaaactccgggagagggaaagcacaggaattgggagaagacgtgaaggcagagcttgaactcctatgtacccggtgacacaagactgctctgagggtggcgcccgctgcttctcccgggcgccccgccagccgctctccctggcagtggcgccctttcctcgccctctgcccgcccaagagctgctggcccagagcagccgcattcccgaccctccaaggcgaagatcccctggattcaccccctcactggcctttccgcctaactgactgaaacccggctccccaggcacagattttccagcctccctaagaaatgaaaggttcgcgtgcccttcacctccctccctgctttccagcgtcctcagcgcctccccgaacagccagacagtggagcgccccgtgttggggagaggaggggagcagacgcctccgaagtttggaaaagttacacaggggctggggactgggggtagggggtgccgaccgggagaaggggagggtcacctgttgagggagggagggaaagtttgcctggccccgcctcctcctcggggcaccccgctcccagccgcgccgcgcctccccacctggcccgcgctcaccttgaggccgcggatctcgccgaggtgcagctgcaggcggcggttcacctcgcggatgaggttgctgtggtccagcatcgcgctcaccttctccgcctcggcgcgccgcaggctgcggatcagctcctccttgctccactgcagcagctcctcgtccgacactttggacaggtcctccaccggcgcgggcgg

SEQ ID NO: 23479 - DNA, 2300 bp, Homo sapien
atgtttataaccccaaagatttgggagatcatttatagatcattcatttattaagcaaatgtttactgaatgtccagtctgtgctgggcaatatcctaagtacaaaatcctgcaaggatttttttttctcaaaggagtttaatccctctatcctctctgcttccatggctctttagattggtaatatagcatttatttattttgtccatattggtaatacagcatttattctttggtccatattggtaatacagcatatttttccatattctataagttgtatacatgtttgattatacaattctaaattcaggatctgattctgaattaattttatttgcctctatagtgttcctagtgtacgtaagtgttgatatatagcacctatctggataaaaaaaattgatgcaggaaaattaataccattagcccccatgatacaaattaaactaatattcttgagacataatttatttaaaatagctgaagtcttcaactgaaggaaaggaaatactttttaaaaaacatttgaatatgtgattattccttacagcagtcaaaagagaaagaaataagtacttctcaaagattctagtaattagtaaacaagccacgaggtacttaaaattaccttaaaccagttttattttgtcaaatagtctgttactacagctatagataattttgttctaagtgtagcttaaaactaaaatgtgccctggataagataaaaagtagtgtctgggcgtcctcattacaatcttccttcctaccactagtctatgctgttgcactaagtactgaatgcttgttcagtgtccataggaatgtggggaagatcacttttgtctaagatttgttactcagatgggaaaaagtcaaatgccttattttttccccaaaatagaagcaggcaatttataaacaattctgttcacgaaaaaatgtattctgaattcataaatttaagttatatgttttaactatgtcaattagaaaaggaaaatattatgggggtggggcctccctttctaattttgaaaagaaggaatctaatcgtcatagttaagcactcttacttacaatgttgagtttttgttaatttctcctggtcctctgcctcactttgatctgcatttaatgagttacaaatcctgtgaattttacctcagcgctgttttttccacctagcccattttctcccctttgtattaacacagtttaaaacctcaatgtctataaactgcacagtgcaggcaaacatgtattgaggtcttatctgtgtgatgtcttatgctaagggcttcacatatgtacactgtttaaatcttacacaaatatgatgaaataaattctaaaagttttcctgttttacagatgagaaaagccatggaggactttttttattattatttttatttttttgagacagagtcttgctgtgtcacccaggctggagtgcagtggcgcgatctcggctcactgcaacctccacctcccaggttcaagcgattatcctgcctcagcctcccaagtagctgggactacaggtgcccaccaccacgtgcggctaatttttttttgtatttttagtagagacgggatttcactatgttgaccaggctggtcttgaactcctgacctcgtgatcctcccgcctctgcctcccaaagtgctgggattataggcgtgagccactgcacccagctgaggacttttagaactaagtaattcacccaaggtgatagtcagtagtggtggaaccagcatgcaaattagacaatgtgacttcatagcctagtattctactctacttctgtaacttatggctggaagggactttaaaattccatctactccatgtttaatgcttcattctcccttaacatttgcaaagttgtcactagcctatgttggaacatctccaatgactgtcacaatagtcttctatctctcaactccaactcaccctatgctctgccagattcattgttttcaaaaagctttttgtcataatctccctcagctcaaataaacaactagcatttccaaacagagcaactacaaccacttcaaacatcctaaactccctccaaccctggctattcacacgcttcagttcacaacttccatccagaatcctacttctctgattgtcctcatggggaaagtatgctatttccttcatcctacaagatgcttctcactgactctatccatattcttctcatccttcaagagccaagtcaaatctctctgcttccaataagccttccttgctacactcaggtaaatgtaat

SEQ ID NO: 23480 - DNA, 2300 bp, Homo sapien
actatccttttgttttcagtgggtaggtagtacttgattatatggaagcatcatactttagttgaccagatctgttaattgtcacttaattagcattctgtgttttactatttcaagcaatgtccctaagtaatattttaacattttctccatgtagaccttctacatgttttaatatgtttattcgtagttatgtcacgttgttttagatttatttttatttttaatgctccttttaaatccattcctaaagtgctttttttgtttcatatgtgtatttgtattcgccttctaaaaagtttgaattgtttgaaaagttgaaagtttatagttttctagttcatccagttgttctactttaattttgtgtaatctaatcaatactccatttcttgaagcagtatttatttactctttactctgagcaataggaaactagtactgtctgagaagtagttagatgctctggtcatctacagaaattcagcttggtgaataatatcacacaggttattttgatgtgctgcaaacattaaaaagcacttgtttaaagggagagtttacaccagaactaagaagccaggaagtctgaataattctaaaataactggaatgctagttatttttctgtagcatttgaaaatcaaagatggatcaagttacatacttactatcatttaggtcaaagctttctattctcatcatacactgcagttacctagacaattgtctcacttgtctatatctcatttgctataaaaagctagtatcaatatgagtcatggctaaatgctaaagttaatattgcataatgtttacatgtatgggaccactgctgaatttcctaaaaaaaagcggatatacttattaattagtcttaaagcaggcactaccctgacacttaaagtattaatagttacttgtattcttagtgttgccaactttgtgatagcaacgtaaaaatttctccttattgttctaatgtttaacgtggtcacattattcagcagttaattccacaaatattttttgagaattggatgttatgcttggcattgtagttacaaatttgaggaagacctagtccttgcttgctatgagttcaatttatttatctcctaagaaaagcatttaaaaatgcatctaaaatattgtataaaaagttctgtaatattgataagcatattcagggaatacaagctaagctttgtggtacagggaaatttatcagagaaggggacacataactaatgtatatgcagaggttatgtggatgcagtgagggtgtaaaccgggaagtgctgaggtcctggggcaggagaagcatttcaggcagatggaacaaacctgcagaatagagagaacctgtcattatacccttataattggaagtggtcaggtgtgcctagcccacagagaagagaattacaagaaaaaaaatcagagttttgttcttagccatactgtatcgctactataaaggtaaataaacaacaccaaagtttagatgtaatttctccacagtggtcactatttttatccagaggaattagaggagtcagatgtattcttagctagcctggaggggatatcagatatagaagtattataacttaaagaaggtataattcaatattacaacattacatttataaattttaaaactacttttgaaatataaatttgaggaacataagaatctaaaattctctgctacaaatggaattttagttttaaaatatgggcaaacactcacatacatgattcacaaaattgaaacttttagaattaacaaggtacgatgaaccaaatttaaaaattgctctcatttcagaactggaccaaatttaatagttctaaaacttctggtttttaaaatatattttcagccaggcatggtggctaatgcctgtaatctcagcattttgagaggccgaggcaggtggatcacctgaggtcaagagttcgagaccagcttggccaacgtggtgaaaccctgtctctactaaaaatacaaaaattagccaggattggtggcgtgcacctgtaatcccagctacaaggcagggctgaggcaggagaatcgcttttaccttgggaggcagaggctgcagtaagctgagatcgtgccactgtactccagcctgcgtggcagagcaagactctgtatcaaaaaataaagaaagaaaataaaatatattttctaatattcaagtgagatttcttctacatatttgttgtctctattatgatgcagtatgtactacgaatattttcacgtaattatcaagtatcagctt

SEQ ID NO: 23481 - DNA, 2300 bp, Homo sapien
aaagaggctacgaaatattgtgggtgagctgaaatttcagataggatgtttaggaaaggtctcactgaactgacttttaaataaagacctgaaggaagtgatggagcagtctatacggataccaggttggagagtggtccaggtggcagtaaatgcgaaaagttcttgagaacagcaggccactgtggttgaagagagtaataggacattggggagtgggagtgcataataggtagatcagtgttcttttcaacgactggcaattttggcaaaatttcgtcatgttgggggatattttggttgttaacttgtgtgggagggagtgctgaggagaccagggatactgctaaatatcctacaatgcacaggacagcctatctctcaatcctcctccttctcccaaacccccaacaaagaattatccaggctgactgtcaatagtgcccaggttgagaaatgctgtttaaagtcatagcgaagactggctaattgtgagtaaattggaataacactgaattgttttaagctcagtaattatttaagcgttaaggatcatgtggctgcttgctgtgaacagactaaagggataagagggtataaaacatttaggagggtaatacaattacctagagaaaaaatatggtttgggccagaatgcaggtaagggtgctaagtgatagatgctggatgtattttgaaggttgagccaacaggatttactaacactggatacatgcctgtagggagaggaaccacctacaagtaatctgctgtggttgctactggagttgtttcttctcaaaagggagccggggaagtggtggaaagctaaacaaatttggaaaggaggaaagagtacccaatatggatattaggattattatgcatctgttacataaatatctgtaattatgcatctgttatataaatatcttaagaaaataagaaaggacactgttggaccagtgaatgactaagggcacaattattctatggactgtttctttaaaaatacttttttgtttgtttttagaaacgtcttctcatgccatctttcattttggtgacagtctgaaagatgtagggagccccaattccttattctatcaaagtcattaaagggctctaattttcctttcagtatttgtatcccaaccaattattggtggttactatgtagaatgctgacgtattaataatctttgtctaagcatttgtttggtttagtctaaaatataagcttactatgagtcttttttttctttccttcgagactgagtttccctcttgctgcccaggctggggtgcagtggcgcgctctctgctcactgcaatctctgcttcctgggttcaagcgcttctcctacctcagcctgccgagtagctgggattacaggcgtccgccaccacgcctggctaattttttgtatttttagtagagatagggtttcaccatgttggccaggctggtctcaaactcctgacctcagatgatccacccgcctcggcctcccaacgtgctgggagtacaggcgtgagccaccgcacctggccactatgagtctttatgtattagaaaactgcttaataaagtcctcaccttattgtcataatcttataaccaataaccttataatctaacaacaagggttatttccatttcacagacaaaaaaacctgaagtttgttaattacggtgttaaattatcctacgattaatggcagaaataggtcctgaaccaatatgcctttgagaacttaaacgcggtgagttacatacaggccctcctaactggagtcttcgctagtaccaatagttagttgctcggcgagagctcggtaaggactagccatttggaagctcgtagtactcaggttgtggtacaggagatctaacactcctacacaaatgcatgtcgtgcttatttcgtaccaaactggtctggcggcggttcttcgtccagacgctggcgggccagggtggaggtagtaacacagctcccattccccatgtagccgcgccctctccttcccctgggcgtctccggggcgtggacaggccgctgaaaggaaccggctgcggcctgtgtgaggctccgcgggccgctgcactgcgaggccgacgcagctggagagaagttaggcaggtcctagggagggcaggctcgagtgctgggcccgcctccccgcgggactgtaggcccgggggctccgcctcgtcgcagcggcaggtaggaggcggtgcgcgcggcccggcgacgggggatcctgaggcccggtcagtctcttgctctggggtc

SEQ ID NO: 23482 - DNA, 2300 bp, Homo sapien
cttgtccttgcgtcttgattttggacttctcagcctccataactaagaaataattaatttctgcggattacctatccagtttatggtattctgctataacaacccaaattaagatatttagtaaataatttattagcacctacgatgcagcaggaaatatgctaaatgattagggagagcaataattttcagaagattaaaaaagctttccaaaaagacatagcacttgagaagaactttaaagaaagggtagaagttccatgggggaaagtgtggtggtggggaagtttaacatactggatacaataaagatcttaattcacagataaattataaagtgcttgaagtaagggactatatgttctcttaatctttgtgttgatcccacttttgcacagcctctactttattcttataggaaaacatgtagcatggccgtccttaattaccgagttgcaaaataaagcaggtgttatgtcctgcccctgcagagatcctcaaaccttagcatgcatcagaatcacctggagagcttgttaaaacgcagactgctgagccctattgccagtgtttgggattcccgaggtttgaaataggggcctgtagggaatgagaaacatctttctttcctgttgctagattcctgtttgagtcccttataagaaaagacagattaataagagaaaagcgtgcaaatttatttaagttttatgtggcatgggagccttcagagatgaagcccaaagaaacaggaaaacctgtgcatttttagaaggaacagtggacagttgtggggaagtacggttggacaaagcatggtctaatggtaataaactggggtaagttgtcaaaggtctttttgttcagattcttttctatgtctccgtttctttagagataaggatatttctttcctgtgggtataggaagagcacctctggattgaggatccaatgacccgcctcagggaagaaggatgggagaaggtcagagagtgatcttaggttttgttgttttctcaaatgtcaaggggccatattttggggtagcatatcctgaaccccatcagcggtgaaaacttgtatttctacatagttcccaggtgatgctgttgctaggttctaggatcacgttttgagaaccactgctttaatgtaatttatatctaaccactgctccagcattcttttctgtaagcatccagaatgctgtgacaaattcttgtcaaactttaagaatcttcaggatgtcaaattctgtcttgaggtcaataaagatgggtaggggacgaaataatctttgctcaacctttggcacattacaatgatgtttttcaaatagtagggctcaaacgtgatgcattggaaaattggaaaattggaaaatcaaataatcatatggtaaatattttagtaggtttcttatttaatcaactcttaataagatgggatggataacattcctgagttagaaaaacatattgcaagcgctgtcagaggaaaattaagttcaagtccatcagcaatctttactcatgttttgctttatatatttgtgagtgccgtacacagaactgagtccagtgttgacttgagtctaatcaatacacatatacgtatacatgtgtgtgcctcaaatatatctgattgaacttagtaagccacagaactgtaatatatatgatataatcaatgtgttatacattatattacaataattatacacaaaataatacattattctgtatgttaagggagagaggacaacagcaaagaagacagagtgctacaacgtccaggctgtaaaagtcattttattctggaggaaatgcaacaccaaagttgtaacagtctttcaataaagtaaaacagaatcatcgaaagggctcctgggacaattgaggctagaatgatcttggtcagtcagtcctgtggacttgagggcaatcttccctcccactaccggttggggagccctgatgtcgcctcccgcagagcgccacttggcctggcctgcgcttcaccttcatttccgcccgcggaatcctccaggatcttcccgccaaggctggggtttccgctccgcggcgtccgagcgccagcggactgcgcatgtgcaggacccagcaggtctagagcttttctgtgtttctccggacttcgagccatggcggtgacggaagcgagcctgttgcgccagtgccccctgcttctgccccagaaccggtcgaaaaccgtgtatgagggattcatctcggctcaggtacccgcccagtggttgctttctagctaagagagcct

SEQ ID NO: 23483 - DNA, 2300 bp, Homo sapien
gcaagaccctgtgtcaaaaaaataaaaattaaaattaaaaatctgacttaaaaggctcaaataaaacattgtctctgtagggagatacatttgccttctcctttagaaaatatggacagaaaaggaatatgaggaagagtatttggcaattttgtagttgcttttatttctgtttcacttgagcagtttattgtcatgttttaatgaacatgaattaaaatatgaagagtgattatggatctattttagggttagtattttgcgatcacagacttatattttctttgctgcaaaagctttatttgataaagatataaactgactcctttgacaactggtaaagtattctgcatgaatgtttctcaaccttatttgagcagtaatctcttttcattataaacattttataactccacttactatcctgagattaaattcatatttaacataacttgctacacacataaatattttaaaaacttaatgtaattcaccaaattgttatgaaagataagaaaagggaatgtgatttataataaaataatccgtagctcaggatgtaaatgcatggtgggactggatcagaagatggaacaaagttggcagggcttgcctgtgtatgattgctatgactgtgaccatcgctggtagagctgtgatgtattggctaccaggtgaagtgaattaccaaatgactaataattcttggtacatttataaaaaacaggatataatcttcccttagttagaaggtagttgtagttccagaaaattctgtttatgttaaacttttggcaaaatgcgttgtttttacttttaaaaaatgctttgtgtttatatgtaaaatgggttattttgcataataattattaatggatttttccactataggagtgtttttcaagataacagaaaattattcaggatatgggtcagtttttgttgtatgtgggattgatttccttattctaagacacctagcatccctggcctctgcctgctaaatgccaaaaagaccccctccatcattgtaacaaccgaaaaggttcccacattttccaaaaagacccctggtgttttccactgagaaccacataattaccaatgaatactgctgtatcctagataaaggagatagtggctcctactccaagctaagtattattaaatctttcatatttatgttcaataacaataagtaaataggctaaaatcatgtaaatatacaatatgatttttatccaaagattaattttcaacttgaagatacctgaaattataacagatcctctaatgatgagcatgcaaccatttctagattaagaatttttagaagaaaaatgattttgggattttgagaatattggccataaaaatcccccaaaattttgctaaaaaatgatcatgacctcaactaaaaggcgtgccttaacagtgaactgaggtcaaaaggggagtgagacaaaatgtgcatggcatatgcgttagggaaaaaccagttgtagtgtggtgtgagttaggttccttgggatacaaactcggagacagcgttttgtgtgcaggatgtttataagggacccctggggatcaacacctgtgcaatcaagactggacagaaggagaagtcaagctgtgatacagtcttaatacctactttcaatgacctcatgggagctccaaaactaggatagcctctcagagttggaccagggtgtccagatatttatagtttcaaagtggtcagtcgttgtatacaggctgatccaagaaggagtatgaatttgagcaagtcccctctttggaactgcgctgatccctgaaagccctgacagcggaagcctgtctgctgacagcacgcccagcagagaggacaacaggtcttttattgaagggagacgtgcatggcacatcacagtatttaccacatagatctgggcatctgttcaactggaatccaaaaattcaggttggcaaggatacctgtgggatctgctctttggatgggaagctgtggcagcaagaacctctggcatgggtcatattaatggcaatatttgcaattatcattattccagacagatctagctatactgaaaaagagaatgtgagtatagaagacgagtccaggcaccaggagcataatagcggtcagagaaccaagtccaggaccccaggcagattagctagagttcaggcagggtgtcagcgccagtggggaagaaagaaaccaaggagctggaataccgtctgtaagttgagacagaaggatagccatatggcctggaaaaagatgacaagtt

SEQ ID NO: 23484 - DNA, 2300 bp, Homo sapien
ggcaaataggactccagggtgcattaaaaaagggagaaaataatatggaaatattaagttgatgtgatatcaaataatgatatactttcatccagaataccgagtctaatttcagtcagtgcaccttaagacatgtcaagcagagaatgaaaatatcagaggaatgtggaaaaaggagtaaattggggattaattcacagaaagataatttatttctcccaaataagttttaataagcaggaagtcacttttttttttcaaaacatcacaataaaggacattgggcgactgatatttataataaaataattagcaacttaatgtattagctgaagtttggaacgatacacttaaaactagttatctggattggtcagaaaagcgttgcagatttaaaagatctgaatgggaacatcagtgatggaagcagaacttctaggctagtggtcttattcttttccaggttgtgtatttaccctgggccttggtcccaatcaacatgtaacatttattgtaagtttatgtgcatttatggtgacacaaaagtgtaaaataaggtctctcatccttttttcctaattaacaaaataaattgcattatgtgttttctcagtatagaaagagaacatacatattaccagaaaggaattccaggctggaacatgtagattatataaaagcctttttcactaccaaggaaactttgtgcctattacctagaaataatggctgagctcactattgtgaagtctggggcttcctctaagaaaagaaatgaaattattttctttttcttttaatatacttgtcattttataaaatgttggatttatgtactttaacttggcatataaattttatctcatttatcctcatgtgcttcttaaaatgattaacattatcttcatttcagaaatgaagaaacagagtttatagttgaaagaatgaaaaggaacgaggattcaattctaggcctttcactatgagtctatttttcaggattcacaatgatattattttttataatacaagtgacaatgaggaaaaaaacgtgactctcatggaacactgcatggaatctgggactttctttatctttatttattttttacatactcaaataggaaaagattagtcccataaacctagcactaattttaacttcctcttgaaatattcatatttcaagaaattgaaattactcattactagaaattggactttgtaaataatctgaattaagctattcattaatattctctactttaatcacttgtagttttggtcttccaaacatttaagtgattttctgccttttccagagactactgttattcaggtgcaaacattttttgtttattttttccaaaaaagattagtaaagaccaaggtttgggaagcttagaggaaccaagcttatttgaaagtagagttaagagaatggactcagagggtatattatttaaataccaaacaaaggtattcacaaaagaaagagagagaaatagagcacatgaatagtagcatctaagcatttagagcttcgaatggaactttctttcctctcttatgaaatgtctttgaaaagaatttggggccttgattgcatgtttaggacatcagagtactaagcaggggtagggaaattcagggtcctattctgcctttgctgaatactgtagatttttttctacccctcactggtaattataacgtttggaaagatgaaaaaaagtgtttttttttttgtttgtttgttttttttctttcttggagaatgcttttctttcaaagattctgagtttggagaagatctttaaactaaggggtactagacataagagtctttttaagtccttcttatcccaacatttgaaaaagcattttattcataaagcttacactgttttttcacaggagccatttaattcattatggagtagtatgaagctgttgagagagatatagcagcttgattcatttgaaatcacaggacaaatagactttaaaaagcaaatgcatccattttgacactaattatgtgtcttttgcacatgcggtatctcatgtcacaaattgctctcatttgcttctcactgcagaatgtctctgaaatgagatgagtggaaaatgccttaaacaggtggatgtggaacaggtcggggactttaaggacttcagtggaggaggggtgggttggggaagggaaacaaatgaagatgtcttagaagtcactgcaatttatatggaatctgttcaacgccgacactgaaccatatgagaaggtgggttatatggct

SEQ ID NO: 23485 - DNA, 2300 bp, Homo sapien
tagagcagtattcactgtagatggcctcccagggtgtattaatctgttctcacactgctataaaaaattcttgagactggataatttataaaggaaagaggtttaattgactcacagttctgcatggctagggaggcctcagtaaacttacaatcatggcagaagggaaagcaggcacatcttatacggcagcaggcaagagagaggagtggaaactgccacttataaaaccattagaactcatgagatctaatcaccatcacaagaacagcattggggaaaccggccccatgatccaatcacctcccactaggttcctcccctgacatgtggggattacaatttgagatgagatttcggtggggacacagagccaaaccatatcacagggtgctaagaaattatgggctctcaatagctgatggattgattatttgaatgagattcaccttaagagacacaattatacatctaagaagtggggaaaaaaactcttaacaaactctcagccatgaaaagctgattctttagtccagatgtgtgaagcaaataattgagaccaccttaaagacacaatgatatttttgccagttatctgctaagctgactgagcagtgacccacactaagcatggtgtatatttaggcatcttttcctaactgttgcatatgctttcttaggatgacttgctgcctgcatgtgcagagctgccttcatgattggtcttatgagaatctggaccagattttaaaatttgagggacaataatttttccttgttgtagtgctaacctttcagaacttgataaaatttaaacaatgcttaaggatattttgtttttttggagttccttctgcatcttgaggatatttttttcatagtgctcctcatatggcttcatactttgactttcatgctagaaaattagctttttgagagcaggaataggacttttttatgtctgtaatctcagcttctctgctggtacctgacataagatacacactagactttagaataaacaaatatgtattattaacatccaaacatattgtaatgacaattgaaagataacctagattaaggcaatgagacataatattggcacttgtaattggaatggcagtagggaaaaggagaaaagtttgaaggataaattcatttctgttgctttaagcagatgtgacttggccaactgtaaaggaaactatacaagaaaaaaatgattatggtagtaatttctgcttaatttatcctagatttaacctggttactaactgatttgattatataaagagacaagaaacttacatcatcgatttctctttaaggacttttcacttagcaactgaaaaaaagaagagtcacttgagcttagcaatcacctgctaaggtacaaagagaagctggagttaggaggaccaagcacaaataaagaagacaatgggatgtttctaaataatgcaattattggctgaaacaatagtctattaagattccacaggtatagattgtactatattctgtttctttttctagtctgaacaagtcagagagacaatctcctgcctctcttccatcccatctggaaacaaggcccatgtagcaagcagacaatgacatctacccagctgccaggactgtgcaatgaatgaagcatcccctcaaaaaactctgaatggattgccaatttttattatgtttaaggcaggcagtaatttcagttttcaattctactaagtaataatagttattaattagtaaattaggccactgggttctagaggtgagctaacagaatgattaaaaaggagaaaattcacagataatgctcaggtttcatagaagcctgccatgattgagagtttatgtttgtacatctcttcagaatggattgctgcacttaagagcaacttacattgcctacagtgccgtctgttcggtaattgcagcaaagtgaggtactgcaccatacattgtcataaagatgtcaagaaatgaagggagatgttcgagggctcagcttctaatacttacattttaaatctgggggcattaaatctagggaggagaattcctcagatttcccaaccccacatcaacaaaaggcaacatttcctgagtaaagggcttgatatcaaccccagggaggatttctggactccaggtaggtttaattcattttggaggctaattttttgagctttatatctcgaacacaatagccttcatagaggtttgtggactgtgattaaaagtacttttcatggctgtatctggataataacaaaatccttgaa

SEQ ID NO: 23486 - DNA, 2300 bp, Homo sapien
cctggaagagggactggtaggttagaggccaagtgcatttaaaattttgattgcaattttcctccccaaacaggcaagtatttattaagtgtcagctctaagtgcaacaccctcttaggcattctttggaatgcacagacacatgagataggggccctcccacaggtttacaagagtggagagacaagctggtacaagtcgccaggtgatgaaaacagtcattccacaaggcaaagctggtggcatatgctgggagcactacaggtgtgtagagagcagggaggtctgtgaggggtggaaggtatcagggggagcttcagagaggaactggggctgaatgaggcttggaaggatggaaagatggagggaaggggttggagagcaatcctggggaagggccaagaagaacgaggcttaggcgggaggtggtgtagttgaagaatgagacagtgagtctgtgggattgccatcctgactgaagcaaagagtgtgttttgggaactggtcagccagccgaccatcaagagaagagtagaataagagtagaaatggacatccacctgtcacatgactaaattgtttaacccaaataaaagctaatcaattaacaaataaagctaatcaattagctttataaatgaagctaatcagttgctaaactgtgctctattcttctgccttgacataagaatctttgacctggaacaggtttgaatttagaattttccactccatggactatggcactggagggtggtgaattacatttcccgatcagtgccaacagaaagagaatagggcttgtgataatcagatatatttgcccaaatcacttggataagtttttctcctctgtcaatgctgaagcacgctggtgctggagcaggaaatcacagcccagagaaggtgagcaggtgccctgttcacacagagcttggaagttctaatctctgacctgaagtgagacattgaaatagaaatctttctcttcctcctccctccttaccctacccccagccaacaaagaaagaaatgcaggtgcatttaactttgcctgtaactttctgttctgcaatgaaaatggcctcctgtgtttttgtttcacaagcacaattaaaagtctaatttcaaagctacaatagggaagcaagggcgtcagtaagaaacccagaacttgatgcaaataattgagccatttttaatttgttcagtgtgatcaggtagggggaaattctatatttaaatataaccaaccaccttgaaccttgtatggaagtaactgtgtaagaaatgtttggtaacatgttgctgaagttgtaaaatgtgtacctcccaaaacaaggatattcaaaagttaagtttctcacggtgatgttaacacatccgcatcgcgttgcacatgctgtacaattctgcatcataaaaaatggatttacaagcttaagtactactcgggaatattacatgtgtggaatgtggctgggttaatgtcactgtgagacccttagccgttgccaaggaggtttcctgagcctcagctggggccaggcgggggcagactggagaaagccgctgctgcctgggcctgcaactttgcctaatgaacaaaaacaccattttggcctcaaagatcttgagctccacaagccacaaatcacaacgaggaagaaatcaaacattaaggtttctctcggattattattgaccaggacggtctggaaattataggatctttctaaatgtgggcaggggcttccgtgaggtccagcaacacagtggcatttgcttttactgctgctatttctctgtttctggttttacttactctgacccctctccacaccagagccggtgtgagagctgctgtcacctggcctttcccagagctggagggagtccctgggggacgagttgggtggcaggtgatgcgtgtagactaggatgtgagattaactccagtccgaaagggccctgggataaattacacatgtccgaacatatccatagaggaggagttgagtggaaataggcttcaggggcagccaaagagggaaaaacatgaggacattgtgtgtgtgtgtgtgtgtgtgtgtgtgttgctgtaatgatgggagggaggatgcaaggcaggacttacgggtcctagccagctgtgctgcacctggtccgtgaggcagtgtggagtccaccgaaacgaccctcaagcctgatgccagttccagaagcccagtcggcaactctgccaccttacactcctctccccgtggaactgcctgggggtgctggcatggggacatgag

SEQ ID NO: 23487 - DNA, 2300 bp, Homo sapien
cagagctaggctgggcctcagctcgctccatcttttgccctttttgatctctttagatagataaaataccaagttctcagagtgctaaacaacaaattatatatacctaaaggtgagatgatcaggtttaaacttcctgtaaaagaggcgagaaggcgccttgcacacccttttccagatagggctggcagcatgttattcagaactgaatcagtctctgccagagaattcccagtgggaacctggagcaggtatgttgatgaaggggatacctggggacctttggtcactcacaatgagtttttgtttgtattctcactgttgttagcattgccaatgaacaattgcacctacaatttgattttagttttagatagaggcgaatccactgattaaaaactcccattaaaataaagaatggaattattgtgaaacctgcaagggtgccttcaaaaagaaaaccagtgctgttgtatacctacctcgcctttctatttgctttttgaactttctaaaaaacacaaggaagctttttgctaagcatcagggcatttaaatttatattcatcagttgttcattttcttaatatgtaatgatgcataaaaaggctgcaaggaaatcacatctgttaatttttagggaaataaagtgtagcttggattcttatgttggagcacaaagcactatgtgccaagtctgttcctgtacattttaaatatagagttttaatatttggccaatccctgcacctcctcaaacaaaaacaaacctcaaaaaactaagagaaccaaacctgaagtattctccttcaccaactcaaggtataccatgattttatgatttatttacatttaggggggaacccctcagtgaaccatttactccccattttaactcccctgccccgatcctttcagtttccagttaaaacaatgcattaaccaatgttaaatcttaaatctcgtgagtttctctccatcacaccctaatattttaaaaaaattattcctttacatttaaaactgaacattggctactgaagaatgatttaaaggctgaaaaaaattttaataataaatcgtaaccttctcatgttatgtttttgttatgttaaggagaaaaaaatcaataaggaaaaatttaattctgataaagatactcttggatctttgaaaacaactgctgtccttttaactaaaacatttgagcagcttcaaagactatgtatttcttctgatcttggagctgtgtgactggtagcaagaaagaaaaaaaatcttattctacatacaagtggattgcttaacaagtcagcacagacacgtacttgtttgtacaatagagataaaaattcctgtataaaaataattcagctgctgacagcaggcattgttgttggacctgtcttttgtgcttgtcccagctctgggtccccctcccctcctatctgcttggggcagcctgctgcctgcacactgctgaccagaagttaattgctatatattaagtatataggtattgtatttaaagaggaatatctcaaggcttcctatatgcattccactttactttctgatgtgattgcggtgttgccagcaggggggtggcaggcaaacgctctaatagggaaaatcacttgaaggcagttaggggaaatttggccttcaagtcccatttgctctgtagtgtagcattggtttctaaacttttgtttttaatctaattctgatttgccctgtcacatcccatatcaaccctcattgaactctactcatgtagagtaacattagtgtcaaacggaattggtcaggactgtggacctgtggctcatacagatggttgtggatgtgggttccatgcagctctgcatcctatcctttctaataaatgttaaaatgtggcacatttctgagcagggcccaaggataagagagttaagaaatcagggggtagtacctgagatttttctcccttctctttccgatttccttgataacatccacatttccggtaagatcaactctaggagaaagtctgaggctgggggagagagggggagaagggtgcggagagaggttcttggaatattcttcgatagcagttcaaatgaaatccccacagcagagagcttttgggtctagcagtggagcggtaagctgggacacgtggcctttcgaagctgttattctcagtctgacttgcacaccagctgagataggacttaacatatactttcttgctttcacctgggttggagaggttggggttgggaggaagaggaggagttcattgggaattc

SEQ ID NO: 23488 - DNA, 2300 bp, Homo sapien
ggtccgaagctccgccgagctaggcaagccagtcattttctaacacagtagacttgaaactttactaagacgaaacaggaataaacagccgcttgccggcagggctgcgggatgggtgagcgcgtgcaagcccggggccctcgcttaaaacaataaagcccccccaccgggtgggtgagtttacggaagcgacaccctttagactgaagagggggatgagaagacgggggttgtggaaccgctccgaggagagggaaggagggctcctcgctctgcagacacactcacacatatccacctgcagctcagggtctcgcgggccatggcgacccgtctccaccctgcaccctccgcacctcccttggacctgagtccattctcctctccccccaactccttccagatttggaatcggactgcgatctccccggcggcggcggcggcggctgcagagtggtgctggcaggcagggaggctgggaggcgggaggcgccaggggactttacaggcacgtttctgaataaactttccaatcgcagggggtgctgttgctgtacattttacgtaaaactgaaagtatcccacgccagagtgaagcccgctttttgacagcggcagcacgcgcgtgtgtgtgcgtgtgtgcattaaagagacagggttttatttccaacaggtcttccctaatttccagggaacgtctgcagaaaggcgagagggggctgctggctcctgggtgtgcgccttggccggcggcgcctggggagcgcggcggtgacccgaggcggtcatctcaccaccgtggtctccccgctgctcctgcgagcctgtcgctctctctccattcccattttctctttccctgggtaacagcacaggaacagttgtgctctgcccgtaagaaacattttcttcccatccctctgtgcttttgcagttgctctggagtgggagggggtgtgtccctcccagggacccggctcggggacctcccgcggcgccgtgagcacattcccagggactgggactcccgggactgcccgcgctttgtcctcggcctctcagagaggtggacgcctcggtgcctctcttgcccaggcccccggcgctcccctccgggggccagactctggctcctcgttctttattcctcgggctctctttctgcgacccttaggagccggggactcggcgctttcagttgcattcagacccagtcgcttggcggggcgctcagattcccggtccctggctcggccttgggggcgccctcgggccccggcctgcgccgcctgcctctccccggtcccctctttccaggccgcgcgggctcctggagacttgggcgctgcccttccggacccgcagccctccaaacttaggctggattccgcgttgccgtgcgctccctcccacctcccctcgcccgctgcggagctgtaacttggaggctcagctctcaacttcgggtgatttttctttgctgtcctctcctcgggcaaagtttcccgagcgcagccgcgggctcggggcttttacttcggcccctggcgtccacacgcggggagcgagcgcggcggcggcggggaggggaagtgggtgtgcgtacggaggagggtgtccgggagcaactctacctggcttccctccgcccgcgcttccccagcccggggctgcagcctcccggtgcactctcgctctatttttttcttttttgaataatctttcattttagagtccgcgtgtgtgggggggagcagggcgcacgtcttgctcccccccaccctttcctcccacccctgccacccctttcttctctcccggccacgccaccgccgcggcgctcgctgcggccactggtgagcccgcggccccagcgccccctcccctcggcccgcccctcccccgggggccgcgtctggcgtccgcggagccccccgccccgcacctccccctccccgcactggccattggcttgtcctggtctctttttcatgtccagcccctgatgtgtgtccattggtgtgagcttccccttccctcctccccttctctcctgctcgccctgcccatgttttgtgtgtctctgtccatccagactcctgacgttcaagttcgcagggacgtcacgtccgcacttgaacttgcagctcaggggggcttttgccatttttttcatctctctctctctctctccctctatctctcttctctctctctccctctttttttttttttttttttttttttttttgcttaaaaaaaagccatgacggctctcccacaattcatcttccctgcgc

SEQ ID NO: 23489 - DNA, 2300 bp, Homo sapien
atcacgaggtcaggagttcaagactagcctgaccaatatggtgaaaccctgtctgtactaaaaatacaaaaattaggctggaagcggtggctcacgcctgtaatcccagcactttgggaggctgagatgtgcggccaacatggtgaaagtccatctctaaaatacaaaaaattagccaggcgtggtggcgcacgcctgtagtcccagctactcgggaggctgagacaggagaatcatttgaacccaggaggcagaggatgcagtgagccaagatcatgccactgtgctgcagcctaggtgacagagcaagactccatctcaaaaataaataaataaataaataataaaacactgcttggctgggtgtggtggctcacatctgtaatcctagcactttgggaagccgaggtgggcggattacctgatgtcaggagtttgagactagctggcccacatggtgaaaccccgtctgtactaaaaatacaaaaatatagctggacgtggtggtgcatgcctgtaatcccacctactcaggaggctgagcagagatcacgccactgcaccccagcctgggcaacagagcgagactccatctcaaaaaaacctctgcctctcgggttcacgcaattctcctgcctcaccctgctgagtagccgggatcacaggcgcaccacgcacccagctagtttttctatttttagtagagatggggtttcaccatgttggccaggctggtctcgaactcctgacctcaagtgatccacccgcctcagcctcccaaaatgttaggattacaggtgtgatccaccacaccaggccacgtcaggtttttgttgttgcttttaagtagagatgggtttttgccatgttggccaggctggtcttaatagaactcatggcctcaagtgatccaccagccttggcgtcacaaagcactgggattgcaggcaagagccactgcaccttgctcaggttttcaaaaatatgttttgtagtttttatttatttatttatttatttatttttttgagacagggtctccttctatcactctggctggaatgcagtggtgccatcctggtttcctgcagcctccacgtcctggactcaaagagatcctcccaccccagcctcctgagtagctgggactacaggcatgggccaccatgcccagctaatttttttaaaactttttgtagtgacagggtctcactatgttgcccaggctgttctcgaactcctggcctcaagcaattctcccaccttggcctcccaaagtgctgggattacaggtgtgagccactgtatcttgcctcaataaatattttttaatgaattaatcagcaagtaatctcctctatttactgtgactctgagttatgttcaagagcaagcagttcttgacttccttttctttgtaatgatttagtgcttgaaattacttctacctttcagcattttaaaattggttattattttctcattttcatccccacactcacatcgaacatgatttccactatttaaaagtgtaagatttttgtttcagcctgggatttatcctattgcaaactgctagctactattttcaacctctgtcagctaaatgccagaatgtcactaatcaaaggtggtacttaggggtgaagtgaacagttaagcctccaatttacaagcttgtttttccctgggatacttgtgtgaaagtcgtatgttcctgggtgtgaccctttcgagacaaaatctcaactggtgagttaattatgtataactataattaaatcaaagatgtaggataacggaggcgttgaaatagtttttgctaggcaagggtgtgacctttttaaaaaatgtatgatatatgctgccattcgagaggcaaggaaaacatatctccaaatttccttccaagcggtctaccggcattgacagtaccgcggacaaaggagagtaccaaataaatactccttcgaaccaacggtatactgagagccctgagcttgtgggcggggccccggagcctcccgggacctaaaggcagagggggcgtggctgagggtggtccagacctccaggggcggggctgagacctgcgagaggcaggctgggaagcggcgccatattggcgtcggccgcgctgtattgtcataaatagagccggttttgtggtgttttcactactcggttggatgcctcagccatagtaagtgggaaagtgagcgagcaagcgagctactagcgaccggaggaaagtgaacagggggagaagggaacagcaagaacaggactccagagcgata

SEQ ID NO: 23490 - DNA, 2300 bp, Homo sapien
tttgactttcaggtacttatctgtaaaatggcacttattcaataccccttaggattattgcgattgagtgatactatatagatatgtagataattactctgtcctattcacttaccgtatatatttacatatgtattacacaaacaataccaaaacactgctctagctttctcagaggtaaaaagccaaatctttaaaaagaaattaccacttgaaataactaattgaagttttgtttgttctacaacaaaataaatacagaagataaattaaccagtattttggtttctggggtttttttttttttttttttttttgagtcattttggaaggtatacaggctattttatcttccatttgattctttctccctctctgcctaatgagattttttttttttttttttttttgagacggagtttcgctcttgttgcccaggctggagtgtggtggcgcgatcttggttcactgcaaccttcgtctcctgggttcaagcgaatctcctgcctcagcctcccgagtagccgggattacagacgtccgccaccatgcccagctaattttttgtattttcagtagagacggggtttcaccatgttggccaggctgatcttgaacttctgacctcaagtaatccacctgccttggcctcccagagtactgggattacaggcatgaggcaccacgcccggcctctaatgagatctttagctattacagcgtgtcttactctgtgtacttagtagtggtaagacagtgttttgaccagttagaatccaaaaacaattaaacaatctctattgtatgttattttttacagggctaatttattcaacttgaaagattgtttctaattttgagattacattcttactcttggtgttaatggcccttcatggaagcatggtgaagataaatggtagtgttggtcgtttagtgtgtatgtttttactttcatagcaaaattagaagttttgccaacccctgttggtcccagaatttattttgaagttgattagtttgtgtaaactcaaaatctcagaacttgaattggctgagcgcgggggctcacgcctgtgatcccagcaccgtgggaggccgagactgttggatcacctgaggtcaggagttcgagaccagcctggcaacatggcgaaactccgtctctactaaaaatacaaaaagtagctgggtgtggtggcacatgcctgtaatcccagctacttgggaggctgaggtaggagaattgcttgaacccaggaggcagaggttgcagtgagctgagatctccccaatgcactccagcctgggagacagagagagactccatctcaaaaaaaaaaagaaaaaaaagtctcagaacttctgttgtactttattcaagaccgtagtttcttgatggctaagatgtttggagggtggctcatgtatcttccaaaagattgccagtagtataaagaattttatttcaatgtgaagatggtatgggtaccagtctaaaatgaagagaataattaactagaatcacaaagtactaggactgtaaactctgattcaagcagaggatgttaacctcggtttcccaaggacaaatctaattgtgatttctttttaaaagccagattatttcacaaggaccttctaatgggatgttttcatttctttcctggggaaaaaaacccattgtttttactaaaagctttatttcaagtggttgactgcttttcaaagattctagaatctggatggcacttgacttaagtctgcagggtagtggaggtggccctggcacagatcccaatcaaactctgggtttgagctgagtggtgttggtacaattgtcttgatgccaacacatgctgcgcttggcttgaaaaaacatcctaaccatgaaagctgcaggcagtatgaatagccccttcataaacataaacataaaatacccatttttcctttacaagaaagtgtctgccactactgttattactaagtaaacttttaaggtagctaaattaacatgagtagattgagagattcagtgtatcagtatggtatatactttaaattttttgtttcatttttcttattttcttgaacagaaacaccgtgctggacagccagcgtcaacaaaagcattatggaattacctccccaattagtttggcatctcctaaagaaattgatcatatttacacacagaaattaattgacgccatgaaaccatttggagtgtttgaagatgaggaagaattgaaccacaggtatgtcattgaaaaccataaaatatttgacagtgcatt

SEQ ID NO: 23491 - DNA, 2300 bp, Homo sapien
ttcactctgtagaaggttagaacaatctaataattataaagtttcatgtagtacctgaagtgagatcatgtgtaagttaatttgccttattcatgtcagggaatggccaaatcctgtgctgctgaagcaaccagaagaaagcaatttgaatttgcctgtctgggatcctcgggtatgtgatttattatggagtttctttaaagcttttaaggaagaggacatttcactaaattacagtctagttaaagatagttcctcttgtctctgttcttccttctatataactatagtccccttcctccttctgctgtggtttttgttttgttttttgtgcagatgattaggatcactaatgctgatccaaatgttatgtcattaaaaatcgcccatgtaagatgagtgggtgtcttatggacagtgtcataatccagtgtggaaaaaatgtctcaaaagtaattggatacttggctgggcatgatggttcacgcctgtaatcccagctctttgggaggccgaggcgggtggatcacctgcggtcaggagttcaagaccagcctggccaacgtggtgaaaccccctctctactgaaaatataaaaaattagccgggcgtggtggtgcacacctgtagttccagctactctggaggctgaggcacgagaatcacctgaaccccagaggcacaggttgcagtgagccgagactgtgccactgcactccagcctgggtgacgagttgagacttcgtctcaaaaaaaaaaagtaattggttactaataataaagtactaaagtataataaaagatttactttgcaatacaatttaaagcaaattcattgttccagggtagcataattctcccatatcttgcattttaatttgcttttagagtgagtgctcattcctctaggtaaccaaggggaagtcatccattgagtgggtggtgaaaaaggattgagaaccattaaaccagataatgctttttgtagttataatactgtatttccttgattataagagatcattgtttataagatgcacatcaatttaacagcttttctgaggaaaaatatacttctgcagtatttcctttgactttgactatcagacatatccaacttcagaaataaatgcagttggggagggaaaatgtacttcttaaacttgaggaaatgtagtattaaatttatatttcatattcttcagacttttggggaaatgaagtgagaacaactgaaataggagaatagatcagttattctgcttctaatttcacaggtaaatccatcagataggtatcatctcatgcccataatcacccctgcctacccacaacagaattctacgtataatgtgtccacatcaactcgaacagtaatggtagaagaatttaaacaaggtaaacatgtggccctgttgccctttacatattcccacaagtttttggttaacagttttattctctgttgcagctatggattggcagttagagttatacctattctttctaaaaattctttcaagtatggttattttgttttttagtaatgagttttcaaaagtatatgataatattaaggccaaaaatggagccagcccagtctggttgaaactaattttttgtgttctaagaaacaacattatatatatttatattttgttactcaagagtttggtgggccgggcgcgatggctcatgcctataatcctagcactttgggaggccgaggcgagcagatgacctgaggtcaggagttcaagaccagcctagccaacctggtgaaaccctgtctcacaaaaattagccggaagtggtggtgggcacctgtaatcccagctactcaggagcctggggcaggagaatcgcttgaacccaggaggtagaggttgcagtgagccgagatagatccaccacactccagcctgggtgacagagtgagactctgtctcaaaaaaagaaaaaaaaaaatttcgtctggtggagtttgagattttgtagtagtagagtgatttaagagctggtcccttttcaaaatcattcttcttctttttttttttttttttttttttttaatttaggtcttgcagtcacagatgaaattcttcaaggaaagtcagattggtccaaactacttgagccaccgaatttctttcaaaagtataggtacgtgaaattttgtattttgtatgtatgtgatttttttttttttaaagaagaatgttaaacatagttaatatatggcaggtgacagctcttttatttcttaagcaagagagaatagattaacaaaaatcctaaga

SEQ ID NO: 23492 - DNA, 2300 bp, Homo sapien
tgctgcctgctgttcccccagctggaatgttctttccctgaatctccctgtgaatggcctttttttttttttttttttttttctgagacggagtctcgctctgtcgcccaggctggagtgcaagtggcatgatctcggctcaccgcaacctccgcctcccaggttcaagcaattctctacctcagcctcctgagtagctggggttacaggcgcccgccaccacgcctggctaatttttgtatttttagtagagacggggtttcaccatcttggccagactggtcttgaactcccaacctcgtgatccacttgcctcagcctcccaaagtgctgggattacaggcatgagccactgcgcctggccggctctttcttaaactgaggactcagctcaaatgtcacctcctcagaactttcctctcccccagtcacttttcattttgaaattccttcagagaactgaaaatgttttccgtctctttgaaatgtatgtacatattttaaaaagctaaataagcctcttgctagttttgcgtcctcagaaggtctttcttgcgggcctcggagccatctcttggaaatgtgaacatcaaggatggtgctccatgtttctgtctctaggagggtttaagccttggctcttggttccaagataacttcccattattttcctttggataaagacaattaataggtatgtaatggattgtacgtgcctgaccatatgaaaaggtgagatttccttttttttggtctttgcactctcttcagtggattgcctgtgatgtgcatcatggtacgttttagtacatatccaataataaaactgtttcattcttttgttgtacattgcgcatttcgtggaaagaacagtttggggttggcaggatattttaaattatttgcccatatgggtcccccagttttgggcacttgtatggcaggctgatattccccattacctctccgtactaattttaactagtaagggacaggggcaagggcatggagctttggagtcagacaaccctggctttaaactgtgccttttatcagcattctgaagtactgtatgttgaagtaacttctctgaaccccgaatacttcatctataaagttaggaataataaatacgtcatagattaagtatggacattatctgatgcatagcaggtactattcaaatgaaggaaacgaagttatcctaggtcctttaatgcactaaatgtgtgctccatttccgcctttcttggcatctgtgtgaaatctcaggatatagtgtccactaaacttcagtgcactgcctaatgagacaacgaactccaagtgcggaccttttgagtttaaacgggtttcagtaggtaaaatacgtaaagttcacagtaccctcgcaatttagatggaggaaaaaaaatcagtcggggggggggtccccgtatgcaaatacaggaattacagaagaagacaggacccccgccgcagcaccacttccccctacagggcgcaacgtcccgccgctggcgcgggggtggagatttgcatgtgcgaagtcgggaagagggggaaccacctctcgaaaaccccggccgtcgccctcccaggccgggagagtcggccccgcgcgcccccaaaagctccccagcggccggccctctctacgtcatccgcaccctcccgcccgctcctgaactttaaaccacactcggaagaacaacctggaggagggggatttctcaggagccagcggccttctcacgctgctagccgtcacctcccggctcccgccgttccctgcgctcccgaagcccaccccaagctcccgctccctcgaccccctcccaagccagccgccgcagcagcgccgggggcgtatgcgtgggggccggcggggagcgtgcgcggggacaggcaggggcggggcgctgggggcggtcgcgcgcgcggcggccgcgaggtcgccccgcccacgcctccgggtgagggttgctgcgtcgggcctacgtcagccgcgggaaattcccctcccgccaggctgctcgcctctcggctgggccagcactcggctctccccgctccgccccctgcccctggctcccgtacggtggacggcgacgctgggtgacccggggtgcaagaattcaggggttgggaaggtgtgagccgcaaacccagcggagggcgggaagaaggaggaggcctctagggtggtcgggggactgggggccccgccggcagaggtccctcggcctcctgactgactgactgcggccgcctccggccaggacgctgggagctgcctg

SEQ ID NO: 23493 - DNA, 2300 bp, Homo sapien
aaagggaaagttgaaatattttaaactacacttagtattctcacaaccacaaacaaactgaaatcaaatgtcatgtgaaacaccccaatttccttttctgcctacagcaatagctatggcattgttctgctcaaccttttaaaaaggttctttaagcttcctacttcctcatctctactagacatcagcctacttctgagggtcactggaccaggcagtttggggataagagtcaagttcataaacggggccccctcttcattctcttagtacagcatttaacatgcatttagccctccctgcctttgctcacgctgcttcctctgtctggaaagtgtcccccactcaccttgccaaaatcctggtaaaagaccaactcgaccccaggctacttgatttatccccccgccccggctctcccgtccccctcaaccttaagctccaggcagccccaaccacatctgtgtatataggagactttcttgctctgcaatgtttcttacaaacttattcccccccaaagggagagatcgagcatttattaagggaaaatatatagtcacataagtgataaagttgtattcattcctactcattattttaaagctcggatattctaaaactcctctttccccttatttccagcgaggaggaagggggattcaacgtctctattcgtcagattaggaaccttgagctttatctcacagtaaaaactacattttttttttttttaaatagagacagggtctccctctgtcgcccaggctggagtgcaggggcgcgatctcggctcactgcaacctccacctcccaggttcaagcgattctcctgcctcagcttcccgagtagctgggattacaggcgcgcgccaccacgccccgctgatttttgtatttttagtagagacggggtttcaccatgtttgccaggctggtctcaaactcctgacctctggttatccacccgcctcggcctcccaaagtgctgggaatacaggcatgagccaccgcgcccggcctacacttggtcgaagcaacattaacacttaaaataccacggattttctaattcgtgttaaaataccacggatgatttttaaagccgtgacacattttgtacaactgtcagtacaagggggatcacctctttgcatttgatgaaattaaactaaaaagggggagagagcttgcccgaggtctgaaggttcctcattcctgttctaaaacataaaaccaccatcttcaatacatatacatttttaatgagaactcttcgtcctcctttggttcgcttatgacttccctaatcctaaaatcaagtcgttgggaatttctaaggttcctgctatgacaacaggatcgaattacagagcgtggcttggattctgcacgcaaaccctgaagcaggtaacttttttaaaagctgacaattttaccatatgagattttaaagacagaacgcgccccagcaaaaactgagctccctaaactcactgcggcaggacccccttcagaagagctcctttcccccggcccaggcccgcgccccatgaacactcaccggaggccatggctccgctccccgcaccttcccgcaggcagctcccagcgtcctggccggaggcggccgcagtcagtcagtcaggaggccgagggacctctgccggcggggcccccagtcccccgaccaccctagaggcctcctccttcttcccgccctccgctgggtttgcggctcacaccttcccaacccctgaattcttgcaccccgggtcacccagcgtcgccgtccaccgtacgggagccaggggcagggggcggagcggggagagccgagtgctggcccagccgagaggcgagcagcctggcgggaggggaatttcccgcggctgacgtaggcccgacgcagcaaccctcacccggaggcgtgggcggggcgacctcgcggccgccgcgcgcgcgaccgcccccagcgccccgcccctgcctgtccccgcgcacgctccccgccggcccccacgcatacgcccccggcgctgctgcggcggctggcttgggagggggtcgagggagcgggagcttggggtgggcttcgggagcgcagggaacggcgggagccgggaggtgacggctagcagcgtgagaaggccgctggctcctgagaaatccccctcctccaggttgttcttccgagtgtggtttaaagttcaggagcgggcgggagggtgcggatgacgtagagagggccggccgctggggagcttttgggggcgcgcggggccgactctcccggcctg

SEQ ID NO: 23494 - DNA, 2300 bp, Homo sapien
ggctttaggaaaataccaccagctagtacttacctatttaaagatgtagaatttattatcctctaatattcttatcagttgtttccacaactttagtttactattggactttcaaaaatttaaagaattacaagtaaaattcattaaacacttgtgtgtgaatagtaatacacagtaattagtacagcatgttgcttcttcaacaaattgagttttcagggaaatcagcaagtaaatgaaatataaatttttggtaaaagtatcaaacattcatcttgcccatttttcctcttaaactttattatctaatcaaacatagttttccataagatgtaataaaatatagataaggttggaatatttgaggatccatttgtggaactgaatttaatgagacttcattggtgatacactcaatttttactgggtaattagctaataatgttggtcactgtctcacagttcaagtagctttaagatgatgtggcaaggaaaacacaaagcttttgggtaaccagcgttcttaaatgtatggtttttgaccaggtgaaccctttagaagtgatttctgttttaaaagtatgtacttaaaatacctttggctgtgatgaatgtagatcccagcagaataccaaaatcctattttttttgactgagtatttgtagatgcttaatgactgaaatgaatttggaggcactgatgaaagtgatttttttaaagttctcaggtactgttcaattatttaatgttaagtttagtatcaagatacagttgtttttaaaatgccaaaatgctgtttattatacagaatattttattacatttgcaatatctttgtatatagtgatttttttcttgataataaatggaaaaattctaaaacacttgctgaaattttgttgctatttaacttttaaaatatcagattttcttcatatttatagcatcttcctaacaggaaaaggtagttttagttgcttagaaacattagacatttttatggaatgctgttgctgaatatggttgcatttgtaactgtcctttgaaataattttgtagagtactgaagtgcctttttacaagatttttttcctttttccttttctggcttaaccaacaaaaatctgttttcagagtcctggaggctgaaagtccgagatcaggggtactaggacggtttctgctgaggctctcctcctggcttgcagagggctgccttcccatcatcctcacatggtagagagagagaaggatggagatctagggtgtctcttctcttttttgagacagagtctcactctgtcatcaaggctggagtgcagtggcacaatcacatctcactgcaacttctgcctcctgggctcaagagatcctcccgcctcagcctcccaagtagctgggactacaggcgcatgccaccatgcctggccaatttttgtattttttgtcagagtttcatcatgttacccaggctggtctcaaactcttgggctcaagtgattcacccgccttggcctcccaaagtgctgggattacaagcgtgagtcaccatagctggcctggcctcctcttttcttaaatccttttttttttaattgacaaaactgtatatattaatatttatcttgttcaacatgatgttttgaaatatgcatacgttgtggaatggctaaactgagctaatgaacatgtattacttcacttagttattttgtaagaacacttaagatctactcttagcaactttgaagaatatatttgttattaactatagtcaccatgttgtacagtagatctcttaaacttattcctatcaagctgaaattttaaatcctttgaccaacatctccccaactccgcaacccctatcccactctcacctccgcagttctagtaacaaccattctaccctacttctatgagttcaactattttagattccacatataggtgagatcatgcagtagttgtctttctgtgcctgacttatttcacttaacataatgttcttcaggttcatccacgttgtttcaaatgacagaatttcctttcttatgggtgaataatatttcattgtacatatacaccacattttcttcatttatctattgattgattgatgcataggttgatgccatatcttggctattatgaataatgctgcagagaccatgggagtcagatatctcttcaacatactgattttatttccttgggatacatatacctaaatagtaggattgctggatcatgtggtagttctattttaaattttgttttctgtttatattcccaccaa

SEQ ID NO: 23495 - DNA, 2300 bp, Homo sapien
gcttaccaaaaaatagcccaagactatttaatacaatcttatatagttaccatttgttattaagttaaacctcagttggtattatgaagaggaaaaacattaagctaaacctaaaaaaaatgaatgggtcatttaagtttcagaaaggagcctcattacaatttcagatttgagtataatttccatcaccctaattcaactatttgagctttttttaagaatacatgtgacttgactagtattagattactaaccatttcccatctctatattaaacataaatcacagataccaagattcactttagatatgaggaaaatggttttaatggacacaaaggagtcagccacgttggaaccaacatagtttcataccacgttgaaaccatgtgtttgatatgcaaataacagcaaataattttttcactcttgtcaatgccaatgcattgaaaggcccagaaaatgagaaaaggataacaaacttttgataaaaaggtaagaatttctgtgtggatgttcctcagtttctgggaaaattttgctacaaaagagatttaaataatttaggaggcagtcttttgcatggtatttttggcttacctttgaatctagtggacctgtaatatgtaagaatgaagaatgtgcttagcaaactgaaatgagaagatttctatttcttaaatttctattcctgagattatataaaatttcacgcaaagagtaagcattagctttaaatacttcttccaaatgttcctagaattttgagacaaagattgttaaaaattaatgtatgtctttgttttaggcagaactggaaatattaagtagtgagagtactatagtttcccttttgcctacataaaagcattttaaaattagttttatgatttctttgtaagctttatttaaattcaaagtctttttcataacacttaagagaaagagccctttgtacttcttagtatctcttatatagtcccaaatatagtctgtggtttattttaggaaaaacatcaactctgaatacctggaaaagtcaaaagaaaataaagttggtaaaatgaaaaatgtccaagtaagaaaaccggttacatttgcaagttatgtgaagtaaatttagaagttaaatttccattttgtaagagaaaaacatcttacttggcaaatcttttcttttggagctaattattctttgatttttaagtccacataagagaatgaactttgatatcagcttttctgattttttaacaaaggctacccttgtttattatgaaaaatattacttttatgattctattttgaatttttaaattttgaaataattccaaacttacaggaaaagttaaagtacaaagaacctttttccctgaaccatggagccagtgctgtctcatgatcttaaaggcttcagtgtgtaatttctacaaacaaggacattcttttacttaaccacaacacagtgatcaaaaccaggaaattaacactggtatattaccatctaacccacagaccccgttcaagttgccagttgtcccatcagtgtccttcatagtcaagtgctcacattgcattttgttacgtctctttagtctccaccactcttaaaagaagtttgtctttcttgactttaattactttaacatttttgaacacttcaggtcagttattttgtagactgttcctcaatttgggtttgcctgatgtttcctttttattagattcagattgtacctttttggcaagaacaccacaaaagagagattgtcttcttgcatcttatcaggtgtcacacagttttgatttgtccagttgctggctggggctttggtcaattgattaggtattatcacgaggcttctccacttttatggttattctttttgccccttgtagttaataagtatcttgtagagagatcatccaactttcactcactagttttagcatccattgaagatgttcacctgaatcaatcagtaccacaatgattgccaaatacagattttctaattccatcattccttttacatttgttggttggcattaccctaaaaggtagagctttcccttctctccaatttattcattgatttatatcatgtggacttgtggcttattttatttgagaagttgtaatttgttcgtttggccagtggcgaccccttcaagctggcttctgtgtcctttggtatgtccccatcattcttggagcatgttcttactttctaatacaaaaagacattccatgctcatctttgtatttcctctgcactaactctgcaaggtgctttttct

SEQ ID NO: 23496 - DNA, 2300 bp, Homo sapien
ctaatttttgtattttagtagagatggagttttaccatgttggccaggctggtcttgaactccagacctcaagtgataatgcctgcctcggcctcccaaagtgctgggattacaggcgtgagccactgggcctggccagatcttcattatttagaggctgttttccacatattctgttttctttcttgaaaataccctggagcccaaatttacttaggcaaccctaactatgcgtttctcaattctggtgtttcaaagttgtcaccttgtcagcttgtatggtgtgtccatacaagcctgattttcttccctctgctgactcacatattcccctgaattagaattcagccagaggcaatctgtttttagtagtcctggctgctgaactgatttttatggtgaagagttctatgtaactatatgcctgtcttcctcattattttgtgcaagaatcttggtaagtggccccaaacatttagcaacttgcaagtaagtaggaagttttagaggtttggaaaacgcagactagaagaatcacgtctttatactaagctgttgggaggagcttcacccttccacaaattttaagcaagttcatttgaattatgaaactgcacaaattaaaagatgccactgtcgttcatctttatgaccacagttacagcatgccataagattgccatgcaatgattattttctaaaatatgggcagttgatcattttaaggtaatatgaactgtttcactaattagaagatcttgttttgctgaacaaattaggttgtttgaatttttagtaccccctccttcccggtaacaggagacagatttgccttcattctctatatagtatttttttgtgagtttatttaaattgcaaaaattggcaatttaagcaaacagttgctctcaaatattttgtacttaatttgtttttgttgaaggtttttttgtttgtttgtttgcttgtttgtttgagatggaatttcgctcttattgcccaggctggagtgaagtggcatgatctcggctcactgcaccctccgcctcctggggttcaagtgattctcttgtctcagcctcctgagtggctgggattataggcacacgccaacacacctggctaatagttttttgtatttttagtagagatagggttttaccgtgttggccaggctggtctcaaactcctgttgtcaggtgatccgcccgcctcggcttcccaaagtgctgggattacaggtgtgagccactgcgcctgaccttttgttggaggttttactcatgaaaggggcagatttttattttgttaacaggtggttgccatttagtcatataatcaaagtaaagttgatgtctttagacctgctgatcaactttgttgttgttgttgttgttgttgtttgtttgtatttttgagacagcatctcactctgttgcccaggctggagtgcaggcgccagccaccacacccaactaatttttgtatttttagtagagacaaggtttcaccatgttggtcaggctggtcttgaactcctgacctcaagtgatctgcccacctcagcctcccaaagtgctgggattacagatgtgagccactgcacccggcctcaatttgttttaaatagttggccgctaagctatcattaagggtagtccagtattatataaggtagactgatcagatttttttgtctagtctgaatgccaaggcccttagccacctagaggttctctgaaaatcactgacatgaggcaaattgattaatgggagaaaaggcatacacgtttatgtaatgtgtatacacaggagccttcagaatgaagacataatgataacaggggaaattgtccatttttatgcttaggttcatcaaagtatggatggcacatagaaatatgattgaacaaaaaggtaatcaactcagtggggaaacccagcaagcctgtctaggttcttggcctctcagagcatgcattccttccttctgggtgtggggcaggacctgccatggaatggggagtcttatgacctacagtcagacaagagaggttagatcatttcttcatcttttttttttttttttctgtttctttttagagacaaggtcttgctctgtcacccaggttggagtacagtggcatgatcttgattcactacaacctctacctcttgggttcaagcgatcctcccacctcggtcttctgagtagctgggaatacaggtgtgtaccaccatgcccagctaatttttcaatttttttgtagagacagggtcttgtgggttgttgcccaggc

SEQ ID NO: 23497 - DNA, 2300 bp, Homo sapien
taatgaagatctggccaggcccagtggctcacgcctgtaatcccagcactttgggaggccgaggcaggcattatcacttgaggtctggagttcaagaccagcctggccaacatggtaaaactccatctctactaaaatacaaaaattagccacgtgtggaggtgtgcacctgtaatccctgctactcgggaggttgaggcaggagaatcacttgaacccagtaggtggaggttgcagtaagcccaggactttgggaggctgaggcaggaggatcatgaggtcaggagatcgagaccatcctggctaacacgatgaaatcccatctctactaaaaatacaaaaaattagccatgcgtggtggcacgcacctgtagtcccagctactcaggaggctgaggcaggagaatcgcccgaacccaggaggcagaggttgcagagagccaaaatcgtgccactgtactccagtctgggcaacagagcgagactccatctcaataaataaataaataagatctgtgtggtcaaggtcaagtcattactatttactagtgatctggatcccttttcccagcccatttaatctactttgatgcagagaagagatcggatgctgtgaggggcgaatataagcatttacagtgcatctctgactacatacacagagaaactgtttctgtttcacctgttactctaagttattttttctccattagttaaggtcaagaattttacttaattcagaagtaacatttaactcaaaaagagacagaagaaatacaccctcttccaataaatcaataagcactttaaaaggacacttaatgaagatttccctcgatacttaaatagctatattaaaatttattttattttccatggctagaagacaatgtttatttttccagtaagttcacaagaacaaaggtatcatgcaaagtaaataaatgacacattacaatctcctggctctgagaagttcccaaacctgattgatgagaattacaaaacttccagtcctgagtaatttgaagaggtctaaaaatagaccccaaaaaagacctcttttgaatgtgtgttaataaacgagctatgaatttacaaacctctcaacatcattttcacctaccaacaatttatcaacttctcaagaatgttaacattaaaaggagaaaatacgttacgtcttaaatttggttttttcatcgtgagataattaaatgccaggatttcataagatattagaaatcggttgtccatattagatttattatgtttgaaagcaagccctgagaaaggcattccacaatgtaagttttccagtgttggttaccctcaagatgtttgcttttcgtttatgtgtttgttttatagaaataactctgtaacaagttgctacaaagccgcctttcatgtgtcaggctccctaggaggactgaatccctcctccccaaatcaaggataactagcccagtctctggcttactggaggagaggaaggactttattttcacctcttggacgattacaaaaaccagtcatcgaaaacgagaaaaggggcagggtataagaaaaactagcgaaatgaccagactgagtctcatatcctaagatcttttaaaactcatttccctaccgaagggtgtcattcgtaacgcggcgtggggctgggggtgtggatttacggagaaagaggtgatcacacttcactgggcttctgaaacattcagctctggaatctactgtggactcttgaaaagttcatcccgagatctaacctcaagcctcagttttcgccaagcaagcccttcccccttcggtcaggtgcaacaaacttcccactcacccctcctttgctaacaaagccgctccagcaggagagaaacgaactctctcccgccacacctcttttgcacccagtctgcactccttcacctcttacctacccgcctcaccttctccccagacgccggagcctgagatttaaccccttccggccctcgaagggaagagggaagactaaagacaacgcacctattgcgtctagcaattctgttccccgaggaaacgtgcgttttagaacaaaagtaccagcccgctctcgctaggactaagtgagcttctcccttcttgtttgtagaggaaatccgaaaaactgcctggtttgccacctcaccctacctcccccacgagcgaaggagtgcgtgcggctttactcccagcccgactggtccactcccagaaaagcctcggtgggactccgacgtctagggagttgtagccgctaccagaaatatcgatga

SEQ ID NO: 23498 - DNA, 2300 bp, Homo sapien
agccaatagaaaattgggcaacagaaaaaacaaaaacagatacaaaaaataatatataaatagtaacatgtaattagatataaaatatatattattgttacattgttaagttttagatataaaatgcatataaatagcacaaacctaagtactaaaatataaaaacattactgggtatgcgaaacaccaaataaggacaatagtcaccactataaagaagaatgggagagtttagccgtcttttattttgaaaaattcgacataagtctggcaaatgttaacactgtttaaagttgagtagtgaatatataggtattatcttactctctactggtctctgtgtttaaaatatttcacgataaagtgggaaaatggttaattttacataaaaagaactttaacagatgcaaaaaataaaacctctctcattcgacaagcagcctaaatggggaaaaaagaacccactcaaaaaaaaggtagcagataatgtcaccgtggcttaccagcctaatcaaacttattacttgttatgtatatatccttattaaactaagtcgttactgtgttaaagcattttagtgtttaaataaaagatttcagaatacagcagaaatacattccaatatgttggggtttttacgcttaggaaaacctacaatagtaggtgatttgacatttgaatcacacctatctgaattaagatgtccagcactaccaaacaaaagccacacgaggccacgaaacactcccaactctgcatgttttagcctttttaaagtcctagaaaccaactgatactgattaaaaaccaaacaaaaaaaaaatacaggcctcagaaaaatacactattttgcacacaaagtccatccataggcctcagatctagaactcctgctttaaagttgcttctccaatctcgatccgaaacactggctgagttatgctggaaaagaatgcaaagtgtacggggcttgagttcctgttgcgtaaaacctttccggctttcagcaacttctcgagaggttaacacctttaaggagagactttgctccctgtcgatgccgtggctggacaaatgccgctctcaactgctacagaccaaagtctacgctttaaagatagagaagccattctgtcaaagtgaaaacagaagcggtaggtaggaagccgcccccctttctttcaagcacagagacccagagagacgcccaggagctcccgaaaaaaacgttgctgattagagctgccgggtcagaaacagctgtgagacactaaagtccccactggtaagcgccccagctccacctcggcccctatccccaaggttgggtattggttaaaggggggaagggaatacctccactaacaaccgctacaaccgcctcctgccaagtccccgctcgggcccactaaactcacagcctgaagaatcccacactcactggaaagtggggcccggtcctggtcccggtccggctcccggaattcggcgggtctcccagggtttggggggaggtggcggctgggacgccatctcctccgcctcctctcggctcccgctcctacccctgactgtccaggcccgcgtagaccagcacctggagcgtaagacacaacgggcagaacaccgagccgtccaccccgcccacccttgcagtcaggacaaggcttgagttactttgccagctgaatccatacagcgggaggatgccactaatttgtaggaagaaacacgctctttgtatttgccccagaaagagctgcctttctaaacctcagggtaaaggctcatcgatatttctggtagcggctacaactccctagacgtcggagtcccaccgaggcttttctgggagtggaccagtcgggctgggagtaaagccgcacgcactccttcgctcgtgggggaggtagggtgaggtggcaaaccaggcagtttttcggatttcctctacaaacaagaagggagaagctcacttagtcctagcgagagcgggctggtacttttgttctaaaacgcacgtttcctcggggaacagaattgctagacgcaataggtgcgttgtctttagtcttccctcttcccttcgagggccggaaggggttaaatctcaggctccggcgtctggggagaaggtgaggcgggtaggtaagaggtgaaggagtgcagactgggtgcaaaagaggtgtggcgggagagagttcgtttctctcctgctggagcggctttgttagcaaaggaggggtgagtgggaagtttgttgcacctgaccgaagggggaagggcttgcttggcgaaa

SEQ ID NO: 23499 - DNA, 2300 bp, Homo sapien
gctcactgcaagctccgcctcgtgggttcacgccattctcctgcctcagcctcctgattagctgggactacaggtgcccgccaccgcacccagctaatgtttttttgtatttttagtagagacggggtttctccgagttagccaggatggtctcgatctcctgacctcgtgatctgcccgcccagtctcccaaagtggataattataagatatttaaggcaaaaagataaattcccaccaattgtagcttatacaatattcatggaataaaaacttacttgatccataaattcagctcagttccaataaaaatcccagtaagtctttttataaaggactaagtgtaaagagcgcaattacaaagaacagcaatgtgtggaaactcttgacatactacatatcaagacttataaaattctgtaattaagatagtgtggtgctagtagaaagtcagaaaatgcccaaaacagaactacatatttaggaaaccttgatatgacatagatggcattaaaaactaagaatagactactcaataaatggtgctgcgacaattagttacctatatggaaaaaaaaattagatttttatacaaagtcagttccatgtggattaaatgcaaatgaaaaaaccggaagatttaaaagaaaacatacagaaaaactgtcctgatctaggtagacaggatttcttaaccaagacaaaaagcataaacaataaaatatgacaattttggctgtattaaaatcaaaaacatctgtacaaaaaattgaacataaatataaagaggagaagccacacagtgaaaaatattagcaaaatgtagtaacaaaaaaggattagtttaacaatactcttacaaattggtaagcaaagataaagccaatagaaaattgggcaacagaaaaaacaaaaacagatacaaaaaataatatataaatagtaacatgtaattagatataaaatatatattattgttacattgttaagttttagatataaaatgcatataaatagcacaaacctaagtactaaaatataaaaacattactgggtatgcgaaacaccaaataaggacaatagtcaccactataaagaagaatgggagagtttagccgtcttttattttgaaaaattcgacataagtctggcaaatgttaacactgtttaaagttgagtagtgaatatataggtattatcttactctctactggtctctgtgtttaaaatatttcacgataaagtgggaaaatggttaattttacataaaaagaactttaacagatgcaaaaaataaaacctctctcattcgacaagcagcctaaatggggaaaaaagaacccactcaaaaaaaaggtagcagataatgtcaccgtggcttaccagcctaatcaaacttattacttgttatgtatatatccttattaaactaagtcgttactgtgttaaagcattttagtgtttaaataaaagatttcagaatacagcagaaatacattccaatatgttggggtttttacgcttaggaaaacctacaatagtaggtgatttgacatttgaatcacacctatctgaattaagatgtccagcactaccaaacaaaagccacacgaggccacgaaacactcccaactctgcatgttttagcctttttaaagtcctagaaaccaactgatactgattaaaaaccaaacaaaaaaaaaatacaggcctcagaaaaatacactattttgcacacaaagtccatccataggcctcagatctagaactcctgctttaaagttgcttctccaatctcgatccgaaacactggctgagttatgctggaaaagaatgcaaagtgtacggggcttgagttcctgttgcgtaaaacctttccggctttcagcaacttctcgagaggttaacacctttaaggagagactttgctccctgtcgatgccgtggctggacaaatgccgctctcaactgctacagaccaaagtctacgctttaaagatagagaagccattctgtcaaagtgaaaacagaagcggtaggtaggaagccgcccccctttctttcaagcacagagacccagagagacgcccaggagctcccgaaaaaaacgttgctgattagagctgccgggtcagaaacagctgtgagacactaaagtccccactggtaagcgccccagctccacctcggcccctatccccaaggttgggtattggttaaaggggggaagggaatacctccactaacaaccgctacaaccgcctcctgccaagtccccgctcgggcccactaaactcaca

SEQ ID NO: 23500 - DNA, 2300 bp, Homo sapien
ctcactgcaacctctgcctctcaggttcaagtgattttcccccatcagccttggagtagctggtattacaggcacccgccaccacgcctgactaatatttgtatttttagtagacatgaggtttcaccagtctggtctcgaactcctaacctcaagtgatcctcctgcctcagcctcccaaagttctgggattacagcgtgagctaactatgcccagccccttatgcattattcttgttttcatggttgtaaagtaccaccatcacaactaagtaccagcctatatgaaagaagaaagaggggaagtagagggcaagcagtttctgtttaagaatttacctggctggggctgggtgtggtggctcacacctgtaatcccagcactttgggaggctgaggtgggcagatcacctgaggtcaggagttcaagaccagcctggctaacatggtgaaaccccatttctactaaaaacacaaaaattagccgggtgtggtggcacacgcctgtaatcccagctactcgggaggctgaggcaggagaatcacttgaaccagggaggcggaggttgcagtgagccaagatcgcgccattgcactccagcctgggtgacaagaccgaaactctgtctccaaaaaaaaaataataataatttacctggctgggcatggtggctcacgcctgtaatcccagcactttgggaggccgaggcgggcagatcacctgaggtcaggagttcaagaccaacatggtgaaaccccatctctactaaaaatacaaaaaattagctggacatggtggcatgcgcctgtaaatcccagttactcaggaggctgtggtaggagaatcgcttgaagggaggtggaggttgcagtgagcccagacggtgccactgcactccagcctgggcaacagagcaagactccatctcaaaaaaataaaaaaagaatttacctgacttaacctaacatcttatgatacgacacttgcctaactttatttttatttttatttttgacagggtctcactctgttgcccagcttggagtgcagtggtgcaaacatagctcattggggccaccacgcccagctaacttaaaaaaaaaacaacttttttttttttttggtagagacagggtttcactttgttgttcaggctgtgctcaagcaatcctctcgtcttggtctccctaaatgctgggattatgggattacaggtgtgagccaccgcacccagccactttaatgtctttgtggaacaaaaatcgtaaaagatctgcagaaagtcacaggatgatacaattggtaaaaactcctgacattctgtacagtgaaccacttaatctctacttaatcatcagatctcgtagtaattattcatttggttaaggctttactttttctgttctttctaatcctaacatttaattttggttctcagaatagaccaagtggaaattagatagaaatgttgacatgtagcagttaccctacaatattgagccgtttgcattttactagatgcccaatagtagtgttcctcacaataacacacacacacacacacacacacacacacacacaccctattaatgtatgaaaaccgaatttgtaatccagagctatttacatttttaaagagctacctcctggtaaagacacttcaggtccttacccaaagaccttggtctaaaagatactttcggtgtccctcatcatgcgatctttccgctctacctaagcggtgtaccaaatgatctgcaccaagaacaatttcatccattctttaatcttttatctcctgtatatccccctttcttctggactcagggttggtcacctaagatcaggctcctaggatctggttgctaagagacaagacgctgggagggtggggacgctgcactgcgacaagcctgggagtgtatgccagaggaggaaggagaagcagcaggcaaggcaaggcgacagtcagccgccgccgcccctccggtgccctcccgcccggcaggggctcggcgctcattggctccgccgctgcggcgctggcccgcgattggccgggcggcgtcggctcggcggctcccccacccctcggcgctagtctccgcagccgcctgcaagcgggcgggggcggggtgtgaggcgctgcggacggggttgcgggctcggtagcggcagcttcagggcgcgagcgcgggcggtgccgaccactgcaggtaacagaggcgctgcgagggcagccgcggccctgtggaggtgagcgagacgccgagggggctcgggtgcccaccgcggggcg

SEQ ID NO: 23501 - DNA, 2300 bp, Homo sapien
ggtggctcacacctgtaatcccagcactttgggaggctgaggtgggcagatcacctgaggtcaggagttcaagaccagcctggctaacatggtgaaaccccatttctactaaaaacacaaaaattagccgggtgtggtggcacacgcctgtaatcccagctactcgggaggctgaggcaggagaatcacttgaaccagggaggcggaggttgcagtgagccaagatcgcgccattgcactccagcctgggtgacaagaccgaaactctgtctccaaaaaaaaaataataataatttacctggctgggcatggtggctcacgcctgtaatcccagcactttgggaggccgaggcgggcagatcacctgaggtcaggagttcaagaccaacatggtgaaaccccatctctactaaaaatacaaaaaattagctggacatggtggcatgcgcctgtaaatcccagttactcaggaggctgtggtaggagaatcgcttgaagggaggtggaggttgcagtgagcccagacggtgccactgcactccagcctgggcaacagagcaagactccatctcaaaaaaataaaaaaagaatttacctgacttaacctaacatcttatgatacgacacttgcctaactttatttttatttttatttttgacagggtctcactctgttgcccagcttggagtgcagtggtgcaaacatagctcattggggccaccacgcccagctaacttaaaaaaaaaacaacttttttttttttttggtagagacagggtttcactttgttgttcaggctgtgctcaagcaatcctctcgtcttggtctccctaaatgctgggattatgggattacaggtgtgagccaccgcacccagccactttaatgtctttgtggaacaaaaatcgtaaaagatctgcagaaagtcacaggatgatacaattggtaaaaactcctgacattctgtacagtgaaccacttaatctctacttaatcatcagatctcgtagtaattattcatttggttaaggctttactttttctgttctttctaatcctaacatttaattttggttctcagaatagaccaagtggaaattagatagaaatgttgacatgtagcagttaccctacaatattgagccgtttgcattttactagatgcccaatagtagtgttcctcacaataacacacacacacacacacacacacacacacacacaccctattaatgtatgaaaaccgaatttgtaatccagagctatttacatttttaaagagctacctcctggtaaagacacttcaggtccttacccaaagaccttggtctaaaagatactttcggtgtccctcatcatgcgatctttccgctctacctaagcggtgtaccaaatgatctgcaccaagaacaatttcatccattctttaatcttttatctcctgtatatccccctttcttctggactcagggttggtcacctaagatcaggctcctaggatctggttgctaagagacaagacgctgggagggtggggacgctgcactgcgacaagcctgggagtgtatgccagaggaggaaggagaagcagcaggcaaggcaaggcgacagtcagccgccgccgcccctccggtgccctcccgcccggcaggggctcggcgctcattggctccgccgctgcggcgctggcccgcgattggccgggcggcgtcggctcggcggctcccccacccctcggcgctagtctccgcagccgcctgcaagcgggcgggggcggggtgtgaggcgctgcggacggggttgcgggctcggtagcggcagcttcagggcgcgagcgcgggcggtgccgaccactgcaggtaacagaggcgctgcgagggcagccgcggccctgtggaggtgagcgagacgccgagggggctcgggtgcccaccgcggggcgggaagtgcggcatggggcggtaccgctcacagccagccggctcccgccgcggcttcccaccccgggcggggtcccacttgcccaaacgcccccgaacgcccccgtgcacagcctcagccggccgcgcctcgagcagccagctggcccgcgtcccgtcacccgcccggtccatgtccctgcagaccgtcccgcccgcgcacagcggcgggaaccccagcttctgcgcgcccggccgcgccccgggcctctgccccgcctcgctcccgctgcccggcgcctttgtccgctctgcgcccctggagtttctgtgcctccacgggcgggagcggggcgcgaaggtctgggggtgccccgagg
